United States Patent Application Publication US 2015/0141320 A1 - sequence listing, part 16

SEQ ID NO: 470174 - DNA, 15 bp, Homo sapiens
agtgttgaactttct

SEQ ID NO: 470175 - DNA, 15 bp, Homo sapiens
tagtgttgaactttc

SEQ ID NO: 470176 - DNA, 15 bp, Homo sapiens
ttagtgttgaacttt

SEQ ID NO: 470177 - DNA, 15 bp, Homo sapiens
cttagtgttgaactt

SEQ ID NO: 470178 - DNA, 15 bp, Homo sapiens
tcttagtgttgaact

SEQ ID NO: 470179 - DNA, 15 bp, Homo sapiens
ctcttagtgttgaac

SEQ ID NO: 470180 - DNA, 15 bp, Homo sapiens
gctcttagtgttgaa

SEQ ID NO: 470181 - DNA, 15 bp, Homo sapiens
tgctcttagtgttga

SEQ ID NO: 470182 - DNA, 15 bp, Homo sapiens
ttgctcttagtgttg

SEQ ID NO: 470183 - DNA, 15 bp, Homo sapiens
attgctcttagtgtt

SEQ ID NO: 470184 - DNA, 15 bp, Homo sapiens
gattgctcttagtgt

SEQ ID NO: 470185 - DNA, 15 bp, Homo sapiens
cgattgctcttagtg

SEQ ID NO: 470186 - DNA, 15 bp, Homo sapiens
acgattgctcttagt

SEQ ID NO: 470187 - DNA, 15 bp, Homo sapiens
cacgattgctcttag

SEQ ID NO: 470188 - DNA, 15 bp, Homo sapiens
gcacgattgctctta

SEQ ID NO: 470189 - DNA, 15 bp, Homo sapiens
ggcacgattgctctt

SEQ ID NO: 470190 - DNA, 15 bp, Homo sapiens
tggcacgattgctct

SEQ ID NO: 470191 - DNA, 15 bp, Homo sapiens
atggcacgattgctc

SEQ ID NO: 470192 - DNA, 15 bp, Homo sapiens
catggcacgattgct

SEQ ID NO: 470193 - DNA, 15 bp, Homo sapiens
gcatggcacgattgc

SEQ ID NO: 470194 - DNA, 15 bp, Homo sapiens
agcatggcacgattg

SEQ ID NO: 470195 - DNA, 15 bp, Homo sapiens
gagcatggcacgatt

SEQ ID NO: 470196 - DNA, 15 bp, Homo sapiens
ggagcatggcacgat

SEQ ID NO: 470197 - DNA, 15 bp, Homo sapiens
gggagcatggcacga

SEQ ID NO: 470198 - DNA, 15 bp, Homo sapiens
ggggagcatggcacg

SEQ ID NO: 470199 - DNA, 15 bp, Homo sapiens
gggggagcatggcac

SEQ ID NO: 470200 - DNA, 15 bp, Homo sapiens
tgggggagcatggca

SEQ ID NO: 470201 - DNA, 15 bp, Homo sapiens
ctgggggagcatggc

SEQ ID NO: 470202 - DNA, 15 bp, Homo sapiens
cctgggggagcatgg

SEQ ID NO: 470203 - DNA, 15 bp, Homo sapiens
gcctgggggagcatg

SEQ ID NO: 470204 - DNA, 15 bp, Homo sapiens
cgcctgggggagcat

SEQ ID NO: 470205 - DNA, 15 bp, Homo sapiens
ccgcctgggggagca

SEQ ID NO: 470206 - DNA, 15 bp, Homo sapiens
gccgcctgggggagc

SEQ ID NO: 470207 - DNA, 15 bp, Homo sapiens
tgccgcctgggggag

SEQ ID NO: 470208 - DNA, 15 bp, Homo sapiens
ctgccgcctggggga

SEQ ID NO: 470209 - DNA, 15 bp, Homo sapiens
gctgccgcctggggg

SEQ ID NO: 470210 - DNA, 15 bp, Homo sapiens
cgctgccgcctgggg

SEQ ID NO: 470211 - DNA, 15 bp, Homo sapiens
gcgctgccgcctggg

SEQ ID NO: 470212 - DNA, 15 bp, Homo sapiens
ggcgctgccgcctgg

SEQ ID NO: 470213 - DNA, 15 bp, Homo sapiens
gggcgctgccgcctg

SEQ ID NO: 470214 - DNA, 15 bp, Homo sapiens
cgggcgctgccgcct

SEQ ID NO: 470215 - DNA, 15 bp, Homo sapiens
ccgggcgctgccgcc

SEQ ID NO: 470216 - DNA, 15 bp, Homo sapiens
gccgggcgctgccgc

SEQ ID NO: 470217 - DNA, 15 bp, Homo sapiens
cgccgggcgctgccg

SEQ ID NO: 470218 - DNA, 15 bp, Homo sapiens
acgccgggcgctgcc

SEQ ID NO: 470219 - DNA, 15 bp, Homo sapiens
gacgccgggcgctgc

SEQ ID NO: 470220 - DNA, 15 bp, Homo sapiens
tgacgccgggcgctg

SEQ ID NO: 470221 - DNA, 15 bp, Homo sapiens
ctgacgccgggcgct

SEQ ID NO: 470222 - DNA, 15 bp, Homo sapiens
cctgacgccgggcgc

SEQ ID NO: 470223 - DNA, 15 bp, Homo sapiens
ccctgacgccgggcg

SEQ ID NO: 470224 - DNA, 15 bp, Homo sapiens
accctgacgccgggc

SEQ ID NO: 470225 - DNA, 15 bp, Homo sapiens
gaccctgacgccggg

SEQ ID NO: 470226 - DNA, 15 bp, Homo sapiens
ggaccctgacgccgg

SEQ ID NO: 470227 - DNA, 15 bp, Homo sapiens
gggaccctgacgccg

SEQ ID NO: 470228 - DNA, 15 bp, Homo sapiens
ggggaccctgacgcc

SEQ ID NO: 470229 - DNA, 15 bp, Homo sapiens
aggggaccctgacgc

SEQ ID NO: 470230 - DNA, 15 bp, Homo sapiens
aaggggaccctgacg

SEQ ID NO: 470231 - DNA, 15 bp, Homo sapiens
gaaggggaccctgac

SEQ ID NO: 470232 - DNA, 15 bp, Homo sapiens
ggaaggggaccctga

SEQ ID NO: 470233 - DNA, 15 bp, Homo sapiens
gggaaggggaccctg

SEQ ID NO: 470234 - DNA, 15 bp, Homo sapiens
ggggaaggggaccct

SEQ ID NO: 470235 - DNA, 15 bp, Homo sapiens
aggggaaggggaccc

SEQ ID NO: 470236 - DNA, 15 bp, Homo sapiens
gaggggaaggggacc

SEQ ID NO: 470237 - DNA, 15 bp, Homo sapiens
agaggggaaggggac

SEQ ID NO: 470238 - DNA, 15 bp, Homo sapiens
cagaggggaagggga

SEQ ID NO: 470239 - DNA, 15 bp, Homo sapiens
acagaggggaagggg

SEQ ID NO: 470240 - DNA, 15 bp, Homo sapiens
cacagaggggaaggg

SEQ ID NO: 470241 - DNA, 15 bp, Homo sapiens
ccacagaggggaagg

SEQ ID NO: 470242 - DNA, 15 bp, Homo sapiens
gccacagaggggaag

SEQ ID NO: 470243 - DNA, 15 bp, Homo sapiens
ggccacagaggggaa

SEQ ID NO: 470244 - DNA, 15 bp, Homo sapiens
aggccacagagggga

SEQ ID NO: 470245 - DNA, 15 bp, Homo sapiens
gaggccacagagggg

SEQ ID NO: 470246 - DNA, 15 bp, Homo sapiens
agaggccacagaggg

SEQ ID NO: 470247 - DNA, 15 bp, Homo sapiens
gagaggccacagagg

SEQ ID NO: 470248 - DNA, 15 bp, Homo sapiens
tgagaggccacagag

SEQ ID NO: 470249 - DNA, 15 bp, Homo sapiens
gtgagaggccacaga

SEQ ID NO: 470250 - DNA, 15 bp, Homo sapiens
tgtgagaggccacag

SEQ ID NO: 470251 - DNA, 15 bp, Homo sapiens
ctgtgagaggccaca

SEQ ID NO: 470252 - DNA, 15 bp, Homo sapiens
actgtgagaggccac

SEQ ID NO: 470253 - DNA, 15 bp, Homo sapiens
cactgtgagaggcca

SEQ ID NO: 470254 - DNA, 15 bp, Homo sapiens
ccactgtgagaggcc

SEQ ID NO: 470255 - DNA, 15 bp, Homo sapiens
gccactgtgagaggc

SEQ ID NO: 470256 - DNA, 15 bp, Homo sapiens
agccactgtgagagg

SEQ ID NO: 470257 - DNA, 15 bp, Homo sapiens
cagccactgtgagag

SEQ ID NO: 470258 - DNA, 15 bp, Homo sapiens
gcagccactgtgaga

SEQ ID NO: 470259 - DNA, 15 bp, Homo sapiens
tgcagccactgtgag

SEQ ID NO: 470260 - DNA, 15 bp, Homo sapiens
ctgcagccactgtga

SEQ ID NO: 470261 - DNA, 15 bp, Homo sapiens
gctgcagccactgtg

SEQ ID NO: 470262 - DNA, 15 bp, Homo sapiens
tgctgcagccactgt

SEQ ID NO: 470263 - DNA, 15 bp, Homo sapiens
ctgctgcagccactg

SEQ ID NO: 470264 - DNA, 15 bp, Homo sapiens
gctgctgcagccact

SEQ ID NO: 470265 - DNA, 15 bp, Homo sapiens
agctgctgcagccac

SEQ ID NO: 470266 - DNA, 15 bp, Homo sapiens
aagctgctgcagcca

SEQ ID NO: 470267 - DNA, 15 bp, Homo sapiens
taagctgctgcagcc

SEQ ID NO: 470268 - DNA, 15 bp, Homo sapiens
ctaagctgctgcagc

SEQ ID NO: 470269 - DNA, 15 bp, Homo sapiens
cctaagctgctgcag

SEQ ID NO: 470270 - DNA, 15 bp, Homo sapiens
gcctaagctgctgca

SEQ ID NO: 470271 - DNA, 15 bp, Homo sapiens
agcctaagctgctgc

SEQ ID NO: 470272 - DNA, 15 bp, Homo sapiens
tagcctaagctgctg

SEQ ID NO: 470273 - DNA, 15 bp, Homo sapiens
atagcctaagctgct

SEQ ID NO: 470274 - DNA, 15 bp, Homo sapiens
catagcctaagctgc

SEQ ID NO: 470275 - DNA, 15 bp, Homo sapiens
tcatagcctaagctg

SEQ ID NO: 470276 - DNA, 15 bp, Homo sapiens
gtcatagcctaagct

SEQ ID NO: 470277 - DNA, 15 bp, Homo sapiens
tgtcatagcctaagc

SEQ ID NO: 470278 - DNA, 15 bp, Homo sapiens
ctgtcatagcctaag

SEQ ID NO: 470279 - DNA, 15 bp, Homo sapiens
cctgtcatagcctaa

SEQ ID NO: 470280 - DNA, 15 bp, Homo sapiens
ccctgtcatagccta

SEQ ID NO: 470281 - DNA, 15 bp, Homo sapiens
gccctgtcatagcct

SEQ ID NO: 470282 - DNA, 15 bp, Homo sapiens
tgccctgtcatagcc

SEQ ID NO: 470283 - DNA, 15 bp, Homo sapiens
ctgccctgtcatagc

SEQ ID NO: 470284 - DNA, 15 bp, Homo sapiens
tctgccctgtcatag

SEQ ID NO: 470285 - DNA, 15 bp, Homo sapiens
ctctgccctgtcata

SEQ ID NO: 470286 - DNA, 15 bp, Homo sapiens
cctctgccctgtcat

SEQ ID NO: 470287 - DNA, 15 bp, Homo sapiens
gcctctgccctgtca

SEQ ID NO: 470288 - DNA, 15 bp, Homo sapiens
ggcctctgccctgtc

SEQ ID NO: 470289 - DNA, 15 bp, Homo sapiens
tggcctctgccctgt

SEQ ID NO: 470290 - DNA, 15 bp, Homo sapiens
gtggcctctgccctg

SEQ ID NO: 470291 - DNA, 15 bp, Homo sapiens
ggtggcctctgccct

SEQ ID NO: 470292 - DNA, 15 bp, Homo sapiens
tggtggcctctgccc

SEQ ID NO: 470293 - DNA, 15 bp, Homo sapiens
ctggtggcctctgcc

SEQ ID NO: 470294 - DNA, 15 bp, Homo sapiens
tctggtggcctctgc

SEQ ID NO: 470295 - DNA, 15 bp, Homo sapiens
ctctggtggcctctg

SEQ ID NO: 470296 - DNA, 15 bp, Homo sapiens
cctctggtggcctct

SEQ ID NO: 470297 - DNA, 15 bp, Homo sapiens
gcctctggtggcctc

SEQ ID NO: 470298 - DNA, 15 bp, Homo sapiens
agcctctggtggcct

SEQ ID NO: 470299 - DNA, 15 bp, Homo sapiens
gagcctctggtggcc

SEQ ID NO: 470300 - DNA, 15 bp, Homo sapiens
agagcctctggtggc

SEQ ID NO: 470301 - DNA, 15 bp, Homo sapiens
cagagcctctggtgg

SEQ ID NO: 470302 - DNA, 15 bp, Homo sapiens
acagagcctctggtg

SEQ ID NO: 470303 - DNA, 15 bp, Homo sapiens
gacagagcctctggt

SEQ ID NO: 470304 - DNA, 15 bp, Homo sapiens
ggacagagcctctgg

SEQ ID NO: 470305 - DNA, 15 bp, Homo sapiens
tggacagagcctctg

SEQ ID NO: 470306 - DNA, 15 bp, Homo sapiens
ctggacagagcctct

SEQ ID NO: 470307 - DNA, 15 bp, Homo sapiens
tctggacagagcctc

SEQ ID NO: 470308 - DNA, 15 bp, Homo sapiens
gtctggacagagcct

SEQ ID NO: 470309 - DNA, 15 bp, Homo sapiens
agtctggacagagcc

SEQ ID NO: 470310 - DNA, 15 bp, Homo sapiens
gagtctggacagagc

SEQ ID NO: 470311 - DNA, 15 bp, Homo sapiens
agagtctggacagag

SEQ ID NO: 470312 - DNA, 15 bp, Homo sapiens
cagagtctggacaga

SEQ ID NO: 470313 - DNA, 15 bp, Homo sapiens
gcagagtctggacag

SEQ ID NO: 470314 - DNA, 15 bp, Homo sapiens
ggcagagtctggaca

SEQ ID NO: 470315 - DNA, 15 bp, Homo sapiens
tggcagagtctggac

SEQ ID NO: 470316 - DNA, 15 bp, Homo sapiens
ctggcagagtctgga

SEQ ID NO: 470317 - DNA, 15 bp, Homo sapiens
gctggcagagtctgg

SEQ ID NO: 470318 - DNA, 15 bp, Homo sapiens
agctggcagagtctg

SEQ ID NO: 470319 - DNA, 15 bp, Homo sapiens
cagctggcagagtct

SEQ ID NO: 470320 - DNA, 15 bp, Homo sapiens
ccagctggcagagtc

SEQ ID NO: 470321 - DNA, 15 bp, Homo sapiens
cccagctggcagagt

SEQ ID NO: 470322 - DNA, 15 bp, Homo sapiens
tcccagctggcagag

SEQ ID NO: 470323 - DNA, 15 bp, Homo sapiens
ctcccagctggcaga

SEQ ID NO: 470324 - DNA, 15 bp, Homo sapiens
cctcccagctggcag

SEQ ID NO: 470325 - DNA, 15 bp, Homo sapiens
tcctcccagctggca

SEQ ID NO: 470326 - DNA, 15 bp, Homo sapiens
gtcctcccagctggc

SEQ ID NO: 470327 - DNA, 15 bp, Homo sapiens
tgtcctcccagctgg

SEQ ID NO: 470328 - DNA, 15 bp, Homo sapiens
atgtcctcccagctg

SEQ ID NO: 470329 - DNA, 15 bp, Homo sapiens
catgtcctcccagct

SEQ ID NO: 470330 - DNA, 15 bp, Homo sapiens
ccatgtcctcccagc

SEQ ID NO: 470331 - DNA, 15 bp, Homo sapiens
gccatgtcctcccag

SEQ ID NO: 470332 - DNA, 15 bp, Homo sapiens
ggccatgtcctccca

SEQ ID NO: 470333 - DNA, 15 bp, Homo sapiens
gggccatgtcctccc

SEQ ID NO: 470334 - DNA, 15 bp, Homo sapiens
agggccatgtcctcc

SEQ ID NO: 470335 - DNA, 15 bp, Homo sapiens
tagggccatgtcctc

SEQ ID NO: 470336 - DNA, 15 bp, Homo sapiens
ctagggccatgtcct

SEQ ID NO: 470337 - DNA, 15 bp, Homo sapiens
gctagggccatgtcc

SEQ ID NO: 470338 - DNA, 15 bp, Homo sapiens
ggctagggccatgtc

SEQ ID NO: 470339 - DNA, 15 bp, Homo sapiens
aggctagggccatgt

SEQ ID NO: 470340 - DNA, 15 bp, Homo sapiens
gaggctagggccatg

SEQ ID NO: 470341 - DNA, 15 bp, Homo sapiens
ggaggctagggccat

SEQ ID NO: 470342 - DNA, 15 bp, Homo sapiens
aggaggctagggcca

SEQ ID NO: 470343 - DNA, 15 bp, Homo sapiens
gaggaggctagggcc

SEQ ID NO: 470344 - DNA, 15 bp, Homo sapiens
tgaggaggctagggc

SEQ ID NO: 470345 - DNA, 15 bp, Homo sapiens
ctgaggaggctaggg

SEQ ID NO: 470346 - DNA, 15 bp, Homo sapiens
gctgaggaggctagg

SEQ ID NO: 470347 - DNA, 15 bp, Homo sapiens
agctgaggaggctag

SEQ ID NO: 470348 - DNA, 15 bp, Homo sapiens
tagctgaggaggcta

SEQ ID NO: 470349 - DNA, 15 bp, Homo sapiens
ctagctgaggaggct

SEQ ID NO: 470350 - DNA, 15 bp, Homo sapiens
cctagctgaggaggc

SEQ ID NO: 470351 - DNA, 15 bp, Homo sapiens
gcctagctgaggagg

SEQ ID NO: 470352 - DNA, 15 bp, Homo sapiens
ggcctagctgaggag

SEQ ID NO: 470353 - DNA, 15 bp, Homo sapiens
aggcctagctgagga

SEQ ID NO: 470354 - DNA, 15 bp, Homo sapiens
gaggcctagctgagg

SEQ ID NO: 470355 - DNA, 15 bp, Homo sapiens
agaggcctagctgag

SEQ ID NO: 470356 - DNA, 15 bp, Homo sapiens
cagaggcctagctga

SEQ ID NO: 470357 - DNA, 15 bp, Homo sapiens
acagaggcctagctg

SEQ ID NO: 470358 - DNA, 15 bp, Homo sapiens
gacagaggcctagct

SEQ ID NO: 470359 - DNA, 15 bp, Homo sapiens
tgacagaggcctagc

SEQ ID NO: 470360 - DNA, 15 bp, Homo sapiens
atgacagaggcctag

SEQ ID NO: 470361 - DNA, 15 bp, Homo sapiens
gatgacagaggccta

SEQ ID NO: 470362 - DNA, 15 bp, Homo sapiens
ggatgacagaggcct

SEQ ID NO: 470363 - DNA, 15 bp, Homo sapiens
cggatgacagaggcc

SEQ ID NO: 470364 - DNA, 15 bp, Homo sapiens
gcggatgacagaggc

SEQ ID NO: 470365 - DNA, 15 bp, Homo sapiens
tgcggatgacagagg

SEQ ID NO: 470366 - DNA, 15 bp, Homo sapiens
ctgcggatgacagag

SEQ ID NO: 470367 - DNA, 15 bp, Homo sapiens
actgcggatgacaga

SEQ ID NO: 470368 - DNA, 15 bp, Homo sapiens
cactgcggatgacag

SEQ ID NO: 470369 - DNA, 15 bp, Homo sapiens
ccactgcggatgaca

SEQ ID NO: 470370 - DNA, 15 bp, Homo sapiens
gccactgcggatgac

SEQ ID NO: 470371 - DNA, 15 bp, Homo sapiens
cgccactgcggatga

SEQ ID NO: 470372 - DNA, 15 bp, Homo sapiens
acgccactgcggatg

SEQ ID NO: 470373 - DNA, 15 bp, Homo sapiens
aacgccactgcggat

SEQ ID NO: 470374 - DNA, 15 bp, Homo sapiens
aaacgccactgcgga

SEQ ID NO: 470375 - DNA, 15 bp, Homo sapiens
taaacgccactgcgg

SEQ ID NO: 470376 - DNA, 15 bp, Homo sapiens
gtaaacgccactgcg

SEQ ID NO: 470377 - DNA, 15 bp, Homo sapiens
agtaaacgccactgc

SEQ ID NO: 470378 - DNA, 15 bp, Homo sapiens
aagtaaacgccactg

SEQ ID NO: 470379 - DNA, 15 bp, Homo sapiens
caagtaaacgccact

SEQ ID NO: 470380 - DNA, 15 bp, Homo sapiens
tcaagtaaacgccac

SEQ ID NO: 470381 - DNA, 15 bp, Homo sapiens
atcaagtaaacgcca

SEQ ID NO: 470382 - DNA, 15 bp, Homo sapiens
catcaagtaaacgcc

SEQ ID NO: 470383 - DNA, 15 bp, Homo sapiens
ccatcaagtaaacgc

SEQ ID NO: 470384 - DNA, 15 bp, Homo sapiens
gccatcaagtaaacg

SEQ ID NO: 470385 - DNA, 15 bp, Homo sapiens
ggccatcaagtaaac

SEQ ID NO: 470386 - DNA, 15 bp, Homo sapiens
cggccatcaagtaaa

SEQ ID NO: 470387 - DNA, 15 bp, Homo sapiens
acggccatcaagtaa

SEQ ID NO: 470388 - DNA, 15 bp, Homo sapiens
cacggccatcaagta

SEQ ID NO: 470389 - DNA, 15 bp, Homo sapiens
tcacggccatcaagt

SEQ ID NO: 470390 - DNA, 15 bp, Homo sapiens
atcacggccatcaag

SEQ ID NO: 470391 - DNA, 15 bp, Homo sapiens
aatcacggccatcaa

SEQ ID NO: 470392 - DNA, 15 bp, Homo sapiens
gaatcacggccatca

SEQ ID NO: 470393 - DNA, 15 bp, Homo sapiens
agaatcacggccatc

SEQ ID NO: 470394 - DNA, 15 bp, Homo sapiens
tagaatcacggccat

SEQ ID NO: 470395 - DNA, 15 bp, Homo sapiens
gtagaatcacggcca

SEQ ID NO: 470396 - DNA, 15 bp, Homo sapiens
ggtagaatcacggcc

SEQ ID NO: 470397 - DNA, 15 bp, Homo sapiens
gggtagaatcacggc

SEQ ID NO: 470398 - DNA, 15 bp, Homo sapiens
tgggtagaatcacgg

SEQ ID NO: 470399 - DNA, 15 bp, Homo sapiens
gtgggtagaatcacg

SEQ ID NO: 470400 - DNA, 15 bp, Homo sapiens
agtgggtagaatcac

SEQ ID NO: 470401 - DNA, 15 bp, Homo sapiens
aagtgggtagaatca

SEQ ID NO: 470402 - DNA, 15 bp, Homo sapiens
gaagtgggtagaatc

SEQ ID NO: 470403 - DNA, 15 bp, Homo sapiens
agaagtgggtagaat

SEQ ID NO: 470404 - DNA, 15 bp, Homo sapiens
aagaagtgggtagaa

SEQ ID NO: 470405 - DNA, 15 bp, Homo sapiens
aaagaagtgggtaga

SEQ ID NO: 470406 - DNA, 15 bp, Homo sapiens
caaagaagtgggtag

SEQ ID NO: 470407 - DNA, 15 bp, Homo sapiens
tcaaagaagtgggta

SEQ ID NO: 470408 - DNA, 15 bp, Homo sapiens
ttcaaagaagtgggt

SEQ ID NO: 470409 - DNA, 15 bp, Homo sapiens
tttcaaagaagtggg

SEQ ID NO: 470410 - DNA, 15 bp, Homo sapiens
ctttcaaagaagtgg

SEQ ID NO: 470411 - DNA, 15 bp, Homo sapiens
gctttcaaagaagtg

SEQ ID NO: 470412 - DNA, 15 bp, Homo sapiens
ggctttcaaagaagt

SEQ ID NO: 470413 - DNA, 15 bp, Homo sapiens
gggctttcaaagaag

SEQ ID NO: 470414 - DNA, 15 bp, Homo sapiens
agggctttcaaagaa

SEQ ID NO: 470415 - DNA, 15 bp, Homo sapiens
cagggctttcaaaga

SEQ ID NO: 470416 - DNA, 15 bp, Homo sapiens
ccagggctttcaaag

SEQ ID NO: 470417 - DNA, 15 bp, Homo sapiens
tccagggctttcaaa

SEQ ID NO: 470418 - DNA, 15 bp, Homo sapiens
atccagggctttcaa

SEQ ID NO: 470419 - DNA, 15 bp, Homo sapiens
catccagggctttca

SEQ ID NO: 470420 - DNA, 15 bp, Homo sapiens
ccatccagggctttc

SEQ ID NO: 470421 - DNA, 15 bp, Homo sapiens
cccatccagggcttt

SEQ ID NO: 470422 - DNA, 15 bp, Homo sapiens
tcccatccagggctt

SEQ ID NO: 470423 - DNA, 15 bp, Homo sapiens
ctcccatccagggct

SEQ ID NO: 470424 - DNA, 15 bp, Homo sapiens
cctcccatccagggc

SEQ ID NO: 470425 - DNA, 15 bp, Homo sapiens
ccctcccatccaggg

SEQ ID NO: 470426 - DNA, 15 bp, Homo sapiens
tccctcccatccagg

SEQ ID NO: 470427 - DNA, 15 bp, Homo sapiens
gtccctcccatccag

SEQ ID NO: 470428 - DNA, 15 bp, Homo sapiens
cgtccctcccatcca

SEQ ID NO: 470429 - DNA, 15 bp, Homo sapiens
ccgtccctcccatcc

SEQ ID NO: 470430 - DNA, 15 bp, Homo sapiens
cccgtccctcccatc

SEQ ID NO: 470431 - DNA, 15 bp, Homo sapiens
gcccgtccctcccat

SEQ ID NO: 470432 - DNA, 15 bp, Homo sapiens
ggcccgtccctccca

SEQ ID NO: 470433 - DNA, 15 bp, Homo sapiens
aggcccgtccctccc

SEQ ID NO: 470434 - DNA, 15 bp, Homo sapiens
aaggcccgtccctcc

SEQ ID NO: 470435 - DNA, 15 bp, Homo sapiens
aaaggcccgtccctc

SEQ ID NO: 470436 - DNA, 15 bp, Homo sapiens
gaaaggcccgtccct

SEQ ID NO: 470437 - DNA, 15 bp, Homo sapiens
tgaaaggcccgtccc

SEQ ID NO: 470438 - DNA, 15 bp, Homo sapiens
gtgaaaggcccgtcc

SEQ ID NO: 470439 - DNA, 15 bp, Homo sapiens
ggtgaaaggcccgtc

SEQ ID NO: 470440 - DNA, 15 bp, Homo sapiens
tggtgaaaggcccgt

SEQ ID NO: 470441 - DNA, 15 bp, Homo sapiens
ctggtgaaaggcccg

SEQ ID NO: 470442 - DNA, 15 bp, Homo sapiens
gctggtgaaaggccc

SEQ ID NO: 470443 - DNA, 15 bp, Homo sapiens
ggctggtgaaaggcc

SEQ ID NO: 470444 - DNA, 15 bp, Homo sapiens
aggctggtgaaaggc

SEQ ID NO: 470445 - DNA, 15 bp, Homo sapiens
caggctggtgaaagg

SEQ ID NO: 470446 - DNA, 15 bp, Homo sapiens
ccaggctggtgaaag

SEQ ID NO: 470447 - DNA, 15 bp, Homo sapiens
accaggctggtgaaa

SEQ ID NO: 470448 - DNA, 15 bp, Homo sapiens
gaccaggctggtgaa

SEQ ID NO: 470449 - DNA, 15 bp, Homo sapiens
tgaccaggctggtga

SEQ ID NO: 470450 - DNA, 15 bp, Homo sapiens
gtgaccaggctggtg

SEQ ID NO: 470451 - DNA, 15 bp, Homo sapiens
tgtgaccaggctggt

SEQ ID NO: 470452 - DNA, 15 bp, Homo sapiens
ctgtgaccaggctgg

SEQ ID NO: 470453 - DNA, 15 bp, Homo sapiens
gctgtgaccaggctg

SEQ ID NO: 470454 - DNA, 15 bp, Homo sapiens
agctgtgaccaggct

SEQ ID NO: 470455 - DNA, 15 bp, Homo sapiens
tagctgtgaccaggc

SEQ ID NO: 470456 - DNA, 15 bp, Homo sapiens
gtagctgtgaccagg

SEQ ID NO: 470457 - DNA, 15 bp, Homo sapiens
agtagctgtgaccag

SEQ ID NO: 470458 - DNA, 15 bp, Homo sapiens
cagtagctgtgacca

SEQ ID NO: 470459 - DNA, 15 bp, Homo sapiens
acagtagctgtgacc

SEQ ID NO: 470460 - DNA, 15 bp, Homo sapiens
gacagtagctgtgac

SEQ ID NO: 470461 - DNA, 15 bp, Homo sapiens
ggacagtagctgtga

SEQ ID NO: 470462 - DNA, 15 bp, Homo sapiens
tggacagtagctgtg

SEQ ID NO: 470463 - DNA, 15 bp, Homo sapiens
ctggacagtagctgt

SEQ ID NO: 470464 - DNA, 15 bp, Homo sapiens
cctggacagtagctg

SEQ ID NO: 470465 - DNA, 15 bp, Homo sapiens
ccctggacagtagct

SEQ ID NO: 470466 - DNA, 15 bp, Homo sapiens
gccctggacagtagc

SEQ ID NO: 470467 - DNA, 15 bp, Homo sapiens
ggccctggacagtag

SEQ ID NO: 470468 - DNA, 15 bp, Homo sapiens
gggccctggacagta

SEQ ID NO: 470469 - DNA, 15 bp, Homo sapiens
ggggccctggacagt

SEQ ID NO: 470470 - DNA, 15 bp, Homo sapiens
aggggccctggacag

SEQ ID NO: 470471 - DNA, 15 bp, Homo sapiens
caggggccctggaca

SEQ ID NO: 470472 - DNA, 15 bp, Homo sapiens
tcaggggccctggac

SEQ ID NO: 470473 - DNA, 15 bp, Homo sapiens
ctcaggggccctgga

SEQ ID NO: 470474 - DNA, 15 bp, Homo sapiens
cctcaggggccctgg

SEQ ID NO: 470475 - DNA, 15 bp, Homo sapiens
tcctcaggggccctg

SEQ ID NO: 470476 - DNA, 15 bp, Homo sapiens
ctcctcaggggccct

SEQ ID NO: 470477 - DNA, 15 bp, Homo sapiens
gctcctcaggggccc

SEQ ID NO: 470478 - DNA, 15 bp, Homo sapiens
agctcctcaggggcc

SEQ ID NO: 470479 - DNA, 15 bp, Homo sapiens
cagctcctcaggggc

SEQ ID NO: 470480 - DNA, 15 bp, Homo sapiens
gcagctcctcagggg

SEQ ID NO: 470481 - DNA, 15 bp, Homo sapiens
tgcagctcctcaggg

SEQ ID NO: 470482 - DNA, 15 bp, Homo sapiens
ctgcagctcctcagg

SEQ ID NO: 470483 - DNA, 15 bp, Homo sapiens
actgcagctcctcag

SEQ ID NO: 470484 - DNA, 15 bp, Homo sapiens
cactgcagctcctca

SEQ ID NO: 470485 - DNA, 15 bp, Homo sapiens
ccactgcagctcctc

SEQ ID NO: 470486 - DNA, 15 bp, Homo sapiens
cccactgcagctcct

SEQ ID NO: 470487 - DNA, 15 bp, Homo sapiens
ccccactgcagctcc

SEQ ID NO: 470488 - DNA, 15 bp, Homo sapiens
tccccactgcagctc

SEQ ID NO: 470489 - DNA, 15 bp, Homo sapiens
ttccccactgcagct

SEQ ID NO: 470490 - DNA, 15 bp, Homo sapiens
attccccactgcagc

SEQ ID NO: 470491 - DNA, 15 bp, Homo sapiens
aattccccactgcag

SEQ ID NO: 470492 - DNA, 15 bp, Homo sapiens
gaattccccactgca

SEQ ID NO: 470493 - DNA, 15 bp, Homo sapiens
ggaattccccactgc

SEQ ID NO: 470494 - DNA, 15 bp, Homo sapiens
gggaattccccactg

SEQ ID NO: 470495 - DNA, 15 bp, Homo sapiens
tgggaattccccact

SEQ ID NO: 470496 - DNA, 15 bp, Homo sapiens
ctgggaattccccac

SEQ ID NO: 470497 - DNA, 15 bp, Homo sapiens
cctgggaattcccca

SEQ ID NO: 470498 - DNA, 15 bp, Homo sapiens
acctgggaattcccc

SEQ ID NO: 470499 - DNA, 15 bp, Homo sapiens
aacctgggaattccc

SEQ ID NO: 470500 - DNA, 15 bp, Homo sapiens
aaacctgggaattcc

SEQ ID NO: 470501 - DNA, 15 bp, Homo sapiens
aaaacctgggaattc

SEQ ID NO: 470502 - DNA, 15 bp, Homo sapiens
caaaacctgggaatt

SEQ ID NO: 470503 - DNA, 15 bp, Homo sapiens
ccaaaacctgggaat

SEQ ID NO: 470504 - DNA, 15 bp, Homo sapiens
gccaaaacctgggaa

SEQ ID NO: 470505 - DNA, 15 bp, Homo sapiens
agccaaaacctggga

SEQ ID NO: 470506 - DNA, 15 bp, Homo sapiens
cagccaaaacctggg

SEQ ID NO: 470507 - DNA, 15 bp, Homo sapiens
ccagccaaaacctgg

SEQ ID NO: 470508 - DNA, 15 bp, Homo sapiens
cccagccaaaacctg

SEQ ID NO: 470509 - DNA, 15 bp, Homo sapiens
tcccagccaaaacct

SEQ ID NO: 470510 - DNA, 15 bp, Homo sapiens
ctcccagccaaaacc

SEQ ID NO: 470511 - DNA, 15 bp, Homo sapiens
cctcccagccaaaac

SEQ ID NO: 470512 - DNA, 15 bp, Homo sapiens
tcctcccagccaaaa

SEQ ID NO: 470513 - DNA, 15 bp, Homo sapiens
ctcctcccagccaaa

SEQ ID NO: 470514 - DNA, 15 bp, Homo sapiens
tctcctcccagccaa

SEQ ID NO: 470515 - DNA, 15 bp, Homo sapiens
ctctcctcccagcca

SEQ ID NO: 470516 - DNA, 15 bp, Homo sapiens
tctctcctcccagcc

SEQ ID NO: 470517 - DNA, 15 bp, Homo sapiens
ctctctcctcccagc

SEQ ID NO: 470518 - DNA, 15 bp, Homo sapiens
gctctctcctcccag

SEQ ID NO: 470519 - DNA, 15 bp, Homo sapiens
agctctctcctccca

SEQ ID NO: 470520 - DNA, 15 bp, Homo sapiens
gagctctctcctccc

SEQ ID NO: 470521 - DNA, 15 bp, Homo sapiens
agagctctctcctcc

SEQ ID NO: 470522 - DNA, 15 bp, Homo sapiens
gagagctctctcctc

SEQ ID NO: 470523 - DNA, 15 bp, Homo sapiens
agagagctctctcct

SEQ ID NO: 470524 - DNA, 15 bp, Homo sapiens
gagagagctctctcc

SEQ ID NO: 470525 - DNA, 15 bp, Homo sapiens
agagagagctctctc

SEQ ID NO: 470526 - DNA, 15 bp, Homo sapiens
tagagagagctctct

SEQ ID NO: 470527 - DNA, 15 bp, Homo sapiens
ctagagagagctctc

SEQ ID NO: 470528 - DNA, 15 bp, Homo sapiens
gctagagagagctct

SEQ ID NO: 470529 - DNA, 15 bp, Homo sapiens
agctagagagagctc

SEQ ID NO: 470530 - DNA, 15 bp, Homo sapiens
aagctagagagagct

SEQ ID NO: 470531 - DNA, 15 bp, Homo sapiens
caagctagagagagc

SEQ ID NO: 470532 - DNA, 15 bp, Homo sapiens
acaagctagagagag

SEQ ID NO: 470533 - DNA, 15 bp, Homo sapiens
cacaagctagagaga

SEQ ID NO: 470534 - DNA, 15 bp, Homo sapiens
acacaagctagagag

SEQ ID NO: 470535 - DNA, 15 bp, Homo sapiens
gacacaagctagaga

SEQ ID NO: 470536 - DNA, 15 bp, Homo sapiens
ggacacaagctagag

SEQ ID NO: 470537 - DNA, 15 bp, Homo sapiens
tggacacaagctaga

SEQ ID NO: 470538 - DNA, 15 bp, Homo sapiens
ttggacacaagctag

SEQ ID NO: 470539 - DNA, 15 bp, Homo sapiens
gttggacacaagcta

SEQ ID NO: 470540 - DNA, 15 bp, Homo sapiens
agttggacacaagct

SEQ ID NO: 470541 - DNA, 15 bp, Homo sapiens
aagttggacacaagc

SEQ ID NO: 470542 - DNA, 15 bp, Homo sapiens
aaagttggacacaag

SEQ ID NO: 470543 - DNA, 15 bp, Homo sapiens
caaagttggacacaa

SEQ ID NO: 470544 - DNA, 15 bp, Homo sapiens
gcaaagttggacaca

SEQ ID NO: 470545 - DNA, 15 bp, Homo sapiens
agcaaagttggacac

SEQ ID NO: 470546 - DNA, 15 bp, Homo sapiens
cagcaaagttggaca

SEQ ID NO: 470547 - DNA, 15 bp, Homo sapiens
tcagcaaagttggac

SEQ ID NO: 470548 - DNA, 15 bp, Homo sapiens
ctcagcaaagttgga

SEQ ID NO: 470549 - DNA, 15 bp, Homo sapiens
tctcagcaaagttgg

SEQ ID NO: 470550 - DNA, 15 bp, Homo sapiens
gtctcagcaaagttg

SEQ ID NO: 470551 - DNA, 15 bp, Homo sapiens
tgtctcagcaaagtt

SEQ ID NO: 470552 - DNA, 15 bp, Homo sapiens
gtgtctcagcaaagt

SEQ ID NO: 470553 - DNA, 15 bp, Homo sapiens
ggtgtctcagcaaag

SEQ ID NO: 470554 - DNA, 15 bp, Homo sapiens
gggtgtctcagcaaa

SEQ ID NO: 470555 - DNA, 15 bp, Homo sapiens
cgggtgtctcagcaa

SEQ ID NO: 470556 - DNA, 15 bp, Homo sapiens
acgggtgtctcagca

SEQ ID NO: 470557 - DNA, 15 bp, Homo sapiens
cacgggtgtctcagc

SEQ ID NO: 470558 - DNA, 15 bp, Homo sapiens
tcacgggtgtctcag

SEQ ID NO: 470559 - DNA, 15 bp, Homo sapiens
ttcacgggtgtctca

SEQ ID NO: 470560 - DNA, 15 bp, Homo sapiens
gttcacgggtgtctc

SEQ ID NO: 470561 - DNA, 15 bp, Homo sapiens
agttcacgggtgtct

SEQ ID NO: 470562 - DNA, 15 bp, Homo sapiens
gagttcacgggtgtc

SEQ ID NO: 470563 - DNA, 15 bp, Homo sapiens
cgagttcacgggtgt

SEQ ID NO: 470564 - DNA, 15 bp, Homo sapiens
acgagttcacgggtg

SEQ ID NO: 470565 - DNA, 15 bp, Homo sapiens
gacgagttcacgggt

SEQ ID NO: 470566 - DNA, 15 bp, Homo sapiens
tgacgagttcacggg

SEQ ID NO: 470567 - DNA, 15 bp, Homo sapiens
gtgacgagttcacgg

SEQ ID NO: 470568 - DNA, 15 bp, Homo sapiens
ggtgacgagttcacg

SEQ ID NO: 470569 - DNA, 15 bp, Homo sapiens
tggtgacgagttcac

SEQ ID NO: 470570 - DNA, 15 bp, Homo sapiens
ctggtgacgagttca

SEQ ID NO: 470571 - DNA, 15 bp, Homo sapiens
gctggtgacgagttc

SEQ ID NO: 470572 - DNA, 15 bp, Homo sapiens
ggctggtgacgagtt

SEQ ID NO: 470573 - DNA, 15 bp, Homo sapiens
aggctggtgacgagt

SEQ ID NO: 470574 - DNA, 15 bp, Homo sapiens
caggctggtgacgag

SEQ ID NO: 470575 - DNA, 15 bp, Homo sapiens
tcaggctggtgacga

SEQ ID NO: 470576 - DNA, 15 bp, Homo sapiens
ttcaggctggtgacg

SEQ ID NO: 470577 - DNA, 15 bp, Homo sapiens
tttcaggctggtgac

SEQ ID NO: 470578 - DNA, 15 bp, Homo sapiens
ttttcaggctggtga

SEQ ID NO: 470579 - DNA, 15 bp, Homo sapiens
attttcaggctggtg

SEQ ID NO: 470580 - DNA, 15 bp, Homo sapiens
aattttcaggctggt

SEQ ID NO: 470581 - DNA, 15 bp, Homo sapiens
caattttcaggctgg

SEQ ID NO: 470582 - DNA, 15 bp, Homo sapiens
ccaattttcaggctg

SEQ ID NO: 470583 - DNA, 15 bp, Homo sapiens
cccaattttcaggct

SEQ ID NO: 470584 - DNA, 15 bp, Homo sapiens
acccaattttcaggc

SEQ ID NO: 470585 - DNA, 15 bp, Homo sapiens
gacccaattttcagg

SEQ ID NO: 470586 - DNA, 15 bp, Homo sapiens
tgacccaattttcag

SEQ ID NO: 470587 - DNA, 15 bp, Homo sapiens
atgacccaattttca

SEQ ID NO: 470588 - DNA, 15 bp, Homo sapiens
catgacccaattttc

SEQ ID NO: 470589 - DNA, 15 bp, Homo sapiens
acatgacccaatttt

SEQ ID NO: 470590 - DNA, 15 bp, Homo sapiens
aacatgacccaattt

SEQ ID NO: 470591 - DNA, 15 bp, Homo sapiens
taacatgacccaatt

SEQ ID NO: 470592 - DNA, 15 bp, Homo sapiens
ttaacatgacccaat

SEQ ID NO: 470593 - DNA, 15 bp, Homo sapiens
tttaacatgacccaa

SEQ ID NO: 470594 - DNA, 15 bp, Homo sapiens
gtttaacatgaccca

SEQ ID NO: 470595 - DNA, 15 bp, Homo sapiens
tgtttaacatgaccc

SEQ ID NO: 470596 - DNA, 15 bp, Homo sapiens
gtgtttaacatgacc

SEQ ID NO: 470597 - DNA, 15 bp, Homo sapiens
tgtgtttaacatgac

SEQ ID NO: 470598 - DNA, 15 bp, Homo sapiens
ctgtgtttaacatga

SEQ ID NO: 470599 - DNA, 15 bp, Homo sapiens
actgtgtttaacatg

SEQ ID NO: 470600 - DNA, 15 bp, Homo sapiens
aactgtgtttaacat

SEQ ID NO: 470601 - DNA, 15 bp, Homo sapiens
gaactgtgtttaaca

SEQ ID NO: 470602 - DNA, 15 bp, Homo sapiens
ggaactgtgtttaac

SEQ ID NO: 470603 - DNA, 15 bp, Homo sapiens
gggaactgtgtttaa

SEQ ID NO: 470604 - DNA, 15 bp, Homo sapiens
cgggaactgtgttta

SEQ ID NO: 470605 - DNA, 15 bp, Homo sapiens
acgggaactgtgttt

SEQ ID NO: 470606 - DNA, 15 bp, Homo sapiens
aacgggaactgtgtt

SEQ ID NO: 470607 - DNA, 15 bp, Homo sapiens
taacgggaactgtgt

SEQ ID NO: 470608 - DNA, 15 bp, Homo sapiens
ataacgggaactgtg

SEQ ID NO: 470609 - DNA, 15 bp, Homo sapiens
aataacgggaactgt

SEQ ID NO: 470610 - DNA, 15 bp, Homo sapiens
gaataacgggaactg

SEQ ID NO: 470611 - DNA, 15 bp, Homo sapiens
ggaataacgggaact

SEQ ID NO: 470612 - DNA, 15 bp, Homo sapiens
gggaataacgggaac

SEQ ID NO: 470613 - DNA, 15 bp, Homo sapiens
tgggaataacgggaa

SEQ ID NO: 470614 - DNA, 15 bp, Homo sapiens
ctgggaataacggga

SEQ ID NO: 470615 - DNA, 15 bp, Homo sapiens
gctgggaataacggg

SEQ ID NO: 470616 - DNA, 15 bp, Homo sapiens
ggctgggaataacgg

SEQ ID NO: 470617 - DNA, 15 bp, Homo sapiens
gggctgggaataacg

SEQ ID NO: 470618 - DNA, 15 bp, Homo sapiens
ggggctgggaataac

SEQ ID NO: 470619 - DNA, 15 bp, Homo sapiens
gggggctgggaataa

SEQ ID NO: 470620 - DNA, 15 bp, Homo sapiens
agggggctgggaata

SEQ ID NO: 470621 - DNA, 15 bp, Homo sapiens
tagggggctgggaat

SEQ ID NO: 470622 - DNA, 15 bp, Homo sapiens
gtagggggctgggaa

SEQ ID NO: 470623 - DNA, 15 bp, Homo sapiens
tgtagggggctggga

SEQ ID NO: 470624 - DNA, 15 bp, Homo sapiens
gtgtagggggctggg

SEQ ID NO: 470625 - DNA, 15 bp, Homo sapiens
tgtgtagggggctgg

SEQ ID NO: 470626 - DNA, 15 bp, Homo sapiens
ctgtgtagggggctg

SEQ ID NO: 470627 - DNA, 15 bp, Homo sapiens
tctgtgtagggggct

SEQ ID NO: 470628 - DNA, 15 bp, Homo sapiens
ctctgtgtagggggc

SEQ ID NO: 470629 - DNA, 15 bp, Homo sapiens
cctctgtgtaggggg

SEQ ID NO: 470630 - DNA, 15 bp, Homo sapiens
ccctctgtgtagggg

SEQ ID NO: 470631 - DNA, 15 bp, Homo sapiens
accctctgtgtaggg

SEQ ID NO: 470632 - DNA, 15 bp, Homo sapiens
gaccctctgtgtagg

SEQ ID NO: 470633 - DNA, 15 bp, Homo sapiens
agaccctctgtgtag

SEQ ID NO: 470634 - DNA, 15 bp, Homo sapiens
aagaccctctgtgta

SEQ ID NO: 470635 - DNA, 15 bp, Homo sapiens
caagaccctctgtgt

SEQ ID NO: 470636 - DNA, 15 bp, Homo sapiens
tcaagaccctctgtg

SEQ ID NO: 470637 - DNA, 15 bp, Homo sapiens
ctcaagaccctctgt

SEQ ID NO: 470638 - DNA, 15 bp, Homo sapiens
cctcaagaccctctg

SEQ ID NO: 470639 - DNA, 15 bp, Homo sapiens
gcctcaagaccctct

SEQ ID NO: 470640 - DNA, 15 bp, Homo sapiens
agcctcaagaccctc

SEQ ID NO: 470641 - DNA, 15 bp, Homo sapiens
cagcctcaagaccct

SEQ ID NO: 470642 - DNA, 15 bp, Homo sapiens
ccagcctcaagaccc

SEQ ID NO: 470643 - DNA, 15 bp, Homo sapiens
tccagcctcaagacc

SEQ ID NO: 470644 - DNA, 15 bp, Homo sapiens
atccagcctcaagac

SEQ ID NO: 470645 - DNA, 15 bp, Homo sapiens
catccagcctcaaga

SEQ ID NO: 470646 - DNA, 15 bp, Homo sapiens
tcatccagcctcaag

SEQ ID NO: 470647 - DNA, 15 bp, Homo sapiens
ttcatccagcctcaa

SEQ ID NO: 470648 - DNA, 15 bp, Homo sapiens
cttcatccagcctca

SEQ ID NO: 470649 - DNA, 15 bp, Homo sapiens
tcttcatccagcctc

SEQ ID NO: 470650 - DNA, 15 bp, Homo sapiens
ctcttcatccagcct

SEQ ID NO: 470651 - DNA, 15 bp, Homo sapiens
cctcttcatccagcc

SEQ ID NO: 470652 - DNA, 15 bp, Homo sapiens
acctcttcatccagc

SEQ ID NO: 470653 - DNA, 15 bp, Homo sapiens
tacctcttcatccag

SEQ ID NO: 470654 - DNA, 15 bp, Homo sapiens
ttacctcttcatcca

SEQ ID NO: 470655 - DNA, 15 bp, Homo sapiens
gttacctcttcatcc

SEQ ID NO: 470656 - DNA, 15 bp, Homo sapiens
tgttacctcttcatc

SEQ ID NO: 470657 - DNA, 15 bp, Homo sapiens
atgttacctcttcat

SEQ ID NO: 470658 - DNA, 15 bp, Homo sapiens
catgttacctcttca

SEQ ID NO: 470659 - DNA, 15 bp, Homo sapiens
tcatgttacctcttc

SEQ ID NO: 470660 - DNA, 15 bp, Homo sapiens
atcatgttacctctt

SEQ ID NO: 470661 - DNA, 15 bp, Homo sapiens
tatcatgttacctct

SEQ ID NO: 470662 - DNA, 15 bp, Homo sapiens
atatcatgttacctc

SEQ ID NO: 470663 - DNA, 15 bp, Homo sapiens
tatatcatgttacct

SEQ ID NO: 470664 - DNA, 15 bp, Homo sapiens
ttatatcatgttacc

SEQ ID NO: 470665 - DNA, 15 bp, Homo sapiens
tttatatcatgttac

SEQ ID NO: 470666 - DNA, 15 bp, Homo sapiens
gtttatatcatgtta

SEQ ID NO: 470667 - DNA, 15 bp, Homo sapiens
ggtttatatcatgtt

SEQ ID NO: 470668 - DNA, 15 bp, Homo sapiens
gggtttatatcatgt

SEQ ID NO: 470669 - DNA, 15 bp, Homo sapiens
tgggtttatatcatg

SEQ ID NO: 470670 - DNA, 15 bp, Homo sapiens
gtgggtttatatcat

SEQ ID NO: 470671 - DNA, 15 bp, Homo sapiens
tgtgggtttatatca

SEQ ID NO: 470672 - DNA, 15 bp, Homo sapiens
ctgtgggtttatatc

SEQ ID NO: 470673 - DNA, 15 bp, Homo sapiens
cctgtgggtttatat

SEQ ID NO: 470674 - DNA, 15 bp, Homo sapiens
tcctgtgggtttata

SEQ ID NO: 470675 - DNA, 15 bp, Homo sapiens
atcctgtgggtttat

SEQ ID NO: 470676 - DNA, 15 bp, Homo sapiens
catcctgtgggttta

SEQ ID NO: 470677 - DNA, 15 bp, Homo sapiens
acatcctgtgggttt

SEQ ID NO: 470678 - DNA, 15 bp, Homo sapiens
cacatcctgtgggtt

SEQ ID NO: 470679 - DNA, 15 bp, Homo sapiens
ccacatcctgtgggt

SEQ ID NO: 470680 - DNA, 15 bp, Homo sapiens
gccacatcctgtggg

SEQ ID NO: 470681 - DNA, 15 bp, Homo sapiens
tgccacatcctgtgg

SEQ ID NO: 470682 - DNA, 15 bp, Homo sapiens
ctgccacatcctgtg

SEQ ID NO: 470683 - DNA, 15 bp, Homo sapiens
actgccacatcctgt

SEQ ID NO: 470684 - DNA, 15 bp, Homo sapiens
cactgccacatcctg

SEQ ID NO: 470685 - DNA, 15 bp, Homo sapiens
acactgccacatcct

SEQ ID NO: 470686 - DNA, 15 bp, Homo sapiens
gacactgccacatcc

SEQ ID NO: 470687 - DNA, 15 bp, Homo sapiens
ggacactgccacatc

SEQ ID NO: 470688 - DNA, 15 bp, Homo sapiens
aggacactgccacat

SEQ ID NO: 470689 - DNA, 15 bp, Homo sapiens
aaggacactgccaca

SEQ ID NO: 470690 - DNA, 15 bp, Homo sapiens
gaaggacactgccac

SEQ ID NO: 470691 - DNA, 15 bp, Homo sapiens
ggaaggacactgcca

SEQ ID NO: 470692 - DNA, 15 bp, Homo sapiens
gggaaggacactgcc

SEQ ID NO: 470693 - DNA, 15 bp, Homo sapiens
agggaaggacactgc

SEQ ID NO: 470694 - DNA, 15 bp, Homo sapiens
cagggaaggacactg

SEQ ID NO: 470695 - DNA, 15 bp, Homo sapiens
tcagggaaggacact

SEQ ID NO: 470696 - DNA, 15 bp, Homo sapiens
ctcagggaaggacac

SEQ ID NO: 470697 - DNA, 15 bp, Homo sapiens
actcagggaaggaca

SEQ ID NO: 470698 - DNA, 15 bp, Homo sapiens
cactcagggaaggac

SEQ ID NO: 470699 - DNA, 15 bp, Homo sapiens
ccactcagggaagga

SEQ ID NO: 470700 - DNA, 15 bp, Homo sapiens
gccactcagggaagg

SEQ ID NO: 470701 - DNA, 15 bp, Homo sapiens
tgccactcagggaag

SEQ ID NO: 470702 - DNA, 15 bp, Homo sapiens
ctgccactcagggaa

SEQ ID NO: 470703 - DNA, 15 bp, Homo sapiens
cctgccactcaggga

SEQ ID NO: 470704 - DNA, 15 bp, Homo sapiens
tcctgccactcaggg

SEQ ID NO: 470705 - DNA, 15 bp, Homo sapiens
ctcctgccactcagg

SEQ ID NO: 470706 - DNA, 15 bp, Homo sapiens
tctcctgccactcag

SEQ ID NO: 470707 - DNA, 15 bp, Homo sapiens
ttctcctgccactca

SEQ ID NO: 470708 - DNA, 15 bp, Homo sapiens
cttctcctgccactc

SEQ ID NO: 470709 - DNA, 15 bp, Homo sapiens
gcttctcctgccact

SEQ ID NO: 470710 - DNA, 15 bp, Homo sapiens
ggcttctcctgccac

SEQ ID NO: 470711 - DNA, 15 bp, Homo sapiens
gggcttctcctgcca

SEQ ID NO: 470712 - DNA, 15 bp, Homo sapiens
tgggcttctcctgcc

SEQ ID NO: 470713 - DNA, 15 bp, Homo sapiens
ctgggcttctcctgc

SEQ ID NO: 470714 - DNA, 15 bp, Homo sapiens
tctgggcttctcctg

SEQ ID NO: 470715 - DNA, 15 bp, Homo sapiens
gtctgggcttctcct

SEQ ID NO: 470716 - DNA, 15 bp, Homo sapiens
ggtctgggcttctcc

SEQ ID NO: 470717 - DNA, 15 bp, Homo sapiens
aggtctgggcttctc

SEQ ID NO: 470718 - DNA, 15 bp, Homo sapiens
caggtctgggcttct

SEQ ID NO: 470719 - DNA, 15 bp, Homo sapiens
gcaggtctgggcttc

SEQ ID NO: 470720 - DNA, 15 bp, Homo sapiens
ggcaggtctgggctt

SEQ ID NO: 470721 - DNA, 15 bp, Homo sapiens
aggcaggtctgggct

SEQ ID NO: 470722 - DNA, 15 bp, Homo sapiens
caggcaggtctgggc

SEQ ID NO: 470723 - DNA, 15 bp, Homo sapiens
acaggcaggtctggg

SEQ ID NO: 470724 - DNA, 15 bp, Homo sapiens
cacaggcaggtctgg

SEQ ID NO: 470725 - DNA, 15 bp, Homo sapiens
acacaggcaggtctg

SEQ ID NO: 470726 - DNA, 15 bp, Homo sapiens
cacacaggcaggtct

SEQ ID NO: 470727 - DNA, 15 bp, Homo sapiens
tcacacaggcaggtc

SEQ ID NO: 470728 - DNA, 15 bp, Homo sapiens
ctcacacaggcaggt

SEQ ID NO: 470729 - DNA, 15 bp, Homo sapiens
cctcacacaggcagg

SEQ ID NO: 470730 - DNA, 15 bp, Homo sapiens
ccctcacacaggcag

SEQ ID NO: 470731 - DNA, 15 bp, Homo sapiens
tccctcacacaggca

SEQ ID NO: 470732 - DNA, 15 bp, Homo sapiens
ctccctcacacaggc

SEQ ID NO: 470733 - DNA, 15 bp, Homo sapiens
tctccctcacacagg

SEQ ID NO: 470734 - DNA, 15 bp, Homo sapiens
ctctccctcacacag

SEQ ID NO: 470735 - DNA, 15 bp, Homo sapiens
gctctccctcacaca

SEQ ID NO: 470736 - DNA, 15 bp, Homo sapiens
cgctctccctcacac

SEQ ID NO: 470737 - DNA, 15 bp, Homo sapiens
acgctctccctcaca

SEQ ID NO: 470738 - DNA, 15 bp, Homo sapiens
gacgctctccctcac

SEQ ID NO: 470739 - DNA, 15 bp, Homo sapiens
agacgctctccctca

SEQ ID NO: 470740 - DNA, 15 bp, Homo sapiens
cagacgctctccctc

SEQ ID NO: 470741 - DNA, 15 bp, Homo sapiens
tcagacgctctccct

SEQ ID NO: 470742 - DNA, 15 bp, Homo sapiens
ctcagacgctctccc

SEQ ID NO: 470743 - DNA, 15 bp, Homo sapiens
cctcagacgctctcc

SEQ ID NO: 470744 - DNA, 15 bp, Homo sapiens
ccctcagacgctctc

SEQ ID NO: 470745 - DNA, 15 bp, Homo sapiens
gccctcagacgctct

SEQ ID NO: 470746 - DNA, 15 bp, Homo sapiens
agccctcagacgctc

SEQ ID NO: 470747 - DNA, 15 bp, Homo sapiens
gagccctcagacgct

SEQ ID NO: 470748 - DNA, 15 bp, Homo sapiens
agagccctcagacgc

SEQ ID NO: 470749 - DNA, 15 bp, Homo sapiens
cagagccctcagacg

SEQ ID NO: 470750 - DNA, 15 bp, Homo sapiens
ccagagccctcagac

SEQ ID NO: 470751 - DNA, 15 bp, Homo sapiens
tccagagccctcaga

SEQ ID NO: 470752 - DNA, 15 bp, Homo sapiens
ctccagagccctcag

SEQ ID NO: 470753 - DNA, 15 bp, Homo sapiens
gctccagagccctca

SEQ ID NO: 470754 - DNA, 15 bp, Homo sapiens
tgctccagagccctc

SEQ ID NO: 470755 - DNA, 15 bp, Homo sapiens
ttgctccagagccct

SEQ ID NO: 470756 - DNA, 15 bp, Homo sapiens
gttgctccagagccc

SEQ ID NO: 470757 - DNA, 15 bp, Homo sapiens
tgttgctccagagcc

SEQ ID NO: 470758 - DNA, 15 bp, Homo sapiens
gtgttgctccagagc

SEQ ID NO: 470759 - DNA, 15 bp, Homo sapiens
tgtgttgctccagag

SEQ ID NO: 470760 - DNA, 15 bp, Homo sapiens
gtgtgttgctccaga

SEQ ID NO: 470761 - DNA, 15 bp, Homo sapiens
ggtgtgttgctccag

SEQ ID NO: 470762 - DNA, 15 bp, Homo sapiens
gggtgtgttgctcca

SEQ ID NO: 470763 - DNA, 15 bp, Homo sapiens
tgggtgtgttgctcc

SEQ ID NO: 470764 - DNA, 15 bp, Homo sapiens
ctgggtgtgttgctc

SEQ ID NO: 470765 - DNA, 15 bp, Homo sapiens
gctgggtgtgttgct

SEQ ID NO: 470766 - DNA, 15 bp, Homo sapiens
tgctgggtgtgttgc

SEQ ID NO: 470767 - DNA, 15 bp, Homo sapiens
ctgctgggtgtgttg

SEQ ID NO: 470768 - DNA, 15 bp, Homo sapiens
tctgctgggtgtgtt

SEQ ID NO: 470769 - DNA, 15 bp, Homo sapiens
ttctgctgggtgtgt

SEQ ID NO: 470770 - DNA, 15 bp, Homo sapiens
cttctgctgggtgtg

SEQ ID NO: 470771 - DNA, 15 bp, Homo sapiens
tcttctgctgggtgt

SEQ ID NO: 470772 - DNA, 15 bp, Homo sapiens
gtcttctgctgggtg

SEQ ID NO: 470773 - DNA, 15 bp, Homo sapiens
tgtcttctgctgggt

SEQ ID NO: 470774 - DNA, 15 bp, Homo sapiens
ctgtcttctgctggg

SEQ ID NO: 470775 - DNA, 15 bp, Homo sapiens
cctgtcttctgctgg

SEQ ID NO: 470776 - DNA, 15 bp, Homo sapiens
gcctgtcttctgctg

SEQ ID NO: 470777 - DNA, 15 bp, Homo sapiens
cgcctgtcttctgct

SEQ ID NO: 470778 - DNA, 15 bp, Homo sapiens
tcgcctgtcttctgc

SEQ ID NO: 470779 - DNA, 15 bp, Homo sapiens
ctcgcctgtcttctg

SEQ ID NO: 470780 - DNA, 15 bp, Homo sapiens
actcgcctgtcttct

SEQ ID NO: 470781 - DNA, 15 bp, Homo sapiens
tactcgcctgtcttc

SEQ ID NO: 470782 - DNA, 15 bp, Homo sapiens
gtactcgcctgtctt

SEQ ID NO: 470783 - DNA, 15 bp, Homo sapiens
tgtactcgcctgtct

SEQ ID NO: 470784 - DNA, 15 bp, Homo sapiens
ctgtactcgcctgtc

SEQ ID NO: 470785 - DNA, 15 bp, Homo sapiens
gctgtactcgcctgt

SEQ ID NO: 470786 - DNA, 15 bp, Homo sapiens
tgctgtactcgcctg

SEQ ID NO: 470787 - DNA, 15 bp, Homo sapiens
gtgctgtactcgcct

SEQ ID NO: 470788 - DNA, 15 bp, Homo sapiens
ggtgctgtactcgcc

SEQ ID NO: 470789 - DNA, 15 bp, Homo sapiens
gggtgctgtactcgc

SEQ ID NO: 470790 - DNA, 15 bp, Homo sapiens
tgggtgctgtactcg

SEQ ID NO: 470791 - DNA, 15 bp, Homo sapiens
ctgggtgctgtactc

SEQ ID NO: 470792 - DNA, 15 bp, Homo sapiens
cctgggtgctgtact

SEQ ID NO: 470793 - DNA, 15 bp, Homo sapiens
ccctgggtgctgtac

SEQ ID NO: 470794 - DNA, 15 bp, Homo sapiens
tccctgggtgctgta

SEQ ID NO: 470795 - DNA, 15 bp, Homo sapiens
ctccctgggtgctgt

SEQ ID NO: 470796 - DNA, 15 bp, Homo sapiens
cctccctgggtgctg

SEQ ID NO: 470797 - DNA, 15 bp, Homo sapiens
ccctccctgggtgct

SEQ ID NO: 470798 - DNA, 15 bp, Homo sapiens
tccctccctgggtgc

SEQ ID NO: 470799 - DNA, 15 bp, Homo sapiens
ctccctccctgggtg

SEQ ID NO: 470800 - DNA, 15 bp, Homo sapiens
cctccctccctgggt

SEQ ID NO: 470801 - DNA, 15 bp, Homo sapiens
acctccctccctggg

SEQ ID NO: 470802 - DNA, 15 bp, Homo sapiens
cacctccctccctgg

SEQ ID NO: 470803 - DNA, 15 bp, Homo sapiens
tcacctccctccctg

SEQ ID NO: 470804 - DNA, 15 bp, Homo sapiens
gtcacctccctccct

SEQ ID NO: 470805 - DNA, 15 bp, Homo sapiens
tgtcacctccctccc

SEQ ID NO: 470806 - DNA, 15 bp, Homo sapiens
ctgtcacctccctcc

SEQ ID NO: 470807 - DNA, 15 bp, Homo sapiens
cctgtcacctccctc

SEQ ID NO: 470808 - DNA, 15 bp, Homo sapiens
ccctgtcacctccct

SEQ ID NO: 470809 - DNA, 15 bp, Homo sapiens
tccctgtcacctccc

SEQ ID NO: 470810 - DNA, 15 bp, Homo sapiens
ctccctgtcacctcc

SEQ ID NO: 470811 - DNA, 15 bp, Homo sapiens
gctccctgtcacctc

SEQ ID NO: 470812 - DNA, 15 bp, Homo sapiens
tgctccctgtcacct

SEQ ID NO: 470813 - DNA, 15 bp, Homo sapiens
atgctccctgtcacc

SEQ ID NO: 470814 - DNA, 15 bp, Homo sapiens
gatgctccctgtcac

SEQ ID NO: 470815 - DNA, 15 bp, Homo sapiens
tgatgctccctgtca

SEQ ID NO: 470816 - DNA, 15 bp, Homo sapiens
ctgatgctccctgtc

SEQ ID NO: 470817 - DNA, 15 bp, Homo sapiens
cctgatgctccctgt

SEQ ID NO: 470818 - DNA, 15 bp, Homo sapiens
gcctgatgctccctg

SEQ ID NO: 470819 - DNA, 15 bp, Homo sapiens
tgcctgatgctccct

SEQ ID NO: 470820 - DNA, 15 bp, Homo sapiens
ttgcctgatgctccc

SEQ ID NO: 470821 - DNA, 15 bp, Homo sapiens
tttgcctgatgctcc

SEQ ID NO: 470822 - DNA, 15 bp, Homo sapiens
ttttgcctgatgctc

SEQ ID NO: 470823 - DNA, 15 bp, Homo sapiens
attttgcctgatgct

SEQ ID NO: 470824 - DNA, 15 bp, Homo sapiens
tattttgcctgatgc

SEQ ID NO: 470825 - DNA, 15 bp, Homo sapiens
gtattttgcctgatg

SEQ ID NO: 470826 - DNA, 15 bp, Homo sapiens
tgtattttgcctgat

SEQ ID NO: 470827 - DNA, 15 bp, Homo sapiens
gtgtattttgcctga

SEQ ID NO: 470828 - DNA, 15 bp, Homo sapiens
tgtgtattttgcctg

SEQ ID NO: 470829 - DNA, 15 bp, Homo sapiens
gtgtgtattttgcct

SEQ ID NO: 470830 - DNA, 15 bp, Homo sapiens
tgtgtgtattttgcc

SEQ ID NO: 470831 - DNA, 15 bp, Homo sapiens
atgtgtgtattttgc

SEQ ID NO: 470832 - DNA, 15 bp, Homo sapiens
catgtgtgtattttg

SEQ ID NO: 470833 - DNA, 15 bp, Homo sapiens
acatgtgtgtatttt

SEQ ID NO: 470834 - DNA, 15 bp, Homo sapiens
gacatgtgtgtattt

SEQ ID NO: 470835 - DNA, 15 bp, Homo sapiens
ggacatgtgtgtatt

SEQ ID NO: 470836 - DNA, 15 bp, Homo sapiens
tggacatgtgtgtat

SEQ ID NO: 470837 - DNA, 15 bp, Homo sapiens
gtggacatgtgtgta

SEQ ID NO: 470838 - DNA, 15 bp, Homo sapiens
tgtggacatgtgtgt

SEQ ID NO: 470839 - DNA, 15 bp, Homo sapiens
ctgtggacatgtgtg

SEQ ID NO: 470840 - DNA, 15 bp, Homo sapiens
gctgtggacatgtgt

SEQ ID NO: 470841 - DNA, 15 bp, Homo sapiens
ggctgtggacatgtg

SEQ ID NO: 470842 - DNA, 15 bp, Homo sapiens
gggctgtggacatgt

SEQ ID NO: 470843 - DNA, 15 bp, Homo sapiens
tgggctgtggacatg

SEQ ID NO: 470844 - DNA, 15 bp, Homo sapiens
ctgggctgtggacat

SEQ ID NO: 470845 - DNA, 15 bp, Homo sapiens
tctgggctgtggaca

SEQ ID NO: 470846 - DNA, 15 bp, Homo sapiens
ttctgggctgtggac

SEQ ID NO: 470847 - DNA, 15 bp, Homo sapiens
cttctgggctgtgga

SEQ ID NO: 470848 - DNA, 15 bp, Homo sapiens
ccttctgggctgtgg

SEQ ID NO: 470849 - DNA, 15 bp, Homo sapiens
gccttctgggctgtg

SEQ ID NO: 470850 - DNA, 15 bp, Homo sapiens
tgccttctgggctgt

SEQ ID NO: 470851 - DNA, 15 bp, Homo sapiens
ttgccttctgggctg

SEQ ID NO: 470852 - DNA, 15 bp, Homo sapiens
cttgccttctgggct

SEQ ID NO: 470853 - DNA, 15 bp, Homo sapiens
tcttgccttctgggc

SEQ ID NO: 470854 - DNA, 15 bp, Homo sapiens
ctcttgccttctggg

SEQ ID NO: 470855 - DNA, 15 bp, Homo sapiens
actcttgccttctgg

SEQ ID NO: 470856 - DNA, 15 bp, Homo sapiens
cactcttgccttctg

SEQ ID NO: 470857 - DNA, 15 bp, Homo sapiens
tcactcttgccttct

SEQ ID NO: 470858 - DNA, 15 bp, Homo sapiens
ctcactcttgccttc

SEQ ID NO: 470859 - DNA, 15 bp, Homo sapiens
tctcactcttgcctt

SEQ ID NO: 470860 - DNA, 15 bp, Homo sapiens
ctctcactcttgcct

SEQ ID NO: 470861 - DNA, 15 bp, Homo sapiens
actctcactcttgcc

SEQ ID NO: 470862 - DNA, 15 bp, Homo sapiens
gactctcactcttgc

SEQ ID NO: 470863 - DNA, 15 bp, Homo sapiens
ggactctcactcttg

SEQ ID NO: 470864 - DNA, 15 bp, Homo sapiens
gggactctcactctt

SEQ ID NO: 470865 - DNA, 15 bp, Homo sapiens
ggggactctcactct

SEQ ID NO: 470866 - DNA, 15 bp, Homo sapiens
gggggactctcactc

SEQ ID NO: 470867 - DNA, 15 bp, Homo sapiens
ggggggactctcact

SEQ ID NO: 470868 - DNA, 15 bp, Homo sapiens
cggggggactctcac

SEQ ID NO: 470869 - DNA, 15 bp, Homo sapiens
gcggggggactctca

SEQ ID NO: 470870 - DNA, 15 bp, Homo sapiens
agcggggggactctc

SEQ ID NO: 470871 - DNA, 15 bp, Homo sapiens
gagcggggggactct

SEQ ID NO: 470872 - DNA, 15 bp, Homo sapiens
ggagcggggggactc

SEQ ID NO: 470873 - DNA, 15 bp, Homo sapiens
tggagcggggggact

SEQ ID NO: 470874 - DNA, 15 bp, Homo sapiens
ctggagcggggggac

SEQ ID NO: 470875 - DNA, 15 bp, Homo sapiens
gctggagcgggggga

SEQ ID NO: 470876 - DNA, 15 bp, Homo sapiens
ggctggagcgggggg

SEQ ID NO: 470877 - DNA, 15 bp, Homo sapiens
tggctggagcggggg

SEQ ID NO: 470878 - DNA, 15 bp, Homo sapiens
atggctggagcgggg

SEQ ID NO: 470879 - DNA, 15 bp, Homo sapiens
catggctggagcggg

SEQ ID NO: 470880 - DNA, 15 bp, Homo sapiens
gcatggctggagcgg

SEQ ID NO: 470881 - DNA, 15 bp, Homo sapiens
tgcatggctggagcg

SEQ ID NO: 470882 - DNA, 15 bp, Homo sapiens
ctgcatggctggagc

SEQ ID NO: 470883 - DNA, 15 bp, Homo sapiens
cctgcatggctggag

SEQ ID NO: 470884 - DNA, 15 bp, Homo sapiens
ccctgcatggctgga

SEQ ID NO: 470885 - DNA, 15 bp, Homo sapiens
cccctgcatggctgg

SEQ ID NO: 470886 - DNA, 15 bp, Homo sapiens
acccctgcatggctg

SEQ ID NO: 470887 - DNA, 15 bp, Homo sapiens
aacccctgcatggct

SEQ ID NO: 470888 - DNA, 15 bp, Homo sapiens
gaacccctgcatggc

SEQ ID NO: 470889 - DNA, 15 bp, Homo sapiens
agaacccctgcatgg

SEQ ID NO: 470890 - DNA, 15 bp, Homo sapiens
cagaacccctgcatg

SEQ ID NO: 470891 - DNA, 15 bp, Homo sapiens
gcagaacccctgcat

SEQ ID NO: 470892 - DNA, 15 bp, Homo sapiens
agcagaacccctgca

SEQ ID NO: 470893 - DNA, 15 bp, Homo sapiens
aagcagaacccctgc

SEQ ID NO: 470894 - DNA, 15 bp, Homo sapiens
caagcagaacccctg

SEQ ID NO: 470895 - DNA, 15 bp, Homo sapiens
ccaagcagaacccct

SEQ ID NO: 470896 - DNA, 15 bp, Homo sapiens
gccaagcagaacccc

SEQ ID NO: 470897 - DNA, 15 bp, Homo sapiens
ggccaagcagaaccc

SEQ ID NO: 470898 - DNA, 15 bp, Homo sapiens
tggccaagcagaacc

SEQ ID NO: 470899 - DNA, 15 bp, Homo sapiens
ctggccaagcagaac

SEQ ID NO: 470900 - DNA, 15 bp, Homo sapiens
tctggccaagcagaa

SEQ ID NO: 470901 - DNA, 15 bp, Homo sapiens
ctctggccaagcaga

SEQ ID NO: 470902 - DNA, 15 bp, Homo sapiens
cctctggccaagcag

SEQ ID NO: 470903 - DNA, 15 bp, Homo sapiens
tcctctggccaagca

SEQ ID NO: 470904 - DNA, 15 bp, Homo sapiens
ttcctctggccaagc

SEQ ID NO: 470905 - DNA, 15 bp, Homo sapiens
cttcctctggccaag

SEQ ID NO: 470906 - DNA, 15 bp, Homo sapiens
ccttcctctggccaa

SEQ ID NO: 470907 - DNA, 15 bp, Homo sapiens
tccttcctctggcca

SEQ ID NO: 470908 - DNA, 15 bp, Homo sapiens
ctccttcctctggcc

SEQ ID NO: 470909 - DNA, 15 bp, Homo sapiens
actccttcctctggc

SEQ ID NO: 470910 - DNA, 15 bp, Homo sapiens
tactccttcctctgg

SEQ ID NO: 470911 - DNA, 15 bp, Homo sapiens
ctactccttcctctg

SEQ ID NO: 470912 - DNA, 15 bp, Homo sapiens
cctactccttcctct

SEQ ID NO: 470913 - DNA, 15 bp, Homo sapiens
gcctactccttcctc

SEQ ID NO: 470914 - DNA, 15 bp, Homo sapiens
ggcctactccttcct

SEQ ID NO: 470915 - DNA, 15 bp, Homo sapiens
gggcctactccttcc

SEQ ID NO: 470916 - DNA, 15 bp, Homo sapiens
ggggcctactccttc

SEQ ID NO: 470917 - DNA, 15 bp, Homo sapiens
gggggcctactcctt

SEQ ID NO: 470918 - DNA, 15 bp, Homo sapiens
ggggggcctactcct

SEQ ID NO: 470919 - DNA, 15 bp, Homo sapiens
tggggggcctactcc

SEQ ID NO: 470920 - DNA, 15 bp, Homo sapiens
ctggggggcctactc

SEQ ID NO: 470921 - DNA, 15 bp, Homo sapiens
cctggggggcctact

SEQ ID NO: 470922 - DNA, 15 bp, Homo sapiens
gcctggggggcctac

SEQ ID NO: 470923 - DNA, 15 bp, Homo sapiens
agcctggggggccta

SEQ ID NO: 470924 - DNA, 15 bp, Homo sapiens
gagcctggggggcct

SEQ ID NO: 470925 - DNA, 15 bp, Homo sapiens
tgagcctggggggcc

SEQ ID NO: 470926 - DNA, 15 bp, Homo sapiens
ctgagcctggggggc

SEQ ID NO: 470927 - DNA, 15 bp, Homo sapiens
gctgagcctgggggg

SEQ ID NO: 470928 - DNA, 15 bp, Homo sapiens
ggctgagcctggggg

SEQ ID NO: 470929 - DNA, 15 bp, Homo sapiens
tggctgagcctgggg

SEQ ID NO: 470930 - DNA, 15 bp, Homo sapiens
gtggctgagcctggg

SEQ ID NO: 470931 - DNA, 15 bp, Homo sapiens
ggtggctgagcctgg

SEQ ID NO: 470932 - DNA, 15 bp, Homo sapiens
tggtggctgagcctg

SEQ ID NO: 470933 - DNA, 15 bp, Homo sapiens
atggtggctgagcct

SEQ ID NO: 470934 - DNA, 15 bp, Homo sapiens
gatggtggctgagcc

SEQ ID NO: 470935 - DNA, 15 bp, Homo sapiens
tgatggtggctgagc

SEQ ID NO: 470936 - DNA, 15 bp, Homo sapiens
atgatggtggctgag

SEQ ID NO: 470937 - DNA, 15 bp, Homo sapiens
catgatggtggctga

SEQ ID NO: 470938 - DNA, 15 bp, Homo sapiens
ccatgatggtggctg

SEQ ID NO: 470939 - DNA, 15 bp, Homo sapiens
gccatgatggtggct

SEQ ID NO: 470940 - DNA, 15 bp, Homo sapiens
ggccatgatggtggc

SEQ ID NO: 470941 - DNA, 15 bp, Homo sapiens
gggccatgatggtgg

SEQ ID NO: 470942 - DNA, 15 bp, Homo sapiens
ggggccatgatggtg

SEQ ID NO: 470943 - DNA, 15 bp, Homo sapiens
aggggccatgatggt

SEQ ID NO: 470944 - DNA, 15 bp, Homo sapiens
aaggggccatgatgg

SEQ ID NO: 470945 - DNA, 15 bp, Homo sapiens
caaggggccatgatg

SEQ ID NO: 470946 - DNA, 15 bp, Homo sapiens
tcaaggggccatgat

SEQ ID NO: 470947 - DNA, 15 bp, Homo sapiens
ctcaaggggccatga

SEQ ID NO: 470948 - DNA, 15 bp, Homo sapiens
tctcaaggggccatg

SEQ ID NO: 470949 - DNA, 15 bp, Homo sapiens
gtctcaaggggccat

SEQ ID NO: 470950 - DNA, 15 bp, Homo sapiens
agtctcaaggggcca

SEQ ID NO: 470951 - DNA, 15 bp, Homo sapiens
cagtctcaaggggcc

SEQ ID NO: 470952 - DNA, 15 bp, Homo sapiens
ccagtctcaaggggc

SEQ ID NO: 470953 - DNA, 15 bp, Homo sapiens
cccagtctcaagggg

SEQ ID NO: 470954 - DNA, 15 bp, Homo sapiens
tcccagtctcaaggg

SEQ ID NO: 470955 - DNA, 15 bp, Homo sapiens
ctcccagtctcaagg

SEQ ID NO: 470956 - DNA, 15 bp, Homo sapiens
gctcccagtctcaag

SEQ ID NO: 470957 - DNA, 15 bp, Homo sapiens
tgctcccagtctcaa

SEQ ID NO: 470958 - DNA, 15 bp, Homo sapiens
ctgctcccagtctca

SEQ ID NO: 470959 - DNA, 15 bp, Homo sapiens
tctgctcccagtctc

SEQ ID NO: 470960 - DNA, 15 bp, Homo sapiens
ctctgctcccagtct

SEQ ID NO: 470961 - DNA, 15 bp, Homo sapiens
cctctgctcccagtc

SEQ ID NO: 470962 - DNA, 15 bp, Homo sapiens
ccctctgctcccagt

SEQ ID NO: 470963 - DNA, 15 bp, Homo sapiens
cccctctgctcccag

SEQ ID NO: 470964 - DNA, 15 bp, Homo sapiens
gcccctctgctccca

SEQ ID NO: 470965 - DNA, 15 bp, Homo sapiens
ggcccctctgctccc

SEQ ID NO: 470966 - DNA, 15 bp, Homo sapiens
aggcccctctgctcc

SEQ ID NO: 470967 - DNA, 15 bp, Homo sapiens
caggcccctctgctc

SEQ ID NO: 470968 - DNA, 15 bp, Homo sapiens
ccaggcccctctgct

SEQ ID NO: 470969 - DNA, 15 bp, Homo sapiens
gccaggcccctctgc

SEQ ID NO: 470970 - DNA, 15 bp, Homo sapiens
tgccaggcccctctg

SEQ ID NO: 470971 - DNA, 15 bp, Homo sapiens
atgccaggcccctct

SEQ ID NO: 470972 - DNA, 15 bp, Homo sapiens
gatgccaggcccctc

SEQ ID NO: 470973 - DNA, 15 bp, Homo sapiens
agatgccaggcccct

SEQ ID NO: 470974 - DNA, 15 bp, Homo sapiens
gagatgccaggcccc

SEQ ID NO: 470975 - DNA, 15 bp, Homo sapiens
ggagatgccaggccc

SEQ ID NO: 470976 - DNA, 15 bp, Homo sapiens
gggagatgccaggcc

SEQ ID NO: 470977 - DNA, 15 bp, Homo sapiens
agggagatgccaggc

SEQ ID NO: 470978 - DNA, 15 bp, Homo sapiens
cagggagatgccagg

SEQ ID NO: 470979 - DNA, 15 bp, Homo sapiens
ccagggagatgccag

SEQ ID NO: 470980 - DNA, 15 bp, Homo sapiens
cccagggagatgcca

SEQ ID NO: 470981 - DNA, 15 bp, Homo sapiens
ccccagggagatgcc

SEQ ID NO: 470982 - DNA, 15 bp, Homo sapiens
cccccagggagatgc

SEQ ID NO: 470983 - DNA, 15 bp, Homo sapiens
gcccccagggagatg

SEQ ID NO: 470984 - DNA, 15 bp, Homo sapiens
ggcccccagggagat

SEQ ID NO: 470985 - DNA, 15 bp, Homo sapiens
tggcccccagggaga

SEQ ID NO: 470986 - DNA, 15 bp, Homo sapiens
ctggcccccagggag

SEQ ID NO: 470987 - DNA, 15 bp, Homo sapiens
tctggcccccaggga

SEQ ID NO: 470988 - DNA, 15 bp, Homo sapiens
ttctggcccccaggg

SEQ ID NO: 470989 - DNA, 15 bp, Homo sapiens
tttctggcccccagg

SEQ ID NO: 470990 - DNA, 15 bp, Homo sapiens
ttttctggcccccag

SEQ ID NO: 470991 - DNA, 15 bp, Homo sapiens
cttttctggccccca

SEQ ID NO: 470992 - DNA, 15 bp, Homo sapiens
ccttttctggccccc

SEQ ID NO: 470993 - DNA, 15 bp, Homo sapiens
gccttttctggcccc

SEQ ID NO: 470994 - DNA, 15 bp, Homo sapiens
tgccttttctggccc

SEQ ID NO: 470995 - DNA, 15 bp, Homo sapiens
ctgccttttctggcc

SEQ ID NO: 470996 - DNA, 15 bp, Homo sapiens
cctgccttttctggc

SEQ ID NO: 470997 - DNA, 15 bp, Homo sapiens
tcctgccttttctgg

SEQ ID NO: 470998 - DNA, 15 bp, Homo sapiens
ctcctgccttttctg

SEQ ID NO: 470999 - DNA, 15 bp, Homo sapiens
cctcctgccttttct

SEQ ID NO: 471000 - DNA, 15 bp, Homo sapiens
tcctcctgccttttc

SEQ ID NO: 471001 - DNA, 15 bp, Homo sapiens
ctcctcctgcctttt

SEQ ID NO: 471002 - DNA, 15 bp, Homo sapiens
tctcctcctgccttt

SEQ ID NO: 471003 - DNA, 15 bp, Homo sapiens
ttctcctcctgcctt

SEQ ID NO: 471004 - DNA, 15 bp, Homo sapiens
attctcctcctgcct

SEQ ID NO: 471005 - DNA, 15 bp, Homo sapiens
aattctcctcctgcc

SEQ ID NO: 471006 - DNA, 15 bp, Homo sapiens
caattctcctcctgc

SEQ ID NO: 471007 - DNA, 15 bp, Homo sapiens
ccaattctcctcctg

SEQ ID NO: 471008 - DNA, 15 bp, Homo sapiens
gccaattctcctcct

SEQ ID NO: 471009 - DNA, 15 bp, Homo sapiens
ggccaattctcctcc

SEQ ID NO: 471010 - DNA, 15 bp, Homo sapiens
cggccaattctcctc

SEQ ID NO: 471011 - DNA, 15 bp, Homo sapiens
acggccaattctcct

SEQ ID NO: 471012 - DNA, 15 bp, Homo sapiens
tacggccaattctcc

SEQ ID NO: 471013 - DNA, 15 bp, Homo sapiens
gtacggccaattctc

SEQ ID NO: 471014 - DNA, 15 bp, Homo sapiens
ggtacggccaattct

SEQ ID NO: 471015 - DNA, 15 bp, Homo sapiens
aggtacggccaattc

SEQ ID NO: 471016 - DNA, 15 bp, Homo sapiens
aaggtacggccaatt

SEQ ID NO: 471017 - DNA, 15 bp, Homo sapiens
gaaggtacggccaat

SEQ ID NO: 471018 - DNA, 15 bp, Homo sapiens
agaaggtacggccaa

SEQ ID NO: 471019 - DNA, 15 bp, Homo sapiens
aagaaggtacggcca

SEQ ID NO: 471020 - DNA, 15 bp, Homo sapiens
gaagaaggtacggcc

SEQ ID NO: 471021 - DNA, 15 bp, Homo sapiens
agaagaaggtacggc

SEQ ID NO: 471022 - DNA, 15 bp, Homo sapiens
cagaagaaggtacgg

SEQ ID NO: 471023 - DNA, 15 bp, Homo sapiens
tcagaagaaggtacg

SEQ ID NO: 471024 - DNA, 15 bp, Homo sapiens
gtcagaagaaggtac

SEQ ID NO: 471025 - DNA, 15 bp, Homo sapiens
ggtcagaagaaggta

SEQ ID NO: 471026 - DNA, 15 bp, Homo sapiens
gggtcagaagaaggt

SEQ ID NO: 471027 - DNA, 15 bp, Homo sapiens
agggtcagaagaagg

SEQ ID NO: 471028 - DNA, 15 bp, Homo sapiens
cagggtcagaagaag

SEQ ID NO: 471029 - DNA, 15 bp, Homo sapiens
ccagggtcagaagaa

SEQ ID NO: 471030 - DNA, 15 bp, Homo sapiens
cccagggtcagaaga

SEQ ID NO: 471031 - DNA, 15 bp, Homo sapiens
tcccagggtcagaag

SEQ ID NO: 471032 - DNA, 15 bp, Homo sapiens
ctcccagggtcagaa

SEQ ID NO: 471033 - DNA, 15 bp, Homo sapiens
cctcccagggtcaga

SEQ ID NO: 471034 - DNA, 15 bp, Homo sapiens
acctcccagggtcag

SEQ ID NO: 471035 - DNA, 15 bp, Homo sapiens
tacctcccagggtca

SEQ ID NO: 471036 - DNA, 15 bp, Homo sapiens
ctacctcccagggtc

SEQ ID NO: 471037 - DNA, 15 bp, Homo sapiens
tctacctcccagggt

SEQ ID NO: 471038 - DNA, 15 bp, Homo sapiens
ttctacctcccaggg

SEQ ID NO: 471039 - DNA, 15 bp, Homo sapiens
attctacctcccagg

SEQ ID NO: 471040 - DNA, 15 bp, Homo sapiens
aattctacctcccag

SEQ ID NO: 471041 - DNA, 15 bp, Homo sapiens
aaattctacctccca

SEQ ID NO: 471042 - DNA, 15 bp, Homo sapiens
caaattctacctccc

SEQ ID NO: 471043 - DNA, 15 bp, Homo sapiens
ccaaattctacctcc

SEQ ID NO: 471044 - DNA, 15 bp, Homo sapiens
cccaaattctacctc

SEQ ID NO: 471045 - DNA, 15 bp, Homo sapiens
ccccaaattctacct

SEQ ID NO: 471046 - DNA, 15 bp, Homo sapiens
cccccaaattctacc

SEQ ID NO: 471047 - DNA, 15 bp, Homo sapiens
tcccccaaattctac

SEQ ID NO: 471048 - DNA, 15 bp, Homo sapiens
ttcccccaaattcta

SEQ ID NO: 471049 - DNA, 15 bp, Homo sapiens
gttcccccaaattct

SEQ ID NO: 471050 - DNA, 15 bp, Homo sapiens
ggttcccccaaattc

SEQ ID NO: 471051 - DNA, 15 bp, Homo sapiens
gggttcccccaaatt

SEQ ID NO: 471052 - DNA, 15 bp, Homo sapiens
tgggttcccccaaat

SEQ ID NO: 471053 - DNA, 15 bp, Homo sapiens
ctgggttcccccaaa

SEQ ID NO: 471054 - DNA, 15 bp, Homo sapiens
cctgggttcccccaa

SEQ ID NO: 471055 - DNA, 15 bp, Homo sapiens
ccctgggttccccca

SEQ ID NO: 471056 - DNA, 15 bp, Homo sapiens
accctgggttccccc

SEQ ID NO: 471057 - DNA, 15 bp, Homo sapiens
gaccctgggttcccc

SEQ ID NO: 471058 - DNA, 15 bp, Homo sapiens
tgaccctgggttccc

SEQ ID NO: 471059 - DNA, 15 bp, Homo sapiens
ctgaccctgggttcc

SEQ ID NO: 471060 - DNA, 15 bp, Homo sapiens
gctgaccctgggttc

SEQ ID NO: 471061 - DNA, 15 bp, Homo sapiens
tgctgaccctgggtt

SEQ ID NO: 471062 - DNA, 15 bp, Homo sapiens
ctgctgaccctgggt

SEQ ID NO: 471063 - DNA, 15 bp, Homo sapiens
cctgctgaccctggg

SEQ ID NO: 471064 - DNA, 15 bp, Homo sapiens
ccctgctgaccctgg

SEQ ID NO: 471065 - DNA, 15 bp, Homo sapiens
tccctgctgaccctg

SEQ ID NO: 471066 - DNA, 15 bp, Homo sapiens
ttccctgctgaccct

SEQ ID NO: 471067 - DNA, 15 bp, Homo sapiens
attccctgctgaccc

SEQ ID NO: 471068 - DNA, 15 bp, Homo sapiens
tattccctgctgacc

SEQ ID NO: 471069 - DNA, 15 bp, Homo sapiens
ttattccctgctgac

SEQ ID NO: 471070 - DNA, 15 bp, Homo sapiens
tttattccctgctga

SEQ ID NO: 471071 - DNA, 15 bp, Homo sapiens
gtttattccctgctg

SEQ ID NO: 471072 - DNA, 15 bp, Homo sapiens
agtttattccctgct

SEQ ID NO: 471073 - DNA, 15 bp, Homo sapiens
gagtttattccctgc

SEQ ID NO: 471074 - DNA, 15 bp, Homo sapiens
tgagtttattccctg

SEQ ID NO: 471075 - DNA, 15 bp, Homo sapiens
atgagtttattccct

SEQ ID NO: 471076 - DNA, 15 bp, Homo sapiens
gatgagtttattccc

SEQ ID NO: 471077 - DNA, 15 bp, Homo sapiens
tgatgagtttattcc

SEQ ID NO: 471078 - DNA, 15 bp, Homo sapiens
ttgatgagtttattc

SEQ ID NO: 471079 - DNA, 15 bp, Homo sapiens
tttgatgagtttatt

SEQ ID NO: 471080 - DNA, 15 bp, Homo sapiens
ctttgatgagtttat

SEQ ID NO: 471081 - DNA, 15 bp, Homo sapiens
cctttgatgagttta

SEQ ID NO: 471082 - DNA, 15 bp, Homo sapiens
acctttgatgagttt

SEQ ID NO: 471083 - DNA, 15 bp, Homo sapiens
tacctttgatgagtt

SEQ ID NO: 471084 - DNA, 15 bp, Homo sapiens
ctacctttgatgagt

SEQ ID NO: 471085 - DNA, 15 bp, Homo sapiens
tctacctttgatgag

SEQ ID NO: 471086 - DNA, 15 bp, Homo sapiens
ctctacctttgatga

SEQ ID NO: 471087 - DNA, 15 bp, Homo sapiens
gctctacctttgatg

SEQ ID NO: 471088 - DNA, 15 bp, Homo sapiens
tgctctacctttgat

SEQ ID NO: 471089 - DNA, 15 bp, Homo sapiens
ttgctctacctttga

SEQ ID NO: 471090 - DNA, 15 bp, Homo sapiens
cttgctctacctttg

SEQ ID NO: 471091 - DNA, 15 bp, Homo sapiens
tcttgctctaccttt

SEQ ID NO: 471092 - DNA, 15 bp, Homo sapiens
ttcttgctctacctt

SEQ ID NO: 471093 - DNA, 15 bp, Homo sapiens
cttcttgctctacct

SEQ ID NO: 471094 - DNA, 15 bp, Homo sapiens
gcttcttgctctacc

SEQ ID NO: 471095 - DNA, 15 bp, Homo sapiens
ggcttcttgctctac

SEQ ID NO: 471096 - DNA, 15 bp, Homo sapiens
gggcttcttgctcta

SEQ ID NO: 471097 - DNA, 15 bp, Homo sapiens
ggggcttcttgctct

SEQ ID NO: 471098 - DNA, 15 bp, Homo sapiens
tggggcttcttgctc

SEQ ID NO: 471099 - DNA, 15 bp, Homo sapiens
ctggggcttcttgct

SEQ ID NO: 471100 - DNA, 15 bp, Homo sapiens
cctggggcttcttgc

SEQ ID NO: 471101 - DNA, 15 bp, Homo sapiens
gcctggggcttcttg

SEQ ID NO: 471102 - DNA, 15 bp, Homo sapiens
ggcctggggcttctt

SEQ ID NO: 471103 - DNA, 15 bp, Homo sapiens
tggcctggggcttct

SEQ ID NO: 471104 - DNA, 15 bp, Homo sapiens
atggcctggggcttc

SEQ ID NO: 471105 - DNA, 15 bp, Homo sapiens
aatggcctggggctt

SEQ ID NO: 471106 - DNA, 15 bp, Homo sapiens
gaatggcctggggct

SEQ ID NO: 471107 - DNA, 15 bp, Homo sapiens
agaatggcctggggc

SEQ ID NO: 471108 - DNA, 15 bp, Homo sapiens
gagaatggcctgggg

SEQ ID NO: 471109 - DNA, 15 bp, Homo sapiens
ggagaatggcctggg

SEQ ID NO: 471110 - DNA, 15 bp, Homo sapiens
gggagaatggcctgg

SEQ ID NO: 471111 - DNA, 15 bp, Homo sapiens
cgggagaatggcctg

SEQ ID NO: 471112 - DNA, 15 bp, Homo sapiens
tcgggagaatggcct

SEQ ID NO: 471113 - DNA, 15 bp, Homo sapiens
ctcgggagaatggcc

SEQ ID NO: 471114 - DNA, 15 bp, Homo sapiens
actcgggagaatggc

SEQ ID NO: 471115 - DNA, 15 bp, Homo sapiens
aactcgggagaatgg

SEQ ID NO: 471116 - DNA, 15 bp, Homo sapiens
caactcgggagaatg

SEQ ID NO: 471117 - DNA, 15 bp, Homo sapiens
ccaactcgggagaat

SEQ ID NO: 471118 - DNA, 15 bp, Homo sapiens
tccaactcgggagaa

SEQ ID NO: 471119 - DNA, 15 bp, Homo sapiens
ttccaactcgggaga

SEQ ID NO: 471120 - DNA, 15 bp, Homo sapiens
cttccaactcgggag

SEQ ID NO: 471121 - DNA, 15 bp, Homo sapiens
tcttccaactcggga

SEQ ID NO: 471122 - DNA, 15 bp, Homo sapiens
atcttccaactcggg

SEQ ID NO: 471123 - DNA, 15 bp, Homo sapiens
aatcttccaactcgg

SEQ ID NO: 471124 - DNA, 15 bp, Homo sapiens
gaatcttccaactcg

SEQ ID NO: 471125 - DNA, 15 bp, Homo sapiens
ggaatcttccaactc

SEQ ID NO: 471126 - DNA, 15 bp, Homo sapiens
gggaatcttccaact

SEQ ID NO: 471127 - DNA, 15 bp, Homo sapiens
ggggaatcttccaac

SEQ ID NO: 471128 - DNA, 15 bp, Homo sapiens
gggggaatcttccaa

SEQ ID NO: 471129 - DNA, 15 bp, Homo sapiens
tgggggaatcttcca

SEQ ID NO: 471130 - DNA, 15 bp, Homo sapiens
ttgggggaatcttcc

SEQ ID NO: 471131 - DNA, 15 bp, Homo sapiens
cttgggggaatcttc

SEQ ID NO: 471132 - DNA, 15 bp, Homo sapiens
acttgggggaatctt

SEQ ID NO: 471133 - DNA, 15 bp, Homo sapiens
tacttgggggaatct

SEQ ID NO: 471134 - DNA, 15 bp, Homo sapiens
atacttgggggaatc

SEQ ID NO: 471135 - DNA, 15 bp, Homo sapiens
gatacttgggggaat

SEQ ID NO: 471136 - DNA, 15 bp, Homo sapiens
agatacttgggggaa

SEQ ID NO: 471137 - DNA, 15 bp, Homo sapiens
gagatacttggggga

SEQ ID NO: 471138 - DNA, 15 bp, Homo sapiens
agagatacttggggg

SEQ ID NO: 471139 - DNA, 15 bp, Homo sapiens
gagagatacttgggg

SEQ ID NO: 471140 - DNA, 15 bp, Homo sapiens
agagagatacttggg

SEQ ID NO: 471141 - DNA, 15 bp, Homo sapiens
cagagagatacttgg

SEQ ID NO: 471142 - DNA, 15 bp, Homo sapiens
tcagagagatacttg

SEQ ID NO: 471143 - DNA, 15 bp, Homo sapiens
gtcagagagatactt

SEQ ID NO: 471144 - DNA, 15 bp, Homo sapiens
tgtcagagagatact

SEQ ID NO: 471145 - DNA, 15 bp, Homo sapiens
ctgtcagagagatac

SEQ ID NO: 471146 - DNA, 15 bp, Homo sapiens
tctgtcagagagata

SEQ ID NO: 471147 - DNA, 15 bp, Homo sapiens
ttctgtcagagagat

SEQ ID NO: 471148 - DNA, 15 bp, Homo sapiens
cttctgtcagagaga

SEQ ID NO: 471149 - DNA, 15 bp, Homo sapiens
tcttctgtcagagag

SEQ ID NO: 471150 - DNA, 15 bp, Homo sapiens
ctcttctgtcagaga

SEQ ID NO: 471151 - DNA, 15 bp, Homo sapiens
tctcttctgtcagag

SEQ ID NO: 471152 - DNA, 15 bp, Homo sapiens
ctctcttctgtcaga

SEQ ID NO: 471153 - DNA, 15 bp, Homo sapiens
tctctcttctgtcag

SEQ ID NO: 471154 - DNA, 15 bp, Homo sapiens
ttctctcttctgtca

SEQ ID NO: 471155 - DNA, 15 bp, Homo sapiens
cttctctcttctgtc

SEQ ID NO: 471156 - DNA, 15 bp, Homo sapiens
ccttctctcttctgt

SEQ ID NO: 471157 - DNA, 15 bp, Homo sapiens
cccttctctcttctg

SEQ ID NO: 471158 - DNA, 15 bp, Homo sapiens
tcccttctctcttct

SEQ ID NO: 471159 - DNA, 15 bp, Homo sapiens
ttcccttctctcttc

SEQ ID NO: 471160 - DNA, 15 bp, Homo sapiens
gttcccttctctctt

SEQ ID NO: 471161 - DNA, 15 bp, Homo sapiens
tgttcccttctctct

SEQ ID NO: 471162 - DNA, 15 bp, Homo sapiens
gtgttcccttctctc

SEQ ID NO: 471163 - DNA, 15 bp, Homo sapiens
tgtgttcccttctct

SEQ ID NO: 471164 - DNA, 15 bp, Homo sapiens
gtgtgttcccttctc

SEQ ID NO: 471165 - DNA, 15 bp, Homo sapiens
cgtgtgttcccttct

SEQ ID NO: 471166 - DNA, 15 bp, Homo sapiens
ccgtgtgttcccttc

SEQ ID NO: 471167 - DNA, 15 bp, Homo sapiens
cccgtgtgttccctt

SEQ ID NO: 471168 - DNA, 15 bp, Homo sapiens
ccccgtgtgttccct

SEQ ID NO: 471169 - DNA, 15 bp, Homo sapiens
tccccgtgtgttccc

SEQ ID NO: 471170 - DNA, 15 bp, Homo sapiens
ctccccgtgtgttcc

SEQ ID NO: 471171 - DNA, 15 bp, Homo sapiens
cctccccgtgtgttc

SEQ ID NO: 471172 - DNA, 15 bp, Homo sapiens
tcctccccgtgtgtt

SEQ ID NO: 471173 - DNA, 15 bp, Homo sapiens
ttcctccccgtgtgt

SEQ ID NO: 471174 - DNA, 15 bp, Homo sapiens
tttcctccccgtgtg

SEQ ID NO: 471175 - DNA, 15 bp, Homo sapiens
ctttcctccccgtgt

SEQ ID NO: 471176 - DNA, 15 bp, Homo sapiens
actttcctccccgtg

SEQ ID NO: 471177 - DNA, 15 bp, Homo sapiens
gactttcctccccgt

SEQ ID NO: 471178 - DNA, 15 bp, Homo sapiens
ggactttcctccccg

SEQ ID NO: 471179 - DNA, 15 bp, Homo sapiens
tggactttcctcccc

SEQ ID NO: 471180 - DNA, 15 bp, Homo sapiens
ctggactttcctccc

SEQ ID NO: 471181 - DNA, 15 bp, Homo sapiens
actggactttcctcc

SEQ ID NO: 471182 - DNA, 15 bp, Homo sapiens
cactggactttcctc

SEQ ID NO: 471183 - DNA, 15 bp, Homo sapiens
tcactggactttcct

SEQ ID NO: 471184 - DNA, 15 bp, Homo sapiens
ctcactggactttcc

SEQ ID NO: 471185 - DNA, 15 bp, Homo sapiens
gctcactggactttc

SEQ ID NO: 471186 - DNA, 15 bp, Homo sapiens
ggctcactggacttt

SEQ ID NO: 471187 - DNA, 15 bp, Homo sapiens
cggctcactggactt

SEQ ID NO: 471188 - DNA, 15 bp, Homo sapiens
ccggctcactggact

SEQ ID NO: 471189 - DNA, 15 bp, Homo sapiens
accggctcactggac

SEQ ID NO: 471190 - DNA, 15 bp, Homo sapiens
caccggctcactgga

SEQ ID NO: 471191 - DNA, 15 bp, Homo sapiens
tcaccggctcactgg

SEQ ID NO: 471192 - DNA, 15 bp, Homo sapiens
ctcaccggctcactg

SEQ ID NO: 471193 - DNA, 15 bp, Homo sapiens
tctcaccggctcact

SEQ ID NO: 471194 - DNA, 15 bp, Homo sapiens
ttctcaccggctcac

SEQ ID NO: 471195 - DNA, 15 bp, Homo sapiens
cttctcaccggctca

SEQ ID NO: 471196 - DNA, 15 bp, Homo sapiens
ccttctcaccggctc

SEQ ID NO: 471197 - DNA, 15 bp, Homo sapiens
cccttctcaccggct

SEQ ID NO: 471198 - DNA, 15 bp, Homo sapiens
ccccttctcaccggc

SEQ ID NO: 471199 - DNA, 15 bp, Homo sapiens
cccccttctcaccgg

SEQ ID NO: 471200 - DNA, 15 bp, Homo sapiens
tcccccttctcaccg

SEQ ID NO: 471201 - DNA, 15 bp, Homo sapiens
ctcccccttctcacc

SEQ ID NO: 471202 - DNA, 15 bp, Homo sapiens
cctcccccttctcac

SEQ ID NO: 471203 - DNA, 15 bp, Homo sapiens
gcctcccccttctca

SEQ ID NO: 471204 - DNA, 15 bp, Homo sapiens
tgcctcccccttctc

SEQ ID NO: 471205 - DNA, 15 bp, Homo sapiens
ttgcctcccccttct

SEQ ID NO: 471206 - DNA, 15 bp, Homo sapiens
cttgcctcccccttc

SEQ ID NO: 471207 - DNA, 15 bp, Homo sapiens
ccttgcctccccctt

SEQ ID NO: 471208 - DNA, 15 bp, Homo sapiens
accttgcctccccct

SEQ ID NO: 471209 - DNA, 15 bp, Homo sapiens
taccttgcctccccc

SEQ ID NO: 471210 - DNA, 15 bp, Homo sapiens
ctaccttgcctcccc

SEQ ID NO: 471211 - DNA, 15 bp, Homo sapiens
cctaccttgcctccc

SEQ ID NO: 471212 - DNA, 15 bp, Homo sapiens
tcctaccttgcctcc

SEQ ID NO: 471213 - DNA, 15 bp, Homo sapiens
ttcctaccttgcctc

SEQ ID NO: 471214 - DNA, 15 bp, Homo sapiens
cttcctaccttgcct

SEQ ID NO: 471215 - DNA, 15 bp, Homo sapiens
tcttcctaccttgcc

SEQ ID NO: 471216 - DNA, 15 bp, Homo sapiens
ttcttcctaccttgc

SEQ ID NO: 471217 - DNA, 15 bp, Homo sapiens
tttcttcctaccttg

SEQ ID NO: 471218 - DNA, 15 bp, Homo sapiens
ctttcttcctacctt

SEQ ID NO: 471219 - DNA, 15 bp, Homo sapiens
tctttcttcctacct

SEQ ID NO: 471220 - DNA, 15 bp, Homo sapiens
ctctttcttcctacc

SEQ ID NO: 471221 - DNA, 15 bp, Homo sapiens
cctctttcttcctac

SEQ ID NO: 471222 - DNA, 15 bp, Homo sapiens
ccctctttcttccta

SEQ ID NO: 471223 - DNA, 15 bp, Homo sapiens
accctctttcttcct

SEQ ID NO: 471224 - DNA, 15 bp, Homo sapiens
taccctctttcttcc

SEQ ID NO: 471225 - DNA, 15 bp, Homo sapiens
ctaccctctttcttc

SEQ ID NO: 471226 - DNA, 15 bp, Homo sapiens
cctaccctctttctt

SEQ ID NO: 471227 - DNA, 15 bp, Homo sapiens
ccctaccctctttct

SEQ ID NO: 471228 - DNA, 15 bp, Homo sapiens
cccctaccctctttc

SEQ ID NO: 471229 - DNA, 15 bp, Homo sapiens
tcccctaccctcttt

SEQ ID NO: 471230 - DNA, 15 bp, Homo sapiens
ctcccctaccctctt

SEQ ID NO: 471231 - DNA, 15 bp, Homo sapiens
tctcccctaccctct

SEQ ID NO: 471232 - DNA, 15 bp, Homo sapiens
ttctcccctaccctc

SEQ ID NO: 471233 - DNA, 15 bp, Homo sapiens
tttctcccctaccct

SEQ ID NO: 471234 - DNA, 15 bp, Homo sapiens
ctttctcccctaccc

SEQ ID NO: 471235 - DNA, 15 bp, Homo sapiens
cctttctcccctacc

SEQ ID NO: 471236 - DNA, 15 bp, Homo sapiens
tcctttctcccctac

SEQ ID NO: 471237 - DNA, 15 bp, Homo sapiens
ttcctttctccccta

SEQ ID NO: 471238 - DNA, 15 bp, Homo sapiens
cttcctttctcccct

SEQ ID NO: 471239 - DNA, 15 bp, Homo sapiens
tcttcctttctcccc

SEQ ID NO: 471240 - DNA, 15 bp, Homo sapiens
ctcttcctttctccc

SEQ ID NO: 471241 - DNA, 15 bp, Homo sapiens
tctcttcctttctcc

SEQ ID NO: 471242 - DNA, 15 bp, Homo sapiens
gtctcttcctttctc

SEQ ID NO: 471243 - DNA, 15 bp, Homo sapiens
cgtctcttcctttct

SEQ ID NO: 471244 - DNA, 15 bp, Homo sapiens
tcgtctcttcctttc

SEQ ID NO: 471245 - DNA, 15 bp, Homo sapiens
ctcgtctcttccttt

SEQ ID NO: 471246 - DNA, 15 bp, Homo sapiens
gctcgtctcttcctt

SEQ ID NO: 471247 - DNA, 15 bp, Homo sapiens
agctcgtctcttcct

SEQ ID NO: 471248 - DNA, 15 bp, Homo sapiens
cagctcgtctcttcc

SEQ ID NO: 471249 - DNA, 15 bp, Homo sapiens
ccagctcgtctcttc

SEQ ID NO: 471250 - DNA, 15 bp, Homo sapiens
gccagctcgtctctt

SEQ ID NO: 471251 - DNA, 15 bp, Homo sapiens
tgccagctcgtctct

SEQ ID NO: 471252 - DNA, 15 bp, Homo sapiens
ctgccagctcgtctc

SEQ ID NO: 471253 - DNA, 15 bp, Homo sapiens
actgccagctcgtct

SEQ ID NO: 471254 - DNA, 15 bp, Homo sapiens
cactgccagctcgtc

SEQ ID NO: 471255 - DNA, 15 bp, Homo sapiens
acactgccagctcgt

SEQ ID NO: 471256 - DNA, 15 bp, Homo sapiens
cacactgccagctcg

SEQ ID NO: 471257 - DNA, 15 bp, Homo sapiens
tcacactgccagctc

SEQ ID NO: 471258 - DNA, 15 bp, Homo sapiens
ctcacactgccagct

SEQ ID NO: 471259 - DNA, 15 bp, Homo sapiens
cctcacactgccagc

SEQ ID NO: 471260 - DNA, 15 bp, Homo sapiens
tcctcacactgccag

SEQ ID NO: 471261 - DNA, 15 bp, Homo sapiens
ctcctcacactgcca

SEQ ID NO: 471262 - DNA, 15 bp, Homo sapiens
gctcctcacactgcc

SEQ ID NO: 471263 - DNA, 15 bp, Homo sapiens
agctcctcacactgc

SEQ ID NO: 471264 - DNA, 15 bp, Homo sapiens
cagctcctcacactg

SEQ ID NO: 471265 - DNA, 15 bp, Homo sapiens
ccagctcctcacact

SEQ ID NO: 471266 - DNA, 15 bp, Homo sapiens
accagctcctcacac

SEQ ID NO: 471267 - DNA, 15 bp, Homo sapiens
aaccagctcctcaca

SEQ ID NO: 471268 - DNA, 15 bp, Homo sapiens
gaaccagctcctcac

SEQ ID NO: 471269 - DNA, 15 bp, Homo sapiens
cgaaccagctcctca

SEQ ID NO: 471270 - DNA, 15 bp, Homo sapiens
tcgaaccagctcctc

SEQ ID NO: 471271 - DNA, 15 bp, Homo sapiens
atcgaaccagctcct

SEQ ID NO: 471272 - DNA, 15 bp, Homo sapiens
catcgaaccagctcc

SEQ ID NO: 471273 - DNA, 15 bp, Homo sapiens
ccatcgaaccagctc

SEQ ID NO: 471274 - DNA, 15 bp, Homo sapiens
cccatcgaaccagct

SEQ ID NO: 471275 - DNA, 15 bp, Homo sapiens
tcccatcgaaccagc

SEQ ID NO: 471276 - DNA, 15 bp, Homo sapiens
ctcccatcgaaccag

SEQ ID NO: 471277 - DNA, 15 bp, Homo sapiens
gctcccatcgaacca

SEQ ID NO: 471278 - DNA, 15 bp, Homo sapiens
agctcccatcgaacc

SEQ ID NO: 471279 - DNA, 15 bp, Homo sapiens
tagctcccatcgaac

SEQ ID NO: 471280 - DNA, 15 bp, Homo sapiens
gtagctcccatcgaa

SEQ ID NO: 471281 - DNA, 15 bp, Homo sapiens
ggtagctcccatcga

SEQ ID NO: 471282 - DNA, 15 bp, Homo sapiens
gggtagctcccatcg

SEQ ID NO: 471283 - DNA, 15 bp, Homo sapiens
tgggtagctcccatc

SEQ ID NO: 471284 - DNA, 15 bp, Homo sapiens
gtgggtagctcccat

SEQ ID NO: 471285 - DNA, 15 bp, Homo sapiens
ggtgggtagctccca

SEQ ID NO: 471286 - DNA, 15 bp, Homo sapiens
gggtgggtagctccc

SEQ ID NO: 471287 - DNA, 15 bp, Homo sapiens
tgggtgggtagctcc

SEQ ID NO: 471288 - DNA, 15 bp, Homo sapiens
ctgggtgggtagctc

SEQ ID NO: 471289 - DNA, 15 bp, Homo sapiens
cctgggtgggtagct

SEQ ID NO: 471290 - DNA, 15 bp, Homo sapiens
ccctgggtgggtagc

SEQ ID NO: 471291 - DNA, 15 bp, Homo sapiens
gccctgggtgggtag

SEQ ID NO: 471292 - DNA, 15 bp, Homo sapiens
tgccctgggtgggta

SEQ ID NO: 471293 - DNA, 15 bp, Homo sapiens
ctgccctgggtgggt

SEQ ID NO: 471294 - DNA, 15 bp, Homo sapiens
cctgccctgggtggg

SEQ ID NO: 471295 - DNA, 15 bp, Homo sapiens
ccctgccctgggtgg

SEQ ID NO: 471296 - DNA, 15 bp, Homo sapiens
gccctgccctgggtg

SEQ ID NO: 471297 - DNA, 15 bp, Homo sapiens
ggccctgccctgggt

SEQ ID NO: 471298 - DNA, 15 bp, Homo sapiens
gggccctgccctggg

SEQ ID NO: 471299 - DNA, 15 bp, Homo sapiens
tgggccctgccctgg

SEQ ID NO: 471300 - DNA, 15 bp, Homo sapiens
ttgggccctgccctg

SEQ ID NO: 471301 - DNA, 15 bp, Homo sapiens
cttgggccctgccct

SEQ ID NO: 471302 - DNA, 15 bp, Homo sapiens
ccttgggccctgccc

SEQ ID NO: 471303 - DNA, 15 bp, Homo sapiens
gccttgggccctgcc

SEQ ID NO: 471304 - DNA, 15 bp, Homo sapiens
tgccttgggccctgc

SEQ ID NO: 471305 - DNA, 15 bp, Homo sapiens
ctgccttgggccctg

SEQ ID NO: 471306 - DNA, 15 bp, Homo sapiens
tctgccttgggccct

SEQ ID NO: 471307 - DNA, 15 bp, Homo sapiens
ctctgccttgggccc

SEQ ID NO: 471308 - DNA, 15 bp, Homo sapiens
tctctgccttgggcc

SEQ ID NO: 471309 - DNA, 15 bp, Homo sapiens
gtctctgccttgggc

SEQ ID NO: 471310 - DNA, 15 bp, Homo sapiens
ggtctctgccttggg

SEQ ID NO: 471311 - DNA, 15 bp, Homo sapiens
aggtctctgccttgg

SEQ ID NO: 471312 - DNA, 15 bp, Homo sapiens
caggtctctgccttg

SEQ ID NO: 471313 - DNA, 15 bp, Homo sapiens
ccaggtctctgcctt

SEQ ID NO: 471314 - DNA, 15 bp, Homo sapiens
cccaggtctctgcct

SEQ ID NO: 471315 - DNA, 15 bp, Homo sapiens
ccccaggtctctgcc

SEQ ID NO: 471316 - DNA, 15 bp, Homo sapiens
tccccaggtctctgc

SEQ ID NO: 471317 - DNA, 15 bp, Homo sapiens
ctccccaggtctctg

SEQ ID NO: 471318 - DNA, 15 bp, Homo sapiens
tctccccaggtctct

SEQ ID NO: 471319 - DNA, 15 bp, Homo sapiens
ctctccccaggtctc

SEQ ID NO: 471320 - DNA, 15 bp, Homo sapiens
cctctccccaggtct

SEQ ID NO: 471321 - DNA, 15 bp, Homo sapiens
gcctctccccaggtc

SEQ ID NO: 471322 - DNA, 15 bp, Homo sapiens
tgcctctccccaggt

SEQ ID NO: 471323 - DNA, 15 bp, Homo sapiens
ctgcctctccccagg

SEQ ID NO: 471324 - DNA, 15 bp, Homo sapiens
gctgcctctccccag

SEQ ID NO: 471325 - DNA, 15 bp, Homo sapiens
tgctgcctctcccca

SEQ ID NO: 471326 - DNA, 15 bp, Homo sapiens
gtgctgcctctcccc

SEQ ID NO: 471327 - DNA, 15 bp, Homo sapiens
cgtgctgcctctccc

SEQ ID NO: 471328 - DNA, 15 bp, Homo sapiens
tcgtgctgcctctcc

SEQ ID NO: 471329 - DNA, 15 bp, Homo sapiens
ctcgtgctgcctctc

SEQ ID NO: 471330 - DNA, 15 bp, Homo sapiens
gctcgtgctgcctct

SEQ ID NO: 471331 - DNA, 15 bp, Homo sapiens
ggctcgtgctgcctc

SEQ ID NO: 471332 - DNA, 15 bp, Homo sapiens
cggctcgtgctgcct

SEQ ID NO: 471333 - DNA, 15 bp, Homo sapiens
tcggctcgtgctgcc

SEQ ID NO: 471334 - DNA, 15 bp, Homo sapiens
ctcggctcgtgctgc

SEQ ID NO: 471335 - DNA, 15 bp, Homo sapiens
cctcggctcgtgctg

SEQ ID NO: 471336 - DNA, 15 bp, Homo sapiens
acctcggctcgtgct

SEQ ID NO: 471337 - DNA, 15 bp, Homo sapiens
gacctcggctcgtgc

SEQ ID NO: 471338 - DNA, 15 bp, Homo sapiens
tgacctcggctcgtg

SEQ ID NO: 471339 - DNA, 15 bp, Homo sapiens
gtgacctcggctcgt

SEQ ID NO: 471340 - DNA, 15 bp, Homo sapiens
agtgacctcggctcg

SEQ ID NO: 471341 - DNA, 15 bp, Homo sapiens
aagtgacctcggctc

SEQ ID NO: 471342 - DNA, 15 bp, Homo sapiens
aaagtgacctcggct

SEQ ID NO: 471343 - DNA, 15 bp, Homo sapiens
taaagtgacctcggc

SEQ ID NO: 471344 - DNA, 15 bp, Homo sapiens
gtaaagtgacctcgg

SEQ ID NO: 471345 - DNA, 15 bp, Homo sapiens
ggtaaagtgacctcg

SEQ ID NO: 471346 - DNA, 15 bp, Homo sapiens
aggtaaagtgacctc

SEQ ID NO: 471347 - DNA, 15 bp, Homo sapiens
caggtaaagtgacct

SEQ ID NO: 471348 - DNA, 15 bp, Homo sapiens
gcaggtaaagtgacc

SEQ ID NO: 471349 - DNA, 15 bp, Homo sapiens
agcaggtaaagtgac

SEQ ID NO: 471350 - DNA, 15 bp, Homo sapiens
cagcaggtaaagtga

SEQ ID NO: 471351 - DNA, 15 bp, Homo sapiens
ccagcaggtaaagtg

SEQ ID NO: 471352 - DNA, 15 bp, Homo sapiens
tccagcaggtaaagt

SEQ ID NO: 471353 - DNA, 15 bp, Homo sapiens
ctccagcaggtaaag

SEQ ID NO: 471354 - DNA, 15 bp, Homo sapiens
tctccagcaggtaaa

SEQ ID NO: 471355 - DNA, 15 bp, Homo sapiens
ttctccagcaggtaa

SEQ ID NO: 471356 - DNA, 15 bp, Homo sapiens
gttctccagcaggta

SEQ ID NO: 471357 - DNA, 15 bp, Homo sapiens
cgttctccagcaggt

SEQ ID NO: 471358 - DNA, 15 bp, Homo sapiens
tcgttctccagcagg

SEQ ID NO: 471359 - DNA, 15 bp, Homo sapiens
ttcgttctccagcag

SEQ ID NO: 471360 - DNA, 15 bp, Homo sapiens
cttcgttctccagca

SEQ ID NO: 471361 - DNA, 15 bp, Homo sapiens
ccttcgttctccagc

SEQ ID NO: 471362 - DNA, 15 bp, Homo sapiens
accttcgttctccag

SEQ ID NO: 471363 - DNA, 15 bp, Homo sapiens
aaccttcgttctcca

SEQ ID NO: 471364 - DNA, 15 bp, Homo sapiens
aaaccttcgttctcc

SEQ ID NO: 471365 - DNA, 15 bp, Homo sapiens
aaaaccttcgttctc

SEQ ID NO: 471366 - DNA, 15 bp, Homo sapiens
gaaaaccttcgttct

SEQ ID NO: 471367 - DNA, 15 bp, Homo sapiens
tgaaaaccttcgttc

SEQ ID NO: 471368 - DNA, 15 bp, Homo sapiens
atgaaaaccttcgtt

SEQ ID NO: 471369 - DNA, 15 bp, Homo sapiens
tatgaaaaccttcgt

SEQ ID NO: 471370 - DNA, 15 bp, Homo sapiens
ctatgaaaaccttcg

SEQ ID NO: 471371 - DNA, 15 bp, Homo sapiens
gctatgaaaaccttc

SEQ ID NO: 471372 - DNA, 15 bp, Homo sapiens
tgctatgaaaacctt

SEQ ID NO: 471373 - DNA, 15 bp, Homo sapiens
ctgctatgaaaacct

SEQ ID NO: 471374 - DNA, 15 bp, Homo sapiens
gctgctatgaaaacc

SEQ ID NO: 471375 - DNA, 15 bp, Homo sapiens
cgctgctatgaaaac

SEQ ID NO: 471376 - DNA, 15 bp, Homo sapiens
tcgctgctatgaaaa

SEQ ID NO: 471377 - DNA, 15 bp, Homo sapiens
atcgctgctatgaaa

SEQ ID NO: 471378 - DNA, 15 bp, Homo sapiens
catcgctgctatgaa

SEQ ID NO: 471379 - DNA, 15 bp, Homo sapiens
tcatcgctgctatga

SEQ ID NO: 471380 - DNA, 15 bp, Homo sapiens
ctcatcgctgctatg

SEQ ID NO: 471381 - DNA, 15 bp, Homo sapiens
cctcatcgctgctat

SEQ ID NO: 471382 - DNA, 15 bp, Homo sapiens
ccctcatcgctgcta

SEQ ID NO: 471383 - DNA, 15 bp, Homo sapiens
cccctcatcgctgct

SEQ ID NO: 471384 - DNA, 15 bp, Homo sapiens
gcccctcatcgctgc

SEQ ID NO: 471385 - DNA, 15 bp, Homo sapiens
tgcccctcatcgctg

SEQ ID NO: 471386 - DNA, 15 bp, Homo sapiens
gtgcccctcatcgct

SEQ ID NO: 471387 - DNA, 15 bp, Homo sapiens
tgtgcccctcatcgc

SEQ ID NO: 471388 - DNA, 15 bp, Homo sapiens
ttgtgcccctcatcg

SEQ ID NO: 471389 - DNA, 15 bp, Homo sapiens
tttgtgcccctcatc

SEQ ID NO: 471390 - DNA, 15 bp, Homo sapiens
ttttgtgcccctcat

SEQ ID NO: 471391 - DNA, 15 bp, Homo sapiens
cttttgtgcccctca

SEQ ID NO: 471392 - DNA, 15 bp, Homo sapiens
tcttttgtgcccctc

SEQ ID NO: 471393 - DNA, 15 bp, Homo sapiens
ttcttttgtgcccct

SEQ ID NO: 471394 - DNA, 15 bp, Homo sapiens
attcttttgtgcccc

SEQ ID NO: 471395 - DNA, 15 bp, Homo sapiens
cattcttttgtgccc

SEQ ID NO: 471396 - DNA, 15 bp, Homo sapiens
tcattcttttgtgcc

SEQ ID NO: 471397 - DNA, 15 bp, Homo sapiens
ttcattcttttgtgc

SEQ ID NO: 471398 - DNA, 15 bp, Homo sapiens
cttcattcttttgtg

SEQ ID NO: 471399 - DNA, 15 bp, Homo sapiens
gcttcattcttttgt

SEQ ID NO: 471400 - DNA, 15 bp, Homo sapiens
tgcttcattcttttg

SEQ ID NO: 471401 - DNA, 15 bp, Homo sapiens
gtgcttcattctttt

SEQ ID NO: 471402 - DNA, 15 bp, Homo sapiens
tgtgcttcattcttt

SEQ ID NO: 471403 - DNA, 15 bp, Homo sapiens
ttgtgcttcattctt

SEQ ID NO: 471404 - DNA, 15 bp, Homo sapiens
tttgtgcttcattct

SEQ ID NO: 471405 - DNA, 15 bp, Homo sapiens
gtttgtgcttcattc

SEQ ID NO: 471406 - DNA, 15 bp, Homo sapiens
tgtttgtgcttcatt

SEQ ID NO: 471407 - DNA, 15 bp, Homo sapiens
gtgtttgtgcttcat

SEQ ID NO: 471408 - DNA, 15 bp, Homo sapiens
tgtgtttgtgcttca

SEQ ID NO: 471409 - DNA, 15 bp, Homo sapiens
ctgtgtttgtgcttc

SEQ ID NO: 471410 - DNA, 15 bp, Homo sapiens
gctgtgtttgtgctt

SEQ ID NO: 471411 - DNA, 15 bp, Homo sapiens
tgctgtgtttgtgct

SEQ ID NO: 471412 - DNA, 15 bp, Homo sapiens
ctgctgtgtttgtgc

SEQ ID NO: 471413 - DNA, 15 bp, Homo sapiens
cctgctgtgtttgtg

SEQ ID NO: 471414 - DNA, 15 bp, Homo sapiens
tcctgctgtgtttgt

SEQ ID NO: 471415 - DNA, 15 bp, Homo sapiens
ttcctgctgtgtttg

SEQ ID NO: 471416 - DNA, 15 bp, Homo sapiens
gttcctgctgtgttt

SEQ ID NO: 471417 - DNA, 15 bp, Homo sapiens
agttcctgctgtgtt

SEQ ID NO: 471418 - DNA, 15 bp, Homo sapiens
gagttcctgctgtgt

SEQ ID NO: 471419 - DNA, 15 bp, Homo sapiens
tgagttcctgctgtg

SEQ ID NO: 471420 - DNA, 15 bp, Homo sapiens
ttgagttcctgctgt

SEQ ID NO: 471421 - DNA, 15 bp, Homo sapiens
tttgagttcctgctg

SEQ ID NO: 471422 - DNA, 15 bp, Homo sapiens
ctttgagttcctgct

SEQ ID NO: 471423 - DNA, 15 bp, Homo sapiens
gctttgagttcctgc

SEQ ID NO: 471424 - DNA, 15 bp, Homo sapiens
ggctttgagttcctg

SEQ ID NO: 471425 - DNA, 15 bp, Homo sapiens
gggctttgagttcct

SEQ ID NO: 471426 - DNA, 15 bp, Homo sapiens
ggggctttgagttcc

SEQ ID NO: 471427 - DNA, 15 bp, Homo sapiens
tggggctttgagttc

SEQ ID NO: 471428 - DNA, 15 bp, Homo sapiens
ctggggctttgagtt

SEQ ID NO: 471429 - DNA, 15 bp, Homo sapiens
cctggggctttgagt

SEQ ID NO: 471430 - DNA, 15 bp, Homo sapiens
ccctggggctttgag

SEQ ID NO: 471431 - DNA, 15 bp, Homo sapiens
accctggggctttga

SEQ ID NO: 471432 - DNA, 15 bp, Homo sapiens
caccctggggctttg

SEQ ID NO: 471433 - DNA, 15 bp, Homo sapiens
tcaccctggggcttt

SEQ ID NO: 471434 - DNA, 15 bp, Homo sapiens
ctcaccctggggctt

SEQ ID NO: 471435 - DNA, 15 bp, Homo sapiens
tctcaccctggggct

SEQ ID NO: 471436 - DNA, 15 bp, Homo sapiens
ttctcaccctggggc

SEQ ID NO: 471437 - DNA, 15 bp, Homo sapiens
gttctcaccctgggg

SEQ ID NO: 471438 - DNA, 15 bp, Homo sapiens
ggttctcaccctggg

SEQ ID NO: 471439 - DNA, 15 bp, Homo sapiens
gggttctcaccctgg

SEQ ID NO: 471440 - DNA, 15 bp, Homo sapiens
tgggttctcaccctg

SEQ ID NO: 471441 - DNA, 15 bp, Homo sapiens
gtgggttctcaccct

SEQ ID NO: 471442 - DNA, 15 bp, Homo sapiens
agtgggttctcaccc

SEQ ID NO: 471443 - DNA, 15 bp, Homo sapiens
tagtgggttctcacc

SEQ ID NO: 471444 - DNA, 15 bp, Homo sapiens
gtagtgggttctcac

SEQ ID NO: 471445 - DNA, 15 bp, Homo sapiens
tgtagtgggttctca

SEQ ID NO: 471446 - DNA, 15 bp, Homo sapiens
gtgtagtgggttctc

SEQ ID NO: 471447 - DNA, 15 bp, Homo sapiens
ggtgtagtgggttct

SEQ ID NO: 471448 - DNA, 15 bp, Homo sapiens
tggtgtagtgggttc

SEQ ID NO: 471449 - DNA, 15 bp, Homo sapiens
gtggtgtagtgggtt

SEQ ID NO: 471450 - DNA, 15 bp, Homo sapiens
agtggtgtagtgggt

SEQ ID NO: 471451 - DNA, 15 bp, Homo sapiens
gagtggtgtagtggg

SEQ ID NO: 471452 - DNA, 15 bp, Homo sapiens
ggagtggtgtagtgg

SEQ ID NO: 471453 - DNA, 15 bp, Homo sapiens
gggagtggtgtagtg

SEQ ID NO: 471454 - DNA, 15 bp, Homo sapiens
agggagtggtgtagt

SEQ ID NO: 471455 - DNA, 15 bp, Homo sapiens
tagggagtggtgtag

SEQ ID NO: 471456 - DNA, 15 bp, Homo sapiens
ctagggagtggtgta

SEQ ID NO: 471457 - DNA, 15 bp, Homo sapiens
gctagggagtggtgt

SEQ ID NO: 471458 - DNA, 15 bp, Homo sapiens
cgctagggagtggtg

SEQ ID NO: 471459 - DNA, 15 bp, Homo sapiens
gcgctagggagtggt

SEQ ID NO: 471460 - DNA, 15 bp, Homo sapiens
agcgctagggagtgg

SEQ ID NO: 471461 - DNA, 15 bp, Homo sapiens
cagcgctagggagtg

SEQ ID NO: 471462 - DNA, 15 bp, Homo sapiens
ccagcgctagggagt

SEQ ID NO: 471463 - DNA, 15 bp, Homo sapiens
gccagcgctagggag

SEQ ID NO: 471464 - DNA, 15 bp, Homo sapiens
agccagcgctaggga

SEQ ID NO: 471465 - DNA, 15 bp, Homo sapiens
gagccagcgctaggg

SEQ ID NO: 471466 - DNA, 15 bp, Homo sapiens
ggagccagcgctagg

SEQ ID NO: 471467 - DNA, 15 bp, Homo sapiens
gggagccagcgctag

SEQ ID NO: 471468 - DNA, 15 bp, Homo sapiens
tgggagccagcgcta

SEQ ID NO: 471469 - DNA, 15 bp, Homo sapiens
ctgggagccagcgct

SEQ ID NO: 471470 - DNA, 15 bp, Homo sapiens
gctgggagccagcgc

SEQ ID NO: 471471 - DNA, 15 bp, Homo sapiens
agctgggagccagcg

SEQ ID NO: 471472 - DNA, 15 bp, Homo sapiens
aagctgggagccagc

SEQ ID NO: 471473 - DNA, 15 bp, Homo sapiens
gaagctgggagccag

SEQ ID NO: 471474 - DNA, 15 bp, Homo sapiens
ggaagctgggagcca

SEQ ID NO: 471475 - DNA, 15 bp, Homo sapiens
cggaagctgggagcc

SEQ ID NO: 471476 - DNA, 15 bp, Homo sapiens
ccggaagctgggagc

SEQ ID NO: 471477 - DNA, 15 bp, Homo sapiens
gccggaagctgggag

SEQ ID NO: 471478 - DNA, 15 bp, Homo sapiens
agccggaagctggga

SEQ ID NO: 471479 - DNA, 15 bp, Homo sapiens
tagccggaagctggg

SEQ ID NO: 471480 - DNA, 15 bp, Homo sapiens
gtagccggaagctgg

SEQ ID NO: 471481 - DNA, 15 bp, Homo sapiens
tgtagccggaagctg

SEQ ID NO: 471482 - DNA, 15 bp, Homo sapiens
ctgtagccggaagct

SEQ ID NO: 471483 - DNA, 15 bp, Homo sapiens
gctgtagccggaagc

SEQ ID NO: 471484 - DNA, 15 bp, Homo sapiens
agctgtagccggaag

SEQ ID NO: 471485 - DNA, 15 bp, Homo sapiens
cagctgtagccggaa

SEQ ID NO: 471486 - DNA, 15 bp, Homo sapiens
acagctgtagccgga

SEQ ID NO: 471487 - DNA, 15 bp, Homo sapiens
gacagctgtagccgg

SEQ ID NO: 471488 - DNA, 15 bp, Homo sapiens
ggacagctgtagccg

SEQ ID NO: 471489 - DNA, 15 bp, Homo sapiens
gggacagctgtagcc

SEQ ID NO: 471490 - DNA, 15 bp, Homo sapiens
cgggacagctgtagc

SEQ ID NO: 471491 - DNA, 15 bp, Homo sapiens
gcgggacagctgtag

SEQ ID NO: 471492 - DNA, 15 bp, Homo sapiens
agcgggacagctgta

SEQ ID NO: 471493 - DNA, 15 bp, Homo sapiens
tagcgggacagctgt

SEQ ID NO: 471494 - DNA, 15 bp, Homo sapiens
ctagcgggacagctg

SEQ ID NO: 471495 - DNA, 15 bp, Homo sapiens
tctagcgggacagct

SEQ ID NO: 471496 - DNA, 15 bp, Homo sapiens
gtctagcgggacagc

SEQ ID NO: 471497 - DNA, 15 bp, Homo sapiens
agtctagcgggacag

SEQ ID NO: 471498 - DNA, 15 bp, Homo sapiens
gagtctagcgggaca

SEQ ID NO: 471499 - DNA, 15 bp, Homo sapiens
ggagtctagcgggac

SEQ ID NO: 471500 - DNA, 15 bp, Homo sapiens
aggagtctagcggga

SEQ ID NO: 471501 - DNA, 15 bp, Homo sapiens
gaggagtctagcggg

SEQ ID NO: 471502 - DNA, 15 bp, Homo sapiens
agaggagtctagcgg

SEQ ID NO: 471503 - DNA, 15 bp, Homo sapiens
cagaggagtctagcg

SEQ ID NO: 471504 - DNA, 15 bp, Homo sapiens
acagaggagtctagc

SEQ ID NO: 471505 - DNA, 15 bp, Homo sapiens
gacagaggagtctag

SEQ ID NO: 471506 - DNA, 15 bp, Homo sapiens
ggacagaggagtcta

SEQ ID NO: 471507 - DNA, 15 bp, Homo sapiens
gggacagaggagtct

SEQ ID NO: 471508 - DNA, 15 bp, Homo sapiens
agggacagaggagtc

SEQ ID NO: 471509 - DNA, 15 bp, Homo sapiens
gagggacagaggagt

SEQ ID NO: 471510 - DNA, 15 bp, Homo sapiens
tgagggacagaggag

SEQ ID NO: 471511 - DNA, 15 bp, Homo sapiens
ttgagggacagagga

SEQ ID NO: 471512 - DNA, 15 bp, Homo sapiens
cttgagggacagagg

SEQ ID NO: 471513 - DNA, 15 bp, Homo sapiens
acttgagggacagag

SEQ ID NO: 471514 - DNA, 15 bp, Homo sapiens
cacttgagggacaga

SEQ ID NO: 471515 - DNA, 15 bp, Homo sapiens
tcacttgagggacag

SEQ ID NO: 471516 - DNA, 15 bp, Homo sapiens
ctcacttgagggaca

SEQ ID NO: 471517 - DNA, 15 bp, Homo sapiens
actcacttgagggac

SEQ ID NO: 471518 - DNA, 15 bp, Homo sapiens
gactcacttgaggga

SEQ ID NO: 471519 - DNA, 15 bp, Homo sapiens
agactcacttgaggg

SEQ ID NO: 471520 - DNA, 15 bp, Homo sapiens
cagactcacttgagg

SEQ ID NO: 471521 - DNA, 15 bp, Homo sapiens
gcagactcacttgag

SEQ ID NO: 471522 - DNA, 15 bp, Homo sapiens
ggcagactcacttga

SEQ ID NO: 471523 - DNA, 15 bp, Homo sapiens
aggcagactcacttg

SEQ ID NO: 471524 - DNA, 15 bp, Homo sapiens
caggcagactcactt

SEQ ID NO: 471525 - DNA, 15 bp, Homo sapiens
gcaggcagactcact

SEQ ID NO: 471526 - DNA, 15 bp, Homo sapiens
cgcaggcagactcac

SEQ ID NO: 471527 - DNA, 15 bp, Homo sapiens
tcgcaggcagactca

SEQ ID NO: 471528 - DNA, 15 bp, Homo sapiens
gtcgcaggcagactc

SEQ ID NO: 471529 - DNA, 15 bp, Homo sapiens
cgtcgcaggcagact

SEQ ID NO: 471530 - DNA, 15 bp, Homo sapiens
gcgtcgcaggcagac

SEQ ID NO: 471531 - DNA, 15 bp, Homo sapiens
ggcgtcgcaggcaga

SEQ ID NO: 471532 - DNA, 15 bp, Homo sapiens
gggcgtcgcaggcag

SEQ ID NO: 471533 - DNA, 15 bp, Homo sapiens
cgggcgtcgcaggca

SEQ ID NO: 471534 - DNA, 15 bp, Homo sapiens
ccgggcgtcgcaggc

SEQ ID NO: 471535 - DNA, 15 bp, Homo sapiens
accgggcgtcgcagg

SEQ ID NO: 471536 - DNA, 15 bp, Homo sapiens
caccgggcgtcgcag

SEQ ID NO: 471537 - DNA, 15 bp, Homo sapiens
gcaccgggcgtcgca

SEQ ID NO: 471538 - DNA, 15 bp, Homo sapiens
ggcaccgggcgtcgc

SEQ ID NO: 471539 - DNA, 15 bp, Homo sapiens
gggcaccgggcgtcg

SEQ ID NO: 471540 - DNA, 15 bp, Homo sapiens
ggggcaccgggcgtc

SEQ ID NO: 471541 - DNA, 15 bp, Homo sapiens
aggggcaccgggcgt

SEQ ID NO: 471542 - DNA, 15 bp, Homo sapiens
aaggggcaccgggcg

SEQ ID NO: 471543 - DNA, 15 bp, Homo sapiens
aaaggggcaccgggc

SEQ ID NO: 471544 - DNA, 15 bp, Homo sapiens
caaaggggcaccggg

SEQ ID NO: 471545 - DNA, 15 bp, Homo sapiens
acaaaggggcaccgg

SEQ ID NO: 471546 - DNA, 15 bp, Homo sapiens
gacaaaggggcaccg

SEQ ID NO: 471547 - DNA, 15 bp, Homo sapiens
agacaaaggggcacc

SEQ ID NO: 471548 - DNA, 15 bp, Homo sapiens
cagacaaaggggcac

SEQ ID NO: 471549 - DNA, 15 bp, Homo sapiens
ccagacaaaggggca

SEQ ID NO: 471550 - DNA, 15 bp, Homo sapiens
gccagacaaaggggc

SEQ ID NO: 471551 - DNA, 15 bp, Homo sapiens
tgccagacaaagggg

SEQ ID NO: 471552 - DNA, 15 bp, Homo sapiens
gtgccagacaaaggg

SEQ ID NO: 471553 - DNA, 15 bp, Homo sapiens
tgtgccagacaaagg

SEQ ID NO: 471554 - DNA, 15 bp, Homo sapiens
ctgtgccagacaaag

SEQ ID NO: 471555 - DNA, 15 bp, Homo sapiens
tctgtgccagacaaa

SEQ ID NO: 471556 - DNA, 15 bp, Homo sapiens
ctctgtgccagacaa

SEQ ID NO: 471557 - DNA, 15 bp, Homo sapiens
cctctgtgccagaca

SEQ ID NO: 471558 - DNA, 15 bp, Homo sapiens
gcctctgtgccagac

SEQ ID NO: 471559 - DNA, 15 bp, Homo sapiens
ggcctctgtgccaga

SEQ ID NO: 471560 - DNA, 15 bp, Homo sapiens
tggcctctgtgccag

SEQ ID NO: 471561 - DNA, 15 bp, Homo sapiens
ctggcctctgtgcca

SEQ ID NO: 471562 - DNA, 15 bp, Homo sapiens
cctggcctctgtgcc

SEQ ID NO: 471563 - DNA, 15 bp, Homo sapiens
acctggcctctgtgc

SEQ ID NO: 471564 - DNA, 15 bp, Homo sapiens
cacctggcctctgtg

SEQ ID NO: 471565 - DNA, 15 bp, Homo sapiens
ccacctggcctctgt

SEQ ID NO: 471566 - DNA, 15 bp, Homo sapiens
tccacctggcctctg

SEQ ID NO: 471567 - DNA, 15 bp, Homo sapiens
ctccacctggcctct

SEQ ID NO: 471568 - DNA, 15 bp, Homo sapiens
tctccacctggcctc

SEQ ID NO: 471569 - DNA, 15 bp, Homo sapiens
gtctccacctggcct

SEQ ID NO: 471570 - DNA, 15 bp, Homo sapiens
ggtctccacctggcc

SEQ ID NO: 471571 - DNA, 15 bp, Homo sapiens
tggtctccacctggc

SEQ ID NO: 471572 - DNA, 15 bp, Homo sapiens
ctggtctccacctgg

SEQ ID NO: 471573 - DNA, 15 bp, Homo sapiens
tctggtctccacctg

SEQ ID NO: 471574 - DNA, 15 bp, Homo sapiens
ctctggtctccacct

SEQ ID NO: 471575 - DNA, 15 bp, Homo sapiens
gctctggtctccacc

SEQ ID NO: 471576 - DNA, 15 bp, Homo sapiens
cgctctggtctccac

SEQ ID NO: 471577 - DNA, 15 bp, Homo sapiens
ccgctctggtctcca

SEQ ID NO: 471578 - DNA, 15 bp, Homo sapiens
gccgctctggtctcc

SEQ ID NO: 471579 - DNA, 15 bp, Homo sapiens
cgccgctctggtctc

SEQ ID NO: 471580 - DNA, 15 bp, Homo sapiens
gcgccgctctggtct

SEQ ID NO: 471581 - DNA, 15 bp, Homo sapiens
ggcgccgctctggtc

SEQ ID NO: 471582 - DNA, 15 bp, Homo sapiens
tggcgccgctctggt

SEQ ID NO: 471583 - DNA, 15 bp, Homo sapiens
ctggcgccgctctgg

SEQ ID NO: 471584 - DNA, 15 bp, Homo sapiens
cctggcgccgctctg

SEQ ID NO: 471585 - DNA, 15 bp, Homo sapiens
ccctggcgccgctct

SEQ ID NO: 471586 - DNA, 15 bp, Homo sapiens
tccctggcgccgctc

SEQ ID NO: 471587 - DNA, 15 bp, Homo sapiens
ctccctggcgccgct

SEQ ID NO: 471588 - DNA, 15 bp, Homo sapiens
cctccctggcgccgc

SEQ ID NO: 471589 - DNA, 15 bp, Homo sapiens
gcctccctggcgccg

SEQ ID NO: 471590 - DNA, 15 bp, Homo sapiens
agcctccctggcgcc

SEQ ID NO: 471591 - DNA, 15 bp, Homo sapiens
cagcctccctggcgc

SEQ ID NO: 471592 - DNA, 15 bp, Homo sapiens
ccagcctccctggcg

SEQ ID NO: 471593 - DNA, 15 bp, Homo sapiens
gccagcctccctggc

SEQ ID NO: 471594 - DNA, 15 bp, Homo sapiens
agccagcctccctgg

SEQ ID NO: 471595 - DNA, 15 bp, Homo sapiens
tagccagcctccctg

SEQ ID NO: 471596 - DNA, 15 bp, Homo sapiens
ctagccagcctccct

SEQ ID NO: 471597 - DNA, 15 bp, Homo sapiens
gctagccagcctccc

SEQ ID NO: 471598 - DNA, 15 bp, Homo sapiens
cgctagccagcctcc

SEQ ID NO: 471599 - DNA, 15 bp, Homo sapiens
gcgctagccagcctc

SEQ ID NO: 471600 - DNA, 15 bp, Homo sapiens
tgcgctagccagcct

SEQ ID NO: 471601 - DNA, 15 bp, Homo sapiens
gtgcgctagccagcc

SEQ ID NO: 471602 - DNA, 15 bp, Homo sapiens
agtgcgctagccagc

SEQ ID NO: 471603 - DNA, 15 bp, Homo sapiens
cagtgcgctagccag

SEQ ID NO: 471604 - DNA, 15 bp, Homo sapiens
ccagtgcgctagcca

SEQ ID NO: 471605 - DNA, 15 bp, Homo sapiens
cccagtgcgctagcc

SEQ ID NO: 471606 - DNA, 15 bp, Homo sapiens
gcccagtgcgctagc

SEQ ID NO: 471607 - DNA, 15 bp, Homo sapiens
agcccagtgcgctag

SEQ ID NO: 471608 - DNA, 15 bp, Homo sapiens
cagcccagtgcgcta

SEQ ID NO: 471609 - DNA, 15 bp, Homo sapiens
gcagcccagtgcgct

SEQ ID NO: 471610 - DNA, 15 bp, Homo sapiens
agcagcccagtgcgc

SEQ ID NO: 471611 - DNA, 15 bp, Homo sapiens
tagcagcccagtgcg

SEQ ID NO: 471612 - DNA, 15 bp, Homo sapiens
ctagcagcccagtgc

SEQ ID NO: 471613 - DNA, 15 bp, Homo sapiens
tctagcagcccagtg

SEQ ID NO: 471614 - DNA, 15 bp, Homo sapiens
ctctagcagcccagt

SEQ ID NO: 471615 - DNA, 15 bp, Homo sapiens
tctctagcagcccag

SEQ ID NO: 471616 - DNA, 15 bp, Homo sapiens
ctctctagcagccca

SEQ ID NO: 471617 - DNA, 15 bp, Homo sapiens
tctctctagcagccc

SEQ ID NO: 471618 - DNA, 15 bp, Homo sapiens
atctctctagcagcc

SEQ ID NO: 471619 - DNA, 15 bp, Homo sapiens
aatctctctagcagc

SEQ ID NO: 471620 - DNA, 15 bp, Homo sapiens
caatctctctagcag

SEQ ID NO: 471621 - DNA, 15 bp, Homo sapiens
gcaatctctctagca

SEQ ID NO: 471622 - DNA, 15 bp, Homo sapiens
tgcaatctctctagc

SEQ ID NO: 471623 - DNA, 15 bp, Homo sapiens
ctgcaatctctctag

SEQ ID NO: 471624 - DNA, 15 bp, Homo sapiens
gctgcaatctctcta

SEQ ID NO: 471625 - DNA, 15 bp, Homo sapiens
tgctgcaatctctct

SEQ ID NO: 471626 - DNA, 15 bp, Homo sapiens
ctgctgcaatctctc

SEQ ID NO: 471627 - DNA, 15 bp, Homo sapiens
cctgctgcaatctct

SEQ ID NO: 471628 - DNA, 15 bp, Homo sapiens
acctgctgcaatctc

SEQ ID NO: 471629 - DNA, 15 bp, Homo sapiens
cacctgctgcaatct

SEQ ID NO: 471630 - DNA, 15 bp, Homo sapiens
tcacctgctgcaatc

SEQ ID NO: 471631 - DNA, 15 bp, Homo sapiens
gtcacctgctgcaat

SEQ ID NO: 471632 - DNA, 15 bp, Homo sapiens
tgtcacctgctgcaa

SEQ ID NO: 471633 - DNA, 15 bp, Homo sapiens
atgtcacctgctgca

SEQ ID NO: 471634 - DNA, 15 bp, Homo sapiens
catgtcacctgctgc

SEQ ID NO: 471635 - DNA, 15 bp, Homo sapiens
ccatgtcacctgctg

SEQ ID NO: 471636 - DNA, 15 bp, Homo sapiens
tccatgtcacctgct

SEQ ID NO: 471637 - DNA, 15 bp, Homo sapiens
gtccatgtcacctgc

SEQ ID NO: 471638 - DNA, 15 bp, Homo sapiens
tgtccatgtcacctg

SEQ ID NO: 471639 - DNA, 15 bp, Homo sapiens
atgtccatgtcacct

SEQ ID NO: 471640 - DNA, 15 bp, Homo sapiens
tatgtccatgtcacc

SEQ ID NO: 471641 - DNA, 15 bp, Homo sapiens
ctatgtccatgtcac

SEQ ID NO: 471642 - DNA, 15 bp, Homo sapiens
actatgtccatgtca

SEQ ID NO: 471643 - DNA, 15 bp, Homo sapiens
cactatgtccatgtc

SEQ ID NO: 471644 - DNA, 15 bp, Homo sapiens
ccactatgtccatgt

SEQ ID NO: 471645 - DNA, 15 bp, Homo sapiens
tccactatgtccatg

SEQ ID NO: 471646 - DNA, 15 bp, Homo sapiens
ctccactatgtccat

SEQ ID NO: 471647 - DNA, 15 bp, Homo sapiens
gctccactatgtcca

SEQ ID NO: 471648 - DNA, 15 bp, Homo sapiens
agctccactatgtcc

SEQ ID NO: 471649 - DNA, 15 bp, Homo sapiens
aagctccactatgtc

SEQ ID NO: 471650 - DNA, 15 bp, Homo sapiens
caagctccactatgt

SEQ ID NO: 471651 - DNA, 15 bp, Homo sapiens
ccaagctccactatg

SEQ ID NO: 471652 - DNA, 15 bp, Homo sapiens
cccaagctccactat

SEQ ID NO: 471653 - DNA, 15 bp, Homo sapiens
ccccaagctccacta

SEQ ID NO: 471654 - DNA, 15 bp, Homo sapiens
cccccaagctccact

SEQ ID NO: 471655 - DNA, 15 bp, Homo sapiens
acccccaagctccac

SEQ ID NO: 471656 - DNA, 15 bp, Homo sapiens
gacccccaagctcca

SEQ ID NO: 471657 - DNA, 15 bp, Homo sapiens
cgacccccaagctcc

SEQ ID NO: 471658 - DNA, 15 bp, Homo sapiens
gcgacccccaagctc

SEQ ID NO: 471659 - DNA, 15 bp, Homo sapiens
ggcgacccccaagct

SEQ ID NO: 471660 - DNA, 15 bp, Homo sapiens
tggcgacccccaagc

SEQ ID NO: 471661 - DNA, 15 bp, Homo sapiens
ctggcgacccccaag

SEQ ID NO: 471662 - DNA, 15 bp, Homo sapiens
actggcgacccccaa

SEQ ID NO: 471663 - DNA, 15 bp, Homo sapiens
gactggcgaccccca

SEQ ID NO: 471664 - DNA, 15 bp, Homo sapiens
agactggcgaccccc

SEQ ID NO: 471665 - DNA, 15 bp, Homo sapiens
cagactggcgacccc

SEQ ID NO: 471666 - DNA, 15 bp, Homo sapiens
gcagactggcgaccc

SEQ ID NO: 471667 - DNA, 15 bp, Homo sapiens
agcagactggcgacc

SEQ ID NO: 471668 - DNA, 15 bp, Homo sapiens
cagcagactggcgac

SEQ ID NO: 471669 - DNA, 15 bp, Homo sapiens
acagcagactggcga

SEQ ID NO: 471670 - DNA, 15 bp, Homo sapiens
cacagcagactggcg

SEQ ID NO: 471671 - DNA, 15 bp, Homo sapiens
acacagcagactggc

SEQ ID NO: 471672 - DNA, 15 bp, Homo sapiens
gacacagcagactgg

SEQ ID NO: 471673 - DNA, 15 bp, Homo sapiens
ggacacagcagactg

SEQ ID NO: 471674 - DNA, 15 bp, Homo sapiens
gggacacagcagact

SEQ ID NO: 471675 - DNA, 15 bp, Homo sapiens
tgggacacagcagac

SEQ ID NO: 471676 - DNA, 15 bp, Homo sapiens
ttgggacacagcaga

SEQ ID NO: 471677 - DNA, 15 bp, Homo sapiens
tttgggacacagcag

SEQ ID NO: 471678 - DNA, 15 bp, Homo sapiens
gtttgggacacagca

SEQ ID NO: 471679 - DNA, 15 bp, Homo sapiens
agtttgggacacagc

SEQ ID NO: 471680 - DNA, 15 bp, Homo sapiens
aagtttgggacacag

SEQ ID NO: 471681 - DNA, 15 bp, Homo sapiens
aaagtttgggacaca

SEQ ID NO: 471682 - DNA, 15 bp, Homo sapiens
gaaagtttgggacac

SEQ ID NO: 471683 - DNA, 15 bp, Homo sapiens
agaaagtttgggaca

SEQ ID NO: 471684 - DNA, 15 bp, Homo sapiens
cagaaagtttgggac

SEQ ID NO: 471685 - DNA, 15 bp, Homo sapiens
tcagaaagtttggga

SEQ ID NO: 471686 - DNA, 15 bp, Homo sapiens
gtcagaaagtttggg

SEQ ID NO: 471687 - DNA, 15 bp, Homo sapiens
ggtcagaaagtttgg

SEQ ID NO: 471688 - DNA, 15 bp, Homo sapiens
tggtcagaaagtttg

SEQ ID NO: 471689 - DNA, 15 bp, Homo sapiens
gtggtcagaaagttt

SEQ ID NO: 471690 - DNA, 15 bp, Homo sapiens
agtggtcagaaagtt

SEQ ID NO: 471691 - DNA, 15 bp, Homo sapiens
cagtggtcagaaagt

SEQ ID NO: 471692 - DNA, 15 bp, Homo sapiens
ccagtggtcagaaag

SEQ ID NO: 471693 - DNA, 15 bp, Homo sapiens
gccagtggtcagaaa

SEQ ID NO: 471694 - DNA, 15 bp, Homo sapiens
agccagtggtcagaa

SEQ ID NO: 471695 - DNA, 15 bp, Homo sapiens
cagccagtggtcaga

SEQ ID NO: 471696 - DNA, 15 bp, Homo sapiens
ccagccagtggtcag

SEQ ID NO: 471697 - DNA, 15 bp, Homo sapiens
gccagccagtggtca

SEQ ID NO: 471698 - DNA, 15 bp, Homo sapiens
ggccagccagtggtc

SEQ ID NO: 471699 - DNA, 15 bp, Homo sapiens
gggccagccagtggt

SEQ ID NO: 471700 - DNA, 15 bp, Homo sapiens
tgggccagccagtgg

SEQ ID NO: 471701 - DNA, 15 bp, Homo sapiens
ctgggccagccagtg

SEQ ID NO: 471702 - DNA, 15 bp, Homo sapiens
gctgggccagccagt

SEQ ID NO: 471703 - DNA, 15 bp, Homo sapiens
tgctgggccagccag

SEQ ID NO: 471704 - DNA, 15 bp, Homo sapiens
gtgctgggccagcca

SEQ ID NO: 471705 - DNA, 15 bp, Homo sapiens
cgtgctgggccagcc

SEQ ID NO: 471706 - DNA, 15 bp, Homo sapiens
ccgtgctgggccagc

SEQ ID NO: 471707 - DNA, 15 bp, Homo sapiens
cccgtgctgggccag

SEQ ID NO: 471708 - DNA, 15 bp, Homo sapiens
ccccgtgctgggcca

SEQ ID NO: 471709 - DNA, 15 bp, Homo sapiens
tccccgtgctgggcc

SEQ ID NO: 471710 - DNA, 15 bp, Homo sapiens
ctccccgtgctgggc

SEQ ID NO: 471711 - DNA, 15 bp, Homo sapiens
cctccccgtgctggg

SEQ ID NO: 471712 - DNA, 15 bp, Homo sapiens
acctccccgtgctgg

SEQ ID NO: 471713 - DNA, 15 bp, Homo sapiens
cacctccccgtgctg

SEQ ID NO: 471714 - DNA, 15 bp, Homo sapiens
ccacctccccgtgct

SEQ ID NO: 471715 - DNA, 15 bp, Homo sapiens
accacctccccgtgc

SEQ ID NO: 471716 - DNA, 15 bp, Homo sapiens
caccacctccccgtg

SEQ ID NO: 471717 - DNA, 15 bp, Homo sapiens
gcaccacctccccgt

SEQ ID NO: 471718 - DNA, 15 bp, Homo sapiens
agcaccacctccccg

SEQ ID NO: 471719 - DNA, 15 bp, Homo sapiens
tagcaccacctcccc

SEQ ID NO: 471720 - DNA, 15 bp, Homo sapiens
gtagcaccacctccc

SEQ ID NO: 471721 - DNA, 15 bp, Homo sapiens
agtagcaccacctcc

SEQ ID NO: 471722 - DNA, 15 bp, Homo sapiens
aagtagcaccacctc

SEQ ID NO: 471723 - DNA, 15 bp, Homo sapiens
gaagtagcaccacct

SEQ ID NO: 471724 - DNA, 15 bp, Homo sapiens
tgaagtagcaccacc

SEQ ID NO: 471725 - DNA, 15 bp, Homo sapiens
gtgaagtagcaccac

SEQ ID NO: 471726 - DNA, 15 bp, Homo sapiens
agtgaagtagcacca

SEQ ID NO: 471727 - DNA, 15 bp, Homo sapiens
cagtgaagtagcacc

SEQ ID NO: 471728 - DNA, 15 bp, Homo sapiens
tcagtgaagtagcac

SEQ ID NO: 471729 - DNA, 15 bp, Homo sapiens
ctcagtgaagtagca

SEQ ID NO: 471730 - DNA, 15 bp, Homo sapiens
gctcagtgaagtagc

SEQ ID NO: 471731 - DNA, 15 bp, Homo sapiens
agctcagtgaagtag

SEQ ID NO: 471732 - DNA, 15 bp, Homo sapiens
cagctcagtgaagta

SEQ ID NO: 471733 - DNA, 15 bp, Homo sapiens
gcagctcagtgaagt

SEQ ID NO: 471734 - DNA, 15 bp, Homo sapiens
agcagctcagtgaag

SEQ ID NO: 471735 - DNA, 15 bp, Homo sapiens
aagcagctcagtgaa

SEQ ID NO: 471736 - DNA, 15 bp, Homo sapiens
gaagcagctcagtga

SEQ ID NO: 471737 - DNA, 15 bp, Homo sapiens
tgaagcagctcagtg

SEQ ID NO: 471738 - DNA, 15 bp, Homo sapiens
ctgaagcagctcagt

SEQ ID NO: 471739 - DNA, 15 bp, Homo sapiens
cctgaagcagctcag

SEQ ID NO: 471740 - DNA, 15 bp, Homo sapiens
tcctgaagcagctca

SEQ ID NO: 471741 - DNA, 15 bp, Homo sapiens
gtcctgaagcagctc

SEQ ID NO: 471742 - DNA, 15 bp, Homo sapiens
ggtcctgaagcagct

SEQ ID NO: 471743 - DNA, 15 bp, Homo sapiens
tggtcctgaagcagc

SEQ ID NO: 471744 - DNA, 15 bp, Homo sapiens
gtggtcctgaagcag

SEQ ID NO: 471745 - DNA, 15 bp, Homo sapiens
ggtggtcctgaagca

SEQ ID NO: 471746 - DNA, 15 bp, Homo sapiens
aggtggtcctgaagc

SEQ ID NO: 471747 - DNA, 15 bp, Homo sapiens
gaggtggtcctgaag

SEQ ID NO: 471748 - DNA, 15 bp, Homo sapiens
agaggtggtcctgaa

SEQ ID NO: 471749 - DNA, 15 bp, Homo sapiens
tagaggtggtcctga

SEQ ID NO: 471750 - DNA, 15 bp, Homo sapiens
ttagaggtggtcctg

SEQ ID NO: 471751 - DNA, 15 bp, Homo sapiens
tttagaggtggtcct

SEQ ID NO: 471752 - DNA, 15 bp, Homo sapiens
gtttagaggtggtcc

SEQ ID NO: 471753 - DNA, 15 bp, Homo sapiens
agtttagaggtggtc

SEQ ID NO: 471754 - DNA, 15 bp, Homo sapiens
gagtttagaggtggt

SEQ ID NO: 471755 - DNA, 15 bp, Homo sapiens
cgagtttagaggtgg

SEQ ID NO: 471756 - DNA, 15 bp, Homo sapiens
tcgagtttagaggtg

SEQ ID NO: 471757 - DNA, 15 bp, Homo sapiens
ttcgagtttagaggt

SEQ ID NO: 471758 - DNA, 15 bp, Homo sapiens
tttcgagtttagagg

SEQ ID NO: 471759 - DNA, 15 bp, Homo sapiens
gtttcgagtttagag

SEQ ID NO: 471760 - DNA, 15 bp, Homo sapiens
ggtttcgagtttaga

SEQ ID NO: 471761 - DNA, 15 bp, Homo sapiens
gggtttcgagtttag

SEQ ID NO: 471762 - DNA, 15 bp, Homo sapiens
tgggtttcgagttta

SEQ ID NO: 471763 - DNA, 15 bp, Homo sapiens
gtgggtttcgagttt

SEQ ID NO: 471764 - DNA, 15 bp, Homo sapiens
ggtgggtttcgagtt

SEQ ID NO: 471765 - DNA, 15 bp, Homo sapiens
aggtgggtttcgagt

SEQ ID NO: 471766 - DNA, 15 bp, Homo sapiens
caggtgggtttcgag

SEQ ID NO: 471767 - DNA, 15 bp, Homo sapiens
tcaggtgggtttcga

SEQ ID NO: 471768 - DNA, 15 bp, Homo sapiens
ctcaggtgggtttcg

SEQ ID NO: 471769 - DNA, 15 bp, Homo sapiens
cctcaggtgggtttc

SEQ ID NO: 471770 - DNA, 15 bp, Homo sapiens
gcctcaggtgggttt

SEQ ID NO: 471771 - DNA, 15 bp, Homo sapiens
ggcctcaggtgggtt

SEQ ID NO: 471772 - DNA, 15 bp, Homo sapiens
gggcctcaggtgggt

SEQ ID NO: 471773 - DNA, 15 bp, Homo sapiens
ggggcctcaggtggg

SEQ ID NO: 471774 - DNA, 15 bp, Homo sapiens
tggggcctcaggtgg

SEQ ID NO: 471775 - DNA, 15 bp, Homo sapiens
atggggcctcaggtg

SEQ ID NO: 471776 - DNA, 15 bp, Homo sapiens
aatggggcctcaggt

SEQ ID NO: 471777 - DNA, 15 bp, Homo sapiens
aaatggggcctcagg

SEQ ID NO: 471778 - DNA, 15 bp, Homo sapiens
caaatggggcctcag

SEQ ID NO: 471779 - DNA, 15 bp, Homo sapiens
gcaaatggggcctca

SEQ ID NO: 471780 - DNA, 15 bp, Homo sapiens
agcaaatggggcctc

SEQ ID NO: 471781 - DNA, 15 bp, Homo sapiens
gagcaaatggggcct

SEQ ID NO: 471782 - DNA, 15 bp, Homo sapiens
agagcaaatggggcc

SEQ ID NO: 471783 - DNA, 15 bp, Homo sapiens
aagagcaaatggggc

SEQ ID NO: 471784 - DNA, 15 bp, Homo sapiens
gaagagcaaatgggg

SEQ ID NO: 471785 - DNA, 15 bp, Homo sapiens
agaagagcaaatggg

SEQ ID NO: 471786 - DNA, 15 bp, Homo sapiens
cagaagagcaaatgg

SEQ ID NO: 471787 - DNA, 15 bp, Homo sapiens
gcagaagagcaaatg

SEQ ID NO: 471788 - DNA, 15 bp, Homo sapiens
cgcagaagagcaaat

SEQ ID NO: 471789 - DNA, 15 bp, Homo sapiens
tcgcagaagagcaaa

SEQ ID NO: 471790 - DNA, 15 bp, Homo sapiens
atcgcagaagagcaa

SEQ ID NO: 471791 - DNA, 15 bp, Homo sapiens
gatcgcagaagagca

SEQ ID NO: 471792 - DNA, 15 bp, Homo sapiens
ggatcgcagaagagc

SEQ ID NO: 471793 - DNA, 15 bp, Homo sapiens
tggatcgcagaagag

SEQ ID NO: 471794 - DNA, 15 bp, Homo sapiens
atggatcgcagaaga

SEQ ID NO: 471795 - DNA, 15 bp, Homo sapiens
aatggatcgcagaag

SEQ ID NO: 471796 - DNA, 15 bp, Homo sapiens
taatggatcgcagaa

SEQ ID NO: 471797 - DNA, 15 bp, Homo sapiens
ataatggatcgcaga

SEQ ID NO: 471798 - DNA, 15 bp, Homo sapiens
gataatggatcgcag

SEQ ID NO: 471799 - DNA, 15 bp, Homo sapiens
agataatggatcgca

SEQ ID NO: 471800 - DNA, 15 bp, Homo sapiens
tagataatggatcgc

SEQ ID NO: 471801 - DNA, 15 bp, Homo sapiens
atagataatggatcg

SEQ ID NO: 471802 - DNA, 15 bp, Homo sapiens
gatagataatggatc

SEQ ID NO: 471803 - DNA, 15 bp, Homo sapiens
agatagataatggat

SEQ ID NO: 471804 - DNA, 15 bp, Homo sapiens
aagatagataatgga

SEQ ID NO: 471805 - DNA, 15 bp, Homo sapiens
aaagatagataatgg

SEQ ID NO: 471806 - DNA, 15 bp, Homo sapiens
gaaagatagataatg

SEQ ID NO: 471807 - DNA, 15 bp, Homo sapiens
ggaaagatagataat

SEQ ID NO: 471808 - DNA, 15 bp, Homo sapiens
gggaaagatagataa

SEQ ID NO: 471809 - DNA, 15 bp, Homo sapiens
agggaaagatagata

SEQ ID NO: 471810 - DNA, 15 bp, Homo sapiens
aagggaaagatagat

SEQ ID NO: 471811 - DNA, 15 bp, Homo sapiens
gaagggaaagataga

SEQ ID NO: 471812 - DNA, 15 bp, Homo sapiens
ggaagggaaagatag

SEQ ID NO: 471813 - DNA, 15 bp, Homo sapiens
tggaagggaaagata

SEQ ID NO: 471814 - DNA, 15 bp, Homo sapiens
gtggaagggaaagat

SEQ ID NO: 471815 - DNA, 15 bp, Homo sapiens
tgtggaagggaaaga

SEQ ID NO: 471816 - DNA, 15 bp, Homo sapiens
atgtggaagggaaag

SEQ ID NO: 471817 - DNA, 15 bp, Homo sapiens
gatgtggaagggaaa

SEQ ID NO: 471818 - DNA, 15 bp, Homo sapiens
ggatgtggaagggaa

SEQ ID NO: 471819 - DNA, 15 bp, Homo sapiens
gggatgtggaaggga

SEQ ID NO: 471820 - DNA, 15 bp, Homo sapiens
cgggatgtggaaggg

SEQ ID NO: 471821 - DNA, 15 bp, Homo sapiens
ccgggatgtggaagg

SEQ ID NO: 471822 - DNA, 15 bp, Homo sapiens
gccgggatgtggaag

SEQ ID NO: 471823 - DNA, 15 bp, Homo sapiens
agccgggatgtggaa

SEQ ID NO: 471824 - DNA, 15 bp, Homo sapiens
gagccgggatgtgga

SEQ ID NO: 471825 - DNA, 15 bp, Homo sapiens
agagccgggatgtgg

SEQ ID NO: 471826 - DNA, 15 bp, Homo sapiens
gagagccgggatgtg

SEQ ID NO: 471827 - DNA, 15 bp, Homo sapiens
tgagagccgggatgt

SEQ ID NO: 471828 - DNA, 15 bp, Homo sapiens
atgagagccgggatg

SEQ ID NO: 471829 - DNA, 15 bp, Homo sapiens
gatgagagccgggat

SEQ ID NO: 471830 - DNA, 15 bp, Homo sapiens
agatgagagccggga

SEQ ID NO: 471831 - DNA, 15 bp, Homo sapiens
gagatgagagccggg

SEQ ID NO: 471832 - DNA, 15 bp, Homo sapiens
tgagatgagagccgg

SEQ ID NO: 471833 - DNA, 15 bp, Homo sapiens
ctgagatgagagccg

SEQ ID NO: 471834 - DNA, 15 bp, Homo sapiens
cctgagatgagagcc

SEQ ID NO: 471835 - DNA, 15 bp, Homo sapiens
ccctgagatgagagc

SEQ ID NO: 471836 - DNA, 15 bp, Homo sapiens
cccctgagatgagag

SEQ ID NO: 471837 - DNA, 15 bp, Homo sapiens
acccctgagatgaga

SEQ ID NO: 471838 - DNA, 15 bp, Homo sapiens
gacccctgagatgag

SEQ ID NO: 471839 - DNA, 15 bp, Homo sapiens
ggacccctgagatga

SEQ ID NO: 471840 - DNA, 15 bp, Homo sapiens
gggacccctgagatg

SEQ ID NO: 471841 - DNA, 15 bp, Homo sapiens
agggacccctgagat

SEQ ID NO: 471842 - DNA, 15 bp, Homo sapiens
aagggacccctgaga

SEQ ID NO: 471843 - DNA, 15 bp, Homo sapiens
aaagggacccctgag

SEQ ID NO: 471844 - DNA, 15 bp, Homo sapiens
aaaagggacccctga

SEQ ID NO: 471845 - DNA, 15 bp, Homo sapiens
gaaaagggacccctg

SEQ ID NO: 471846 - DNA, 15 bp, Homo sapiens
agaaaagggacccct

SEQ ID NO: 471847 - DNA, 15 bp, Homo sapiens
aagaaaagggacccc

SEQ ID NO: 471848 - DNA, 15 bp, Homo sapiens
gaagaaaagggaccc

SEQ ID NO: 471849 - DNA, 15 bp, Homo sapiens
ggaagaaaagggacc

SEQ ID NO: 471850 - DNA, 15 bp, Homo sapiens
aggaagaaaagggac

SEQ ID NO: 471851 - DNA, 15 bp, Homo sapiens
aaggaagaaaaggga

SEQ ID NO: 471852 - DNA, 15 bp, Homo sapiens
caaggaagaaaaggg

SEQ ID NO: 471853 - DNA, 15 bp, Homo sapiens
acaaggaagaaaagg

SEQ ID NO: 471854 - DNA, 15 bp, Homo sapiens
gacaaggaagaaaag

SEQ ID NO: 471855 - DNA, 15 bp, Homo sapiens
tgacaaggaagaaaa

SEQ ID NO: 471856 - DNA, 15 bp, Homo sapiens
gtgacaaggaagaaa

SEQ ID NO: 471857 - DNA, 15 bp, Homo sapiens
agtgacaaggaagaa

SEQ ID NO: 471858 - DNA, 15 bp, Homo sapiens
gagtgacaaggaaga

SEQ ID NO: 471859 - DNA, 15 bp, Homo sapiens
ggagtgacaaggaag

SEQ ID NO: 471860 - DNA, 15 bp, Homo sapiens
aggagtgacaaggaa

SEQ ID NO: 471861 - DNA, 15 bp, Homo sapiens
caggagtgacaagga

SEQ ID NO: 471862 - DNA, 15 bp, Homo sapiens
gcaggagtgacaagg

SEQ ID NO: 471863 - DNA, 15 bp, Homo sapiens
agcaggagtgacaag

SEQ ID NO: 471864 - DNA, 15 bp, Homo sapiens
gagcaggagtgacaa

SEQ ID NO: 471865 - DNA, 15 bp, Homo sapiens
ggagcaggagtgaca

SEQ ID NO: 471866 - DNA, 15 bp, Homo sapiens
aggagcaggagtgac

SEQ ID NO: 471867 - DNA, 15 bp, Homo sapiens
gaggagcaggagtga

SEQ ID NO: 471868 - DNA, 15 bp, Homo sapiens
ggaggagcaggagtg

SEQ ID NO: 471869 - DNA, 15 bp, Homo sapiens
aggaggagcaggagt

SEQ ID NO: 471870 - DNA, 15 bp, Homo sapiens
caggaggagcaggag

SEQ ID NO: 471871 - DNA, 15 bp, Homo sapiens
tcaggaggagcagga

SEQ ID NO: 471872 - DNA, 15 bp, Homo sapiens
gtcaggaggagcagg

SEQ ID NO: 471873 - DNA, 15 bp, Homo sapiens
agtcaggaggagcag

SEQ ID NO: 471874 - DNA, 15 bp, Homo sapiens
aagtcaggaggagca

SEQ ID NO: 471875 - DNA, 15 bp, Homo sapiens
gaagtcaggaggagc

SEQ ID NO: 471876 - DNA, 15 bp, Homo sapiens
agaagtcaggaggag

SEQ ID NO: 471877 - DNA, 15 bp, Homo sapiens
gagaagtcaggagga

SEQ ID NO: 471878 - DNA, 15 bp, Homo sapiens
agagaagtcaggagg

SEQ ID NO: 471879 - DNA, 15 bp, Homo sapiens
tagagaagtcaggag

SEQ ID NO: 471880 - DNA, 15 bp, Homo sapiens
gtagagaagtcagga

SEQ ID NO: 471881 - DNA, 15 bp, Homo sapiens
tgtagagaagtcagg

SEQ ID NO: 471882 - DNA, 15 bp, Homo sapiens
ctgtagagaagtcag

SEQ ID NO: 471883 - DNA, 15 bp, Homo sapiens
tctgtagagaagtca

SEQ ID NO: 471884 - DNA, 15 bp, Homo sapiens
ctctgtagagaagtc

SEQ ID NO: 471885 - DNA, 15 bp, Homo sapiens
cctctgtagagaagt

SEQ ID NO: 471886 - DNA, 15 bp, Homo sapiens
acctctgtagagaag

SEQ ID NO: 471887 - DNA, 15 bp, Homo sapiens
aacctctgtagagaa

SEQ ID NO: 471888 - DNA, 15 bp, Homo sapiens
gaacctctgtagaga

SEQ ID NO: 471889 - DNA, 15 bp, Homo sapiens
agaacctctgtagag

SEQ ID NO: 471890 - DNA, 15 bp, Homo sapiens
aagaacctctgtaga

SEQ ID NO: 471891 - DNA, 15 bp, Homo sapiens
gaagaacctctgtag

SEQ ID NO: 471892 - DNA, 15 bp, Homo sapiens
agaagaacctctgta

SEQ ID NO: 471893 - DNA, 15 bp, Homo sapiens
aagaagaacctctgt

SEQ ID NO: 471894 - DNA, 15 bp, Homo sapiens
gaagaagaacctctg

SEQ ID NO: 471895 - DNA, 15 bp, Homo sapiens
agaagaagaacctct

SEQ ID NO: 471896 - DNA, 15 bp, Homo sapiens
gagaagaagaacctc

SEQ ID NO: 471897 - DNA, 15 bp, Homo sapiens
ggagaagaagaacct

SEQ ID NO: 471898 - DNA, 15 bp, Homo sapiens
gggagaagaagaacc

SEQ ID NO: 471899 - DNA, 15 bp, Homo sapiens
agggagaagaagaac

SEQ ID NO: 471900 - DNA, 15 bp, Homo sapiens
cagggagaagaagaa

SEQ ID NO: 471901 - DNA, 15 bp, Homo sapiens
gcagggagaagaaga

SEQ ID NO: 471902 - DNA, 15 bp, Homo sapiens
ggcagggagaagaag

SEQ ID NO: 471903 - DNA, 15 bp, Homo sapiens
gggcagggagaagaa

SEQ ID NO: 471904 - DNA, 15 bp, Homo sapiens
ggggcagggagaaga

SEQ ID NO: 471905 - DNA, 15 bp, Homo sapiens
aggggcagggagaag

SEQ ID NO: 471906 - DNA, 15 bp, Homo sapiens
taggggcagggagaa

SEQ ID NO: 471907 - DNA, 15 bp, Homo sapiens
ctaggggcagggaga

SEQ ID NO: 471908 - DNA, 15 bp, Homo sapiens
tctaggggcagggag

SEQ ID NO: 471909 - DNA, 15 bp, Homo sapiens
gtctaggggcaggga

SEQ ID NO: 471910 - DNA, 15 bp, Homo sapiens
ggtctaggggcaggg

SEQ ID NO: 471911 - DNA, 15 bp, Homo sapiens
gggtctaggggcagg

SEQ ID NO: 471912 - DNA, 15 bp, Homo sapiens
agggtctaggggcag

SEQ ID NO: 471913 - DNA, 15 bp, Homo sapiens
gagggtctaggggca

SEQ ID NO: 471914 - DNA, 15 bp, Homo sapiens
ggagggtctaggggc

SEQ ID NO: 471915 - DNA, 15 bp, Homo sapiens
aggagggtctagggg

SEQ ID NO: 471916 - DNA, 15 bp, Homo sapiens
gaggagggtctaggg

SEQ ID NO: 471917 - DNA, 15 bp, Homo sapiens
agaggagggtctagg

SEQ ID NO: 471918 - DNA, 15 bp, Homo sapiens
cagaggagggtctag

SEQ ID NO: 471919 - DNA, 15 bp, Homo sapiens
ccagaggagggtcta

SEQ ID NO: 471920 - DNA, 15 bp, Homo sapiens
tccagaggagggtct

SEQ ID NO: 471921 - DNA, 15 bp, Homo sapiens
ctccagaggagggtc

SEQ ID NO: 471922 - DNA, 15 bp, Homo sapiens
gctccagaggagggt

SEQ ID NO: 471923 - DNA, 15 bp, Homo sapiens
agctccagaggaggg

SEQ ID NO: 471924 - DNA, 15 bp, Homo sapiens
gagctccagaggagg

SEQ ID NO: 471925 - DNA, 15 bp, Homo sapiens
ggagctccagaggag

SEQ ID NO: 471926 - DNA, 15 bp, Homo sapiens
cggagctccagagga

SEQ ID NO: 471927 - DNA, 15 bp, Homo sapiens
tcggagctccagagg

SEQ ID NO: 471928 - DNA, 15 bp, Homo sapiens
ctcggagctccagag

SEQ ID NO: 471929 - DNA, 15 bp, Homo sapiens
cctcggagctccaga

SEQ ID NO: 471930 - DNA, 15 bp, Homo sapiens
acctcggagctccag

SEQ ID NO: 471931 - DNA, 15 bp, Homo sapiens
aacctcggagctcca

SEQ ID NO: 471932 - DNA, 15 bp, Homo sapiens
aaacctcggagctcc

SEQ ID NO: 471933 - DNA, 15 bp, Homo sapiens
caaacctcggagctc

SEQ ID NO: 471934 - DNA, 15 bp, Homo sapiens
tcaaacctcggagct

SEQ ID NO: 471935 - DNA, 15 bp, Homo sapiens
ctcaaacctcggagc

SEQ ID NO: 471936 - DNA, 15 bp, Homo sapiens
actcaaacctcggag

SEQ ID NO: 471937 - DNA, 15 bp, Homo sapiens
aactcaaacctcgga

SEQ ID NO: 471938 - DNA, 15 bp, Homo sapiens
taactcaaacctcgg

SEQ ID NO: 471939 - DNA, 15 bp, Homo sapiens
gtaactcaaacctcg

SEQ ID NO: 471940 - DNA, 15 bp, Homo sapiens
agtaactcaaacctc

SEQ ID NO: 471941 - DNA, 15 bp, Homo sapiens
cagtaactcaaacct

SEQ ID NO: 471942 - DNA, 15 bp, Homo sapiens
gcagtaactcaaacc

SEQ ID NO: 471943 - DNA, 15 bp, Homo sapiens
ggcagtaactcaaac

SEQ ID NO: 471944 - DNA, 15 bp, Homo sapiens
tggcagtaactcaaa

SEQ ID NO: 471945 - DNA, 15 bp, Homo sapiens
atggcagtaactcaa

SEQ ID NO: 471946 - DNA, 15 bp, Homo sapiens
catggcagtaactca

SEQ ID NO: 471947 - DNA, 15 bp, Homo sapiens
acatggcagtaactc

SEQ ID NO: 471948 - DNA, 15 bp, Homo sapiens
cacatggcagtaact

SEQ ID NO: 471949 - DNA, 15 bp, Homo sapiens
tcacatggcagtaac

SEQ ID NO: 471950 - DNA, 15 bp, Homo sapiens
ctcacatggcagtaa

SEQ ID NO: 471951 - DNA, 15 bp, Homo sapiens
actcacatggcagta

SEQ ID NO: 471952 - DNA, 15 bp, Homo sapiens
gactcacatggcagt

SEQ ID NO: 471953 - DNA, 15 bp, Homo sapiens
ggactcacatggcag

SEQ ID NO: 471954 - DNA, 15 bp, Homo sapiens
tggactcacatggca

SEQ ID NO: 471955 - DNA, 15 bp, Homo sapiens
ctggactcacatggc

SEQ ID NO: 471956 - DNA, 15 bp, Homo sapiens
tctggactcacatgg

SEQ ID NO: 471957 - DNA, 15 bp, Homo sapiens
gtctggactcacatg

SEQ ID NO: 471958 - DNA, 15 bp, Homo sapiens
ggtctggactcacat

SEQ ID NO: 471959 - DNA, 15 bp, Homo sapiens
aggtctggactcaca

SEQ ID NO: 471960 - DNA, 15 bp, Homo sapiens
taggtctggactcac

SEQ ID NO: 471961 - DNA, 15 bp, Homo sapiens
ttaggtctggactca

SEQ ID NO: 471962 - DNA, 15 bp, Homo sapiens
cttaggtctggactc

SEQ ID NO: 471963 - DNA, 15 bp, Homo sapiens
tcttaggtctggact

SEQ ID NO: 471964 - DNA, 15 bp, Homo sapiens
ctcttaggtctggac

SEQ ID NO: 471965 - DNA, 15 bp, Homo sapiens
gctcttaggtctgga

SEQ ID NO: 471966 - DNA, 15 bp, Homo sapiens
tgctcttaggtctgg

SEQ ID NO: 471967 - DNA, 15 bp, Homo sapiens
ttgctcttaggtctg

SEQ ID NO: 471968 - DNA, 15 bp, Homo sapiens
tttgctcttaggtct

SEQ ID NO: 471969 - DNA, 15 bp, Homo sapiens
ttttgctcttaggtc

SEQ ID NO: 471970 - DNA, 15 bp, Homo sapiens
attttgctcttaggt

SEQ ID NO: 471971 - DNA, 15 bp, Homo sapiens
tattttgctcttagg

SEQ ID NO: 471972 - DNA, 15 bp, Homo sapiens
ctattttgctcttag

SEQ ID NO: 471973 - DNA, 15 bp, Homo sapiens
actattttgctctta

SEQ ID NO: 471974 - DNA, 15 bp, Homo sapiens
cactattttgctctt

SEQ ID NO: 471975 - DNA, 15 bp, Homo sapiens
acactattttgctct

SEQ ID NO: 471976 - DNA, 15 bp, Homo sapiens
tacactattttgctc

SEQ ID NO: 471977 - DNA, 15 bp, Homo sapiens
ttacactattttgct

SEQ ID NO: 471978 - DNA, 15 bp, Homo sapiens
attacactattttgc

SEQ ID NO: 471979 - DNA, 15 bp, Homo sapiens
aattacactattttg

SEQ ID NO: 471980 - DNA, 15 bp, Homo sapiens
taattacactatttt

SEQ ID NO: 471981 - DNA, 15 bp, Homo sapiens
gtaattacactattt

SEQ ID NO: 471982 - DNA, 15 bp, Homo sapiens
ggtaattacactatt

SEQ ID NO: 471983 - DNA, 15 bp, Homo sapiens
tggtaattacactat

SEQ ID NO: 471984 - DNA, 15 bp, Homo sapiens
ttggtaattacacta

SEQ ID NO: 471985 - DNA, 15 bp, Homo sapiens
tttggtaattacact

SEQ ID NO: 471986 - DNA, 15 bp, Homo sapiens
atttggtaattacac

SEQ ID NO: 471987 - DNA, 15 bp, Homo sapiens
aatttggtaattaca

SEQ ID NO: 471988 - DNA, 15 bp, Homo sapiens
gaatttggtaattac

SEQ ID NO: 471989 - DNA, 15 bp, Homo sapiens
ggaatttggtaatta

SEQ ID NO: 471990 - DNA, 15 bp, Homo sapiens
aggaatttggtaatt

SEQ ID NO: 471991 - DNA, 15 bp, Homo sapiens
gaggaatttggtaat

SEQ ID NO: 471992 - DNA, 15 bp, Homo sapiens
ggaggaatttggtaa

SEQ ID NO: 471993 - DNA, 15 bp, Homo sapiens
tggaggaatttggta

SEQ ID NO: 471994 - DNA, 15 bp, Homo sapiens
ctggaggaatttggt

SEQ ID NO: 471995 - DNA, 15 bp, Homo sapiens
cctggaggaatttgg

SEQ ID NO: 471996 - DNA, 15 bp, Homo sapiens
tcctggaggaatttg

SEQ ID NO: 471997 - DNA, 15 bp, Homo sapiens
gtcctggaggaattt

SEQ ID NO: 471998 - DNA, 15 bp, Homo sapiens
tgtcctggaggaatt

SEQ ID NO: 471999 - DNA, 15 bp, Homo sapiens
ttgtcctggaggaat

SEQ ID NO: 472000 - DNA, 15 bp, Homo sapiens
tttgtcctggaggaa

SEQ ID NO: 472001 - DNA, 15 bp, Homo sapiens
ctttgtcctggagga

SEQ ID NO: 472002 - DNA, 15 bp, Homo sapiens
tctttgtcctggagg

SEQ ID NO: 472003 - DNA, 15 bp, Homo sapiens
gtctttgtcctggag

SEQ ID NO: 472004 - DNA, 15 bp, Homo sapiens
cgtctttgtcctgga

SEQ ID NO: 472005 - DNA, 15 bp, Homo sapiens
gcgtctttgtcctgg

SEQ ID NO: 472006 - DNA, 15 bp, Homo sapiens
ggcgtctttgtcctg

SEQ ID NO: 472007 - DNA, 15 bp, Homo sapiens
aggcgtctttgtcct

SEQ ID NO: 472008 - DNA, 15 bp, Homo sapiens
gaggcgtctttgtcc

SEQ ID NO: 472009 - DNA, 15 bp, Homo sapiens
cgaggcgtctttgtc

SEQ ID NO: 472010 - DNA, 15 bp, Homo sapiens
tcgaggcgtctttgt

SEQ ID NO: 472011 - DNA, 15 bp, Homo sapiens
ttcgaggcgtctttg

SEQ ID NO: 472012 - DNA, 15 bp, Homo sapiens
gttcgaggcgtcttt

SEQ ID NO: 472013 - DNA, 15 bp, Homo sapiens
agttcgaggcgtctt

SEQ ID NO: 472014 - DNA, 15 bp, Homo sapiens
cagttcgaggcgtct

SEQ ID NO: 472015 - DNA, 15 bp, Homo sapiens
acagttcgaggcgtc

SEQ ID NO: 472016 - DNA, 15 bp, Homo sapiens
tacagttcgaggcgt

SEQ ID NO: 472017 - DNA, 15 bp, Homo sapiens
atacagttcgaggcg

SEQ ID NO: 472018 - DNA, 15 bp, Homo sapiens
aatacagttcgaggc

SEQ ID NO: 472019 - DNA, 15 bp, Homo sapiens
caatacagttcgagg

SEQ ID NO: 472020 - DNA, 15 bp, Homo sapiens
gcaatacagttcgag

SEQ ID NO: 472021 - DNA, 15 bp, Homo sapiens
tgcaatacagttcga

SEQ ID NO: 472022 - DNA, 15 bp, Homo sapiens
gtgcaatacagttcg

SEQ ID NO: 472023 - DNA, 15 bp, Homo sapiens
agtgcaatacagttc

SEQ ID NO: 472024 - DNA, 15 bp, Homo sapiens
aagtgcaatacagtt

SEQ ID NO: 472025 - DNA, 15 bp, Homo sapiens
aaagtgcaatacagt

SEQ ID NO: 472026 - DNA, 15 bp, Homo sapiens
aaaagtgcaatacag

SEQ ID NO: 472027 - DNA, 15 bp, Homo sapiens
aaaaagtgcaataca

SEQ ID NO: 472028 - DNA, 15 bp, Homo sapiens
taaaaagtgcaatac

SEQ ID NO: 472029 - DNA, 15 bp, Homo sapiens
ttaaaaagtgcaata

SEQ ID NO: 472030 - DNA, 15 bp, Homo sapiens
attaaaaagtgcaat

SEQ ID NO: 472031 - DNA, 15 bp, Homo sapiens
cattaaaaagtgcaa

SEQ ID NO: 472032 - DNA, 15 bp, Homo sapiens
acattaaaaagtgca

SEQ ID NO: 472033 - DNA, 15 bp, Homo sapiens
cacattaaaaagtgc

SEQ ID NO: 472034 - DNA, 15 bp, Homo sapiens
tcacattaaaaagtg

SEQ ID NO: 472035 - DNA, 15 bp, Homo sapiens
atcacattaaaaagt

SEQ ID NO: 472036 - DNA, 15 bp, Homo sapiens
aatcacattaaaaag

SEQ ID NO: 472037 - DNA, 15 bp, Homo sapiens
gaatcacattaaaaa

SEQ ID NO: 472038 - DNA, 15 bp, Homo sapiens
tgaatcacattaaaa

SEQ ID NO: 472039 - DNA, 15 bp, Homo sapiens
ctgaatcacattaaa

SEQ ID NO: 472040 - DNA, 15 bp, Homo sapiens
gctgaatcacattaa

SEQ ID NO: 472041 - DNA, 15 bp, Homo sapiens
agctgaatcacatta

SEQ ID NO: 472042 - DNA, 15 bp, Homo sapiens
gagctgaatcacatt

SEQ ID NO: 472043 - DNA, 15 bp, Homo sapiens
agagctgaatcacat

SEQ ID NO: 472044 - DNA, 15 bp, Homo sapiens
tagagctgaatcaca

SEQ ID NO: 472045 - DNA, 15 bp, Homo sapiens
atagagctgaatcac

SEQ ID NO: 472046 - DNA, 15 bp, Homo sapiens
catagagctgaatca

SEQ ID NO: 472047 - DNA, 15 bp, Homo sapiens
tcatagagctgaatc

SEQ ID NO: 472048 - DNA, 15 bp, Homo sapiens
ttcatagagctgaat

SEQ ID NO: 472049 - DNA, 15 bp, Homo sapiens
tttcatagagctgaa

SEQ ID NO: 472050 - DNA, 15 bp, Homo sapiens
ttttcatagagctga

SEQ ID NO: 472051 - DNA, 15 bp, Homo sapiens
gttttcatagagctg

SEQ ID NO: 472052 - DNA, 15 bp, Homo sapiens
ggttttcatagagct

SEQ ID NO: 472053 - DNA, 15 bp, Homo sapiens
aggttttcatagagc

SEQ ID NO: 472054 - DNA, 15 bp, Homo sapiens
caggttttcatagag

SEQ ID NO: 472055 - DNA, 15 bp, Homo sapiens
gcaggttttcataga

SEQ ID NO: 472056 - DNA, 15 bp, Homo sapiens
tgcaggttttcatag

SEQ ID NO: 472057 - DNA, 15 bp, Homo sapiens
ttgcaggttttcata

SEQ ID NO: 472058 - DNA, 15 bp, Homo sapiens
cttgcaggttttcat

SEQ ID NO: 472059 - DNA, 15 bp, Homo sapiens
tcttgcaggttttca

SEQ ID NO: 472060 - DNA, 15 bp, Homo sapiens
ctcttgcaggttttc

SEQ ID NO: 472061 - DNA, 15 bp, Homo sapiens
tctcttgcaggtttt

SEQ ID NO: 472062 - DNA, 15 bp, Homo sapiens
ctctcttgcaggttt

SEQ ID NO: 472063 - DNA, 15 bp, Homo sapiens
cctctcttgcaggtt

SEQ ID NO: 472064 - DNA, 15 bp, Homo sapiens
ccctctcttgcaggt

SEQ ID NO: 472065 - DNA, 15 bp, Homo sapiens
tccctctcttgcagg

SEQ ID NO: 472066 - DNA, 15 bp, Homo sapiens
ctccctctcttgcag

SEQ ID NO: 472067 - DNA, 15 bp, Homo sapiens
cctccctctcttgca

SEQ ID NO: 472068 - DNA, 15 bp, Homo sapiens
ccctccctctcttgc

SEQ ID NO: 472069 - DNA, 15 bp, Homo sapiens
tccctccctctcttg

SEQ ID NO: 472070 - DNA, 15 bp, Homo sapiens
ctccctccctctctt

SEQ ID NO: 472071 - DNA, 15 bp, Homo sapiens
cctccctccctctct

SEQ ID NO: 472072 - DNA, 15 bp, Homo sapiens
gcctccctccctctc

SEQ ID NO: 472073 - DNA, 15 bp, Homo sapiens
ggcctccctccctct

SEQ ID NO: 472074 - DNA, 15 bp, Homo sapiens
cggcctccctccctc

SEQ ID NO: 472075 - DNA, 15 bp, Homo sapiens
ccggcctccctccct

SEQ ID NO: 472076 - DNA, 15 bp, Homo sapiens
cccggcctccctccc

SEQ ID NO: 472077 - DNA, 15 bp, Homo sapiens
ccccggcctccctcc

SEQ ID NO: 472078 - DNA, 15 bp, Homo sapiens
accccggcctccctc

SEQ ID NO: 472079 - DNA, 15 bp, Homo sapiens
taccccggcctccct

SEQ ID NO: 472080 - DNA, 15 bp, Homo sapiens
ttaccccggcctccc

SEQ ID NO: 472081 - DNA, 15 bp, Homo sapiens
cttaccccggcctcc

SEQ ID NO: 472082 - DNA, 15 bp, Homo sapiens
ccttaccccggcctc

SEQ ID NO: 472083 - DNA, 15 bp, Homo sapiens
gccttaccccggcct

SEQ ID NO: 472084 - DNA, 15 bp, Homo sapiens
ggccttaccccggcc

SEQ ID NO: 472085 - DNA, 15 bp, Homo sapiens
gggccttaccccggc

SEQ ID NO: 472086 - DNA, 15 bp, Homo sapiens
tgggccttaccccgg

SEQ ID NO: 472087 - DNA, 15 bp, Homo sapiens
gtgggccttaccccg

SEQ ID NO: 472088 - DNA, 15 bp, Homo sapiens
tgtgggccttacccc

SEQ ID NO: 472089 - DNA, 15 bp, Homo sapiens
ctgtgggccttaccc

SEQ ID NO: 472090 - DNA, 15 bp, Homo sapiens
cctgtgggccttacc

SEQ ID NO: 472091 - DNA, 15 bp, Homo sapiens
gcctgtgggccttac

SEQ ID NO: 472092 - DNA, 15 bp, Homo sapiens
agcctgtgggcctta

SEQ ID NO: 472093 - DNA, 15 bp, Homo sapiens
gagcctgtgggcctt

SEQ ID NO: 472094 - DNA, 15 bp, Homo sapiens
ggagcctgtgggcct

SEQ ID NO: 472095 - DNA, 15 bp, Homo sapiens
tggagcctgtgggcc

SEQ ID NO: 472096 - DNA, 15 bp, Homo sapiens
gtggagcctgtgggc

SEQ ID NO: 472097 - DNA, 15 bp, Homo sapiens
ggtggagcctgtggg

SEQ ID NO: 472098 - DNA, 15 bp, Homo sapiens
gggtggagcctgtgg

SEQ ID NO: 472099 - DNA, 15 bp, Homo sapiens
ggggtggagcctgtg

SEQ ID NO: 472100 - DNA, 15 bp, Homo sapiens
aggggtggagcctgt

SEQ ID NO: 472101 - DNA, 15 bp, Homo sapiens
caggggtggagcctg

SEQ ID NO: 472102 - DNA, 15 bp, Homo sapiens
gcaggggtggagcct

SEQ ID NO: 472103 - DNA, 15 bp, Homo sapiens
ggcaggggtggagcc

SEQ ID NO: 472104 - DNA, 15 bp, Homo sapiens
gggcaggggtggagc

SEQ ID NO: 472105 - DNA, 15 bp, Homo sapiens
ggggcaggggtggag

SEQ ID NO: 472106 - DNA, 15 bp, Homo sapiens
tggggcaggggtgga

SEQ ID NO: 472107 - DNA, 15 bp, Homo sapiens
gtggggcaggggtgg

SEQ ID NO: 472108 - DNA, 15 bp, Homo sapiens
tgtggggcaggggtg

SEQ ID NO: 472109 - DNA, 15 bp, Homo sapiens
gtgtggggcaggggt

SEQ ID NO: 472110 - DNA, 15 bp, Homo sapiens
tgtgtggggcagggg

SEQ ID NO: 472111 - DNA, 15 bp, Homo sapiens
ctgtgtggggcaggg

SEQ ID NO: 472112 - DNA, 15 bp, Homo sapiens
gctgtgtggggcagg

SEQ ID NO: 472113 - DNA, 15 bp, Homo sapiens
tgctgtgtggggcag

SEQ ID NO: 472114 - DNA, 15 bp, Homo sapiens
gtgctgtgtggggca

SEQ ID NO: 472115 - DNA, 15 bp, Homo sapiens
tgtgctgtgtggggc

SEQ ID NO: 472116 - DNA, 15 bp, Homo sapiens
gtgtgctgtgtgggg

SEQ ID NO: 472117 - DNA, 15 bp, Homo sapiens
agtgtgctgtgtggg

SEQ ID NO: 472118 - DNA, 15 bp, Homo sapiens
gagtgtgctgtgtgg

SEQ ID NO: 472119 - DNA, 15 bp, Homo sapiens
agagtgtgctgtgtg

SEQ ID NO: 472120 - DNA, 15 bp, Homo sapiens
gagagtgtgctgtgt

SEQ ID NO: 472121 - DNA, 15 bp, Homo sapiens
ggagagtgtgctgtg

SEQ ID NO: 472122 - DNA, 15 bp, Homo sapiens
gggagagtgtgctgt

SEQ ID NO: 472123 - DNA, 15 bp, Homo sapiens
tgggagagtgtgctg

SEQ ID NO: 472124 - DNA, 15 bp, Homo sapiens
ctgggagagtgtgct

SEQ ID NO: 472125 - DNA, 15 bp, Homo sapiens
gctgggagagtgtgc

SEQ ID NO: 472126 - DNA, 15 bp, Homo sapiens
agctgggagagtgtg

SEQ ID NO: 472127 - DNA, 15 bp, Homo sapiens
tagctgggagagtgt

SEQ ID NO: 472128 - DNA, 15 bp, Homo sapiens
gtagctgggagagtg

SEQ ID NO: 472129 - DNA, 15 bp, Homo sapiens
tgtagctgggagagt

SEQ ID NO: 472130 - DNA, 15 bp, Homo sapiens
ctgtagctgggagag

SEQ ID NO: 472131 - DNA, 15 bp, Homo sapiens
gctgtagctgggaga

SEQ ID NO: 472132 - DNA, 15 bp, Homo sapiens
ggctgtagctgggag

SEQ ID NO: 472133 - DNA, 15 bp, Homo sapiens
gggctgtagctggga

SEQ ID NO: 472134 - DNA, 15 bp, Homo sapiens
ggggctgtagctggg

SEQ ID NO: 472135 - DNA, 15 bp, Homo sapiens
tggggctgtagctgg

SEQ ID NO: 472136 - DNA, 15 bp, Homo sapiens
gtggggctgtagctg

SEQ ID NO: 472137 - DNA, 15 bp, Homo sapiens
ggtggggctgtagct

SEQ ID NO: 472138 - DNA, 15 bp, Homo sapiens
gggtggggctgtagc

SEQ ID NO: 472139 - DNA, 15 bp, Homo sapiens
tgggtggggctgtag

SEQ ID NO: 472140 - DNA, 15 bp, Homo sapiens
gtgggtggggctgta

SEQ ID NO: 472141 - DNA, 15 bp, Homo sapiens
tgtgggtggggctgt

SEQ ID NO: 472142 - DNA, 15 bp, Homo sapiens
gtgtgggtggggctg

SEQ ID NO: 472143 - DNA, 15 bp, Homo sapiens
tgtgtgggtggggct

SEQ ID NO: 472144 - DNA, 15 bp, Homo sapiens
ttgtgtgggtggggc

SEQ ID NO: 472145 - DNA, 15 bp, Homo sapiens
tttgtgtgggtgggg

SEQ ID NO: 472146 - DNA, 15 bp, Homo sapiens
ctttgtgtgggtggg

SEQ ID NO: 472147 - DNA, 15 bp, Homo sapiens
tctttgtgtgggtgg

SEQ ID NO: 472148 - DNA, 15 bp, Homo sapiens
ttctttgtgtgggtg

SEQ ID NO: 472149 - DNA, 15 bp, Homo sapiens
tttctttgtgtgggt

SEQ ID NO: 472150 - DNA, 15 bp, Homo sapiens
ctttctttgtgtggg

SEQ ID NO: 472151 - DNA, 15 bp, Homo sapiens
actttctttgtgtgg

SEQ ID NO: 472152 - DNA, 15 bp, Homo sapiens
gactttctttgtgtg

SEQ ID NO: 472153 - DNA, 15 bp, Homo sapiens
agactttctttgtgt

SEQ ID NO: 472154 - DNA, 15 bp, Homo sapiens
tagactttctttgtg

SEQ ID NO: 472155 - DNA, 15 bp, Homo sapiens
atagactttctttgt

SEQ ID NO: 472156 - DNA, 15 bp, Homo sapiens
aatagactttctttg

SEQ ID NO: 472157 - DNA, 15 bp, Homo sapiens
aaatagactttcttt

SEQ ID NO: 472158 - DNA, 15 bp, Homo sapiens
gaaatagactttctt

SEQ ID NO: 472159 - DNA, 15 bp, Homo sapiens
ggaaatagactttct

SEQ ID NO: 472160 - DNA, 15 bp, Homo sapiens
gggaaatagactttc

SEQ ID NO: 472161 - DNA, 15 bp, Homo sapiens
tgggaaatagacttt

SEQ ID NO: 472162 - DNA, 15 bp, Homo sapiens
ttgggaaatagactt

SEQ ID NO: 472163 - DNA, 15 bp, Homo sapiens
tttgggaaatagact

SEQ ID NO: 472164 - DNA, 15 bp, Homo sapiens
ctttgggaaatagac

SEQ ID NO: 472165 - DNA, 15 bp, Homo sapiens
tctttgggaaataga

SEQ ID NO: 472166 - DNA, 15 bp, Homo sapiens
ctctttgggaaatag

SEQ ID NO: 472167 - DNA, 15 bp, Homo sapiens
tctctttgggaaata

SEQ ID NO: 472168 - DNA, 15 bp, Homo sapiens
ctctctttgggaaat

SEQ ID NO: 472169 - DNA, 15 bp, Homo sapiens
cctctctttgggaaa

SEQ ID NO: 472170 - DNA, 15 bp, Homo sapiens
tcctctctttgggaa

SEQ ID NO: 472171 - DNA, 15 bp, Homo sapiens
gtcctctctttggga

SEQ ID NO: 472172 - DNA, 15 bp, Homo sapiens
tgtcctctctttggg

SEQ ID NO: 472173 - DNA, 15 bp, Homo sapiens
ctgtcctctctttgg

SEQ ID NO: 472174 - DNA, 15 bp, Homo sapiens
tctgtcctctctttg

SEQ ID NO: 472175 - DNA, 15 bp, Homo sapiens
ttctgtcctctcttt

SEQ ID NO: 472176 - DNA, 15 bp, Homo sapiens
cttctgtcctctctt

SEQ ID NO: 472177 - DNA, 15 bp, Homo sapiens
tcttctgtcctctct

SEQ ID NO: 472178 - DNA, 15 bp, Homo sapiens
ttcttctgtcctctc

SEQ ID NO: 472179 - DNA, 15 bp, Homo sapiens
attcttctgtcctct

SEQ ID NO: 472180 - DNA, 15 bp, Homo sapiens
gattcttctgtcctc

SEQ ID NO: 472181 - DNA, 15 bp, Homo sapiens
ggattcttctgtcct

SEQ ID NO: 472182 - DNA, 15 bp, Homo sapiens
tggattcttctgtcc

SEQ ID NO: 472183 - DNA, 15 bp, Homo sapiens
gtggattcttctgtc

SEQ ID NO: 472184 - DNA, 15 bp, Homo sapiens
tgtggattcttctgt

SEQ ID NO: 472185 - DNA, 15 bp, Homo sapiens
gtgtggattcttctg

SEQ ID NO: 472186 - DNA, 15 bp, Homo sapiens
cgtgtggattcttct

SEQ ID NO: 472187 - DNA, 15 bp, Homo sapiens
gcgtgtggattcttc

SEQ ID NO: 472188 - DNA, 15 bp, Homo sapiens
tgcgtgtggattctt

SEQ ID NO: 472189 - DNA, 15 bp, Homo sapiens
gtgcgtgtggattct

SEQ ID NO: 472190 - DNA, 15 bp, Homo sapiens
tgtgcgtgtggattc

SEQ ID NO: 472191 - DNA, 15 bp, Homo sapiens
gtgtgcgtgtggatt

SEQ ID NO: 472192 - DNA, 15 bp, Homo sapiens
tgtgtgcgtgtggat

SEQ ID NO: 472193 - DNA, 15 bp, Homo sapiens
ttgtgtgcgtgtgga

SEQ ID NO: 472194 - DNA, 15 bp, Homo sapiens
gttgtgtgcgtgtgg

SEQ ID NO: 472195 - DNA, 15 bp, Homo sapiens
agttgtgtgcgtgtg

SEQ ID NO: 472196 - DNA, 15 bp, Homo sapiens
gagttgtgtgcgtgt

SEQ ID NO: 472197 - DNA, 15 bp, Homo sapiens
tgagttgtgtgcgtg

SEQ ID NO: 472198 - DNA, 15 bp, Homo sapiens
ttgagttgtgtgcgt

SEQ ID NO: 472199 - DNA, 15 bp, Homo sapiens
tttgagttgtgtgcg

SEQ ID NO: 472200 - DNA, 15 bp, Homo sapiens
ttttgagttgtgtgc

SEQ ID NO: 472201 - DNA, 15 bp, Homo sapiens
cttttgagttgtgtg

SEQ ID NO: 472202 - DNA, 15 bp, Homo sapiens
gcttttgagttgtgt

SEQ ID NO: 472203 - DNA, 15 bp, Homo sapiens
cgcttttgagttgtg

SEQ ID NO: 472204 - DNA, 15 bp, Homo sapiens
gcgcttttgagttgt

SEQ ID NO: 472205 - DNA, 15 bp, Homo sapiens
agcgcttttgagttg

SEQ ID NO: 472206 - DNA, 15 bp, Homo sapiens
tagcgcttttgagtt

SEQ ID NO: 472207 - DNA, 15 bp, Homo sapiens
ttagcgcttttgagt

SEQ ID NO: 472208 - DNA, 15 bp, Homo sapiens
cttagcgcttttgag

SEQ ID NO: 472209 - DNA, 15 bp, Homo sapiens
tcttagcgcttttga

SEQ ID NO: 472210 - DNA, 15 bp, Homo sapiens
ttcttagcgcttttg

SEQ ID NO: 472211 - DNA, 15 bp, Homo sapiens
cttcttagcgctttt

SEQ ID NO: 472212 - DNA, 15 bp, Homo sapiens
gcttcttagcgcttt

SEQ ID NO: 472213 - DNA, 15 bp, Homo sapiens
cgcttcttagcgctt

SEQ ID NO: 472214 - DNA, 15 bp, Homo sapiens
tcgcttcttagcgct

SEQ ID NO: 472215 - DNA, 15 bp, Homo sapiens
ttcgcttcttagcgc

SEQ ID NO: 472216 - DNA, 15 bp, Homo sapiens
cttcgcttcttagcg

SEQ ID NO: 472217 - DNA, 15 bp, Homo sapiens
tcttcgcttcttagc

SEQ ID NO: 472218 - DNA, 15 bp, Homo sapiens
atcttcgcttcttag

SEQ ID NO: 472219 - DNA, 15 bp, Homo sapiens
tatcttcgcttctta

SEQ ID NO: 472220 - DNA, 15 bp, Homo sapiens
ctatcttcgcttctt

SEQ ID NO: 472221 - DNA, 15 bp, Homo sapiens
gctatcttcgcttct

SEQ ID NO: 472222 - DNA, 15 bp, Homo sapiens
tgctatcttcgcttc

SEQ ID NO: 472223 - DNA, 15 bp, Homo sapiens
ctgctatcttcgctt

SEQ ID NO: 472224 - DNA, 15 bp, Homo sapiens
tctgctatcttcgct

SEQ ID NO: 472225 - DNA, 15 bp, Homo sapiens
ttctgctatcttcgc

SEQ ID NO: 472226 - DNA, 15 bp, Homo sapiens
tttctgctatcttcg

SEQ ID NO: 472227 - DNA, 15 bp, Homo sapiens
ctttctgctatcttc

SEQ ID NO: 472228 - DNA, 15 bp, Homo sapiens
cctttctgctatctt

SEQ ID NO: 472229 - DNA, 15 bp, Homo sapiens
ccctttctgctatct

SEQ ID NO: 472230 - DNA, 15 bp, Homo sapiens
gccctttctgctatc

SEQ ID NO: 472231 - DNA, 15 bp, Homo sapiens
tgccctttctgctat

SEQ ID NO: 472232 - DNA, 15 bp, Homo sapiens
atgccctttctgcta

SEQ ID NO: 472233 - DNA, 15 bp, Homo sapiens
catgccctttctgct

SEQ ID NO: 472234 - DNA, 15 bp, Homo sapiens
acatgccctttctgc

SEQ ID NO: 472235 - DNA, 15 bp, Homo sapiens
tacatgccctttctg

SEQ ID NO: 472236 - DNA, 15 bp, Homo sapiens
gtacatgccctttct

SEQ ID NO: 472237 - DNA, 15 bp, Homo sapiens
ggtacatgccctttc

SEQ ID NO: 472238 - DNA, 15 bp, Homo sapiens
aggtacatgcccttt

SEQ ID NO: 472239 - DNA, 15 bp, Homo sapiens
aaggtacatgccctt

SEQ ID NO: 472240 - DNA, 15 bp, Homo sapiens
gaaggtacatgccct

SEQ ID NO: 472241 - DNA, 15 bp, Homo sapiens
ggaaggtacatgccc

SEQ ID NO: 472242 - DNA, 15 bp, Homo sapiens
cggaaggtacatgcc

SEQ ID NO: 472243 - DNA, 15 bp, Homo sapiens
gcggaaggtacatgc

SEQ ID NO: 472244 - DNA, 15 bp, Homo sapiens
agcggaaggtacatg

SEQ ID NO: 472245 - DNA, 15 bp, Homo sapiens
gagcggaaggtacat

SEQ ID NO: 472246 - DNA, 15 bp, Homo sapiens
ggagcggaaggtaca

SEQ ID NO: 472247 - DNA, 15 bp, Homo sapiens
aggagcggaaggtac

SEQ ID NO: 472248 - DNA, 15 bp, Homo sapiens
caggagcggaaggta

SEQ ID NO: 472249 - DNA, 15 bp, Homo sapiens
ccaggagcggaaggt

SEQ ID NO: 472250 - DNA, 15 bp, Homo sapiens
gccaggagcggaagg

SEQ ID NO: 472251 - DNA, 15 bp, Homo sapiens
ggccaggagcggaag

SEQ ID NO: 472252 - DNA, 15 bp, Homo sapiens
cggccaggagcggaa

SEQ ID NO: 472253 - DNA, 15 bp, Homo sapiens
ccggccaggagcgga

SEQ ID NO: 472254 - DNA, 15 bp, Homo sapiens
tccggccaggagcgg

SEQ ID NO: 472255 - DNA, 15 bp, Homo sapiens
ctccggccaggagcg

SEQ ID NO: 472256 - DNA, 15 bp, Homo sapiens
cctccggccaggagc

SEQ ID NO: 472257 - DNA, 15 bp, Homo sapiens
tcctccggccaggag

SEQ ID NO: 472258 - DNA, 15 bp, Homo sapiens
ctcctccggccagga

SEQ ID NO: 472259 - DNA, 15 bp, Homo sapiens
tctcctccggccagg

SEQ ID NO: 472260 - DNA, 15 bp, Homo sapiens
ttctcctccggccag

SEQ ID NO: 472261 - DNA, 15 bp, Homo sapiens
tttctcctccggcca

SEQ ID NO: 472262 - DNA, 15 bp, Homo sapiens
ctttctcctccggcc

SEQ ID NO: 472263 - DNA, 15 bp, Homo sapiens
gctttctcctccggc

SEQ ID NO: 472264 - DNA, 15 bp, Homo sapiens
tgctttctcctccgg

SEQ ID NO: 472265 - DNA, 15 bp, Homo sapiens
atgctttctcctccg

SEQ ID NO: 472266 - DNA, 15 bp, Homo sapiens
catgctttctcctcc

SEQ ID NO: 472267 - DNA, 15 bp, Homo sapiens
ccatgctttctcctc

SEQ ID NO: 472268 - DNA, 15 bp, Homo sapiens
cccatgctttctcct

SEQ ID NO: 472269 - DNA, 15 bp, Homo sapiens
tcccatgctttctcc

SEQ ID NO: 472270 - DNA, 15 bp, Homo sapiens
ctcccatgctttctc

SEQ ID NO: 472271 - DNA, 15 bp, Homo sapiens
tctcccatgctttct

SEQ ID NO: 472272 - DNA, 15 bp, Homo sapiens
ctctcccatgctttc

SEQ ID NO: 472273 - DNA, 15 bp, Homo sapiens
tctctcccatgcttt

SEQ ID NO: 472274 - DNA, 15 bp, Homo sapiens
ttctctcccatgctt

SEQ ID NO: 472275 - DNA, 15 bp, Homo sapiens
tttctctcccatgct

SEQ ID NO: 472276 - DNA, 15 bp, Homo sapiens
atttctctcccatgc

SEQ ID NO: 472277 - DNA, 15 bp, Homo sapiens
catttctctcccatg

SEQ ID NO: 472278 - DNA, 15 bp, Homo sapiens
tcatttctctcccat

SEQ ID NO: 472279 - DNA, 15 bp, Homo sapiens
ttcatttctctccca

SEQ ID NO: 472280 - DNA, 15 bp, Homo sapiens
cttcatttctctccc

SEQ ID NO: 472281 - DNA, 15 bp, Homo sapiens
ccttcatttctctcc

SEQ ID NO: 472282 - DNA, 15 bp, Homo sapiens
gccttcatttctctc

SEQ ID NO: 472283 - DNA, 15 bp, Homo sapiens
cgccttcatttctct

SEQ ID NO: 472284 - DNA, 15 bp, Homo sapiens
acgccttcatttctc

SEQ ID NO: 472285 - DNA, 15 bp, Homo sapiens
aacgccttcatttct

SEQ ID NO: 472286 - DNA, 15 bp, Homo sapiens
taacgccttcatttc

SEQ ID NO: 472287 - DNA, 15 bp, Homo sapiens
ctaacgccttcattt

SEQ ID NO: 472288 - DNA, 15 bp, Homo sapiens
actaacgccttcatt

SEQ ID NO: 472289 - DNA, 15 bp, Homo sapiens
aactaacgccttcat

SEQ ID NO: 472290 - DNA, 15 bp, Homo sapiens
aaactaacgccttca

SEQ ID NO: 472291 - DNA, 15 bp, Homo sapiens
caaactaacgccttc

SEQ ID NO: 472292 - DNA, 15 bp, Homo sapiens
tcaaactaacgcctt

SEQ ID NO: 472293 - DNA, 15 bp, Homo sapiens
ttcaaactaacgcct

SEQ ID NO: 472294 - DNA, 15 bp, Homo sapiens
attcaaactaacgcc

SEQ ID NO: 472295 - DNA, 15 bp, Homo sapiens
cattcaaactaacgc

SEQ ID NO: 472296 - DNA, 15 bp, Homo sapiens
ccattcaaactaacg

SEQ ID NO: 472297 - DNA, 15 bp, Homo sapiens
accattcaaactaac

SEQ ID NO: 472298 - DNA, 15 bp, Homo sapiens
gaccattcaaactaa

SEQ ID NO: 472299 - DNA, 15 bp, Homo sapiens
tgaccattcaaacta

SEQ ID NO: 472300 - DNA, 15 bp, Homo sapiens
ttgaccattcaaact

SEQ ID NO: 472301 - DNA, 15 bp, Homo sapiens
tttgaccattcaaac

SEQ ID NO: 472302 - DNA, 15 bp, Homo sapiens
gtttgaccattcaaa

SEQ ID NO: 472303 - DNA, 15 bp, Homo sapiens
ggtttgaccattcaa

SEQ ID NO: 472304 - DNA, 15 bp, Homo sapiens
gggtttgaccattca

SEQ ID NO: 472305 - DNA, 15 bp, Homo sapiens
tgggtttgaccattc

SEQ ID NO: 472306 - DNA, 15 bp, Homo sapiens
ttgggtttgaccatt

SEQ ID NO: 472307 - DNA, 15 bp, Homo sapiens
gttgggtttgaccat

SEQ ID NO: 472308 - DNA, 15 bp, Homo sapiens
ggttgggtttgacca

SEQ ID NO: 472309 - DNA, 15 bp, Homo sapiens
gggttgggtttgacc

SEQ ID NO: 472310 - DNA, 15 bp, Homo sapiens
cgggttgggtttgac

SEQ ID NO: 472311 - DNA, 15 bp, Homo sapiens
tcgggttgggtttga

SEQ ID NO: 472312 - DNA, 15 bp, Homo sapiens
ttcgggttgggtttg

SEQ ID NO: 472313 - DNA, 15 bp, Homo sapiens
cttcgggttgggttt

SEQ ID NO: 472314 - DNA, 15 bp, Homo sapiens
ccttcgggttgggtt

SEQ ID NO: 472315 - DNA, 15 bp, Homo sapiens
gccttcgggttgggt

SEQ ID NO: 472316 - DNA, 15 bp, Homo sapiens
ggccttcgggttggg

SEQ ID NO: 472317 - DNA, 15 bp, Homo sapiens
gggccttcgggttgg

SEQ ID NO: 472318 - DNA, 15 bp, Homo sapiens
agggccttcgggttg

SEQ ID NO: 472319 - DNA, 15 bp, Homo sapiens
cagggccttcgggtt

SEQ ID NO: 472320 - DNA, 15 bp, Homo sapiens
gcagggccttcgggt

SEQ ID NO: 472321 - DNA, 15 bp, Homo sapiens
agcagggccttcggg

SEQ ID NO: 472322 - DNA, 15 bp, Homo sapiens
cagcagggccttcgg

SEQ ID NO: 472323 - DNA, 15 bp, Homo sapiens
gcagcagggccttcg

SEQ ID NO: 472324 - DNA, 15 bp, Homo sapiens
agcagcagggccttc

SEQ ID NO: 472325 - DNA, 15 bp, Homo sapiens
cagcagcagggcctt

SEQ ID NO: 472326 - DNA, 15 bp, Homo sapiens
ccagcagcagggcct

SEQ ID NO: 472327 - DNA, 15 bp, Homo sapiens
gccagcagcagggcc

SEQ ID NO: 472328 - DNA, 15 bp, Homo sapiens
ggccagcagcagggc

SEQ ID NO: 472329 - DNA, 15 bp, Homo sapiens
aggccagcagcaggg

SEQ ID NO: 472330 - DNA, 15 bp, Homo sapiens
caggccagcagcagg

SEQ ID NO: 472331 - DNA, 15 bp, Homo sapiens
ccaggccagcagcag

SEQ ID NO: 472332 - DNA, 15 bp, Homo sapiens
cccaggccagcagca

SEQ ID NO: 472333 - DNA, 15 bp, Homo sapiens
gcccaggccagcagc

SEQ ID NO: 472334 - DNA, 15 bp, Homo sapiens
agcccaggccagcag

SEQ ID NO: 472335 - DNA, 15 bp, Homo sapiens
cagcccaggccagca

SEQ ID NO: 472336 - DNA, 15 bp, Homo sapiens
gcagcccaggccagc

SEQ ID NO: 472337 - DNA, 15 bp, Homo sapiens
ggcagcccaggccag

SEQ ID NO: 472338 - DNA, 15 bp, Homo sapiens
gggcagcccaggcca

SEQ ID NO: 472339 - DNA, 15 bp, Homo sapiens
cgggcagcccaggcc

SEQ ID NO: 472340 - DNA, 15 bp, Homo sapiens
gcgggcagcccaggc

SEQ ID NO: 472341 - DNA, 15 bp, Homo sapiens
ggcgggcagcccagg

SEQ ID NO: 472342 - DNA, 15 bp, Homo sapiens
gggcgggcagcccag

SEQ ID NO: 472343 - DNA, 15 bp, Homo sapiens
cgggcgggcagccca

SEQ ID NO: 472344 - DNA, 15 bp, Homo sapiens
acgggcgggcagccc

SEQ ID NO: 472345 - DNA, 15 bp, Homo sapiens
tacgggcgggcagcc

SEQ ID NO: 472346 - DNA, 15 bp, Homo sapiens
gtacgggcgggcagc

SEQ ID NO: 472347 - DNA, 15 bp, Homo sapiens
ggtacgggcgggcag

SEQ ID NO: 472348 - DNA, 15 bp, Homo sapiens
gggtacgggcgggca

SEQ ID NO: 472349 - DNA, 15 bp, Homo sapiens
agggtacgggcgggc

SEQ ID NO: 472350 - DNA, 15 bp, Homo sapiens
gagggtacgggcggg

SEQ ID NO: 472351 - DNA, 15 bp, Homo sapiens
agagggtacgggcgg

SEQ ID NO: 472352 - DNA, 15 bp, Homo sapiens
cagagggtacgggcg

SEQ ID NO: 472353 - DNA, 15 bp, Homo sapiens
gcagagggtacgggc

SEQ ID NO: 472354 - DNA, 15 bp, Homo sapiens
ggcagagggtacggg

SEQ ID NO: 472355 - DNA, 15 bp, Homo sapiens
gggcagagggtacgg

SEQ ID NO: 472356 - DNA, 15 bp, Homo sapiens
tgggcagagggtacg

SEQ ID NO: 472357 - DNA, 15 bp, Homo sapiens
ctgggcagagggtac

SEQ ID NO: 472358 - DNA, 15 bp, Homo sapiens
cctgggcagagggta

SEQ ID NO: 472359 - DNA, 15 bp, Homo sapiens
ccctgggcagagggt

SEQ ID NO: 472360 - DNA, 15 bp, Homo sapiens
gccctgggcagaggg

SEQ ID NO: 472361 - DNA, 15 bp, Homo sapiens
tgccctgggcagagg

SEQ ID NO: 472362 - DNA, 15 bp, Homo sapiens
ctgccctgggcagag

SEQ ID NO: 472363 - DNA, 15 bp, Homo sapiens
actgccctgggcaga

SEQ ID NO: 472364 - DNA, 15 bp, Homo sapiens
cactgccctgggcag

SEQ ID NO: 472365 - DNA, 15 bp, Homo sapiens
gcactgccctgggca

SEQ ID NO: 472366 - DNA, 15 bp, Homo sapiens
agcactgccctgggc

SEQ ID NO: 472367 - DNA, 15 bp, Homo sapiens
aagcactgccctggg

SEQ ID NO: 472368 - DNA, 15 bp, Homo sapiens
caagcactgccctgg

SEQ ID NO: 472369 - DNA, 15 bp, Homo sapiens
acaagcactgccctg

SEQ ID NO: 472370 - DNA, 15 bp, Homo sapiens
tacaagcactgccct

SEQ ID NO: 472371 - DNA, 15 bp, Homo sapiens
ttacaagcactgccc

SEQ ID NO: 472372 - DNA, 15 bp, Homo sapiens
cttacaagcactgcc

SEQ ID NO: 472373 - DNA, 15 bp, Homo sapiens
tcttacaagcactgc

SEQ ID NO: 472374 - DNA, 15 bp, Homo sapiens
gtcttacaagcactg

SEQ ID NO: 472375 - DNA, 15 bp, Homo sapiens
tgtcttacaagcact

SEQ ID NO: 472376 - DNA, 15 bp, Homo sapiens
gtgtcttacaagcac

SEQ ID NO: 472377 - DNA, 15 bp, Homo sapiens
tgtgtcttacaagca

SEQ ID NO: 472378 - DNA, 15 bp, Homo sapiens
ctgtgtcttacaagc

SEQ ID NO: 472379 - DNA, 15 bp, Homo sapiens
actgtgtcttacaag

SEQ ID NO: 472380 - DNA, 15 bp, Homo sapiens
cactgtgtcttacaa

SEQ ID NO: 472381 - DNA, 15 bp, Homo sapiens
gcactgtgtcttaca

SEQ ID NO: 472382 - DNA, 15 bp, Homo sapiens
ggcactgtgtcttac

SEQ ID NO: 472383 - DNA, 15 bp, Homo sapiens
gggcactgtgtctta

SEQ ID NO: 472384 - DNA, 15 bp, Homo sapiens
ggggcactgtgtctt

SEQ ID NO: 472385 - DNA, 15 bp, Homo sapiens
tggggcactgtgtct

SEQ ID NO: 472386 - DNA, 15 bp, Homo sapiens
ctggggcactgtgtc

SEQ ID NO: 472387 - DNA, 15 bp, Homo sapiens
cctggggcactgtgt

SEQ ID NO: 472388 - DNA, 15 bp, Homo sapiens
ccctggggcactgtg

SEQ ID NO: 472389 - DNA, 15 bp, Homo sapiens
cccctggggcactgt

SEQ ID NO: 472390 - DNA, 15 bp, Homo sapiens
acccctggggcactg

SEQ ID NO: 472391 - DNA, 15 bp, Homo sapiens
gacccctggggcact

SEQ ID NO: 472392 - DNA, 15 bp, Homo sapiens
ggacccctggggcac

SEQ ID NO: 472393 - DNA, 15 bp, Homo sapiens
gggacccctggggca

SEQ ID NO: 472394 - DNA, 15 bp, Homo sapiens
ggggacccctggggc

SEQ ID NO: 472395 - DNA, 15 bp, Homo sapiens
tggggacccctgggg

SEQ ID NO: 472396 - DNA, 15 bp, Homo sapiens
gtggggacccctggg

SEQ ID NO: 472397 - DNA, 15 bp, Homo sapiens
agtggggacccctgg

SEQ ID NO: 472398 - DNA, 15 bp, Homo sapiens
gagtggggacccctg

SEQ ID NO: 472399 - DNA, 15 bp, Homo sapiens
tgagtggggacccct

SEQ ID NO: 472400 - DNA, 15 bp, Homo sapiens
ctgagtggggacccc

SEQ ID NO: 472401 - DNA, 15 bp, Homo sapiens
gctgagtggggaccc

SEQ ID NO: 472402 - DNA, 15 bp, Homo sapiens
ggctgagtggggacc

SEQ ID NO: 472403 - DNA, 15 bp, Homo sapiens
gggctgagtggggac

SEQ ID NO: 472404 - DNA, 15 bp, Homo sapiens
tgggctgagtgggga

SEQ ID NO: 472405 - DNA, 15 bp, Homo sapiens
atgggctgagtgggg

SEQ ID NO: 472406 - DNA, 15 bp, Homo sapiens
aatgggctgagtggg

SEQ ID NO: 472407 - DNA, 15 bp, Homo sapiens
taatgggctgagtgg

SEQ ID NO: 472408 - DNA, 15 bp, Homo sapiens
ctaatgggctgagtg

SEQ ID NO: 472409 - DNA, 15 bp, Homo sapiens
cctaatgggctgagt

SEQ ID NO: 472410 - DNA, 15 bp, Homo sapiens
acctaatgggctgag

SEQ ID NO: 472411 - DNA, 15 bp, Homo sapiens
gacctaatgggctga

SEQ ID NO: 472412 - DNA, 15 bp, Homo sapiens
agacctaatgggctg

SEQ ID NO: 472413 - DNA, 15 bp, Homo sapiens
gagacctaatgggct

SEQ ID NO: 472414 - DNA, 15 bp, Homo sapiens
agagacctaatgggc

SEQ ID NO: 472415 - DNA, 15 bp, Homo sapiens
tagagacctaatggg

SEQ ID NO: 472416 - DNA, 15 bp, Homo sapiens
gtagagacctaatgg

SEQ ID NO: 472417 - DNA, 15 bp, Homo sapiens
ggtagagacctaatg

SEQ ID NO: 472418 - DNA, 15 bp, Homo sapiens
gggtagagacctaat

SEQ ID NO: 472419 - DNA, 15 bp, Homo sapiens
agggtagagacctaa

SEQ ID NO: 472420 - DNA, 15 bp, Homo sapiens
aagggtagagaccta

SEQ ID NO: 472421 - DNA, 15 bp, Homo sapiens
gaagggtagagacct

SEQ ID NO: 472422 - DNA, 15 bp, Homo sapiens
ggaagggtagagacc

SEQ ID NO: 472423 - DNA, 15 bp, Homo sapiens
tggaagggtagagac

SEQ ID NO: 472424 - DNA, 15 bp, Homo sapiens
atggaagggtagaga

SEQ ID NO: 472425 - DNA, 15 bp, Homo sapiens
catggaagggtagag

SEQ ID NO: 472426 - DNA, 15 bp, Homo sapiens
gcatggaagggtaga

SEQ ID NO: 472427 - DNA, 15 bp, Homo sapiens
tgcatggaagggtag

SEQ ID NO: 472428 - DNA, 15 bp, Homo sapiens
atgcatggaagggta

SEQ ID NO: 472429 - DNA, 15 bp, Homo sapiens
gatgcatggaagggt

SEQ ID NO: 472430 - DNA, 15 bp, Homo sapiens
ggatgcatggaaggg

SEQ ID NO: 472431 - DNA, 15 bp, Homo sapiens
aggatgcatggaagg

SEQ ID NO: 472432 - DNA, 15 bp, Homo sapiens
gaggatgcatggaag

SEQ ID NO: 472433 - DNA, 15 bp, Homo sapiens
ggaggatgcatggaa

SEQ ID NO: 472434 - DNA, 15 bp, Homo sapiens
aggaggatgcatgga

SEQ ID NO: 472435 - DNA, 15 bp, Homo sapiens
gaggaggatgcatgg

SEQ ID NO: 472436 - DNA, 15 bp, Homo sapiens
ggaggaggatgcatg

SEQ ID NO: 472437 - DNA, 15 bp, Homo sapiens
cggaggaggatgcat

SEQ ID NO: 472438 - DNA, 15 bp, Homo sapiens
ccggaggaggatgca

SEQ ID NO: 472439 - DNA, 15 bp, Homo sapiens
gccggaggaggatgc

SEQ ID NO: 472440 - DNA, 15 bp, Homo sapiens
cgccggaggaggatg

SEQ ID NO: 472441 - DNA, 15 bp, Homo sapiens
gcgccggaggaggat

SEQ ID NO: 472442 - DNA, 15 bp, Homo sapiens
tgcgccggaggagga

SEQ ID NO: 472443 - DNA, 15 bp, Homo sapiens
ctgcgccggaggagg

SEQ ID NO: 472444 - DNA, 15 bp, Homo sapiens
tctgcgccggaggag

SEQ ID NO: 472445 - DNA, 15 bp, Homo sapiens
ctctgcgccggagga

SEQ ID NO: 472446 - DNA, 15 bp, Homo sapiens
cctctgcgccggagg

SEQ ID NO: 472447 - DNA, 15 bp, Homo sapiens
ccctctgcgccggag

SEQ ID NO: 472448 - DNA, 15 bp, Homo sapiens
gccctctgcgccgga

SEQ ID NO: 472449 - DNA, 15 bp, Homo sapiens
agccctctgcgccgg

SEQ ID NO: 472450 - DNA, 15 bp, Homo sapiens
cagccctctgcgccg

SEQ ID NO: 472451 - DNA, 15 bp, Homo sapiens
ccagccctctgcgcc

SEQ ID NO: 472452 - DNA, 15 bp, Homo sapiens
gccagccctctgcgc

SEQ ID NO: 472453 - DNA, 15 bp, Homo sapiens
tgccagccctctgcg

SEQ ID NO: 472454 - DNA, 15 bp, Homo sapiens
gtgccagccctctgc

SEQ ID NO: 472455 - DNA, 15 bp, Homo sapiens
cgtgccagccctctg

SEQ ID NO: 472456 - DNA, 15 bp, Homo sapiens
ccgtgccagccctct

SEQ ID NO: 472457 - DNA, 15 bp, Homo sapiens
cccgtgccagccctc

SEQ ID NO: 472458 - DNA, 15 bp, Homo sapiens
gcccgtgccagccct

SEQ ID NO: 472459 - DNA, 15 bp, Homo sapiens
cgcccgtgccagccc

SEQ ID NO: 472460 - DNA, 15 bp, Homo sapiens
gcgcccgtgccagcc

SEQ ID NO: 472461 - DNA, 15 bp, Homo sapiens
tgcgcccgtgccagc

SEQ ID NO: 472462 - DNA, 15 bp, Homo sapiens
ttgcgcccgtgccag

SEQ ID NO: 472463 - DNA, 15 bp, Homo sapiens
tttgcgcccgtgcca

SEQ ID NO: 472464 - DNA, 15 bp, Homo sapiens
ctttgcgcccgtgcc

SEQ ID NO: 472465 - DNA, 15 bp, Homo sapiens
gctttgcgcccgtgc

SEQ ID NO: 472466 - DNA, 15 bp, Homo sapiens
agctttgcgcccgtg

SEQ ID NO: 472467 - DNA, 15 bp, Homo sapiens
gagctttgcgcccgt

SEQ ID NO: 472468 - DNA, 15 bp, Homo sapiens
ggagctttgcgcccg

SEQ ID NO: 472469 - DNA, 15 bp, Homo sapiens
gggagctttgcgccc

SEQ ID NO: 472470 - DNA, 15 bp, Homo sapiens
ggggagctttgcgcc

SEQ ID NO: 472471 - DNA, 15 bp, Homo sapiens
aggggagctttgcgc

SEQ ID NO: 472472 - DNA, 15 bp, Homo sapiens
gaggggagctttgcg

SEQ ID NO: 472473 - DNA, 15 bp, Homo sapiens
tgaggggagctttgc

SEQ ID NO: 472474 - DNA, 15 bp, Homo sapiens
ctgaggggagctttg

SEQ ID NO: 472475 - DNA, 15 bp, Homo sapiens
tctgaggggagcttt

SEQ ID NO: 472476 - DNA, 15 bp, Homo sapiens
gtctgaggggagctt

SEQ ID NO: 472477 - DNA, 15 bp, Homo sapiens
agtctgaggggagct

SEQ ID NO: 472478 - DNA, 15 bp, Homo sapiens
cagtctgaggggagc

SEQ ID NO: 472479 - DNA, 15 bp, Homo sapiens
acagtctgaggggag

SEQ ID NO: 472480 - DNA, 15 bp, Homo sapiens
gacagtctgagggga

SEQ ID NO: 472481 - DNA, 15 bp, Homo sapiens
ggacagtctgagggg

SEQ ID NO: 472482 - DNA, 15 bp, Homo sapiens
aggacagtctgaggg

SEQ ID NO: 472483 - DNA, 15 bp, Homo sapiens
gaggacagtctgagg

SEQ ID NO: 472484 - DNA, 15 bp, Homo sapiens
tgaggacagtctgag

SEQ ID NO: 472485 - DNA, 15 bp, Homo sapiens
ctgaggacagtctga

SEQ ID NO: 472486 - DNA, 15 bp, Homo sapiens
cctgaggacagtctg

SEQ ID NO: 472487 - DNA, 15 bp, Homo sapiens
ccctgaggacagtct

SEQ ID NO: 472488 - DNA, 15 bp, Homo sapiens
accctgaggacagtc

SEQ ID NO: 472489 - DNA, 15 bp, Homo sapiens
caccctgaggacagt

SEQ ID NO: 472490 - DNA, 15 bp, Homo sapiens
ccaccctgaggacag

SEQ ID NO: 472491 - DNA, 15 bp, Homo sapiens
cccaccctgaggaca

SEQ ID NO: 472492 - DNA, 15 bp, Homo sapiens
tcccaccctgaggac

SEQ ID NO: 472493 - DNA, 15 bp, Homo sapiens
ctcccaccctgagga

SEQ ID NO: 472494 - DNA, 15 bp, Homo sapiens
cctcccaccctgagg

SEQ ID NO: 472495 - DNA, 15 bp, Homo sapiens
acctcccaccctgag

SEQ ID NO: 472496 - DNA, 15 bp, Homo sapiens
cacctcccaccctga

SEQ ID NO: 472497 - DNA, 15 bp, Homo sapiens
acacctcccaccctg

SEQ ID NO: 472498 - DNA, 15 bp, Homo sapiens
aacacctcccaccct

SEQ ID NO: 472499 - DNA, 15 bp, Homo sapiens
caacacctcccaccc

SEQ ID NO: 472500 - DNA, 15 bp, Homo sapiens
ccaacacctcccacc

SEQ ID NO: 472501 - DNA, 15 bp, Homo sapiens
accaacacctcccac

SEQ ID NO: 472502 - DNA, 15 bp, Homo sapiens
taccaacacctccca

SEQ ID NO: 472503 - DNA, 15 bp, Homo sapiens
ataccaacacctccc

SEQ ID NO: 472504 - DNA, 15 bp, Homo sapiens
gataccaacacctcc

SEQ ID NO: 472505 - DNA, 15 bp, Homo sapiens
ggataccaacacctc

SEQ ID NO: 472506 - DNA, 15 bp, Homo sapiens
aggataccaacacct

SEQ ID NO: 472507 - DNA, 15 bp, Homo sapiens
gaggataccaacacc

SEQ ID NO: 472508 - DNA, 15 bp, Homo sapiens
ggaggataccaacac

SEQ ID NO: 472509 - DNA, 15 bp, Homo sapiens
aggaggataccaaca

SEQ ID NO: 472510 - DNA, 15 bp, Homo sapiens
aaggaggataccaac

SEQ ID NO: 472511 - DNA, 15 bp, Homo sapiens
caaggaggataccaa

SEQ ID NO: 472512 - DNA, 15 bp, Homo sapiens
tcaaggaggatacca

SEQ ID NO: 472513 - DNA, 15 bp, Homo sapiens
ttcaaggaggatacc

SEQ ID NO: 472514 - DNA, 15 bp, Homo sapiens
tttcaaggaggatac

SEQ ID NO: 472515 - DNA, 15 bp, Homo sapiens
gtttcaaggaggata

SEQ ID NO: 472516 - DNA, 15 bp, Homo sapiens
tgtttcaaggaggat

SEQ ID NO: 472517 - DNA, 15 bp, Homo sapiens
ctgtttcaaggagga

SEQ ID NO: 472518 - DNA, 15 bp, Homo sapiens
cctgtttcaaggagg

SEQ ID NO: 472519 - DNA, 15 bp, Homo sapiens
tcctgtttcaaggag

SEQ ID NO: 472520 - DNA, 15 bp, Homo sapiens
atcctgtttcaagga

SEQ ID NO: 472521 - DNA, 15 bp, Homo sapiens
gatcctgtttcaagg

SEQ ID NO: 472522 - DNA, 15 bp, Homo sapiens
ggatcctgtttcaag

SEQ ID NO: 472523 - DNA, 15 bp, Homo sapiens
tggatcctgtttcaa

SEQ ID NO: 472524 - DNA, 15 bp, Homo sapiens
ctggatcctgtttca

SEQ ID NO: 472525 - DNA, 15 bp, Homo sapiens
cctggatcctgtttc

SEQ ID NO: 472526 - DNA, 15 bp, Homo sapiens
tcctggatcctgttt

SEQ ID NO: 472527 - DNA, 15 bp, Homo sapiens
atcctggatcctgtt

SEQ ID NO: 472528 - DNA, 15 bp, Homo sapiens
gatcctggatcctgt

SEQ ID NO: 472529 - DNA, 15 bp, Homo sapiens
agatcctggatcctg

SEQ ID NO: 472530 - DNA, 15 bp, Homo sapiens
gagatcctggatcct

SEQ ID NO: 472531 - DNA, 15 bp, Homo sapiens
ggagatcctggatcc

SEQ ID NO: 472532 - DNA, 15 bp, Homo sapiens
gggagatcctggatc

SEQ ID NO: 472533 - DNA, 15 bp, Homo sapiens
tgggagatcctggat

SEQ ID NO: 472534 - DNA, 15 bp, Homo sapiens
ttgggagatcctgga

SEQ ID NO: 472535 - DNA, 15 bp, Homo sapiens
cttgggagatcctgg

SEQ ID NO: 472536 - DNA, 15 bp, Homo sapiens
tcttgggagatcctg

SEQ ID NO: 472537 - DNA, 15 bp, Homo sapiens
ctcttgggagatcct

SEQ ID NO: 472538 - DNA, 15 bp, Homo sapiens
cctcttgggagatcc

SEQ ID NO: 472539 - DNA, 15 bp, Homo sapiens
acctcttgggagatc

SEQ ID NO: 472540 - DNA, 15 bp, Homo sapiens
tacctcttgggagat

SEQ ID NO: 472541 - DNA, 15 bp, Homo sapiens
atacctcttgggaga

SEQ ID NO: 472542 - DNA, 15 bp, Homo sapiens
catacctcttgggag

SEQ ID NO: 472543 - DNA, 15 bp, Homo sapiens
acatacctcttggga

SEQ ID NO: 472544 - DNA, 15 bp, Homo sapiens
cacatacctcttggg

SEQ ID NO: 472545 - DNA, 15 bp, Homo sapiens
ccacatacctcttgg

SEQ ID NO: 472546 - DNA, 15 bp, Homo sapiens
accacatacctcttg

SEQ ID NO: 472547 - DNA, 15 bp, Homo sapiens
caccacatacctctt

SEQ ID NO: 472548 - DNA, 15 bp, Homo sapiens
tcaccacatacctct

SEQ ID NO: 472549 - DNA, 15 bp, Homo sapiens
atcaccacatacctc

SEQ ID NO: 472550 - DNA, 15 bp, Homo sapiens
tatcaccacatacct

SEQ ID NO: 472551 - DNA, 15 bp, Homo sapiens
ttatcaccacatacc

SEQ ID NO: 472552 - DNA, 15 bp, Homo sapiens
attatcaccacatac

SEQ ID NO: 472553 - DNA, 15 bp, Homo sapiens
tattatcaccacata

SEQ ID NO: 472554 - DNA, 15 bp, Homo sapiens
ttattatcaccacat

SEQ ID NO: 472555 - DNA, 15 bp, Homo sapiens
attattatcaccaca

SEQ ID NO: 472556 - DNA, 15 bp, Homo sapiens
tattattatcaccac

SEQ ID NO: 472557 - DNA, 15 bp, Homo sapiens
atattattatcacca

SEQ ID NO: 472558 - DNA, 15 bp, Homo sapiens
gatattattatcacc

SEQ ID NO: 472559 - DNA, 15 bp, Homo sapiens
tgatattattatcac

SEQ ID NO: 472560 - DNA, 15 bp, Homo sapiens
ctgatattattatca

SEQ ID NO: 472561 - DNA, 15 bp, Homo sapiens
gctgatattattatc

SEQ ID NO: 472562 - DNA, 15 bp, Homo sapiens
agctgatattattat

SEQ ID NO: 472563 - DNA, 15 bp, Homo sapiens
tagctgatattatta

SEQ ID NO: 472564 - DNA, 15 bp, Homo sapiens
gtagctgatattatt

SEQ ID NO: 472565 - DNA, 15 bp, Homo sapiens
ggtagctgatattat

SEQ ID NO: 472566 - DNA, 15 bp, Homo sapiens
tggtagctgatatta

SEQ ID NO: 472567 - DNA, 15 bp, Homo sapiens
gtggtagctgatatt

SEQ ID NO: 472568 - DNA, 15 bp, Homo sapiens
agtggtagctgatat

SEQ ID NO: 472569 - DNA, 15 bp, Homo sapiens
aagtggtagctgata

SEQ ID NO: 472570 - DNA, 15 bp, Homo sapiens
caagtggtagctgat

SEQ ID NO: 472571 - DNA, 15 bp, Homo sapiens
gcaagtggtagctga

SEQ ID NO: 472572 - DNA, 15 bp, Homo sapiens
agcaagtggtagctg

SEQ ID NO: 472573 - DNA, 15 bp, Homo sapiens
cagcaagtggtagct

SEQ ID NO: 472574 - DNA, 15 bp, Homo sapiens
tcagcaagtggtagc

SEQ ID NO: 472575 - DNA, 15 bp, Homo sapiens
ctcagcaagtggtag

SEQ ID NO: 472576 - DNA, 15 bp, Homo sapiens
gctcagcaagtggta

SEQ ID NO: 472577 - DNA, 15 bp, Homo sapiens
tgctcagcaagtggt

SEQ ID NO: 472578 - DNA, 15 bp, Homo sapiens
gtgctcagcaagtgg

SEQ ID NO: 472579 - DNA, 15 bp, Homo sapiens
ggtgctcagcaagtg

SEQ ID NO: 472580 - DNA, 15 bp, Homo sapiens
aggtgctcagcaagt

SEQ ID NO: 472581 - DNA, 15 bp, Homo sapiens
taggtgctcagcaag

SEQ ID NO: 472582 - DNA, 15 bp, Homo sapiens
gtaggtgctcagcaa

SEQ ID NO: 472583 - DNA, 15 bp, Homo sapiens
agtaggtgctcagca

SEQ ID NO: 472584 - DNA, 15 bp, Homo sapiens
aagtaggtgctcagc

SEQ ID NO: 472585 - DNA, 15 bp, Homo sapiens
caagtaggtgctcag

SEQ ID NO: 472586 - DNA, 15 bp, Homo sapiens
ccaagtaggtgctca

SEQ ID NO: 472587 - DNA, 15 bp, Homo sapiens
cccaagtaggtgctc

SEQ ID NO: 472588 - DNA, 15 bp, Homo sapiens
ccccaagtaggtgct

SEQ ID NO: 472589 - DNA, 15 bp, Homo sapiens
accccaagtaggtgc

SEQ ID NO: 472590 - DNA, 15 bp, Homo sapiens
aaccccaagtaggtg

SEQ ID NO: 472591 - DNA, 15 bp, Homo sapiens
aaaccccaagtaggt

SEQ ID NO: 472592 - DNA, 15 bp, Homo sapiens
aaaaccccaagtagg

SEQ ID NO: 472593 - DNA, 15 bp, Homo sapiens
taaaaccccaagtag

SEQ ID NO: 472594 - DNA, 15 bp, Homo sapiens
gtaaaaccccaagta

SEQ ID NO: 472595 - DNA, 15 bp, Homo sapiens
tgtaaaaccccaagt

SEQ ID NO: 472596 - DNA, 15 bp, Homo sapiens
ttgtaaaaccccaag

SEQ ID NO: 472597 - DNA, 15 bp, Homo sapiens
tttgtaaaaccccaa

SEQ ID NO: 472598 - DNA, 15 bp, Homo sapiens
atttgtaaaacccca

SEQ ID NO: 472599 - DNA, 15 bp, Homo sapiens
tatttgtaaaacccc

SEQ ID NO: 472600 - DNA, 15 bp, Homo sapiens
gtatttgtaaaaccc

SEQ ID NO: 472601 - DNA, 15 bp, Homo sapiens
cgtatttgtaaaacc

SEQ ID NO: 472602 - DNA, 15 bp, Homo sapiens
tcgtatttgtaaaac

SEQ ID NO: 472603 - DNA, 15 bp, Homo sapiens
atcgtatttgtaaaa

SEQ ID NO: 472604 - DNA, 15 bp, Homo sapiens
aatcgtatttgtaaa

SEQ ID NO: 472605 - DNA, 15 bp, Homo sapiens
aaatcgtatttgtaa

SEQ ID NO: 472606 - DNA, 15 bp, Homo sapiens
gaaatcgtatttgta

SEQ ID NO: 472607 - DNA, 15 bp, Homo sapiens
agaaatcgtatttgt

SEQ ID NO: 472608 - DNA, 15 bp, Homo sapiens
tagaaatcgtatttg

SEQ ID NO: 472609 - DNA, 15 bp, Homo sapiens
ttagaaatcgtattt

SEQ ID NO: 472610 - DNA, 15 bp, Homo sapiens
attagaaatcgtatt

SEQ ID NO: 472611 - DNA, 15 bp, Homo sapiens
gattagaaatcgtat

SEQ ID NO: 472612 - DNA, 15 bp, Homo sapiens
agattagaaatcgta

SEQ ID NO: 472613 - DNA, 15 bp, Homo sapiens
gagattagaaatcgt

SEQ ID NO: 472614 - DNA, 15 bp, Homo sapiens
agagattagaaatcg

SEQ ID NO: 472615 - DNA, 15 bp, Homo sapiens
cagagattagaaatc

SEQ ID NO: 472616 - DNA, 15 bp, Homo sapiens
gcagagattagaaat

SEQ ID NO: 472617 - DNA, 15 bp, Homo sapiens
tgcagagattagaaa

SEQ ID NO: 472618 - DNA, 15 bp, Homo sapiens
gtgcagagattagaa

SEQ ID NO: 472619 - DNA, 15 bp, Homo sapiens
ggtgcagagattaga

SEQ ID NO: 472620 - DNA, 15 bp, Homo sapiens
aggtgcagagattag

SEQ ID NO: 472621 - DNA, 15 bp, Homo sapiens
taggtgcagagatta

SEQ ID NO: 472622 - DNA, 15 bp, Homo sapiens
gtaggtgcagagatt

SEQ ID NO: 472623 - DNA, 15 bp, Homo sapiens
agtaggtgcagagat

SEQ ID NO: 472624 - DNA, 15 bp, Homo sapiens
tagtaggtgcagaga

SEQ ID NO: 472625 - DNA, 15 bp, Homo sapiens
gtagtaggtgcagag

SEQ ID NO: 472626 - DNA, 15 bp, Homo sapiens
cgtagtaggtgcaga

SEQ ID NO: 472627 - DNA, 15 bp, Homo sapiens
acgtagtaggtgcag

SEQ ID NO: 472628 - DNA, 15 bp, Homo sapiens
cacgtagtaggtgca

SEQ ID NO: 472629 - DNA, 15 bp, Homo sapiens
tcacgtagtaggtgc

SEQ ID NO: 472630 - DNA, 15 bp, Homo sapiens
gtcacgtagtaggtg

SEQ ID NO: 472631 - DNA, 15 bp, Homo sapiens
tgtcacgtagtaggt

SEQ ID NO: 472632 - DNA, 15 bp, Homo sapiens
gtgtcacgtagtagg

SEQ ID NO: 472633 - DNA, 15 bp, Homo sapiens
tgtgtcacgtagtag

SEQ ID NO: 472634 - DNA, 15 bp, Homo sapiens
ctgtgtcacgtagta

SEQ ID NO: 472635 - DNA, 15 bp, Homo sapiens
actgtgtcacgtagt

SEQ ID NO: 472636 - DNA, 15 bp, Homo sapiens
tactgtgtcacgtag

SEQ ID NO: 472637 - DNA, 15 bp, Homo sapiens
ttactgtgtcacgta

SEQ ID NO: 472638 - DNA, 15 bp, Homo sapiens
tttactgtgtcacgt

SEQ ID NO: 472639 - DNA, 15 bp, Homo sapiens
atttactgtgtcacg

SEQ ID NO: 472640 - DNA, 15 bp, Homo sapiens
tatttactgtgtcac

SEQ ID NO: 472641 - DNA, 15 bp, Homo sapiens
ctatttactgtgtca

SEQ ID NO: 472642 - DNA, 15 bp, Homo sapiens
actatttactgtgtc

SEQ ID NO: 472643 - DNA, 15 bp, Homo sapiens
tactatttactgtgt

SEQ ID NO: 472644 - DNA, 15 bp, Homo sapiens
atactatttactgtg

SEQ ID NO: 472645 - DNA, 15 bp, Homo sapiens
aatactatttactgt

SEQ ID NO: 472646 - DNA, 15 bp, Homo sapiens
taatactatttactg

SEQ ID NO: 472647 - DNA, 15 bp, Homo sapiens
gtaatactatttact

SEQ ID NO: 472648 - DNA, 15 bp, Homo sapiens
ggtaatactatttac

SEQ ID NO: 472649 - DNA, 15 bp, Homo sapiens
gggtaatactattta

SEQ ID NO: 472650 - DNA, 15 bp, Homo sapiens
ggggtaatactattt

SEQ ID NO: 472651 - DNA, 15 bp, Homo sapiens
gggggtaatactatt

SEQ ID NO: 472652 - DNA, 15 bp, Homo sapiens
tgggggtaatactat

SEQ ID NO: 472653 - DNA, 15 bp, Homo sapiens
atgggggtaatacta

SEQ ID NO: 472654 - DNA, 15 bp, Homo sapiens
aatgggggtaatact

SEQ ID NO: 472655 - DNA, 15 bp, Homo sapiens
aaatgggggtaatac

SEQ ID NO: 472656 - DNA, 15 bp, Homo sapiens
aaaatgggggtaata

SEQ ID NO: 472657 - DNA, 15 bp, Homo sapiens
gaaaatgggggtaat

SEQ ID NO: 472658 - DNA, 15 bp, Homo sapiens
agaaaatgggggtaa

SEQ ID NO: 472659 - DNA, 15 bp, Homo sapiens
tagaaaatgggggta

SEQ ID NO: 472660 - DNA, 15 bp, Homo sapiens
gtagaaaatgggggt

SEQ ID NO: 472661 - DNA, 15 bp, Homo sapiens
tgtagaaaatggggg

SEQ ID NO: 472662 - DNA, 15 bp, Homo sapiens
atgtagaaaatgggg

SEQ ID NO: 472663 - DNA, 15 bp, Homo sapiens
catgtagaaaatggg

SEQ ID NO: 472664 - DNA, 15 bp, Homo sapiens
tcatgtagaaaatgg

SEQ ID NO: 472665 - DNA, 15 bp, Homo sapiens
ctcatgtagaaaatg

SEQ ID NO: 472666 - DNA, 15 bp, Homo sapiens
cctcatgtagaaaat

SEQ ID NO: 472667 - DNA, 15 bp, Homo sapiens
tcctcatgtagaaaa

SEQ ID NO: 472668 - DNA, 15 bp, Homo sapiens
ttcctcatgtagaaa

SEQ ID NO: 472669 - DNA, 15 bp, Homo sapiens
tttcctcatgtagaa

SEQ ID NO: 472670 - DNA, 15 bp, Homo sapiens
gtttcctcatgtaga

SEQ ID NO: 472671 - DNA, 15 bp, Homo sapiens
agtttcctcatgtag

SEQ ID NO: 472672 - DNA, 15 bp, Homo sapiens
tagtttcctcatgta

SEQ ID NO: 472673 - DNA, 15 bp, Homo sapiens
atagtttcctcatgt

SEQ ID NO: 472674 - DNA, 15 bp, Homo sapiens
catagtttcctcatg

SEQ ID NO: 472675 - DNA, 15 bp, Homo sapiens
ccatagtttcctcat

SEQ ID NO: 472676 - DNA, 15 bp, Homo sapiens
tccatagtttcctca

SEQ ID NO: 472677 - DNA, 15 bp, Homo sapiens
atccatagtttcctc

SEQ ID NO: 472678 - DNA, 15 bp, Homo sapiens
gatccatagtttcct

SEQ ID NO: 472679 - DNA, 15 bp, Homo sapiens
tgatccatagtttcc

SEQ ID NO: 472680 - DNA, 15 bp, Homo sapiens
ctgatccatagtttc

SEQ ID NO: 472681 - DNA, 15 bp, Homo sapiens
tctgatccatagttt

SEQ ID NO: 472682 - DNA, 15 bp, Homo sapiens
ttctgatccatagtt

SEQ ID NO: 472683 - DNA, 15 bp, Homo sapiens
tttctgatccatagt

SEQ ID NO: 472684 - DNA, 15 bp, Homo sapiens
ctttctgatccatag

SEQ ID NO: 472685 - DNA, 15 bp, Homo sapiens
actttctgatccata

SEQ ID NO: 472686 - DNA, 15 bp, Homo sapiens
aactttctgatccat

SEQ ID NO: 472687 - DNA, 15 bp, Homo sapiens
aaactttctgatcca

SEQ ID NO: 472688 - DNA, 15 bp, Homo sapiens
gaaactttctgatcc

SEQ ID NO: 472689 - DNA, 15 bp, Homo sapiens
agaaactttctgatc

SEQ ID NO: 472690 - DNA, 15 bp, Homo sapiens
aagaaactttctgat

SEQ ID NO: 472691 - DNA, 15 bp, Homo sapiens
aaagaaactttctga

SEQ ID NO: 472692 - DNA, 15 bp, Homo sapiens
caaagaaactttctg

SEQ ID NO: 472693 - DNA, 15 bp, Homo sapiens
gcaaagaaactttct

SEQ ID NO: 472694 - DNA, 15 bp, Homo sapiens
ggcaaagaaactttc

SEQ ID NO: 472695 - DNA, 15 bp, Homo sapiens
gggcaaagaaacttt

SEQ ID NO: 472696 - DNA, 15 bp, Homo sapiens
tgggcaaagaaactt

SEQ ID NO: 472697 - DNA, 15 bp, Homo sapiens
atgggcaaagaaact

SEQ ID NO: 472698 - DNA, 15 bp, Homo sapiens
catgggcaaagaaac

SEQ ID NO: 472699 - DNA, 15 bp, Homo sapiens
tcatgggcaaagaaa

SEQ ID NO: 472700 - DNA, 15 bp, Homo sapiens
ttcatgggcaaagaa

SEQ ID NO: 472701 - DNA, 15 bp, Homo sapiens
gttcatgggcaaaga

SEQ ID NO: 472702 - DNA, 15 bp, Homo sapiens
cgttcatgggcaaag

SEQ ID NO: 472703 - DNA, 15 bp, Homo sapiens
acgttcatgggcaaa

SEQ ID NO: 472704 - DNA, 15 bp, Homo sapiens
cacgttcatgggcaa

SEQ ID NO: 472705 - DNA, 15 bp, Homo sapiens
ccacgttcatgggca

SEQ ID NO: 472706 - DNA, 15 bp, Homo sapiens
tccacgttcatgggc

SEQ ID NO: 472707 - DNA, 15 bp, Homo sapiens
ttccacgttcatggg

SEQ ID NO: 472708 - DNA, 15 bp, Homo sapiens
cttccacgttcatgg

SEQ ID NO: 472709 - DNA, 15 bp, Homo sapiens
gcttccacgttcatg

SEQ ID NO: 472710 - DNA, 15 bp, Homo sapiens
agcttccacgttcat

SEQ ID NO: 472711 - DNA, 15 bp, Homo sapiens
cagcttccacgttca

SEQ ID NO: 472712 - DNA, 15 bp, Homo sapiens
ccagcttccacgttc

SEQ ID NO: 472713 - DNA, 15 bp, Homo sapiens
cccagcttccacgtt

SEQ ID NO: 472714 - DNA, 15 bp, Homo sapiens
gcccagcttccacgt

SEQ ID NO: 472715 - DNA, 15 bp, Homo sapiens
agcccagcttccacg

SEQ ID NO: 472716 - DNA, 15 bp, Homo sapiens
aagcccagcttccac

SEQ ID NO: 472717 - DNA, 15 bp, Homo sapiens
gaagcccagcttcca

SEQ ID NO: 472718 - DNA, 15 bp, Homo sapiens
tgaagcccagcttcc

SEQ ID NO: 472719 - DNA, 15 bp, Homo sapiens
ttgaagcccagcttc

SEQ ID NO: 472720 - DNA, 15 bp, Homo sapiens
tttgaagcccagctt

SEQ ID NO: 472721 - DNA, 15 bp, Homo sapiens
atttgaagcccagct

SEQ ID NO: 472722 - DNA, 15 bp, Homo sapiens
gatttgaagcccagc

SEQ ID NO: 472723 - DNA, 15 bp, Homo sapiens
ggatttgaagcccag

SEQ ID NO: 472724 - DNA, 15 bp, Homo sapiens
tggatttgaagccca

SEQ ID NO: 472725 - DNA, 15 bp, Homo sapiens
ttggatttgaagccc

SEQ ID NO: 472726 - DNA, 15 bp, Homo sapiens
cttggatttgaagcc

SEQ ID NO: 472727 - DNA, 15 bp, Homo sapiens
gcttggatttgaagc

SEQ ID NO: 472728 - DNA, 15 bp, Homo sapiens
tgcttggatttgaag

SEQ ID NO: 472729 - DNA, 15 bp, Homo sapiens
atgcttggatttgaa

SEQ ID NO: 472730 - DNA, 15 bp, Homo sapiens
catgcttggatttga

SEQ ID NO: 472731 - DNA, 15 bp, Homo sapiens
acatgcttggatttg

SEQ ID NO: 472732 - DNA, 15 bp, Homo sapiens
gacatgcttggattt

SEQ ID NO: 472733 - DNA, 15 bp, Homo sapiens
ggacatgcttggatt

SEQ ID NO: 472734 - DNA, 15 bp, Homo sapiens
aggacatgcttggat

SEQ ID NO: 472735 - DNA, 15 bp, Homo sapiens
gaggacatgcttgga

SEQ ID NO: 472736 - DNA, 15 bp, Homo sapiens
tgaggacatgcttgg

SEQ ID NO: 472737 - DNA, 15 bp, Homo sapiens
gtgaggacatgcttg

SEQ ID NO: 472738 - DNA, 15 bp, Homo sapiens
tgtgaggacatgctt

SEQ ID NO: 472739 - DNA, 15 bp, Homo sapiens
gtgtgaggacatgct

SEQ ID NO: 472740 - DNA, 15 bp, Homo sapiens
ggtgtgaggacatgc

SEQ ID NO: 472741 - DNA, 15 bp, Homo sapiens
cggtgtgaggacatg

SEQ ID NO: 472742 - DNA, 15 bp, Homo sapiens
tcggtgtgaggacat

SEQ ID NO: 472743 - DNA, 15 bp, Homo sapiens
ttcggtgtgaggaca

SEQ ID NO: 472744 - DNA, 15 bp, Homo sapiens
cttcggtgtgaggac

SEQ ID NO: 472745 - DNA, 15 bp, Homo sapiens
gcttcggtgtgagga

SEQ ID NO: 472746 - DNA, 15 bp, Homo sapiens
ggcttcggtgtgagg

SEQ ID NO: 472747 - DNA, 15 bp, Homo sapiens
aggcttcggtgtgag

SEQ ID NO: 472748 - DNA, 15 bp, Homo sapiens
caggcttcggtgtga

SEQ ID NO: 472749 - DNA, 15 bp, Homo sapiens
acaggcttcggtgtg

SEQ ID NO: 472750 - DNA, 15 bp, Homo sapiens
cacaggcttcggtgt

SEQ ID NO: 472751 - DNA, 15 bp, Homo sapiens
gcacaggcttcggtg

SEQ ID NO: 472752 - DNA, 15 bp, Homo sapiens
agcacaggcttcggt

SEQ ID NO: 472753 - DNA, 15 bp, Homo sapiens
aagcacaggcttcgg

SEQ ID NO: 472754 - DNA, 15 bp, Homo sapiens
aaagcacaggcttcg

SEQ ID NO: 472755 - DNA, 15 bp, Homo sapiens
aaaagcacaggcttc

SEQ ID NO: 472756 - DNA, 15 bp, Homo sapiens
gaaaagcacaggctt

SEQ ID NO: 472757 - DNA, 15 bp, Homo sapiens
ggaaaagcacaggct

SEQ ID NO: 472758 - DNA, 15 bp, Homo sapiens
gggaaaagcacaggc

SEQ ID NO: 472759 - DNA, 15 bp, Homo sapiens
tgggaaaagcacagg

SEQ ID NO: 472760 - DNA, 15 bp, Homo sapiens
atgggaaaagcacag

SEQ ID NO: 472761 - DNA, 15 bp, Homo sapiens
aatgggaaaagcaca

SEQ ID NO: 472762 - DNA, 15 bp, Homo sapiens
aaatgggaaaagcac

SEQ ID NO: 472763 - DNA, 15 bp, Homo sapiens
taaatgggaaaagca

SEQ ID NO: 472764 - DNA, 15 bp, Homo sapiens
gtaaatgggaaaagc

SEQ ID NO: 472765 - DNA, 15 bp, Homo sapiens
ggtaaatgggaaaag

SEQ ID NO: 472766 - DNA, 15 bp, Homo sapiens
gggtaaatgggaaaa

SEQ ID NO: 472767 - DNA, 15 bp, Homo sapiens
ggggtaaatgggaaa

SEQ ID NO: 472768 - DNA, 15 bp, Homo sapiens
tggggtaaatgggaa

SEQ ID NO: 472769 - DNA, 15 bp, Homo sapiens
ctggggtaaatggga

SEQ ID NO: 472770 - DNA, 15 bp, Homo sapiens
tctggggtaaatggg

SEQ ID NO: 472771 - DNA, 15 bp, Homo sapiens
gtctggggtaaatgg

SEQ ID NO: 472772 - DNA, 15 bp, Homo sapiens
agtctggggtaaatg

SEQ ID NO: 472773 - DNA, 15 bp, Homo sapiens
cagtctggggtaaat

SEQ ID NO: 472774 - DNA, 15 bp, Homo sapiens
gcagtctggggtaaa

SEQ ID NO: 472775 - DNA, 15 bp, Homo sapiens
tgcagtctggggtaa

SEQ ID NO: 472776 - DNA, 15 bp, Homo sapiens
gtgcagtctggggta

SEQ ID NO: 472777 - DNA, 15 bp, Homo sapiens
tgtgcagtctggggt

SEQ ID NO: 472778 - DNA, 15 bp, Homo sapiens
ctgtgcagtctgggg

SEQ ID NO: 472779 - DNA, 15 bp, Homo sapiens
gctgtgcagtctggg

SEQ ID NO: 472780 - DNA, 15 bp, Homo sapiens
agctgtgcagtctgg

SEQ ID NO: 472781 - DNA, 15 bp, Homo sapiens
gagctgtgcagtctg

SEQ ID NO: 472782 - DNA, 15 bp, Homo sapiens
ggagctgtgcagtct

SEQ ID NO: 472783 - DNA, 15 bp, Homo sapiens
tggagctgtgcagtc

SEQ ID NO: 472784 - DNA, 15 bp, Homo sapiens
gtggagctgtgcagt

SEQ ID NO: 472785 - DNA, 15 bp, Homo sapiens
ggtggagctgtgcag

SEQ ID NO: 472786 - DNA, 15 bp, Homo sapiens
tggtggagctgtgca

SEQ ID NO: 472787 - DNA, 15 bp, Homo sapiens
ctggtggagctgtgc

SEQ ID NO: 472788 - DNA, 15 bp, Homo sapiens
cctggtggagctgtg

SEQ ID NO: 472789 - DNA, 15 bp, Homo sapiens
tcctggtggagctgt

SEQ ID NO: 472790 - DNA, 15 bp, Homo sapiens
ctcctggtggagctg

SEQ ID NO: 472791 - DNA, 15 bp, Homo sapiens
cctcctggtggagct

SEQ ID NO: 472792 - DNA, 15 bp, Homo sapiens
acctcctggtggagc

SEQ ID NO: 472793 - DNA, 15 bp, Homo sapiens
gacctcctggtggag

SEQ ID NO: 472794 - DNA, 15 bp, Homo sapiens
agacctcctggtgga

SEQ ID NO: 472795 - DNA, 15 bp, Homo sapiens
cagacctcctggtgg

SEQ ID NO: 472796 - DNA, 15 bp, Homo sapiens
gcagacctcctggtg

SEQ ID NO: 472797 - DNA, 15 bp, Homo sapiens
agcagacctcctggt

SEQ ID NO: 472798 - DNA, 15 bp, Homo sapiens
cagcagacctcctgg

SEQ ID NO: 472799 - DNA, 15 bp, Homo sapiens
gcagcagacctcctg

SEQ ID NO: 472800 - DNA, 15 bp, Homo sapiens
ggcagcagacctcct

SEQ ID NO: 472801 - DNA, 15 bp, Homo sapiens
aggcagcagacctcc

SEQ ID NO: 472802 - DNA, 15 bp, Homo sapiens
gaggcagcagacctc

SEQ ID NO: 472803 - DNA, 15 bp, Homo sapiens
ggaggcagcagacct

SEQ ID NO: 472804 - DNA, 15 bp, Homo sapiens
aggaggcagcagacc

SEQ ID NO: 472805 - DNA, 15 bp, Homo sapiens
gaggaggcagcagac

SEQ ID NO: 472806 - DNA, 15 bp, Homo sapiens
ggaggaggcagcaga

SEQ ID NO: 472807 - DNA, 15 bp, Homo sapiens
tggaggaggcagcag

SEQ ID NO: 472808 - DNA, 15 bp, Homo sapiens
gtggaggaggcagca

SEQ ID NO: 472809 - DNA, 15 bp, Homo sapiens
agtggaggaggcagc

SEQ ID NO: 472810 - DNA, 15 bp, Homo sapiens
gagtggaggaggcag

SEQ ID NO: 472811 - DNA, 15 bp, Homo sapiens
ggagtggaggaggca

SEQ ID NO: 472812 - DNA, 15 bp, Homo sapiens
tggagtggaggaggc

SEQ ID NO: 472813 - DNA, 15 bp, Homo sapiens
ttggagtggaggagg

SEQ ID NO: 472814 - DNA, 15 bp, Homo sapiens
gttggagtggaggag

SEQ ID NO: 472815 - DNA, 15 bp, Homo sapiens
agttggagtggagga

SEQ ID NO: 472816 - DNA, 15 bp, Homo sapiens
cagttggagtggagg

SEQ ID NO: 472817 - DNA, 15 bp, Homo sapiens
tcagttggagtggag

SEQ ID NO: 472818 - DNA, 15 bp, Homo sapiens
ttcagttggagtgga

SEQ ID NO: 472819 - DNA, 15 bp, Homo sapiens
gttcagttggagtgg

SEQ ID NO: 472820 - DNA, 15 bp, Homo sapiens
tgttcagttggagtg

SEQ ID NO: 472821 - DNA, 15 bp, Homo sapiens
gtgttcagttggagt

SEQ ID NO: 472822 - DNA, 15 bp, Homo sapiens
agtgttcagttggag

SEQ ID NO: 472823 - DNA, 15 bp, Homo sapiens
cagtgttcagttgga

SEQ ID NO: 472824 - DNA, 15 bp, Homo sapiens
acagtgttcagttgg

SEQ ID NO: 472825 - DNA, 15 bp, Homo sapiens
cacagtgttcagttg

SEQ ID NO: 472826 - DNA, 15 bp, Homo sapiens
acacagtgttcagtt

SEQ ID NO: 472827 - DNA, 15 bp, Homo sapiens
cacacagtgttcagt

SEQ ID NO: 472828 - DNA, 15 bp, Homo sapiens
ccacacagtgttcag

SEQ ID NO: 472829 - DNA, 15 bp, Homo sapiens
gccacacagtgttca

SEQ ID NO: 472830 - DNA, 15 bp, Homo sapiens
tgccacacagtgttc

SEQ ID NO: 472831 - DNA, 15 bp, Homo sapiens
ctgccacacagtgtt

SEQ ID NO: 472832 - DNA, 15 bp, Homo sapiens
tctgccacacagtgt

SEQ ID NO: 472833 - DNA, 15 bp, Homo sapiens
ttctgccacacagtg

SEQ ID NO: 472834 - DNA, 15 bp, Homo sapiens
attctgccacacagt

SEQ ID NO: 472835 - DNA, 15 bp, Homo sapiens
tattctgccacacag

SEQ ID NO: 472836 - DNA, 15 bp, Homo sapiens
ctattctgccacaca

SEQ ID NO: 472837 - DNA, 15 bp, Homo sapiens
cctattctgccacac

SEQ ID NO: 472838 - DNA, 15 bp, Homo sapiens
ccctattctgccaca

SEQ ID NO: 472839 - DNA, 15 bp, Homo sapiens
cccctattctgccac

SEQ ID NO: 472840 - DNA, 15 bp, Homo sapiens
ccccctattctgcca

SEQ ID NO: 472841 - DNA, 15 bp, Homo sapiens
gccccctattctgcc

SEQ ID NO: 472842 - DNA, 15 bp, Homo sapiens
tgccccctattctgc

SEQ ID NO: 472843 - DNA, 15 bp, Homo sapiens
ctgccccctattctg

SEQ ID NO: 472844 - DNA, 15 bp, Homo sapiens
cctgccccctattct

SEQ ID NO: 472845 - DNA, 15 bp, Homo sapiens
acctgccccctattc

SEQ ID NO: 472846 - DNA, 15 bp, Homo sapiens
gacctgccccctatt

SEQ ID NO: 472847 - DNA, 15 bp, Homo sapiens
cgacctgccccctat

SEQ ID NO: 472848 - DNA, 15 bp, Homo sapiens
gcgacctgcccccta

SEQ ID NO: 472849 - DNA, 15 bp, Homo sapiens
agcgacctgccccct

SEQ ID NO: 472850 - DNA, 15 bp, Homo sapiens
tagcgacctgccccc

SEQ ID NO: 472851 - DNA, 15 bp, Homo sapiens
atagcgacctgcccc

SEQ ID NO: 472852 - DNA, 15 bp, Homo sapiens
gatagcgacctgccc

SEQ ID NO: 472853 - DNA, 15 bp, Homo sapiens
agatagcgacctgcc

SEQ ID NO: 472854 - DNA, 15 bp, Homo sapiens
gagatagcgacctgc

SEQ ID NO: 472855 - DNA, 15 bp, Homo sapiens
tgagatagcgacctg

SEQ ID NO: 472856 - DNA, 15 bp, Homo sapiens
atgagatagcgacct

SEQ ID NO: 472857 - DNA, 15 bp, Homo sapiens
aatgagatagcgacc

SEQ ID NO: 472858 - DNA, 15 bp, Homo sapiens
taatgagatagcgac

SEQ ID NO: 472859 - DNA, 15 bp, Homo sapiens
gtaatgagatagcga

SEQ ID NO: 472860 - DNA, 15 bp, Homo sapiens
agtaatgagatagcg

SEQ ID NO: 472861 - DNA, 15 bp, Homo sapiens
tagtaatgagatagc

SEQ ID NO: 472862 - DNA, 15 bp, Homo sapiens
ttagtaatgagatag

SEQ ID NO: 472863 - DNA, 15 bp, Homo sapiens
gttagtaatgagata

SEQ ID NO: 472864 - DNA, 15 bp, Homo sapiens
agttagtaatgagat

SEQ ID NO: 472865 - DNA, 15 bp, Homo sapiens
cagttagtaatgaga

SEQ ID NO: 472866 - DNA, 15 bp, Homo sapiens
acagttagtaatgag

SEQ ID NO: 472867 - DNA, 15 bp, Homo sapiens
cacagttagtaatga

SEQ ID NO: 472868 - DNA, 15 bp, Homo sapiens
tcacagttagtaatg

SEQ ID NO: 472869 - DNA, 15 bp, Homo sapiens
ctcacagttagtaat

SEQ ID NO: 472870 - DNA, 15 bp, Homo sapiens
cctcacagttagtaa

SEQ ID NO: 472871 - DNA, 15 bp, Homo sapiens
acctcacagttagta

SEQ ID NO: 472872 - DNA, 15 bp, Homo sapiens
cacctcacagttagt

SEQ ID NO: 472873 - DNA, 15 bp, Homo sapiens
tcacctcacagttag

SEQ ID NO: 472874 - DNA, 15 bp, Homo sapiens
ctcacctcacagtta

SEQ ID NO: 472875 - DNA, 15 bp, Homo sapiens
tctcacctcacagtt

SEQ ID NO: 472876 - DNA, 15 bp, Homo sapiens
atctcacctcacagt

SEQ ID NO: 472877 - DNA, 15 bp, Homo sapiens
aatctcacctcacag

SEQ ID NO: 472878 - DNA, 15 bp, Homo sapiens
caatctcacctcaca

SEQ ID NO: 472879 - DNA, 15 bp, Homo sapiens
tcaatctcacctcac

SEQ ID NO: 472880 - DNA, 15 bp, Homo sapiens
ctcaatctcacctca

SEQ ID NO: 472881 - DNA, 15 bp, Homo sapiens
tctcaatctcacctc

SEQ ID NO: 472882 - DNA, 15 bp, Homo sapiens
ttctcaatctcacct

SEQ ID NO: 472883 - DNA, 15 bp, Homo sapiens
gttctcaatctcacc

SEQ ID NO: 472884 - DNA, 15 bp, Homo sapiens
ggttctcaatctcac

SEQ ID NO: 472885 - DNA, 15 bp, Homo sapiens
gggttctcaatctca

SEQ ID NO: 472886 - DNA, 15 bp, Homo sapiens
cgggttctcaatctc

SEQ ID NO: 472887 - DNA, 15 bp, Homo sapiens
ccgggttctcaatct

SEQ ID NO: 472888 - DNA, 15 bp, Homo sapiens
cccgggttctcaatc

SEQ ID NO: 472889 - DNA, 15 bp, Homo sapiens
gcccgggttctcaat

SEQ ID NO: 472890 - DNA, 15 bp, Homo sapiens
agcccgggttctcaa

SEQ ID NO: 472891 - DNA, 15 bp, Homo sapiens
aagcccgggttctca

SEQ ID NO: 472892 - DNA, 15 bp, Homo sapiens
aaagcccgggttctc

SEQ ID NO: 472893 - DNA, 15 bp, Homo sapiens
gaaagcccgggttct

SEQ ID NO: 472894 - DNA, 15 bp, Homo sapiens
ggaaagcccgggttc

SEQ ID NO: 472895 - DNA, 15 bp, Homo sapiens
aggaaagcccgggtt

SEQ ID NO: 472896 - DNA, 15 bp, Homo sapiens
gaggaaagcccgggt

SEQ ID NO: 472897 - DNA, 15 bp, Homo sapiens
ggaggaaagcccggg

SEQ ID NO: 472898 - DNA, 15 bp, Homo sapiens
gggaggaaagcccgg

SEQ ID NO: 472899 - DNA, 15 bp, Homo sapiens
ggggaggaaagcccg

SEQ ID NO: 472900 - DNA, 15 bp, Homo sapiens
aggggaggaaagccc

SEQ ID NO: 472901 - DNA, 15 bp, Homo sapiens
aaggggaggaaagcc

SEQ ID NO: 472902 - DNA, 15 bp, Homo sapiens
gaaggggaggaaagc

SEQ ID NO: 472903 - DNA, 15 bp, Homo sapiens
agaaggggaggaaag

SEQ ID NO: 472904 - DNA, 15 bp, Homo sapiens
gagaaggggaggaaa

SEQ ID NO: 472905 - DNA, 15 bp, Homo sapiens
agagaaggggaggaa

SEQ ID NO: 472906 - DNA, 15 bp, Homo sapiens
cagagaaggggagga

SEQ ID NO: 472907 - DNA, 15 bp, Homo sapiens
gcagagaaggggagg

SEQ ID NO: 472908 - DNA, 15 bp, Homo sapiens
tgcagagaaggggag

SEQ ID NO: 472909 - DNA, 15 bp, Homo sapiens
ctgcagagaagggga

SEQ ID NO: 472910 - DNA, 15 bp, Homo sapiens
actgcagagaagggg

SEQ ID NO: 472911 - DNA, 15 bp, Homo sapiens
gactgcagagaaggg

SEQ ID NO: 472912 - DNA, 15 bp, Homo sapiens
agactgcagagaagg

SEQ ID NO: 472913 - DNA, 15 bp, Homo sapiens
tagactgcagagaag

SEQ ID NO: 472914 - DNA, 15 bp, Homo sapiens
atagactgcagagaa

SEQ ID NO: 472915 - DNA, 15 bp, Homo sapiens
gatagactgcagaga

SEQ ID NO: 472916 - DNA, 15 bp, Homo sapiens
agatagactgcagag

SEQ ID NO: 472917 - DNA, 15 bp, Homo sapiens
aagatagactgcaga

SEQ ID NO: 472918 - DNA, 15 bp, Homo sapiens
gaagatagactgcag

SEQ ID NO: 472919 - DNA, 15 bp, Homo sapiens
agaagatagactgca

SEQ ID NO: 472920 - DNA, 15 bp, Homo sapiens
tagaagatagactgc

SEQ ID NO: 472921 - DNA, 15 bp, Homo sapiens
ctagaagatagactg

SEQ ID NO: 472922 - DNA, 15 bp, Homo sapiens
cctagaagatagact

SEQ ID NO: 472923 - DNA, 15 bp, Homo sapiens
ccctagaagatagac

SEQ ID NO: 472924 - DNA, 15 bp, Homo sapiens
cccctagaagataga

SEQ ID NO: 472925 - DNA, 15 bp, Homo sapiens
gcccctagaagatag

SEQ ID NO: 472926 - DNA, 15 bp, Homo sapiens
ggcccctagaagata

SEQ ID NO: 472927 - DNA, 15 bp, Homo sapiens
tggcccctagaagat

SEQ ID NO: 472928 - DNA, 15 bp, Homo sapiens
ttggcccctagaaga

SEQ ID NO: 472929 - DNA, 15 bp, Homo sapiens
cttggcccctagaag

SEQ ID NO: 472930 - DNA, 15 bp, Homo sapiens
gcttggcccctagaa

SEQ ID NO: 472931 - DNA, 15 bp, Homo sapiens
ggcttggcccctaga

SEQ ID NO: 472932 - DNA, 15 bp, Homo sapiens
aggcttggcccctag

SEQ ID NO: 472933 - DNA, 15 bp, Homo sapiens
aaggcttggccccta

SEQ ID NO: 472934 - DNA, 15 bp, Homo sapiens
gaaggcttggcccct

SEQ ID NO: 472935 - DNA, 15 bp, Homo sapiens
tgaaggcttggcccc

SEQ ID NO: 472936 - DNA, 15 bp, Homo sapiens
ttgaaggcttggccc

SEQ ID NO: 472937 - DNA, 15 bp, Homo sapiens
gttgaaggcttggcc

SEQ ID NO: 472938 - DNA, 15 bp, Homo sapiens
ggttgaaggcttggc

SEQ ID NO: 472939 - DNA, 15 bp, Homo sapiens
tggttgaaggcttgg

SEQ ID NO: 472940 - DNA, 15 bp, Homo sapiens
gtggttgaaggcttg

SEQ ID NO: 472941 - DNA, 15 bp, Homo sapiens
tgtggttgaaggctt

SEQ ID NO: 472942 - DNA, 15 bp, Homo sapiens
ctgtggttgaaggct

SEQ ID NO: 472943 - DNA, 15 bp, Homo sapiens
tctgtggttgaaggc

SEQ ID NO: 472944 - DNA, 15 bp, Homo sapiens
gtctgtggttgaagg

SEQ ID NO: 472945 - DNA, 15 bp, Homo sapiens
agtctgtggttgaag

SEQ ID NO: 472946 - DNA, 15 bp, Homo sapiens
cagtctgtggttgaa

SEQ ID NO: 472947 - DNA, 15 bp, Homo sapiens
ccagtctgtggttga

SEQ ID NO: 472948 - DNA, 15 bp, Homo sapiens
gccagtctgtggttg

SEQ ID NO: 472949 - DNA, 15 bp, Homo sapiens
agccagtctgtggtt

SEQ ID NO: 472950 - DNA, 15 bp, Homo sapiens
aagccagtctgtggt

SEQ ID NO: 472951 - DNA, 15 bp, Homo sapiens
caagccagtctgtgg

SEQ ID NO: 472952 - DNA, 15 bp, Homo sapiens
ccaagccagtctgtg

SEQ ID NO: 472953 - DNA, 15 bp, Homo sapiens
tccaagccagtctgt

SEQ ID NO: 472954 - DNA, 15 bp, Homo sapiens
atccaagccagtctg

SEQ ID NO: 472955 - DNA, 15 bp, Homo sapiens
catccaagccagtct

SEQ ID NO: 472956 - DNA, 15 bp, Homo sapiens
ccatccaagccagtc

SEQ ID NO: 472957 - DNA, 15 bp, Homo sapiens
gccatccaagccagt

SEQ ID NO: 472958 - DNA, 15 bp, Homo sapiens
agccatccaagccag

SEQ ID NO: 472959 - DNA, 15 bp, Homo sapiens
cagccatccaagcca

SEQ ID NO: 472960 - DNA, 15 bp, Homo sapiens
gcagccatccaagcc

SEQ ID NO: 472961 - DNA, 15 bp, Homo sapiens
ggcagccatccaagc

SEQ ID NO: 472962 - DNA, 15 bp, Homo sapiens
gggcagccatccaag

SEQ ID NO: 472963 - DNA, 15 bp, Homo sapiens
tgggcagccatccaa

SEQ ID NO: 472964 - DNA, 15 bp, Homo sapiens
ctgggcagccatcca

SEQ ID NO: 472965 - DNA, 15 bp, Homo sapiens
actgggcagccatcc

SEQ ID NO: 472966 - DNA, 15 bp, Homo sapiens
cactgggcagccatc

SEQ ID NO: 472967 - DNA, 15 bp, Homo sapiens
ccactgggcagccat

SEQ ID NO: 472968 - DNA, 15 bp, Homo sapiens
cccactgggcagcca

SEQ ID NO: 472969 - DNA, 15 bp, Homo sapiens
ccccactgggcagcc

SEQ ID NO: 472970 - DNA, 15 bp, Homo sapiens
gccccactgggcagc

SEQ ID NO: 472971 - DNA, 15 bp, Homo sapiens
agccccactgggcag

SEQ ID NO: 472972 - DNA, 15 bp, Homo sapiens
tagccccactgggca

SEQ ID NO: 472973 - DNA, 15 bp, Homo sapiens
atagccccactgggc

SEQ ID NO: 472974 - DNA, 15 bp, Homo sapiens
catagccccactggg

SEQ ID NO: 472975 - DNA, 15 bp, Homo sapiens
gcatagccccactgg

SEQ ID NO: 472976 - DNA, 15 bp, Homo sapiens
ggcatagccccactg

SEQ ID NO: 472977 - DNA, 15 bp, Homo sapiens
tggcatagccccact

SEQ ID NO: 472978 - DNA, 15 bp, Homo sapiens
ttggcatagccccac

SEQ ID NO: 472979 - DNA, 15 bp, Homo sapiens
cttggcatagcccca

SEQ ID NO: 472980 - DNA, 15 bp, Homo sapiens
ccttggcatagcccc

SEQ ID NO: 472981 - DNA, 15 bp, Homo sapiens
cccttggcatagccc

SEQ ID NO: 472982 - DNA, 15 bp, Homo sapiens
gcccttggcatagcc

SEQ ID NO: 472983 - DNA, 15 bp, Homo sapiens
tgcccttggcatagc

SEQ ID NO: 472984 - DNA, 15 bp, Homo sapiens
ctgcccttggcatag

SEQ ID NO: 472985 - DNA, 15 bp, Homo sapiens
cctgcccttggcata

SEQ ID NO: 472986 - DNA, 15 bp, Homo sapiens
tcctgcccttggcat

SEQ ID NO: 472987 - DNA, 15 bp, Homo sapiens
gtcctgcccttggca

SEQ ID NO: 472988 - DNA, 15 bp, Homo sapiens
cgtcctgcccttggc

SEQ ID NO: 472989 - DNA, 15 bp, Homo sapiens
tcgtcctgcccttgg

SEQ ID NO: 472990 - DNA, 15 bp, Homo sapiens
ctcgtcctgcccttg

SEQ ID NO: 472991 - DNA, 15 bp, Homo sapiens
cctcgtcctgccctt

SEQ ID NO: 472992 - DNA, 15 bp, Homo sapiens
tcctcgtcctgccct

SEQ ID NO: 472993 - DNA, 15 bp, Homo sapiens
ttcctcgtcctgccc

SEQ ID NO: 472994 - DNA, 15 bp, Homo sapiens
gttcctcgtcctgcc

SEQ ID NO: 472995 - DNA, 15 bp, Homo sapiens
tgttcctcgtcctgc

SEQ ID NO: 472996 - DNA, 15 bp, Homo sapiens
ctgttcctcgtcctg

SEQ ID NO: 472997 - DNA, 15 bp, Homo sapiens
cctgttcctcgtcct

SEQ ID NO: 472998 - DNA, 15 bp, Homo sapiens
ccctgttcctcgtcc

SEQ ID NO: 472999 - DNA, 15 bp, Homo sapiens
gccctgttcctcgtc

SEQ ID NO: 473000 - DNA, 15 bp, Homo sapiens
tgccctgttcctcgt

SEQ ID NO: 473001 - DNA, 15 bp, Homo sapiens
ctgccctgttcctcg

SEQ ID NO: 473002 - DNA, 15 bp, Homo sapiens
tctgccctgttcctc

SEQ ID NO: 473003 - DNA, 15 bp, Homo sapiens
ctctgccctgttcct

SEQ ID NO: 473004 - DNA, 15 bp, Homo sapiens
gctctgccctgttcc

SEQ ID NO: 473005 - DNA, 15 bp, Homo sapiens
tgctctgccctgttc

SEQ ID NO: 473006 - DNA, 15 bp, Homo sapiens
gtgctctgccctgtt

SEQ ID NO: 473007 - DNA, 15 bp, Homo sapiens
ggtgctctgccctgt

SEQ ID NO: 473008 - DNA, 15 bp, Homo sapiens
aggtgctctgccctg

SEQ ID NO: 473009 - DNA, 15 bp, Homo sapiens
caggtgctctgccct

SEQ ID NO: 473010 - DNA, 15 bp, Homo sapiens
ccaggtgctctgccc

SEQ ID NO: 473011 - DNA, 15 bp, Homo sapiens
cccaggtgctctgcc

SEQ ID NO: 473012 - DNA, 15 bp, Homo sapiens
gcccaggtgctctgc

SEQ ID NO: 473013 - DNA, 15 bp, Homo sapiens
cgcccaggtgctctg

SEQ ID NO: 473014 - DNA, 15 bp, Homo sapiens
acgcccaggtgctct

SEQ ID NO: 473015 - DNA, 15 bp, Homo sapiens
aacgcccaggtgctc

SEQ ID NO: 473016 - DNA, 15 bp, Homo sapiens
caacgcccaggtgct

SEQ ID NO: 473017 - DNA, 15 bp, Homo sapiens
gcaacgcccaggtgc

SEQ ID NO: 473018 - DNA, 15 bp, Homo sapiens
agcaacgcccaggtg

SEQ ID NO: 473019 - DNA, 15 bp, Homo sapiens
gagcaacgcccaggt

SEQ ID NO: 473020 - DNA, 15 bp, Homo sapiens
tgagcaacgcccagg

SEQ ID NO: 473021 - DNA, 15 bp, Homo sapiens
ctgagcaacgcccag

SEQ ID NO: 473022 - DNA, 15 bp, Homo sapiens
gctgagcaacgccca

SEQ ID NO: 473023 - DNA, 15 bp, Homo sapiens
tgctgagcaacgccc

SEQ ID NO: 473024 - DNA, 15 bp, Homo sapiens
ttgctgagcaacgcc

SEQ ID NO: 473025 - DNA, 15 bp, Homo sapiens
cttgctgagcaacgc

SEQ ID NO: 473026 - DNA, 15 bp, Homo sapiens
tcttgctgagcaacg

SEQ ID NO: 473027 - DNA, 15 bp, Homo sapiens
atcttgctgagcaac

SEQ ID NO: 473028 - DNA, 15 bp, Homo sapiens
gatcttgctgagcaa

SEQ ID NO: 473029 - DNA, 15 bp, Homo sapiens
agatcttgctgagca

SEQ ID NO: 473030 - DNA, 15 bp, Homo sapiens
gagatcttgctgagc

SEQ ID NO: 473031 - DNA, 15 bp, Homo sapiens
tgagatcttgctgag

SEQ ID NO: 473032 - DNA, 15 bp, Homo sapiens
atgagatcttgctga

SEQ ID NO: 473033 - DNA, 15 bp, Homo sapiens
gatgagatcttgctg

SEQ ID NO: 473034 - DNA, 15 bp, Homo sapiens
agatgagatcttgct

SEQ ID NO: 473035 - DNA, 15 bp, Homo sapiens
aagatgagatcttgc

SEQ ID NO: 473036 - DNA, 15 bp, Homo sapiens
gaagatgagatcttg

SEQ ID NO: 473037 - DNA, 15 bp, Homo sapiens
tgaagatgagatctt

SEQ ID NO: 473038 - DNA, 15 bp, Homo sapiens
ctgaagatgagatct

SEQ ID NO: 473039 - DNA, 15 bp, Homo sapiens
tctgaagatgagatc

SEQ ID NO: 473040 - DNA, 15 bp, Homo sapiens
ctctgaagatgagat

SEQ ID NO: 473041 - DNA, 15 bp, Homo sapiens
cctctgaagatgaga

SEQ ID NO: 473042 - DNA, 15 bp, Homo sapiens
gcctctgaagatgag

SEQ ID NO: 473043 - DNA, 15 bp, Homo sapiens
ggcctctgaagatga

SEQ ID NO: 473044 - DNA, 15 bp, Homo sapiens
tggcctctgaagatg

SEQ ID NO: 473045 - DNA, 15 bp, Homo sapiens
gtggcctctgaagat

SEQ ID NO: 473046 - DNA, 15 bp, Homo sapiens
cgtggcctctgaaga

SEQ ID NO: 473047 - DNA, 15 bp, Homo sapiens
ccgtggcctctgaag

SEQ ID NO: 473048 - DNA, 15 bp, Homo sapiens
gccgtggcctctgaa

SEQ ID NO: 473049 - DNA, 15 bp, Homo sapiens
cgccgtggcctctga

SEQ ID NO: 473050 - DNA, 15 bp, Homo sapiens
gcgccgtggcctctg

SEQ ID NO: 473051 - DNA, 15 bp, Homo sapiens
agcgccgtggcctct

SEQ ID NO: 473052 - DNA, 15 bp, Homo sapiens
tagcgccgtggcctc

SEQ ID NO: 473053 - DNA, 15 bp, Homo sapiens
ttagcgccgtggcct

SEQ ID NO: 473054 - DNA, 15 bp, Homo sapiens
tttagcgccgtggcc

SEQ ID NO: 473055 - DNA, 15 bp, Homo sapiens
ttttagcgccgtggc

SEQ ID NO: 473056 - DNA, 15 bp, Homo sapiens
attttagcgccgtgg

SEQ ID NO: 473057 - DNA, 15 bp, Homo sapiens
cattttagcgccgtg

SEQ ID NO: 473058 - DNA, 15 bp, Homo sapiens
acattttagcgccgt

SEQ ID NO: 473059 - DNA, 15 bp, Homo sapiens
cacattttagcgccg

SEQ ID NO: 473060 - DNA, 15 bp, Homo sapiens
ccacattttagcgcc

SEQ ID NO: 473061 - DNA, 15 bp, Homo sapiens
accacattttagcgc

SEQ ID NO: 473062 - DNA, 15 bp, Homo sapiens
gaccacattttagcg

SEQ ID NO: 473063 - DNA, 15 bp, Homo sapiens
tgaccacattttagc

SEQ ID NO: 473064 - DNA, 15 bp, Homo sapiens
ctgaccacattttag

SEQ ID NO: 473065 - DNA, 15 bp, Homo sapiens
tctgaccacatttta

SEQ ID NO: 473066 - DNA, 15 bp, Homo sapiens
ttctgaccacatttt

SEQ ID NO: 473067 - DNA, 15 bp, Homo sapiens
cttctgaccacattt

SEQ ID NO: 473068 - DNA, 15 bp, Homo sapiens
acttctgaccacatt

SEQ ID NO: 473069 - DNA, 15 bp, Homo sapiens
gacttctgaccacat

SEQ ID NO: 473070 - DNA, 15 bp, Homo sapiens
agacttctgaccaca

SEQ ID NO: 473071 - DNA, 15 bp, Homo sapiens
cagacttctgaccac

SEQ ID NO: 473072 - DNA, 15 bp, Homo sapiens
gcagacttctgacca

SEQ ID NO: 473073 - DNA, 15 bp, Homo sapiens
agcagacttctgacc

SEQ ID NO: 473074 - DNA, 15 bp, Homo sapiens
gagcagacttctgac

SEQ ID NO: 473075 - DNA, 15 bp, Homo sapiens
ggagcagacttctga

SEQ ID NO: 473076 - DNA, 15 bp, Homo sapiens
gggagcagacttctg

SEQ ID NO: 473077 - DNA, 15 bp, Homo sapiens
ggggagcagacttct

SEQ ID NO: 473078 - DNA, 15 bp, Homo sapiens
tggggagcagacttc

SEQ ID NO: 473079 - DNA, 15 bp, Homo sapiens
ttggggagcagactt

SEQ ID NO: 473080 - DNA, 15 bp, Homo sapiens
cttggggagcagact

SEQ ID NO: 473081 - DNA, 15 bp, Homo sapiens
tcttggggagcagac

SEQ ID NO: 473082 - DNA, 15 bp, Homo sapiens
ttcttggggagcaga

SEQ ID NO: 473083 - DNA, 15 bp, Homo sapiens
cttcttggggagcag

SEQ ID NO: 473084 - DNA, 15 bp, Homo sapiens
acttcttggggagca

SEQ ID NO: 473085 - DNA, 15 bp, Homo sapiens
tacttcttggggagc

SEQ ID NO: 473086 - DNA, 15 bp, Homo sapiens
gtacttcttggggag

SEQ ID NO: 473087 - DNA, 15 bp, Homo sapiens
agtacttcttgggga

SEQ ID NO: 473088 - DNA, 15 bp, Homo sapiens
cagtacttcttgggg

SEQ ID NO: 473089 - DNA, 15 bp, Homo sapiens
tcagtacttcttggg

SEQ ID NO: 473090 - DNA, 15 bp, Homo sapiens
gtcagtacttcttgg

SEQ ID NO: 473091 - DNA, 15 bp, Homo sapiens
tgtcagtacttcttg

SEQ ID NO: 473092 - DNA, 15 bp, Homo sapiens
gtgtcagtacttctt

SEQ ID NO: 473093 - DNA, 15 bp, Homo sapiens
ggtgtcagtacttct

SEQ ID NO: 473094 - DNA, 15 bp, Homo sapiens
aggtgtcagtacttc

SEQ ID NO: 473095 - DNA, 15 bp, Homo sapiens
aaggtgtcagtactt

SEQ ID NO: 473096 - DNA, 15 bp, Homo sapiens
aaaggtgtcagtact

SEQ ID NO: 473097 - DNA, 15 bp, Homo sapiens
caaaggtgtcagtac

SEQ ID NO: 473098 - DNA, 15 bp, Homo sapiens
acaaaggtgtcagta

SEQ ID NO: 473099 - DNA, 15 bp, Homo sapiens
cacaaaggtgtcagt

SEQ ID NO: 473100 - DNA, 15 bp, Homo sapiens
ccacaaaggtgtcag

SEQ ID NO: 473101 - DNA, 15 bp, Homo sapiens
accacaaaggtgtca

SEQ ID NO: 473102 - DNA, 15 bp, Homo sapiens
gaccacaaaggtgtc

SEQ ID NO: 473103 - DNA, 15 bp, Homo sapiens
ggaccacaaaggtgt

SEQ ID NO: 473104 - DNA, 15 bp, Homo sapiens
tggaccacaaaggtg

SEQ ID NO: 473105 - DNA, 15 bp, Homo sapiens
ctggaccacaaaggt

SEQ ID NO: 473106 - DNA, 15 bp, Homo sapiens
tctggaccacaaagg

SEQ ID NO: 473107 - DNA, 15 bp, Homo sapiens
ttctggaccacaaag

SEQ ID NO: 473108 - DNA, 15 bp, Homo sapiens
tttctggaccacaaa

SEQ ID NO: 473109 - DNA, 15 bp, Homo sapiens
ttttctggaccacaa

SEQ ID NO: 473110 - DNA, 15 bp, Homo sapiens
cttttctggaccaca

SEQ ID NO: 473111 - DNA, 15 bp, Homo sapiens
gcttttctggaccac

SEQ ID NO: 473112 - DNA, 15 bp, Homo sapiens
tgcttttctggacca

SEQ ID NO: 473113 - DNA, 15 bp, Homo sapiens
gtgcttttctggacc

SEQ ID NO: 473114 - DNA, 15 bp, Homo sapiens
agtgcttttctggac

SEQ ID NO: 473115 - DNA, 15 bp, Homo sapiens
aagtgcttttctgga

SEQ ID NO: 473116 - DNA, 15 bp, Homo sapiens
taagtgcttttctgg

SEQ ID NO: 473117 - DNA, 15 bp, Homo sapiens
ctaagtgcttttctg

SEQ ID NO: 473118 - DNA, 15 bp, Homo sapiens
cctaagtgcttttct

SEQ ID NO: 473119 - DNA, 15 bp, Homo sapiens
acctaagtgcttttc

SEQ ID NO: 473120 - DNA, 15 bp, Homo sapiens
tacctaagtgctttt

SEQ ID NO: 473121 - DNA, 15 bp, Homo sapiens
ctacctaagtgcttt

SEQ ID NO: 473122 - DNA, 15 bp, Homo sapiens
tctacctaagtgctt

SEQ ID NO: 473123 - DNA, 15 bp, Homo sapiens
gtctacctaagtgct

SEQ ID NO: 473124 - DNA, 15 bp, Homo sapiens
ggtctacctaagtgc

SEQ ID NO: 473125 - DNA, 15 bp, Homo sapiens
gggtctacctaagtg

SEQ ID NO: 473126 - DNA, 15 bp, Homo sapiens
ggggtctacctaagt

SEQ ID NO: 473127 - DNA, 15 bp, Homo sapiens
aggggtctacctaag

SEQ ID NO: 473128 - DNA, 15 bp, Homo sapiens
gaggggtctacctaa

SEQ ID NO: 473129 - DNA, 15 bp, Homo sapiens
agaggggtctaccta

SEQ ID NO: 473130 - DNA, 15 bp, Homo sapiens
gagaggggtctacct

SEQ ID NO: 473131 - DNA, 15 bp, Homo sapiens
agagaggggtctacc

SEQ ID NO: 473132 - DNA, 15 bp, Homo sapiens
cagagaggggtctac

SEQ ID NO: 473133 - DNA, 15 bp, Homo sapiens
ccagagaggggtcta

SEQ ID NO: 473134 - DNA, 15 bp, Homo sapiens
cccagagaggggtct

SEQ ID NO: 473135 - DNA, 15 bp, Homo sapiens
tcccagagaggggtc

SEQ ID NO: 473136 - DNA, 15 bp, Homo sapiens
atcccagagaggggt

SEQ ID NO: 473137 - DNA, 15 bp, Homo sapiens
catcccagagagggg

SEQ ID NO: 473138 - DNA, 15 bp, Homo sapiens
ccatcccagagaggg

SEQ ID NO: 473139 - DNA, 15 bp, Homo sapiens
accatcccagagagg

SEQ ID NO: 473140 - DNA, 15 bp, Homo sapiens
gaccatcccagagag

SEQ ID NO: 473141 - DNA, 15 bp, Homo sapiens
ggaccatcccagaga

SEQ ID NO: 473142 - DNA, 15 bp, Homo sapiens
aggaccatcccagag

SEQ ID NO: 473143 - DNA, 15 bp, Homo sapiens
taggaccatcccaga

SEQ ID NO: 473144 - DNA, 15 bp, Homo sapiens
ttaggaccatcccag

SEQ ID NO: 473145 - DNA, 15 bp, Homo sapiens
cttaggaccatccca

SEQ ID NO: 473146 - DNA, 15 bp, Homo sapiens
ccttaggaccatccc

SEQ ID NO: 473147 - DNA, 15 bp, Homo sapiens
accttaggaccatcc

SEQ ID NO: 473148 - DNA, 15 bp, Homo sapiens
gaccttaggaccatc

SEQ ID NO: 473149 - DNA, 15 bp, Homo sapiens
agaccttaggaccat

SEQ ID NO: 473150 - DNA, 15 bp, Homo sapiens
aagaccttaggacca

SEQ ID NO: 473151 - DNA, 15 bp, Homo sapiens
aaagaccttaggacc

SEQ ID NO: 473152 - DNA, 15 bp, Homo sapiens
caaagaccttaggac

SEQ ID NO: 473153 - DNA, 15 bp, Homo sapiens
ccaaagaccttagga

SEQ ID NO: 473154 - DNA, 15 bp, Homo sapiens
cccaaagaccttagg

SEQ ID NO: 473155 - DNA, 15 bp, Homo sapiens
ccccaaagaccttag

SEQ ID NO: 473156 - DNA, 15 bp, Homo sapiens
accccaaagacctta

SEQ ID NO: 473157 - DNA, 15 bp, Homo sapiens
aaccccaaagacctt

SEQ ID NO: 473158 - DNA, 15 bp, Homo sapiens
caaccccaaagacct

SEQ ID NO: 473159 - DNA, 15 bp, Homo sapiens
ccaaccccaaagacc

SEQ ID NO: 473160 - DNA, 15 bp, Homo sapiens
gccaaccccaaagac

SEQ ID NO: 473161 - DNA, 15 bp, Homo sapiens
agccaaccccaaaga

SEQ ID NO: 473162 - DNA, 15 bp, Homo sapiens
tagccaaccccaaag

SEQ ID NO: 473163 - DNA, 15 bp, Homo sapiens
gtagccaaccccaaa

SEQ ID NO: 473164 - DNA, 15 bp, Homo sapiens
agtagccaaccccaa

SEQ ID NO: 473165 - DNA, 15 bp, Homo sapiens
cagtagccaacccca

SEQ ID NO: 473166 - DNA, 15 bp, Homo sapiens
gcagtagccaacccc

SEQ ID NO: 473167 - DNA, 15 bp, Homo sapiens
ggcagtagccaaccc

SEQ ID NO: 473168 - DNA, 15 bp, Homo sapiens
gggcagtagccaacc

SEQ ID NO: 473169 - DNA, 15 bp, Homo sapiens
agggcagtagccaac

SEQ ID NO: 473170 - DNA, 15 bp, Homo sapiens
tagggcagtagccaa

SEQ ID NO: 473171 - DNA, 15 bp, Homo sapiens
ttagggcagtagcca

SEQ ID NO: 473172 - DNA, 15 bp, Homo sapiens
cttagggcagtagcc

SEQ ID NO: 473173 - DNA, 15 bp, Homo sapiens
acttagggcagtagc

SEQ ID NO: 473174 - DNA, 15 bp, Homo sapiens
gacttagggcagtag

SEQ ID NO: 473175 - DNA, 15 bp, Homo sapiens
ggacttagggcagta

SEQ ID NO: 473176 - DNA, 15 bp, Homo sapiens
aggacttagggcagt

SEQ ID NO: 473177 - DNA, 15 bp, Homo sapiens
taggacttagggcag

SEQ ID NO: 473178 - DNA, 15 bp, Homo sapiens
ttaggacttagggca

SEQ ID NO: 473179 - DNA, 15 bp, Homo sapiens
tttaggacttagggc

SEQ ID NO: 473180 - DNA, 15 bp, Homo sapiens
atttaggacttaggg

SEQ ID NO: 473181 - DNA, 15 bp, Homo sapiens
aatttaggacttagg

SEQ ID NO: 473182 - DNA, 15 bp, Homo sapiens
caatttaggacttag

SEQ ID NO: 473183 - DNA, 15 bp, Homo sapiens
tcaatttaggactta

SEQ ID NO: 473184 - DNA, 15 bp, Homo sapiens
ttcaatttaggactt

SEQ ID NO: 473185 - DNA, 15 bp, Homo sapiens
tttcaatttaggact

SEQ ID NO: 473186 - DNA, 15 bp, Homo sapiens
ttttcaatttaggac

SEQ ID NO: 473187 - DNA, 15 bp, Homo sapiens
attttcaatttagga

SEQ ID NO: 473188 - DNA, 15 bp, Homo sapiens
tattttcaatttagg

SEQ ID NO: 473189 - DNA, 15 bp, Homo sapiens
atattttcaatttag

SEQ ID NO: 473190 - DNA, 15 bp, Homo sapiens
tatattttcaattta

SEQ ID NO: 473191 - DNA, 15 bp, Homo sapiens
gtatattttcaattt

SEQ ID NO: 473192 - DNA, 15 bp, Homo sapiens
agtatattttcaatt

SEQ ID NO: 473193 - DNA, 15 bp, Homo sapiens
tagtatattttcaat

SEQ ID NO: 473194 - DNA, 15 bp, Homo sapiens
ttagtatattttcaa

SEQ ID NO: 473195 - DNA, 15 bp, Homo sapiens
cttagtatattttca

SEQ ID NO: 473196 - DNA, 15 bp, Homo sapiens
ccttagtatattttc

SEQ ID NO: 473197 - DNA, 15 bp, Homo sapiens
cccttagtatatttt

SEQ ID NO: 473198 - DNA, 15 bp, Homo sapiens
ccccttagtatattt

SEQ ID NO: 473199 - DNA, 15 bp, Homo sapiens
gccccttagtatatt

SEQ ID NO: 473200 - DNA, 15 bp, Homo sapiens
agccccttagtatat

SEQ ID NO: 473201 - DNA, 15 bp, Homo sapiens
cagccccttagtata

SEQ ID NO: 473202 - DNA, 15 bp, Homo sapiens
gcagccccttagtat

SEQ ID NO: 473203 - DNA, 15 bp, Homo sapiens
agcagccccttagta

SEQ ID NO: 473204 - DNA, 15 bp, Homo sapiens
cagcagccccttagt

SEQ ID NO: 473205 - DNA, 15 bp, Homo sapiens
ccagcagccccttag

SEQ ID NO: 473206 - DNA, 15 bp, Homo sapiens
gccagcagcccctta

SEQ ID NO: 473207 - DNA, 15 bp, Homo sapiens
tgccagcagcccctt

SEQ ID NO: 473208 - DNA, 15 bp, Homo sapiens
ctgccagcagcccct

SEQ ID NO: 473209 - DNA, 15 bp, Homo sapiens
gctgccagcagcccc

SEQ ID NO: 473210 - DNA, 15 bp, Homo sapiens
ggctgccagcagccc

SEQ ID NO: 473211 - DNA, 15 bp, Homo sapiens
aggctgccagcagcc

SEQ ID NO: 473212 - DNA, 15 bp, Homo sapiens
caggctgccagcagc

SEQ ID NO: 473213 - DNA, 15 bp, Homo sapiens
gcaggctgccagcag

SEQ ID NO: 473214 - DNA, 15 bp, Homo sapiens
cgcaggctgccagca

SEQ ID NO: 473215 - DNA, 15 bp, Homo sapiens
gcgcaggctgccagc

SEQ ID NO: 473216 - DNA, 15 bp, Homo sapiens
tgcgcaggctgccag

SEQ ID NO: 473217 - DNA, 15 bp, Homo sapiens
ctgcgcaggctgcca

SEQ ID NO: 473218 - DNA, 15 bp, Homo sapiens
gctgcgcaggctgcc

SEQ ID NO: 473219 - DNA, 15 bp, Homo sapiens
ggctgcgcaggctgc

SEQ ID NO: 473220 - DNA, 15 bp, Homo sapiens
tggctgcgcaggctg

SEQ ID NO: 473221 - DNA, 15 bp, Homo sapiens
atggctgcgcaggct

SEQ ID NO: 473222 - DNA, 15 bp, Homo sapiens
aatggctgcgcaggc

SEQ ID NO: 473223 - DNA, 15 bp, Homo sapiens
aaatggctgcgcagg

SEQ ID NO: 473224 - DNA, 15 bp, Homo sapiens
gaaatggctgcgcag

SEQ ID NO: 473225 - DNA, 15 bp, Homo sapiens
ggaaatggctgcgca

SEQ ID NO: 473226 - DNA, 15 bp, Homo sapiens
aggaaatggctgcgc

SEQ ID NO: 473227 - DNA, 15 bp, Homo sapiens
caggaaatggctgcg

SEQ ID NO: 473228 - DNA, 15 bp, Homo sapiens
acaggaaatggctgc

SEQ ID NO: 473229 - DNA, 15 bp, Homo sapiens
aacaggaaatggctg

SEQ ID NO: 473230 - DNA, 15 bp, Homo sapiens
taacaggaaatggct

SEQ ID NO: 473231 - DNA, 15 bp, Homo sapiens
ttaacaggaaatggc

SEQ ID NO: 473232 - DNA, 15 bp, Homo sapiens
tttaacaggaaatgg

SEQ ID NO: 473233 - DNA, 15 bp, Homo sapiens
gtttaacaggaaatg

SEQ ID NO: 473234 - DNA, 15 bp, Homo sapiens
ggtttaacaggaaat

SEQ ID NO: 473235 - DNA, 15 bp, Homo sapiens
tggtttaacaggaaa

SEQ ID NO: 473236 - DNA, 15 bp, Homo sapiens
ttggtttaacaggaa

SEQ ID NO: 473237 - DNA, 15 bp, Homo sapiens
tttggtttaacagga

SEQ ID NO: 473238 - DNA, 15 bp, Homo sapiens
ctttggtttaacagg

SEQ ID NO: 473239 - DNA, 15 bp, Homo sapiens
gctttggtttaacag

SEQ ID NO: 473240 - DNA, 15 bp, Homo sapiens
agctttggtttaaca

SEQ ID NO: 473241 - DNA, 15 bp, Homo sapiens
cagctttggtttaac

SEQ ID NO: 473242 - DNA, 15 bp, Homo sapiens
gcagctttggtttaa

SEQ ID NO: 473243 - DNA, 15 bp, Homo sapiens
ggcagctttggttta

SEQ ID NO: 473244 - DNA, 15 bp, Homo sapiens
gggcagctttggttt

SEQ ID NO: 473245 - DNA, 15 bp, Homo sapiens
tgggcagctttggtt

SEQ ID NO: 473246 - DNA, 15 bp, Homo sapiens
ctgggcagctttggt

SEQ ID NO: 473247 - DNA, 15 bp, Homo sapiens
gctgggcagctttgg

SEQ ID NO: 473248 - DNA, 15 bp, Homo sapiens
agctgggcagctttg

SEQ ID NO: 473249 - DNA, 15 bp, Homo sapiens
tagctgggcagcttt

SEQ ID NO: 473250 - DNA, 15 bp, Homo sapiens
gtagctgggcagctt

SEQ ID NO: 473251 - DNA, 15 bp, Homo sapiens
cgtagctgggcagct

SEQ ID NO: 473252 - DNA, 15 bp, Homo sapiens
acgtagctgggcagc

SEQ ID NO: 473253 - DNA, 15 bp, Homo sapiens
aacgtagctgggcag

SEQ ID NO: 473254 - DNA, 15 bp, Homo sapiens
gaacgtagctgggca

SEQ ID NO: 473255 - DNA, 15 bp, Homo sapiens
ggaacgtagctgggc

SEQ ID NO: 473256 - DNA, 15 bp, Homo sapiens
aggaacgtagctggg

SEQ ID NO: 473257 - DNA, 15 bp, Homo sapiens
caggaacgtagctgg

SEQ ID NO: 473258 - DNA, 15 bp, Homo sapiens
tcaggaacgtagctg

SEQ ID NO: 473259 - DNA, 15 bp, Homo sapiens
ttcaggaacgtagct

SEQ ID NO: 473260 - DNA, 15 bp, Homo sapiens
tttcaggaacgtagc

SEQ ID NO: 473261 - DNA, 15 bp, Homo sapiens
ctttcaggaacgtag

SEQ ID NO: 473262 - DNA, 15 bp, Homo sapiens
tctttcaggaacgta

SEQ ID NO: 473263 - DNA, 15 bp, Homo sapiens
ctctttcaggaacgt

SEQ ID NO: 473264 - DNA, 15 bp, Homo sapiens
tctctttcaggaacg

SEQ ID NO: 473265 - DNA, 15 bp, Homo sapiens
ctctctttcaggaac

SEQ ID NO: 473266 - DNA, 15 bp, Homo sapiens
gctctctttcaggaa

SEQ ID NO: 473267 - DNA, 15 bp, Homo sapiens
agctctctttcagga

SEQ ID NO: 473268 - DNA, 15 bp, Homo sapiens
tagctctctttcagg

SEQ ID NO: 473269 - DNA, 15 bp, Homo sapiens
gtagctctctttcag

SEQ ID NO: 473270 - DNA, 15 bp, Homo sapiens
tgtagctctctttca

SEQ ID NO: 473271 - DNA, 15 bp, Homo sapiens
ttgtagctctctttc

SEQ ID NO: 473272 - DNA, 15 bp, Homo sapiens
gttgtagctctcttt

SEQ ID NO: 473273 - DNA, 15 bp, Homo sapiens
cgttgtagctctctt

SEQ ID NO: 473274 - DNA, 15 bp, Homo sapiens
ccgttgtagctctct

SEQ ID NO: 473275 - DNA, 15 bp, Homo sapiens
gccgttgtagctctc

SEQ ID NO: 473276 - DNA, 15 bp, Homo sapiens
agccgttgtagctct

SEQ ID NO: 473277 - DNA, 15 bp, Homo sapiens
tagccgttgtagctc

SEQ ID NO: 473278 - DNA, 15 bp, Homo sapiens
ctagccgttgtagct

SEQ ID NO: 473279 - DNA, 15 bp, Homo sapiens
gctagccgttgtagc

SEQ ID NO: 473280 - DNA, 15 bp, Homo sapiens
cgctagccgttgtag

SEQ ID NO: 473281 - DNA, 15 bp, Homo sapiens
ccgctagccgttgta

SEQ ID NO: 473282 - DNA, 15 bp, Homo sapiens
tccgctagccgttgt

SEQ ID NO: 473283 - DNA, 15 bp, Homo sapiens
ctccgctagccgttg

SEQ ID NO: 473284 - DNA, 15 bp, Homo sapiens
cctccgctagccgtt

SEQ ID NO: 473285 - DNA, 15 bp, Homo sapiens
ccctccgctagccgt

SEQ ID NO: 473286 - DNA, 15 bp, Homo sapiens
tccctccgctagccg

SEQ ID NO: 473287 - DNA, 15 bp, Homo sapiens
ctccctccgctagcc

SEQ ID NO: 473288 - DNA, 15 bp, Homo sapiens
cctccctccgctagc

SEQ ID NO: 473289 - DNA, 15 bp, Homo sapiens
ccctccctccgctag

SEQ ID NO: 473290 - DNA, 15 bp, Homo sapiens
tccctccctccgcta

SEQ ID NO: 473291 - DNA, 15 bp, Homo sapiens
ctccctccctccgct

SEQ ID NO: 473292 - DNA, 15 bp, Homo sapiens
tctccctccctccgc

SEQ ID NO: 473293 - DNA, 15 bp, Homo sapiens
gtctccctccctccg

SEQ ID NO: 473294 - DNA, 15 bp, Homo sapiens
tgtctccctccctcc

SEQ ID NO: 473295 - DNA, 15 bp, Homo sapiens
ctgtctccctccctc

SEQ ID NO: 473296 - DNA, 15 bp, Homo sapiens
gctgtctccctccct

SEQ ID NO: 473297 - DNA, 15 bp, Homo sapiens
ggctgtctccctccc

SEQ ID NO: 473298 - DNA, 15 bp, Homo sapiens
tggctgtctccctcc

SEQ ID NO: 473299 - DNA, 15 bp, Homo sapiens
gtggctgtctccctc

SEQ ID NO: 473300 - DNA, 15 bp, Homo sapiens
cgtggctgtctccct

SEQ ID NO: 473301 - DNA, 15 bp, Homo sapiens
acgtggctgtctccc

SEQ ID NO: 473302 - DNA, 15 bp, Homo sapiens
gacgtggctgtctcc

SEQ ID NO: 473303 - DNA, 15 bp, Homo sapiens
tgacgtggctgtctc

SEQ ID NO: 473304 - DNA, 15 bp, Homo sapiens
ctgacgtggctgtct

SEQ ID NO: 473305 - DNA, 15 bp, Homo sapiens
actgacgtggctgtc

SEQ ID NO: 473306 - DNA, 15 bp, Homo sapiens
gactgacgtggctgt

SEQ ID NO: 473307 - DNA, 15 bp, Homo sapiens
tgactgacgtggctg

SEQ ID NO: 473308 - DNA, 15 bp, Homo sapiens
ctgactgacgtggct

SEQ ID NO: 473309 - DNA, 15 bp, Homo sapiens
cctgactgacgtggc

SEQ ID NO: 473310 - DNA, 15 bp, Homo sapiens
gcctgactgacgtgg

SEQ ID NO: 473311 - DNA, 15 bp, Homo sapiens
tgcctgactgacgtg

SEQ ID NO: 473312 - DNA, 15 bp, Homo sapiens
atgcctgactgacgt

SEQ ID NO: 473313 - DNA, 15 bp, Homo sapiens
gatgcctgactgacg

SEQ ID NO: 473314 - DNA, 15 bp, Homo sapiens
ggatgcctgactgac

SEQ ID NO: 473315 - DNA, 15 bp, Homo sapiens
tggatgcctgactga

SEQ ID NO: 473316 - DNA, 15 bp, Homo sapiens
gtggatgcctgactg

SEQ ID NO: 473317 - DNA, 15 bp, Homo sapiens
ggtggatgcctgact

SEQ ID NO: 473318 - DNA, 15 bp, Homo sapiens
aggtggatgcctgac

SEQ ID NO: 473319 - DNA, 15 bp, Homo sapiens
gaggtggatgcctga

SEQ ID NO: 473320 - DNA, 15 bp, Homo sapiens
ggaggtggatgcctg

SEQ ID NO: 473321 - DNA, 15 bp, Homo sapiens
gggaggtggatgcct

SEQ ID NO: 473322 - DNA, 15 bp, Homo sapiens
ggggaggtggatgcc

SEQ ID NO: 473323 - DNA, 15 bp, Homo sapiens
aggggaggtggatgc

SEQ ID NO: 473324 - DNA, 15 bp, Homo sapiens
caggggaggtggatg

SEQ ID NO: 473325 - DNA, 15 bp, Homo sapiens
tcaggggaggtggat

SEQ ID NO: 473326 - DNA, 15 bp, Homo sapiens
ctcaggggaggtgga

SEQ ID NO: 473327 - DNA, 15 bp, Homo sapiens
cctcaggggaggtgg

SEQ ID NO: 473328 - DNA, 15 bp, Homo sapiens
ccctcaggggaggtg

SEQ ID NO: 473329 - DNA, 15 bp, Homo sapiens
accctcaggggaggt

SEQ ID NO: 473330 - DNA, 15 bp, Homo sapiens
gaccctcaggggagg

SEQ ID NO: 473331 - DNA, 15 bp, Homo sapiens
agaccctcaggggag

SEQ ID NO: 473332 - DNA, 15 bp, Homo sapiens
cagaccctcagggga

SEQ ID NO: 473333 - DNA, 15 bp, Homo sapiens
gcagaccctcagggg

SEQ ID NO: 473334 - DNA, 15 bp, Homo sapiens
cgcagaccctcaggg

SEQ ID NO: 473335 - DNA, 15 bp, Homo sapiens
ccgcagaccctcagg

SEQ ID NO: 473336 - DNA, 15 bp, Homo sapiens
gccgcagaccctcag

SEQ ID NO: 473337 - DNA, 15 bp, Homo sapiens
ggccgcagaccctca

SEQ ID NO: 473338 - DNA, 15 bp, Homo sapiens
aggccgcagaccctc

SEQ ID NO: 473339 - DNA, 15 bp, Homo sapiens
caggccgcagaccct

SEQ ID NO: 473340 - DNA, 15 bp, Homo sapiens
ccaggccgcagaccc

SEQ ID NO: 473341 - DNA, 15 bp, Homo sapiens
gccaggccgcagacc

SEQ ID NO: 473342 - DNA, 15 bp, Homo sapiens
ggccaggccgcagac

SEQ ID NO: 473343 - DNA, 15 bp, Homo sapiens
tggccaggccgcaga

SEQ ID NO: 473344 - DNA, 15 bp, Homo sapiens
ctggccaggccgcag

SEQ ID NO: 473345 - DNA, 15 bp, Homo sapiens
cctggccaggccgca

SEQ ID NO: 473346 - DNA, 15 bp, Homo sapiens
ccctggccaggccgc

SEQ ID NO: 473347 - DNA, 15 bp, Homo sapiens
accctggccaggccg

SEQ ID NO: 473348 - DNA, 15 bp, Homo sapiens
gaccctggccaggcc

SEQ ID NO: 473349 - DNA, 15 bp, Homo sapiens
agaccctggccaggc

SEQ ID NO: 473350 - DNA, 15 bp, Homo sapiens
cagaccctggccagg

SEQ ID NO: 473351 - DNA, 15 bp, Homo sapiens
acagaccctggccag

SEQ ID NO: 473352 - DNA, 15 bp, Homo sapiens
cacagaccctggcca

SEQ ID NO: 473353 - DNA, 15 bp, Homo sapiens
ccacagaccctggcc

SEQ ID NO: 473354 - DNA, 15 bp, Homo sapiens
cccacagaccctggc

SEQ ID NO: 473355 - DNA, 15 bp, Homo sapiens
ccccacagaccctgg

SEQ ID NO: 473356 - DNA, 15 bp, Homo sapiens
gccccacagaccctg

SEQ ID NO: 473357 - DNA, 15 bp, Homo sapiens
agccccacagaccct

SEQ ID NO: 473358 - DNA, 15 bp, Homo sapiens
aagccccacagaccc

SEQ ID NO: 473359 - DNA, 15 bp, Homo sapiens
gaagccccacagacc

SEQ ID NO: 473360 - DNA, 15 bp, Homo sapiens
tgaagccccacagac

SEQ ID NO: 473361 - DNA, 15 bp, Homo sapiens
gtgaagccccacaga

SEQ ID NO: 473362 - DNA, 15 bp, Homo sapiens
tgtgaagccccacag

SEQ ID NO: 473363 - DNA, 15 bp, Homo sapiens
gtgtgaagccccaca

SEQ ID NO: 473364 - DNA, 15 bp, Homo sapiens
tgtgtgaagccccac

SEQ ID NO: 473365 - DNA, 15 bp, Homo sapiens
atgtgtgaagcccca

SEQ ID NO: 473366 - DNA, 15 bp, Homo sapiens
aatgtgtgaagcccc

SEQ ID NO: 473367 - DNA, 15 bp, Homo sapiens
aaatgtgtgaagccc

SEQ ID NO: 473368 - DNA, 15 bp, Homo sapiens
caaatgtgtgaagcc

SEQ ID NO: 473369 - DNA, 15 bp, Homo sapiens
ccaaatgtgtgaagc

SEQ ID NO: 473370 - DNA, 15 bp, Homo sapiens
cccaaatgtgtgaag

SEQ ID NO: 473371 - DNA, 15 bp, Homo sapiens
acccaaatgtgtgaa

SEQ ID NO: 473372 - DNA, 15 bp, Homo sapiens
gacccaaatgtgtga

SEQ ID NO: 473373 - DNA, 15 bp, Homo sapiens
agacccaaatgtgtg

SEQ ID NO: 473374 - DNA, 15 bp, Homo sapiens
cagacccaaatgtgt

SEQ ID NO: 473375 - DNA, 15 bp, Homo sapiens
ccagacccaaatgtg

SEQ ID NO: 473376 - DNA, 15 bp, Homo sapiens
gccagacccaaatgt

SEQ ID NO: 473377 - DNA, 15 bp, Homo sapiens
agccagacccaaatg

SEQ ID NO: 473378 - DNA, 15 bp, Homo sapiens
gagccagacccaaat

SEQ ID NO: 473379 - DNA, 15 bp, Homo sapiens
tgagccagacccaaa

SEQ ID NO: 473380 - DNA, 15 bp, Homo sapiens
ctgagccagacccaa

SEQ ID NO: 473381 - DNA, 15 bp, Homo sapiens
tctgagccagaccca

SEQ ID NO: 473382 - DNA, 15 bp, Homo sapiens
ctctgagccagaccc

SEQ ID NO: 473383 - DNA, 15 bp, Homo sapiens
gctctgagccagacc

SEQ ID NO: 473384 - DNA, 15 bp, Homo sapiens
ggctctgagccagac

SEQ ID NO: 473385 - DNA, 15 bp, Homo sapiens
aggctctgagccaga

SEQ ID NO: 473386 - DNA, 15 bp, Homo sapiens
gaggctctgagccag

SEQ ID NO: 473387 - DNA, 15 bp, Homo sapiens
tgaggctctgagcca

SEQ ID NO: 473388 - DNA, 15 bp, Homo sapiens
ctgaggctctgagcc

SEQ ID NO: 473389 - DNA, 15 bp, Homo sapiens
cctgaggctctgagc

SEQ ID NO: 473390 - DNA, 15 bp, Homo sapiens
ccctgaggctctgag

SEQ ID NO: 473391 - DNA, 15 bp, Homo sapiens
tccctgaggctctga

SEQ ID NO: 473392 - DNA, 15 bp, Homo sapiens
ctccctgaggctctg

SEQ ID NO: 473393 - DNA, 15 bp, Homo sapiens
tctccctgaggctct

SEQ ID NO: 473394 - DNA, 15 bp, Homo sapiens
ctctccctgaggctc

SEQ ID NO: 473395 - DNA, 15 bp, Homo sapiens
cctctccctgaggct

SEQ ID NO: 473396 - DNA, 15 bp, Homo sapiens
tcctctccctgaggc

SEQ ID NO: 473397 - DNA, 15 bp, Homo sapiens
ttcctctccctgagg

SEQ ID NO: 473398 - DNA, 15 bp, Homo sapiens
gttcctctccctgag

SEQ ID NO: 473399 - DNA, 15 bp, Homo sapiens
ggttcctctccctga

SEQ ID NO: 473400 - DNA, 15 bp, Homo sapiens
gggttcctctccctg

SEQ ID NO: 473401 - DNA, 15 bp, Homo sapiens
cgggttcctctccct

SEQ ID NO: 473402 - DNA, 15 bp, Homo sapiens
ccgggttcctctccc

SEQ ID NO: 473403 - DNA, 15 bp, Homo sapiens
tccgggttcctctcc

SEQ ID NO: 473404 - DNA, 15 bp, Homo sapiens
gtccgggttcctctc

SEQ ID NO: 473405 - DNA, 15 bp, Homo sapiens
tgtccgggttcctct

SEQ ID NO: 473406 - DNA, 15 bp, Homo sapiens
atgtccgggttcctc

SEQ ID NO: 473407 - DNA, 15 bp, Homo sapiens
gatgtccgggttcct

SEQ ID NO: 473408 - DNA, 15 bp, Homo sapiens
tgatgtccgggttcc

SEQ ID NO: 473409 - DNA, 15 bp, Homo sapiens
ctgatgtccgggttc

SEQ ID NO: 473410 - DNA, 15 bp, Homo sapiens
cctgatgtccgggtt

SEQ ID NO: 473411 - DNA, 15 bp, Homo sapiens
ccctgatgtccgggt

SEQ ID NO: 473412 - DNA, 15 bp, Homo sapiens
tccctgatgtccggg

SEQ ID NO: 473413 - DNA, 15 bp, Homo sapiens
ttccctgatgtccgg

SEQ ID NO: 473414 - DNA, 15 bp, Homo sapiens
tttccctgatgtccg

SEQ ID NO: 473415 - DNA, 15 bp, Homo sapiens
ctttccctgatgtcc

SEQ ID NO: 473416 - DNA, 15 bp, Homo sapiens
tctttccctgatgtc

SEQ ID NO: 473417 - DNA, 15 bp, Homo sapiens
ctctttccctgatgt

SEQ ID NO: 473418 - DNA, 15 bp, Homo sapiens
cctctttccctgatg

SEQ ID NO: 473419 - DNA, 15 bp, Homo sapiens
tcctctttccctgat

SEQ ID NO: 473420 - DNA, 15 bp, Homo sapiens
ctcctctttccctga

SEQ ID NO: 473421 - DNA, 15 bp, Homo sapiens
cctcctctttccctg

SEQ ID NO: 473422 - DNA, 15 bp, Homo sapiens
ccctcctctttccct

SEQ ID NO: 473423 - DNA, 15 bp, Homo sapiens
tccctcctctttccc

SEQ ID NO: 473424 - DNA, 15 bp, Homo sapiens
ttccctcctctttcc

SEQ ID NO: 473425 - DNA, 15 bp, Homo sapiens
cttccctcctctttc

SEQ ID NO: 473426 - DNA, 15 bp, Homo sapiens
ccttccctcctcttt

SEQ ID NO: 473427 - DNA, 15 bp, Homo sapiens
gccttccctcctctt

SEQ ID NO: 473428 - DNA, 15 bp, Homo sapiens
tgccttccctcctct

SEQ ID NO: 473429 - DNA, 15 bp, Homo sapiens
gtgccttccctcctc

SEQ ID NO: 473430 - DNA, 15 bp, Homo sapiens
agtgccttccctcct

SEQ ID NO: 473431 - DNA, 15 bp, Homo sapiens
aagtgccttccctcc

SEQ ID NO: 473432 - DNA, 15 bp, Homo sapiens
caagtgccttccctc

SEQ ID NO: 473433 - DNA, 15 bp, Homo sapiens
acaagtgccttccct

SEQ ID NO: 473434 - DNA, 15 bp, Homo sapiens
cacaagtgccttccc

SEQ ID NO: 473435 - DNA, 15 bp, Homo sapiens
acacaagtgccttcc

SEQ ID NO: 473436 - DNA, 15 bp, Homo sapiens
cacacaagtgccttc

SEQ ID NO: 473437 - DNA, 15 bp, Homo sapiens
tcacacaagtgcctt

SEQ ID NO: 473438 - DNA, 15 bp, Homo sapiens
ctcacacaagtgcct

SEQ ID NO: 473439 - DNA, 15 bp, Homo sapiens
cctcacacaagtgcc

SEQ ID NO: 473440 - DNA, 15 bp, Homo sapiens
tcctcacacaagtgc

SEQ ID NO: 473441 - DNA, 15 bp, Homo sapiens
ctcctcacacaagtg

SEQ ID NO: 473442 - DNA, 15 bp, Homo sapiens
actcctcacacaagt

SEQ ID NO: 473443 - DNA, 15 bp, Homo sapiens
gactcctcacacaag

SEQ ID NO: 473444 - DNA, 15 bp, Homo sapiens
tgactcctcacacaa

SEQ ID NO: 473445 - DNA, 15 bp, Homo sapiens
ctgactcctcacaca

SEQ ID NO: 473446 - DNA, 15 bp, Homo sapiens
tctgactcctcacac

SEQ ID NO: 473447 - DNA, 15 bp, Homo sapiens
ctctgactcctcaca

SEQ ID NO: 473448 - DNA, 15 bp, Homo sapiens
gctctgactcctcac

SEQ ID NO: 473449 - DNA, 15 bp, Homo sapiens
agctctgactcctca

SEQ ID NO: 473450 - DNA, 15 bp, Homo sapiens
cagctctgactcctc

SEQ ID NO: 473451 - DNA, 15 bp, Homo sapiens
acagctctgactcct

SEQ ID NO: 473452 - DNA, 15 bp, Homo sapiens
cacagctctgactcc

SEQ ID NO: 473453 - DNA, 15 bp, Homo sapiens
tcacagctctgactc

SEQ ID NO: 473454 - DNA, 15 bp, Homo sapiens
ttcacagctctgact

SEQ ID NO: 473455 - DNA, 15 bp, Homo sapiens
gttcacagctctgac

SEQ ID NO: 473456 - DNA, 15 bp, Homo sapiens
cgttcacagctctga

SEQ ID NO: 473457 - DNA, 15 bp, Homo sapiens
ccgttcacagctctg

SEQ ID NO: 473458 - DNA, 15 bp, Homo sapiens
tccgttcacagctct

SEQ ID NO: 473459 - DNA, 15 bp, Homo sapiens
gtccgttcacagctc

SEQ ID NO: 473460 - DNA, 15 bp, Homo sapiens
ggtccgttcacagct

SEQ ID NO: 473461 - DNA, 15 bp, Homo sapiens
aggtccgttcacagc

SEQ ID NO: 473462 - DNA, 15 bp, Homo sapiens
caggtccgttcacag

SEQ ID NO: 473463 - DNA, 15 bp, Homo sapiens
ccaggtccgttcaca

SEQ ID NO: 473464 - DNA, 15 bp, Homo sapiens
cccaggtccgttcac

SEQ ID NO: 473465 - DNA, 15 bp, Homo sapiens
tcccaggtccgttca

SEQ ID NO: 473466 - DNA, 15 bp, Homo sapiens
atcccaggtccgttc

SEQ ID NO: 473467 - DNA, 15 bp, Homo sapiens
catcccaggtccgtt

SEQ ID NO: 473468 - DNA, 15 bp, Homo sapiens
tcatcccaggtccgt

SEQ ID NO: 473469 - DNA, 15 bp, Homo sapiens
atcatcccaggtccg

SEQ ID NO: 473470 - DNA, 15 bp, Homo sapiens
catcatcccaggtcc

SEQ ID NO: 473471 - DNA, 15 bp, Homo sapiens
gcatcatcccaggtc

SEQ ID NO: 473472 - DNA, 15 bp, Homo sapiens
cgcatcatcccaggt

SEQ ID NO: 473473 - DNA, 15 bp, Homo sapiens
gcgcatcatcccagg

SEQ ID NO: 473474 - DNA, 15 bp, Homo sapiens
agcgcatcatcccag

SEQ ID NO: 473475 - DNA, 15 bp, Homo sapiens
cagcgcatcatccca

SEQ ID NO: 473476 - DNA, 15 bp, Homo sapiens
ccagcgcatcatccc

SEQ ID NO: 473477 - DNA, 15 bp, Homo sapiens
gccagcgcatcatcc

SEQ ID NO: 473478 - DNA, 15 bp, Homo sapiens
ggccagcgcatcatc

SEQ ID NO: 473479 - DNA, 15 bp, Homo sapiens
aggccagcgcatcat

SEQ ID NO: 473480 - DNA, 15 bp, Homo sapiens
gaggccagcgcatca

SEQ ID NO: 473481 - DNA, 15 bp, Homo sapiens
tgaggccagcgcatc

SEQ ID NO: 473482 - DNA, 15 bp, Homo sapiens
ctgaggccagcgcat

SEQ ID NO: 473483 - DNA, 15 bp, Homo sapiens
tctgaggccagcgca

SEQ ID NO: 473484 - DNA, 15 bp, Homo sapiens
ttctgaggccagcgc

SEQ ID NO: 473485 - DNA, 15 bp, Homo sapiens
tttctgaggccagcg

SEQ ID NO: 473486 - DNA, 15 bp, Homo sapiens
ctttctgaggccagc

SEQ ID NO: 473487 - DNA, 15 bp, Homo sapiens
cctttctgaggccag

SEQ ID NO: 473488 - DNA, 15 bp, Homo sapiens
tcctttctgaggcca

SEQ ID NO: 473489 - DNA, 15 bp, Homo sapiens
ttcctttctgaggcc

SEQ ID NO: 473490 - DNA, 15 bp, Homo sapiens
attcctttctgaggc

SEQ ID NO: 473491 - DNA, 15 bp, Homo sapiens
aattcctttctgagg

SEQ ID NO: 473492 - DNA, 15 bp, Homo sapiens
taattcctttctgag

SEQ ID NO: 473493 - DNA, 15 bp, Homo sapiens
ctaattcctttctga

SEQ ID NO: 473494 - DNA, 15 bp, Homo sapiens
gctaattcctttctg

SEQ ID NO: 473495 - DNA, 15 bp, Homo sapiens
agctaattcctttct

SEQ ID NO: 473496 - DNA, 15 bp, Homo sapiens
aagctaattcctttc

SEQ ID NO: 473497 - DNA, 15 bp, Homo sapiens
taagctaattccttt

SEQ ID NO: 473498 - DNA, 15 bp, Homo sapiens
ttaagctaattcctt

SEQ ID NO: 473499 - DNA, 15 bp, Homo sapiens
cttaagctaattcct

SEQ ID NO: 473500 - DNA, 15 bp, Homo sapiens
ccttaagctaattcc

SEQ ID NO: 473501 - DNA, 15 bp, Homo sapiens
tccttaagctaattc

SEQ ID NO: 473502 - DNA, 15 bp, Homo sapiens
ttccttaagctaatt

SEQ ID NO: 473503 - DNA, 15 bp, Homo sapiens
attccttaagctaat

SEQ ID NO: 473504 - DNA, 15 bp, Homo sapiens
cattccttaagctaa

SEQ ID NO: 473505 - DNA, 15 bp, Homo sapiens
acattccttaagcta

SEQ ID NO: 473506 - DNA, 15 bp, Homo sapiens
gacattccttaagct

SEQ ID NO: 473507 - DNA, 15 bp, Homo sapiens
ggacattccttaagc

SEQ ID NO: 473508 - DNA, 15 bp, Homo sapiens
tggacattccttaag

SEQ ID NO: 473509 - DNA, 15 bp, Homo sapiens
gtggacattccttaa

SEQ ID NO: 473510 - DNA, 15 bp, Homo sapiens
agtggacattcctta

SEQ ID NO: 473511 - DNA, 15 bp, Homo sapiens
cagtggacattcctt

SEQ ID NO: 473512 - DNA, 15 bp, Homo sapiens
tcagtggacattcct

SEQ ID NO: 473513 - DNA, 15 bp, Homo sapiens
ctcagtggacattcc

SEQ ID NO: 473514 - DNA, 15 bp, Homo sapiens
tctcagtggacattc

SEQ ID NO: 473515 - DNA, 15 bp, Homo sapiens
ctctcagtggacatt

SEQ ID NO: 473516 - DNA, 15 bp, Homo sapiens
tctctcagtggacat

SEQ ID NO: 473517 - DNA, 15 bp, Homo sapiens
ttctctcagtggaca

SEQ ID NO: 473518 - DNA, 15 bp, Homo sapiens
tttctctcagtggac

SEQ ID NO: 473519 - DNA, 15 bp, Homo sapiens
ttttctctcagtgga

SEQ ID NO: 473520 - DNA, 15 bp, Homo sapiens
tttttctctcagtgg

SEQ ID NO: 473521 - DNA, 15 bp, Homo sapiens
ctttttctctcagtg

SEQ ID NO: 473522 - DNA, 15 bp, Homo sapiens
cctttttctctcagt

SEQ ID NO: 473523 - DNA, 15 bp, Homo sapiens
acctttttctctcag

SEQ ID NO: 473524 - DNA, 15 bp, Homo sapiens
tacctttttctctca

SEQ ID NO: 473525 - DNA, 15 bp, Homo sapiens
ttacctttttctctc

SEQ ID NO: 473526 - DNA, 15 bp, Homo sapiens
gttacctttttctct

SEQ ID NO: 473527 - DNA, 15 bp, Homo sapiens
tgttacctttttctc

SEQ ID NO: 473528 - DNA, 15 bp, Homo sapiens
gtgttacctttttct

SEQ ID NO: 473529 - DNA, 15 bp, Homo sapiens
agtgttacctttttc

SEQ ID NO: 473530 - DNA, 15 bp, Homo sapiens
cagtgttaccttttt

SEQ ID NO: 473531 - DNA, 15 bp, Homo sapiens
acagtgttacctttt

SEQ ID NO: 473532 - DNA, 15 bp, Homo sapiens
cacagtgttaccttt

SEQ ID NO: 473533 - DNA, 15 bp, Homo sapiens
acacagtgttacctt

SEQ ID NO: 473534 - DNA, 15 bp, Homo sapiens
aacacagtgttacct

SEQ ID NO: 473535 - DNA, 15 bp, Homo sapiens
taacacagtgttacc

SEQ ID NO: 473536 - DNA, 15 bp, Homo sapiens
ttaacacagtgttac

SEQ ID NO: 473537 - DNA, 15 bp, Homo sapiens
tttaacacagtgtta

SEQ ID NO: 473538 - DNA, 15 bp, Homo sapiens
ttttaacacagtgtt

SEQ ID NO: 473539 - DNA, 15 bp, Homo sapiens
cttttaacacagtgt

SEQ ID NO: 473540 - DNA, 15 bp, Homo sapiens
tcttttaacacagtg

SEQ ID NO: 473541 - DNA, 15 bp, Homo sapiens
gtcttttaacacagt

SEQ ID NO: 473542 - DNA, 15 bp, Homo sapiens
ggtcttttaacacag

SEQ ID NO: 473543 - DNA, 15 bp, Homo sapiens
tggtcttttaacaca

SEQ ID NO: 473544 - DNA, 15 bp, Homo sapiens
ttggtcttttaacac

SEQ ID NO: 473545 - DNA, 15 bp, Homo sapiens
cttggtcttttaaca

SEQ ID NO: 473546 - DNA, 15 bp, Homo sapiens
tcttggtcttttaac

SEQ ID NO: 473547 - DNA, 15 bp, Homo sapiens
ctcttggtcttttaa

SEQ ID NO: 473548 - DNA, 15 bp, Homo sapiens
tctcttggtctttta

SEQ ID NO: 473549 - DNA, 15 bp, Homo sapiens
ctctcttggtctttt

SEQ ID NO: 473550 - DNA, 15 bp, Homo sapiens
tctctcttggtcttt

SEQ ID NO: 473551 - DNA, 15 bp, Homo sapiens
ttctctcttggtctt

SEQ ID NO: 473552 - DNA, 15 bp, Homo sapiens
tttctctcttggtct

SEQ ID NO: 473553 - DNA, 15 bp, Homo sapiens
ttttctctcttggtc

SEQ ID NO: 473554 - DNA, 15 bp, Homo sapiens
tttttctctcttggt

SEQ ID NO: 473555 - DNA, 15 bp, Homo sapiens
ttttttctctcttgg

SEQ ID NO: 473556 - DNA, 15 bp, Homo sapiens
tttttttctctcttg

SEQ ID NO: 473557 - DNA, 15 bp, Homo sapiens
ttttttttctctctt

SEQ ID NO: 473558 - DNA, 15 bp, Homo sapiens
tttttttttctctct

SEQ ID NO: 473559 - DNA, 15 bp, Homo sapiens
ttttttttttctctc

SEQ ID NO: 473560 - DNA, 15 bp, Homo sapiens
cttttttttttctct

SEQ ID NO: 473561 - DNA, 15 bp, Homo sapiens
acttttttttttctc

SEQ ID NO: 473562 - DNA, 15 bp, Homo sapiens
gacttttttttttct

SEQ ID NO: 473563 - DNA, 15 bp, Homo sapiens
tgacttttttttttc

SEQ ID NO: 473564 - DNA, 15 bp, Homo sapiens
ctgactttttttttt

SEQ ID NO: 473565 - DNA, 15 bp, Homo sapiens
gctgacttttttttt

SEQ ID NO: 473566 - DNA, 15 bp, Homo sapiens
agctgactttttttt

SEQ ID NO: 473567 - DNA, 15 bp, Homo sapiens
gagctgacttttttt

SEQ ID NO: 473568 - DNA, 15 bp, Homo sapiens
ggagctgactttttt

SEQ ID NO: 473569 - DNA, 15 bp, Homo sapiens
aggagctgacttttt

SEQ ID NO: 473570 - DNA, 15 bp, Homo sapiens
taggagctgactttt

SEQ ID NO: 473571 - DNA, 15 bp, Homo sapiens
ataggagctgacttt

SEQ ID NO: 473572 - DNA, 15 bp, Homo sapiens
cataggagctgactt

SEQ ID NO: 473573 - DNA, 15 bp, Homo sapiens
ccataggagctgact

SEQ ID NO: 473574 - DNA, 15 bp, Homo sapiens
accataggagctgac

SEQ ID NO: 473575 - DNA, 15 bp, Homo sapiens
caccataggagctga

SEQ ID NO: 473576 - DNA, 15 bp, Homo sapiens
ccaccataggagctg

SEQ ID NO: 473577 - DNA, 15 bp, Homo sapiens
tccaccataggagct

SEQ ID NO: 473578 - DNA, 15 bp, Homo sapiens
ttccaccataggagc

SEQ ID NO: 473579 - DNA, 15 bp, Homo sapiens
attccaccataggag

SEQ ID NO: 473580 - DNA, 15 bp, Homo sapiens
aattccaccatagga

SEQ ID NO: 473581 - DNA, 15 bp, Homo sapiens
taattccaccatagg

SEQ ID NO: 473582 - DNA, 15 bp, Homo sapiens
gtaattccaccatag

SEQ ID NO: 473583 - DNA, 15 bp, Homo sapiens
tgtaattccaccata

SEQ ID NO: 473584 - DNA, 15 bp, Homo sapiens
ttgtaattccaccat

SEQ ID NO: 473585 - DNA, 15 bp, Homo sapiens
attgtaattccacca

SEQ ID NO: 473586 - DNA, 15 bp, Homo sapiens
cattgtaattccacc

SEQ ID NO: 473587 - DNA, 15 bp, Homo sapiens
tcattgtaattccac

SEQ ID NO: 473588 - DNA, 15 bp, Homo sapiens
ctcattgtaattcca

SEQ ID NO: 473589 - DNA, 15 bp, Homo sapiens
cctcattgtaattcc

SEQ ID NO: 473590 - DNA, 15 bp, Homo sapiens
ccctcattgtaattc

SEQ ID NO: 473591 - DNA, 15 bp, Homo sapiens
tccctcattgtaatt

SEQ ID NO: 473592 - DNA, 15 bp, Homo sapiens
ttccctcattgtaat

SEQ ID NO: 473593 - DNA, 15 bp, Homo sapiens
tttccctcattgtaa

SEQ ID NO: 473594 - DNA, 15 bp, Homo sapiens
ctttccctcattgta

SEQ ID NO: 473595 - DNA, 15 bp, Homo sapiens
tctttccctcattgt

SEQ ID NO: 473596 - DNA, 15 bp, Homo sapiens
atctttccctcattg

SEQ ID NO: 473597 - DNA, 15 bp, Homo sapiens
catctttccctcatt

SEQ ID NO: 473598 - DNA, 15 bp, Homo sapiens
acatctttccctcat

SEQ ID NO: 473599 - DNA, 15 bp, Homo sapiens
tacatctttccctca

SEQ ID NO: 473600 - DNA, 15 bp, Homo sapiens
atacatctttccctc

SEQ ID NO: 473601 - DNA, 15 bp, Homo sapiens
gatacatctttccct

SEQ ID NO: 473602 - DNA, 15 bp, Homo sapiens
ggatacatctttccc

SEQ ID NO: 473603 - DNA, 15 bp, Homo sapiens
tggatacatctttcc

SEQ ID NO: 473604 - DNA, 15 bp, Homo sapiens
gtggatacatctttc

SEQ ID NO: 473605 - DNA, 15 bp, Homo sapiens
tgtggatacatcttt

SEQ ID NO: 473606 - DNA, 15 bp, Homo sapiens
ttgtggatacatctt

SEQ ID NO: 473607 - DNA, 15 bp, Homo sapiens
cttgtggatacatct

SEQ ID NO: 473608 - DNA, 15 bp, Homo sapiens
acttgtggatacatc

SEQ ID NO: 473609 - DNA, 15 bp, Homo sapiens
cacttgtggatacat

SEQ ID NO: 473610 - DNA, 15 bp, Homo sapiens
gcacttgtggataca

SEQ ID NO: 473611 - DNA, 15 bp, Homo sapiens
agcacttgtggatac

SEQ ID NO: 473612 - DNA, 15 bp, Homo sapiens
gagcacttgtggata

SEQ ID NO: 473613 - DNA, 15 bp, Homo sapiens
ggagcacttgtggat

SEQ ID NO: 473614 - DNA, 15 bp, Homo sapiens
gggagcacttgtgga

SEQ ID NO: 473615 - DNA, 15 bp, Homo sapiens
ggggagcacttgtgg

SEQ ID NO: 473616 - DNA, 15 bp, Homo sapiens
tggggagcacttgtg

SEQ ID NO: 473617 - DNA, 15 bp, Homo sapiens
ttggggagcacttgt

SEQ ID NO: 473618 - DNA, 15 bp, Homo sapiens
attggggagcacttg

SEQ ID NO: 473619 - DNA, 15 bp, Homo sapiens
gattggggagcactt

SEQ ID NO: 473620 - DNA, 15 bp, Homo sapiens
tgattggggagcact

SEQ ID NO: 473621 - DNA, 15 bp, Homo sapiens
ttgattggggagcac

SEQ ID NO: 473622 - DNA, 15 bp, Homo sapiens
tttgattggggagca

SEQ ID NO: 473623 - DNA, 15 bp, Homo sapiens
ttttgattggggagc

SEQ ID NO: 473624 - DNA, 15 bp, Homo sapiens
cttttgattggggag

SEQ ID NO: 473625 - DNA, 15 bp, Homo sapiens
tcttttgattgggga

SEQ ID NO: 473626 - DNA, 15 bp, Homo sapiens
ttcttttgattgggg

SEQ ID NO: 473627 - DNA, 15 bp, Homo sapiens
tttcttttgattggg

SEQ ID NO: 473628 - DNA, 15 bp, Homo sapiens
ctttcttttgattgg

SEQ ID NO: 473629 - DNA, 15 bp, Homo sapiens
cctttcttttgattg

SEQ ID NO: 473630 - DNA, 15 bp, Homo sapiens
ccctttcttttgatt

SEQ ID NO: 473631 - DNA, 15 bp, Homo sapiens
tccctttcttttgat

SEQ ID NO: 473632 - DNA, 15 bp, Homo sapiens
ttccctttcttttga

SEQ ID NO: 473633 - DNA, 15 bp, Homo sapiens
attccctttcttttg

SEQ ID NO: 473634 - DNA, 15 bp, Homo sapiens
cattccctttctttt

SEQ ID NO: 473635 - DNA, 15 bp, Homo sapiens
ccattccctttcttt

SEQ ID NO: 473636 - DNA, 15 bp, Homo sapiens
cccattccctttctt

SEQ ID NO: 473637 - DNA, 15 bp, Homo sapiens
ccccattccctttct

SEQ ID NO: 473638 - DNA, 15 bp, Homo sapiens
gccccattccctttc

SEQ ID NO: 473639 - DNA, 15 bp, Homo sapiens
ggccccattcccttt

SEQ ID NO: 473640 - DNA, 15 bp, Homo sapiens
aggccccattccctt

SEQ ID NO: 473641 - DNA, 15 bp, Homo sapiens
caggccccattccct

SEQ ID NO: 473642 - DNA, 15 bp, Homo sapiens
acaggccccattccc

SEQ ID NO: 473643 - DNA, 15 bp, Homo sapiens
cacaggccccattcc

SEQ ID NO: 473644 - DNA, 15 bp, Homo sapiens
ccacaggccccattc

SEQ ID NO: 473645 - DNA, 15 bp, Homo sapiens
tccacaggccccatt

SEQ ID NO: 473646 - DNA, 15 bp, Homo sapiens
ctccacaggccccat

SEQ ID NO: 473647 - DNA, 15 bp, Homo sapiens
gctccacaggcccca

SEQ ID NO: 473648 - DNA, 15 bp, Homo sapiens
tgctccacaggcccc

SEQ ID NO: 473649 - DNA, 15 bp, Homo sapiens
ctgctccacaggccc

SEQ ID NO: 473650 - DNA, 15 bp, Homo sapiens
cctgctccacaggcc

SEQ ID NO: 473651 - DNA, 15 bp, Homo sapiens
ccctgctccacaggc

SEQ ID NO: 473652 - DNA, 15 bp, Homo sapiens
cccctgctccacagg

SEQ ID NO: 473653 - DNA, 15 bp, Homo sapiens
tcccctgctccacag

SEQ ID NO: 473654 - DNA, 15 bp, Homo sapiens
gtcccctgctccaca

SEQ ID NO: 473655 - DNA, 15 bp, Homo sapiens
tgtcccctgctccac

SEQ ID NO: 473656 - DNA, 15 bp, Homo sapiens
ctgtcccctgctcca

SEQ ID NO: 473657 - DNA, 15 bp, Homo sapiens
tctgtcccctgctcc

SEQ ID NO: 473658 - DNA, 15 bp, Homo sapiens
ctctgtcccctgctc

SEQ ID NO: 473659 - DNA, 15 bp, Homo sapiens
actctgtcccctgct

SEQ ID NO: 473660 - DNA, 15 bp, Homo sapiens
cactctgtcccctgc

SEQ ID NO: 473661 - DNA, 15 bp, Homo sapiens
ccactctgtcccctg

SEQ ID NO: 473662 - DNA, 15 bp, Homo sapiens
cccactctgtcccct

SEQ ID NO: 473663 - DNA, 15 bp, Homo sapiens
tcccactctgtcccc

SEQ ID NO: 473664 - DNA, 15 bp, Homo sapiens
ttcccactctgtccc

SEQ ID NO: 473665 - DNA, 15 bp, Homo sapiens
gttcccactctgtcc

SEQ ID NO: 473666 - DNA, 15 bp, Homo sapiens
tgttcccactctgtc

SEQ ID NO: 473667 - DNA, 15 bp, Homo sapiens
gtgttcccactctgt

SEQ ID NO: 473668 - DNA, 15 bp, Homo sapiens
agtgttcccactctg

SEQ ID NO: 473669 - DNA, 15 bp, Homo sapiens
gagtgttcccactct

SEQ ID NO: 473670 - DNA, 15 bp, Homo sapiens
tgagtgttcccactc

SEQ ID NO: 473671 - DNA, 15 bp, Homo sapiens
ctgagtgttcccact

SEQ ID NO: 473672 - DNA, 15 bp, Homo sapiens
tctgagtgttcccac

SEQ ID NO: 473673 - DNA, 15 bp, Homo sapiens
ctctgagtgttccca

SEQ ID NO: 473674 - DNA, 15 bp, Homo sapiens
cctctgagtgttccc

SEQ ID NO: 473675 - DNA, 15 bp, Homo sapiens
tcctctgagtgttcc

SEQ ID NO: 473676 - DNA, 15 bp, Homo sapiens
ttcctctgagtgttc

SEQ ID NO: 473677 - DNA, 15 bp, Homo sapiens
cttcctctgagtgtt

SEQ ID NO: 473678 - DNA, 15 bp, Homo sapiens
ccttcctctgagtgt

SEQ ID NO: 473679 - DNA, 15 bp, Homo sapiens
tccttcctctgagtg

SEQ ID NO: 473680 - DNA, 15 bp, Homo sapiens
ttccttcctctgagt

SEQ ID NO: 473681 - DNA, 15 bp, Homo sapiens
tttccttcctctgag

SEQ ID NO: 473682 - DNA, 15 bp, Homo sapiens
ttttccttcctctga

SEQ ID NO: 473683 - DNA, 15 bp, Homo sapiens
cttttccttcctctg

SEQ ID NO: 473684 - DNA, 15 bp, Homo sapiens
tcttttccttcctct

SEQ ID NO: 473685 - DNA, 15 bp, Homo sapiens
ttcttttccttcctc

SEQ ID NO: 473686 - DNA, 15 bp, Homo sapiens
gttcttttccttcct

SEQ ID NO: 473687 - DNA, 15 bp, Homo sapiens
tgttcttttccttcc

SEQ ID NO: 473688 - DNA, 15 bp, Homo sapiens
ctgttcttttccttc

SEQ ID NO: 473689 - DNA, 15 bp, Homo sapiens
cctgttcttttcctt

SEQ ID NO: 473690 - DNA, 15 bp, Homo sapiens
tcctgttcttttcct

SEQ ID NO: 473691 - DNA, 15 bp, Homo sapiens
ttcctgttcttttcc

SEQ ID NO: 473692 - DNA, 15 bp, Homo sapiens
cttcctgttcttttc

SEQ ID NO: 473693 - DNA, 15 bp, Homo sapiens
tcttcctgttctttt

SEQ ID NO: 473694 - DNA, 15 bp, Homo sapiens
ttcttcctgttcttt

SEQ ID NO: 473695 - DNA, 15 bp, Homo sapiens
cttcttcctgttctt

SEQ ID NO: 473696 - DNA, 15 bp, Homo sapiens
tcttcttcctgttct

SEQ ID NO: 473697 - DNA, 15 bp, Homo sapiens
ttcttcttcctgttc

SEQ ID NO: 473698 - DNA, 15 bp, Homo sapiens
attcttcttcctgtt

SEQ ID NO: 473699 - DNA, 15 bp, Homo sapiens
gattcttcttcctgt

SEQ ID NO: 473700 - DNA, 15 bp, Homo sapiens
ggattcttcttcctg

SEQ ID NO: 473701 - DNA, 15 bp, Homo sapiens
cggattcttcttcct

SEQ ID NO: 473702 - DNA, 15 bp, Homo sapiens
gcggattcttcttcc

SEQ ID NO: 473703 - DNA, 15 bp, Homo sapiens
tgcggattcttcttc

SEQ ID NO: 473704 - DNA, 15 bp, Homo sapiens
ctgcggattcttctt

SEQ ID NO: 473705 - DNA, 15 bp, Homo sapiens
tctgcggattcttct

SEQ ID NO: 473706 - DNA, 15 bp, Homo sapiens
ttctgcggattcttc

SEQ ID NO: 473707 - DNA, 15 bp, Homo sapiens
cttctgcggattctt

SEQ ID NO: 473708 - DNA, 15 bp, Homo sapiens
tcttctgcggattct

SEQ ID NO: 473709 - DNA, 15 bp, Homo sapiens
ttcttctgcggattc

SEQ ID NO: 473710 - DNA, 15 bp, Homo sapiens
tttcttctgcggatt

SEQ ID NO: 473711 - DNA, 15 bp, Homo sapiens
ttttcttctgcggat

SEQ ID NO: 473712 - DNA, 15 bp, Homo sapiens
tttttcttctgcgga

SEQ ID NO: 473713 - DNA, 15 bp, Homo sapiens
ctttttcttctgcgg

SEQ ID NO: 473714 - DNA, 15 bp, Homo sapiens
cctttttcttctgcg

SEQ ID NO: 473715 - DNA, 15 bp, Homo sapiens
gcctttttcttctgc

SEQ ID NO: 473716 - DNA, 15 bp, Homo sapiens
tgcctttttcttctg

SEQ ID NO: 473717 - DNA, 15 bp, Homo sapiens
ttgcctttttcttct

SEQ ID NO: 473718 - DNA, 15 bp, Homo sapiens
tttgcctttttcttc

SEQ ID NO: 473719 - DNA, 15 bp, Homo sapiens
atttgcctttttctt

SEQ ID NO: 473720 - DNA, 15 bp, Homo sapiens
tatttgcctttttct

SEQ ID NO: 473721 - DNA, 15 bp, Homo sapiens
ttatttgcctttttc

SEQ ID NO: 473722 - DNA, 15 bp, Homo sapiens
tttatttgccttttt

SEQ ID NO: 473723 - DNA, 15 bp, Homo sapiens
gtttatttgcctttt

SEQ ID NO: 473724 - DNA, 15 bp, Homo sapiens
tgtttatttgccttt

SEQ ID NO: 473725 - DNA, 15 bp, Homo sapiens
gtgtttatttgcctt

SEQ ID NO: 473726 - DNA, 15 bp, Homo sapiens
tgtgtttatttgcct

SEQ ID NO: 473727 - DNA, 15 bp, Homo sapiens
gtgtgtttatttgcc

SEQ ID NO: 473728 - DNA, 15 bp, Homo sapiens
agtgtgtttatttgc

SEQ ID NO: 473729 - DNA, 15 bp, Homo sapiens
gagtgtgtttatttg

SEQ ID NO: 473730 - DNA, 15 bp, Homo sapiens
ggagtgtgtttattt

SEQ ID NO: 473731 - DNA, 15 bp, Homo sapiens
tggagtgtgtttatt

SEQ ID NO: 473732 - DNA, 15 bp, Homo sapiens
ctggagtgtgtttat

SEQ ID NO: 473733 - DNA, 15 bp, Homo sapiens
tctggagtgtgttta

SEQ ID NO: 473734 - DNA, 15 bp, Homo sapiens
ctctggagtgtgttt

SEQ ID NO: 473735 - DNA, 15 bp, Homo sapiens
tctctggagtgtgtt

SEQ ID NO: 473736 - DNA, 15 bp, Homo sapiens
ctctctggagtgtgt

SEQ ID NO: 473737 - DNA, 15 bp, Homo sapiens
cctctctggagtgtg

SEQ ID NO: 473738 - DNA, 15 bp, Homo sapiens
tcctctctggagtgt

SEQ ID NO: 473739 - DNA, 15 bp, Homo sapiens
gtcctctctggagtg

SEQ ID NO: 473740 - DNA, 15 bp, Homo sapiens
tgtcctctctggagt

SEQ ID NO: 473741 - DNA, 15 bp, Homo sapiens
ctgtcctctctggag

SEQ ID NO: 473742 - DNA, 15 bp, Homo sapiens
tctgtcctctctgga

SEQ ID NO: 473743 - DNA, 15 bp, Homo sapiens
atctgtcctctctgg

SEQ ID NO: 473744 - DNA, 15 bp, Homo sapiens
tatctgtcctctctg

SEQ ID NO: 473745 - DNA, 15 bp, Homo sapiens
gtatctgtcctctct

SEQ ID NO: 473746 - DNA, 15 bp, Homo sapiens
tgtatctgtcctctc

SEQ ID NO: 473747 - DNA, 15 bp, Homo sapiens
ttgtatctgtcctct

SEQ ID NO: 473748 - DNA, 15 bp, Homo sapiens
cttgtatctgtcctc

SEQ ID NO: 473749 - DNA, 15 bp, Homo sapiens
gcttgtatctgtcct

SEQ ID NO: 473750 - DNA, 15 bp, Homo sapiens
agcttgtatctgtcc

SEQ ID NO: 473751 - DNA, 15 bp, Homo sapiens
tagcttgtatctgtc

SEQ ID NO: 473752 - DNA, 15 bp, Homo sapiens
gtagcttgtatctgt

SEQ ID NO: 473753 - DNA, 15 bp, Homo sapiens
agtagcttgtatctg

SEQ ID NO: 473754 - DNA, 15 bp, Homo sapiens
aagtagcttgtatct

SEQ ID NO: 473755 - DNA, 15 bp, Homo sapiens
taagtagcttgtatc

SEQ ID NO: 473756 - DNA, 15 bp, Homo sapiens
gtaagtagcttgtat

SEQ ID NO: 473757 - DNA, 15 bp, Homo sapiens
tgtaagtagcttgta

SEQ ID NO: 473758 - DNA, 15 bp, Homo sapiens
gtgtaagtagcttgt

SEQ ID NO: 473759 - DNA, 15 bp, Homo sapiens
tgtgtaagtagcttg

SEQ ID NO: 473760 - DNA, 15 bp, Homo sapiens
gtgtgtaagtagctt

SEQ ID NO: 473761 - DNA, 15 bp, Homo sapiens
tgtgtgtaagtagct

SEQ ID NO: 473762 - DNA, 15 bp, Homo sapiens
ttgtgtgtaagtagc

SEQ ID NO: 473763 - DNA, 15 bp, Homo sapiens
cttgtgtgtaagtag

SEQ ID NO: 473764 - DNA, 15 bp, Homo sapiens
gcttgtgtgtaagta

SEQ ID NO: 473765 - DNA, 15 bp, Homo sapiens
tgcttgtgtgtaagt

SEQ ID NO: 473766 - DNA, 15 bp, Homo sapiens
gtgcttgtgtgtaag

SEQ ID NO: 473767 - DNA, 15 bp, Homo sapiens
cgtgcttgtgtgtaa

SEQ ID NO: 473768 - DNA, 15 bp, Homo sapiens
gcgtgcttgtgtgta

SEQ ID NO: 473769 - DNA, 15 bp, Homo sapiens
tgcgtgcttgtgtgt

SEQ ID NO: 473770 - DNA, 15 bp, Homo sapiens
ctgcgtgcttgtgtg

SEQ ID NO: 473771 - DNA, 15 bp, Homo sapiens
cctgcgtgcttgtgt

SEQ ID NO: 473772 - DNA, 15 bp, Homo sapiens
gcctgcgtgcttgtg

SEQ ID NO: 473773 - DNA, 15 bp, Homo sapiens
tgcctgcgtgcttgt

SEQ ID NO: 473774 - DNA, 15 bp, Homo sapiens
gtgcctgcgtgcttg

SEQ ID NO: 473775 - DNA, 15 bp, Homo sapiens
cgtgcctgcgtgctt

SEQ ID NO: 473776 - DNA, 15 bp, Homo sapiens
gcgtgcctgcgtgct

SEQ ID NO: 473777 - DNA, 15 bp, Homo sapiens
tgcgtgcctgcgtgc

SEQ ID NO: 473778 - DNA, 15 bp, Homo sapiens
gtgcgtgcctgcgtg

SEQ ID NO: 473779 - DNA, 15 bp, Homo sapiens
cgtgcgtgcctgcgt

SEQ ID NO: 473780 - DNA, 15 bp, Homo sapiens
gcgtgcgtgcctgcg

SEQ ID NO: 473781 - DNA, 15 bp, Homo sapiens
tgcgtgcgtgcctgc

SEQ ID NO: 473782 - DNA, 15 bp, Homo sapiens
gtgcgtgcgtgcctg

SEQ ID NO: 473783 - DNA, 15 bp, Homo sapiens
cgtgcgtgcgtgcct

SEQ ID NO: 473784 - DNA, 15 bp, Homo sapiens
gcgtgcgtgcgtgcc

SEQ ID NO: 473785 - DNA, 15 bp, Homo sapiens
tgcgtgcgtgcgtgc

SEQ ID NO: 473786 - DNA, 15 bp, Homo sapiens
gtgcgtgcgtgcgtg

SEQ ID NO: 473787 - DNA, 15 bp, Homo sapiens
tgtgcgtgcgtgcgt

SEQ ID NO: 473788 - DNA, 15 bp, Homo sapiens
gtgtgcgtgcgtgcg

SEQ ID NO: 473789 - DNA, 15 bp, Homo sapiens
cgtgtgcgtgcgtgc

SEQ ID NO: 473790 - DNA, 15 bp, Homo sapiens
gcgtgtgcgtgcgtg

SEQ ID NO: 473791 - DNA, 15 bp, Homo sapiens
tgcgtgtgcgtgcgt

SEQ ID NO: 473792 - DNA, 15 bp, Homo sapiens
ttgcgtgtgcgtgcg

SEQ ID NO: 473793 - DNA, 15 bp, Homo sapiens
cttgcgtgtgcgtgc

SEQ ID NO: 473794 - DNA, 15 bp, Homo sapiens
gcttgcgtgtgcgtg

SEQ ID NO: 473795 - DNA, 15 bp, Homo sapiens
agcttgcgtgtgcgt

SEQ ID NO: 473796 - DNA, 15 bp, Homo sapiens
cagcttgcgtgtgcg

SEQ ID NO: 473797 - DNA, 15 bp, Homo sapiens
gcagcttgcgtgtgc

SEQ ID NO: 473798 - DNA, 15 bp, Homo sapiens
tgcagcttgcgtgtg

SEQ ID NO: 473799 - DNA, 15 bp, Homo sapiens
gtgcagcttgcgtgt

SEQ ID NO: 473800 - DNA, 15 bp, Homo sapiens
cgtgcagcttgcgtg

SEQ ID NO: 473801 - DNA, 15 bp, Homo sapiens
gcgtgcagcttgcgt

SEQ ID NO: 473802 - DNA, 15 bp, Homo sapiens
tgcgtgcagcttgcg

SEQ ID NO: 473803 - DNA, 15 bp, Homo sapiens
gtgcgtgcagcttgc

SEQ ID NO: 473804 - DNA, 15 bp, Homo sapiens
tgtgcgtgcagcttg

SEQ ID NO: 473805 - DNA, 15 bp, Homo sapiens
gtgtgcgtgcagctt

SEQ ID NO: 473806 - DNA, 15 bp, Homo sapiens
ggtgtgcgtgcagct

SEQ ID NO: 473807 - DNA, 15 bp, Homo sapiens
tggtgtgcgtgcagc

SEQ ID NO: 473808 - DNA, 15 bp, Homo sapiens
ctggtgtgcgtgcag

SEQ ID NO: 473809 - DNA, 15 bp, Homo sapiens
tctggtgtgcgtgca

SEQ ID NO: 473810 - DNA, 15 bp, Homo sapiens
ttctggtgtgcgtgc

SEQ ID NO: 473811 - DNA, 15 bp, Homo sapiens
tttctggtgtgcgtg

SEQ ID NO: 473812 - DNA, 15 bp, Homo sapiens
ctttctggtgtgcgt

SEQ ID NO: 473813 - DNA, 15 bp, Homo sapiens
tctttctggtgtgcg

SEQ ID NO: 473814 - DNA, 15 bp, Homo sapiens
gtctttctggtgtgc

SEQ ID NO: 473815 - DNA, 15 bp, Homo sapiens
tgtctttctggtgtg

SEQ ID NO: 473816 - DNA, 15 bp, Homo sapiens
gtgtctttctggtgt

SEQ ID NO: 473817 - DNA, 15 bp, Homo sapiens
tgtgtctttctggtg

SEQ ID NO: 473818 - DNA, 15 bp, Homo sapiens
ttgtgtctttctggt

SEQ ID NO: 473819 - DNA, 15 bp, Homo sapiens
cttgtgtctttctgg

SEQ ID NO: 473820 - DNA, 15 bp, Homo sapiens
ccttgtgtctttctg

SEQ ID NO: 473821 - DNA, 15 bp, Homo sapiens
tccttgtgtctttct

SEQ ID NO: 473822 - DNA, 15 bp, Homo sapiens
ctccttgtgtctttc

SEQ ID NO: 473823 - DNA, 15 bp, Homo sapiens
tctccttgtgtcttt

SEQ ID NO: 473824 - DNA, 15 bp, Homo sapiens
atctccttgtgtctt

SEQ ID NO: 473825 - DNA, 15 bp, Homo sapiens
gatctccttgtgtct

SEQ ID NO: 473826 - DNA, 15 bp, Homo sapiens
cgatctccttgtgtc

SEQ ID NO: 473827 - DNA, 15 bp, Homo sapiens
ccgatctccttgtgt

SEQ ID NO: 473828 - DNA, 15 bp, Homo sapiens
gccgatctccttgtg

SEQ ID NO: 473829 - DNA, 15 bp, Homo sapiens
ggccgatctccttgt

SEQ ID NO: 473830 - DNA, 15 bp, Homo sapiens
tggccgatctccttg

SEQ ID NO: 473831 - DNA, 15 bp, Homo sapiens
ctggccgatctcctt

SEQ ID NO: 473832 - DNA, 15 bp, Homo sapiens
actggccgatctcct

SEQ ID NO: 473833 - DNA, 15 bp, Homo sapiens
gactggccgatctcc

SEQ ID NO: 473834 - DNA, 15 bp, Homo sapiens
agactggccgatctc

SEQ ID NO: 473835 - DNA, 15 bp, Homo sapiens
tagactggccgatct

SEQ ID NO: 473836 - DNA, 15 bp, Homo sapiens
ctagactggccgatc

SEQ ID NO: 473837 - DNA, 15 bp, Homo sapiens
tctagactggccgat

SEQ ID NO: 473838 - DNA, 15 bp, Homo sapiens
gtctagactggccga

SEQ ID NO: 473839 - DNA, 15 bp, Homo sapiens
agtctagactggccg

SEQ ID NO: 473840 - DNA, 15 bp, Homo sapiens
gagtctagactggcc

SEQ ID NO: 473841 - DNA, 15 bp, Homo sapiens
agagtctagactggc

SEQ ID NO: 473842 - DNA, 15 bp, Homo sapiens
gagagtctagactgg

SEQ ID NO: 473843 - DNA, 15 bp, Homo sapiens
tgagagtctagactg

SEQ ID NO: 473844 - DNA, 15 bp, Homo sapiens
ttgagagtctagact

SEQ ID NO: 473845 - DNA, 15 bp, Homo sapiens
tttgagagtctagac

SEQ ID NO: 473846 - DNA, 15 bp, Homo sapiens
ctttgagagtctaga

SEQ ID NO: 473847 - DNA, 15 bp, Homo sapiens
gctttgagagtctag

SEQ ID NO: 473848 - DNA, 15 bp, Homo sapiens
tgctttgagagtcta

SEQ ID NO: 473849 - DNA, 15 bp, Homo sapiens
ttgctttgagagtct

SEQ ID NO: 473850 - DNA, 15 bp, Homo sapiens
tttgctttgagagtc

SEQ ID NO: 473851 - DNA, 15 bp, Homo sapiens
ttttgctttgagagt

SEQ ID NO: 473852 - DNA, 15 bp, Homo sapiens
gttttgctttgagag

SEQ ID NO: 473853 - DNA, 15 bp, Homo sapiens
ggttttgctttgaga

SEQ ID NO: 473854 - DNA, 15 bp, Homo sapiens
tggttttgctttgag

SEQ ID NO: 473855 - DNA, 15 bp, Homo sapiens
gtggttttgctttga

SEQ ID NO: 473856 - DNA, 15 bp, Homo sapiens
ggtggttttgctttg

SEQ ID NO: 473857 - DNA, 15 bp, Homo sapiens
tggtggttttgcttt

SEQ ID NO: 473858 - DNA, 15 bp, Homo sapiens
ttggtggttttgctt

SEQ ID NO: 473859 - DNA, 15 bp, Homo sapiens
cttggtggttttgct

SEQ ID NO: 473860 - DNA, 15 bp, Homo sapiens
gcttggtggttttgc

SEQ ID NO: 473861 - DNA, 15 bp, Homo sapiens
tgcttggtggttttg

SEQ ID NO: 473862 - DNA, 15 bp, Homo sapiens
ctgcttggtggtttt

SEQ ID NO: 473863 - DNA, 15 bp, Homo sapiens
tctgcttggtggttt

SEQ ID NO: 473864 - DNA, 15 bp, Homo sapiens
ttctgcttggtggtt

SEQ ID NO: 473865 - DNA, 15 bp, Homo sapiens
cttctgcttggtggt

SEQ ID NO: 473866 - DNA, 15 bp, Homo sapiens
gcttctgcttggtgg

SEQ ID NO: 473867 - DNA, 15 bp, Homo sapiens
tgcttctgcttggtg

SEQ ID NO: 473868 - DNA, 15 bp, Homo sapiens
atgcttctgcttggt

SEQ ID NO: 473869 - DNA, 15 bp, Homo sapiens
tatgcttctgcttgg

SEQ ID NO: 473870 - DNA, 15 bp, Homo sapiens
atatgcttctgcttg

SEQ ID NO: 473871 - DNA, 15 bp, Homo sapiens
gatatgcttctgctt

SEQ ID NO: 473872 - DNA, 15 bp, Homo sapiens
ggatatgcttctgct

SEQ ID NO: 473873 - DNA, 15 bp, Homo sapiens
aggatatgcttctgc

SEQ ID NO: 473874 - DNA, 15 bp, Homo sapiens
caggatatgcttctg

SEQ ID NO: 473875 - DNA, 15 bp, Homo sapiens
ccaggatatgcttct

SEQ ID NO: 473876 - DNA, 15 bp, Homo sapiens
cccaggatatgcttc

SEQ ID NO: 473877 - DNA, 15 bp, Homo sapiens
tcccaggatatgctt

SEQ ID NO: 473878 - DNA, 15 bp, Homo sapiens
ttcccaggatatgct

SEQ ID NO: 473879 - DNA, 15 bp, Homo sapiens
attcccaggatatgc

SEQ ID NO: 473880 - DNA, 15 bp, Homo sapiens
tattcccaggatatg

SEQ ID NO: 473881 - DNA, 15 bp, Homo sapiens
ctattcccaggatat

SEQ ID NO: 473882 - DNA, 15 bp, Homo sapiens
tctattcccaggata

SEQ ID NO: 473883 - DNA, 15 bp, Homo sapiens
ctctattcccaggat

SEQ ID NO: 473884 - DNA, 15 bp, Homo sapiens
cctctattcccagga

SEQ ID NO: 473885 - DNA, 15 bp, Homo sapiens
tcctctattcccagg

SEQ ID NO: 473886 - DNA, 15 bp, Homo sapiens
ttcctctattcccag

SEQ ID NO: 473887 - DNA, 15 bp, Homo sapiens
cttcctctattccca

SEQ ID NO: 473888 - DNA, 15 bp, Homo sapiens
ccttcctctattccc

SEQ ID NO: 473889 - DNA, 15 bp, Homo sapiens
gccttcctctattcc

SEQ ID NO: 473890 - DNA, 15 bp, Homo sapiens
tgccttcctctattc

SEQ ID NO: 473891 - DNA, 15 bp, Homo sapiens
ctgccttcctctatt

SEQ ID NO: 473892 - DNA, 15 bp, Homo sapiens
tctgccttcctctat

SEQ ID NO: 473893 - DNA, 15 bp, Homo sapiens
ctctgccttcctcta

SEQ ID NO: 473894 - DNA, 15 bp, Homo sapiens
tctctgccttcctct

SEQ ID NO: 473895 - DNA, 15 bp, Homo sapiens
gtctctgccttcctc

SEQ ID NO: 473896 - DNA, 15 bp, Homo sapiens
tgtctctgccttcct

SEQ ID NO: 473897 - DNA, 15 bp, Homo sapiens
gtgtctctgccttcc

SEQ ID NO: 473898 - DNA, 15 bp, Homo sapiens
agtgtctctgccttc

SEQ ID NO: 473899 - DNA, 15 bp, Homo sapiens
cagtgtctctgcctt

SEQ ID NO: 473900 - DNA, 15 bp, Homo sapiens
gcagtgtctctgcct

SEQ ID NO: 473901 - DNA, 15 bp, Homo sapiens
tgcagtgtctctgcc

SEQ ID NO: 473902 - DNA, 15 bp, Homo sapiens
ctgcagtgtctctgc

SEQ ID NO: 473903 - DNA, 15 bp, Homo sapiens
cctgcagtgtctctg

SEQ ID NO: 473904 - DNA, 15 bp, Homo sapiens
ccctgcagtgtctct

SEQ ID NO: 473905 - DNA, 15 bp, Homo sapiens
cccctgcagtgtctc

SEQ ID NO: 473906 - DNA, 15 bp, Homo sapiens
tcccctgcagtgtct

SEQ ID NO: 473907 - DNA, 15 bp, Homo sapiens
ttcccctgcagtgtc

SEQ ID NO: 473908 - DNA, 15 bp, Homo sapiens
cttcccctgcagtgt

SEQ ID NO: 473909 - DNA, 15 bp, Homo sapiens
ccttcccctgcagtg

SEQ ID NO: 473910 - DNA, 15 bp, Homo sapiens
cccttcccctgcagt

SEQ ID NO: 473911 - DNA, 15 bp, Homo sapiens
gcccttcccctgcag

SEQ ID NO: 473912 - DNA, 15 bp, Homo sapiens
ggcccttcccctgca

SEQ ID NO: 473913 - DNA, 15 bp, Homo sapiens
tggcccttcccctgc

SEQ ID NO: 473914 - DNA, 15 bp, Homo sapiens
ttggcccttcccctg

SEQ ID NO: 473915 - DNA, 15 bp, Homo sapiens
cttggcccttcccct

SEQ ID NO: 473916 - DNA, 15 bp, Homo sapiens
acttggcccttcccc

SEQ ID NO: 473917 - DNA, 15 bp, Homo sapiens
cacttggcccttccc

SEQ ID NO: 473918 - DNA, 15 bp, Homo sapiens
tcacttggcccttcc

SEQ ID NO: 473919 - DNA, 15 bp, Homo sapiens
ctcacttggcccttc

SEQ ID NO: 473920 - DNA, 15 bp, Homo sapiens
tctcacttggccctt

SEQ ID NO: 473921 - DNA, 15 bp, Homo sapiens
gtctcacttggccct

SEQ ID NO: 473922 - DNA, 15 bp, Homo sapiens
cgtctcacttggccc

SEQ ID NO: 473923 - DNA, 15 bp, Homo sapiens
gcgtctcacttggcc

SEQ ID NO: 473924 - DNA, 15 bp, Homo sapiens
agcgtctcacttggc

SEQ ID NO: 473925 - DNA, 15 bp, Homo sapiens
gagcgtctcacttgg

SEQ ID NO: 473926 - DNA, 15 bp, Homo sapiens
ggagcgtctcacttg

SEQ ID NO: 473927 - DNA, 15 bp, Homo sapiens
gggagcgtctcactt

SEQ ID NO: 473928 - DNA, 15 bp, Homo sapiens
tgggagcgtctcact

SEQ ID NO: 473929 - DNA, 15 bp, Homo sapiens
gtgggagcgtctcac

SEQ ID NO: 473930 - DNA, 15 bp, Homo sapiens
agtgggagcgtctca

SEQ ID NO: 473931 - DNA, 15 bp, Homo sapiens
gagtgggagcgtctc

SEQ ID NO: 473932 - DNA, 15 bp, Homo sapiens
tgagtgggagcgtct

SEQ ID NO: 473933 - DNA, 15 bp, Homo sapiens
gtgagtgggagcgtc

SEQ ID NO: 473934 - DNA, 15 bp, Homo sapiens
tgtgagtgggagcgt

SEQ ID NO: 473935 - DNA, 15 bp, Homo sapiens
gtgtgagtgggagcg

SEQ ID NO: 473936 - DNA, 15 bp, Homo sapiens
agtgtgagtgggagc

SEQ ID NO: 473937 - DNA, 15 bp, Homo sapiens
cagtgtgagtgggag

SEQ ID NO: 473938 - DNA, 15 bp, Homo sapiens
acagtgtgagtggga

SEQ ID NO: 473939 - DNA, 15 bp, Homo sapiens
cacagtgtgagtggg

SEQ ID NO: 473940 - DNA, 15 bp, Homo sapiens
acacagtgtgagtgg

SEQ ID NO: 473941 - DNA, 15 bp, Homo sapiens
cacacagtgtgagtg

SEQ ID NO: 473942 - DNA, 15 bp, Homo sapiens
ccacacagtgtgagt

SEQ ID NO: 473943 - DNA, 15 bp, Homo sapiens
tccacacagtgtgag

SEQ ID NO: 473944 - DNA, 15 bp, Homo sapiens
ctccacacagtgtga

SEQ ID NO: 473945 - DNA, 15 bp, Homo sapiens
actccacacagtgtg

SEQ ID NO: 473946 - DNA, 15 bp, Homo sapiens
gactccacacagtgt

SEQ ID NO: 473947 - DNA, 15 bp, Homo sapiens
ggactccacacagtg

SEQ ID NO: 473948 - DNA, 15 bp, Homo sapiens
tggactccacacagt

SEQ ID NO: 473949 - DNA, 15 bp, Homo sapiens
ttggactccacacag

SEQ ID NO: 473950 - DNA, 15 bp, Homo sapiens
gttggactccacaca

SEQ ID NO: 473951 - DNA, 15 bp, Homo sapiens
cgttggactccacac

SEQ ID NO: 473952 - DNA, 15 bp, Homo sapiens
ccgttggactccaca

SEQ ID NO: 473953 - DNA, 15 bp, Homo sapiens
tccgttggactccac

SEQ ID NO: 473954 - DNA, 15 bp, Homo sapiens
atccgttggactcca

SEQ ID NO: 473955 - DNA, 15 bp, Homo sapiens
catccgttggactcc

SEQ ID NO: 473956 - DNA, 15 bp, Homo sapiens
ccatccgttggactc

SEQ ID NO: 473957 - DNA, 15 bp, Homo sapiens
cccatccgttggact

SEQ ID NO: 473958 - DNA, 15 bp, Homo sapiens
ccccatccgttggac

SEQ ID NO: 473959 - DNA, 15 bp, Homo sapiens
gccccatccgttgga

SEQ ID NO: 473960 - DNA, 15 bp, Homo sapiens
tgccccatccgttgg

SEQ ID NO: 473961 - DNA, 15 bp, Homo sapiens
ctgccccatccgttg

SEQ ID NO: 473962 - DNA, 15 bp, Homo sapiens
gctgccccatccgtt

SEQ ID NO: 473963 - DNA, 15 bp, Homo sapiens
cgctgccccatccgt

SEQ ID NO: 473964 - DNA, 15 bp, Homo sapiens
acgctgccccatccg

SEQ ID NO: 473965 - DNA, 15 bp, Homo sapiens
cacgctgccccatcc

SEQ ID NO: 473966 - DNA, 15 bp, Homo sapiens
ccacgctgccccatc

SEQ ID NO: 473967 - DNA, 15 bp, Homo sapiens
gccacgctgccccat

SEQ ID NO: 473968 - DNA, 15 bp, Homo sapiens
ggccacgctgcccca

SEQ ID NO: 473969 - DNA, 15 bp, Homo sapiens
tggccacgctgcccc

SEQ ID NO: 473970 - DNA, 15 bp, Homo sapiens
gtggccacgctgccc

SEQ ID NO: 473971 - DNA, 15 bp, Homo sapiens
ggtggccacgctgcc

SEQ ID NO: 473972 - DNA, 15 bp, Homo sapiens
aggtggccacgctgc

SEQ ID NO: 473973 - DNA, 15 bp, Homo sapiens
caggtggccacgctg

SEQ ID NO: 473974 - DNA, 15 bp, Homo sapiens
ccaggtggccacgct

SEQ ID NO: 473975 - DNA, 15 bp, Homo sapiens
gccaggtggccacgc

SEQ ID NO: 473976 - DNA, 15 bp, Homo sapiens
ggccaggtggccacg

SEQ ID NO: 473977 - DNA, 15 bp, Homo sapiens
aggccaggtggccac

SEQ ID NO: 473978 - DNA, 15 bp, Homo sapiens
gaggccaggtggcca

SEQ ID NO: 473979 - DNA, 15 bp, Homo sapiens
cgaggccaggtggcc

SEQ ID NO: 473980 - DNA, 15 bp, Homo sapiens
gcgaggccaggtggc

SEQ ID NO: 473981 - DNA, 15 bp, Homo sapiens
agcgaggccaggtgg

SEQ ID NO: 473982 - DNA, 15 bp, Homo sapiens
gagcgaggccaggtg

SEQ ID NO: 473983 - DNA, 15 bp, Homo sapiens
ggagcgaggccaggt

SEQ ID NO: 473984 - DNA, 15 bp, Homo sapiens
aggagcgaggccagg

SEQ ID NO: 473985 - DNA, 15 bp, Homo sapiens
caggagcgaggccag

SEQ ID NO: 473986 - DNA, 15 bp, Homo sapiens
gcaggagcgaggcca

SEQ ID NO: 473987 - DNA, 15 bp, Homo sapiens
ggcaggagcgaggcc

SEQ ID NO: 473988 - DNA, 15 bp, Homo sapiens
gggcaggagcgaggc

SEQ ID NO: 473989 - DNA, 15 bp, Homo sapiens
tgggcaggagcgagg

SEQ ID NO: 473990 - DNA, 15 bp, Homo sapiens
ctgggcaggagcgag

SEQ ID NO: 473991 - DNA, 15 bp, Homo sapiens
gctgggcaggagcga

SEQ ID NO: 473992 - DNA, 15 bp, Homo sapiens
ggctgggcaggagcg

SEQ ID NO: 473993 - DNA, 15 bp, Homo sapiens
aggctgggcaggagc

SEQ ID NO: 473994 - DNA, 15 bp, Homo sapiens
gaggctgggcaggag

SEQ ID NO: 473995 - DNA, 15 bp, Homo sapiens
ggaggctgggcagga

SEQ ID NO: 473996 - DNA, 15 bp, Homo sapiens
gggaggctgggcagg

SEQ ID NO: 473997 - DNA, 15 bp, Homo sapiens
ggggaggctgggcag

SEQ ID NO: 473998 - DNA, 15 bp, Homo sapiens
gggggaggctgggca

SEQ ID NO: 473999 - DNA, 15 bp, Homo sapiens
tgggggaggctgggc

SEQ ID NO: 474000 - DNA, 15 bp, Homo sapiens
gtgggggaggctggg

SEQ ID NO: 474001 - DNA, 15 bp, Homo sapiens
cgtgggggaggctgg

SEQ ID NO: 474002 - DNA, 15 bp, Homo sapiens
ccgtgggggaggctg

SEQ ID NO: 474003 - DNA, 15 bp, Homo sapiens
cccgtgggggaggct

SEQ ID NO: 474004 - DNA, 15 bp, Homo sapiens
gcccgtgggggaggc

SEQ ID NO: 474005 - DNA, 15 bp, Homo sapiens
agcccgtgggggagg

SEQ ID NO: 474006 - DNA, 15 bp, Homo sapiens
gagcccgtgggggag

SEQ ID NO: 474007 - DNA, 15 bp, Homo sapiens
ggagcccgtggggga

SEQ ID NO: 474008 - DNA, 15 bp, Homo sapiens
gggagcccgtggggg

SEQ ID NO: 474009 - DNA, 15 bp, Homo sapiens
agggagcccgtgggg

SEQ ID NO: 474010 - DNA, 15 bp, Homo sapiens
cagggagcccgtggg

SEQ ID NO: 474011 - DNA, 15 bp, Homo sapiens
ccagggagcccgtgg

SEQ ID NO: 474012 - DNA, 15 bp, Homo sapiens
accagggagcccgtg

SEQ ID NO: 474013 - DNA, 15 bp, Homo sapiens
caccagggagcccgt

SEQ ID NO: 474014 - DNA, 15 bp, Homo sapiens
gcaccagggagcccg

SEQ ID NO: 474015 - DNA, 15 bp, Homo sapiens
tgcaccagggagccc

SEQ ID NO: 474016 - DNA, 15 bp, Homo sapiens
gtgcaccagggagcc

SEQ ID NO: 474017 - DNA, 15 bp, Homo sapiens
ggtgcaccagggagc

SEQ ID NO: 474018 - DNA, 15 bp, Homo sapiens
aggtgcaccagggag

SEQ ID NO: 474019 - DNA, 15 bp, Homo sapiens
aaggtgcaccaggga

SEQ ID NO: 474020 - DNA, 15 bp, Homo sapiens
gaaggtgcaccaggg

SEQ ID NO: 474021 - DNA, 15 bp, Homo sapiens
tgaaggtgcaccagg

SEQ ID NO: 474022 - DNA, 15 bp, Homo sapiens
gtgaaggtgcaccag

SEQ ID NO: 474023 - DNA, 15 bp, Homo sapiens
tgtgaaggtgcacca

SEQ ID NO: 474024 - DNA, 15 bp, Homo sapiens
ctgtgaaggtgcacc

SEQ ID NO: 474025 - DNA, 15 bp, Homo sapiens
gctgtgaaggtgcac

SEQ ID NO: 474026 - DNA, 15 bp, Homo sapiens
cgctgtgaaggtgca

SEQ ID NO: 474027 - DNA, 15 bp, Homo sapiens
gcgctgtgaaggtgc

SEQ ID NO: 474028 - DNA, 15 bp, Homo sapiens
ggcgctgtgaaggtg

SEQ ID NO: 474029 - DNA, 15 bp, Homo sapiens
tggcgctgtgaaggt

SEQ ID NO: 474030 - DNA, 15 bp, Homo sapiens
ctggcgctgtgaagg

SEQ ID NO: 474031 - DNA, 15 bp, Homo sapiens
cctggcgctgtgaag

SEQ ID NO: 474032 - DNA, 15 bp, Homo sapiens
acctggcgctgtgaa

SEQ ID NO: 474033 - DNA, 15 bp, Homo sapiens
cacctggcgctgtga

SEQ ID NO: 474034 - DNA, 15 bp, Homo sapiens
ccacctggcgctgtg

SEQ ID NO: 474035 - DNA, 15 bp, Homo sapiens
accacctggcgctgt

SEQ ID NO: 474036 - DNA, 15 bp, Homo sapiens
gaccacctggcgctg

SEQ ID NO: 474037 - DNA, 15 bp, Homo sapiens
cgaccacctggcgct

SEQ ID NO: 474038 - DNA, 15 bp, Homo sapiens
gcgaccacctggcgc

SEQ ID NO: 474039 - DNA, 15 bp, Homo sapiens
ggcgaccacctggcg

SEQ ID NO: 474040 - DNA, 15 bp, Homo sapiens
tggcgaccacctggc

SEQ ID NO: 474041 - DNA, 15 bp, Homo sapiens
ttggcgaccacctgg

SEQ ID NO: 474042 - DNA, 15 bp, Homo sapiens
gttggcgaccacctg

SEQ ID NO: 474043 - DNA, 15 bp, Homo sapiens
cgttggcgaccacct

SEQ ID NO: 474044 - DNA, 15 bp, Homo sapiens
acgttggcgaccacc

SEQ ID NO: 474045 - DNA, 15 bp, Homo sapiens
gacgttggcgaccac

SEQ ID NO: 474046 - DNA, 15 bp, Homo sapiens
tgacgttggcgacca

SEQ ID NO: 474047 - DNA, 15 bp, Homo sapiens
gtgacgttggcgacc

SEQ ID NO: 474048 - DNA, 15 bp, Homo sapiens
agtgacgttggcgac

SEQ ID NO: 474049 - DNA, 15 bp, Homo sapiens
cagtgacgttggcga

SEQ ID NO: 474050 - DNA, 15 bp, Homo sapiens
acagtgacgttggcg

SEQ ID NO: 474051 - DNA, 15 bp, Homo sapiens
cacagtgacgttggc

SEQ ID NO: 474052 - DNA, 15 bp, Homo sapiens
gcacagtgacgttgg

SEQ ID NO: 474053 - DNA, 15 bp, Homo sapiens
ggcacagtgacgttg

SEQ ID NO: 474054 - DNA, 15 bp, Homo sapiens
gggcacagtgacgtt

SEQ ID NO: 474055 - DNA, 15 bp, Homo sapiens
agggcacagtgacgt

SEQ ID NO: 474056 - DNA, 15 bp, Homo sapiens
gagggcacagtgacg

SEQ ID NO: 474057 - DNA, 15 bp, Homo sapiens
ggagggcacagtgac

SEQ ID NO: 474058 - DNA, 15 bp, Homo sapiens
gggagggcacagtga

SEQ ID NO: 474059 - DNA, 15 bp, Homo sapiens
ggggagggcacagtg

SEQ ID NO: 474060 - DNA, 15 bp, Homo sapiens
aggggagggcacagt

SEQ ID NO: 474061 - DNA, 15 bp, Homo sapiens
caggggagggcacag

SEQ ID NO: 474062 - DNA, 15 bp, Homo sapiens
ccaggggagggcaca

SEQ ID NO: 474063 - DNA, 15 bp, Homo sapiens
cccaggggagggcac

SEQ ID NO: 474064 - DNA, 15 bp, Homo sapiens
ccccaggggagggca

SEQ ID NO: 474065 - DNA, 15 bp, Homo sapiens
accccaggggagggc

SEQ ID NO: 474066 - DNA, 15 bp, Homo sapiens
aaccccaggggaggg

SEQ ID NO: 474067 - DNA, 15 bp, Homo sapiens
aaaccccaggggagg

SEQ ID NO: 474068 - DNA, 15 bp, Homo sapiens
gaaaccccaggggag

SEQ ID NO: 474069 - DNA, 15 bp, Homo sapiens
agaaaccccagggga

SEQ ID NO: 474070 - DNA, 15 bp, Homo sapiens
aagaaaccccagggg

SEQ ID NO: 474071 - DNA, 15 bp, Homo sapiens
aaagaaaccccaggg

SEQ ID NO: 474072 - DNA, 15 bp, Homo sapiens
gaaagaaaccccagg

SEQ ID NO: 474073 - DNA, 15 bp, Homo sapiens
ggaaagaaaccccag

SEQ ID NO: 474074 - DNA, 15 bp, Homo sapiens
aggaaagaaacccca

SEQ ID NO: 474075 - DNA, 15 bp, Homo sapiens
caggaaagaaacccc

SEQ ID NO: 474076 - DNA, 15 bp, Homo sapiens
ccaggaaagaaaccc

SEQ ID NO: 474077 - DNA, 15 bp, Homo sapiens
cccaggaaagaaacc

SEQ ID NO: 474078 - DNA, 15 bp, Homo sapiens
acccaggaaagaaac

SEQ ID NO: 474079 - DNA, 15 bp, Homo sapiens
gacccaggaaagaaa

SEQ ID NO: 474080 - DNA, 15 bp, Homo sapiens
ggacccaggaaagaa

SEQ ID NO: 474081 - DNA, 15 bp, Homo sapiens
tggacccaggaaaga

SEQ ID NO: 474082 - DNA, 15 bp, Homo sapiens
ctggacccaggaaag

SEQ ID NO: 474083 - DNA, 15 bp, Homo sapiens
gctggacccaggaaa

SEQ ID NO: 474084 - DNA, 15 bp, Homo sapiens
agctggacccaggaa

SEQ ID NO: 474085 - DNA, 15 bp, Homo sapiens
cagctggacccagga

SEQ ID NO: 474086 - DNA, 15 bp, Homo sapiens
gcagctggacccagg

SEQ ID NO: 474087 - DNA, 15 bp, Homo sapiens
agcagctggacccag

SEQ ID NO: 474088 - DNA, 15 bp, Homo sapiens
gagcagctggaccca

SEQ ID NO: 474089 - DNA, 15 bp, Homo sapiens
ggagcagctggaccc

SEQ ID NO: 474090 - DNA, 15 bp, Homo sapiens
tggagcagctggacc

SEQ ID NO: 474091 - DNA, 15 bp, Homo sapiens
ctggagcagctggac

SEQ ID NO: 474092 - DNA, 15 bp, Homo sapiens
actggagcagctgga

SEQ ID NO: 474093 - DNA, 15 bp, Homo sapiens
aactggagcagctgg

SEQ ID NO: 474094 - DNA, 15 bp, Homo sapiens
gaactggagcagctg

SEQ ID NO: 474095 - DNA, 15 bp, Homo sapiens
agaactggagcagct

SEQ ID NO: 474096 - DNA, 15 bp, Homo sapiens
gagaactggagcagc

SEQ ID NO: 474097 - DNA, 15 bp, Homo sapiens
ggagaactggagcag

SEQ ID NO: 474098 - DNA, 15 bp, Homo sapiens
gggagaactggagca

SEQ ID NO: 474099 - DNA, 15 bp, Homo sapiens
agggagaactggagc

SEQ ID NO: 474100 - DNA, 15 bp, Homo sapiens
gagggagaactggag

SEQ ID NO: 474101 - DNA, 15 bp, Homo sapiens
agagggagaactgga

SEQ ID NO: 474102 - DNA, 15 bp, Homo sapiens
tagagggagaactgg

SEQ ID NO: 474103 - DNA, 15 bp, Homo sapiens
ctagagggagaactg

SEQ ID NO: 474104 - DNA, 15 bp, Homo sapiens
gctagagggagaact

SEQ ID NO: 474105 - DNA, 15 bp, Homo sapiens
agctagagggagaac

SEQ ID NO: 474106 - DNA, 15 bp, Homo sapiens
gagctagagggagaa

SEQ ID NO: 474107 - DNA, 15 bp, Homo sapiens
ggagctagagggaga

SEQ ID NO: 474108 - DNA, 15 bp, Homo sapiens
tggagctagagggag

SEQ ID NO: 474109 - DNA, 15 bp, Homo sapiens
ctggagctagaggga

SEQ ID NO: 474110 - DNA, 15 bp, Homo sapiens
tctggagctagaggg

SEQ ID NO: 474111 - DNA, 15 bp, Homo sapiens
ctctggagctagagg

SEQ ID NO: 474112 - DNA, 15 bp, Homo sapiens
cctctggagctagag

SEQ ID NO: 474113 - DNA, 15 bp, Homo sapiens
ccctctggagctaga

SEQ ID NO: 474114 - DNA, 15 bp, Homo sapiens
gccctctggagctag

SEQ ID NO: 474115 - DNA, 15 bp, Homo sapiens
ggccctctggagcta

SEQ ID NO: 474116 - DNA, 15 bp, Homo sapiens
gggccctctggagct

SEQ ID NO: 474117 - DNA, 15 bp, Homo sapiens
agggccctctggagc

SEQ ID NO: 474118 - DNA, 15 bp, Homo sapiens
gagggccctctggag

SEQ ID NO: 474119 - DNA, 15 bp, Homo sapiens
agagggccctctgga

SEQ ID NO: 474120 - DNA, 15 bp, Homo sapiens
gagagggccctctgg

SEQ ID NO: 474121 - DNA, 15 bp, Homo sapiens
agagagggccctctg

SEQ ID NO: 474122 - DNA, 15 bp, Homo sapiens
gagagagggccctct

SEQ ID NO: 474123 - DNA, 15 bp, Homo sapiens
tgagagagggccctc

SEQ ID NO: 474124 - DNA, 15 bp, Homo sapiens
atgagagagggccct

SEQ ID NO: 474125 - DNA, 15 bp, Homo sapiens
catgagagagggccc

SEQ ID NO: 474126 - DNA, 15 bp, Homo sapiens
gcatgagagagggcc

SEQ ID NO: 474127 - DNA, 15 bp, Homo sapiens
agcatgagagagggc

SEQ ID NO: 474128 - DNA, 15 bp, Homo sapiens
aagcatgagagaggg

SEQ ID NO: 474129 - DNA, 15 bp, Homo sapiens
caagcatgagagagg

SEQ ID NO: 474130 - DNA, 15 bp, Homo sapiens
gcaagcatgagagag

SEQ ID NO: 474131 - DNA, 15 bp, Homo sapiens
agcaagcatgagaga

SEQ ID NO: 474132 - DNA, 15 bp, Homo sapiens
cagcaagcatgagag

SEQ ID NO: 474133 - DNA, 15 bp, Homo sapiens
ccagcaagcatgaga

SEQ ID NO: 474134 - DNA, 15 bp, Homo sapiens
cccagcaagcatgag

SEQ ID NO: 474135 - DNA, 15 bp, Homo sapiens
ccccagcaagcatga

SEQ ID NO: 474136 - DNA, 15 bp, Homo sapiens
tccccagcaagcatg

SEQ ID NO: 474137 - DNA, 15 bp, Homo sapiens
ttccccagcaagcat

SEQ ID NO: 474138 - DNA, 15 bp, Homo sapiens
cttccccagcaagca

SEQ ID NO: 474139 - DNA, 15 bp, Homo sapiens
acttccccagcaagc

SEQ ID NO: 474140 - DNA, 15 bp, Homo sapiens
tacttccccagcaag

SEQ ID NO: 474141 - DNA, 15 bp, Homo sapiens
gtacttccccagcaa

SEQ ID NO: 474142 - DNA, 15 bp, Homo sapiens
agtacttccccagca

SEQ ID NO: 474143 - DNA, 15 bp, Homo sapiens
cagtacttccccagc

SEQ ID NO: 474144 - DNA, 15 bp, Homo sapiens
ccagtacttccccag

SEQ ID NO: 474145 - DNA, 15 bp, Homo sapiens
cccagtacttcccca

SEQ ID NO: 474146 - DNA, 15 bp, Homo sapiens
ccccagtacttcccc

SEQ ID NO: 474147 - DNA, 15 bp, Homo sapiens
cccccagtacttccc

SEQ ID NO: 474148 - DNA, 15 bp, Homo sapiens
gcccccagtacttcc

SEQ ID NO: 474149 - DNA, 15 bp, Homo sapiens
agcccccagtacttc

SEQ ID NO: 474150 - DNA, 15 bp, Homo sapiens
aagcccccagtactt

SEQ ID NO: 474151 - DNA, 15 bp, Homo sapiens
caagcccccagtact

SEQ ID NO: 474152 - DNA, 15 bp, Homo sapiens
ccaagcccccagtac

SEQ ID NO: 474153 - DNA, 15 bp, Homo sapiens
tccaagcccccagta

SEQ ID NO: 474154 - DNA, 15 bp, Homo sapiens
gtccaagcccccagt

SEQ ID NO: 474155 - DNA, 15 bp, Homo sapiens
tgtccaagcccccag

SEQ ID NO: 474156 - DNA, 15 bp, Homo sapiens
atgtccaagccccca

SEQ ID NO: 474157 - DNA, 15 bp, Homo sapiens
aatgtccaagccccc

SEQ ID NO: 474158 - DNA, 15 bp, Homo sapiens
caatgtccaagcccc

SEQ ID NO: 474159 - DNA, 15 bp, Homo sapiens
ccaatgtccaagccc

SEQ ID NO: 474160 - DNA, 15 bp, Homo sapiens
accaatgtccaagcc

SEQ ID NO: 474161 - DNA, 15 bp, Homo sapiens
gaccaatgtccaagc

SEQ ID NO: 474162 - DNA, 15 bp, Homo sapiens
ggaccaatgtccaag

SEQ ID NO: 474163 - DNA, 15 bp, Homo sapiens
aggaccaatgtccaa

SEQ ID NO: 474164 - DNA, 15 bp, Homo sapiens
aaggaccaatgtcca

SEQ ID NO: 474165 - DNA, 15 bp, Homo sapiens
acgttacccacctct

SEQ ID NO: 474166 - DNA, 15 bp, Homo sapiens
aacgttacccacctc

SEQ ID NO: 474167 - DNA, 15 bp, Homo sapiens
aaacgttacccacct

SEQ ID NO: 474168 - DNA, 15 bp, Homo sapiens
taaacgttacccacc

SEQ ID NO: 474169 - DNA, 15 bp, Homo sapiens
ctaaacgttacccac

SEQ ID NO: 474170 - DNA, 15 bp, Homo sapiens
cctaaacgttaccca

SEQ ID NO: 474171 - DNA, 15 bp, Homo sapiens
ccctaaacgttaccc

SEQ ID NO: 474172 - DNA, 15 bp, Homo sapiens
cccctaaacgttacc

SEQ ID NO: 474173 - DNA, 15 bp, Homo sapiens
acccctaaacgttac

SEQ ID NO: 474174 - DNA, 15 bp, Homo sapiens
aacccctaaacgtta

SEQ ID NO: 474175 - DNA, 15 bp, Homo sapiens
gaacccctaaacgtt

SEQ ID NO: 474176 - DNA, 15 bp, Homo sapiens
agaacccctaaacgt

SEQ ID NO: 474177 - DNA, 15 bp, Homo sapiens
gagaacccctaaacg

SEQ ID NO: 474178 - DNA, 15 bp, Homo sapiens
agagaacccctaaac

SEQ ID NO: 474179 - DNA, 15 bp, Homo sapiens
gagagaacccctaaa

SEQ ID NO: 474180 - DNA, 15 bp, Homo sapiens
agagagaacccctaa

SEQ ID NO: 474181 - DNA, 15 bp, Homo sapiens
aagagagaaccccta

SEQ ID NO: 474182 - DNA, 15 bp, Homo sapiens
gaagagagaacccct

SEQ ID NO: 474183 - DNA, 15 bp, Homo sapiens
ggaagagagaacccc

SEQ ID NO: 474184 - DNA, 15 bp, Homo sapiens
aggaagagagaaccc

SEQ ID NO: 474185 - DNA, 15 bp, Homo sapiens
gaggaagagagaacc

SEQ ID NO: 474186 - DNA, 15 bp, Homo sapiens
agaggaagagagaac

SEQ ID NO: 474187 - DNA, 15 bp, Homo sapiens
aagaggaagagagaa

SEQ ID NO: 474188 - DNA, 15 bp, Homo sapiens
gaagaggaagagaga

SEQ ID NO: 474189 - DNA, 15 bp, Homo sapiens
ggaagaggaagagag

SEQ ID NO: 474190 - DNA, 15 bp, Homo sapiens
gggaagaggaagaga

SEQ ID NO: 474191 - DNA, 15 bp, Homo sapiens
agggaagaggaagag

SEQ ID NO: 474192 - DNA, 15 bp, Homo sapiens
gagggaagaggaaga

SEQ ID NO: 474193 - DNA, 15 bp, Homo sapiens
ggagggaagaggaag

SEQ ID NO: 474194 - DNA, 15 bp, Homo sapiens
cggagggaagaggaa

SEQ ID NO: 474195 - DNA, 15 bp, Homo sapiens
acggagggaagagga

SEQ ID NO: 474196 - DNA, 15 bp, Homo sapiens
cacggagggaagagg

SEQ ID NO: 474197 - DNA, 15 bp, Homo sapiens
tcacggagggaagag

SEQ ID NO: 474198 - DNA, 15 bp, Homo sapiens
gtcacggagggaaga

SEQ ID NO: 474199 - DNA, 15 bp, Homo sapiens
ggtcacggagggaag

SEQ ID NO: 474200 - DNA, 15 bp, Homo sapiens
gggtcacggagggaa

SEQ ID NO: 474201 - DNA, 15 bp, Homo sapiens
agggtcacggaggga

SEQ ID NO: 474202 - DNA, 15 bp, Homo sapiens
gagggtcacggaggg

SEQ ID NO: 474203 - DNA, 15 bp, Homo sapiens
ggagggtcacggagg

SEQ ID NO: 474204 - DNA, 15 bp, Homo sapiens
aggagggtcacggag

SEQ ID NO: 474205 - DNA, 15 bp, Homo sapiens
taggagggtcacgga

SEQ ID NO: 474206 - DNA, 15 bp, Homo sapiens
ttaggagggtcacgg

SEQ ID NO: 474207 - DNA, 15 bp, Homo sapiens
gttaggagggtcacg

SEQ ID NO: 474208 - DNA, 15 bp, Homo sapiens
agttaggagggtcac

SEQ ID NO: 474209 - DNA, 15 bp, Homo sapiens
cagttaggagggtca

SEQ ID NO: 474210 - DNA, 15 bp, Homo sapiens
ccagttaggagggtc

SEQ ID NO: 474211 - DNA, 15 bp, Homo sapiens
cccagttaggagggt

SEQ ID NO: 474212 - DNA, 15 bp, Homo sapiens
ccccagttaggaggg

SEQ ID NO: 474213 - DNA, 15 bp, Homo sapiens
tccccagttaggagg

SEQ ID NO: 474214 - DNA, 15 bp, Homo sapiens
gtccccagttaggag

SEQ ID NO: 474215 - DNA, 15 bp, Homo sapiens
cgtccccagttagga

SEQ ID NO: 474216 - DNA, 15 bp, Homo sapiens
tcgtccccagttagg

SEQ ID NO: 474217 - DNA, 15 bp, Homo sapiens
ctcgtccccagttag

SEQ ID NO: 474218 - DNA, 15 bp, Homo sapiens
gctcgtccccagtta

SEQ ID NO: 474219 - DNA, 15 bp, Homo sapiens
cgctcgtccccagtt

SEQ ID NO: 474220 - DNA, 15 bp, Homo sapiens
tcgctcgtccccagt

SEQ ID NO: 474221 - DNA, 15 bp, Homo sapiens
ttcgctcgtccccag

SEQ ID NO: 474222 - DNA, 15 bp, Homo sapiens
gttcgctcgtcccca

SEQ ID NO: 474223 - DNA, 15 bp, Homo sapiens
ggttcgctcgtcccc

SEQ ID NO: 474224 - DNA, 15 bp, Homo sapiens
gggttcgctcgtccc

SEQ ID NO: 474225 - DNA, 15 bp, Homo sapiens
agggttcgctcgtcc

SEQ ID NO: 474226 - DNA, 15 bp, Homo sapiens
tagggttcgctcgtc

SEQ ID NO: 474227 - DNA, 15 bp, Homo sapiens
ttagggttcgctcgt

SEQ ID NO: 474228 - DNA, 15 bp, Homo sapiens
cttagggttcgctcg

SEQ ID NO: 474229 - DNA, 15 bp, Homo sapiens
ccttagggttcgctc

SEQ ID NO: 474230 - DNA, 15 bp, Homo sapiens
gccttagggttcgct

SEQ ID NO: 474231 - DNA, 15 bp, Homo sapiens
ggccttagggttcgc

SEQ ID NO: 474232 - DNA, 15 bp, Homo sapiens
aggccttagggttcg

SEQ ID NO: 474233 - DNA, 15 bp, Homo sapiens
caggccttagggttc

SEQ ID NO: 474234 - DNA, 15 bp, Homo sapiens
acaggccttagggtt

SEQ ID NO: 474235 - DNA, 15 bp, Homo sapiens
gacaggccttagggt

SEQ ID NO: 474236 - DNA, 15 bp, Homo sapiens
agacaggccttaggg

SEQ ID NO: 474237 - DNA, 15 bp, Homo sapiens
aagacaggccttagg

SEQ ID NO: 474238 - DNA, 15 bp, Homo sapiens
taagacaggccttag

SEQ ID NO: 474239 - DNA, 15 bp, Homo sapiens
ataagacaggcctta

SEQ ID NO: 474240 - DNA, 15 bp, Homo sapiens
tataagacaggcctt

SEQ ID NO: 474241 - DNA, 15 bp, Homo sapiens
atataagacaggcct

SEQ ID NO: 474242 - DNA, 15 bp, Homo sapiens
tatataagacaggcc

SEQ ID NO: 474243 - DNA, 15 bp, Homo sapiens
gtatataagacaggc

SEQ ID NO: 474244 - DNA, 15 bp, Homo sapiens
ggtatataagacagg

SEQ ID NO: 474245 - DNA, 15 bp, Homo sapiens
gggtatataagacag

SEQ ID NO: 474246 - DNA, 15 bp, Homo sapiens
agggtatataagaca

SEQ ID NO: 474247 - DNA, 15 bp, Homo sapiens
gagggtatataagac

SEQ ID NO: 474248 - DNA, 15 bp, Homo sapiens
tgagggtatataaga

SEQ ID NO: 474249 - DNA, 15 bp, Homo sapiens
ttgagggtatataag

SEQ ID NO: 474250 - DNA, 15 bp, Homo sapiens
attgagggtatataa

SEQ ID NO: 474251 - DNA, 15 bp, Homo sapiens
tattgagggtatata

SEQ ID NO: 474252 - DNA, 15 bp, Homo sapiens
ctattgagggtatat

SEQ ID NO: 474253 - DNA, 15 bp, Homo sapiens
cctattgagggtata

SEQ ID NO: 474254 - DNA, 15 bp, Homo sapiens
tcctattgagggtat

SEQ ID NO: 474255 - DNA, 15 bp, Homo sapiens
ctcctattgagggta

SEQ ID NO: 474256 - DNA, 15 bp, Homo sapiens
tctcctattgagggt

SEQ ID NO: 474257 - DNA, 15 bp, Homo sapiens
ttctcctattgaggg

SEQ ID NO: 474258 - DNA, 15 bp, Homo sapiens
gttctcctattgagg

SEQ ID NO: 474259 - DNA, 15 bp, Homo sapiens
cgttctcctattgag

SEQ ID NO: 474260 - DNA, 15 bp, Homo sapiens
tcgttctcctattga

SEQ ID NO: 474261 - DNA, 15 bp, Homo sapiens
atcgttctcctattg

SEQ ID NO: 474262 - DNA, 15 bp, Homo sapiens
tatcgttctcctatt

SEQ ID NO: 474263 - DNA, 15 bp, Homo sapiens
ttatcgttctcctat

SEQ ID NO: 474264 - DNA, 15 bp, Homo sapiens
gttatcgttctccta

SEQ ID NO: 474265 - DNA, 15 bp, Homo sapiens
tgttatcgttctcct

SEQ ID NO: 474266 - DNA, 15 bp, Homo sapiens
atgttatcgttctcc

SEQ ID NO: 474267 - DNA, 15 bp, Homo sapiens
aatgttatcgttctc

SEQ ID NO: 474268 - DNA, 15 bp, Homo sapiens
gaatgttatcgttct

SEQ ID NO: 474269 - DNA, 15 bp, Homo sapiens
ggaatgttatcgttc

SEQ ID NO: 474270 - DNA, 15 bp, Homo sapiens
cggaatgttatcgtt

SEQ ID NO: 474271 - DNA, 15 bp, Homo sapiens
gcggaatgttatcgt

SEQ ID NO: 474272 - DNA, 15 bp, Homo sapiens
ggcggaatgttatcg

SEQ ID NO: 474273 - DNA, 15 bp, Homo sapiens
gggcggaatgttatc

SEQ ID NO: 474274 - DNA, 15 bp, Homo sapiens
ggggcggaatgttat

SEQ ID NO: 474275 - DNA, 15 bp, Homo sapiens
aggggcggaatgtta

SEQ ID NO: 474276 - DNA, 15 bp, Homo sapiens
gaggggcggaatgtt

SEQ ID NO: 474277 - DNA, 15 bp, Homo sapiens
ggaggggcggaatgt

SEQ ID NO: 474278 - DNA, 15 bp, Homo sapiens
gggaggggcggaatg

SEQ ID NO: 474279 - DNA, 15 bp, Homo sapiens
ggggaggggcggaat

SEQ ID NO: 474280 - DNA, 15 bp, Homo sapiens
gggggaggggcggaa

SEQ ID NO: 474281 - DNA, 15 bp, Homo sapiens
tgggggaggggcgga

SEQ ID NO: 474282 - DNA, 15 bp, Homo sapiens
ctgggggaggggcgg

SEQ ID NO: 474283 - DNA, 15 bp, Homo sapiens
actgggggaggggcg

SEQ ID NO: 474284 - DNA, 15 bp, Homo sapiens
aactgggggaggggc

SEQ ID NO: 474285 - DNA, 15 bp, Homo sapiens
aaactgggggagggg

SEQ ID NO: 474286 - DNA, 15 bp, Homo sapiens
gaaactgggggaggg

SEQ ID NO: 474287 - DNA, 15 bp, Homo sapiens
agaaactgggggagg

SEQ ID NO: 474288 - DNA, 15 bp, Homo sapiens
aagaaactgggggag

SEQ ID NO: 474289 - DNA, 15 bp, Homo sapiens
gaagaaactggggga

SEQ ID NO: 474290 - DNA, 15 bp, Homo sapiens
tgaagaaactggggg

SEQ ID NO: 474291 - DNA, 15 bp, Homo sapiens
ctgaagaaactgggg

SEQ ID NO: 474292 - DNA, 15 bp, Homo sapiens
gctgaagaaactggg

SEQ ID NO: 474293 - DNA, 15 bp, Homo sapiens
agctgaagaaactgg

SEQ ID NO: 474294 - DNA, 15 bp, Homo sapiens
aagctgaagaaactg

SEQ ID NO: 474295 - DNA, 15 bp, Homo sapiens
gaagctgaagaaact

SEQ ID NO: 474296 - DNA, 15 bp, Homo sapiens
ggaagctgaagaaac

SEQ ID NO: 474297 - DNA, 15 bp, Homo sapiens
aggaagctgaagaaa

SEQ ID NO: 474298 - DNA, 15 bp, Homo sapiens
gaggaagctgaagaa

SEQ ID NO: 474299 - DNA, 15 bp, Homo sapiens
agaggaagctgaaga

SEQ ID NO: 474300 - DNA, 15 bp, Homo sapiens
gagaggaagctgaag

SEQ ID NO: 474301 - DNA, 15 bp, Homo sapiens
ggagaggaagctgaa

SEQ ID NO: 474302 - DNA, 15 bp, Homo sapiens
aggagaggaagctga

SEQ ID NO: 474303 - DNA, 15 bp, Homo sapiens
caggagaggaagctg

SEQ ID NO: 474304 - DNA, 15 bp, Homo sapiens
ccaggagaggaagct

SEQ ID NO: 474305 - DNA, 15 bp, Homo sapiens
tccaggagaggaagc

SEQ ID NO: 474306 - DNA, 15 bp, Homo sapiens
ctccaggagaggaag

SEQ ID NO: 474307 - DNA, 15 bp, Homo sapiens
cctccaggagaggaa

SEQ ID NO: 474308 - DNA, 15 bp, Homo sapiens
ccctccaggagagga

SEQ ID NO: 474309 - DNA, 15 bp, Homo sapiens
cccctccaggagagg

SEQ ID NO: 474310 - DNA, 15 bp, Homo sapiens
ccccctccaggagag

SEQ ID NO: 474311 - DNA, 15 bp, Homo sapiens
tccccctccaggaga

SEQ ID NO: 474312 - DNA, 15 bp, Homo sapiens
ttccccctccaggag

SEQ ID NO: 474313 - DNA, 15 bp, Homo sapiens
cttccccctccagga

SEQ ID NO: 474314 - DNA, 15 bp, Homo sapiens
tcttccccctccagg

SEQ ID NO: 474315 - DNA, 15 bp, Homo sapiens
ctcttccccctccag

SEQ ID NO: 474316 - DNA, 15 bp, Homo sapiens
gctcttccccctcca

SEQ ID NO: 474317 - DNA, 15 bp, Homo sapiens
tgctcttccccctcc

SEQ ID NO: 474318 - DNA, 15 bp, Homo sapiens
ctgctcttccccctc

SEQ ID NO: 474319 - DNA, 15 bp, Homo sapiens
tctgctcttccccct

SEQ ID NO: 474320 - DNA, 15 bp, Homo sapiens
ttctgctcttccccc

SEQ ID NO: 474321 - DNA, 15 bp, Homo sapiens
cttctgctcttcccc

SEQ ID NO: 474322 - DNA, 15 bp, Homo sapiens
tcttctgctcttccc

SEQ ID NO: 474323 - DNA, 15 bp, Homo sapiens
ttcttctgctcttcc

SEQ ID NO: 474324 - DNA, 15 bp, Homo sapiens
tttcttctgctcttc

SEQ ID NO: 474325 - DNA, 15 bp, Homo sapiens
ctttcttctgctctt

SEQ ID NO: 474326 - DNA, 15 bp, Homo sapiens
gctttcttctgctct

SEQ ID NO: 474327 - DNA, 15 bp, Homo sapiens
tgctttcttctgctc

SEQ ID NO: 474328 - DNA, 15 bp, Homo sapiens
ttgctttcttctgct

SEQ ID NO: 474329 - DNA, 15 bp, Homo sapiens
cttgctttcttctgc

SEQ ID NO: 474330 - DNA, 15 bp, Homo sapiens
ccttgctttcttctg

SEQ ID NO: 474331 - DNA, 15 bp, Homo sapiens
tccttgctttcttct

SEQ ID NO: 474332 - DNA, 15 bp, Homo sapiens
ttccttgctttcttc

SEQ ID NO: 474333 - DNA, 15 bp, Homo sapiens
cttccttgctttctt

SEQ ID NO: 474334 - DNA, 15 bp, Homo sapiens
ccttccttgctttct

SEQ ID NO: 474335 - DNA, 15 bp, Homo sapiens
gccttccttgctttc

SEQ ID NO: 474336 - DNA, 15 bp, Homo sapiens
tgccttccttgcttt

SEQ ID NO: 474337 - DNA, 15 bp, Homo sapiens
gtgccttccttgctt

SEQ ID NO: 474338 - DNA, 15 bp, Homo sapiens
tgtgccttccttgct

SEQ ID NO: 474339 - DNA, 15 bp, Homo sapiens
ctgtgccttccttgc

SEQ ID NO: 474340 - DNA, 15 bp, Homo sapiens
cctgtgccttccttg

SEQ ID NO: 474341 - DNA, 15 bp, Homo sapiens
acctgtgccttcctt

SEQ ID NO: 474342 - DNA, 15 bp, Homo sapiens
aacctgtgccttcct

SEQ ID NO: 474343 - DNA, 15 bp, Homo sapiens
aaacctgtgccttcc

SEQ ID NO: 474344 - DNA, 15 bp, Homo sapiens
aaaacctgtgccttc

SEQ ID NO: 474345 - DNA, 15 bp, Homo sapiens
gaaaacctgtgcctt

SEQ ID NO: 474346 - DNA, 15 bp, Homo sapiens
agaaaacctgtgcct

SEQ ID NO: 474347 - DNA, 15 bp, Homo sapiens
aagaaaacctgtgcc

SEQ ID NO: 474348 - DNA, 15 bp, Homo sapiens
taagaaaacctgtgc

SEQ ID NO: 474349 - DNA, 15 bp, Homo sapiens
gtaagaaaacctgtg

SEQ ID NO: 474350 - DNA, 15 bp, Homo sapiens
agtaagaaaacctgt

SEQ ID NO: 474351 - DNA, 15 bp, Homo sapiens
aagtaagaaaacctg

SEQ ID NO: 474352 - DNA, 15 bp, Homo sapiens
aaagtaagaaaacct

SEQ ID NO: 474353 - DNA, 15 bp, Homo sapiens
gaaagtaagaaaacc

SEQ ID NO: 474354 - DNA, 15 bp, Homo sapiens
agaaagtaagaaaac

SEQ ID NO: 474355 - DNA, 15 bp, Homo sapiens
cagaaagtaagaaaa

SEQ ID NO: 474356 - DNA, 15 bp, Homo sapiens
gcagaaagtaagaaa

SEQ ID NO: 474357 - DNA, 15 bp, Homo sapiens
agcagaaagtaagaa

SEQ ID NO: 474358 - DNA, 15 bp, Homo sapiens
gagcagaaagtaaga

SEQ ID NO: 474359 - DNA, 15 bp, Homo sapiens
ggagcagaaagtaag

SEQ ID NO: 474360 - DNA, 15 bp, Homo sapiens
tggagcagaaagtaa

SEQ ID NO: 474361 - DNA, 15 bp, Homo sapiens
atggagcagaaagta

SEQ ID NO: 474362 - DNA, 15 bp, Homo sapiens
gatggagcagaaagt

SEQ ID NO: 474363 - DNA, 15 bp, Homo sapiens
cgatggagcagaaag

SEQ ID NO: 474364 - DNA, 15 bp, Homo sapiens
acgatggagcagaaa

SEQ ID NO: 474365 - DNA, 15 bp, Homo sapiens
gacgatggagcagaa

SEQ ID NO: 474366 - DNA, 15 bp, Homo sapiens
agacgatggagcaga

SEQ ID NO: 474367 - DNA, 15 bp, Homo sapiens
gagacgatggagcag

SEQ ID NO: 474368 - DNA, 15 bp, Homo sapiens
tgagacgatggagca

SEQ ID NO: 474369 - DNA, 15 bp, Homo sapiens
atgagacgatggagc

SEQ ID NO: 474370 - DNA, 15 bp, Homo sapiens
gatgagacgatggag

SEQ ID NO: 474371 - DNA, 15 bp, Homo sapiens
ggatgagacgatgga

SEQ ID NO: 474372 - DNA, 15 bp, Homo sapiens
aggatgagacgatgg

SEQ ID NO: 474373 - DNA, 15 bp, Homo sapiens
caggatgagacgatg

SEQ ID NO: 474374 - DNA, 15 bp, Homo sapiens
gcaggatgagacgat

SEQ ID NO: 474375 - DNA, 15 bp, Homo sapiens
ggcaggatgagacga

SEQ ID NO: 474376 - DNA, 15 bp, Homo sapiens
gggcaggatgagacg

SEQ ID NO: 474377 - DNA, 15 bp, Homo sapiens
ggggcaggatgagac

SEQ ID NO: 474378 - DNA, 15 bp, Homo sapiens
cggggcaggatgaga

SEQ ID NO: 474379 - DNA, 15 bp, Homo sapiens
tcggggcaggatgag

SEQ ID NO: 474380 - DNA, 15 bp, Homo sapiens
ctcggggcaggatga

SEQ ID NO: 474381 - DNA, 15 bp, Homo sapiens
tctcggggcaggatg

SEQ ID NO: 474382 - DNA, 15 bp, Homo sapiens
ctctcggggcaggat

SEQ ID NO: 474383 - DNA, 15 bp, Homo sapiens
gctctcggggcagga

SEQ ID NO: 474384 - DNA, 15 bp, Homo sapiens
agctctcggggcagg

SEQ ID NO: 474385 - DNA, 15 bp, Homo sapiens
aagctctcggggcag

SEQ ID NO: 474386 - DNA, 15 bp, Homo sapiens
gaagctctcggggca

SEQ ID NO: 474387 - DNA, 15 bp, Homo sapiens
tgaagctctcggggc

SEQ ID NO: 474388 - DNA, 15 bp, Homo sapiens
ttgaagctctcgggg

SEQ ID NO: 474389 - DNA, 15 bp, Homo sapiens
cttgaagctctcggg

SEQ ID NO: 474390 - DNA, 15 bp, Homo sapiens
acttgaagctctcgg

SEQ ID NO: 474391 - DNA, 15 bp, Homo sapiens
cacttgaagctctcg

SEQ ID NO: 474392 - DNA, 15 bp, Homo sapiens
gcacttgaagctctc

SEQ ID NO: 474393 - DNA, 15 bp, Homo sapiens
tgcacttgaagctct

SEQ ID NO: 474394 - DNA, 15 bp, Homo sapiens
gtgcacttgaagctc

SEQ ID NO: 474395 - DNA, 15 bp, Homo sapiens
tgtgcacttgaagct

SEQ ID NO: 474396 - DNA, 15 bp, Homo sapiens
gtgtgcacttgaagc

SEQ ID NO: 474397 - DNA, 15 bp, Homo sapiens
agtgtgcacttgaag

SEQ ID NO: 474398 - DNA, 15 bp, Homo sapiens
gagtgtgcacttgaa

SEQ ID NO: 474399 - DNA, 15 bp, Homo sapiens
tgagtgtgcacttga

SEQ ID NO: 474400 - DNA, 15 bp, Homo sapiens
gtgagtgtgcacttg

SEQ ID NO: 474401 - DNA, 15 bp, Homo sapiens
agtgagtgtgcactt

SEQ ID NO: 474402 - DNA, 15 bp, Homo sapiens
cagtgagtgtgcact

SEQ ID NO: 474403 - DNA, 15 bp, Homo sapiens
gcagtgagtgtgcac

SEQ ID NO: 474404 - DNA, 15 bp, Homo sapiens
tgcagtgagtgtgca

SEQ ID NO: 474405 - DNA, 15 bp, Homo sapiens
gtgcagtgagtgtgc

SEQ ID NO: 474406 - DNA, 15 bp, Homo sapiens
tgtgcagtgagtgtg

SEQ ID NO: 474407 - DNA, 15 bp, Homo sapiens
atgtgcagtgagtgt

SEQ ID NO: 474408 - DNA, 15 bp, Homo sapiens
gatgtgcagtgagtg

SEQ ID NO: 474409 - DNA, 15 bp, Homo sapiens
agatgtgcagtgagt

SEQ ID NO: 474410 - DNA, 15 bp, Homo sapiens
aagatgtgcagtgag

SEQ ID NO: 474411 - DNA, 15 bp, Homo sapiens
aaagatgtgcagtga

SEQ ID NO: 474412 - DNA, 15 bp, Homo sapiens
caaagatgtgcagtg

SEQ ID NO: 474413 - DNA, 15 bp, Homo sapiens
acaaagatgtgcagt

SEQ ID NO: 474414 - DNA, 15 bp, Homo sapiens
cacaaagatgtgcag

SEQ ID NO: 474415 - DNA, 15 bp, Homo sapiens
tcacaaagatgtgca

SEQ ID NO: 474416 - DNA, 15 bp, Homo sapiens
atcacaaagatgtgc

SEQ ID NO: 474417 - DNA, 15 bp, Homo sapiens
catcacaaagatgtg

SEQ ID NO: 474418 - DNA, 15 bp, Homo sapiens
gcatcacaaagatgt

SEQ ID NO: 474419 - DNA, 15 bp, Homo sapiens
ggcatcacaaagatg

SEQ ID NO: 474420 - DNA, 15 bp, Homo sapiens
gggcatcacaaagat

SEQ ID NO: 474421 - DNA, 15 bp, Homo sapiens
agggcatcacaaaga

SEQ ID NO: 474422 - DNA, 15 bp, Homo sapiens
tagggcatcacaaag

SEQ ID NO: 474423 - DNA, 15 bp, Homo sapiens
gtagggcatcacaaa

SEQ ID NO: 474424 - DNA, 15 bp, Homo sapiens
tgtagggcatcacaa

SEQ ID NO: 474425 - DNA, 15 bp, Homo sapiens
ttgtagggcatcaca

SEQ ID NO: 474426 - DNA, 15 bp, Homo sapiens
gttgtagggcatcac

SEQ ID NO: 474427 - DNA, 15 bp, Homo sapiens
cgttgtagggcatca

SEQ ID NO: 474428 - DNA, 15 bp, Homo sapiens
acgttgtagggcatc

SEQ ID NO: 474429 - DNA, 15 bp, Homo sapiens
gacgttgtagggcat

SEQ ID NO: 474430 - DNA, 15 bp, Homo sapiens
cgacgttgtagggca

SEQ ID NO: 474431 - DNA, 15 bp, Homo sapiens
acgacgttgtagggc

SEQ ID NO: 474432 - DNA, 15 bp, Homo sapiens
gacgacgttgtaggg

SEQ ID NO: 474433 - DNA, 15 bp, Homo sapiens
ggacgacgttgtagg

SEQ ID NO: 474434 - DNA, 15 bp, Homo sapiens
gggacgacgttgtag

SEQ ID NO: 474435 - DNA, 15 bp, Homo sapiens
ggggacgacgttgta

SEQ ID NO: 474436 - DNA, 15 bp, Homo sapiens
gggggacgacgttgt

SEQ ID NO: 474437 - DNA, 15 bp, Homo sapiens
tgggggacgacgttg

SEQ ID NO: 474438 - DNA, 15 bp, Homo sapiens
atgggggacgacgtt

SEQ ID NO: 474439 - DNA, 15 bp, Homo sapiens
tatgggggacgacgt

SEQ ID NO: 474440 - DNA, 15 bp, Homo sapiens
atatgggggacgacg

SEQ ID NO: 474441 - DNA, 15 bp, Homo sapiens
gatatgggggacgac

SEQ ID NO: 474442 - DNA, 15 bp, Homo sapiens
ggatatgggggacga

SEQ ID NO: 474443 - DNA, 15 bp, Homo sapiens
aggatatgggggacg

SEQ ID NO: 474444 - DNA, 15 bp, Homo sapiens
caggatatgggggac

SEQ ID NO: 474445 - DNA, 15 bp, Homo sapiens
tcaggatatggggga

SEQ ID NO: 474446 - DNA, 15 bp, Homo sapiens
atcaggatatggggg

SEQ ID NO: 474447 - DNA, 15 bp, Homo sapiens
catcaggatatgggg

SEQ ID NO: 474448 - DNA, 15 bp, Homo sapiens
tcatcaggatatggg

SEQ ID NO: 474449 - DNA, 15 bp, Homo sapiens
gtcatcaggatatgg

SEQ ID NO: 474450 - DNA, 15 bp, Homo sapiens
tgtcatcaggatatg

SEQ ID NO: 474451 - DNA, 15 bp, Homo sapiens
gtgtcatcaggatat

SEQ ID NO: 474452 - DNA, 15 bp, Homo sapiens
tgtgtcatcaggata

SEQ ID NO: 474453 - DNA, 15 bp, Homo sapiens
ctgtgtcatcaggat

SEQ ID NO: 474454 - DNA, 15 bp, Homo sapiens
tctgtgtcatcagga

SEQ ID NO: 474455 - DNA, 15 bp, Homo sapiens
gtctgtgtcatcagg

SEQ ID NO: 474456 - DNA, 15 bp, Homo sapiens
agtctgtgtcatcag

SEQ ID NO: 474457 - DNA, 15 bp, Homo sapiens
cagtctgtgtcatca

SEQ ID NO: 474458 - DNA, 15 bp, Homo sapiens
gcagtctgtgtcatc

SEQ ID NO: 474459 - DNA, 15 bp, Homo sapiens
ggcagtctgtgtcat

SEQ ID NO: 474460 - DNA, 15 bp, Homo sapiens
aggcagtctgtgtca

SEQ ID NO: 474461 - DNA, 15 bp, Homo sapiens
aaggcagtctgtgtc

SEQ ID NO: 474462 - DNA, 15 bp, Homo sapiens
aaaggcagtctgtgt

SEQ ID NO: 474463 - DNA, 15 bp, Homo sapiens
aaaaggcagtctgtg

SEQ ID NO: 474464 - DNA, 15 bp, Homo sapiens
aaaaaggcagtctgt

SEQ ID NO: 474465 - DNA, 15 bp, Homo sapiens
aaaaaaggcagtctg

SEQ ID NO: 474466 - DNA, 15 bp, Homo sapiens
aaaaaaaggcagtct

SEQ ID NO: 474467 - DNA, 15 bp, Homo sapiens
aaaaaaaaggcagtc

SEQ ID NO: 474468 - DNA, 15 bp, Homo sapiens
aaaaaaaaaggcagt

SEQ ID NO: 474469 - DNA, 15 bp, Homo sapiens
aaaaaaaaaaggcag

SEQ ID NO: 474470 - DNA, 15 bp, Homo sapiens
taaaaaaaaaaggca

SEQ ID NO: 474471 - DNA, 15 bp, Homo sapiens
ataaaaaaaaaaggc

SEQ ID NO: 474472 - DNA, 15 bp, Homo sapiens
aataaaaaaaaaagg

SEQ ID NO: 474473 - DNA, 15 bp, Homo sapiens
caataaaaaaaaaag

SEQ ID NO: 474474 - DNA, 15 bp, Homo sapiens
gcaataaaaaaaaaa

SEQ ID NO: 474475 - DNA, 15 bp, Homo sapiens
ggcaataaaaaaaaa

SEQ ID NO: 474476 - DNA, 15 bp, Homo sapiens
cggcaataaaaaaaa

SEQ ID NO: 474477 - DNA, 15 bp, Homo sapiens
acggcaataaaaaaa

SEQ ID NO: 474478 - DNA, 15 bp, Homo sapiens
aacggcaataaaaaa

SEQ ID NO: 474479 - DNA, 15 bp, Homo sapiens
aaacggcaataaaaa

SEQ ID NO: 474480 - DNA, 15 bp, Homo sapiens
caaacggcaataaaa

SEQ ID NO: 474481 - DNA, 15 bp, Homo sapiens
gcaaacggcaataaa

SEQ ID NO: 474482 - DNA, 15 bp, Homo sapiens
tgcaaacggcaataa

SEQ ID NO: 474483 - DNA, 15 bp, Homo sapiens
ctgcaaacggcaata

SEQ ID NO: 474484 - DNA, 15 bp, Homo sapiens
actgcaaacggcaat

SEQ ID NO: 474485 - DNA, 15 bp, Homo sapiens
cactgcaaacggcaa

SEQ ID NO: 474486 - DNA, 15 bp, Homo sapiens
ccactgcaaacggca

SEQ ID NO: 474487 - DNA, 15 bp, Homo sapiens
tccactgcaaacggc

SEQ ID NO: 474488 - DNA, 15 bp, Homo sapiens
ttccactgcaaacgg

SEQ ID NO: 474489 - DNA, 15 bp, Homo sapiens
tttccactgcaaacg

SEQ ID NO: 474490 - DNA, 15 bp, Homo sapiens
gtttccactgcaaac

SEQ ID NO: 474491 - DNA, 15 bp, Homo sapiens
ggtttccactgcaaa

SEQ ID NO: 474492 - DNA, 15 bp, Homo sapiens
cggtttccactgcaa

SEQ ID NO: 474493 - DNA, 15 bp, Homo sapiens
acggtttccactgca

SEQ ID NO: 474494 - DNA, 15 bp, Homo sapiens
cacggtttccactgc

SEQ ID NO: 474495 - DNA, 15 bp, Homo sapiens
ccacggtttccactg

SEQ ID NO: 474496 - DNA, 15 bp, Homo sapiens
accacggtttccact

SEQ ID NO: 474497 - DNA, 15 bp, Homo sapiens
aaccacggtttccac

SEQ ID NO: 474498 - DNA, 15 bp, Homo sapiens
gaaccacggtttcca

SEQ ID NO: 474499 - DNA, 15 bp, Homo sapiens
agaaccacggtttcc

SEQ ID NO: 474500 - DNA, 15 bp, Homo sapiens
cagaaccacggtttc

SEQ ID NO: 474501 - DNA, 15 bp, Homo sapiens
tcagaaccacggttt

SEQ ID NO: 474502 - DNA, 15 bp, Homo sapiens
ttcagaaccacggtt

SEQ ID NO: 474503 - DNA, 15 bp, Homo sapiens
tttcagaaccacggt

SEQ ID NO: 474504 - DNA, 15 bp, Homo sapiens
atttcagaaccacgg

SEQ ID NO: 474505 - DNA, 15 bp, Homo sapiens
tatttcagaaccacg

SEQ ID NO: 474506 - DNA, 15 bp, Homo sapiens
atatttcagaaccac

SEQ ID NO: 474507 - DNA, 15 bp, Homo sapiens
gatatttcagaacca

SEQ ID NO: 474508 - DNA, 15 bp, Homo sapiens
agatatttcagaacc

SEQ ID NO: 474509 - DNA, 15 bp, Homo sapiens
aagatatttcagaac

SEQ ID NO: 474510 - DNA, 15 bp, Homo sapiens
gaagatatttcagaa

SEQ ID NO: 474511 - DNA, 15 bp, Homo sapiens
ggaagatatttcaga

SEQ ID NO: 474512 - DNA, 15 bp, Homo sapiens
gggaagatatttcag

SEQ ID NO: 474513 - DNA, 15 bp, Homo sapiens
ggggaagatatttca

SEQ ID NO: 474514 - DNA, 15 bp, Homo sapiens
aggggaagatatttc

SEQ ID NO: 474515 - DNA, 15 bp, Homo sapiens
aaggggaagatattt

SEQ ID NO: 474516 - DNA, 15 bp, Homo sapiens
gaaggggaagatatt

SEQ ID NO: 474517 - DNA, 15 bp, Homo sapiens
ggaaggggaagatat

SEQ ID NO: 474518 - DNA, 15 bp, Homo sapiens
aggaaggggaagata

SEQ ID NO: 474519 - DNA, 15 bp, Homo sapiens
aaggaaggggaagat

SEQ ID NO: 474520 - DNA, 15 bp, Homo sapiens
caaggaaggggaaga

SEQ ID NO: 474521 - DNA, 15 bp, Homo sapiens
tcaaggaaggggaag

SEQ ID NO: 474522 - DNA, 15 bp, Homo sapiens
atcaaggaaggggaa

SEQ ID NO: 474523 - DNA, 15 bp, Homo sapiens
tatcaaggaagggga

SEQ ID NO: 474524 - DNA, 15 bp, Homo sapiens
ttatcaaggaagggg

SEQ ID NO: 474525 - DNA, 15 bp, Homo sapiens
attatcaaggaaggg

SEQ ID NO: 474526 - DNA, 15 bp, Homo sapiens
aattatcaaggaagg

SEQ ID NO: 474527 - DNA, 15 bp, Homo sapiens
caattatcaaggaag

SEQ ID NO: 474528 - DNA, 15 bp, Homo sapiens
gcaattatcaaggaa

SEQ ID NO: 474529 - DNA, 15 bp, Homo sapiens
tgcaattatcaagga

SEQ ID NO: 474530 - DNA, 15 bp, Homo sapiens
ctgcaattatcaagg

SEQ ID NO: 474531 - DNA, 15 bp, Homo sapiens
actgcaattatcaag

SEQ ID NO: 474532 - DNA, 15 bp, Homo sapiens
gactgcaattatcaa

SEQ ID NO: 474533 - DNA, 15 bp, Homo sapiens
agactgcaattatca

SEQ ID NO: 474534 - DNA, 15 bp, Homo sapiens
gagactgcaattatc

SEQ ID NO: 474535 - DNA, 15 bp, Homo sapiens
agagactgcaattat

SEQ ID NO: 474536 - DNA, 15 bp, Homo sapiens
aagagactgcaatta

SEQ ID NO: 474537 - DNA, 15 bp, Homo sapiens
gaagagactgcaatt

SEQ ID NO: 474538 - DNA, 15 bp, Homo sapiens
ggaagagactgcaat

SEQ ID NO: 474539 - DNA, 15 bp, Homo sapiens
gggaagagactgcaa

SEQ ID NO: 474540 - DNA, 15 bp, Homo sapiens
ggggaagagactgca

SEQ ID NO: 474541 - DNA, 15 bp, Homo sapiens
gggggaagagactgc

SEQ ID NO: 474542 - DNA, 15 bp, Homo sapiens
ggggggaagagactg

SEQ ID NO: 474543 - DNA, 15 bp, Homo sapiens
gggggggaagagact

SEQ ID NO: 474544 - DNA, 15 bp, Homo sapiens
ggggggggaagagac

SEQ ID NO: 474545 - DNA, 15 bp, Homo sapiens
gggggggggaagaga

SEQ ID NO: 474546 - DNA, 15 bp, Homo sapiens
ggggggggggaagag

SEQ ID NO: 474547 - DNA, 15 bp, Homo sapiens
aggggggggggaaga

SEQ ID NO: 474548 - DNA, 15 bp, Homo sapiens
aaggggggggggaag

SEQ ID NO: 474549 - DNA, 15 bp, Homo sapiens
aaaggggggggggaa

SEQ ID NO: 474550 - DNA, 15 bp, Homo sapiens
aaaagggggggggga

SEQ ID NO: 474551 - DNA, 15 bp, Homo sapiens
aaaaagggggggggg

SEQ ID NO: 474552 - DNA, 15 bp, Homo sapiens
aaaaaaggggggggg

SEQ ID NO: 474553 - DNA, 15 bp, Homo sapiens
aaaaaaagggggggg

SEQ ID NO: 474554 - DNA, 15 bp, Homo sapiens
aaaaaaaaggggggg

SEQ ID NO: 474555 - DNA, 15 bp, Homo sapiens
aaaaaaaaagggggg

SEQ ID NO: 474556 - DNA, 15 bp, Homo sapiens
aaaaaaaaaaggggg

SEQ ID NO: 474557 - DNA, 15 bp, Homo sapiens
caaaaaaaaaagggg

SEQ ID NO: 474558 - DNA, 15 bp, Homo sapiens
gcaaaaaaaaaaggg

SEQ ID NO: 474559 - DNA, 15 bp, Homo sapiens
ggcaaaaaaaaaagg

SEQ ID NO: 474560 - DNA, 15 bp, Homo sapiens
tggcaaaaaaaaaag

SEQ ID NO: 474561 - DNA, 15 bp, Homo sapiens
ctggcaaaaaaaaaa

SEQ ID NO: 474562 - DNA, 15 bp, Homo sapiens
gctggcaaaaaaaaa

SEQ ID NO: 474563 - DNA, 15 bp, Homo sapiens
cgctggcaaaaaaaa

SEQ ID NO: 474564 - DNA, 15 bp, Homo sapiens
ccgctggcaaaaaaa

SEQ ID NO: 474565 - DNA, 15 bp, Homo sapiens
accgctggcaaaaaa

SEQ ID NO: 474566 - DNA, 15 bp, Homo sapiens
gaccgctggcaaaaa

SEQ ID NO: 474567 - DNA, 15 bp, Homo sapiens
agaccgctggcaaaa

SEQ ID NO: 474568 - DNA, 15 bp, Homo sapiens
cagaccgctggcaaa

SEQ ID NO: 474569 - DNA, 15 bp, Homo sapiens
tcagaccgctggcaa

SEQ ID NO: 474570 - DNA, 15 bp, Homo sapiens
ctcagaccgctggca

SEQ ID NO: 474571 - DNA, 15 bp, Homo sapiens
cctcagaccgctggc

SEQ ID NO: 474572 - DNA, 15 bp, Homo sapiens
tcctcagaccgctgg

SEQ ID NO: 474573 - DNA, 15 bp, Homo sapiens
atcctcagaccgctg

SEQ ID NO: 474574 - DNA, 15 bp, Homo sapiens
catcctcagaccgct

SEQ ID NO: 474575 - DNA, 15 bp, Homo sapiens
acatcctcagaccgc

SEQ ID NO: 474576 - DNA, 15 bp, Homo sapiens
cacatcctcagaccg

SEQ ID NO: 474577 - DNA, 15 bp, Homo sapiens
tcacatcctcagacc

SEQ ID NO: 474578 - DNA, 15 bp, Homo sapiens
atcacatcctcagac

SEQ ID NO: 474579 - DNA, 15 bp, Homo sapiens
catcacatcctcaga

SEQ ID NO: 474580 - DNA, 15 bp, Homo sapiens
gcatcacatcctcag

SEQ ID NO: 474581 - DNA, 15 bp, Homo sapiens
tgcatcacatcctca

SEQ ID NO: 474582 - DNA, 15 bp, Homo sapiens
atgcatcacatcctc

SEQ ID NO: 474583 - DNA, 15 bp, Homo sapiens
aatgcatcacatcct

SEQ ID NO: 474584 - DNA, 15 bp, Homo sapiens
gaatgcatcacatcc

SEQ ID NO: 474585 - DNA, 15 bp, Homo sapiens
agaatgcatcacatc

SEQ ID NO: 474586 - DNA, 15 bp, Homo sapiens
gagaatgcatcacat

SEQ ID NO: 474587 - DNA, 15 bp, Homo sapiens
cgagaatgcatcaca

SEQ ID NO: 474588 - DNA, 15 bp, Homo sapiens
tcgagaatgcatcac

SEQ ID NO: 474589 - DNA, 15 bp, Homo sapiens
ctcgagaatgcatca

SEQ ID NO: 474590 - DNA, 15 bp, Homo sapiens
actcgagaatgcatc

SEQ ID NO: 474591 - DNA, 15 bp, Homo sapiens
cactcgagaatgcat

SEQ ID NO: 474592 - DNA, 15 bp, Homo sapiens
tcactcgagaatgca

SEQ ID NO: 474593 - DNA, 15 bp, Homo sapiens
ctcactcgagaatgc

SEQ ID NO: 474594 - DNA, 15 bp, Homo sapiens
tctcactcgagaatg

SEQ ID NO: 474595 - DNA, 15 bp, Homo sapiens
ttctcactcgagaat

SEQ ID NO: 474596 - DNA, 15 bp, Homo sapiens
attctcactcgagaa

SEQ ID NO: 474597 - DNA, 15 bp, Homo sapiens
cattctcactcgaga

SEQ ID NO: 474598 - DNA, 15 bp, Homo sapiens
acattctcactcgag

SEQ ID NO: 474599 - DNA, 15 bp, Homo sapiens
aacattctcactcga

SEQ ID NO: 474600 - DNA, 15 bp, Homo sapiens
caacattctcactcg

SEQ ID NO: 474601 - DNA, 15 bp, Homo sapiens
ccaacattctcactc

SEQ ID NO: 474602 - DNA, 15 bp, Homo sapiens
cccaacattctcact

SEQ ID NO: 474603 - DNA, 15 bp, Homo sapiens
ccccaacattctcac

SEQ ID NO: 474604 - DNA, 15 bp, Homo sapiens
tccccaacattctca

SEQ ID NO: 474605 - DNA, 15 bp, Homo sapiens
ctccccaacattctc

SEQ ID NO: 474606 - DNA, 15 bp, Homo sapiens
actccccaacattct

SEQ ID NO: 474607 - DNA, 15 bp, Homo sapiens
tactccccaacattc

SEQ ID NO: 474608 - DNA, 15 bp, Homo sapiens
ttactccccaacatt

SEQ ID NO: 474609 - DNA, 15 bp, Homo sapiens
tttactccccaacat

SEQ ID NO: 474610 - DNA, 15 bp, Homo sapiens
ctttactccccaaca

SEQ ID NO: 474611 - DNA, 15 bp, Homo sapiens
cctttactccccaac

SEQ ID NO: 474612 - DNA, 15 bp, Homo sapiens
ccctttactccccaa

SEQ ID NO: 474613 - DNA, 15 bp, Homo sapiens
cccctttactcccca

SEQ ID NO: 474614 - DNA, 15 bp, Homo sapiens
tcccctttactcccc

SEQ ID NO: 474615 - DNA, 15 bp, Homo sapiens
ctcccctttactccc

SEQ ID NO: 474616 - DNA, 15 bp, Homo sapiens
tctcccctttactcc

SEQ ID NO: 474617 - DNA, 15 bp, Homo sapiens
ttctcccctttactc

SEQ ID NO: 474618 - DNA, 15 bp, Homo sapiens
cttctcccctttact

SEQ ID NO: 474619 - DNA, 15 bp, Homo sapiens
ccttctcccctttac

SEQ ID NO: 474620 - DNA, 15 bp, Homo sapiens
cccttctccccttta

SEQ ID NO: 474621 - DNA, 15 bp, Homo sapiens
acccttctccccttt

SEQ ID NO: 474622 - DNA, 15 bp, Homo sapiens
cacccttctcccctt

SEQ ID NO: 474623 - DNA, 15 bp, Homo sapiens
tcacccttctcccct

SEQ ID NO: 474624 - DNA, 15 bp, Homo sapiens
ttcacccttctcccc

SEQ ID NO: 474625 - DNA, 15 bp, Homo sapiens
tttcacccttctccc

SEQ ID NO: 474626 - DNA, 15 bp, Homo sapiens
ctttcacccttctcc

SEQ ID NO: 474627 - DNA, 15 bp, Homo sapiens
cctttcacccttctc

SEQ ID NO: 474628 - DNA, 15 bp, Homo sapiens
tcctttcacccttct

SEQ ID NO: 474629 - DNA, 15 bp, Homo sapiens
ttcctttcacccttc

SEQ ID NO: 474630 - DNA, 15 bp, Homo sapiens
tttcctttcaccctt

SEQ ID NO: 474631 - DNA, 15 bp, Homo sapiens
ctttcctttcaccct

SEQ ID NO: 474632 - DNA, 15 bp, Homo sapiens
actttcctttcaccc

SEQ ID NO: 474633 - DNA, 15 bp, Homo sapiens
cactttcctttcacc

SEQ ID NO: 474634 - DNA, 15 bp, Homo sapiens
tcactttcctttcac

SEQ ID NO: 474635 - DNA, 15 bp, Homo sapiens
ctcactttcctttca

SEQ ID NO: 474636 - DNA, 15 bp, Homo sapiens
tctcactttcctttc

SEQ ID NO: 474637 - DNA, 15 bp, Homo sapiens
ttctcactttccttt

SEQ ID NO: 474638 - DNA, 15 bp, Homo sapiens
tttctcactttcctt

SEQ ID NO: 474639 - DNA, 15 bp, Homo sapiens
gtttctcactttcct

SEQ ID NO: 474640 - DNA, 15 bp, Homo sapiens
agtttctcactttcc

SEQ ID NO: 474641 - DNA, 15 bp, Homo sapiens
cagtttctcactttc

SEQ ID NO: 474642 - DNA, 15 bp, Homo sapiens
gcagtttctcacttt

SEQ ID NO: 474643 - DNA, 15 bp, Homo sapiens
agcagtttctcactt

SEQ ID NO: 474644 - DNA, 15 bp, Homo sapiens
aagcagtttctcact

SEQ ID NO: 474645 - DNA, 15 bp, Homo sapiens
gaagcagtttctcac

SEQ ID NO: 474646 - DNA, 15 bp, Homo sapiens
tgaagcagtttctca

SEQ ID NO: 474647 - DNA, 15 bp, Homo sapiens
ctgaagcagtttctc

SEQ ID NO: 474648 - DNA, 15 bp, Homo sapiens
tctgaagcagtttct

SEQ ID NO: 474649 - DNA, 15 bp, Homo sapiens
ctctgaagcagtttc

SEQ ID NO: 474650 - DNA, 15 bp, Homo sapiens
gctctgaagcagttt

SEQ ID NO: 474651 - DNA, 15 bp, Homo sapiens
ggctctgaagcagtt

SEQ ID NO: 474652 - DNA, 15 bp, Homo sapiens
tggctctgaagcagt

SEQ ID NO: 474653 - DNA, 15 bp, Homo sapiens
gtggctctgaagcag

SEQ ID NO: 474654 - DNA, 15 bp, Homo sapiens
ggtggctctgaagca

SEQ ID NO: 474655 - DNA, 15 bp, Homo sapiens
cggtggctctgaagc

SEQ ID NO: 474656 - DNA, 15 bp, Homo sapiens
tcggtggctctgaag

SEQ ID NO: 474657 - DNA, 15 bp, Homo sapiens
gtcggtggctctgaa

SEQ ID NO: 474658 - DNA, 15 bp, Homo sapiens
tgtcggtggctctga

SEQ ID NO: 474659 - DNA, 15 bp, Homo sapiens
ttgtcggtggctctg

SEQ ID NO: 474660 - DNA, 15 bp, Homo sapiens
gttgtcggtggctct

SEQ ID NO: 474661 - DNA, 15 bp, Homo sapiens
tgttgtcggtggctc

SEQ ID NO: 474662 - DNA, 15 bp, Homo sapiens
ctgttgtcggtggct

SEQ ID NO: 474663 - DNA, 15 bp, Homo sapiens
tctgttgtcggtggc

SEQ ID NO: 474664 - DNA, 15 bp, Homo sapiens
ctctgttgtcggtgg

SEQ ID NO: 474665 - DNA, 15 bp, Homo sapiens
gctctgttgtcggtg

SEQ ID NO: 474666 - DNA, 15 bp, Homo sapiens
tgctctgttgtcggt

SEQ ID NO: 474667 - DNA, 15 bp, Homo sapiens
ttgctctgttgtcgg

SEQ ID NO: 474668 - DNA, 15 bp, Homo sapiens
tttgctctgttgtcg

SEQ ID NO: 474669 - DNA, 15 bp, Homo sapiens
ctttgctctgttgtc

SEQ ID NO: 474670 - DNA, 15 bp, Homo sapiens
gctttgctctgttgt

SEQ ID NO: 474671 - DNA, 15 bp, Homo sapiens
ggctttgctctgttg

SEQ ID NO: 474672 - DNA, 15 bp, Homo sapiens
tggctttgctctgtt

SEQ ID NO: 474673 - DNA, 15 bp, Homo sapiens
ctggctttgctctgt

SEQ ID NO: 474674 - DNA, 15 bp, Homo sapiens
gctggctttgctctg

SEQ ID NO: 474675 - DNA, 15 bp, Homo sapiens
agctggctttgctct

SEQ ID NO: 474676 - DNA, 15 bp, Homo sapiens
cagctggctttgctc

SEQ ID NO: 474677 - DNA, 15 bp, Homo sapiens
ccagctggctttgct

SEQ ID NO: 474678 - DNA, 15 bp, Homo sapiens
cccagctggctttgc

SEQ ID NO: 474679 - DNA, 15 bp, Homo sapiens
tcccagctggctttg

SEQ ID NO: 474680 - DNA, 15 bp, Homo sapiens
atcccagctggcttt

SEQ ID NO: 474681 - DNA, 15 bp, Homo sapiens
catcccagctggctt

SEQ ID NO: 474682 - DNA, 15 bp, Homo sapiens
acatcccagctggct

SEQ ID NO: 474683 - DNA, 15 bp, Homo sapiens
cacatcccagctggc

SEQ ID NO: 474684 - DNA, 15 bp, Homo sapiens
ccacatcccagctgg

SEQ ID NO: 474685 - DNA, 15 bp, Homo sapiens
accacatcccagctg

SEQ ID NO: 474686 - DNA, 15 bp, Homo sapiens
gaccacatcccagct

SEQ ID NO: 474687 - DNA, 15 bp, Homo sapiens
ggaccacatcccagc

SEQ ID NO: 474688 - DNA, 15 bp, Homo sapiens
aggaccacatcccag

SEQ ID NO: 474689 - DNA, 15 bp, Homo sapiens
caggaccacatccca

SEQ ID NO: 474690 - DNA, 15 bp, Homo sapiens
ccaggaccacatccc

SEQ ID NO: 474691 - DNA, 15 bp, Homo sapiens
tccaggaccacatcc

SEQ ID NO: 474692 - DNA, 15 bp, Homo sapiens
ctccaggaccacatc

SEQ ID NO: 474693 - DNA, 15 bp, Homo sapiens
gctccaggaccacat

SEQ ID NO: 474694 - DNA, 15 bp, Homo sapiens
cgctccaggaccaca

SEQ ID NO: 474695 - DNA, 15 bp, Homo sapiens
ccgctccaggaccac

SEQ ID NO: 474696 - DNA, 15 bp, Homo sapiens
tccgctccaggacca

SEQ ID NO: 474697 - DNA, 15 bp, Homo sapiens
atccgctccaggacc

SEQ ID NO: 474698 - DNA, 15 bp, Homo sapiens
gatccgctccaggac

SEQ ID NO: 474699 - DNA, 15 bp, Homo sapiens
tgatccgctccagga

SEQ ID NO: 474700 - DNA, 15 bp, Homo sapiens
atgatccgctccagg

SEQ ID NO: 474701 - DNA, 15 bp, Homo sapiens
aatgatccgctccag

SEQ ID NO: 474702 - DNA, 15 bp, Homo sapiens
gaatgatccgctcca

SEQ ID NO: 474703 - DNA, 15 bp, Homo sapiens
agaatgatccgctcc

SEQ ID NO: 474704 - DNA, 15 bp, Homo sapiens
cagaatgatccgctc

SEQ ID NO: 474705 - DNA, 15 bp, Homo sapiens
gcagaatgatccgct

SEQ ID NO: 474706 - DNA, 15 bp, Homo sapiens
agcagaatgatccgc

SEQ ID NO: 474707 - DNA, 15 bp, Homo sapiens
tagcagaatgatccg

SEQ ID NO: 474708 - DNA, 15 bp, Homo sapiens
ctagcagaatgatcc

SEQ ID NO: 474709 - DNA, 15 bp, Homo sapiens
actagcagaatgatc

SEQ ID NO: 474710 - DNA, 15 bp, Homo sapiens
cactagcagaatgat

SEQ ID NO: 474711 - DNA, 15 bp, Homo sapiens
acactagcagaatga

SEQ ID NO: 474712 - DNA, 15 bp, Homo sapiens
aacactagcagaatg

SEQ ID NO: 474713 - DNA, 15 bp, Homo sapiens
aaacactagcagaat

SEQ ID NO: 474714 - DNA, 15 bp, Homo sapiens
caaacactagcagaa

SEQ ID NO: 474715 - DNA, 15 bp, Homo sapiens
acaaacactagcaga

SEQ ID NO: 474716 - DNA, 15 bp, Homo sapiens
cacaaacactagcag

SEQ ID NO: 474717 - DNA, 15 bp, Homo sapiens
ccacaaacactagca

SEQ ID NO: 474718 - DNA, 15 bp, Homo sapiens
accacaaacactagc

SEQ ID NO: 474719 - DNA, 15 bp, Homo sapiens
aaccacaaacactag

SEQ ID NO: 474720 - DNA, 15 bp, Homo sapiens
caaccacaaacacta

SEQ ID NO: 474721 - DNA, 15 bp, Homo sapiens
acaaccacaaacact

SEQ ID NO: 474722 - DNA, 15 bp, Homo sapiens
aacaaccacaaacac

SEQ ID NO: 474723 - DNA, 15 bp, Homo sapiens
aaacaaccacaaaca

SEQ ID NO: 474724 - DNA, 15 bp, Homo sapiens
aaaacaaccacaaac

SEQ ID NO: 474725 - DNA, 15 bp, Homo sapiens
aaaaacaaccacaaa

SEQ ID NO: 474726 - DNA, 15 bp, Homo sapiens
caaaaacaaccacaa

SEQ ID NO: 474727 - DNA, 15 bp, Homo sapiens
tcaaaaacaaccaca

SEQ ID NO: 474728 - DNA, 15 bp, Homo sapiens
gtcaaaaacaaccac

SEQ ID NO: 474729 - DNA, 15 bp, Homo sapiens
agtcaaaaacaacca

SEQ ID NO: 474730 - DNA, 15 bp, Homo sapiens
gagtcaaaaacaacc

SEQ ID NO: 474731 - DNA, 15 bp, Homo sapiens
agagtcaaaaacaac

SEQ ID NO: 474732 - DNA, 15 bp, Homo sapiens
gagagtcaaaaacaa

SEQ ID NO: 474733 - DNA, 15 bp, Homo sapiens
agagagtcaaaaaca

SEQ ID NO: 474734 - DNA, 15 bp, Homo sapiens
gagagagtcaaaaac

SEQ ID NO: 474735 - DNA, 15 bp, Homo sapiens
ggagagagtcaaaaa

SEQ ID NO: 474736 - DNA, 15 bp, Homo sapiens
aggagagagtcaaaa

SEQ ID NO: 474737 - DNA, 15 bp, Homo sapiens
caggagagagtcaaa

SEQ ID NO: 474738 - DNA, 15 bp, Homo sapiens
ccaggagagagtcaa

SEQ ID NO: 474739 - DNA, 15 bp, Homo sapiens
accaggagagagtca

SEQ ID NO: 474740 - DNA, 15 bp, Homo sapiens
aaccaggagagagtc

SEQ ID NO: 474741 - DNA, 15 bp, Homo sapiens
caaccaggagagagt

SEQ ID NO: 474742 - DNA, 15 bp, Homo sapiens
tcaaccaggagagag

SEQ ID NO: 474743 - DNA, 15 bp, Homo sapiens
gtcaaccaggagaga

SEQ ID NO: 474744 - DNA, 15 bp, Homo sapiens
tgtcaaccaggagag

SEQ ID NO: 474745 - DNA, 15 bp, Homo sapiens
ttgtcaaccaggaga

SEQ ID NO: 474746 - DNA, 15 bp, Homo sapiens
cttgtcaaccaggag

SEQ ID NO: 474747 - DNA, 15 bp, Homo sapiens
tcttgtcaaccagga

SEQ ID NO: 474748 - DNA, 15 bp, Homo sapiens
ctcttgtcaaccagg

SEQ ID NO: 474749 - DNA, 15 bp, Homo sapiens
tctcttgtcaaccag

SEQ ID NO: 474750 - DNA, 15 bp, Homo sapiens
ttctcttgtcaacca

SEQ ID NO: 474751 - DNA, 15 bp, Homo sapiens
gttctcttgtcaacc

SEQ ID NO: 474752 - DNA, 15 bp, Homo sapiens
agttctcttgtcaac

SEQ ID NO: 474753 - DNA, 15 bp, Homo sapiens
aagttctcttgtcaa

SEQ ID NO: 474754 - DNA, 15 bp, Homo sapiens
aaagttctcttgtca

SEQ ID NO: 474755 - DNA, 15 bp, Homo sapiens
gaaagttctcttgtc

SEQ ID NO: 474756 - DNA, 15 bp, Homo sapiens
tgaaagttctcttgt

SEQ ID NO: 474757 - DNA, 15 bp, Homo sapiens
atgaaagttctcttg

SEQ ID NO: 474758 - DNA, 15 bp, Homo sapiens
aatgaaagttctctt

SEQ ID NO: 474759 - DNA, 15 bp, Homo sapiens
caatgaaagttctct

SEQ ID NO: 474760 - DNA, 15 bp, Homo sapiens
tcaatgaaagttctc

SEQ ID NO: 474761 - DNA, 15 bp, Homo sapiens
ctcaatgaaagttct

SEQ ID NO: 474762 - DNA, 15 bp, Homo sapiens
tctcaatgaaagttc

SEQ ID NO: 474763 - DNA, 15 bp, Homo sapiens
ttctcaatgaaagtt

SEQ ID NO: 474764 - DNA, 15 bp, Homo sapiens
attctcaatgaaagt

SEQ ID NO: 474765 - DNA, 15 bp, Homo sapiens
tattctcaatgaaag

SEQ ID NO: 474766 - DNA, 15 bp, Homo sapiens
atattctcaatgaaa

SEQ ID NO: 474767 - DNA, 15 bp, Homo sapiens
aatattctcaatgaa

SEQ ID NO: 474768 - DNA, 15 bp, Homo sapiens
aaatattctcaatga

SEQ ID NO: 474769 - DNA, 15 bp, Homo sapiens
caaatattctcaatg

SEQ ID NO: 474770 - DNA, 15 bp, Homo sapiens
ccaaatattctcaat

SEQ ID NO: 474771 - DNA, 15 bp, Homo sapiens
cccaaatattctcaa

SEQ ID NO: 474772 - DNA, 15 bp, Homo sapiens
tcccaaatattctca

SEQ ID NO: 474773 - DNA, 15 bp, Homo sapiens
atcccaaatattctc

SEQ ID NO: 474774 - DNA, 15 bp, Homo sapiens
catcccaaatattct

SEQ ID NO: 474775 - DNA, 15 bp, Homo sapiens
tcatcccaaatattc

SEQ ID NO: 474776 - DNA, 15 bp, Homo sapiens
ttcatcccaaatatt

SEQ ID NO: 474777 - DNA, 15 bp, Homo sapiens
tttcatcccaaatat

SEQ ID NO: 474778 - DNA, 15 bp, Homo sapiens
ttttcatcccaaata

SEQ ID NO: 474779 - DNA, 15 bp, Homo sapiens
tttttcatcccaaat

SEQ ID NO: 474780 - DNA, 15 bp, Homo sapiens
ttttttcatcccaaa

SEQ ID NO: 474781 - DNA, 15 bp, Homo sapiens
tttttttcatcccaa

SEQ ID NO: 474782 - DNA, 15 bp, Homo sapiens
ttttttttcatccca

SEQ ID NO: 474783 - DNA, 15 bp, Homo sapiens
cttttttttcatccc

SEQ ID NO: 474784 - DNA, 15 bp, Homo sapiens
acttttttttcatcc

SEQ ID NO: 474785 - DNA, 15 bp, Homo sapiens
aacttttttttcatc

SEQ ID NO: 474786 - DNA, 15 bp, Homo sapiens
aaacttttttttcat

SEQ ID NO: 474787 - DNA, 15 bp, Homo sapiens
aaaacttttttttca

SEQ ID NO: 474788 - DNA, 15 bp, Homo sapiens
caaaacttttttttc

SEQ ID NO: 474789 - DNA, 15 bp, Homo sapiens
acaaaactttttttt

SEQ ID NO: 474790 - DNA, 15 bp, Homo sapiens
tacaaaacttttttt

SEQ ID NO: 474791 - DNA, 15 bp, Homo sapiens
ctacaaaactttttt

SEQ ID NO: 474792 - DNA, 15 bp, Homo sapiens
gctacaaaacttttt

SEQ ID NO: 474793 - DNA, 15 bp, Homo sapiens
agctacaaaactttt

SEQ ID NO: 474794 - DNA, 15 bp, Homo sapiens
aagctacaaaacttt

SEQ ID NO: 474795 - DNA, 15 bp, Homo sapiens
caagctacaaaactt

SEQ ID NO: 474796 - DNA, 15 bp, Homo sapiens
tcaagctacaaaact

SEQ ID NO: 474797 - DNA, 15 bp, Homo sapiens
ctcaagctacaaaac

SEQ ID NO: 474798 - DNA, 15 bp, Homo sapiens
cctcaagctacaaaa

SEQ ID NO: 474799 - DNA, 15 bp, Homo sapiens
tcctcaagctacaaa

SEQ ID NO: 474800 - DNA, 15 bp, Homo sapiens
ctcctcaagctacaa

SEQ ID NO: 474801 - DNA, 15 bp, Homo sapiens
cctcctcaagctaca

SEQ ID NO: 474802 - DNA, 15 bp, Homo sapiens
acctcctcaagctac

SEQ ID NO: 474803 - DNA, 15 bp, Homo sapiens
cacctcctcaagcta

SEQ ID NO: 474804 - DNA, 15 bp, Homo sapiens
tcacctcctcaagct

SEQ ID NO: 474805 - DNA, 15 bp, Homo sapiens
gtcacctcctcaagc

SEQ ID NO: 474806 - DNA, 15 bp, Homo sapiens
agtcacctcctcaag

SEQ ID NO: 474807 - DNA, 15 bp, Homo sapiens
aagtcacctcctcaa

SEQ ID NO: 474808 - DNA, 15 bp, Homo sapiens
aaagtcacctcctca

SEQ ID NO: 474809 - DNA, 15 bp, Homo sapiens
aaaagtcacctcctc

SEQ ID NO: 474810 - DNA, 15 bp, Homo sapiens
aaaaagtcacctcct

SEQ ID NO: 474811 - DNA, 15 bp, Homo sapiens
taaaaagtcacctcc

SEQ ID NO: 474812 - DNA, 15 bp, Homo sapiens
ataaaaagtcacctc

SEQ ID NO: 474813 - DNA, 15 bp, Homo sapiens
gataaaaagtcacct

SEQ ID NO: 474814 - DNA, 15 bp, Homo sapiens
cgataaaaagtcacc

SEQ ID NO: 474815 - DNA, 15 bp, Homo sapiens
gcgataaaaagtcac

SEQ ID NO: 474816 - DNA, 15 bp, Homo sapiens
ggcgataaaaagtca

SEQ ID NO: 474817 - DNA, 15 bp, Homo sapiens
aggcgataaaaagtc

SEQ ID NO: 474818 - DNA, 15 bp, Homo sapiens
caggcgataaaaagt

SEQ ID NO: 474819 - DNA, 15 bp, Homo sapiens
tcaggcgataaaaag

SEQ ID NO: 474820 - DNA, 15 bp, Homo sapiens
ctcaggcgataaaaa

SEQ ID NO: 474821 - DNA, 15 bp, Homo sapiens
actcaggcgataaaa

SEQ ID NO: 474822 - DNA, 15 bp, Homo sapiens
aactcaggcgataaa

SEQ ID NO: 474823 - DNA, 15 bp, Homo sapiens
aaactcaggcgataa

SEQ ID NO: 474824 - DNA, 15 bp, Homo sapiens
gaaactcaggcgata

SEQ ID NO: 474825 - DNA, 15 bp, Homo sapiens
tgaaactcaggcgat

SEQ ID NO: 474826 - DNA, 15 bp, Homo sapiens
gtgaaactcaggcga

SEQ ID NO: 474827 - DNA, 15 bp, Homo sapiens
tgtgaaactcaggcg

SEQ ID NO: 474828 - DNA, 15 bp, Homo sapiens
gtgtgaaactcaggc

SEQ ID NO: 474829 - DNA, 15 bp, Homo sapiens
tgtgtgaaactcagg

SEQ ID NO: 474830 - DNA, 15 bp, Homo sapiens
ttgtgtgaaactcag

SEQ ID NO: 474831 - DNA, 15 bp, Homo sapiens
attgtgtgaaactca

SEQ ID NO: 474832 - DNA, 15 bp, Homo sapiens
tattgtgtgaaactc

SEQ ID NO: 474833 - DNA, 15 bp, Homo sapiens
ttattgtgtgaaact

SEQ ID NO: 474834 - DNA, 15 bp, Homo sapiens
tttattgtgtgaaac

SEQ ID NO: 474835 - DNA, 15 bp, Homo sapiens
atttattgtgtgaaa

SEQ ID NO: 474836 - DNA, 15 bp, Homo sapiens
gatttattgtgtgaa

SEQ ID NO: 474837 - DNA, 15 bp, Homo sapiens
ggatttattgtgtga

SEQ ID NO: 474838 - DNA, 15 bp, Homo sapiens
aggatttattgtgtg

SEQ ID NO: 474839 - DNA, 15 bp, Homo sapiens
caggatttattgtgt

SEQ ID NO: 474840 - DNA, 15 bp, Homo sapiens
ccaggatttattgtg

SEQ ID NO: 474841 - DNA, 15 bp, Homo sapiens
cccaggatttattgt

SEQ ID NO: 474842 - DNA, 15 bp, Homo sapiens
ccccaggatttattg

SEQ ID NO: 474843 - DNA, 15 bp, Homo sapiens
gccccaggatttatt

SEQ ID NO: 474844 - DNA, 15 bp, Homo sapiens
agccccaggatttat

SEQ ID NO: 474845 - DNA, 15 bp, Homo sapiens
cagccccaggattta

SEQ ID NO: 474846 - DNA, 15 bp, Homo sapiens
tcagccccaggattt

SEQ ID NO: 474847 - DNA, 15 bp, Homo sapiens
atcagccccaggatt

SEQ ID NO: 474848 - DNA, 15 bp, Homo sapiens
aatcagccccaggat

SEQ ID NO: 474849 - DNA, 15 bp, Homo sapiens
taatcagccccagga

SEQ ID NO: 474850 - DNA, 15 bp, Homo sapiens
ctaatcagccccagg

SEQ ID NO: 474851 - DNA, 15 bp, Homo sapiens
tctaatcagccccag

SEQ ID NO: 474852 - DNA, 15 bp, Homo sapiens
ttctaatcagcccca

SEQ ID NO: 474853 - DNA, 15 bp, Homo sapiens
attctaatcagcccc

SEQ ID NO: 474854 - DNA, 15 bp, Homo sapiens
tattctaatcagccc

SEQ ID NO: 474855 - DNA, 15 bp, Homo sapiens
ttattctaatcagcc

SEQ ID NO: 474856 - DNA, 15 bp, Homo sapiens
tttattctaatcagc

SEQ ID NO: 474857 - DNA, 15 bp, Homo sapiens
atttattctaatcag

SEQ ID NO: 474858 - DNA, 15 bp, Homo sapiens
catttattctaatca

SEQ ID NO: 474859 - DNA, 15 bp, Homo sapiens
gcatttattctaatc

SEQ ID NO: 474860 - DNA, 15 bp, Homo sapiens
tgcatttattctaat

SEQ ID NO: 474861 - DNA, 15 bp, Homo sapiens
gtgcatttattctaa

SEQ ID NO: 474862 - DNA, 15 bp, Homo sapiens
tgtgcatttattcta

SEQ ID NO: 474863 - DNA, 15 bp, Homo sapiens
gtgtgcatttattct

SEQ ID NO: 474864 - DNA, 15 bp, Homo sapiens
tgtgtgcatttattc

SEQ ID NO: 474865 - DNA, 15 bp, Homo sapiens
atgtgtgcatttatt

SEQ ID NO: 474866 - DNA, 15 bp, Homo sapiens
tatgtgtgcatttat

SEQ ID NO: 474867 - DNA, 15 bp, Homo sapiens
ctatgtgtgcattta

SEQ ID NO: 474868 - DNA, 15 bp, Homo sapiens
gctatgtgtgcattt

SEQ ID NO: 474869 - DNA, 15 bp, Homo sapiens
ggctatgtgtgcatt

SEQ ID NO: 474870 - DNA, 15 bp, Homo sapiens
aggctatgtgtgcat

SEQ ID NO: 474871 - DNA, 15 bp, Homo sapiens
aaggctatgtgtgca

SEQ ID NO: 474872 - DNA, 15 bp, Homo sapiens
aaaggctatgtgtgc

SEQ ID NO: 474873 - DNA, 15 bp, Homo sapiens
aaaaggctatgtgtg

SEQ ID NO: 474874 - DNA, 15 bp, Homo sapiens
caaaaggctatgtgt

SEQ ID NO: 474875 - DNA, 15 bp, Homo sapiens
acaaaaggctatgtg

SEQ ID NO: 474876 - DNA, 15 bp, Homo sapiens
gacaaaaggctatgt

SEQ ID NO: 474877 - DNA, 15 bp, Homo sapiens
tgacaaaaggctatg

SEQ ID NO: 474878 - DNA, 15 bp, Homo sapiens
ctgacaaaaggctat

SEQ ID NO: 474879 - DNA, 15 bp, Homo sapiens
actgacaaaaggcta

SEQ ID NO: 474880 - DNA, 15 bp, Homo sapiens
cactgacaaaaggct

SEQ ID NO: 474881 - DNA, 15 bp, Homo sapiens
ccactgacaaaaggc

SEQ ID NO: 474882 - DNA, 15 bp, Homo sapiens
tccactgacaaaagg

SEQ ID NO: 474883 - DNA, 15 bp, Homo sapiens
ttccactgacaaaag

SEQ ID NO: 474884 - DNA, 15 bp, Homo sapiens
tttccactgacaaaa

SEQ ID NO: 474885 - DNA, 15 bp, Homo sapiens
atttccactgacaaa

SEQ ID NO: 474886 - DNA, 15 bp, Homo sapiens
aatttccactgacaa

SEQ ID NO: 474887 - DNA, 15 bp, Homo sapiens
caatttccactgaca

SEQ ID NO: 474888 - DNA, 15 bp, Homo sapiens
ccaatttccactgac

SEQ ID NO: 474889 - DNA, 15 bp, Homo sapiens
accaatttccactga

SEQ ID NO: 474890 - DNA, 15 bp, Homo sapiens
aaccaatttccactg

SEQ ID NO: 474891 - DNA, 15 bp, Homo sapiens
aaaccaatttccact

SEQ ID NO: 474892 - DNA, 15 bp, Homo sapiens
taaaccaatttccac

SEQ ID NO: 474893 - DNA, 15 bp, Homo sapiens
ttaaaccaatttcca

SEQ ID NO: 474894 - DNA, 15 bp, Homo sapiens
gttaaaccaatttcc

SEQ ID NO: 474895 - DNA, 15 bp, Homo sapiens
agttaaaccaatttc

SEQ ID NO: 474896 - DNA, 15 bp, Homo sapiens
aagttaaaccaattt

SEQ ID NO: 474897 - DNA, 15 bp, Homo sapiens
aaagttaaaccaatt

SEQ ID NO: 474898 - DNA, 15 bp, Homo sapiens
caaagttaaaccaat

SEQ ID NO: 474899 - DNA, 15 bp, Homo sapiens
acaaagttaaaccaa

SEQ ID NO: 474900 - DNA, 15 bp, Homo sapiens
cacaaagttaaacca

SEQ ID NO: 474901 - DNA, 15 bp, Homo sapiens
acacaaagttaaacc

SEQ ID NO: 474902 - DNA, 15 bp, Homo sapiens
aacacaaagttaaac

SEQ ID NO: 474903 - DNA, 15 bp, Homo sapiens
caacacaaagttaaa

SEQ ID NO: 474904 - DNA, 15 bp, Homo sapiens
gcaacacaaagttaa

SEQ ID NO: 474905 - DNA, 15 bp, Homo sapiens
agcaacacaaagtta

SEQ ID NO: 474906 - DNA, 15 bp, Homo sapiens
cagcaacacaaagtt

SEQ ID NO: 474907 - DNA, 15 bp, Homo sapiens
acagcaacacaaagt

SEQ ID NO: 474908 - DNA, 15 bp, Homo sapiens
tacagcaacacaaag

SEQ ID NO: 474909 - DNA, 15 bp, Homo sapiens
ctacagcaacacaaa

SEQ ID NO: 474910 - DNA, 15 bp, Homo sapiens
cctacagcaacacaa

SEQ ID NO: 474911 - DNA, 15 bp, Homo sapiens
acctacagcaacaca

SEQ ID NO: 474912 - DNA, 15 bp, Homo sapiens
tacctacagcaacac

SEQ ID NO: 474913 - DNA, 15 bp, Homo sapiens
ctacctacagcaaca

SEQ ID NO: 474914 - DNA, 15 bp, Homo sapiens
actacctacagcaac

SEQ ID NO: 474915 - DNA, 15 bp, Homo sapiens
aactacctacagcaa

SEQ ID NO: 474916 - DNA, 15 bp, Homo sapiens
caactacctacagca

SEQ ID NO: 474917 - DNA, 15 bp, Homo sapiens
ccaactacctacagc

SEQ ID NO: 474918 - DNA, 15 bp, Homo sapiens
cccaactacctacag

SEQ ID NO: 474919 - DNA, 15 bp, Homo sapiens
ccccaactacctaca

SEQ ID NO: 474920 - DNA, 15 bp, Homo sapiens
tccccaactacctac

SEQ ID NO: 474921 - DNA, 15 bp, Homo sapiens
atccccaactaccta

SEQ ID NO: 474922 - DNA, 15 bp, Homo sapiens
catccccaactacct

SEQ ID NO: 474923 - DNA, 15 bp, Homo sapiens
ccatccccaactacc

SEQ ID NO: 474924 - DNA, 15 bp, Homo sapiens
accatccccaactac

SEQ ID NO: 474925 - DNA, 15 bp, Homo sapiens
aaccatccccaacta

SEQ ID NO: 474926 - DNA, 15 bp, Homo sapiens
aaaccatccccaact

SEQ ID NO: 474927 - DNA, 15 bp, Homo sapiens
taaaccatccccaac

SEQ ID NO: 474928 - DNA, 15 bp, Homo sapiens
ttaaaccatccccaa

SEQ ID NO: 474929 - DNA, 15 bp, Homo sapiens
cttaaaccatcccca

SEQ ID NO: 474930 - DNA, 15 bp, Homo sapiens
ccttaaaccatcccc

SEQ ID NO: 474931 - DNA, 15 bp, Homo sapiens
cccttaaaccatccc

SEQ ID NO: 474932 - DNA, 15 bp, Homo sapiens
tcccttaaaccatcc

SEQ ID NO: 474933 - DNA, 15 bp, Homo sapiens
atcccttaaaccatc

SEQ ID NO: 474934 - DNA, 15 bp, Homo sapiens
catcccttaaaccat

SEQ ID NO: 474935 - DNA, 15 bp, Homo sapiens
gcatcccttaaacca

SEQ ID NO: 474936 - DNA, 15 bp, Homo sapiens
agcatcccttaaacc

SEQ ID NO: 474937 - DNA, 15 bp, Homo sapiens
aagcatcccttaaac

SEQ ID NO: 474938 - DNA, 15 bp, Homo sapiens
aaagcatcccttaaa

SEQ ID NO: 474939 - DNA, 15 bp, Homo sapiens
gaaagcatcccttaa

SEQ ID NO: 474940 - DNA, 15 bp, Homo sapiens
agaaagcatccctta

SEQ ID NO: 474941 - DNA, 15 bp, Homo sapiens
cagaaagcatccctt

SEQ ID NO: 474942 - DNA, 15 bp, Homo sapiens
gcagaaagcatccct

SEQ ID NO: 474943 - DNA, 15 bp, Homo sapiens
tgcagaaagcatccc

SEQ ID NO: 474944 - DNA, 15 bp, Homo sapiens
ctgcagaaagcatcc

SEQ ID NO: 474945 - DNA, 15 bp, Homo sapiens
gctgcagaaagcatc

SEQ ID NO: 474946 - DNA, 15 bp, Homo sapiens
agctgcagaaagcat

SEQ ID NO: 474947 - DNA, 15 bp, Homo sapiens
cagctgcagaaagca

SEQ ID NO: 474948 - DNA, 15 bp, Homo sapiens
acagctgcagaaagc

SEQ ID NO: 474949 - DNA, 15 bp, Homo sapiens
cacagctgcagaaag

SEQ ID NO: 474950 - DNA, 15 bp, Homo sapiens
ccacagctgcagaaa

SEQ ID NO: 474951 - DNA, 15 bp, Homo sapiens
cccacagctgcagaa

SEQ ID NO: 474952 - DNA, 15 bp, Homo sapiens
acccacagctgcaga

SEQ ID NO: 474953 - DNA, 15 bp, Homo sapiens
cacccacagctgcag

SEQ ID NO: 474954 - DNA, 15 bp, Homo sapiens
gcacccacagctgca

SEQ ID NO: 474955 - DNA, 15 bp, Homo sapiens
tgcacccacagctgc

SEQ ID NO: 474956 - DNA, 15 bp, Homo sapiens
ctgcacccacagctg

SEQ ID NO: 474957 - DNA, 15 bp, Homo sapiens
actgcacccacagct

SEQ ID NO: 474958 - DNA, 15 bp, Homo sapiens
cactgcacccacagc

SEQ ID NO: 474959 - DNA, 15 bp, Homo sapiens
ccactgcacccacag

SEQ ID NO: 474960 - DNA, 15 bp, Homo sapiens
cccactgcacccaca

SEQ ID NO: 474961 - DNA, 15 bp, Homo sapiens
gcccactgcacccac

SEQ ID NO: 474962 - DNA, 15 bp, Homo sapiens
agcccactgcaccca

SEQ ID NO: 474963 - DNA, 15 bp, Homo sapiens
aagcccactgcaccc

SEQ ID NO: 474964 - DNA, 15 bp, Homo sapiens
gaagcccactgcacc

SEQ ID NO: 474965 - DNA, 15 bp, Homo sapiens
ggaagcccactgcac

SEQ ID NO: 474966 - DNA, 15 bp, Homo sapiens
aggaagcccactgca

SEQ ID NO: 474967 - DNA, 15 bp, Homo sapiens
caggaagcccactgc

SEQ ID NO: 474968 - DNA, 15 bp, Homo sapiens
acaggaagcccactg

SEQ ID NO: 474969 - DNA, 15 bp, Homo sapiens
cacaggaagcccact

SEQ ID NO: 474970 - DNA, 15 bp, Homo sapiens
tcacaggaagcccac

SEQ ID NO: 474971 - DNA, 15 bp, Homo sapiens
atcacaggaagccca

SEQ ID NO: 474972 - DNA, 15 bp, Homo sapiens
catcacaggaagccc

SEQ ID NO: 474973 - DNA, 15 bp, Homo sapiens
ccatcacaggaagcc

SEQ ID NO: 474974 - DNA, 15 bp, Homo sapiens
cccatcacaggaagc

SEQ ID NO: 474975 - DNA, 15 bp, Homo sapiens
ccccatcacaggaag

SEQ ID NO: 474976 - DNA, 15 bp, Homo sapiens
cccccatcacaggaa

SEQ ID NO: 474977 - DNA, 15 bp, Homo sapiens
tcccccatcacagga

SEQ ID NO: 474978 - DNA, 15 bp, Homo sapiens
ttcccccatcacagg

SEQ ID NO: 474979 - DNA, 15 bp, Homo sapiens
attcccccatcacag

SEQ ID NO: 474980 - DNA, 15 bp, Homo sapiens
aattcccccatcaca

SEQ ID NO: 474981 - DNA, 15 bp, Homo sapiens
caattcccccatcac

SEQ ID NO: 474982 - DNA, 15 bp, Homo sapiens
acaattcccccatca

SEQ ID NO: 474983 - DNA, 15 bp, Homo sapiens
aacaattcccccatc

SEQ ID NO: 474984 - DNA, 15 bp, Homo sapiens
aaacaattcccccat

SEQ ID NO: 474985 - DNA, 15 bp, Homo sapiens
taaacaattccccca

SEQ ID NO: 474986 - DNA, 15 bp, Homo sapiens
ttaaacaattccccc

SEQ ID NO: 474987 - DNA, 15 bp, Homo sapiens
cttaaacaattcccc

SEQ ID NO: 474988 - DNA, 15 bp, Homo sapiens
tcttaaacaattccc

SEQ ID NO: 474989 - DNA, 15 bp, Homo sapiens
atcttaaacaattcc

SEQ ID NO: 474990 - DNA, 15 bp, Homo sapiens
aatcttaaacaattc

SEQ ID NO: 474991 - DNA, 15 bp, Homo sapiens
caatcttaaacaatt

SEQ ID NO: 474992 - DNA, 15 bp, Homo sapiens
tcaatcttaaacaat

SEQ ID NO: 474993 - DNA, 15 bp, Homo sapiens
ctcaatcttaaacaa

SEQ ID NO: 474994 - DNA, 15 bp, Homo sapiens
actcaatcttaaaca

SEQ ID NO: 474995 - DNA, 15 bp, Homo sapiens
gactcaatcttaaac

SEQ ID NO: 474996 - DNA, 15 bp, Homo sapiens
tgactcaatcttaaa

SEQ ID NO: 474997 - DNA, 15 bp, Homo sapiens
ttgactcaatcttaa

SEQ ID NO: 474998 - DNA, 15 bp, Homo sapiens
gttgactcaatctta

SEQ ID NO: 474999 - DNA, 15 bp, Homo sapiens
ggttgactcaatctt

SEQ ID NO: 475000 - DNA, 15 bp, Homo sapiens
aggttgactcaatct

SEQ ID NO: 475001 - DNA, 15 bp, Homo sapiens
taggttgactcaatc

SEQ ID NO: 475002 - DNA, 15 bp, Homo sapiens
ataggttgactcaat

SEQ ID NO: 475003 - DNA, 15 bp, Homo sapiens
aataggttgactcaa

SEQ ID NO: 475004 - DNA, 15 bp, Homo sapiens
aaataggttgactca

SEQ ID NO: 475005 - DNA, 15 bp, Homo sapiens
aaaataggttgactc

SEQ ID NO: 475006 - DNA, 15 bp, Homo sapiens
caaaataggttgact

SEQ ID NO: 475007 - DNA, 15 bp, Homo sapiens
acaaaataggttgac

SEQ ID NO: 475008 - DNA, 15 bp, Homo sapiens
aacaaaataggttga

SEQ ID NO: 475009 - DNA, 15 bp, Homo sapiens
aaacaaaataggttg

SEQ ID NO: 475010 - DNA, 15 bp, Homo sapiens
taaacaaaataggtt

SEQ ID NO: 475011 - DNA, 15 bp, Homo sapiens
gtaaacaaaataggt

SEQ ID NO: 475012 - DNA, 15 bp, Homo sapiens
agtaaacaaaatagg

SEQ ID NO: 475013 - DNA, 15 bp, Homo sapiens
cagtaaacaaaatag

SEQ ID NO: 475014 - DNA, 15 bp, Homo sapiens
ccagtaaacaaaata

SEQ ID NO: 475015 - DNA, 15 bp, Homo sapiens
tccagtaaacaaaat

SEQ ID NO: 475016 - DNA, 15 bp, Homo sapiens
atccagtaaacaaaa

SEQ ID NO: 475017 - DNA, 15 bp, Homo sapiens
tatccagtaaacaaa

SEQ ID NO: 475018 - DNA, 15 bp, Homo sapiens
atatccagtaaacaa

SEQ ID NO: 475019 - DNA, 15 bp, Homo sapiens
tatatccagtaaaca

SEQ ID NO: 475020 - DNA, 15 bp, Homo sapiens
ttatatccagtaaac

SEQ ID NO: 475021 - DNA, 15 bp, Homo sapiens
attatatccagtaaa

SEQ ID NO: 475022 - DNA, 15 bp, Homo sapiens
cattatatccagtaa

SEQ ID NO: 475023 - DNA, 15 bp, Homo sapiens
ccattatatccagta

SEQ ID NO: 475024 - DNA, 15 bp, Homo sapiens
accattatatccagt

SEQ ID NO: 475025 - DNA, 15 bp, Homo sapiens
taccattatatccag

SEQ ID NO: 475026 - DNA, 15 bp, Homo sapiens
ttaccattatatcca

SEQ ID NO: 475027 - DNA, 15 bp, Homo sapiens
tttaccattatatcc

SEQ ID NO: 475028 - DNA, 15 bp, Homo sapiens
ttttaccattatatc

SEQ ID NO: 475029 - DNA, 15 bp, Homo sapiens
gttttaccattatat

SEQ ID NO: 475030 - DNA, 15 bp, Homo sapiens
tgttttaccattata

SEQ ID NO: 475031 - DNA, 15 bp, Homo sapiens
atgttttaccattat

SEQ ID NO: 475032 - DNA, 15 bp, Homo sapiens
aatgttttaccatta

SEQ ID NO: 475033 - DNA, 15 bp, Homo sapiens
taatgttttaccatt

SEQ ID NO: 475034 - DNA, 15 bp, Homo sapiens
ataatgttttaccat

SEQ ID NO: 475035 - DNA, 15 bp, Homo sapiens
cataatgttttacca

SEQ ID NO: 475036 - DNA, 15 bp, Homo sapiens
ccataatgttttacc

SEQ ID NO: 475037 - DNA, 15 bp, Homo sapiens
cccataatgttttac

SEQ ID NO: 475038 - DNA, 15 bp, Homo sapiens
tcccataatgtttta

SEQ ID NO: 475039 - DNA, 15 bp, Homo sapiens
ctcccataatgtttt

SEQ ID NO: 475040 - DNA, 15 bp, Homo sapiens
gctcccataatgttt

SEQ ID NO: 475041 - DNA, 15 bp, Homo sapiens
agctcccataatgtt

SEQ ID NO: 475042 - DNA, 15 bp, Homo sapiens
cagctcccataatgt

SEQ ID NO: 475043 - DNA, 15 bp, Homo sapiens
tcagctcccataatg

SEQ ID NO: 475044 - DNA, 15 bp, Homo sapiens
ttcagctcccataat

SEQ ID NO: 475045 - DNA, 15 bp, Homo sapiens
cttcagctcccataa

SEQ ID NO: 475046 - DNA, 15 bp, Homo sapiens
ccttcagctcccata

SEQ ID NO: 475047 - DNA, 15 bp, Homo sapiens
cccttcagctcccat

SEQ ID NO: 475048 - DNA, 15 bp, Homo sapiens
ccccttcagctccca

SEQ ID NO: 475049 - DNA, 15 bp, Homo sapiens
accccttcagctccc

SEQ ID NO: 475050 - DNA, 15 bp, Homo sapiens
caccccttcagctcc

SEQ ID NO: 475051 - DNA, 15 bp, Homo sapiens
ccaccccttcagctc

SEQ ID NO: 475052 - DNA, 15 bp, Homo sapiens
cccaccccttcagct

SEQ ID NO: 475053 - DNA, 15 bp, Homo sapiens
ccccaccccttcagc

SEQ ID NO: 475054 - DNA, 15 bp, Homo sapiens
cccccaccccttcag

SEQ ID NO: 475055 - DNA, 15 bp, Homo sapiens
tcccccaccccttca

SEQ ID NO: 475056 - DNA, 15 bp, Homo sapiens
ttcccccaccccttc

SEQ ID NO: 475057 - DNA, 15 bp, Homo sapiens
cttcccccacccctt

SEQ ID NO: 475058 - DNA, 15 bp, Homo sapiens
tcttcccccacccct

SEQ ID NO: 475059 - DNA, 15 bp, Homo sapiens
ctcttcccccacccc

SEQ ID NO: 475060 - DNA, 15 bp, Homo sapiens
gctcttcccccaccc

SEQ ID NO: 475061 - DNA, 15 bp, Homo sapiens
agctcttcccccacc

SEQ ID NO: 475062 - DNA, 15 bp, Homo sapiens
gagctcttcccccac

SEQ ID NO: 475063 - DNA, 15 bp, Homo sapiens
agagctcttccccca

SEQ ID NO: 475064 - DNA, 15 bp, Homo sapiens
aagagctcttccccc

SEQ ID NO: 475065 - DNA, 15 bp, Homo sapiens
gaagagctcttcccc

SEQ ID NO: 475066 - DNA, 15 bp, Homo sapiens
agaagagctcttccc

SEQ ID NO: 475067 - DNA, 15 bp, Homo sapiens
cagaagagctcttcc

SEQ ID NO: 475068 - DNA, 15 bp, Homo sapiens
acagaagagctcttc

SEQ ID NO: 475069 - DNA, 15 bp, Homo sapiens
aacagaagagctctt

SEQ ID NO: 475070 - DNA, 15 bp, Homo sapiens
taacagaagagctct

SEQ ID NO: 475071 - DNA, 15 bp, Homo sapiens
ataacagaagagctc

SEQ ID NO: 475072 - DNA, 15 bp, Homo sapiens
aataacagaagagct

SEQ ID NO: 475073 - DNA, 15 bp, Homo sapiens
aaataacagaagagc

SEQ ID NO: 475074 - DNA, 15 bp, Homo sapiens
caaataacagaagag

SEQ ID NO: 475075 - DNA, 15 bp, Homo sapiens
tcaaataacagaaga

SEQ ID NO: 475076 - DNA, 15 bp, Homo sapiens
atcaaataacagaag

SEQ ID NO: 475077 - DNA, 15 bp, Homo sapiens
catcaaataacagaa

SEQ ID NO: 475078 - DNA, 15 bp, Homo sapiens
gcatcaaataacaga

SEQ ID NO: 475079 - DNA, 15 bp, Homo sapiens
tgcatcaaataacag

SEQ ID NO: 475080 - DNA, 15 bp, Homo sapiens
atgcatcaaataaca

SEQ ID NO: 475081 - DNA, 15 bp, Homo sapiens
tatgcatcaaataac

SEQ ID NO: 475082 - DNA, 15 bp, Homo sapiens
ttatgcatcaaataa

SEQ ID NO: 475083 - DNA, 15 bp, Homo sapiens
tttatgcatcaaata

SEQ ID NO: 475084 - DNA, 15 bp, Homo sapiens
gtttatgcatcaaat

SEQ ID NO: 475085 - DNA, 15 bp, Homo sapiens
tgtttatgcatcaaa

SEQ ID NO: 475086 - DNA, 15 bp, Homo sapiens
atgtttatgcatcaa

SEQ ID NO: 475087 - DNA, 15 bp, Homo sapiens
aatgtttatgcatca

SEQ ID NO: 475088 - DNA, 15 bp, Homo sapiens
aaatgtttatgcatc

SEQ ID NO: 475089 - DNA, 15 bp, Homo sapiens
gaaatgtttatgcat

SEQ ID NO: 475090 - DNA, 15 bp, Homo sapiens
agaaatgtttatgca

SEQ ID NO: 475091 - DNA, 15 bp, Homo sapiens
aagaaatgtttatgc

SEQ ID NO: 475092 - DNA, 15 bp, Homo sapiens
aaagaaatgtttatg

SEQ ID NO: 475093 - DNA, 15 bp, Homo sapiens
taaagaaatgtttat

SEQ ID NO: 475094 - DNA, 15 bp, Homo sapiens
gtaaagaaatgttta

SEQ ID NO: 475095 - DNA, 15 bp, Homo sapiens
cgtaaagaaatgttt

SEQ ID NO: 475096 - DNA, 15 bp, Homo sapiens
ccgtaaagaaatgtt

SEQ ID NO: 475097 - DNA, 15 bp, Homo sapiens
cccgtaaagaaatgt

SEQ ID NO: 475098 - DNA, 15 bp, Homo sapiens
tcccgtaaagaaatg

SEQ ID NO: 475099 - DNA, 15 bp, Homo sapiens
gtcccgtaaagaaat

SEQ ID NO: 475100 - DNA, 15 bp, Homo sapiens
agtcccgtaaagaaa

SEQ ID NO: 475101 - DNA, 15 bp, Homo sapiens
gagtcccgtaaagaa

SEQ ID NO: 475102 - DNA, 15 bp, Homo sapiens
tgagtcccgtaaaga

SEQ ID NO: 475103 - DNA, 15 bp, Homo sapiens
ctgagtcccgtaaag

SEQ ID NO: 475104 - DNA, 15 bp, Homo sapiens
gctgagtcccgtaaa

SEQ ID NO: 475105 - DNA, 15 bp, Homo sapiens
cgctgagtcccgtaa

SEQ ID NO: 475106 - DNA, 15 bp, Homo sapiens
acgctgagtcccgta

SEQ ID NO: 475107 - DNA, 15 bp, Homo sapiens
aacgctgagtcccgt

SEQ ID NO: 475108 - DNA, 15 bp, Homo sapiens
aaacgctgagtcccg

SEQ ID NO: 475109 - DNA, 15 bp, Homo sapiens
gaaacgctgagtccc

SEQ ID NO: 475110 - DNA, 15 bp, Homo sapiens
tgaaacgctgagtcc

SEQ ID NO: 475111 - DNA, 15 bp, Homo sapiens
ctgaaacgctgagtc

SEQ ID NO: 475112 - DNA, 15 bp, Homo sapiens
tctgaaacgctgagt

SEQ ID NO: 475113 - DNA, 15 bp, Homo sapiens
gtctgaaacgctgag

SEQ ID NO: 475114 - DNA, 15 bp, Homo sapiens
ggtctgaaacgctga

SEQ ID NO: 475115 - DNA, 15 bp, Homo sapiens
aggtctgaaacgctg

SEQ ID NO: 475116 - DNA, 15 bp, Homo sapiens
taggtctgaaacgct

SEQ ID NO: 475117 - DNA, 15 bp, Homo sapiens
gtaggtctgaaacgc

SEQ ID NO: 475118 - DNA, 15 bp, Homo sapiens
ggtaggtctgaaacg

SEQ ID NO: 475119 - DNA, 15 bp, Homo sapiens
aggtaggtctgaaac

SEQ ID NO: 475120 - DNA, 15 bp, Homo sapiens
caggtaggtctgaaa

SEQ ID NO: 475121 - DNA, 15 bp, Homo sapiens
ccaggtaggtctgaa

SEQ ID NO: 475122 - DNA, 15 bp, Homo sapiens
tccaggtaggtctga

SEQ ID NO: 475123 - DNA, 15 bp, Homo sapiens
ttccaggtaggtctg

SEQ ID NO: 475124 - DNA, 15 bp, Homo sapiens
tttccaggtaggtct

SEQ ID NO: 475125 - DNA, 15 bp, Homo sapiens
ttttccaggtaggtc

SEQ ID NO: 475126 - DNA, 15 bp, Homo sapiens
attttccaggtaggt

SEQ ID NO: 475127 - DNA, 15 bp, Homo sapiens
tattttccaggtagg

SEQ ID NO: 475128 - DNA, 15 bp, Homo sapiens
atattttccaggtag

SEQ ID NO: 475129 - DNA, 15 bp, Homo sapiens
gatattttccaggta

SEQ ID NO: 475130 - DNA, 15 bp, Homo sapiens
agatattttccaggt

SEQ ID NO: 475131 - DNA, 15 bp, Homo sapiens
aagatattttccagg

SEQ ID NO: 475132 - DNA, 15 bp, Homo sapiens
caagatattttccag

SEQ ID NO: 475133 - DNA, 15 bp, Homo sapiens
ccaagatattttcca

SEQ ID NO: 475134 - DNA, 15 bp, Homo sapiens
tccaagatattttcc

SEQ ID NO: 475135 - DNA, 15 bp, Homo sapiens
ttccaagatattttc

SEQ ID NO: 475136 - DNA, 15 bp, Homo sapiens
attccaagatatttt

SEQ ID NO: 475137 - DNA, 15 bp, Homo sapiens
tattccaagatattt

SEQ ID NO: 475138 - DNA, 15 bp, Homo sapiens
ctattccaagatatt

SEQ ID NO: 475139 - DNA, 15 bp, Homo sapiens
tctattccaagatat

SEQ ID NO: 475140 - DNA, 15 bp, Homo sapiens
gtctattccaagata

SEQ ID NO: 475141 - DNA, 15 bp, Homo sapiens
tgtctattccaagat

SEQ ID NO: 475142 - DNA, 15 bp, Homo sapiens
ctgtctattccaaga

SEQ ID NO: 475143 - DNA, 15 bp, Homo sapiens
tctgtctattccaag

SEQ ID NO: 475144 - DNA, 15 bp, Homo sapiens
ctctgtctattccaa

SEQ ID NO: 475145 - DNA, 15 bp, Homo sapiens
cctctgtctattcca

SEQ ID NO: 475146 - DNA, 15 bp, Homo sapiens
tcctctgtctattcc

SEQ ID NO: 475147 - DNA, 15 bp, Homo sapiens
ttcctctgtctattc

SEQ ID NO: 475148 - DNA, 15 bp, Homo sapiens
cttcctctgtctatt

SEQ ID NO: 475149 - DNA, 15 bp, Homo sapiens
acttcctctgtctat

SEQ ID NO: 475150 - DNA, 15 bp, Homo sapiens
aacttcctctgtcta

SEQ ID NO: 475151 - DNA, 15 bp, Homo sapiens
caacttcctctgtct

SEQ ID NO: 475152 - DNA, 15 bp, Homo sapiens
tcaacttcctctgtc

SEQ ID NO: 475153 - DNA, 15 bp, Homo sapiens
ctcaacttcctctgt

SEQ ID NO: 475154 - DNA, 15 bp, Homo sapiens
tctcaacttcctctg

SEQ ID NO: 475155 - DNA, 15 bp, Homo sapiens
ttctcaacttcctct

SEQ ID NO: 475156 - DNA, 15 bp, Homo sapiens
cttctcaacttcctc

SEQ ID NO: 475157 - DNA, 15 bp, Homo sapiens
tcttctcaacttcct

SEQ ID NO: 475158 - DNA, 15 bp, Homo sapiens
ttcttctcaacttcc

SEQ ID NO: 475159 - DNA, 15 bp, Homo sapiens
cttcttctcaacttc

SEQ ID NO: 475160 - DNA, 15 bp, Homo sapiens
gcttcttctcaactt

SEQ ID NO: 475161 - DNA, 15 bp, Homo sapiens
agcttcttctcaact

SEQ ID NO: 475162 - DNA, 15 bp, Homo sapiens
tagcttcttctcaac

SEQ ID NO: 475163 - DNA, 15 bp, Homo sapiens
atagcttcttctcaa

SEQ ID NO: 475164 - DNA, 15 bp, Homo sapiens
catagcttcttctca

SEQ ID NO: 475165 - DNA, 15 bp, Homo sapiens
acatagcttcttctc

SEQ ID NO: 475166 - DNA, 15 bp, Homo sapiens
tacatagcttcttct

SEQ ID NO: 475167 - DNA, 15 bp, Homo sapiens
ctacatagcttcttc

SEQ ID NO: 475168 - DNA, 15 bp, Homo sapiens
tctacatagcttctt

SEQ ID NO: 475169 - DNA, 15 bp, Homo sapiens
atctacatagcttct

SEQ ID NO: 475170 - DNA, 15 bp, Homo sapiens
tatctacatagcttc

SEQ ID NO: 475171 - DNA, 15 bp, Homo sapiens
ttatctacatagctt

SEQ ID NO: 475172 - DNA, 15 bp, Homo sapiens
tttatctacatagct

SEQ ID NO: 475173 - DNA, 15 bp, Homo sapiens
ttttatctacatagc

SEQ ID NO: 475174 - DNA, 15 bp, Homo sapiens
attttatctacatag

SEQ ID NO: 475175 - DNA, 15 bp, Homo sapiens
tattttatctacata

SEQ ID NO: 475176 - DNA, 15 bp, Homo sapiens
ctattttatctacat

SEQ ID NO: 475177 - DNA, 15 bp, Homo sapiens
tctattttatctaca

SEQ ID NO: 475178 - DNA, 15 bp, Homo sapiens
ctctattttatctac

SEQ ID NO: 475179 - DNA, 15 bp, Homo sapiens
actctattttatcta

SEQ ID NO: 475180 - DNA, 15 bp, Homo sapiens
aactctattttatct

SEQ ID NO: 475181 - DNA, 15 bp, Homo sapiens
taactctattttatc

SEQ ID NO: 475182 - DNA, 15 bp, Homo sapiens
ataactctattttat

SEQ ID NO: 475183 - DNA, 15 bp, Homo sapiens
cataactctatttta

SEQ ID NO: 475184 - DNA, 15 bp, Homo sapiens
tcataactctatttt

SEQ ID NO: 475185 - DNA, 15 bp, Homo sapiens
ttcataactctattt

SEQ ID NO: 475186 - DNA, 15 bp, Homo sapiens
cttcataactctatt

SEQ ID NO: 475187 - DNA, 15 bp, Homo sapiens
gcttcataactctat

SEQ ID NO: 475188 - DNA, 15 bp, Homo sapiens
agcttcataactcta

SEQ ID NO: 475189 - DNA, 15 bp, Homo sapiens
cagcttcataactct

SEQ ID NO: 475190 - DNA, 15 bp, Homo sapiens
acagcttcataactc

SEQ ID NO: 475191 - DNA, 15 bp, Homo sapiens
gacagcttcataact

SEQ ID NO: 475192 - DNA, 15 bp, Homo sapiens
tgacagcttcataac

SEQ ID NO: 475193 - DNA, 15 bp, Homo sapiens
ctgacagcttcataa

SEQ ID NO: 475194 - DNA, 15 bp, Homo sapiens
tctgacagcttcata

SEQ ID NO: 475195 - DNA, 15 bp, Homo sapiens
ctctgacagcttcat

SEQ ID NO: 475196 - DNA, 15 bp, Homo sapiens
tctctgacagcttca

SEQ ID NO: 475197 - DNA, 15 bp, Homo sapiens
gtctctgacagcttc

SEQ ID NO: 475198 - DNA, 15 bp, Homo sapiens
agtctctgacagctt

SEQ ID NO: 475199 - DNA, 15 bp, Homo sapiens
aagtctctgacagct

SEQ ID NO: 475200 - DNA, 15 bp, Homo sapiens
caagtctctgacagc

SEQ ID NO: 475201 - DNA, 15 bp, Homo sapiens
tcaagtctctgacag

SEQ ID NO: 475202 - DNA, 15 bp, Homo sapiens
ttcaagtctctgaca

SEQ ID NO: 475203 - DNA, 15 bp, Homo sapiens
cttcaagtctctgac

SEQ ID NO: 475204 - DNA, 15 bp, Homo sapiens
ccttcaagtctctga

SEQ ID NO: 475205 - DNA, 15 bp, Homo sapiens
tccttcaagtctctg

SEQ ID NO: 475206 - DNA, 15 bp, Homo sapiens
ttccttcaagtctct

SEQ ID NO: 475207 - DNA, 15 bp, Homo sapiens
attccttcaagtctc

SEQ ID NO: 475208 - DNA, 15 bp, Homo sapiens
aattccttcaagtct

SEQ ID NO: 475209 - DNA, 15 bp, Homo sapiens
caattccttcaagtc

SEQ ID NO: 475210 - DNA, 15 bp, Homo sapiens
acaattccttcaagt

SEQ ID NO: 475211 - DNA, 15 bp, Homo sapiens
aacaattccttcaag

SEQ ID NO: 475212 - DNA, 15 bp, Homo sapiens
aaacaattccttcaa

SEQ ID NO: 475213 - DNA, 15 bp, Homo sapiens
aaaacaattccttca

SEQ ID NO: 475214 - DNA, 15 bp, Homo sapiens
taaaacaattccttc

SEQ ID NO: 475215 - DNA, 15 bp, Homo sapiens
ataaaacaattcctt

SEQ ID NO: 475216 - DNA, 15 bp, Homo sapiens
gataaaacaattcct

SEQ ID NO: 475217 - DNA, 15 bp, Homo sapiens
ggataaaacaattcc

SEQ ID NO: 475218 - DNA, 15 bp, Homo sapiens
tggataaaacaattc

SEQ ID NO: 475219 - DNA, 15 bp, Homo sapiens
atggataaaacaatt

SEQ ID NO: 475220 - DNA, 15 bp, Homo sapiens
aatggataaaacaat

SEQ ID NO: 475221 - DNA, 15 bp, Homo sapiens
gaatggataaaacaa

SEQ ID NO: 475222 - DNA, 15 bp, Homo sapiens
cgaatggataaaaca

SEQ ID NO: 475223 - DNA, 15 bp, Homo sapiens
acgaatggataaaac

SEQ ID NO: 475224 - DNA, 15 bp, Homo sapiens
tacgaatggataaaa

SEQ ID NO: 475225 - DNA, 15 bp, Homo sapiens
atacgaatggataaa

SEQ ID NO: 475226 - DNA, 15 bp, Homo sapiens
catacgaatggataa

SEQ ID NO: 475227 - DNA, 15 bp, Homo sapiens
gcatacgaatggata

SEQ ID NO: 475228 - DNA, 15 bp, Homo sapiens
agcatacgaatggat

SEQ ID NO: 475229 - DNA, 15 bp, Homo sapiens
aagcatacgaatgga

SEQ ID NO: 475230 - DNA, 15 bp, Homo sapiens
gaagcatacgaatgg

SEQ ID NO: 475231 - DNA, 15 bp, Homo sapiens
ggaagcatacgaatg

SEQ ID NO: 475232 - DNA, 15 bp, Homo sapiens
tggaagcatacgaat

SEQ ID NO: 475233 - DNA, 15 bp, Homo sapiens
ctggaagcatacgaa

SEQ ID NO: 475234 - DNA, 15 bp, Homo sapiens
tctggaagcatacga

SEQ ID NO: 475235 - DNA, 15 bp, Homo sapiens
gtctggaagcatacg

SEQ ID NO: 475236 - DNA, 15 bp, Homo sapiens
ggtctggaagcatac

SEQ ID NO: 475237 - DNA, 15 bp, Homo sapiens
gggtctggaagcata

SEQ ID NO: 475238 - DNA, 15 bp, Homo sapiens
tgggtctggaagcat

SEQ ID NO: 475239 - DNA, 15 bp, Homo sapiens
ttgggtctggaagca

SEQ ID NO: 475240 - DNA, 15 bp, Homo sapiens
tttgggtctggaagc

SEQ ID NO: 475241 - DNA, 15 bp, Homo sapiens
ctttgggtctggaag

SEQ ID NO: 475242 - DNA, 15 bp, Homo sapiens
cctttgggtctggaa

SEQ ID NO: 475243 - DNA, 15 bp, Homo sapiens
gcctttgggtctgga

SEQ ID NO: 475244 - DNA, 15 bp, Homo sapiens
tgcctttgggtctgg

SEQ ID NO: 475245 - DNA, 15 bp, Homo sapiens
atgcctttgggtctg

SEQ ID NO: 475246 - DNA, 15 bp, Homo sapiens
gatgcctttgggtct

SEQ ID NO: 475247 - DNA, 15 bp, Homo sapiens
agatgcctttgggtc

SEQ ID NO: 475248 - DNA, 15 bp, Homo sapiens
tagatgcctttgggt

SEQ ID NO: 475249 - DNA, 15 bp, Homo sapiens
ttagatgcctttggg

SEQ ID NO: 475250 - DNA, 15 bp, Homo sapiens
tttagatgcctttgg

SEQ ID NO: 475251 - DNA, 15 bp, Homo sapiens
gtttagatgcctttg

SEQ ID NO: 475252 - DNA, 15 bp, Homo sapiens
agtttagatgccttt

SEQ ID NO: 475253 - DNA, 15 bp, Homo sapiens
tagtttagatgcctt

SEQ ID NO: 475254 - DNA, 15 bp, Homo sapiens
ttagtttagatgcct

SEQ ID NO: 475255 - DNA, 15 bp, Homo sapiens
tttagtttagatgcc

SEQ ID NO: 475256 - DNA, 15 bp, Homo sapiens
gtttagtttagatgc

SEQ ID NO: 475257 - DNA, 15 bp, Homo sapiens
agtttagtttagatg

SEQ ID NO: 475258 - DNA, 15 bp, Homo sapiens
tagtttagtttagat

SEQ ID NO: 475259 - DNA, 15 bp, Homo sapiens
gtagtttagtttaga

SEQ ID NO: 475260 - DNA, 15 bp, Homo sapiens
agtagtttagtttag

SEQ ID NO: 475261 - DNA, 15 bp, Homo sapiens
tagtagtttagttta

SEQ ID NO: 475262 - DNA, 15 bp, Homo sapiens
ttagtagtttagttt

SEQ ID NO: 475263 - DNA, 15 bp, Homo sapiens
attagtagtttagtt

SEQ ID NO: 475264 - DNA, 15 bp, Homo sapiens
gattagtagtttagt

SEQ ID NO: 475265 - DNA, 15 bp, Homo sapiens
ggattagtagtttag

SEQ ID NO: 475266 - DNA, 15 bp, Homo sapiens
tggattagtagttta

SEQ ID NO: 475267 - DNA, 15 bp, Homo sapiens
atggattagtagttt

SEQ ID NO: 475268 - DNA, 15 bp, Homo sapiens
gatggattagtagtt

SEQ ID NO: 475269 - DNA, 15 bp, Homo sapiens
agatggattagtagt

SEQ ID NO: 475270 - DNA, 15 bp, Homo sapiens
cagatggattagtag

SEQ ID NO: 475271 - DNA, 15 bp, Homo sapiens
tcagatggattagta

SEQ ID NO: 475272 - DNA, 15 bp, Homo sapiens
ttcagatggattagt

SEQ ID NO: 475273 - DNA, 15 bp, Homo sapiens
cttcagatggattag

SEQ ID NO: 475274 - DNA, 15 bp, Homo sapiens
acttcagatggatta

SEQ ID NO: 475275 - DNA, 15 bp, Homo sapiens
tacttcagatggatt

SEQ ID NO: 475276 - DNA, 15 bp, Homo sapiens
atacttcagatggat

SEQ ID NO: 475277 - DNA, 15 bp, Homo sapiens
tatacttcagatgga

SEQ ID NO: 475278 - DNA, 15 bp, Homo sapiens
ttatacttcagatgg

SEQ ID NO: 475279 - DNA, 15 bp, Homo sapiens
attatacttcagatg

SEQ ID NO: 475280 - DNA, 15 bp, Homo sapiens
cattatacttcagat

SEQ ID NO: 475281 - DNA, 15 bp, Homo sapiens
acattatacttcaga

SEQ ID NO: 475282 - DNA, 15 bp, Homo sapiens
aacattatacttcag

SEQ ID NO: 475283 - DNA, 15 bp, Homo sapiens
taacattatacttca

SEQ ID NO: 475284 - DNA, 15 bp, Homo sapiens
gtaacattatacttc

SEQ ID NO: 475285 - DNA, 15 bp, Homo sapiens
agtaacattatactt

SEQ ID NO: 475286 - DNA, 15 bp, Homo sapiens
cagtaacattatact

SEQ ID NO: 475287 - DNA, 15 bp, Homo sapiens
gcagtaacattatac

SEQ ID NO: 475288 - DNA, 15 bp, Homo sapiens
tgcagtaacattata

SEQ ID NO: 475289 - DNA, 15 bp, Homo sapiens
atgcagtaacattat

SEQ ID NO: 475290 - DNA, 15 bp, Homo sapiens
tatgcagtaacatta

SEQ ID NO: 475291 - DNA, 15 bp, Homo sapiens
atatgcagtaacatt

SEQ ID NO: 475292 - DNA, 15 bp, Homo sapiens
tatatgcagtaacat

SEQ ID NO: 475293 - DNA, 15 bp, Homo sapiens
ttatatgcagtaaca

SEQ ID NO: 475294 - DNA, 15 bp, Homo sapiens
tttatatgcagtaac

SEQ ID NO: 475295 - DNA, 15 bp, Homo sapiens
ttttatatgcagtaa

SEQ ID NO: 475296 - DNA, 15 bp, Homo sapiens
cttttatatgcagta

SEQ ID NO: 475297 - DNA, 15 bp, Homo sapiens
tcttttatatgcagt

SEQ ID NO: 475298 - DNA, 15 bp, Homo sapiens
atcttttatatgcag

SEQ ID NO: 475299 - DNA, 15 bp, Homo sapiens
aatcttttatatgca

SEQ ID NO: 475300 - DNA, 15 bp, Homo sapiens
taatcttttatatgc

SEQ ID NO: 475301 - DNA, 15 bp, Homo sapiens
gtaatcttttatatg

SEQ ID NO: 475302 - DNA, 15 bp, Homo sapiens
tgtaatcttttatat

SEQ ID NO: 475303 - DNA, 15 bp, Homo sapiens
atgtaatcttttata

SEQ ID NO: 475304 - DNA, 15 bp, Homo sapiens
aatgtaatcttttat

SEQ ID NO: 475305 - DNA, 15 bp, Homo sapiens
taatgtaatctttta

SEQ ID NO: 475306 - DNA, 15 bp, Homo sapiens
ataatgtaatctttt

SEQ ID NO: 475307 - DNA, 15 bp, Homo sapiens
aataatgtaatcttt

SEQ ID NO: 475308 - DNA, 15 bp, Homo sapiens
caataatgtaatctt

SEQ ID NO: 475309 - DNA, 15 bp, Homo sapiens
tcaataatgtaatct

SEQ ID NO: 475310 - DNA, 15 bp, Homo sapiens
atcaataatgtaatc

SEQ ID NO: 475311 - DNA, 15 bp, Homo sapiens
tatcaataatgtaat

SEQ ID NO: 475312 - DNA, 15 bp, Homo sapiens
ctatcaataatgtaa

SEQ ID NO: 475313 - DNA, 15 bp, Homo sapiens
tctatcaataatgta

SEQ ID NO: 475314 - DNA, 15 bp, Homo sapiens
ctctatcaataatgt

SEQ ID NO: 475315 - DNA, 15 bp, Homo sapiens
gctctatcaataatg

SEQ ID NO: 475316 - DNA, 15 bp, Homo sapiens
cgctctatcaataat

SEQ ID NO: 475317 - DNA, 15 bp, Homo sapiens
acgctctatcaataa

SEQ ID NO: 475318 - DNA, 15 bp, Homo sapiens
aacgctctatcaata

SEQ ID NO: 475319 - DNA, 15 bp, Homo sapiens
taacgctctatcaat

SEQ ID NO: 475320 - DNA, 15 bp, Homo sapiens
ctaacgctctatcaa

SEQ ID NO: 475321 - DNA, 15 bp, Homo sapiens
tctaacgctctatca

SEQ ID NO: 475322 - DNA, 15 bp, Homo sapiens
atctaacgctctatc

SEQ ID NO: 475323 - DNA, 15 bp, Homo sapiens
aatctaacgctctat

SEQ ID NO: 475324 - DNA, 15 bp, Homo sapiens
aaatctaacgctcta

SEQ ID NO: 475325 - DNA, 15 bp, Homo sapiens
taaatctaacgctct

SEQ ID NO: 475326 - DNA, 15 bp, Homo sapiens
ttaaatctaacgctc

SEQ ID NO: 475327 - DNA, 15 bp, Homo sapiens
tttaaatctaacgct

SEQ ID NO: 475328 - DNA, 15 bp, Homo sapiens
ttttaaatctaacgc

SEQ ID NO: 475329 - DNA, 15 bp, Homo sapiens
gttttaaatctaacg

SEQ ID NO: 475330 - DNA, 15 bp, Homo sapiens
agttttaaatctaac

SEQ ID NO: 475331 - DNA, 15 bp, Homo sapiens
aagttttaaatctaa

SEQ ID NO: 475332 - DNA, 15 bp, Homo sapiens
caagttttaaatcta

SEQ ID NO: 475333 - DNA, 15 bp, Homo sapiens
ccaagttttaaatct

SEQ ID NO: 475334 - DNA, 15 bp, Homo sapiens
accaagttttaaatc

SEQ ID NO: 475335 - DNA, 15 bp, Homo sapiens
taccaagttttaaat

SEQ ID NO: 475336 - DNA, 15 bp, Homo sapiens
ctaccaagttttaaa

SEQ ID NO: 475337 - DNA, 15 bp, Homo sapiens
tctaccaagttttaa

SEQ ID NO: 475338 - DNA, 15 bp, Homo sapiens
ttctaccaagtttta

SEQ ID NO: 475339 - DNA, 15 bp, Homo sapiens
tttctaccaagtttt

SEQ ID NO: 475340 - DNA, 15 bp, Homo sapiens
ttttctaccaagttt

SEQ ID NO: 475341 - DNA, 15 bp, Homo sapiens
cttttctaccaagtt

SEQ ID NO: 475342 - DNA, 15 bp, Homo sapiens
tcttttctaccaagt

SEQ ID NO: 475343 - DNA, 15 bp, Homo sapiens
gtcttttctaccaag

SEQ ID NO: 475344 - DNA, 15 bp, Homo sapiens
agtcttttctaccaa

SEQ ID NO: 475345 - DNA, 15 bp, Homo sapiens
gagtcttttctacca

SEQ ID NO: 475346 - DNA, 15 bp, Homo sapiens
agagtcttttctacc

SEQ ID NO: 475347 - DNA, 15 bp, Homo sapiens
cagagtcttttctac

SEQ ID NO: 475348 - DNA, 15 bp, Homo sapiens
acagagtcttttcta

SEQ ID NO: 475349 - DNA, 15 bp, Homo sapiens
tacagagtcttttct

SEQ ID NO: 475350 - DNA, 15 bp, Homo sapiens
ttacagagtcttttc

SEQ ID NO: 475351 - DNA, 15 bp, Homo sapiens
attacagagtctttt

SEQ ID NO: 475352 - DNA, 15 bp, Homo sapiens
aattacagagtcttt

SEQ ID NO: 475353 - DNA, 15 bp, Homo sapiens
aaattacagagtctt

SEQ ID NO: 475354 - DNA, 15 bp, Homo sapiens
aaaattacagagtct

SEQ ID NO: 475355 - DNA, 15 bp, Homo sapiens
taaaattacagagtc

SEQ ID NO: 475356 - DNA, 15 bp, Homo sapiens
ttaaaattacagagt

SEQ ID NO: 475357 - DNA, 15 bp, Homo sapiens
cttaaaattacagag

SEQ ID NO: 475358 - DNA, 15 bp, Homo sapiens
tcttaaaattacaga

SEQ ID NO: 475359 - DNA, 15 bp, Homo sapiens
ttcttaaaattacag

SEQ ID NO: 475360 - DNA, 15 bp, Homo sapiens
tttcttaaaattaca

SEQ ID NO: 475361 - DNA, 15 bp, Homo sapiens
ctttcttaaaattac

SEQ ID NO: 475362 - DNA, 15 bp, Homo sapiens
cctttcttaaaatta

SEQ ID NO: 475363 - DNA, 15 bp, Homo sapiens
tcctttcttaaaatt

SEQ ID NO: 475364 - DNA, 15 bp, Homo sapiens
atcctttcttaaaat

SEQ ID NO: 475365 - DNA, 15 bp, Homo sapiens
aatcctttcttaaaa

SEQ ID NO: 475366 - DNA, 15 bp, Homo sapiens
aaatcctttcttaaa

SEQ ID NO: 475367 - DNA, 15 bp, Homo sapiens
taaatcctttcttaa

SEQ ID NO: 475368 - DNA, 15 bp, Homo sapiens
ttaaatcctttctta

SEQ ID NO: 475369 - DNA, 15 bp, Homo sapiens
tttaaatcctttctt

SEQ ID NO: 475370 - DNA, 15 bp, Homo sapiens
ttttaaatcctttct

SEQ ID NO: 475371 - DNA, 15 bp, Homo sapiens
cttttaaatcctttc

SEQ ID NO: 475372 - DNA, 15 bp, Homo sapiens
ccttttaaatccttt

SEQ ID NO: 475373 - DNA, 15 bp, Homo sapiens
gccttttaaatcctt

SEQ ID NO: 475374 - DNA, 15 bp, Homo sapiens
tgccttttaaatcct

SEQ ID NO: 475375 - DNA, 15 bp, Homo sapiens
gtgccttttaaatcc

SEQ ID NO: 475376 - DNA, 15 bp, Homo sapiens
tgtgccttttaaatc

SEQ ID NO: 475377 - DNA, 15 bp, Homo sapiens
atgtgccttttaaat

SEQ ID NO: 475378 - DNA, 15 bp, Homo sapiens
tatgtgccttttaaa

SEQ ID NO: 475379 - DNA, 15 bp, Homo sapiens
ctatgtgccttttaa

SEQ ID NO: 475380 - DNA, 15 bp, Homo sapiens
tctatgtgcctttta

SEQ ID NO: 475381 - DNA, 15 bp, Homo sapiens
ttctatgtgcctttt

SEQ ID NO: 475382 - DNA, 15 bp, Homo sapiens
cttctatgtgccttt

SEQ ID NO: 475383 - DNA, 15 bp, Homo sapiens
tcttctatgtgcctt

SEQ ID NO: 475384 - DNA, 15 bp, Homo sapiens
gtcttctatgtgcct

SEQ ID NO: 475385 - DNA, 15 bp, Homo sapiens
agtcttctatgtgcc

SEQ ID NO: 475386 - DNA, 15 bp, Homo sapiens
aagtcttctatgtgc

SEQ ID NO: 475387 - DNA, 15 bp, Homo sapiens
gaagtcttctatgtg

SEQ ID NO: 475388 - DNA, 15 bp, Homo sapiens
ggaagtcttctatgt

SEQ ID NO: 475389 - DNA, 15 bp, Homo sapiens
tggaagtcttctatg

SEQ ID NO: 475390 - DNA, 15 bp, Homo sapiens
ttggaagtcttctat

SEQ ID NO: 475391 - DNA, 15 bp, Homo sapiens
tttggaagtcttcta

SEQ ID NO: 475392 - DNA, 15 bp, Homo sapiens
ctttggaagtcttct

SEQ ID NO: 475393 - DNA, 15 bp, Homo sapiens
gctttggaagtcttc

SEQ ID NO: 475394 - DNA, 15 bp, Homo sapiens
agctttggaagtctt

SEQ ID NO: 475395 - DNA, 15 bp, Homo sapiens
cagctttggaagtct

SEQ ID NO: 475396 - DNA, 15 bp, Homo sapiens
tcagctttggaagtc

SEQ ID NO: 475397 - DNA, 15 bp, Homo sapiens
ttcagctttggaagt

SEQ ID NO: 475398 - DNA, 15 bp, Homo sapiens
gttcagctttggaag

SEQ ID NO: 475399 - DNA, 15 bp, Homo sapiens
ggttcagctttggaa

SEQ ID NO: 475400 - DNA, 15 bp, Homo sapiens
aggttcagctttgga

SEQ ID NO: 475401 - DNA, 15 bp, Homo sapiens
aaggttcagctttgg

SEQ ID NO: 475402 - DNA, 15 bp, Homo sapiens
caaggttcagctttg

SEQ ID NO: 475403 - DNA, 15 bp, Homo sapiens
acaaggttcagcttt

SEQ ID NO: 475404 - DNA, 15 bp, Homo sapiens
cacaaggttcagctt

SEQ ID NO: 475405 - DNA, 15 bp, Homo sapiens
ccacaaggttcagct

SEQ ID NO: 475406 - DNA, 15 bp, Homo sapiens
tccacaaggttcagc

SEQ ID NO: 475407 - DNA, 15 bp, Homo sapiens
gtccacaaggttcag

SEQ ID NO: 475408 - DNA, 15 bp, Homo sapiens
tgtccacaaggttca

SEQ ID NO: 475409 - DNA, 15 bp, Homo sapiens
ctgtccacaaggttc

SEQ ID NO: 475410 - DNA, 15 bp, Homo sapiens
gctgtccacaaggtt

SEQ ID NO: 475411 - DNA, 15 bp, Homo sapiens
tgctgtccacaaggt

SEQ ID NO: 475412 - DNA, 15 bp, Homo sapiens
ctgctgtccacaagg

SEQ ID NO: 475413 - DNA, 15 bp, Homo sapiens
tctgctgtccacaag

SEQ ID NO: 475414 - DNA, 15 bp, Homo sapiens
ttctgctgtccacaa

SEQ ID NO: 475415 - DNA, 15 bp, Homo sapiens
attctgctgtccaca

SEQ ID NO: 475416 - DNA, 15 bp, Homo sapiens
gattctgctgtccac

SEQ ID NO: 475417 - DNA, 15 bp, Homo sapiens
agattctgctgtcca

SEQ ID NO: 475418 - DNA, 15 bp, Homo sapiens
cagattctgctgtcc

SEQ ID NO: 475419 - DNA, 15 bp, Homo sapiens
ccagattctgctgtc

SEQ ID NO: 475420 - DNA, 15 bp, Homo sapiens
tccagattctgctgt

SEQ ID NO: 475421 - DNA, 15 bp, Homo sapiens
atccagattctgctg

SEQ ID NO: 475422 - DNA, 15 bp, Homo sapiens
catccagattctgct

SEQ ID NO: 475423 - DNA, 15 bp, Homo sapiens
acatccagattctgc

SEQ ID NO: 475424 - DNA, 15 bp, Homo sapiens
tacatccagattctg

SEQ ID NO: 475425 - DNA, 15 bp, Homo sapiens
ctacatccagattct

SEQ ID NO: 475426 - DNA, 15 bp, Homo sapiens
cctacatccagattc

SEQ ID NO: 475427 - DNA, 15 bp, Homo sapiens
tcctacatccagatt

SEQ ID NO: 475428 - DNA, 15 bp, Homo sapiens
ttcctacatccagat

SEQ ID NO: 475429 - DNA, 15 bp, Homo sapiens
tttcctacatccaga

SEQ ID NO: 475430 - DNA, 15 bp, Homo sapiens
atttcctacatccag

SEQ ID NO: 475431 - DNA, 15 bp, Homo sapiens
aatttcctacatcca

SEQ ID NO: 475432 - DNA, 15 bp, Homo sapiens
caatttcctacatcc

SEQ ID NO: 475433 - DNA, 15 bp, Homo sapiens
tcaatttcctacatc

SEQ ID NO: 475434 - DNA, 15 bp, Homo sapiens
ttcaatttcctacat

SEQ ID NO: 475435 - DNA, 15 bp, Homo sapiens
cttcaatttcctaca

SEQ ID NO: 475436 - DNA, 15 bp, Homo sapiens
ccttcaatttcctac

SEQ ID NO: 475437 - DNA, 15 bp, Homo sapiens
tccttcaatttccta

SEQ ID NO: 475438 - DNA, 15 bp, Homo sapiens
atccttcaatttcct

SEQ ID NO: 475439 - DNA, 15 bp, Homo sapiens
gatccttcaatttcc

SEQ ID NO: 475440 - DNA, 15 bp, Homo sapiens
ggatccttcaatttc

SEQ ID NO: 475441 - DNA, 15 bp, Homo sapiens
tggatccttcaattt

SEQ ID NO: 475442 - DNA, 15 bp, Homo sapiens
gtggatccttcaatt

SEQ ID NO: 475443 - DNA, 15 bp, Homo sapiens
cgtggatccttcaat

SEQ ID NO: 475444 - DNA, 15 bp, Homo sapiens
gcgtggatccttcaa

SEQ ID NO: 475445 - DNA, 15 bp, Homo sapiens
ggcgtggatccttca

SEQ ID NO: 475446 - DNA, 15 bp, Homo sapiens
cggcgtggatccttc

SEQ ID NO: 475447 - DNA, 15 bp, Homo sapiens
gcggcgtggatcctt

SEQ ID NO: 475448 - DNA, 15 bp, Homo sapiens
tgcggcgtggatcct

SEQ ID NO: 475449 - DNA, 15 bp, Homo sapiens
ttgcggcgtggatcc

SEQ ID NO: 475450 - DNA, 15 bp, Homo sapiens
attgcggcgtggatc

SEQ ID NO: 475451 - DNA, 15 bp, Homo sapiens
aattgcggcgtggat

SEQ ID NO: 475452 - DNA, 15 bp, Homo sapiens
gaattgcggcgtgga

SEQ ID NO: 475453 - DNA, 15 bp, Homo sapiens
agaattgcggcgtgg

SEQ ID NO: 475454 - DNA, 15 bp, Homo sapiens
gagaattgcggcgtg

SEQ ID NO: 475455 - DNA, 15 bp, Homo sapiens
ggagaattgcggcgt

SEQ ID NO: 475456 - DNA, 15 bp, Homo sapiens
aggagaattgcggcg

SEQ ID NO: 475457 - DNA, 15 bp, Homo sapiens
aaggagaattgcggc

SEQ ID NO: 475458 - DNA, 15 bp, Homo sapiens
taaggagaattgcgg

SEQ ID NO: 475459 - DNA, 15 bp, Homo sapiens
ttaaggagaattgcg

SEQ ID NO: 475460 - DNA, 15 bp, Homo sapiens
tttaaggagaattgc

SEQ ID NO: 475461 - DNA, 15 bp, Homo sapiens
atttaaggagaattg

SEQ ID NO: 475462 - DNA, 15 bp, Homo sapiens
aatttaaggagaatt

SEQ ID NO: 475463 - DNA, 15 bp, Homo sapiens
aaatttaaggagaat

SEQ ID NO: 475464 - DNA, 15 bp, Homo sapiens
aaaatttaaggagaa

SEQ ID NO: 475465 - DNA, 15 bp, Homo sapiens
taaaatttaaggaga

SEQ ID NO: 475466 - DNA, 15 bp, Homo sapiens
ttaaaatttaaggag

SEQ ID NO: 475467 - DNA, 15 bp, Homo sapiens
tttaaaatttaagga

SEQ ID NO: 475468 - DNA, 15 bp, Homo sapiens
ttttaaaatttaagg

SEQ ID NO: 475469 - DNA, 15 bp, Homo sapiens
tttttaaaatttaag

SEQ ID NO: 475470 - DNA, 15 bp, Homo sapiens
atttttaaaatttaa

SEQ ID NO: 475471 - DNA, 15 bp, Homo sapiens
aatttttaaaattta

SEQ ID NO: 475472 - DNA, 15 bp, Homo sapiens
taatttttaaaattt

SEQ ID NO: 475473 - DNA, 15 bp, Homo sapiens
ttaatttttaaaatt

SEQ ID NO: 475474 - DNA, 15 bp, Homo sapiens
tttaatttttaaaat

SEQ ID NO: 475475 - DNA, 15 bp, Homo sapiens
ttttaatttttaaaa

SEQ ID NO: 475476 - DNA, 15 bp, Homo sapiens
tttttaatttttaaa

SEQ ID NO: 475477 - DNA, 15 bp, Homo sapiens
atttttaatttttaa

SEQ ID NO: 475478 - DNA, 15 bp, Homo sapiens
aatttttaattttta

SEQ ID NO: 475479 - DNA, 15 bp, Homo sapiens
aaatttttaattttt

SEQ ID NO: 475480 - DNA, 15 bp, Homo sapiens
aaaatttttaatttt

SEQ ID NO: 475481 - DNA, 15 bp, Homo sapiens
aaaaatttttaattt

SEQ ID NO: 475482 - DNA, 15 bp, Homo sapiens
aaaaaatttttaatt

SEQ ID NO: 475483 - DNA, 15 bp, Homo sapiens
aaaaaaatttttaat

SEQ ID NO: 475484 - DNA, 15 bp, Homo sapiens
gaaaaaaatttttaa

SEQ ID NO: 475485 - DNA, 15 bp, Homo sapiens
tgaaaaaaattttta

SEQ ID NO: 475486 - DNA, 15 bp, Homo sapiens
ctgaaaaaaattttt

SEQ ID NO: 475487 - DNA, 15 bp, Homo sapiens
actgaaaaaaatttt

SEQ ID NO: 475488 - DNA, 15 bp, Homo sapiens
aactgaaaaaaattt

SEQ ID NO: 475489 - DNA, 15 bp, Homo sapiens
aaactgaaaaaaatt

SEQ ID NO: 475490 - DNA, 15 bp, Homo sapiens
aaaactgaaaaaaat

SEQ ID NO: 475491 - DNA, 15 bp, Homo sapiens
aaaaactgaaaaaaa

SEQ ID NO: 475492 - DNA, 15 bp, Homo sapiens
aaaaaactgaaaaaa

SEQ ID NO: 475493 - DNA, 15 bp, Homo sapiens
gaaaaaactgaaaaa

SEQ ID NO: 475494 - DNA, 15 bp, Homo sapiens
agaaaaaactgaaaa

SEQ ID NO: 475495 - DNA, 15 bp, Homo sapiens
aagaaaaaactgaaa

SEQ ID NO: 475496 - DNA, 15 bp, Homo sapiens
taagaaaaaactgaa

SEQ ID NO: 475497 - DNA, 15 bp, Homo sapiens
ttaagaaaaaactga

SEQ ID NO: 475498 - DNA, 15 bp, Homo sapiens
attaagaaaaaactg

SEQ ID NO: 475499 - DNA, 15 bp, Homo sapiens
aattaagaaaaaact

SEQ ID NO: 475500 - DNA, 15 bp, Homo sapiens
aaattaagaaaaaac

SEQ ID NO: 475501 - DNA, 15 bp, Homo sapiens
aaaattaagaaaaaa

SEQ ID NO: 475502 - DNA, 15 bp, Homo sapiens
taaaattaagaaaaa

SEQ ID NO: 475503 - DNA, 15 bp, Homo sapiens
ataaaattaagaaaa

SEQ ID NO: 475504 - DNA, 15 bp, Homo sapiens
aataaaattaagaaa

SEQ ID NO: 475505 - DNA, 15 bp, Homo sapiens
aaataaaattaagaa

SEQ ID NO: 475506 - DNA, 15 bp, Homo sapiens
aaaataaaattaaga

SEQ ID NO: 475507 - DNA, 15 bp, Homo sapiens
aaaaataaaattaag

SEQ ID NO: 475508 - DNA, 15 bp, Homo sapiens
aaaaaataaaattaa

SEQ ID NO: 475509 - DNA, 15 bp, Homo sapiens
aaaaaaataaaatta

SEQ ID NO: 475510 - DNA, 15 bp, Homo sapiens
taaaaaaataaaatt

SEQ ID NO: 475511 - DNA, 15 bp, Homo sapiens
gtaaaaaaataaaat

SEQ ID NO: 475512 - DNA, 15 bp, Homo sapiens
agtaaaaaaataaaa

SEQ ID NO: 475513 - DNA, 15 bp, Homo sapiens
aagtaaaaaaataaa

SEQ ID NO: 475514 - DNA, 15 bp, Homo sapiens
gaagtaaaaaaataa

SEQ ID NO: 475515 - DNA, 15 bp, Homo sapiens
agaagtaaaaaaata

SEQ ID NO: 475516 - DNA, 15 bp, Homo sapiens
aagaagtaaaaaaat

SEQ ID NO: 475517 - DNA, 15 bp, Homo sapiens
taagaagtaaaaaaa

SEQ ID NO: 475518 - DNA, 15 bp, Homo sapiens
gtaagaagtaaaaaa

SEQ ID NO: 475519 - DNA, 15 bp, Homo sapiens
ggtaagaagtaaaaa

SEQ ID NO: 475520 - DNA, 15 bp, Homo sapiens
aggtaagaagtaaaa

SEQ ID NO: 475521 - DNA, 15 bp, Homo sapiens
caggtaagaagtaaa

SEQ ID NO: 475522 - DNA, 15 bp, Homo sapiens
acaggtaagaagtaa

SEQ ID NO: 475523 - DNA, 15 bp, Homo sapiens
aacaggtaagaagta

SEQ ID NO: 475524 - DNA, 15 bp, Homo sapiens
gaacaggtaagaagt

SEQ ID NO: 475525 - DNA, 15 bp, Homo sapiens
tgaacaggtaagaag

SEQ ID NO: 475526 - DNA, 15 bp, Homo sapiens
atgaacaggtaagaa

SEQ ID NO: 475527 - DNA, 15 bp, Homo sapiens
gatgaacaggtaaga

SEQ ID NO: 475528 - DNA, 15 bp, Homo sapiens
agatgaacaggtaag

SEQ ID NO: 475529 - DNA, 15 bp, Homo sapiens
gagatgaacaggtaa

SEQ ID NO: 475530 - DNA, 15 bp, Homo sapiens
agagatgaacaggta

SEQ ID NO: 475531 - DNA, 15 bp, Homo sapiens
tagagatgaacaggt

SEQ ID NO: 475532 - DNA, 15 bp, Homo sapiens
ctagagatgaacagg

SEQ ID NO: 475533 - DNA, 15 bp, Homo sapiens
cctagagatgaacag

SEQ ID NO: 475534 - DNA, 15 bp, Homo sapiens
gcctagagatgaaca

SEQ ID NO: 475535 - DNA, 15 bp, Homo sapiens
agcctagagatgaac

SEQ ID NO: 475536 - DNA, 15 bp, Homo sapiens
aagcctagagatgaa

SEQ ID NO: 475537 - DNA, 15 bp, Homo sapiens
taagcctagagatga

SEQ ID NO: 475538 - DNA, 15 bp, Homo sapiens
ataagcctagagatg

SEQ ID NO: 475539 - DNA, 15 bp, Homo sapiens
aataagcctagagat

SEQ ID NO: 475540 - DNA, 15 bp, Homo sapiens
aaataagcctagaga

SEQ ID NO: 475541 - DNA, 15 bp, Homo sapiens
caaataagcctagag

SEQ ID NO: 475542 - DNA, 15 bp, Homo sapiens
gcaaataagcctaga

SEQ ID NO: 475543 - DNA, 15 bp, Homo sapiens
ggcaaataagcctag

SEQ ID NO: 475544 - DNA, 15 bp, Homo sapiens
tggcaaataagccta

SEQ ID NO: 475545 - DNA, 15 bp, Homo sapiens
atggcaaataagcct

SEQ ID NO: 475546 - DNA, 15 bp, Homo sapiens
tatggcaaataagcc

SEQ ID NO: 475547 - DNA, 15 bp, Homo sapiens
atatggcaaataagc

SEQ ID NO: 475548 - DNA, 15 bp, Homo sapiens
aatatggcaaataag

SEQ ID NO: 475549 - DNA, 15 bp, Homo sapiens
caatatggcaaataa

SEQ ID NO: 475550 - DNA, 15 bp, Homo sapiens
ccaatatggcaaata

SEQ ID NO: 475551 - DNA, 15 bp, Homo sapiens
tccaatatggcaaat

SEQ ID NO: 475552 - DNA, 15 bp, Homo sapiens
ttccaatatggcaaa

SEQ ID NO: 475553 - DNA, 15 bp, Homo sapiens
tttccaatatggcaa

SEQ ID NO: 475554 - DNA, 15 bp, Homo sapiens
ttttccaatatggca

SEQ ID NO: 475555 - DNA, 15 bp, Homo sapiens
tttttccaatatggc

SEQ ID NO: 475556 - DNA, 15 bp, Homo sapiens
ctttttccaatatgg

SEQ ID NO: 475557 - DNA, 15 bp, Homo sapiens
tctttttccaatatg

SEQ ID NO: 475558 - DNA, 15 bp, Homo sapiens
atctttttccaatat

SEQ ID NO: 475559 - DNA, 15 bp, Homo sapiens
tatctttttccaata

SEQ ID NO: 475560 - DNA, 15 bp, Homo sapiens
gtatctttttccaat

SEQ ID NO: 475561 - DNA, 15 bp, Homo sapiens
agtatctttttccaa

SEQ ID NO: 475562 - DNA, 15 bp, Homo sapiens
aagtatctttttcca

SEQ ID NO: 475563 - DNA, 15 bp, Homo sapiens
taagtatctttttcc

SEQ ID NO: 475564 - DNA, 15 bp, Homo sapiens
ttaagtatctttttc

SEQ ID NO: 475565 - DNA, 15 bp, Homo sapiens
cttaagtatcttttt

SEQ ID NO: 475566 - DNA, 15 bp, Homo sapiens
tcttaagtatctttt

SEQ ID NO: 475567 - DNA, 15 bp, Homo sapiens
ctcttaagtatcttt

SEQ ID NO: 475568 - DNA, 15 bp, Homo sapiens
tctcttaagtatctt

SEQ ID NO: 475569 - DNA, 15 bp, Homo sapiens
ctctcttaagtatct

SEQ ID NO: 475570 - DNA, 15 bp, Homo sapiens
cctctcttaagtatc

SEQ ID NO: 475571 - DNA, 15 bp, Homo sapiens
tcctctcttaagtat

SEQ ID NO: 475572 - DNA, 15 bp, Homo sapiens
ttcctctcttaagta

SEQ ID NO: 475573 - DNA, 15 bp, Homo sapiens
attcctctcttaagt

SEQ ID NO: 475574 - DNA, 15 bp, Homo sapiens
cattcctctcttaag

SEQ ID NO: 475575 - DNA, 15 bp, Homo sapiens
tcattcctctcttaa

SEQ ID NO: 475576 - DNA, 15 bp, Homo sapiens
atcattcctctctta

SEQ ID NO: 475577 - DNA, 15 bp, Homo sapiens
aatcattcctctctt

SEQ ID NO: 475578 - DNA, 15 bp, Homo sapiens
aaatcattcctctct

SEQ ID NO: 475579 - DNA, 15 bp, Homo sapiens
aaaatcattcctctc

SEQ ID NO: 475580 - DNA, 15 bp, Homo sapiens
caaaatcattcctct

SEQ ID NO: 475581 - DNA, 15 bp, Homo sapiens
ccaaaatcattcctc

SEQ ID NO: 475582 - DNA, 15 bp, Homo sapiens
cccaaaatcattcct

SEQ ID NO: 475583 - DNA, 15 bp, Homo sapiens
gcccaaaatcattcc

SEQ ID NO: 475584 - DNA, 15 bp, Homo sapiens
agcccaaaatcattc

SEQ ID NO: 475585 - DNA, 15 bp, Homo sapiens
cagcccaaaatcatt

SEQ ID NO: 475586 - DNA, 15 bp, Homo sapiens
ccagcccaaaatcat

SEQ ID NO: 475587 - DNA, 15 bp, Homo sapiens
cccagcccaaaatca

SEQ ID NO: 475588 - DNA, 15 bp, Homo sapiens
gcccagcccaaaatc

SEQ ID NO: 475589 - DNA, 15 bp, Homo sapiens
cgcccagcccaaaat

SEQ ID NO: 475590 - DNA, 15 bp, Homo sapiens
gcgcccagcccaaaa

SEQ ID NO: 475591 - DNA, 15 bp, Homo sapiens
cgcgcccagcccaaa

SEQ ID NO: 475592 - DNA, 15 bp, Homo sapiens
ccgcgcccagcccaa

SEQ ID NO: 475593 - DNA, 15 bp, Homo sapiens
accgcgcccagccca

SEQ ID NO: 475594 - DNA, 15 bp, Homo sapiens
caccgcgcccagccc

SEQ ID NO: 475595 - DNA, 15 bp, Homo sapiens
ccaccgcgcccagcc

SEQ ID NO: 475596 - DNA, 15 bp, Homo sapiens
gccaccgcgcccagc

SEQ ID NO: 475597 - DNA, 15 bp, Homo sapiens
agccaccgcgcccag

SEQ ID NO: 475598 - DNA, 15 bp, Homo sapiens
gagccaccgcgccca

SEQ ID NO: 475599 - DNA, 15 bp, Homo sapiens
tgagccaccgcgccc

SEQ ID NO: 475600 - DNA, 15 bp, Homo sapiens
gtgagccaccgcgcc

SEQ ID NO: 475601 - DNA, 15 bp, Homo sapiens
cgtgagccaccgcgc

SEQ ID NO: 475602 - DNA, 15 bp, Homo sapiens
gcgtgagccaccgcg

SEQ ID NO: 475603 - DNA, 15 bp, Homo sapiens
ggcgtgagccaccgc

SEQ ID NO: 475604 - DNA, 15 bp, Homo sapiens
aggcgtgagccaccg

SEQ ID NO: 475605 - DNA, 15 bp, Homo sapiens
caggcgtgagccacc

SEQ ID NO: 475606 - DNA, 15 bp, Homo sapiens
acaggcgtgagccac

SEQ ID NO: 475607 - DNA, 15 bp, Homo sapiens
tacaggcgtgagcca

SEQ ID NO: 475608 - DNA, 15 bp, Homo sapiens
atcccaaagtgctgg

SEQ ID NO: 475609 - DNA, 15 bp, Homo sapiens
catcccaaagtgctg

SEQ ID NO: 475610 - DNA, 15 bp, Homo sapiens
gcatcccaaagtgct

SEQ ID NO: 475611 - DNA, 15 bp, Homo sapiens
ggcatcccaaagtgc

SEQ ID NO: 475612 - DNA, 15 bp, Homo sapiens
tggcatcccaaagtg

SEQ ID NO: 475613 - DNA, 15 bp, Homo sapiens
ttggcatcccaaagt

SEQ ID NO: 475614 - DNA, 15 bp, Homo sapiens
cttggcatcccaaag

SEQ ID NO: 475615 - DNA, 15 bp, Homo sapiens
ccttggcatcccaaa

SEQ ID NO: 475616 - DNA, 15 bp, Homo sapiens
gccttggcatcccaa

SEQ ID NO: 475617 - DNA, 15 bp, Homo sapiens
tgccttggcatccca

SEQ ID NO: 475618 - DNA, 15 bp, Homo sapiens
ctgccttggcatccc

SEQ ID NO: 475619 - DNA, 15 bp, Homo sapiens
cctgccttggcatcc

SEQ ID NO: 475620 - DNA, 15 bp, Homo sapiens
acctgccttggcatc

SEQ ID NO: 475621 - DNA, 15 bp, Homo sapiens
cacctgccttggcat

SEQ ID NO: 475622 - DNA, 15 bp, Homo sapiens
ccacctgccttggca

SEQ ID NO: 475623 - DNA, 15 bp, Homo sapiens
ggtgatccacctgcc

SEQ ID NO: 475624 - DNA, 15 bp, Homo sapiens
aggtgatccacctgc

SEQ ID NO: 475625 - DNA, 15 bp, Homo sapiens
caggtgatccacctg

SEQ ID NO: 475626 - DNA, 15 bp, Homo sapiens
tcaggtgatccacct

SEQ ID NO: 475627 - DNA, 15 bp, Homo sapiens
ctcaggtgatccacc

SEQ ID NO: 475628 - DNA, 15 bp, Homo sapiens
tcaggctggtctcaa

SEQ ID NO: 475629 - DNA, 15 bp, Homo sapiens
gtcaggctggtctca

SEQ ID NO: 475630 - DNA, 15 bp, Homo sapiens
ggtcaggctggtctc

SEQ ID NO: 475631 - DNA, 15 bp, Homo sapiens
tggtcaggctggtct

SEQ ID NO: 475632 - DNA, 15 bp, Homo sapiens
ttggtcaggctggtc

SEQ ID NO: 475633 - DNA, 15 bp, Homo sapiens
gttggtcaggctggt

SEQ ID NO: 475634 - DNA, 15 bp, Homo sapiens
tgttggtcaggctgg

SEQ ID NO: 475635 - DNA, 15 bp, Homo sapiens
atgttggtcaggctg

SEQ ID NO: 475636 - DNA, 15 bp, Homo sapiens
catgttggtcaggct

SEQ ID NO: 475637 - DNA, 15 bp, Homo sapiens
ccatgttggtcaggc

SEQ ID NO: 475638 - DNA, 15 bp, Homo sapiens
tccatgttggtcagg

SEQ ID NO: 475639 - DNA, 15 bp, Homo sapiens
ctccatgttggtcag

SEQ ID NO: 475640 - DNA, 15 bp, Homo sapiens
tctccatgttggtca

SEQ ID NO: 475641 - DNA, 15 bp, Homo sapiens
ttctccatgttggtc

SEQ ID NO: 475642 - DNA, 15 bp, Homo sapiens
tttctccatgttggt

SEQ ID NO: 475643 - DNA, 15 bp, Homo sapiens
gtttctccatgttgg

SEQ ID NO: 475644 - DNA, 15 bp, Homo sapiens
ggtttctccatgttg

SEQ ID NO: 475645 - DNA, 15 bp, Homo sapiens
aggtttctccatgtt

SEQ ID NO: 475646 - DNA, 15 bp, Homo sapiens
gaggtttctccatgt

SEQ ID NO: 475647 - DNA, 15 bp, Homo sapiens
cgaggtttctccatg

SEQ ID NO: 475648 - DNA, 15 bp, Homo sapiens
acgaggtttctccat

SEQ ID NO: 475649 - DNA, 15 bp, Homo sapiens
gacgaggtttctcca

SEQ ID NO: 475650 - DNA, 15 bp, Homo sapiens
agacgaggtttctcc

SEQ ID NO: 475651 - DNA, 15 bp, Homo sapiens
gagacgaggtttctc

SEQ ID NO: 475652 - DNA, 15 bp, Homo sapiens
agagacgaggtttct

SEQ ID NO: 475653 - DNA, 15 bp, Homo sapiens
tagagacgaggtttc

SEQ ID NO: 475654 - DNA, 15 bp, Homo sapiens
gtagagacgaggttt

SEQ ID NO: 475655 - DNA, 15 bp, Homo sapiens
agtagagacgaggtt

SEQ ID NO: 475656 - DNA, 15 bp, Homo sapiens
tagtagagacgaggt

SEQ ID NO: 475657 - DNA, 15 bp, Homo sapiens
ttagtagagacgagg

SEQ ID NO: 475658 - DNA, 15 bp, Homo sapiens
tttagtagagacgag

SEQ ID NO: 475659 - DNA, 15 bp, Homo sapiens
ttttagtagagacga

SEQ ID NO: 475660 - DNA, 15 bp, Homo sapiens
agctaatttttgtat

SEQ ID NO: 475661 - DNA, 15 bp, Homo sapiens
cagctaatttttgta

SEQ ID NO: 475662 - DNA, 15 bp, Homo sapiens
ccagctaatttttgt

SEQ ID NO: 475663 - DNA, 15 bp, Homo sapiens
cccagctaatttttg

SEQ ID NO: 475664 - DNA, 15 bp, Homo sapiens
gcccagctaattttt

SEQ ID NO: 475665 - DNA, 15 bp, Homo sapiens
tgcccagctaatttt

SEQ ID NO: 475666 - DNA, 15 bp, Homo sapiens
atgcccagctaattt

SEQ ID NO: 475667 - DNA, 15 bp, Homo sapiens
catgcccagctaatt

SEQ ID NO: 475668 - DNA, 15 bp, Homo sapiens
ccatgcccagctaat

SEQ ID NO: 475669 - DNA, 15 bp, Homo sapiens
accatgcccagctaa

SEQ ID NO: 475670 - DNA, 15 bp, Homo sapiens
caccatgcccagcta

SEQ ID NO: 475671 - DNA, 15 bp, Homo sapiens
ccaccatgcccagct

SEQ ID NO: 475672 - DNA, 15 bp, Homo sapiens
gccaccatgcccagc

SEQ ID NO: 475673 - DNA, 15 bp, Homo sapiens
cgccaccatgcccag

SEQ ID NO: 475674 - DNA, 15 bp, Homo sapiens
ccgccaccatgccca

SEQ ID NO: 475675 - DNA, 15 bp, Homo sapiens
cccgccaccatgccc

SEQ ID NO: 475676 - DNA, 15 bp, Homo sapiens
gcccgccaccatgcc

SEQ ID NO: 475677 - DNA, 15 bp, Homo sapiens
cgcccgccaccatgc

SEQ ID NO: 475678 - DNA, 15 bp, Homo sapiens
gcgcccgccaccatg

SEQ ID NO: 475679 - DNA, 15 bp, Homo sapiens
ggcgcccgccaccat

SEQ ID NO: 475680 - DNA, 15 bp, Homo sapiens
aggcgcccgccacca

SEQ ID NO: 475681 - DNA, 15 bp, Homo sapiens
caggcgcccgccacc

SEQ ID NO: 475682 - DNA, 15 bp, Homo sapiens
acaggcgcccgccac

SEQ ID NO: 475683 - DNA, 15 bp, Homo sapiens
tacaggcgcccgcca

SEQ ID NO: 475684 - DNA, 15 bp, Homo sapiens
ttacaggcgcccgcc

SEQ ID NO: 475685 - DNA, 15 bp, Homo sapiens
attacaggcgcccgc

SEQ ID NO: 475686 - DNA, 15 bp, Homo sapiens
gattacaggcgcccg

SEQ ID NO: 475687 - DNA, 15 bp, Homo sapiens
ggattacaggcgccc

SEQ ID NO: 475688 - DNA, 15 bp, Homo sapiens
gggattacaggcgcc

SEQ ID NO: 475689 - DNA, 15 bp, Homo sapiens
tgggattacaggcgc

SEQ ID NO: 475690 - DNA, 15 bp, Homo sapiens
cgagtagctgggatt

SEQ ID NO: 475691 - DNA, 15 bp, Homo sapiens
ccgagtagctgggat

SEQ ID NO: 475692 - DNA, 15 bp, Homo sapiens
attcaagcaattctc

SEQ ID NO: 475693 - DNA, 15 bp, Homo sapiens
gattcaagcaattct

SEQ ID NO: 475694 - DNA, 15 bp, Homo sapiens
ggattcaagcaattc

SEQ ID NO: 475695 - DNA, 15 bp, Homo sapiens
cggattcaagcaatt

SEQ ID NO: 475696 - DNA, 15 bp, Homo sapiens
ccggattcaagcaat

SEQ ID NO: 475697 - DNA, 15 bp, Homo sapiens
cccggattcaagcaa

SEQ ID NO: 475698 - DNA, 15 bp, Homo sapiens
tcccggattcaagca

SEQ ID NO: 475699 - DNA, 15 bp, Homo sapiens
ctcccggattcaagc

SEQ ID NO: 475700 - DNA, 15 bp, Homo sapiens
cctcccggattcaag

SEQ ID NO: 475701 - DNA, 15 bp, Homo sapiens
acctcccggattcaa

SEQ ID NO: 475702 - DNA, 15 bp, Homo sapiens
cacctcccggattca

SEQ ID NO: 475703 - DNA, 15 bp, Homo sapiens
ccacctcccggattc

SEQ ID NO: 475704 - DNA, 15 bp, Homo sapiens
tccacctcccggatt

SEQ ID NO: 475705 - DNA, 15 bp, Homo sapiens
ctccacctcccggat

SEQ ID NO: 475706 - DNA, 15 bp, Homo sapiens
cctccacctcccgga

SEQ ID NO: 475707 - DNA, 15 bp, Homo sapiens
acctccacctcccgg

SEQ ID NO: 475708 - DNA, 15 bp, Homo sapiens
aacctccacctcccg

SEQ ID NO: 475709 - DNA, 15 bp, Homo sapiens
caacctccacctccc

SEQ ID NO: 475710 - DNA, 15 bp, Homo sapiens
gcaacctccacctcc

SEQ ID NO: 475711 - DNA, 15 bp, Homo sapiens
tgtgatctcagctca

SEQ ID NO: 475712 - DNA, 15 bp, Homo sapiens
gtgtgatctcagctc

SEQ ID NO: 475713 - DNA, 15 bp, Homo sapiens
ggtgtgatctcagct

SEQ ID NO: 475714 - DNA, 15 bp, Homo sapiens
tggtgtgatctcagc

SEQ ID NO: 475715 - DNA, 15 bp, Homo sapiens
gtggtgtgatctcag

SEQ ID NO: 475716 - DNA, 15 bp, Homo sapiens
agtggtgtgatctca

SEQ ID NO: 475717 - DNA, 15 bp, Homo sapiens
cagtggtgtgatctc

SEQ ID NO: 475718 - DNA, 15 bp, Homo sapiens
gcagtggtgtgatct

SEQ ID NO: 475719 - DNA, 15 bp, Homo sapiens
tgcagtggtgtgatc

SEQ ID NO: 475720 - DNA, 15 bp, Homo sapiens
gtgcagtggtgtgat

SEQ ID NO: 475721 - DNA, 15 bp, Homo sapiens
agtgcagtggtgtga

SEQ ID NO: 475722 - DNA, 15 bp, Homo sapiens
gagtgcagtggtgtg

SEQ ID NO: 475723 - DNA, 15 bp, Homo sapiens
agagtgcagtggtgt

SEQ ID NO: 475724 - DNA, 15 bp, Homo sapiens
tagagtgcagtggtg

SEQ ID NO: 475725 - DNA, 15 bp, Homo sapiens
ctagagtgcagtggt

SEQ ID NO: 475726 - DNA, 15 bp, Homo sapiens
gctagagtgcagtgg

SEQ ID NO: 475727 - DNA, 15 bp, Homo sapiens
ggctagagtgcagtg

SEQ ID NO: 475728 - DNA, 15 bp, Homo sapiens
aggctagagtgcagt

SEQ ID NO: 475729 - DNA, 15 bp, Homo sapiens
caggctagagtgcag

SEQ ID NO: 475730 - DNA, 15 bp, Homo sapiens
ccaggctagagtgca

SEQ ID NO: 475731 - DNA, 15 bp, Homo sapiens
cccaggctagagtgc

SEQ ID NO: 475732 - DNA, 15 bp, Homo sapiens
gcccaggctagagtg

SEQ ID NO: 475733 - DNA, 15 bp, Homo sapiens
cgcccaggctagagt

SEQ ID NO: 475734 - DNA, 15 bp, Homo sapiens
tcgcccaggctagag

SEQ ID NO: 475735 - DNA, 15 bp, Homo sapiens
gtcgcccaggctaga

SEQ ID NO: 475736 - DNA, 15 bp, Homo sapiens
tgtcgcccaggctag

SEQ ID NO: 475737 - DNA, 15 bp, Homo sapiens
ctgtcgcccaggcta

SEQ ID NO: 475738 - DNA, 15 bp, Homo sapiens
cgctctgtcgcccag

SEQ ID NO: 475739 - DNA, 15 bp, Homo sapiens
tcgctctgtcgccca

SEQ ID NO: 475740 - DNA, 15 bp, Homo sapiens
ctcgctctgtcgccc

SEQ ID NO: 475741 - DNA, 15 bp, Homo sapiens
tctcgctctgtcgcc

SEQ ID NO: 475742 - DNA, 15 bp, Homo sapiens
gtctcgctctgtcgc

SEQ ID NO: 475743 - DNA, 15 bp, Homo sapiens
agtctcgctctgtcg

SEQ ID NO: 475744 - DNA, 15 bp, Homo sapiens
agagtctcgctctgt

SEQ ID NO: 475745 - DNA, 15 bp, Homo sapiens
aagagtctcgctctg

SEQ ID NO: 475746 - DNA, 15 bp, Homo sapiens
caagagtctcgctct

SEQ ID NO: 475747 - DNA, 15 bp, Homo sapiens
acaagagtctcgctc

SEQ ID NO: 475748 - DNA, 15 bp, Homo sapiens
gacaagagtctcgct

SEQ ID NO: 475749 - DNA, 15 bp, Homo sapiens
agacaagagtctcgc

SEQ ID NO: 475750 - DNA, 15 bp, Homo sapiens
gagacaagagtctcg

SEQ ID NO: 475751 - DNA, 15 bp, Homo sapiens
ggagacaagagtctc

SEQ ID NO: 475752 - DNA, 15 bp, Homo sapiens
tggagacaagagtct

SEQ ID NO: 475753 - DNA, 15 bp, Homo sapiens
ttggagacaagagtc

SEQ ID NO: 475754 - DNA, 15 bp, Homo sapiens
tttggagacaagagt

SEQ ID NO: 475755 - DNA, 15 bp, Homo sapiens
ttttggagacaagag

SEQ ID NO: 475756 - DNA, 15 bp, Homo sapiens
tttttggagacaaga

SEQ ID NO: 475757 - DNA, 15 bp, Homo sapiens
ttttttggagacaag

SEQ ID NO: 475758 - DNA, 15 bp, Homo sapiens
tttttttggagacaa

SEQ ID NO: 475759 - DNA, 15 bp, Homo sapiens
ttttttttggagaca

SEQ ID NO: 475760 - DNA, 15 bp, Homo sapiens
tttttttttggagac

SEQ ID NO: 475761 - DNA, 15 bp, Homo sapiens
ttttttttttggaga

SEQ ID NO: 475762 - DNA, 15 bp, Homo sapiens
tttttttttttggag

SEQ ID NO: 475763 - DNA, 15 bp, Homo sapiens
ttttttttttttgga

SEQ ID NO: 475764 - DNA, 15 bp, Homo sapiens
ccttttttttttttt

SEQ ID NO: 475765 - DNA, 15 bp, Homo sapiens
tcctttttttttttt

SEQ ID NO: 475766 - DNA, 15 bp, Homo sapiens
ctccttttttttttt

SEQ ID NO: 475767 - DNA, 15 bp, Homo sapiens
cctcctttttttttt

SEQ ID NO: 475768 - DNA, 15 bp, Homo sapiens
tcctccttttttttt

SEQ ID NO: 475769 - DNA, 15 bp, Homo sapiens
ttcctcctttttttt

SEQ ID NO: 475770 - DNA, 15 bp, Homo sapiens
attcctccttttttt

SEQ ID NO: 475771 - DNA, 15 bp, Homo sapiens
cattcctcctttttt

SEQ ID NO: 475772 - DNA, 15 bp, Homo sapiens
tcattcctccttttt

SEQ ID NO: 475773 - DNA, 15 bp, Homo sapiens
atcattcctcctttt

SEQ ID NO: 475774 - DNA, 15 bp, Homo sapiens
aatcattcctccttt

SEQ ID NO: 475775 - DNA, 15 bp, Homo sapiens
aaatcattcctcctt

SEQ ID NO: 475776 - DNA, 15 bp, Homo sapiens
aaaatcattcctcct

SEQ ID NO: 475777 - DNA, 15 bp, Homo sapiens
caaaatcattcctcc

SEQ ID NO: 475778 - DNA, 15 bp, Homo sapiens
tcaaaatcattcctc

SEQ ID NO: 475779 - DNA, 15 bp, Homo sapiens
atcaaaatcattcct

SEQ ID NO: 475780 - DNA, 15 bp, Homo sapiens
aatcaaaatcattcc

SEQ ID NO: 475781 - DNA, 15 bp, Homo sapiens
taatcaaaatcattc

SEQ ID NO: 475782 - DNA, 15 bp, Homo sapiens
ataatcaaaatcatt

SEQ ID NO: 475783 - DNA, 15 bp, Homo sapiens
tataatcaaaatcat

SEQ ID NO: 475784 - DNA, 15 bp, Homo sapiens
atataatcaaaatca

SEQ ID NO: 475785 - DNA, 15 bp, Homo sapiens
tatataatcaaaatc

SEQ ID NO: 475786 - DNA, 15 bp, Homo sapiens
gtatataatcaaaat

SEQ ID NO: 475787 - DNA, 15 bp, Homo sapiens
ggtatataatcaaaa

SEQ ID NO: 475788 - DNA, 15 bp, Homo sapiens
gggtatataatcaaa

SEQ ID NO: 475789 - DNA, 15 bp, Homo sapiens
tgggtatataatcaa

SEQ ID NO: 475790 - DNA, 15 bp, Homo sapiens
ctgggtatataatca

SEQ ID NO: 475791 - DNA, 15 bp, Homo sapiens
actgggtatataatc

SEQ ID NO: 475792 - DNA, 15 bp, Homo sapiens
tactgggtatataat

SEQ ID NO: 475793 - DNA, 15 bp, Homo sapiens
ttactgggtatataa

SEQ ID NO: 475794 - DNA, 15 bp, Homo sapiens
tttactgggtatata

SEQ ID NO: 475795 - DNA, 15 bp, Homo sapiens
ctttactgggtatat

SEQ ID NO: 475796 - DNA, 15 bp, Homo sapiens
gctttactgggtata

SEQ ID NO: 475797 - DNA, 15 bp, Homo sapiens
tgctttactgggtat

SEQ ID NO: 475798 - DNA, 15 bp, Homo sapiens
ttgctttactgggta

SEQ ID NO: 475799 - DNA, 15 bp, Homo sapiens
cttgctttactgggt

SEQ ID NO: 475800 - DNA, 15 bp, Homo sapiens
tcttgctttactggg

SEQ ID NO: 475801 - DNA, 15 bp, Homo sapiens
ttcttgctttactgg

SEQ ID NO: 475802 - DNA, 15 bp, Homo sapiens
tttcttgctttactg

SEQ ID NO: 475803 - DNA, 15 bp, Homo sapiens
ctttcttgctttact

SEQ ID NO: 475804 - DNA, 15 bp, Homo sapiens
actttcttgctttac

SEQ ID NO: 475805 - DNA, 15 bp, Homo sapiens
cactttcttgcttta

SEQ ID NO: 475806 - DNA, 15 bp, Homo sapiens
acactttcttgcttt

SEQ ID NO: 475807 - DNA, 15 bp, Homo sapiens
aacactttcttgctt

SEQ ID NO: 475808 - DNA, 15 bp, Homo sapiens
aaacactttcttgct

SEQ ID NO: 475809 - DNA, 15 bp, Homo sapiens
gaaacactttcttgc

SEQ ID NO: 475810 - DNA, 15 bp, Homo sapiens
agaaacactttcttg

SEQ ID NO: 475811 - DNA, 15 bp, Homo sapiens
gagaaacactttctt

SEQ ID NO: 475812 - DNA, 15 bp, Homo sapiens
ggagaaacactttct

SEQ ID NO: 475813 - DNA, 15 bp, Homo sapiens
aggagaaacactttc

SEQ ID NO: 475814 - DNA, 15 bp, Homo sapiens
aaggagaaacacttt

SEQ ID NO: 475815 - DNA, 15 bp, Homo sapiens
gaaggagaaacactt

SEQ ID NO: 475816 - DNA, 15 bp, Homo sapiens
agaaggagaaacact

SEQ ID NO: 475817 - DNA, 15 bp, Homo sapiens
cagaaggagaaacac

SEQ ID NO: 475818 - DNA, 15 bp, Homo sapiens
acagaaggagaaaca

SEQ ID NO: 475819 - DNA, 15 bp, Homo sapiens
gacagaaggagaaac

SEQ ID NO: 475820 - DNA, 15 bp, Homo sapiens
ggacagaaggagaaa

SEQ ID NO: 475821 - DNA, 15 bp, Homo sapiens
gggacagaaggagaa

SEQ ID NO: 475822 - DNA, 15 bp, Homo sapiens
agggacagaaggaga

SEQ ID NO: 475823 - DNA, 15 bp, Homo sapiens
tagggacagaaggag

SEQ ID NO: 475824 - DNA, 15 bp, Homo sapiens
ctagggacagaagga

SEQ ID NO: 475825 - DNA, 15 bp, Homo sapiens
gctagggacagaagg

SEQ ID NO: 475826 - DNA, 15 bp, Homo sapiens
agctagggacagaag

SEQ ID NO: 475827 - DNA, 15 bp, Homo sapiens
aagctagggacagaa

SEQ ID NO: 475828 - DNA, 15 bp, Homo sapiens
aaagctagggacaga

SEQ ID NO: 475829 - DNA, 15 bp, Homo sapiens
taaagctagggacag

SEQ ID NO: 475830 - DNA, 15 bp, Homo sapiens
ttaaagctagggaca

SEQ ID NO: 475831 - DNA, 15 bp, Homo sapiens
tttaaagctagggac

SEQ ID NO: 475832 - DNA, 15 bp, Homo sapiens
ttttaaagctaggga

SEQ ID NO: 475833 - DNA, 15 bp, Homo sapiens
cttttaaagctaggg

SEQ ID NO: 475834 - DNA, 15 bp, Homo sapiens
tcttttaaagctagg

SEQ ID NO: 475835 - DNA, 15 bp, Homo sapiens
gtcttttaaagctag

SEQ ID NO: 475836 - DNA, 15 bp, Homo sapiens
ggtcttttaaagcta

SEQ ID NO: 475837 - DNA, 15 bp, Homo sapiens
aggtcttttaaagct

SEQ ID NO: 475838 - DNA, 15 bp, Homo sapiens
aaggtcttttaaagc

SEQ ID NO: 475839 - DNA, 15 bp, Homo sapiens
taaggtcttttaaag

SEQ ID NO: 475840 - DNA, 15 bp, Homo sapiens
ttaaggtcttttaaa

SEQ ID NO: 475841 - DNA, 15 bp, Homo sapiens
cttaaggtcttttaa

SEQ ID NO: 475842 - DNA, 15 bp, Homo sapiens
ccttaaggtctttta

SEQ ID NO: 475843 - DNA, 15 bp, Homo sapiens
gccttaaggtctttt

SEQ ID NO: 475844 - DNA, 15 bp, Homo sapiens
agccttaaggtcttt

SEQ ID NO: 475845 - DNA, 15 bp, Homo sapiens
aagccttaaggtctt

SEQ ID NO: 475846 - DNA, 15 bp, Homo sapiens
gaagccttaaggtct

SEQ ID NO: 475847 - DNA, 15 bp, Homo sapiens
cgaagccttaaggtc

SEQ ID NO: 475848 - DNA, 15 bp, Homo sapiens
acgaagccttaaggt

SEQ ID NO: 475849 - DNA, 15 bp, Homo sapiens
aacgaagccttaagg

SEQ ID NO: 475850 - DNA, 15 bp, Homo sapiens
caacgaagccttaag

SEQ ID NO: 475851 - DNA, 15 bp, Homo sapiens
acaacgaagccttaa

SEQ ID NO: 475852 - DNA, 15 bp, Homo sapiens
aacaacgaagcctta

SEQ ID NO: 475853 - DNA, 15 bp, Homo sapiens
aaacaacgaagcctt

SEQ ID NO: 475854 - DNA, 15 bp, Homo sapiens
caaacaacgaagcct

SEQ ID NO: 475855 - DNA, 15 bp, Homo sapiens
acaaacaacgaagcc

SEQ ID NO: 475856 - DNA, 15 bp, Homo sapiens
aacaaacaacgaagc

SEQ ID NO: 475857 - DNA, 15 bp, Homo sapiens
taacaaacaacgaag

SEQ ID NO: 475858 - DNA, 15 bp, Homo sapiens
ataacaaacaacgaa

SEQ ID NO: 475859 - DNA, 15 bp, Homo sapiens
cataacaaacaacga

SEQ ID NO: 475860 - DNA, 15 bp, Homo sapiens
gcataacaaacaacg

SEQ ID NO: 475861 - DNA, 15 bp, Homo sapiens
tgcataacaaacaac

SEQ ID NO: 475862 - DNA, 15 bp, Homo sapiens
atgcataacaaacaa

SEQ ID NO: 475863 - DNA, 15 bp, Homo sapiens
tatgcataacaaaca

SEQ ID NO: 475864 - DNA, 15 bp, Homo sapiens
atatgcataacaaac

SEQ ID NO: 475865 - DNA, 15 bp, Homo sapiens
aatatgcataacaaa

SEQ ID NO: 475866 - DNA, 15 bp, Homo sapiens
caatatgcataacaa

SEQ ID NO: 475867 - DNA, 15 bp, Homo sapiens
acaatatgcataaca

SEQ ID NO: 475868 - DNA, 15 bp, Homo sapiens
cacaatatgcataac

SEQ ID NO: 475869 - DNA, 15 bp, Homo sapiens
ccacaatatgcataa

SEQ ID NO: 475870 - DNA, 15 bp, Homo sapiens
tccacaatatgcata

SEQ ID NO: 475871 - DNA, 15 bp, Homo sapiens
ttccacaatatgcat

SEQ ID NO: 475872 - DNA, 15 bp, Homo sapiens
attccacaatatgca

SEQ ID NO: 475873 - DNA, 15 bp, Homo sapiens
gattccacaatatgc

SEQ ID NO: 475874 - DNA, 15 bp, Homo sapiens
tgattccacaatatg

SEQ ID NO: 475875 - DNA, 15 bp, Homo sapiens
ttgattccacaatat

SEQ ID NO: 475876 - DNA, 15 bp, Homo sapiens
tttgattccacaata

SEQ ID NO: 475877 - DNA, 15 bp, Homo sapiens
gtttgattccacaat

SEQ ID NO: 475878 - DNA, 15 bp, Homo sapiens
agtttgattccacaa

SEQ ID NO: 475879 - DNA, 15 bp, Homo sapiens
gagtttgattccaca

SEQ ID NO: 475880 - DNA, 15 bp, Homo sapiens
tgagtttgattccac

SEQ ID NO: 475881 - DNA, 15 bp, Homo sapiens
gtgagtttgattcca

SEQ ID NO: 475882 - DNA, 15 bp, Homo sapiens
ggtgagtttgattcc

SEQ ID NO: 475883 - DNA, 15 bp, Homo sapiens
tggtgagtttgattc

SEQ ID NO: 475884 - DNA, 15 bp, Homo sapiens
gtggtgagtttgatt

SEQ ID NO: 475885 - DNA, 15 bp, Homo sapiens
ggtggtgagtttgat

SEQ ID NO: 475886 - DNA, 15 bp, Homo sapiens
tggtggtgagtttga

SEQ ID NO: 475887 - DNA, 15 bp, Homo sapiens
atggtggtgagtttg

SEQ ID NO: 475888 - DNA, 15 bp, Homo sapiens
gatggtggtgagttt

SEQ ID NO: 475889 - DNA, 15 bp, Homo sapiens
agatggtggtgagtt

SEQ ID NO: 475890 - DNA, 15 bp, Homo sapiens
cagatggtggtgagt

SEQ ID NO: 475891 - DNA, 15 bp, Homo sapiens
acagatggtggtgag

SEQ ID NO: 475892 - DNA, 15 bp, Homo sapiens
aacagatggtggtga

SEQ ID NO: 475893 - DNA, 15 bp, Homo sapiens
taacagatggtggtg

SEQ ID NO: 475894 - DNA, 15 bp, Homo sapiens
ttaacagatggtggt

SEQ ID NO: 475895 - DNA, 15 bp, Homo sapiens
tttaacagatggtgg

SEQ ID NO: 475896 - DNA, 15 bp, Homo sapiens
ttttaacagatggtg

SEQ ID NO: 475897 - DNA, 15 bp, Homo sapiens
tttttaacagatggt

SEQ ID NO: 475898 - DNA, 15 bp, Homo sapiens
atttttaacagatgg

SEQ ID NO: 475899 - DNA, 15 bp, Homo sapiens
aatttttaacagatg

SEQ ID NO: 475900 - DNA, 15 bp, Homo sapiens
taatttttaacagat

SEQ ID NO: 475901 - DNA, 15 bp, Homo sapiens
ttaatttttaacaga

SEQ ID NO: 475902 - DNA, 15 bp, Homo sapiens
cttaatttttaacag

SEQ ID NO: 475903 - DNA, 15 bp, Homo sapiens
ccttaatttttaaca

SEQ ID NO: 475904 - DNA, 15 bp, Homo sapiens
tccttaatttttaac

SEQ ID NO: 475905 - DNA, 15 bp, Homo sapiens
gtccttaatttttaa

SEQ ID NO: 475906 - DNA, 15 bp, Homo sapiens
tgtccttaattttta

SEQ ID NO: 475907 - DNA, 15 bp, Homo sapiens
atgtccttaattttt

SEQ ID NO: 475908 - DNA, 15 bp, Homo sapiens
aatgtccttaatttt

SEQ ID NO: 475909 - DNA, 15 bp, Homo sapiens
taatgtccttaattt

SEQ ID NO: 475910 - DNA, 15 bp, Homo sapiens
ctaatgtccttaatt

SEQ ID NO: 475911 - DNA, 15 bp, Homo sapiens
actaatgtccttaat

SEQ ID NO: 475912 - DNA, 15 bp, Homo sapiens
aactaatgtccttaa

SEQ ID NO: 475913 - DNA, 15 bp, Homo sapiens
aaactaatgtcctta

SEQ ID NO: 475914 - DNA, 15 bp, Homo sapiens
aaaactaatgtcctt

SEQ ID NO: 475915 - DNA, 15 bp, Homo sapiens
aaaaactaatgtcct

SEQ ID NO: 475916 - DNA, 15 bp, Homo sapiens
taaaaactaatgtcc

SEQ ID NO: 475917 - DNA, 15 bp, Homo sapiens
ttaaaaactaatgtc

SEQ ID NO: 475918 - DNA, 15 bp, Homo sapiens
tttaaaaactaatgt

SEQ ID NO: 475919 - DNA, 15 bp, Homo sapiens
ttttaaaaactaatg

SEQ ID NO: 475920 - DNA, 15 bp, Homo sapiens
gttttaaaaactaat

SEQ ID NO: 475921 - DNA, 15 bp, Homo sapiens
tgttttaaaaactaa

SEQ ID NO: 475922 - DNA, 15 bp, Homo sapiens
ctgttttaaaaacta

SEQ ID NO: 475923 - DNA, 15 bp, Homo sapiens
gctgttttaaaaact

SEQ ID NO: 475924 - DNA, 15 bp, Homo sapiens
tgctgttttaaaaac

SEQ ID NO: 475925 - DNA, 15 bp, Homo sapiens
atgctgttttaaaaa

SEQ ID NO: 475926 - DNA, 15 bp, Homo sapiens
aatgctgttttaaaa

SEQ ID NO: 475927 - DNA, 15 bp, Homo sapiens
aaatgctgttttaaa

SEQ ID NO: 475928 - DNA, 15 bp, Homo sapiens
aaaatgctgttttaa

SEQ ID NO: 475929 - DNA, 15 bp, Homo sapiens
aaaaatgctgtttta

SEQ ID NO: 475930 - DNA, 15 bp, Homo sapiens
gaaaaatgctgtttt

SEQ ID NO: 475931 - DNA, 15 bp, Homo sapiens
agaaaaatgctgttt

SEQ ID NO: 475932 - DNA, 15 bp, Homo sapiens
cagaaaaatgctgtt

SEQ ID NO: 475933 - DNA, 15 bp, Homo sapiens
gcagaaaaatgctgt

SEQ ID NO: 475934 - DNA, 15 bp, Homo sapiens
tgcagaaaaatgctg

SEQ ID NO: 475935 - DNA, 15 bp, Homo sapiens
atgcagaaaaatgct

SEQ ID NO: 475936 - DNA, 15 bp, Homo sapiens
aatgcagaaaaatgc

SEQ ID NO: 475937 - DNA, 15 bp, Homo sapiens
gaatgcagaaaaatg

SEQ ID NO: 475938 - DNA, 15 bp, Homo sapiens
ggaatgcagaaaaat

SEQ ID NO: 475939 - DNA, 15 bp, Homo sapiens
aggaatgcagaaaaa

SEQ ID NO: 475940 - DNA, 15 bp, Homo sapiens
aaggaatgcagaaaa

SEQ ID NO: 475941 - DNA, 15 bp, Homo sapiens
taaggaatgcagaaa

SEQ ID NO: 475942 - DNA, 15 bp, Homo sapiens
ataaggaatgcagaa

SEQ ID NO: 475943 - DNA, 15 bp, Homo sapiens
cataaggaatgcaga

SEQ ID NO: 475944 - DNA, 15 bp, Homo sapiens
acataaggaatgcag

SEQ ID NO: 475945 - DNA, 15 bp, Homo sapiens
aacataaggaatgca

SEQ ID NO: 475946 - DNA, 15 bp, Homo sapiens
caacataaggaatgc

SEQ ID NO: 475947 - DNA, 15 bp, Homo sapiens
acaacataaggaatg

SEQ ID NO: 475948 - DNA, 15 bp, Homo sapiens
tacaacataaggaat

SEQ ID NO: 475949 - DNA, 15 bp, Homo sapiens
ttacaacataaggaa

SEQ ID NO: 475950 - DNA, 15 bp, Homo sapiens
attacaacataagga

SEQ ID NO: 475951 - DNA, 15 bp, Homo sapiens
aattacaacataagg

SEQ ID NO: 475952 - DNA, 15 bp, Homo sapiens
taattacaacataag

SEQ ID NO: 475953 - DNA, 15 bp, Homo sapiens
ttaattacaacataa

SEQ ID NO: 475954 - DNA, 15 bp, Homo sapiens
cttaattacaacata

SEQ ID NO: 475955 - DNA, 15 bp, Homo sapiens
tcttaattacaacat

SEQ ID NO: 475956 - DNA, 15 bp, Homo sapiens
ctcttaattacaaca

SEQ ID NO: 475957 - DNA, 15 bp, Homo sapiens
tctcttaattacaac

SEQ ID NO: 475958 - DNA, 15 bp, Homo sapiens
ttctcttaattacaa

SEQ ID NO: 475959 - DNA, 15 bp, Homo sapiens
tttctcttaattaca

SEQ ID NO: 475960 - DNA, 15 bp, Homo sapiens
ctttctcttaattac

SEQ ID NO: 475961 - DNA, 15 bp, Homo sapiens
tctttctcttaatta

SEQ ID NO: 475962 - DNA, 15 bp, Homo sapiens
atctttctcttaatt

SEQ ID NO: 475963 - DNA, 15 bp, Homo sapiens
tatctttctcttaat

SEQ ID NO: 475964 - DNA, 15 bp, Homo sapiens
atatctttctcttaa

SEQ ID NO: 475965 - DNA, 15 bp, Homo sapiens
tatatctttctctta

SEQ ID NO: 475966 - DNA, 15 bp, Homo sapiens
atatatctttctctt

SEQ ID NO: 475967 - DNA, 15 bp, Homo sapiens
tatatatctttctct

SEQ ID NO: 475968 - DNA, 15 bp, Homo sapiens
ctatatatctttctc

SEQ ID NO: 475969 - DNA, 15 bp, Homo sapiens
cctatatatctttct

SEQ ID NO: 475970 - DNA, 15 bp, Homo sapiens
tcctatatatctttc

SEQ ID NO: 475971 - DNA, 15 bp, Homo sapiens
ctcctatatatcttt

SEQ ID NO: 475972 - DNA, 15 bp, Homo sapiens
tctcctatatatctt

SEQ ID NO: 475973 - DNA, 15 bp, Homo sapiens
ctctcctatatatct

SEQ ID NO: 475974 - DNA, 15 bp, Homo sapiens
tctctcctatatatc

SEQ ID NO: 475975 - DNA, 15 bp, Homo sapiens
atctctcctatatat

SEQ ID NO: 475976 - DNA, 15 bp, Homo sapiens
aatctctcctatata

SEQ ID NO: 475977 - DNA, 15 bp, Homo sapiens
taatctctcctatat

SEQ ID NO: 475978 - DNA, 15 bp, Homo sapiens
ataatctctcctata

SEQ ID NO: 475979 - DNA, 15 bp, Homo sapiens
aataatctctcctat

SEQ ID NO: 475980 - DNA, 15 bp, Homo sapiens
gaataatctctccta

SEQ ID NO: 475981 - DNA, 15 bp, Homo sapiens
ggaataatctctcct

SEQ ID NO: 475982 - DNA, 15 bp, Homo sapiens
aggaataatctctcc

SEQ ID NO: 475983 - DNA, 15 bp, Homo sapiens
gaggaataatctctc

SEQ ID NO: 475984 - DNA, 15 bp, Homo sapiens
tgaggaataatctct

SEQ ID NO: 475985 - DNA, 15 bp, Homo sapiens
gtgaggaataatctc

SEQ ID NO: 475986 - DNA, 15 bp, Homo sapiens
agtgaggaataatct

SEQ ID NO: 475987 - DNA, 15 bp, Homo sapiens
aagtgaggaataatc

SEQ ID NO: 475988 - DNA, 15 bp, Homo sapiens
aaagtgaggaataat

SEQ ID NO: 475989 - DNA, 15 bp, Homo sapiens
aaaagtgaggaataa

SEQ ID NO: 475990 - DNA, 15 bp, Homo sapiens
aaaaagtgaggaata

SEQ ID NO: 475991 - DNA, 15 bp, Homo sapiens
aaaaaagtgaggaat

SEQ ID NO: 475992 - DNA, 15 bp, Homo sapiens
aaaaaaagtgaggaa

SEQ ID NO: 475993 - DNA, 15 bp, Homo sapiens
aaaaaaaagtgagga

SEQ ID NO: 475994 - DNA, 15 bp, Homo sapiens
aaaaaaaaagtgagg

SEQ ID NO: 475995 - DNA, 15 bp, Homo sapiens
aaaaaaaaaagtgag

SEQ ID NO: 475996 - DNA, 15 bp, Homo sapiens
aaaaaaaaaaagtga

SEQ ID NO: 475997 - DNA, 15 bp, Homo sapiens
caaaaaaaaaaagtg

SEQ ID NO: 475998 - DNA, 15 bp, Homo sapiens
tcaaaaaaaaaaagt

SEQ ID NO: 475999 - DNA, 15 bp, Homo sapiens
ctcaaaaaaaaaaag

SEQ ID NO: 476000 - DNA, 15 bp, Homo sapiens
tctcaaaaaaaaaaa

SEQ ID NO: 476001 - DNA, 15 bp, Homo sapiens
gtctcaaaaaaaaaa

SEQ ID NO: 476002 - DNA, 15 bp, Homo sapiens
tgtctcaaaaaaaaa

SEQ ID NO: 476003 - DNA, 15 bp, Homo sapiens
ttgtctcaaaaaaaa

SEQ ID NO: 476004 - DNA, 15 bp, Homo sapiens
cttgtctcaaaaaaa

SEQ ID NO: 476005 - DNA, 15 bp, Homo sapiens
ccttgtctcaaaaaa

SEQ ID NO: 476006 - DNA, 15 bp, Homo sapiens
accttgtctcaaaaa

SEQ ID NO: 476007 - DNA, 15 bp, Homo sapiens
gaccttgtctcaaaa

SEQ ID NO: 476008 - DNA, 15 bp, Homo sapiens
agaccttgtctcaaa

SEQ ID NO: 476009 - DNA, 15 bp, Homo sapiens
aagaccttgtctcaa

SEQ ID NO: 476010 - DNA, 15 bp, Homo sapiens
caagaccttgtctca

SEQ ID NO: 476011 - DNA, 15 bp, Homo sapiens
gcaagaccttgtctc

SEQ ID NO: 476012 - DNA, 15 bp, Homo sapiens
agcaagaccttgtct

SEQ ID NO: 476013 - DNA, 15 bp, Homo sapiens
gagcaagaccttgtc

SEQ ID NO: 476014 - DNA, 15 bp, Homo sapiens
agagcaagaccttgt

SEQ ID NO: 476015 - DNA, 15 bp, Homo sapiens
cagagcaagaccttg

SEQ ID NO: 476016 - DNA, 15 bp, Homo sapiens
acagagcaagacctt

SEQ ID NO: 476017 - DNA, 15 bp, Homo sapiens
gacagagcaagacct

SEQ ID NO: 476018 - DNA, 15 bp, Homo sapiens
cgacagagcaagacc

SEQ ID NO: 476019 - DNA, 15 bp, Homo sapiens
gcgacagagcaagac

SEQ ID NO: 476020 - DNA, 15 bp, Homo sapiens
ggcgacagagcaaga

SEQ ID NO: 476021 - DNA, 15 bp, Homo sapiens
gggcgacagagcaag

SEQ ID NO: 476022 - DNA, 15 bp, Homo sapiens
tgggcgacagagcaa

SEQ ID NO: 476023 - DNA, 15 bp, Homo sapiens
gtgggcgacagagca

SEQ ID NO: 476024 - DNA, 15 bp, Homo sapiens
cgtgggcgacagagc

SEQ ID NO: 476025 - DNA, 15 bp, Homo sapiens
gcgtgggcgacagag

SEQ ID NO: 476026 - DNA, 15 bp, Homo sapiens
agcgtgggcgacaga

SEQ ID NO: 476027 - DNA, 15 bp, Homo sapiens
cagcgtgggcgacag

SEQ ID NO: 476028 - DNA, 15 bp, Homo sapiens
ccagcgtgggcgaca

SEQ ID NO: 476029 - DNA, 15 bp, Homo sapiens
tccagcgtgggcgac

SEQ ID NO: 476030 - DNA, 15 bp, Homo sapiens
ctccagcgtgggcga

SEQ ID NO: 476031 - DNA, 15 bp, Homo sapiens
actccagcgtgggcg

SEQ ID NO: 476032 - DNA, 15 bp, Homo sapiens
cactccagcgtgggc

SEQ ID NO: 476033 - DNA, 15 bp, Homo sapiens
gcactccagcgtggg

SEQ ID NO: 476034 - DNA, 15 bp, Homo sapiens
tgcactccagcgtgg

SEQ ID NO: 476035 - DNA, 15 bp, Homo sapiens
ctgcactccagcgtg

SEQ ID NO: 476036 - DNA, 15 bp, Homo sapiens
actgcactccagcgt

SEQ ID NO: 476037 - DNA, 15 bp, Homo sapiens
tactgcactccagcg

SEQ ID NO: 476038 - DNA, 15 bp, Homo sapiens
ctactgcactccagc

SEQ ID NO: 476039 - DNA, 15 bp, Homo sapiens
gctactgcactccag

SEQ ID NO: 476040 - DNA, 15 bp, Homo sapiens
agctactgcactcca

SEQ ID NO: 476041 - DNA, 15 bp, Homo sapiens
aagctactgcactcc

SEQ ID NO: 476042 - DNA, 15 bp, Homo sapiens
caagctactgcactc

SEQ ID NO: 476043 - DNA, 15 bp, Homo sapiens
tcaagctactgcact

SEQ ID NO: 476044 - DNA, 15 bp, Homo sapiens
atcaagctactgcac

SEQ ID NO: 476045 - DNA, 15 bp, Homo sapiens
catcaagctactgca

SEQ ID NO: 476046 - DNA, 15 bp, Homo sapiens
acatcaagctactgc

SEQ ID NO: 476047 - DNA, 15 bp, Homo sapiens
gacatcaagctactg

SEQ ID NO: 476048 - DNA, 15 bp, Homo sapiens
cgacatcaagctact

SEQ ID NO: 476049 - DNA, 15 bp, Homo sapiens
ccgacatcaagctac

SEQ ID NO: 476050 - DNA, 15 bp, Homo sapiens
accgacatcaagcta

SEQ ID NO: 476051 - DNA, 15 bp, Homo sapiens
aaccgacatcaagct

SEQ ID NO: 476052 - DNA, 15 bp, Homo sapiens
gaaccgacatcaagc

SEQ ID NO: 476053 - DNA, 15 bp, Homo sapiens
tgaaccgacatcaag

SEQ ID NO: 476054 - DNA, 15 bp, Homo sapiens
atgaaccgacatcaa

SEQ ID NO: 476055 - DNA, 15 bp, Homo sapiens
aatgaaccgacatca

SEQ ID NO: 476056 - DNA, 15 bp, Homo sapiens
caatgaaccgacatc

SEQ ID NO: 476057 - DNA, 15 bp, Homo sapiens
gcaatgaaccgacat

SEQ ID NO: 476058 - DNA, 15 bp, Homo sapiens
tgcaatgaaccgaca

SEQ ID NO: 476059 - DNA, 15 bp, Homo sapiens
ttgcaatgaaccgac

SEQ ID NO: 476060 - DNA, 15 bp, Homo sapiens
gttgcaatgaaccga

SEQ ID NO: 476061 - DNA, 15 bp, Homo sapiens
ggttgcaatgaaccg

SEQ ID NO: 476062 - DNA, 15 bp, Homo sapiens
gggttgcaatgaacc

SEQ ID NO: 476063 - DNA, 15 bp, Homo sapiens
ggggttgcaatgaac

SEQ ID NO: 476064 - DNA, 15 bp, Homo sapiens
aggggttgcaatgaa

SEQ ID NO: 476065 - DNA, 15 bp, Homo sapiens
caggggttgcaatga

SEQ ID NO: 476066 - DNA, 15 bp, Homo sapiens
gcaggggttgcaatg

SEQ ID NO: 476067 - DNA, 15 bp, Homo sapiens
agcaggggttgcaat

SEQ ID NO: 476068 - DNA, 15 bp, Homo sapiens
aagcaggggttgcaa

SEQ ID NO: 476069 - DNA, 15 bp, Homo sapiens
gaagcaggggttgca

SEQ ID NO: 476070 - DNA, 15 bp, Homo sapiens
ggaagcaggggttgc

SEQ ID NO: 476071 - DNA, 15 bp, Homo sapiens
gggaagcaggggttg

SEQ ID NO: 476072 - DNA, 15 bp, Homo sapiens
tgggaagcaggggtt

SEQ ID NO: 476073 - DNA, 15 bp, Homo sapiens
gtgggaagcaggggt

SEQ ID NO: 476074 - DNA, 15 bp, Homo sapiens
tgtgggaagcagggg

SEQ ID NO: 476075 - DNA, 15 bp, Homo sapiens
atgtgggaagcaggg

SEQ ID NO: 476076 - DNA, 15 bp, Homo sapiens
aatgtgggaagcagg

SEQ ID NO: 476077 - DNA, 15 bp, Homo sapiens
gaatgtgggaagcag

SEQ ID NO: 476078 - DNA, 15 bp, Homo sapiens
tgaatgtgggaagca

SEQ ID NO: 476079 - DNA, 15 bp, Homo sapiens
gtgaatgtgggaagc

SEQ ID NO: 476080 - DNA, 15 bp, Homo sapiens
cgtgaatgtgggaag

SEQ ID NO: 476081 - DNA, 15 bp, Homo sapiens
acgtgaatgtgggaa

SEQ ID NO: 476082 - DNA, 15 bp, Homo sapiens
cacgtgaatgtggga

SEQ ID NO: 476083 - DNA, 15 bp, Homo sapiens
tcacgtgaatgtggg

SEQ ID NO: 476084 - DNA, 15 bp, Homo sapiens
atcacgtgaatgtgg

SEQ ID NO: 476085 - DNA, 15 bp, Homo sapiens
aatcacgtgaatgtg

SEQ ID NO: 476086 - DNA, 15 bp, Homo sapiens
gaatcacgtgaatgt

SEQ ID NO: 476087 - DNA, 15 bp, Homo sapiens
agaatcacgtgaatg

SEQ ID NO: 476088 - DNA, 15 bp, Homo sapiens
gagaatcacgtgaat

SEQ ID NO: 476089 - DNA, 15 bp, Homo sapiens
ggagaatcacgtgaa

SEQ ID NO: 476090 - DNA, 15 bp, Homo sapiens
aggagaatcacgtga

SEQ ID NO: 476091 - DNA, 15 bp, Homo sapiens
caggagaatcacgtg

SEQ ID NO: 476092 - DNA, 15 bp, Homo sapiens
gcaggagaatcacgt

SEQ ID NO: 476093 - DNA, 15 bp, Homo sapiens
agcaggagaatcacg

SEQ ID NO: 476094 - DNA, 15 bp, Homo sapiens
aagcaggagaatcac

SEQ ID NO: 476095 - DNA, 15 bp, Homo sapiens
gaagcaggagaatca

SEQ ID NO: 476096 - DNA, 15 bp, Homo sapiens
tgaagcaggagaatc

SEQ ID NO: 476097 - DNA, 15 bp, Homo sapiens
ctgaagcaggagaat

SEQ ID NO: 476098 - DNA, 15 bp, Homo sapiens
actgaagcaggagaa

SEQ ID NO: 476099 - DNA, 15 bp, Homo sapiens
gactgaagcaggaga

SEQ ID NO: 476100 - DNA, 15 bp, Homo sapiens
agactgaagcaggag

SEQ ID NO: 476101 - DNA, 15 bp, Homo sapiens
gagactgaagcagga

SEQ ID NO: 476102 - DNA, 15 bp, Homo sapiens
ggagactgaagcagg

SEQ ID NO: 476103 - DNA, 15 bp, Homo sapiens
gggagactgaagcag

SEQ ID NO: 476104 - DNA, 15 bp, Homo sapiens
tgggagactgaagca

SEQ ID NO: 476105 - DNA, 15 bp, Homo sapiens
ttgggagactgaagc

SEQ ID NO: 476106 - DNA, 15 bp, Homo sapiens
cttgggagactgaag

SEQ ID NO: 476107 - DNA, 15 bp, Homo sapiens
acttgggagactgaa

SEQ ID NO: 476108 - DNA, 15 bp, Homo sapiens
tacttgggagactga

SEQ ID NO: 476109 - DNA, 15 bp, Homo sapiens
ctacttgggagactg

SEQ ID NO: 476110 - DNA, 15 bp, Homo sapiens
gctacttgggagact

SEQ ID NO: 476111 - DNA, 15 bp, Homo sapiens
agctacttgggagac

SEQ ID NO: 476112 - DNA, 15 bp, Homo sapiens
cagctacttgggaga

SEQ ID NO: 476113 - DNA, 15 bp, Homo sapiens
ccagctacttgggag

SEQ ID NO: 476114 - DNA, 15 bp, Homo sapiens
cccagctacttggga

SEQ ID NO: 476115 - DNA, 15 bp, Homo sapiens
tcccagctacttggg

SEQ ID NO: 476116 - DNA, 15 bp, Homo sapiens
atcccagctacttgg

SEQ ID NO: 476117 - DNA, 15 bp, Homo sapiens
aatcccagctacttg

SEQ ID NO: 476118 - DNA, 15 bp, Homo sapiens
taatcccagctactt

SEQ ID NO: 476119 - DNA, 15 bp, Homo sapiens
gtaatcccagctact

SEQ ID NO: 476120 - DNA, 15 bp, Homo sapiens
tgtaatcccagctac

SEQ ID NO: 476121 - DNA, 15 bp, Homo sapiens
ctgtaatcccagcta

SEQ ID NO: 476122 - DNA, 15 bp, Homo sapiens
cctgtaatcccagct

SEQ ID NO: 476123 - DNA, 15 bp, Homo sapiens
cacctgtaatcccag

SEQ ID NO: 476124 - DNA, 15 bp, Homo sapiens
acacctgtaatccca

SEQ ID NO: 476125 - DNA, 15 bp, Homo sapiens
cacacctgtaatccc

SEQ ID NO: 476126 - DNA, 15 bp, Homo sapiens
gcacacctgtaatcc

SEQ ID NO: 476127 - DNA, 15 bp, Homo sapiens
tgcacacctgtaatc

SEQ ID NO: 476128 - DNA, 15 bp, Homo sapiens
gtgcacacctgtaat

SEQ ID NO: 476129 - DNA, 15 bp, Homo sapiens
ggtgcacacctgtaa

SEQ ID NO: 476130 - DNA, 15 bp, Homo sapiens
tggtgcacacctgta

SEQ ID NO: 476131 - DNA, 15 bp, Homo sapiens
atggtgcacacctgt

SEQ ID NO: 476132 - DNA, 15 bp, Homo sapiens
gatggtgcacacctg

SEQ ID NO: 476133 - DNA, 15 bp, Homo sapiens
cgatggtgcacacct

SEQ ID NO: 476134 - DNA, 15 bp, Homo sapiens
acgatggtgcacacc

SEQ ID NO: 476135 - DNA, 15 bp, Homo sapiens
cacgatggtgcacac

SEQ ID NO: 476136 - DNA, 15 bp, Homo sapiens
gcacgatggtgcaca

SEQ ID NO: 476137 - DNA, 15 bp, Homo sapiens
ggcacgatggtgcac

SEQ ID NO: 476138 - DNA, 15 bp, Homo sapiens
aggcacgatggtgca

SEQ ID NO: 476139 - DNA, 15 bp, Homo sapiens
caggcacgatggtgc

SEQ ID NO: 476140 - DNA, 15 bp, Homo sapiens
ccaggcacgatggtg

SEQ ID NO: 476141 - DNA, 15 bp, Homo sapiens
gccaggcacgatggt

SEQ ID NO: 476142 - DNA, 15 bp, Homo sapiens
agccaggcacgatgg

SEQ ID NO: 476143 - DNA, 15 bp, Homo sapiens
tagccaggcacgatg

SEQ ID NO: 476144 - DNA, 15 bp, Homo sapiens
ttagccaggcacgat

SEQ ID NO: 476145 - DNA, 15 bp, Homo sapiens
attagccaggcacga

SEQ ID NO: 476146 - DNA, 15 bp, Homo sapiens
aattagccaggcacg

SEQ ID NO: 476147 - DNA, 15 bp, Homo sapiens
aaattagccaggcac

SEQ ID NO: 476148 - DNA, 15 bp, Homo sapiens
caaaaattagccagg

SEQ ID NO: 476149 - DNA, 15 bp, Homo sapiens
acaaaaattagccag

SEQ ID NO: 476150 - DNA, 15 bp, Homo sapiens
tacaaaaattagcca

SEQ ID NO: 476151 - DNA, 15 bp, Homo sapiens
atacaaaaattagcc

SEQ ID NO: 476152 - DNA, 15 bp, Homo sapiens
aatacaaaaattagc

SEQ ID NO: 476153 - DNA, 15 bp, Homo sapiens
aaatacaaaaattag

SEQ ID NO: 476154 - DNA, 15 bp, Homo sapiens
aaaatacaaaaatta

SEQ ID NO: 476155 - DNA, 15 bp, Homo sapiens
aaaaatacaaaaatt

SEQ ID NO: 476156 - DNA, 15 bp, Homo sapiens
taaaaatacaaaaat

SEQ ID NO: 476157 - DNA, 15 bp, Homo sapiens
cgtctctactaaaaa

SEQ ID NO: 476158 - DNA, 15 bp, Homo sapiens
ccgtctctactaaaa

SEQ ID NO: 476159 - DNA, 15 bp, Homo sapiens
cccgtctctactaaa

SEQ ID NO: 476160 - DNA, 15 bp, Homo sapiens
ccccgtctctactaa

SEQ ID NO: 476161 - DNA, 15 bp, Homo sapiens
cccccgtctctacta

SEQ ID NO: 476162 - DNA, 15 bp, Homo sapiens
acccccgtctctact

SEQ ID NO: 476163 - DNA, 15 bp, Homo sapiens
aacccccgtctctac

SEQ ID NO: 476164 - DNA, 15 bp, Homo sapiens
aaacccccgtctcta

SEQ ID NO: 476165 - DNA, 15 bp, Homo sapiens
gaaacccccgtctct

SEQ ID NO: 476166 - DNA, 15 bp, Homo sapiens
tgaaacccccgtctc

SEQ ID NO: 476167 - DNA, 15 bp, Homo sapiens
gtgaaacccccgtct

SEQ ID NO: 476168 - DNA, 15 bp, Homo sapiens
ggtgaaacccccgtc

SEQ ID NO: 476169 - DNA, 15 bp, Homo sapiens
tggtgaaacccccgt

SEQ ID NO: 476170 - DNA, 15 bp, Homo sapiens
atggtgaaacccccg

SEQ ID NO: 476171 - DNA, 15 bp, Homo sapiens
catggtgaaaccccc

SEQ ID NO: 476172 - DNA, 15 bp, Homo sapiens
acatggtgaaacccc

SEQ ID NO: 476173 - DNA, 15 bp, Homo sapiens
caacatggtgaaacc

SEQ ID NO: 476174 - DNA, 15 bp, Homo sapiens
ccaacatggtgaaac

SEQ ID NO: 476175 - DNA, 15 bp, Homo sapiens
accaacatggtgaaa

SEQ ID NO: 476176 - DNA, 15 bp, Homo sapiens
gaccaacatggtgaa

SEQ ID NO: 476177 - DNA, 15 bp, Homo sapiens
tgaccaacatggtga

SEQ ID NO: 476178 - DNA, 15 bp, Homo sapiens
ctgaccaacatggtg

SEQ ID NO: 476179 - DNA, 15 bp, Homo sapiens
ggagttcaagaccag

SEQ ID NO: 476180 - DNA, 15 bp, Homo sapiens
aggagttcaagacca

SEQ ID NO: 476181 - DNA, 15 bp, Homo sapiens
caggagttcaagacc

SEQ ID NO: 476182 - DNA, 15 bp, Homo sapiens
tcaggagttcaagac

SEQ ID NO: 476183 - DNA, 15 bp, Homo sapiens
gtcaggagttcaaga

SEQ ID NO: 476184 - DNA, 15 bp, Homo sapiens
ggtcaggagttcaag

SEQ ID NO: 476185 - DNA, 15 bp, Homo sapiens
aggtcaggagttcaa

SEQ ID NO: 476186 - DNA, 15 bp, Homo sapiens
gaggtcaggagttca

SEQ ID NO: 476187 - DNA, 15 bp, Homo sapiens
tgaggtcaggagttc

SEQ ID NO: 476188 - DNA, 15 bp, Homo sapiens
gggcagatcacctga

SEQ ID NO: 476189 - DNA, 15 bp, Homo sapiens
ggggcagatcacctg

SEQ ID NO: 476190 - DNA, 15 bp, Homo sapiens
gggggcagatcacct

SEQ ID NO: 476191 - DNA, 15 bp, Homo sapiens
ggggggcagatcacc

SEQ ID NO: 476192 - DNA, 15 bp, Homo sapiens
tggggggcagatcac

SEQ ID NO: 476193 - DNA, 15 bp, Homo sapiens
gtggggggcagatca

SEQ ID NO: 476194 - DNA, 15 bp, Homo sapiens
ggtggggggcagatc

SEQ ID NO: 476195 - DNA, 15 bp, Homo sapiens
gggtggggggcagat

SEQ ID NO: 476196 - DNA, 15 bp, Homo sapiens
ggggtggggggcaga

SEQ ID NO: 476197 - DNA, 15 bp, Homo sapiens
gggggtggggggcag

SEQ ID NO: 476198 - DNA, 15 bp, Homo sapiens
agggggtggggggca

SEQ ID NO: 476199 - DNA, 15 bp, Homo sapiens
cagggggtggggggc

SEQ ID NO: 476200 - DNA, 15 bp, Homo sapiens
gcagggggtgggggg

SEQ ID NO: 476201 - DNA, 15 bp, Homo sapiens
agcagggggtggggg

SEQ ID NO: 476202 - DNA, 15 bp, Homo sapiens
gagcagggggtgggg

SEQ ID NO: 476203 - DNA, 15 bp, Homo sapiens
cgagcagggggtggg

SEQ ID NO: 476204 - DNA, 15 bp, Homo sapiens
ccgagcagggggtgg

SEQ ID NO: 476205 - DNA, 15 bp, Homo sapiens
gccgagcagggggtg

SEQ ID NO: 476206 - DNA, 15 bp, Homo sapiens
ggccgagcagggggt

SEQ ID NO: 476207 - DNA, 15 bp, Homo sapiens
aggccgagcaggggg

SEQ ID NO: 476208 - DNA, 15 bp, Homo sapiens
gaggccgagcagggg

SEQ ID NO: 476209 - DNA, 15 bp, Homo sapiens
ggaggccgagcaggg

SEQ ID NO: 476210 - DNA, 15 bp, Homo sapiens
gggaggccgagcagg

SEQ ID NO: 476211 - DNA, 15 bp, Homo sapiens
cgggaggccgagcag

SEQ ID NO: 476212 - DNA, 15 bp, Homo sapiens
tcgggaggccgagca

SEQ ID NO: 476213 - DNA, 15 bp, Homo sapiens
ttcgggaggccgagc

SEQ ID NO: 476214 - DNA, 15 bp, Homo sapiens
cttcgggaggccgag

SEQ ID NO: 476215 - DNA, 15 bp, Homo sapiens
acttcgggaggccga

SEQ ID NO: 476216 - DNA, 15 bp, Homo sapiens
cacttcgggaggccg

SEQ ID NO: 476217 - DNA, 15 bp, Homo sapiens
gcacttcgggaggcc

SEQ ID NO: 476218 - DNA, 15 bp, Homo sapiens
agcacttcgggaggc

SEQ ID NO: 476219 - DNA, 15 bp, Homo sapiens
cagcacttcgggagg

SEQ ID NO: 476220 - DNA, 15 bp, Homo sapiens
ccagcacttcgggag

SEQ ID NO: 476221 - DNA, 15 bp, Homo sapiens
cccagcacttcggga

SEQ ID NO: 476222 - DNA, 15 bp, Homo sapiens
tcccagcacttcggg

SEQ ID NO: 476223 - DNA, 15 bp, Homo sapiens
atcccagcacttcgg

SEQ ID NO: 476224 - DNA, 15 bp, Homo sapiens
aatcccagcacttcg

SEQ ID NO: 476225 - DNA, 15 bp, Homo sapiens
taatcccagcacttc

SEQ ID NO: 476226 - DNA, 15 bp, Homo sapiens
agtggctcatgcctg

SEQ ID NO: 476227 - DNA, 15 bp, Homo sapiens
cagtggctcatgcct

SEQ ID NO: 476228 - DNA, 15 bp, Homo sapiens
acagtggctcatgcc

SEQ ID NO: 476229 - DNA, 15 bp, Homo sapiens
cacagtggctcatgc

SEQ ID NO: 476230 - DNA, 15 bp, Homo sapiens
gcacagtggctcatg

SEQ ID NO: 476231 - DNA, 15 bp, Homo sapiens
ggcacagtggctcat

SEQ ID NO: 476232 - DNA, 15 bp, Homo sapiens
aggcacagtggctca

SEQ ID NO: 476233 - DNA, 15 bp, Homo sapiens
caggcacagtggctc

SEQ ID NO: 476234 - DNA, 15 bp, Homo sapiens
ccaggcacagtggct

SEQ ID NO: 476235 - DNA, 15 bp, Homo sapiens
gccaggcacagtggc

SEQ ID NO: 476236 - DNA, 15 bp, Homo sapiens
ggccaggcacagtgg

SEQ ID NO: 476237 - DNA, 15 bp, Homo sapiens
aggccaggcacagtg

SEQ ID NO: 476238 - DNA, 15 bp, Homo sapiens
taggccaggcacagt

SEQ ID NO: 476239 - DNA, 15 bp, Homo sapiens
ataggccaggcacag

SEQ ID NO: 476240 - DNA, 15 bp, Homo sapiens
aataggccaggcaca

SEQ ID NO: 476241 - DNA, 15 bp, Homo sapiens
gaataggccaggcac

SEQ ID NO: 476242 - DNA, 15 bp, Homo sapiens
ggaataggccaggca

SEQ ID NO: 476243 - DNA, 15 bp, Homo sapiens
aggaataggccaggc

SEQ ID NO: 476244 - DNA, 15 bp, Homo sapiens
gaggaataggccagg

SEQ ID NO: 476245 - DNA, 15 bp, Homo sapiens
tgaggaataggccag

SEQ ID NO: 476246 - DNA, 15 bp, Homo sapiens
gtgaggaataggcca

SEQ ID NO: 476247 - DNA, 15 bp, Homo sapiens
tgtgaggaataggcc

SEQ ID NO: 476248 - DNA, 15 bp, Homo sapiens
atgtgaggaataggc

SEQ ID NO: 476249 - DNA, 15 bp, Homo sapiens
aatgtgaggaatagg

SEQ ID NO: 476250 - DNA, 15 bp, Homo sapiens
aaatgtgaggaatag

SEQ ID NO: 476251 - DNA, 15 bp, Homo sapiens
aaaatgtgaggaata

SEQ ID NO: 476252 - DNA, 15 bp, Homo sapiens
aaaaatgtgaggaat

SEQ ID NO: 476253 - DNA, 15 bp, Homo sapiens
gaaaaatgtgaggaa

SEQ ID NO: 476254 - DNA, 15 bp, Homo sapiens
agaaaaatgtgagga

SEQ ID NO: 476255 - DNA, 15 bp, Homo sapiens
gagaaaaatgtgagg

SEQ ID NO: 476256 - DNA, 15 bp, Homo sapiens
agagaaaaatgtgag

SEQ ID NO: 476257 - DNA, 15 bp, Homo sapiens
aagagaaaaatgtga

SEQ ID NO: 476258 - DNA, 15 bp, Homo sapiens
taagagaaaaatgtg

SEQ ID NO: 476259 - DNA, 15 bp, Homo sapiens
ctaagagaaaaatgt

SEQ ID NO: 476260 - DNA, 15 bp, Homo sapiens
tctaagagaaaaatg

SEQ ID NO: 476261 - DNA, 15 bp, Homo sapiens
ttctaagagaaaaat

SEQ ID NO: 476262 - DNA, 15 bp, Homo sapiens
tttctaagagaaaaa

SEQ ID NO: 476263 - DNA, 15 bp, Homo sapiens
ctttctaagagaaaa

SEQ ID NO: 476264 - DNA, 15 bp, Homo sapiens
actttctaagagaaa

SEQ ID NO: 476265 - DNA, 15 bp, Homo sapiens
aactttctaagagaa

SEQ ID NO: 476266 - DNA, 15 bp, Homo sapiens
taactttctaagaga

SEQ ID NO: 476267 - DNA, 15 bp, Homo sapiens
ttaactttctaagag

SEQ ID NO: 476268 - DNA, 15 bp, Homo sapiens
tttaactttctaaga

SEQ ID NO: 476269 - DNA, 15 bp, Homo sapiens
ctttaactttctaag

SEQ ID NO: 476270 - DNA, 15 bp, Homo sapiens
actttaactttctaa

SEQ ID NO: 476271 - DNA, 15 bp, Homo sapiens
gactttaactttcta

SEQ ID NO: 476272 - DNA, 15 bp, Homo sapiens
agactttaactttct

SEQ ID NO: 476273 - DNA, 15 bp, Homo sapiens
gagactttaactttc

SEQ ID NO: 476274 - DNA, 15 bp, Homo sapiens
agagactttaacttt

SEQ ID NO: 476275 - DNA, 15 bp, Homo sapiens
cagagactttaactt

SEQ ID NO: 476276 - DNA, 15 bp, Homo sapiens
tcagagactttaact

SEQ ID NO: 476277 - DNA, 15 bp, Homo sapiens
gtcagagactttaac

SEQ ID NO: 476278 - DNA, 15 bp, Homo sapiens
ggtcagagactttaa

SEQ ID NO: 476279 - DNA, 15 bp, Homo sapiens
aggtcagagacttta

SEQ ID NO: 476280 - DNA, 15 bp, Homo sapiens
aaggtcagagacttt

SEQ ID NO: 476281 - DNA, 15 bp, Homo sapiens
caaggtcagagactt

SEQ ID NO: 476282 - DNA, 15 bp, Homo sapiens
tcaaggtcagagact

SEQ ID NO: 476283 - DNA, 15 bp, Homo sapiens
ctcaaggtcagagac

SEQ ID NO: 476284 - DNA, 15 bp, Homo sapiens
tctcaaggtcagaga

SEQ ID NO: 476285 - DNA, 15 bp, Homo sapiens
atctcaaggtcagag

SEQ ID NO: 476286 - DNA, 15 bp, Homo sapiens
tatctcaaggtcaga

SEQ ID NO: 476287 - DNA, 15 bp, Homo sapiens
gacattttcaaccgt

SEQ ID NO: 476288 - DNA, 15 bp, Homo sapiens
agacattttcaaccg

SEQ ID NO: 476289 - DNA, 15 bp, Homo sapiens
aagacattttcaacc

SEQ ID NO: 476290 - DNA, 15 bp, Homo sapiens
aaagacattttcaac

SEQ ID NO: 476291 - DNA, 15 bp, Homo sapiens
aaaagacattttcaa

SEQ ID NO: 476292 - DNA, 15 bp, Homo sapiens
taaaagacattttca

SEQ ID NO: 476293 - DNA, 15 bp, Homo sapiens
ctaaaagacattttc

SEQ ID NO: 476294 - DNA, 15 bp, Homo sapiens
actaaaagacatttt

SEQ ID NO: 476295 - DNA, 15 bp, Homo sapiens
gactaaaagacattt

SEQ ID NO: 476296 - DNA, 15 bp, Homo sapiens
tgactaaaagacatt

SEQ ID NO: 476297 - DNA, 15 bp, Homo sapiens
ctgactaaaagacat

SEQ ID NO: 476298 - DNA, 15 bp, Homo sapiens
tctgactaaaagaca

SEQ ID NO: 476299 - DNA, 15 bp, Homo sapiens
ttctgactaaaagac

SEQ ID NO: 476300 - DNA, 15 bp, Homo sapiens
tttctgactaaaaga

SEQ ID NO: 476301 - DNA, 15 bp, Homo sapiens
ttttctgactaaaag

SEQ ID NO: 476302 - DNA, 15 bp, Homo sapiens
gttttctgactaaaa

SEQ ID NO: 476303 - DNA, 15 bp, Homo sapiens
agttttctgactaaa

SEQ ID NO: 476304 - DNA, 15 bp, Homo sapiens
cagttttctgactaa

SEQ ID NO: 476305 - DNA, 15 bp, Homo sapiens
tcagttttctgacta

SEQ ID NO: 476306 - DNA, 15 bp, Homo sapiens
ctcagttttctgact

SEQ ID NO: 476307 - DNA, 15 bp, Homo sapiens
cctcagttttctgac

SEQ ID NO: 476308 - DNA, 15 bp, Homo sapiens
gcctcagttttctga

SEQ ID NO: 476309 - DNA, 15 bp, Homo sapiens
tgcctcagttttctg

SEQ ID NO: 476310 - DNA, 15 bp, Homo sapiens
atgcctcagttttct

SEQ ID NO: 476311 - DNA, 15 bp, Homo sapiens
catgcctcagttttc

SEQ ID NO: 476312 - DNA, 15 bp, Homo sapiens
ccatgcctcagtttt

SEQ ID NO: 476313 - DNA, 15 bp, Homo sapiens
cccatgcctcagttt

SEQ ID NO: 476314 - DNA, 15 bp, Homo sapiens
tcccatgcctcagtt

SEQ ID NO: 476315 - DNA, 15 bp, Homo sapiens
ttcccatgcctcagt

SEQ ID NO: 476316 - DNA, 15 bp, Homo sapiens
cttcccatgcctcag

SEQ ID NO: 476317 - DNA, 15 bp, Homo sapiens
ccttcccatgcctca

SEQ ID NO: 476318 - DNA, 15 bp, Homo sapiens
accttcccatgcctc

SEQ ID NO: 476319 - DNA, 15 bp, Homo sapiens
aaccttcccatgcct

SEQ ID NO: 476320 - DNA, 15 bp, Homo sapiens
taaccttcccatgcc

SEQ ID NO: 476321 - DNA, 15 bp, Homo sapiens
ttaaccttcccatgc

SEQ ID NO: 476322 - DNA, 15 bp, Homo sapiens
cttaaccttcccatg

SEQ ID NO: 476323 - DNA, 15 bp, Homo sapiens
acttaaccttcccat

SEQ ID NO: 476324 - DNA, 15 bp, Homo sapiens
cacttaaccttccca

SEQ ID NO: 476325 - DNA, 15 bp, Homo sapiens
tcacttaaccttccc

SEQ ID NO: 476326 - DNA, 15 bp, Homo sapiens
gtcacttaaccttcc

SEQ ID NO: 476327 - DNA, 15 bp, Homo sapiens
tgtcacttaaccttc

SEQ ID NO: 476328 - DNA, 15 bp, Homo sapiens
atgtcacttaacctt

SEQ ID NO: 476329 - DNA, 15 bp, Homo sapiens
tatgtcacttaacct

SEQ ID NO: 476330 - DNA, 15 bp, Homo sapiens
ctatgtcacttaacc

SEQ ID NO: 476331 - DNA, 15 bp, Homo sapiens
tctatgtcacttaac

SEQ ID NO: 476332 - DNA, 15 bp, Homo sapiens
atctatgtcacttaa

SEQ ID NO: 476333 - DNA, 15 bp, Homo sapiens
gatctatgtcactta

SEQ ID NO: 476334 - DNA, 15 bp, Homo sapiens
agatctatgtcactt

SEQ ID NO: 476335 - DNA, 15 bp, Homo sapiens
tagatctatgtcact

SEQ ID NO: 476336 - DNA, 15 bp, Homo sapiens
ttagatctatgtcac

SEQ ID NO: 476337 - DNA, 15 bp, Homo sapiens
attagatctatgtca

SEQ ID NO: 476338 - DNA, 15 bp, Homo sapiens
tattagatctatgtc

SEQ ID NO: 476339 - DNA, 15 bp, Homo sapiens
ttattagatctatgt

SEQ ID NO: 476340 - DNA, 15 bp, Homo sapiens
cttattagatctatg

SEQ ID NO: 476341 - DNA, 15 bp, Homo sapiens
tcttattagatctat

SEQ ID NO: 476342 - DNA, 15 bp, Homo sapiens
ctcttattagatcta

SEQ ID NO: 476343 - DNA, 15 bp, Homo sapiens
gctcttattagatct

SEQ ID NO: 476344 - DNA, 15 bp, Homo sapiens
agctcttattagatc

SEQ ID NO: 476345 - DNA, 15 bp, Homo sapiens
aagctcttattagat

SEQ ID NO: 476346 - DNA, 15 bp, Homo sapiens
gaagctcttattaga

SEQ ID NO: 476347 - DNA, 15 bp, Homo sapiens
tgaagctcttattag

SEQ ID NO: 476348 - DNA, 15 bp, Homo sapiens
ctgaagctcttatta

SEQ ID NO: 476349 - DNA, 15 bp, Homo sapiens
actgaagctcttatt

SEQ ID NO: 476350 - DNA, 15 bp, Homo sapiens
tactgaagctcttat

SEQ ID NO: 476351 - DNA, 15 bp, Homo sapiens
atactgaagctctta

SEQ ID NO: 476352 - DNA, 15 bp, Homo sapiens
catactgaagctctt

SEQ ID NO: 476353 - DNA, 15 bp, Homo sapiens
tcatactgaagctct

SEQ ID NO: 476354 - DNA, 15 bp, Homo sapiens
ttcatactgaagctc

SEQ ID NO: 476355 - DNA, 15 bp, Homo sapiens
tttcatactgaagct

SEQ ID NO: 476356 - DNA, 15 bp, Homo sapiens
ttttcatactgaagc

SEQ ID NO: 476357 - DNA, 15 bp, Homo sapiens
cttttcatactgaag

SEQ ID NO: 476358 - DNA, 15 bp, Homo sapiens
acttttcatactgaa

SEQ ID NO: 476359 - DNA, 15 bp, Homo sapiens
tacttttcatactga

SEQ ID NO: 476360 - DNA, 15 bp, Homo sapiens
ctacttttcatactg

SEQ ID NO: 476361 - DNA, 15 bp, Homo sapiens
actacttttcatact

SEQ ID NO: 476362 - DNA, 15 bp, Homo sapiens
cactacttttcatac

SEQ ID NO: 476363 - DNA, 15 bp, Homo sapiens
tcactacttttcata

SEQ ID NO: 476364 - DNA, 15 bp, Homo sapiens
ttcactacttttcat

SEQ ID NO: 476365 - DNA, 15 bp, Homo sapiens
attcactacttttca

SEQ ID NO: 476366 - DNA, 15 bp, Homo sapiens
cattcactacttttc

SEQ ID NO: 476367 - DNA, 15 bp, Homo sapiens
gcattcactactttt

SEQ ID NO: 476368 - DNA, 15 bp, Homo sapiens
agcattcactacttt

SEQ ID NO: 476369 - DNA, 15 bp, Homo sapiens
aagcattcactactt

SEQ ID NO: 476370 - DNA, 15 bp, Homo sapiens
caagcattcactact

SEQ ID NO: 476371 - DNA, 15 bp, Homo sapiens
tcaagcattcactac

SEQ ID NO: 476372 - DNA, 15 bp, Homo sapiens
gtcaagcattcacta

SEQ ID NO: 476373 - DNA, 15 bp, Homo sapiens
ggtcaagcattcact

SEQ ID NO: 476374 - DNA, 15 bp, Homo sapiens
tggtcaagcattcac

SEQ ID NO: 476375 - DNA, 15 bp, Homo sapiens
atggtcaagcattca

SEQ ID NO: 476376 - DNA, 15 bp, Homo sapiens
gatggtcaagcattc

SEQ ID NO: 476377 - DNA, 15 bp, Homo sapiens
tgatggtcaagcatt

SEQ ID NO: 476378 - DNA, 15 bp, Homo sapiens
ctgatggtcaagcat

SEQ ID NO: 476379 - DNA, 15 bp, Homo sapiens
cctgatggtcaagca

SEQ ID NO: 476380 - DNA, 15 bp, Homo sapiens
ccctgatggtcaagc

SEQ ID NO: 476381 - DNA, 15 bp, Homo sapiens
tccctgatggtcaag

SEQ ID NO: 476382 - DNA, 15 bp, Homo sapiens
ctccctgatggtcaa

SEQ ID NO: 476383 - DNA, 15 bp, Homo sapiens
tctccctgatggtca

SEQ ID NO: 476384 - DNA, 15 bp, Homo sapiens
atctccctgatggtc

SEQ ID NO: 476385 - DNA, 15 bp, Homo sapiens
tatctccctgatggt

SEQ ID NO: 476386 - DNA, 15 bp, Homo sapiens
gtatctccctgatgg

SEQ ID NO: 476387 - DNA, 15 bp, Homo sapiens
agtatctccctgatg

SEQ ID NO: 476388 - DNA, 15 bp, Homo sapiens
aagtatctccctgat

SEQ ID NO: 476389 - DNA, 15 bp, Homo sapiens
aaagtatctccctga

SEQ ID NO: 476390 - DNA, 15 bp, Homo sapiens
aaaagtatctccctg

SEQ ID NO: 476391 - DNA, 15 bp, Homo sapiens
gaaaagtatctccct

SEQ ID NO: 476392 - DNA, 15 bp, Homo sapiens
ggaaaagtatctccc

SEQ ID NO: 476393 - DNA, 15 bp, Homo sapiens
aggaaaagtatctcc

SEQ ID NO: 476394 - DNA, 15 bp, Homo sapiens
taggaaaagtatctc

SEQ ID NO: 476395 - DNA, 15 bp, Homo sapiens
ttaggaaaagtatct

SEQ ID NO: 476396 - DNA, 15 bp, Homo sapiens
cttaggaaaagtatc

SEQ ID NO: 476397 - DNA, 15 bp, Homo sapiens
acttaggaaaagtat

SEQ ID NO: 476398 - DNA, 15 bp, Homo sapiens
tacttaggaaaagta

SEQ ID NO: 476399 - DNA, 15 bp, Homo sapiens
atacttaggaaaagt

SEQ ID NO: 476400 - DNA, 15 bp, Homo sapiens
gatacttaggaaaag

SEQ ID NO: 476401 - DNA, 15 bp, Homo sapiens
ggatacttaggaaaa

SEQ ID NO: 476402 - DNA, 15 bp, Homo sapiens
gggatacttaggaaa

SEQ ID NO: 476403 - DNA, 15 bp, Homo sapiens
tgggatacttaggaa

SEQ ID NO: 476404 - DNA, 15 bp, Homo sapiens
atgggatacttagga

SEQ ID NO: 476405 - DNA, 15 bp, Homo sapiens
tatgggatacttagg

SEQ ID NO: 476406 - DNA, 15 bp, Homo sapiens
ttatgggatacttag

SEQ ID NO: 476407 - DNA, 15 bp, Homo sapiens
tttatgggatactta

SEQ ID NO: 476408 - DNA, 15 bp, Homo sapiens
ttttatgggatactt

SEQ ID NO: 476409 - DNA, 15 bp, Homo sapiens
attttatgggatact

SEQ ID NO: 476410 - DNA, 15 bp, Homo sapiens
aattttatgggatac

SEQ ID NO: 476411 - DNA, 15 bp, Homo sapiens
aaattttatgggata

SEQ ID NO: 476412 - DNA, 15 bp, Homo sapiens
caaattttatgggat

SEQ ID NO: 476413 - DNA, 15 bp, Homo sapiens
acaaattttatggga

SEQ ID NO: 476414 - DNA, 15 bp, Homo sapiens
aacaaattttatggg

SEQ ID NO: 476415 - DNA, 15 bp, Homo sapiens
gaacaaattttatgg

SEQ ID NO: 476416 - DNA, 15 bp, Homo sapiens
agaacaaattttatg

SEQ ID NO: 476417 - DNA, 15 bp, Homo sapiens
tagaacaaattttat

SEQ ID NO: 476418 - DNA, 15 bp, Homo sapiens
ttagaacaaatttta

SEQ ID NO: 476419 - DNA, 15 bp, Homo sapiens
attagaacaaatttt

SEQ ID NO: 476420 - DNA, 15 bp, Homo sapiens
gattagaacaaattt

SEQ ID NO: 476421 - DNA, 15 bp, Homo sapiens
ggattagaacaaatt

SEQ ID NO: 476422 - DNA, 15 bp, Homo sapiens
tggattagaacaaat

SEQ ID NO: 476423 - DNA, 15 bp, Homo sapiens
atggattagaacaaa

SEQ ID NO: 476424 - DNA, 15 bp, Homo sapiens
aatggattagaacaa

SEQ ID NO: 476425 - DNA, 15 bp, Homo sapiens
taatggattagaaca

SEQ ID NO: 476426 - DNA, 15 bp, Homo sapiens
ttaatggattagaac

SEQ ID NO: 476427 - DNA, 15 bp, Homo sapiens
tttaatggattagaa

SEQ ID NO: 476428 - DNA, 15 bp, Homo sapiens
atttaatggattaga

SEQ ID NO: 476429 - DNA, 15 bp, Homo sapiens
tatttaatggattag

SEQ ID NO: 476430 - DNA, 15 bp, Homo sapiens
atatttaatggatta

SEQ ID NO: 476431 - DNA, 15 bp, Homo sapiens
tatatttaatggatt

SEQ ID NO: 476432 - DNA, 15 bp, Homo sapiens
atatatttaatggat

SEQ ID NO: 476433 - DNA, 15 bp, Homo sapiens
aatatatttaatgga

SEQ ID NO: 476434 - DNA, 15 bp, Homo sapiens
aaatatatttaatgg

SEQ ID NO: 476435 - DNA, 15 bp, Homo sapiens
taaatatatttaatg

SEQ ID NO: 476436 - DNA, 15 bp, Homo sapiens
ctaaatatatttaat

SEQ ID NO: 476437 - DNA, 15 bp, Homo sapiens
tctaaatatatttaa

SEQ ID NO: 476438 - DNA, 15 bp, Homo sapiens
ttctaaatatattta

SEQ ID NO: 476439 - DNA, 15 bp, Homo sapiens
cttctaaatatattt

SEQ ID NO: 476440 - DNA, 15 bp, Homo sapiens
tcttctaaatatatt

SEQ ID NO: 476441 - DNA, 15 bp, Homo sapiens
gtcttctaaatatat

SEQ ID NO: 476442 - DNA, 15 bp, Homo sapiens
agtcttctaaatata

SEQ ID NO: 476443 - DNA, 15 bp, Homo sapiens
aagtcttctaaatat

SEQ ID NO: 476444 - DNA, 15 bp, Homo sapiens
aaagtcttctaaata

SEQ ID NO: 476445 - DNA, 15 bp, Homo sapiens
taaagtcttctaaat

SEQ ID NO: 476446 - DNA, 15 bp, Homo sapiens
ataaagtcttctaaa

SEQ ID NO: 476447 - DNA, 15 bp, Homo sapiens
aataaagtcttctaa

SEQ ID NO: 476448 - DNA, 15 bp, Homo sapiens
aaataaagtcttcta

SEQ ID NO: 476449 - DNA, 15 bp, Homo sapiens
aaaataaagtcttct

SEQ ID NO: 476450 - DNA, 15 bp, Homo sapiens
taaaataaagtcttc

SEQ ID NO: 476451 - DNA, 15 bp, Homo sapiens
ataaaataaagtctt

SEQ ID NO: 476452 - DNA, 15 bp, Homo sapiens
aataaaataaagtct

SEQ ID NO: 476453 - DNA, 15 bp, Homo sapiens
aaataaaataaagtc

SEQ ID NO: 476454 - DNA, 15 bp, Homo sapiens
aaaataaaataaagt

SEQ ID NO: 476455 - DNA, 15 bp, Homo sapiens
aaaaataaaataaag

SEQ ID NO: 476456 - DNA, 15 bp, Homo sapiens
aaaaaataaaataaa

SEQ ID NO: 476457 - DNA, 15 bp, Homo sapiens
aaaaaaataaaataa

SEQ ID NO: 476458 - DNA, 15 bp, Homo sapiens
aaaaaaaataaaata

SEQ ID NO: 476459 - DNA, 15 bp, Homo sapiens
taaaaaaaataaaat

SEQ ID NO: 476460 - DNA, 15 bp, Homo sapiens
ataaaaaaaataaaa

SEQ ID NO: 476461 - DNA, 15 bp, Homo sapiens
aataaaaaaaataaa

SEQ ID NO: 476462 - DNA, 15 bp, Homo sapiens
aaataaaaaaaataa

SEQ ID NO: 476463 - DNA, 15 bp, Homo sapiens
aaaataaaaaaaata

SEQ ID NO: 476464 - DNA, 15 bp, Homo sapiens
aaaaataaaaaaaat

SEQ ID NO: 476465 - DNA, 15 bp, Homo sapiens
caaaaataaaaaaaa

SEQ ID NO: 476466 - DNA, 15 bp, Homo sapiens
tcaaaaataaaaaaa

SEQ ID NO: 476467 - DNA, 15 bp, Homo sapiens
ctcaaaaataaaaaa

SEQ ID NO: 476468 - DNA, 15 bp, Homo sapiens
tctcaaaaataaaaa

SEQ ID NO: 476469 - DNA, 15 bp, Homo sapiens
gtctcaaaaataaaa

SEQ ID NO: 476470 - DNA, 15 bp, Homo sapiens
cgtctcaaaaataaa

SEQ ID NO: 476471 - DNA, 15 bp, Homo sapiens
ccgtctcaaaaataa

SEQ ID NO: 476472 - DNA, 15 bp, Homo sapiens
tccgtctcaaaaata

SEQ ID NO: 476473 - DNA, 15 bp, Homo sapiens
ctccgtctcaaaaat

SEQ ID NO: 476474 - DNA, 15 bp, Homo sapiens
actccgtctcaaaaa

SEQ ID NO: 476475 - DNA, 15 bp, Homo sapiens
aactccgtctcaaaa

SEQ ID NO: 476476 - DNA, 15 bp, Homo sapiens
aaactccgtctcaaa

SEQ ID NO: 476477 - DNA, 15 bp, Homo sapiens
gaaactccgtctcaa

SEQ ID NO: 476478 - DNA, 15 bp, Homo sapiens
tgaaactccgtctca

SEQ ID NO: 476479 - DNA, 15 bp, Homo sapiens
atgaaactccgtctc

SEQ ID NO: 476480 - DNA, 15 bp, Homo sapiens
catgaaactccgtct

SEQ ID NO: 476481 - DNA, 15 bp, Homo sapiens
tcatgaaactccgtc

SEQ ID NO: 476482 - DNA, 15 bp, Homo sapiens
atcatgaaactccgt

SEQ ID NO: 476483 - DNA, 15 bp, Homo sapiens
aatcatgaaactccg

SEQ ID NO: 476484 - DNA, 15 bp, Homo sapiens
gaatcatgaaactcc

SEQ ID NO: 476485 - DNA, 15 bp, Homo sapiens
agaatcatgaaactc

SEQ ID NO: 476486 - DNA, 15 bp, Homo sapiens
aagaatcatgaaact

SEQ ID NO: 476487 - DNA, 15 bp, Homo sapiens
caagaatcatgaaac

SEQ ID NO: 476488 - DNA, 15 bp, Homo sapiens
gcaagaatcatgaaa

SEQ ID NO: 476489 - DNA, 15 bp, Homo sapiens
ggcaagaatcatgaa

SEQ ID NO: 476490 - DNA, 15 bp, Homo sapiens
aggcaagaatcatga

SEQ ID NO: 476491 - DNA, 15 bp, Homo sapiens
taggcaagaatcatg

SEQ ID NO: 476492 - DNA, 15 bp, Homo sapiens
ctaggcaagaatcat

SEQ ID NO: 476493 - DNA, 15 bp, Homo sapiens
cctaggcaagaatca

SEQ ID NO: 476494 - DNA, 15 bp, Homo sapiens
gcctaggcaagaatc

SEQ ID NO: 476495 - DNA, 15 bp, Homo sapiens
agcctaggcaagaat

SEQ ID NO: 476496 - DNA, 15 bp, Homo sapiens
cagcctaggcaagaa

SEQ ID NO: 476497 - DNA, 15 bp, Homo sapiens
ccagcctaggcaaga

SEQ ID NO: 476498 - DNA, 15 bp, Homo sapiens
tccagcctaggcaag

SEQ ID NO: 476499 - DNA, 15 bp, Homo sapiens
ttgcactccagccta

SEQ ID NO: 476500 - DNA, 15 bp, Homo sapiens
attgcactccagcct

SEQ ID NO: 476501 - DNA, 15 bp, Homo sapiens
cattgcactccagcc

SEQ ID NO: 476502 - DNA, 15 bp, Homo sapiens
tcattgcactccagc

SEQ ID NO: 476503 - DNA, 15 bp, Homo sapiens
atcattgcactccag

SEQ ID NO: 476504 - DNA, 15 bp, Homo sapiens
catcattgcactcca

SEQ ID NO: 476505 - DNA, 15 bp, Homo sapiens
gcatcattgcactcc

SEQ ID NO: 476506 - DNA, 15 bp, Homo sapiens
cgcatcattgcactc

SEQ ID NO: 476507 - DNA, 15 bp, Homo sapiens
tcgcatcattgcact

SEQ ID NO: 476508 - DNA, 15 bp, Homo sapiens
gtcgcatcattgcac

SEQ ID NO: 476509 - DNA, 15 bp, Homo sapiens
ggtcgcatcattgca

SEQ ID NO: 476510 - DNA, 15 bp, Homo sapiens
aggtcgcatcattgc

SEQ ID NO: 476511 - DNA, 15 bp, Homo sapiens
aaggtcgcatcattg

SEQ ID NO: 476512 - DNA, 15 bp, Homo sapiens
caaggtcgcatcatt

SEQ ID NO: 476513 - DNA, 15 bp, Homo sapiens
ccaaggtcgcatcat

SEQ ID NO: 476514 - DNA, 15 bp, Homo sapiens
gccaaggtcgcatca

SEQ ID NO: 476515 - DNA, 15 bp, Homo sapiens
agccaaggtcgcatc

SEQ ID NO: 476516 - DNA, 15 bp, Homo sapiens
aagccaaggtcgcat

SEQ ID NO: 476517 - DNA, 15 bp, Homo sapiens
taagccaaggtcgca

SEQ ID NO: 476518 - DNA, 15 bp, Homo sapiens
gtaagccaaggtcgc

SEQ ID NO: 476519 - DNA, 15 bp, Homo sapiens
agtaagccaaggtcg

SEQ ID NO: 476520 - DNA, 15 bp, Homo sapiens
cagtaagccaaggtc

SEQ ID NO: 476521 - DNA, 15 bp, Homo sapiens
gcagtaagccaaggt

SEQ ID NO: 476522 - DNA, 15 bp, Homo sapiens
tgcagtaagccaagg

SEQ ID NO: 476523 - DNA, 15 bp, Homo sapiens
ttgcagtaagccaag

SEQ ID NO: 476524 - DNA, 15 bp, Homo sapiens
gttgcagtaagccaa

SEQ ID NO: 476525 - DNA, 15 bp, Homo sapiens
ggttgcagtaagcca

SEQ ID NO: 476526 - DNA, 15 bp, Homo sapiens
aggttgcagtaagcc

SEQ ID NO: 476527 - DNA, 15 bp, Homo sapiens
gaggttgcagtaagc

SEQ ID NO: 476528 - DNA, 15 bp, Homo sapiens
agaggttgcagtaag

SEQ ID NO: 476529 - DNA, 15 bp, Homo sapiens
cagaggttgcagtaa

SEQ ID NO: 476530 - DNA, 15 bp, Homo sapiens
gcagaggttgcagta

SEQ ID NO: 476531 - DNA, 15 bp, Homo sapiens
ggcagaggttgcagt

SEQ ID NO: 476532 - DNA, 15 bp, Homo sapiens
aggcagaggttgcag

SEQ ID NO: 476533 - DNA, 15 bp, Homo sapiens
gaggcagaggttgca

SEQ ID NO: 476534 - DNA, 15 bp, Homo sapiens
ggaggcagaggttgc

SEQ ID NO: 476535 - DNA, 15 bp, Homo sapiens
aggaggcagaggttg

SEQ ID NO: 476536 - DNA, 15 bp, Homo sapiens
caggaggcagaggtt

SEQ ID NO: 476537 - DNA, 15 bp, Homo sapiens
ccaggaggcagaggt

SEQ ID NO: 476538 - DNA, 15 bp, Homo sapiens
cccaggaggcagagg

SEQ ID NO: 476539 - DNA, 15 bp, Homo sapiens
acccaggaggcagag

SEQ ID NO: 476540 - DNA, 15 bp, Homo sapiens
aacccaggaggcaga

SEQ ID NO: 476541 - DNA, 15 bp, Homo sapiens
gaacccaggaggcag

SEQ ID NO: 476542 - DNA, 15 bp, Homo sapiens
tgaacccaggaggca

SEQ ID NO: 476543 - DNA, 15 bp, Homo sapiens
acttgaacccaggag

SEQ ID NO: 476544 - DNA, 15 bp, Homo sapiens
cacttgaacccagga

SEQ ID NO: 476545 - DNA, 15 bp, Homo sapiens
tcacttgaacccagg

SEQ ID NO: 476546 - DNA, 15 bp, Homo sapiens
atcacttgaacccag

SEQ ID NO: 476547 - DNA, 15 bp, Homo sapiens
aatcacttgaaccca

SEQ ID NO: 476548 - DNA, 15 bp, Homo sapiens
gaatcacttgaaccc

SEQ ID NO: 476549 - DNA, 15 bp, Homo sapiens
agaatcacttgaacc

SEQ ID NO: 476550 - DNA, 15 bp, Homo sapiens
gagaatcacttgaac

SEQ ID NO: 476551 - DNA, 15 bp, Homo sapiens
ggagaatcacttgaa

SEQ ID NO: 476552 - DNA, 15 bp, Homo sapiens
aggagaatcacttga

SEQ ID NO: 476553 - DNA, 15 bp, Homo sapiens
caggagaatcacttg

SEQ ID NO: 476554 - DNA, 15 bp, Homo sapiens
gcaggagaatcactt

SEQ ID NO: 476555 - DNA, 15 bp, Homo sapiens
ggcaggagaatcact

SEQ ID NO: 476556 - DNA, 15 bp, Homo sapiens
aggcaggagaatcac

SEQ ID NO: 476557 - DNA, 15 bp, Homo sapiens
gaggcaggagaatca

SEQ ID NO: 476558 - DNA, 15 bp, Homo sapiens
tgaggcaggagaatc

SEQ ID NO: 476559 - DNA, 15 bp, Homo sapiens
tgggaggctgaggca

SEQ ID NO: 476560 - DNA, 15 bp, Homo sapiens
ttgggaggctgaggc

SEQ ID NO: 476561 - DNA, 15 bp, Homo sapiens
cacttgggaggctga

SEQ ID NO: 476562 - DNA, 15 bp, Homo sapiens
ccacttgggaggctg

SEQ ID NO: 476563 - DNA, 15 bp, Homo sapiens
gccacttgggaggct

SEQ ID NO: 476564 - DNA, 15 bp, Homo sapiens
agccacttgggaggc

SEQ ID NO: 476565 - DNA, 15 bp, Homo sapiens
cagccacttgggagg

SEQ ID NO: 476566 - DNA, 15 bp, Homo sapiens
ccagccacttgggag

SEQ ID NO: 476567 - DNA, 15 bp, Homo sapiens
cccagccacttggga

SEQ ID NO: 476568 - DNA, 15 bp, Homo sapiens
tcccagccacttggg

SEQ ID NO: 476569 - DNA, 15 bp, Homo sapiens
atcccagccacttgg

SEQ ID NO: 476570 - DNA, 15 bp, Homo sapiens
aatcccagccacttg

SEQ ID NO: 476571 - DNA, 15 bp, Homo sapiens
taatcccagccactt

SEQ ID NO: 476572 - DNA, 15 bp, Homo sapiens
gtaatcccagccact

SEQ ID NO: 476573 - DNA, 15 bp, Homo sapiens
tgtaatcccagccac

SEQ ID NO: 476574 - DNA, 15 bp, Homo sapiens
ctgtaatcccagcca

SEQ ID NO: 476575 - DNA, 15 bp, Homo sapiens
cctgtaatcccagcc

SEQ ID NO: 476576 - DNA, 15 bp, Homo sapiens
cgcctgtaatcccag

SEQ ID NO: 476577 - DNA, 15 bp, Homo sapiens
gcgcctgtaatccca

SEQ ID NO: 476578 - DNA, 15 bp, Homo sapiens
ggcgcctgtaatccc

SEQ ID NO: 476579 - DNA, 15 bp, Homo sapiens
aggcgcctgtaatcc

SEQ ID NO: 476580 - DNA, 15 bp, Homo sapiens
caggcgcctgtaatc

SEQ ID NO: 476581 - DNA, 15 bp, Homo sapiens
gcaggcgcctgtaat

SEQ ID NO: 476582 - DNA, 15 bp, Homo sapiens
ggcaggcgcctgtaa

SEQ ID NO: 476583 - DNA, 15 bp, Homo sapiens
tggcaggcgcctgta

SEQ ID NO: 476584 - DNA, 15 bp, Homo sapiens
gtggcaggcgcctgt

SEQ ID NO: 476585 - DNA, 15 bp, Homo sapiens
ggtggcaggcgcctg

SEQ ID NO: 476586 - DNA, 15 bp, Homo sapiens
tggtggcaggcgcct

SEQ ID NO: 476587 - DNA, 15 bp, Homo sapiens
gtggtggcaggcgcc

SEQ ID NO: 476588 - DNA, 15 bp, Homo sapiens
agtggtggcaggcgc

SEQ ID NO: 476589 - DNA, 15 bp, Homo sapiens
gagtggtggcaggcg

SEQ ID NO: 476590 - DNA, 15 bp, Homo sapiens
ggagtggtggcaggc

SEQ ID NO: 476591 - DNA, 15 bp, Homo sapiens
aggagtggtggcagg

SEQ ID NO: 476592 - DNA, 15 bp, Homo sapiens
caggagtggtggcag

SEQ ID NO: 476593 - DNA, 15 bp, Homo sapiens
ccaggagtggtggca

SEQ ID NO: 476594 - DNA, 15 bp, Homo sapiens
tccaggagtggtggc

SEQ ID NO: 476595 - DNA, 15 bp, Homo sapiens
atccaggagtggtgg

SEQ ID NO: 476596 - DNA, 15 bp, Homo sapiens
tatccaggagtggtg

SEQ ID NO: 476597 - DNA, 15 bp, Homo sapiens
ttatccaggagtggt

SEQ ID NO: 476598 - DNA, 15 bp, Homo sapiens
gttatccaggagtgg

SEQ ID NO: 476599 - DNA, 15 bp, Homo sapiens
tgttatccaggagtg

SEQ ID NO: 476600 - DNA, 15 bp, Homo sapiens
atgttatccaggagt

SEQ ID NO: 476601 - DNA, 15 bp, Homo sapiens
aatgttatccaggag

SEQ ID NO: 476602 - DNA, 15 bp, Homo sapiens
aaatgttatccagga

SEQ ID NO: 476603 - DNA, 15 bp, Homo sapiens
caaatgttatccagg

SEQ ID NO: 476604 - DNA, 15 bp, Homo sapiens
acaaatgttatccag

SEQ ID NO: 476605 - DNA, 15 bp, Homo sapiens
aacaaatgttatcca

SEQ ID NO: 476606 - DNA, 15 bp, Homo sapiens
taacaaatgttatcc

SEQ ID NO: 476607 - DNA, 15 bp, Homo sapiens
ataacaaatgttatc

SEQ ID NO: 476608 - DNA, 15 bp, Homo sapiens
aataacaaatgttat

SEQ ID NO: 476609 - DNA, 15 bp, Homo sapiens
aaataacaaatgtta

SEQ ID NO: 476610 - DNA, 15 bp, Homo sapiens
aaaataacaaatgtt

SEQ ID NO: 476611 - DNA, 15 bp, Homo sapiens
aaaaataacaaatgt

SEQ ID NO: 476612 - DNA, 15 bp, Homo sapiens
taaaaataacaaatg

SEQ ID NO: 476613 - DNA, 15 bp, Homo sapiens
ctaaaaataacaaat

SEQ ID NO: 476614 - DNA, 15 bp, Homo sapiens
actaaaaataacaaa

SEQ ID NO: 476615 - DNA, 15 bp, Homo sapiens
tactaaaaataacaa

SEQ ID NO: 476616 - DNA, 15 bp, Homo sapiens
ctactaaaaataaca

SEQ ID NO: 476617 - DNA, 15 bp, Homo sapiens
tctactaaaaataac

SEQ ID NO: 476618 - DNA, 15 bp, Homo sapiens
actctactaaaaata

SEQ ID NO: 476619 - DNA, 15 bp, Homo sapiens
cactctactaaaaat

SEQ ID NO: 476620 - DNA, 15 bp, Homo sapiens
gcactctactaaaaa

SEQ ID NO: 476621 - DNA, 15 bp, Homo sapiens
agcactctactaaaa

SEQ ID NO: 476622 - DNA, 15 bp, Homo sapiens
cagcactctactaaa

SEQ ID NO: 476623 - DNA, 15 bp, Homo sapiens
tcagcactctactaa

SEQ ID NO: 476624 - DNA, 15 bp, Homo sapiens
ctcagcactctacta

SEQ ID NO: 476625 - DNA, 15 bp, Homo sapiens
tctcagcactctact

SEQ ID NO: 476626 - DNA, 15 bp, Homo sapiens
atctcagcactctac

SEQ ID NO: 476627 - DNA, 15 bp, Homo sapiens
aatctcagcactcta

SEQ ID NO: 476628 - DNA, 15 bp, Homo sapiens
taatctcagcactct

SEQ ID NO: 476629 - DNA, 15 bp, Homo sapiens
gtaatctcagcactc

SEQ ID NO: 476630 - DNA, 15 bp, Homo sapiens
tgtaatctcagcact

SEQ ID NO: 476631 - DNA, 15 bp, Homo sapiens
ctgtaatctcagcac

SEQ ID NO: 476632 - DNA, 15 bp, Homo sapiens
cctgtaatctcagca

SEQ ID NO: 476633 - DNA, 15 bp, Homo sapiens
gcctgtaatctcagc

SEQ ID NO: 476634 - DNA, 15 bp, Homo sapiens
cgcctgtaatctcag

SEQ ID NO: 476635 - DNA, 15 bp, Homo sapiens
acgcctgtaatctca

SEQ ID NO: 476636 - DNA, 15 bp, Homo sapiens
cacgcctgtaatctc

SEQ ID NO: 476637 - DNA, 15 bp, Homo sapiens
tcacgcctgtaatct

SEQ ID NO: 476638 - DNA, 15 bp, Homo sapiens
ctcacgcctgtaatc

SEQ ID NO: 476639 - DNA, 15 bp, Homo sapiens
gctcacgcctgtaat

SEQ ID NO: 476640 - DNA, 15 bp, Homo sapiens
ggctcacgcctgtaa

SEQ ID NO: 476641 - DNA, 15 bp, Homo sapiens
tggctcacgcctgta

SEQ ID NO: 476642 - DNA, 15 bp, Homo sapiens
atggctcacgcctgt

SEQ ID NO: 476643 - DNA, 15 bp, Homo sapiens
gatggctcacgcctg

SEQ ID NO: 476644 - DNA, 15 bp, Homo sapiens
cgatggctcacgcct

SEQ ID NO: 476645 - DNA, 15 bp, Homo sapiens
gcgatggctcacgcc

SEQ ID NO: 476646 - DNA, 15 bp, Homo sapiens
agcgatggctcacgc

SEQ ID NO: 476647 - DNA, 15 bp, Homo sapiens
aagcgatggctcacg

SEQ ID NO: 476648 - DNA, 15 bp, Homo sapiens
taagcgatggctcac

SEQ ID NO: 476649 - DNA, 15 bp, Homo sapiens
gtaagcgatggctca

SEQ ID NO: 476650 - DNA, 15 bp, Homo sapiens
tgtaagcgatggctc

SEQ ID NO: 476651 - DNA, 15 bp, Homo sapiens
atgtaagcgatggct

SEQ ID NO: 476652 - DNA, 15 bp, Homo sapiens
aatgtaagcgatggc

SEQ ID NO: 476653 - DNA, 15 bp, Homo sapiens
aaatgtaagcgatgg

SEQ ID NO: 476654 - DNA, 15 bp, Homo sapiens
aaaatgtaagcgatg

SEQ ID NO: 476655 - DNA, 15 bp, Homo sapiens
aaaaatgtaagcgat

SEQ ID NO: 476656 - DNA, 15 bp, Homo sapiens
taaaaatgtaagcga

SEQ ID NO: 476657 - DNA, 15 bp, Homo sapiens
ataaaaatgtaagcg

SEQ ID NO: 476658 - DNA, 15 bp, Homo sapiens
aataaaaatgtaagc

SEQ ID NO: 476659 - DNA, 15 bp, Homo sapiens
caataaaaatgtaag

SEQ ID NO: 476660 - DNA, 15 bp, Homo sapiens
tcaataaaaatgtaa

SEQ ID NO: 476661 - DNA, 15 bp, Homo sapiens
ctcaataaaaatgta

SEQ ID NO: 476662 - DNA, 15 bp, Homo sapiens
cctcaataaaaatgt

SEQ ID NO: 476663 - DNA, 15 bp, Homo sapiens
ccctcaataaaaatg

SEQ ID NO: 476664 - DNA, 15 bp, Homo sapiens
cccctcaataaaaat

SEQ ID NO: 476665 - DNA, 15 bp, Homo sapiens
tcccctcaataaaaa

SEQ ID NO: 476666 - DNA, 15 bp, Homo sapiens
ctcccctcaataaaa

SEQ ID NO: 476667 - DNA, 15 bp, Homo sapiens
tctcccctcaataaa

SEQ ID NO: 476668 - DNA, 15 bp, Homo sapiens
ttctcccctcaataa

SEQ ID NO: 476669 - DNA, 15 bp, Homo sapiens
tttctcccctcaata

SEQ ID NO: 476670 - DNA, 15 bp, Homo sapiens
ttttctcccctcaat

SEQ ID NO: 476671 - DNA, 15 bp, Homo sapiens
tttttctcccctcaa

SEQ ID NO: 476672 - DNA, 15 bp, Homo sapiens
ctttttctcccctca

SEQ ID NO: 476673 - DNA, 15 bp, Homo sapiens
gctttttctcccctc

SEQ ID NO: 476674 - DNA, 15 bp, Homo sapiens
ggctttttctcccct

SEQ ID NO: 476675 - DNA, 15 bp, Homo sapiens
gggctttttctcccc

SEQ ID NO: 476676 - DNA, 15 bp, Homo sapiens
agggctttttctccc

SEQ ID NO: 476677 - DNA, 15 bp, Homo sapiens
cagggctttttctcc

SEQ ID NO: 476678 - DNA, 15 bp, Homo sapiens
gcagggctttttctc

SEQ ID NO: 476679 - DNA, 15 bp, Homo sapiens
tgcagggctttttct

SEQ ID NO: 476680 - DNA, 15 bp, Homo sapiens
atgcagggctttttc

SEQ ID NO: 476681 - DNA, 15 bp, Homo sapiens
catgcagggcttttt

SEQ ID NO: 476682 - DNA, 15 bp, Homo sapiens
acatgcagggctttt

SEQ ID NO: 476683 - DNA, 15 bp, Homo sapiens
tacatgcagggcttt

SEQ ID NO: 476684 - DNA, 15 bp, Homo sapiens
gtacatgcagggctt

SEQ ID NO: 476685 - DNA, 15 bp, Homo sapiens
agtacatgcagggct

SEQ ID NO: 476686 - DNA, 15 bp, Homo sapiens
cagtacatgcagggc

SEQ ID NO: 476687 - DNA, 15 bp, Homo sapiens
tcagtacatgcaggg

SEQ ID NO: 476688 - DNA, 15 bp, Homo sapiens
ctcagtacatgcagg

SEQ ID NO: 476689 - DNA, 15 bp, Homo sapiens
tctcagtacatgcag

SEQ ID NO: 476690 - DNA, 15 bp, Homo sapiens
ctctcagtacatgca

SEQ ID NO: 476691 - DNA, 15 bp, Homo sapiens
tctctcagtacatgc

SEQ ID NO: 476692 - DNA, 15 bp, Homo sapiens
atctctcagtacatg

SEQ ID NO: 476693 - DNA, 15 bp, Homo sapiens
tatctctcagtacat

SEQ ID NO: 476694 - DNA, 15 bp, Homo sapiens
ctatctctcagtaca

SEQ ID NO: 476695 - DNA, 15 bp, Homo sapiens
actatctctcagtac

SEQ ID NO: 476696 - DNA, 15 bp, Homo sapiens
aactatctctcagta

SEQ ID NO: 476697 - DNA, 15 bp, Homo sapiens
caactatctctcagt

SEQ ID NO: 476698 - DNA, 15 bp, Homo sapiens
acaactatctctcag

SEQ ID NO: 476699 - DNA, 15 bp, Homo sapiens
tacaactatctctca

SEQ ID NO: 476700 - DNA, 15 bp, Homo sapiens
atacaactatctctc

SEQ ID NO: 476701 - DNA, 15 bp, Homo sapiens
tatacaactatctct

SEQ ID NO: 476702 - DNA, 15 bp, Homo sapiens
ttatacaactatctc

SEQ ID NO: 476703 - DNA, 15 bp, Homo sapiens
cttatacaactatct

SEQ ID NO: 476704 - DNA, 15 bp, Homo sapiens
tcttatacaactatc

SEQ ID NO: 476705 - DNA, 15 bp, Homo sapiens
ttcttatacaactat

SEQ ID NO: 476706 - DNA, 15 bp, Homo sapiens
attcttatacaacta

SEQ ID NO: 476707 - DNA, 15 bp, Homo sapiens
gattcttatacaact

SEQ ID NO: 476708 - DNA, 15 bp, Homo sapiens
agattcttatacaac

SEQ ID NO: 476709 - DNA, 15 bp, Homo sapiens
aagattcttatacaa

SEQ ID NO: 476710 - DNA, 15 bp, Homo sapiens
taagattcttataca

SEQ ID NO: 476711 - DNA, 15 bp, Homo sapiens
ttaagattcttatac

SEQ ID NO: 476712 - DNA, 15 bp, Homo sapiens
cttaagattcttata

SEQ ID NO: 476713 - DNA, 15 bp, Homo sapiens
tcttaagattcttat

SEQ ID NO: 476714 - DNA, 15 bp, Homo sapiens
ctcttaagattctta

SEQ ID NO: 476715 - DNA, 15 bp, Homo sapiens
actcttaagattctt

SEQ ID NO: 476716 - DNA, 15 bp, Homo sapiens
aactcttaagattct

SEQ ID NO: 476717 - DNA, 15 bp, Homo sapiens
caactcttaagattc

SEQ ID NO: 476718 - DNA, 15 bp, Homo sapiens
ccaactcttaagatt

SEQ ID NO: 476719 - DNA, 15 bp, Homo sapiens
gccaactcttaagat

SEQ ID NO: 476720 - DNA, 15 bp, Homo sapiens
ggccaactcttaaga

SEQ ID NO: 476721 - DNA, 15 bp, Homo sapiens
cggccaactcttaag

SEQ ID NO: 476722 - DNA, 15 bp, Homo sapiens
ccggccaactcttaa

SEQ ID NO: 476723 - DNA, 15 bp, Homo sapiens
cccggccaactctta

SEQ ID NO: 476724 - DNA, 15 bp, Homo sapiens
gcccggccaactctt

SEQ ID NO: 476725 - DNA, 15 bp, Homo sapiens
cgcccggccaactct

SEQ ID NO: 476726 - DNA, 15 bp, Homo sapiens
gcgcccggccaactc

SEQ ID NO: 476727 - DNA, 15 bp, Homo sapiens
cgcgcccggccaact

SEQ ID NO: 476728 - DNA, 15 bp, Homo sapiens
ccgcgcccggccaac

SEQ ID NO: 476729 - DNA, 15 bp, Homo sapiens
gccgcgcccggccaa

SEQ ID NO: 476730 - DNA, 15 bp, Homo sapiens
cgccgcgcccggcca

SEQ ID NO: 476731 - DNA, 15 bp, Homo sapiens
ccgccgcgcccggcc

SEQ ID NO: 476732 - DNA, 15 bp, Homo sapiens
gccgccgcgcccggc

SEQ ID NO: 476733 - DNA, 15 bp, Homo sapiens
agccgccgcgcccgg

SEQ ID NO: 476734 - DNA, 15 bp, Homo sapiens
gagccgccgcgcccg

SEQ ID NO: 476735 - DNA, 15 bp, Homo sapiens
tgagccgccgcgccc

SEQ ID NO: 476736 - DNA, 15 bp, Homo sapiens
gtgagccgccgcgcc

SEQ ID NO: 476737 - DNA, 15 bp, Homo sapiens
cgtgagccgccgcgc

SEQ ID NO: 476738 - DNA, 15 bp, Homo sapiens
gcgtgagccgccgcg

SEQ ID NO: 476739 - DNA, 15 bp, Homo sapiens
ggcgtgagccgccgc

SEQ ID NO: 476740 - DNA, 15 bp, Homo sapiens
aggcgtgagccgccg

SEQ ID NO: 476741 - DNA, 15 bp, Homo sapiens
caggcgtgagccgcc

SEQ ID NO: 476742 - DNA, 15 bp, Homo sapiens
acaggcgtgagccgc

SEQ ID NO: 476743 - DNA, 15 bp, Homo sapiens
cacaggcgtgagccg

SEQ ID NO: 476744 - DNA, 15 bp, Homo sapiens
tcacaggcgtgagcc

SEQ ID NO: 476745 - DNA, 15 bp, Homo sapiens
atcacaggcgtgagc

SEQ ID NO: 476746 - DNA, 15 bp, Homo sapiens
gatcacaggcgtgag

SEQ ID NO: 476747 - DNA, 15 bp, Homo sapiens
ggatcacaggcgtga

SEQ ID NO: 476748 - DNA, 15 bp, Homo sapiens
gggatcacaggcgtg

SEQ ID NO: 476749 - DNA, 15 bp, Homo sapiens
tgggatcacaggcgt

SEQ ID NO: 476750 - DNA, 15 bp, Homo sapiens
ctgggatcacaggcg

SEQ ID NO: 476751 - DNA, 15 bp, Homo sapiens
gctgggatcacaggc

SEQ ID NO: 476752 - DNA, 15 bp, Homo sapiens
tgctgggatcacagg

SEQ ID NO: 476753 - DNA, 15 bp, Homo sapiens
gtgctgggatcacag

SEQ ID NO: 476754 - DNA, 15 bp, Homo sapiens
agtgctgggatcaca

SEQ ID NO: 476755 - DNA, 15 bp, Homo sapiens
aagtgctgggatcac

SEQ ID NO: 476756 - DNA, 15 bp, Homo sapiens
aaagtgctgggatca

SEQ ID NO: 476757 - DNA, 15 bp, Homo sapiens
caaagtgctgggatc

SEQ ID NO: 476758 - DNA, 15 bp, Homo sapiens
gcccgcctcggcctc

SEQ ID NO: 476759 - DNA, 15 bp, Homo sapiens
ggcccgcctcggcct

SEQ ID NO: 476760 - DNA, 15 bp, Homo sapiens
cggcccgcctcggcc

SEQ ID NO: 476761 - DNA, 15 bp, Homo sapiens
tcggcccgcctcggc

SEQ ID NO: 476762 - DNA, 15 bp, Homo sapiens
atcggcccgcctcgg

SEQ ID NO: 476763 - DNA, 15 bp, Homo sapiens
gatcggcccgcctcg

SEQ ID NO: 476764 - DNA, 15 bp, Homo sapiens
tgatcggcccgcctc

SEQ ID NO: 476765 - DNA, 15 bp, Homo sapiens
atgatcggcccgcct

SEQ ID NO: 476766 - DNA, 15 bp, Homo sapiens
catgatcggcccgcc

SEQ ID NO: 476767 - DNA, 15 bp, Homo sapiens
tcatgatcggcccgc

SEQ ID NO: 476768 - DNA, 15 bp, Homo sapiens
ctcatgatcggcccg

SEQ ID NO: 476769 - DNA, 15 bp, Homo sapiens
cctcatgatcggccc

SEQ ID NO: 476770 - DNA, 15 bp, Homo sapiens
acctcatgatcggcc

SEQ ID NO: 476771 - DNA, 15 bp, Homo sapiens
gacctcatgatcggc

SEQ ID NO: 476772 - DNA, 15 bp, Homo sapiens
tgacctcatgatcgg

SEQ ID NO: 476773 - DNA, 15 bp, Homo sapiens
ctgacctcatgatcg

SEQ ID NO: 476774 - DNA, 15 bp, Homo sapiens
tctcctgacctcatg

SEQ ID NO: 476775 - DNA, 15 bp, Homo sapiens
atctcctgacctcat

SEQ ID NO: 476776 - DNA, 15 bp, Homo sapiens
gatctcctgacctca

SEQ ID NO: 476777 - DNA, 15 bp, Homo sapiens
ccaggatggtctcga

SEQ ID NO: 476778 - DNA, 15 bp, Homo sapiens
gccaggatggtctcg

SEQ ID NO: 476779 - DNA, 15 bp, Homo sapiens
agccaggatggtctc

SEQ ID NO: 476780 - DNA, 15 bp, Homo sapiens
tagccaggatggtct

SEQ ID NO: 476781 - DNA, 15 bp, Homo sapiens
ttagccaggatggtc

SEQ ID NO: 476782 - DNA, 15 bp, Homo sapiens
gttagccaggatggt

SEQ ID NO: 476783 - DNA, 15 bp, Homo sapiens
tgttagccaggatgg

SEQ ID NO: 476784 - DNA, 15 bp, Homo sapiens
gtgttagccaggatg

SEQ ID NO: 476785 - DNA, 15 bp, Homo sapiens
tgtgttagccaggat

SEQ ID NO: 476786 - DNA, 15 bp, Homo sapiens
ctgtgttagccagga

SEQ ID NO: 476787 - DNA, 15 bp, Homo sapiens
actgtgttagccagg

SEQ ID NO: 476788 - DNA, 15 bp, Homo sapiens
cactgtgttagccag

SEQ ID NO: 476789 - DNA, 15 bp, Homo sapiens
tcactgtgttagcca

SEQ ID NO: 476790 - DNA, 15 bp, Homo sapiens
ttcactgtgttagcc

SEQ ID NO: 476791 - DNA, 15 bp, Homo sapiens
tttcactgtgttagc

SEQ ID NO: 476792 - DNA, 15 bp, Homo sapiens
gtttcactgtgttag

SEQ ID NO: 476793 - DNA, 15 bp, Homo sapiens
ggtttcactgtgtta

SEQ ID NO: 476794 - DNA, 15 bp, Homo sapiens
gggtttcactgtgtt

SEQ ID NO: 476795 - DNA, 15 bp, Homo sapiens
ggggtttcactgtgt

SEQ ID NO: 476796 - DNA, 15 bp, Homo sapiens
tggggtttcactgtg

SEQ ID NO: 476797 - DNA, 15 bp, Homo sapiens
atggggtttcactgt

SEQ ID NO: 476798 - DNA, 15 bp, Homo sapiens
gatggggtttcactg

SEQ ID NO: 476799 - DNA, 15 bp, Homo sapiens
agatggggtttcact

SEQ ID NO: 476800 - DNA, 15 bp, Homo sapiens
gagatggggtttcac

SEQ ID NO: 476801 - DNA, 15 bp, Homo sapiens
agagatggggtttca

SEQ ID NO: 476802 - DNA, 15 bp, Homo sapiens
tagagatggggtttc

SEQ ID NO: 476803 - DNA, 15 bp, Homo sapiens
gtagagatggggttt

SEQ ID NO: 476804 - DNA, 15 bp, Homo sapiens
agtagagatggggtt

SEQ ID NO: 476805 - DNA, 15 bp, Homo sapiens
tagtagagatggggt

SEQ ID NO: 476806 - DNA, 15 bp, Homo sapiens
ttagtagagatgggg

SEQ ID NO: 476807 - DNA, 15 bp, Homo sapiens
tttagtagagatggg

SEQ ID NO: 476808 - DNA, 15 bp, Homo sapiens
ttttagtagagatgg

SEQ ID NO: 476809 - DNA, 15 bp, Homo sapiens
tttttagtagagatg

SEQ ID NO: 476810 - DNA, 15 bp, Homo sapiens
atttttagtagagat

SEQ ID NO: 476811 - DNA, 15 bp, Homo sapiens
acccagctaattttt

SEQ ID NO: 476812 - DNA, 15 bp, Homo sapiens
cacccagctaatttt

SEQ ID NO: 476813 - DNA, 15 bp, Homo sapiens
acacccagctaattt

SEQ ID NO: 476814 - DNA, 15 bp, Homo sapiens
cacacccagctaatt

SEQ ID NO: 476815 - DNA, 15 bp, Homo sapiens
ccacacccagctaat

SEQ ID NO: 476816 - DNA, 15 bp, Homo sapiens
accacacccagctaa

SEQ ID NO: 476817 - DNA, 15 bp, Homo sapiens
caccacacccagcta

SEQ ID NO: 476818 - DNA, 15 bp, Homo sapiens
ccaccacacccagct

SEQ ID NO: 476819 - DNA, 15 bp, Homo sapiens
accaccacacccagc

SEQ ID NO: 476820 - DNA, 15 bp, Homo sapiens
caccaccacacccag

SEQ ID NO: 476821 - DNA, 15 bp, Homo sapiens
ccaccaccacaccca

SEQ ID NO: 476822 - DNA, 15 bp, Homo sapiens
cccaccaccacaccc

SEQ ID NO: 476823 - DNA, 15 bp, Homo sapiens
acccaccaccacacc

SEQ ID NO: 476824 - DNA, 15 bp, Homo sapiens
cacccaccaccacac

SEQ ID NO: 476825 - DNA, 15 bp, Homo sapiens
gcacccaccaccaca

SEQ ID NO: 476826 - DNA, 15 bp, Homo sapiens
ggcacccaccaccac

SEQ ID NO: 476827 - DNA, 15 bp, Homo sapiens
aggcacccaccacca

SEQ ID NO: 476828 - DNA, 15 bp, Homo sapiens
caggcacccaccacc

SEQ ID NO: 476829 - DNA, 15 bp, Homo sapiens
ctacaggcacccacc

SEQ ID NO: 476830 - DNA, 15 bp, Homo sapiens
actacaggcacccac

SEQ ID NO: 476831 - DNA, 15 bp, Homo sapiens
gactacaggcaccca

SEQ ID NO: 476832 - DNA, 15 bp, Homo sapiens
aagtagctgggacta

SEQ ID NO: 476833 - DNA, 15 bp, Homo sapiens
caagtagctgggact

SEQ ID NO: 476834 - DNA, 15 bp, Homo sapiens
ccaagtagctgggac

SEQ ID NO: 476835 - DNA, 15 bp, Homo sapiens
aggttcaggccattc

SEQ ID NO: 476836 - DNA, 15 bp, Homo sapiens
caggttcaggccatt

SEQ ID NO: 476837 - DNA, 15 bp, Homo sapiens
ccaggttcaggccat

SEQ ID NO: 476838 - DNA, 15 bp, Homo sapiens
cccaggttcaggcca

SEQ ID NO: 476839 - DNA, 15 bp, Homo sapiens
tcccaggttcaggcc

SEQ ID NO: 476840 - DNA, 15 bp, Homo sapiens
ctcccaggttcaggc

SEQ ID NO: 476841 - DNA, 15 bp, Homo sapiens
cctcccaggttcagg

SEQ ID NO: 476842 - DNA, 15 bp, Homo sapiens
acctcccaggttcag

SEQ ID NO: 476843 - DNA, 15 bp, Homo sapiens
cacctcccaggttca

SEQ ID NO: 476844 - DNA, 15 bp, Homo sapiens
ccacctcccaggttc

SEQ ID NO: 476845 - DNA, 15 bp, Homo sapiens
tccacctcccaggtt

SEQ ID NO: 476846 - DNA, 15 bp, Homo sapiens
ctccacctcccaggt

SEQ ID NO: 476847 - DNA, 15 bp, Homo sapiens
gctccacctcccagg

SEQ ID NO: 476848 - DNA, 15 bp, Homo sapiens
agctccacctcccag

SEQ ID NO: 476849 - DNA, 15 bp, Homo sapiens
aagctccacctccca

SEQ ID NO: 476850 - DNA, 15 bp, Homo sapiens
caagctccacctccc

SEQ ID NO: 476851 - DNA, 15 bp, Homo sapiens
gcaagctccacctcc

SEQ ID NO: 476852 - DNA, 15 bp, Homo sapiens
cgcaagctccacctc

SEQ ID NO: 476853 - DNA, 15 bp, Homo sapiens
ccgcaagctccacct

SEQ ID NO: 476854 - DNA, 15 bp, Homo sapiens
accgcaagctccacc

SEQ ID NO: 476855 - DNA, 15 bp, Homo sapiens
caccgcaagctccac

SEQ ID NO: 476856 - DNA, 15 bp, Homo sapiens
tcaccgcaagctcca

SEQ ID NO: 476857 - DNA, 15 bp, Homo sapiens
ctcaccgcaagctcc

SEQ ID NO: 476858 - DNA, 15 bp, Homo sapiens
gctcaccgcaagctc

SEQ ID NO: 476859 - DNA, 15 bp, Homo sapiens
ggctcaccgcaagct

SEQ ID NO: 476860 - DNA, 15 bp, Homo sapiens
cggctcaccgcaagc

SEQ ID NO: 476861 - DNA, 15 bp, Homo sapiens
tcggctcaccgcaag

SEQ ID NO: 476862 - DNA, 15 bp, Homo sapiens
ctcggctcaccgcaa

SEQ ID NO: 476863 - DNA, 15 bp, Homo sapiens
tctcggctcaccgca

SEQ ID NO: 476864 - DNA, 15 bp, Homo sapiens
atctcggctcaccgc

SEQ ID NO: 476865 - DNA, 15 bp, Homo sapiens
aatctcggctcaccg

SEQ ID NO: 476866 - DNA, 15 bp, Homo sapiens
caatctcggctcacc

SEQ ID NO: 476867 - DNA, 15 bp, Homo sapiens
gcaatctcggctcac

SEQ ID NO: 476868 - DNA, 15 bp, Homo sapiens
cgcaatctcggctca

SEQ ID NO: 476869 - DNA, 15 bp, Homo sapiens
gcgcaatctcggctc

SEQ ID NO: 476870 - DNA, 15 bp, Homo sapiens
ggcgcaatctcggct

SEQ ID NO: 476871 - DNA, 15 bp, Homo sapiens
tggcgcaatctcggc

SEQ ID NO: 476872 - DNA, 15 bp, Homo sapiens
gtggcgcaatctcgg

SEQ ID NO: 476873 - DNA, 15 bp, Homo sapiens
agtggcgcaatctcg

SEQ ID NO: 476874 - DNA, 15 bp, Homo sapiens
cagtggcgcaatctc

SEQ ID NO: 476875 - DNA, 15 bp, Homo sapiens
gcagtggcgcaatct

SEQ ID NO: 476876 - DNA, 15 bp, Homo sapiens
tgcagtggcgcaatc

SEQ ID NO: 476877 - DNA, 15 bp, Homo sapiens
gtgcagtggcgcaat

SEQ ID NO: 476878 - DNA, 15 bp, Homo sapiens
agtgcagtggcgcaa

SEQ ID NO: 476879 - DNA, 15 bp, Homo sapiens
gagtgcagtggcgca

SEQ ID NO: 476880 - DNA, 15 bp, Homo sapiens
ctgagatggagtctc

SEQ ID NO: 476881 - DNA, 15 bp, Homo sapiens
tctgagatggagtct

SEQ ID NO: 476882 - DNA, 15 bp, Homo sapiens
ttctgagatggagtc

SEQ ID NO: 476883 - DNA, 15 bp, Homo sapiens
tttctgagatggagt

SEQ ID NO: 476884 - DNA, 15 bp, Homo sapiens
ttttctgagatggag

SEQ ID NO: 476885 - DNA, 15 bp, Homo sapiens
tttttctgagatgga

SEQ ID NO: 476886 - DNA, 15 bp, Homo sapiens
ttttttctgagatgg

SEQ ID NO: 476887 - DNA, 15 bp, Homo sapiens
tttttttctgagatg

SEQ ID NO: 476888 - DNA, 15 bp, Homo sapiens
ttttttttctgagat

SEQ ID NO: 476889 - DNA, 15 bp, Homo sapiens
tttttttttctgaga

SEQ ID NO: 476890 - DNA, 15 bp, Homo sapiens
ttttttttttctgag

SEQ ID NO: 476891 - DNA, 15 bp, Homo sapiens
tttttttttttctga

SEQ ID NO: 476892 - DNA, 15 bp, Homo sapiens
ttttttttttttctg

SEQ ID NO: 476893 - DNA, 15 bp, Homo sapiens
tttttttttttttct

SEQ ID NO: 476894 - DNA, 15 bp, Homo sapiens
ttttttttttttttc

SEQ ID NO: 476895 - DNA, 15 bp, Homo sapiens
attcttttttttttt

SEQ ID NO: 476896 - DNA, 15 bp, Homo sapiens
gattctttttttttt

SEQ ID NO: 476897 - DNA, 15 bp, Homo sapiens
agattcttttttttt

SEQ ID NO: 476898 - DNA, 15 bp, Homo sapiens
aagattctttttttt

SEQ ID NO: 476899 - DNA, 15 bp, Homo sapiens
taagattcttttttt

SEQ ID NO: 476900 - DNA, 15 bp, Homo sapiens
ttaagattctttttt

SEQ ID NO: 476901 - DNA, 15 bp, Homo sapiens
attaagattcttttt

SEQ ID NO: 476902 - DNA, 15 bp, Homo sapiens
tattaagattctttt

SEQ ID NO: 476903 - DNA, 15 bp, Homo sapiens
ctattaagattcttt

SEQ ID NO: 476904 - DNA, 15 bp, Homo sapiens
actattaagattctt

SEQ ID NO: 476905 - DNA, 15 bp, Homo sapiens
aactattaagattct

SEQ ID NO: 476906 - DNA, 15 bp, Homo sapiens
aaactattaagattc

SEQ ID NO: 476907 - DNA, 15 bp, Homo sapiens
gaaactattaagatt

SEQ ID NO: 476908 - DNA, 15 bp, Homo sapiens
tgaaactattaagat

SEQ ID NO: 476909 - DNA, 15 bp, Homo sapiens
ttgaaactattaaga

SEQ ID NO: 476910 - DNA, 15 bp, Homo sapiens
gttgaaactattaag

SEQ ID NO: 476911 - DNA, 15 bp, Homo sapiens
agttgaaactattaa

SEQ ID NO: 476912 - DNA, 15 bp, Homo sapiens
cagttgaaactatta

SEQ ID NO: 476913 - DNA, 15 bp, Homo sapiens
acagttgaaactatt

SEQ ID NO: 476914 - DNA, 15 bp, Homo sapiens
aacagttgaaactat

SEQ ID NO: 476915 - DNA, 15 bp, Homo sapiens
aaacagttgaaacta

SEQ ID NO: 476916 - DNA, 15 bp, Homo sapiens
taaacagttgaaact

SEQ ID NO: 476917 - DNA, 15 bp, Homo sapiens
ataaacagttgaaac

SEQ ID NO: 476918 - DNA, 15 bp, Homo sapiens
tataaacagttgaaa

SEQ ID NO: 476919 - DNA, 15 bp, Homo sapiens
ttataaacagttgaa

SEQ ID NO: 476920 - DNA, 15 bp, Homo sapiens
tttataaacagttga

SEQ ID NO: 476921 - DNA, 15 bp, Homo sapiens
ttttataaacagttg

SEQ ID NO: 476922 - DNA, 15 bp, Homo sapiens
gttttataaacagtt

SEQ ID NO: 476923 - DNA, 15 bp, Homo sapiens
agttttataaacagt

SEQ ID NO: 476924 - DNA, 15 bp, Homo sapiens
aagttttataaacag

SEQ ID NO: 476925 - DNA, 15 bp, Homo sapiens
aaagttttataaaca

SEQ ID NO: 476926 - DNA, 15 bp, Homo sapiens
aaaagttttataaac

SEQ ID NO: 476927 - DNA, 15 bp, Homo sapiens
caaaagttttataaa

SEQ ID NO: 476928 - DNA, 15 bp, Homo sapiens
tcaaaagttttataa

SEQ ID NO: 476929 - DNA, 15 bp, Homo sapiens
ttcaaaagttttata

SEQ ID NO: 476930 - DNA, 15 bp, Homo sapiens
attcaaaagttttat

SEQ ID NO: 476931 - DNA, 15 bp, Homo sapiens
aattcaaaagtttta

SEQ ID NO: 476932 - DNA, 15 bp, Homo sapiens
aaattcaaaagtttt

SEQ ID NO: 476933 - DNA, 15 bp, Homo sapiens
aaaattcaaaagttt

SEQ ID NO: 476934 - DNA, 15 bp, Homo sapiens
caaaattcaaaagtt

SEQ ID NO: 476935 - DNA, 15 bp, Homo sapiens
ccaaaattcaaaagt

SEQ ID NO: 476936 - DNA, 15 bp, Homo sapiens
tccaaaattcaaaag

SEQ ID NO: 476937 - DNA, 15 bp, Homo sapiens
atccaaaattcaaaa

SEQ ID NO: 476938 - DNA, 15 bp, Homo sapiens
aatccaaaattcaaa

SEQ ID NO: 476939 - DNA, 15 bp, Homo sapiens
taatccaaaattcaa

SEQ ID NO: 476940 - DNA, 15 bp, Homo sapiens
ataatccaaaattca

SEQ ID NO: 476941 - DNA, 15 bp, Homo sapiens
tataatccaaaattc

SEQ ID NO: 476942 - DNA, 15 bp, Homo sapiens
atataatccaaaatt

SEQ ID NO: 476943 - DNA, 15 bp, Homo sapiens
aatataatccaaaat

SEQ ID NO: 476944 - DNA, 15 bp, Homo sapiens
taatataatccaaaa

SEQ ID NO: 476945 - DNA, 15 bp, Homo sapiens
ataatataatccaaa

SEQ ID NO: 476946 - DNA, 15 bp, Homo sapiens
gataatataatccaa

SEQ ID NO: 476947 - DNA, 15 bp, Homo sapiens
agataatataatcca

SEQ ID NO: 476948 - DNA, 15 bp, Homo sapiens
cagataatataatcc

SEQ ID NO: 476949 - DNA, 15 bp, Homo sapiens
acagataatataatc

SEQ ID NO: 476950 - DNA, 15 bp, Homo sapiens
tacagataatataat

SEQ ID NO: 476951 - DNA, 15 bp, Homo sapiens
gtacagataatataa

SEQ ID NO: 476952 - DNA, 15 bp, Homo sapiens
agtacagataatata

SEQ ID NO: 476953 - DNA, 15 bp, Homo sapiens
aagtacagataatat

SEQ ID NO: 476954 - DNA, 15 bp, Homo sapiens
aaagtacagataata

SEQ ID NO: 476955 - DNA, 15 bp, Homo sapiens
caaagtacagataat

SEQ ID NO: 476956 - DNA, 15 bp, Homo sapiens
gcaaagtacagataa

SEQ ID NO: 476957 - DNA, 15 bp, Homo sapiens
agcaaagtacagata

SEQ ID NO: 476958 - DNA, 15 bp, Homo sapiens
aagcaaagtacagat

SEQ ID NO: 476959 - DNA, 15 bp, Homo sapiens
aaagcaaagtacaga

SEQ ID NO: 476960 - DNA, 15 bp, Homo sapiens
taaagcaaagtacag

SEQ ID NO: 476961 - DNA, 15 bp, Homo sapiens
gtaaagcaaagtaca

SEQ ID NO: 476962 - DNA, 15 bp, Homo sapiens
agtaaagcaaagtac

SEQ ID NO: 476963 - DNA, 15 bp, Homo sapiens
cagtaaagcaaagta

SEQ ID NO: 476964 - DNA, 15 bp, Homo sapiens
ccagtaaagcaaagt

SEQ ID NO: 476965 - DNA, 15 bp, Homo sapiens
cccagtaaagcaaag

SEQ ID NO: 476966 - DNA, 15 bp, Homo sapiens
gcccagtaaagcaaa

SEQ ID NO: 476967 - DNA, 15 bp, Homo sapiens
ggcccagtaaagcaa

SEQ ID NO: 476968 - DNA, 15 bp, Homo sapiens
gggcccagtaaagca

SEQ ID NO: 476969 - DNA, 15 bp, Homo sapiens
tgggcccagtaaagc

SEQ ID NO: 476970 - DNA, 15 bp, Homo sapiens
ctgggcccagtaaag

SEQ ID NO: 476971 - DNA, 15 bp, Homo sapiens
cctgggcccagtaaa

SEQ ID NO: 476972 - DNA, 15 bp, Homo sapiens
ccctgggcccagtaa

SEQ ID NO: 476973 - DNA, 15 bp, Homo sapiens
cccctgggcccagta

SEQ ID NO: 476974 - DNA, 15 bp, Homo sapiens
ccccctgggcccagt

SEQ ID NO: 476975 - DNA, 15 bp, Homo sapiens
tccccctgggcccag

SEQ ID NO: 476976 - DNA, 15 bp, Homo sapiens
ctccccctgggccca

SEQ ID NO: 476977 - DNA, 15 bp, Homo sapiens
actccccctgggccc

SEQ ID NO: 476978 - DNA, 15 bp, Homo sapiens
aactccccctgggcc

SEQ ID NO: 476979 - DNA, 15 bp, Homo sapiens
taactccccctgggc

SEQ ID NO: 476980 - DNA, 15 bp, Homo sapiens
ttaactccccctggg

SEQ ID NO: 476981 - DNA, 15 bp, Homo sapiens
cttaactccccctgg

SEQ ID NO: 476982 - DNA, 15 bp, Homo sapiens
gcttaactccccctg

SEQ ID NO: 476983 - DNA, 15 bp, Homo sapiens
agcttaactccccct

SEQ ID NO: 476984 - DNA, 15 bp, Homo sapiens
aagcttaactccccc

SEQ ID NO: 476985 - DNA, 15 bp, Homo sapiens
aaagcttaactcccc

SEQ ID NO: 476986 - DNA, 15 bp, Homo sapiens
gaaagcttaactccc

SEQ ID NO: 476987 - DNA, 15 bp, Homo sapiens
ggaaagcttaactcc

SEQ ID NO: 476988 - DNA, 15 bp, Homo sapiens
aggaaagcttaactc

SEQ ID NO: 476989 - DNA, 15 bp, Homo sapiens
aaggaaagcttaact

SEQ ID NO: 476990 - DNA, 15 bp, Homo sapiens
gaaggaaagcttaac

SEQ ID NO: 476991 - DNA, 15 bp, Homo sapiens
agaaggaaagcttaa

SEQ ID NO: 476992 - DNA, 15 bp, Homo sapiens
aagaaggaaagctta

SEQ ID NO: 476993 - DNA, 15 bp, Homo sapiens
taagaaggaaagctt

SEQ ID NO: 476994 - DNA, 15 bp, Homo sapiens
ataagaaggaaagct

SEQ ID NO: 476995 - DNA, 15 bp, Homo sapiens
aataagaaggaaagc

SEQ ID NO: 476996 - DNA, 15 bp, Homo sapiens
taataagaaggaaag

SEQ ID NO: 476997 - DNA, 15 bp, Homo sapiens
gtaataagaaggaaa

SEQ ID NO: 476998 - DNA, 15 bp, Homo sapiens
tgtaataagaaggaa

SEQ ID NO: 476999 - DNA, 15 bp, Homo sapiens
ctgtaataagaagga

SEQ ID NO: 477000 - DNA, 15 bp, Homo sapiens
gctgtaataagaagg

SEQ ID NO: 477001 - DNA, 15 bp, Homo sapiens
agctgtaataagaag

SEQ ID NO: 477002 - DNA, 15 bp, Homo sapiens
tagctgtaataagaa

SEQ ID NO: 477003 - DNA, 15 bp, Homo sapiens
ttagctgtaataaga

SEQ ID NO: 477004 - DNA, 15 bp, Homo sapiens
cttagctgtaataag

SEQ ID NO: 477005 - DNA, 15 bp, Homo sapiens
tcttagctgtaataa

SEQ ID NO: 477006 - DNA, 15 bp, Homo sapiens
ctcttagctgtaata

SEQ ID NO: 477007 - DNA, 15 bp, Homo sapiens
actcttagctgtaat

SEQ ID NO: 477008 - DNA, 15 bp, Homo sapiens
aactcttagctgtaa

SEQ ID NO: 477009 - DNA, 15 bp, Homo sapiens
aaactcttagctgta

SEQ ID NO: 477010 - DNA, 15 bp, Homo sapiens
caaactcttagctgt

SEQ ID NO: 477011 - DNA, 15 bp, Homo sapiens
gcaaactcttagctg

SEQ ID NO: 477012 - DNA, 15 bp, Homo sapiens
ggcaaactcttagct

SEQ ID NO: 477013 - DNA, 15 bp, Homo sapiens
aggcaaactcttagc

SEQ ID NO: 477014 - DNA, 15 bp, Homo sapiens
caggcaaactcttag

SEQ ID NO: 477015 - DNA, 15 bp, Homo sapiens
acaggcaaactctta

SEQ ID NO: 477016 - DNA, 15 bp, Homo sapiens
aacaggcaaactctt

SEQ ID NO: 477017 - DNA, 15 bp, Homo sapiens
caacaggcaaactct

SEQ ID NO: 477018 - DNA, 15 bp, Homo sapiens
ccaacaggcaaactc

SEQ ID NO: 477019 - DNA, 15 bp, Homo sapiens
tccaacaggcaaact

SEQ ID NO: 477020 - DNA, 15 bp, Homo sapiens
gtccaacaggcaaac

SEQ ID NO: 477021 - DNA, 15 bp, Homo sapiens
ggtccaacaggcaaa

SEQ ID NO: 477022 - DNA, 15 bp, Homo sapiens
tggtccaacaggcaa

SEQ ID NO: 477023 - DNA, 15 bp, Homo sapiens
gtggtccaacaggca

SEQ ID NO: 477024 - DNA, 15 bp, Homo sapiens
agtggtccaacaggc

SEQ ID NO: 477025 - DNA, 15 bp, Homo sapiens
aagtggtccaacagg

SEQ ID NO: 477026 - DNA, 15 bp, Homo sapiens
taagtggtccaacag

SEQ ID NO: 477027 - DNA, 15 bp, Homo sapiens
ttaagtggtccaaca

SEQ ID NO: 477028 - DNA, 15 bp, Homo sapiens
gttaagtggtccaac

SEQ ID NO: 477029 - DNA, 15 bp, Homo sapiens
cgttaagtggtccaa

SEQ ID NO: 477030 - DNA, 15 bp, Homo sapiens
gcgttaagtggtcca

SEQ ID NO: 477031 - DNA, 15 bp, Homo sapiens
ggcgttaagtggtcc

SEQ ID NO: 477032 - DNA, 15 bp, Homo sapiens
gggcgttaagtggtc

SEQ ID NO: 477033 - DNA, 15 bp, Homo sapiens
ggggcgttaagtggt

SEQ ID NO: 477034 - DNA, 15 bp, Homo sapiens
gggggcgttaagtgg

SEQ ID NO: 477035 - DNA, 15 bp, Homo sapiens
tgggggcgttaagtg

SEQ ID NO: 477036 - DNA, 15 bp, Homo sapiens
ctgggggcgttaagt

SEQ ID NO: 477037 - DNA, 15 bp, Homo sapiens
cctgggggcgttaag

SEQ ID NO: 477038 - DNA, 15 bp, Homo sapiens
ccctgggggcgttaa

SEQ ID NO: 477039 - DNA, 15 bp, Homo sapiens
tccctgggggcgtta

SEQ ID NO: 477040 - DNA, 15 bp, Homo sapiens
ctccctgggggcgtt

SEQ ID NO: 477041 - DNA, 15 bp, Homo sapiens
gctccctgggggcgt

SEQ ID NO: 477042 - DNA, 15 bp, Homo sapiens
tgctccctgggggcg

SEQ ID NO: 477043 - DNA, 15 bp, Homo sapiens
atgctccctgggggc

SEQ ID NO: 477044 - DNA, 15 bp, Homo sapiens
catgctccctggggg

SEQ ID NO: 477045 - DNA, 15 bp, Homo sapiens
acatgctccctgggg

SEQ ID NO: 477046 - DNA, 15 bp, Homo sapiens
cacatgctccctggg

SEQ ID NO: 477047 - DNA, 15 bp, Homo sapiens
gcacatgctccctgg

SEQ ID NO: 477048 - DNA, 15 bp, Homo sapiens
tgcacatgctccctg

SEQ ID NO: 477049 - DNA, 15 bp, Homo sapiens
atgcacatgctccct

SEQ ID NO: 477050 - DNA, 15 bp, Homo sapiens
catgcacatgctccc

SEQ ID NO: 477051 - DNA, 15 bp, Homo sapiens
acatgcacatgctcc

SEQ ID NO: 477052 - DNA, 15 bp, Homo sapiens
gacatgcacatgctc

SEQ ID NO: 477053 - DNA, 15 bp, Homo sapiens
agacatgcacatgct

SEQ ID NO: 477054 - DNA, 15 bp, Homo sapiens
tagacatgcacatgc

SEQ ID NO: 477055 - DNA, 15 bp, Homo sapiens
ttagacatgcacatg

SEQ ID NO: 477056 - DNA, 15 bp, Homo sapiens
tttagacatgcacat

SEQ ID NO: 477057 - DNA, 15 bp, Homo sapiens
ctttagacatgcaca

SEQ ID NO: 477058 - DNA, 15 bp, Homo sapiens
tctttagacatgcac

SEQ ID NO: 477059 - DNA, 15 bp, Homo sapiens
atctttagacatgca

SEQ ID NO: 477060 - DNA, 15 bp, Homo sapiens
catctttagacatgc

SEQ ID NO: 477061 - DNA, 15 bp, Homo sapiens
ccatctttagacatg

SEQ ID NO: 477062 - DNA, 15 bp, Homo sapiens
gccatctttagacat

SEQ ID NO: 477063 - DNA, 15 bp, Homo sapiens
tgccatctttagaca

SEQ ID NO: 477064 - DNA, 15 bp, Homo sapiens
ttgccatctttagac

SEQ ID NO: 477065 - DNA, 15 bp, Homo sapiens
gttgccatctttaga

SEQ ID NO: 477066 - DNA, 15 bp, Homo sapiens
agttgccatctttag

SEQ ID NO: 477067 - DNA, 15 bp, Homo sapiens
gagttgccatcttta

SEQ ID NO: 477068 - DNA, 15 bp, Homo sapiens
agagttgccatcttt

SEQ ID NO: 477069 - DNA, 15 bp, Homo sapiens
cagagttgccatctt

SEQ ID NO: 477070 - DNA, 15 bp, Homo sapiens
acagagttgccatct

SEQ ID NO: 477071 - DNA, 15 bp, Homo sapiens
aacagagttgccatc

SEQ ID NO: 477072 - DNA, 15 bp, Homo sapiens
aaacagagttgccat

SEQ ID NO: 477073 - DNA, 15 bp, Homo sapiens
taaacagagttgcca

SEQ ID NO: 477074 - DNA, 15 bp, Homo sapiens
ataaacagagttgcc

SEQ ID NO: 477075 - DNA, 15 bp, Homo sapiens
cataaacagagttgc

SEQ ID NO: 477076 - DNA, 15 bp, Homo sapiens
tcataaacagagttg

SEQ ID NO: 477077 - DNA, 15 bp, Homo sapiens
atcataaacagagtt

SEQ ID NO: 477078 - DNA, 15 bp, Homo sapiens
aatcataaacagagt

SEQ ID NO: 477079 - DNA, 15 bp, Homo sapiens
caatcataaacagag

SEQ ID NO: 477080 - DNA, 15 bp, Homo sapiens
gcaatcataaacaga

SEQ ID NO: 477081 - DNA, 15 bp, Homo sapiens
agcaatcataaacag

SEQ ID NO: 477082 - DNA, 15 bp, Homo sapiens
cagcaatcataaaca

SEQ ID NO: 477083 - DNA, 15 bp, Homo sapiens
acagcaatcataaac

SEQ ID NO: 477084 - DNA, 15 bp, Homo sapiens
aacagcaatcataaa

SEQ ID NO: 477085 - DNA, 15 bp, Homo sapiens
aaacagcaatcataa

SEQ ID NO: 477086 - DNA, 15 bp, Homo sapiens
aaaacagcaatcata

SEQ ID NO: 477087 - DNA, 15 bp, Homo sapiens
caaaacagcaatcat

SEQ ID NO: 477088 - DNA, 15 bp, Homo sapiens
ccaaaacagcaatca

SEQ ID NO: 477089 - DNA, 15 bp, Homo sapiens
accaaaacagcaatc

SEQ ID NO: 477090 - DNA, 15 bp, Homo sapiens
aaccaaaacagcaat

SEQ ID NO: 477091 - DNA, 15 bp, Homo sapiens
caaccaaaacagcaa

SEQ ID NO: 477092 - DNA, 15 bp, Homo sapiens
ccaaccaaaacagca

SEQ ID NO: 477093 - DNA, 15 bp, Homo sapiens
tccaaccaaaacagc

SEQ ID NO: 477094 - DNA, 15 bp, Homo sapiens
atccaaccaaaacag

SEQ ID NO: 477095 - DNA, 15 bp, Homo sapiens
aatccaaccaaaaca

SEQ ID NO: 477096 - DNA, 15 bp, Homo sapiens
aaatccaaccaaaac

SEQ ID NO: 477097 - DNA, 15 bp, Homo sapiens
gaaatccaaccaaaa

SEQ ID NO: 477098 - DNA, 15 bp, Homo sapiens
agaaatccaaccaaa

SEQ ID NO: 477099 - DNA, 15 bp, Homo sapiens
tagaaatccaaccaa

SEQ ID NO: 477100 - DNA, 15 bp, Homo sapiens
ttagaaatccaacca

SEQ ID NO: 477101 - DNA, 15 bp, Homo sapiens
attagaaatccaacc

SEQ ID NO: 477102 - DNA, 15 bp, Homo sapiens
tattagaaatccaac

SEQ ID NO: 477103 - DNA, 15 bp, Homo sapiens
atattagaaatccaa

SEQ ID NO: 477104 - DNA, 15 bp, Homo sapiens
aatattagaaatcca

SEQ ID NO: 477105 - DNA, 15 bp, Homo sapiens
gaatattagaaatcc

SEQ ID NO: 477106 - DNA, 15 bp, Homo sapiens
cgaatattagaaatc

SEQ ID NO: 477107 - DNA, 15 bp, Homo sapiens
ccgaatattagaaat

SEQ ID NO: 477108 - DNA, 15 bp, Homo sapiens
accgaatattagaaa

SEQ ID NO: 477109 - DNA, 15 bp, Homo sapiens
caccgaatattagaa

SEQ ID NO: 477110 - DNA, 15 bp, Homo sapiens
acaccgaatattaga

SEQ ID NO: 477111 - DNA, 15 bp, Homo sapiens
cacaccgaatattag

SEQ ID NO: 477112 - DNA, 15 bp, Homo sapiens
tcacaccgaatatta

SEQ ID NO: 477113 - DNA, 15 bp, Homo sapiens
atcacaccgaatatt

SEQ ID NO: 477114 - DNA, 15 bp, Homo sapiens
aatcacaccgaatat

SEQ ID NO: 477115 - DNA, 15 bp, Homo sapiens
taatcacaccgaata

SEQ ID NO: 477116 - DNA, 15 bp, Homo sapiens
ttaatcacaccgaat

SEQ ID NO: 477117 - DNA, 15 bp, Homo sapiens
tttaatcacaccgaa

SEQ ID NO: 477118 - DNA, 15 bp, Homo sapiens
ctttaatcacaccga

SEQ ID NO: 477119 - DNA, 15 bp, Homo sapiens
gctttaatcacaccg

SEQ ID NO: 477120 - DNA, 15 bp, Homo sapiens
tgctttaatcacacc

SEQ ID NO: 477121 - DNA, 15 bp, Homo sapiens
ctgctttaatcacac

SEQ ID NO: 477122 - DNA, 15 bp, Homo sapiens
tctgctttaatcaca

SEQ ID NO: 477123 - DNA, 15 bp, Homo sapiens
ttctgctttaatcac

SEQ ID NO: 477124 - DNA, 15 bp, Homo sapiens
tttctgctttaatca

SEQ ID NO: 477125 - DNA, 15 bp, Homo sapiens
atttctgctttaatc

SEQ ID NO: 477126 - DNA, 15 bp, Homo sapiens
catttctgctttaat

SEQ ID NO: 477127 - DNA, 15 bp, Homo sapiens
gcatttctgctttaa

SEQ ID NO: 477128 - DNA, 15 bp, Homo sapiens
tgcatttctgcttta

SEQ ID NO: 477129 - DNA, 15 bp, Homo sapiens
atgcatttctgcttt

SEQ ID NO: 477130 - DNA, 15 bp, Homo sapiens
aatgcatttctgctt

SEQ ID NO: 477131 - DNA, 15 bp, Homo sapiens
aaatgcatttctgct

SEQ ID NO: 477132 - DNA, 15 bp, Homo sapiens
gaaatgcatttctgc

SEQ ID NO: 477133 - DNA, 15 bp, Homo sapiens
agaaatgcatttctg

SEQ ID NO: 477134 - DNA, 15 bp, Homo sapiens
tagaaatgcatttct

SEQ ID NO: 477135 - DNA, 15 bp, Homo sapiens
ctagaaatgcatttc

SEQ ID NO: 477136 - DNA, 15 bp, Homo sapiens
gctagaaatgcattt

SEQ ID NO: 477137 - DNA, 15 bp, Homo sapiens
ggctagaaatgcatt

SEQ ID NO: 477138 - DNA, 15 bp, Homo sapiens
tggctagaaatgcat

SEQ ID NO: 477139 - DNA, 15 bp, Homo sapiens
gtggctagaaatgca

SEQ ID NO: 477140 - DNA, 15 bp, Homo sapiens
agtggctagaaatgc

SEQ ID NO: 477141 - DNA, 15 bp, Homo sapiens
cagtggctagaaatg

SEQ ID NO: 477142 - DNA, 15 bp, Homo sapiens
gcagtggctagaaat

SEQ ID NO: 477143 - DNA, 15 bp, Homo sapiens
agcagtggctagaaa

SEQ ID NO: 477144 - DNA, 15 bp, Homo sapiens
cagcagtggctagaa

SEQ ID NO: 477145 - DNA, 15 bp, Homo sapiens
tcagcagtggctaga

SEQ ID NO: 477146 - DNA, 15 bp, Homo sapiens
atcagcagtggctag

SEQ ID NO: 477147 - DNA, 15 bp, Homo sapiens
aatcagcagtggcta

SEQ ID NO: 477148 - DNA, 15 bp, Homo sapiens
taatcagcagtggct

SEQ ID NO: 477149 - DNA, 15 bp, Homo sapiens
gtaatcagcagtggc

SEQ ID NO: 477150 - DNA, 15 bp, Homo sapiens
tgtaatcagcagtgg

SEQ ID NO: 477151 - DNA, 15 bp, Homo sapiens
ctgtaatcagcagtg

SEQ ID NO: 477152 - DNA, 15 bp, Homo sapiens
tctgtaatcagcagt

SEQ ID NO: 477153 - DNA, 15 bp, Homo sapiens
gtctgtaatcagcag

SEQ ID NO: 477154 - DNA, 15 bp, Homo sapiens
tgtctgtaatcagca

SEQ ID NO: 477155 - DNA, 15 bp, Homo sapiens
atgtctgtaatcagc

SEQ ID NO: 477156 - DNA, 15 bp, Homo sapiens
tatgtctgtaatcag

SEQ ID NO: 477157 - DNA, 15 bp, Homo sapiens
atatgtctgtaatca

SEQ ID NO: 477158 - DNA, 15 bp, Homo sapiens
aatatgtctgtaatc

SEQ ID NO: 477159 - DNA, 15 bp, Homo sapiens
caatatgtctgtaat

SEQ ID NO: 477160 - DNA, 15 bp, Homo sapiens
gcaatatgtctgtaa

SEQ ID NO: 477161 - DNA, 15 bp, Homo sapiens
tgcaatatgtctgta

SEQ ID NO: 477162 - DNA, 15 bp, Homo sapiens
gtgcaatatgtctgt

SEQ ID NO: 477163 - DNA, 15 bp, Homo sapiens
agtgcaatatgtctg

SEQ ID NO: 477164 - DNA, 15 bp, Homo sapiens
gagtgcaatatgtct

SEQ ID NO: 477165 - DNA, 15 bp, Homo sapiens
agagtgcaatatgtc

SEQ ID NO: 477166 - DNA, 15 bp, Homo sapiens
cagagtgcaatatgt

SEQ ID NO: 477167 - DNA, 15 bp, Homo sapiens
tcagagtgcaatatg

SEQ ID NO: 477168 - DNA, 15 bp, Homo sapiens
atcagagtgcaatat

SEQ ID NO: 477169 - DNA, 15 bp, Homo sapiens
catcagagtgcaata

SEQ ID NO: 477170 - DNA, 15 bp, Homo sapiens
ccatcagagtgcaat

SEQ ID NO: 477171 - DNA, 15 bp, Homo sapiens
cccatcagagtgcaa

SEQ ID NO: 477172 - DNA, 15 bp, Homo sapiens
acccatcagagtgca

SEQ ID NO: 477173 - DNA, 15 bp, Homo sapiens
tacccatcagagtgc

SEQ ID NO: 477174 - DNA, 15 bp, Homo sapiens
atacccatcagagtg

SEQ ID NO: 477175 - DNA, 15 bp, Homo sapiens
gatacccatcagagt

SEQ ID NO: 477176 - DNA, 15 bp, Homo sapiens
cgatacccatcagag

SEQ ID NO: 477177 - DNA, 15 bp, Homo sapiens
gcgatacccatcaga

SEQ ID NO: 477178 - DNA, 15 bp, Homo sapiens
agcgatacccatcag

SEQ ID NO: 477179 - DNA, 15 bp, Homo sapiens
aagcgatacccatca

SEQ ID NO: 477180 - DNA, 15 bp, Homo sapiens
taagcgatacccatc

SEQ ID NO: 477181 - DNA, 15 bp, Homo sapiens
ctaagcgatacccat

SEQ ID NO: 477182 - DNA, 15 bp, Homo sapiens
gctaagcgataccca

SEQ ID NO: 477183 - DNA, 15 bp, Homo sapiens
tgctaagcgataccc

SEQ ID NO: 477184 - DNA, 15 bp, Homo sapiens
ttgctaagcgatacc

SEQ ID NO: 477185 - DNA, 15 bp, Homo sapiens
gttgctaagcgatac

SEQ ID NO: 477186 - DNA, 15 bp, Homo sapiens
agttgctaagcgata

SEQ ID NO: 477187 - DNA, 15 bp, Homo sapiens
aagttgctaagcgat

SEQ ID NO: 477188 - DNA, 15 bp, Homo sapiens
taagttgctaagcga

SEQ ID NO: 477189 - DNA, 15 bp, Homo sapiens
ctaagttgctaagcg

SEQ ID NO: 477190 - DNA, 15 bp, Homo sapiens
actaagttgctaagc

SEQ ID NO: 477191 - DNA, 15 bp, Homo sapiens
cactaagttgctaag

SEQ ID NO: 477192 - DNA, 15 bp, Homo sapiens
gcactaagttgctaa

SEQ ID NO: 477193 - DNA, 15 bp, Homo sapiens
tgcactaagttgcta

SEQ ID NO: 477194 - DNA, 15 bp, Homo sapiens
ctgcactaagttgct

SEQ ID NO: 477195 - DNA, 15 bp, Homo sapiens
actgcactaagttgc

SEQ ID NO: 477196 - DNA, 15 bp, Homo sapiens
tactgcactaagttg

SEQ ID NO: 477197 - DNA, 15 bp, Homo sapiens
ctactgcactaagtt

SEQ ID NO: 477198 - DNA, 15 bp, Homo sapiens
tctactgcactaagt

SEQ ID NO: 477199 - DNA, 15 bp, Homo sapiens
gtctactgcactaag

SEQ ID NO: 477200 - DNA, 15 bp, Homo sapiens
agtctactgcactaa

SEQ ID NO: 477201 - DNA, 15 bp, Homo sapiens
gagtctactgcacta

SEQ ID NO: 477202 - DNA, 15 bp, Homo sapiens
tgagtctactgcact

SEQ ID NO: 477203 - DNA, 15 bp, Homo sapiens
ctgagtctactgcac

SEQ ID NO: 477204 - DNA, 15 bp, Homo sapiens
actgagtctactgca

SEQ ID NO: 477205 - DNA, 15 bp, Homo sapiens
aactgagtctactgc

SEQ ID NO: 477206 - DNA, 15 bp, Homo sapiens
taactgagtctactg

SEQ ID NO: 477207 - DNA, 15 bp, Homo sapiens
ttaactgagtctact

SEQ ID NO: 477208 - DNA, 15 bp, Homo sapiens
tttaactgagtctac

SEQ ID NO: 477209 - DNA, 15 bp, Homo sapiens
ttttaactgagtcta

SEQ ID NO: 477210 - DNA, 15 bp, Homo sapiens
cttttaactgagtct

SEQ ID NO: 477211 - DNA, 15 bp, Homo sapiens
tcttttaactgagtc

SEQ ID NO: 477212 - DNA, 15 bp, Homo sapiens
ttcttttaactgagt

SEQ ID NO: 477213 - DNA, 15 bp, Homo sapiens
cttcttttaactgag

SEQ ID NO: 477214 - DNA, 15 bp, Homo sapiens
acttcttttaactga

SEQ ID NO: 477215 - DNA, 15 bp, Homo sapiens
cacttcttttaactg

SEQ ID NO: 477216 - DNA, 15 bp, Homo sapiens
ccacttcttttaact

SEQ ID NO: 477217 - DNA, 15 bp, Homo sapiens
tccacttcttttaac

SEQ ID NO: 477218 - DNA, 15 bp, Homo sapiens
atccacttcttttaa

SEQ ID NO: 477219 - DNA, 15 bp, Homo sapiens
catccacttctttta

SEQ ID NO: 477220 - DNA, 15 bp, Homo sapiens
acatccacttctttt

SEQ ID NO: 477221 - DNA, 15 bp, Homo sapiens
cacatccacttcttt

SEQ ID NO: 477222 - DNA, 15 bp, Homo sapiens
acacatccacttctt

SEQ ID NO: 477223 - DNA, 15 bp, Homo sapiens
cacacatccacttct

SEQ ID NO: 477224 - DNA, 15 bp, Homo sapiens
gcacacatccacttc

SEQ ID NO: 477225 - DNA, 15 bp, Homo sapiens
ggcacacatccactt

SEQ ID NO: 477226 - DNA, 15 bp, Homo sapiens
tggcacacatccact

SEQ ID NO: 477227 - DNA, 15 bp, Homo sapiens
atggcacacatccac

SEQ ID NO: 477228 - DNA, 15 bp, Homo sapiens
tatggcacacatcca

SEQ ID NO: 477229 - DNA, 15 bp, Homo sapiens
atatggcacacatcc

SEQ ID NO: 477230 - DNA, 15 bp, Homo sapiens
aatatggcacacatc

SEQ ID NO: 477231 - DNA, 15 bp, Homo sapiens
caatatggcacacat

SEQ ID NO: 477232 - DNA, 15 bp, Homo sapiens
tcaatatggcacaca

SEQ ID NO: 477233 - DNA, 15 bp, Homo sapiens
gtcaatatggcacac

SEQ ID NO: 477234 - DNA, 15 bp, Homo sapiens
tgtcaatatggcaca

SEQ ID NO: 477235 - DNA, 15 bp, Homo sapiens
atgtcaatatggcac

SEQ ID NO: 477236 - DNA, 15 bp, Homo sapiens
aatgtcaatatggca

SEQ ID NO: 477237 - DNA, 15 bp, Homo sapiens
aaatgtcaatatggc

SEQ ID NO: 477238 - DNA, 15 bp, Homo sapiens
aaaatgtcaatatgg

SEQ ID NO: 477239 - DNA, 15 bp, Homo sapiens
caaaatgtcaatatg

SEQ ID NO: 477240 - DNA, 15 bp, Homo sapiens
tcaaaatgtcaatat

SEQ ID NO: 477241 - DNA, 15 bp, Homo sapiens
ctcaaaatgtcaata

SEQ ID NO: 477242 - DNA, 15 bp, Homo sapiens
gctcaaaatgtcaat

SEQ ID NO: 477243 - DNA, 15 bp, Homo sapiens
agctcaaaatgtcaa

SEQ ID NO: 477244 - DNA, 15 bp, Homo sapiens
gagctcaaaatgtca

SEQ ID NO: 477245 - DNA, 15 bp, Homo sapiens
tgagctcaaaatgtc

SEQ ID NO: 477246 - DNA, 15 bp, Homo sapiens
gtgagctcaaaatgt

SEQ ID NO: 477247 - DNA, 15 bp, Homo sapiens
tgtgagctcaaaatg

SEQ ID NO: 477248 - DNA, 15 bp, Homo sapiens
atgtgagctcaaaat

SEQ ID NO: 477249 - DNA, 15 bp, Homo sapiens
aatgtgagctcaaaa

SEQ ID NO: 477250 - DNA, 15 bp, Homo sapiens
gaatgtgagctcaaa

SEQ ID NO: 477251 - DNA, 15 bp, Homo sapiens
agaatgtgagctcaa

SEQ ID NO: 477252 - DNA, 15 bp, Homo sapiens
aagaatgtgagctca

SEQ ID NO: 477253 - DNA, 15 bp, Homo sapiens
caagaatgtgagctc

SEQ ID NO: 477254 - DNA, 15 bp, Homo sapiens
acaagaatgtgagct

SEQ ID NO: 477255 - DNA, 15 bp, Homo sapiens
cacaagaatgtgagc

SEQ ID NO: 477256 - DNA, 15 bp, Homo sapiens
ccacaagaatgtgag

SEQ ID NO: 477257 - DNA, 15 bp, Homo sapiens
cccacaagaatgtga

SEQ ID NO: 477258 - DNA, 15 bp, Homo sapiens
acccacaagaatgtg

SEQ ID NO: 477259 - DNA, 15 bp, Homo sapiens
tacccacaagaatgt

SEQ ID NO: 477260 - DNA, 15 bp, Homo sapiens
ttacccacaagaatg

SEQ ID NO: 477261 - DNA, 15 bp, Homo sapiens
attacccacaagaat

SEQ ID NO: 477262 - DNA, 15 bp, Homo sapiens
tattacccacaagaa

SEQ ID NO: 477263 - DNA, 15 bp, Homo sapiens
atattacccacaaga

SEQ ID NO: 477264 - DNA, 15 bp, Homo sapiens
tatattacccacaag

SEQ ID NO: 477265 - DNA, 15 bp, Homo sapiens
ttatattacccacaa

SEQ ID NO: 477266 - DNA, 15 bp, Homo sapiens
tttatattacccaca

SEQ ID NO: 477267 - DNA, 15 bp, Homo sapiens
ttttatattacccac

SEQ ID NO: 477268 - DNA, 15 bp, Homo sapiens
attttatattaccca

SEQ ID NO: 477269 - DNA, 15 bp, Homo sapiens
aattttatattaccc

SEQ ID NO: 477270 - DNA, 15 bp, Homo sapiens
gaattttatattacc

SEQ ID NO: 477271 - DNA, 15 bp, Homo sapiens
ggaattttatattac

SEQ ID NO: 477272 - DNA, 15 bp, Homo sapiens
aggaattttatatta

SEQ ID NO: 477273 - DNA, 15 bp, Homo sapiens
aaggaattttatatt

SEQ ID NO: 477274 - DNA, 15 bp, Homo sapiens
taaggaattttatat

SEQ ID NO: 477275 - DNA, 15 bp, Homo sapiens
ttaaggaattttata

SEQ ID NO: 477276 - DNA, 15 bp, Homo sapiens
gttaaggaattttat

SEQ ID NO: 477277 - DNA, 15 bp, Homo sapiens
ggttaaggaatttta

SEQ ID NO: 477278 - DNA, 15 bp, Homo sapiens
aggttaaggaatttt

SEQ ID NO: 477279 - DNA, 15 bp, Homo sapiens
caggttaaggaattt

SEQ ID NO: 477280 - DNA, 15 bp, Homo sapiens
tcaggttaaggaatt

SEQ ID NO: 477281 - DNA, 15 bp, Homo sapiens
atcaggttaaggaat

SEQ ID NO: 477282 - DNA, 15 bp, Homo sapiens
tatcaggttaaggaa

SEQ ID NO: 477283 - DNA, 15 bp, Homo sapiens
ttatcaggttaagga

SEQ ID NO: 477284 - DNA, 15 bp, Homo sapiens
attatcaggttaagg

SEQ ID NO: 477285 - DNA, 15 bp, Homo sapiens
tattatcaggttaag

SEQ ID NO: 477286 - DNA, 15 bp, Homo sapiens
atattatcaggttaa

SEQ ID NO: 477287 - DNA, 15 bp, Homo sapiens
aatattatcaggtta

SEQ ID NO: 477288 - DNA, 15 bp, Homo sapiens
caatattatcaggtt

SEQ ID NO: 477289 - DNA, 15 bp, Homo sapiens
gcaatattatcaggt

SEQ ID NO: 477290 - DNA, 15 bp, Homo sapiens
tgcaatattatcagg

SEQ ID NO: 477291 - DNA, 15 bp, Homo sapiens
ctgcaatattatcag

SEQ ID NO: 477292 - DNA, 15 bp, Homo sapiens
gctgcaatattatca

SEQ ID NO: 477293 - DNA, 15 bp, Homo sapiens
agctgcaatattatc

SEQ ID NO: 477294 - DNA, 15 bp, Homo sapiens
tagctgcaatattat

SEQ ID NO: 477295 - DNA, 15 bp, Homo sapiens
ttagctgcaatatta

SEQ ID NO: 477296 - DNA, 15 bp, Homo sapiens
tttagctgcaatatt

SEQ ID NO: 477297 - DNA, 15 bp, Homo sapiens
gtttagctgcaatat

SEQ ID NO: 477298 - DNA, 15 bp, Homo sapiens
ggtttagctgcaata

SEQ ID NO: 477299 - DNA, 15 bp, Homo sapiens
aggtttagctgcaat

SEQ ID NO: 477300 - DNA, 15 bp, Homo sapiens
taggtttagctgcaa

SEQ ID NO: 477301 - DNA, 15 bp, Homo sapiens
ctaggtttagctgca

SEQ ID NO: 477302 - DNA, 15 bp, Homo sapiens
actaggtttagctgc

SEQ ID NO: 477303 - DNA, 15 bp, Homo sapiens
tactaggtttagctg

SEQ ID NO: 477304 - DNA, 15 bp, Homo sapiens
atactaggtttagct

SEQ ID NO: 477305 - DNA, 15 bp, Homo sapiens
aatactaggtttagc

SEQ ID NO: 477306 - DNA, 15 bp, Homo sapiens
aaatactaggtttag

SEQ ID NO: 477307 - DNA, 15 bp, Homo sapiens
taaatactaggttta

SEQ ID NO: 477308 - DNA, 15 bp, Homo sapiens
ctaaatactaggttt

SEQ ID NO: 477309 - DNA, 15 bp, Homo sapiens
cctaaatactaggtt

SEQ ID NO: 477310 - DNA, 15 bp, Homo sapiens
ccctaaatactaggt

SEQ ID NO: 477311 - DNA, 15 bp, Homo sapiens
accctaaatactagg

SEQ ID NO: 477312 - DNA, 15 bp, Homo sapiens
gaccctaaatactag

SEQ ID NO: 477313 - DNA, 15 bp, Homo sapiens
agaccctaaatacta

SEQ ID NO: 477314 - DNA, 15 bp, Homo sapiens
tagaccctaaatact

SEQ ID NO: 477315 - DNA, 15 bp, Homo sapiens
ttagaccctaaatac

SEQ ID NO: 477316 - DNA, 15 bp, Homo sapiens
cttagaccctaaata

SEQ ID NO: 477317 - DNA, 15 bp, Homo sapiens
acttagaccctaaat

SEQ ID NO: 477318 - DNA, 15 bp, Homo sapiens
aacttagaccctaaa

SEQ ID NO: 477319 - DNA, 15 bp, Homo sapiens
caacttagaccctaa

SEQ ID NO: 477320 - DNA, 15 bp, Homo sapiens
tcaacttagacccta

SEQ ID NO: 477321 - DNA, 15 bp, Homo sapiens
ttcaacttagaccct

SEQ ID NO: 477322 - DNA, 15 bp, Homo sapiens
attcaacttagaccc

SEQ ID NO: 477323 - DNA, 15 bp, Homo sapiens
cattcaacttagacc

SEQ ID NO: 477324 - DNA, 15 bp, Homo sapiens
tcattcaacttagac

SEQ ID NO: 477325 - DNA, 15 bp, Homo sapiens
ctcattcaacttaga

SEQ ID NO: 477326 - DNA, 15 bp, Homo sapiens
actcattcaacttag

SEQ ID NO: 477327 - DNA, 15 bp, Homo sapiens
tactcattcaactta

SEQ ID NO: 477328 - DNA, 15 bp, Homo sapiens
atactcattcaactt

SEQ ID NO: 477329 - DNA, 15 bp, Homo sapiens
aatactcattcaact

SEQ ID NO: 477330 - DNA, 15 bp, Homo sapiens
taatactcattcaac

SEQ ID NO: 477331 - DNA, 15 bp, Homo sapiens
gtaatactcattcaa

SEQ ID NO: 477332 - DNA, 15 bp, Homo sapiens
ggtaatactcattca

SEQ ID NO: 477333 - DNA, 15 bp, Homo sapiens
tggtaatactcattc

SEQ ID NO: 477334 - DNA, 15 bp, Homo sapiens
ttggtaatactcatt

SEQ ID NO: 477335 - DNA, 15 bp, Homo sapiens
attggtaatactcat

SEQ ID NO: 477336 - DNA, 15 bp, Homo sapiens
aattggtaatactca

SEQ ID NO: 477337 - DNA, 15 bp, Homo sapiens
aaattggtaatactc

SEQ ID NO: 477338 - DNA, 15 bp, Homo sapiens
aaaattggtaatact

SEQ ID NO: 477339 - DNA, 15 bp, Homo sapiens
taaaattggtaatac

SEQ ID NO: 477340 - DNA, 15 bp, Homo sapiens
ctaaaattggtaata

SEQ ID NO: 477341 - DNA, 15 bp, Homo sapiens
tctaaaattggtaat

SEQ ID NO: 477342 - DNA, 15 bp, Homo sapiens
ttctaaaattggtaa

SEQ ID NO: 477343 - DNA, 15 bp, Homo sapiens
cttctaaaattggta

SEQ ID NO: 477344 - DNA, 15 bp, Homo sapiens
acttctaaaattggt

SEQ ID NO: 477345 - DNA, 15 bp, Homo sapiens
tacttctaaaattgg

SEQ ID NO: 477346 - DNA, 15 bp, Homo sapiens
ttacttctaaaattg

SEQ ID NO: 477347 - DNA, 15 bp, Homo sapiens
attacttctaaaatt

SEQ ID NO: 477348 - DNA, 15 bp, Homo sapiens
gattacttctaaaat

SEQ ID NO: 477349 - DNA, 15 bp, Homo sapiens
tgattacttctaaaa

SEQ ID NO: 477350 - DNA, 15 bp, Homo sapiens
gtgattacttctaaa

SEQ ID NO: 477351 - DNA, 15 bp, Homo sapiens
ggtgattacttctaa

SEQ ID NO: 477352 - DNA, 15 bp, Homo sapiens
aggtgattacttcta

SEQ ID NO: 477353 - DNA, 15 bp, Homo sapiens
gaggtgattacttct

SEQ ID NO: 477354 - DNA, 15 bp, Homo sapiens
ggaggtgattacttc

SEQ ID NO: 477355 - DNA, 15 bp, Homo sapiens
aggaggtgattactt

SEQ ID NO: 477356 - DNA, 15 bp, Homo sapiens
aaggaggtgattact

SEQ ID NO: 477357 - DNA, 15 bp, Homo sapiens
caaggaggtgattac

SEQ ID NO: 477358 - DNA, 15 bp, Homo sapiens
ccaaggaggtgatta

SEQ ID NO: 477359 - DNA, 15 bp, Homo sapiens
accaaggaggtgatt

SEQ ID NO: 477360 - DNA, 15 bp, Homo sapiens
aaccaaggaggtgat

SEQ ID NO: 477361 - DNA, 15 bp, Homo sapiens
taaccaaggaggtga

SEQ ID NO: 477362 - DNA, 15 bp, Homo sapiens
ctaaccaaggaggtg

SEQ ID NO: 477363 - DNA, 15 bp, Homo sapiens
cctaaccaaggaggt

SEQ ID NO: 477364 - DNA, 15 bp, Homo sapiens
ccctaaccaaggagg

SEQ ID NO: 477365 - DNA, 15 bp, Homo sapiens
tccctaaccaaggag

SEQ ID NO: 477366 - DNA, 15 bp, Homo sapiens
ttccctaaccaagga

SEQ ID NO: 477367 - DNA, 15 bp, Homo sapiens
tttccctaaccaagg

SEQ ID NO: 477368 - DNA, 15 bp, Homo sapiens
atttccctaaccaag

SEQ ID NO: 477369 - DNA, 15 bp, Homo sapiens
catttccctaaccaa

SEQ ID NO: 477370 - DNA, 15 bp, Homo sapiens
tcatttccctaacca

SEQ ID NO: 477371 - DNA, 15 bp, Homo sapiens
gtcatttccctaacc

SEQ ID NO: 477372 - DNA, 15 bp, Homo sapiens
tgtcatttccctaac

SEQ ID NO: 477373 - DNA, 15 bp, Homo sapiens
ctgtcatttccctaa

SEQ ID NO: 477374 - DNA, 15 bp, Homo sapiens
actgtcatttcccta

SEQ ID NO: 477375 - DNA, 15 bp, Homo sapiens
aactgtcatttccct

SEQ ID NO: 477376 - DNA, 15 bp, Homo sapiens
caactgtcatttccc

SEQ ID NO: 477377 - DNA, 15 bp, Homo sapiens
gcaactgtcatttcc

SEQ ID NO: 477378 - DNA, 15 bp, Homo sapiens
tgcaactgtcatttc

SEQ ID NO: 477379 - DNA, 15 bp, Homo sapiens
gtgcaactgtcattt

SEQ ID NO: 477380 - DNA, 15 bp, Homo sapiens
tgtgcaactgtcatt

SEQ ID NO: 477381 - DNA, 15 bp, Homo sapiens
ctgtgcaactgtcat

SEQ ID NO: 477382 - DNA, 15 bp, Homo sapiens
cctgtgcaactgtca

SEQ ID NO: 477383 - DNA, 15 bp, Homo sapiens
acctgtgcaactgtc

SEQ ID NO: 477384 - DNA, 15 bp, Homo sapiens
cacctgtgcaactgt

SEQ ID NO: 477385 - DNA, 15 bp, Homo sapiens
ccacctgtgcaactg

SEQ ID NO: 477386 - DNA, 15 bp, Homo sapiens
tccacctgtgcaact

SEQ ID NO: 477387 - DNA, 15 bp, Homo sapiens
gtccacctgtgcaac

SEQ ID NO: 477388 - DNA, 15 bp, Homo sapiens
tgtccacctgtgcaa

SEQ ID NO: 477389 - DNA, 15 bp, Homo sapiens
ctgtccacctgtgca

SEQ ID NO: 477390 - DNA, 15 bp, Homo sapiens
gctgtccacctgtgc

SEQ ID NO: 477391 - DNA, 15 bp, Homo sapiens
ggctgtccacctgtg

SEQ ID NO: 477392 - DNA, 15 bp, Homo sapiens
tggctgtccacctgt

SEQ ID NO: 477393 - DNA, 15 bp, Homo sapiens
ctggctgtccacctg

SEQ ID NO: 477394 - DNA, 15 bp, Homo sapiens
tctggctgtccacct

SEQ ID NO: 477395 - DNA, 15 bp, Homo sapiens
ttctggctgtccacc

SEQ ID NO: 477396 - DNA, 15 bp, Homo sapiens
tttctggctgtccac

SEQ ID NO: 477397 - DNA, 15 bp, Homo sapiens
ctttctggctgtcca

SEQ ID NO: 477398 - DNA, 15 bp, Homo sapiens
gctttctggctgtcc

SEQ ID NO: 477399 - DNA, 15 bp, Homo sapiens
agctttctggctgtc

SEQ ID NO: 477400 - DNA, 15 bp, Homo sapiens
cagctttctggctgt

SEQ ID NO: 477401 - DNA, 15 bp, Homo sapiens
tcagctttctggctg

SEQ ID NO: 477402 - DNA, 15 bp, Homo sapiens
ttcagctttctggct

SEQ ID NO: 477403 - DNA, 15 bp, Homo sapiens
attcagctttctggc

SEQ ID NO: 477404 - DNA, 15 bp, Homo sapiens
cattcagctttctgg

SEQ ID NO: 477405 - DNA, 15 bp, Homo sapiens
acattcagctttctg

SEQ ID NO: 477406 - DNA, 15 bp, Homo sapiens
aacattcagctttct

SEQ ID NO: 477407 - DNA, 15 bp, Homo sapiens
taacattcagctttc

SEQ ID NO: 477408 - DNA, 15 bp, Homo sapiens
ataacattcagcttt

SEQ ID NO: 477409 - DNA, 15 bp, Homo sapiens
gataacattcagctt

SEQ ID NO: 477410 - DNA, 15 bp, Homo sapiens
tgataacattcagct

SEQ ID NO: 477411 - DNA, 15 bp, Homo sapiens
ctgataacattcagc

SEQ ID NO: 477412 - DNA, 15 bp, Homo sapiens
actgataacattcag

SEQ ID NO: 477413 - DNA, 15 bp, Homo sapiens
aactgataacattca

SEQ ID NO: 477414 - DNA, 15 bp, Homo sapiens
taactgataacattc

SEQ ID NO: 477415 - DNA, 15 bp, Homo sapiens
ttaactgataacatt

SEQ ID NO: 477416 - DNA, 15 bp, Homo sapiens
tttaactgataacat

SEQ ID NO: 477417 - DNA, 15 bp, Homo sapiens
atttaactgataaca

SEQ ID NO: 477418 - DNA, 15 bp, Homo sapiens
gatttaactgataac

SEQ ID NO: 477419 - DNA, 15 bp, Homo sapiens
agatttaactgataa

SEQ ID NO: 477420 - DNA, 15 bp, Homo sapiens
aagatttaactgata

SEQ ID NO: 477421 - DNA, 15 bp, Homo sapiens
taagatttaactgat

SEQ ID NO: 477422 - DNA, 15 bp, Homo sapiens
gtaagatttaactga

SEQ ID NO: 477423 - DNA, 15 bp, Homo sapiens
tgtaagatttaactg

SEQ ID NO: 477424 - DNA, 15 bp, Homo sapiens
atgtaagatttaact

SEQ ID NO: 477425 - DNA, 15 bp, Homo sapiens
gatgtaagatttaac

SEQ ID NO: 477426 - DNA, 15 bp, Homo sapiens
agatgtaagatttaa

SEQ ID NO: 477427 - DNA, 15 bp, Homo sapiens
gagatgtaagattta

SEQ ID NO: 477428 - DNA, 15 bp, Homo sapiens
agagatgtaagattt

SEQ ID NO: 477429 - DNA, 15 bp, Homo sapiens
gagagatgtaagatt

SEQ ID NO: 477430 - DNA, 15 bp, Homo sapiens
ggagagatgtaagat

SEQ ID NO: 477431 - DNA, 15 bp, Homo sapiens
aggagagatgtaaga

SEQ ID NO: 477432 - DNA, 15 bp, Homo sapiens
aaggagagatgtaag

SEQ ID NO: 477433 - DNA, 15 bp, Homo sapiens
taaggagagatgtaa

SEQ ID NO: 477434 - DNA, 15 bp, Homo sapiens
ttaaggagagatgta

SEQ ID NO: 477435 - DNA, 15 bp, Homo sapiens
gttaaggagagatgt

SEQ ID NO: 477436 - DNA, 15 bp, Homo sapiens
ggttaaggagagatg

SEQ ID NO: 477437 - DNA, 15 bp, Homo sapiens
aggttaaggagagat

SEQ ID NO: 477438 - DNA, 15 bp, Homo sapiens
caggttaaggagaga

SEQ ID NO: 477439 - DNA, 15 bp, Homo sapiens
gcaggttaaggagag

SEQ ID NO: 477440 - DNA, 15 bp, Homo sapiens
ggcaggttaaggaga

SEQ ID NO: 477441 - DNA, 15 bp, Homo sapiens
aggcaggttaaggag

SEQ ID NO: 477442 - DNA, 15 bp, Homo sapiens
aaggcaggttaagga

SEQ ID NO: 477443 - DNA, 15 bp, Homo sapiens
gaaggcaggttaagg

SEQ ID NO: 477444 - DNA, 15 bp, Homo sapiens
cgaaggcaggttaag

SEQ ID NO: 477445 - DNA, 15 bp, Homo sapiens
acgaaggcaggttaa

SEQ ID NO: 477446 - DNA, 15 bp, Homo sapiens
cacgaaggcaggtta

SEQ ID NO: 477447 - DNA, 15 bp, Homo sapiens
ccacgaaggcaggtt

SEQ ID NO: 477448 - DNA, 15 bp, Homo sapiens
accacgaaggcaggt

SEQ ID NO: 477449 - DNA, 15 bp, Homo sapiens
caccacgaaggcagg

SEQ ID NO: 477450 - DNA, 15 bp, Homo sapiens
gcaccacgaaggcag

SEQ ID NO: 477451 - DNA, 15 bp, Homo sapiens
ggcaccacgaaggca

SEQ ID NO: 477452 - DNA, 15 bp, Homo sapiens
tggcaccacgaaggc

SEQ ID NO: 477453 - DNA, 15 bp, Homo sapiens
ttggcaccacgaagg

SEQ ID NO: 477454 - DNA, 15 bp, Homo sapiens
tttggcaccacgaag

SEQ ID NO: 477455 - DNA, 15 bp, Homo sapiens
atttggcaccacgaa

SEQ ID NO: 477456 - DNA, 15 bp, Homo sapiens
tatttggcaccacga

SEQ ID NO: 477457 - DNA, 15 bp, Homo sapiens
ctatttggcaccacg

SEQ ID NO: 477458 - DNA, 15 bp, Homo sapiens
gctatttggcaccac

SEQ ID NO: 477459 - DNA, 15 bp, Homo sapiens
tgctatttggcacca

SEQ ID NO: 477460 - DNA, 15 bp, Homo sapiens
ttgctatttggcacc

SEQ ID NO: 477461 - DNA, 15 bp, Homo sapiens
cttgctatttggcac

SEQ ID NO: 477462 - DNA, 15 bp, Homo sapiens
acttgctatttggca

SEQ ID NO: 477463 - DNA, 15 bp, Homo sapiens
aacttgctatttggc

SEQ ID NO: 477464 - DNA, 15 bp, Homo sapiens
aaacttgctatttgg

SEQ ID NO: 477465 - DNA, 15 bp, Homo sapiens
gaaacttgctatttg

SEQ ID NO: 477466 - DNA, 15 bp, Homo sapiens
agaaacttgctattt

SEQ ID NO: 477467 - DNA, 15 bp, Homo sapiens
tagaaacttgctatt

SEQ ID NO: 477468 - DNA, 15 bp, Homo sapiens
ttagaaacttgctat

SEQ ID NO: 477469 - DNA, 15 bp, Homo sapiens
attagaaacttgcta

SEQ ID NO: 477470 - DNA, 15 bp, Homo sapiens
aattagaaacttgct

SEQ ID NO: 477471 - DNA, 15 bp, Homo sapiens
caattagaaacttgc

SEQ ID NO: 477472 - DNA, 15 bp, Homo sapiens
tcaattagaaacttg

SEQ ID NO: 477473 - DNA, 15 bp, Homo sapiens
ttcaattagaaactt

SEQ ID NO: 477474 - DNA, 15 bp, Homo sapiens
tttcaattagaaact

SEQ ID NO: 477475 - DNA, 15 bp, Homo sapiens
gtttcaattagaaac

SEQ ID NO: 477476 - DNA, 15 bp, Homo sapiens
agtttcaattagaaa

SEQ ID NO: 477477 - DNA, 15 bp, Homo sapiens
cagtttcaattagaa

SEQ ID NO: 477478 - DNA, 15 bp, Homo sapiens
tcagtttcaattaga

SEQ ID NO: 477479 - DNA, 15 bp, Homo sapiens
gtcagtttcaattag

SEQ ID NO: 477480 - DNA, 15 bp, Homo sapiens
tgtcagtttcaatta

SEQ ID NO: 477481 - DNA, 15 bp, Homo sapiens
ttgtcagtttcaatt

SEQ ID NO: 477482 - DNA, 15 bp, Homo sapiens
tttgtcagtttcaat

SEQ ID NO: 477483 - DNA, 15 bp, Homo sapiens
atttgtcagtttcaa

SEQ ID NO: 477484 - DNA, 15 bp, Homo sapiens
aatttgtcagtttca

SEQ ID NO: 477485 - DNA, 15 bp, Homo sapiens
caatttgtcagtttc

SEQ ID NO: 477486 - DNA, 15 bp, Homo sapiens
acaatttgtcagttt

SEQ ID NO: 477487 - DNA, 15 bp, Homo sapiens
tacaatttgtcagtt

SEQ ID NO: 477488 - DNA, 15 bp, Homo sapiens
ctacaatttgtcagt

SEQ ID NO: 477489 - DNA, 15 bp, Homo sapiens
cctacaatttgtcag

SEQ ID NO: 477490 - DNA, 15 bp, Homo sapiens
acctacaatttgtca

SEQ ID NO: 477491 - DNA, 15 bp, Homo sapiens
cacctacaatttgtc

SEQ ID NO: 477492 - DNA, 15 bp, Homo sapiens
acacctacaatttgt

SEQ ID NO: 477493 - DNA, 15 bp, Homo sapiens
cacacctacaatttg

SEQ ID NO: 477494 - DNA, 15 bp, Homo sapiens
acacacctacaattt

SEQ ID NO: 477495 - DNA, 15 bp, Homo sapiens
tacacacctacaatt

SEQ ID NO: 477496 - DNA, 15 bp, Homo sapiens
ctacacacctacaat

SEQ ID NO: 477497 - DNA, 15 bp, Homo sapiens
gctacacacctacaa

SEQ ID NO: 477498 - DNA, 15 bp, Homo sapiens
agctacacacctaca

SEQ ID NO: 477499 - DNA, 15 bp, Homo sapiens
aagctacacacctac

SEQ ID NO: 477500 - DNA, 15 bp, Homo sapiens
aaagctacacaccta

SEQ ID NO: 477501 - DNA, 15 bp, Homo sapiens
aaaagctacacacct

SEQ ID NO: 477502 - DNA, 15 bp, Homo sapiens
aaaaagctacacacc

SEQ ID NO: 477503 - DNA, 15 bp, Homo sapiens
aaaaaagctacacac

SEQ ID NO: 477504 - DNA, 15 bp, Homo sapiens
aaaaaaagctacaca

SEQ ID NO: 477505 - DNA, 15 bp, Homo sapiens
aaaaaaaagctacac

SEQ ID NO: 477506 - DNA, 15 bp, Homo sapiens
aaaaaaaaagctaca

SEQ ID NO: 477507 - DNA, 15 bp, Homo sapiens
aaaaaaaaaagctac

SEQ ID NO: 477508 - DNA, 15 bp, Homo sapiens
aaaaaaaaaaagcta

SEQ ID NO: 477509 - DNA, 15 bp, Homo sapiens
aaaaaaaaaaaagct

SEQ ID NO: 477510 - DNA, 15 bp, Homo sapiens
caaaaaaaaaaaaaa

SEQ ID NO: 477511 - DNA, 15 bp, Homo sapiens
tcaaaaaaaaaaaaa

SEQ ID NO: 477512 - DNA, 15 bp, Homo sapiens
ctcaaaaaaaaaaaa

SEQ ID NO: 477513 - DNA, 15 bp, Homo sapiens
ctgtctcaaaaaaaa

SEQ ID NO: 477514 - DNA, 15 bp, Homo sapiens
tctgtctcaaaaaaa

SEQ ID NO: 477515 - DNA, 15 bp, Homo sapiens
ctctgtctcaaaaaa

SEQ ID NO: 477516 - DNA, 15 bp, Homo sapiens
actctgtctcaaaaa

SEQ ID NO: 477517 - DNA, 15 bp, Homo sapiens
aactctgtctcaaaa

SEQ ID NO: 477518 - DNA, 15 bp, Homo sapiens
aaactctgtctcaaa

SEQ ID NO: 477519 - DNA, 15 bp, Homo sapiens
gaaactctgtctcaa

SEQ ID NO: 477520 - DNA, 15 bp, Homo sapiens
cgaaactctgtctca

SEQ ID NO: 477521 - DNA, 15 bp, Homo sapiens
gcgaaactctgtctc

SEQ ID NO: 477522 - DNA, 15 bp, Homo sapiens
agcgaaactctgtct

SEQ ID NO: 477523 - DNA, 15 bp, Homo sapiens
gagcgaaactctgtc

SEQ ID NO: 477524 - DNA, 15 bp, Homo sapiens
agagcgaaactctgt

SEQ ID NO: 477525 - DNA, 15 bp, Homo sapiens
aagagcgaaactctg

SEQ ID NO: 477526 - DNA, 15 bp, Homo sapiens
caagagcgaaactct

SEQ ID NO: 477527 - DNA, 15 bp, Homo sapiens
acaagagcgaaactc

SEQ ID NO: 477528 - DNA, 15 bp, Homo sapiens
gacaagagcgaaact

SEQ ID NO: 477529 - DNA, 15 bp, Homo sapiens
agacaagagcgaaac

SEQ ID NO: 477530 - DNA, 15 bp, Homo sapiens
gagacaagagcgaaa

SEQ ID NO: 477531 - DNA, 15 bp, Homo sapiens
ggagacaagagcgaa

SEQ ID NO: 477532 - DNA, 15 bp, Homo sapiens
aggagacaagagcga

SEQ ID NO: 477533 - DNA, 15 bp, Homo sapiens
taggagacaagagcg

SEQ ID NO: 477534 - DNA, 15 bp, Homo sapiens
ctaggagacaagagc

SEQ ID NO: 477535 - DNA, 15 bp, Homo sapiens
cctaggagacaagag

SEQ ID NO: 477536 - DNA, 15 bp, Homo sapiens
gcctaggagacaaga

SEQ ID NO: 477537 - DNA, 15 bp, Homo sapiens
agcctaggagacaag

SEQ ID NO: 477538 - DNA, 15 bp, Homo sapiens
cagcctaggagacaa

SEQ ID NO: 477539 - DNA, 15 bp, Homo sapiens
ccagcctaggagaca

SEQ ID NO: 477540 - DNA, 15 bp, Homo sapiens
tccagcctaggagac

SEQ ID NO: 477541 - DNA, 15 bp, Homo sapiens
ctccagcctaggaga

SEQ ID NO: 477542 - DNA, 15 bp, Homo sapiens
actccagcctaggag

SEQ ID NO: 477543 - DNA, 15 bp, Homo sapiens
cactccagcctagga

SEQ ID NO: 477544 - DNA, 15 bp, Homo sapiens
ccattgcactccagc

SEQ ID NO: 477545 - DNA, 15 bp, Homo sapiens
cccattgcactccag

SEQ ID NO: 477546 - DNA, 15 bp, Homo sapiens
ccccattgcactcca

SEQ ID NO: 477547 - DNA, 15 bp, Homo sapiens
tccccattgcactcc

SEQ ID NO: 477548 - DNA, 15 bp, Homo sapiens
ctccccattgcactc

SEQ ID NO: 477549 - DNA, 15 bp, Homo sapiens
tctccccattgcact

SEQ ID NO: 477550 - DNA, 15 bp, Homo sapiens
atctccccattgcac

SEQ ID NO: 477551 - DNA, 15 bp, Homo sapiens
gatctccccattgca

SEQ ID NO: 477552 - DNA, 15 bp, Homo sapiens
agatctccccattgc

SEQ ID NO: 477553 - DNA, 15 bp, Homo sapiens
gagatctccccattg

SEQ ID NO: 477554 - DNA, 15 bp, Homo sapiens
tgagatctccccatt

SEQ ID NO: 477555 - DNA, 15 bp, Homo sapiens
ctgagatctccccat

SEQ ID NO: 477556 - DNA, 15 bp, Homo sapiens
gctgagatctcccca

SEQ ID NO: 477557 - DNA, 15 bp, Homo sapiens
tgctgagatctcccc

SEQ ID NO: 477558 - DNA, 15 bp, Homo sapiens
atgctgagatctccc

SEQ ID NO: 477559 - DNA, 15 bp, Homo sapiens
tatgctgagatctcc

SEQ ID NO: 477560 - DNA, 15 bp, Homo sapiens
gtatgctgagatctc

SEQ ID NO: 477561 - DNA, 15 bp, Homo sapiens
agtatgctgagatct

SEQ ID NO: 477562 - DNA, 15 bp, Homo sapiens
cagtatgctgagatc

SEQ ID NO: 477563 - DNA, 15 bp, Homo sapiens
gcagtatgctgagat

SEQ ID NO: 477564 - DNA, 15 bp, Homo sapiens
tgcagtatgctgaga

SEQ ID NO: 477565 - DNA, 15 bp, Homo sapiens
ttgcagtatgctgag

SEQ ID NO: 477566 - DNA, 15 bp, Homo sapiens
gttgcagtatgctga

SEQ ID NO: 477567 - DNA, 15 bp, Homo sapiens
ggttgcagtatgctg

SEQ ID NO: 477568 - DNA, 15 bp, Homo sapiens
aggttgcagtatgct

SEQ ID NO: 477569 - DNA, 15 bp, Homo sapiens
gaggttgcagtatgc

SEQ ID NO: 477570 - DNA, 15 bp, Homo sapiens
agaggttgcagtatg

SEQ ID NO: 477571 - DNA, 15 bp, Homo sapiens
cagaggttgcagtat

SEQ ID NO: 477572 - DNA, 15 bp, Homo sapiens
ggcttgaacccagga

SEQ ID NO: 477573 - DNA, 15 bp, Homo sapiens
tggcttgaacccagg

SEQ ID NO: 477574 - DNA, 15 bp, Homo sapiens
atggcttgaacccag

SEQ ID NO: 477575 - DNA, 15 bp, Homo sapiens
aatggcttgaaccca

SEQ ID NO: 477576 - DNA, 15 bp, Homo sapiens
gaatggcttgaaccc

SEQ ID NO: 477577 - DNA, 15 bp, Homo sapiens
agaatggcttgaacc

SEQ ID NO: 477578 - DNA, 15 bp, Homo sapiens
gagaatggcttgaac

SEQ ID NO: 477579 - DNA, 15 bp, Homo sapiens
ggagaatggcttgaa

SEQ ID NO: 477580 - DNA, 15 bp, Homo sapiens
aggagaatggcttga

SEQ ID NO: 477581 - DNA, 15 bp, Homo sapiens
caggagaatggcttg

SEQ ID NO: 477582 - DNA, 15 bp, Homo sapiens
gcaggagaatggctt

SEQ ID NO: 477583 - DNA, 15 bp, Homo sapiens
ggcaggagaatggct

SEQ ID NO: 477584 - DNA, 15 bp, Homo sapiens
aggcaggagaatggc

SEQ ID NO: 477585 - DNA, 15 bp, Homo sapiens
tacttgggaggctga

SEQ ID NO: 477586 - DNA, 15 bp, Homo sapiens
ctacttgggaggctg

SEQ ID NO: 477587 - DNA, 15 bp, Homo sapiens
gctacttgggaggct

SEQ ID NO: 477588 - DNA, 15 bp, Homo sapiens
agctacttgggaggc

SEQ ID NO: 477589 - DNA, 15 bp, Homo sapiens
cagctacttgggagg

SEQ ID NO: 477590 - DNA, 15 bp, Homo sapiens
gggcgcctgtaatcc

SEQ ID NO: 477591 - DNA, 15 bp, Homo sapiens
tgggcgcctgtaatc

SEQ ID NO: 477592 - DNA, 15 bp, Homo sapiens
gtgggcgcctgtaat

SEQ ID NO: 477593 - DNA, 15 bp, Homo sapiens
ggtgggcgcctgtaa

SEQ ID NO: 477594 - DNA, 15 bp, Homo sapiens
tggtgggcgcctgta

SEQ ID NO: 477595 - DNA, 15 bp, Homo sapiens
gtggtgggcgcctgt

SEQ ID NO: 477596 - DNA, 15 bp, Homo sapiens
ggtggtgggcgcctg

SEQ ID NO: 477597 - DNA, 15 bp, Homo sapiens
tggtggtgggcgcct

SEQ ID NO: 477598 - DNA, 15 bp, Homo sapiens
gtggtggtgggcgcc

SEQ ID NO: 477599 - DNA, 15 bp, Homo sapiens
cgtggtggtgggcgc

SEQ ID NO: 477600 - DNA, 15 bp, Homo sapiens
gcgtggtggtgggcg

SEQ ID NO: 477601 - DNA, 15 bp, Homo sapiens
ggcgtggtggtgggc

SEQ ID NO: 477602 - DNA, 15 bp, Homo sapiens
aggcgtggtggtggg

SEQ ID NO: 477603 - DNA, 15 bp, Homo sapiens
caggcgtggtggtgg

SEQ ID NO: 477604 - DNA, 15 bp, Homo sapiens
gcaggcgtggtggtg

SEQ ID NO: 477605 - DNA, 15 bp, Homo sapiens
ggcaggcgtggtggt

SEQ ID NO: 477606 - DNA, 15 bp, Homo sapiens
aggcaggcgtggtgg

SEQ ID NO: 477607 - DNA, 15 bp, Homo sapiens
taggcaggcgtggtg

SEQ ID NO: 477608 - DNA, 15 bp, Homo sapiens
ttaggcaggcgtggt

SEQ ID NO: 477609 - DNA, 15 bp, Homo sapiens
attaggcaggcgtgg

SEQ ID NO: 477610 - DNA, 15 bp, Homo sapiens
aattaggcaggcgtg

SEQ ID NO: 477611 - DNA, 15 bp, Homo sapiens
aaattaggcaggcgt

SEQ ID NO: 477612 - DNA, 15 bp, Homo sapiens
aaaattaggcaggcg

SEQ ID NO: 477613 - DNA, 15 bp, Homo sapiens
aaaaattaggcaggc

SEQ ID NO: 477614 - DNA, 15 bp, Homo sapiens
caaaaattaggcagg

SEQ ID NO: 477615 - DNA, 15 bp, Homo sapiens
acaaaaattaggcag

SEQ ID NO: 477616 - DNA, 15 bp, Homo sapiens
tacaaaaattaggca

SEQ ID NO: 477617 - DNA, 15 bp, Homo sapiens
atacaaaaattaggc

SEQ ID NO: 477618 - DNA, 15 bp, Homo sapiens
aatacaaaaattagg

SEQ ID NO: 477619 - DNA, 15 bp, Homo sapiens
cggtgaaacccccgt

SEQ ID NO: 477620 - DNA, 15 bp, Homo sapiens
acggtgaaacccccg

SEQ ID NO: 477621 - DNA, 15 bp, Homo sapiens
cacggtgaaaccccc

SEQ ID NO: 477622 - DNA, 15 bp, Homo sapiens
acacggtgaaacccc

SEQ ID NO: 477623 - DNA, 15 bp, Homo sapiens
aacacggtgaaaccc

SEQ ID NO: 477624 - DNA, 15 bp, Homo sapiens
caacacggtgaaacc

SEQ ID NO: 477625 - DNA, 15 bp, Homo sapiens
ccaacacggtgaaac

SEQ ID NO: 477626 - DNA, 15 bp, Homo sapiens
gccaacacggtgaaa

SEQ ID NO: 477627 - DNA, 15 bp, Homo sapiens
ggccaacacggtgaa

SEQ ID NO: 477628 - DNA, 15 bp, Homo sapiens
tggccaacacggtga

SEQ ID NO: 477629 - DNA, 15 bp, Homo sapiens
ctggccaacacggtg

SEQ ID NO: 477630 - DNA, 15 bp, Homo sapiens
cctggccaacacggt

SEQ ID NO: 477631 - DNA, 15 bp, Homo sapiens
gcctggccaacacgg

SEQ ID NO: 477632 - DNA, 15 bp, Homo sapiens
agcctggccaacacg

SEQ ID NO: 477633 - DNA, 15 bp, Homo sapiens
cagcctggccaacac

SEQ ID NO: 477634 - DNA, 15 bp, Homo sapiens
ccagcctggccaaca

SEQ ID NO: 477635 - DNA, 15 bp, Homo sapiens
accagcctggccaac

SEQ ID NO: 477636 - DNA, 15 bp, Homo sapiens
ggagaccagcctggc

SEQ ID NO: 477637 - DNA, 15 bp, Homo sapiens
tggagaccagcctgg

SEQ ID NO: 477638 - DNA, 15 bp, Homo sapiens
ttggagaccagcctg

SEQ ID NO: 477639 - DNA, 15 bp, Homo sapiens
gttggagaccagcct

SEQ ID NO: 477640 - DNA, 15 bp, Homo sapiens
agttggagaccagcc

SEQ ID NO: 477641 - DNA, 15 bp, Homo sapiens
gagttggagaccagc

SEQ ID NO: 477642 - DNA, 15 bp, Homo sapiens
ggagttggagaccag

SEQ ID NO: 477643 - DNA, 15 bp, Homo sapiens
aggagttggagacca

SEQ ID NO: 477644 - DNA, 15 bp, Homo sapiens
caggagttggagacc

SEQ ID NO: 477645 - DNA, 15 bp, Homo sapiens
ccaggagttggagac

SEQ ID NO: 477646 - DNA, 15 bp, Homo sapiens
gccaggagttggaga

SEQ ID NO: 477647 - DNA, 15 bp, Homo sapiens
agccaggagttggag

SEQ ID NO: 477648 - DNA, 15 bp, Homo sapiens
aagccaggagttgga

SEQ ID NO: 477649 - DNA, 15 bp, Homo sapiens
gaagccaggagttgg

SEQ ID NO: 477650 - DNA, 15 bp, Homo sapiens
tgaagccaggagttg

SEQ ID NO: 477651 - DNA, 15 bp, Homo sapiens
ctgaagccaggagtt

SEQ ID NO: 477652 - DNA, 15 bp, Homo sapiens
cctgaagccaggagt

SEQ ID NO: 477653 - DNA, 15 bp, Homo sapiens
acctgaagccaggag

SEQ ID NO: 477654 - DNA, 15 bp, Homo sapiens
cacctgaagccagga

SEQ ID NO: 477655 - DNA, 15 bp, Homo sapiens
tcacctgaagccagg

SEQ ID NO: 477656 - DNA, 15 bp, Homo sapiens
atcacctgaagccag

SEQ ID NO: 477657 - DNA, 15 bp, Homo sapiens
gatcacctgaagcca

SEQ ID NO: 477658 - DNA, 15 bp, Homo sapiens
ggatcacctgaagcc

SEQ ID NO: 477659 - DNA, 15 bp, Homo sapiens
tggatcacctgaagc

SEQ ID NO: 477660 - DNA, 15 bp, Homo sapiens
gtggatcacctgaag

SEQ ID NO: 477661 - DNA, 15 bp, Homo sapiens
ggtggatcacctgaa

SEQ ID NO: 477662 - DNA, 15 bp, Homo sapiens
aggtggatcacctga

SEQ ID NO: 477663 - DNA, 15 bp, Homo sapiens
caggtggatcacctg

SEQ ID NO: 477664 - DNA, 15 bp, Homo sapiens
gcaggtggatcacct

SEQ ID NO: 477665 - DNA, 15 bp, Homo sapiens
ggcaggtggatcacc

SEQ ID NO: 477666 - DNA, 15 bp, Homo sapiens
aggcaggtggatcac

SEQ ID NO: 477667 - DNA, 15 bp, Homo sapiens
aaggcaggtggatca

SEQ ID NO: 477668 - DNA, 15 bp, Homo sapiens
caaggcaggtggatc

SEQ ID NO: 477669 - DNA, 15 bp, Homo sapiens
ccaaggcaggtggat

SEQ ID NO: 477670 - DNA, 15 bp, Homo sapiens
gccaaggcaggtgga

SEQ ID NO: 477671 - DNA, 15 bp, Homo sapiens
ggccaaggcaggtgg

SEQ ID NO: 477672 - DNA, 15 bp, Homo sapiens
aggccaaggcaggtg

SEQ ID NO: 477673 - DNA, 15 bp, Homo sapiens
gaggccaaggcaggt

SEQ ID NO: 477674 - DNA, 15 bp, Homo sapiens
ggaggccaaggcagg

SEQ ID NO: 477675 - DNA, 15 bp, Homo sapiens
gggaggccaaggcag

SEQ ID NO: 477676 - DNA, 15 bp, Homo sapiens
tgggaggccaaggca

SEQ ID NO: 477677 - DNA, 15 bp, Homo sapiens
ttgggaggccaaggc

SEQ ID NO: 477678 - DNA, 15 bp, Homo sapiens
acgcctgtaatccca

SEQ ID NO: 477679 - DNA, 15 bp, Homo sapiens
cacgcctgtaatccc

SEQ ID NO: 477680 - DNA, 15 bp, Homo sapiens
tcacgcctgtaatcc

SEQ ID NO: 477681 - DNA, 15 bp, Homo sapiens
gtggctcacgcctgt

SEQ ID NO: 477682 - DNA, 15 bp, Homo sapiens
ggtggctcacgcctg

SEQ ID NO: 477683 - DNA, 15 bp, Homo sapiens
tggtggctcacgcct

SEQ ID NO: 477684 - DNA, 15 bp, Homo sapiens
gtggtggctcacgcc

SEQ ID NO: 477685 - DNA, 15 bp, Homo sapiens
cgtggtggctcacgc

SEQ ID NO: 477686 - DNA, 15 bp, Homo sapiens
gcgtggtggctcacg

SEQ ID NO: 477687 - DNA, 15 bp, Homo sapiens
ggcgtggtggctcac

SEQ ID NO: 477688 - DNA, 15 bp, Homo sapiens
ccgggcgtggtggct

SEQ ID NO: 477689 - DNA, 15 bp, Homo sapiens
gccgggcgtggtggc

SEQ ID NO: 477690 - DNA, 15 bp, Homo sapiens
ggccgggcgtggtgg

SEQ ID NO: 477691 - DNA, 15 bp, Homo sapiens
tggccgggcgtggtg

SEQ ID NO: 477692 - DNA, 15 bp, Homo sapiens
atggccgggcgtggt

SEQ ID NO: 477693 - DNA, 15 bp, Homo sapiens
catggccgggcgtgg

SEQ ID NO: 477694 - DNA, 15 bp, Homo sapiens
acatggccgggcgtg

SEQ ID NO: 477695 - DNA, 15 bp, Homo sapiens
cacatggccgggcgt

SEQ ID NO: 477696 - DNA, 15 bp, Homo sapiens
acacatggccgggcg

SEQ ID NO: 477697 - DNA, 15 bp, Homo sapiens
tacacatggccgggc

SEQ ID NO: 477698 - DNA, 15 bp, Homo sapiens
ctacacatggccggg

SEQ ID NO: 477699 - DNA, 15 bp, Homo sapiens
gctacacatggccgg

SEQ ID NO: 477700 - DNA, 15 bp, Homo sapiens
agctacacatggccg

SEQ ID NO: 477701 - DNA, 15 bp, Homo sapiens
aagctacacatggcc

SEQ ID NO: 477702 - DNA, 15 bp, Homo sapiens
aaagctacacatggc

SEQ ID NO: 477703 - DNA, 15 bp, Homo sapiens
aaaagctacacatgg

SEQ ID NO: 477704 - DNA, 15 bp, Homo sapiens
taaaagctacacatg

SEQ ID NO: 477705 - DNA, 15 bp, Homo sapiens
ttaaaagctacacat

SEQ ID NO: 477706 - DNA, 15 bp, Homo sapiens
attaaaagctacaca

SEQ ID NO: 477707 - DNA, 15 bp, Homo sapiens
aattaaaagctacac

SEQ ID NO: 477708 - DNA, 15 bp, Homo sapiens
caattaaaagctaca

SEQ ID NO: 477709 - DNA, 15 bp, Homo sapiens
acaattaaaagctac

SEQ ID NO: 477710 - DNA, 15 bp, Homo sapiens
cacaattaaaagcta

SEQ ID NO: 477711 - DNA, 15 bp, Homo sapiens
ccacaattaaaagct

SEQ ID NO: 477712 - DNA, 15 bp, Homo sapiens
accacaattaaaagc

SEQ ID NO: 477713 - DNA, 15 bp, Homo sapiens
aaccacaattaaaag

SEQ ID NO: 477714 - DNA, 15 bp, Homo sapiens
gaaccacaattaaaa

SEQ ID NO: 477715 - DNA, 15 bp, Homo sapiens
tgaaccacaattaaa

SEQ ID NO: 477716 - DNA, 15 bp, Homo sapiens
atgaaccacaattaa

SEQ ID NO: 477717 - DNA, 15 bp, Homo sapiens
aatgaaccacaatta

SEQ ID NO: 477718 - DNA, 15 bp, Homo sapiens
taatgaaccacaatt

SEQ ID NO: 477719 - DNA, 15 bp, Homo sapiens
ttaatgaaccacaat

SEQ ID NO: 477720 - DNA, 15 bp, Homo sapiens
gttaatgaaccacaa

SEQ ID NO: 477721 - DNA, 15 bp, Homo sapiens
ggttaatgaaccaca

SEQ ID NO: 477722 - DNA, 15 bp, Homo sapiens
gggttaatgaaccac

SEQ ID NO: 477723 - DNA, 15 bp, Homo sapiens
tgggttaatgaacca

SEQ ID NO: 477724 - DNA, 15 bp, Homo sapiens
ctgggttaatgaacc

SEQ ID NO: 477725 - DNA, 15 bp, Homo sapiens
actgggttaatgaac

SEQ ID NO: 477726 - DNA, 15 bp, Homo sapiens
aactgggttaatgaa

SEQ ID NO: 477727 - DNA, 15 bp, Homo sapiens
aaactgggttaatga

SEQ ID NO: 477728 - DNA, 15 bp, Homo sapiens
gaaactgggttaatg

SEQ ID NO: 477729 - DNA, 15 bp, Homo sapiens
agaaactgggttaat

SEQ ID NO: 477730 - DNA, 15 bp, Homo sapiens
tagaaactgggttaa

SEQ ID NO: 477731 - DNA, 15 bp, Homo sapiens
ttagaaactgggtta

SEQ ID NO: 477732 - DNA, 15 bp, Homo sapiens
cttagaaactgggtt

SEQ ID NO: 477733 - DNA, 15 bp, Homo sapiens
gcttagaaactgggt

SEQ ID NO: 477734 - DNA, 15 bp, Homo sapiens
tgcttagaaactggg

SEQ ID NO: 477735 - DNA, 15 bp, Homo sapiens
ttgcttagaaactgg

SEQ ID NO: 477736 - DNA, 15 bp, Homo sapiens
tttgcttagaaactg

SEQ ID NO: 477737 - DNA, 15 bp, Homo sapiens
atttgcttagaaact

SEQ ID NO: 477738 - DNA, 15 bp, Homo sapiens
aatttgcttagaaac

SEQ ID NO: 477739 - DNA, 15 bp, Homo sapiens
taatttgcttagaaa

SEQ ID NO: 477740 - DNA, 15 bp, Homo sapiens
ctaatttgcttagaa

SEQ ID NO: 477741 - DNA, 15 bp, Homo sapiens
tctaatttgcttaga

SEQ ID NO: 477742 - DNA, 15 bp, Homo sapiens
ttctaatttgcttag

SEQ ID NO: 477743 - DNA, 15 bp, Homo sapiens
gttctaatttgctta

SEQ ID NO: 477744 - DNA, 15 bp, Homo sapiens
ggttctaatttgctt

SEQ ID NO: 477745 - DNA, 15 bp, Homo sapiens
aggttctaatttgct

SEQ ID NO: 477746 - DNA, 15 bp, Homo sapiens
aaggttctaatttgc

SEQ ID NO: 477747 - DNA, 15 bp, Homo sapiens
gaaggttctaatttg

SEQ ID NO: 477748 - DNA, 15 bp, Homo sapiens
agaaggttctaattt

SEQ ID NO: 477749 - DNA, 15 bp, Homo sapiens
cagaaggttctaatt

SEQ ID NO: 477750 - DNA, 15 bp, Homo sapiens
acagaaggttctaat

SEQ ID NO: 477751 - DNA, 15 bp, Homo sapiens
cacagaaggttctaa

SEQ ID NO: 477752 - DNA, 15 bp, Homo sapiens
acacagaaggttcta

SEQ ID NO: 477753 - DNA, 15 bp, Homo sapiens
tacacagaaggttct

SEQ ID NO: 477754 - DNA, 15 bp, Homo sapiens
atacacagaaggttc

SEQ ID NO: 477755 - DNA, 15 bp, Homo sapiens
gatacacagaaggtt

SEQ ID NO: 477756 - DNA, 15 bp, Homo sapiens
agatacacagaaggt

SEQ ID NO: 477757 - DNA, 15 bp, Homo sapiens
gagatacacagaagg

SEQ ID NO: 477758 - DNA, 15 bp, Homo sapiens
ggagatacacagaag

SEQ ID NO: 477759 - DNA, 15 bp, Homo sapiens
gggagatacacagaa

SEQ ID NO: 477760 - DNA, 15 bp, Homo sapiens
ggggagatacacaga

SEQ ID NO: 477761 - DNA, 15 bp, Homo sapiens
aggggagatacacag

SEQ ID NO: 477762 - DNA, 15 bp, Homo sapiens
taggggagatacaca

SEQ ID NO: 477763 - DNA, 15 bp, Homo sapiens
ctaggggagatacac

SEQ ID NO: 477764 - DNA, 15 bp, Homo sapiens
actaggggagataca

SEQ ID NO: 477765 - DNA, 15 bp, Homo sapiens
aactaggggagatac

SEQ ID NO: 477766 - DNA, 15 bp, Homo sapiens
gaactaggggagata

SEQ ID NO: 477767 - DNA, 15 bp, Homo sapiens
agaactaggggagat

SEQ ID NO: 477768 - DNA, 15 bp, Homo sapiens
cagaactaggggaga

SEQ ID NO: 477769 - DNA, 15 bp, Homo sapiens
acagaactaggggag

SEQ ID NO: 477770 - DNA, 15 bp, Homo sapiens
tacagaactagggga

SEQ ID NO: 477771 - DNA, 15 bp, Homo sapiens
atacagaactagggg

SEQ ID NO: 477772 - DNA, 15 bp, Homo sapiens
catacagaactaggg

SEQ ID NO: 477773 - DNA, 15 bp, Homo sapiens
gcatacagaactagg

SEQ ID NO: 477774 - DNA, 15 bp, Homo sapiens
ggcatacagaactag

SEQ ID NO: 477775 - DNA, 15 bp, Homo sapiens
gggcatacagaacta

SEQ ID NO: 477776 - DNA, 15 bp, Homo sapiens
ggggcatacagaact

SEQ ID NO: 477777 - DNA, 15 bp, Homo sapiens
tggggcatacagaac

SEQ ID NO: 477778 - DNA, 15 bp, Homo sapiens
gtggggcatacagaa

SEQ ID NO: 477779 - DNA, 15 bp, Homo sapiens
agtggggcatacaga

SEQ ID NO: 477780 - DNA, 15 bp, Homo sapiens
cagtggggcatacag

SEQ ID NO: 477781 - DNA, 15 bp, Homo sapiens
ccagtggggcataca

SEQ ID NO: 477782 - DNA, 15 bp, Homo sapiens
accagtggggcatac

SEQ ID NO: 477783 - DNA, 15 bp, Homo sapiens
aaccagtggggcata

SEQ ID NO: 477784 - DNA, 15 bp, Homo sapiens
gaaccagtggggcat

SEQ ID NO: 477785 - DNA, 15 bp, Homo sapiens
ggaaccagtggggca

SEQ ID NO: 477786 - DNA, 15 bp, Homo sapiens
aggaaccagtggggc

SEQ ID NO: 477787 - DNA, 15 bp, Homo sapiens
caggaaccagtgggg

SEQ ID NO: 477788 - DNA, 15 bp, Homo sapiens
acaggaaccagtggg

SEQ ID NO: 477789 - DNA, 15 bp, Homo sapiens
tacaggaaccagtgg

SEQ ID NO: 477790 - DNA, 15 bp, Homo sapiens
ctacaggaaccagtg

SEQ ID NO: 477791 - DNA, 15 bp, Homo sapiens
tctacaggaaccagt

SEQ ID NO: 477792 - DNA, 15 bp, Homo sapiens
ctctacaggaaccag

SEQ ID NO: 477793 - DNA, 15 bp, Homo sapiens
gctctacaggaacca

SEQ ID NO: 477794 - DNA, 15 bp, Homo sapiens
agctctacaggaacc

SEQ ID NO: 477795 - DNA, 15 bp, Homo sapiens
aagctctacaggaac

SEQ ID NO: 477796 - DNA, 15 bp, Homo sapiens
aaagctctacaggaa

SEQ ID NO: 477797 - DNA, 15 bp, Homo sapiens
taaagctctacagga

SEQ ID NO: 477798 - DNA, 15 bp, Homo sapiens
ataaagctctacagg

SEQ ID NO: 477799 - DNA, 15 bp, Homo sapiens
aataaagctctacag

SEQ ID NO: 477800 - DNA, 15 bp, Homo sapiens
aaataaagctctaca

SEQ ID NO: 477801 - DNA, 15 bp, Homo sapiens
gaaataaagctctac

SEQ ID NO: 477802 - DNA, 15 bp, Homo sapiens
agaaataaagctcta

SEQ ID NO: 477803 - DNA, 15 bp, Homo sapiens
cagaaataaagctct

SEQ ID NO: 477804 - DNA, 15 bp, Homo sapiens
tcagaaataaagctc

SEQ ID NO: 477805 - DNA, 15 bp, Homo sapiens
ttcagaaataaagct

SEQ ID NO: 477806 - DNA, 15 bp, Homo sapiens
cttcagaaataaagc

SEQ ID NO: 477807 - DNA, 15 bp, Homo sapiens
ccttcagaaataaag

SEQ ID NO: 477808 - DNA, 15 bp, Homo sapiens
cccttcagaaataaa

SEQ ID NO: 477809 - DNA, 15 bp, Homo sapiens
tcccttcagaaataa

SEQ ID NO: 477810 - DNA, 15 bp, Homo sapiens
ttcccttcagaaata

SEQ ID NO: 477811 - DNA, 15 bp, Homo sapiens
cttcccttcagaaat

SEQ ID NO: 477812 - DNA, 15 bp, Homo sapiens
acttcccttcagaaa

SEQ ID NO: 477813 - DNA, 15 bp, Homo sapiens
tacttcccttcagaa

SEQ ID NO: 477814 - DNA, 15 bp, Homo sapiens
atacttcccttcaga

SEQ ID NO: 477815 - DNA, 15 bp, Homo sapiens
catacttcccttcag

SEQ ID NO: 477816 - DNA, 15 bp, Homo sapiens
ccatacttcccttca

SEQ ID NO: 477817 - DNA, 15 bp, Homo sapiens
cccatacttcccttc

SEQ ID NO: 477818 - DNA, 15 bp, Homo sapiens
tcccatacttccctt

SEQ ID NO: 477819 - DNA, 15 bp, Homo sapiens
ttcccatacttccct

SEQ ID NO: 477820 - DNA, 15 bp, Homo sapiens
tttcccatacttccc

SEQ ID NO: 477821 - DNA, 15 bp, Homo sapiens
ttttcccatacttcc

SEQ ID NO: 477822 - DNA, 15 bp, Homo sapiens
gttttcccatacttc

SEQ ID NO: 477823 - DNA, 15 bp, Homo sapiens
agttttcccatactt

SEQ ID NO: 477824 - DNA, 15 bp, Homo sapiens
tagttttcccatact

SEQ ID NO: 477825 - DNA, 15 bp, Homo sapiens
atagttttcccatac

SEQ ID NO: 477826 - DNA, 15 bp, Homo sapiens
catagttttcccata

SEQ ID NO: 477827 - DNA, 15 bp, Homo sapiens
ccatagttttcccat

SEQ ID NO: 477828 - DNA, 15 bp, Homo sapiens
tccatagttttccca

SEQ ID NO: 477829 - DNA, 15 bp, Homo sapiens
atccatagttttccc

SEQ ID NO: 477830 - DNA, 15 bp, Homo sapiens
tatccatagttttcc

SEQ ID NO: 477831 - DNA, 15 bp, Homo sapiens
atatccatagttttc

SEQ ID NO: 477832 - DNA, 15 bp, Homo sapiens
aatatccatagtttt

SEQ ID NO: 477833 - DNA, 15 bp, Homo sapiens
aaatatccatagttt

SEQ ID NO: 477834 - DNA, 15 bp, Homo sapiens
caaatatccatagtt

SEQ ID NO: 477835 - DNA, 15 bp, Homo sapiens
tcaaatatccatagt

SEQ ID NO: 477836 - DNA, 15 bp, Homo sapiens
ttcaaatatccatag

SEQ ID NO: 477837 - DNA, 15 bp, Homo sapiens
gttcaaatatccata

SEQ ID NO: 477838 - DNA, 15 bp, Homo sapiens
agttcaaatatccat

SEQ ID NO: 477839 - DNA, 15 bp, Homo sapiens
tagttcaaatatcca

SEQ ID NO: 477840 - DNA, 15 bp, Homo sapiens
ttagttcaaatatcc

SEQ ID NO: 477841 - DNA, 15 bp, Homo sapiens
tttagttcaaatatc

SEQ ID NO: 477842 - DNA, 15 bp, Homo sapiens
ttttagttcaaatat

SEQ ID NO: 477843 - DNA, 15 bp, Homo sapiens
tttttagttcaaata

SEQ ID NO: 477844 - DNA, 15 bp, Homo sapiens
ttttttagttcaaat

SEQ ID NO: 477845 - DNA, 15 bp, Homo sapiens
tttttttagttcaaa

SEQ ID NO: 477846 - DNA, 15 bp, Homo sapiens
ttttttttagttcaa

SEQ ID NO: 477847 - DNA, 15 bp, Homo sapiens
tttttttttagttca

SEQ ID NO: 477848 - DNA, 15 bp, Homo sapiens
ttttttttttagttc

SEQ ID NO: 477849 - DNA, 15 bp, Homo sapiens
tttttttttttagtt

SEQ ID NO: 477850 - DNA, 15 bp, Homo sapiens
ttttttttttttagt

SEQ ID NO: 477851 - DNA, 15 bp, Homo sapiens
tttttttttttttag

SEQ ID NO: 477852 - DNA, 15 bp, Homo sapiens
aattctttttttttt

SEQ ID NO: 477853 - DNA, 15 bp, Homo sapiens
taattcttttttttt

SEQ ID NO: 477854 - DNA, 15 bp, Homo sapiens
ttaattctttttttt

SEQ ID NO: 477855 - DNA, 15 bp, Homo sapiens
tttaattcttttttt

SEQ ID NO: 477856 - DNA, 15 bp, Homo sapiens
ttttaattctttttt

SEQ ID NO: 477857 - DNA, 15 bp, Homo sapiens
tttttaattcttttt

SEQ ID NO: 477858 - DNA, 15 bp, Homo sapiens
ctttttaattctttt

SEQ ID NO: 477859 - DNA, 15 bp, Homo sapiens
tctttttaattcttt

SEQ ID NO: 477860 - DNA, 15 bp, Homo sapiens
ttctttttaattctt

SEQ ID NO: 477861 - DNA, 15 bp, Homo sapiens
gttctttttaattct

SEQ ID NO: 477862 - DNA, 15 bp, Homo sapiens
agttctttttaattc

SEQ ID NO: 477863 - DNA, 15 bp, Homo sapiens
gagttctttttaatt

SEQ ID NO: 477864 - DNA, 15 bp, Homo sapiens
ggagttctttttaat

SEQ ID NO: 477865 - DNA, 15 bp, Homo sapiens
tggagttctttttaa

SEQ ID NO: 477866 - DNA, 15 bp, Homo sapiens
atggagttcttttta

SEQ ID NO: 477867 - DNA, 15 bp, Homo sapiens
gatggagttcttttt

SEQ ID NO: 477868 - DNA, 15 bp, Homo sapiens
ggatggagttctttt

SEQ ID NO: 477869 - DNA, 15 bp, Homo sapiens
gggatggagttcttt

SEQ ID NO: 477870 - DNA, 15 bp, Homo sapiens
tgggatggagttctt

SEQ ID NO: 477871 - DNA, 15 bp, Homo sapiens
ttgggatggagttct

SEQ ID NO: 477872 - DNA, 15 bp, Homo sapiens
tttgggatggagttc

SEQ ID NO: 477873 - DNA, 15 bp, Homo sapiens
ttttgggatggagtt

SEQ ID NO: 477874 - DNA, 15 bp, Homo sapiens
attttgggatggagt

SEQ ID NO: 477875 - DNA, 15 bp, Homo sapiens
cattttgggatggag

SEQ ID NO: 477876 - DNA, 15 bp, Homo sapiens
tcattttgggatgga

SEQ ID NO: 477877 - DNA, 15 bp, Homo sapiens
atcattttgggatgg

SEQ ID NO: 477878 - DNA, 15 bp, Homo sapiens
aatcattttgggatg

SEQ ID NO: 477879 - DNA, 15 bp, Homo sapiens
aaatcattttgggat

SEQ ID NO: 477880 - DNA, 15 bp, Homo sapiens
caaatcattttggga

SEQ ID NO: 477881 - DNA, 15 bp, Homo sapiens
acaaatcattttggg

SEQ ID NO: 477882 - DNA, 15 bp, Homo sapiens
aacaaatcattttgg

SEQ ID NO: 477883 - DNA, 15 bp, Homo sapiens
caacaaatcattttg

SEQ ID NO: 477884 - DNA, 15 bp, Homo sapiens
acaacaaatcatttt

SEQ ID NO: 477885 - DNA, 15 bp, Homo sapiens
tacaacaaatcattt

SEQ ID NO: 477886 - DNA, 15 bp, Homo sapiens
ttacaacaaatcatt

SEQ ID NO: 477887 - DNA, 15 bp, Homo sapiens
tttacaacaaatcat

SEQ ID NO: 477888 - DNA, 15 bp, Homo sapiens
atttacaacaaatca

SEQ ID NO: 477889 - DNA, 15 bp, Homo sapiens
tatttacaacaaatc

SEQ ID NO: 477890 - DNA, 15 bp, Homo sapiens
atatttacaacaaat

SEQ ID NO: 477891 - DNA, 15 bp, Homo sapiens
catatttacaacaaa

SEQ ID NO: 477892 - DNA, 15 bp, Homo sapiens
acatatttacaacaa

SEQ ID NO: 477893 - DNA, 15 bp, Homo sapiens
aacatatttacaaca

SEQ ID NO: 477894 - DNA, 15 bp, Homo sapiens
gaacatatttacaac

SEQ ID NO: 477895 - DNA, 15 bp, Homo sapiens
tgaacatatttacaa

SEQ ID NO: 477896 - DNA, 15 bp, Homo sapiens
atgaacatatttaca

SEQ ID NO: 477897 - DNA, 15 bp, Homo sapiens
aatgaacatatttac

SEQ ID NO: 477898 - DNA, 15 bp, Homo sapiens
aaatgaacatattta

SEQ ID NO: 477899 - DNA, 15 bp, Homo sapiens
taaatgaacatattt

SEQ ID NO: 477900 - DNA, 15 bp, Homo sapiens
ttaaatgaacatatt

SEQ ID NO: 477901 - DNA, 15 bp, Homo sapiens
tttaaatgaacatat

SEQ ID NO: 477902 - DNA, 15 bp, Homo sapiens
ctttaaatgaacata

SEQ ID NO: 477903 - DNA, 15 bp, Homo sapiens
gctttaaatgaacat

SEQ ID NO: 477904 - DNA, 15 bp, Homo sapiens
tgctttaaatgaaca

SEQ ID NO: 477905 - DNA, 15 bp, Homo sapiens
ttgctttaaatgaac

SEQ ID NO: 477906 - DNA, 15 bp, Homo sapiens
attgctttaaatgaa

SEQ ID NO: 477907 - DNA, 15 bp, Homo sapiens
aattgctttaaatga

SEQ ID NO: 477908 - DNA, 15 bp, Homo sapiens
taattgctttaaatg

SEQ ID NO: 477909 - DNA, 15 bp, Homo sapiens
ataattgctttaaat

SEQ ID NO: 477910 - DNA, 15 bp, Homo sapiens
tataattgctttaaa

SEQ ID NO: 477911 - DNA, 15 bp, Homo sapiens
atataattgctttaa

SEQ ID NO: 477912 - DNA, 15 bp, Homo sapiens
aatataattgcttta

SEQ ID NO: 477913 - DNA, 15 bp, Homo sapiens
aaatataattgcttt

SEQ ID NO: 477914 - DNA, 15 bp, Homo sapiens
aaaatataattgctt

SEQ ID NO: 477915 - DNA, 15 bp, Homo sapiens
gaaaatataattgct

SEQ ID NO: 477916 - DNA, 15 bp, Homo sapiens
ggaaaatataattgc

SEQ ID NO: 477917 - DNA, 15 bp, Homo sapiens
tggaaaatataattg

SEQ ID NO: 477918 - DNA, 15 bp, Homo sapiens
atggaaaatataatt

SEQ ID NO: 477919 - DNA, 15 bp, Homo sapiens
tatggaaaatataat

SEQ ID NO: 477920 - DNA, 15 bp, Homo sapiens
atatggaaaatataa

SEQ ID NO: 477921 - DNA, 15 bp, Homo sapiens
gatatggaaaatata

SEQ ID NO: 477922 - DNA, 15 bp, Homo sapiens
agatatggaaaatat

SEQ ID NO: 477923 - DNA, 15 bp, Homo sapiens
cagatatggaaaata

SEQ ID NO: 477924 - DNA, 15 bp, Homo sapiens
tcagatatggaaaat

SEQ ID NO: 477925 - DNA, 15 bp, Homo sapiens
atcagatatggaaaa

SEQ ID NO: 477926 - DNA, 15 bp, Homo sapiens
gatcagatatggaaa

SEQ ID NO: 477927 - DNA, 15 bp, Homo sapiens
tgatcagatatggaa

SEQ ID NO: 477928 - DNA, 15 bp, Homo sapiens
ttgatcagatatgga

SEQ ID NO: 477929 - DNA, 15 bp, Homo sapiens
cttgatcagatatgg

SEQ ID NO: 477930 - DNA, 15 bp, Homo sapiens
gcttgatcagatatg

SEQ ID NO: 477931 - DNA, 15 bp, Homo sapiens
tgcttgatcagatat

SEQ ID NO: 477932 - DNA, 15 bp, Homo sapiens
ttgcttgatcagata

SEQ ID NO: 477933 - DNA, 15 bp, Homo sapiens
tttgcttgatcagat

SEQ ID NO: 477934 - DNA, 15 bp, Homo sapiens
ttttgcttgatcaga

SEQ ID NO: 477935 - DNA, 15 bp, Homo sapiens
cttttgcttgatcag

SEQ ID NO: 477936 - DNA, 15 bp, Homo sapiens
acttttgcttgatca

SEQ ID NO: 477937 - DNA, 15 bp, Homo sapiens
tacttttgcttgatc

SEQ ID NO: 477938 - DNA, 15 bp, Homo sapiens
ctacttttgcttgat

SEQ ID NO: 477939 - DNA, 15 bp, Homo sapiens
actacttttgcttga

SEQ ID NO: 477940 - DNA, 15 bp, Homo sapiens
tactacttttgcttg

SEQ ID NO: 477941 - DNA, 15 bp, Homo sapiens
gtactacttttgctt

SEQ ID NO: 477942 - DNA, 15 bp, Homo sapiens
tgtactacttttgct

SEQ ID NO: 477943 - DNA, 15 bp, Homo sapiens
atgtactacttttgc

SEQ ID NO: 477944 - DNA, 15 bp, Homo sapiens
tatgtactacttttg

SEQ ID NO: 477945 - DNA, 15 bp, Homo sapiens
ttatgtactactttt

SEQ ID NO: 477946 - DNA, 15 bp, Homo sapiens
tttatgtactacttt

SEQ ID NO: 477947 - DNA, 15 bp, Homo sapiens
ttttatgtactactt

SEQ ID NO: 477948 - DNA, 15 bp, Homo sapiens
cttttatgtactact

SEQ ID NO: 477949 - DNA, 15 bp, Homo sapiens
gcttttatgtactac

SEQ ID NO: 477950 - DNA, 15 bp, Homo sapiens
ggcttttatgtacta

SEQ ID NO: 477951 - DNA, 15 bp, Homo sapiens
tggcttttatgtact

SEQ ID NO: 477952 - DNA, 15 bp, Homo sapiens
ttggcttttatgtac

SEQ ID NO: 477953 - DNA, 15 bp, Homo sapiens
tttggcttttatgta

SEQ ID NO: 477954 - DNA, 15 bp, Homo sapiens
ttttggcttttatgt

SEQ ID NO: 477955 - DNA, 15 bp, Homo sapiens
tttttggcttttatg

SEQ ID NO: 477956 - DNA, 15 bp, Homo sapiens
ttttttggcttttat

SEQ ID NO: 477957 - DNA, 15 bp, Homo sapiens
gttttttggctttta

SEQ ID NO: 477958 - DNA, 15 bp, Homo sapiens
ggttttttggctttt

SEQ ID NO: 477959 - DNA, 15 bp, Homo sapiens
gggttttttggcttt

SEQ ID NO: 477960 - DNA, 15 bp, Homo sapiens
tgggttttttggctt

SEQ ID NO: 477961 - DNA, 15 bp, Homo sapiens
ttgggttttttggct

SEQ ID NO: 477962 - DNA, 15 bp, Homo sapiens
attgggttttttggc

SEQ ID NO: 477963 - DNA, 15 bp, Homo sapiens
aattgggttttttgg

SEQ ID NO: 477964 - DNA, 15 bp, Homo sapiens
aaattgggttttttg

SEQ ID NO: 477965 - DNA, 15 bp, Homo sapiens
taaattgggtttttt

SEQ ID NO: 477966 - DNA, 15 bp, Homo sapiens
ttaaattgggttttt

SEQ ID NO: 477967 - DNA, 15 bp, Homo sapiens
tttaaattgggtttt

SEQ ID NO: 477968 - DNA, 15 bp, Homo sapiens
ctttaaattgggttt

SEQ ID NO: 477969 - DNA, 15 bp, Homo sapiens
tctttaaattgggtt

SEQ ID NO: 477970 - DNA, 15 bp, Homo sapiens
ttctttaaattgggt

SEQ ID NO: 477971 - DNA, 15 bp, Homo sapiens
attctttaaattggg

SEQ ID NO: 477972 - DNA, 15 bp, Homo sapiens
tattctttaaattgg

SEQ ID NO: 477973 - DNA, 15 bp, Homo sapiens
atattctttaaattg

SEQ ID NO: 477974 - DNA, 15 bp, Homo sapiens
catattctttaaatt

SEQ ID NO: 477975 - DNA, 15 bp, Homo sapiens
acatattctttaaat

SEQ ID NO: 477976 - DNA, 15 bp, Homo sapiens
aacatattctttaaa

SEQ ID NO: 477977 - DNA, 15 bp, Homo sapiens
taacatattctttaa

SEQ ID NO: 477978 - DNA, 15 bp, Homo sapiens
ataacatattcttta

SEQ ID NO: 477979 - DNA, 15 bp, Homo sapiens
cataacatattcttt

SEQ ID NO: 477980 - DNA, 15 bp, Homo sapiens
ccataacatattctt

SEQ ID NO: 477981 - DNA, 15 bp, Homo sapiens
tccataacatattct

SEQ ID NO: 477982 - DNA, 15 bp, Homo sapiens
ttccataacatattc

SEQ ID NO: 477983 - DNA, 15 bp, Homo sapiens
attccataacatatt

SEQ ID NO: 477984 - DNA, 15 bp, Homo sapiens
tattccataacatat

SEQ ID NO: 477985 - DNA, 15 bp, Homo sapiens
ttattccataacata

SEQ ID NO: 477986 - DNA, 15 bp, Homo sapiens
tttattccataacat

SEQ ID NO: 477987 - DNA, 15 bp, Homo sapiens
gtttattccataaca

SEQ ID NO: 477988 - DNA, 15 bp, Homo sapiens
agtttattccataac

SEQ ID NO: 477989 - DNA, 15 bp, Homo sapiens
gagtttattccataa

SEQ ID NO: 477990 - DNA, 15 bp, Homo sapiens
agagtttattccata

SEQ ID NO: 477991 - DNA, 15 bp, Homo sapiens
cagagtttattccat

SEQ ID NO: 477992 - DNA, 15 bp, Homo sapiens
tcagagtttattcca

SEQ ID NO: 477993 - DNA, 15 bp, Homo sapiens
atcagagtttattcc

SEQ ID NO: 477994 - DNA, 15 bp, Homo sapiens
aatcagagtttattc

SEQ ID NO: 477995 - DNA, 15 bp, Homo sapiens
aaatcagagtttatt

SEQ ID NO: 477996 - DNA, 15 bp, Homo sapiens
aaaatcagagtttat

SEQ ID NO: 477997 - DNA, 15 bp, Homo sapiens
taaaatcagagttta

SEQ ID NO: 477998 - DNA, 15 bp, Homo sapiens
ctaaaatcagagttt

SEQ ID NO: 477999 - DNA, 15 bp, Homo sapiens
tctaaaatcagagtt

SEQ ID NO: 478000 - DNA, 15 bp, Homo sapiens
ctctaaaatcagagt

SEQ ID NO: 478001 - DNA, 15 bp, Homo sapiens
cctctaaaatcagag

SEQ ID NO: 478002 - DNA, 15 bp, Homo sapiens
acctctaaaatcaga

SEQ ID NO: 478003 - DNA, 15 bp, Homo sapiens
aacctctaaaatcag

SEQ ID NO: 478004 - DNA, 15 bp, Homo sapiens
caacctctaaaatca

SEQ ID NO: 478005 - DNA, 15 bp, Homo sapiens
acaacctctaaaatc

SEQ ID NO: 478006 - DNA, 15 bp, Homo sapiens
tacaacctctaaaat

SEQ ID NO: 478007 - DNA, 15 bp, Homo sapiens
ctacaacctctaaaa

SEQ ID NO: 478008 - DNA, 15 bp, Homo sapiens
actacaacctctaaa

SEQ ID NO: 478009 - DNA, 15 bp, Homo sapiens
tactacaacctctaa

SEQ ID NO: 478010 - DNA, 15 bp, Homo sapiens
ctactacaacctcta

SEQ ID NO: 478011 - DNA, 15 bp, Homo sapiens
gctactacaacctct

SEQ ID NO: 478012 - DNA, 15 bp, Homo sapiens
tgctactacaacctc

SEQ ID NO: 478013 - DNA, 15 bp, Homo sapiens
atgctactacaacct

SEQ ID NO: 478014 - DNA, 15 bp, Homo sapiens
tatgctactacaacc

SEQ ID NO: 478015 - DNA, 15 bp, Homo sapiens
atatgctactacaac

SEQ ID NO: 478016 - DNA, 15 bp, Homo sapiens
aatatgctactacaa

SEQ ID NO: 478017 - DNA, 15 bp, Homo sapiens
aaatatgctactaca

SEQ ID NO: 478018 - DNA, 15 bp, Homo sapiens
caaatatgctactac

SEQ ID NO: 478019 - DNA, 15 bp, Homo sapiens
acaaatatgctacta

SEQ ID NO: 478020 - DNA, 15 bp, Homo sapiens
aacaaatatgctact

SEQ ID NO: 478021 - DNA, 15 bp, Homo sapiens
caacaaatatgctac

SEQ ID NO: 478022 - DNA, 15 bp, Homo sapiens
acaacaaatatgcta

SEQ ID NO: 478023 - DNA, 15 bp, Homo sapiens
aacaacaaatatgct

SEQ ID NO: 478024 - DNA, 15 bp, Homo sapiens
gaacaacaaatatgc

SEQ ID NO: 478025 - DNA, 15 bp, Homo sapiens
agaacaacaaatatg

SEQ ID NO: 478026 - DNA, 15 bp, Homo sapiens
gagaacaacaaatat

SEQ ID NO: 478027 - DNA, 15 bp, Homo sapiens
tgagaacaacaaata

SEQ ID NO: 478028 - DNA, 15 bp, Homo sapiens
atgagaacaacaaat

SEQ ID NO: 478029 - DNA, 15 bp, Homo sapiens
tatgagaacaacaaa

SEQ ID NO: 478030 - DNA, 15 bp, Homo sapiens
gtatgagaacaacaa

SEQ ID NO: 478031 - DNA, 15 bp, Homo sapiens
tgtatgagaacaaca

SEQ ID NO: 478032 - DNA, 15 bp, Homo sapiens
atgtatgagaacaac

SEQ ID NO: 478033 - DNA, 15 bp, Homo sapiens
aatgtatgagaacaa

SEQ ID NO: 478034 - DNA, 15 bp, Homo sapiens
caatgtatgagaaca

SEQ ID NO: 478035 - DNA, 15 bp, Homo sapiens
tcaatgtatgagaac

SEQ ID NO: 478036 - DNA, 15 bp, Homo sapiens
ctcaatgtatgagaa

SEQ ID NO: 478037 - DNA, 15 bp, Homo sapiens
actcaatgtatgaga

SEQ ID NO: 478038 - DNA, 15 bp, Homo sapiens
cactcaatgtatgag

SEQ ID NO: 478039 - DNA, 15 bp, Homo sapiens
acactcaatgtatga

SEQ ID NO: 478040 - DNA, 15 bp, Homo sapiens
aacactcaatgtatg

SEQ ID NO: 478041 - DNA, 15 bp, Homo sapiens
gaacactcaatgtat

SEQ ID NO: 478042 - DNA, 15 bp, Homo sapiens
tgaacactcaatgta

SEQ ID NO: 478043 - DNA, 15 bp, Homo sapiens
atgaacactcaatgt

SEQ ID NO: 478044 - DNA, 15 bp, Homo sapiens
gatgaacactcaatg

SEQ ID NO: 478045 - DNA, 15 bp, Homo sapiens
agatgaacactcaat

SEQ ID NO: 478046 - DNA, 15 bp, Homo sapiens
cagatgaacactcaa

SEQ ID NO: 478047 - DNA, 15 bp, Homo sapiens
tcagatgaacactca

SEQ ID NO: 478048 - DNA, 15 bp, Homo sapiens
ttcagatgaacactc

SEQ ID NO: 478049 - DNA, 15 bp, Homo sapiens
attcagatgaacact

SEQ ID NO: 478050 - DNA, 15 bp, Homo sapiens
cattcagatgaacac

SEQ ID NO: 478051 - DNA, 15 bp, Homo sapiens
acattcagatgaaca

SEQ ID NO: 478052 - DNA, 15 bp, Homo sapiens
tacattcagatgaac

SEQ ID NO: 478053 - DNA, 15 bp, Homo sapiens
gtacattcagatgaa

SEQ ID NO: 478054 - DNA, 15 bp, Homo sapiens
cgtacattcagatga

SEQ ID NO: 478055 - DNA, 15 bp, Homo sapiens
acgtacattcagatg

SEQ ID NO: 478056 - DNA, 15 bp, Homo sapiens
aacgtacattcagat

SEQ ID NO: 478057 - DNA, 15 bp, Homo sapiens
caacgtacattcaga

SEQ ID NO: 478058 - DNA, 15 bp, Homo sapiens
tcaacgtacattcag

SEQ ID NO: 478059 - DNA, 15 bp, Homo sapiens
ttcaacgtacattca

SEQ ID NO: 478060 - DNA, 15 bp, Homo sapiens
attcaacgtacattc

SEQ ID NO: 478061 - DNA, 15 bp, Homo sapiens
tattcaacgtacatt

SEQ ID NO: 478062 - DNA, 15 bp, Homo sapiens
atattcaacgtacat

SEQ ID NO: 478063 - DNA, 15 bp, Homo sapiens
catattcaacgtaca

SEQ ID NO: 478064 - DNA, 15 bp, Homo sapiens
gcatattcaacgtac

SEQ ID NO: 478065 - DNA, 15 bp, Homo sapiens
cgcatattcaacgta

SEQ ID NO: 478066 - DNA, 15 bp, Homo sapiens
ccgcatattcaacgt

SEQ ID NO: 478067 - DNA, 15 bp, Homo sapiens
accgcatattcaacg

SEQ ID NO: 478068 - DNA, 15 bp, Homo sapiens
caccgcatattcaac

SEQ ID NO: 478069 - DNA, 15 bp, Homo sapiens
tcaccgcatattcaa

SEQ ID NO: 478070 - DNA, 15 bp, Homo sapiens
ctcaccgcatattca

SEQ ID NO: 478071 - DNA, 15 bp, Homo sapiens
actcaccgcatattc

SEQ ID NO: 478072 - DNA, 15 bp, Homo sapiens
cactcaccgcatatt

SEQ ID NO: 478073 - DNA, 15 bp, Homo sapiens
tcactcaccgcatat

SEQ ID NO: 478074 - DNA, 15 bp, Homo sapiens
atcactcaccgcata

SEQ ID NO: 478075 - DNA, 15 bp, Homo sapiens
aatcactcaccgcat

SEQ ID NO: 478076 - DNA, 15 bp, Homo sapiens
gaatcactcaccgca

SEQ ID NO: 478077 - DNA, 15 bp, Homo sapiens
tgaatcactcaccgc

SEQ ID NO: 478078 - DNA, 15 bp, Homo sapiens
gtgaatcactcaccg

SEQ ID NO: 478079 - DNA, 15 bp, Homo sapiens
tgtgaatcactcacc

SEQ ID NO: 478080 - DNA, 15 bp, Homo sapiens
ctgtgaatcactcac

SEQ ID NO: 478081 - DNA, 15 bp, Homo sapiens
actgtgaatcactca

SEQ ID NO: 478082 - DNA, 15 bp, Homo sapiens
tactgtgaatcactc

SEQ ID NO: 478083 - DNA, 15 bp, Homo sapiens
atactgtgaatcact

SEQ ID NO: 478084 - DNA, 15 bp, Homo sapiens
tatactgtgaatcac

SEQ ID NO: 478085 - DNA, 15 bp, Homo sapiens
ttatactgtgaatca

SEQ ID NO: 478086 - DNA, 15 bp, Homo sapiens
tttatactgtgaatc

SEQ ID NO: 478087 - DNA, 15 bp, Homo sapiens
ttttatactgtgaat

SEQ ID NO: 478088 - DNA, 15 bp, Homo sapiens
attttatactgtgaa

SEQ ID NO: 478089 - DNA, 15 bp, Homo sapiens
cattttatactgtga

SEQ ID NO: 478090 - DNA, 15 bp, Homo sapiens
tcattttatactgtg

SEQ ID NO: 478091 - DNA, 15 bp, Homo sapiens
atcattttatactgt

SEQ ID NO: 478092 - DNA, 15 bp, Homo sapiens
aatcattttatactg

SEQ ID NO: 478093 - DNA, 15 bp, Homo sapiens
caatcattttatact

SEQ ID NO: 478094 - DNA, 15 bp, Homo sapiens
ccaatcattttatac

SEQ ID NO: 478095 - DNA, 15 bp, Homo sapiens
gccaatcattttata

SEQ ID NO: 478096 - DNA, 15 bp, Homo sapiens
tgccaatcattttat

SEQ ID NO: 478097 - DNA, 15 bp, Homo sapiens
ttgccaatcatttta

SEQ ID NO: 478098 - DNA, 15 bp, Homo sapiens
cttgccaatcatttt

SEQ ID NO: 478099 - DNA, 15 bp, Homo sapiens
acttgccaatcattt

SEQ ID NO: 478100 - DNA, 15 bp, Homo sapiens
tacttgccaatcatt

SEQ ID NO: 478101 - DNA, 15 bp, Homo sapiens
atacttgccaatcat

SEQ ID NO: 478102 - DNA, 15 bp, Homo sapiens
gatacttgccaatca

SEQ ID NO: 478103 - DNA, 15 bp, Homo sapiens
agatacttgccaatc

SEQ ID NO: 478104 - DNA, 15 bp, Homo sapiens
aagatacttgccaat

SEQ ID NO: 478105 - DNA, 15 bp, Homo sapiens
gaagatacttgccaa

SEQ ID NO: 478106 - DNA, 15 bp, Homo sapiens
cgaagatacttgcca

SEQ ID NO: 478107 - DNA, 15 bp, Homo sapiens
tcgaagatacttgcc

SEQ ID NO: 478108 - DNA, 15 bp, Homo sapiens
ttcgaagatacttgc

SEQ ID NO: 478109 - DNA, 15 bp, Homo sapiens
tttcgaagatacttg

SEQ ID NO: 478110 - DNA, 15 bp, Homo sapiens
atttcgaagatactt

SEQ ID NO: 478111 - DNA, 15 bp, Homo sapiens
aatttcgaagatact

SEQ ID NO: 478112 - DNA, 15 bp, Homo sapiens
taatttcgaagatac

SEQ ID NO: 478113 - DNA, 15 bp, Homo sapiens
gtaatttcgaagata

SEQ ID NO: 478114 - DNA, 15 bp, Homo sapiens
tgtaatttcgaagat

SEQ ID NO: 478115 - DNA, 15 bp, Homo sapiens
ttgtaatttcgaaga

SEQ ID NO: 478116 - DNA, 15 bp, Homo sapiens
tttgtaatttcgaag

SEQ ID NO: 478117 - DNA, 15 bp, Homo sapiens
gtttgtaatttcgaa

SEQ ID NO: 478118 - DNA, 15 bp, Homo sapiens
ggtttgtaatttcga

SEQ ID NO: 478119 - DNA, 15 bp, Homo sapiens
tggtttgtaatttcg

SEQ ID NO: 478120 - DNA, 15 bp, Homo sapiens
gtggtttgtaatttc

SEQ ID NO: 478121 - DNA, 15 bp, Homo sapiens
tgtggtttgtaattt

SEQ ID NO: 478122 - DNA, 15 bp, Homo sapiens
atgtggtttgtaatt

SEQ ID NO: 478123 - DNA, 15 bp, Homo sapiens
tatgtggtttgtaat

SEQ ID NO: 478124 - DNA, 15 bp, Homo sapiens
gtatgtggtttgtaa

SEQ ID NO: 478125 - DNA, 15 bp, Homo sapiens
agtatgtggtttgta

SEQ ID NO: 478126 - DNA, 15 bp, Homo sapiens
cagtatgtggtttgt

SEQ ID NO: 478127 - DNA, 15 bp, Homo sapiens
tcagtatgtggtttg

SEQ ID NO: 478128 - DNA, 15 bp, Homo sapiens
atcagtatgtggttt

SEQ ID NO: 478129 - DNA, 15 bp, Homo sapiens
aatcagtatgtggtt

SEQ ID NO: 478130 - DNA, 15 bp, Homo sapiens
taatcagtatgtggt

SEQ ID NO: 478131 - DNA, 15 bp, Homo sapiens
ctaatcagtatgtgg

SEQ ID NO: 478132 - DNA, 15 bp, Homo sapiens
caataaactaggtac

SEQ ID NO: 478133 - DNA, 15 bp, Homo sapiens
tcaataaactaggta

SEQ ID NO: 478134 - DNA, 15 bp, Homo sapiens
ctcaataaactaggt

SEQ ID NO: 478135 - DNA, 15 bp, Homo sapiens
tctcaataaactagg

SEQ ID NO: 478136 - DNA, 15 bp, Homo sapiens
ctctcaataaactag

SEQ ID NO: 478137 - DNA, 15 bp, Homo sapiens
actctcaataaacta

SEQ ID NO: 478138 - DNA, 15 bp, Homo sapiens
aactctcaataaact

SEQ ID NO: 478139 - DNA, 15 bp, Homo sapiens
aaactctcaataaac

SEQ ID NO: 478140 - DNA, 15 bp, Homo sapiens
aaaactctcaataaa

SEQ ID NO: 478141 - DNA, 15 bp, Homo sapiens
aaaaactctcaataa

SEQ ID NO: 478142 - DNA, 15 bp, Homo sapiens
taaaaactctcaata

SEQ ID NO: 478143 - DNA, 15 bp, Homo sapiens
ataaaaactctcaat

SEQ ID NO: 478144 - DNA, 15 bp, Homo sapiens
gataaaaactctcaa

SEQ ID NO: 478145 - DNA, 15 bp, Homo sapiens
tgataaaaactctca

SEQ ID NO: 478146 - DNA, 15 bp, Homo sapiens
atgataaaaactctc

SEQ ID NO: 478147 - DNA, 15 bp, Homo sapiens
catgataaaaactct

SEQ ID NO: 478148 - DNA, 15 bp, Homo sapiens
tcatgataaaaactc

SEQ ID NO: 478149 - DNA, 15 bp, Homo sapiens
ttcatgataaaaact

SEQ ID NO: 478150 - DNA, 15 bp, Homo sapiens
cttcatgataaaaac

SEQ ID NO: 478151 - DNA, 15 bp, Homo sapiens
ccttcatgataaaaa

SEQ ID NO: 478152 - DNA, 15 bp, Homo sapiens
cccttcatgataaaa

SEQ ID NO: 478153 - DNA, 15 bp, Homo sapiens
ccccttcatgataaa

SEQ ID NO: 478154 - DNA, 15 bp, Homo sapiens
accccttcatgataa

SEQ ID NO: 478155 - DNA, 15 bp, Homo sapiens
caccccttcatgata

SEQ ID NO: 478156 - DNA, 15 bp, Homo sapiens
acaccccttcatgat

SEQ ID NO: 478157 - DNA, 15 bp, Homo sapiens
aacaccccttcatga

SEQ ID NO: 478158 - DNA, 15 bp, Homo sapiens
caacaccccttcatg

SEQ ID NO: 478159 - DNA, 15 bp, Homo sapiens
tcaacaccccttcat

SEQ ID NO: 478160 - DNA, 15 bp, Homo sapiens
ttcaacaccccttca

SEQ ID NO: 478161 - DNA, 15 bp, Homo sapiens
attcaacaccccttc

SEQ ID NO: 478162 - DNA, 15 bp, Homo sapiens
aattcaacacccctt

SEQ ID NO: 478163 - DNA, 15 bp, Homo sapiens
aaattcaacacccct

SEQ ID NO: 478164 - DNA, 15 bp, Homo sapiens
aaaattcaacacccc

SEQ ID NO: 478165 - DNA, 15 bp, Homo sapiens
taaaattcaacaccc

SEQ ID NO: 478166 - DNA, 15 bp, Homo sapiens
ataaaattcaacacc

SEQ ID NO: 478167 - DNA, 15 bp, Homo sapiens
gataaaattcaacac

SEQ ID NO: 478168 - DNA, 15 bp, Homo sapiens
tgataaaattcaaca

SEQ ID NO: 478169 - DNA, 15 bp, Homo sapiens
ttgataaaattcaac

SEQ ID NO: 478170 - DNA, 15 bp, Homo sapiens
tttgataaaattcaa

SEQ ID NO: 478171 - DNA, 15 bp, Homo sapiens
ctttgataaaattca

SEQ ID NO: 478172 - DNA, 15 bp, Homo sapiens
cctttgataaaattc

SEQ ID NO: 478173 - DNA, 15 bp, Homo sapiens
gcctttgataaaatt

SEQ ID NO: 478174 - DNA, 15 bp, Homo sapiens
ggcctttgataaaat

SEQ ID NO: 478175 - DNA, 15 bp, Homo sapiens
aggcctttgataaaa

SEQ ID NO: 478176 - DNA, 15 bp, Homo sapiens
aaggcctttgataaa

SEQ ID NO: 478177 - DNA, 15 bp, Homo sapiens
aaaggcctttgataa

SEQ ID NO: 478178 - DNA, 15 bp, Homo sapiens
aaaaggcctttgata

SEQ ID NO: 478179 - DNA, 15 bp, Homo sapiens
gaaaaggcctttgat

SEQ ID NO: 478180 - DNA, 15 bp, Homo sapiens
agaaaaggcctttga

SEQ ID NO: 478181 - DNA, 15 bp, Homo sapiens
aagaaaaggcctttg

SEQ ID NO: 478182 - DNA, 15 bp, Homo sapiens
gaagaaaaggccttt

SEQ ID NO: 478183 - DNA, 15 bp, Homo sapiens
tgaagaaaaggcctt

SEQ ID NO: 478184 - DNA, 15 bp, Homo sapiens
atgaagaaaaggcct

SEQ ID NO: 478185 - DNA, 15 bp, Homo sapiens
gatgaagaaaaggcc

SEQ ID NO: 478186 - DNA, 15 bp, Homo sapiens
agatgaagaaaaggc

SEQ ID NO: 478187 - DNA, 15 bp, Homo sapiens
tagatgaagaaaagg

SEQ ID NO: 478188 - DNA, 15 bp, Homo sapiens
atagatgaagaaaag

SEQ ID NO: 478189 - DNA, 15 bp, Homo sapiens
aatagatgaagaaaa

SEQ ID NO: 478190 - DNA, 15 bp, Homo sapiens
caatagatgaagaaa

SEQ ID NO: 478191 - DNA, 15 bp, Homo sapiens
tcaatagatgaagaa

SEQ ID NO: 478192 - DNA, 15 bp, Homo sapiens
ctcaatagatgaaga

SEQ ID NO: 478193 - DNA, 15 bp, Homo sapiens
tctcaatagatgaag

SEQ ID NO: 478194 - DNA, 15 bp, Homo sapiens
atctcaatagatgaa

SEQ ID NO: 478195 - DNA, 15 bp, Homo sapiens
tatctcaatagatga

SEQ ID NO: 478196 - DNA, 15 bp, Homo sapiens
ttatctcaatagatg

SEQ ID NO: 478197 - DNA, 15 bp, Homo sapiens
attatctcaatagat

SEQ ID NO: 478198 - DNA, 15 bp, Homo sapiens
gattatctcaataga

SEQ ID NO: 478199 - DNA, 15 bp, Homo sapiens
cgattatctcaatag

SEQ ID NO: 478200 - DNA, 15 bp, Homo sapiens
acgattatctcaata

SEQ ID NO: 478201 - DNA, 15 bp, Homo sapiens
cacgattatctcaat

SEQ ID NO: 478202 - DNA, 15 bp, Homo sapiens
acacgattatctcaa

SEQ ID NO: 478203 - DNA, 15 bp, Homo sapiens
cacacgattatctca

SEQ ID NO: 478204 - DNA, 15 bp, Homo sapiens
ccacacgattatctc

SEQ ID NO: 478205 - DNA, 15 bp, Homo sapiens
accacacgattatct

SEQ ID NO: 478206 - DNA, 15 bp, Homo sapiens
aaccacacgattatc

SEQ ID NO: 478207 - DNA, 15 bp, Homo sapiens
aaaccacacgattat

SEQ ID NO: 478208 - DNA, 15 bp, Homo sapiens
aaaaccacacgatta

SEQ ID NO: 478209 - DNA, 15 bp, Homo sapiens
aaaaaccacacgatt

SEQ ID NO: 478210 - DNA, 15 bp, Homo sapiens
caaaaaccacacgat

SEQ ID NO: 478211 - DNA, 15 bp, Homo sapiens
acaaaaaccacacga

SEQ ID NO: 478212 - DNA, 15 bp, Homo sapiens
gacaaaaaccacacg

SEQ ID NO: 478213 - DNA, 15 bp, Homo sapiens
tgacaaaaaccacac

SEQ ID NO: 478214 - DNA, 15 bp, Homo sapiens
atgacaaaaaccaca

SEQ ID NO: 478215 - DNA, 15 bp, Homo sapiens
aatgacaaaaaccac

SEQ ID NO: 478216 - DNA, 15 bp, Homo sapiens
caatgacaaaaacca

SEQ ID NO: 478217 - DNA, 15 bp, Homo sapiens
ccaatgacaaaaacc

SEQ ID NO: 478218 - DNA, 15 bp, Homo sapiens
accaatgacaaaaac

SEQ ID NO: 478219 - DNA, 15 bp, Homo sapiens
aaccaatgacaaaaa

SEQ ID NO: 478220 - DNA, 15 bp, Homo sapiens
gaaccaatgacaaaa

SEQ ID NO: 478221 - DNA, 15 bp, Homo sapiens
agaaccaatgacaaa

SEQ ID NO: 478222 - DNA, 15 bp, Homo sapiens
cagaaccaatgacaa

SEQ ID NO: 478223 - DNA, 15 bp, Homo sapiens
acagaaccaatgaca

SEQ ID NO: 478224 - DNA, 15 bp, Homo sapiens
aacagaaccaatgac

SEQ ID NO: 478225 - DNA, 15 bp, Homo sapiens
aaacagaaccaatga

SEQ ID NO: 478226 - DNA, 15 bp, Homo sapiens
taaacagaaccaatg

SEQ ID NO: 478227 - DNA, 15 bp, Homo sapiens
ataaacagaaccaat

SEQ ID NO: 478228 - DNA, 15 bp, Homo sapiens
cataaacagaaccaa

SEQ ID NO: 478229 - DNA, 15 bp, Homo sapiens
acataaacagaacca

SEQ ID NO: 478230 - DNA, 15 bp, Homo sapiens
cacataaacagaacc

SEQ ID NO: 478231 - DNA, 15 bp, Homo sapiens
tcacataaacagaac

SEQ ID NO: 478232 - DNA, 15 bp, Homo sapiens
atcacataaacagaa

SEQ ID NO: 478233 - DNA, 15 bp, Homo sapiens
catcacataaacaga

SEQ ID NO: 478234 - DNA, 15 bp, Homo sapiens
ccatcacataaacag

SEQ ID NO: 478235 - DNA, 15 bp, Homo sapiens
tccatcacataaaca

SEQ ID NO: 478236 - DNA, 15 bp, Homo sapiens
atccatcacataaac

SEQ ID NO: 478237 - DNA, 15 bp, Homo sapiens
aatccatcacataaa

SEQ ID NO: 478238 - DNA, 15 bp, Homo sapiens
taatccatcacataa

SEQ ID NO: 478239 - DNA, 15 bp, Homo sapiens
gtaatccatcacata

SEQ ID NO: 478240 - DNA, 15 bp, Homo sapiens
tgtaatccatcacat

SEQ ID NO: 478241 - DNA, 15 bp, Homo sapiens
atgtaatccatcaca

SEQ ID NO: 478242 - DNA, 15 bp, Homo sapiens
aatgtaatccatcac

SEQ ID NO: 478243 - DNA, 15 bp, Homo sapiens
aaatgtaatccatca

SEQ ID NO: 478244 - DNA, 15 bp, Homo sapiens
taaatgtaatccatc

SEQ ID NO: 478245 - DNA, 15 bp, Homo sapiens
ataaatgtaatccat

SEQ ID NO: 478246 - DNA, 15 bp, Homo sapiens
aataaatgtaatcca

SEQ ID NO: 478247 - DNA, 15 bp, Homo sapiens
caataaatgtaatcc

SEQ ID NO: 478248 - DNA, 15 bp, Homo sapiens
tcaataaatgtaatc

SEQ ID NO: 478249 - DNA, 15 bp, Homo sapiens
atcaataaatgtaat

SEQ ID NO: 478250 - DNA, 15 bp, Homo sapiens
aatcaataaatgtaa

SEQ ID NO: 478251 - DNA, 15 bp, Homo sapiens
aaatcaataaatgta

SEQ ID NO: 478252 - DNA, 15 bp, Homo sapiens
taaatcaataaatgt

SEQ ID NO: 478253 - DNA, 15 bp, Homo sapiens
gtaaatcaataaatg

SEQ ID NO: 478254 - DNA, 15 bp, Homo sapiens
tgtaaatcaataaat

SEQ ID NO: 478255 - DNA, 15 bp, Homo sapiens
atgtaaatcaataaa

SEQ ID NO: 478256 - DNA, 15 bp, Homo sapiens
tatgtaaatcaataa

SEQ ID NO: 478257 - DNA, 15 bp, Homo sapiens
atatgtaaatcaata

SEQ ID NO: 478258 - DNA, 15 bp, Homo sapiens
catatgtaaatcaat

SEQ ID NO: 478259 - DNA, 15 bp, Homo sapiens
acatatgtaaatcaa

SEQ ID NO: 478260 - DNA, 15 bp, Homo sapiens
aacatatgtaaatca

SEQ ID NO: 478261 - DNA, 15 bp, Homo sapiens
caacatatgtaaatc

SEQ ID NO: 478262 - DNA, 15 bp, Homo sapiens
tcaacatatgtaaat

SEQ ID NO: 478263 - DNA, 15 bp, Homo sapiens
ctcaacatatgtaaa

SEQ ID NO: 478264 - DNA, 15 bp, Homo sapiens
gctcaacatatgtaa

SEQ ID NO: 478265 - DNA, 15 bp, Homo sapiens
ggctcaacatatgta

SEQ ID NO: 478266 - DNA, 15 bp, Homo sapiens
tggctcaacatatgt

SEQ ID NO: 478267 - DNA, 15 bp, Homo sapiens
ctggctcaacatatg

SEQ ID NO: 478268 - DNA, 15 bp, Homo sapiens
gctggctcaacatat

SEQ ID NO: 478269 - DNA, 15 bp, Homo sapiens
ggctggctcaacata

SEQ ID NO: 478270 - DNA, 15 bp, Homo sapiens
aggctggctcaacat

SEQ ID NO: 478271 - DNA, 15 bp, Homo sapiens
aaggctggctcaaca

SEQ ID NO: 478272 - DNA, 15 bp, Homo sapiens
caaggctggctcaac

SEQ ID NO: 478273 - DNA, 15 bp, Homo sapiens
gcaaggctggctcaa

SEQ ID NO: 478274 - DNA, 15 bp, Homo sapiens
tgcaaggctggctca

SEQ ID NO: 478275 - DNA, 15 bp, Homo sapiens
atgcaaggctggctc

SEQ ID NO: 478276 - DNA, 15 bp, Homo sapiens
gatgcaaggctggct

SEQ ID NO: 478277 - DNA, 15 bp, Homo sapiens
ggatgcaaggctggc

SEQ ID NO: 478278 - DNA, 15 bp, Homo sapiens
gggatgcaaggctgg

SEQ ID NO: 478279 - DNA, 15 bp, Homo sapiens
tgggatgcaaggctg

SEQ ID NO: 478280 - DNA, 15 bp, Homo sapiens
ctgggatgcaaggct

SEQ ID NO: 478281 - DNA, 15 bp, Homo sapiens
actgggatgcaaggc

SEQ ID NO: 478282 - DNA, 15 bp, Homo sapiens
cactgggatgcaagg

SEQ ID NO: 478283 - DNA, 15 bp, Homo sapiens
tcactgggatgcaag

SEQ ID NO: 478284 - DNA, 15 bp, Homo sapiens
atcactgggatgcaa

SEQ ID NO: 478285 - DNA, 15 bp, Homo sapiens
catcactgggatgca

SEQ ID NO: 478286 - DNA, 15 bp, Homo sapiens
tcatcactgggatgc

SEQ ID NO: 478287 - DNA, 15 bp, Homo sapiens
ttcatcactgggatg

SEQ ID NO: 478288 - DNA, 15 bp, Homo sapiens
cttcatcactgggat

SEQ ID NO: 478289 - DNA, 15 bp, Homo sapiens
gcttcatcactggga

SEQ ID NO: 478290 - DNA, 15 bp, Homo sapiens
agcttcatcactggg

SEQ ID NO: 478291 - DNA, 15 bp, Homo sapiens
cagcttcatcactgg

SEQ ID NO: 478292 - DNA, 15 bp, Homo sapiens
tcagcttcatcactg

SEQ ID NO: 478293 - DNA, 15 bp, Homo sapiens
gtcagcttcatcact

SEQ ID NO: 478294 - DNA, 15 bp, Homo sapiens
agtcagcttcatcac

SEQ ID NO: 478295 - DNA, 15 bp, Homo sapiens
aagtcagcttcatca

SEQ ID NO: 478296 - DNA, 15 bp, Homo sapiens
caagtcagcttcatc

SEQ ID NO: 478297 - DNA, 15 bp, Homo sapiens
tcaagtcagcttcat

SEQ ID NO: 478298 - DNA, 15 bp, Homo sapiens
atcaagtcagcttca

SEQ ID NO: 478299 - DNA, 15 bp, Homo sapiens
gatcaagtcagcttc

SEQ ID NO: 478300 - DNA, 15 bp, Homo sapiens
tgatcaagtcagctt

SEQ ID NO: 478301 - DNA, 15 bp, Homo sapiens
atgatcaagtcagct

SEQ ID NO: 478302 - DNA, 15 bp, Homo sapiens
catgatcaagtcagc

SEQ ID NO: 478303 - DNA, 15 bp, Homo sapiens
ccatgatcaagtcag

SEQ ID NO: 478304 - DNA, 15 bp, Homo sapiens
cccatgatcaagtca

SEQ ID NO: 478305 - DNA, 15 bp, Homo sapiens
ccccatgatcaagtc

SEQ ID NO: 478306 - DNA, 15 bp, Homo sapiens
cccccatgatcaagt

SEQ ID NO: 478307 - DNA, 15 bp, Homo sapiens
tcccccatgatcaag

SEQ ID NO: 478308 - DNA, 15 bp, Homo sapiens
atcccccatgatcaa

SEQ ID NO: 478309 - DNA, 15 bp, Homo sapiens
tatcccccatgatca

SEQ ID NO: 478310 - DNA, 15 bp, Homo sapiens
ttatcccccatgatc

SEQ ID NO: 478311 - DNA, 15 bp, Homo sapiens
cttatcccccatgat

SEQ ID NO: 478312 - DNA, 15 bp, Homo sapiens
gcttatcccccatga

SEQ ID NO: 478313 - DNA, 15 bp, Homo sapiens
agcttatcccccatg

SEQ ID NO: 478314 - DNA, 15 bp, Homo sapiens
aagcttatcccccat

SEQ ID NO: 478315 - DNA, 15 bp, Homo sapiens
aaagcttatccccca

SEQ ID NO: 478316 - DNA, 15 bp, Homo sapiens
aaaagcttatccccc

SEQ ID NO: 478317 - DNA, 15 bp, Homo sapiens
aaaaagcttatcccc

SEQ ID NO: 478318 - DNA, 15 bp, Homo sapiens
caaaaagcttatccc

SEQ ID NO: 478319 - DNA, 15 bp, Homo sapiens
ccaaaaagcttatcc

SEQ ID NO: 478320 - DNA, 15 bp, Homo sapiens
accaaaaagcttatc

SEQ ID NO: 478321 - DNA, 15 bp, Homo sapiens
caccaaaaagcttat

SEQ ID NO: 478322 - DNA, 15 bp, Homo sapiens
acaccaaaaagctta

SEQ ID NO: 478323 - DNA, 15 bp, Homo sapiens
tacaccaaaaagctt

SEQ ID NO: 478324 - DNA, 15 bp, Homo sapiens
gtacaccaaaaagct

SEQ ID NO: 478325 - DNA, 15 bp, Homo sapiens
agtacaccaaaaagc

SEQ ID NO: 478326 - DNA, 15 bp, Homo sapiens
cagtacaccaaaaag

SEQ ID NO: 478327 - DNA, 15 bp, Homo sapiens
gcagtacaccaaaaa

SEQ ID NO: 478328 - DNA, 15 bp, Homo sapiens
agcagtacaccaaaa

SEQ ID NO: 478329 - DNA, 15 bp, Homo sapiens
cagcagtacaccaaa

SEQ ID NO: 478330 - DNA, 15 bp, Homo sapiens
ccagcagtacaccaa

SEQ ID NO: 478331 - DNA, 15 bp, Homo sapiens
tccagcagtacacca

SEQ ID NO: 478332 - DNA, 15 bp, Homo sapiens
atccagcagtacacc

SEQ ID NO: 478333 - DNA, 15 bp, Homo sapiens
aatccagcagtacac

SEQ ID NO: 478334 - DNA, 15 bp, Homo sapiens
gaatccagcagtaca

SEQ ID NO: 478335 - DNA, 15 bp, Homo sapiens
cgaatccagcagtac

SEQ ID NO: 478336 - DNA, 15 bp, Homo sapiens
ccgaatccagcagta

SEQ ID NO: 478337 - DNA, 15 bp, Homo sapiens
accgaatccagcagt

SEQ ID NO: 478338 - DNA, 15 bp, Homo sapiens
aaccgaatccagcag

SEQ ID NO: 478339 - DNA, 15 bp, Homo sapiens
aaaccgaatccagca

SEQ ID NO: 478340 - DNA, 15 bp, Homo sapiens
caaaccgaatccagc

SEQ ID NO: 478341 - DNA, 15 bp, Homo sapiens
gcaaaccgaatccag

SEQ ID NO: 478342 - DNA, 15 bp, Homo sapiens
ggcaaaccgaatcca

SEQ ID NO: 478343 - DNA, 15 bp, Homo sapiens
tggcaaaccgaatcc

SEQ ID NO: 478344 - DNA, 15 bp, Homo sapiens
gtggcaaaccgaatc

SEQ ID NO: 478345 - DNA, 15 bp, Homo sapiens
tgtggcaaaccgaat

SEQ ID NO: 478346 - DNA, 15 bp, Homo sapiens
ttgtggcaaaccgaa

SEQ ID NO: 478347 - DNA, 15 bp, Homo sapiens
attgtggcaaaccga

SEQ ID NO: 478348 - DNA, 15 bp, Homo sapiens
aattgtggcaaaccg

SEQ ID NO: 478349 - DNA, 15 bp, Homo sapiens
aaattgtggcaaacc

SEQ ID NO: 478350 - DNA, 15 bp, Homo sapiens
aaaattgtggcaaac

SEQ ID NO: 478351 - DNA, 15 bp, Homo sapiens
taaaattgtggcaaa

SEQ ID NO: 478352 - DNA, 15 bp, Homo sapiens
ataaaattgtggcaa

SEQ ID NO: 478353 - DNA, 15 bp, Homo sapiens
aataaaattgtggca

SEQ ID NO: 478354 - DNA, 15 bp, Homo sapiens
caataaaattgtggc

SEQ ID NO: 478355 - DNA, 15 bp, Homo sapiens
tcaataaaattgtgg

SEQ ID NO: 478356 - DNA, 15 bp, Homo sapiens
ctcaataaaattgtg

SEQ ID NO: 478357 - DNA, 15 bp, Homo sapiens
cctcaataaaattgt

SEQ ID NO: 478358 - DNA, 15 bp, Homo sapiens
tcctcaataaaattg

SEQ ID NO: 478359 - DNA, 15 bp, Homo sapiens
atcctcaataaaatt

SEQ ID NO: 478360 - DNA, 15 bp, Homo sapiens
aatcctcaataaaat

SEQ ID NO: 478361 - DNA, 15 bp, Homo sapiens
aaatcctcaataaaa

SEQ ID NO: 478362 - DNA, 15 bp, Homo sapiens
aaaatcctcaataaa

SEQ ID NO: 478363 - DNA, 15 bp, Homo sapiens
gaaaatcctcaataa

SEQ ID NO: 478364 - DNA, 15 bp, Homo sapiens
tgaaaatcctcaata

SEQ ID NO: 478365 - DNA, 15 bp, Homo sapiens
gtgaaaatcctcaat

SEQ ID NO: 478366 - DNA, 15 bp, Homo sapiens
tgtgaaaatcctcaa

SEQ ID NO: 478367 - DNA, 15 bp, Homo sapiens
ctgtgaaaatcctca

SEQ ID NO: 478368 - DNA, 15 bp, Homo sapiens
tctgtgaaaatcctc

SEQ ID NO: 478369 - DNA, 15 bp, Homo sapiens
atctgtgaaaatcct

SEQ ID NO: 478370 - DNA, 15 bp, Homo sapiens
catctgtgaaaatcc

SEQ ID NO: 478371 - DNA, 15 bp, Homo sapiens
gcatctgtgaaaatc

SEQ ID NO: 478372 - DNA, 15 bp, Homo sapiens
agcatctgtgaaaat

SEQ ID NO: 478373 - DNA, 15 bp, Homo sapiens
cagcatctgtgaaaa

SEQ ID NO: 478374 - DNA, 15 bp, Homo sapiens
tcagcatctgtgaaa

SEQ ID NO: 478375 - DNA, 15 bp, Homo sapiens
ttcagcatctgtgaa

SEQ ID NO: 478376 - DNA, 15 bp, Homo sapiens
attcagcatctgtga

SEQ ID NO: 478377 - DNA, 15 bp, Homo sapiens
aattcagcatctgtg

SEQ ID NO: 478378 - DNA, 15 bp, Homo sapiens
aaattcagcatctgt

SEQ ID NO: 478379 - DNA, 15 bp, Homo sapiens
aaaattcagcatctg

SEQ ID NO: 478380 - DNA, 15 bp, Homo sapiens
aaaaattcagcatct

SEQ ID NO: 478381 - DNA, 15 bp, Homo sapiens
aaaaaattcagcatc

SEQ ID NO: 478382 - DNA, 15 bp, Homo sapiens
aaaaaaattcagcat

SEQ ID NO: 478383 - DNA, 15 bp, Homo sapiens
gaaaaaaattcagca

SEQ ID NO: 478384 - DNA, 15 bp, Homo sapiens
agaaaaaaattcagc

SEQ ID NO: 478385 - DNA, 15 bp, Homo sapiens
cagaaaaaaattcag

SEQ ID NO: 478386 - DNA, 15 bp, Homo sapiens
ccagaaaaaaattca

SEQ ID NO: 478387 - DNA, 15 bp, Homo sapiens
cccagaaaaaaattc

SEQ ID NO: 478388 - DNA, 15 bp, Homo sapiens
tcccagaaaaaaatt

SEQ ID NO: 478389 - DNA, 15 bp, Homo sapiens
ttcccagaaaaaaat

SEQ ID NO: 478390 - DNA, 15 bp, Homo sapiens
cttcccagaaaaaaa

SEQ ID NO: 478391 - DNA, 15 bp, Homo sapiens
tcttcccagaaaaaa

SEQ ID NO: 478392 - DNA, 15 bp, Homo sapiens
ttcttcccagaaaaa

SEQ ID NO: 478393 - DNA, 15 bp, Homo sapiens
attcttcccagaaaa

SEQ ID NO: 478394 - DNA, 15 bp, Homo sapiens
aattcttcccagaaa

SEQ ID NO: 478395 - DNA, 15 bp, Homo sapiens
aaattcttcccagaa

SEQ ID NO: 478396 - DNA, 15 bp, Homo sapiens
taaattcttcccaga

SEQ ID NO: 478397 - DNA, 15 bp, Homo sapiens
gtaaattcttcccag

SEQ ID NO: 478398 - DNA, 15 bp, Homo sapiens
agtaaattcttccca

SEQ ID NO: 478399 - DNA, 15 bp, Homo sapiens
aagtaaattcttccc

SEQ ID NO: 478400 - DNA, 15 bp, Homo sapiens
aaagtaaattcttcc

SEQ ID NO: 478401 - DNA, 15 bp, Homo sapiens
caaagtaaattcttc

SEQ ID NO: 478402 - DNA, 15 bp, Homo sapiens
tcaaagtaaattctt

SEQ ID NO: 478403 - DNA, 15 bp, Homo sapiens
gtcaaagtaaattct

SEQ ID NO: 478404 - DNA, 15 bp, Homo sapiens
agtcaaagtaaattc

SEQ ID NO: 478405 - DNA, 15 bp, Homo sapiens
aagtcaaagtaaatt

SEQ ID NO: 478406 - DNA, 15 bp, Homo sapiens
aaagtcaaagtaaat

SEQ ID NO: 478407 - DNA, 15 bp, Homo sapiens
aaaagtcaaagtaaa

SEQ ID NO: 478408 - DNA, 15 bp, Homo sapiens
aaaaagtcaaagtaa

SEQ ID NO: 478409 - DNA, 15 bp, Homo sapiens
gaaaaagtcaaagta

SEQ ID NO: 478410 - DNA, 15 bp, Homo sapiens
tgaaaaagtcaaagt

SEQ ID NO: 478411 - DNA, 15 bp, Homo sapiens
atgaaaaagtcaaag

SEQ ID NO: 478412 - DNA, 15 bp, Homo sapiens
gatgaaaaagtcaaa

SEQ ID NO: 478413 - DNA, 15 bp, Homo sapiens
ggatgaaaaagtcaa

SEQ ID NO: 478414 - DNA, 15 bp, Homo sapiens
aggatgaaaaagtca

SEQ ID NO: 478415 - DNA, 15 bp, Homo sapiens
taggatgaaaaagtc

SEQ ID NO: 478416 - DNA, 15 bp, Homo sapiens
gtaggatgaaaaagt

SEQ ID NO: 478417 - DNA, 15 bp, Homo sapiens
tgtaggatgaaaaag

SEQ ID NO: 478418 - DNA, 15 bp, Homo sapiens
ttgtaggatgaaaaa

SEQ ID NO: 478419 - DNA, 15 bp, Homo sapiens
tttgtaggatgaaaa

SEQ ID NO: 478420 - DNA, 15 bp, Homo sapiens
ttttgtaggatgaaa

SEQ ID NO: 478421 - DNA, 15 bp, Homo sapiens
tttttgtaggatgaa

SEQ ID NO: 478422 - DNA, 15 bp, Homo sapiens
atttttgtaggatga

SEQ ID NO: 478423 - DNA, 15 bp, Homo sapiens
aatttttgtaggatg

SEQ ID NO: 478424 - DNA, 15 bp, Homo sapiens
taatttttgtaggat

SEQ ID NO: 478425 - DNA, 15 bp, Homo sapiens
ataatttttgtagga

SEQ ID NO: 478426 - DNA, 15 bp, Homo sapiens
aataatttttgtagg

SEQ ID NO: 478427 - DNA, 15 bp, Homo sapiens
gaataatttttgtag

SEQ ID NO: 478428 - DNA, 15 bp, Homo sapiens
agaataatttttgta

SEQ ID NO: 478429 - DNA, 15 bp, Homo sapiens
cagaataatttttgt

SEQ ID NO: 478430 - DNA, 15 bp, Homo sapiens
ccagaataatttttg

SEQ ID NO: 478431 - DNA, 15 bp, Homo sapiens
accagaataattttt

SEQ ID NO: 478432 - DNA, 15 bp, Homo sapiens
aaccagaataatttt

SEQ ID NO: 478433 - DNA, 15 bp, Homo sapiens
gaaccagaataattt

SEQ ID NO: 478434 - DNA, 15 bp, Homo sapiens
agaaccagaataatt

SEQ ID NO: 478435 - DNA, 15 bp, Homo sapiens
cagaaccagaataat

SEQ ID NO: 478436 - DNA, 15 bp, Homo sapiens
tcagaaccagaataa

SEQ ID NO: 478437 - DNA, 15 bp, Homo sapiens
ttcagaaccagaata

SEQ ID NO: 478438 - DNA, 15 bp, Homo sapiens
cttcagaaccagaat

SEQ ID NO: 478439 - DNA, 15 bp, Homo sapiens
ccttcagaaccagaa

SEQ ID NO: 478440 - DNA, 15 bp, Homo sapiens
tccttcagaaccaga

SEQ ID NO: 478441 - DNA, 15 bp, Homo sapiens
atccttcagaaccag

SEQ ID NO: 478442 - DNA, 15 bp, Homo sapiens
catccttcagaacca

SEQ ID NO: 478443 - DNA, 15 bp, Homo sapiens
gcatccttcagaacc

SEQ ID NO: 478444 - DNA, 15 bp, Homo sapiens
tgcatccttcagaac

SEQ ID NO: 478445 - DNA, 15 bp, Homo sapiens
ctgcatccttcagaa

SEQ ID NO: 478446 - DNA, 15 bp, Homo sapiens
cctgcatccttcaga

SEQ ID NO: 478447 - DNA, 15 bp, Homo sapiens
acctgcatccttcag

SEQ ID NO: 478448 - DNA, 15 bp, Homo sapiens
cacctgcatccttca

SEQ ID NO: 478449 - DNA, 15 bp, Homo sapiens
acacctgcatccttc

SEQ ID NO: 478450 - DNA, 15 bp, Homo sapiens
aacacctgcatcctt

SEQ ID NO: 478451 - DNA, 15 bp, Homo sapiens
aaacacctgcatcct

SEQ ID NO: 478452 - DNA, 15 bp, Homo sapiens
gaaacacctgcatcc

SEQ ID NO: 478453 - DNA, 15 bp, Homo sapiens
tgaaacacctgcatc

SEQ ID NO: 478454 - DNA, 15 bp, Homo sapiens
ttgaaacacctgcat

SEQ ID NO: 478455 - DNA, 15 bp, Homo sapiens
attgaaacacctgca

SEQ ID NO: 478456 - DNA, 15 bp, Homo sapiens
cattgaaacacctgc

SEQ ID NO: 478457 - DNA, 15 bp, Homo sapiens
ccattgaaacacctg

SEQ ID NO: 478458 - DNA, 15 bp, Homo sapiens
accattgaaacacct

SEQ ID NO: 478459 - DNA, 15 bp, Homo sapiens
caccattgaaacacc

SEQ ID NO: 478460 - DNA, 15 bp, Homo sapiens
acaccattgaaacac

SEQ ID NO: 478461 - DNA, 15 bp, Homo sapiens
gacaccattgaaaca

SEQ ID NO: 478462 - DNA, 15 bp, Homo sapiens
ggacaccattgaaac

SEQ ID NO: 478463 - DNA, 15 bp, Homo sapiens
gggacaccattgaaa

SEQ ID NO: 478464 - DNA, 15 bp, Homo sapiens
tgggacaccattgaa

SEQ ID NO: 478465 - DNA, 15 bp, Homo sapiens
atgggacaccattga

SEQ ID NO: 478466 - DNA, 15 bp, Homo sapiens
aatgggacaccattg

SEQ ID NO: 478467 - DNA, 15 bp, Homo sapiens
taatgggacaccatt

SEQ ID NO: 478468 - DNA, 15 bp, Homo sapiens
ttaatgggacaccat

SEQ ID NO: 478469 - DNA, 15 bp, Homo sapiens
attaatgggacacca

SEQ ID NO: 478470 - DNA, 15 bp, Homo sapiens
tattaatgggacacc

SEQ ID NO: 478471 - DNA, 15 bp, Homo sapiens
atattaatgggacac

SEQ ID NO: 478472 - DNA, 15 bp, Homo sapiens
gatattaatgggaca

SEQ ID NO: 478473 - DNA, 15 bp, Homo sapiens
ggatattaatgggac

SEQ ID NO: 478474 - DNA, 15 bp, Homo sapiens
gggatattaatggga

SEQ ID NO: 478475 - DNA, 15 bp, Homo sapiens
ggggatattaatggg

SEQ ID NO: 478476 - DNA, 15 bp, Homo sapiens
tggggatattaatgg

SEQ ID NO: 478477 - DNA, 15 bp, Homo sapiens
ctggggatattaatg

SEQ ID NO: 478478 - DNA, 15 bp, Homo sapiens
cctggggatattaat

SEQ ID NO: 478479 - DNA, 15 bp, Homo sapiens
gcctggggatattaa

SEQ ID NO: 478480 - DNA, 15 bp, Homo sapiens
agcctggggatatta

SEQ ID NO: 478481 - DNA, 15 bp, Homo sapiens
aagcctggggatatt

SEQ ID NO: 478482 - DNA, 15 bp, Homo sapiens
taagcctggggatat

SEQ ID NO: 478483 - DNA, 15 bp, Homo sapiens
ctaagcctggggata

SEQ ID NO: 478484 - DNA, 15 bp, Homo sapiens
gctaagcctggggat

SEQ ID NO: 478485 - DNA, 15 bp, Homo sapiens
tgctaagcctgggga

SEQ ID NO: 478486 - DNA, 15 bp, Homo sapiens
gtgctaagcctgggg

SEQ ID NO: 478487 - DNA, 15 bp, Homo sapiens
tgtgctaagcctggg

SEQ ID NO: 478488 - DNA, 15 bp, Homo sapiens
ctgtgctaagcctgg

SEQ ID NO: 478489 - DNA, 15 bp, Homo sapiens
actgtgctaagcctg

SEQ ID NO: 478490 - DNA, 15 bp, Homo sapiens
aactgtgctaagcct

SEQ ID NO: 478491 - DNA, 15 bp, Homo sapiens
gaactgtgctaagcc

SEQ ID NO: 478492 - DNA, 15 bp, Homo sapiens
agaactgtgctaagc

SEQ ID NO: 478493 - DNA, 15 bp, Homo sapiens
aagaactgtgctaag

SEQ ID NO: 478494 - DNA, 15 bp, Homo sapiens
caagaactgtgctaa

SEQ ID NO: 478495 - DNA, 15 bp, Homo sapiens
gcaagaactgtgcta

SEQ ID NO: 478496 - DNA, 15 bp, Homo sapiens
agcaagaactgtgct

SEQ ID NO: 478497 - DNA, 15 bp, Homo sapiens
aagcaagaactgtgc

SEQ ID NO: 478498 - DNA, 15 bp, Homo sapiens
caagcaagaactgtg

SEQ ID NO: 478499 - DNA, 15 bp, Homo sapiens
ccaagcaagaactgt

SEQ ID NO: 478500 - DNA, 15 bp, Homo sapiens
accaagcaagaactg

SEQ ID NO: 478501 - DNA, 15 bp, Homo sapiens
aaccaagcaagaact

SEQ ID NO: 478502 - DNA, 15 bp, Homo sapiens
taaccaagcaagaac

SEQ ID NO: 478503 - DNA, 15 bp, Homo sapiens
ataaccaagcaagaa

SEQ ID NO: 478504 - DNA, 15 bp, Homo sapiens
tataaccaagcaaga

SEQ ID NO: 478505 - DNA, 15 bp, Homo sapiens
ttataaccaagcaag

SEQ ID NO: 478506 - DNA, 15 bp, Homo sapiens
attataaccaagcaa

SEQ ID NO: 478507 - DNA, 15 bp, Homo sapiens
tattataaccaagca

SEQ ID NO: 478508 - DNA, 15 bp, Homo sapiens
ctattataaccaagc

SEQ ID NO: 478509 - DNA, 15 bp, Homo sapiens
cctattataaccaag

SEQ ID NO: 478510 - DNA, 15 bp, Homo sapiens
gcctattataaccaa

SEQ ID NO: 478511 - DNA, 15 bp, Homo sapiens
tgcctattataacca

SEQ ID NO: 478512 - DNA, 15 bp, Homo sapiens
ttgcctattataacc

SEQ ID NO: 478513 - DNA, 15 bp, Homo sapiens
attgcctattataac

SEQ ID NO: 478514 - DNA, 15 bp, Homo sapiens
aattgcctattataa

SEQ ID NO: 478515 - DNA, 15 bp, Homo sapiens
taattgcctattata

SEQ ID NO: 478516 - DNA, 15 bp, Homo sapiens
ttaattgcctattat

SEQ ID NO: 478517 - DNA, 15 bp, Homo sapiens
cttaattgcctatta

SEQ ID NO: 478518 - DNA, 15 bp, Homo sapiens
acttaattgcctatt

SEQ ID NO: 478519 - DNA, 15 bp, Homo sapiens
cacttaattgcctat

SEQ ID NO: 478520 - DNA, 15 bp, Homo sapiens
acacttaattgccta

SEQ ID NO: 478521 - DNA, 15 bp, Homo sapiens
aacacttaattgcct

SEQ ID NO: 478522 - DNA, 15 bp, Homo sapiens
caacacttaattgcc

SEQ ID NO: 478523 - DNA, 15 bp, Homo sapiens
tcaacacttaattgc

SEQ ID NO: 478524 - DNA, 15 bp, Homo sapiens
ttcaacacttaattg

SEQ ID NO: 478525 - DNA, 15 bp, Homo sapiens
attcaacacttaatt

SEQ ID NO: 478526 - DNA, 15 bp, Homo sapiens
cattcaacacttaat

SEQ ID NO: 478527 - DNA, 15 bp, Homo sapiens
tcattcaacacttaa

SEQ ID NO: 478528 - DNA, 15 bp, Homo sapiens
ttcattcaacactta

SEQ ID NO: 478529 - DNA, 15 bp, Homo sapiens
attcattcaacactt

SEQ ID NO: 478530 - DNA, 15 bp, Homo sapiens
cattcattcaacact

SEQ ID NO: 478531 - DNA, 15 bp, Homo sapiens
tcattcattcaacac

SEQ ID NO: 478532 - DNA, 15 bp, Homo sapiens
tttcattcattcaac

SEQ ID NO: 478533 - DNA, 15 bp, Homo sapiens
ctttcattcattcaa

SEQ ID NO: 478534 - DNA, 15 bp, Homo sapiens
tctttcattcattca

SEQ ID NO: 478535 - DNA, 15 bp, Homo sapiens
ttctttcattcattc

SEQ ID NO: 478536 - DNA, 15 bp, Homo sapiens
attctttcattcatt

SEQ ID NO: 478537 - DNA, 15 bp, Homo sapiens
aattctttcattcat

SEQ ID NO: 478538 - DNA, 15 bp, Homo sapiens
aaattctttcattca

SEQ ID NO: 478539 - DNA, 15 bp, Homo sapiens
aaaattctttcattc

SEQ ID NO: 478540 - DNA, 15 bp, Homo sapiens
taaaattctttcatt

SEQ ID NO: 478541 - DNA, 15 bp, Homo sapiens
ttaaaattctttcat

SEQ ID NO: 478542 - DNA, 15 bp, Homo sapiens
gttaaaattctttca

SEQ ID NO: 478543 - DNA, 15 bp, Homo sapiens
agttaaaattctttc

SEQ ID NO: 478544 - DNA, 15 bp, Homo sapiens
aagttaaaattcttt

SEQ ID NO: 478545 - DNA, 15 bp, Homo sapiens
aaagttaaaattctt

SEQ ID NO: 478546 - DNA, 15 bp, Homo sapiens
taaagttaaaattct

SEQ ID NO: 478547 - DNA, 15 bp, Homo sapiens
ataaagttaaaattc

SEQ ID NO: 478548 - DNA, 15 bp, Homo sapiens
aataaagttaaaatt

SEQ ID NO: 478549 - DNA, 15 bp, Homo sapiens
gaataaagttaaaat

SEQ ID NO: 478550 - DNA, 15 bp, Homo sapiens
agaataaagttaaaa

SEQ ID NO: 478551 - DNA, 15 bp, Homo sapiens
cagaataaagttaaa

SEQ ID NO: 478552 - DNA, 15 bp, Homo sapiens
acagaataaagttaa

SEQ ID NO: 478553 - DNA, 15 bp, Homo sapiens
cacagaataaagtta

SEQ ID NO: 478554 - DNA, 15 bp, Homo sapiens
ccacagaataaagtt

SEQ ID NO: 478555 - DNA, 15 bp, Homo sapiens
cccacagaataaagt

SEQ ID NO: 478556 - DNA, 15 bp, Homo sapiens
acccacagaataaag

SEQ ID NO: 478557 - DNA, 15 bp, Homo sapiens
aacccacagaataaa

SEQ ID NO: 478558 - DNA, 15 bp, Homo sapiens
gaacccacagaataa

SEQ ID NO: 478559 - DNA, 15 bp, Homo sapiens
tgaacccacagaata

SEQ ID NO: 478560 - DNA, 15 bp, Homo sapiens
ctgaacccacagaat

SEQ ID NO: 478561 - DNA, 15 bp, Homo sapiens
cctgaacccacagaa

SEQ ID NO: 478562 - DNA, 15 bp, Homo sapiens
ccctgaacccacaga

SEQ ID NO: 478563 - DNA, 15 bp, Homo sapiens
tccctgaacccacag

SEQ ID NO: 478564 - DNA, 15 bp, Homo sapiens
ctccctgaacccaca

SEQ ID NO: 478565 - DNA, 15 bp, Homo sapiens
gctccctgaacccac

SEQ ID NO: 478566 - DNA, 15 bp, Homo sapiens
agctccctgaaccca

SEQ ID NO: 478567 - DNA, 15 bp, Homo sapiens
cagctccctgaaccc

SEQ ID NO: 478568 - DNA, 15 bp, Homo sapiens
acagctccctgaacc

SEQ ID NO: 478569 - DNA, 15 bp, Homo sapiens
aacagctccctgaac

SEQ ID NO: 478570 - DNA, 15 bp, Homo sapiens
caacagctccctgaa

SEQ ID NO: 478571 - DNA, 15 bp, Homo sapiens
tcaacagctccctga

SEQ ID NO: 478572 - DNA, 15 bp, Homo sapiens
ttcaacagctccctg

SEQ ID NO: 478573 - DNA, 15 bp, Homo sapiens
cttcaacagctccct

SEQ ID NO: 478574 - DNA, 15 bp, Homo sapiens
tcttcaacagctccc

SEQ ID NO: 478575 - DNA, 15 bp, Homo sapiens
ctcttcaacagctcc

SEQ ID NO: 478576 - DNA, 15 bp, Homo sapiens
actcttcaacagctc

SEQ ID NO: 478577 - DNA, 15 bp, Homo sapiens
tactcttcaacagct

SEQ ID NO: 478578 - DNA, 15 bp, Homo sapiens
atactcttcaacagc

SEQ ID NO: 478579 - DNA, 15 bp, Homo sapiens
aatactcttcaacag

SEQ ID NO: 478580 - DNA, 15 bp, Homo sapiens
taatactcttcaaca

SEQ ID NO: 478581 - DNA, 15 bp, Homo sapiens
ttaatactcttcaac

SEQ ID NO: 478582 - DNA, 15 bp, Homo sapiens
cttaatactcttcaa

SEQ ID NO: 478583 - DNA, 15 bp, Homo sapiens
gcttaatactcttca

SEQ ID NO: 478584 - DNA, 15 bp, Homo sapiens
tgcttaatactcttc

SEQ ID NO: 478585 - DNA, 15 bp, Homo sapiens
ttgcttaatactctt

SEQ ID NO: 478586 - DNA, 15 bp, Homo sapiens
cttgcttaatactct

SEQ ID NO: 478587 - DNA, 15 bp, Homo sapiens
acttgcttaatactc

SEQ ID NO: 478588 - DNA, 15 bp, Homo sapiens
cacttgcttaatact

SEQ ID NO: 478589 - DNA, 15 bp, Homo sapiens
tcacttgcttaatac

SEQ ID NO: 478590 - DNA, 15 bp, Homo sapiens
ctcacttgcttaata

SEQ ID NO: 478591 - DNA, 15 bp, Homo sapiens
actcacttgcttaat

SEQ ID NO: 478592 - DNA, 15 bp, Homo sapiens
cactcacttgcttaa

SEQ ID NO: 478593 - DNA, 15 bp, Homo sapiens
ccactcacttgctta

SEQ ID NO: 478594 - DNA, 15 bp, Homo sapiens
gccactcacttgctt

SEQ ID NO: 478595 - DNA, 15 bp, Homo sapiens
tgccactcacttgct

SEQ ID NO: 478596 - DNA, 15 bp, Homo sapiens
atgccactcacttgc

SEQ ID NO: 478597 - DNA, 15 bp, Homo sapiens
catgccactcacttg

SEQ ID NO: 478598 - DNA, 15 bp, Homo sapiens
gcatgccactcactt

SEQ ID NO: 478599 - DNA, 15 bp, Homo sapiens
agcatgccactcact

SEQ ID NO: 478600 - DNA, 15 bp, Homo sapiens
gagcatgccactcac

SEQ ID NO: 478601 - DNA, 15 bp, Homo sapiens
tgagcatgccactca

SEQ ID NO: 478602 - DNA, 15 bp, Homo sapiens
gtgagcatgccactc

SEQ ID NO: 478603 - DNA, 15 bp, Homo sapiens
tgtgagcatgccact

SEQ ID NO: 478604 - DNA, 15 bp, Homo sapiens
atgtgagcatgccac

SEQ ID NO: 478605 - DNA, 15 bp, Homo sapiens
catgtgagcatgcca

SEQ ID NO: 478606 - DNA, 15 bp, Homo sapiens
acatgtgagcatgcc

SEQ ID NO: 478607 - DNA, 15 bp, Homo sapiens
aacatgtgagcatgc

SEQ ID NO: 478608 - DNA, 15 bp, Homo sapiens
gaacatgtgagcatg

SEQ ID NO: 478609 - DNA, 15 bp, Homo sapiens
agaacatgtgagcat

SEQ ID NO: 478610 - DNA, 15 bp, Homo sapiens
cagaacatgtgagca

SEQ ID NO: 478611 - DNA, 15 bp, Homo sapiens
tcagaacatgtgagc

SEQ ID NO: 478612 - DNA, 15 bp, Homo sapiens
ttcagaacatgtgag

SEQ ID NO: 478613 - DNA, 15 bp, Homo sapiens
cttcagaacatgtga

SEQ ID NO: 478614 - DNA, 15 bp, Homo sapiens
tcttcagaacatgtg

SEQ ID NO: 478615 - DNA, 15 bp, Homo sapiens
ctcttcagaacatgt

SEQ ID NO: 478616 - DNA, 15 bp, Homo sapiens
actcttcagaacatg

SEQ ID NO: 478617 - DNA, 15 bp, Homo sapiens
cactcttcagaacat

SEQ ID NO: 478618 - DNA, 15 bp, Homo sapiens
acactcttcagaaca

SEQ ID NO: 478619 - DNA, 15 bp, Homo sapiens
aacactcttcagaac

SEQ ID NO: 478620 - DNA, 15 bp, Homo sapiens
aaacactcttcagaa

SEQ ID NO: 478621 - DNA, 15 bp, Homo sapiens
gaaacactcttcaga

SEQ ID NO: 478622 - DNA, 15 bp, Homo sapiens
ggaaacactcttcag

SEQ ID NO: 478623 - DNA, 15 bp, Homo sapiens
aggaaacactcttca

SEQ ID NO: 478624 - DNA, 15 bp, Homo sapiens
caggaaacactcttc

SEQ ID NO: 478625 - DNA, 15 bp, Homo sapiens
ccaggaaacactctt

SEQ ID NO: 478626 - DNA, 15 bp, Homo sapiens
accaggaaacactct

SEQ ID NO: 478627 - DNA, 15 bp, Homo sapiens
taccaggaaacactc

SEQ ID NO: 478628 - DNA, 15 bp, Homo sapiens
ctaccaggaaacact

SEQ ID NO: 478629 - DNA, 15 bp, Homo sapiens
actaccaggaaacac

SEQ ID NO: 478630 - DNA, 15 bp, Homo sapiens
cactaccaggaaaca

SEQ ID NO: 478631 - DNA, 15 bp, Homo sapiens
tcactaccaggaaac

SEQ ID NO: 478632 - DNA, 15 bp, Homo sapiens
atcactaccaggaaa

SEQ ID NO: 478633 - DNA, 15 bp, Homo sapiens
tatcactaccaggaa

SEQ ID NO: 478634 - DNA, 15 bp, Homo sapiens
atatcactaccagga

SEQ ID NO: 478635 - DNA, 15 bp, Homo sapiens
tatatcactaccagg

SEQ ID NO: 478636 - DNA, 15 bp, Homo sapiens
ctatatcactaccag

SEQ ID NO: 478637 - DNA, 15 bp, Homo sapiens
tctatatcactacca

SEQ ID NO: 478638 - DNA, 15 bp, Homo sapiens
ttctatatcactacc

SEQ ID NO: 478639 - DNA, 15 bp, Homo sapiens
cttctatatcactac

SEQ ID NO: 478640 - DNA, 15 bp, Homo sapiens
tcttctatatcacta

SEQ ID NO: 478641 - DNA, 15 bp, Homo sapiens
atcttctatatcact

SEQ ID NO: 478642 - DNA, 15 bp, Homo sapiens
catcttctatatcac

SEQ ID NO: 478643 - DNA, 15 bp, Homo sapiens
ccatcttctatatca

SEQ ID NO: 478644 - DNA, 15 bp, Homo sapiens
tccatcttctatatc

SEQ ID NO: 478645 - DNA, 15 bp, Homo sapiens
atccatcttctatat

SEQ ID NO: 478646 - DNA, 15 bp, Homo sapiens
aatccatcttctata

SEQ ID NO: 478647 - DNA, 15 bp, Homo sapiens
aaatccatcttctat

SEQ ID NO: 478648 - DNA, 15 bp, Homo sapiens
caaatccatcttcta

SEQ ID NO: 478649 - DNA, 15 bp, Homo sapiens
tcaaatccatcttct

SEQ ID NO: 478650 - DNA, 15 bp, Homo sapiens
ttcaaatccatcttc

SEQ ID NO: 478651 - DNA, 15 bp, Homo sapiens
cttcaaatccatctt

SEQ ID NO: 478652 - DNA, 15 bp, Homo sapiens
ccttcaaatccatct

SEQ ID NO: 478653 - DNA, 15 bp, Homo sapiens
cccttcaaatccatc

SEQ ID NO: 478654 - DNA, 15 bp, Homo sapiens
tcccttcaaatccat

SEQ ID NO: 478655 - DNA, 15 bp, Homo sapiens
gtcccttcaaatcca

SEQ ID NO: 478656 - DNA, 15 bp, Homo sapiens
tgtcccttcaaatcc

SEQ ID NO: 478657 - DNA, 15 bp, Homo sapiens
ctgtcccttcaaatc

SEQ ID NO: 478658 - DNA, 15 bp, Homo sapiens
actgtcccttcaaat

SEQ ID NO: 478659 - DNA, 15 bp, Homo sapiens
tactgtcccttcaaa

SEQ ID NO: 478660 - DNA, 15 bp, Homo sapiens
ttactgtcccttcaa

SEQ ID NO: 478661 - DNA, 15 bp, Homo sapiens
tttactgtcccttca

SEQ ID NO: 478662 - DNA, 15 bp, Homo sapiens
ctttactgtcccttc

SEQ ID NO: 478663 - DNA, 15 bp, Homo sapiens
cctttactgtccctt

SEQ ID NO: 478664 - DNA, 15 bp, Homo sapiens
gcctttactgtccct

SEQ ID NO: 478665 - DNA, 15 bp, Homo sapiens
tgcctttactgtccc

SEQ ID NO: 478666 - DNA, 15 bp, Homo sapiens
ttgcctttactgtcc

SEQ ID NO: 478667 - DNA, 15 bp, Homo sapiens
cttgcctttactgtc

SEQ ID NO: 478668 - DNA, 15 bp, Homo sapiens
tcttgcctttactgt

SEQ ID NO: 478669 - DNA, 15 bp, Homo sapiens
ttcttgcctttactg

SEQ ID NO: 478670 - DNA, 15 bp, Homo sapiens
attcttgcctttact

SEQ ID NO: 478671 - DNA, 15 bp, Homo sapiens
tattcttgcctttac

SEQ ID NO: 478672 - DNA, 15 bp, Homo sapiens
ttattcttgccttta

SEQ ID NO: 478673 - DNA, 15 bp, Homo sapiens
attattcttgccttt

SEQ ID NO: 478674 - DNA, 15 bp, Homo sapiens
tattattcttgcctt

SEQ ID NO: 478675 - DNA, 15 bp, Homo sapiens
ttattattcttgcct

SEQ ID NO: 478676 - DNA, 15 bp, Homo sapiens
attattattcttgcc

SEQ ID NO: 478677 - DNA, 15 bp, Homo sapiens
aattattattcttgc

SEQ ID NO: 478678 - DNA, 15 bp, Homo sapiens
taattattattcttg

SEQ ID NO: 478679 - DNA, 15 bp, Homo sapiens
ttaattattattctt

SEQ ID NO: 478680 - DNA, 15 bp, Homo sapiens
cttaattattattct

SEQ ID NO: 478681 - DNA, 15 bp, Homo sapiens
tcttaattattattc

SEQ ID NO: 478682 - DNA, 15 bp, Homo sapiens
ttcttaattattatt

SEQ ID NO: 478683 - DNA, 15 bp, Homo sapiens
tttcttaattattat

SEQ ID NO: 478684 - DNA, 15 bp, Homo sapiens
atttcttaattatta

SEQ ID NO: 478685 - DNA, 15 bp, Homo sapiens
aatttcttaattatt

SEQ ID NO: 478686 - DNA, 15 bp, Homo sapiens
caatttcttaattat

SEQ ID NO: 478687 - DNA, 15 bp, Homo sapiens
acaatttcttaatta

SEQ ID NO: 478688 - DNA, 15 bp, Homo sapiens
aacaatttcttaatt

SEQ ID NO: 478689 - DNA, 15 bp, Homo sapiens
taacaatttcttaat

SEQ ID NO: 478690 - DNA, 15 bp, Homo sapiens
ataacaatttcttaa

SEQ ID NO: 478691 - DNA, 15 bp, Homo sapiens
tataacaatttctta

SEQ ID NO: 478692 - DNA, 15 bp, Homo sapiens
ttataacaatttctt

SEQ ID NO: 478693 - DNA, 15 bp, Homo sapiens
attataacaatttct

SEQ ID NO: 478694 - DNA, 15 bp, Homo sapiens
tattataacaatttc

SEQ ID NO: 478695 - DNA, 15 bp, Homo sapiens
ctattataacaattt

SEQ ID NO: 478696 - DNA, 15 bp, Homo sapiens
cctattataacaatt

SEQ ID NO: 478697 - DNA, 15 bp, Homo sapiens
ccctattataacaat

SEQ ID NO: 478698 - DNA, 15 bp, Homo sapiens
tccctattataacaa

SEQ ID NO: 478699 - DNA, 15 bp, Homo sapiens
atccctattataaca

SEQ ID NO: 478700 - DNA, 15 bp, Homo sapiens
catccctattataac

SEQ ID NO: 478701 - DNA, 15 bp, Homo sapiens
tcatccctattataa

SEQ ID NO: 478702 - DNA, 15 bp, Homo sapiens
atcatccctattata

SEQ ID NO: 478703 - DNA, 15 bp, Homo sapiens
gatcatccctattat

SEQ ID NO: 478704 - DNA, 15 bp, Homo sapiens
agatcatccctatta

SEQ ID NO: 478705 - DNA, 15 bp, Homo sapiens
cagatcatccctatt

SEQ ID NO: 478706 - DNA, 15 bp, Homo sapiens
tcagatcatccctat

SEQ ID NO: 478707 - DNA, 15 bp, Homo sapiens
ctcagatcatcccta

SEQ ID NO: 478708 - DNA, 15 bp, Homo sapiens
gctcagatcatccct

SEQ ID NO: 478709 - DNA, 15 bp, Homo sapiens
ggctcagatcatccc

SEQ ID NO: 478710 - DNA, 15 bp, Homo sapiens
tggctcagatcatcc

SEQ ID NO: 478711 - DNA, 15 bp, Homo sapiens
ctggctcagatcatc

SEQ ID NO: 478712 - DNA, 15 bp, Homo sapiens
cctggctcagatcat

SEQ ID NO: 478713 - DNA, 15 bp, Homo sapiens
ccctggctcagatca

SEQ ID NO: 478714 - DNA, 15 bp, Homo sapiens
accctggctcagatc

SEQ ID NO: 478715 - DNA, 15 bp, Homo sapiens
taccctggctcagat

SEQ ID NO: 478716 - DNA, 15 bp, Homo sapiens
gtaccctggctcaga

SEQ ID NO: 478717 - DNA, 15 bp, Homo sapiens
agtaccctggctcag

SEQ ID NO: 478718 - DNA, 15 bp, Homo sapiens
gagtaccctggctca

SEQ ID NO: 478719 - DNA, 15 bp, Homo sapiens
tgagtaccctggctc

SEQ ID NO: 478720 - DNA, 15 bp, Homo sapiens
atgagtaccctggct

SEQ ID NO: 478721 - DNA, 15 bp, Homo sapiens
aatgagtaccctggc

SEQ ID NO: 478722 - DNA, 15 bp, Homo sapiens
taatgagtaccctgg

SEQ ID NO: 478723 - DNA, 15 bp, Homo sapiens
ataatgagtaccctg

SEQ ID NO: 478724 - DNA, 15 bp, Homo sapiens
tataatgagtaccct

SEQ ID NO: 478725 - DNA, 15 bp, Homo sapiens
ctataatgagtaccc

SEQ ID NO: 478726 - DNA, 15 bp, Homo sapiens
cctataatgagtacc

SEQ ID NO: 478727 - DNA, 15 bp, Homo sapiens
tcctataatgagtac

SEQ ID NO: 478728 - DNA, 15 bp, Homo sapiens
ttcctataatgagta

SEQ ID NO: 478729 - DNA, 15 bp, Homo sapiens
tttcctataatgagt

SEQ ID NO: 478730 - DNA, 15 bp, Homo sapiens
atttcctataatgag

SEQ ID NO: 478731 - DNA, 15 bp, Homo sapiens
aatttcctataatga

SEQ ID NO: 478732 - DNA, 15 bp, Homo sapiens
taatttcctataatg

SEQ ID NO: 478733 - DNA, 15 bp, Homo sapiens
ctaatttcctataat

SEQ ID NO: 478734 - DNA, 15 bp, Homo sapiens
cctaatttcctataa

SEQ ID NO: 478735 - DNA, 15 bp, Homo sapiens
ccctaatttcctata

SEQ ID NO: 478736 - DNA, 15 bp, Homo sapiens
cccctaatttcctat

SEQ ID NO: 478737 - DNA, 15 bp, Homo sapiens
gcccctaatttccta

SEQ ID NO: 478738 - DNA, 15 bp, Homo sapiens
tgcccctaatttcct

SEQ ID NO: 478739 - DNA, 15 bp, Homo sapiens
ttgcccctaatttcc

SEQ ID NO: 478740 - DNA, 15 bp, Homo sapiens
gttgcccctaatttc

SEQ ID NO: 478741 - DNA, 15 bp, Homo sapiens
ggttgcccctaattt

SEQ ID NO: 478742 - DNA, 15 bp, Homo sapiens
aggttgcccctaatt

SEQ ID NO: 478743 - DNA, 15 bp, Homo sapiens
aaggttgcccctaat

SEQ ID NO: 478744 - DNA, 15 bp, Homo sapiens
caaggttgcccctaa

SEQ ID NO: 478745 - DNA, 15 bp, Homo sapiens
acaaggttgccccta

SEQ ID NO: 478746 - DNA, 15 bp, Homo sapiens
gacaaggttgcccct

SEQ ID NO: 478747 - DNA, 15 bp, Homo sapiens
tgacaaggttgcccc

SEQ ID NO: 478748 - DNA, 15 bp, Homo sapiens
atgacaaggttgccc

SEQ ID NO: 478749 - DNA, 15 bp, Homo sapiens
catgacaaggttgcc

SEQ ID NO: 478750 - DNA, 15 bp, Homo sapiens
tcatgacaaggttgc

SEQ ID NO: 478751 - DNA, 15 bp, Homo sapiens
ctcatgacaaggttg

SEQ ID NO: 478752 - DNA, 15 bp, Homo sapiens
tctcatgacaaggtt

SEQ ID NO: 478753 - DNA, 15 bp, Homo sapiens
atctcatgacaaggt

SEQ ID NO: 478754 - DNA, 15 bp, Homo sapiens
aatctcatgacaagg

SEQ ID NO: 478755 - DNA, 15 bp, Homo sapiens
aaatctcatgacaag

SEQ ID NO: 478756 - DNA, 15 bp, Homo sapiens
caaatctcatgacaa

SEQ ID NO: 478757 - DNA, 15 bp, Homo sapiens
acaaatctcatgaca

SEQ ID NO: 478758 - DNA, 15 bp, Homo sapiens
aacaaatctcatgac

SEQ ID NO: 478759 - DNA, 15 bp, Homo sapiens
aaacaaatctcatga

SEQ ID NO: 478760 - DNA, 15 bp, Homo sapiens
taaacaaatctcatg

SEQ ID NO: 478761 - DNA, 15 bp, Homo sapiens
ctaaacaaatctcat

SEQ ID NO: 478762 - DNA, 15 bp, Homo sapiens
cctaaacaaatctca

SEQ ID NO: 478763 - DNA, 15 bp, Homo sapiens
tcctaaacaaatctc

SEQ ID NO: 478764 - DNA, 15 bp, Homo sapiens
ctcctaaacaaatct

SEQ ID NO: 478765 - DNA, 15 bp, Homo sapiens
tctcctaaacaaatc

SEQ ID NO: 478766 - DNA, 15 bp, Homo sapiens
atctcctaaacaaat

SEQ ID NO: 478767 - DNA, 15 bp, Homo sapiens
catctcctaaacaaa

SEQ ID NO: 478768 - DNA, 15 bp, Homo sapiens
tcatctcctaaacaa

SEQ ID NO: 478769 - DNA, 15 bp, Homo sapiens
ttcatctcctaaaca

SEQ ID NO: 478770 - DNA, 15 bp, Homo sapiens
tttcatctcctaaac

SEQ ID NO: 478771 - DNA, 15 bp, Homo sapiens
atttcatctcctaaa

SEQ ID NO: 478772 - DNA, 15 bp, Homo sapiens
aatttcatctcctaa

SEQ ID NO: 478773 - DNA, 15 bp, Homo sapiens
caatttcatctccta

SEQ ID NO: 478774 - DNA, 15 bp, Homo sapiens
ccaatttcatctcct

SEQ ID NO: 478775 - DNA, 15 bp, Homo sapiens
tccaatttcatctcc

SEQ ID NO: 478776 - DNA, 15 bp, Homo sapiens
ttccaatttcatctc

SEQ ID NO: 478777 - DNA, 15 bp, Homo sapiens
cttccaatttcatct

SEQ ID NO: 478778 - DNA, 15 bp, Homo sapiens
ccttccaatttcatc

SEQ ID NO: 478779 - DNA, 15 bp, Homo sapiens
gccttccaatttcat

SEQ ID NO: 478780 - DNA, 15 bp, Homo sapiens
agccttccaatttca

SEQ ID NO: 478781 - DNA, 15 bp, Homo sapiens
aagccttccaatttc

SEQ ID NO: 478782 - DNA, 15 bp, Homo sapiens
gaagccttccaattt

SEQ ID NO: 478783 - DNA, 15 bp, Homo sapiens
tgaagccttccaatt

SEQ ID NO: 478784 - DNA, 15 bp, Homo sapiens
ctgaagccttccaat

SEQ ID NO: 478785 - DNA, 15 bp, Homo sapiens
tctgaagccttccaa

SEQ ID NO: 478786 - DNA, 15 bp, Homo sapiens
atctgaagccttcca

SEQ ID NO: 478787 - DNA, 15 bp, Homo sapiens
catctgaagccttcc

SEQ ID NO: 478788 - DNA, 15 bp, Homo sapiens
ccatctgaagccttc

SEQ ID NO: 478789 - DNA, 15 bp, Homo sapiens
tccatctgaagcctt

SEQ ID NO: 478790 - DNA, 15 bp, Homo sapiens
atccatctgaagcct

SEQ ID NO: 478791 - DNA, 15 bp, Homo sapiens
catccatctgaagcc

SEQ ID NO: 478792 - DNA, 15 bp, Homo sapiens
tcatccatctgaagc

SEQ ID NO: 478793 - DNA, 15 bp, Homo sapiens
atcatccatctgaag

SEQ ID NO: 478794 - DNA, 15 bp, Homo sapiens
tatcatccatctgaa

SEQ ID NO: 478795 - DNA, 15 bp, Homo sapiens
ctatcatccatctga

SEQ ID NO: 478796 - DNA, 15 bp, Homo sapiens
cctatcatccatctg

SEQ ID NO: 478797 - DNA, 15 bp, Homo sapiens
ccctatcatccatct

SEQ ID NO: 478798 - DNA, 15 bp, Homo sapiens
cccctatcatccatc

SEQ ID NO: 478799 - DNA, 15 bp, Homo sapiens
acccctatcatccat

SEQ ID NO: 478800 - DNA, 15 bp, Homo sapiens
tacccctatcatcca

SEQ ID NO: 478801 - DNA, 15 bp, Homo sapiens
ttacccctatcatcc

SEQ ID NO: 478802 - DNA, 15 bp, Homo sapiens
cttacccctatcatc

SEQ ID NO: 478803 - DNA, 15 bp, Homo sapiens
ccttacccctatcat

SEQ ID NO: 478804 - DNA, 15 bp, Homo sapiens
tccttacccctatca

SEQ ID NO: 478805 - DNA, 15 bp, Homo sapiens
ctccttacccctatc

SEQ ID NO: 478806 - DNA, 15 bp, Homo sapiens
cctccttacccctat

SEQ ID NO: 478807 - DNA, 15 bp, Homo sapiens
tcctccttaccccta

SEQ ID NO: 478808 - DNA, 15 bp, Homo sapiens
ttcctccttacccct

SEQ ID NO: 478809 - DNA, 15 bp, Homo sapiens
tttcctccttacccc

SEQ ID NO: 478810 - DNA, 15 bp, Homo sapiens
ctttcctccttaccc

SEQ ID NO: 478811 - DNA, 15 bp, Homo sapiens
cctttcctccttacc

SEQ ID NO: 478812 - DNA, 15 bp, Homo sapiens
tcctttcctccttac

SEQ ID NO: 478813 - DNA, 15 bp, Homo sapiens
ctcctttcctcctta

SEQ ID NO: 478814 - DNA, 15 bp, Homo sapiens
cctcctttcctcctt

SEQ ID NO: 478815 - DNA, 15 bp, Homo sapiens
tcctcctttcctcct

SEQ ID NO: 478816 - DNA, 15 bp, Homo sapiens
ctcctcctttcctcc

SEQ ID NO: 478817 - DNA, 15 bp, Homo sapiens
tctcctcctttcctc

SEQ ID NO: 478818 - DNA, 15 bp, Homo sapiens
atctcctcctttcct

SEQ ID NO: 478819 - DNA, 15 bp, Homo sapiens
aatctcctcctttcc

SEQ ID NO: 478820 - DNA, 15 bp, Homo sapiens
aaatctcctcctttc

SEQ ID NO: 478821 - DNA, 15 bp, Homo sapiens
taaatctcctccttt

SEQ ID NO: 478822 - DNA, 15 bp, Homo sapiens
ttaaatctcctcctt

SEQ ID NO: 478823 - DNA, 15 bp, Homo sapiens
cttaaatctcctcct

SEQ ID NO: 478824 - DNA, 15 bp, Homo sapiens
acttaaatctcctcc

SEQ ID NO: 478825 - DNA, 15 bp, Homo sapiens
cacttaaatctcctc

SEQ ID NO: 478826 - DNA, 15 bp, Homo sapiens
tcacttaaatctcct

SEQ ID NO: 478827 - DNA, 15 bp, Homo sapiens
ttcacttaaatctcc

SEQ ID NO: 478828 - DNA, 15 bp, Homo sapiens
attcacttaaatctc

SEQ ID NO: 478829 - DNA, 15 bp, Homo sapiens
tattcacttaaatct

SEQ ID NO: 478830 - DNA, 15 bp, Homo sapiens
ttattcacttaaatc

SEQ ID NO: 478831 - DNA, 15 bp, Homo sapiens
cttattcacttaaat

SEQ ID NO: 478832 - DNA, 15 bp, Homo sapiens
tcttattcacttaaa

SEQ ID NO: 478833 - DNA, 15 bp, Homo sapiens
ctcttattcacttaa

SEQ ID NO: 478834 - DNA, 15 bp, Homo sapiens
actcttattcactta

SEQ ID NO: 478835 - DNA, 15 bp, Homo sapiens
aactcttattcactt

SEQ ID NO: 478836 - DNA, 15 bp, Homo sapiens
caactcttattcact

SEQ ID NO: 478837 - DNA, 15 bp, Homo sapiens
tcaactcttattcac

SEQ ID NO: 478838 - DNA, 15 bp, Homo sapiens
ctcaactcttattca

SEQ ID NO: 478839 - DNA, 15 bp, Homo sapiens
cctcaactcttattc

SEQ ID NO: 478840 - DNA, 15 bp, Homo sapiens
tcctcaactcttatt

SEQ ID NO: 478841 - DNA, 15 bp, Homo sapiens
ctcctcaactcttat

SEQ ID NO: 478842 - DNA, 15 bp, Homo sapiens
tctcctcaactctta

SEQ ID NO: 478843 - DNA, 15 bp, Homo sapiens
ctctcctcaactctt

SEQ ID NO: 478844 - DNA, 15 bp, Homo sapiens
cctctcctcaactct

SEQ ID NO: 478845 - DNA, 15 bp, Homo sapiens
ccctctcctcaactc

SEQ ID NO: 478846 - DNA, 15 bp, Homo sapiens
tccctctcctcaact

SEQ ID NO: 478847 - DNA, 15 bp, Homo sapiens
ctccctctcctcaac

SEQ ID NO: 478848 - DNA, 15 bp, Homo sapiens
cctccctctcctcaa

SEQ ID NO: 478849 - DNA, 15 bp, Homo sapiens
tcctccctctcctca

SEQ ID NO: 478850 - DNA, 15 bp, Homo sapiens
ctcctccctctcctc

SEQ ID NO: 478851 - DNA, 15 bp, Homo sapiens
actcctccctctcct

SEQ ID NO: 478852 - DNA, 15 bp, Homo sapiens
aactcctccctctcc

SEQ ID NO: 478853 - DNA, 15 bp, Homo sapiens
caactcctccctctc

SEQ ID NO: 478854 - DNA, 15 bp, Homo sapiens
acaactcctccctct

SEQ ID NO: 478855 - DNA, 15 bp, Homo sapiens
tacaactcctccctc

SEQ ID NO: 478856 - DNA, 15 bp, Homo sapiens
ttacaactcctccct

SEQ ID NO: 478857 - DNA, 15 bp, Homo sapiens
tttacaactcctccc

SEQ ID NO: 478858 - DNA, 15 bp, Homo sapiens
atttacaactcctcc

SEQ ID NO: 478859 - DNA, 15 bp, Homo sapiens
catttacaactcctc

SEQ ID NO: 478860 - DNA, 15 bp, Homo sapiens
tcatttacaactcct

SEQ ID NO: 478861 - DNA, 15 bp, Homo sapiens
gtcatttacaactcc

SEQ ID NO: 478862 - DNA, 15 bp, Homo sapiens
tgtcatttacaactc

SEQ ID NO: 478863 - DNA, 15 bp, Homo sapiens
ttgtcatttacaact

SEQ ID NO: 478864 - DNA, 15 bp, Homo sapiens
cttgtcatttacaac

SEQ ID NO: 478865 - DNA, 15 bp, Homo sapiens
acttgtcatttacaa

SEQ ID NO: 478866 - DNA, 15 bp, Homo sapiens
aacttgtcatttaca

SEQ ID NO: 478867 - DNA, 15 bp, Homo sapiens
aaacttgtcatttac

SEQ ID NO: 478868 - DNA, 15 bp, Homo sapiens
gaaacttgtcattta

SEQ ID NO: 478869 - DNA, 15 bp, Homo sapiens
agaaacttgtcattt

SEQ ID NO: 478870 - DNA, 15 bp, Homo sapiens
aagaaacttgtcatt

SEQ ID NO: 478871 - DNA, 15 bp, Homo sapiens
caagaaacttgtcat

SEQ ID NO: 478872 - DNA, 15 bp, Homo sapiens
acaagaaacttgtca

SEQ ID NO: 478873 - DNA, 15 bp, Homo sapiens
aacaagaaacttgtc

SEQ ID NO: 478874 - DNA, 15 bp, Homo sapiens
aaacaagaaacttgt

SEQ ID NO: 478875 - DNA, 15 bp, Homo sapiens
taaacaagaaacttg

SEQ ID NO: 478876 - DNA, 15 bp, Homo sapiens
ataaacaagaaactt

SEQ ID NO: 478877 - DNA, 15 bp, Homo sapiens
aataaacaagaaact

SEQ ID NO: 478878 - DNA, 15 bp, Homo sapiens
caataaacaagaaac

SEQ ID NO: 478879 - DNA, 15 bp, Homo sapiens
acaataaacaagaaa

SEQ ID NO: 478880 - DNA, 15 bp, Homo sapiens
aacaataaacaagaa

SEQ ID NO: 478881 - DNA, 15 bp, Homo sapiens
aaacaataaacaaga

SEQ ID NO: 478882 - DNA, 15 bp, Homo sapiens
aaaacaataaacaag

SEQ ID NO: 478883 - DNA, 15 bp, Homo sapiens
caaaacaataaacaa

SEQ ID NO: 478884 - DNA, 15 bp, Homo sapiens
tcaaaacaataaaca

SEQ ID NO: 478885 - DNA, 15 bp, Homo sapiens
ttcaaaacaataaac

SEQ ID NO: 478886 - DNA, 15 bp, Homo sapiens
attcaaaacaataaa

SEQ ID NO: 478887 - DNA, 15 bp, Homo sapiens
tattcaaaacaataa

SEQ ID NO: 478888 - DNA, 15 bp, Homo sapiens
ttattcaaaacaata

SEQ ID NO: 478889 - DNA, 15 bp, Homo sapiens
tttattcaaaacaat

SEQ ID NO: 478890 - DNA, 15 bp, Homo sapiens
ctttattcaaaacaa

SEQ ID NO: 478891 - DNA, 15 bp, Homo sapiens
cctttattcaaaaca

SEQ ID NO: 478892 - DNA, 15 bp, Homo sapiens
ccctttattcaaaac

SEQ ID NO: 478893 - DNA, 15 bp, Homo sapiens
cccctttattcaaaa

SEQ ID NO: 478894 - DNA, 15 bp, Homo sapiens
tcccctttattcaaa

SEQ ID NO: 478895 - DNA, 15 bp, Homo sapiens
ttcccctttattcaa

SEQ ID NO: 478896 - DNA, 15 bp, Homo sapiens
tttcccctttattca

SEQ ID NO: 478897 - DNA, 15 bp, Homo sapiens
ttttcccctttattc

SEQ ID NO: 478898 - DNA, 15 bp, Homo sapiens
attttcccctttatt

SEQ ID NO: 478899 - DNA, 15 bp, Homo sapiens
aattttcccctttat

SEQ ID NO: 478900 - DNA, 15 bp, Homo sapiens
caattttccccttta

SEQ ID NO: 478901 - DNA, 15 bp, Homo sapiens
acaattttccccttt

SEQ ID NO: 478902 - DNA, 15 bp, Homo sapiens
aacaattttcccctt

SEQ ID NO: 478903 - DNA, 15 bp, Homo sapiens
aaacaattttcccct

SEQ ID NO: 478904 - DNA, 15 bp, Homo sapiens
aaaacaattttcccc

SEQ ID NO: 478905 - DNA, 15 bp, Homo sapiens
gaaaacaattttccc

SEQ ID NO: 478906 - DNA, 15 bp, Homo sapiens
tgaaaacaattttcc

SEQ ID NO: 478907 - DNA, 15 bp, Homo sapiens
ctgaaaacaattttc

SEQ ID NO: 478908 - DNA, 15 bp, Homo sapiens
actgaaaacaatttt

SEQ ID NO: 478909 - DNA, 15 bp, Homo sapiens
aactgaaaacaattt

SEQ ID NO: 478910 - DNA, 15 bp, Homo sapiens
taactgaaaacaatt

SEQ ID NO: 478911 - DNA, 15 bp, Homo sapiens
ataactgaaaacaat

SEQ ID NO: 478912 - DNA, 15 bp, Homo sapiens
aataactgaaaacaa

SEQ ID NO: 478913 - DNA, 15 bp, Homo sapiens
gaataactgaaaaca

SEQ ID NO: 478914 - DNA, 15 bp, Homo sapiens
tgaataactgaaaac

SEQ ID NO: 478915 - DNA, 15 bp, Homo sapiens
atgaataactgaaaa

SEQ ID NO: 478916 - DNA, 15 bp, Homo sapiens
tatgaataactgaaa

SEQ ID NO: 478917 - DNA, 15 bp, Homo sapiens
ttatgaataactgaa

SEQ ID NO: 478918 - DNA, 15 bp, Homo sapiens
tttatgaataactga

SEQ ID NO: 478919 - DNA, 15 bp, Homo sapiens
ctttatgaataactg

SEQ ID NO: 478920 - DNA, 15 bp, Homo sapiens
cctttatgaataact

SEQ ID NO: 478921 - DNA, 15 bp, Homo sapiens
tcctttatgaataac

SEQ ID NO: 478922 - DNA, 15 bp, Homo sapiens
gtcctttatgaataa

SEQ ID NO: 478923 - DNA, 15 bp, Homo sapiens
agtcctttatgaata

SEQ ID NO: 478924 - DNA, 15 bp, Homo sapiens
aagtcctttatgaat

SEQ ID NO: 478925 - DNA, 15 bp, Homo sapiens
taagtcctttatgaa

SEQ ID NO: 478926 - DNA, 15 bp, Homo sapiens
ttaagtcctttatga

SEQ ID NO: 478927 - DNA, 15 bp, Homo sapiens
tttaagtcctttatg

SEQ ID NO: 478928 - DNA, 15 bp, Homo sapiens
ttttaagtcctttat

SEQ ID NO: 478929 - DNA, 15 bp, Homo sapiens
tttttaagtccttta

SEQ ID NO: 478930 - DNA, 15 bp, Homo sapiens
atttttaagtccttt

SEQ ID NO: 478931 - DNA, 15 bp, Homo sapiens
catttttaagtcctt

SEQ ID NO: 478932 - DNA, 15 bp, Homo sapiens
ccatttttaagtcct

SEQ ID NO: 478933 - DNA, 15 bp, Homo sapiens
cccatttttaagtcc

SEQ ID NO: 478934 - DNA, 15 bp, Homo sapiens
gcccatttttaagtc

SEQ ID NO: 478935 - DNA, 15 bp, Homo sapiens
agcccatttttaagt

SEQ ID NO: 478936 - DNA, 15 bp, Homo sapiens
aagcccatttttaag

SEQ ID NO: 478937 - DNA, 15 bp, Homo sapiens
aaagcccatttttaa

SEQ ID NO: 478938 - DNA, 15 bp, Homo sapiens
caaagcccattttta

SEQ ID NO: 478939 - DNA, 15 bp, Homo sapiens
tcaaagcccattttt

SEQ ID NO: 478940 - DNA, 15 bp, Homo sapiens
atcaaagcccatttt

SEQ ID NO: 478941 - DNA, 15 bp, Homo sapiens
gatcaaagcccattt

SEQ ID NO: 478942 - DNA, 15 bp, Homo sapiens
ggatcaaagcccatt

SEQ ID NO: 478943 - DNA, 15 bp, Homo sapiens
gggatcaaagcccat

SEQ ID NO: 478944 - DNA, 15 bp, Homo sapiens
tgggatcaaagccca

SEQ ID NO: 478945 - DNA, 15 bp, Homo sapiens
ttgggatcaaagccc

SEQ ID NO: 478946 - DNA, 15 bp, Homo sapiens
tttgggatcaaagcc

SEQ ID NO: 478947 - DNA, 15 bp, Homo sapiens
ttttgggatcaaagc

SEQ ID NO: 478948 - DNA, 15 bp, Homo sapiens
cttttgggatcaaag

SEQ ID NO: 478949 - DNA, 15 bp, Homo sapiens
acttttgggatcaaa

SEQ ID NO: 478950 - DNA, 15 bp, Homo sapiens
aacttttgggatcaa

SEQ ID NO: 478951 - DNA, 15 bp, Homo sapiens
caacttttgggatca

SEQ ID NO: 478952 - DNA, 15 bp, Homo sapiens
acaacttttgggatc

SEQ ID NO: 478953 - DNA, 15 bp, Homo sapiens
aacaacttttgggat

SEQ ID NO: 478954 - DNA, 15 bp, Homo sapiens
aaacaacttttggga

SEQ ID NO: 478955 - DNA, 15 bp, Homo sapiens
aaaacaacttttggg

SEQ ID NO: 478956 - DNA, 15 bp, Homo sapiens
caaaacaacttttgg

SEQ ID NO: 478957 - DNA, 15 bp, Homo sapiens
tcaaaacaacttttg

SEQ ID NO: 478958 - DNA, 15 bp, Homo sapiens
ttcaaaacaactttt

SEQ ID NO: 478959 - DNA, 15 bp, Homo sapiens
cttcaaaacaacttt

SEQ ID NO: 478960 - DNA, 15 bp, Homo sapiens
acttcaaaacaactt

SEQ ID NO: 478961 - DNA, 15 bp, Homo sapiens
aacttcaaaacaact

SEQ ID NO: 478962 - DNA, 15 bp, Homo sapiens
taacttcaaaacaac

SEQ ID NO: 478963 - DNA, 15 bp, Homo sapiens
ataacttcaaaacaa

SEQ ID NO: 478964 - DNA, 15 bp, Homo sapiens
aataacttcaaaaca

SEQ ID NO: 478965 - DNA, 15 bp, Homo sapiens
aaataacttcaaaac

SEQ ID NO: 478966 - DNA, 15 bp, Homo sapiens
gaaataacttcaaaa

SEQ ID NO: 478967 - DNA, 15 bp, Homo sapiens
ggaaataacttcaaa

SEQ ID NO: 478968 - DNA, 15 bp, Homo sapiens
aggaaataacttcaa

SEQ ID NO: 478969 - DNA, 15 bp, Homo sapiens
caggaaataacttca

SEQ ID NO: 478970 - DNA, 15 bp, Homo sapiens
gcaggaaataacttc

SEQ ID NO: 478971 - DNA, 15 bp, Homo sapiens
agcaggaaataactt

SEQ ID NO: 478972 - DNA, 15 bp, Homo sapiens
aagcaggaaataact

SEQ ID NO: 478973 - DNA, 15 bp, Homo sapiens
aaagcaggaaataac

SEQ ID NO: 478974 - DNA, 15 bp, Homo sapiens
taaagcaggaaataa

SEQ ID NO: 478975 - DNA, 15 bp, Homo sapiens
ataaagcaggaaata

SEQ ID NO: 478976 - DNA, 15 bp, Homo sapiens
gataaagcaggaaat

SEQ ID NO: 478977 - DNA, 15 bp, Homo sapiens
agataaagcaggaaa

SEQ ID NO: 478978 - DNA, 15 bp, Homo sapiens
aagataaagcaggaa

SEQ ID NO: 478979 - DNA, 15 bp, Homo sapiens
aaagataaagcagga

SEQ ID NO: 478980 - DNA, 15 bp, Homo sapiens
caaagataaagcagg

SEQ ID NO: 478981 - DNA, 15 bp, Homo sapiens
ccaaagataaagcag

SEQ ID NO: 478982 - DNA, 15 bp, Homo sapiens
tccaaagataaagca

SEQ ID NO: 478983 - DNA, 15 bp, Homo sapiens
ctccaaagataaagc

SEQ ID NO: 478984 - DNA, 15 bp, Homo sapiens
tctccaaagataaag

SEQ ID NO: 478985 - DNA, 15 bp, Homo sapiens
gtctccaaagataaa

SEQ ID NO: 478986 - DNA, 15 bp, Homo sapiens
ggtctccaaagataa

SEQ ID NO: 478987 - DNA, 15 bp, Homo sapiens
gggtctccaaagata

SEQ ID NO: 478988 - DNA, 15 bp, Homo sapiens
agggtctccaaagat

SEQ ID NO: 478989 - DNA, 15 bp, Homo sapiens
aagggtctccaaaga

SEQ ID NO: 478990 - DNA, 15 bp, Homo sapiens
gaagggtctccaaag

SEQ ID NO: 478991 - DNA, 15 bp, Homo sapiens
agaagggtctccaaa

SEQ ID NO: 478992 - DNA, 15 bp, Homo sapiens
aagaagggtctccaa

SEQ ID NO: 478993 - DNA, 15 bp, Homo sapiens
gaagaagggtctcca

SEQ ID NO: 478994 - DNA, 15 bp, Homo sapiens
ggaagaagggtctcc

SEQ ID NO: 478995 - DNA, 15 bp, Homo sapiens
gggaagaagggtctc

SEQ ID NO: 478996 - DNA, 15 bp, Homo sapiens
tgggaagaagggtct

SEQ ID NO: 478997 - DNA, 15 bp, Homo sapiens
gtgggaagaagggtc

SEQ ID NO: 478998 - DNA, 15 bp, Homo sapiens
ggtgggaagaagggt

SEQ ID NO: 478999 - DNA, 15 bp, Homo sapiens
gggtgggaagaaggg

SEQ ID NO: 479000 - DNA, 15 bp, Homo sapiens
ggggtgggaagaagg

SEQ ID NO: 479001 - DNA, 15 bp, Homo sapiens
gggggtgggaagaag

SEQ ID NO: 479002 - DNA, 15 bp, Homo sapiens
tgggggtgggaagaa

SEQ ID NO: 479003 - DNA, 15 bp, Homo sapiens
gtgggggtgggaaga

SEQ ID NO: 479004 - DNA, 15 bp, Homo sapiens
tgtgggggtgggaag

SEQ ID NO: 479005 - DNA, 15 bp, Homo sapiens
atgtgggggtgggaa

SEQ ID NO: 479006 - DNA, 15 bp, Homo sapiens
gatgtgggggtggga

SEQ ID NO: 479007 - DNA, 15 bp, Homo sapiens
tgatgtgggggtggg

SEQ ID NO: 479008 - DNA, 15 bp, Homo sapiens
ttgatgtgggggtgg

SEQ ID NO: 479009 - DNA, 15 bp, Homo sapiens
tttgatgtgggggtg

SEQ ID NO: 479010 - DNA, 15 bp, Homo sapiens
ctttgatgtgggggt

SEQ ID NO: 479011 - DNA, 15 bp, Homo sapiens
gctttgatgtggggg

SEQ ID NO: 479012 - DNA, 15 bp, Homo sapiens
tgctttgatgtgggg

SEQ ID NO: 479013 - DNA, 15 bp, Homo sapiens
ttgctttgatgtggg

SEQ ID NO: 479014 - DNA, 15 bp, Homo sapiens
tttgctttgatgtgg

SEQ ID NO: 479015 - DNA, 15 bp, Homo sapiens
atttgctttgatgtg

SEQ ID NO: 479016 - DNA, 15 bp, Homo sapiens
catttgctttgatgt

SEQ ID NO: 479017 - DNA, 15 bp, Homo sapiens
gcatttgctttgatg

SEQ ID NO: 479018 - DNA, 15 bp, Homo sapiens
ggcatttgctttgat

SEQ ID NO: 479019 - DNA, 15 bp, Homo sapiens
gggcatttgctttga

SEQ ID NO: 479020 - DNA, 15 bp, Homo sapiens
agggcatttgctttg

SEQ ID NO: 479021 - DNA, 15 bp, Homo sapiens
gagggcatttgcttt

SEQ ID NO: 479022 - DNA, 15 bp, Homo sapiens
tgagggcatttgctt

SEQ ID NO: 479023 - DNA, 15 bp, Homo sapiens
ttgagggcatttgct

SEQ ID NO: 479024 - DNA, 15 bp, Homo sapiens
gttgagggcatttgc

SEQ ID NO: 479025 - DNA, 15 bp, Homo sapiens
agttgagggcatttg

SEQ ID NO: 479026 - DNA, 15 bp, Homo sapiens
cagttgagggcattt

SEQ ID NO: 479027 - DNA, 15 bp, Homo sapiens
gcagttgagggcatt

SEQ ID NO: 479028 - DNA, 15 bp, Homo sapiens
agcagttgagggcat

SEQ ID NO: 479029 - DNA, 15 bp, Homo sapiens
aagcagttgagggca

SEQ ID NO: 479030 - DNA, 15 bp, Homo sapiens
aaagcagttgagggc

SEQ ID NO: 479031 - DNA, 15 bp, Homo sapiens
taaagcagttgaggg

SEQ ID NO: 479032 - DNA, 15 bp, Homo sapiens
ctaaagcagttgagg

SEQ ID NO: 479033 - DNA, 15 bp, Homo sapiens
tctaaagcagttgag

SEQ ID NO: 479034 - DNA, 15 bp, Homo sapiens
atctaaagcagttga

SEQ ID NO: 479035 - DNA, 15 bp, Homo sapiens
catctaaagcagttg

SEQ ID NO: 479036 - DNA, 15 bp, Homo sapiens
gcatctaaagcagtt

SEQ ID NO: 479037 - DNA, 15 bp, Homo sapiens
tgcatctaaagcagt

SEQ ID NO: 479038 - DNA, 15 bp, Homo sapiens
ctgcatctaaagcag

SEQ ID NO: 479039 - DNA, 15 bp, Homo sapiens
actgcatctaaagca

SEQ ID NO: 479040 - DNA, 15 bp, Homo sapiens
gactgcatctaaagc

SEQ ID NO: 479041 - DNA, 15 bp, Homo sapiens
agactgcatctaaag

SEQ ID NO: 479042 - DNA, 15 bp, Homo sapiens
aagactgcatctaaa

SEQ ID NO: 479043 - DNA, 15 bp, Homo sapiens
caagactgcatctaa

SEQ ID NO: 479044 - DNA, 15 bp, Homo sapiens
gcaagactgcatcta

SEQ ID NO: 479045 - DNA, 15 bp, Homo sapiens
tgcaagactgcatct

SEQ ID NO: 479046 - DNA, 15 bp, Homo sapiens
atgcaagactgcatc

SEQ ID NO: 479047 - DNA, 15 bp, Homo sapiens
aatgcaagactgcat

SEQ ID NO: 479048 - DNA, 15 bp, Homo sapiens
caatgcaagactgca

SEQ ID NO: 479049 - DNA, 15 bp, Homo sapiens
tcaatgcaagactgc

SEQ ID NO: 479050 - DNA, 15 bp, Homo sapiens
ttcaatgcaagactg

SEQ ID NO: 479051 - DNA, 15 bp, Homo sapiens
tttcaatgcaagact

SEQ ID NO: 479052 - DNA, 15 bp, Homo sapiens
atttcaatgcaagac

SEQ ID NO: 479053 - DNA, 15 bp, Homo sapiens
tatttcaatgcaaga

SEQ ID NO: 479054 - DNA, 15 bp, Homo sapiens
ctatttcaatgcaag

SEQ ID NO: 479055 - DNA, 15 bp, Homo sapiens
cctatttcaatgcaa

SEQ ID NO: 479056 - DNA, 15 bp, Homo sapiens
acctatttcaatgca

SEQ ID NO: 479057 - DNA, 15 bp, Homo sapiens
tacctatttcaatgc

SEQ ID NO: 479058 - DNA, 15 bp, Homo sapiens
atacctatttcaatg

SEQ ID NO: 479059 - DNA, 15 bp, Homo sapiens
gatacctatttcaat

SEQ ID NO: 479060 - DNA, 15 bp, Homo sapiens
tgatacctatttcaa

SEQ ID NO: 479061 - DNA, 15 bp, Homo sapiens
gtgatacctatttca

SEQ ID NO: 479062 - DNA, 15 bp, Homo sapiens
tgtgatacctatttc

SEQ ID NO: 479063 - DNA, 15 bp, Homo sapiens
atgtgatacctattt

SEQ ID NO: 479064 - DNA, 15 bp, Homo sapiens
aatgtgatacctatt

SEQ ID NO: 479065 - DNA, 15 bp, Homo sapiens
caatgtgatacctat

SEQ ID NO: 479066 - DNA, 15 bp, Homo sapiens
acaatgtgataccta

SEQ ID NO: 479067 - DNA, 15 bp, Homo sapiens
aacaatgtgatacct

SEQ ID NO: 479068 - DNA, 15 bp, Homo sapiens
aaacaatgtgatacc

SEQ ID NO: 479069 - DNA, 15 bp, Homo sapiens
aaaacaatgtgatac

SEQ ID NO: 479070 - DNA, 15 bp, Homo sapiens
taaaacaatgtgata

SEQ ID NO: 479071 - DNA, 15 bp, Homo sapiens
ataaaacaatgtgat

SEQ ID NO: 479072 - DNA, 15 bp, Homo sapiens
aataaaacaatgtga

SEQ ID NO: 479073 - DNA, 15 bp, Homo sapiens
aaataaaacaatgtg

SEQ ID NO: 479074 - DNA, 15 bp, Homo sapiens
aaaataaaacaatgt

SEQ ID NO: 479075 - DNA, 15 bp, Homo sapiens
caaaataaaacaatg

SEQ ID NO: 479076 - DNA, 15 bp, Homo sapiens
gcaaaataaaacaat

SEQ ID NO: 479077 - DNA, 15 bp, Homo sapiens
agcaaaataaaacaa

SEQ ID NO: 479078 - DNA, 15 bp, Homo sapiens
aagcaaaataaaaca

SEQ ID NO: 479079 - DNA, 15 bp, Homo sapiens
caagcaaaataaaac

SEQ ID NO: 479080 - DNA, 15 bp, Homo sapiens
tcaagcaaaataaaa

SEQ ID NO: 479081 - DNA, 15 bp, Homo sapiens
ttcaagcaaaataaa

SEQ ID NO: 479082 - DNA, 15 bp, Homo sapiens
attcaagcaaaataa

SEQ ID NO: 479083 - DNA, 15 bp, Homo sapiens
cattcaagcaaaata

SEQ ID NO: 479084 - DNA, 15 bp, Homo sapiens
ccattcaagcaaaat

SEQ ID NO: 479085 - DNA, 15 bp, Homo sapiens
cccattcaagcaaaa

SEQ ID NO: 479086 - DNA, 15 bp, Homo sapiens
acccattcaagcaaa

SEQ ID NO: 479087 - DNA, 15 bp, Homo sapiens
cacccattcaagcaa

SEQ ID NO: 479088 - DNA, 15 bp, Homo sapiens
gcacccattcaagca

SEQ ID NO: 479089 - DNA, 15 bp, Homo sapiens
agcacccattcaagc

SEQ ID NO: 479090 - DNA, 15 bp, Homo sapiens
cagcacccattcaag

SEQ ID NO: 479091 - DNA, 15 bp, Homo sapiens
acagcacccattcaa

SEQ ID NO: 479092 - DNA, 15 bp, Homo sapiens
aacagcacccattca

SEQ ID NO: 479093 - DNA, 15 bp, Homo sapiens
caacagcacccattc

SEQ ID NO: 479094 - DNA, 15 bp, Homo sapiens
ccaacagcacccatt

SEQ ID NO: 479095 - DNA, 15 bp, Homo sapiens
gccaacagcacccat

SEQ ID NO: 479096 - DNA, 15 bp, Homo sapiens
agccaacagcaccca

SEQ ID NO: 479097 - DNA, 15 bp, Homo sapiens
aagccaacagcaccc

SEQ ID NO: 479098 - DNA, 15 bp, Homo sapiens
taagccaacagcacc

SEQ ID NO: 479099 - DNA, 15 bp, Homo sapiens
ttaagccaacagcac

SEQ ID NO: 479100 - DNA, 15 bp, Homo sapiens
tttaagccaacagca

SEQ ID NO: 479101 - DNA, 15 bp, Homo sapiens
gtttaagccaacagc

SEQ ID NO: 479102 - DNA, 15 bp, Homo sapiens
tgtttaagccaacag

SEQ ID NO: 479103 - DNA, 15 bp, Homo sapiens
atgtttaagccaaca

SEQ ID NO: 479104 - DNA, 15 bp, Homo sapiens
gatgtttaagccaac

SEQ ID NO: 479105 - DNA, 15 bp, Homo sapiens
agatgtttaagccaa

SEQ ID NO: 479106 - DNA, 15 bp, Homo sapiens
tagatgtttaagcca

SEQ ID NO: 479107 - DNA, 15 bp, Homo sapiens
ttagatgtttaagcc

SEQ ID NO: 479108 - DNA, 15 bp, Homo sapiens
attagatgtttaagc

SEQ ID NO: 479109 - DNA, 15 bp, Homo sapiens
aattagatgtttaag

SEQ ID NO: 479110 - DNA, 15 bp, Homo sapiens
caattagatgtttaa

SEQ ID NO: 479111 - DNA, 15 bp, Homo sapiens
gcaattagatgttta

SEQ ID NO: 479112 - DNA, 15 bp, Homo sapiens
tgcaattagatgttt

SEQ ID NO: 479113 - DNA, 15 bp, Homo sapiens
atgcaattagatgtt

SEQ ID NO: 479114 - DNA, 15 bp, Homo sapiens
gatgcaattagatgt

SEQ ID NO: 479115 - DNA, 15 bp, Homo sapiens
agatgcaattagatg

SEQ ID NO: 479116 - DNA, 15 bp, Homo sapiens
cagatgcaattagat

SEQ ID NO: 479117 - DNA, 15 bp, Homo sapiens
gcagatgcaattaga

SEQ ID NO: 479118 - DNA, 15 bp, Homo sapiens
agcagatgcaattag

SEQ ID NO: 479119 - DNA, 15 bp, Homo sapiens
aagcagatgcaatta

SEQ ID NO: 479120 - DNA, 15 bp, Homo sapiens
aaagcagatgcaatt

SEQ ID NO: 479121 - DNA, 15 bp, Homo sapiens
caaagcagatgcaat

SEQ ID NO: 479122 - DNA, 15 bp, Homo sapiens
acaaagcagatgcaa

SEQ ID NO: 479123 - DNA, 15 bp, Homo sapiens
gacaaagcagatgca

SEQ ID NO: 479124 - DNA, 15 bp, Homo sapiens
agacaaagcagatgc

SEQ ID NO: 479125 - DNA, 15 bp, Homo sapiens
aagacaaagcagatg

SEQ ID NO: 479126 - DNA, 15 bp, Homo sapiens
gaagacaaagcagat

SEQ ID NO: 479127 - DNA, 15 bp, Homo sapiens
agaagacaaagcaga

SEQ ID NO: 479128 - DNA, 15 bp, Homo sapiens
aagaagacaaagcag

SEQ ID NO: 479129 - DNA, 15 bp, Homo sapiens
aaagaagacaaagca

SEQ ID NO: 479130 - DNA, 15 bp, Homo sapiens
taaagaagacaaagc

SEQ ID NO: 479131 - DNA, 15 bp, Homo sapiens
ctaaagaagacaaag

SEQ ID NO: 479132 - DNA, 15 bp, Homo sapiens
actaaagaagacaaa

SEQ ID NO: 479133 - DNA, 15 bp, Homo sapiens
aactaaagaagacaa

SEQ ID NO: 479134 - DNA, 15 bp, Homo sapiens
caactaaagaagaca

SEQ ID NO: 479135 - DNA, 15 bp, Homo sapiens
acaactaaagaagac

SEQ ID NO: 479136 - DNA, 15 bp, Homo sapiens
cacaactaaagaaga

SEQ ID NO: 479137 - DNA, 15 bp, Homo sapiens
acacaactaaagaag

SEQ ID NO: 479138 - DNA, 15 bp, Homo sapiens
gacacaactaaagaa

SEQ ID NO: 479139 - DNA, 15 bp, Homo sapiens
agacacaactaaaga

SEQ ID NO: 479140 - DNA, 15 bp, Homo sapiens
tagacacaactaaag

SEQ ID NO: 479141 - DNA, 15 bp, Homo sapiens
gtagacacaactaaa

SEQ ID NO: 479142 - DNA, 15 bp, Homo sapiens
agtagacacaactaa

SEQ ID NO: 479143 - DNA, 15 bp, Homo sapiens
aagtagacacaacta

SEQ ID NO: 479144 - DNA, 15 bp, Homo sapiens
taagtagacacaact

SEQ ID NO: 479145 - DNA, 15 bp, Homo sapiens
ataagtagacacaac

SEQ ID NO: 479146 - DNA, 15 bp, Homo sapiens
cataagtagacacaa

SEQ ID NO: 479147 - DNA, 15 bp, Homo sapiens
ccataagtagacaca

SEQ ID NO: 479148 - DNA, 15 bp, Homo sapiens
cccataagtagacac

SEQ ID NO: 479149 - DNA, 15 bp, Homo sapiens
gcccataagtagaca

SEQ ID NO: 479150 - DNA, 15 bp, Homo sapiens
ggcccataagtagac

SEQ ID NO: 479151 - DNA, 15 bp, Homo sapiens
tggcccataagtaga

SEQ ID NO: 479152 - DNA, 15 bp, Homo sapiens
ttggcccataagtag

SEQ ID NO: 479153 - DNA, 15 bp, Homo sapiens
tttggcccataagta

SEQ ID NO: 479154 - DNA, 15 bp, Homo sapiens
ttttggcccataagt

SEQ ID NO: 479155 - DNA, 15 bp, Homo sapiens
cttttggcccataag

SEQ ID NO: 479156 - DNA, 15 bp, Homo sapiens
tcttttggcccataa

SEQ ID NO: 479157 - DNA, 15 bp, Homo sapiens
ctcttttggcccata

SEQ ID NO: 479158 - DNA, 15 bp, Homo sapiens
gctcttttggcccat

SEQ ID NO: 479159 - DNA, 15 bp, Homo sapiens
tgctcttttggccca

SEQ ID NO: 479160 - DNA, 15 bp, Homo sapiens
atgctcttttggccc

SEQ ID NO: 479161 - DNA, 15 bp, Homo sapiens
aatgctcttttggcc

SEQ ID NO: 479162 - DNA, 15 bp, Homo sapiens
aaatgctcttttggc

SEQ ID NO: 479163 - DNA, 15 bp, Homo sapiens
gaaatgctcttttgg

SEQ ID NO: 479164 - DNA, 15 bp, Homo sapiens
agaaatgctcttttg

SEQ ID NO: 479165 - DNA, 15 bp, Homo sapiens
tagaaatgctctttt

SEQ ID NO: 479166 - DNA, 15 bp, Homo sapiens
gtagaaatgctcttt

SEQ ID NO: 479167 - DNA, 15 bp, Homo sapiens
ggtagaaatgctctt

SEQ ID NO: 479168 - DNA, 15 bp, Homo sapiens
aggtagaaatgctct

SEQ ID NO: 479169 - DNA, 15 bp, Homo sapiens
gaggtagaaatgctc

SEQ ID NO: 479170 - DNA, 15 bp, Homo sapiens
agaggtagaaatgct

SEQ ID NO: 479171 - DNA, 15 bp, Homo sapiens
cagaggtagaaatgc

SEQ ID NO: 479172 - DNA, 15 bp, Homo sapiens
acagaggtagaaatg

SEQ ID NO: 479173 - DNA, 15 bp, Homo sapiens
tacagaggtagaaat

SEQ ID NO: 479174 - DNA, 15 bp, Homo sapiens
ttacagaggtagaaa

SEQ ID NO: 479175 - DNA, 15 bp, Homo sapiens
attacagaggtagaa

SEQ ID NO: 479176 - DNA, 15 bp, Homo sapiens
aattacagaggtaga

SEQ ID NO: 479177 - DNA, 15 bp, Homo sapiens
aaattacagaggtag

SEQ ID NO: 479178 - DNA, 15 bp, Homo sapiens
gaaattacagaggta

SEQ ID NO: 479179 - DNA, 15 bp, Homo sapiens
tgaaattacagaggt

SEQ ID NO: 479180 - DNA, 15 bp, Homo sapiens
atgaaattacagagg

SEQ ID NO: 479181 - DNA, 15 bp, Homo sapiens
aatgaaattacagag

SEQ ID NO: 479182 - DNA, 15 bp, Homo sapiens
aaatgaaattacaga

SEQ ID NO: 479183 - DNA, 15 bp, Homo sapiens
caaatgaaattacag

SEQ ID NO: 479184 - DNA, 15 bp, Homo sapiens
gcaaatgaaattaca

SEQ ID NO: 479185 - DNA, 15 bp, Homo sapiens
tgcaaatgaaattac

SEQ ID NO: 479186 - DNA, 15 bp, Homo sapiens
atgcaaatgaaatta

SEQ ID NO: 479187 - DNA, 15 bp, Homo sapiens
tatgcaaatgaaatt

SEQ ID NO: 479188 - DNA, 15 bp, Homo sapiens
atatgcaaatgaaat

SEQ ID NO: 479189 - DNA, 15 bp, Homo sapiens
aatatgcaaatgaaa

SEQ ID NO: 479190 - DNA, 15 bp, Homo sapiens
caatatgcaaatgaa

SEQ ID NO: 479191 - DNA, 15 bp, Homo sapiens
ccaatatgcaaatga

SEQ ID NO: 479192 - DNA, 15 bp, Homo sapiens
accaatatgcaaatg

SEQ ID NO: 479193 - DNA, 15 bp, Homo sapiens
aaccaatatgcaaat

SEQ ID NO: 479194 - DNA, 15 bp, Homo sapiens
aaaccaatatgcaaa

SEQ ID NO: 479195 - DNA, 15 bp, Homo sapiens
aaaaccaatatgcaa

SEQ ID NO: 479196 - DNA, 15 bp, Homo sapiens
gaaaaccaatatgca

SEQ ID NO: 479197 - DNA, 15 bp, Homo sapiens
tgaaaaccaatatgc

SEQ ID NO: 479198 - DNA, 15 bp, Homo sapiens
ctgaaaaccaatatg

SEQ ID NO: 479199 - DNA, 15 bp, Homo sapiens
tctgaaaaccaatat

SEQ ID NO: 479200 - DNA, 15 bp, Homo sapiens
atctgaaaaccaata

SEQ ID NO: 479201 - DNA, 15 bp, Homo sapiens
tatctgaaaaccaat

SEQ ID NO: 479202 - DNA, 15 bp, Homo sapiens
ttatctgaaaaccaa

SEQ ID NO: 479203 - DNA, 15 bp, Homo sapiens
tttatctgaaaacca

SEQ ID NO: 479204 - DNA, 15 bp, Homo sapiens
atttatctgaaaacc

SEQ ID NO: 479205 - DNA, 15 bp, Homo sapiens
aatttatctgaaaac

SEQ ID NO: 479206 - DNA, 15 bp, Homo sapiens
caatttatctgaaaa

SEQ ID NO: 479207 - DNA, 15 bp, Homo sapiens
tcaatttatctgaaa

SEQ ID NO: 479208 - DNA, 15 bp, Homo sapiens
ttcaatttatctgaa

SEQ ID NO: 479209 - DNA, 15 bp, Homo sapiens
cttcaatttatctga

SEQ ID NO: 479210 - DNA, 15 bp, Homo sapiens
tcttcaatttatctg

SEQ ID NO: 479211 - DNA, 15 bp, Homo sapiens
atcttcaatttatct

SEQ ID NO: 479212 - DNA, 15 bp, Homo sapiens
aatcttcaatttatc

SEQ ID NO: 479213 - DNA, 15 bp, Homo sapiens
taatcttcaatttat

SEQ ID NO: 479214 - DNA, 15 bp, Homo sapiens
ttaatcttcaattta

SEQ ID NO: 479215 - DNA, 15 bp, Homo sapiens
attaatcttcaattt

SEQ ID NO: 479216 - DNA, 15 bp, Homo sapiens
aattaatcttcaatt

SEQ ID NO: 479217 - DNA, 15 bp, Homo sapiens
taattaatcttcaat

SEQ ID NO: 479218 - DNA, 15 bp, Homo sapiens
ataattaatcttcaa

SEQ ID NO: 479219 - DNA, 15 bp, Homo sapiens
tataattaatcttca

SEQ ID NO: 479220 - DNA, 15 bp, Homo sapiens
atataattaatcttc

SEQ ID NO: 479221 - DNA, 15 bp, Homo sapiens
catataattaatctt

SEQ ID NO: 479222 - DNA, 15 bp, Homo sapiens
tcatataattaatct

SEQ ID NO: 479223 - DNA, 15 bp, Homo sapiens
ttcatataattaatc

SEQ ID NO: 479224 - DNA, 15 bp, Homo sapiens
cttcatataattaat

SEQ ID NO: 479225 - DNA, 15 bp, Homo sapiens
acttcatataattaa

SEQ ID NO: 479226 - DNA, 15 bp, Homo sapiens
tacttcatataatta

SEQ ID NO: 479227 - DNA, 15 bp, Homo sapiens
atacttcatataatt

SEQ ID NO: 479228 - DNA, 15 bp, Homo sapiens
tatacttcatataat

SEQ ID NO: 479229 - DNA, 15 bp, Homo sapiens
atatacttcatataa

SEQ ID NO: 479230 - DNA, 15 bp, Homo sapiens
catatacttcatata

SEQ ID NO: 479231 - DNA, 15 bp, Homo sapiens
ccatatacttcatat

SEQ ID NO: 479232 - DNA, 15 bp, Homo sapiens
accatatacttcata

SEQ ID NO: 479233 - DNA, 15 bp, Homo sapiens
aaccatatacttcat

SEQ ID NO: 479234 - DNA, 15 bp, Homo sapiens
aaaccatatacttca

SEQ ID NO: 479235 - DNA, 15 bp, Homo sapiens
caaaccatatacttc

SEQ ID NO: 479236 - DNA, 15 bp, Homo sapiens
acaaaccatatactt

SEQ ID NO: 479237 - DNA, 15 bp, Homo sapiens
tacaaaccatatact

SEQ ID NO: 479238 - DNA, 15 bp, Homo sapiens
ttacaaaccatatac

SEQ ID NO: 479239 - DNA, 15 bp, Homo sapiens
attacaaaccatata

SEQ ID NO: 479240 - DNA, 15 bp, Homo sapiens
gattacaaaccatat

SEQ ID NO: 479241 - DNA, 15 bp, Homo sapiens
agattacaaaccata

SEQ ID NO: 479242 - DNA, 15 bp, Homo sapiens
gagattacaaaccat

SEQ ID NO: 479243 - DNA, 15 bp, Homo sapiens
tgagattacaaacca

SEQ ID NO: 479244 - DNA, 15 bp, Homo sapiens
ttgagattacaaacc

SEQ ID NO: 479245 - DNA, 15 bp, Homo sapiens
attgagattacaaac

SEQ ID NO: 479246 - DNA, 15 bp, Homo sapiens
aattgagattacaaa

SEQ ID NO: 479247 - DNA, 15 bp, Homo sapiens
caattgagattacaa

SEQ ID NO: 479248 - DNA, 15 bp, Homo sapiens
tcaattgagattaca

SEQ ID NO: 479249 - DNA, 15 bp, Homo sapiens
ttcaattgagattac

SEQ ID NO: 479250 - DNA, 15 bp, Homo sapiens
cttcaattgagatta

SEQ ID NO: 479251 - DNA, 15 bp, Homo sapiens
ccttcaattgagatt

SEQ ID NO: 479252 - DNA, 15 bp, Homo sapiens
accttcaattgagat

SEQ ID NO: 479253 - DNA, 15 bp, Homo sapiens
caccttcaattgaga

SEQ ID NO: 479254 - DNA, 15 bp, Homo sapiens
tcaccttcaattgag

SEQ ID NO: 479255 - DNA, 15 bp, Homo sapiens
ttcaccttcaattga

SEQ ID NO: 479256 - DNA, 15 bp, Homo sapiens
attcaccttcaattg

SEQ ID NO: 479257 - DNA, 15 bp, Homo sapiens
aattcaccttcaatt

SEQ ID NO: 479258 - DNA, 15 bp, Homo sapiens
aaattcaccttcaat

SEQ ID NO: 479259 - DNA, 15 bp, Homo sapiens
aaaattcaccttcaa

SEQ ID NO: 479260 - DNA, 15 bp, Homo sapiens
aaaaattcaccttca

SEQ ID NO: 479261 - DNA, 15 bp, Homo sapiens
aaaaaattcaccttc

SEQ ID NO: 479262 - DNA, 15 bp, Homo sapiens
taaaaaattcacctt

SEQ ID NO: 479263 - DNA, 15 bp, Homo sapiens
ataaaaaattcacct

SEQ ID NO: 479264 - DNA, 15 bp, Homo sapiens
aataaaaaattcacc

SEQ ID NO: 479265 - DNA, 15 bp, Homo sapiens
aaataaaaaattcac

SEQ ID NO: 479266 - DNA, 15 bp, Homo sapiens
aaaataaaaaattca

SEQ ID NO: 479267 - DNA, 15 bp, Homo sapiens
gaaaataaaaaattc

SEQ ID NO: 479268 - DNA, 15 bp, Homo sapiens
ggaaaataaaaaatt

SEQ ID NO: 479269 - DNA, 15 bp, Homo sapiens
aggaaaataaaaaat

SEQ ID NO: 479270 - DNA, 15 bp, Homo sapiens
caggaaaataaaaaa

SEQ ID NO: 479271 - DNA, 15 bp, Homo sapiens
ccaggaaaataaaaa

SEQ ID NO: 479272 - DNA, 15 bp, Homo sapiens
accaggaaaataaaa

SEQ ID NO: 479273 - DNA, 15 bp, Homo sapiens
aaccaggaaaataaa

SEQ ID NO: 479274 - DNA, 15 bp, Homo sapiens
caaccaggaaaataa

SEQ ID NO: 479275 - DNA, 15 bp, Homo sapiens
tcaaccaggaaaata

SEQ ID NO: 479276 - DNA, 15 bp, Homo sapiens
ttcaaccaggaaaat

SEQ ID NO: 479277 - DNA, 15 bp, Homo sapiens
attcaaccaggaaaa

SEQ ID NO: 479278 - DNA, 15 bp, Homo sapiens
tattcaaccaggaaa

SEQ ID NO: 479279 - DNA, 15 bp, Homo sapiens
atattcaaccaggaa

SEQ ID NO: 479280 - DNA, 15 bp, Homo sapiens
tatattcaaccagga

SEQ ID NO: 479281 - DNA, 15 bp, Homo sapiens
ttatattcaaccagg

SEQ ID NO: 479282 - DNA, 15 bp, Homo sapiens
attatattcaaccag

SEQ ID NO: 479283 - DNA, 15 bp, Homo sapiens
cattatattcaacca

SEQ ID NO: 479284 - DNA, 15 bp, Homo sapiens
ccattatattcaacc

SEQ ID NO: 479285 - DNA, 15 bp, Homo sapiens
tccattatattcaac

SEQ ID NO: 479286 - DNA, 15 bp, Homo sapiens
ttccattatattcaa

SEQ ID NO: 479287 - DNA, 15 bp, Homo sapiens
attccattatattca

SEQ ID NO: 479288 - DNA, 15 bp, Homo sapiens
gattccattatattc

SEQ ID NO: 479289 - DNA, 15 bp, Homo sapiens
tgattccattatatt

SEQ ID NO: 479290 - DNA, 15 bp, Homo sapiens
atgattccattatat

SEQ ID NO: 479291 - DNA, 15 bp, Homo sapiens
aatgattccattata

SEQ ID NO: 479292 - DNA, 15 bp, Homo sapiens
aaatgattccattat

SEQ ID NO: 479293 - DNA, 15 bp, Homo sapiens
aaaatgattccatta

SEQ ID NO: 479294 - DNA, 15 bp, Homo sapiens
caaaatgattccatt

SEQ ID NO: 479295 - DNA, 15 bp, Homo sapiens
ccaaaatgattccat

SEQ ID NO: 479296 - DNA, 15 bp, Homo sapiens
accaaaatgattcca

SEQ ID NO: 479297 - DNA, 15 bp, Homo sapiens
taccaaaatgattcc

SEQ ID NO: 479298 - DNA, 15 bp, Homo sapiens
ataccaaaatgattc

SEQ ID NO: 479299 - DNA, 15 bp, Homo sapiens
cataccaaaatgatt

SEQ ID NO: 479300 - DNA, 15 bp, Homo sapiens
ccataccaaaatgat

SEQ ID NO: 479301 - DNA, 15 bp, Homo sapiens
tccataccaaaatga

SEQ ID NO: 479302 - DNA, 15 bp, Homo sapiens
ctccataccaaaatg

SEQ ID NO: 479303 - DNA, 15 bp, Homo sapiens
tctccataccaaaat

SEQ ID NO: 479304 - DNA, 15 bp, Homo sapiens
ttctccataccaaaa

SEQ ID NO: 479305 - DNA, 15 bp, Homo sapiens
cttctccataccaaa

SEQ ID NO: 479306 - DNA, 15 bp, Homo sapiens
tcttctccataccaa

SEQ ID NO: 479307 - DNA, 15 bp, Homo sapiens
ttcttctccatacca

SEQ ID NO: 479308 - DNA, 15 bp, Homo sapiens
tttcttctccatacc

SEQ ID NO: 479309 - DNA, 15 bp, Homo sapiens
atttcttctccatac

SEQ ID NO: 479310 - DNA, 15 bp, Homo sapiens
catttcttctccata

SEQ ID NO: 479311 - DNA, 15 bp, Homo sapiens
ccatttcttctccat

SEQ ID NO: 479312 - DNA, 15 bp, Homo sapiens
accatttcttctcca

SEQ ID NO: 479313 - DNA, 15 bp, Homo sapiens
aaccatttcttctcc

SEQ ID NO: 479314 - DNA, 15 bp, Homo sapiens
taaccatttcttctc

SEQ ID NO: 479315 - DNA, 15 bp, Homo sapiens
ttaaccatttcttct

SEQ ID NO: 479316 - DNA, 15 bp, Homo sapiens
tttaaccatttcttc

SEQ ID NO: 479317 - DNA, 15 bp, Homo sapiens
ttttaaccatttctt

SEQ ID NO: 479318 - DNA, 15 bp, Homo sapiens
tttttaaccatttct

SEQ ID NO: 479319 - DNA, 15 bp, Homo sapiens
atttttaaccatttc

SEQ ID NO: 479320 - DNA, 15 bp, Homo sapiens
tatttttaaccattt

SEQ ID NO: 479321 - DNA, 15 bp, Homo sapiens
ctatttttaaccatt

SEQ ID NO: 479322 - DNA, 15 bp, Homo sapiens
tctatttttaaccat

SEQ ID NO: 479323 - DNA, 15 bp, Homo sapiens
gtctatttttaacca

SEQ ID NO: 479324 - DNA, 15 bp, Homo sapiens
ggtctatttttaacc

SEQ ID NO: 479325 - DNA, 15 bp, Homo sapiens
tggtctatttttaac

SEQ ID NO: 479326 - DNA, 15 bp, Homo sapiens
ctggtctatttttaa

SEQ ID NO: 479327 - DNA, 15 bp, Homo sapiens
actggtctattttta

SEQ ID NO: 479328 - DNA, 15 bp, Homo sapiens
cactggtctattttt

SEQ ID NO: 479329 - DNA, 15 bp, Homo sapiens
ccactggtctatttt

SEQ ID NO: 479330 - DNA, 15 bp, Homo sapiens
cccactggtctattt

SEQ ID NO: 479331 - DNA, 15 bp, Homo sapiens
acccactggtctatt

SEQ ID NO: 479332 - DNA, 15 bp, Homo sapiens
gacccactggtctat

SEQ ID NO: 479333 - DNA, 15 bp, Homo sapiens
tgacccactggtcta

SEQ ID NO: 479334 - DNA, 15 bp, Homo sapiens
atgacccactggtct

SEQ ID NO: 479335 - DNA, 15 bp, Homo sapiens
gatgacccactggtc

SEQ ID NO: 479336 - DNA, 15 bp, Homo sapiens
agatgacccactggt

SEQ ID NO: 479337 - DNA, 15 bp, Homo sapiens
gagatgacccactgg

SEQ ID NO: 479338 - DNA, 15 bp, Homo sapiens
tgagatgacccactg

SEQ ID NO: 479339 - DNA, 15 bp, Homo sapiens
ctgagatgacccact

SEQ ID NO: 479340 - DNA, 15 bp, Homo sapiens
actgagatgacccac

SEQ ID NO: 479341 - DNA, 15 bp, Homo sapiens
cactgagatgaccca

SEQ ID NO: 479342 - DNA, 15 bp, Homo sapiens
acactgagatgaccc

SEQ ID NO: 479343 - DNA, 15 bp, Homo sapiens
cacactgagatgacc

SEQ ID NO: 479344 - DNA, 15 bp, Homo sapiens
tcacactgagatgac

SEQ ID NO: 479345 - DNA, 15 bp, Homo sapiens
ttcacactgagatga

SEQ ID NO: 479346 - DNA, 15 bp, Homo sapiens
tttcacactgagatg

SEQ ID NO: 479347 - DNA, 15 bp, Homo sapiens
ctttcacactgagat

SEQ ID NO: 479348 - DNA, 15 bp, Homo sapiens
actttcacactgaga

SEQ ID NO: 479349 - DNA, 15 bp, Homo sapiens
gactttcacactgag

SEQ ID NO: 479350 - DNA, 15 bp, Homo sapiens
tgactttcacactga

SEQ ID NO: 479351 - DNA, 15 bp, Homo sapiens
ttgactttcacactg

SEQ ID NO: 479352 - DNA, 15 bp, Homo sapiens
cttgactttcacact

SEQ ID NO: 479353 - DNA, 15 bp, Homo sapiens
tcttgactttcacac

SEQ ID NO: 479354 - DNA, 15 bp, Homo sapiens
ctcttgactttcaca

SEQ ID NO: 479355 - DNA, 15 bp, Homo sapiens
cctcttgactttcac

SEQ ID NO: 479356 - DNA, 15 bp, Homo sapiens
tcctcttgactttca

SEQ ID NO: 479357 - DNA, 15 bp, Homo sapiens
gtcctcttgactttc

SEQ ID NO: 479358 - DNA, 15 bp, Homo sapiens
agtcctcttgacttt

SEQ ID NO: 479359 - DNA, 15 bp, Homo sapiens
aagtcctcttgactt

SEQ ID NO: 479360 - DNA, 15 bp, Homo sapiens
gaagtcctcttgact

SEQ ID NO: 479361 - DNA, 15 bp, Homo sapiens
agaagtcctcttgac

SEQ ID NO: 479362 - DNA, 15 bp, Homo sapiens
tagaagtcctcttga

SEQ ID NO: 479363 - DNA, 15 bp, Homo sapiens
ctagaagtcctcttg

SEQ ID NO: 479364 - DNA, 15 bp, Homo sapiens
cctagaagtcctctt

SEQ ID NO: 479365 - DNA, 15 bp, Homo sapiens
gcctagaagtcctct

SEQ ID NO: 479366 - DNA, 15 bp, Homo sapiens
agcctagaagtcctc

SEQ ID NO: 479367 - DNA, 15 bp, Homo sapiens
aagcctagaagtcct

SEQ ID NO: 479368 - DNA, 15 bp, Homo sapiens
taagcctagaagtcc

SEQ ID NO: 479369 - DNA, 15 bp, Homo sapiens
ttaagcctagaagtc

SEQ ID NO: 479370 - DNA, 15 bp, Homo sapiens
cttaagcctagaagt

SEQ ID NO: 479371 - DNA, 15 bp, Homo sapiens
gcttaagcctagaag

SEQ ID NO: 479372 - DNA, 15 bp, Homo sapiens
ggcttaagcctagaa

SEQ ID NO: 479373 - DNA, 15 bp, Homo sapiens
aggcttaagcctaga

SEQ ID NO: 479374 - DNA, 15 bp, Homo sapiens
caggcttaagcctag

SEQ ID NO: 479375 - DNA, 15 bp, Homo sapiens
ccaggcttaagccta

SEQ ID NO: 479376 - DNA, 15 bp, Homo sapiens
accaggcttaagcct

SEQ ID NO: 479377 - DNA, 15 bp, Homo sapiens
taccaggcttaagcc

SEQ ID NO: 479378 - DNA, 15 bp, Homo sapiens
ctaccaggcttaagc

SEQ ID NO: 479379 - DNA, 15 bp, Homo sapiens
gctaccaggcttaag

SEQ ID NO: 479380 - DNA, 15 bp, Homo sapiens
agctaccaggcttaa

SEQ ID NO: 479381 - DNA, 15 bp, Homo sapiens
tagctaccaggctta

SEQ ID NO: 479382 - DNA, 15 bp, Homo sapiens
ttagctaccaggctt

SEQ ID NO: 479383 - DNA, 15 bp, Homo sapiens
tttagctaccaggct

SEQ ID NO: 479384 - DNA, 15 bp, Homo sapiens
atttagctaccaggc

SEQ ID NO: 479385 - DNA, 15 bp, Homo sapiens
aatttagctaccagg

SEQ ID NO: 479386 - DNA, 15 bp, Homo sapiens
aaatttagctaccag

SEQ ID NO: 479387 - DNA, 15 bp, Homo sapiens
gaaatttagctacca

SEQ ID NO: 479388 - DNA, 15 bp, Homo sapiens
agaaatttagctacc

SEQ ID NO: 479389 - DNA, 15 bp, Homo sapiens
cagaaatttagctac

SEQ ID NO: 479390 - DNA, 15 bp, Homo sapiens
acagaaatttagcta

SEQ ID NO: 479391 - DNA, 15 bp, Homo sapiens
aacagaaatttagct

SEQ ID NO: 479392 - DNA, 15 bp, Homo sapiens
caacagaaatttagc

SEQ ID NO: 479393 - DNA, 15 bp, Homo sapiens
ccaacagaaatttag

SEQ ID NO: 479394 - DNA, 15 bp, Homo sapiens
gccaacagaaattta

SEQ ID NO: 479395 - DNA, 15 bp, Homo sapiens
agccaacagaaattt

SEQ ID NO: 479396 - DNA, 15 bp, Homo sapiens
gagccaacagaaatt

SEQ ID NO: 479397 - DNA, 15 bp, Homo sapiens
agagccaacagaaat

SEQ ID NO: 479398 - DNA, 15 bp, Homo sapiens
tagagccaacagaaa

SEQ ID NO: 479399 - DNA, 15 bp, Homo sapiens
gtagagccaacagaa

SEQ ID NO: 479400 - DNA, 15 bp, Homo sapiens
ggtagagccaacaga

SEQ ID NO: 479401 - DNA, 15 bp, Homo sapiens
gggtagagccaacag

SEQ ID NO: 479402 - DNA, 15 bp, Homo sapiens
agggtagagccaaca

SEQ ID NO: 479403 - DNA, 15 bp, Homo sapiens
gagggtagagccaac

SEQ ID NO: 479404 - DNA, 15 bp, Homo sapiens
agagggtagagccaa

SEQ ID NO: 479405 - DNA, 15 bp, Homo sapiens
aagagggtagagcca

SEQ ID NO: 479406 - DNA, 15 bp, Homo sapiens
gaagagggtagagcc

SEQ ID NO: 479407 - DNA, 15 bp, Homo sapiens
tgaagagggtagagc

SEQ ID NO: 479408 - DNA, 15 bp, Homo sapiens
atgaagagggtagag

SEQ ID NO: 479409 - DNA, 15 bp, Homo sapiens
catgaagagggtaga

SEQ ID NO: 479410 - DNA, 15 bp, Homo sapiens
tcatgaagagggtag

SEQ ID NO: 479411 - DNA, 15 bp, Homo sapiens
atcatgaagagggta

SEQ ID NO: 479412 - DNA, 15 bp, Homo sapiens
catcatgaagagggt

SEQ ID NO: 479413 - DNA, 15 bp, Homo sapiens
tcatcatgaagaggg

SEQ ID NO: 479414 - DNA, 15 bp, Homo sapiens
ctcatcatgaagagg

SEQ ID NO: 479415 - DNA, 15 bp, Homo sapiens
actcatcatgaagag

SEQ ID NO: 479416 - DNA, 15 bp, Homo sapiens
gactcatcatgaaga

SEQ ID NO: 479417 - DNA, 15 bp, Homo sapiens
ggactcatcatgaag

SEQ ID NO: 479418 - DNA, 15 bp, Homo sapiens
tggactcatcatgaa

SEQ ID NO: 479419 - DNA, 15 bp, Homo sapiens
ttggactcatcatga

SEQ ID NO: 479420 - DNA, 15 bp, Homo sapiens
cttggactcatcatg

SEQ ID NO: 479421 - DNA, 15 bp, Homo sapiens
acttggactcatcat

SEQ ID NO: 479422 - DNA, 15 bp, Homo sapiens
aacttggactcatca

SEQ ID NO: 479423 - DNA, 15 bp, Homo sapiens
aaacttggactcatc

SEQ ID NO: 479424 - DNA, 15 bp, Homo sapiens
taaacttggactcat

SEQ ID NO: 479425 - DNA, 15 bp, Homo sapiens
ataaacttggactca

SEQ ID NO: 479426 - DNA, 15 bp, Homo sapiens
aataaacttggactc

SEQ ID NO: 479427 - DNA, 15 bp, Homo sapiens
aaataaacttggact

SEQ ID NO: 479428 - DNA, 15 bp, Homo sapiens
aaaataaacttggac

SEQ ID NO: 479429 - DNA, 15 bp, Homo sapiens
caaaataaacttgga

SEQ ID NO: 479430 - DNA, 15 bp, Homo sapiens
tcaaaataaacttgg

SEQ ID NO: 479431 - DNA, 15 bp, Homo sapiens
atcaaaataaacttg

SEQ ID NO: 479432 - DNA, 15 bp, Homo sapiens
gatcaaaataaactt

SEQ ID NO: 479433 - DNA, 15 bp, Homo sapiens
agatcaaaataaact

SEQ ID NO: 479434 - DNA, 15 bp, Homo sapiens
cagatcaaaataaac

SEQ ID NO: 479435 - DNA, 15 bp, Homo sapiens
gcagatcaaaataaa

SEQ ID NO: 479436 - DNA, 15 bp, Homo sapiens
tgcagatcaaaataa

SEQ ID NO: 479437 - DNA, 15 bp, Homo sapiens
atgcagatcaaaata

SEQ ID NO: 479438 - DNA, 15 bp, Homo sapiens
gatgcagatcaaaat

SEQ ID NO: 479439 - DNA, 15 bp, Homo sapiens
agatgcagatcaaaa

SEQ ID NO: 479440 - DNA, 15 bp, Homo sapiens
aagatgcagatcaaa

SEQ ID NO: 479441 - DNA, 15 bp, Homo sapiens
aaagatgcagatcaa

SEQ ID NO: 479442 - DNA, 15 bp, Homo sapiens
gaaagatgcagatca

SEQ ID NO: 479443 - DNA, 15 bp, Homo sapiens
agaaagatgcagatc

SEQ ID NO: 479444 - DNA, 15 bp, Homo sapiens
aagaaagatgcagat

SEQ ID NO: 479445 - DNA, 15 bp, Homo sapiens
aaagaaagatgcaga

SEQ ID NO: 479446 - DNA, 15 bp, Homo sapiens
aaaagaaagatgcag

SEQ ID NO: 479447 - DNA, 15 bp, Homo sapiens
aaaaagaaagatgca

SEQ ID NO: 479448 - DNA, 15 bp, Homo sapiens
aaaaaagaaagatgc

SEQ ID NO: 479449 - DNA, 15 bp, Homo sapiens
aaaaaaagaaagatg

SEQ ID NO: 479450 - DNA, 15 bp, Homo sapiens
aaaaaaaagaaagat

SEQ ID NO: 479451 - DNA, 15 bp, Homo sapiens
taaaaaaaagaaaga

SEQ ID NO: 479452 - DNA, 15 bp, Homo sapiens
ttaaaaaaaagaaag

SEQ ID NO: 479453 - DNA, 15 bp, Homo sapiens
attaaaaaaaagaaa

SEQ ID NO: 479454 - DNA, 15 bp, Homo sapiens
cattaaaaaaaagaa

SEQ ID NO: 479455 - DNA, 15 bp, Homo sapiens
tcattaaaaaaaaga

SEQ ID NO: 479456 - DNA, 15 bp, Homo sapiens
ttcattaaaaaaaag

SEQ ID NO: 479457 - DNA, 15 bp, Homo sapiens
attcattaaaaaaaa

SEQ ID NO: 479458 - DNA, 15 bp, Homo sapiens
cattcattaaaaaaa

SEQ ID NO: 479459 - DNA, 15 bp, Homo sapiens
tcattcattaaaaaa

SEQ ID NO: 479460 - DNA, 15 bp, Homo sapiens
ttcattcattaaaaa

SEQ ID NO: 479461 - DNA, 15 bp, Homo sapiens
tttcattcattaaaa

SEQ ID NO: 479462 - DNA, 15 bp, Homo sapiens
atttcattcattaaa

SEQ ID NO: 479463 - DNA, 15 bp, Homo sapiens
aatttcattcattaa

SEQ ID NO: 479464 - DNA, 15 bp, Homo sapiens
gaatttcattcatta

SEQ ID NO: 479465 - DNA, 15 bp, Homo sapiens
agaatttcattcatt

SEQ ID NO: 479466 - DNA, 15 bp, Homo sapiens
gagaatttcattcat

SEQ ID NO: 479467 - DNA, 15 bp, Homo sapiens
ggagaatttcattca

SEQ ID NO: 479468 - DNA, 15 bp, Homo sapiens
aggagaatttcattc

SEQ ID NO: 479469 - DNA, 15 bp, Homo sapiens
aaggagaatttcatt

SEQ ID NO: 479470 - DNA, 15 bp, Homo sapiens
gaaggagaatttcat

SEQ ID NO: 479471 - DNA, 15 bp, Homo sapiens
tgaaggagaatttca

SEQ ID NO: 479472 - DNA, 15 bp, Homo sapiens
atgaaggagaatttc

SEQ ID NO: 479473 - DNA, 15 bp, Homo sapiens
aatgaaggagaattt

SEQ ID NO: 479474 - DNA, 15 bp, Homo sapiens
gaatgaaggagaatt

SEQ ID NO: 479475 - DNA, 15 bp, Homo sapiens
tgaatgaaggagaat

SEQ ID NO: 479476 - DNA, 15 bp, Homo sapiens
ctgaatgaaggagaa

SEQ ID NO: 479477 - DNA, 15 bp, Homo sapiens
gctgaatgaaggaga

SEQ ID NO: 479478 - DNA, 15 bp, Homo sapiens
ggctgaatgaaggag

SEQ ID NO: 479479 - DNA, 15 bp, Homo sapiens
aggctgaatgaagga

SEQ ID NO: 479480 - DNA, 15 bp, Homo sapiens
caggctgaatgaagg

SEQ ID NO: 479481 - DNA, 15 bp, Homo sapiens
ccaggctgaatgaag

SEQ ID NO: 479482 - DNA, 15 bp, Homo sapiens
accaggctgaatgaa

SEQ ID NO: 479483 - DNA, 15 bp, Homo sapiens
taccaggctgaatga

SEQ ID NO: 479484 - DNA, 15 bp, Homo sapiens
ttaccaggctgaatg

SEQ ID NO: 479485 - DNA, 15 bp, Homo sapiens
cttaccaggctgaat

SEQ ID NO: 479486 - DNA, 15 bp, Homo sapiens
acttaccaggctgaa

SEQ ID NO: 479487 - DNA, 15 bp, Homo sapiens
tacttaccaggctga

SEQ ID NO: 479488 - DNA, 15 bp, Homo sapiens
ttacttaccaggctg

SEQ ID NO: 479489 - DNA, 15 bp, Homo sapiens
gttacttaccaggct

SEQ ID NO: 479490 - DNA, 15 bp, Homo sapiens
ggttacttaccaggc

SEQ ID NO: 479491 - DNA, 15 bp, Homo sapiens
aggttacttaccagg

SEQ ID NO: 479492 - DNA, 15 bp, Homo sapiens
caggttacttaccag

SEQ ID NO: 479493 - DNA, 15 bp, Homo sapiens
ccaggttacttacca

SEQ ID NO: 479494 - DNA, 15 bp, Homo sapiens
gccaggttacttacc

SEQ ID NO: 479495 - DNA, 15 bp, Homo sapiens
ggccaggttacttac

SEQ ID NO: 479496 - DNA, 15 bp, Homo sapiens
tggccaggttactta

SEQ ID NO: 479497 - DNA, 15 bp, Homo sapiens
atggccaggttactt

SEQ ID NO: 479498 - DNA, 15 bp, Homo sapiens
aatggccaggttact

SEQ ID NO: 479499 - DNA, 15 bp, Homo sapiens
taatggccaggttac

SEQ ID NO: 479500 - DNA, 15 bp, Homo sapiens
ctaatggccaggtta

SEQ ID NO: 479501 - DNA, 15 bp, Homo sapiens
actaatggccaggtt

SEQ ID NO: 479502 - DNA, 15 bp, Homo sapiens
tactaatggccaggt

SEQ ID NO: 479503 - DNA, 15 bp, Homo sapiens
gtactaatggccagg

SEQ ID NO: 479504 - DNA, 15 bp, Homo sapiens
cgtactaatggccag

SEQ ID NO: 479505 - DNA, 15 bp, Homo sapiens
acgtactaatggcca

SEQ ID NO: 479506 - DNA, 15 bp, Homo sapiens
cacgtactaatggcc

SEQ ID NO: 479507 - DNA, 15 bp, Homo sapiens
tcacgtactaatggc

SEQ ID NO: 479508 - DNA, 15 bp, Homo sapiens
gtcacgtactaatgg

SEQ ID NO: 479509 - DNA, 15 bp, Homo sapiens
agtcacgtactaatg

SEQ ID NO: 479510 - DNA, 15 bp, Homo sapiens
tagtcacgtactaat

SEQ ID NO: 479511 - DNA, 15 bp, Homo sapiens
ttagtcacgtactaa

SEQ ID NO: 479512 - DNA, 15 bp, Homo sapiens
tttagtcacgtacta

SEQ ID NO: 479513 - DNA, 15 bp, Homo sapiens
atttagtcacgtact

SEQ ID NO: 479514 - DNA, 15 bp, Homo sapiens
tatttagtcacgtac

SEQ ID NO: 479515 - DNA, 15 bp, Homo sapiens
ctatttagtcacgta

SEQ ID NO: 479516 - DNA, 15 bp, Homo sapiens
gctatttagtcacgt

SEQ ID NO: 479517 - DNA, 15 bp, Homo sapiens
agctatttagtcacg

SEQ ID NO: 479518 - DNA, 15 bp, Homo sapiens
cagctatttagtcac

SEQ ID NO: 479519 - DNA, 15 bp, Homo sapiens
tcagctatttagtca

SEQ ID NO: 479520 - DNA, 15 bp, Homo sapiens
ttcagctatttagtc

SEQ ID NO: 479521 - DNA, 15 bp, Homo sapiens
cttcagctatttagt

SEQ ID NO: 479522 - DNA, 15 bp, Homo sapiens
gcttcagctatttag

SEQ ID NO: 479523 - DNA, 15 bp, Homo sapiens
agcttcagctattta

SEQ ID NO: 479524 - DNA, 15 bp, Homo sapiens
aagcttcagctattt

SEQ ID NO: 479525 - DNA, 15 bp, Homo sapiens
gaagcttcagctatt

SEQ ID NO: 479526 - DNA, 15 bp, Homo sapiens
agaagcttcagctat

SEQ ID NO: 479527 - DNA, 15 bp, Homo sapiens
cagaagcttcagcta

SEQ ID NO: 479528 - DNA, 15 bp, Homo sapiens
ccagaagcttcagct

SEQ ID NO: 479529 - DNA, 15 bp, Homo sapiens
gccagaagcttcagc

SEQ ID NO: 479530 - DNA, 15 bp, Homo sapiens
agccagaagcttcag

SEQ ID NO: 479531 - DNA, 15 bp, Homo sapiens
aagccagaagcttca

SEQ ID NO: 479532 - DNA, 15 bp, Homo sapiens
caagccagaagcttc

SEQ ID NO: 479533 - DNA, 15 bp, Homo sapiens
tcaagccagaagctt

SEQ ID NO: 479534 - DNA, 15 bp, Homo sapiens
ttcaagccagaagct

SEQ ID NO: 479535 - DNA, 15 bp, Homo sapiens
attcaagccagaagc

SEQ ID NO: 479536 - DNA, 15 bp, Homo sapiens
aattcaagccagaag

SEQ ID NO: 479537 - DNA, 15 bp, Homo sapiens
taattcaagccagaa

SEQ ID NO: 479538 - DNA, 15 bp, Homo sapiens
ttaattcaagccaga

SEQ ID NO: 479539 - DNA, 15 bp, Homo sapiens
cttaattcaagccag

SEQ ID NO: 479540 - DNA, 15 bp, Homo sapiens
acttaattcaagcca

SEQ ID NO: 479541 - DNA, 15 bp, Homo sapiens
aacttaattcaagcc

SEQ ID NO: 479542 - DNA, 15 bp, Homo sapiens
taacttaattcaagc

SEQ ID NO: 479543 - DNA, 15 bp, Homo sapiens
ataacttaattcaag

SEQ ID NO: 479544 - DNA, 15 bp, Homo sapiens
tataacttaattcaa

SEQ ID NO: 479545 - DNA, 15 bp, Homo sapiens
ttataacttaattca

SEQ ID NO: 479546 - DNA, 15 bp, Homo sapiens
tttataacttaattc

SEQ ID NO: 479547 - DNA, 15 bp, Homo sapiens
gtttataacttaatt

SEQ ID NO: 479548 - DNA, 15 bp, Homo sapiens
agtttataacttaat

SEQ ID NO: 479549 - DNA, 15 bp, Homo sapiens
aagtttataacttaa

SEQ ID NO: 479550 - DNA, 15 bp, Homo sapiens
taagtttataactta

SEQ ID NO: 479551 - DNA, 15 bp, Homo sapiens
ctaagtttataactt

SEQ ID NO: 479552 - DNA, 15 bp, Homo sapiens
gctaagtttataact

SEQ ID NO: 479553 - DNA, 15 bp, Homo sapiens
tgctaagtttataac

SEQ ID NO: 479554 - DNA, 15 bp, Homo sapiens
gtgctaagtttataa

SEQ ID NO: 479555 - DNA, 15 bp, Homo sapiens
tgtgctaagtttata

SEQ ID NO: 479556 - DNA, 15 bp, Homo sapiens
ctgtgctaagtttat

SEQ ID NO: 479557 - DNA, 15 bp, Homo sapiens
actgtgctaagttta

SEQ ID NO: 479558 - DNA, 15 bp, Homo sapiens
cactgtgctaagttt

SEQ ID NO: 479559 - DNA, 15 bp, Homo sapiens
ccactgtgctaagtt

SEQ ID NO: 479560 - DNA, 15 bp, Homo sapiens
gccactgtgctaagt

SEQ ID NO: 479561 - DNA, 15 bp, Homo sapiens
tgccactgtgctaag

SEQ ID NO: 479562 - DNA, 15 bp, Homo sapiens
ctgccactgtgctaa

SEQ ID NO: 479563 - DNA, 15 bp, Homo sapiens
cctgccactgtgcta

SEQ ID NO: 479564 - DNA, 15 bp, Homo sapiens
acctgccactgtgct

SEQ ID NO: 479565 - DNA, 15 bp, Homo sapiens
cacctgccactgtgc

SEQ ID NO: 479566 - DNA, 15 bp, Homo sapiens
gcacctgccactgtg

SEQ ID NO: 479567 - DNA, 15 bp, Homo sapiens
agcacctgccactgt

SEQ ID NO: 479568 - DNA, 15 bp, Homo sapiens
aagcacctgccactg

SEQ ID NO: 479569 - DNA, 15 bp, Homo sapiens
caagcacctgccact

SEQ ID NO: 479570 - DNA, 15 bp, Homo sapiens
tcaagcacctgccac

SEQ ID NO: 479571 - DNA, 15 bp, Homo sapiens
ttcaagcacctgcca

SEQ ID NO: 479572 - DNA, 15 bp, Homo sapiens
gttcaagcacctgcc

SEQ ID NO: 479573 - DNA, 15 bp, Homo sapiens
agttcaagcacctgc

SEQ ID NO: 479574 - DNA, 15 bp, Homo sapiens
cagttcaagcacctg

SEQ ID NO: 479575 - DNA, 15 bp, Homo sapiens
gcagttcaagcacct

SEQ ID NO: 479576 - DNA, 15 bp, Homo sapiens
ggcagttcaagcacc

SEQ ID NO: 479577 - DNA, 15 bp, Homo sapiens
tggcagttcaagcac

SEQ ID NO: 479578 - DNA, 15 bp, Homo sapiens
atggcagttcaagca

SEQ ID NO: 479579 - DNA, 15 bp, Homo sapiens
catggcagttcaagc

SEQ ID NO: 479580 - DNA, 15 bp, Homo sapiens
acatggcagttcaag

SEQ ID NO: 479581 - DNA, 15 bp, Homo sapiens
aacatggcagttcaa

SEQ ID NO: 479582 - DNA, 15 bp, Homo sapiens
taacatggcagttca

SEQ ID NO: 479583 - DNA, 15 bp, Homo sapiens
ttaacatggcagttc

SEQ ID NO: 479584 - DNA, 15 bp, Homo sapiens
tttaacatggcagtt

SEQ ID NO: 479585 - DNA, 15 bp, Homo sapiens
ttttaacatggcagt

SEQ ID NO: 479586 - DNA, 15 bp, Homo sapiens
gttttaacatggcag

SEQ ID NO: 479587 - DNA, 15 bp, Homo sapiens
agttttaacatggca

SEQ ID NO: 479588 - DNA, 15 bp, Homo sapiens
tagttttaacatggc

SEQ ID NO: 479589 - DNA, 15 bp, Homo sapiens
ctagttttaacatgg

SEQ ID NO: 479590 - DNA, 15 bp, Homo sapiens
gctagttttaacatg

SEQ ID NO: 479591 - DNA, 15 bp, Homo sapiens
cgctagttttaacat

SEQ ID NO: 479592 - DNA, 15 bp, Homo sapiens
gcgctagttttaaca

SEQ ID NO: 479593 - DNA, 15 bp, Homo sapiens
tgcgctagttttaac

SEQ ID NO: 479594 - DNA, 15 bp, Homo sapiens
atgcgctagttttaa

SEQ ID NO: 479595 - DNA, 15 bp, Homo sapiens
tatgcgctagtttta

SEQ ID NO: 479596 - DNA, 15 bp, Homo sapiens
ctatgcgctagtttt

SEQ ID NO: 479597 - DNA, 15 bp, Homo sapiens
tctatgcgctagttt

SEQ ID NO: 479598 - DNA, 15 bp, Homo sapiens
ttctatgcgctagtt

SEQ ID NO: 479599 - DNA, 15 bp, Homo sapiens
attctatgcgctagt

SEQ ID NO: 479600 - DNA, 15 bp, Homo sapiens
gattctatgcgctag

SEQ ID NO: 479601 - DNA, 15 bp, Homo sapiens
agattctatgcgcta

SEQ ID NO: 479602 - DNA, 15 bp, Homo sapiens
aagattctatgcgct

SEQ ID NO: 479603 - DNA, 15 bp, Homo sapiens
aaagattctatgcgc

SEQ ID NO: 479604 - DNA, 15 bp, Homo sapiens
caaagattctatgcg

SEQ ID NO: 479605 - DNA, 15 bp, Homo sapiens
gcaaagattctatgc

SEQ ID NO: 479606 - DNA, 15 bp, Homo sapiens
ggcaaagattctatg

SEQ ID NO: 479607 - DNA, 15 bp, Homo sapiens
tggcaaagattctat

SEQ ID NO: 479608 - DNA, 15 bp, Homo sapiens
atggcaaagattcta

SEQ ID NO: 479609 - DNA, 15 bp, Homo sapiens
aatggcaaagattct

SEQ ID NO: 479610 - DNA, 15 bp, Homo sapiens
gaatggcaaagattc

SEQ ID NO: 479611 - DNA, 15 bp, Homo sapiens
tgaatggcaaagatt

SEQ ID NO: 479612 - DNA, 15 bp, Homo sapiens
ttgaatggcaaagat

SEQ ID NO: 479613 - DNA, 15 bp, Homo sapiens
tttgaatggcaaaga

SEQ ID NO: 479614 - DNA, 15 bp, Homo sapiens
ttttgaatggcaaag

SEQ ID NO: 479615 - DNA, 15 bp, Homo sapiens
tttttgaatggcaaa

SEQ ID NO: 479616 - DNA, 15 bp, Homo sapiens
gtttttgaatggcaa

SEQ ID NO: 479617 - DNA, 15 bp, Homo sapiens
agtttttgaatggca

SEQ ID NO: 479618 - DNA, 15 bp, Homo sapiens
cagtttttgaatggc

SEQ ID NO: 479619 - DNA, 15 bp, Homo sapiens
acagtttttgaatgg

SEQ ID NO: 479620 - DNA, 15 bp, Homo sapiens
aacagtttttgaatg

SEQ ID NO: 479621 - DNA, 15 bp, Homo sapiens
aaacagtttttgaat

SEQ ID NO: 479622 - DNA, 15 bp, Homo sapiens
aaaacagtttttgaa

SEQ ID NO: 479623 - DNA, 15 bp, Homo sapiens
gaaaacagtttttga

SEQ ID NO: 479624 - DNA, 15 bp, Homo sapiens
agaaaacagtttttg

SEQ ID NO: 479625 - DNA, 15 bp, Homo sapiens
gagaaaacagttttt

SEQ ID NO: 479626 - DNA, 15 bp, Homo sapiens
tgagaaaacagtttt

SEQ ID NO: 479627 - DNA, 15 bp, Homo sapiens
ttgagaaaacagttt

SEQ ID NO: 479628 - DNA, 15 bp, Homo sapiens
attgagaaaacagtt

SEQ ID NO: 479629 - DNA, 15 bp, Homo sapiens
gattgagaaaacagt

SEQ ID NO: 479630 - DNA, 15 bp, Homo sapiens
ggattgagaaaacag

SEQ ID NO: 479631 - DNA, 15 bp, Homo sapiens
gggattgagaaaaca

SEQ ID NO: 479632 - DNA, 15 bp, Homo sapiens
tgggattgagaaaac

SEQ ID NO: 479633 - DNA, 15 bp, Homo sapiens
atgggattgagaaaa

SEQ ID NO: 479634 - DNA, 15 bp, Homo sapiens
catgggattgagaaa

SEQ ID NO: 479635 - DNA, 15 bp, Homo sapiens
tcatgggattgagaa

SEQ ID NO: 479636 - DNA, 15 bp, Homo sapiens
ttcatgggattgaga

SEQ ID NO: 479637 - DNA, 15 bp, Homo sapiens
cttcatgggattgag

SEQ ID NO: 479638 - DNA, 15 bp, Homo sapiens
ccttcatgggattga

SEQ ID NO: 479639 - DNA, 15 bp, Homo sapiens
tccttcatgggattg

SEQ ID NO: 479640 - DNA, 15 bp, Homo sapiens
ctccttcatgggatt

SEQ ID NO: 479641 - DNA, 15 bp, Homo sapiens
tctccttcatgggat

SEQ ID NO: 479642 - DNA, 15 bp, Homo sapiens
atctccttcatggga

SEQ ID NO: 479643 - DNA, 15 bp, Homo sapiens
catctccttcatggg

SEQ ID NO: 479644 - DNA, 15 bp, Homo sapiens
tcatctccttcatgg

SEQ ID NO: 479645 - DNA, 15 bp, Homo sapiens
ttcatctccttcatg

SEQ ID NO: 479646 - DNA, 15 bp, Homo sapiens
cttcatctccttcat

SEQ ID NO: 479647 - DNA, 15 bp, Homo sapiens
gcttcatctccttca

SEQ ID NO: 479648 - DNA, 15 bp, Homo sapiens
ggcttcatctccttc

SEQ ID NO: 479649 - DNA, 15 bp, Homo sapiens
aggcttcatctcctt

SEQ ID NO: 479650 - DNA, 15 bp, Homo sapiens
taggcttcatctcct

SEQ ID NO: 479651 - DNA, 15 bp, Homo sapiens
gtaggcttcatctcc

SEQ ID NO: 479652 - DNA, 15 bp, Homo sapiens
tgtaggcttcatctc

SEQ ID NO: 479653 - DNA, 15 bp, Homo sapiens
atgtaggcttcatct

SEQ ID NO: 479654 - DNA, 15 bp, Homo sapiens
catgtaggcttcatc

SEQ ID NO: 479655 - DNA, 15 bp, Homo sapiens
ccatgtaggcttcat

SEQ ID NO: 479656 - DNA, 15 bp, Homo sapiens
cccatgtaggcttca

SEQ ID NO: 479657 - DNA, 15 bp, Homo sapiens
tcccatgtaggcttc

SEQ ID NO: 479658 - DNA, 15 bp, Homo sapiens
ttcccatgtaggctt

SEQ ID NO: 479659 - DNA, 15 bp, Homo sapiens
attcccatgtaggct

SEQ ID NO: 479660 - DNA, 15 bp, Homo sapiens
gattcccatgtaggc

SEQ ID NO: 479661 - DNA, 15 bp, Homo sapiens
agattcccatgtagg

SEQ ID NO: 479662 - DNA, 15 bp, Homo sapiens
aagattcccatgtag

SEQ ID NO: 479663 - DNA, 15 bp, Homo sapiens
gaagattcccatgta

SEQ ID NO: 479664 - DNA, 15 bp, Homo sapiens
tgaagattcccatgt

SEQ ID NO: 479665 - DNA, 15 bp, Homo sapiens
gtgaagattcccatg

SEQ ID NO: 479666 - DNA, 15 bp, Homo sapiens
agtgaagattcccat

SEQ ID NO: 479667 - DNA, 15 bp, Homo sapiens
cagtgaagattccca

SEQ ID NO: 479668 - DNA, 15 bp, Homo sapiens
tcagtgaagattccc

SEQ ID NO: 479669 - DNA, 15 bp, Homo sapiens
atcagtgaagattcc

SEQ ID NO: 479670 - DNA, 15 bp, Homo sapiens
aatcagtgaagattc

SEQ ID NO: 479671 - DNA, 15 bp, Homo sapiens
caatcagtgaagatt

SEQ ID NO: 479672 - DNA, 15 bp, Homo sapiens
acaatcagtgaagat

SEQ ID NO: 479673 - DNA, 15 bp, Homo sapiens
cacaatcagtgaaga

SEQ ID NO: 479674 - DNA, 15 bp, Homo sapiens
gcacaatcagtgaag

SEQ ID NO: 479675 - DNA, 15 bp, Homo sapiens
agcacaatcagtgaa

SEQ ID NO: 479676 - DNA, 15 bp, Homo sapiens
cagcacaatcagtga

SEQ ID NO: 479677 - DNA, 15 bp, Homo sapiens
tcagcacaatcagtg

SEQ ID NO: 479678 - DNA, 15 bp, Homo sapiens
gtcagcacaatcagt

SEQ ID NO: 479679 - DNA, 15 bp, Homo sapiens
agtcagcacaatcag

SEQ ID NO: 479680 - DNA, 15 bp, Homo sapiens
aagtcagcacaatca

SEQ ID NO: 479681 - DNA, 15 bp, Homo sapiens
aaagtcagcacaatc

SEQ ID NO: 479682 - DNA, 15 bp, Homo sapiens
aaaagtcagcacaat

SEQ ID NO: 479683 - DNA, 15 bp, Homo sapiens
gaaaagtcagcacaa

SEQ ID NO: 479684 - DNA, 15 bp, Homo sapiens
agaaaagtcagcaca

SEQ ID NO: 479685 - DNA, 15 bp, Homo sapiens
aagaaaagtcagcac

SEQ ID NO: 479686 - DNA, 15 bp, Homo sapiens
gaagaaaagtcagca

SEQ ID NO: 479687 - DNA, 15 bp, Homo sapiens
agaagaaaagtcagc

SEQ ID NO: 479688 - DNA, 15 bp, Homo sapiens
tagaagaaaagtcag

SEQ ID NO: 479689 - DNA, 15 bp, Homo sapiens
gtagaagaaaagtca

SEQ ID NO: 479690 - DNA, 15 bp, Homo sapiens
tgtagaagaaaagtc

SEQ ID NO: 479691 - DNA, 15 bp, Homo sapiens
ttgtagaagaaaagt

SEQ ID NO: 479692 - DNA, 15 bp, Homo sapiens
attgtagaagaaaag

SEQ ID NO: 479693 - DNA, 15 bp, Homo sapiens
aattgtagaagaaaa

SEQ ID NO: 479694 - DNA, 15 bp, Homo sapiens
aaattgtagaagaaa

SEQ ID NO: 479695 - DNA, 15 bp, Homo sapiens
aaaattgtagaagaa

SEQ ID NO: 479696 - DNA, 15 bp, Homo sapiens
aaaaattgtagaaga

SEQ ID NO: 479697 - DNA, 15 bp, Homo sapiens
taaaaattgtagaag

SEQ ID NO: 479698 - DNA, 15 bp, Homo sapiens
ctaaaaattgtagaa

SEQ ID NO: 479699 - DNA, 15 bp, Homo sapiens
actaaaaattgtaga

SEQ ID NO: 479700 - DNA, 15 bp, Homo sapiens
aactaaaaattgtag

SEQ ID NO: 479701 - DNA, 15 bp, Homo sapiens
aaactaaaaattgta

SEQ ID NO: 479702 - DNA, 15 bp, Homo sapiens
taaactaaaaattgt

SEQ ID NO: 479703 - DNA, 15 bp, Homo sapiens
ataaactaaaaattg

SEQ ID NO: 479704 - DNA, 15 bp, Homo sapiens
tataaactaaaaatt

SEQ ID NO: 479705 - DNA, 15 bp, Homo sapiens
ttataaactaaaaat

SEQ ID NO: 479706 - DNA, 15 bp, Homo sapiens
gttataaactaaaaa

SEQ ID NO: 479707 - DNA, 15 bp, Homo sapiens
tgttataaactaaaa

SEQ ID NO: 479708 - DNA, 15 bp, Homo sapiens
atgttataaactaaa

SEQ ID NO: 479709 - DNA, 15 bp, Homo sapiens
catgttataaactaa

SEQ ID NO: 479710 - DNA, 15 bp, Homo sapiens
acatgttataaacta

SEQ ID NO: 479711 - DNA, 15 bp, Homo sapiens
tacatgttataaact

SEQ ID NO: 479712 - DNA, 15 bp, Homo sapiens
atacatgttataaac

SEQ ID NO: 479713 - DNA, 15 bp, Homo sapiens
tatacatgttataaa

SEQ ID NO: 479714 - DNA, 15 bp, Homo sapiens
ctatacatgttataa

SEQ ID NO: 479715 - DNA, 15 bp, Homo sapiens
actatacatgttata

SEQ ID NO: 479716 - DNA, 15 bp, Homo sapiens
aactatacatgttat

SEQ ID NO: 479717 - DNA, 15 bp, Homo sapiens
aaactatacatgtta

SEQ ID NO: 479718 - DNA, 15 bp, Homo sapiens
caaactatacatgtt

SEQ ID NO: 479719 - DNA, 15 bp, Homo sapiens
acaaactatacatgt

SEQ ID NO: 479720 - DNA, 15 bp, Homo sapiens
gacaaactatacatg

SEQ ID NO: 479721 - DNA, 15 bp, Homo sapiens
tgacaaactatacat

SEQ ID NO: 479722 - DNA, 15 bp, Homo sapiens
ttgacaaactataca

SEQ ID NO: 479723 - DNA, 15 bp, Homo sapiens
attgacaaactatac

SEQ ID NO: 479724 - DNA, 15 bp, Homo sapiens
aattgacaaactata

SEQ ID NO: 479725 - DNA, 15 bp, Homo sapiens
caattgacaaactat

SEQ ID NO: 479726 - DNA, 15 bp, Homo sapiens
acaattgacaaacta

SEQ ID NO: 479727 - DNA, 15 bp, Homo sapiens
cacaattgacaaact

SEQ ID NO: 479728 - DNA, 15 bp, Homo sapiens
gcacaattgacaaac

SEQ ID NO: 479729 - DNA, 15 bp, Homo sapiens
agcacaattgacaaa

SEQ ID NO: 479730 - DNA, 15 bp, Homo sapiens
tagcacaattgacaa

SEQ ID NO: 479731 - DNA, 15 bp, Homo sapiens
ctagcacaattgaca

SEQ ID NO: 479732 - DNA, 15 bp, Homo sapiens
cctagcacaattgac

SEQ ID NO: 479733 - DNA, 15 bp, Homo sapiens
tcctagcacaattga

SEQ ID NO: 479734 - DNA, 15 bp, Homo sapiens
atcctagcacaattg

SEQ ID NO: 479735 - DNA, 15 bp, Homo sapiens
tatcctagcacaatt

SEQ ID NO: 479736 - DNA, 15 bp, Homo sapiens
atatcctagcacaat

SEQ ID NO: 479737 - DNA, 15 bp, Homo sapiens
aatatcctagcacaa

SEQ ID NO: 479738 - DNA, 15 bp, Homo sapiens
aaatatcctagcaca

SEQ ID NO: 479739 - DNA, 15 bp, Homo sapiens
aaaatatcctagcac

SEQ ID NO: 479740 - DNA, 15 bp, Homo sapiens
caaaatatcctagca

SEQ ID NO: 479741 - DNA, 15 bp, Homo sapiens
acaaaatatcctagc

SEQ ID NO: 479742 - DNA, 15 bp, Homo sapiens
aacaaaatatcctag

SEQ ID NO: 479743 - DNA, 15 bp, Homo sapiens
taacaaaatatccta

SEQ ID NO: 479744 - DNA, 15 bp, Homo sapiens
ttaacaaaatatcct

SEQ ID NO: 479745 - DNA, 15 bp, Homo sapiens
attaacaaaatatcc

SEQ ID NO: 479746 - DNA, 15 bp, Homo sapiens
tattaacaaaatatc

SEQ ID NO: 479747 - DNA, 15 bp, Homo sapiens
atattaacaaaatat

SEQ ID NO: 479748 - DNA, 15 bp, Homo sapiens
catattaacaaaata

SEQ ID NO: 479749 - DNA, 15 bp, Homo sapiens
acatattaacaaaat

SEQ ID NO: 479750 - DNA, 15 bp, Homo sapiens
aacatattaacaaaa

SEQ ID NO: 479751 - DNA, 15 bp, Homo sapiens
gaacatattaacaaa

SEQ ID NO: 479752 - DNA, 15 bp, Homo sapiens
agaacatattaacaa

SEQ ID NO: 479753 - DNA, 15 bp, Homo sapiens
aagaacatattaaca

SEQ ID NO: 479754 - DNA, 15 bp, Homo sapiens
taagaacatattaac

SEQ ID NO: 479755 - DNA, 15 bp, Homo sapiens
ttaagaacatattaa

SEQ ID NO: 479756 - DNA, 15 bp, Homo sapiens
tttaagaacatatta

SEQ ID NO: 479757 - DNA, 15 bp, Homo sapiens
ttttaagaacatatt

SEQ ID NO: 479758 - DNA, 15 bp, Homo sapiens
tttttaagaacatat

SEQ ID NO: 479759 - DNA, 15 bp, Homo sapiens
atttttaagaacata

SEQ ID NO: 479760 - DNA, 15 bp, Homo sapiens
aatttttaagaacat

SEQ ID NO: 479761 - DNA, 15 bp, Homo sapiens
gaatttttaagaaca

SEQ ID NO: 479762 - DNA, 15 bp, Homo sapiens
tgaatttttaagaac

SEQ ID NO: 479763 - DNA, 15 bp, Homo sapiens
ttgaatttttaagaa

SEQ ID NO: 479764 - DNA, 15 bp, Homo sapiens
tttgaatttttaaga

SEQ ID NO: 479765 - DNA, 15 bp, Homo sapiens
atttgaatttttaag

SEQ ID NO: 479766 - DNA, 15 bp, Homo sapiens
gatttgaatttttaa

SEQ ID NO: 479767 - DNA, 15 bp, Homo sapiens
ggatttgaattttta

SEQ ID NO: 479768 - DNA, 15 bp, Homo sapiens
gggatttgaattttt

SEQ ID NO: 479769 - DNA, 15 bp, Homo sapiens
tgggatttgaatttt

SEQ ID NO: 479770 - DNA, 15 bp, Homo sapiens
ctgggatttgaattt

SEQ ID NO: 479771 - DNA, 15 bp, Homo sapiens
cctgggatttgaatt

SEQ ID NO: 479772 - DNA, 15 bp, Homo sapiens
ccctgggatttgaat

SEQ ID NO: 479773 - DNA, 15 bp, Homo sapiens
cccctgggatttgaa

SEQ ID NO: 479774 - DNA, 15 bp, Homo sapiens
acccctgggatttga

SEQ ID NO: 479775 - DNA, 15 bp, Homo sapiens
tacccctgggatttg

SEQ ID NO: 479776 - DNA, 15 bp, Homo sapiens
ttacccctgggattt

SEQ ID NO: 479777 - DNA, 15 bp, Homo sapiens
tttacccctgggatt

SEQ ID NO: 479778 - DNA, 15 bp, Homo sapiens
gtttacccctgggat

SEQ ID NO: 479779 - DNA, 15 bp, Homo sapiens
tgtttacccctggga

SEQ ID NO: 479780 - DNA, 15 bp, Homo sapiens
atgtttacccctggg

SEQ ID NO: 479781 - DNA, 15 bp, Homo sapiens
gatgtttacccctgg

SEQ ID NO: 479782 - DNA, 15 bp, Homo sapiens
tgatgtttacccctg

SEQ ID NO: 479783 - DNA, 15 bp, Homo sapiens
ttgatgtttacccct

SEQ ID NO: 479784 - DNA, 15 bp, Homo sapiens
tttgatgtttacccc

SEQ ID NO: 479785 - DNA, 15 bp, Homo sapiens
atttgatgtttaccc

SEQ ID NO: 479786 - DNA, 15 bp, Homo sapiens
tatttgatgtttacc

SEQ ID NO: 479787 - DNA, 15 bp, Homo sapiens
ttatttgatgtttac

SEQ ID NO: 479788 - DNA, 15 bp, Homo sapiens
attatttgatgttta

SEQ ID NO: 479789 - DNA, 15 bp, Homo sapiens
aattatttgatgttt

SEQ ID NO: 479790 - DNA, 15 bp, Homo sapiens
aaattatttgatgtt

SEQ ID NO: 479791 - DNA, 15 bp, Homo sapiens
taaattatttgatgt

SEQ ID NO: 479792 - DNA, 15 bp, Homo sapiens
ttaaattatttgatg

SEQ ID NO: 479793 - DNA, 15 bp, Homo sapiens
attaaattatttgat

SEQ ID NO: 479794 - DNA, 15 bp, Homo sapiens
aattaaattatttga

SEQ ID NO: 479795 - DNA, 15 bp, Homo sapiens
caattaaattatttg

SEQ ID NO: 479796 - DNA, 15 bp, Homo sapiens
acaattaaattattt

SEQ ID NO: 479797 - DNA, 15 bp, Homo sapiens
cacaattaaattatt

SEQ ID NO: 479798 - DNA, 15 bp, Homo sapiens
gcacaattaaattat

SEQ ID NO: 479799 - DNA, 15 bp, Homo sapiens
ggcacaattaaatta

SEQ ID NO: 479800 - DNA, 15 bp, Homo sapiens
aggcacaattaaatt

SEQ ID NO: 479801 - DNA, 15 bp, Homo sapiens
taggcacaattaaat

SEQ ID NO: 479802 - DNA, 15 bp, Homo sapiens
ataggcacaattaaa

SEQ ID NO: 479803 - DNA, 15 bp, Homo sapiens
aataggcacaattaa

SEQ ID NO: 479804 - DNA, 15 bp, Homo sapiens
aaataggcacaatta

SEQ ID NO: 479805 - DNA, 15 bp, Homo sapiens
caaataggcacaatt

SEQ ID NO: 479806 - DNA, 15 bp, Homo sapiens
tcaaataggcacaat

SEQ ID NO: 479807 - DNA, 15 bp, Homo sapiens
gtcaaataggcacaa

SEQ ID NO: 479808 - DNA, 15 bp, Homo sapiens
agtcaaataggcaca

SEQ ID NO: 479809 - DNA, 15 bp, Homo sapiens
aagtcaaataggcac

SEQ ID NO: 479810 - DNA, 15 bp, Homo sapiens
aaagtcaaataggca

SEQ ID NO: 479811 - DNA, 15 bp, Homo sapiens
taaagtcaaataggc

SEQ ID NO: 479812 - DNA, 15 bp, Homo sapiens
ataaagtcaaatagg

SEQ ID NO: 479813 - DNA, 15 bp, Homo sapiens
cataaagtcaaatag

SEQ ID NO: 479814 - DNA, 15 bp, Homo sapiens
ccataaagtcaaata

SEQ ID NO: 479815 - DNA, 15 bp, Homo sapiens
cccataaagtcaaat

SEQ ID NO: 479816 - DNA, 15 bp, Homo sapiens
tcccataaagtcaaa

SEQ ID NO: 479817 - DNA, 15 bp, Homo sapiens
ctcccataaagtcaa

SEQ ID NO: 479818 - DNA, 15 bp, Homo sapiens
tctcccataaagtca

SEQ ID NO: 479819 - DNA, 15 bp, Homo sapiens
ctctcccataaagtc

SEQ ID NO: 479820 - DNA, 15 bp, Homo sapiens
actctcccataaagt

SEQ ID NO: 479821 - DNA, 15 bp, Homo sapiens
aactctcccataaag

SEQ ID NO: 479822 - DNA, 15 bp, Homo sapiens
taactctcccataaa

SEQ ID NO: 479823 - DNA, 15 bp, Homo sapiens
ttaactctcccataa

SEQ ID NO: 479824 - DNA, 15 bp, Homo sapiens
gttaactctcccata

SEQ ID NO: 479825 - DNA, 15 bp, Homo sapiens
tgttaactctcccat

SEQ ID NO: 479826 - DNA, 15 bp, Homo sapiens
ttgttaactctccca

SEQ ID NO: 479827 - DNA, 15 bp, Homo sapiens
gttgttaactctccc

SEQ ID NO: 479828 - DNA, 15 bp, Homo sapiens
ggttgttaactctcc

SEQ ID NO: 479829 - DNA, 15 bp, Homo sapiens
tggttgttaactctc

SEQ ID NO: 479830 - DNA, 15 bp, Homo sapiens
atggttgttaactct

SEQ ID NO: 479831 - DNA, 15 bp, Homo sapiens
tatggttgttaactc

SEQ ID NO: 479832 - DNA, 15 bp, Homo sapiens
atatggttgttaact

SEQ ID NO: 479833 - DNA, 15 bp, Homo sapiens
aatatggttgttaac

SEQ ID NO: 479834 - DNA, 15 bp, Homo sapiens
aaatatggttgttaa

SEQ ID NO: 479835 - DNA, 15 bp, Homo sapiens
taaatatggttgtta

SEQ ID NO: 479836 - DNA, 15 bp, Homo sapiens
ataaatatggttgtt

SEQ ID NO: 479837 - DNA, 15 bp, Homo sapiens
tataaatatggttgt

SEQ ID NO: 479838 - DNA, 15 bp, Homo sapiens
atataaatatggttg

SEQ ID NO: 479839 - DNA, 15 bp, Homo sapiens
tatataaatatggtt

SEQ ID NO: 479840 - DNA, 15 bp, Homo sapiens
atatataaatatggt

SEQ ID NO: 479841 - DNA, 15 bp, Homo sapiens
tatatataaatatgg

SEQ ID NO: 479842 - DNA, 15 bp, Homo sapiens
atatatataaatatg

SEQ ID NO: 479843 - DNA, 15 bp, Homo sapiens
catatatataaatat

SEQ ID NO: 479844 - DNA, 15 bp, Homo sapiens
ccatatatataaata

SEQ ID NO: 479845 - DNA, 15 bp, Homo sapiens
accatatatataaat

SEQ ID NO: 479846 - DNA, 15 bp, Homo sapiens
aaccatatatataaa

SEQ ID NO: 479847 - DNA, 15 bp, Homo sapiens
taaccatatatataa

SEQ ID NO: 479848 - DNA, 15 bp, Homo sapiens
ttaaccatatatata

SEQ ID NO: 479849 - DNA, 15 bp, Homo sapiens
tttaaccatatatat

SEQ ID NO: 479850 - DNA, 15 bp, Homo sapiens
atttaaccatatata

SEQ ID NO: 479851 - DNA, 15 bp, Homo sapiens
catttaaccatatat

SEQ ID NO: 479852 - DNA, 15 bp, Homo sapiens
acatttaaccatata

SEQ ID NO: 479853 - DNA, 15 bp, Homo sapiens
cacatttaaccatat

SEQ ID NO: 479854 - DNA, 15 bp, Homo sapiens
acacatttaaccata

SEQ ID NO: 479855 - DNA, 15 bp, Homo sapiens
tacacatttaaccat

SEQ ID NO: 479856 - DNA, 15 bp, Homo sapiens
atacacatttaacca

SEQ ID NO: 479857 - DNA, 15 bp, Homo sapiens
tatacacatttaacc

SEQ ID NO: 479858 - DNA, 15 bp, Homo sapiens
ttatacacatttaac

SEQ ID NO: 479859 - DNA, 15 bp, Homo sapiens
attatacacatttaa

SEQ ID NO: 479860 - DNA, 15 bp, Homo sapiens
gattatacacattta

SEQ ID NO: 479861 - DNA, 15 bp, Homo sapiens
agattatacacattt

SEQ ID NO: 479862 - DNA, 15 bp, Homo sapiens
aagattatacacatt

SEQ ID NO: 479863 - DNA, 15 bp, Homo sapiens
gaagattatacacat

SEQ ID NO: 479864 - DNA, 15 bp, Homo sapiens
tgaagattatacaca

SEQ ID NO: 479865 - DNA, 15 bp, Homo sapiens
atgaagattatacac

SEQ ID NO: 479866 - DNA, 15 bp, Homo sapiens
aatgaagattataca

SEQ ID NO: 479867 - DNA, 15 bp, Homo sapiens
gaatgaagattatac

SEQ ID NO: 479868 - DNA, 15 bp, Homo sapiens
agaatgaagattata

SEQ ID NO: 479869 - DNA, 15 bp, Homo sapiens
gagaatgaagattat

SEQ ID NO: 479870 - DNA, 15 bp, Homo sapiens
tgagaatgaagatta

SEQ ID NO: 479871 - DNA, 15 bp, Homo sapiens
ttgagaatgaagatt

SEQ ID NO: 479872 - DNA, 15 bp, Homo sapiens
attgagaatgaagat

SEQ ID NO: 479873 - DNA, 15 bp, Homo sapiens
gattgagaatgaaga

SEQ ID NO: 479874 - DNA, 15 bp, Homo sapiens
agattgagaatgaag

SEQ ID NO: 479875 - DNA, 15 bp, Homo sapiens
aagattgagaatgaa

SEQ ID NO: 479876 - DNA, 15 bp, Homo sapiens
aaagattgagaatga

SEQ ID NO: 479877 - DNA, 15 bp, Homo sapiens
gaaagattgagaatg

SEQ ID NO: 479878 - DNA, 15 bp, Homo sapiens
tgaaagattgagaat

SEQ ID NO: 479879 - DNA, 15 bp, Homo sapiens
ctgaaagattgagaa

SEQ ID NO: 479880 - DNA, 15 bp, Homo sapiens
tctgaaagattgaga

SEQ ID NO: 479881 - DNA, 15 bp, Homo sapiens
ttctgaaagattgag

SEQ ID NO: 479882 - DNA, 15 bp, Homo sapiens
attctgaaagattga

SEQ ID NO: 479883 - DNA, 15 bp, Homo sapiens
gattctgaaagattg

SEQ ID NO: 479884 - DNA, 15 bp, Homo sapiens
ggattctgaaagatt

SEQ ID NO: 479885 - DNA, 15 bp, Homo sapiens
aggattctgaaagat

SEQ ID NO: 479886 - DNA, 15 bp, Homo sapiens
aaggattctgaaaga

SEQ ID NO: 479887 - DNA, 15 bp, Homo sapiens
taaggattctgaaag

SEQ ID NO: 479888 - DNA, 15 bp, Homo sapiens
ataaggattctgaaa

SEQ ID NO: 479889 - DNA, 15 bp, Homo sapiens
aataaggattctgaa

SEQ ID NO: 479890 - DNA, 15 bp, Homo sapiens
aaataaggattctga

SEQ ID NO: 479891 - DNA, 15 bp, Homo sapiens
aaaataaggattctg

SEQ ID NO: 479892 - DNA, 15 bp, Homo sapiens
gaaaataaggattct

SEQ ID NO: 479893 - DNA, 15 bp, Homo sapiens
ggaaaataaggattc

SEQ ID NO: 479894 - DNA, 15 bp, Homo sapiens
tggaaaataaggatt

SEQ ID NO: 479895 - DNA, 15 bp, Homo sapiens
atggaaaataaggat

SEQ ID NO: 479896 - DNA, 15 bp, Homo sapiens
aatggaaaataagga

SEQ ID NO: 479897 - DNA, 15 bp, Homo sapiens
aaatggaaaataagg

SEQ ID NO: 479898 - DNA, 15 bp, Homo sapiens
aaaatggaaaataag

SEQ ID NO: 479899 - DNA, 15 bp, Homo sapiens
gaaaatggaaaataa

SEQ ID NO: 479900 - DNA, 15 bp, Homo sapiens
tgaaaatggaaaata

SEQ ID NO: 479901 - DNA, 15 bp, Homo sapiens
atgaaaatggaaaat

SEQ ID NO: 479902 - DNA, 15 bp, Homo sapiens
aatgaaaatggaaaa

SEQ ID NO: 479903 - DNA, 15 bp, Homo sapiens
aaatgaaaatggaaa

SEQ ID NO: 479904 - DNA, 15 bp, Homo sapiens
aaaatgaaaatggaa

SEQ ID NO: 479905 - DNA, 15 bp, Homo sapiens
aaaaatgaaaatgga

SEQ ID NO: 479906 - DNA, 15 bp, Homo sapiens
taaaaatgaaaatgg

SEQ ID NO: 479907 - DNA, 15 bp, Homo sapiens
ctaaaaatgaaaatg

SEQ ID NO: 479908 - DNA, 15 bp, Homo sapiens
gctaaaaatgaaaat

SEQ ID NO: 479909 - DNA, 15 bp, Homo sapiens
tgctaaaaatgaaaa

SEQ ID NO: 479910 - DNA, 15 bp, Homo sapiens
atgctaaaaatgaaa

SEQ ID NO: 479911 - DNA, 15 bp, Homo sapiens
aatgctaaaaatgaa

SEQ ID NO: 479912 - DNA, 15 bp, Homo sapiens
taatgctaaaaatga

SEQ ID NO: 479913 - DNA, 15 bp, Homo sapiens
ctaatgctaaaaatg

SEQ ID NO: 479914 - DNA, 15 bp, Homo sapiens
gctaatgctaaaaat

SEQ ID NO: 479915 - DNA, 15 bp, Homo sapiens
agctaatgctaaaaa

SEQ ID NO: 479916 - DNA, 15 bp, Homo sapiens
cagctaatgctaaaa

SEQ ID NO: 479917 - DNA, 15 bp, Homo sapiens
gcagctaatgctaaa

SEQ ID NO: 479918 - DNA, 15 bp, Homo sapiens
tgcagctaatgctaa

SEQ ID NO: 479919 - DNA, 15 bp, Homo sapiens
atgcagctaatgcta

SEQ ID NO: 479920 - DNA, 15 bp, Homo sapiens
aatgcagctaatgct

SEQ ID NO: 479921 - DNA, 15 bp, Homo sapiens
taatgcagctaatgc

SEQ ID NO: 479922 - DNA, 15 bp, Homo sapiens
ataatgcagctaatg

SEQ ID NO: 479923 - DNA, 15 bp, Homo sapiens
aataatgcagctaat

SEQ ID NO: 479924 - DNA, 15 bp, Homo sapiens
aaataatgcagctaa

SEQ ID NO: 479925 - DNA, 15 bp, Homo sapiens
gaaataatgcagcta

SEQ ID NO: 479926 - DNA, 15 bp, Homo sapiens
agaaataatgcagct

SEQ ID NO: 479927 - DNA, 15 bp, Homo sapiens
aagaaataatgcagc

SEQ ID NO: 479928 - DNA, 15 bp, Homo sapiens
aaagaaataatgcag

SEQ ID NO: 479929 - DNA, 15 bp, Homo sapiens
taaagaaataatgca

SEQ ID NO: 479930 - DNA, 15 bp, Homo sapiens
ataaagaaataatgc

SEQ ID NO: 479931 - DNA, 15 bp, Homo sapiens
tataaagaaataatg

SEQ ID NO: 479932 - DNA, 15 bp, Homo sapiens
gtataaagaaataat

SEQ ID NO: 479933 - DNA, 15 bp, Homo sapiens
tgtataaagaaataa

SEQ ID NO: 479934 - DNA, 15 bp, Homo sapiens
ttgtataaagaaata

SEQ ID NO: 479935 - DNA, 15 bp, Homo sapiens
gttgtataaagaaat

SEQ ID NO: 479936 - DNA, 15 bp, Homo sapiens
agttgtataaagaaa

SEQ ID NO: 479937 - DNA, 15 bp, Homo sapiens
tagttgtataaagaa

SEQ ID NO: 479938 - DNA, 15 bp, Homo sapiens
ctagttgtataaaga

SEQ ID NO: 479939 - DNA, 15 bp, Homo sapiens
cctagttgtataaag

SEQ ID NO: 479940 - DNA, 15 bp, Homo sapiens
tcctagttgtataaa

SEQ ID NO: 479941 - DNA, 15 bp, Homo sapiens
ttcctagttgtataa

SEQ ID NO: 479942 - DNA, 15 bp, Homo sapiens
tttcctagttgtata

SEQ ID NO: 479943 - DNA, 15 bp, Homo sapiens
ttttcctagttgtat

SEQ ID NO: 479944 - DNA, 15 bp, Homo sapiens
cttttcctagttgta

SEQ ID NO: 479945 - DNA, 15 bp, Homo sapiens
ccttttcctagttgt

SEQ ID NO: 479946 - DNA, 15 bp, Homo sapiens
cccttttcctagttg

SEQ ID NO: 479947 - DNA, 15 bp, Homo sapiens
tcccttttcctagtt

SEQ ID NO: 479948 - DNA, 15 bp, Homo sapiens
atcccttttcctagt

SEQ ID NO: 479949 - DNA, 15 bp, Homo sapiens
aatcccttttcctag

SEQ ID NO: 479950 - DNA, 15 bp, Homo sapiens
taatcccttttccta

SEQ ID NO: 479951 - DNA, 15 bp, Homo sapiens
ataatcccttttcct

SEQ ID NO: 479952 - DNA, 15 bp, Homo sapiens
aataatcccttttcc

SEQ ID NO: 479953 - DNA, 15 bp, Homo sapiens
gaataatcccttttc

SEQ ID NO: 479954 - DNA, 15 bp, Homo sapiens
tgaataatccctttt

SEQ ID NO: 479955 - DNA, 15 bp, Homo sapiens
ctgaataatcccttt

SEQ ID NO: 479956 - DNA, 15 bp, Homo sapiens
tctgaataatccctt

SEQ ID NO: 479957 - DNA, 15 bp, Homo sapiens
ttctgaataatccct

SEQ ID NO: 479958 - DNA, 15 bp, Homo sapiens
tttctgaataatccc

SEQ ID NO: 479959 - DNA, 15 bp, Homo sapiens
atttctgaataatcc

SEQ ID NO: 479960 - DNA, 15 bp, Homo sapiens
aatttctgaataatc

SEQ ID NO: 479961 - DNA, 15 bp, Homo sapiens
aaatttctgaataat

SEQ ID NO: 479962 - DNA, 15 bp, Homo sapiens
caaatttctgaataa

SEQ ID NO: 479963 - DNA, 15 bp, Homo sapiens
ccaaatttctgaata

SEQ ID NO: 479964 - DNA, 15 bp, Homo sapiens
accaaatttctgaat

SEQ ID NO: 479965 - DNA, 15 bp, Homo sapiens
aaccaaatttctgaa

SEQ ID NO: 479966 - DNA, 15 bp, Homo sapiens
caaccaaatttctga

SEQ ID NO: 479967 - DNA, 15 bp, Homo sapiens
tcaaccaaatttctg

SEQ ID NO: 479968 - DNA, 15 bp, Homo sapiens
atcaaccaaatttct

SEQ ID NO: 479969 - DNA, 15 bp, Homo sapiens
catcaaccaaatttc

SEQ ID NO: 479970 - DNA, 15 bp, Homo sapiens
ccatcaaccaaattt

SEQ ID NO: 479971 - DNA, 15 bp, Homo sapiens
gccatcaaccaaatt

SEQ ID NO: 479972 - DNA, 15 bp, Homo sapiens
agccatcaaccaaat

SEQ ID NO: 479973 - DNA, 15 bp, Homo sapiens
aagccatcaaccaaa

SEQ ID NO: 479974 - DNA, 15 bp, Homo sapiens
aaagccatcaaccaa

SEQ ID NO: 479975 - DNA, 15 bp, Homo sapiens
aaaagccatcaacca

SEQ ID NO: 479976 - DNA, 15 bp, Homo sapiens
aaaaagccatcaacc

SEQ ID NO: 479977 - DNA, 15 bp, Homo sapiens
taaaaagccatcaac

SEQ ID NO: 479978 - DNA, 15 bp, Homo sapiens
ataaaaagccatcaa

SEQ ID NO: 479979 - DNA, 15 bp, Homo sapiens
aataaaaagccatca

SEQ ID NO: 479980 - DNA, 15 bp, Homo sapiens
aaataaaaagccatc

SEQ ID NO: 479981 - DNA, 15 bp, Homo sapiens
aaaataaaaagccat

SEQ ID NO: 479982 - DNA, 15 bp, Homo sapiens
caaaataaaaagcca

SEQ ID NO: 479983 - DNA, 15 bp, Homo sapiens
acaaaataaaaagcc

SEQ ID NO: 479984 - DNA, 15 bp, Homo sapiens
tacaaaataaaaagc

SEQ ID NO: 479985 - DNA, 15 bp, Homo sapiens
ctacaaaataaaaag

SEQ ID NO: 479986 - DNA, 15 bp, Homo sapiens
tctacaaaataaaaa

SEQ ID NO: 479987 - DNA, 15 bp, Homo sapiens
ctctacaaaataaaa

SEQ ID NO: 479988 - DNA, 15 bp, Homo sapiens
tctctacaaaataaa

SEQ ID NO: 479989 - DNA, 15 bp, Homo sapiens
gtctctacaaaataa

SEQ ID NO: 479990 - DNA, 15 bp, Homo sapiens
tgtctctacaaaata

SEQ ID NO: 479991 - DNA, 15 bp, Homo sapiens
ctgtctctacaaaat

SEQ ID NO: 479992 - DNA, 15 bp, Homo sapiens
gaccctgtctctaca

SEQ ID NO: 479993 - DNA, 15 bp, Homo sapiens
agaccctgtctctac

SEQ ID NO: 479994 - DNA, 15 bp, Homo sapiens
cagaccctgtctcta

SEQ ID NO: 479995 - DNA, 15 bp, Homo sapiens
acagaccctgtctct

SEQ ID NO: 479996 - DNA, 15 bp, Homo sapiens
gacagaccctgtctc

SEQ ID NO: 479997 - DNA, 15 bp, Homo sapiens
agacagaccctgtct

SEQ ID NO: 479998 - DNA, 15 bp, Homo sapiens
gagacagaccctgtc

SEQ ID NO: 479999 - DNA, 15 bp, Homo sapiens
agagacagaccctgt

SEQ ID NO: 480000 - DNA, 15 bp, Homo sapiens
cagagacagaccctg

SEQ ID NO: 480001 - DNA, 15 bp, Homo sapiens
acagagacagaccct

SEQ ID NO: 480002 - DNA, 15 bp, Homo sapiens
aacagagacagaccc

SEQ ID NO: 480003 - DNA, 15 bp, Homo sapiens
taacagagacagacc

SEQ ID NO: 480004 - DNA, 15 bp, Homo sapiens
gtaacagagacagac

SEQ ID NO: 480005 - DNA, 15 bp, Homo sapiens
ggtaacagagacaga

SEQ ID NO: 480006 - DNA, 15 bp, Homo sapiens
gggtaacagagacag

SEQ ID NO: 480007 - DNA, 15 bp, Homo sapiens
tgggtaacagagaca

SEQ ID NO: 480008 - DNA, 15 bp, Homo sapiens
ctgggtaacagagac

SEQ ID NO: 480009 - DNA, 15 bp, Homo sapiens
gctgggtaacagaga

SEQ ID NO: 480010 - DNA, 15 bp, Homo sapiens
ggctgggtaacagag

SEQ ID NO: 480011 - DNA, 15 bp, Homo sapiens
aggctgggtaacaga

SEQ ID NO: 480012 - DNA, 15 bp, Homo sapiens
taggctgggtaacag

SEQ ID NO: 480013 - DNA, 15 bp, Homo sapiens
ctaggctgggtaaca

SEQ ID NO: 480014 - DNA, 15 bp, Homo sapiens
actaggctgggtaac

SEQ ID NO: 480015 - DNA, 15 bp, Homo sapiens
gactaggctgggtaa

SEQ ID NO: 480016 - DNA, 15 bp, Homo sapiens
agactaggctgggta

SEQ ID NO: 480017 - DNA, 15 bp, Homo sapiens
gagactaggctgggt

SEQ ID NO: 480018 - DNA, 15 bp, Homo sapiens
agagactaggctggg

SEQ ID NO: 480019 - DNA, 15 bp, Homo sapiens
tagagactaggctgg

SEQ ID NO: 480020 - DNA, 15 bp, Homo sapiens
ttagagactaggctg

SEQ ID NO: 480021 - DNA, 15 bp, Homo sapiens
gttagagactaggct

SEQ ID NO: 480022 - DNA, 15 bp, Homo sapiens
agttagagactaggc

SEQ ID NO: 480023 - DNA, 15 bp, Homo sapiens
aagttagagactagg

SEQ ID NO: 480024 - DNA, 15 bp, Homo sapiens
gaagttagagactag

SEQ ID NO: 480025 - DNA, 15 bp, Homo sapiens
agaagttagagacta

SEQ ID NO: 480026 - DNA, 15 bp, Homo sapiens
tagaagttagagact

SEQ ID NO: 480027 - DNA, 15 bp, Homo sapiens
ctagaagttagagac

SEQ ID NO: 480028 - DNA, 15 bp, Homo sapiens
actagaagttagaga

SEQ ID NO: 480029 - DNA, 15 bp, Homo sapiens
gactagaagttagag

SEQ ID NO: 480030 - DNA, 15 bp, Homo sapiens
agactagaagttaga

SEQ ID NO: 480031 - DNA, 15 bp, Homo sapiens
gagactagaagttag

SEQ ID NO: 480032 - DNA, 15 bp, Homo sapiens
tgagactagaagtta

SEQ ID NO: 480033 - DNA, 15 bp, Homo sapiens
ttgagactagaagtt

SEQ ID NO: 480034 - DNA, 15 bp, Homo sapiens
cttgagactagaagt

SEQ ID NO: 480035 - DNA, 15 bp, Homo sapiens
acttgagactagaag

SEQ ID NO: 480036 - DNA, 15 bp, Homo sapiens
cacttgagactagaa

SEQ ID NO: 480037 - DNA, 15 bp, Homo sapiens
ccacttgagactaga

SEQ ID NO: 480038 - DNA, 15 bp, Homo sapiens
accacttgagactag

SEQ ID NO: 480039 - DNA, 15 bp, Homo sapiens
gaccacttgagacta

SEQ ID NO: 480040 - DNA, 15 bp, Homo sapiens
agaccacttgagact

SEQ ID NO: 480041 - DNA, 15 bp, Homo sapiens
aagaccacttgagac

SEQ ID NO: 480042 - DNA, 15 bp, Homo sapiens
aaagaccacttgaga

SEQ ID NO: 480043 - DNA, 15 bp, Homo sapiens
gaaagaccacttgag

SEQ ID NO: 480044 - DNA, 15 bp, Homo sapiens
ggaaagaccacttga

SEQ ID NO: 480045 - DNA, 15 bp, Homo sapiens
tggaaagaccacttg

SEQ ID NO: 480046 - DNA, 15 bp, Homo sapiens
gtggaaagaccactt

SEQ ID NO: 480047 - DNA, 15 bp, Homo sapiens
ggtggaaagaccact

SEQ ID NO: 480048 - DNA, 15 bp, Homo sapiens
aggtggaaagaccac

SEQ ID NO: 480049 - DNA, 15 bp, Homo sapiens
gaggtggaaagacca

SEQ ID NO: 480050 - DNA, 15 bp, Homo sapiens
tgaggtggaaagacc

SEQ ID NO: 480051 - DNA, 15 bp, Homo sapiens
ctgaggtggaaagac

SEQ ID NO: 480052 - DNA, 15 bp, Homo sapiens
gctgaggtggaaaga

SEQ ID NO: 480053 - DNA, 15 bp, Homo sapiens
ggctgaggtggaaag

SEQ ID NO: 480054 - DNA, 15 bp, Homo sapiens
aggctgaggtggaaa

SEQ ID NO: 480055 - DNA, 15 bp, Homo sapiens
aaggctgaggtggaa

SEQ ID NO: 480056 - DNA, 15 bp, Homo sapiens
gaaggctgaggtgga

SEQ ID NO: 480057 - DNA, 15 bp, Homo sapiens
ggaaggctgaggtgg

SEQ ID NO: 480058 - DNA, 15 bp, Homo sapiens
aggaaggctgaggtg

SEQ ID NO: 480059 - DNA, 15 bp, Homo sapiens
taggaaggctgaggt

SEQ ID NO: 480060 - DNA, 15 bp, Homo sapiens
ctaggaaggctgagg

SEQ ID NO: 480061 - DNA, 15 bp, Homo sapiens
actaggaaggctgag

SEQ ID NO: 480062 - DNA, 15 bp, Homo sapiens
cactaggaaggctga

SEQ ID NO: 480063 - DNA, 15 bp, Homo sapiens
acactaggaaggctg

SEQ ID NO: 480064 - DNA, 15 bp, Homo sapiens
aacactaggaaggct

SEQ ID NO: 480065 - DNA, 15 bp, Homo sapiens
caacactaggaaggc

SEQ ID NO: 480066 - DNA, 15 bp, Homo sapiens
ccaacactaggaagg

SEQ ID NO: 480067 - DNA, 15 bp, Homo sapiens
cccaacactaggaag

SEQ ID NO: 480068 - DNA, 15 bp, Homo sapiens
tcccaacactaggaa

SEQ ID NO: 480069 - DNA, 15 bp, Homo sapiens
atcccaacactagga

SEQ ID NO: 480070 - DNA, 15 bp, Homo sapiens
aatcccaacactagg

SEQ ID NO: 480071 - DNA, 15 bp, Homo sapiens
taatcccaacactag

SEQ ID NO: 480072 - DNA, 15 bp, Homo sapiens
gtaatcccaacacta

SEQ ID NO: 480073 - DNA, 15 bp, Homo sapiens
tgtaatcccaacact

SEQ ID NO: 480074 - DNA, 15 bp, Homo sapiens
ctgtaatcccaacac

SEQ ID NO: 480075 - DNA, 15 bp, Homo sapiens
cctgtaatcccaaca

SEQ ID NO: 480076 - DNA, 15 bp, Homo sapiens
gcctgtaatcccaac

SEQ ID NO: 480077 - DNA, 15 bp, Homo sapiens
tgcctgtaatcccaa

SEQ ID NO: 480078 - DNA, 15 bp, Homo sapiens
agtgcggtggctcat

SEQ ID NO: 480079 - DNA, 15 bp, Homo sapiens
cagtgcggtggctca

SEQ ID NO: 480080 - DNA, 15 bp, Homo sapiens
ccagtgcggtggctc

SEQ ID NO: 480081 - DNA, 15 bp, Homo sapiens
gccagtgcggtggct

SEQ ID NO: 480082 - DNA, 15 bp, Homo sapiens
ggccagtgcggtggc

SEQ ID NO: 480083 - DNA, 15 bp, Homo sapiens
tggccagtgcggtgg

SEQ ID NO: 480084 - DNA, 15 bp, Homo sapiens
ctggccagtgcggtg

SEQ ID NO: 480085 - DNA, 15 bp, Homo sapiens
tctggccagtgcggt

SEQ ID NO: 480086 - DNA, 15 bp, Homo sapiens
atctggccagtgcgg

SEQ ID NO: 480087 - DNA, 15 bp, Homo sapiens
catctggccagtgcg

SEQ ID NO: 480088 - DNA, 15 bp, Homo sapiens
ccatctggccagtgc

SEQ ID NO: 480089 - DNA, 15 bp, Homo sapiens
gccatctggccagtg

SEQ ID NO: 480090 - DNA, 15 bp, Homo sapiens
tgccatctggccagt

SEQ ID NO: 480091 - DNA, 15 bp, Homo sapiens
atgccatctggccag

SEQ ID NO: 480092 - DNA, 15 bp, Homo sapiens
aatgccatctggcca

SEQ ID NO: 480093 - DNA, 15 bp, Homo sapiens
aaatgccatctggcc

SEQ ID NO: 480094 - DNA, 15 bp, Homo sapiens
aaaatgccatctggc

SEQ ID NO: 480095 - DNA, 15 bp, Homo sapiens
taaaatgccatctgg

SEQ ID NO: 480096 - DNA, 15 bp, Homo sapiens
ttaaaatgccatctg

SEQ ID NO: 480097 - DNA, 15 bp, Homo sapiens
tttaaaatgccatct

SEQ ID NO: 480098 - DNA, 15 bp, Homo sapiens
ctttaaaatgccatc

SEQ ID NO: 480099 - DNA, 15 bp, Homo sapiens
tctttaaaatgccat

SEQ ID NO: 480100 - DNA, 15 bp, Homo sapiens
ttctttaaaatgcca

SEQ ID NO: 480101 - DNA, 15 bp, Homo sapiens
attctttaaaatgcc

SEQ ID NO: 480102 - DNA, 15 bp, Homo sapiens
tattctttaaaatgc

SEQ ID NO: 480103 - DNA, 15 bp, Homo sapiens
ttattctttaaaatg

SEQ ID NO: 480104 - DNA, 15 bp, Homo sapiens
attattctttaaaat

SEQ ID NO: 480105 - DNA, 15 bp, Homo sapiens
cattattctttaaaa

SEQ ID NO: 480106 - DNA, 15 bp, Homo sapiens
acattattctttaaa

SEQ ID NO: 480107 - DNA, 15 bp, Homo sapiens
aacattattctttaa

SEQ ID NO: 480108 - DNA, 15 bp, Homo sapiens
taacattattcttta

SEQ ID NO: 480109 - DNA, 15 bp, Homo sapiens
ctaacattattcttt

SEQ ID NO: 480110 - DNA, 15 bp, Homo sapiens
cctaacattattctt

SEQ ID NO: 480111 - DNA, 15 bp, Homo sapiens
tcctaacattattct

SEQ ID NO: 480112 - DNA, 15 bp, Homo sapiens
ttcctaacattattc

SEQ ID NO: 480113 - DNA, 15 bp, Homo sapiens
tttcctaacattatt

SEQ ID NO: 480114 - DNA, 15 bp, Homo sapiens
ttttcctaacattat

SEQ ID NO: 480115 - DNA, 15 bp, Homo sapiens
attttcctaacatta

SEQ ID NO: 480116 - DNA, 15 bp, Homo sapiens
tattttcctaacatt

SEQ ID NO: 480117 - DNA, 15 bp, Homo sapiens
ttattttcctaacat

SEQ ID NO: 480118 - DNA, 15 bp, Homo sapiens
attattttcctaaca

SEQ ID NO: 480119 - DNA, 15 bp, Homo sapiens
aattattttcctaac

SEQ ID NO: 480120 - DNA, 15 bp, Homo sapiens
taattattttcctaa

SEQ ID NO: 480121 - DNA, 15 bp, Homo sapiens
ttaattattttccta

SEQ ID NO: 480122 - DNA, 15 bp, Homo sapiens
attaattattttcct

SEQ ID NO: 480123 - DNA, 15 bp, Homo sapiens
aattaattattttcc

SEQ ID NO: 480124 - DNA, 15 bp, Homo sapiens
aaattaattattttc

SEQ ID NO: 480125 - DNA, 15 bp, Homo sapiens
aaaattaattatttt

SEQ ID NO: 480126 - DNA, 15 bp, Homo sapiens
aaaaattaattattt

SEQ ID NO: 480127 - DNA, 15 bp, Homo sapiens
caaaaattaattatt

SEQ ID NO: 480128 - DNA, 15 bp, Homo sapiens
gcaaaaattaattat

SEQ ID NO: 480129 - DNA, 15 bp, Homo sapiens
tgcaaaaattaatta

SEQ ID NO: 480130 - DNA, 15 bp, Homo sapiens
ttgcaaaaattaatt

SEQ ID NO: 480131 - DNA, 15 bp, Homo sapiens
cttgcaaaaattaat

SEQ ID NO: 480132 - DNA, 15 bp, Homo sapiens
acttgcaaaaattaa

SEQ ID NO: 480133 - DNA, 15 bp, Homo sapiens
cacttgcaaaaatta

SEQ ID NO: 480134 - DNA, 15 bp, Homo sapiens
tcacttgcaaaaatt

SEQ ID NO: 480135 - DNA, 15 bp, Homo sapiens
ttcacttgcaaaaat

SEQ ID NO: 480136 - DNA, 15 bp, Homo sapiens
cttcacttgcaaaaa

SEQ ID NO: 480137 - DNA, 15 bp, Homo sapiens
tcttcacttgcaaaa

SEQ ID NO: 480138 - DNA, 15 bp, Homo sapiens
atcttcacttgcaaa

SEQ ID NO: 480139 - DNA, 15 bp, Homo sapiens
tatcttcacttgcaa

SEQ ID NO: 480140 - DNA, 15 bp, Homo sapiens
ctatcttcacttgca

SEQ ID NO: 480141 - DNA, 15 bp, Homo sapiens
actatcttcacttgc

SEQ ID NO: 480142 - DNA, 15 bp, Homo sapiens
aactatcttcacttg

SEQ ID NO: 480143 - DNA, 15 bp, Homo sapiens
caactatcttcactt

SEQ ID NO: 480144 - DNA, 15 bp, Homo sapiens
tcaactatcttcact

SEQ ID NO: 480145 - DNA, 15 bp, Homo sapiens
ttcaactatcttcac

SEQ ID NO: 480146 - DNA, 15 bp, Homo sapiens
tttcaactatcttca

SEQ ID NO: 480147 - DNA, 15 bp, Homo sapiens
atttcaactatcttc

SEQ ID NO: 480148 - DNA, 15 bp, Homo sapiens
catttcaactatctt

SEQ ID NO: 480149 - DNA, 15 bp, Homo sapiens
acatttcaactatct

SEQ ID NO: 480150 - DNA, 15 bp, Homo sapiens
aacatttcaactatc

SEQ ID NO: 480151 - DNA, 15 bp, Homo sapiens
taacatttcaactat

SEQ ID NO: 480152 - DNA, 15 bp, Homo sapiens
ctaacatttcaacta

SEQ ID NO: 480153 - DNA, 15 bp, Homo sapiens
gctaacatttcaact

SEQ ID NO: 480154 - DNA, 15 bp, Homo sapiens
agctaacatttcaac

SEQ ID NO: 480155 - DNA, 15 bp, Homo sapiens
tagctaacatttcaa

SEQ ID NO: 480156 - DNA, 15 bp, Homo sapiens
ttagctaacatttca

SEQ ID NO: 480157 - DNA, 15 bp, Homo sapiens
tttagctaacatttc

SEQ ID NO: 480158 - DNA, 15 bp, Homo sapiens
ttttagctaacattt

SEQ ID NO: 480159 - DNA, 15 bp, Homo sapiens
attttagctaacatt

SEQ ID NO: 480160 - DNA, 15 bp, Homo sapiens
cattttagctaacat

SEQ ID NO: 480161 - DNA, 15 bp, Homo sapiens
tcattttagctaaca

SEQ ID NO: 480162 - DNA, 15 bp, Homo sapiens
atcattttagctaac

SEQ ID NO: 480163 - DNA, 15 bp, Homo sapiens
catcattttagctaa

SEQ ID NO: 480164 - DNA, 15 bp, Homo sapiens
tcatcattttagcta

SEQ ID NO: 480165 - DNA, 15 bp, Homo sapiens
gtcatcattttagct

SEQ ID NO: 480166 - DNA, 15 bp, Homo sapiens
ggtcatcattttagc

SEQ ID NO: 480167 - DNA, 15 bp, Homo sapiens
aggtcatcattttag

SEQ ID NO: 480168 - DNA, 15 bp, Homo sapiens
taggtcatcatttta

SEQ ID NO: 480169 - DNA, 15 bp, Homo sapiens
ctaggtcatcatttt

SEQ ID NO: 480170 - DNA, 15 bp, Homo sapiens
tctaggtcatcattt

SEQ ID NO: 480171 - DNA, 15 bp, Homo sapiens
ctctaggtcatcatt

SEQ ID NO: 480172 - DNA, 15 bp, Homo sapiens
cctctaggtcatcat

SEQ ID NO: 480173 - DNA, 15 bp, Homo sapiens
gcctctaggtcatca

SEQ ID NO: 480174 - DNA, 15 bp, Homo sapiens
tgcctctaggtcatc

SEQ ID NO: 480175 - DNA, 15 bp, Homo sapiens
ctgcctctaggtcat

SEQ ID NO: 480176 - DNA, 15 bp, Homo sapiens
gctgcctctaggtca

SEQ ID NO: 480177 - DNA, 15 bp, Homo sapiens
agctgcctctaggtc

SEQ ID NO: 480178 - DNA, 15 bp, Homo sapiens
aagctgcctctaggt

SEQ ID NO: 480179 - DNA, 15 bp, Homo sapiens
caagctgcctctagg

SEQ ID NO: 480180 - DNA, 15 bp, Homo sapiens
acaagctgcctctag

SEQ ID NO: 480181 - DNA, 15 bp, Homo sapiens
aacaagctgcctcta

SEQ ID NO: 480182 - DNA, 15 bp, Homo sapiens
aaacaagctgcctct

SEQ ID NO: 480183 - DNA, 15 bp, Homo sapiens
aaaacaagctgcctc

SEQ ID NO: 480184 - DNA, 15 bp, Homo sapiens
caaaacaagctgcct

SEQ ID NO: 480185 - DNA, 15 bp, Homo sapiens
ccaaaacaagctgcc

SEQ ID NO: 480186 - DNA, 15 bp, Homo sapiens
accaaaacaagctgc

SEQ ID NO: 480187 - DNA, 15 bp, Homo sapiens
taccaaaacaagctg

SEQ ID NO: 480188 - DNA, 15 bp, Homo sapiens
ttaccaaaacaagct

SEQ ID NO: 480189 - DNA, 15 bp, Homo sapiens
tttaccaaaacaagc

SEQ ID NO: 480190 - DNA, 15 bp, Homo sapiens
atttaccaaaacaag

SEQ ID NO: 480191 - DNA, 15 bp, Homo sapiens
tatttaccaaaacaa

SEQ ID NO: 480192 - DNA, 15 bp, Homo sapiens
atatttaccaaaaca

SEQ ID NO: 480193 - DNA, 15 bp, Homo sapiens
gatatttaccaaaac

SEQ ID NO: 480194 - DNA, 15 bp, Homo sapiens
agatatttaccaaaa

SEQ ID NO: 480195 - DNA, 15 bp, Homo sapiens
aagatatttaccaaa

SEQ ID NO: 480196 - DNA, 15 bp, Homo sapiens
taagatatttaccaa

SEQ ID NO: 480197 - DNA, 15 bp, Homo sapiens
ctaagatatttacca

SEQ ID NO: 480198 - DNA, 15 bp, Homo sapiens
actaagatatttacc

SEQ ID NO: 480199 - DNA, 15 bp, Homo sapiens
gactaagatatttac

SEQ ID NO: 480200 - DNA, 15 bp, Homo sapiens
tgactaagatattta

SEQ ID NO: 480201 - DNA, 15 bp, Homo sapiens
ctgactaagatattt

SEQ ID NO: 480202 - DNA, 15 bp, Homo sapiens
actgactaagatatt

SEQ ID NO: 480203 - DNA, 15 bp, Homo sapiens
aactgactaagatat

SEQ ID NO: 480204 - DNA, 15 bp, Homo sapiens
aaactgactaagata

SEQ ID NO: 480205 - DNA, 15 bp, Homo sapiens
taaactgactaagat

SEQ ID NO: 480206 - DNA, 15 bp, Homo sapiens
ctaaactgactaaga

SEQ ID NO: 480207 - DNA, 15 bp, Homo sapiens
cctaaactgactaag

SEQ ID NO: 480208 - DNA, 15 bp, Homo sapiens
gcctaaactgactaa

SEQ ID NO: 480209 - DNA, 15 bp, Homo sapiens
agcctaaactgacta

SEQ ID NO: 480210 - DNA, 15 bp, Homo sapiens
cagcctaaactgact

SEQ ID NO: 480211 - DNA, 15 bp, Homo sapiens
gcagcctaaactgac

SEQ ID NO: 480212 - DNA, 15 bp, Homo sapiens
agcagcctaaactga

SEQ ID NO: 480213 - DNA, 15 bp, Homo sapiens
tagcagcctaaactg

SEQ ID NO: 480214 - DNA, 15 bp, Homo sapiens
atagcagcctaaact

SEQ ID NO: 480215 - DNA, 15 bp, Homo sapiens
tatagcagcctaaac

SEQ ID NO: 480216 - DNA, 15 bp, Homo sapiens
ttatagcagcctaaa

SEQ ID NO: 480217 - DNA, 15 bp, Homo sapiens
gttatagcagcctaa

SEQ ID NO: 480218 - DNA, 15 bp, Homo sapiens
tgttatagcagccta

SEQ ID NO: 480219 - DNA, 15 bp, Homo sapiens
ttgttatagcagcct

SEQ ID NO: 480220 - DNA, 15 bp, Homo sapiens
tttgttatagcagcc

SEQ ID NO: 480221 - DNA, 15 bp, Homo sapiens
ttttgttatagcagc

SEQ ID NO: 480222 - DNA, 15 bp, Homo sapiens
attttgttatagcag

SEQ ID NO: 480223 - DNA, 15 bp, Homo sapiens
tattttgttatagca

SEQ ID NO: 480224 - DNA, 15 bp, Homo sapiens
gtattttgttatagc

SEQ ID NO: 480225 - DNA, 15 bp, Homo sapiens
ggtattttgttatag

SEQ ID NO: 480226 - DNA, 15 bp, Homo sapiens
tggtattttgttata

SEQ ID NO: 480227 - DNA, 15 bp, Homo sapiens
atggtattttgttat

SEQ ID NO: 480228 - DNA, 15 bp, Homo sapiens
tatggtattttgtta

SEQ ID NO: 480229 - DNA, 15 bp, Homo sapiens
ctatggtattttgtt

SEQ ID NO: 480230 - DNA, 15 bp, Homo sapiens
tctatggtattttgt

SEQ ID NO: 480231 - DNA, 15 bp, Homo sapiens
atctatggtattttg

SEQ ID NO: 480232 - DNA, 15 bp, Homo sapiens
aatctatggtatttt

SEQ ID NO: 480233 - DNA, 15 bp, Homo sapiens
aaatctatggtattt

SEQ ID NO: 480234 - DNA, 15 bp, Homo sapiens
caaatctatggtatt

SEQ ID NO: 480235 - DNA, 15 bp, Homo sapiens
ccaaatctatggtat

SEQ ID NO: 480236 - DNA, 15 bp, Homo sapiens
accaaatctatggta

SEQ ID NO: 480237 - DNA, 15 bp, Homo sapiens
taccaaatctatggt

SEQ ID NO: 480238 - DNA, 15 bp, Homo sapiens
ctaccaaatctatgg

SEQ ID NO: 480239 - DNA, 15 bp, Homo sapiens
actaccaaatctatg

SEQ ID NO: 480240 - DNA, 15 bp, Homo sapiens
aactaccaaatctat

SEQ ID NO: 480241 - DNA, 15 bp, Homo sapiens
aaactaccaaatcta

SEQ ID NO: 480242 - DNA, 15 bp, Homo sapiens
taaactaccaaatct

SEQ ID NO: 480243 - DNA, 15 bp, Homo sapiens
ataaactaccaaatc

SEQ ID NO: 480244 - DNA, 15 bp, Homo sapiens
tataaactaccaaat

SEQ ID NO: 480245 - DNA, 15 bp, Homo sapiens
ttataaactaccaaa

SEQ ID NO: 480246 - DNA, 15 bp, Homo sapiens
tttataaactaccaa

SEQ ID NO: 480247 - DNA, 15 bp, Homo sapiens
gtttataaactacca

SEQ ID NO: 480248 - DNA, 15 bp, Homo sapiens
tgtttataaactacc

SEQ ID NO: 480249 - DNA, 15 bp, Homo sapiens
ttgtttataaactac

SEQ ID NO: 480250 - DNA, 15 bp, Homo sapiens
gttgtttataaacta

SEQ ID NO: 480251 - DNA, 15 bp, Homo sapiens
tgttgtttataaact

SEQ ID NO: 480252 - DNA, 15 bp, Homo sapiens
ctgttgtttataaac

SEQ ID NO: 480253 - DNA, 15 bp, Homo sapiens
tctgttgtttataaa

SEQ ID NO: 480254 - DNA, 15 bp, Homo sapiens
ttctgttgtttataa

SEQ ID NO: 480255 - DNA, 15 bp, Homo sapiens
tttctgttgtttata

SEQ ID NO: 480256 - DNA, 15 bp, Homo sapiens
gtttctgttgtttat

SEQ ID NO: 480257 - DNA, 15 bp, Homo sapiens
agtttctgttgttta

SEQ ID NO: 480258 - DNA, 15 bp, Homo sapiens
aagtttctgttgttt

SEQ ID NO: 480259 - DNA, 15 bp, Homo sapiens
taagtttctgttgtt

SEQ ID NO: 480260 - DNA, 15 bp, Homo sapiens
gtaagtttctgttgt

SEQ ID NO: 480261 - DNA, 15 bp, Homo sapiens
agtaagtttctgttg

SEQ ID NO: 480262 - DNA, 15 bp, Homo sapiens
aagtaagtttctgtt

SEQ ID NO: 480263 - DNA, 15 bp, Homo sapiens
gaagtaagtttctgt

SEQ ID NO: 480264 - DNA, 15 bp, Homo sapiens
agaagtaagtttctg

SEQ ID NO: 480265 - DNA, 15 bp, Homo sapiens
gagaagtaagtttct

SEQ ID NO: 480266 - DNA, 15 bp, Homo sapiens
tgagaagtaagtttc

SEQ ID NO: 480267 - DNA, 15 bp, Homo sapiens
gtgagaagtaagttt

SEQ ID NO: 480268 - DNA, 15 bp, Homo sapiens
tgtgagaagtaagtt

SEQ ID NO: 480269 - DNA, 15 bp, Homo sapiens
ttgtgagaagtaagt

SEQ ID NO: 480270 - DNA, 15 bp, Homo sapiens
attgtgagaagtaag

SEQ ID NO: 480271 - DNA, 15 bp, Homo sapiens
aattgtgagaagtaa

SEQ ID NO: 480272 - DNA, 15 bp, Homo sapiens
gaattgtgagaagta

SEQ ID NO: 480273 - DNA, 15 bp, Homo sapiens
agaattgtgagaagt

SEQ ID NO: 480274 - DNA, 15 bp, Homo sapiens
tagaattgtgagaag

SEQ ID NO: 480275 - DNA, 15 bp, Homo sapiens
ttagaattgtgagaa

SEQ ID NO: 480276 - DNA, 15 bp, Homo sapiens
tttagaattgtgaga

SEQ ID NO: 480277 - DNA, 15 bp, Homo sapiens
ctttagaattgtgag

SEQ ID NO: 480278 - DNA, 15 bp, Homo sapiens
actttagaattgtga

SEQ ID NO: 480279 - DNA, 15 bp, Homo sapiens
gactttagaattgtg

SEQ ID NO: 480280 - DNA, 15 bp, Homo sapiens
agactttagaattgt

SEQ ID NO: 480281 - DNA, 15 bp, Homo sapiens
cagactttagaattg

SEQ ID NO: 480282 - DNA, 15 bp, Homo sapiens
ccagactttagaatt

SEQ ID NO: 480283 - DNA, 15 bp, Homo sapiens
cccagactttagaat

SEQ ID NO: 480284 - DNA, 15 bp, Homo sapiens
tcccagactttagaa

SEQ ID NO: 480285 - DNA, 15 bp, Homo sapiens
ttcccagactttaga

SEQ ID NO: 480286 - DNA, 15 bp, Homo sapiens
tttcccagactttag

SEQ ID NO: 480287 - DNA, 15 bp, Homo sapiens
atttcccagacttta

SEQ ID NO: 480288 - DNA, 15 bp, Homo sapiens
gatttcccagacttt

SEQ ID NO: 480289 - DNA, 15 bp, Homo sapiens
ggatttcccagactt

SEQ ID NO: 480290 - DNA, 15 bp, Homo sapiens
tggatttcccagact

SEQ ID NO: 480291 - DNA, 15 bp, Homo sapiens
ttggatttcccagac

SEQ ID NO: 480292 - DNA, 15 bp, Homo sapiens
cttggatttcccaga

SEQ ID NO: 480293 - DNA, 15 bp, Homo sapiens
tcttggatttcccag

SEQ ID NO: 480294 - DNA, 15 bp, Homo sapiens
ttcttggatttccca

SEQ ID NO: 480295 - DNA, 15 bp, Homo sapiens
attcttggatttccc

SEQ ID NO: 480296 - DNA, 15 bp, Homo sapiens
tattcttggatttcc

SEQ ID NO: 480297 - DNA, 15 bp, Homo sapiens
ttattcttggatttc

SEQ ID NO: 480298 - DNA, 15 bp, Homo sapiens
gttattcttggattt

SEQ ID NO: 480299 - DNA, 15 bp, Homo sapiens
tgttattcttggatt

SEQ ID NO: 480300 - DNA, 15 bp, Homo sapiens
atgttattcttggat

SEQ ID NO: 480301 - DNA, 15 bp, Homo sapiens
aatgttattcttgga

SEQ ID NO: 480302 - DNA, 15 bp, Homo sapiens
gaatgttattcttgg

SEQ ID NO: 480303 - DNA, 15 bp, Homo sapiens
ggaatgttattcttg

SEQ ID NO: 480304 - DNA, 15 bp, Homo sapiens
aggaatgttattctt

SEQ ID NO: 480305 - DNA, 15 bp, Homo sapiens
aaggaatgttattct

SEQ ID NO: 480306 - DNA, 15 bp, Homo sapiens
aaaggaatgttattc

SEQ ID NO: 480307 - DNA, 15 bp, Homo sapiens
taaaggaatgttatt

SEQ ID NO: 480308 - DNA, 15 bp, Homo sapiens
ttaaaggaatgttat

SEQ ID NO: 480309 - DNA, 15 bp, Homo sapiens
cttaaaggaatgtta

SEQ ID NO: 480310 - DNA, 15 bp, Homo sapiens
gcttaaaggaatgtt

SEQ ID NO: 480311 - DNA, 15 bp, Homo sapiens
tgcttaaaggaatgt

SEQ ID NO: 480312 - DNA, 15 bp, Homo sapiens
ttgcttaaaggaatg

SEQ ID NO: 480313 - DNA, 15 bp, Homo sapiens
cttgcttaaaggaat

SEQ ID NO: 480314 - DNA, 15 bp, Homo sapiens
ccttgcttaaaggaa

SEQ ID NO: 480315 - DNA, 15 bp, Homo sapiens
accttgcttaaagga

SEQ ID NO: 480316 - DNA, 15 bp, Homo sapiens
aaccttgcttaaagg

SEQ ID NO: 480317 - DNA, 15 bp, Homo sapiens
caaccttgcttaaag

SEQ ID NO: 480318 - DNA, 15 bp, Homo sapiens
tcaaccttgcttaaa

SEQ ID NO: 480319 - DNA, 15 bp, Homo sapiens
ttcaaccttgcttaa

SEQ ID NO: 480320 - DNA, 15 bp, Homo sapiens
attcaaccttgctta

SEQ ID NO: 480321 - DNA, 15 bp, Homo sapiens
cattcaaccttgctt

SEQ ID NO: 480322 - DNA, 15 bp, Homo sapiens
acattcaaccttgct

SEQ ID NO: 480323 - DNA, 15 bp, Homo sapiens
tacattcaaccttgc

SEQ ID NO: 480324 - DNA, 15 bp, Homo sapiens
gtacattcaaccttg

SEQ ID NO: 480325 - DNA, 15 bp, Homo sapiens
ggtacattcaacctt

SEQ ID NO: 480326 - DNA, 15 bp, Homo sapiens
tggtacattcaacct

SEQ ID NO: 480327 - DNA, 15 bp, Homo sapiens
ctggtacattcaacc

SEQ ID NO: 480328 - DNA, 15 bp, Homo sapiens
gctggtacattcaac

SEQ ID NO: 480329 - DNA, 15 bp, Homo sapiens
agctggtacattcaa

SEQ ID NO: 480330 - DNA, 15 bp, Homo sapiens
aagctggtacattca

SEQ ID NO: 480331 - DNA, 15 bp, Homo sapiens
caagctggtacattc

SEQ ID NO: 480332 - DNA, 15 bp, Homo sapiens
ccaagctggtacatt

SEQ ID NO: 480333 - DNA, 15 bp, Homo sapiens
cccaagctggtacat

SEQ ID NO: 480334 - DNA, 15 bp, Homo sapiens
gcccaagctggtaca

SEQ ID NO: 480335 - DNA, 15 bp, Homo sapiens
cgcccaagctggtac

SEQ ID NO: 480336 - DNA, 15 bp, Homo sapiens
tcgcccaagctggta

SEQ ID NO: 480337 - DNA, 15 bp, Homo sapiens
atcgcccaagctggt

SEQ ID NO: 480338 - DNA, 15 bp, Homo sapiens
tatcgcccaagctgg

SEQ ID NO: 480339 - DNA, 15 bp, Homo sapiens
ctatcgcccaagctg

SEQ ID NO: 480340 - DNA, 15 bp, Homo sapiens
actatcgcccaagct

SEQ ID NO: 480341 - DNA, 15 bp, Homo sapiens
cactatcgcccaagc

SEQ ID NO: 480342 - DNA, 15 bp, Homo sapiens
ccactatcgcccaag

SEQ ID NO: 480343 - DNA, 15 bp, Homo sapiens
gccactatcgcccaa

SEQ ID NO: 480344 - DNA, 15 bp, Homo sapiens
tgccactatcgccca

SEQ ID NO: 480345 - DNA, 15 bp, Homo sapiens
ttgccactatcgccc

SEQ ID NO: 480346 - DNA, 15 bp, Homo sapiens
cttgccactatcgcc

SEQ ID NO: 480347 - DNA, 15 bp, Homo sapiens
acttgccactatcgc

SEQ ID NO: 480348 - DNA, 15 bp, Homo sapiens
tacttgccactatcg

SEQ ID NO: 480349 - DNA, 15 bp, Homo sapiens
ctacttgccactatc

SEQ ID NO: 480350 - DNA, 15 bp, Homo sapiens
gctacttgccactat

SEQ ID NO: 480351 - DNA, 15 bp, Homo sapiens
ggctacttgccacta

SEQ ID NO: 480352 - DNA, 15 bp, Homo sapiens
aggctacttgccact

SEQ ID NO: 480353 - DNA, 15 bp, Homo sapiens
gaggctacttgccac

SEQ ID NO: 480354 - DNA, 15 bp, Homo sapiens
ggaggctacttgcca

SEQ ID NO: 480355 - DNA, 15 bp, Homo sapiens
aggaggctacttgcc

SEQ ID NO: 480356 - DNA, 15 bp, Homo sapiens
taggaggctacttgc

SEQ ID NO: 480357 - DNA, 15 bp, Homo sapiens
ataggaggctacttg

SEQ ID NO: 480358 - DNA, 15 bp, Homo sapiens
aataggaggctactt

SEQ ID NO: 480359 - DNA, 15 bp, Homo sapiens
gaataggaggctact

SEQ ID NO: 480360 - DNA, 15 bp, Homo sapiens
ggaataggaggctac

SEQ ID NO: 480361 - DNA, 15 bp, Homo sapiens
tggaataggaggcta

SEQ ID NO: 480362 - DNA, 15 bp, Homo sapiens
atggaataggaggct

SEQ ID NO: 480363 - DNA, 15 bp, Homo sapiens
aatggaataggaggc

SEQ ID NO: 480364 - DNA, 15 bp, Homo sapiens
aaatggaataggagg

SEQ ID NO: 480365 - DNA, 15 bp, Homo sapiens
aaaatggaataggag

SEQ ID NO: 480366 - DNA, 15 bp, Homo sapiens
caaaatggaatagga

SEQ ID NO: 480367 - DNA, 15 bp, Homo sapiens
acaaaatggaatagg

SEQ ID NO: 480368 - DNA, 15 bp, Homo sapiens
aacaaaatggaatag

SEQ ID NO: 480369 - DNA, 15 bp, Homo sapiens
gaacaaaatggaata

SEQ ID NO: 480370 - DNA, 15 bp, Homo sapiens
agaacaaaatggaat

SEQ ID NO: 480371 - DNA, 15 bp, Homo sapiens
tagaacaaaatggaa

SEQ ID NO: 480372 - DNA, 15 bp, Homo sapiens
ctagaacaaaatgga

SEQ ID NO: 480373 - DNA, 15 bp, Homo sapiens
tctagaacaaaatgg

SEQ ID NO: 480374 - DNA, 15 bp, Homo sapiens
ttctagaacaaaatg

SEQ ID NO: 480375 - DNA, 15 bp, Homo sapiens
tttctagaacaaaat

SEQ ID NO: 480376 - DNA, 15 bp, Homo sapiens
ctttctagaacaaaa

SEQ ID NO: 480377 - DNA, 15 bp, Homo sapiens
gctttctagaacaaa

SEQ ID NO: 480378 - DNA, 15 bp, Homo sapiens
tgctttctagaacaa

SEQ ID NO: 480379 - DNA, 15 bp, Homo sapiens
atgctttctagaaca

SEQ ID NO: 480380 - DNA, 15 bp, Homo sapiens
aatgctttctagaac

SEQ ID NO: 480381 - DNA, 15 bp, Homo sapiens
aaatgctttctagaa

SEQ ID NO: 480382 - DNA, 15 bp, Homo sapiens
aaaatgctttctaga

SEQ ID NO: 480383 - DNA, 15 bp, Homo sapiens
aaaaatgctttctag

SEQ ID NO: 480384 - DNA, 15 bp, Homo sapiens
aaaaaatgctttcta

SEQ ID NO: 480385 - DNA, 15 bp, Homo sapiens
gaaaaaatgctttct

SEQ ID NO: 480386 - DNA, 15 bp, Homo sapiens
agaaaaaatgctttc

SEQ ID NO: 480387 - DNA, 15 bp, Homo sapiens
gagaaaaaatgcttt

SEQ ID NO: 480388 - DNA, 15 bp, Homo sapiens
agagaaaaaatgctt

SEQ ID NO: 480389 - DNA, 15 bp, Homo sapiens
aagagaaaaaatgct

SEQ ID NO: 480390 - DNA, 15 bp, Homo sapiens
aaagagaaaaaatgc

SEQ ID NO: 480391 - DNA, 15 bp, Homo sapiens
aaaagagaaaaaatg

SEQ ID NO: 480392 - DNA, 15 bp, Homo sapiens
gaaaagagaaaaaat

SEQ ID NO: 480393 - DNA, 15 bp, Homo sapiens
agaaaagagaaaaaa

SEQ ID NO: 480394 - DNA, 15 bp, Homo sapiens
tagaaaagagaaaaa

SEQ ID NO: 480395 - DNA, 15 bp, Homo sapiens
atagaaaagagaaaa

SEQ ID NO: 480396 - DNA, 15 bp, Homo sapiens
aatagaaaagagaaa

SEQ ID NO: 480397 - DNA, 15 bp, Homo sapiens
taatagaaaagagaa

SEQ ID NO: 480398 - DNA, 15 bp, Homo sapiens
ataatagaaaagaga

SEQ ID NO: 480399 - DNA, 15 bp, Homo sapiens
aataatagaaaagag

SEQ ID NO: 480400 - DNA, 15 bp, Homo sapiens
aaataatagaaaaga

SEQ ID NO: 480401 - DNA, 15 bp, Homo sapiens
aaaataatagaaaag

SEQ ID NO: 480402 - DNA, 15 bp, Homo sapiens
aaaaataatagaaaa

SEQ ID NO: 480403 - DNA, 15 bp, Homo sapiens
caaaaataatagaaa

SEQ ID NO: 480404 - DNA, 15 bp, Homo sapiens
acaaaaataatagaa

SEQ ID NO: 480405 - DNA, 15 bp, Homo sapiens
gacaaaaataataga

SEQ ID NO: 480406 - DNA, 15 bp, Homo sapiens
agacaaaaataatag

SEQ ID NO: 480407 - DNA, 15 bp, Homo sapiens
gagacaaaaataata

SEQ ID NO: 480408 - DNA, 15 bp, Homo sapiens
agagacaaaaataat

SEQ ID NO: 480409 - DNA, 15 bp, Homo sapiens
aagagacaaaaataa

SEQ ID NO: 480410 - DNA, 15 bp, Homo sapiens
aaagagacaaaaata

SEQ ID NO: 480411 - DNA, 15 bp, Homo sapiens
taaagagacaaaaat

SEQ ID NO: 480412 - DNA, 15 bp, Homo sapiens
ataaagagacaaaaa

SEQ ID NO: 480413 - DNA, 15 bp, Homo sapiens
tataaagagacaaaa

SEQ ID NO: 480414 - DNA, 15 bp, Homo sapiens
atataaagagacaaa

SEQ ID NO: 480415 - DNA, 15 bp, Homo sapiens
catataaagagacaa

SEQ ID NO: 480416 - DNA, 15 bp, Homo sapiens
acatataaagagaca

SEQ ID NO: 480417 - DNA, 15 bp, Homo sapiens
aacatataaagagac

SEQ ID NO: 480418 - DNA, 15 bp, Homo sapiens
aaacatataaagaga

SEQ ID NO: 480419 - DNA, 15 bp, Homo sapiens
taaacatataaagag

SEQ ID NO: 480420 - DNA, 15 bp, Homo sapiens
ataaacatataaaga

SEQ ID NO: 480421 - DNA, 15 bp, Homo sapiens
cataaacatataaag

SEQ ID NO: 480422 - DNA, 15 bp, Homo sapiens
acataaacatataaa

SEQ ID NO: 480423 - DNA, 15 bp, Homo sapiens
cacataaacatataa

SEQ ID NO: 480424 - DNA, 15 bp, Homo sapiens
acacataaacatata

SEQ ID NO: 480425 - DNA, 15 bp, Homo sapiens
aacacataaacatat

SEQ ID NO: 480426 - DNA, 15 bp, Homo sapiens
taacacataaacata

SEQ ID NO: 480427 - DNA, 15 bp, Homo sapiens
ctaacacataaacat

SEQ ID NO: 480428 - DNA, 15 bp, Homo sapiens
cctaacacataaaca

SEQ ID NO: 480429 - DNA, 15 bp, Homo sapiens
ccctaacacataaac

SEQ ID NO: 480430 - DNA, 15 bp, Homo sapiens
cccctaacacataaa

SEQ ID NO: 480431 - DNA, 15 bp, Homo sapiens
ccccctaacacataa

SEQ ID NO: 480432 - DNA, 15 bp, Homo sapiens
tccccctaacacata

SEQ ID NO: 480433 - DNA, 15 bp, Homo sapiens
ctccccctaacacat

SEQ ID NO: 480434 - DNA, 15 bp, Homo sapiens
tctccccctaacaca

SEQ ID NO: 480435 - DNA, 15 bp, Homo sapiens
ttctccccctaacac

SEQ ID NO: 480436 - DNA, 15 bp, Homo sapiens
cttctccccctaaca

SEQ ID NO: 480437 - DNA, 15 bp, Homo sapiens
ccttctccccctaac

SEQ ID NO: 480438 - DNA, 15 bp, Homo sapiens
tccttctccccctaa

SEQ ID NO: 480439 - DNA, 15 bp, Homo sapiens
ctccttctcccccta

SEQ ID NO: 480440 - DNA, 15 bp, Homo sapiens
tctccttctccccct

SEQ ID NO: 480441 - DNA, 15 bp, Homo sapiens
ctctccttctccccc

SEQ ID NO: 480442 - DNA, 15 bp, Homo sapiens
tctctccttctcccc

SEQ ID NO: 480443 - DNA, 15 bp, Homo sapiens
ctctctccttctccc

SEQ ID NO: 480444 - DNA, 15 bp, Homo sapiens
tctctctccttctcc

SEQ ID NO: 480445 - DNA, 15 bp, Homo sapiens
ttctctctccttctc

SEQ ID NO: 480446 - DNA, 15 bp, Homo sapiens
attctctctccttct

SEQ ID NO: 480447 - DNA, 15 bp, Homo sapiens
tattctctctccttc

SEQ ID NO: 480448 - DNA, 15 bp, Homo sapiens
atattctctctcctt

SEQ ID NO: 480449 - DNA, 15 bp, Homo sapiens
aatattctctctcct

SEQ ID NO: 480450 - DNA, 15 bp, Homo sapiens
aaatattctctctcc

SEQ ID NO: 480451 - DNA, 15 bp, Homo sapiens
aaaatattctctctc

SEQ ID NO: 480452 - DNA, 15 bp, Homo sapiens
aaaaatattctctct

SEQ ID NO: 480453 - DNA, 15 bp, Homo sapiens
taaaaatattctctc

SEQ ID NO: 480454 - DNA, 15 bp, Homo sapiens
ataaaaatattctct

SEQ ID NO: 480455 - DNA, 15 bp, Homo sapiens
tataaaaatattctc

SEQ ID NO: 480456 - DNA, 15 bp, Homo sapiens
atataaaaatattct

SEQ ID NO: 480457 - DNA, 15 bp, Homo sapiens
aatataaaaatattc

SEQ ID NO: 480458 - DNA, 15 bp, Homo sapiens
aaatataaaaatatt

SEQ ID NO: 480459 - DNA, 15 bp, Homo sapiens
aaaatataaaaatat

SEQ ID NO: 480460 - DNA, 15 bp, Homo sapiens
aaaaatataaaaata

SEQ ID NO: 480461 - DNA, 15 bp, Homo sapiens
gaaaaatataaaaat

SEQ ID NO: 480462 - DNA, 15 bp, Homo sapiens
agaaaaatataaaaa

SEQ ID NO: 480463 - DNA, 15 bp, Homo sapiens
aagaaaaatataaaa

SEQ ID NO: 480464 - DNA, 15 bp, Homo sapiens
aaagaaaaatataaa

SEQ ID NO: 480465 - DNA, 15 bp, Homo sapiens
aaaagaaaaatataa

SEQ ID NO: 480466 - DNA, 15 bp, Homo sapiens
caaaagaaaaatata

SEQ ID NO: 480467 - DNA, 15 bp, Homo sapiens
ccaaaagaaaaatat

SEQ ID NO: 480468 - DNA, 15 bp, Homo sapiens
cccaaaagaaaaata

SEQ ID NO: 480469 - DNA, 15 bp, Homo sapiens
ccccaaaagaaaaat

SEQ ID NO: 480470 - DNA, 15 bp, Homo sapiens
cccccaaaagaaaaa

SEQ ID NO: 480471 - DNA, 15 bp, Homo sapiens
ccccccaaaagaaaa

SEQ ID NO: 480472 - DNA, 15 bp, Homo sapiens
tccccccaaaagaaa

SEQ ID NO: 480473 - DNA, 15 bp, Homo sapiens
atccccccaaaagaa

SEQ ID NO: 480474 - DNA, 15 bp, Homo sapiens
tatccccccaaaaga

SEQ ID NO: 480475 - DNA, 15 bp, Homo sapiens
atatccccccaaaag

SEQ ID NO: 480476 - DNA, 15 bp, Homo sapiens
aatatccccccaaaa

SEQ ID NO: 480477 - DNA, 15 bp, Homo sapiens
aaatatccccccaaa

SEQ ID NO: 480478 - DNA, 15 bp, Homo sapiens
aaaatatccccccaa

SEQ ID NO: 480479 - DNA, 15 bp, Homo sapiens
aaaaatatcccccca

SEQ ID NO: 480480 - DNA, 15 bp, Homo sapiens
taaaaatatcccccc

SEQ ID NO: 480481 - DNA, 15 bp, Homo sapiens
ataaaaatatccccc

SEQ ID NO: 480482 - DNA, 15 bp, Homo sapiens
aataaaaatatcccc

SEQ ID NO: 480483 - DNA, 15 bp, Homo sapiens
aaataaaaatatccc

SEQ ID NO: 480484 - DNA, 15 bp, Homo sapiens
aaaataaaaatatcc

SEQ ID NO: 480485 - DNA, 15 bp, Homo sapiens
aaaaataaaaatatc

SEQ ID NO: 480486 - DNA, 15 bp, Homo sapiens
taaaaataaaaatat

SEQ ID NO: 480487 - DNA, 15 bp, Homo sapiens
ttaaaaataaaaata

SEQ ID NO: 480488 - DNA, 15 bp, Homo sapiens
tttaaaaataaaaat

SEQ ID NO: 480489 - DNA, 15 bp, Homo sapiens
atttaaaaataaaaa

SEQ ID NO: 480490 - DNA, 15 bp, Homo sapiens
aatttaaaaataaaa

SEQ ID NO: 480491 - DNA, 15 bp, Homo sapiens
taatttaaaaataaa

SEQ ID NO: 480492 - DNA, 15 bp, Homo sapiens
ataatttaaaaataa

SEQ ID NO: 480493 - DNA, 15 bp, Homo sapiens
tataatttaaaaata

SEQ ID NO: 480494 - DNA, 15 bp, Homo sapiens
ttataatttaaaaat

SEQ ID NO: 480495 - DNA, 15 bp, Homo sapiens
tttataatttaaaaa

SEQ ID NO: 480496 - DNA, 15 bp, Homo sapiens
atttataatttaaaa

SEQ ID NO: 480497 - DNA, 15 bp, Homo sapiens
tatttataatttaaa

SEQ ID NO: 480498 - DNA, 15 bp, Homo sapiens
gtatttataatttaa

SEQ ID NO: 480499 - DNA, 15 bp, Homo sapiens
agtatttataattta

SEQ ID NO: 480500 - DNA, 15 bp, Homo sapiens
aagtatttataattt

SEQ ID NO: 480501 - DNA, 15 bp, Homo sapiens
gaagtatttataatt

SEQ ID NO: 480502 - DNA, 15 bp, Homo sapiens
agaagtatttataat

SEQ ID NO: 480503 - DNA, 15 bp, Homo sapiens
tagaagtatttataa

SEQ ID NO: 480504 - DNA, 15 bp, Homo sapiens
ttagaagtatttata

SEQ ID NO: 480505 - DNA, 15 bp, Homo sapiens
attagaagtatttat

SEQ ID NO: 480506 - DNA, 15 bp, Homo sapiens
aattagaagtattta

SEQ ID NO: 480507 - DNA, 15 bp, Homo sapiens
aaattagaagtattt

SEQ ID NO: 480508 - DNA, 15 bp, Homo sapiens
caaattagaagtatt

SEQ ID NO: 480509 - DNA, 15 bp, Homo sapiens
gcaaattagaagtat

SEQ ID NO: 480510 - DNA, 15 bp, Homo sapiens
tgcaaattagaagta

SEQ ID NO: 480511 - DNA, 15 bp, Homo sapiens
ttgcaaattagaagt

SEQ ID NO: 480512 - DNA, 15 bp, Homo sapiens
tttgcaaattagaag

SEQ ID NO: 480513 - DNA, 15 bp, Homo sapiens
ctttgcaaattagaa

SEQ ID NO: 480514 - DNA, 15 bp, Homo sapiens
cctttgcaaattaga

SEQ ID NO: 480515 - DNA, 15 bp, Homo sapiens
tcctttgcaaattag

SEQ ID NO: 480516 - DNA, 15 bp, Homo sapiens
atcctttgcaaatta

SEQ ID NO: 480517 - DNA, 15 bp, Homo sapiens
gatcctttgcaaatt

SEQ ID NO: 480518 - DNA, 15 bp, Homo sapiens
ggatcctttgcaaat

SEQ ID NO: 480519 - DNA, 15 bp, Homo sapiens
gggatcctttgcaaa

SEQ ID NO: 480520 - DNA, 15 bp, Homo sapiens
tgggatcctttgcaa

SEQ ID NO: 480521 - DNA, 15 bp, Homo sapiens
ctgggatcctttgca

SEQ ID NO: 480522 - DNA, 15 bp, Homo sapiens
tctgggatcctttgc

SEQ ID NO: 480523 - DNA, 15 bp, Homo sapiens
ttctgggatcctttg

SEQ ID NO: 480524 - DNA, 15 bp, Homo sapiens
tttctgggatccttt

SEQ ID NO: 480525 - DNA, 15 bp, Homo sapiens
atttctgggatcctt

SEQ ID NO: 480526 - DNA, 15 bp, Homo sapiens
tatttctgggatcct

SEQ ID NO: 480527 - DNA, 15 bp, Homo sapiens
ctatttctgggatcc

SEQ ID NO: 480528 - DNA, 15 bp, Homo sapiens
actatttctgggatc

SEQ ID NO: 480529 - DNA, 15 bp, Homo sapiens
aactatttctgggat

SEQ ID NO: 480530 - DNA, 15 bp, Homo sapiens
caactatttctggga

SEQ ID NO: 480531 - DNA, 15 bp, Homo sapiens
tcaactatttctggg

SEQ ID NO: 480532 - DNA, 15 bp, Homo sapiens
ttcaactatttctgg

SEQ ID NO: 480533 - DNA, 15 bp, Homo sapiens
cttcaactatttctg

SEQ ID NO: 480534 - DNA, 15 bp, Homo sapiens
gcttcaactatttct

SEQ ID NO: 480535 - DNA, 15 bp, Homo sapiens
agcttcaactatttc

SEQ ID NO: 480536 - DNA, 15 bp, Homo sapiens
cagcttcaactattt

SEQ ID NO: 480537 - DNA, 15 bp, Homo sapiens
acagcttcaactatt

SEQ ID NO: 480538 - DNA, 15 bp, Homo sapiens
gacagcttcaactat

SEQ ID NO: 480539 - DNA, 15 bp, Homo sapiens
agacagcttcaacta

SEQ ID NO: 480540 - DNA, 15 bp, Homo sapiens
aagacagcttcaact

SEQ ID NO: 480541 - DNA, 15 bp, Homo sapiens
aaagacagcttcaac

SEQ ID NO: 480542 - DNA, 15 bp, Homo sapiens
taaagacagcttcaa

SEQ ID NO: 480543 - DNA, 15 bp, Homo sapiens
ttaaagacagcttca

SEQ ID NO: 480544 - DNA, 15 bp, Homo sapiens
tttaaagacagcttc

SEQ ID NO: 480545 - DNA, 15 bp, Homo sapiens
gtttaaagacagctt

SEQ ID NO: 480546 - DNA, 15 bp, Homo sapiens
ggtttaaagacagct

SEQ ID NO: 480547 - DNA, 15 bp, Homo sapiens
gggtttaaagacagc

SEQ ID NO: 480548 - DNA, 15 bp, Homo sapiens
ggggtttaaagacag

SEQ ID NO: 480549 - DNA, 15 bp, Homo sapiens
aggggtttaaagaca

SEQ ID NO: 480550 - DNA, 15 bp, Homo sapiens
gaggggtttaaagac

SEQ ID NO: 480551 - DNA, 15 bp, Homo sapiens
agaggggtttaaaga

SEQ ID NO: 480552 - DNA, 15 bp, Homo sapiens
gagaggggtttaaag

SEQ ID NO: 480553 - DNA, 15 bp, Homo sapiens
agagaggggtttaaa

SEQ ID NO: 480554 - DNA, 15 bp, Homo sapiens
cagagaggggtttaa

SEQ ID NO: 480555 - DNA, 15 bp, Homo sapiens
tcagagaggggttta

SEQ ID NO: 480556 - DNA, 15 bp, Homo sapiens
atcagagaggggttt

SEQ ID NO: 480557 - DNA, 15 bp, Homo sapiens
gatcagagaggggtt

SEQ ID NO: 480558 - DNA, 15 bp, Homo sapiens
ggatcagagaggggt

SEQ ID NO: 480559 - DNA, 15 bp, Homo sapiens
gggatcagagagggg

SEQ ID NO: 480560 - DNA, 15 bp, Homo sapiens
tgggatcagagaggg

SEQ ID NO: 480561 - DNA, 15 bp, Homo sapiens
atgggatcagagagg

SEQ ID NO: 480562 - DNA, 15 bp, Homo sapiens
aatgggatcagagag

SEQ ID NO: 480563 - DNA, 15 bp, Homo sapiens
gaatgggatcagaga

SEQ ID NO: 480564 - DNA, 15 bp, Homo sapiens
agaatgggatcagag

SEQ ID NO: 480565 - DNA, 15 bp, Homo sapiens
tagaatgggatcaga

SEQ ID NO: 480566 - DNA, 15 bp, Homo sapiens
atagaatgggatcag

SEQ ID NO: 480567 - DNA, 15 bp, Homo sapiens
gatagaatgggatca

SEQ ID NO: 480568 - DNA, 15 bp, Homo sapiens
ggatagaatgggatc

SEQ ID NO: 480569 - DNA, 15 bp, Homo sapiens
aggatagaatgggat

SEQ ID NO: 480570 - DNA, 15 bp, Homo sapiens
aaggatagaatggga

SEQ ID NO: 480571 - DNA, 15 bp, Homo sapiens
aaaggatagaatggg

SEQ ID NO: 480572 - DNA, 15 bp, Homo sapiens
gaaaggatagaatgg

SEQ ID NO: 480573 - DNA, 15 bp, Homo sapiens
agaaaggatagaatg

SEQ ID NO: 480574 - DNA, 15 bp, Homo sapiens
cagaaaggatagaat

SEQ ID NO: 480575 - DNA, 15 bp, Homo sapiens
acagaaaggatagaa

SEQ ID NO: 480576 - DNA, 15 bp, Homo sapiens
aacagaaaggataga

SEQ ID NO: 480577 - DNA, 15 bp, Homo sapiens
taacagaaaggatag

SEQ ID NO: 480578 - DNA, 15 bp, Homo sapiens
ttaacagaaaggata

SEQ ID NO: 480579 - DNA, 15 bp, Homo sapiens
gttaacagaaaggat

SEQ ID NO: 480580 - DNA, 15 bp, Homo sapiens
agttaacagaaagga

SEQ ID NO: 480581 - DNA, 15 bp, Homo sapiens
tagttaacagaaagg

SEQ ID NO: 480582 - DNA, 15 bp, Homo sapiens
gtagttaacagaaag

SEQ ID NO: 480583 - DNA, 15 bp, Homo sapiens
agtagttaacagaaa

SEQ ID NO: 480584 - DNA, 15 bp, Homo sapiens
tagtagttaacagaa

SEQ ID NO: 480585 - DNA, 15 bp, Homo sapiens
atagtagttaacaga

SEQ ID NO: 480586 - DNA, 15 bp, Homo sapiens
aatagtagttaacag

SEQ ID NO: 480587 - DNA, 15 bp, Homo sapiens
gaatagtagttaaca

SEQ ID NO: 480588 - DNA, 15 bp, Homo sapiens
agaatagtagttaac

SEQ ID NO: 480589 - DNA, 15 bp, Homo sapiens
cagaatagtagttaa

SEQ ID NO: 480590 - DNA, 15 bp, Homo sapiens
tcagaatagtagtta

SEQ ID NO: 480591 - DNA, 15 bp, Homo sapiens
ttcagaatagtagtt

SEQ ID NO: 480592 - DNA, 15 bp, Homo sapiens
cttcagaatagtagt

SEQ ID NO: 480593 - DNA, 15 bp, Homo sapiens
acttcagaatagtag

SEQ ID NO: 480594 - DNA, 15 bp, Homo sapiens
aacttcagaatagta

SEQ ID NO: 480595 - DNA, 15 bp, Homo sapiens
taacttcagaatagt

SEQ ID NO: 480596 - DNA, 15 bp, Homo sapiens
ttaacttcagaatag

SEQ ID NO: 480597 - DNA, 15 bp, Homo sapiens
attaacttcagaata

SEQ ID NO: 480598 - DNA, 15 bp, Homo sapiens
aattaacttcagaat

SEQ ID NO: 480599 - DNA, 15 bp, Homo sapiens
aaattaacttcagaa

SEQ ID NO: 480600 - DNA, 15 bp, Homo sapiens
caaattaacttcaga

SEQ ID NO: 480601 - DNA, 15 bp, Homo sapiens
acaaattaacttcag

SEQ ID NO: 480602 - DNA, 15 bp, Homo sapiens
tacaaattaacttca

SEQ ID NO: 480603 - DNA, 15 bp, Homo sapiens
gtacaaattaacttc

SEQ ID NO: 480604 - DNA, 15 bp, Homo sapiens
agtacaaattaactt

SEQ ID NO: 480605 - DNA, 15 bp, Homo sapiens
gagtacaaattaact

SEQ ID NO: 480606 - DNA, 15 bp, Homo sapiens
agagtacaaattaac

SEQ ID NO: 480607 - DNA, 15 bp, Homo sapiens
cagagtacaaattaa

SEQ ID NO: 480608 - DNA, 15 bp, Homo sapiens
acagagtacaaatta

SEQ ID NO: 480609 - DNA, 15 bp, Homo sapiens
gacagagtacaaatt

SEQ ID NO: 480610 - DNA, 15 bp, Homo sapiens
ggacagagtacaaat

SEQ ID NO: 480611 - DNA, 15 bp, Homo sapiens
tggacagagtacaaa

SEQ ID NO: 480612 - DNA, 15 bp, Homo sapiens
atggacagagtacaa

SEQ ID NO: 480613 - DNA, 15 bp, Homo sapiens
aatggacagagtaca

SEQ ID NO: 480614 - DNA, 15 bp, Homo sapiens
aaatggacagagtac

SEQ ID NO: 480615 - DNA, 15 bp, Homo sapiens
aaaatggacagagta

SEQ ID NO: 480616 - DNA, 15 bp, Homo sapiens
aaaaatggacagagt

SEQ ID NO: 480617 - DNA, 15 bp, Homo sapiens
taaaaatggacagag

SEQ ID NO: 480618 - DNA, 15 bp, Homo sapiens
ataaaaatggacaga

SEQ ID NO: 480619 - DNA, 15 bp, Homo sapiens
gataaaaatggacag

SEQ ID NO: 480620 - DNA, 15 bp, Homo sapiens
ggataaaaatggaca

SEQ ID NO: 480621 - DNA, 15 bp, Homo sapiens
aggataaaaatggac

SEQ ID NO: 480622 - DNA, 15 bp, Homo sapiens
aaggataaaaatgga

SEQ ID NO: 480623 - DNA, 15 bp, Homo sapiens
aaaggataaaaatgg

SEQ ID NO: 480624 - DNA, 15 bp, Homo sapiens
aaaaggataaaaatg

SEQ ID NO: 480625 - DNA, 15 bp, Homo sapiens
taaaaggataaaaat

SEQ ID NO: 480626 - DNA, 15 bp, Homo sapiens
ataaaaggataaaaa

SEQ ID NO: 480627 - DNA, 15 bp, Homo sapiens
aataaaaggataaaa

SEQ ID NO: 480628 - DNA, 15 bp, Homo sapiens
taataaaaggataaa

SEQ ID NO: 480629 - DNA, 15 bp, Homo sapiens
gtaataaaaggataa

SEQ ID NO: 480630 - DNA, 15 bp, Homo sapiens
tgtaataaaaggata

SEQ ID NO: 480631 - DNA, 15 bp, Homo sapiens
atgtaataaaaggat

SEQ ID NO: 480632 - DNA, 15 bp, Homo sapiens
tatgtaataaaagga

SEQ ID NO: 480633 - DNA, 15 bp, Homo sapiens
atatgtaataaaagg

SEQ ID NO: 480634 - DNA, 15 bp, Homo sapiens
catatgtaataaaag

SEQ ID NO: 480635 - DNA, 15 bp, Homo sapiens
acatatgtaataaaa

SEQ ID NO: 480636 - DNA, 15 bp, Homo sapiens
aacatatgtaataaa

SEQ ID NO: 480637 - DNA, 15 bp, Homo sapiens
aaacatatgtaataa

SEQ ID NO: 480638 - DNA, 15 bp, Homo sapiens
caaacatatgtaata

SEQ ID NO: 480639 - DNA, 15 bp, Homo sapiens
acaaacatatgtaat

SEQ ID NO: 480640 - DNA, 15 bp, Homo sapiens
cacaaacatatgtaa

SEQ ID NO: 480641 - DNA, 15 bp, Homo sapiens
acacaaacatatgta

SEQ ID NO: 480642 - DNA, 15 bp, Homo sapiens
aacacaaacatatgt

SEQ ID NO: 480643 - DNA, 15 bp, Homo sapiens
gaacacaaacatatg

SEQ ID NO: 480644 - DNA, 15 bp, Homo sapiens
tgaacacaaacatat

SEQ ID NO: 480645 - DNA, 15 bp, Homo sapiens
atgaacacaaacata

SEQ ID NO: 480646 - DNA, 15 bp, Homo sapiens
tatgaacacaaacat

SEQ ID NO: 480647 - DNA, 15 bp, Homo sapiens
ttatgaacacaaaca

SEQ ID NO: 480648 - DNA, 15 bp, Homo sapiens
tttatgaacacaaac

SEQ ID NO: 480649 - DNA, 15 bp, Homo sapiens
ttttatgaacacaaa

SEQ ID NO: 480650 - DNA, 15 bp, Homo sapiens
tttttatgaacacaa

SEQ ID NO: 480651 - DNA, 15 bp, Homo sapiens
ttttttatgaacaca

SEQ ID NO: 480652 - DNA, 15 bp, Homo sapiens
tttttttatgaacac

SEQ ID NO: 480653 - DNA, 15 bp, Homo sapiens
atttttttatgaaca

SEQ ID NO: 480654 - DNA, 15 bp, Homo sapiens
aatttttttatgaac

SEQ ID NO: 480655 - DNA, 15 bp, Homo sapiens
taatttttttatgaa

SEQ ID NO: 480656 - DNA, 15 bp, Homo sapiens
gtaatttttttatga

SEQ ID NO: 480657 - DNA, 15 bp, Homo sapiens
tgtaatttttttatg

SEQ ID NO: 480658 - DNA, 15 bp, Homo sapiens
ctgtaatttttttat

SEQ ID NO: 480659 - DNA, 15 bp, Homo sapiens
actgtaattttttta

SEQ ID NO: 480660 - DNA, 15 bp, Homo sapiens
aactgtaattttttt

SEQ ID NO: 480661 - DNA, 15 bp, Homo sapiens
aaactgtaatttttt

SEQ ID NO: 480662 - DNA, 15 bp, Homo sapiens
taaactgtaattttt

SEQ ID NO: 480663 - DNA, 15 bp, Homo sapiens
ttaaactgtaatttt

SEQ ID NO: 480664 - DNA, 15 bp, Homo sapiens
gttaaactgtaattt

SEQ ID NO: 480665 - DNA, 15 bp, Homo sapiens
tgttaaactgtaatt

SEQ ID NO: 480666 - DNA, 15 bp, Homo sapiens
atgttaaactgtaat

SEQ ID NO: 480667 - DNA, 15 bp, Homo sapiens
aatgttaaactgtaa

SEQ ID NO: 480668 - DNA, 15 bp, Homo sapiens
aaatgttaaactgta

SEQ ID NO: 480669 - DNA, 15 bp, Homo sapiens
aaaatgttaaactgt

SEQ ID NO: 480670 - DNA, 15 bp, Homo sapiens
aaaaatgttaaactg

SEQ ID NO: 480671 - DNA, 15 bp, Homo sapiens
taaaaatgttaaact

SEQ ID NO: 480672 - DNA, 15 bp, Homo sapiens
gtaaaaatgttaaac

SEQ ID NO: 480673 - DNA, 15 bp, Homo sapiens
tgtaaaaatgttaaa

SEQ ID NO: 480674 - DNA, 15 bp, Homo sapiens
atgtaaaaatgttaa

SEQ ID NO: 480675 - DNA, 15 bp, Homo sapiens
tatgtaaaaatgtta

SEQ ID NO: 480676 - DNA, 15 bp, Homo sapiens
ttatgtaaaaatgtt

SEQ ID NO: 480677 - DNA, 15 bp, Homo sapiens
tttatgtaaaaatgt

SEQ ID NO: 480678 - DNA, 15 bp, Homo sapiens
ttttatgtaaaaatg

SEQ ID NO: 480679 - DNA, 15 bp, Homo sapiens
tttttatgtaaaaat

SEQ ID NO: 480680 - DNA, 15 bp, Homo sapiens
ttttttatgtaaaaa

SEQ ID NO: 480681 - DNA, 15 bp, Homo sapiens
attttttatgtaaaa

SEQ ID NO: 480682 - DNA, 15 bp, Homo sapiens
cattttttatgtaaa

SEQ ID NO: 480683 - DNA, 15 bp, Homo sapiens
acattttttatgtaa

SEQ ID NO: 480684 - DNA, 15 bp, Homo sapiens
aacattttttatgta

SEQ ID NO: 480685 - DNA, 15 bp, Homo sapiens
gaacattttttatgt

SEQ ID NO: 480686 - DNA, 15 bp, Homo sapiens
agaacattttttatg

SEQ ID NO: 480687 - DNA, 15 bp, Homo sapiens
aagaacattttttat

SEQ ID NO: 480688 - DNA, 15 bp, Homo sapiens
caagaacatttttta

SEQ ID NO: 480689 - DNA, 15 bp, Homo sapiens
acaagaacatttttt

SEQ ID NO: 480690 - DNA, 15 bp, Homo sapiens
tacaagaacattttt

SEQ ID NO: 480691 - DNA, 15 bp, Homo sapiens
ttacaagaacatttt

SEQ ID NO: 480692 - DNA, 15 bp, Homo sapiens
tttacaagaacattt

SEQ ID NO: 480693 - DNA, 15 bp, Homo sapiens
atttacaagaacatt

SEQ ID NO: 480694 - DNA, 15 bp, Homo sapiens
tatttacaagaacat

SEQ ID NO: 480695 - DNA, 15 bp, Homo sapiens
atatttacaagaaca

SEQ ID NO: 480696 - DNA, 15 bp, Homo sapiens
aatatttacaagaac

SEQ ID NO: 480697 - DNA, 15 bp, Homo sapiens
gaatatttacaagaa

SEQ ID NO: 480698 - DNA, 15 bp, Homo sapiens
agaatatttacaaga

SEQ ID NO: 480699 - DNA, 15 bp, Homo sapiens
cagaatatttacaag

SEQ ID NO: 480700 - DNA, 15 bp, Homo sapiens
gcagaatatttacaa

SEQ ID NO: 480701 - DNA, 15 bp, Homo sapiens
tgcagaatatttaca

SEQ ID NO: 480702 - DNA, 15 bp, Homo sapiens
ttgcagaatatttac

SEQ ID NO: 480703 - DNA, 15 bp, Homo sapiens
attgcagaatattta

SEQ ID NO: 480704 - DNA, 15 bp, Homo sapiens
aattgcagaatattt

SEQ ID NO: 480705 - DNA, 15 bp, Homo sapiens
aaattgcagaatatt

SEQ ID NO: 480706 - DNA, 15 bp, Homo sapiens
caaattgcagaatat

SEQ ID NO: 480707 - DNA, 15 bp, Homo sapiens
gcaaattgcagaata

SEQ ID NO: 480708 - DNA, 15 bp, Homo sapiens
agcaaattgcagaat

SEQ ID NO: 480709 - DNA, 15 bp, Homo sapiens
aagcaaattgcagaa

SEQ ID NO: 480710 - DNA, 15 bp, Homo sapiens
aaagcaaattgcaga

SEQ ID NO: 480711 - DNA, 15 bp, Homo sapiens
aaaagcaaattgcag

SEQ ID NO: 480712 - DNA, 15 bp, Homo sapiens
aaaaagcaaattgca

SEQ ID NO: 480713 - DNA, 15 bp, Homo sapiens
aaaaaagcaaattgc

SEQ ID NO: 480714 - DNA, 15 bp, Homo sapiens
taaaaaagcaaattg

SEQ ID NO: 480715 - DNA, 15 bp, Homo sapiens
ttaaaaaagcaaatt

SEQ ID NO: 480716 - DNA, 15 bp, Homo sapiens
tttaaaaaagcaaat

SEQ ID NO: 480717 - DNA, 15 bp, Homo sapiens
atttaaaaaagcaaa

SEQ ID NO: 480718 - DNA, 15 bp, Homo sapiens
aatttaaaaaagcaa

SEQ ID NO: 480719 - DNA, 15 bp, Homo sapiens
aaatttaaaaaagca

SEQ ID NO: 480720 - DNA, 15 bp, Homo sapiens
aaaatttaaaaaagc

SEQ ID NO: 480721 - DNA, 15 bp, Homo sapiens
taaaatttaaaaaag

SEQ ID NO: 480722 - DNA, 15 bp, Homo sapiens
ataaaatttaaaaaa

SEQ ID NO: 480723 - DNA, 15 bp, Homo sapiens
aataaaatttaaaaa

SEQ ID NO: 480724 - DNA, 15 bp, Homo sapiens
aaataaaatttaaaa

SEQ ID NO: 480725 - DNA, 15 bp, Homo sapiens
aaaataaaatttaaa

SEQ ID NO: 480726 - DNA, 15 bp, Homo sapiens
aaaaataaaatttaa

SEQ ID NO: 480727 - DNA, 15 bp, Homo sapiens
aaaaaataaaattta

SEQ ID NO: 480728 - DNA, 15 bp, Homo sapiens
taaaaaataaaattt

SEQ ID NO: 480729 - DNA, 15 bp, Homo sapiens
ataaaaaataaaatt

SEQ ID NO: 480730 - DNA, 15 bp, Homo sapiens
aataaaaaataaaat

SEQ ID NO: 480731 - DNA, 15 bp, Homo sapiens
aaaataaaaaataaa

SEQ ID NO: 480732 - DNA, 15 bp, Homo sapiens
aaaaataaaaaataa

SEQ ID NO: 480733 - DNA, 15 bp, Homo sapiens
taaaaataaaaaata

SEQ ID NO: 480734 - DNA, 15 bp, Homo sapiens
ttaaaaataaaaaat

SEQ ID NO: 480735 - DNA, 15 bp, Homo sapiens
attaaaaataaaaaa

SEQ ID NO: 480736 - DNA, 15 bp, Homo sapiens
aattaaaaataaaaa

SEQ ID NO: 480737 - DNA, 15 bp, Homo sapiens
aaattaaaaataaaa

SEQ ID NO: 480738 - DNA, 15 bp, Homo sapiens
aaaattaaaaataaa

SEQ ID NO: 480739 - DNA, 15 bp, Homo sapiens
aaaaattaaaaataa

SEQ ID NO: 480740 - DNA, 15 bp, Homo sapiens
aaaaaattaaaaata

SEQ ID NO: 480741 - DNA, 15 bp, Homo sapiens
aaaaaaattaaaaat

SEQ ID NO: 480742 - DNA, 15 bp, Homo sapiens
aaaaaaaattaaaaa

SEQ ID NO: 480743 - DNA, 15 bp, Homo sapiens
aaaaaaaaattaaaa

SEQ ID NO: 480744 - DNA, 15 bp, Homo sapiens
caaaaaaaaattaaa

SEQ ID NO: 480745 - DNA, 15 bp, Homo sapiens
gcaaaaaaaaattaa

SEQ ID NO: 480746 - DNA, 15 bp, Homo sapiens
tgcaaaaaaaaatta

SEQ ID NO: 480747 - DNA, 15 bp, Homo sapiens
ctgcaaaaaaaaatt

SEQ ID NO: 480748 - DNA, 15 bp, Homo sapiens
tctgcaaaaaaaaat

SEQ ID NO: 480749 - DNA, 15 bp, Homo sapiens
ctctgcaaaaaaaaa

SEQ ID NO: 480750 - DNA, 15 bp, Homo sapiens
gctctgcaaaaaaaa

SEQ ID NO: 480751 - DNA, 15 bp, Homo sapiens
ggctctgcaaaaaaa

SEQ ID NO: 480752 - DNA, 15 bp, Homo sapiens
tggctctgcaaaaaa

SEQ ID NO: 480753 - DNA, 15 bp, Homo sapiens
ctggctctgcaaaaa

SEQ ID NO: 480754 - DNA, 15 bp, Homo sapiens
cctggctctgcaaaa

SEQ ID NO: 480755 - DNA, 15 bp, Homo sapiens
ccctggctctgcaaa

SEQ ID NO: 480756 - DNA, 15 bp, Homo sapiens
gccctggctctgcaa

SEQ ID NO: 480757 - DNA, 15 bp, Homo sapiens
ggccctggctctgca

SEQ ID NO: 480758 - DNA, 15 bp, Homo sapiens
aggccctggctctgc

SEQ ID NO: 480759 - DNA, 15 bp, Homo sapiens
aaggccctggctctg

SEQ ID NO: 480760 - DNA, 15 bp, Homo sapiens
caaggccctggctct

SEQ ID NO: 480761 - DNA, 15 bp, Homo sapiens
gcaaggccctggctc

SEQ ID NO: 480762 - DNA, 15 bp, Homo sapiens
ggcaaggccctggct

SEQ ID NO: 480763 - DNA, 15 bp, Homo sapiens
aggcaaggccctggc

SEQ ID NO: 480764 - DNA, 15 bp, Homo sapiens
aaggcaaggccctgg

SEQ ID NO: 480765 - DNA, 15 bp, Homo sapiens
caaggcaaggccctg

SEQ ID NO: 480766 - DNA, 15 bp, Homo sapiens
acaaggcaaggccct

SEQ ID NO: 480767 - DNA, 15 bp, Homo sapiens
aacaaggcaaggccc

SEQ ID NO: 480768 - DNA, 15 bp, Homo sapiens
caacaaggcaaggcc

SEQ ID NO: 480769 - DNA, 15 bp, Homo sapiens
gcaacaaggcaaggc

SEQ ID NO: 480770 - DNA, 15 bp, Homo sapiens
ggcaacaaggcaagg

SEQ ID NO: 480771 - DNA, 15 bp, Homo sapiens
aggcaacaaggcaag

SEQ ID NO: 480772 - DNA, 15 bp, Homo sapiens
taggcaacaaggcaa

SEQ ID NO: 480773 - DNA, 15 bp, Homo sapiens
ctaggcaacaaggca

SEQ ID NO: 480774 - DNA, 15 bp, Homo sapiens
cctaggcaacaaggc

SEQ ID NO: 480775 - DNA, 15 bp, Homo sapiens
gcctaggcaacaagg

SEQ ID NO: 480776 - DNA, 15 bp, Homo sapiens
agcctaggcaacaag

SEQ ID NO: 480777 - DNA, 15 bp, Homo sapiens
cagcctaggcaacaa

SEQ ID NO: 480778 - DNA, 15 bp, Homo sapiens
tcagcctaggcaaca

SEQ ID NO: 480779 - DNA, 15 bp, Homo sapiens
atcagcctaggcaac

SEQ ID NO: 480780 - DNA, 15 bp, Homo sapiens
gatcagcctaggcaa

SEQ ID NO: 480781 - DNA, 15 bp, Homo sapiens
agatcagcctaggca

SEQ ID NO: 480782 - DNA, 15 bp, Homo sapiens
gagatcagcctaggc

SEQ ID NO: 480783 - DNA, 15 bp, Homo sapiens
tgagatcagcctagg

SEQ ID NO: 480784 - DNA, 15 bp, Homo sapiens
ttgagatcagcctag

SEQ ID NO: 480785 - DNA, 15 bp, Homo sapiens
tttgagatcagccta

SEQ ID NO: 480786 - DNA, 15 bp, Homo sapiens
gtttgagatcagcct

SEQ ID NO: 480787 - DNA, 15 bp, Homo sapiens
agtttgagatcagcc

SEQ ID NO: 480788 - DNA, 15 bp, Homo sapiens
gagtttgagatcagc

SEQ ID NO: 480789 - DNA, 15 bp, Homo sapiens
ggagtttgagatcag

SEQ ID NO: 480790 - DNA, 15 bp, Homo sapiens
aggagtttgagatca

SEQ ID NO: 480791 - DNA, 15 bp, Homo sapiens
caggagtttgagatc

SEQ ID NO: 480792 - DNA, 15 bp, Homo sapiens
ccaggagtttgagat

SEQ ID NO: 480793 - DNA, 15 bp, Homo sapiens
gccaggagtttgaga

SEQ ID NO: 480794 - DNA, 15 bp, Homo sapiens
ggccaggagtttgag

SEQ ID NO: 480795 - DNA, 15 bp, Homo sapiens
gggccaggagtttga

SEQ ID NO: 480796 - DNA, 15 bp, Homo sapiens
ggggccaggagtttg

SEQ ID NO: 480797 - DNA, 15 bp, Homo sapiens
tggggccaggagttt

SEQ ID NO: 480798 - DNA, 15 bp, Homo sapiens
ttggggccaggagtt

SEQ ID NO: 480799 - DNA, 15 bp, Homo sapiens
cttggggccaggagt

SEQ ID NO: 480800 - DNA, 15 bp, Homo sapiens
ccttggggccaggag

SEQ ID NO: 480801 - DNA, 15 bp, Homo sapiens
tccttggggccagga

SEQ ID NO: 480802 - DNA, 15 bp, Homo sapiens
ttccttggggccagg

SEQ ID NO: 480803 - DNA, 15 bp, Homo sapiens
attccttggggccag

SEQ ID NO: 480804 - DNA, 15 bp, Homo sapiens
gattccttggggcca

SEQ ID NO: 480805 - DNA, 15 bp, Homo sapiens
ggattccttggggcc

SEQ ID NO: 480806 - DNA, 15 bp, Homo sapiens
aggattccttggggc

SEQ ID NO: 480807 - DNA, 15 bp, Homo sapiens
gaggattccttgggg

SEQ ID NO: 480808 - DNA, 15 bp, Homo sapiens
agaggattccttggg

SEQ ID NO: 480809 - DNA, 15 bp, Homo sapiens
aagaggattccttgg

SEQ ID NO: 480810 - DNA, 15 bp, Homo sapiens
taagaggattccttg

SEQ ID NO: 480811 - DNA, 15 bp, Homo sapiens
gtaagaggattcctt

SEQ ID NO: 480812 - DNA, 15 bp, Homo sapiens
ggtaagaggattcct

SEQ ID NO: 480813 - DNA, 15 bp, Homo sapiens
aggtaagaggattcc

SEQ ID NO: 480814 - DNA, 15 bp, Homo sapiens
aaggtaagaggattc

SEQ ID NO: 480815 - DNA, 15 bp, Homo sapiens
caaggtaagaggatt

SEQ ID NO: 480816 - DNA, 15 bp, Homo sapiens
ccaaggtaagaggat

SEQ ID NO: 480817 - DNA, 15 bp, Homo sapiens
gccaaggtaagagga

SEQ ID NO: 480818 - DNA, 15 bp, Homo sapiens
ggccaaggtaagagg

SEQ ID NO: 480819 - DNA, 15 bp, Homo sapiens
aggccaaggtaagag

SEQ ID NO: 480820 - DNA, 15 bp, Homo sapiens
gaggccaaggtaaga

SEQ ID NO: 480821 - DNA, 15 bp, Homo sapiens
ggaggccaaggtaag

SEQ ID NO: 480822 - DNA, 15 bp, Homo sapiens
gggaggccaaggtaa

SEQ ID NO: 480823 - DNA, 15 bp, Homo sapiens
tgggaggccaaggta

SEQ ID NO: 480824 - DNA, 15 bp, Homo sapiens
ttataatcccagcac

SEQ ID NO: 480825 - DNA, 15 bp, Homo sapiens
cttataatcccagca

SEQ ID NO: 480826 - DNA, 15 bp, Homo sapiens
acttataatcccagc

SEQ ID NO: 480827 - DNA, 15 bp, Homo sapiens
cacttataatcccag

SEQ ID NO: 480828 - DNA, 15 bp, Homo sapiens
acacttataatccca

SEQ ID NO: 480829 - DNA, 15 bp, Homo sapiens
cacacttataatccc

SEQ ID NO: 480830 - DNA, 15 bp, Homo sapiens
tcacacttataatcc

SEQ ID NO: 480831 - DNA, 15 bp, Homo sapiens
ttcacacttataatc

SEQ ID NO: 480832 - DNA, 15 bp, Homo sapiens
gttcacacttataat

SEQ ID NO: 480833 - DNA, 15 bp, Homo sapiens
ggttcacacttataa

SEQ ID NO: 480834 - DNA, 15 bp, Homo sapiens
tggttcacacttata

SEQ ID NO: 480835 - DNA, 15 bp, Homo sapiens
gtggttcacacttat

SEQ ID NO: 480836 - DNA, 15 bp, Homo sapiens
ggtggttcacactta

SEQ ID NO: 480837 - DNA, 15 bp, Homo sapiens
tggtggttcacactt

SEQ ID NO: 480838 - DNA, 15 bp, Homo sapiens
gtggtggttcacact

SEQ ID NO: 480839 - DNA, 15 bp, Homo sapiens
agtggtggttcacac

SEQ ID NO: 480840 - DNA, 15 bp, Homo sapiens
gagtggtggttcaca

SEQ ID NO: 480841 - DNA, 15 bp, Homo sapiens
ggagtggtggttcac

SEQ ID NO: 480842 - DNA, 15 bp, Homo sapiens
aggagtggtggttca

SEQ ID NO: 480843 - DNA, 15 bp, Homo sapiens
caggagtggtggttc

SEQ ID NO: 480844 - DNA, 15 bp, Homo sapiens
ccaggagtggtggtt

SEQ ID NO: 480845 - DNA, 15 bp, Homo sapiens
gccaggagtggtggt

SEQ ID NO: 480846 - DNA, 15 bp, Homo sapiens
ggccaggagtggtgg

SEQ ID NO: 480847 - DNA, 15 bp, Homo sapiens
aggccaggagtggtg

SEQ ID NO: 480848 - DNA, 15 bp, Homo sapiens
aaggccaggagtggt

SEQ ID NO: 480849 - DNA, 15 bp, Homo sapiens
caaggccaggagtgg

SEQ ID NO: 480850 - DNA, 15 bp, Homo sapiens
gcaaggccaggagtg

SEQ ID NO: 480851 - DNA, 15 bp, Homo sapiens
tgcaaggccaggagt

SEQ ID NO: 480852 - DNA, 15 bp, Homo sapiens
ctgcaaggccaggag

SEQ ID NO: 480853 - DNA, 15 bp, Homo sapiens
gctgcaaggccagga

SEQ ID NO: 480854 - DNA, 15 bp, Homo sapiens
agctgcaaggccagg

SEQ ID NO: 480855 - DNA, 15 bp, Homo sapiens
aagctgcaaggccag

SEQ ID NO: 480856 - DNA, 15 bp, Homo sapiens
caagctgcaaggcca

SEQ ID NO: 480857 - DNA, 15 bp, Homo sapiens
gcaagctgcaaggcc

SEQ ID NO: 480858 - DNA, 15 bp, Homo sapiens
agcaagctgcaaggc

SEQ ID NO: 480859 - DNA, 15 bp, Homo sapiens
aagcaagctgcaagg

SEQ ID NO: 480860 - DNA, 15 bp, Homo sapiens
aaagcaagctgcaag

SEQ ID NO: 480861 - DNA, 15 bp, Homo sapiens
aaaagcaagctgcaa

SEQ ID NO: 480862 - DNA, 15 bp, Homo sapiens
aaaaagcaagctgca

SEQ ID NO: 480863 - DNA, 15 bp, Homo sapiens
taaaaagcaagctgc

SEQ ID NO: 480864 - DNA, 15 bp, Homo sapiens
ttaaaaagcaagctg

SEQ ID NO: 480865 - DNA, 15 bp, Homo sapiens
tttaaaaagcaagct

SEQ ID NO: 480866 - DNA, 15 bp, Homo sapiens
gtttaaaaagcaagc

SEQ ID NO: 480867 - DNA, 15 bp, Homo sapiens
ggtttaaaaagcaag

SEQ ID NO: 480868 - DNA, 15 bp, Homo sapiens
aggtttaaaaagcaa

SEQ ID NO: 480869 - DNA, 15 bp, Homo sapiens
taggtttaaaaagca

SEQ ID NO: 480870 - DNA, 15 bp, Homo sapiens
ataggtttaaaaagc

SEQ ID NO: 480871 - DNA, 15 bp, Homo sapiens
aataggtttaaaaag

SEQ ID NO: 480872 - DNA, 15 bp, Homo sapiens
gaataggtttaaaaa

SEQ ID NO: 480873 - DNA, 15 bp, Homo sapiens
agaataggtttaaaa

SEQ ID NO: 480874 - DNA, 15 bp, Homo sapiens
tagaataggtttaaa

SEQ ID NO: 480875 - DNA, 15 bp, Homo sapiens
ttagaataggtttaa

SEQ ID NO: 480876 - DNA, 15 bp, Homo sapiens
cttagaataggttta

SEQ ID NO: 480877 - DNA, 15 bp, Homo sapiens
tcttagaataggttt

SEQ ID NO: 480878 - DNA, 15 bp, Homo sapiens
gtcttagaataggtt

SEQ ID NO: 480879 - DNA, 15 bp, Homo sapiens
agtcttagaataggt

SEQ ID NO: 480880 - DNA, 15 bp, Homo sapiens
aagtcttagaatagg

SEQ ID NO: 480881 - DNA, 15 bp, Homo sapiens
caagtcttagaatag

SEQ ID NO: 480882 - DNA, 15 bp, Homo sapiens
gcaagtcttagaata

SEQ ID NO: 480883 - DNA, 15 bp, Homo sapiens
agcaagtcttagaat

SEQ ID NO: 480884 - DNA, 15 bp, Homo sapiens
gagcaagtcttagaa

SEQ ID NO: 480885 - DNA, 15 bp, Homo sapiens
ggagcaagtcttaga

SEQ ID NO: 480886 - DNA, 15 bp, Homo sapiens
gggagcaagtcttag

SEQ ID NO: 480887 - DNA, 15 bp, Homo sapiens
agggagcaagtctta

SEQ ID NO: 480888 - DNA, 15 bp, Homo sapiens
tagggagcaagtctt

SEQ ID NO: 480889 - DNA, 15 bp, Homo sapiens
atagggagcaagtct

SEQ ID NO: 480890 - DNA, 15 bp, Homo sapiens
aatagggagcaagtc

SEQ ID NO: 480891 - DNA, 15 bp, Homo sapiens
aaatagggagcaagt

SEQ ID NO: 480892 - DNA, 15 bp, Homo sapiens
taaatagggagcaag

SEQ ID NO: 480893 - DNA, 15 bp, Homo sapiens
ataaatagggagcaa

SEQ ID NO: 480894 - DNA, 15 bp, Homo sapiens
tataaatagggagca

SEQ ID NO: 480895 - DNA, 15 bp, Homo sapiens
gtataaatagggagc

SEQ ID NO: 480896 - DNA, 15 bp, Homo sapiens
tgtataaatagggag

SEQ ID NO: 480897 - DNA, 15 bp, Homo sapiens
atgtataaataggga

SEQ ID NO: 480898 - DNA, 15 bp, Homo sapiens
catgtataaataggg

SEQ ID NO: 480899 - DNA, 15 bp, Homo sapiens
tcatgtataaatagg

SEQ ID NO: 480900 - DNA, 15 bp, Homo sapiens
ctcatgtataaatag

SEQ ID NO: 480901 - DNA, 15 bp, Homo sapiens
actcatgtataaata

SEQ ID NO: 480902 - DNA, 15 bp, Homo sapiens
tactcatgtataaat

SEQ ID NO: 480903 - DNA, 15 bp, Homo sapiens
atactcatgtataaa

SEQ ID NO: 480904 - DNA, 15 bp, Homo sapiens
aatactcatgtataa

SEQ ID NO: 480905 - DNA, 15 bp, Homo sapiens
taatactcatgtata

SEQ ID NO: 480906 - DNA, 15 bp, Homo sapiens
ttaatactcatgtat

SEQ ID NO: 480907 - DNA, 15 bp, Homo sapiens
cttaatactcatgta

SEQ ID NO: 480908 - DNA, 15 bp, Homo sapiens
acttaatactcatgt

SEQ ID NO: 480909 - DNA, 15 bp, Homo sapiens
aacttaatactcatg

SEQ ID NO: 480910 - DNA, 15 bp, Homo sapiens
taacttaatactcat

SEQ ID NO: 480911 - DNA, 15 bp, Homo sapiens
ttaacttaatactca

SEQ ID NO: 480912 - DNA, 15 bp, Homo sapiens
gttaacttaatactc

SEQ ID NO: 480913 - DNA, 15 bp, Homo sapiens
agttaacttaatact

SEQ ID NO: 480914 - DNA, 15 bp, Homo sapiens
gagttaacttaatac

SEQ ID NO: 480915 - DNA, 15 bp, Homo sapiens
tgagttaacttaata

SEQ ID NO: 480916 - DNA, 15 bp, Homo sapiens
atgagttaacttaat

SEQ ID NO: 480917 - DNA, 15 bp, Homo sapiens
aatgagttaacttaa

SEQ ID NO: 480918 - DNA, 15 bp, Homo sapiens
aaatgagttaactta

SEQ ID NO: 480919 - DNA, 15 bp, Homo sapiens
aaaatgagttaactt

SEQ ID NO: 480920 - DNA, 15 bp, Homo sapiens
taaaatgagttaact

SEQ ID NO: 480921 - DNA, 15 bp, Homo sapiens
ttaaaatgagttaac

SEQ ID NO: 480922 - DNA, 15 bp, Homo sapiens
gttaaaatgagttaa

SEQ ID NO: 480923 - DNA, 15 bp, Homo sapiens
agttaaaatgagtta

SEQ ID NO: 480924 - DNA, 15 bp, Homo sapiens
cagttaaaatgagtt

SEQ ID NO: 480925 - DNA, 15 bp, Homo sapiens
gcagttaaaatgagt

SEQ ID NO: 480926 - DNA, 15 bp, Homo sapiens
tgcagttaaaatgag

SEQ ID NO: 480927 - DNA, 15 bp, Homo sapiens
gtgcagttaaaatga

SEQ ID NO: 480928 - DNA, 15 bp, Homo sapiens
cgtgcagttaaaatg

SEQ ID NO: 480929 - DNA, 15 bp, Homo sapiens
acgtgcagttaaaat

SEQ ID NO: 480930 - DNA, 15 bp, Homo sapiens
tacgtgcagttaaaa

SEQ ID NO: 480931 - DNA, 15 bp, Homo sapiens
atacgtgcagttaaa

SEQ ID NO: 480932 - DNA, 15 bp, Homo sapiens
tatacgtgcagttaa

SEQ ID NO: 480933 - DNA, 15 bp, Homo sapiens
ttatacgtgcagtta

SEQ ID NO: 480934 - DNA, 15 bp, Homo sapiens
attatacgtgcagtt

SEQ ID NO: 480935 - DNA, 15 bp, Homo sapiens
tattatacgtgcagt

SEQ ID NO: 480936 - DNA, 15 bp, Homo sapiens
atattatacgtgcag

SEQ ID NO: 480937 - DNA, 15 bp, Homo sapiens
aatattatacgtgca

SEQ ID NO: 480938 - DNA, 15 bp, Homo sapiens
gaatattatacgtgc

SEQ ID NO: 480939 - DNA, 15 bp, Homo sapiens
agaatattatacgtg

SEQ ID NO: 480940 - DNA, 15 bp, Homo sapiens
tagaatattatacgt

SEQ ID NO: 480941 - DNA, 15 bp, Homo sapiens
atagaatattatacg

SEQ ID NO: 480942 - DNA, 15 bp, Homo sapiens
aatagaatattatac

SEQ ID NO: 480943 - DNA, 15 bp, Homo sapiens
taatagaatattata

SEQ ID NO: 480944 - DNA, 15 bp, Homo sapiens
ataatagaatattat

SEQ ID NO: 480945 - DNA, 15 bp, Homo sapiens
gataatagaatatta

SEQ ID NO: 480946 - DNA, 15 bp, Homo sapiens
tgataatagaatatt

SEQ ID NO: 480947 - DNA, 15 bp, Homo sapiens
ctgataatagaatat

SEQ ID NO: 480948 - DNA, 15 bp, Homo sapiens
actgataatagaata

SEQ ID NO: 480949 - DNA, 15 bp, Homo sapiens
tactgataatagaat

SEQ ID NO: 480950 - DNA, 15 bp, Homo sapiens
atactgataatagaa

SEQ ID NO: 480951 - DNA, 15 bp, Homo sapiens
catactgataataga

SEQ ID NO: 480952 - DNA, 15 bp, Homo sapiens
acatactgataatag

SEQ ID NO: 480953 - DNA, 15 bp, Homo sapiens
gacatactgataata

SEQ ID NO: 480954 - DNA, 15 bp, Homo sapiens
tgacatactgataat

SEQ ID NO: 480955 - DNA, 15 bp, Homo sapiens
ctgacatactgataa

SEQ ID NO: 480956 - DNA, 15 bp, Homo sapiens
actgacatactgata

SEQ ID NO: 480957 - DNA, 15 bp, Homo sapiens
aactgacatactgat

SEQ ID NO: 480958 - DNA, 15 bp, Homo sapiens
aaactgacatactga

SEQ ID NO: 480959 - DNA, 15 bp, Homo sapiens
taaactgacatactg

SEQ ID NO: 480960 - DNA, 15 bp, Homo sapiens
ataaactgacatact

SEQ ID NO: 480961 - DNA, 15 bp, Homo sapiens
gataaactgacatac

SEQ ID NO: 480962 - DNA, 15 bp, Homo sapiens
ggataaactgacata

SEQ ID NO: 480963 - DNA, 15 bp, Homo sapiens
tggataaactgacat

SEQ ID NO: 480964 - DNA, 15 bp, Homo sapiens
atggataaactgaca

SEQ ID NO: 480965 - DNA, 15 bp, Homo sapiens
aatggataaactgac

SEQ ID NO: 480966 - DNA, 15 bp, Homo sapiens
aaatggataaactga

SEQ ID NO: 480967 - DNA, 15 bp, Homo sapiens
gaaatggataaactg

SEQ ID NO: 480968 - DNA, 15 bp, Homo sapiens
agaaatggataaact

SEQ ID NO: 480969 - DNA, 15 bp, Homo sapiens
cagaaatggataaac

SEQ ID NO: 480970 - DNA, 15 bp, Homo sapiens
ccagaaatggataaa

SEQ ID NO: 480971 - DNA, 15 bp, Homo sapiens
accagaaatggataa

SEQ ID NO: 480972 - DNA, 15 bp, Homo sapiens
taccagaaatggata

SEQ ID NO: 480973 - DNA, 15 bp, Homo sapiens
ataccagaaatggat

SEQ ID NO: 480974 - DNA, 15 bp, Homo sapiens
tataccagaaatgga

SEQ ID NO: 480975 - DNA, 15 bp, Homo sapiens
ctataccagaaatgg

SEQ ID NO: 480976 - DNA, 15 bp, Homo sapiens
tctataccagaaatg

SEQ ID NO: 480977 - DNA, 15 bp, Homo sapiens
ctctataccagaaat

SEQ ID NO: 480978 - DNA, 15 bp, Homo sapiens
cctctataccagaaa

SEQ ID NO: 480979 - DNA, 15 bp, Homo sapiens
tcctctataccagaa

SEQ ID NO: 480980 - DNA, 15 bp, Homo sapiens
ttcctctataccaga

SEQ ID NO: 480981 - DNA, 15 bp, Homo sapiens
gttcctctataccag

SEQ ID NO: 480982 - DNA, 15 bp, Homo sapiens
tgttcctctatacca

SEQ ID NO: 480983 - DNA, 15 bp, Homo sapiens
gtgttcctctatacc

SEQ ID NO: 480984 - DNA, 15 bp, Homo sapiens
agtgttcctctatac

SEQ ID NO: 480985 - DNA, 15 bp, Homo sapiens
aagtgttcctctata

SEQ ID NO: 480986 - DNA, 15 bp, Homo sapiens
taagtgttcctctat

SEQ ID NO: 480987 - DNA, 15 bp, Homo sapiens
ttaagtgttcctcta

SEQ ID NO: 480988 - DNA, 15 bp, Homo sapiens
attaagtgttcctct

SEQ ID NO: 480989 - DNA, 15 bp, Homo sapiens
aattaagtgttcctc

SEQ ID NO: 480990 - DNA, 15 bp, Homo sapiens
aaattaagtgttcct

SEQ ID NO: 480991 - DNA, 15 bp, Homo sapiens
caaattaagtgttcc

SEQ ID NO: 480992 - DNA, 15 bp, Homo sapiens
acaaattaagtgttc

SEQ ID NO: 480993 - DNA, 15 bp, Homo sapiens
aacaaattaagtgtt

SEQ ID NO: 480994 - DNA, 15 bp, Homo sapiens
aaacaaattaagtgt

SEQ ID NO: 480995 - DNA, 15 bp, Homo sapiens
aaaacaaattaagtg

SEQ ID NO: 480996 - DNA, 15 bp, Homo sapiens
gaaaacaaattaagt

SEQ ID NO: 480997 - DNA, 15 bp, Homo sapiens
tgaaaacaaattaag

SEQ ID NO: 480998 - DNA, 15 bp, Homo sapiens
ctgaaaacaaattaa

SEQ ID NO: 480999 - DNA, 15 bp, Homo sapiens
cctgaaaacaaatta

SEQ ID NO: 481000 - DNA, 15 bp, Homo sapiens
ccctgaaaacaaatt

SEQ ID NO: 481001 - DNA, 15 bp, Homo sapiens
accctgaaaacaaat

SEQ ID NO: 481002 - DNA, 15 bp, Homo sapiens
aaccctgaaaacaaa

SEQ ID NO: 481003 - DNA, 15 bp, Homo sapiens
aaaccctgaaaacaa

SEQ ID NO: 481004 - DNA, 15 bp, Homo sapiens
aaaaccctgaaaaca

SEQ ID NO: 481005 - DNA, 15 bp, Homo sapiens
aaaaaccctgaaaac

SEQ ID NO: 481006 - DNA, 15 bp, Homo sapiens
aaaaaaccctgaaaa

SEQ ID NO: 481007 - DNA, 15 bp, Homo sapiens
aaaaaaaccctgaaa

SEQ ID NO: 481008 - DNA, 15 bp, Homo sapiens
aaaaaaaaccctgaa

SEQ ID NO: 481009 - DNA, 15 bp, Homo sapiens
aaaaaaaaaccctga

SEQ ID NO: 481010 - DNA, 15 bp, Homo sapiens
aaaaaaaaaaccctg

SEQ ID NO: 481011 - DNA, 15 bp, Homo sapiens
aaaaaaaaaaaccct

SEQ ID NO: 481012 - DNA, 15 bp, Homo sapiens
aaaaaaaaaaaaacc

SEQ ID NO: 481013 - DNA, 15 bp, Homo sapiens
gcaaaaaaaaaaaaa

SEQ ID NO: 481014 - DNA, 15 bp, Homo sapiens
agcaaaaaaaaaaaa

SEQ ID NO: 481015 - DNA, 15 bp, Homo sapiens
aagcaaaaaaaaaaa

SEQ ID NO: 481016 - DNA, 15 bp, Homo sapiens
caagcaaaaaaaaaa

SEQ ID NO: 481017 - DNA, 15 bp, Homo sapiens
acaagcaaaaaaaaa

SEQ ID NO: 481018 - DNA, 15 bp, Homo sapiens
cacaagcaaaaaaaa

SEQ ID NO: 481019 - DNA, 15 bp, Homo sapiens
acacaagcaaaaaaa

SEQ ID NO: 481020 - DNA, 15 bp, Homo sapiens
aacacaagcaaaaaa

SEQ ID NO: 481021 - DNA, 15 bp, Homo sapiens
aaacacaagcaaaaa

SEQ ID NO: 481022 - DNA, 15 bp, Homo sapiens
aaaacacaagcaaaa

SEQ ID NO: 481023 - DNA, 15 bp, Homo sapiens
aaaaacacaagcaaa

SEQ ID NO: 481024 - DNA, 15 bp, Homo sapiens
caaaaacacaagcaa

SEQ ID NO: 481025 - DNA, 15 bp, Homo sapiens
acaaaaacacaagca

SEQ ID NO: 481026 - DNA, 15 bp, Homo sapiens
aacaaaaacacaagc

SEQ ID NO: 481027 - DNA, 15 bp, Homo sapiens
aaacaaaaacacaag

SEQ ID NO: 481028 - DNA, 15 bp, Homo sapiens
aaaacaaaaacacaa

SEQ ID NO: 481029 - DNA, 15 bp, Homo sapiens
taaaacaaaaacaca

SEQ ID NO: 481030 - DNA, 15 bp, Homo sapiens
ataaaacaaaaacac

SEQ ID NO: 481031 - DNA, 15 bp, Homo sapiens
aataaaacaaaaaca

SEQ ID NO: 481032 - DNA, 15 bp, Homo sapiens
taataaaacaaaaac

SEQ ID NO: 481033 - DNA, 15 bp, Homo sapiens
ataataaaacaaaaa

SEQ ID NO: 481034 - DNA, 15 bp, Homo sapiens
tataataaaacaaaa

SEQ ID NO: 481035 - DNA, 15 bp, Homo sapiens
ttataataaaacaaa

SEQ ID NO: 481036 - DNA, 15 bp, Homo sapiens
tttataataaaacaa

SEQ ID NO: 481037 - DNA, 15 bp, Homo sapiens
gtttataataaaaca

SEQ ID NO: 481038 - DNA, 15 bp, Homo sapiens
tgtttataataaaac

SEQ ID NO: 481039 - DNA, 15 bp, Homo sapiens
ttgtttataataaaa

SEQ ID NO: 481040 - DNA, 15 bp, Homo sapiens
attgtttataataaa

SEQ ID NO: 481041 - DNA, 15 bp, Homo sapiens
cattgtttataataa

SEQ ID NO: 481042 - DNA, 15 bp, Homo sapiens
gcattgtttataata

SEQ ID NO: 481043 - DNA, 15 bp, Homo sapiens
agcattgtttataat

SEQ ID NO: 481044 - DNA, 15 bp, Homo sapiens
aagcattgtttataa

SEQ ID NO: 481045 - DNA, 15 bp, Homo sapiens
gaagcattgtttata

SEQ ID NO: 481046 - DNA, 15 bp, Homo sapiens
tgaagcattgtttat

SEQ ID NO: 481047 - DNA, 15 bp, Homo sapiens
ctgaagcattgttta

SEQ ID NO: 481048 - DNA, 15 bp, Homo sapiens
cctgaagcattgttt

SEQ ID NO: 481049 - DNA, 15 bp, Homo sapiens
tcctgaagcattgtt

SEQ ID NO: 481050 - DNA, 15 bp, Homo sapiens
ttcctgaagcattgt

SEQ ID NO: 481051 - DNA, 15 bp, Homo sapiens
cttcctgaagcattg

SEQ ID NO: 481052 - DNA, 15 bp, Homo sapiens
gcttcctgaagcatt

SEQ ID NO: 481053 - DNA, 15 bp, Homo sapiens
tgcttcctgaagcat

SEQ ID NO: 481054 - DNA, 15 bp, Homo sapiens
atgcttcctgaagca

SEQ ID NO: 481055 - DNA, 15 bp, Homo sapiens
tatgcttcctgaagc

SEQ ID NO: 481056 - DNA, 15 bp, Homo sapiens
atatgcttcctgaag

SEQ ID NO: 481057 - DNA, 15 bp, Homo sapiens
tatatgcttcctgaa

SEQ ID NO: 481058 - DNA, 15 bp, Homo sapiens
atatatgcttcctga

SEQ ID NO: 481059 - DNA, 15 bp, Homo sapiens
aatatatgcttcctg

SEQ ID NO: 481060 - DNA, 15 bp, Homo sapiens
aaatatatgcttcct

SEQ ID NO: 481061 - DNA, 15 bp, Homo sapiens
caaatatatgcttcc

SEQ ID NO: 481062 - DNA, 15 bp, Homo sapiens
acaaatatatgcttc

SEQ ID NO: 481063 - DNA, 15 bp, Homo sapiens
tacaaatatatgctt

SEQ ID NO: 481064 - DNA, 15 bp, Homo sapiens
atacaaatatatgct

SEQ ID NO: 481065 - DNA, 15 bp, Homo sapiens
aatacaaatatatgc

SEQ ID NO: 481066 - DNA, 15 bp, Homo sapiens
gaatacaaatatatg

SEQ ID NO: 481067 - DNA, 15 bp, Homo sapiens
agaatacaaatatat

SEQ ID NO: 481068 - DNA, 15 bp, Homo sapiens
aagaatacaaatata

SEQ ID NO: 481069 - DNA, 15 bp, Homo sapiens
caagaatacaaatat

SEQ ID NO: 481070 - DNA, 15 bp, Homo sapiens
tcaagaatacaaata

SEQ ID NO: 481071 - DNA, 15 bp, Homo sapiens
ttcaagaatacaaat

SEQ ID NO: 481072 - DNA, 15 bp, Homo sapiens
attcaagaatacaaa

SEQ ID NO: 481073 - DNA, 15 bp, Homo sapiens
aattcaagaatacaa

SEQ ID NO: 481074 - DNA, 15 bp, Homo sapiens
aaattcaagaataca

SEQ ID NO: 481075 - DNA, 15 bp, Homo sapiens
aaaattcaagaatac

SEQ ID NO: 481076 - DNA, 15 bp, Homo sapiens
aaaaattcaagaata

SEQ ID NO: 481077 - DNA, 15 bp, Homo sapiens
aaaaaattcaagaat

SEQ ID NO: 481078 - DNA, 15 bp, Homo sapiens
aaaaaaattcaagaa

SEQ ID NO: 481079 - DNA, 15 bp, Homo sapiens
aaaaaaaattcaaga

SEQ ID NO: 481080 - DNA, 15 bp, Homo sapiens
aaaaaaaaattcaag

SEQ ID NO: 481081 - DNA, 15 bp, Homo sapiens
aaaaaaaaaattcaa

SEQ ID NO: 481082 - DNA, 15 bp, Homo sapiens
aaaaaaaaaaattca

SEQ ID NO: 481083 - DNA, 15 bp, Homo sapiens
aaaaaaaaaaaattc

SEQ ID NO: 481084 - DNA, 15 bp, Homo sapiens
aaaaaaaaaaaaatt

SEQ ID NO: 481085 - DNA, 15 bp, Homo sapiens
cctgtctcaaaaaaa

SEQ ID NO: 481086 - DNA, 15 bp, Homo sapiens
ccctgtctcaaaaaa

SEQ ID NO: 481087 - DNA, 15 bp, Homo sapiens
accctgtctcaaaaa

SEQ ID NO: 481088 - DNA, 15 bp, Homo sapiens
gagaccctgtctcaa

SEQ ID NO: 481089 - DNA, 15 bp, Homo sapiens
tgagaccctgtctca

SEQ ID NO: 481090 - DNA, 15 bp, Homo sapiens
gtgagaccctgtctc

SEQ ID NO: 481091 - DNA, 15 bp, Homo sapiens
agtgagaccctgtct

SEQ ID NO: 481092 - DNA, 15 bp, Homo sapiens
gagtgagaccctgtc

SEQ ID NO: 481093 - DNA, 15 bp, Homo sapiens
agagtgagaccctgt

SEQ ID NO: 481094 - DNA, 15 bp, Homo sapiens
aagagtgagaccctg

SEQ ID NO: 481095 - DNA, 15 bp, Homo sapiens
caagagtgagaccct

SEQ ID NO: 481096 - DNA, 15 bp, Homo sapiens
acaagagtgagaccc

SEQ ID NO: 481097 - DNA, 15 bp, Homo sapiens
gacaagagtgagacc

SEQ ID NO: 481098 - DNA, 15 bp, Homo sapiens
cgacaagagtgagac

SEQ ID NO: 481099 - DNA, 15 bp, Homo sapiens
gcgacaagagtgaga

SEQ ID NO: 481100 - DNA, 15 bp, Homo sapiens
ggcgacaagagtgag

SEQ ID NO: 481101 - DNA, 15 bp, Homo sapiens
gggcgacaagagtga

SEQ ID NO: 481102 - DNA, 15 bp, Homo sapiens
tgggcgacaagagtg

SEQ ID NO: 481103 - DNA, 15 bp, Homo sapiens
ctgggcgacaagagt

SEQ ID NO: 481104 - DNA, 15 bp, Homo sapiens
cctgggcgacaagag

SEQ ID NO: 481105 - DNA, 15 bp, Homo sapiens
gcctgggcgacaaga

SEQ ID NO: 481106 - DNA, 15 bp, Homo sapiens
agcctgggcgacaag

SEQ ID NO: 481107 - DNA, 15 bp, Homo sapiens
cagcctgggcgacaa

SEQ ID NO: 481108 - DNA, 15 bp, Homo sapiens
cgcaccactgcactc

SEQ ID NO: 481109 - DNA, 15 bp, Homo sapiens
tcgcaccactgcact

SEQ ID NO: 481110 - DNA, 15 bp, Homo sapiens
ttcgcaccactgcac

SEQ ID NO: 481111 - DNA, 15 bp, Homo sapiens
gttcgcaccactgca

SEQ ID NO: 481112 - DNA, 15 bp, Homo sapiens
agttcgcaccactgc

SEQ ID NO: 481113 - DNA, 15 bp, Homo sapiens
gagttcgcaccactg

SEQ ID NO: 481114 - DNA, 15 bp, Homo sapiens
cgagttcgcaccact

SEQ ID NO: 481115 - DNA, 15 bp, Homo sapiens
ccgagttcgcaccac

SEQ ID NO: 481116 - DNA, 15 bp, Homo sapiens
gccgagttcgcacca

SEQ ID NO: 481117 - DNA, 15 bp, Homo sapiens
agccgagttcgcacc

SEQ ID NO: 481118 - DNA, 15 bp, Homo sapiens
gagccgagttcgcac

SEQ ID NO: 481119 - DNA, 15 bp, Homo sapiens
tgagccgagttcgca

SEQ ID NO: 481120 - DNA, 15 bp, Homo sapiens
gtgagccgagttcgc

SEQ ID NO: 481121 - DNA, 15 bp, Homo sapiens
agtgagccgagttcg

SEQ ID NO: 481122 - DNA, 15 bp, Homo sapiens
cagtgagccgagttc

SEQ ID NO: 481123 - DNA, 15 bp, Homo sapiens
gcagtgagccgagtt

SEQ ID NO: 481124 - DNA, 15 bp, Homo sapiens
tgcagtgagccgagt

SEQ ID NO: 481125 - DNA, 15 bp, Homo sapiens
gcttgcagtgagccg

SEQ ID NO: 481126 - DNA, 15 bp, Homo sapiens
tgggaggcggagctt

SEQ ID NO: 481127 - DNA, 15 bp, Homo sapiens
ctgggaggcggagct

SEQ ID NO: 481128 - DNA, 15 bp, Homo sapiens
cctgggaggcggagc

SEQ ID NO: 481129 - DNA, 15 bp, Homo sapiens
aaacctgggaggcgg

SEQ ID NO: 481130 - DNA, 15 bp, Homo sapiens
taaacctgggaggcg

SEQ ID NO: 481131 - DNA, 15 bp, Homo sapiens
ataaacctgggaggc

SEQ ID NO: 481132 - DNA, 15 bp, Homo sapiens
cataaacctgggagg

SEQ ID NO: 481133 - DNA, 15 bp, Homo sapiens
gcataaacctgggag

SEQ ID NO: 481134 - DNA, 15 bp, Homo sapiens
ggcataaacctggga

SEQ ID NO: 481135 - DNA, 15 bp, Homo sapiens
tggcataaacctggg

SEQ ID NO: 481136 - DNA, 15 bp, Homo sapiens
atggcataaacctgg

SEQ ID NO: 481137 - DNA, 15 bp, Homo sapiens
aatggcataaacctg

SEQ ID NO: 481138 - DNA, 15 bp, Homo sapiens
gaatggcataaacct

SEQ ID NO: 481139 - DNA, 15 bp, Homo sapiens
agaatggcataaacc

SEQ ID NO: 481140 - DNA, 15 bp, Homo sapiens
gagaatggcataaac

SEQ ID NO: 481141 - DNA, 15 bp, Homo sapiens
ggagaatggcataaa

SEQ ID NO: 481142 - DNA, 15 bp, Homo sapiens
aggagaatggcataa

SEQ ID NO: 481143 - DNA, 15 bp, Homo sapiens
caggagaatggcata

SEQ ID NO: 481144 - DNA, 15 bp, Homo sapiens
gcaggagaatggcat

SEQ ID NO: 481145 - DNA, 15 bp, Homo sapiens
ggcaggagaatggca

SEQ ID NO: 481146 - DNA, 15 bp, Homo sapiens
aaggcaggagaatgg

SEQ ID NO: 481147 - DNA, 15 bp, Homo sapiens
taaggcaggagaatg

SEQ ID NO: 481148 - DNA, 15 bp, Homo sapiens
ctaaggcaggagaat

SEQ ID NO: 481149 - DNA, 15 bp, Homo sapiens
gctaaggcaggagaa

SEQ ID NO: 481150 - DNA, 15 bp, Homo sapiens
ggctaaggcaggaga

SEQ ID NO: 481151 - DNA, 15 bp, Homo sapiens
aggctaaggcaggag

SEQ ID NO: 481152 - DNA, 15 bp, Homo sapiens
gaggctaaggcagga

SEQ ID NO: 481153 - DNA, 15 bp, Homo sapiens
ggaggctaaggcagg

SEQ ID NO: 481154 - DNA, 15 bp, Homo sapiens
aggaggctaaggcag

SEQ ID NO: 481155 - DNA, 15 bp, Homo sapiens
caggaggctaaggca

SEQ ID NO: 481156 - DNA, 15 bp, Homo sapiens
tcaggaggctaaggc

SEQ ID NO: 481157 - DNA, 15 bp, Homo sapiens
ctcaggaggctaagg

SEQ ID NO: 481158 - DNA, 15 bp, Homo sapiens
actcaggaggctaag

SEQ ID NO: 481159 - DNA, 15 bp, Homo sapiens
tactcaggaggctaa

SEQ ID NO: 481160 - DNA, 15 bp, Homo sapiens
ctactcaggaggcta

SEQ ID NO: 481161 - DNA, 15 bp, Homo sapiens
ccagctactcaggag

SEQ ID NO: 481162 - DNA, 15 bp, Homo sapiens
cccagctactcagga

SEQ ID NO: 481163 - DNA, 15 bp, Homo sapiens
tcccagctactcagg

SEQ ID NO: 481164 - DNA, 15 bp, Homo sapiens
gtcccagctactcag

SEQ ID NO: 481165 - DNA, 15 bp, Homo sapiens
agtcccagctactca

SEQ ID NO: 481166 - DNA, 15 bp, Homo sapiens
aggcacctgtagtcc

SEQ ID NO: 481167 - DNA, 15 bp, Homo sapiens
caggcacctgtagtc

SEQ ID NO: 481168 - DNA, 15 bp, Homo sapiens
gcaggcacctgtagt

SEQ ID NO: 481169 - DNA, 15 bp, Homo sapiens
ggcaggcacctgtag

SEQ ID NO: 481170 - DNA, 15 bp, Homo sapiens
tggcaggcacctgta

SEQ ID NO: 481171 - DNA, 15 bp, Homo sapiens
gtggcaggcacctgt

SEQ ID NO: 481172 - DNA, 15 bp, Homo sapiens
ggtggcaggcacctg

SEQ ID NO: 481173 - DNA, 15 bp, Homo sapiens
tggtggcaggcacct

SEQ ID NO: 481174 - DNA, 15 bp, Homo sapiens
atggtggcaggcacc

SEQ ID NO: 481175 - DNA, 15 bp, Homo sapiens
catggtggcaggcac

SEQ ID NO: 481176 - DNA, 15 bp, Homo sapiens
gcatggtggcaggca

SEQ ID NO: 481177 - DNA, 15 bp, Homo sapiens
cgcatggtggcaggc

SEQ ID NO: 481178 - DNA, 15 bp, Homo sapiens
ccgcatggtggcagg

SEQ ID NO: 481179 - DNA, 15 bp, Homo sapiens
cccgcatggtggcag

SEQ ID NO: 481180 - DNA, 15 bp, Homo sapiens
gcccgcatggtggca

SEQ ID NO: 481181 - DNA, 15 bp, Homo sapiens
agcccgcatggtggc

SEQ ID NO: 481182 - DNA, 15 bp, Homo sapiens
tagcccgcatggtgg

SEQ ID NO: 481183 - DNA, 15 bp, Homo sapiens
ttagcccgcatggtg

SEQ ID NO: 481184 - DNA, 15 bp, Homo sapiens
attagcccgcatggt

SEQ ID NO: 481185 - DNA, 15 bp, Homo sapiens
aattagcccgcatgg

SEQ ID NO: 481186 - DNA, 15 bp, Homo sapiens
aaattagcccgcatg

SEQ ID NO: 481187 - DNA, 15 bp, Homo sapiens
aaaattagcccgcat

SEQ ID NO: 481188 - DNA, 15 bp, Homo sapiens
aaaaattagcccgca

SEQ ID NO: 481189 - DNA, 15 bp, Homo sapiens
aaaaaattagcccgc

SEQ ID NO: 481190 - DNA, 15 bp, Homo sapiens
aaaaaaattagcccg

SEQ ID NO: 481191 - DNA, 15 bp, Homo sapiens
aaaaaaaattagccc

SEQ ID NO: 481192 - DNA, 15 bp, Homo sapiens
aaaaaaaaattagcc

SEQ ID NO: 481193 - DNA, 15 bp, Homo sapiens
caaaaaaaaattagc

SEQ ID NO: 481194 - DNA, 15 bp, Homo sapiens
acaaaaaaaaattag

SEQ ID NO: 481195 - DNA, 15 bp, Homo sapiens
tacaaaaaaaaatta

SEQ ID NO: 481196 - DNA, 15 bp, Homo sapiens
atacaaaaaaaaatt

SEQ ID NO: 481197 - DNA, 15 bp, Homo sapiens
aatacaaaaaaaaat

SEQ ID NO: 481198 - DNA, 15 bp, Homo sapiens
aaatacaaaaaaaaa

SEQ ID NO: 481199 - DNA, 15 bp, Homo sapiens
aaaatacaaaaaaaa

SEQ ID NO: 481200 - DNA, 15 bp, Homo sapiens
gtactaaaaatacaa

SEQ ID NO: 481201 - DNA, 15 bp, Homo sapiens
tgtactaaaaataca

SEQ ID NO: 481202 - DNA, 15 bp, Homo sapiens
ctgtactaaaaatac

SEQ ID NO: 481203 - DNA, 15 bp, Homo sapiens
cctgtactaaaaata

SEQ ID NO: 481204 - DNA, 15 bp, Homo sapiens
gcctgtactaaaaat

SEQ ID NO: 481205 - DNA, 15 bp, Homo sapiens
cgcctgtactaaaaa

SEQ ID NO: 481206 - DNA, 15 bp, Homo sapiens
ccgcctgtactaaaa

SEQ ID NO: 481207 - DNA, 15 bp, Homo sapiens
accgcctgtactaaa

SEQ ID NO: 481208 - DNA, 15 bp, Homo sapiens
caccgcctgtactaa

SEQ ID NO: 481209 - DNA, 15 bp, Homo sapiens
acaccgcctgtacta

SEQ ID NO: 481210 - DNA, 15 bp, Homo sapiens
aacaccgcctgtact

SEQ ID NO: 481211 - DNA, 15 bp, Homo sapiens
aaacaccgcctgtac

SEQ ID NO: 481212 - DNA, 15 bp, Homo sapiens
gaaacaccgcctgta

SEQ ID NO: 481213 - DNA, 15 bp, Homo sapiens
tgaaacaccgcctgt

SEQ ID NO: 481214 - DNA, 15 bp, Homo sapiens
gtgaaacaccgcctg

SEQ ID NO: 481215 - DNA, 15 bp, Homo sapiens
agtgaaacaccgcct

SEQ ID NO: 481216 - DNA, 15 bp, Homo sapiens
cagtgaaacaccgcc

SEQ ID NO: 481217 - DNA, 15 bp, Homo sapiens
acagtgaaacaccgc

SEQ ID NO: 481218 - DNA, 15 bp, Homo sapiens
cacagtgaaacaccg

SEQ ID NO: 481219 - DNA, 15 bp, Homo sapiens
taacacagtgaaaca

SEQ ID NO: 481220 - DNA, 15 bp, Homo sapiens
ctaacacagtgaaac

SEQ ID NO: 481221 - DNA, 15 bp, Homo sapiens
gctaacacagtgaaa

SEQ ID NO: 481222 - DNA, 15 bp, Homo sapiens
ggctaacacagtgaa

SEQ ID NO: 481223 - DNA, 15 bp, Homo sapiens
tggctaacacagtga

SEQ ID NO: 481224 - DNA, 15 bp, Homo sapiens
ctggctaacacagtg

SEQ ID NO: 481225 - DNA, 15 bp, Homo sapiens
cctggctaacacagt

SEQ ID NO: 481226 - DNA, 15 bp, Homo sapiens
ccaggagatcgagac

SEQ ID NO: 481227 - DNA, 15 bp, Homo sapiens
gccaggagatcgaga

SEQ ID NO: 481228 - DNA, 15 bp, Homo sapiens
ggccaggagatcgag

SEQ ID NO: 481229 - DNA, 15 bp, Homo sapiens
aggccaggagatcga

SEQ ID NO: 481230 - DNA, 15 bp, Homo sapiens
gaggccaggagatcg

SEQ ID NO: 481231 - DNA, 15 bp, Homo sapiens
tgaggccaggagatc

SEQ ID NO: 481232 - DNA, 15 bp, Homo sapiens
atgaggccaggagat

SEQ ID NO: 481233 - DNA, 15 bp, Homo sapiens
catgaggccaggaga

SEQ ID NO: 481234 - DNA, 15 bp, Homo sapiens
tcatgaggccaggag

SEQ ID NO: 481235 - DNA, 15 bp, Homo sapiens
atcatgaggccagga

SEQ ID NO: 481236 - DNA, 15 bp, Homo sapiens
gatcatgaggccagg

SEQ ID NO: 481237 - DNA, 15 bp, Homo sapiens
agatcatgaggccag

SEQ ID NO: 481238 - DNA, 15 bp, Homo sapiens
cagatcatgaggcca

SEQ ID NO: 481239 - DNA, 15 bp, Homo sapiens
acagatcatgaggcc

SEQ ID NO: 481240 - DNA, 15 bp, Homo sapiens
gacagatcatgaggc

SEQ ID NO: 481241 - DNA, 15 bp, Homo sapiens
ggacagatcatgagg

SEQ ID NO: 481242 - DNA, 15 bp, Homo sapiens
cggacagatcatgag

SEQ ID NO: 481243 - DNA, 15 bp, Homo sapiens
gcggacagatcatga

SEQ ID NO: 481244 - DNA, 15 bp, Homo sapiens
ggcggacagatcatg

SEQ ID NO: 481245 - DNA, 15 bp, Homo sapiens
aggcggacagatcat

SEQ ID NO: 481246 - DNA, 15 bp, Homo sapiens
aaggcggacagatca

SEQ ID NO: 481247 - DNA, 15 bp, Homo sapiens
caaggcggacagatc

SEQ ID NO: 481248 - DNA, 15 bp, Homo sapiens
ccaaggcggacagat

SEQ ID NO: 481249 - DNA, 15 bp, Homo sapiens
gccaaggcggacaga

SEQ ID NO: 481250 - DNA, 15 bp, Homo sapiens
ggccaaggcggacag

SEQ ID NO: 481251 - DNA, 15 bp, Homo sapiens
aggccaaggcggaca

SEQ ID NO: 481252 - DNA, 15 bp, Homo sapiens
gaggccaaggcggac

SEQ ID NO: 481253 - DNA, 15 bp, Homo sapiens
ggaggccaaggcgga

SEQ ID NO: 481254 - DNA, 15 bp, Homo sapiens
gggaggccaaggcgg

SEQ ID NO: 481255 - DNA, 15 bp, Homo sapiens
tgggaggccaaggcg

SEQ ID NO: 481256 - DNA, 15 bp, Homo sapiens
atataatcccagcac

SEQ ID NO: 481257 - DNA, 15 bp, Homo sapiens
catataatcccagca

SEQ ID NO: 481258 - DNA, 15 bp, Homo sapiens
gcatataatcccagc

SEQ ID NO: 481259 - DNA, 15 bp, Homo sapiens
cgcatataatcccag

SEQ ID NO: 481260 - DNA, 15 bp, Homo sapiens
acgcatataatccca

SEQ ID NO: 481261 - DNA, 15 bp, Homo sapiens
cacgcatataatccc

SEQ ID NO: 481262 - DNA, 15 bp, Homo sapiens
tcacgcatataatcc

SEQ ID NO: 481263 - DNA, 15 bp, Homo sapiens
ctcacgcatataatc

SEQ ID NO: 481264 - DNA, 15 bp, Homo sapiens
gctcacgcatataat

SEQ ID NO: 481265 - DNA, 15 bp, Homo sapiens
ggctcacgcatataa

SEQ ID NO: 481266 - DNA, 15 bp, Homo sapiens
tggctcacgcatata

SEQ ID NO: 481267 - DNA, 15 bp, Homo sapiens
gtggctcacgcatat

SEQ ID NO: 481268 - DNA, 15 bp, Homo sapiens
ggtggctcacgcata

SEQ ID NO: 481269 - DNA, 15 bp, Homo sapiens
cggtggctcacgcat

SEQ ID NO: 481270 - DNA, 15 bp, Homo sapiens
acggtggctcacgca

SEQ ID NO: 481271 - DNA, 15 bp, Homo sapiens
cacggtggctcacgc

SEQ ID NO: 481272 - DNA, 15 bp, Homo sapiens
gcacggtggctcacg

SEQ ID NO: 481273 - DNA, 15 bp, Homo sapiens
ggcacggtggctcac

SEQ ID NO: 481274 - DNA, 15 bp, Homo sapiens
aggcacggtggctca

SEQ ID NO: 481275 - DNA, 15 bp, Homo sapiens
caggcacggtggctc

SEQ ID NO: 481276 - DNA, 15 bp, Homo sapiens
ccaggcacggtggct

SEQ ID NO: 481277 - DNA, 15 bp, Homo sapiens
gccaggcacggtggc

SEQ ID NO: 481278 - DNA, 15 bp, Homo sapiens
aggccaggcacggtg

SEQ ID NO: 481279 - DNA, 15 bp, Homo sapiens
aaggccaggcacggt

SEQ ID NO: 481280 - DNA, 15 bp, Homo sapiens
caaggccaggcacgg

SEQ ID NO: 481281 - DNA, 15 bp, Homo sapiens
tcaaggccaggcacg

SEQ ID NO: 481282 - DNA, 15 bp, Homo sapiens
ttcaaggccaggcac

SEQ ID NO: 481283 - DNA, 15 bp, Homo sapiens
attcaaggccaggca

SEQ ID NO: 481284 - DNA, 15 bp, Homo sapiens
aattcaaggccaggc

SEQ ID NO: 481285 - DNA, 15 bp, Homo sapiens
aaattcaaggccagg

SEQ ID NO: 481286 - DNA, 15 bp, Homo sapiens
aaaattcaaggccag

SEQ ID NO: 481287 - DNA, 15 bp, Homo sapiens
aaaaattcaaggcca

SEQ ID NO: 481288 - DNA, 15 bp, Homo sapiens
taaaaattcaaggcc

SEQ ID NO: 481289 - DNA, 15 bp, Homo sapiens
ataaaaattcaaggc

SEQ ID NO: 481290 - DNA, 15 bp, Homo sapiens
aataaaaattcaagg

SEQ ID NO: 481291 - DNA, 15 bp, Homo sapiens
aaataaaaattcaag

SEQ ID NO: 481292 - DNA, 15 bp, Homo sapiens
caaataaaaattcaa

SEQ ID NO: 481293 - DNA, 15 bp, Homo sapiens
tcaaataaaaattca

SEQ ID NO: 481294 - DNA, 15 bp, Homo sapiens
gtcaaataaaaattc

SEQ ID NO: 481295 - DNA, 15 bp, Homo sapiens
agtcaaataaaaatt

SEQ ID NO: 481296 - DNA, 15 bp, Homo sapiens
aagtcaaataaaaat

SEQ ID NO: 481297 - DNA, 15 bp, Homo sapiens
taagtcaaataaaaa

SEQ ID NO: 481298 - DNA, 15 bp, Homo sapiens
ttaagtcaaataaaa

SEQ ID NO: 481299 - DNA, 15 bp, Homo sapiens
tttaagtcaaataaa

SEQ ID NO: 481300 - DNA, 15 bp, Homo sapiens
ttttaagtcaaataa

SEQ ID NO: 481301 - DNA, 15 bp, Homo sapiens
gttttaagtcaaata

SEQ ID NO: 481302 - DNA, 15 bp, Homo sapiens
tgttttaagtcaaat

SEQ ID NO: 481303 - DNA, 15 bp, Homo sapiens
atgttttaagtcaaa

SEQ ID NO: 481304 - DNA, 15 bp, Homo sapiens
tatgttttaagtcaa

SEQ ID NO: 481305 - DNA, 15 bp, Homo sapiens
gtatgttttaagtca

SEQ ID NO: 481306 - DNA, 15 bp, Homo sapiens
agtatgttttaagtc

SEQ ID NO: 481307 - DNA, 15 bp, Homo sapiens
cagtatgttttaagt

SEQ ID NO: 481308 - DNA, 15 bp, Homo sapiens
acagtatgttttaag

SEQ ID NO: 481309 - DNA, 15 bp, Homo sapiens
cacagtatgttttaa

SEQ ID NO: 481310 - DNA, 15 bp, Homo sapiens
tcacagtatgtttta

SEQ ID NO: 481311 - DNA, 15 bp, Homo sapiens
ttcacagtatgtttt

SEQ ID NO: 481312 - DNA, 15 bp, Homo sapiens
tttcacagtatgttt

SEQ ID NO: 481313 - DNA, 15 bp, Homo sapiens
gtttcacagtatgtt

SEQ ID NO: 481314 - DNA, 15 bp, Homo sapiens
agtttcacagtatgt

SEQ ID NO: 481315 - DNA, 15 bp, Homo sapiens
aagtttcacagtatg

SEQ ID NO: 481316 - DNA, 15 bp, Homo sapiens
caagtttcacagtat

SEQ ID NO: 481317 - DNA, 15 bp, Homo sapiens
acaagtttcacagta

SEQ ID NO: 481318 - DNA, 15 bp, Homo sapiens
tacaagtttcacagt

SEQ ID NO: 481319 - DNA, 15 bp, Homo sapiens
ttacaagtttcacag

SEQ ID NO: 481320 - DNA, 15 bp, Homo sapiens
cttacaagtttcaca

SEQ ID NO: 481321 - DNA, 15 bp, Homo sapiens
tcttacaagtttcac

SEQ ID NO: 481322 - DNA, 15 bp, Homo sapiens
atcttacaagtttca

SEQ ID NO: 481323 - DNA, 15 bp, Homo sapiens
aatcttacaagtttc

SEQ ID NO: 481324 - DNA, 15 bp, Homo sapiens
taatcttacaagttt

SEQ ID NO: 481325 - DNA, 15 bp, Homo sapiens
ataatcttacaagtt

SEQ ID NO: 481326 - DNA, 15 bp, Homo sapiens
cataatcttacaagt

SEQ ID NO: 481327 - DNA, 15 bp, Homo sapiens
acataatcttacaag

SEQ ID NO: 481328 - DNA, 15 bp, Homo sapiens
cacataatcttacaa

SEQ ID NO: 481329 - DNA, 15 bp, Homo sapiens
tcacataatcttaca

SEQ ID NO: 481330 - DNA, 15 bp, Homo sapiens
ttcacataatcttac

SEQ ID NO: 481331 - DNA, 15 bp, Homo sapiens
attcacataatctta

SEQ ID NO: 481332 - DNA, 15 bp, Homo sapiens
gattcacataatctt

SEQ ID NO: 481333 - DNA, 15 bp, Homo sapiens
tgattcacataatct

SEQ ID NO: 481334 - DNA, 15 bp, Homo sapiens
atgattcacataatc

SEQ ID NO: 481335 - DNA, 15 bp, Homo sapiens
catgattcacataat

SEQ ID NO: 481336 - DNA, 15 bp, Homo sapiens
acatgattcacataa

SEQ ID NO: 481337 - DNA, 15 bp, Homo sapiens
aacatgattcacata

SEQ ID NO: 481338 - DNA, 15 bp, Homo sapiens
aaacatgattcacat

SEQ ID NO: 481339 - DNA, 15 bp, Homo sapiens
caaacatgattcaca

SEQ ID NO: 481340 - DNA, 15 bp, Homo sapiens
acaaacatgattcac

SEQ ID NO: 481341 - DNA, 15 bp, Homo sapiens
tacaaacatgattca

SEQ ID NO: 481342 - DNA, 15 bp, Homo sapiens
gtacaaacatgattc

SEQ ID NO: 481343 - DNA, 15 bp, Homo sapiens
tgtacaaacatgatt

SEQ ID NO: 481344 - DNA, 15 bp, Homo sapiens
ctgtacaaacatgat

SEQ ID NO: 481345 - DNA, 15 bp, Homo sapiens
actgtacaaacatga

SEQ ID NO: 481346 - DNA, 15 bp, Homo sapiens
aactgtacaaacatg

SEQ ID NO: 481347 - DNA, 15 bp, Homo sapiens
aaactgtacaaacat

SEQ ID NO: 481348 - DNA, 15 bp, Homo sapiens
taaactgtacaaaca

SEQ ID NO: 481349 - DNA, 15 bp, Homo sapiens
ataaactgtacaaac

SEQ ID NO: 481350 - DNA, 15 bp, Homo sapiens
tataaactgtacaaa

SEQ ID NO: 481351 - DNA, 15 bp, Homo sapiens
gtataaactgtacaa

SEQ ID NO: 481352 - DNA, 15 bp, Homo sapiens
agtataaactgtaca

SEQ ID NO: 481353 - DNA, 15 bp, Homo sapiens
aagtataaactgtac

SEQ ID NO: 481354 - DNA, 15 bp, Homo sapiens
taagtataaactgta

SEQ ID NO: 481355 - DNA, 15 bp, Homo sapiens
ttaagtataaactgt

SEQ ID NO: 481356 - DNA, 15 bp, Homo sapiens
tttaagtataaactg

SEQ ID NO: 481357 - DNA, 15 bp, Homo sapiens
ttttaagtataaact

SEQ ID NO: 481358 - DNA, 15 bp, Homo sapiens
tttttaagtataaac

SEQ ID NO: 481359 - DNA, 15 bp, Homo sapiens
ttttttaagtataaa

SEQ ID NO: 481360 - DNA, 15 bp, Homo sapiens
tttttttaagtataa

SEQ ID NO: 481361 - DNA, 15 bp, Homo sapiens
ttttttttaagtata

SEQ ID NO: 481362 - DNA, 15 bp, Homo sapiens
tttttttttaagtat

SEQ ID NO: 481363 - DNA, 15 bp, Homo sapiens
ttttttttttaagta

SEQ ID NO: 481364 - DNA, 15 bp, Homo sapiens
tttttttttttaagt

SEQ ID NO: 481365 - DNA, 15 bp, Homo sapiens
gttttttttttttta

SEQ ID NO: 481366 - DNA, 15 bp, Homo sapiens
tgttttttttttttt

SEQ ID NO: 481367 - DNA, 15 bp, Homo sapiens
atgtttttttttttt

SEQ ID NO: 481368 - DNA, 15 bp, Homo sapiens
catgttttttttttt

SEQ ID NO: 481369 - DNA, 15 bp, Homo sapiens
ccatgtttttttttt

SEQ ID NO: 481370 - DNA, 15 bp, Homo sapiens
accatgttttttttt

SEQ ID NO: 481371 - DNA, 15 bp, Homo sapiens
caccatgtttttttt

SEQ ID NO: 481372 - DNA, 15 bp, Homo sapiens
tcaccatgttttttt

SEQ ID NO: 481373 - DNA, 15 bp, Homo sapiens
ttcaccatgtttttt

SEQ ID NO: 481374 - DNA, 15 bp, Homo sapiens
gttcaccatgttttt

SEQ ID NO: 481375 - DNA, 15 bp, Homo sapiens
agttcaccatgtttt

SEQ ID NO: 481376 - DNA, 15 bp, Homo sapiens
gagttcaccatgttt

SEQ ID NO: 481377 - DNA, 15 bp, Homo sapiens
agagttcaccatgtt

SEQ ID NO: 481378 - DNA, 15 bp, Homo sapiens
aagagttcaccatgt

SEQ ID NO: 481379 - DNA, 15 bp, Homo sapiens
taagagttcaccatg

SEQ ID NO: 481380 - DNA, 15 bp, Homo sapiens
ataagagttcaccat

SEQ ID NO: 481381 - DNA, 15 bp, Homo sapiens
gataagagttcacca

SEQ ID NO: 481382 - DNA, 15 bp, Homo sapiens
tgataagagttcacc

SEQ ID NO: 481383 - DNA, 15 bp, Homo sapiens
ttgataagagttcac

SEQ ID NO: 481384 - DNA, 15 bp, Homo sapiens
attgataagagttca

SEQ ID NO: 481385 - DNA, 15 bp, Homo sapiens
aattgataagagttc

SEQ ID NO: 481386 - DNA, 15 bp, Homo sapiens
gaattgataagagtt

SEQ ID NO: 481387 - DNA, 15 bp, Homo sapiens
tgaattgataagagt

SEQ ID NO: 481388 - DNA, 15 bp, Homo sapiens
gtgaattgataagag

SEQ ID NO: 481389 - DNA, 15 bp, Homo sapiens
tgtgaattgataaga

SEQ ID NO: 481390 - DNA, 15 bp, Homo sapiens
ctgtgaattgataag

SEQ ID NO: 481391 - DNA, 15 bp, Homo sapiens
tctgtgaattgataa

SEQ ID NO: 481392 - DNA, 15 bp, Homo sapiens
ctctgtgaattgata

SEQ ID NO: 481393 - DNA, 15 bp, Homo sapiens
actctgtgaattgat

SEQ ID NO: 481394 - DNA, 15 bp, Homo sapiens
tactctgtgaattga

SEQ ID NO: 481395 - DNA, 15 bp, Homo sapiens
ttactctgtgaattg

SEQ ID NO: 481396 - DNA, 15 bp, Homo sapiens
tttactctgtgaatt

SEQ ID NO: 481397 - DNA, 15 bp, Homo sapiens
ttttactctgtgaat

SEQ ID NO: 481398 - DNA, 15 bp, Homo sapiens
tttttactctgtgaa

SEQ ID NO: 481399 - DNA, 15 bp, Homo sapiens
ttttttactctgtga

SEQ ID NO: 481400 - DNA, 15 bp, Homo sapiens
gttttttactctgtg

SEQ ID NO: 481401 - DNA, 15 bp, Homo sapiens
tgttttttactctgt

SEQ ID NO: 481402 - DNA, 15 bp, Homo sapiens
ttgttttttactctg

SEQ ID NO: 481403 - DNA, 15 bp, Homo sapiens
gttgttttttactct

SEQ ID NO: 481404 - DNA, 15 bp, Homo sapiens
tgttgttttttactc

SEQ ID NO: 481405 - DNA, 15 bp, Homo sapiens
atgttgttttttact

SEQ ID NO: 481406 - DNA, 15 bp, Homo sapiens
aatgttgttttttac

SEQ ID NO: 481407 - DNA, 15 bp, Homo sapiens
gaatgttgtttttta

SEQ ID NO: 481408 - DNA, 15 bp, Homo sapiens
ggaatgttgtttttt

SEQ ID NO: 481409 - DNA, 15 bp, Homo sapiens
gggaatgttgttttt

SEQ ID NO: 481410 - DNA, 15 bp, Homo sapiens
tgggaatgttgtttt

SEQ ID NO: 481411 - DNA, 15 bp, Homo sapiens
ttgggaatgttgttt

SEQ ID NO: 481412 - DNA, 15 bp, Homo sapiens
attgggaatgttgtt

SEQ ID NO: 481413 - DNA, 15 bp, Homo sapiens
cattgggaatgttgt

SEQ ID NO: 481414 - DNA, 15 bp, Homo sapiens
gcattgggaatgttg

SEQ ID NO: 481415 - DNA, 15 bp, Homo sapiens
agcattgggaatgtt

SEQ ID NO: 481416 - DNA, 15 bp, Homo sapiens
cagcattgggaatgt

SEQ ID NO: 481417 - DNA, 15 bp, Homo sapiens
acagcattgggaatg

SEQ ID NO: 481418 - DNA, 15 bp, Homo sapiens
cacagcattgggaat

SEQ ID NO: 481419 - DNA, 15 bp, Homo sapiens
ccacagcattgggaa

SEQ ID NO: 481420 - DNA, 15 bp, Homo sapiens
tccacagcattggga

SEQ ID NO: 481421 - DNA, 15 bp, Homo sapiens
ttccacagcattggg

SEQ ID NO: 481422 - DNA, 15 bp, Homo sapiens
tttccacagcattgg

SEQ ID NO: 481423 - DNA, 15 bp, Homo sapiens
gtttccacagcattg

SEQ ID NO: 481424 - DNA, 15 bp, Homo sapiens
tgtttccacagcatt

SEQ ID NO: 481425 - DNA, 15 bp, Homo sapiens
gtgtttccacagcat

SEQ ID NO: 481426 - DNA, 15 bp, Homo sapiens
ggtgtttccacagca

SEQ ID NO: 481427 - DNA, 15 bp, Homo sapiens
aggtgtttccacagc

SEQ ID NO: 481428 - DNA, 15 bp, Homo sapiens
gaggtgtttccacag

SEQ ID NO: 481429 - DNA, 15 bp, Homo sapiens
agaggtgtttccaca

SEQ ID NO: 481430 - DNA, 15 bp, Homo sapiens
tagaggtgtttccac

SEQ ID NO: 481431 - DNA, 15 bp, Homo sapiens
atagaggtgtttcca

SEQ ID NO: 481432 - DNA, 15 bp, Homo sapiens
catagaggtgtttcc

SEQ ID NO: 481433 - DNA, 15 bp, Homo sapiens
ccatagaggtgtttc

SEQ ID NO: 481434 - DNA, 15 bp, Homo sapiens
gccatagaggtgttt

SEQ ID NO: 481435 - DNA, 15 bp, Homo sapiens
ggccatagaggtgtt

SEQ ID NO: 481436 - DNA, 15 bp, Homo sapiens
gggccatagaggtgt

SEQ ID NO: 481437 - DNA, 15 bp, Homo sapiens
tgggccatagaggtg

SEQ ID NO: 481438 - DNA, 15 bp, Homo sapiens
ttgggccatagaggt

SEQ ID NO: 481439 - DNA, 15 bp, Homo sapiens
tttgggccatagagg

SEQ ID NO: 481440 - DNA, 15 bp, Homo sapiens
atttgggccatagag

SEQ ID NO: 481441 - DNA, 15 bp, Homo sapiens
gatttgggccataga

SEQ ID NO: 481442 - DNA, 15 bp, Homo sapiens
tgatttgggccatag

SEQ ID NO: 481443 - DNA, 15 bp, Homo sapiens
gtgatttgggccata

SEQ ID NO: 481444 - DNA, 15 bp, Homo sapiens
tgtgatttgggccat

SEQ ID NO: 481445 - DNA, 15 bp, Homo sapiens
ctgtgatttgggcca

SEQ ID NO: 481446 - DNA, 15 bp, Homo sapiens
actgtgatttgggcc

SEQ ID NO: 481447 - DNA, 15 bp, Homo sapiens
aactgtgatttgggc

SEQ ID NO: 481448 - DNA, 15 bp, Homo sapiens
gaactgtgatttggg

SEQ ID NO: 481449 - DNA, 15 bp, Homo sapiens
agaactgtgatttgg

SEQ ID NO: 481450 - DNA, 15 bp, Homo sapiens
aagaactgtgatttg

SEQ ID NO: 481451 - DNA, 15 bp, Homo sapiens
aaagaactgtgattt

SEQ ID NO: 481452 - DNA, 15 bp, Homo sapiens
aaaagaactgtgatt

SEQ ID NO: 481453 - DNA, 15 bp, Homo sapiens
gaaaagaactgtgat

SEQ ID NO: 481454 - DNA, 15 bp, Homo sapiens
agaaaagaactgtga

SEQ ID NO: 481455 - DNA, 15 bp, Homo sapiens
aagaaaagaactgtg

SEQ ID NO: 481456 - DNA, 15 bp, Homo sapiens
taagaaaagaactgt

SEQ ID NO: 481457 - DNA, 15 bp, Homo sapiens
gtaagaaaagaactg

SEQ ID NO: 481458 - DNA, 15 bp, Homo sapiens
ggtaagaaaagaact

SEQ ID NO: 481459 - DNA, 15 bp, Homo sapiens
tggtaagaaaagaac

SEQ ID NO: 481460 - DNA, 15 bp, Homo sapiens
atggtaagaaaagaa

SEQ ID NO: 481461 - DNA, 15 bp, Homo sapiens
aatggtaagaaaaga

SEQ ID NO: 481462 - DNA, 15 bp, Homo sapiens
gaatggtaagaaaag

SEQ ID NO: 481463 - DNA, 15 bp, Homo sapiens
ggaatggtaagaaaa

SEQ ID NO: 481464 - DNA, 15 bp, Homo sapiens
gggaatggtaagaaa

SEQ ID NO: 481465 - DNA, 15 bp, Homo sapiens
ggggaatggtaagaa

SEQ ID NO: 481466 - DNA, 15 bp, Homo sapiens
gggggaatggtaaga

SEQ ID NO: 481467 - DNA, 15 bp, Homo sapiens
agggggaatggtaag

SEQ ID NO: 481468 - DNA, 15 bp, Homo sapiens
tagggggaatggtaa

SEQ ID NO: 481469 - DNA, 15 bp, Homo sapiens
gtagggggaatggta

SEQ ID NO: 481470 - DNA, 15 bp, Homo sapiens
ggtagggggaatggt

SEQ ID NO: 481471 - DNA, 15 bp, Homo sapiens
tggtagggggaatgg

SEQ ID NO: 481472 - DNA, 15 bp, Homo sapiens
gtggtagggggaatg

SEQ ID NO: 481473 - DNA, 15 bp, Homo sapiens
agtggtagggggaat

SEQ ID NO: 481474 - DNA, 15 bp, Homo sapiens
tagtggtagggggaa

SEQ ID NO: 481475 - DNA, 15 bp, Homo sapiens
atagtggtaggggga

SEQ ID NO: 481476 - DNA, 15 bp, Homo sapiens
gatagtggtaggggg

SEQ ID NO: 481477 - DNA, 15 bp, Homo sapiens
agatagtggtagggg

SEQ ID NO: 481478 - DNA, 15 bp, Homo sapiens
aagatagtggtaggg

SEQ ID NO: 481479 - DNA, 15 bp, Homo sapiens
caagatagtggtagg

SEQ ID NO: 481480 - DNA, 15 bp, Homo sapiens
tcaagatagtggtag

SEQ ID NO: 481481 - DNA, 15 bp, Homo sapiens
ttcaagatagtggta

SEQ ID NO: 481482 - DNA, 15 bp, Homo sapiens
attcaagatagtggt

SEQ ID NO: 481483 - DNA, 15 bp, Homo sapiens
aattcaagatagtgg

SEQ ID NO: 481484 - DNA, 15 bp, Homo sapiens
caattcaagatagtg

SEQ ID NO: 481485 - DNA, 15 bp, Homo sapiens
acaattcaagatagt

SEQ ID NO: 481486 - DNA, 15 bp, Homo sapiens
tacaattcaagatag

SEQ ID NO: 481487 - DNA, 15 bp, Homo sapiens
atacaattcaagata

SEQ ID NO: 481488 - DNA, 15 bp, Homo sapiens
aatacaattcaagat

SEQ ID NO: 481489 - DNA, 15 bp, Homo sapiens
aaatacaattcaaga

SEQ ID NO: 481490 - DNA, 15 bp, Homo sapiens
aaaatacaattcaag

SEQ ID NO: 481491 - DNA, 15 bp, Homo sapiens
taaaatacaattcaa

SEQ ID NO: 481492 - DNA, 15 bp, Homo sapiens
ttaaaatacaattca

SEQ ID NO: 481493 - DNA, 15 bp, Homo sapiens
tttaaaatacaattc

SEQ ID NO: 481494 - DNA, 15 bp, Homo sapiens
ttttaaaatacaatt

SEQ ID NO: 481495 - DNA, 15 bp, Homo sapiens
attttaaaatacaat

SEQ ID NO: 481496 - DNA, 15 bp, Homo sapiens
aattttaaaatacaa

SEQ ID NO: 481497 - DNA, 15 bp, Homo sapiens
aaattttaaaataca

SEQ ID NO: 481498 - DNA, 15 bp, Homo sapiens
gaaattttaaaatac

SEQ ID NO: 481499 - DNA, 15 bp, Homo sapiens
ggaaattttaaaata

SEQ ID NO: 481500 - DNA, 15 bp, Homo sapiens
aggaaattttaaaat

SEQ ID NO: 481501 - DNA, 15 bp, Homo sapiens
aaggaaattttaaaa

SEQ ID NO: 481502 - DNA, 15 bp, Homo sapiens
aaaggaaattttaaa

SEQ ID NO: 481503 - DNA, 15 bp, Homo sapiens
gaaaggaaattttaa

SEQ ID NO: 481504 - DNA, 15 bp, Homo sapiens
agaaaggaaatttta

SEQ ID NO: 481505 - DNA, 15 bp, Homo sapiens
aagaaaggaaatttt

SEQ ID NO: 481506 - DNA, 15 bp, Homo sapiens
aaagaaaggaaattt

SEQ ID NO: 481507 - DNA, 15 bp, Homo sapiens
aaaagaaaggaaatt

SEQ ID NO: 481508 - DNA, 15 bp, Homo sapiens
gaaaagaaaggaaat

SEQ ID NO: 481509 - DNA, 15 bp, Homo sapiens
agaaaagaaaggaaa

SEQ ID NO: 481510 - DNA, 15 bp, Homo sapiens
aagaaaagaaaggaa

SEQ ID NO: 481511 - DNA, 15 bp, Homo sapiens
aaagaaaagaaagga

SEQ ID NO: 481512 - DNA, 15 bp, Homo sapiens
taaagaaaagaaagg

SEQ ID NO: 481513 - DNA, 15 bp, Homo sapiens
ataaagaaaagaaag

SEQ ID NO: 481514 - DNA, 15 bp, Homo sapiens
cataaagaaaagaaa

SEQ ID NO: 481515 - DNA, 15 bp, Homo sapiens
acataaagaaaagaa

SEQ ID NO: 481516 - DNA, 15 bp, Homo sapiens
gacataaagaaaaga

SEQ ID NO: 481517 - DNA, 15 bp, Homo sapiens
agacataaagaaaag

SEQ ID NO: 481518 - DNA, 15 bp, Homo sapiens
gagacataaagaaaa

SEQ ID NO: 481519 - DNA, 15 bp, Homo sapiens
ggagacataaagaaa

SEQ ID NO: 481520 - DNA, 15 bp, Homo sapiens
tggagacataaagaa

SEQ ID NO: 481521 - DNA, 15 bp, Homo sapiens
atggagacataaaga

SEQ ID NO: 481522 - DNA, 15 bp, Homo sapiens
catggagacataaag

SEQ ID NO: 481523 - DNA, 15 bp, Homo sapiens
tcatggagacataaa

SEQ ID NO: 481524 - DNA, 15 bp, Homo sapiens
ttcatggagacataa

SEQ ID NO: 481525 - DNA, 15 bp, Homo sapiens
gttcatggagacata

SEQ ID NO: 481526 - DNA, 15 bp, Homo sapiens
tgttcatggagacat

SEQ ID NO: 481527 - DNA, 15 bp, Homo sapiens
ttgttcatggagaca

SEQ ID NO: 481528 - DNA, 15 bp, Homo sapiens
attgttcatggagac

SEQ ID NO: 481529 - DNA, 15 bp, Homo sapiens
cattgttcatggaga

SEQ ID NO: 481530 - DNA, 15 bp, Homo sapiens
acattgttcatggag

SEQ ID NO: 481531 - DNA, 15 bp, Homo sapiens
tacattgttcatgga

SEQ ID NO: 481532 - DNA, 15 bp, Homo sapiens
atacattgttcatgg

SEQ ID NO: 481533 - DNA, 15 bp, Homo sapiens
aatacattgttcatg

SEQ ID NO: 481534 - DNA, 15 bp, Homo sapiens
caatacattgttcat

SEQ ID NO: 481535 - DNA, 15 bp, Homo sapiens
gcaatacattgttca

SEQ ID NO: 481536 - DNA, 15 bp, Homo sapiens
agcaatacattgttc

SEQ ID NO: 481537 - DNA, 15 bp, Homo sapiens
aagcaatacattgtt

SEQ ID NO: 481538 - DNA, 15 bp, Homo sapiens
aaagcaatacattgt

SEQ ID NO: 481539 - DNA, 15 bp, Homo sapiens
caaagcaatacattg

SEQ ID NO: 481540 - DNA, 15 bp, Homo sapiens
acaaagcaatacatt

SEQ ID NO: 481541 - DNA, 15 bp, Homo sapiens
aacaaagcaatacat

SEQ ID NO: 481542 - DNA, 15 bp, Homo sapiens
aaacaaagcaataca

SEQ ID NO: 481543 - DNA, 15 bp, Homo sapiens
taaacaaagcaatac

SEQ ID NO: 481544 - DNA, 15 bp, Homo sapiens
gtaaacaaagcaata

SEQ ID NO: 481545 - DNA, 15 bp, Homo sapiens
agtaaacaaagcaat

SEQ ID NO: 481546 - DNA, 15 bp, Homo sapiens
aagtaaacaaagcaa

SEQ ID NO: 481547 - DNA, 15 bp, Homo sapiens
taagtaaacaaagca

SEQ ID NO: 481548 - DNA, 15 bp, Homo sapiens
ataagtaaacaaagc

SEQ ID NO: 481549 - DNA, 15 bp, Homo sapiens
aataagtaaacaaag

SEQ ID NO: 481550 - DNA, 15 bp, Homo sapiens
aaataagtaaacaaa

SEQ ID NO: 481551 - DNA, 15 bp, Homo sapiens
aaaataagtaaacaa

SEQ ID NO: 481552 - DNA, 15 bp, Homo sapiens
caaaataagtaaaca

SEQ ID NO: 481553 - DNA, 15 bp, Homo sapiens
tcaaaataagtaaac

SEQ ID NO: 481554 - DNA, 15 bp, Homo sapiens
atcaaaataagtaaa

SEQ ID NO: 481555 - DNA, 15 bp, Homo sapiens
aatcaaaataagtaa

SEQ ID NO: 481556 - DNA, 15 bp, Homo sapiens
aaatcaaaataagta

SEQ ID NO: 481557 - DNA, 15 bp, Homo sapiens
aaaatcaaaataagt

SEQ ID NO: 481558 - DNA, 15 bp, Homo sapiens
gaaaatcaaaataag

SEQ ID NO: 481559 - DNA, 15 bp, Homo sapiens
tgaaaatcaaaataa

SEQ ID NO: 481560 - DNA, 15 bp, Homo sapiens
atgaaaatcaaaata

SEQ ID NO: 481561 - DNA, 15 bp, Homo sapiens
catgaaaatcaaaat

SEQ ID NO: 481562 - DNA, 15 bp, Homo sapiens
acatgaaaatcaaaa

SEQ ID NO: 481563 - DNA, 15 bp, Homo sapiens
tacatgaaaatcaaa

SEQ ID NO: 481564 - DNA, 15 bp, Homo sapiens
ttacatgaaaatcaa

SEQ ID NO: 481565 - DNA, 15 bp, Homo sapiens
attacatgaaaatca

SEQ ID NO: 481566 - DNA, 15 bp, Homo sapiens
cattacatgaaaatc

SEQ ID NO: 481567 - DNA, 15 bp, Homo sapiens
ccattacatgaaaat

SEQ ID NO: 481568 - DNA, 15 bp, Homo sapiens
tccattacatgaaaa

SEQ ID NO: 481569 - DNA, 15 bp, Homo sapiens
ttccattacatgaaa

SEQ ID NO: 481570 - DNA, 15 bp, Homo sapiens
attccattacatgaa

SEQ ID NO: 481571 - DNA, 15 bp, Homo sapiens
tattccattacatga

SEQ ID NO: 481572 - DNA, 15 bp, Homo sapiens
ttattccattacatg

SEQ ID NO: 481573 - DNA, 15 bp, Homo sapiens
attattccattacat

SEQ ID NO: 481574 - DNA, 15 bp, Homo sapiens
tattattccattaca

SEQ ID NO: 481575 - DNA, 15 bp, Homo sapiens
gtattattccattac

SEQ ID NO: 481576 - DNA, 15 bp, Homo sapiens
agtattattccatta

SEQ ID NO: 481577 - DNA, 15 bp, Homo sapiens
cagtattattccatt

SEQ ID NO: 481578 - DNA, 15 bp, Homo sapiens
acagtattattccat

SEQ ID NO: 481579 - DNA, 15 bp, Homo sapiens
tacagtattattcca

SEQ ID NO: 481580 - DNA, 15 bp, Homo sapiens
ttacagtattattcc

SEQ ID NO: 481581 - DNA, 15 bp, Homo sapiens
cttacagtattattc

SEQ ID NO: 481582 - DNA, 15 bp, Homo sapiens
acttacagtattatt

SEQ ID NO: 481583 - DNA, 15 bp, Homo sapiens
tacttacagtattat

SEQ ID NO: 481584 - DNA, 15 bp, Homo sapiens
atacttacagtatta

SEQ ID NO: 481585 - DNA, 15 bp, Homo sapiens
aatacttacagtatt

SEQ ID NO: 481586 - DNA, 15 bp, Homo sapiens
gaatacttacagtat

SEQ ID NO: 481587 - DNA, 15 bp, Homo sapiens
agaatacttacagta

SEQ ID NO: 481588 - DNA, 15 bp, Homo sapiens
cagaatacttacagt

SEQ ID NO: 481589 - DNA, 15 bp, Homo sapiens
tcagaatacttacag

SEQ ID NO: 481590 - DNA, 15 bp, Homo sapiens
atcagaatacttaca

SEQ ID NO: 481591 - DNA, 15 bp, Homo sapiens
aatcagaatacttac

SEQ ID NO: 481592 - DNA, 15 bp, Homo sapiens
aaatcagaatactta

SEQ ID NO: 481593 - DNA, 15 bp, Homo sapiens
gaaatcagaatactt

SEQ ID NO: 481594 - DNA, 15 bp, Homo sapiens
agaaatcagaatact

SEQ ID NO: 481595 - DNA, 15 bp, Homo sapiens
aagaaatcagaatac

SEQ ID NO: 481596 - DNA, 15 bp, Homo sapiens
aaagaaatcagaata

SEQ ID NO: 481597 - DNA, 15 bp, Homo sapiens
aaaagaaatcagaat

SEQ ID NO: 481598 - DNA, 15 bp, Homo sapiens
caaaagaaatcagaa

SEQ ID NO: 481599 - DNA, 15 bp, Homo sapiens
acaaaagaaatcaga

SEQ ID NO: 481600 - DNA, 15 bp, Homo sapiens
tacaaaagaaatcag

SEQ ID NO: 481601 - DNA, 15 bp, Homo sapiens
ttacaaaagaaatca

SEQ ID NO: 481602 - DNA, 15 bp, Homo sapiens
cttacaaaagaaatc

SEQ ID NO: 481603 - DNA, 15 bp, Homo sapiens
gcttacaaaagaaat

SEQ ID NO: 481604 - DNA, 15 bp, Homo sapiens
tgcttacaaaagaaa

SEQ ID NO: 481605 - DNA, 15 bp, Homo sapiens
atgcttacaaaagaa

SEQ ID NO: 481606 - DNA, 15 bp, Homo sapiens
gatgcttacaaaaga

SEQ ID NO: 481607 - DNA, 15 bp, Homo sapiens
tgatgcttacaaaag

SEQ ID NO: 481608 - DNA, 15 bp, Homo sapiens
atgatgcttacaaaa

SEQ ID NO: 481609 - DNA, 15 bp, Homo sapiens
aatgatgcttacaaa

SEQ ID NO: 481610 - DNA, 15 bp, Homo sapiens
aaatgatgcttacaa

SEQ ID NO: 481611 - DNA, 15 bp, Homo sapiens
aaaatgatgcttaca

SEQ ID NO: 481612 - DNA, 15 bp, Homo sapiens
aaaaatgatgcttac

SEQ ID NO: 481613 - DNA, 15 bp, Homo sapiens
gaaaaatgatgctta

SEQ ID NO: 481614 - DNA, 15 bp, Homo sapiens
agaaaaatgatgctt

SEQ ID NO: 481615 - DNA, 15 bp, Homo sapiens
aagaaaaatgatgct

SEQ ID NO: 481616 - DNA, 15 bp, Homo sapiens
aaagaaaaatgatgc

SEQ ID NO: 481617 - DNA, 15 bp, Homo sapiens
aaaagaaaaatgatg

SEQ ID NO: 481618 - DNA, 15 bp, Homo sapiens
caaaagaaaaatgat

SEQ ID NO: 481619 - DNA, 15 bp, Homo sapiens
tcaaaagaaaaatga

SEQ ID NO: 481620 - DNA, 15 bp, Homo sapiens
ctcaaaagaaaaatg

SEQ ID NO: 481621 - DNA, 15 bp, Homo sapiens
gctcaaaagaaaaat

SEQ ID NO: 481622 - DNA, 15 bp, Homo sapiens
cgctcaaaagaaaaa

SEQ ID NO: 481623 - DNA, 15 bp, Homo sapiens
acgctcaaaagaaaa

SEQ ID NO: 481624 - DNA, 15 bp, Homo sapiens
aacgctcaaaagaaa

SEQ ID NO: 481625 - DNA, 15 bp, Homo sapiens
taacgctcaaaagaa

SEQ ID NO: 481626 - DNA, 15 bp, Homo sapiens
ttaacgctcaaaaga

SEQ ID NO: 481627 - DNA, 15 bp, Homo sapiens
attaacgctcaaaag

SEQ ID NO: 481628 - DNA, 15 bp, Homo sapiens
gattaacgctcaaaa

SEQ ID NO: 481629 - DNA, 15 bp, Homo sapiens
agattaacgctcaaa

SEQ ID NO: 481630 - DNA, 15 bp, Homo sapiens
tagattaacgctcaa

SEQ ID NO: 481631 - DNA, 15 bp, Homo sapiens
atagattaacgctca

SEQ ID NO: 481632 - DNA, 15 bp, Homo sapiens
catagattaacgctc

SEQ ID NO: 481633 - DNA, 15 bp, Homo sapiens
ccatagattaacgct

SEQ ID NO: 481634 - DNA, 15 bp, Homo sapiens
accatagattaacgc

SEQ ID NO: 481635 - DNA, 15 bp, Homo sapiens
taccatagattaacg

SEQ ID NO: 481636 - DNA, 15 bp, Homo sapiens
ataccatagattaac

SEQ ID NO: 481637 - DNA, 15 bp, Homo sapiens
aataccatagattaa

SEQ ID NO: 481638 - DNA, 15 bp, Homo sapiens
caataccatagatta

SEQ ID NO: 481639 - DNA, 15 bp, Homo sapiens
acaataccatagatt

SEQ ID NO: 481640 - DNA, 15 bp, Homo sapiens
tacaataccatagat

SEQ ID NO: 481641 - DNA, 15 bp, Homo sapiens
atacaataccataga

SEQ ID NO: 481642 - DNA, 15 bp, Homo sapiens
catacaataccatag

SEQ ID NO: 481643 - DNA, 15 bp, Homo sapiens
gcatacaataccata

SEQ ID NO: 481644 - DNA, 15 bp, Homo sapiens
tgcatacaataccat

SEQ ID NO: 481645 - DNA, 15 bp, Homo sapiens
ctgcatacaatacca

SEQ ID NO: 481646 - DNA, 15 bp, Homo sapiens
actgcatacaatacc

SEQ ID NO: 481647 - DNA, 15 bp, Homo sapiens
aactgcatacaatac

SEQ ID NO: 481648 - DNA, 15 bp, Homo sapiens
gaactgcatacaata

SEQ ID NO: 481649 - DNA, 15 bp, Homo sapiens
tgaactgcatacaat

SEQ ID NO: 481650 - DNA, 15 bp, Homo sapiens
atgaactgcatacaa

SEQ ID NO: 481651 - DNA, 15 bp, Homo sapiens
aatgaactgcataca

SEQ ID NO: 481652 - DNA, 15 bp, Homo sapiens
gaatgaactgcatac

SEQ ID NO: 481653 - DNA, 15 bp, Homo sapiens
tgaatgaactgcata

SEQ ID NO: 481654 - DNA, 15 bp, Homo sapiens
ctgaatgaactgcat

SEQ ID NO: 481655 - DNA, 15 bp, Homo sapiens
actgaatgaactgca

SEQ ID NO: 481656 - DNA, 15 bp, Homo sapiens
aactgaatgaactgc

SEQ ID NO: 481657 - DNA, 15 bp, Homo sapiens
aaactgaatgaactg

SEQ ID NO: 481658 - DNA, 15 bp, Homo sapiens
aaaactgaatgaact

SEQ ID NO: 481659 - DNA, 15 bp, Homo sapiens
taaaactgaatgaac

SEQ ID NO: 481660 - DNA, 15 bp, Homo sapiens
gtaaaactgaatgaa

SEQ ID NO: 481661 - DNA, 15 bp, Homo sapiens
agtaaaactgaatga

SEQ ID NO: 481662 - DNA, 15 bp, Homo sapiens
cagtaaaactgaatg

SEQ ID NO: 481663 - DNA, 15 bp, Homo sapiens
gcagtaaaactgaat

SEQ ID NO: 481664 - DNA, 15 bp, Homo sapiens
agcagtaaaactgaa

SEQ ID NO: 481665 - DNA, 15 bp, Homo sapiens
tagcagtaaaactga

SEQ ID NO: 481666 - DNA, 15 bp, Homo sapiens
atagcagtaaaactg

SEQ ID NO: 481667 - DNA, 15 bp, Homo sapiens
tatagcagtaaaact

SEQ ID NO: 481668 - DNA, 15 bp, Homo sapiens
gtatagcagtaaaac

SEQ ID NO: 481669 - DNA, 15 bp, Homo sapiens
tgtatagcagtaaaa

SEQ ID NO: 481670 - DNA, 15 bp, Homo sapiens
atgtatagcagtaaa

SEQ ID NO: 481671 - DNA, 15 bp, Homo sapiens
aatgtatagcagtaa

SEQ ID NO: 481672 - DNA, 15 bp, Homo sapiens
taatgtatagcagta

SEQ ID NO: 481673 - DNA, 15 bp, Homo sapiens
ctaatgtatagcagt

SEQ ID NO: 481674 - DNA, 15 bp, Homo sapiens
actaatgtatagcag

SEQ ID NO: 481675 - DNA, 15 bp, Homo sapiens
aactaatgtatagca

SEQ ID NO: 481676 - DNA, 15 bp, Homo sapiens
gaactaatgtatagc

SEQ ID NO: 481677 - DNA, 15 bp, Homo sapiens
tgaactaatgtatag

SEQ ID NO: 481678 - DNA, 15 bp, Homo sapiens
atgaactaatgtata

SEQ ID NO: 481679 - DNA, 15 bp, Homo sapiens
aatgaactaatgtat

SEQ ID NO: 481680 - DNA, 15 bp, Homo sapiens
taatgaactaatgta

SEQ ID NO: 481681 - DNA, 15 bp, Homo sapiens
ataatgaactaatgt

SEQ ID NO: 481682 - DNA, 15 bp, Homo sapiens
aataatgaactaatg

SEQ ID NO: 481683 - DNA, 15 bp, Homo sapiens
aaataatgaactaat

SEQ ID NO: 481684 - DNA, 15 bp, Homo sapiens
caaataatgaactaa

SEQ ID NO: 481685 - DNA, 15 bp, Homo sapiens
acaaataatgaacta

SEQ ID NO: 481686 - DNA, 15 bp, Homo sapiens
tacaaataatgaact

SEQ ID NO: 481687 - DNA, 15 bp, Homo sapiens
atacaaataatgaac

SEQ ID NO: 481688 - DNA, 15 bp, Homo sapiens
tatacaaataatgaa

SEQ ID NO: 481689 - DNA, 15 bp, Homo sapiens
atatacaaataatga

SEQ ID NO: 481690 - DNA, 15 bp, Homo sapiens
tatatacaaataatg

SEQ ID NO: 481691 - DNA, 15 bp, Homo sapiens
atatatacaaataat

SEQ ID NO: 481692 - DNA, 15 bp, Homo sapiens
aatatatacaaataa

SEQ ID NO: 481693 - DNA, 15 bp, Homo sapiens
caatatatacaaata

SEQ ID NO: 481694 - DNA, 15 bp, Homo sapiens
acaatatatacaaat

SEQ ID NO: 481695 - DNA, 15 bp, Homo sapiens
tacaatatatacaaa

SEQ ID NO: 481696 - DNA, 15 bp, Homo sapiens
atacaatatatacaa

SEQ ID NO: 481697 - DNA, 15 bp, Homo sapiens
tatacaatatataca

SEQ ID NO: 481698 - DNA, 15 bp, Homo sapiens
atatacaatatatac

SEQ ID NO: 481699 - DNA, 15 bp, Homo sapiens
tatatacaatatata

SEQ ID NO: 481700 - DNA, 15 bp, Homo sapiens
atatatacaatatat

SEQ ID NO: 481701 - DNA, 15 bp, Homo sapiens
tatatatacaatata

SEQ ID NO: 481702 - DNA, 15 bp, Homo sapiens
atatatatacaatat

SEQ ID NO: 481703 - DNA, 15 bp, Homo sapiens
tatatatatacaata

SEQ ID NO: 481704 - DNA, 15 bp, Homo sapiens
atatatatatacaat

SEQ ID NO: 481705 - DNA, 15 bp, Homo sapiens
tatatatatatacaa

SEQ ID NO: 481706 - DNA, 15 bp, Homo sapiens
atatatatatataca

SEQ ID NO: 481707 - DNA, 15 bp, Homo sapiens
tatatatatatatac

SEQ ID NO: 481708 - DNA, 15 bp, Homo sapiens
atatatatatatata

SEQ ID NO: 481709 - DNA, 15 bp, Homo sapiens
gatatatatatatat

SEQ ID NO: 481710 - DNA, 15 bp, Homo sapiens
agatatatatatata

SEQ ID NO: 481711 - DNA, 15 bp, Homo sapiens
cagatatatatatat

SEQ ID NO: 481712 - DNA, 15 bp, Homo sapiens
ccagatatatatata

SEQ ID NO: 481713 - DNA, 15 bp, Homo sapiens
cccagatatatatat

SEQ ID NO: 481714 - DNA, 15 bp, Homo sapiens
gcccagatatatata

SEQ ID NO: 481715 - DNA, 15 bp, Homo sapiens
agcccagatatatat

SEQ ID NO: 481716 - DNA, 15 bp, Homo sapiens
tagcccagatatata

SEQ ID NO: 481717 - DNA, 15 bp, Homo sapiens
atagcccagatatat

SEQ ID NO: 481718 - DNA, 15 bp, Homo sapiens
aatagcccagatata

SEQ ID NO: 481719 - DNA, 15 bp, Homo sapiens
caatagcccagatat

SEQ ID NO: 481720 - DNA, 15 bp, Homo sapiens
tcaatagcccagata

SEQ ID NO: 481721 - DNA, 15 bp, Homo sapiens
atcaatagcccagat

SEQ ID NO: 481722 - DNA, 15 bp, Homo sapiens
catcaatagcccaga

SEQ ID NO: 481723 - DNA, 15 bp, Homo sapiens
gcatcaatagcccag

SEQ ID NO: 481724 - DNA, 15 bp, Homo sapiens
tgcatcaatagccca

SEQ ID NO: 481725 - DNA, 15 bp, Homo sapiens
gtgcatcaatagccc

SEQ ID NO: 481726 - DNA, 15 bp, Homo sapiens
tgtgcatcaatagcc

SEQ ID NO: 481727 - DNA, 15 bp, Homo sapiens
atgtgcatcaatagc

SEQ ID NO: 481728 - DNA, 15 bp, Homo sapiens
aatgtgcatcaatag

SEQ ID NO: 481729 - DNA, 15 bp, Homo sapiens
aaatgtgcatcaata

SEQ ID NO: 481730 - DNA, 15 bp, Homo sapiens
caaatgtgcatcaat

SEQ ID NO: 481731 - DNA, 15 bp, Homo sapiens
ccaaatgtgcatcaa

SEQ ID NO: 481732 - DNA, 15 bp, Homo sapiens
tccaaatgtgcatca

SEQ ID NO: 481733 - DNA, 15 bp, Homo sapiens
atccaaatgtgcatc

SEQ ID NO: 481734 - DNA, 15 bp, Homo sapiens
aatccaaatgtgcat

SEQ ID NO: 481735 - DNA, 15 bp, Homo sapiens
caatccaaatgtgca

SEQ ID NO: 481736 - DNA, 15 bp, Homo sapiens
acaatccaaatgtgc

SEQ ID NO: 481737 - DNA, 15 bp, Homo sapiens
aacaatccaaatgtg

SEQ ID NO: 481738 - DNA, 15 bp, Homo sapiens
aaacaatccaaatgt

SEQ ID NO: 481739 - DNA, 15 bp, Homo sapiens
gaaacaatccaaatg

SEQ ID NO: 481740 - DNA, 15 bp, Homo sapiens
agaaacaatccaaat

SEQ ID NO: 481741 - DNA, 15 bp, Homo sapiens
tagaaacaatccaaa

SEQ ID NO: 481742 - DNA, 15 bp, Homo sapiens
ctagaaacaatccaa

SEQ ID NO: 481743 - DNA, 15 bp, Homo sapiens
actagaaacaatcca

SEQ ID NO: 481744 - DNA, 15 bp, Homo sapiens
aactagaaacaatcc

SEQ ID NO: 481745 - DNA, 15 bp, Homo sapiens
aaactagaaacaatc

SEQ ID NO: 481746 - DNA, 15 bp, Homo sapiens
aaaactagaaacaat

SEQ ID NO: 481747 - DNA, 15 bp, Homo sapiens
aaaaactagaaacaa

SEQ ID NO: 481748 - DNA, 15 bp, Homo sapiens
aaaaaactagaaaca

SEQ ID NO: 481749 - DNA, 15 bp, Homo sapiens
caaaaaactagaaac

SEQ ID NO: 481750 - DNA, 15 bp, Homo sapiens
gcaaaaaactagaaa

SEQ ID NO: 481751 - DNA, 15 bp, Homo sapiens
agcaaaaaactagaa

SEQ ID NO: 481752 - DNA, 15 bp, Homo sapiens
tagcaaaaaactaga

SEQ ID NO: 481753 - DNA, 15 bp, Homo sapiens
atagcaaaaaactag

SEQ ID NO: 481754 - DNA, 15 bp, Homo sapiens
aatagcaaaaaacta

SEQ ID NO: 481755 - DNA, 15 bp, Homo sapiens
taatagcaaaaaact

SEQ ID NO: 481756 - DNA, 15 bp, Homo sapiens
gtaatagcaaaaaac

SEQ ID NO: 481757 - DNA, 15 bp, Homo sapiens
agtaatagcaaaaaa

SEQ ID NO: 481758 - DNA, 15 bp, Homo sapiens
tagtaatagcaaaaa

SEQ ID NO: 481759 - DNA, 15 bp, Homo sapiens
ttagtaatagcaaaa

SEQ ID NO: 481760 - DNA, 15 bp, Homo sapiens
cttagtaatagcaaa

SEQ ID NO: 481761 - DNA, 15 bp, Homo sapiens
tcttagtaatagcaa

SEQ ID NO: 481762 - DNA, 15 bp, Homo sapiens
ttcttagtaatagca

SEQ ID NO: 481763 - DNA, 15 bp, Homo sapiens
attcttagtaatagc

SEQ ID NO: 481764 - DNA, 15 bp, Homo sapiens
cattcttagtaatag

SEQ ID NO: 481765 - DNA, 15 bp, Homo sapiens
gcattcttagtaata

SEQ ID NO: 481766 - DNA, 15 bp, Homo sapiens
agcattcttagtaat

SEQ ID NO: 481767 - DNA, 15 bp, Homo sapiens
cagcattcttagtaa

SEQ ID NO: 481768 - DNA, 15 bp, Homo sapiens
gcagcattcttagta

SEQ ID NO: 481769 - DNA, 15 bp, Homo sapiens
agcagcattcttagt

SEQ ID NO: 481770 - DNA, 15 bp, Homo sapiens
aagcagcattcttag

SEQ ID NO: 481771 - DNA, 15 bp, Homo sapiens
taagcagcattctta

SEQ ID NO: 481772 - DNA, 15 bp, Homo sapiens
gtaagcagcattctt

SEQ ID NO: 481773 - DNA, 15 bp, Homo sapiens
cgtaagcagcattct

SEQ ID NO: 481774 - DNA, 15 bp, Homo sapiens
tcgtaagcagcattc

SEQ ID NO: 481775 - DNA, 15 bp, Homo sapiens
ttcgtaagcagcatt

SEQ ID NO: 481776 - DNA, 15 bp, Homo sapiens
gttcgtaagcagcat

SEQ ID NO: 481777 - DNA, 15 bp, Homo sapiens
tgttcgtaagcagca

SEQ ID NO: 481778 - DNA, 15 bp, Homo sapiens
atgttcgtaagcagc

SEQ ID NO: 481779 - DNA, 15 bp, Homo sapiens
aatgttcgtaagcag

SEQ ID NO: 481780 - DNA, 15 bp, Homo sapiens
caatgttcgtaagca

SEQ ID NO: 481781 - DNA, 15 bp, Homo sapiens
acaatgttcgtaagc

SEQ ID NO: 481782 - DNA, 15 bp, Homo sapiens
aacaatgttcgtaag

SEQ ID NO: 481783 - DNA, 15 bp, Homo sapiens
taacaatgttcgtaa

SEQ ID NO: 481784 - DNA, 15 bp, Homo sapiens
ataacaatgttcgta

SEQ ID NO: 481785 - DNA, 15 bp, Homo sapiens
aataacaatgttcgt

SEQ ID NO: 481786 - DNA, 15 bp, Homo sapiens
gaataacaatgttcg

SEQ ID NO: 481787 - DNA, 15 bp, Homo sapiens
tgaataacaatgttc

SEQ ID NO: 481788 - DNA, 15 bp, Homo sapiens
atgaataacaatgtt

SEQ ID NO: 481789 - DNA, 15 bp, Homo sapiens
catgaataacaatgt

SEQ ID NO: 481790 - DNA, 15 bp, Homo sapiens
acatgaataacaatg

SEQ ID NO: 481791 - DNA, 15 bp, Homo sapiens
gacatgaataacaat

SEQ ID NO: 481792 - DNA, 15 bp, Homo sapiens
agacatgaataacaa

SEQ ID NO: 481793 - DNA, 15 bp, Homo sapiens
aagacatgaataaca

SEQ ID NO: 481794 - DNA, 15 bp, Homo sapiens
aaagacatgaataac

SEQ ID NO: 481795 - DNA, 15 bp, Homo sapiens
aaaagacatgaataa

SEQ ID NO: 481796 - DNA, 15 bp, Homo sapiens
caaaagacatgaata

SEQ ID NO: 481797 - DNA, 15 bp, Homo sapiens
acaaaagacatgaat

SEQ ID NO: 481798 - DNA, 15 bp, Homo sapiens
cacaaaagacatgaa

SEQ ID NO: 481799 - DNA, 15 bp, Homo sapiens
gcacaaaagacatga

SEQ ID NO: 481800 - DNA, 15 bp, Homo sapiens
tgcacaaaagacatg

SEQ ID NO: 481801 - DNA, 15 bp, Homo sapiens
gtgcacaaaagacat

SEQ ID NO: 481802 - DNA, 15 bp, Homo sapiens
tgtgcacaaaagaca

SEQ ID NO: 481803 - DNA, 15 bp, Homo sapiens
atgtgcacaaaagac

SEQ ID NO: 481804 - DNA, 15 bp, Homo sapiens
catgtgcacaaaaga

SEQ ID NO: 481805 - DNA, 15 bp, Homo sapiens
gcatgtgcacaaaag

SEQ ID NO: 481806 - DNA, 15 bp, Homo sapiens
tgcatgtgcacaaaa

SEQ ID NO: 481807 - DNA, 15 bp, Homo sapiens
ctgcatgtgcacaaa

SEQ ID NO: 481808 - DNA, 15 bp, Homo sapiens
cctgcatgtgcacaa

SEQ ID NO: 481809 - DNA, 15 bp, Homo sapiens
tcctgcatgtgcaca

SEQ ID NO: 481810 - DNA, 15 bp, Homo sapiens
ttcctgcatgtgcac

SEQ ID NO: 481811 - DNA, 15 bp, Homo sapiens
attcctgcatgtgca

SEQ ID NO: 481812 - DNA, 15 bp, Homo sapiens
aattcctgcatgtgc

SEQ ID NO: 481813 - DNA, 15 bp, Homo sapiens
aaattcctgcatgtg

SEQ ID NO: 481814 - DNA, 15 bp, Homo sapiens
caaattcctgcatgt

SEQ ID NO: 481815 - DNA, 15 bp, Homo sapiens
tcaaattcctgcatg

SEQ ID NO: 481816 - DNA, 15 bp, Homo sapiens
ttcaaattcctgcat

SEQ ID NO: 481817 - DNA, 15 bp, Homo sapiens
cttcaaattcctgca

SEQ ID NO: 481818 - DNA, 15 bp, Homo sapiens
acttcaaattcctgc

SEQ ID NO: 481819 - DNA, 15 bp, Homo sapiens
tacttcaaattcctg

SEQ ID NO: 481820 - DNA, 15 bp, Homo sapiens
atacttcaaattcct

SEQ ID NO: 481821 - DNA, 15 bp, Homo sapiens
tatacttcaaattcc

SEQ ID NO: 481822 - DNA, 15 bp, Homo sapiens
atatacttcaaattc

SEQ ID NO: 481823 - DNA, 15 bp, Homo sapiens
catatacttcaaatt

SEQ ID NO: 481824 - DNA, 15 bp, Homo sapiens
acatatacttcaaat

SEQ ID NO: 481825 - DNA, 15 bp, Homo sapiens
gacatatacttcaaa

SEQ ID NO: 481826 - DNA, 15 bp, Homo sapiens
agacatatacttcaa

SEQ ID NO: 481827 - DNA, 15 bp, Homo sapiens
cagacatatacttca

SEQ ID NO: 481828 - DNA, 15 bp, Homo sapiens
ccagacatatacttc

SEQ ID NO: 481829 - DNA, 15 bp, Homo sapiens
cccagacatatactt

SEQ ID NO: 481830 - DNA, 15 bp, Homo sapiens
tcccagacatatact

SEQ ID NO: 481831 - DNA, 15 bp, Homo sapiens
ctcccagacatatac

SEQ ID NO: 481832 - DNA, 15 bp, Homo sapiens
gctcccagacatata

SEQ ID NO: 481833 - DNA, 15 bp, Homo sapiens
tgctcccagacatat

SEQ ID NO: 481834 - DNA, 15 bp, Homo sapiens
ctgctcccagacata

SEQ ID NO: 481835 - DNA, 15 bp, Homo sapiens
tctgctcccagacat

SEQ ID NO: 481836 - DNA, 15 bp, Homo sapiens
ttctgctcccagaca

SEQ ID NO: 481837 - DNA, 15 bp, Homo sapiens
attctgctcccagac

SEQ ID NO: 481838 - DNA, 15 bp, Homo sapiens
aattctgctcccaga

SEQ ID NO: 481839 - DNA, 15 bp, Homo sapiens
aaattctgctcccag

SEQ ID NO: 481840 - DNA, 15 bp, Homo sapiens
aaaattctgctccca

SEQ ID NO: 481841 - DNA, 15 bp, Homo sapiens
aaaaattctgctccc

SEQ ID NO: 481842 - DNA, 15 bp, Homo sapiens
gaaaaattctgctcc

SEQ ID NO: 481843 - DNA, 15 bp, Homo sapiens
tgaaaaattctgctc

SEQ ID NO: 481844 - DNA, 15 bp, Homo sapiens
atgaaaaattctgct

SEQ ID NO: 481845 - DNA, 15 bp, Homo sapiens
aatgaaaaattctgc

SEQ ID NO: 481846 - DNA, 15 bp, Homo sapiens
aaatgaaaaattctg

SEQ ID NO: 481847 - DNA, 15 bp, Homo sapiens
aaaatgaaaaattct

SEQ ID NO: 481848 - DNA, 15 bp, Homo sapiens
taaaatgaaaaattc

SEQ ID NO: 481849 - DNA, 15 bp, Homo sapiens
ataaaatgaaaaatt

SEQ ID NO: 481850 - DNA, 15 bp, Homo sapiens
cataaaatgaaaaat

SEQ ID NO: 481851 - DNA, 15 bp, Homo sapiens
ccataaaatgaaaaa

SEQ ID NO: 481852 - DNA, 15 bp, Homo sapiens
cccataaaatgaaaa

SEQ ID NO: 481853 - DNA, 15 bp, Homo sapiens
ccccataaaatgaaa

SEQ ID NO: 481854 - DNA, 15 bp, Homo sapiens
accccataaaatgaa

SEQ ID NO: 481855 - DNA, 15 bp, Homo sapiens
taccccataaaatga

SEQ ID NO: 481856 - DNA, 15 bp, Homo sapiens
ataccccataaaatg

SEQ ID NO: 481857 - DNA, 15 bp, Homo sapiens
cataccccataaaat

SEQ ID NO: 481858 - DNA, 15 bp, Homo sapiens
ccataccccataaaa

SEQ ID NO: 481859 - DNA, 15 bp, Homo sapiens
cccataccccataaa

SEQ ID NO: 481860 - DNA, 15 bp, Homo sapiens
acccataccccataa

SEQ ID NO: 481861 - DNA, 15 bp, Homo sapiens
aacccataccccata

SEQ ID NO: 481862 - DNA, 15 bp, Homo sapiens
aaacccataccccat

SEQ ID NO: 481863 - DNA, 15 bp, Homo sapiens
caaacccatacccca

SEQ ID NO: 481864 - DNA, 15 bp, Homo sapiens
acaaacccatacccc

SEQ ID NO: 481865 - DNA, 15 bp, Homo sapiens
aacaaacccataccc

SEQ ID NO: 481866 - DNA, 15 bp, Homo sapiens
aaacaaacccatacc

SEQ ID NO: 481867 - DNA, 15 bp, Homo sapiens
taaacaaacccatac

SEQ ID NO: 481868 - DNA, 15 bp, Homo sapiens
ctaaacaaacccata

SEQ ID NO: 481869 - DNA, 15 bp, Homo sapiens
gctaaacaaacccat

SEQ ID NO: 481870 - DNA, 15 bp, Homo sapiens
agctaaacaaaccca

SEQ ID NO: 481871 - DNA, 15 bp, Homo sapiens
aagctaaacaaaccc

SEQ ID NO: 481872 - DNA, 15 bp, Homo sapiens
aaagctaaacaaacc

SEQ ID NO: 481873 - DNA, 15 bp, Homo sapiens
taaagctaaacaaac

SEQ ID NO: 481874 - DNA, 15 bp, Homo sapiens
gtaaagctaaacaaa

SEQ ID NO: 481875 - DNA, 15 bp, Homo sapiens
agtaaagctaaacaa

SEQ ID NO: 481876 - DNA, 15 bp, Homo sapiens
tagtaaagctaaaca

SEQ ID NO: 481877 - DNA, 15 bp, Homo sapiens
ttagtaaagctaaac

SEQ ID NO: 481878 - DNA, 15 bp, Homo sapiens
cttagtaaagctaaa

SEQ ID NO: 481879 - DNA, 15 bp, Homo sapiens
acttagtaaagctaa

SEQ ID NO: 481880 - DNA, 15 bp, Homo sapiens
tacttagtaaagcta

SEQ ID NO: 481881 - DNA, 15 bp, Homo sapiens
ttacttagtaaagct

SEQ ID NO: 481882 - DNA, 15 bp, Homo sapiens
attacttagtaaagc

SEQ ID NO: 481883 - DNA, 15 bp, Homo sapiens
cattacttagtaaag

SEQ ID NO: 481884 - DNA, 15 bp, Homo sapiens
gcattacttagtaaa

SEQ ID NO: 481885 - DNA, 15 bp, Homo sapiens
ggcattacttagtaa

SEQ ID NO: 481886 - DNA, 15 bp, Homo sapiens
tggcattacttagta

SEQ ID NO: 481887 - DNA, 15 bp, Homo sapiens
ttggcattacttagt

SEQ ID NO: 481888 - DNA, 15 bp, Homo sapiens
tttggcattacttag

SEQ ID NO: 481889 - DNA, 15 bp, Homo sapiens
atttggcattactta

SEQ ID NO: 481890 - DNA, 15 bp, Homo sapiens
aatttggcattactt

SEQ ID NO: 481891 - DNA, 15 bp, Homo sapiens
aaatttggcattact

SEQ ID NO: 481892 - DNA, 15 bp, Homo sapiens
aaaatttggcattac

SEQ ID NO: 481893 - DNA, 15 bp, Homo sapiens
aaaaatttggcatta

SEQ ID NO: 481894 - DNA, 15 bp, Homo sapiens
gaaaaatttggcatt

SEQ ID NO: 481895 - DNA, 15 bp, Homo sapiens
agaaaaatttggcat

SEQ ID NO: 481896 - DNA, 15 bp, Homo sapiens
tagaaaaatttggca

SEQ ID NO: 481897 - DNA, 15 bp, Homo sapiens
ttagaaaaatttggc

SEQ ID NO: 481898 - DNA, 15 bp, Homo sapiens
attagaaaaatttgg

SEQ ID NO: 481899 - DNA, 15 bp, Homo sapiens
aattagaaaaatttg

SEQ ID NO: 481900 - DNA, 15 bp, Homo sapiens
aaattagaaaaattt

SEQ ID NO: 481901 - DNA, 15 bp, Homo sapiens
aaaattagaaaaatt

SEQ ID NO: 481902 - DNA, 15 bp, Homo sapiens
aaaaattagaaaaat

SEQ ID NO: 481903 - DNA, 15 bp, Homo sapiens
taaaaattagaaaaa

SEQ ID NO: 481904 - DNA, 15 bp, Homo sapiens
ttaaaaattagaaaa

SEQ ID NO: 481905 - DNA, 15 bp, Homo sapiens
tttaaaaattagaaa

SEQ ID NO: 481906 - DNA, 15 bp, Homo sapiens
ttttaaaaattagaa

SEQ ID NO: 481907 - DNA, 15 bp, Homo sapiens
tttttaaaaattaga

SEQ ID NO: 481908 - DNA, 15 bp, Homo sapiens
atttttaaaaattag

SEQ ID NO: 481909 - DNA, 15 bp, Homo sapiens
aatttttaaaaatta

SEQ ID NO: 481910 - DNA, 15 bp, Homo sapiens
aaatttttaaaaatt

SEQ ID NO: 481911 - DNA, 15 bp, Homo sapiens
aaaatttttaaaaat

SEQ ID NO: 481912 - DNA, 15 bp, Homo sapiens
aaaaatttttaaaaa

SEQ ID NO: 481913 - DNA, 15 bp, Homo sapiens
taaaaatttttaaaa

SEQ ID NO: 481914 - DNA, 15 bp, Homo sapiens
ttaaaaatttttaaa

SEQ ID NO: 481915 - DNA, 15 bp, Homo sapiens
attaaaaatttttaa

SEQ ID NO: 481916 - DNA, 15 bp, Homo sapiens
aattaaaaattttta

SEQ ID NO: 481917 - DNA, 15 bp, Homo sapiens
taattaaaaattttt

SEQ ID NO: 481918 - DNA, 15 bp, Homo sapiens
ttaattaaaaatttt

SEQ ID NO: 481919 - DNA, 15 bp, Homo sapiens
attaattaaaaattt

SEQ ID NO: 481920 - DNA, 15 bp, Homo sapiens
aattaattaaaaatt

SEQ ID NO: 481921 - DNA, 15 bp, Homo sapiens
aaattaattaaaaat

SEQ ID NO: 481922 - DNA, 15 bp, Homo sapiens
aaaattaattaaaaa

SEQ ID NO: 481923 - DNA, 15 bp, Homo sapiens
aaaaattaattaaaa

SEQ ID NO: 481924 - DNA, 15 bp, Homo sapiens
aaaaaattaattaaa

SEQ ID NO: 481925 - DNA, 15 bp, Homo sapiens
aaaaaaattaattaa

SEQ ID NO: 481926 - DNA, 15 bp, Homo sapiens
aaaaaaaattaatta

SEQ ID NO: 481927 - DNA, 15 bp, Homo sapiens
aaaaaaaaattaatt

SEQ ID NO: 481928 - DNA, 15 bp, Homo sapiens
aaaaaaaaaattaat

SEQ ID NO: 481929 - DNA, 15 bp, Homo sapiens
caaaaaaaaaattaa

SEQ ID NO: 481930 - DNA, 15 bp, Homo sapiens
tcaaaaaaaaaatta

SEQ ID NO: 481931 - DNA, 15 bp, Homo sapiens
ctcaaaaaaaaaatt

SEQ ID NO: 481932 - DNA, 15 bp, Homo sapiens
agaaactccatctca

SEQ ID NO: 481933 - DNA, 15 bp, Homo sapiens
gagaaactccatctc

SEQ ID NO: 481934 - DNA, 15 bp, Homo sapiens
agagaaactccatct

SEQ ID NO: 481935 - DNA, 15 bp, Homo sapiens
gagagaaactccatc

SEQ ID NO: 481936 - DNA, 15 bp, Homo sapiens
agagagaaactccat

SEQ ID NO: 481937 - DNA, 15 bp, Homo sapiens
aagagagaaactcca

SEQ ID NO: 481938 - DNA, 15 bp, Homo sapiens
gaagagagaaactcc

SEQ ID NO: 481939 - DNA, 15 bp, Homo sapiens
agaagagagaaactc

SEQ ID NO: 481940 - DNA, 15 bp, Homo sapiens
gagaagagagaaact

SEQ ID NO: 481941 - DNA, 15 bp, Homo sapiens
ggagaagagagaaac

SEQ ID NO: 481942 - DNA, 15 bp, Homo sapiens
gggagaagagagaaa

SEQ ID NO: 481943 - DNA, 15 bp, Homo sapiens
ggggagaagagagaa

SEQ ID NO: 481944 - DNA, 15 bp, Homo sapiens
gggggagaagagaga

SEQ ID NO: 481945 - DNA, 15 bp, Homo sapiens
tgggggagaagagag

SEQ ID NO: 481946 - DNA, 15 bp, Homo sapiens
ctgggggagaagaga

SEQ ID NO: 481947 - DNA, 15 bp, Homo sapiens
cctgggggagaagag

SEQ ID NO: 481948 - DNA, 15 bp, Homo sapiens
gcctgggggagaaga

SEQ ID NO: 481949 - DNA, 15 bp, Homo sapiens
agcctgggggagaag

SEQ ID NO: 481950 - DNA, 15 bp, Homo sapiens
cagcctgggggagaa

SEQ ID NO: 481951 - DNA, 15 bp, Homo sapiens
ccagcctgggggaga

SEQ ID NO: 481952 - DNA, 15 bp, Homo sapiens
tccagcctgggggag

SEQ ID NO: 481953 - DNA, 15 bp, Homo sapiens
ctccagcctggggga

SEQ ID NO: 481954 - DNA, 15 bp, Homo sapiens
actccagcctggggg

SEQ ID NO: 481955 - DNA, 15 bp, Homo sapiens
cactccagcctgggg

SEQ ID NO: 481956 - DNA, 15 bp, Homo sapiens
cagatcgtgccatta

SEQ ID NO: 481957 - DNA, 15 bp, Homo sapiens
ccagatcgtgccatt

SEQ ID NO: 481958 - DNA, 15 bp, Homo sapiens
tccagatcgtgccat

SEQ ID NO: 481959 - DNA, 15 bp, Homo sapiens
gtccagatcgtgcca

SEQ ID NO: 481960 - DNA, 15 bp, Homo sapiens
agtccagatcgtgcc

SEQ ID NO: 481961 - DNA, 15 bp, Homo sapiens
gagtccagatcgtgc

SEQ ID NO: 481962 - DNA, 15 bp, Homo sapiens
tgagtccagatcgtg

SEQ ID NO: 481963 - DNA, 15 bp, Homo sapiens
gtgagtccagatcgt

SEQ ID NO: 481964 - DNA, 15 bp, Homo sapiens
agtgagtccagatcg

SEQ ID NO: 481965 - DNA, 15 bp, Homo sapiens
cagtgagtccagatc

SEQ ID NO: 481966 - DNA, 15 bp, Homo sapiens
gcagtgagtccagat

SEQ ID NO: 481967 - DNA, 15 bp, Homo sapiens
tgcagtgagtccaga

SEQ ID NO: 481968 - DNA, 15 bp, Homo sapiens
ttgcagtgagtccag

SEQ ID NO: 481969 - DNA, 15 bp, Homo sapiens
gttgcagtgagtcca

SEQ ID NO: 481970 - DNA, 15 bp, Homo sapiens
ggttgcagtgagtcc

SEQ ID NO: 481971 - DNA, 15 bp, Homo sapiens
aggttgcagtgagtc

SEQ ID NO: 481972 - DNA, 15 bp, Homo sapiens
gaggttgcagtgagt

SEQ ID NO: 481973 - DNA, 15 bp, Homo sapiens
aggaggctgaggcag

SEQ ID NO: 481974 - DNA, 15 bp, Homo sapiens
caggaggctgaggca

SEQ ID NO: 481975 - DNA, 15 bp, Homo sapiens
tcaggaggctgaggc

SEQ ID NO: 481976 - DNA, 15 bp, Homo sapiens
ctcaggaggctgagg

SEQ ID NO: 481977 - DNA, 15 bp, Homo sapiens
actcaggaggctgag

SEQ ID NO: 481978 - DNA, 15 bp, Homo sapiens
atcccagctactcag

SEQ ID NO: 481979 - DNA, 15 bp, Homo sapiens
aatcccagctactca

SEQ ID NO: 481980 - DNA, 15 bp, Homo sapiens
cagagtctttggcat

SEQ ID NO: 481981 - DNA, 15 bp, Homo sapiens
tcagagtctttggca

SEQ ID NO: 481982 - DNA, 15 bp, Homo sapiens
ttcagagtctttggc

SEQ ID NO: 481983 - DNA, 15 bp, Homo sapiens
attcagagtctttgg

SEQ ID NO: 481984 - DNA, 15 bp, Homo sapiens
tattcagagtctttg

SEQ ID NO: 481985 - DNA, 15 bp, Homo sapiens
ttattcagagtcttt

SEQ ID NO: 481986 - DNA, 15 bp, Homo sapiens
tttattcagagtctt

SEQ ID NO: 481987 - DNA, 15 bp, Homo sapiens
gtttattcagagtct

SEQ ID NO: 481988 - DNA, 15 bp, Homo sapiens
agtttattcagagtc

SEQ ID NO: 481989 - DNA, 15 bp, Homo sapiens
tagtttattcagagt

SEQ ID NO: 481990 - DNA, 15 bp, Homo sapiens
ctagtttattcagag

SEQ ID NO: 481991 - DNA, 15 bp, Homo sapiens
cctagtttattcaga

SEQ ID NO: 481992 - DNA, 15 bp, Homo sapiens
ccctagtttattcag

SEQ ID NO: 481993 - DNA, 15 bp, Homo sapiens
tccctagtttattca

SEQ ID NO: 481994 - DNA, 15 bp, Homo sapiens
atccctagtttattc

SEQ ID NO: 481995 - DNA, 15 bp, Homo sapiens
aatccctagtttatt

SEQ ID NO: 481996 - DNA, 15 bp, Homo sapiens
caatccctagtttat

SEQ ID NO: 481997 - DNA, 15 bp, Homo sapiens
tcaatccctagttta

SEQ ID NO: 481998 - DNA, 15 bp, Homo sapiens
atcaatccctagttt

SEQ ID NO: 481999 - DNA, 15 bp, Homo sapiens
gatcaatccctagtt

SEQ ID NO: 482000 - DNA, 15 bp, Homo sapiens
tgatcaatccctagt

SEQ ID NO: 482001 - DNA, 15 bp, Homo sapiens
ttgatcaatccctag

SEQ ID NO: 482002 - DNA, 15 bp, Homo sapiens
tttgatcaatcccta

SEQ ID NO: 482003 - DNA, 15 bp, Homo sapiens
gtttgatcaatccct

SEQ ID NO: 482004 - DNA, 15 bp, Homo sapiens
tgtttgatcaatccc

SEQ ID NO: 482005 - DNA, 15 bp, Homo sapiens
atgtttgatcaatcc

SEQ ID NO: 482006 - DNA, 15 bp, Homo sapiens
tatgtttgatcaatc

SEQ ID NO: 482007 - DNA, 15 bp, Homo sapiens
atatgtttgatcaat

SEQ ID NO: 482008 - DNA, 15 bp, Homo sapiens
gatatgtttgatcaa

SEQ ID NO: 482009 - DNA, 15 bp, Homo sapiens
agatatgtttgatca

SEQ ID NO: 482010 - DNA, 15 bp, Homo sapiens
gagatatgtttgatc

SEQ ID NO: 482011 - DNA, 15 bp, Homo sapiens
tgagatatgtttgat

SEQ ID NO: 482012 - DNA, 15 bp, Homo sapiens
ttgagatatgtttga

SEQ ID NO: 482013 - DNA, 15 bp, Homo sapiens
tttgagatatgtttg

SEQ ID NO: 482014 - DNA, 15 bp, Homo sapiens
ttttgagatatgttt

SEQ ID NO: 482015 - DNA, 15 bp, Homo sapiens
attttgagatatgtt

SEQ ID NO: 482016 - DNA, 15 bp, Homo sapiens
tattttgagatatgt

SEQ ID NO: 482017 - DNA, 15 bp, Homo sapiens
ttattttgagatatg

SEQ ID NO: 482018 - DNA, 15 bp, Homo sapiens
attattttgagatat

SEQ ID NO: 482019 - DNA, 15 bp, Homo sapiens
tattattttgagata

SEQ ID NO: 482020 - DNA, 15 bp, Homo sapiens
ttattattttgagat

SEQ ID NO: 482021 - DNA, 15 bp, Homo sapiens
cttattattttgaga

SEQ ID NO: 482022 - DNA, 15 bp, Homo sapiens
tcttattattttgag

SEQ ID NO: 482023 - DNA, 15 bp, Homo sapiens
ctcttattattttga

SEQ ID NO: 482024 - DNA, 15 bp, Homo sapiens
gctcttattattttg

SEQ ID NO: 482025 - DNA, 15 bp, Homo sapiens
agctcttattatttt

SEQ ID NO: 482026 - DNA, 15 bp, Homo sapiens
tagctcttattattt

SEQ ID NO: 482027 - DNA, 15 bp, Homo sapiens
atagctcttattatt

SEQ ID NO: 482028 - DNA, 15 bp, Homo sapiens
aatagctcttattat

SEQ ID NO: 482029 - DNA, 15 bp, Homo sapiens
aaatagctcttatta

SEQ ID NO: 482030 - DNA, 15 bp, Homo sapiens
taaatagctcttatt

SEQ ID NO: 482031 - DNA, 15 bp, Homo sapiens
ataaatagctcttat

SEQ ID NO: 482032 - DNA, 15 bp, Homo sapiens
cataaatagctctta

SEQ ID NO: 482033 - DNA, 15 bp, Homo sapiens
tcataaatagctctt

SEQ ID NO: 482034 - DNA, 15 bp, Homo sapiens
gtcataaatagctct

SEQ ID NO: 482035 - DNA, 15 bp, Homo sapiens
tgtcataaatagctc

SEQ ID NO: 482036 - DNA, 15 bp, Homo sapiens
ttgtcataaatagct

SEQ ID NO: 482037 - DNA, 15 bp, Homo sapiens
tttgtcataaatagc

SEQ ID NO: 482038 - DNA, 15 bp, Homo sapiens
gtttgtcataaatag

SEQ ID NO: 482039 - DNA, 15 bp, Homo sapiens
ggtttgtcataaata

SEQ ID NO: 482040 - DNA, 15 bp, Homo sapiens
gggtttgtcataaat

SEQ ID NO: 482041 - DNA, 15 bp, Homo sapiens
tgggtttgtcataaa

SEQ ID NO: 482042 - DNA, 15 bp, Homo sapiens
gtgggtttgtcataa

SEQ ID NO: 482043 - DNA, 15 bp, Homo sapiens
tgtgggtttgtcata

SEQ ID NO: 482044 - DNA, 15 bp, Homo sapiens
ctgtgggtttgtcat

SEQ ID NO: 482045 - DNA, 15 bp, Homo sapiens
gctgtgggtttgtca

SEQ ID NO: 482046 - DNA, 15 bp, Homo sapiens
ggctgtgggtttgtc

SEQ ID NO: 482047 - DNA, 15 bp, Homo sapiens
tggctgtgggtttgt

SEQ ID NO: 482048 - DNA, 15 bp, Homo sapiens
ttggctgtgggtttg

SEQ ID NO: 482049 - DNA, 15 bp, Homo sapiens
attggctgtgggttt

SEQ ID NO: 482050 - DNA, 15 bp, Homo sapiens
tattggctgtgggtt

SEQ ID NO: 482051 - DNA, 15 bp, Homo sapiens
atattggctgtgggt

SEQ ID NO: 482052 - DNA, 15 bp, Homo sapiens
gatattggctgtggg

SEQ ID NO: 482053 - DNA, 15 bp, Homo sapiens
tgatattggctgtgg

SEQ ID NO: 482054 - DNA, 15 bp, Homo sapiens
atgatattggctgtg

SEQ ID NO: 482055 - DNA, 15 bp, Homo sapiens
tatgatattggctgt

SEQ ID NO: 482056 - DNA, 15 bp, Homo sapiens
gtatgatattggctg

SEQ ID NO: 482057 - DNA, 15 bp, Homo sapiens
agtatgatattggct

SEQ ID NO: 482058 - DNA, 15 bp, Homo sapiens
cagtatgatattggc

SEQ ID NO: 482059 - DNA, 15 bp, Homo sapiens
tcagtatgatattgg

SEQ ID NO: 482060 - DNA, 15 bp, Homo sapiens
ttcagtatgatattg

SEQ ID NO: 482061 - DNA, 15 bp, Homo sapiens
attcagtatgatatt

SEQ ID NO: 482062 - DNA, 15 bp, Homo sapiens
cattcagtatgatat

SEQ ID NO: 482063 - DNA, 15 bp, Homo sapiens
ccattcagtatgata

SEQ ID NO: 482064 - DNA, 15 bp, Homo sapiens
cccattcagtatgat

SEQ ID NO: 482065 - DNA, 15 bp, Homo sapiens
gcccattcagtatga

SEQ ID NO: 482066 - DNA, 15 bp, Homo sapiens
tgcccattcagtatg

SEQ ID NO: 482067 - DNA, 15 bp, Homo sapiens
ttgcccattcagtat

SEQ ID NO: 482068 - DNA, 15 bp, Homo sapiens
tttgcccattcagta

SEQ ID NO: 482069 - DNA, 15 bp, Homo sapiens
ttttgcccattcagt

SEQ ID NO: 482070 - DNA, 15 bp, Homo sapiens
tttttgcccattcag

SEQ ID NO: 482071 - DNA, 15 bp, Homo sapiens
gtttttgcccattca

SEQ ID NO: 482072 - DNA, 15 bp, Homo sapiens
agtttttgcccattc

SEQ ID NO: 482073 - DNA, 15 bp, Homo sapiens
cagtttttgcccatt

SEQ ID NO: 482074 - DNA, 15 bp, Homo sapiens
ccagtttttgcccat

SEQ ID NO: 482075 - DNA, 15 bp, Homo sapiens
tccagtttttgccca

SEQ ID NO: 482076 - DNA, 15 bp, Homo sapiens
ttccagtttttgccc

SEQ ID NO: 482077 - DNA, 15 bp, Homo sapiens
cttccagtttttgcc

SEQ ID NO: 482078 - DNA, 15 bp, Homo sapiens
ccttccagtttttgc

SEQ ID NO: 482079 - DNA, 15 bp, Homo sapiens
tccttccagtttttg

SEQ ID NO: 482080 - DNA, 15 bp, Homo sapiens
atccttccagttttt

SEQ ID NO: 482081 - DNA, 15 bp, Homo sapiens
aatccttccagtttt

SEQ ID NO: 482082 - DNA, 15 bp, Homo sapiens
gaatccttccagttt

SEQ ID NO: 482083 - DNA, 15 bp, Homo sapiens
ggaatccttccagtt

SEQ ID NO: 482084 - DNA, 15 bp, Homo sapiens
gggaatccttccagt

SEQ ID NO: 482085 - DNA, 15 bp, Homo sapiens
agggaatccttccag

SEQ ID NO: 482086 - DNA, 15 bp, Homo sapiens
aagggaatccttcca

SEQ ID NO: 482087 - DNA, 15 bp, Homo sapiens
aaagggaatccttcc

SEQ ID NO: 482088 - DNA, 15 bp, Homo sapiens
caaagggaatccttc

SEQ ID NO: 482089 - DNA, 15 bp, Homo sapiens
tcaaagggaatcctt

SEQ ID NO: 482090 - DNA, 15 bp, Homo sapiens
ttcaaagggaatcct

SEQ ID NO: 482091 - DNA, 15 bp, Homo sapiens
tttcaaagggaatcc

SEQ ID NO: 482092 - DNA, 15 bp, Homo sapiens
ttttcaaagggaatc

SEQ ID NO: 482093 - DNA, 15 bp, Homo sapiens
gttttcaaagggaat

SEQ ID NO: 482094 - DNA, 15 bp, Homo sapiens
agttttcaaagggaa

SEQ ID NO: 482095 - DNA, 15 bp, Homo sapiens
cagttttcaaaggga

SEQ ID NO: 482096 - DNA, 15 bp, Homo sapiens
ccagttttcaaaggg

SEQ ID NO: 482097 - DNA, 15 bp, Homo sapiens
gccagttttcaaagg

SEQ ID NO: 482098 - DNA, 15 bp, Homo sapiens
tgccagttttcaaag

SEQ ID NO: 482099 - DNA, 15 bp, Homo sapiens
gtgccagttttcaaa

SEQ ID NO: 482100 - DNA, 15 bp, Homo sapiens
tgtgccagttttcaa

SEQ ID NO: 482101 - DNA, 15 bp, Homo sapiens
ttgtgccagttttca

SEQ ID NO: 482102 - DNA, 15 bp, Homo sapiens
cttgtgccagttttc

SEQ ID NO: 482103 - DNA, 15 bp, Homo sapiens
tcttgtgccagtttt

SEQ ID NO: 482104 - DNA, 15 bp, Homo sapiens
gtcttgtgccagttt

SEQ ID NO: 482105 - DNA, 15 bp, Homo sapiens
tgtcttgtgccagtt

SEQ ID NO: 482106 - DNA, 15 bp, Homo sapiens
ttgtcttgtgccagt

SEQ ID NO: 482107 - DNA, 15 bp, Homo sapiens
cttgtcttgtgccag

SEQ ID NO: 482108 - DNA, 15 bp, Homo sapiens
ccttgtcttgtgcca

SEQ ID NO: 482109 - DNA, 15 bp, Homo sapiens
tccttgtcttgtgcc

SEQ ID NO: 482110 - DNA, 15 bp, Homo sapiens
atccttgtcttgtgc

SEQ ID NO: 482111 - DNA, 15 bp, Homo sapiens
catccttgtcttgtg

SEQ ID NO: 482112 - DNA, 15 bp, Homo sapiens
gcatccttgtcttgt

SEQ ID NO: 482113 - DNA, 15 bp, Homo sapiens
ggcatccttgtcttg

SEQ ID NO: 482114 - DNA, 15 bp, Homo sapiens
gggcatccttgtctt

SEQ ID NO: 482115 - DNA, 15 bp, Homo sapiens
agggcatccttgtct

SEQ ID NO: 482116 - DNA, 15 bp, Homo sapiens
gagggcatccttgtc

SEQ ID NO: 482117 - DNA, 15 bp, Homo sapiens
agagggcatccttgt

SEQ ID NO: 482118 - DNA, 15 bp, Homo sapiens
gagagggcatccttg

SEQ ID NO: 482119 - DNA, 15 bp, Homo sapiens
agagagggcatcctt

SEQ ID NO: 482120 - DNA, 15 bp, Homo sapiens
gagagagggcatcct

SEQ ID NO: 482121 - DNA, 15 bp, Homo sapiens
tgagagagggcatcc

SEQ ID NO: 482122 - DNA, 15 bp, Homo sapiens
gtgagagagggcatc

SEQ ID NO: 482123 - DNA, 15 bp, Homo sapiens
ggtgagagagggcat

SEQ ID NO: 482124 - DNA, 15 bp, Homo sapiens
tggtgagagagggca

SEQ ID NO: 482125 - DNA, 15 bp, Homo sapiens
gtggtgagagagggc

SEQ ID NO: 482126 - DNA, 15 bp, Homo sapiens
agtggtgagagaggg

SEQ ID NO: 482127 - DNA, 15 bp, Homo sapiens
gagtggtgagagagg

SEQ ID NO: 482128 - DNA, 15 bp, Homo sapiens
ggagtggtgagagag

SEQ ID NO: 482129 - DNA, 15 bp, Homo sapiens
aggagtggtgagaga

SEQ ID NO: 482130 - DNA, 15 bp, Homo sapiens
taggagtggtgagag

SEQ ID NO: 482131 - DNA, 15 bp, Homo sapiens
ataggagtggtgaga

SEQ ID NO: 482132 - DNA, 15 bp, Homo sapiens
aataggagtggtgag

SEQ ID NO: 482133 - DNA, 15 bp, Homo sapiens
gaataggagtggtga

SEQ ID NO: 482134 - DNA, 15 bp, Homo sapiens
tgaataggagtggtg

SEQ ID NO: 482135 - DNA, 15 bp, Homo sapiens
ttgaataggagtggt

SEQ ID NO: 482136 - DNA, 15 bp, Homo sapiens
tttgaataggagtgg

SEQ ID NO: 482137 - DNA, 15 bp, Homo sapiens
gtttgaataggagtg

SEQ ID NO: 482138 - DNA, 15 bp, Homo sapiens
agtttgaataggagt

SEQ ID NO: 482139 - DNA, 15 bp, Homo sapiens
tagtttgaataggag

SEQ ID NO: 482140 - DNA, 15 bp, Homo sapiens
ttagtttgaatagga

SEQ ID NO: 482141 - DNA, 15 bp, Homo sapiens
attagtttgaatagg

SEQ ID NO: 482142 - DNA, 15 bp, Homo sapiens
tattagtttgaatag

SEQ ID NO: 482143 - DNA, 15 bp, Homo sapiens
atattagtttgaata

SEQ ID NO: 482144 - DNA, 15 bp, Homo sapiens
aatattagtttgaat

SEQ ID NO: 482145 - DNA, 15 bp, Homo sapiens
caatattagtttgaa

SEQ ID NO: 482146 - DNA, 15 bp, Homo sapiens
ccaatattagtttga

SEQ ID NO: 482147 - DNA, 15 bp, Homo sapiens
tccaatattagtttg

SEQ ID NO: 482148 - DNA, 15 bp, Homo sapiens
ttccaatattagttt

SEQ ID NO: 482149 - DNA, 15 bp, Homo sapiens
cttccaatattagtt

SEQ ID NO: 482150 - DNA, 15 bp, Homo sapiens
acttccaatattagt

SEQ ID NO: 482151 - DNA, 15 bp, Homo sapiens
aacttccaatattag

SEQ ID NO: 482152 - DNA, 15 bp, Homo sapiens
gaacttccaatatta

SEQ ID NO: 482153 - DNA, 15 bp, Homo sapiens
agaacttccaatatt

SEQ ID NO: 482154 - DNA, 15 bp, Homo sapiens
cagaacttccaatat

SEQ ID NO: 482155 - DNA, 15 bp, Homo sapiens
ccagaacttccaata

SEQ ID NO: 482156 - DNA, 15 bp, Homo sapiens
gccagaacttccaat

SEQ ID NO: 482157 - DNA, 15 bp, Homo sapiens
ggccagaacttccaa

SEQ ID NO: 482158 - DNA, 15 bp, Homo sapiens
tggccagaacttcca

SEQ ID NO: 482159 - DNA, 15 bp, Homo sapiens
ctggccagaacttcc

SEQ ID NO: 482160 - DNA, 15 bp, Homo sapiens
cctggccagaacttc

SEQ ID NO: 482161 - DNA, 15 bp, Homo sapiens
ccctggccagaactt

SEQ ID NO: 482162 - DNA, 15 bp, Homo sapiens
gccctggccagaact

SEQ ID NO: 482163 - DNA, 15 bp, Homo sapiens
tgccctggccagaac

SEQ ID NO: 482164 - DNA, 15 bp, Homo sapiens
ttgccctggccagaa

SEQ ID NO: 482165 - DNA, 15 bp, Homo sapiens
attgccctggccaga

SEQ ID NO: 482166 - DNA, 15 bp, Homo sapiens
gattgccctggccag

SEQ ID NO: 482167 - DNA, 15 bp, Homo sapiens
tgattgccctggcca

SEQ ID NO: 482168 - DNA, 15 bp, Homo sapiens
ctgattgccctggcc

SEQ ID NO: 482169 - DNA, 15 bp, Homo sapiens
cctgattgccctggc

SEQ ID NO: 482170 - DNA, 15 bp, Homo sapiens
gcctgattgccctgg

SEQ ID NO: 482171 - DNA, 15 bp, Homo sapiens
tgcctgattgccctg

SEQ ID NO: 482172 - DNA, 15 bp, Homo sapiens
ttgcctgattgccct

SEQ ID NO: 482173 - DNA, 15 bp, Homo sapiens
cttgcctgattgccc

SEQ ID NO: 482174 - DNA, 15 bp, Homo sapiens
tcttgcctgattgcc

SEQ ID NO: 482175 - DNA, 15 bp, Homo sapiens
ctcttgcctgattgc

SEQ ID NO: 482176 - DNA, 15 bp, Homo sapiens
tctcttgcctgattg

SEQ ID NO: 482177 - DNA, 15 bp, Homo sapiens
ttctcttgcctgatt

SEQ ID NO: 482178 - DNA, 15 bp, Homo sapiens
tttctcttgcctgat

SEQ ID NO: 482179 - DNA, 15 bp, Homo sapiens
ctttctcttgcctga

SEQ ID NO: 482180 - DNA, 15 bp, Homo sapiens
tctttctcttgcctg

SEQ ID NO: 482181 - DNA, 15 bp, Homo sapiens
ttctttctcttgcct

SEQ ID NO: 482182 - DNA, 15 bp, Homo sapiens
tttctttctcttgcc

SEQ ID NO: 482183 - DNA, 15 bp, Homo sapiens
atttctttctcttgc

SEQ ID NO: 482184 - DNA, 15 bp, Homo sapiens
tatttctttctcttg

SEQ ID NO: 482185 - DNA, 15 bp, Homo sapiens
ttatttctttctctt

SEQ ID NO: 482186 - DNA, 15 bp, Homo sapiens
tttatttctttctct

SEQ ID NO: 482187 - DNA, 15 bp, Homo sapiens
ctttatttctttctc

SEQ ID NO: 482188 - DNA, 15 bp, Homo sapiens
cctttatttctttct

SEQ ID NO: 482189 - DNA, 15 bp, Homo sapiens
ccctttatttctttc

SEQ ID NO: 482190 - DNA, 15 bp, Homo sapiens
accctttatttcttt

SEQ ID NO: 482191 - DNA, 15 bp, Homo sapiens
taccctttatttctt

SEQ ID NO: 482192 - DNA, 15 bp, Homo sapiens
ataccctttatttct

SEQ ID NO: 482193 - DNA, 15 bp, Homo sapiens
aataccctttatttc

SEQ ID NO: 482194 - DNA, 15 bp, Homo sapiens
gaataccctttattt

SEQ ID NO: 482195 - DNA, 15 bp, Homo sapiens
cgaataccctttatt

SEQ ID NO: 482196 - DNA, 15 bp, Homo sapiens
ccgaataccctttat

SEQ ID NO: 482197 - DNA, 15 bp, Homo sapiens
accgaatacccttta

SEQ ID NO: 482198 - DNA, 15 bp, Homo sapiens
aaccgaatacccttt

SEQ ID NO: 482199 - DNA, 15 bp, Homo sapiens
taaccgaataccctt

SEQ ID NO: 482200 - DNA, 15 bp, Homo sapiens
ctaaccgaataccct

SEQ ID NO: 482201 - DNA, 15 bp, Homo sapiens
cctaaccgaataccc

SEQ ID NO: 482202 - DNA, 15 bp, Homo sapiens
tcctaaccgaatacc

SEQ ID NO: 482203 - DNA, 15 bp, Homo sapiens
ttcctaaccgaatac

SEQ ID NO: 482204 - DNA, 15 bp, Homo sapiens
tttcctaaccgaata

SEQ ID NO: 482205 - DNA, 15 bp, Homo sapiens
ttttcctaaccgaat

SEQ ID NO: 482206 - DNA, 15 bp, Homo sapiens
cttttcctaaccgaa

SEQ ID NO: 482207 - DNA, 15 bp, Homo sapiens
tcttttcctaaccga

SEQ ID NO: 482208 - DNA, 15 bp, Homo sapiens
ctcttttcctaaccg

SEQ ID NO: 482209 - DNA, 15 bp, Homo sapiens
tctcttttcctaacc

SEQ ID NO: 482210 - DNA, 15 bp, Homo sapiens
ttctcttttcctaac

SEQ ID NO: 482211 - DNA, 15 bp, Homo sapiens
tttctcttttcctaa

SEQ ID NO: 482212 - DNA, 15 bp, Homo sapiens
ctttctcttttccta

SEQ ID NO: 482213 - DNA, 15 bp, Homo sapiens
actttctcttttcct

SEQ ID NO: 482214 - DNA, 15 bp, Homo sapiens
gactttctcttttcc

SEQ ID NO: 482215 - DNA, 15 bp, Homo sapiens
tgactttctcttttc

SEQ ID NO: 482216 - DNA, 15 bp, Homo sapiens
ttgactttctctttt

SEQ ID NO: 482217 - DNA, 15 bp, Homo sapiens
tttgactttctcttt

SEQ ID NO: 482218 - DNA, 15 bp, Homo sapiens
atttgactttctctt

SEQ ID NO: 482219 - DNA, 15 bp, Homo sapiens
aatttgactttctct

SEQ ID NO: 482220 - DNA, 15 bp, Homo sapiens
caatttgactttctc

SEQ ID NO: 482221 - DNA, 15 bp, Homo sapiens
gcaatttgactttct

SEQ ID NO: 482222 - DNA, 15 bp, Homo sapiens
ggcaatttgactttc

SEQ ID NO: 482223 - DNA, 15 bp, Homo sapiens
aggcaatttgacttt

SEQ ID NO: 482224 - DNA, 15 bp, Homo sapiens
gaggcaatttgactt

SEQ ID NO: 482225 - DNA, 15 bp, Homo sapiens
agaggcaatttgact

SEQ ID NO: 482226 - DNA, 15 bp, Homo sapiens
cagaggcaatttgac

SEQ ID NO: 482227 - DNA, 15 bp, Homo sapiens
acagaggcaatttga

SEQ ID NO: 482228 - DNA, 15 bp, Homo sapiens
aacagaggcaatttg

SEQ ID NO: 482229 - DNA, 15 bp, Homo sapiens
aaacagaggcaattt

SEQ ID NO: 482230 - DNA, 15 bp, Homo sapiens
caaacagaggcaatt

SEQ ID NO: 482231 - DNA, 15 bp, Homo sapiens
gcaaacagaggcaat

SEQ ID NO: 482232 - DNA, 15 bp, Homo sapiens
tgcaaacagaggcaa

SEQ ID NO: 482233 - DNA, 15 bp, Homo sapiens
ctgcaaacagaggca

SEQ ID NO: 482234 - DNA, 15 bp, Homo sapiens
tctgcaaacagaggc

SEQ ID NO: 482235 - DNA, 15 bp, Homo sapiens
atctgcaaacagagg

SEQ ID NO: 482236 - DNA, 15 bp, Homo sapiens
catctgcaaacagag

SEQ ID NO: 482237 - DNA, 15 bp, Homo sapiens
tcatctgcaaacaga

SEQ ID NO: 482238 - DNA, 15 bp, Homo sapiens
gtcatctgcaaacag

SEQ ID NO: 482239 - DNA, 15 bp, Homo sapiens
tgtcatctgcaaaca

SEQ ID NO: 482240 - DNA, 15 bp, Homo sapiens
atgtcatctgcaaac

SEQ ID NO: 482241 - DNA, 15 bp, Homo sapiens
catgtcatctgcaaa

SEQ ID NO: 482242 - DNA, 15 bp, Homo sapiens
ccatgtcatctgcaa

SEQ ID NO: 482243 - DNA, 15 bp, Homo sapiens
accatgtcatctgca

SEQ ID NO: 482244 - DNA, 15 bp, Homo sapiens
aaccatgtcatctgc

SEQ ID NO: 482245 - DNA, 15 bp, Homo sapiens
caaccatgtcatctg

SEQ ID NO: 482246 - DNA, 15 bp, Homo sapiens
acaaccatgtcatct

SEQ ID NO: 482247 - DNA, 15 bp, Homo sapiens
tacaaccatgtcatc

SEQ ID NO: 482248 - DNA, 15 bp, Homo sapiens
atacaaccatgtcat

SEQ ID NO: 482249 - DNA, 15 bp, Homo sapiens
catacaaccatgtca

SEQ ID NO: 482250 - DNA, 15 bp, Homo sapiens
acatacaaccatgtc

SEQ ID NO: 482251 - DNA, 15 bp, Homo sapiens
aacatacaaccatgt

SEQ ID NO: 482252 - DNA, 15 bp, Homo sapiens
aaacatacaaccatg

SEQ ID NO: 482253 - DNA, 15 bp, Homo sapiens
taaacatacaaccat

SEQ ID NO: 482254 - DNA, 15 bp, Homo sapiens
ctaaacatacaacca

SEQ ID NO: 482255 - DNA, 15 bp, Homo sapiens
tctaaacatacaacc

SEQ ID NO: 482256 - DNA, 15 bp, Homo sapiens
ttctaaacatacaac

SEQ ID NO: 482257 - DNA, 15 bp, Homo sapiens
tttctaaacatacaa

SEQ ID NO: 482258 - DNA, 15 bp, Homo sapiens
ttttctaaacataca

SEQ ID NO: 482259 - DNA, 15 bp, Homo sapiens
gttttctaaacatac

SEQ ID NO: 482260 - DNA, 15 bp, Homo sapiens
ggttttctaaacata

SEQ ID NO: 482261 - DNA, 15 bp, Homo sapiens
gggttttctaaacat

SEQ ID NO: 482262 - DNA, 15 bp, Homo sapiens
ggggttttctaaaca

SEQ ID NO: 482263 - DNA, 15 bp, Homo sapiens
tggggttttctaaac

SEQ ID NO: 482264 - DNA, 15 bp, Homo sapiens
atggggttttctaaa

SEQ ID NO: 482265 - DNA, 15 bp, Homo sapiens
gatggggttttctaa

SEQ ID NO: 482266 - DNA, 15 bp, Homo sapiens
cgatggggttttcta

SEQ ID NO: 482267 - DNA, 15 bp, Homo sapiens
acgatggggttttct

SEQ ID NO: 482268 - DNA, 15 bp, Homo sapiens
gacgatggggttttc

SEQ ID NO: 482269 - DNA, 15 bp, Homo sapiens
agacgatggggtttt

SEQ ID NO: 482270 - DNA, 15 bp, Homo sapiens
gagacgatggggttt

SEQ ID NO: 482271 - DNA, 15 bp, Homo sapiens
tgagacgatggggtt

SEQ ID NO: 482272 - DNA, 15 bp, Homo sapiens
ctgagacgatggggt

SEQ ID NO: 482273 - DNA, 15 bp, Homo sapiens
gctgagacgatgggg

SEQ ID NO: 482274 - DNA, 15 bp, Homo sapiens
ggctgagacgatggg

SEQ ID NO: 482275 - DNA, 15 bp, Homo sapiens
gggctgagacgatgg

SEQ ID NO: 482276 - DNA, 15 bp, Homo sapiens
tgggctgagacgatg

SEQ ID NO: 482277 - DNA, 15 bp, Homo sapiens
ttgggctgagacgat

SEQ ID NO: 482278 - DNA, 15 bp, Homo sapiens
tttgggctgagacga

SEQ ID NO: 482279 - DNA, 15 bp, Homo sapiens
ttttgggctgagacg

SEQ ID NO: 482280 - DNA, 15 bp, Homo sapiens
attttgggctgagac

SEQ ID NO: 482281 - DNA, 15 bp, Homo sapiens
gattttgggctgaga

SEQ ID NO: 482282 - DNA, 15 bp, Homo sapiens
agattttgggctgag

SEQ ID NO: 482283 - DNA, 15 bp, Homo sapiens
gagattttgggctga

SEQ ID NO: 482284 - DNA, 15 bp, Homo sapiens
ggagattttgggctg

SEQ ID NO: 482285 - DNA, 15 bp, Homo sapiens
aggagattttgggct

SEQ ID NO: 482286 - DNA, 15 bp, Homo sapiens
aaggagattttgggc

SEQ ID NO: 482287 - DNA, 15 bp, Homo sapiens
taaggagattttggg

SEQ ID NO: 482288 - DNA, 15 bp, Homo sapiens
ttaaggagattttgg

SEQ ID NO: 482289 - DNA, 15 bp, Homo sapiens
cttaaggagattttg

SEQ ID NO: 482290 - DNA, 15 bp, Homo sapiens
gcttaaggagatttt

SEQ ID NO: 482291 - DNA, 15 bp, Homo sapiens
agcttaaggagattt

SEQ ID NO: 482292 - DNA, 15 bp, Homo sapiens
cagcttaaggagatt

SEQ ID NO: 482293 - DNA, 15 bp, Homo sapiens
tcagcttaaggagat

SEQ ID NO: 482294 - DNA, 15 bp, Homo sapiens
atcagcttaaggaga

SEQ ID NO: 482295 - DNA, 15 bp, Homo sapiens
tatcagcttaaggag

SEQ ID NO: 482296 - DNA, 15 bp, Homo sapiens
ttatcagcttaagga

SEQ ID NO: 482297 - DNA, 15 bp, Homo sapiens
cttatcagcttaagg

SEQ ID NO: 482298 - DNA, 15 bp, Homo sapiens
gcttatcagcttaag

SEQ ID NO: 482299 - DNA, 15 bp, Homo sapiens
tgcttatcagcttaa

SEQ ID NO: 482300 - DNA, 15 bp, Homo sapiens
ttgcttatcagctta

SEQ ID NO: 482301 - DNA, 15 bp, Homo sapiens
gttgcttatcagctt

SEQ ID NO: 482302 - DNA, 15 bp, Homo sapiens
agttgcttatcagct

SEQ ID NO: 482303 - DNA, 15 bp, Homo sapiens
aagttgcttatcagc

SEQ ID NO: 482304 - DNA, 15 bp, Homo sapiens
gaagttgcttatcag

SEQ ID NO: 482305 - DNA, 15 bp, Homo sapiens
tgaagttgcttatca

SEQ ID NO: 482306 - DNA, 15 bp, Homo sapiens
ctgaagttgcttatc

SEQ ID NO: 482307 - DNA, 15 bp, Homo sapiens
gctgaagttgcttat

SEQ ID NO: 482308 - DNA, 15 bp, Homo sapiens
tgctgaagttgctta

SEQ ID NO: 482309 - DNA, 15 bp, Homo sapiens
ttgctgaagttgctt

SEQ ID NO: 482310 - DNA, 15 bp, Homo sapiens
tttgctgaagttgct

SEQ ID NO: 482311 - DNA, 15 bp, Homo sapiens
ctttgctgaagttgc

SEQ ID NO: 482312 - DNA, 15 bp, Homo sapiens
actttgctgaagttg

SEQ ID NO: 482313 - DNA, 15 bp, Homo sapiens
gactttgctgaagtt

SEQ ID NO: 482314 - DNA, 15 bp, Homo sapiens
agactttgctgaagt

SEQ ID NO: 482315 - DNA, 15 bp, Homo sapiens
gagactttgctgaag

SEQ ID NO: 482316 - DNA, 15 bp, Homo sapiens
tgagactttgctgaa

SEQ ID NO: 482317 - DNA, 15 bp, Homo sapiens
ctgagactttgctga

SEQ ID NO: 482318 - DNA, 15 bp, Homo sapiens
cctgagactttgctg

SEQ ID NO: 482319 - DNA, 15 bp, Homo sapiens
tcctgagactttgct

SEQ ID NO: 482320 - DNA, 15 bp, Homo sapiens
atcctgagactttgc

SEQ ID NO: 482321 - DNA, 15 bp, Homo sapiens
tatcctgagactttg

SEQ ID NO: 482322 - DNA, 15 bp, Homo sapiens
gtatcctgagacttt

SEQ ID NO: 482323 - DNA, 15 bp, Homo sapiens
tgtatcctgagactt

SEQ ID NO: 482324 - DNA, 15 bp, Homo sapiens
ttgtatcctgagact

SEQ ID NO: 482325 - DNA, 15 bp, Homo sapiens
tttgtatcctgagac

SEQ ID NO: 482326 - DNA, 15 bp, Homo sapiens
ttttgtatcctgaga

SEQ ID NO: 482327 - DNA, 15 bp, Homo sapiens
attttgtatcctgag

SEQ ID NO: 482328 - DNA, 15 bp, Homo sapiens
gattttgtatcctga

SEQ ID NO: 482329 - DNA, 15 bp, Homo sapiens
tgattttgtatcctg

SEQ ID NO: 482330 - DNA, 15 bp, Homo sapiens
ttgattttgtatcct

SEQ ID NO: 482331 - DNA, 15 bp, Homo sapiens
attgattttgtatcc

SEQ ID NO: 482332 - DNA, 15 bp, Homo sapiens
cattgattttgtatc

SEQ ID NO: 482333 - DNA, 15 bp, Homo sapiens
acattgattttgtat

SEQ ID NO: 482334 - DNA, 15 bp, Homo sapiens
cacattgattttgta

SEQ ID NO: 482335 - DNA, 15 bp, Homo sapiens
gcacattgattttgt

SEQ ID NO: 482336 - DNA, 15 bp, Homo sapiens
tgcacattgattttg

SEQ ID NO: 482337 - DNA, 15 bp, Homo sapiens
ttgcacattgatttt

SEQ ID NO: 482338 - DNA, 15 bp, Homo sapiens
tttgcacattgattt

SEQ ID NO: 482339 - DNA, 15 bp, Homo sapiens
ttttgcacattgatt

SEQ ID NO: 482340 - DNA, 15 bp, Homo sapiens
tttttgcacattgat

SEQ ID NO: 482341 - DNA, 15 bp, Homo sapiens
atttttgcacattga

SEQ ID NO: 482342 - DNA, 15 bp, Homo sapiens
gatttttgcacattg

SEQ ID NO: 482343 - DNA, 15 bp, Homo sapiens
tgatttttgcacatt

SEQ ID NO: 482344 - DNA, 15 bp, Homo sapiens
gtgatttttgcacat

SEQ ID NO: 482345 - DNA, 15 bp, Homo sapiens
tgtgatttttgcaca

SEQ ID NO: 482346 - DNA, 15 bp, Homo sapiens
ttgtgatttttgcac

SEQ ID NO: 482347 - DNA, 15 bp, Homo sapiens
cttgtgatttttgca

SEQ ID NO: 482348 - DNA, 15 bp, Homo sapiens
gcttgtgatttttgc

SEQ ID NO: 482349 - DNA, 15 bp, Homo sapiens
tgcttgtgatttttg

SEQ ID NO: 482350 - DNA, 15 bp, Homo sapiens
atgcttgtgattttt

SEQ ID NO: 482351 - DNA, 15 bp, Homo sapiens
aatgcttgtgatttt

SEQ ID NO: 482352 - DNA, 15 bp, Homo sapiens
gaatgcttgtgattt

SEQ ID NO: 482353 - DNA, 15 bp, Homo sapiens
ggaatgcttgtgatt

SEQ ID NO: 482354 - DNA, 15 bp, Homo sapiens
aggaatgcttgtgat

SEQ ID NO: 482355 - DNA, 15 bp, Homo sapiens
taggaatgcttgtga

SEQ ID NO: 482356 - DNA, 15 bp, Homo sapiens
ataggaatgcttgtg

SEQ ID NO: 482357 - DNA, 15 bp, Homo sapiens
tataggaatgcttgt

SEQ ID NO: 482358 - DNA, 15 bp, Homo sapiens
gtataggaatgcttg

SEQ ID NO: 482359 - DNA, 15 bp, Homo sapiens
tgtataggaatgctt

SEQ ID NO: 482360 - DNA, 15 bp, Homo sapiens
gtgtataggaatgct

SEQ ID NO: 482361 - DNA, 15 bp, Homo sapiens
ggtgtataggaatgc

SEQ ID NO: 482362 - DNA, 15 bp, Homo sapiens
tggtgtataggaatg

SEQ ID NO: 482363 - DNA, 15 bp, Homo sapiens
ttggtgtataggaat

SEQ ID NO: 482364 - DNA, 15 bp, Homo sapiens
attggtgtataggaa

SEQ ID NO: 482365 - DNA, 15 bp, Homo sapiens
tattggtgtatagga

SEQ ID NO: 482366 - DNA, 15 bp, Homo sapiens
ttattggtgtatagg

SEQ ID NO: 482367 - DNA, 15 bp, Homo sapiens
gttattggtgtatag

SEQ ID NO: 482368 - DNA, 15 bp, Homo sapiens
tgttattggtgtata

SEQ ID NO: 482369 - DNA, 15 bp, Homo sapiens
ctgttattggtgtat

SEQ ID NO: 482370 - DNA, 15 bp, Homo sapiens
tctgttattggtgta

SEQ ID NO: 482371 - DNA, 15 bp, Homo sapiens
gtctgttattggtgt

SEQ ID NO: 482372 - DNA, 15 bp, Homo sapiens
tgtctgttattggtg

SEQ ID NO: 482373 - DNA, 15 bp, Homo sapiens
ttgtctgttattggt

SEQ ID NO: 482374 - DNA, 15 bp, Homo sapiens
tttgtctgttattgg

SEQ ID NO: 482375 - DNA, 15 bp, Homo sapiens
gtttgtctgttattg

SEQ ID NO: 482376 - DNA, 15 bp, Homo sapiens
tgtttgtctgttatt

SEQ ID NO: 482377 - DNA, 15 bp, Homo sapiens
ctgtttgtctgttat

SEQ ID NO: 482378 - DNA, 15 bp, Homo sapiens
tctgtttgtctgtta

SEQ ID NO: 482379 - DNA, 15 bp, Homo sapiens
ctctgtttgtctgtt

SEQ ID NO: 482380 - DNA, 15 bp, Homo sapiens
tctctgtttgtctgt

SEQ ID NO: 482381 - DNA, 15 bp, Homo sapiens
ctctctgtttgtctg

SEQ ID NO: 482382 - DNA, 15 bp, Homo sapiens
gctctctgtttgtct

SEQ ID NO: 482383 - DNA, 15 bp, Homo sapiens
ggctctctgtttgtc

SEQ ID NO: 482384 - DNA, 15 bp, Homo sapiens
tggctctctgtttgt

SEQ ID NO: 482385 - DNA, 15 bp, Homo sapiens
ttggctctctgtttg

SEQ ID NO: 482386 - DNA, 15 bp, Homo sapiens
tttggctctctgttt

SEQ ID NO: 482387 - DNA, 15 bp, Homo sapiens
atttggctctctgtt

SEQ ID NO: 482388 - DNA, 15 bp, Homo sapiens
gatttggctctctgt

SEQ ID NO: 482389 - DNA, 15 bp, Homo sapiens
tgatttggctctctg

SEQ ID NO: 482390 - DNA, 15 bp, Homo sapiens
atgatttggctctct

SEQ ID NO: 482391 - DNA, 15 bp, Homo sapiens
catgatttggctctc

SEQ ID NO: 482392 - DNA, 15 bp, Homo sapiens
tcatgatttggctct

SEQ ID NO: 482393 - DNA, 15 bp, Homo sapiens
ctcatgatttggctc

SEQ ID NO: 482394 - DNA, 15 bp, Homo sapiens
actcatgatttggct

SEQ ID NO: 482395 - DNA, 15 bp, Homo sapiens
cactcatgatttggc

SEQ ID NO: 482396 - DNA, 15 bp, Homo sapiens
tcactcatgatttgg

SEQ ID NO: 482397 - DNA, 15 bp, Homo sapiens
ttcactcatgatttg

SEQ ID NO: 482398 - DNA, 15 bp, Homo sapiens
gttcactcatgattt

SEQ ID NO: 482399 - DNA, 15 bp, Homo sapiens
agttcactcatgatt

SEQ ID NO: 482400 - DNA, 15 bp, Homo sapiens
gagttcactcatgat

SEQ ID NO: 482401 - DNA, 15 bp, Homo sapiens
ggagttcactcatga

SEQ ID NO: 482402 - DNA, 15 bp, Homo sapiens
gggagttcactcatg

SEQ ID NO: 482403 - DNA, 15 bp, Homo sapiens
tgggagttcactcat

SEQ ID NO: 482404 - DNA, 15 bp, Homo sapiens
atgggagttcactca

SEQ ID NO: 482405 - DNA, 15 bp, Homo sapiens
aatgggagttcactc

SEQ ID NO: 482406 - DNA, 15 bp, Homo sapiens
gaatgggagttcact

SEQ ID NO: 482407 - DNA, 15 bp, Homo sapiens
tgaatgggagttcac

SEQ ID NO: 482408 - DNA, 15 bp, Homo sapiens
gtgaatgggagttca

SEQ ID NO: 482409 - DNA, 15 bp, Homo sapiens
tgtgaatgggagttc

SEQ ID NO: 482410 - DNA, 15 bp, Homo sapiens
ttgtgaatgggagtt

SEQ ID NO: 482411 - DNA, 15 bp, Homo sapiens
gttgtgaatgggagt

SEQ ID NO: 482412 - DNA, 15 bp, Homo sapiens
agttgtgaatgggag

SEQ ID NO: 482413 - DNA, 15 bp, Homo sapiens
cagttgtgaatggga

SEQ ID NO: 482414 - DNA, 15 bp, Homo sapiens
gcagttgtgaatggg

SEQ ID NO: 482415 - DNA, 15 bp, Homo sapiens
agcagttgtgaatgg

SEQ ID NO: 482416 - DNA, 15 bp, Homo sapiens
tagcagttgtgaatg

SEQ ID NO: 482417 - DNA, 15 bp, Homo sapiens
gtagcagttgtgaat

SEQ ID NO: 482418 - DNA, 15 bp, Homo sapiens
tgtagcagttgtgaa

SEQ ID NO: 482419 - DNA, 15 bp, Homo sapiens
ttgtagcagttgtga

SEQ ID NO: 482420 - DNA, 15 bp, Homo sapiens
tttgtagcagttgtg

SEQ ID NO: 482421 - DNA, 15 bp, Homo sapiens
ctttgtagcagttgt

SEQ ID NO: 482422 - DNA, 15 bp, Homo sapiens
tctttgtagcagttg

SEQ ID NO: 482423 - DNA, 15 bp, Homo sapiens
ctctttgtagcagtt

SEQ ID NO: 482424 - DNA, 15 bp, Homo sapiens
tctctttgtagcagt

SEQ ID NO: 482425 - DNA, 15 bp, Homo sapiens
ttctctttgtagcag

SEQ ID NO: 482426 - DNA, 15 bp, Homo sapiens
attctctttgtagca

SEQ ID NO: 482427 - DNA, 15 bp, Homo sapiens
tattctctttgtagc

SEQ ID NO: 482428 - DNA, 15 bp, Homo sapiens
ttattctctttgtag

SEQ ID NO: 482429 - DNA, 15 bp, Homo sapiens
tttattctctttgta

SEQ ID NO: 482430 - DNA, 15 bp, Homo sapiens
ttttattctctttgt

SEQ ID NO: 482431 - DNA, 15 bp, Homo sapiens
attttattctctttg

SEQ ID NO: 482432 - DNA, 15 bp, Homo sapiens
tattttattctcttt

SEQ ID NO: 482433 - DNA, 15 bp, Homo sapiens
gtattttattctctt

SEQ ID NO: 482434 - DNA, 15 bp, Homo sapiens
ggtattttattctct

SEQ ID NO: 482435 - DNA, 15 bp, Homo sapiens
aggtattttattctc

SEQ ID NO: 482436 - DNA, 15 bp, Homo sapiens
taggtattttattct

SEQ ID NO: 482437 - DNA, 15 bp, Homo sapiens
ctaggtattttattc

SEQ ID NO: 482438 - DNA, 15 bp, Homo sapiens
cctaggtattttatt

SEQ ID NO: 482439 - DNA, 15 bp, Homo sapiens
tcctaggtattttat

SEQ ID NO: 482440 - DNA, 15 bp, Homo sapiens
ttcctaggtatttta

SEQ ID NO: 482441 - DNA, 15 bp, Homo sapiens
attcctaggtatttt

SEQ ID NO: 482442 - DNA, 15 bp, Homo sapiens
gattcctaggtattt

SEQ ID NO: 482443 - DNA, 15 bp, Homo sapiens
ggattcctaggtatt

SEQ ID NO: 482444 - DNA, 15 bp, Homo sapiens
tggattcctaggtat

SEQ ID NO: 482445 - DNA, 15 bp, Homo sapiens
ttggattcctaggta

SEQ ID NO: 482446 - DNA, 15 bp, Homo sapiens
gttggattcctaggt

SEQ ID NO: 482447 - DNA, 15 bp, Homo sapiens
agttggattcctagg

SEQ ID NO: 482448 - DNA, 15 bp, Homo sapiens
aagttggattcctag

SEQ ID NO: 482449 - DNA, 15 bp, Homo sapiens
taagttggattccta

SEQ ID NO: 482450 - DNA, 15 bp, Homo sapiens
gtaagttggattcct

SEQ ID NO: 482451 - DNA, 15 bp, Homo sapiens
tgtaagttggattcc

SEQ ID NO: 482452 - DNA, 15 bp, Homo sapiens
ttgtaagttggattc

SEQ ID NO: 482453 - DNA, 15 bp, Homo sapiens
cttgtaagttggatt

SEQ ID NO: 482454 - DNA, 15 bp, Homo sapiens
ccttgtaagttggat

SEQ ID NO: 482455 - DNA, 15 bp, Homo sapiens
cccttgtaagttgga

SEQ ID NO: 482456 - DNA, 15 bp, Homo sapiens
tcccttgtaagttgg

SEQ ID NO: 482457 - DNA, 15 bp, Homo sapiens
atcccttgtaagttg

SEQ ID NO: 482458 - DNA, 15 bp, Homo sapiens
catcccttgtaagtt

SEQ ID NO: 482459 - DNA, 15 bp, Homo sapiens
acatcccttgtaagt

SEQ ID NO: 482460 - DNA, 15 bp, Homo sapiens
cacatcccttgtaag

SEQ ID NO: 482461 - DNA, 15 bp, Homo sapiens
tcacatcccttgtaa

SEQ ID NO: 482462 - DNA, 15 bp, Homo sapiens
ttcacatcccttgta

SEQ ID NO: 482463 - DNA, 15 bp, Homo sapiens
cttcacatcccttgt

SEQ ID NO: 482464 - DNA, 15 bp, Homo sapiens
ccttcacatcccttg

SEQ ID NO: 482465 - DNA, 15 bp, Homo sapiens
tccttcacatccctt

SEQ ID NO: 482466 - DNA, 15 bp, Homo sapiens
gtccttcacatccct

SEQ ID NO: 482467 - DNA, 15 bp, Homo sapiens
ggtccttcacatccc

SEQ ID NO: 482468 - DNA, 15 bp, Homo sapiens
aggtccttcacatcc

SEQ ID NO: 482469 - DNA, 15 bp, Homo sapiens
gaggtccttcacatc

SEQ ID NO: 482470 - DNA, 15 bp, Homo sapiens
agaggtccttcacat

SEQ ID NO: 482471 - DNA, 15 bp, Homo sapiens
aagaggtccttcaca

SEQ ID NO: 482472 - DNA, 15 bp, Homo sapiens
gaagaggtccttcac

SEQ ID NO: 482473 - DNA, 15 bp, Homo sapiens
tgaagaggtccttca

SEQ ID NO: 482474 - DNA, 15 bp, Homo sapiens
ttgaagaggtccttc

SEQ ID NO: 482475 - DNA, 15 bp, Homo sapiens
cttgaagaggtcctt

SEQ ID NO: 482476 - DNA, 15 bp, Homo sapiens
ccttgaagaggtcct

SEQ ID NO: 482477 - DNA, 15 bp, Homo sapiens
tccttgaagaggtcc

SEQ ID NO: 482478 - DNA, 15 bp, Homo sapiens
ctccttgaagaggtc

SEQ ID NO: 482479 - DNA, 15 bp, Homo sapiens
tctccttgaagaggt

SEQ ID NO: 482480 - DNA, 15 bp, Homo sapiens
ttctccttgaagagg

SEQ ID NO: 482481 - DNA, 15 bp, Homo sapiens
gttctccttgaagag

SEQ ID NO: 482482 - DNA, 15 bp, Homo sapiens
agttctccttgaaga

SEQ ID NO: 482483 - DNA, 15 bp, Homo sapiens
tagttctccttgaag

SEQ ID NO: 482484 - DNA, 15 bp, Homo sapiens
gtagttctccttgaa

SEQ ID NO: 482485 - DNA, 15 bp, Homo sapiens
tgtagttctccttga

SEQ ID NO: 482486 - DNA, 15 bp, Homo sapiens
ttgtagttctccttg

SEQ ID NO: 482487 - DNA, 15 bp, Homo sapiens
tttgtagttctcctt

SEQ ID NO: 482488 - DNA, 15 bp, Homo sapiens
gtttgtagttctcct

SEQ ID NO: 482489 - DNA, 15 bp, Homo sapiens
ggtttgtagttctcc

SEQ ID NO: 482490 - DNA, 15 bp, Homo sapiens
tggtttgtagttctc

SEQ ID NO: 482491 - DNA, 15 bp, Homo sapiens
gtggtttgtagttct

SEQ ID NO: 482492 - DNA, 15 bp, Homo sapiens
agtggtttgtagttc

SEQ ID NO: 482493 - DNA, 15 bp, Homo sapiens
cagtggtttgtagtt

SEQ ID NO: 482494 - DNA, 15 bp, Homo sapiens
gcagtggtttgtagt

SEQ ID NO: 482495 - DNA, 15 bp, Homo sapiens
agcagtggtttgtag

SEQ ID NO: 482496 - DNA, 15 bp, Homo sapiens
gagcagtggtttgta

SEQ ID NO: 482497 - DNA, 15 bp, Homo sapiens
agagcagtggtttgt

SEQ ID NO: 482498 - DNA, 15 bp, Homo sapiens
tagagcagtggtttg

SEQ ID NO: 482499 - DNA, 15 bp, Homo sapiens
ctagagcagtggttt

SEQ ID NO: 482500 - DNA, 15 bp, Homo sapiens
cctagagcagtggtt

SEQ ID NO: 482501 - DNA, 15 bp, Homo sapiens
tcctagagcagtggt

SEQ ID NO: 482502 - DNA, 15 bp, Homo sapiens
ttcctagagcagtgg

SEQ ID NO: 482503 - DNA, 15 bp, Homo sapiens
tttcctagagcagtg

SEQ ID NO: 482504 - DNA, 15 bp, Homo sapiens
atttcctagagcagt

SEQ ID NO: 482505 - DNA, 15 bp, Homo sapiens
tatttcctagagcag

SEQ ID NO: 482506 - DNA, 15 bp, Homo sapiens
ttatttcctagagca

SEQ ID NO: 482507 - DNA, 15 bp, Homo sapiens
cttatttcctagagc

SEQ ID NO: 482508 - DNA, 15 bp, Homo sapiens
tcttatttcctagag

SEQ ID NO: 482509 - DNA, 15 bp, Homo sapiens
ctcttatttcctaga

SEQ ID NO: 482510 - DNA, 15 bp, Homo sapiens
tctcttatttcctag

SEQ ID NO: 482511 - DNA, 15 bp, Homo sapiens
ctctcttatttccta

SEQ ID NO: 482512 - DNA, 15 bp, Homo sapiens
cctctcttatttcct

SEQ ID NO: 482513 - DNA, 15 bp, Homo sapiens
tcctctcttatttcc

SEQ ID NO: 482514 - DNA, 15 bp, Homo sapiens
gtcctctcttatttc

SEQ ID NO: 482515 - DNA, 15 bp, Homo sapiens
tgtcctctcttattt

SEQ ID NO: 482516 - DNA, 15 bp, Homo sapiens
gtgtcctctcttatt

SEQ ID NO: 482517 - DNA, 15 bp, Homo sapiens
tgtgtcctctcttat

SEQ ID NO: 482518 - DNA, 15 bp, Homo sapiens
ttgtgtcctctctta

SEQ ID NO: 482519 - DNA, 15 bp, Homo sapiens
tttgtgtcctctctt

SEQ ID NO: 482520 - DNA, 15 bp, Homo sapiens
atttgtgtcctctct

SEQ ID NO: 482521 - DNA, 15 bp, Homo sapiens
catttgtgtcctctc

SEQ ID NO: 482522 - DNA, 15 bp, Homo sapiens
ccatttgtgtcctct

SEQ ID NO: 482523 - DNA, 15 bp, Homo sapiens
tccatttgtgtcctc

SEQ ID NO: 482524 - DNA, 15 bp, Homo sapiens
ttccatttgtgtcct

SEQ ID NO: 482525 - DNA, 15 bp, Homo sapiens
tttccatttgtgtcc

SEQ ID NO: 482526 - DNA, 15 bp, Homo sapiens
ttttccatttgtgtc

SEQ ID NO: 482527 - DNA, 15 bp, Homo sapiens
gttttccatttgtgt

SEQ ID NO: 482528 - DNA, 15 bp, Homo sapiens
tgttttccatttgtg

SEQ ID NO: 482529 - DNA, 15 bp, Homo sapiens
ttgttttccatttgt

SEQ ID NO: 482530 - DNA, 15 bp, Homo sapiens
attgttttccatttg

SEQ ID NO: 482531 - DNA, 15 bp, Homo sapiens
aattgttttccattt

SEQ ID NO: 482532 - DNA, 15 bp, Homo sapiens
gaattgttttccatt

SEQ ID NO: 482533 - DNA, 15 bp, Homo sapiens
ggaattgttttccat

SEQ ID NO: 482534 - DNA, 15 bp, Homo sapiens
tggaattgttttcca

SEQ ID NO: 482535 - DNA, 15 bp, Homo sapiens
atggaattgttttcc

SEQ ID NO: 482536 - DNA, 15 bp, Homo sapiens
catggaattgttttc

SEQ ID NO: 482537 - DNA, 15 bp, Homo sapiens
gcatggaattgtttt

SEQ ID NO: 482538 - DNA, 15 bp, Homo sapiens
agcatggaattgttt

SEQ ID NO: 482539 - DNA, 15 bp, Homo sapiens
gagcatggaattgtt

SEQ ID NO: 482540 - DNA, 15 bp, Homo sapiens
tgagcatggaattgt

SEQ ID NO: 482541 - DNA, 15 bp, Homo sapiens
atgagcatggaattg

SEQ ID NO: 482542 - DNA, 15 bp, Homo sapiens
catgagcatggaatt

SEQ ID NO: 482543 - DNA, 15 bp, Homo sapiens
ccatgagcatggaat

SEQ ID NO: 482544 - DNA, 15 bp, Homo sapiens
tccatgagcatggaa

SEQ ID NO: 482545 - DNA, 15 bp, Homo sapiens
atccatgagcatgga

SEQ ID NO: 482546 - DNA, 15 bp, Homo sapiens
tatccatgagcatgg

SEQ ID NO: 482547 - DNA, 15 bp, Homo sapiens
ctatccatgagcatg

SEQ ID NO: 482548 - DNA, 15 bp, Homo sapiens
cctatccatgagcat

SEQ ID NO: 482549 - DNA, 15 bp, Homo sapiens
tcctatccatgagca

SEQ ID NO: 482550 - DNA, 15 bp, Homo sapiens
ctcctatccatgagc

SEQ ID NO: 482551 - DNA, 15 bp, Homo sapiens
cctcctatccatgag

SEQ ID NO: 482552 - DNA, 15 bp, Homo sapiens
tcctcctatccatga

SEQ ID NO: 482553 - DNA, 15 bp, Homo sapiens
ttcctcctatccatg

SEQ ID NO: 482554 - DNA, 15 bp, Homo sapiens
gttcctcctatccat

SEQ ID NO: 482555 - DNA, 15 bp, Homo sapiens
ggttcctcctatcca

SEQ ID NO: 482556 - DNA, 15 bp, Homo sapiens
tggttcctcctatcc

SEQ ID NO: 482557 - DNA, 15 bp, Homo sapiens
ttggttcctcctatc

SEQ ID NO: 482558 - DNA, 15 bp, Homo sapiens
attggttcctcctat

SEQ ID NO: 482559 - DNA, 15 bp, Homo sapiens
tattggttcctccta

SEQ ID NO: 482560 - DNA, 15 bp, Homo sapiens
atattggttcctcct

SEQ ID NO: 482561 - DNA, 15 bp, Homo sapiens
gatattggttcctcc

SEQ ID NO: 482562 - DNA, 15 bp, Homo sapiens
ggatattggttcctc

SEQ ID NO: 482563 - DNA, 15 bp, Homo sapiens
aggatattggttcct

SEQ ID NO: 482564 - DNA, 15 bp, Homo sapiens
caggatattggttcc

SEQ ID NO: 482565 - DNA, 15 bp, Homo sapiens
acaggatattggttc

SEQ ID NO: 482566 - DNA, 15 bp, Homo sapiens
tacaggatattggtt

SEQ ID NO: 482567 - DNA, 15 bp, Homo sapiens
atacaggatattggt

SEQ ID NO: 482568 - DNA, 15 bp, Homo sapiens
catacaggatattgg

SEQ ID NO: 482569 - DNA, 15 bp, Homo sapiens
acatacaggatattg

SEQ ID NO: 482570 - DNA, 15 bp, Homo sapiens
cacatacaggatatt

SEQ ID NO: 482571 - DNA, 15 bp, Homo sapiens
acacatacaggatat

SEQ ID NO: 482572 - DNA, 15 bp, Homo sapiens
aacacatacaggata

SEQ ID NO: 482573 - DNA, 15 bp, Homo sapiens
aaacacatacaggat

SEQ ID NO: 482574 - DNA, 15 bp, Homo sapiens
aaaacacatacagga

SEQ ID NO: 482575 - DNA, 15 bp, Homo sapiens
taaaacacatacagg

SEQ ID NO: 482576 - DNA, 15 bp, Homo sapiens
ataaaacacatacag

SEQ ID NO: 482577 - DNA, 15 bp, Homo sapiens
tataaaacacataca

SEQ ID NO: 482578 - DNA, 15 bp, Homo sapiens
gtataaaacacatac

SEQ ID NO: 482579 - DNA, 15 bp, Homo sapiens
agtataaaacacata

SEQ ID NO: 482580 - DNA, 15 bp, Homo sapiens
aagtataaaacacat

SEQ ID NO: 482581 - DNA, 15 bp, Homo sapiens
aaagtataaaacaca

SEQ ID NO: 482582 - DNA, 15 bp, Homo sapiens
aaaagtataaaacac

SEQ ID NO: 482583 - DNA, 15 bp, Homo sapiens
aaaaagtataaaaca

SEQ ID NO: 482584 - DNA, 15 bp, Homo sapiens
aaaaaagtataaaac

SEQ ID NO: 482585 - DNA, 15 bp, Homo sapiens
aaaaaaagtataaaa

SEQ ID NO: 482586 - DNA, 15 bp, Homo sapiens
caaaaaaaagtataa

SEQ ID NO: 482587 - DNA, 15 bp, Homo sapiens
tcaaaaaaaagtata

SEQ ID NO: 482588 - DNA, 15 bp, Homo sapiens
ttcaaaaaaaagtat

SEQ ID NO: 482589 - DNA, 15 bp, Homo sapiens
tttcaaaaaaaagta

SEQ ID NO: 482590 - DNA, 15 bp, Homo sapiens
ttttcaaaaaaaagt

SEQ ID NO: 482591 - DNA, 15 bp, Homo sapiens
tttttcaaaaaaaag

SEQ ID NO: 482592 - DNA, 15 bp, Homo sapiens
ctttttcaaaaaaaa

SEQ ID NO: 482593 - DNA, 15 bp, Homo sapiens
gctttttcaaaaaaa

SEQ ID NO: 482594 - DNA, 15 bp, Homo sapiens
tgctttttcaaaaaa

SEQ ID NO: 482595 - DNA, 15 bp, Homo sapiens
ttgctttttcaaaaa

SEQ ID NO: 482596 - DNA, 15 bp, Homo sapiens
cttgctttttcaaaa

SEQ ID NO: 482597 - DNA, 15 bp, Homo sapiens
acttgctttttcaaa

SEQ ID NO: 482598 - DNA, 15 bp, Homo sapiens
aacttgctttttcaa

SEQ ID NO: 482599 - DNA, 15 bp, Homo sapiens
taacttgctttttca

SEQ ID NO: 482600 - DNA, 15 bp, Homo sapiens
ataacttgctttttc

SEQ ID NO: 482601 - DNA, 15 bp, Homo sapiens
aataacttgcttttt

SEQ ID NO: 482602 - DNA, 15 bp, Homo sapiens
taataacttgctttt

SEQ ID NO: 482603 - DNA, 15 bp, Homo sapiens
ttaataacttgcttt

SEQ ID NO: 482604 - DNA, 15 bp, Homo sapiens
tttaataacttgctt

SEQ ID NO: 482605 - DNA, 15 bp, Homo sapiens
ttttaataacttgct

SEQ ID NO: 482606 - DNA, 15 bp, Homo sapiens
cttttaataacttgc

SEQ ID NO: 482607 - DNA, 15 bp, Homo sapiens
tcttttaataacttg

SEQ ID NO: 482608 - DNA, 15 bp, Homo sapiens
ttcttttaataactt

SEQ ID NO: 482609 - DNA, 15 bp, Homo sapiens
tttcttttaataact

SEQ ID NO: 482610 - DNA, 15 bp, Homo sapiens
ttttcttttaataac

SEQ ID NO: 482611 - DNA, 15 bp, Homo sapiens
tttttcttttaataa

SEQ ID NO: 482612 - DNA, 15 bp, Homo sapiens
ctttttcttttaata

SEQ ID NO: 482613 - DNA, 15 bp, Homo sapiens
gctttttcttttaat

SEQ ID NO: 482614 - DNA, 15 bp, Homo sapiens
agctttttcttttaa

SEQ ID NO: 482615 - DNA, 15 bp, Homo sapiens
gagctttttctttta

SEQ ID NO: 482616 - DNA, 15 bp, Homo sapiens
tgagctttttctttt

SEQ ID NO: 482617 - DNA, 15 bp, Homo sapiens
gtgagctttttcttt

SEQ ID NO: 482618 - DNA, 15 bp, Homo sapiens
tgtgagctttttctt

SEQ ID NO: 482619 - DNA, 15 bp, Homo sapiens
ttgtgagctttttct

SEQ ID NO: 482620 - DNA, 15 bp, Homo sapiens
attgtgagctttttc

SEQ ID NO: 482621 - DNA, 15 bp, Homo sapiens
gattgtgagcttttt

SEQ ID NO: 482622 - DNA, 15 bp, Homo sapiens
tgattgtgagctttt

SEQ ID NO: 482623 - DNA, 15 bp, Homo sapiens
atgattgtgagcttt

SEQ ID NO: 482624 - DNA, 15 bp, Homo sapiens
aatgattgtgagctt

SEQ ID NO: 482625 - DNA, 15 bp, Homo sapiens
caatgattgtgagct

SEQ ID NO: 482626 - DNA, 15 bp, Homo sapiens
tcaatgattgtgagc

SEQ ID NO: 482627 - DNA, 15 bp, Homo sapiens
atcaatgattgtgag

SEQ ID NO: 482628 - DNA, 15 bp, Homo sapiens
catcaatgattgtga

SEQ ID NO: 482629 - DNA, 15 bp, Homo sapiens
acatcaatgattgtg

SEQ ID NO: 482630 - DNA, 15 bp, Homo sapiens
gacatcaatgattgt

SEQ ID NO: 482631 - DNA, 15 bp, Homo sapiens
ggacatcaatgattg

SEQ ID NO: 482632 - DNA, 15 bp, Homo sapiens
tggacatcaatgatt

SEQ ID NO: 482633 - DNA, 15 bp, Homo sapiens
ttggacatcaatgat

SEQ ID NO: 482634 - DNA, 15 bp, Homo sapiens
cttggacatcaatga

SEQ ID NO: 482635 - DNA, 15 bp, Homo sapiens
ccttggacatcaatg

SEQ ID NO: 482636 - DNA, 15 bp, Homo sapiens
gccttggacatcaat

SEQ ID NO: 482637 - DNA, 15 bp, Homo sapiens
tgccttggacatcaa

SEQ ID NO: 482638 - DNA, 15 bp, Homo sapiens
atgccttggacatca

SEQ ID NO: 482639 - DNA, 15 bp, Homo sapiens
tatgccttggacatc

SEQ ID NO: 482640 - DNA, 15 bp, Homo sapiens
atatgccttggacat

SEQ ID NO: 482641 - DNA, 15 bp, Homo sapiens
aatatgccttggaca

SEQ ID NO: 482642 - DNA, 15 bp, Homo sapiens
aaatatgccttggac

SEQ ID NO: 482643 - DNA, 15 bp, Homo sapiens
caaatatgccttgga

SEQ ID NO: 482644 - DNA, 15 bp, Homo sapiens
gcaaatatgccttgg

SEQ ID NO: 482645 - DNA, 15 bp, Homo sapiens
agcaaatatgccttg

SEQ ID NO: 482646 - DNA, 15 bp, Homo sapiens
cagcaaatatgcctt

SEQ ID NO: 482647 - DNA, 15 bp, Homo sapiens
acagcaaatatgcct

SEQ ID NO: 482648 - DNA, 15 bp, Homo sapiens
aacagcaaatatgcc

SEQ ID NO: 482649 - DNA, 15 bp, Homo sapiens
aaacagcaaatatgc

SEQ ID NO: 482650 - DNA, 15 bp, Homo sapiens
taaacagcaaatatg

SEQ ID NO: 482651 - DNA, 15 bp, Homo sapiens
ataaacagcaaatat

SEQ ID NO: 482652 - DNA, 15 bp, Homo sapiens
cataaacagcaaata

SEQ ID NO: 482653 - DNA, 15 bp, Homo sapiens
ccataaacagcaaat

SEQ ID NO: 482654 - DNA, 15 bp, Homo sapiens
tccataaacagcaaa

SEQ ID NO: 482655 - DNA, 15 bp, Homo sapiens
ttccataaacagcaa

SEQ ID NO: 482656 - DNA, 15 bp, Homo sapiens
attccataaacagca

SEQ ID NO: 482657 - DNA, 15 bp, Homo sapiens
aattccataaacagc

SEQ ID NO: 482658 - DNA, 15 bp, Homo sapiens
aaattccataaacag

SEQ ID NO: 482659 - DNA, 15 bp, Homo sapiens
aaaattccataaaca

SEQ ID NO: 482660 - DNA, 15 bp, Homo sapiens
aaaaattccataaac

SEQ ID NO: 482661 - DNA, 15 bp, Homo sapiens
gaaaaattccataaa

SEQ ID NO: 482662 - DNA, 15 bp, Homo sapiens
agaaaaattccataa

SEQ ID NO: 482663 - DNA, 15 bp, Homo sapiens
aagaaaaattccata

SEQ ID NO: 482664 - DNA, 15 bp, Homo sapiens
aaagaaaaattccat

SEQ ID NO: 482665 - DNA, 15 bp, Homo sapiens
gaaagaaaaattcca

SEQ ID NO: 482666 - DNA, 15 bp, Homo sapiens
ggaaagaaaaattcc

SEQ ID NO: 482667 - DNA, 15 bp, Homo sapiens
aggaaagaaaaattc

SEQ ID NO: 482668 - DNA, 15 bp, Homo sapiens
taggaaagaaaaatt

SEQ ID NO: 482669 - DNA, 15 bp, Homo sapiens
ctaggaaagaaaaat

SEQ ID NO: 482670 - DNA, 15 bp, Homo sapiens
gctaggaaagaaaaa

SEQ ID NO: 482671 - DNA, 15 bp, Homo sapiens
tgctaggaaagaaaa

SEQ ID NO: 482672 - DNA, 15 bp, Homo sapiens
ctgctaggaaagaaa

SEQ ID NO: 482673 - DNA, 15 bp, Homo sapiens
tctgctaggaaagaa

SEQ ID NO: 482674 - DNA, 15 bp, Homo sapiens
gtctgctaggaaaga

SEQ ID NO: 482675 - DNA, 15 bp, Homo sapiens
tgtctgctaggaaag

SEQ ID NO: 482676 - DNA, 15 bp, Homo sapiens
ttgtctgctaggaaa

SEQ ID NO: 482677 - DNA, 15 bp, Homo sapiens
gttgtctgctaggaa

SEQ ID NO: 482678 - DNA, 15 bp, Homo sapiens
agttgtctgctagga

SEQ ID NO: 482679 - DNA, 15 bp, Homo sapiens
tagttgtctgctagg

SEQ ID NO: 482680 - DNA, 15 bp, Homo sapiens
atagttgtctgctag

SEQ ID NO: 482681 - DNA, 15 bp, Homo sapiens
gatagttgtctgcta

SEQ ID NO: 482682 - DNA, 15 bp, Homo sapiens
cgatagttgtctgct

SEQ ID NO: 482683 - DNA, 15 bp, Homo sapiens
tcgatagttgtctgc

SEQ ID NO: 482684 - DNA, 15 bp, Homo sapiens
ctcgatagttgtctg

SEQ ID NO: 482685 - DNA, 15 bp, Homo sapiens
actcgatagttgtct

SEQ ID NO: 482686 - DNA, 15 bp, Homo sapiens
aactcgatagttgtc

SEQ ID NO: 482687 - DNA, 15 bp, Homo sapiens
aaactcgatagttgt

SEQ ID NO: 482688 - DNA, 15 bp, Homo sapiens
aaaactcgatagttg

SEQ ID NO: 482689 - DNA, 15 bp, Homo sapiens
caaaactcgatagtt

SEQ ID NO: 482690 - DNA, 15 bp, Homo sapiens
ccaaaactcgatagt

SEQ ID NO: 482691 - DNA, 15 bp, Homo sapiens
cccaaaactcgatag

SEQ ID NO: 482692 - DNA, 15 bp, Homo sapiens
acccaaaactcgata

SEQ ID NO: 482693 - DNA, 15 bp, Homo sapiens
aacccaaaactcgat

SEQ ID NO: 482694 - DNA, 15 bp, Homo sapiens
aaacccaaaactcga

SEQ ID NO: 482695 - DNA, 15 bp, Homo sapiens
taaacccaaaactcg

SEQ ID NO: 482696 - DNA, 15 bp, Homo sapiens
ataaacccaaaactc

SEQ ID NO: 482697 - DNA, 15 bp, Homo sapiens
cataaacccaaaact

SEQ ID NO: 482698 - DNA, 15 bp, Homo sapiens
acataaacccaaaac

SEQ ID NO: 482699 - DNA, 15 bp, Homo sapiens
aacataaacccaaaa

SEQ ID NO: 482700 - DNA, 15 bp, Homo sapiens
taacataaacccaaa

SEQ ID NO: 482701 - DNA, 15 bp, Homo sapiens
ctaacataaacccaa

SEQ ID NO: 482702 - DNA, 15 bp, Homo sapiens
cctaacataaaccca

SEQ ID NO: 482703 - DNA, 15 bp, Homo sapiens
acctaacataaaccc

SEQ ID NO: 482704 - DNA, 15 bp, Homo sapiens
cacctaacataaacc

SEQ ID NO: 482705 - DNA, 15 bp, Homo sapiens
acacctaacataaac

SEQ ID NO: 482706 - DNA, 15 bp, Homo sapiens
gacacctaacataaa

SEQ ID NO: 482707 - DNA, 15 bp, Homo sapiens
agacacctaacataa

SEQ ID NO: 482708 - DNA, 15 bp, Homo sapiens
aagacacctaacata

SEQ ID NO: 482709 - DNA, 15 bp, Homo sapiens
aaagacacctaacat

SEQ ID NO: 482710 - DNA, 15 bp, Homo sapiens
taaagacacctaaca

SEQ ID NO: 482711 - DNA, 15 bp, Homo sapiens
gtaaagacacctaac

SEQ ID NO: 482712 - DNA, 15 bp, Homo sapiens
ggtaaagacacctaa

SEQ ID NO: 482713 - DNA, 15 bp, Homo sapiens
aggtaaagacaccta

SEQ ID NO: 482714 - DNA, 15 bp, Homo sapiens
aaggtaaagacacct

SEQ ID NO: 482715 - DNA, 15 bp, Homo sapiens
aaaggtaaagacacc

SEQ ID NO: 482716 - DNA, 15 bp, Homo sapiens
gaaaggtaaagacac

SEQ ID NO: 482717 - DNA, 15 bp, Homo sapiens
tgaaaggtaaagaca

SEQ ID NO: 482718 - DNA, 15 bp, Homo sapiens
atgaaaggtaaagac

SEQ ID NO: 482719 - DNA, 15 bp, Homo sapiens
aatgaaaggtaaaga

SEQ ID NO: 482720 - DNA, 15 bp, Homo sapiens
caatgaaaggtaaag

SEQ ID NO: 482721 - DNA, 15 bp, Homo sapiens
gcaatgaaaggtaaa

SEQ ID NO: 482722 - DNA, 15 bp, Homo sapiens
agcaatgaaaggtaa

SEQ ID NO: 482723 - DNA, 15 bp, Homo sapiens
aagcaatgaaaggta

SEQ ID NO: 482724 - DNA, 15 bp, Homo sapiens
taagcaatgaaaggt

SEQ ID NO: 482725 - DNA, 15 bp, Homo sapiens
gtaagcaatgaaagg

SEQ ID NO: 482726 - DNA, 15 bp, Homo sapiens
tgtaagcaatgaaag

SEQ ID NO: 482727 - DNA, 15 bp, Homo sapiens
ctgtaagcaatgaaa

SEQ ID NO: 482728 - DNA, 15 bp, Homo sapiens
tctgtaagcaatgaa

SEQ ID NO: 482729 - DNA, 15 bp, Homo sapiens
atctgtaagcaatga

SEQ ID NO: 482730 - DNA, 15 bp, Homo sapiens
tatctgtaagcaatg

SEQ ID NO: 482731 - DNA, 15 bp, Homo sapiens
ttatctgtaagcaat

SEQ ID NO: 482732 - DNA, 15 bp, Homo sapiens
attatctgtaagcaa

SEQ ID NO: 482733 - DNA, 15 bp, Homo sapiens
tattatctgtaagca

SEQ ID NO: 482734 - DNA, 15 bp, Homo sapiens
atattatctgtaagc

SEQ ID NO: 482735 - DNA, 15 bp, Homo sapiens
aatattatctgtaag

SEQ ID NO: 482736 - DNA, 15 bp, Homo sapiens
caatattatctgtaa

SEQ ID NO: 482737 - DNA, 15 bp, Homo sapiens
ccaatattatctgta

SEQ ID NO: 482738 - DNA, 15 bp, Homo sapiens
tccaatattatctgt

SEQ ID NO: 482739 - DNA, 15 bp, Homo sapiens
ctccaatattatctg

SEQ ID NO: 482740 - DNA, 15 bp, Homo sapiens
gctccaatattatct

SEQ ID NO: 482741 - DNA, 15 bp, Homo sapiens
tgctccaatattatc

SEQ ID NO: 482742 - DNA, 15 bp, Homo sapiens
ttgctccaatattat

SEQ ID NO: 482743 - DNA, 15 bp, Homo sapiens
tttgctccaatatta

SEQ ID NO: 482744 - DNA, 15 bp, Homo sapiens
ttttgctccaatatt

SEQ ID NO: 482745 - DNA, 15 bp, Homo sapiens
cttttgctccaatat

SEQ ID NO: 482746 - DNA, 15 bp, Homo sapiens
acttttgctccaata

SEQ ID NO: 482747 - DNA, 15 bp, Homo sapiens
tacttttgctccaat

SEQ ID NO: 482748 - DNA, 15 bp, Homo sapiens
ttacttttgctccaa

SEQ ID NO: 482749 - DNA, 15 bp, Homo sapiens
attacttttgctcca

SEQ ID NO: 482750 - DNA, 15 bp, Homo sapiens
tattacttttgctcc

SEQ ID NO: 482751 - DNA, 15 bp, Homo sapiens
gtattacttttgctc

SEQ ID NO: 482752 - DNA, 15 bp, Homo sapiens
cgtattacttttgct

SEQ ID NO: 482753 - DNA, 15 bp, Homo sapiens
acgtattacttttgc

SEQ ID NO: 482754 - DNA, 15 bp, Homo sapiens
tacgtattacttttg

SEQ ID NO: 482755 - DNA, 15 bp, Homo sapiens
ttacgtattactttt

SEQ ID NO: 482756 - DNA, 15 bp, Homo sapiens
tttacgtattacttt

SEQ ID NO: 482757 - DNA, 15 bp, Homo sapiens
atttacgtattactt

SEQ ID NO: 482758 - DNA, 15 bp, Homo sapiens
catttacgtattact

SEQ ID NO: 482759 - DNA, 15 bp, Homo sapiens
ccatttacgtattac

SEQ ID NO: 482760 - DNA, 15 bp, Homo sapiens
tccatttacgtatta

SEQ ID NO: 482761 - DNA, 15 bp, Homo sapiens
ttccatttacgtatt

SEQ ID NO: 482762 - DNA, 15 bp, Homo sapiens
tttccatttacgtat

SEQ ID NO: 482763 - DNA, 15 bp, Homo sapiens
ctttccatttacgta

SEQ ID NO: 482764 - DNA, 15 bp, Homo sapiens
actttccatttacgt

SEQ ID NO: 482765 - DNA, 15 bp, Homo sapiens
aactttccatttacg

SEQ ID NO: 482766 - DNA, 15 bp, Homo sapiens
taactttccatttac

SEQ ID NO: 482767 - DNA, 15 bp, Homo sapiens
ataactttccattta

SEQ ID NO: 482768 - DNA, 15 bp, Homo sapiens
aataactttccattt

SEQ ID NO: 482769 - DNA, 15 bp, Homo sapiens
aaataactttccatt

SEQ ID NO: 482770 - DNA, 15 bp, Homo sapiens
aaaataactttccat

SEQ ID NO: 482771 - DNA, 15 bp, Homo sapiens
caaaataactttcca

SEQ ID NO: 482772 - DNA, 15 bp, Homo sapiens
gcaaaataactttcc

SEQ ID NO: 482773 - DNA, 15 bp, Homo sapiens
agcaaaataactttc

SEQ ID NO: 482774 - DNA, 15 bp, Homo sapiens
gagcaaaataacttt

SEQ ID NO: 482775 - DNA, 15 bp, Homo sapiens
agagcaaaataactt

SEQ ID NO: 482776 - DNA, 15 bp, Homo sapiens
cagagcaaaataact

SEQ ID NO: 482777 - DNA, 15 bp, Homo sapiens
tcagagcaaaataac

SEQ ID NO: 482778 - DNA, 15 bp, Homo sapiens
ctcagagcaaaataa

SEQ ID NO: 482779 - DNA, 15 bp, Homo sapiens
actcagagcaaaata

SEQ ID NO: 482780 - DNA, 15 bp, Homo sapiens
aactcagagcaaaat

SEQ ID NO: 482781 - DNA, 15 bp, Homo sapiens
caactcagagcaaaa

SEQ ID NO: 482782 - DNA, 15 bp, Homo sapiens
acaactcagagcaaa

SEQ ID NO: 482783 - DNA, 15 bp, Homo sapiens
tacaactcagagcaa

SEQ ID NO: 482784 - DNA, 15 bp, Homo sapiens
atacaactcagagca

SEQ ID NO: 482785 - DNA, 15 bp, Homo sapiens
aatacaactcagagc

SEQ ID NO: 482786 - DNA, 15 bp, Homo sapiens
aaatacaactcagag

SEQ ID NO: 482787 - DNA, 15 bp, Homo sapiens
caaatacaactcaga

SEQ ID NO: 482788 - DNA, 15 bp, Homo sapiens
acaaatacaactcag

SEQ ID NO: 482789 - DNA, 15 bp, Homo sapiens
cacaaatacaactca

SEQ ID NO: 482790 - DNA, 15 bp, Homo sapiens
acacaaatacaactc

SEQ ID NO: 482791 - DNA, 15 bp, Homo sapiens
aacacaaatacaact

SEQ ID NO: 482792 - DNA, 15 bp, Homo sapiens
taacacaaatacaac

SEQ ID NO: 482793 - DNA, 15 bp, Homo sapiens
ttaacacaaatacaa

SEQ ID NO: 482794 - DNA, 15 bp, Homo sapiens
gttaacacaaataca

SEQ ID NO: 482795 - DNA, 15 bp, Homo sapiens
agttaacacaaatac

SEQ ID NO: 482796 - DNA, 15 bp, Homo sapiens
aagttaacacaaata

SEQ ID NO: 482797 - DNA, 15 bp, Homo sapiens
taagttaacacaaat

SEQ ID NO: 482798 - DNA, 15 bp, Homo sapiens
ataagttaacacaaa

SEQ ID NO: 482799 - DNA, 15 bp, Homo sapiens
aataagttaacacaa

SEQ ID NO: 482800 - DNA, 15 bp, Homo sapiens
gaataagttaacaca

SEQ ID NO: 482801 - DNA, 15 bp, Homo sapiens
agaataagttaacac

SEQ ID NO: 482802 - DNA, 15 bp, Homo sapiens
tagaataagttaaca

SEQ ID NO: 482803 - DNA, 15 bp, Homo sapiens
ctagaataagttaac

SEQ ID NO: 482804 - DNA, 15 bp, Homo sapiens
tctagaataagttaa

SEQ ID NO: 482805 - DNA, 15 bp, Homo sapiens
ctctagaataagtta

SEQ ID NO: 482806 - DNA, 15 bp, Homo sapiens
actctagaataagtt

SEQ ID NO: 482807 - DNA, 15 bp, Homo sapiens
aactctagaataagt

SEQ ID NO: 482808 - DNA, 15 bp, Homo sapiens
taactctagaataag

SEQ ID NO: 482809 - DNA, 15 bp, Homo sapiens
ttaactctagaataa

SEQ ID NO: 482810 - DNA, 15 bp, Homo sapiens
attaactctagaata

SEQ ID NO: 482811 - DNA, 15 bp, Homo sapiens
aattaactctagaat

SEQ ID NO: 482812 - DNA, 15 bp, Homo sapiens
aaattaactctagaa

SEQ ID NO: 482813 - DNA, 15 bp, Homo sapiens
aaaattaactctaga

SEQ ID NO: 482814 - DNA, 15 bp, Homo sapiens
aaaaattaactctag

SEQ ID NO: 482815 - DNA, 15 bp, Homo sapiens
taaaaattaactcta

SEQ ID NO: 482816 - DNA, 15 bp, Homo sapiens
ttaaaaattaactct

SEQ ID NO: 482817 - DNA, 15 bp, Homo sapiens
tttaaaaattaactc

SEQ ID NO: 482818 - DNA, 15 bp, Homo sapiens
ttttaaaaattaact

SEQ ID NO: 482819 - DNA, 15 bp, Homo sapiens
tttttaaaaattaac

SEQ ID NO: 482820 - DNA, 15 bp, Homo sapiens
atttttaaaaattaa

SEQ ID NO: 482821 - DNA, 15 bp, Homo sapiens
caatttttaaaaatt

SEQ ID NO: 482822 - DNA, 15 bp, Homo sapiens
acaatttttaaaaat

SEQ ID NO: 482823 - DNA, 15 bp, Homo sapiens
cacaatttttaaaaa

SEQ ID NO: 482824 - DNA, 15 bp, Homo sapiens
acacaatttttaaaa

SEQ ID NO: 482825 - DNA, 15 bp, Homo sapiens
aacacaatttttaaa

SEQ ID NO: 482826 - DNA, 15 bp, Homo sapiens
aaacacaatttttaa

SEQ ID NO: 482827 - DNA, 15 bp, Homo sapiens
aaaacacaattttta

SEQ ID NO: 482828 - DNA, 15 bp, Homo sapiens
aaaaacacaattttt

SEQ ID NO: 482829 - DNA, 15 bp, Homo sapiens
aaaaaacacaatttt

SEQ ID NO: 482830 - DNA, 15 bp, Homo sapiens
gaaaaaacacaattt

SEQ ID NO: 482831 - DNA, 15 bp, Homo sapiens
ggaaaaaacacaatt

SEQ ID NO: 482832 - DNA, 15 bp, Homo sapiens
tggaaaaaacacaat

SEQ ID NO: 482833 - DNA, 15 bp, Homo sapiens
ctggaaaaaacacaa

SEQ ID NO: 482834 - DNA, 15 bp, Homo sapiens
tctggaaaaaacaca

SEQ ID NO: 482835 - DNA, 15 bp, Homo sapiens
ttctggaaaaaacac

SEQ ID NO: 482836 - DNA, 15 bp, Homo sapiens
tttctggaaaaaaca

SEQ ID NO: 482837 - DNA, 15 bp, Homo sapiens
gtttctggaaaaaac

SEQ ID NO: 482838 - DNA, 15 bp, Homo sapiens
tgtttctggaaaaaa

SEQ ID NO: 482839 - DNA, 15 bp, Homo sapiens
ctgtttctggaaaaa

SEQ ID NO: 482840 - DNA, 15 bp, Homo sapiens
gctgtttctggaaaa

SEQ ID NO: 482841 - DNA, 15 bp, Homo sapiens
tgctgtttctggaaa

SEQ ID NO: 482842 - DNA, 15 bp, Homo sapiens
atgctgtttctggaa

SEQ ID NO: 482843 - DNA, 15 bp, Homo sapiens
aatgctgtttctgga

SEQ ID NO: 482844 - DNA, 15 bp, Homo sapiens
aaatgctgtttctgg

SEQ ID NO: 482845 - DNA, 15 bp, Homo sapiens
taaatgctgtttctg

SEQ ID NO: 482846 - DNA, 15 bp, Homo sapiens
ttaaatgctgtttct

SEQ ID NO: 482847 - DNA, 15 bp, Homo sapiens
tttaaatgctgtttc

SEQ ID NO: 482848 - DNA, 15 bp, Homo sapiens
atttaaatgctgttt

SEQ ID NO: 482849 - DNA, 15 bp, Homo sapiens
aatttaaatgctgtt

SEQ ID NO: 482850 - DNA, 15 bp, Homo sapiens
aaatttaaatgctgt

SEQ ID NO: 482851 - DNA, 15 bp, Homo sapiens
taaatttaaatgctg

SEQ ID NO: 482852 - DNA, 15 bp, Homo sapiens
ttaaatttaaatgct

SEQ ID NO: 482853 - DNA, 15 bp, Homo sapiens
tttaaatttaaatgc

SEQ ID NO: 482854 - DNA, 15 bp, Homo sapiens
ctttaaatttaaatg

SEQ ID NO: 482855 - DNA, 15 bp, Homo sapiens
gctttaaatttaaat

SEQ ID NO: 482856 - DNA, 15 bp, Homo sapiens
ggctttaaatttaaa

SEQ ID NO: 482857 - DNA, 15 bp, Homo sapiens
gggctttaaatttaa

SEQ ID NO: 482858 - DNA, 15 bp, Homo sapiens
agggctttaaattta

SEQ ID NO: 482859 - DNA, 15 bp, Homo sapiens
tagggctttaaattt

SEQ ID NO: 482860 - DNA, 15 bp, Homo sapiens
ttagggctttaaatt

SEQ ID NO: 482861 - DNA, 15 bp, Homo sapiens
tttagggctttaaat

SEQ ID NO: 482862 - DNA, 15 bp, Homo sapiens
ctttagggctttaaa

SEQ ID NO: 482863 - DNA, 15 bp, Homo sapiens
tctttagggctttaa

SEQ ID NO: 482864 - DNA, 15 bp, Homo sapiens
ttctttagggcttta

SEQ ID NO: 482865 - DNA, 15 bp, Homo sapiens
cttctttagggcttt

SEQ ID NO: 482866 - DNA, 15 bp, Homo sapiens
ccttctttagggctt

SEQ ID NO: 482867 - DNA, 15 bp, Homo sapiens
accttctttagggct

SEQ ID NO: 482868 - DNA, 15 bp, Homo sapiens
aaccttctttagggc

SEQ ID NO: 482869 - DNA, 15 bp, Homo sapiens
caaccttctttaggg

SEQ ID NO: 482870 - DNA, 15 bp, Homo sapiens
gcaaccttctttagg

SEQ ID NO: 482871 - DNA, 15 bp, Homo sapiens
cgcaaccttctttag

SEQ ID NO: 482872 - DNA, 15 bp, Homo sapiens
gcgcaaccttcttta

SEQ ID NO: 482873 - DNA, 15 bp, Homo sapiens
tgcgcaaccttcttt

SEQ ID NO: 482874 - DNA, 15 bp, Homo sapiens
ctgcgcaaccttctt

SEQ ID NO: 482875 - DNA, 15 bp, Homo sapiens
actgcgcaaccttct

SEQ ID NO: 482876 - DNA, 15 bp, Homo sapiens
aactgcgcaaccttc

SEQ ID NO: 482877 - DNA, 15 bp, Homo sapiens
taactgcgcaacctt

SEQ ID NO: 482878 - DNA, 15 bp, Homo sapiens
ctaactgcgcaacct

SEQ ID NO: 482879 - DNA, 15 bp, Homo sapiens
gctaactgcgcaacc

SEQ ID NO: 482880 - DNA, 15 bp, Homo sapiens
tgctaactgcgcaac

SEQ ID NO: 482881 - DNA, 15 bp, Homo sapiens
ctgctaactgcgcaa

SEQ ID NO: 482882 - DNA, 15 bp, Homo sapiens
actgctaactgcgca

SEQ ID NO: 482883 - DNA, 15 bp, Homo sapiens
aactgctaactgcgc

SEQ ID NO: 482884 - DNA, 15 bp, Homo sapiens
taactgctaactgcg

SEQ ID NO: 482885 - DNA, 15 bp, Homo sapiens
ataactgctaactgc

SEQ ID NO: 482886 - DNA, 15 bp, Homo sapiens
tataactgctaactg

SEQ ID NO: 482887 - DNA, 15 bp, Homo sapiens
ttataactgctaact

SEQ ID NO: 482888 - DNA, 15 bp, Homo sapiens
tttataactgctaac

SEQ ID NO: 482889 - DNA, 15 bp, Homo sapiens
atttataactgctaa

SEQ ID NO: 482890 - DNA, 15 bp, Homo sapiens
tatttataactgcta

SEQ ID NO: 482891 - DNA, 15 bp, Homo sapiens
ctatttataactgct

SEQ ID NO: 482892 - DNA, 15 bp, Homo sapiens
gctatttataactgc

SEQ ID NO: 482893 - DNA, 15 bp, Homo sapiens
ggctatttataactg

SEQ ID NO: 482894 - DNA, 15 bp, Homo sapiens
aggctatttataact

SEQ ID NO: 482895 - DNA, 15 bp, Homo sapiens
caggctatttataac

SEQ ID NO: 482896 - DNA, 15 bp, Homo sapiens
ccaggctatttataa

SEQ ID NO: 482897 - DNA, 15 bp, Homo sapiens
tccaggctatttata

SEQ ID NO: 482898 - DNA, 15 bp, Homo sapiens
ttccaggctatttat

SEQ ID NO: 482899 - DNA, 15 bp, Homo sapiens
tttccaggctattta

SEQ ID NO: 482900 - DNA, 15 bp, Homo sapiens
ttttccaggctattt

SEQ ID NO: 482901 - DNA, 15 bp, Homo sapiens
cttttccaggctatt

SEQ ID NO: 482902 - DNA, 15 bp, Homo sapiens
ccttttccaggctat

SEQ ID NO: 482903 - DNA, 15 bp, Homo sapiens
accttttccaggcta

SEQ ID NO: 482904 - DNA, 15 bp, Homo sapiens
taccttttccaggct

SEQ ID NO: 482905 - DNA, 15 bp, Homo sapiens
ttaccttttccaggc

SEQ ID NO: 482906 - DNA, 15 bp, Homo sapiens
cttaccttttccagg

SEQ ID NO: 482907 - DNA, 15 bp, Homo sapiens
acttaccttttccag

SEQ ID NO: 482908 - DNA, 15 bp, Homo sapiens
aacttaccttttcca

SEQ ID NO: 482909 - DNA, 15 bp, Homo sapiens
taacttaccttttcc

SEQ ID NO: 482910 - DNA, 15 bp, Homo sapiens
gtaacttaccttttc

SEQ ID NO: 482911 - DNA, 15 bp, Homo sapiens
tgtaacttacctttt

SEQ ID NO: 482912 - DNA, 15 bp, Homo sapiens
ttgtaacttaccttt

SEQ ID NO: 482913 - DNA, 15 bp, Homo sapiens
gttgtaacttacctt

SEQ ID NO: 482914 - DNA, 15 bp, Homo sapiens
ggttgtaacttacct

SEQ ID NO: 482915 - DNA, 15 bp, Homo sapiens
aggttgtaacttacc

SEQ ID NO: 482916 - DNA, 15 bp, Homo sapiens
gaggttgtaacttac

SEQ ID NO: 482917 - DNA, 15 bp, Homo sapiens
agaggttgtaactta

SEQ ID NO: 482918 - DNA, 15 bp, Homo sapiens
gagaggttgtaactt

SEQ ID NO: 482919 - DNA, 15 bp, Homo sapiens
agagaggttgtaact

SEQ ID NO: 482920 - DNA, 15 bp, Homo sapiens
cagagaggttgtaac

SEQ ID NO: 482921 - DNA, 15 bp, Homo sapiens
ccagagaggttgtaa

SEQ ID NO: 482922 - DNA, 15 bp, Homo sapiens
accagagaggttgta

SEQ ID NO: 482923 - DNA, 15 bp, Homo sapiens
taccagagaggttgt

SEQ ID NO: 482924 - DNA, 15 bp, Homo sapiens
ataccagagaggttg

SEQ ID NO: 482925 - DNA, 15 bp, Homo sapiens
aataccagagaggtt

SEQ ID NO: 482926 - DNA, 15 bp, Homo sapiens
taataccagagaggt

SEQ ID NO: 482927 - DNA, 15 bp, Homo sapiens
ttaataccagagagg

SEQ ID NO: 482928 - DNA, 15 bp, Homo sapiens
tttaataccagagag

SEQ ID NO: 482929 - DNA, 15 bp, Homo sapiens
ttttaataccagaga

SEQ ID NO: 482930 - DNA, 15 bp, Homo sapiens
attttaataccagag

SEQ ID NO: 482931 - DNA, 15 bp, Homo sapiens
aattttaataccaga

SEQ ID NO: 482932 - DNA, 15 bp, Homo sapiens
aaattttaataccag

SEQ ID NO: 482933 - DNA, 15 bp, Homo sapiens
aaaattttaatacca

SEQ ID NO: 482934 - DNA, 15 bp, Homo sapiens
caaaattttaatacc

SEQ ID NO: 482935 - DNA, 15 bp, Homo sapiens
acaaaattttaatac

SEQ ID NO: 482936 - DNA, 15 bp, Homo sapiens
aacaaaattttaata

SEQ ID NO: 482937 - DNA, 15 bp, Homo sapiens
aaacaaaattttaat

SEQ ID NO: 482938 - DNA, 15 bp, Homo sapiens
aaaacaaaattttaa

SEQ ID NO: 482939 - DNA, 15 bp, Homo sapiens
aaaaacaaaatttta

SEQ ID NO: 482940 - DNA, 15 bp, Homo sapiens
caaaaacaaaatttt

SEQ ID NO: 482941 - DNA, 15 bp, Homo sapiens
tcaaaaacaaaattt

SEQ ID NO: 482942 - DNA, 15 bp, Homo sapiens
atcaaaaacaaaatt

SEQ ID NO: 482943 - DNA, 15 bp, Homo sapiens
catcaaaaacaaaat

SEQ ID NO: 482944 - DNA, 15 bp, Homo sapiens
acatcaaaaacaaaa

SEQ ID NO: 482945 - DNA, 15 bp, Homo sapiens
tacatcaaaaacaaa

SEQ ID NO: 482946 - DNA, 15 bp, Homo sapiens
ttacatcaaaaacaa

SEQ ID NO: 482947 - DNA, 15 bp, Homo sapiens
tttacatcaaaaaca

SEQ ID NO: 482948 - DNA, 15 bp, Homo sapiens
ttttacatcaaaaac

SEQ ID NO: 482949 - DNA, 15 bp, Homo sapiens
attttacatcaaaaa

SEQ ID NO: 482950 - DNA, 15 bp, Homo sapiens
aattttacatcaaaa

SEQ ID NO: 482951 - DNA, 15 bp, Homo sapiens
aaattttacatcaaa

SEQ ID NO: 482952 - DNA, 15 bp, Homo sapiens
caaattttacatcaa

SEQ ID NO: 482953 - DNA, 15 bp, Homo sapiens
gcaaattttacatca

SEQ ID NO: 482954 - DNA, 15 bp, Homo sapiens
agcaaattttacatc

SEQ ID NO: 482955 - DNA, 15 bp, Homo sapiens
cagcaaattttacat

SEQ ID NO: 482956 - DNA, 15 bp, Homo sapiens
acagcaaattttaca

SEQ ID NO: 482957 - DNA, 15 bp, Homo sapiens
aacagcaaattttac

SEQ ID NO: 482958 - DNA, 15 bp, Homo sapiens
caacagcaaatttta

SEQ ID NO: 482959 - DNA, 15 bp, Homo sapiens
acaacagcaaatttt

SEQ ID NO: 482960 - DNA, 15 bp, Homo sapiens
aacaacagcaaattt

SEQ ID NO: 482961 - DNA, 15 bp, Homo sapiens
taacaacagcaaatt

SEQ ID NO: 482962 - DNA, 15 bp, Homo sapiens
ctaacaacagcaaat

SEQ ID NO: 482963 - DNA, 15 bp, Homo sapiens
gctaacaacagcaaa

SEQ ID NO: 482964 - DNA, 15 bp, Homo sapiens
tgctaacaacagcaa

SEQ ID NO: 482965 - DNA, 15 bp, Homo sapiens
atgctaacaacagca

SEQ ID NO: 482966 - DNA, 15 bp, Homo sapiens
gatgctaacaacagc

SEQ ID NO: 482967 - DNA, 15 bp, Homo sapiens
ggatgctaacaacag

SEQ ID NO: 482968 - DNA, 15 bp, Homo sapiens
aggatgctaacaaca

SEQ ID NO: 482969 - DNA, 15 bp, Homo sapiens
caggatgctaacaac

SEQ ID NO: 482970 - DNA, 15 bp, Homo sapiens
tcaggatgctaacaa

SEQ ID NO: 482971 - DNA, 15 bp, Homo sapiens
ttcaggatgctaaca

SEQ ID NO: 482972 - DNA, 15 bp, Homo sapiens
attcaggatgctaac

SEQ ID NO: 482973 - DNA, 15 bp, Homo sapiens
gattcaggatgctaa

SEQ ID NO: 482974 - DNA, 15 bp, Homo sapiens
tgattcaggatgcta

SEQ ID NO: 482975 - DNA, 15 bp, Homo sapiens
ttgattcaggatgct

SEQ ID NO: 482976 - DNA, 15 bp, Homo sapiens
tttgattcaggatgc

SEQ ID NO: 482977 - DNA, 15 bp, Homo sapiens
ttttgattcaggatg

SEQ ID NO: 482978 - DNA, 15 bp, Homo sapiens
tttttgattcaggat

SEQ ID NO: 482979 - DNA, 15 bp, Homo sapiens
ctttttgattcagga

SEQ ID NO: 482980 - DNA, 15 bp, Homo sapiens
actttttgattcagg

SEQ ID NO: 482981 - DNA, 15 bp, Homo sapiens
aactttttgattcag

SEQ ID NO: 482982 - DNA, 15 bp, Homo sapiens
taactttttgattca

SEQ ID NO: 482983 - DNA, 15 bp, Homo sapiens
ataactttttgattc

SEQ ID NO: 482984 - DNA, 15 bp, Homo sapiens
cataactttttgatt

SEQ ID NO: 482985 - DNA, 15 bp, Homo sapiens
tcataactttttgat

SEQ ID NO: 482986 - DNA, 15 bp, Homo sapiens
gtcataactttttga

SEQ ID NO: 482987 - DNA, 15 bp, Homo sapiens
agtcataactttttg

SEQ ID NO: 482988 - DNA, 15 bp, Homo sapiens
aagtcataacttttt

SEQ ID NO: 482989 - DNA, 15 bp, Homo sapiens
caagtcataactttt

SEQ ID NO: 482990 - DNA, 15 bp, Homo sapiens
tcaagtcataacttt

SEQ ID NO: 482991 - DNA, 15 bp, Homo sapiens
ctcaagtcataactt

SEQ ID NO: 482992 - DNA, 15 bp, Homo sapiens
actcaagtcataact

SEQ ID NO: 482993 - DNA, 15 bp, Homo sapiens
cactcaagtcataac

SEQ ID NO: 482994 - DNA, 15 bp, Homo sapiens
tcactcaagtcataa

SEQ ID NO: 482995 - DNA, 15 bp, Homo sapiens
atcactcaagtcata

SEQ ID NO: 482996 - DNA, 15 bp, Homo sapiens
tatcactcaagtcat

SEQ ID NO: 482997 - DNA, 15 bp, Homo sapiens
ctatcactcaagtca

SEQ ID NO: 482998 - DNA, 15 bp, Homo sapiens
actatcactcaagtc

SEQ ID NO: 482999 - DNA, 15 bp, Homo sapiens
aactatcactcaagt

SEQ ID NO: 483000 - DNA, 15 bp, Homo sapiens
aaactatcactcaag

SEQ ID NO: 483001 - DNA, 15 bp, Homo sapiens
gaaactatcactcaa

SEQ ID NO: 483002 - DNA, 15 bp, Homo sapiens
tgaaactatcactca

SEQ ID NO: 483003 - DNA, 15 bp, Homo sapiens
gtgaaactatcactc

SEQ ID NO: 483004 - DNA, 15 bp, Homo sapiens
tgtgaaactatcact

SEQ ID NO: 483005 - DNA, 15 bp, Homo sapiens
atgtgaaactatcac

SEQ ID NO: 483006 - DNA, 15 bp, Homo sapiens
aatgtgaaactatca

SEQ ID NO: 483007 - DNA, 15 bp, Homo sapiens
gaatgtgaaactatc

SEQ ID NO: 483008 - DNA, 15 bp, Homo sapiens
tgaatgtgaaactat

SEQ ID NO: 483009 - DNA, 15 bp, Homo sapiens
atgaatgtgaaacta

SEQ ID NO: 483010 - DNA, 15 bp, Homo sapiens
aatgaatgtgaaact

SEQ ID NO: 483011 - DNA, 15 bp, Homo sapiens
aaatgaatgtgaaac

SEQ ID NO: 483012 - DNA, 15 bp, Homo sapiens
aaaatgaatgtgaaa

SEQ ID NO: 483013 - DNA, 15 bp, Homo sapiens
gaaaatgaatgtgaa

SEQ ID NO: 483014 - DNA, 15 bp, Homo sapiens
tgaaaatgaatgtga

SEQ ID NO: 483015 - DNA, 15 bp, Homo sapiens
ctgaaaatgaatgtg

SEQ ID NO: 483016 - DNA, 15 bp, Homo sapiens
cctgaaaatgaatgt

SEQ ID NO: 483017 - DNA, 15 bp, Homo sapiens
tcctgaaaatgaatg

SEQ ID NO: 483018 - DNA, 15 bp, Homo sapiens
ttcctgaaaatgaat

SEQ ID NO: 483019 - DNA, 15 bp, Homo sapiens
cttcctgaaaatgaa

SEQ ID NO: 483020 - DNA, 15 bp, Homo sapiens
tcttcctgaaaatga

SEQ ID NO: 483021 - DNA, 15 bp, Homo sapiens
ttcttcctgaaaatg

SEQ ID NO: 483022 - DNA, 15 bp, Homo sapiens
attcttcctgaaaat

SEQ ID NO: 483023 - DNA, 15 bp, Homo sapiens
tattcttcctgaaaa

SEQ ID NO: 483024 - DNA, 15 bp, Homo sapiens
gtattcttcctgaaa

SEQ ID NO: 483025 - DNA, 15 bp, Homo sapiens
tgtattcttcctgaa

SEQ ID NO: 483026 - DNA, 15 bp, Homo sapiens
atgtattcttcctga

SEQ ID NO: 483027 - DNA, 15 bp, Homo sapiens
aatgtattcttcctg

SEQ ID NO: 483028 - DNA, 15 bp, Homo sapiens
caatgtattcttcct

SEQ ID NO: 483029 - DNA, 15 bp, Homo sapiens
acaatgtattcttcc

SEQ ID NO: 483030 - DNA, 15 bp, Homo sapiens
tacaatgtattcttc

SEQ ID NO: 483031 - DNA, 15 bp, Homo sapiens
ttacaatgtattctt

SEQ ID NO: 483032 - DNA, 15 bp, Homo sapiens
attacaatgtattct

SEQ ID NO: 483033 - DNA, 15 bp, Homo sapiens
tattacaatgtattc

SEQ ID NO: 483034 - DNA, 15 bp, Homo sapiens
atattacaatgtatt

SEQ ID NO: 483035 - DNA, 15 bp, Homo sapiens
aatattacaatgtat

SEQ ID NO: 483036 - DNA, 15 bp, Homo sapiens
taatattacaatgta

SEQ ID NO: 483037 - DNA, 15 bp, Homo sapiens
ataatattacaatgt

SEQ ID NO: 483038 - DNA, 15 bp, Homo sapiens
aataatattacaatg

SEQ ID NO: 483039 - DNA, 15 bp, Homo sapiens
taataatattacaat

SEQ ID NO: 483040 - DNA, 15 bp, Homo sapiens
ataataatattacaa

SEQ ID NO: 483041 - DNA, 15 bp, Homo sapiens
cataataatattaca

SEQ ID NO: 483042 - DNA, 15 bp, Homo sapiens
tcataataatattac

SEQ ID NO: 483043 - DNA, 15 bp, Homo sapiens
ttcataataatatta

SEQ ID NO: 483044 - DNA, 15 bp, Homo sapiens
cttcataataatatt

SEQ ID NO: 483045 - DNA, 15 bp, Homo sapiens
ccttcataataatat

SEQ ID NO: 483046 - DNA, 15 bp, Homo sapiens
tccttcataataata

SEQ ID NO: 483047 - DNA, 15 bp, Homo sapiens
ttccttcataataat

SEQ ID NO: 483048 - DNA, 15 bp, Homo sapiens
cttccttcataataa

SEQ ID NO: 483049 - DNA, 15 bp, Homo sapiens
acttccttcataata

SEQ ID NO: 483050 - DNA, 15 bp, Homo sapiens
aacttccttcataat

SEQ ID NO: 483051 - DNA, 15 bp, Homo sapiens
taacttccttcataa

SEQ ID NO: 483052 - DNA, 15 bp, Homo sapiens
ctaacttccttcata

SEQ ID NO: 483053 - DNA, 15 bp, Homo sapiens
tctaacttccttcat

SEQ ID NO: 483054 - DNA, 15 bp, Homo sapiens
ttctaacttccttca

SEQ ID NO: 483055 - DNA, 15 bp, Homo sapiens
cttctaacttccttc

SEQ ID NO: 483056 - DNA, 15 bp, Homo sapiens
acttctaacttcctt

SEQ ID NO: 483057 - DNA, 15 bp, Homo sapiens
aacttctaacttcct

SEQ ID NO: 483058 - DNA, 15 bp, Homo sapiens
aaacttctaacttcc

SEQ ID NO: 483059 - DNA, 15 bp, Homo sapiens
caaacttctaacttc

SEQ ID NO: 483060 - DNA, 15 bp, Homo sapiens
acaaacttctaactt

SEQ ID NO: 483061 - DNA, 15 bp, Homo sapiens
cacaaacttctaact

SEQ ID NO: 483062 - DNA, 15 bp, Homo sapiens
tcacaaacttctaac

SEQ ID NO: 483063 - DNA, 15 bp, Homo sapiens
gtcacaaacttctaa

SEQ ID NO: 483064 - DNA, 15 bp, Homo sapiens
tgtcacaaacttcta

SEQ ID NO: 483065 - DNA, 15 bp, Homo sapiens
atgtcacaaacttct

SEQ ID NO: 483066 - DNA, 15 bp, Homo sapiens
aatgtcacaaacttc

SEQ ID NO: 483067 - DNA, 15 bp, Homo sapiens
aaatgtcacaaactt

SEQ ID NO: 483068 - DNA, 15 bp, Homo sapiens
aaaatgtcacaaact

SEQ ID NO: 483069 - DNA, 15 bp, Homo sapiens
taaaatgtcacaaac

SEQ ID NO: 483070 - DNA, 15 bp, Homo sapiens
ataaaatgtcacaaa

SEQ ID NO: 483071 - DNA, 15 bp, Homo sapiens
aataaaatgtcacaa

SEQ ID NO: 483072 - DNA, 15 bp, Homo sapiens
aaataaaatgtcaca

SEQ ID NO: 483073 - DNA, 15 bp, Homo sapiens
taaataaaatgtcac

SEQ ID NO: 483074 - DNA, 15 bp, Homo sapiens
gtaaataaaatgtca

SEQ ID NO: 483075 - DNA, 15 bp, Homo sapiens
agtaaataaaatgtc

SEQ ID NO: 483076 - DNA, 15 bp, Homo sapiens
cagtaaataaaatgt

SEQ ID NO: 483077 - DNA, 15 bp, Homo sapiens
acagtaaataaaatg

SEQ ID NO: 483078 - DNA, 15 bp, Homo sapiens
tacagtaaataaaat

SEQ ID NO: 483079 - DNA, 15 bp, Homo sapiens
atacagtaaataaaa

SEQ ID NO: 483080 - DNA, 15 bp, Homo sapiens
aatacagtaaataaa

SEQ ID NO: 483081 - DNA, 15 bp, Homo sapiens
taatacagtaaataa

SEQ ID NO: 483082 - DNA, 15 bp, Homo sapiens
gtaatacagtaaata

SEQ ID NO: 483083 - DNA, 15 bp, Homo sapiens
tgtaatacagtaaat

SEQ ID NO: 483084 - DNA, 15 bp, Homo sapiens
ttgtaatacagtaaa

SEQ ID NO: 483085 - DNA, 15 bp, Homo sapiens
tttgtaatacagtaa

SEQ ID NO: 483086 - DNA, 15 bp, Homo sapiens
ttttgtaatacagta

SEQ ID NO: 483087 - DNA, 15 bp, Homo sapiens
tttttgtaatacagt

SEQ ID NO: 483088 - DNA, 15 bp, Homo sapiens
ttttttgtaatacag

SEQ ID NO: 483089 - DNA, 15 bp, Homo sapiens
attttttgtaataca

SEQ ID NO: 483090 - DNA, 15 bp, Homo sapiens
gattttttgtaatac

SEQ ID NO: 483091 - DNA, 15 bp, Homo sapiens
tgattttttgtaata

SEQ ID NO: 483092 - DNA, 15 bp, Homo sapiens
gtgattttttgtaat

SEQ ID NO: 483093 - DNA, 15 bp, Homo sapiens
agtgattttttgtaa

SEQ ID NO: 483094 - DNA, 15 bp, Homo sapiens
cagtgattttttgta

SEQ ID NO: 483095 - DNA, 15 bp, Homo sapiens
acagtgattttttgt

SEQ ID NO: 483096 - DNA, 15 bp, Homo sapiens
tacagtgattttttg

SEQ ID NO: 483097 - DNA, 15 bp, Homo sapiens
ttacagtgatttttt

SEQ ID NO: 483098 - DNA, 15 bp, Homo sapiens
tttacagtgattttt

SEQ ID NO: 483099 - DNA, 15 bp, Homo sapiens
ctttacagtgatttt

SEQ ID NO: 483100 - DNA, 15 bp, Homo sapiens
tctttacagtgattt

SEQ ID NO: 483101 - DNA, 15 bp, Homo sapiens
gtctttacagtgatt

SEQ ID NO: 483102 - DNA, 15 bp, Homo sapiens
tgtctttacagtgat

SEQ ID NO: 483103 - DNA, 15 bp, Homo sapiens
atgtctttacagtga

SEQ ID NO: 483104 - DNA, 15 bp, Homo sapiens
catgtctttacagtg

SEQ ID NO: 483105 - DNA, 15 bp, Homo sapiens
acatgtctttacagt

SEQ ID NO: 483106 - DNA, 15 bp, Homo sapiens
cacatgtctttacag

SEQ ID NO: 483107 - DNA, 15 bp, Homo sapiens
ccacatgtctttaca

SEQ ID NO: 483108 - DNA, 15 bp, Homo sapiens
accacatgtctttac

SEQ ID NO: 483109 - DNA, 15 bp, Homo sapiens
aaccacatgtcttta

SEQ ID NO: 483110 - DNA, 15 bp, Homo sapiens
gaaccacatgtcttt

SEQ ID NO: 483111 - DNA, 15 bp, Homo sapiens
agaaccacatgtctt

SEQ ID NO: 483112 - DNA, 15 bp, Homo sapiens
aagaaccacatgtct

SEQ ID NO: 483113 - DNA, 15 bp, Homo sapiens
aaagaaccacatgtc

SEQ ID NO: 483114 - DNA, 15 bp, Homo sapiens
taaagaaccacatgt

SEQ ID NO: 483115 - DNA, 15 bp, Homo sapiens
ataaagaaccacatg

SEQ ID NO: 483116 - DNA, 15 bp, Homo sapiens
aataaagaaccacat

SEQ ID NO: 483117 - DNA, 15 bp, Homo sapiens
aaataaagaaccaca

SEQ ID NO: 483118 - DNA, 15 bp, Homo sapiens
taaataaagaaccac

SEQ ID NO: 483119 - DNA, 15 bp, Homo sapiens
ataaataaagaacca

SEQ ID NO: 483120 - DNA, 15 bp, Homo sapiens
tataaataaagaacc

SEQ ID NO: 483121 - DNA, 15 bp, Homo sapiens
ctataaataaagaac

SEQ ID NO: 483122 - DNA, 15 bp, Homo sapiens
cctataaataaagaa

SEQ ID NO: 483123 - DNA, 15 bp, Homo sapiens
gcctataaataaaga

SEQ ID NO: 483124 - DNA, 15 bp, Homo sapiens
tgcctataaataaag

SEQ ID NO: 483125 - DNA, 15 bp, Homo sapiens
atgcctataaataaa

SEQ ID NO: 483126 - DNA, 15 bp, Homo sapiens
aatgcctataaataa

SEQ ID NO: 483127 - DNA, 15 bp, Homo sapiens
aaatgcctataaata

SEQ ID NO: 483128 - DNA, 15 bp, Homo sapiens
aaaatgcctataaat

SEQ ID NO: 483129 - DNA, 15 bp, Homo sapiens
caaaatgcctataaa

SEQ ID NO: 483130 - DNA, 15 bp, Homo sapiens
ccaaaatgcctataa

SEQ ID NO: 483131 - DNA, 15 bp, Homo sapiens
tccaaaatgcctata

SEQ ID NO: 483132 - DNA, 15 bp, Homo sapiens
ttccaaaatgcctat

SEQ ID NO: 483133 - DNA, 15 bp, Homo sapiens
gttccaaaatgccta

SEQ ID NO: 483134 - DNA, 15 bp, Homo sapiens
agttccaaaatgcct

SEQ ID NO: 483135 - DNA, 15 bp, Homo sapiens
cagttccaaaatgcc

SEQ ID NO: 483136 - DNA, 15 bp, Homo sapiens
ccagttccaaaatgc

SEQ ID NO: 483137 - DNA, 15 bp, Homo sapiens
cccagttccaaaatg

SEQ ID NO: 483138 - DNA, 15 bp, Homo sapiens
acccagttccaaaat

SEQ ID NO: 483139 - DNA, 15 bp, Homo sapiens
tacccagttccaaaa

SEQ ID NO: 483140 - DNA, 15 bp, Homo sapiens
ctacccagttccaaa

SEQ ID NO: 483141 - DNA, 15 bp, Homo sapiens
tctacccagttccaa

SEQ ID NO: 483142 - DNA, 15 bp, Homo sapiens
ttctacccagttcca

SEQ ID NO: 483143 - DNA, 15 bp, Homo sapiens
tttctacccagttcc

SEQ ID NO: 483144 - DNA, 15 bp, Homo sapiens
ttttctacccagttc

SEQ ID NO: 483145 - DNA, 15 bp, Homo sapiens
attttctacccagtt

SEQ ID NO: 483146 - DNA, 15 bp, Homo sapiens
aattttctacccagt

SEQ ID NO: 483147 - DNA, 15 bp, Homo sapiens
taattttctacccag

SEQ ID NO: 483148 - DNA, 15 bp, Homo sapiens
ataattttctaccca

SEQ ID NO: 483149 - DNA, 15 bp, Homo sapiens
gataattttctaccc

SEQ ID NO: 483150 - DNA, 15 bp, Homo sapiens
ggataattttctacc

SEQ ID NO: 483151 - DNA, 15 bp, Homo sapiens
tggataattttctac

SEQ ID NO: 483152 - DNA, 15 bp, Homo sapiens
ctggataattttcta

SEQ ID NO: 483153 - DNA, 15 bp, Homo sapiens
tctggataattttct

SEQ ID NO: 483154 - DNA, 15 bp, Homo sapiens
atctggataattttc

SEQ ID NO: 483155 - DNA, 15 bp, Homo sapiens
catctggataatttt

SEQ ID NO: 483156 - DNA, 15 bp, Homo sapiens
tcatctggataattt

SEQ ID NO: 483157 - DNA, 15 bp, Homo sapiens
ttcatctggataatt

SEQ ID NO: 483158 - DNA, 15 bp, Homo sapiens
attcatctggataat

SEQ ID NO: 483159 - DNA, 15 bp, Homo sapiens
aattcatctggataa

SEQ ID NO: 483160 - DNA, 15 bp, Homo sapiens
aaattcatctggata

SEQ ID NO: 483161 - DNA, 15 bp, Homo sapiens
taaattcatctggat

SEQ ID NO: 483162 - DNA, 15 bp, Homo sapiens
gtaaattcatctgga

SEQ ID NO: 483163 - DNA, 15 bp, Homo sapiens
tgtaaattcatctgg

SEQ ID NO: 483164 - DNA, 15 bp, Homo sapiens
ttgtaaattcatctg

SEQ ID NO: 483165 - DNA, 15 bp, Homo sapiens
tttgtaaattcatct

SEQ ID NO: 483166 - DNA, 15 bp, Homo sapiens
ttttgtaaattcatc

SEQ ID NO: 483167 - DNA, 15 bp, Homo sapiens
gttttgtaaattcat

SEQ ID NO: 483168 - DNA, 15 bp, Homo sapiens
agttttgtaaattca

SEQ ID NO: 483169 - DNA, 15 bp, Homo sapiens
cagttttgtaaattc

SEQ ID NO: 483170 - DNA, 15 bp, Homo sapiens
acagttttgtaaatt

SEQ ID NO: 483171 - DNA, 15 bp, Homo sapiens
tacagttttgtaaat

SEQ ID NO: 483172 - DNA, 15 bp, Homo sapiens
gtacagttttgtaaa

SEQ ID NO: 483173 - DNA, 15 bp, Homo sapiens
ggtacagttttgtaa

SEQ ID NO: 483174 - DNA, 15 bp, Homo sapiens
tggtacagttttgta

SEQ ID NO: 483175 - DNA, 15 bp, Homo sapiens
ctggtacagttttgt

SEQ ID NO: 483176 - DNA, 15 bp, Homo sapiens
tctggtacagttttg

SEQ ID NO: 483177 - DNA, 15 bp, Homo sapiens
atctggtacagtttt

SEQ ID NO: 483178 - DNA, 15 bp, Homo sapiens
gatctggtacagttt

SEQ ID NO: 483179 - DNA, 15 bp, Homo sapiens
ggatctggtacagtt

SEQ ID NO: 483180 - DNA, 15 bp, Homo sapiens
gggatctggtacagt

SEQ ID NO: 483181 - DNA, 15 bp, Homo sapiens
tgggatctggtacag

SEQ ID NO: 483182 - DNA, 15 bp, Homo sapiens
gtgggatctggtaca

SEQ ID NO: 483183 - DNA, 15 bp, Homo sapiens
tgtgggatctggtac

SEQ ID NO: 483184 - DNA, 15 bp, Homo sapiens
ctgtgggatctggta

SEQ ID NO: 483185 - DNA, 15 bp, Homo sapiens
tctgtgggatctggt

SEQ ID NO: 483186 - DNA, 15 bp, Homo sapiens
gtctgtgggatctgg

SEQ ID NO: 483187 - DNA, 15 bp, Homo sapiens
agtctgtgggatctg

SEQ ID NO: 483188 - DNA, 15 bp, Homo sapiens
cagtctgtgggatct

SEQ ID NO: 483189 - DNA, 15 bp, Homo sapiens
tcagtctgtgggatc

SEQ ID NO: 483190 - DNA, 15 bp, Homo sapiens
atcagtctgtgggat

SEQ ID NO: 483191 - DNA, 15 bp, Homo sapiens
tatcagtctgtggga

SEQ ID NO: 483192 - DNA, 15 bp, Homo sapiens
atatcagtctgtggg

SEQ ID NO: 483193 - DNA, 15 bp, Homo sapiens
catatcagtctgtgg

SEQ ID NO: 483194 - DNA, 15 bp, Homo sapiens
ccatatcagtctgtg

SEQ ID NO: 483195 - DNA, 15 bp, Homo sapiens
gccatatcagtctgt

SEQ ID NO: 483196 - DNA, 15 bp, Homo sapiens
agccatatcagtctg

SEQ ID NO: 483197 - DNA, 15 bp, Homo sapiens
cagccatatcagtct

SEQ ID NO: 483198 - DNA, 15 bp, Homo sapiens
ccagccatatcagtc

SEQ ID NO: 483199 - DNA, 15 bp, Homo sapiens
accagccatatcagt

SEQ ID NO: 483200 - DNA, 15 bp, Homo sapiens
taccagccatatcag

SEQ ID NO: 483201 - DNA, 15 bp, Homo sapiens
ttaccagccatatca

SEQ ID NO: 483202 - DNA, 15 bp, Homo sapiens
cttaccagccatatc

SEQ ID NO: 483203 - DNA, 15 bp, Homo sapiens
ccttaccagccatat

SEQ ID NO: 483204 - DNA, 15 bp, Homo sapiens
tccttaccagccata

SEQ ID NO: 483205 - DNA, 15 bp, Homo sapiens
atccttaccagccat

SEQ ID NO: 483206 - DNA, 15 bp, Homo sapiens
tatccttaccagcca

SEQ ID NO: 483207 - DNA, 15 bp, Homo sapiens
gtatccttaccagcc

SEQ ID NO: 483208 - DNA, 15 bp, Homo sapiens
cgtatccttaccagc

SEQ ID NO: 483209 - DNA, 15 bp, Homo sapiens
tcgtatccttaccag

SEQ ID NO: 483210 - DNA, 15 bp, Homo sapiens
atcgtatccttacca

SEQ ID NO: 483211 - DNA, 15 bp, Homo sapiens
aatcgtatccttacc

SEQ ID NO: 483212 - DNA, 15 bp, Homo sapiens
caatcgtatccttac

SEQ ID NO: 483213 - DNA, 15 bp, Homo sapiens
tcaatcgtatcctta

SEQ ID NO: 483214 - DNA, 15 bp, Homo sapiens
atcaatcgtatcctt

SEQ ID NO: 483215 - DNA, 15 bp, Homo sapiens
aatcaatcgtatcct

SEQ ID NO: 483216 - DNA, 15 bp, Homo sapiens
aaatcaatcgtatcc

SEQ ID NO: 483217 - DNA, 15 bp, Homo sapiens
aaaatcaatcgtatc

SEQ ID NO: 483218 - DNA, 15 bp, Homo sapiens
aaaaatcaatcgtat

SEQ ID NO: 483219 - DNA, 15 bp, Homo sapiens
aaaaaatcaatcgta

SEQ ID NO: 483220 - DNA, 15 bp, Homo sapiens
aaaaaaatcaatcgt

SEQ ID NO: 483221 - DNA, 15 bp, Homo sapiens
aaaaaaaatcaatcg

SEQ ID NO: 483222 - DNA, 15 bp, Homo sapiens
aaaaaaaaatcaatc

SEQ ID NO: 483223 - DNA, 15 bp, Homo sapiens
aaaaaaaaaatcaat

SEQ ID NO: 483224 - DNA, 15 bp, Homo sapiens
gacaaaaaaaaaaaa

SEQ ID NO: 483225 - DNA, 15 bp, Homo sapiens
agacaaaaaaaaaaa

SEQ ID NO: 483226 - DNA, 15 bp, Homo sapiens
aagacaaaaaaaaaa

SEQ ID NO: 483227 - DNA, 15 bp, Homo sapiens
aaagacaaaaaaaaa

SEQ ID NO: 483228 - DNA, 15 bp, Homo sapiens
aaaagacaaaaaaaa

SEQ ID NO: 483229 - DNA, 15 bp, Homo sapiens
taaaagacaaaaaaa

SEQ ID NO: 483230 - DNA, 15 bp, Homo sapiens
ttaaaagacaaaaaa

SEQ ID NO: 483231 - DNA, 15 bp, Homo sapiens
tttaaaagacaaaaa

SEQ ID NO: 483232 - DNA, 15 bp, Homo sapiens
atttaaaagacaaaa

SEQ ID NO: 483233 - DNA, 15 bp, Homo sapiens
catttaaaagacaaa

SEQ ID NO: 483234 - DNA, 15 bp, Homo sapiens
gcatttaaaagacaa

SEQ ID NO: 483235 - DNA, 15 bp, Homo sapiens
ggcatttaaaagaca

SEQ ID NO: 483236 - DNA, 15 bp, Homo sapiens
aggcatttaaaagac

SEQ ID NO: 483237 - DNA, 15 bp, Homo sapiens
taggcatttaaaaga

SEQ ID NO: 483238 - DNA, 15 bp, Homo sapiens
gtaggcatttaaaag

SEQ ID NO: 483239 - DNA, 15 bp, Homo sapiens
agtaggcatttaaaa

SEQ ID NO: 483240 - DNA, 15 bp, Homo sapiens
aagtaggcatttaaa

SEQ ID NO: 483241 - DNA, 15 bp, Homo sapiens
caagtaggcatttaa

SEQ ID NO: 483242 - DNA, 15 bp, Homo sapiens
acaagtaggcattta

SEQ ID NO: 483243 - DNA, 15 bp, Homo sapiens
cacaagtaggcattt

SEQ ID NO: 483244 - DNA, 15 bp, Homo sapiens
tcacaagtaggcatt

SEQ ID NO: 483245 - DNA, 15 bp, Homo sapiens
gtcacaagtaggcat

SEQ ID NO: 483246 - DNA, 15 bp, Homo sapiens
tgtcacaagtaggca

SEQ ID NO: 483247 - DNA, 15 bp, Homo sapiens
atgtcacaagtaggc

SEQ ID NO: 483248 - DNA, 15 bp, Homo sapiens
tatgtcacaagtagg

SEQ ID NO: 483249 - DNA, 15 bp, Homo sapiens
ttatgtcacaagtag

SEQ ID NO: 483250 - DNA, 15 bp, Homo sapiens
tttatgtcacaagta

SEQ ID NO: 483251 - DNA, 15 bp, Homo sapiens
ttttatgtcacaagt

SEQ ID NO: 483252 - DNA, 15 bp, Homo sapiens
tttttatgtcacaag

SEQ ID NO: 483253 - DNA, 15 bp, Homo sapiens
gtttttatgtcacaa

SEQ ID NO: 483254 - DNA, 15 bp, Homo sapiens
ggtttttatgtcaca

SEQ ID NO: 483255 - DNA, 15 bp, Homo sapiens
aggtttttatgtcac

SEQ ID NO: 483256 - DNA, 15 bp, Homo sapiens
taggtttttatgtca

SEQ ID NO: 483257 - DNA, 15 bp, Homo sapiens
ataggtttttatgtc

SEQ ID NO: 483258 - DNA, 15 bp, Homo sapiens
gataggtttttatgt

SEQ ID NO: 483259 - DNA, 15 bp, Homo sapiens
tgataggtttttatg

SEQ ID NO: 483260 - DNA, 15 bp, Homo sapiens
atgataggtttttat

SEQ ID NO: 483261 - DNA, 15 bp, Homo sapiens
gatgataggttttta

SEQ ID NO: 483262 - DNA, 15 bp, Homo sapiens
cgatgataggttttt

SEQ ID NO: 483263 - DNA, 15 bp, Homo sapiens
acgatgataggtttt

SEQ ID NO: 483264 - DNA, 15 bp, Homo sapiens
aacgatgataggttt

SEQ ID NO: 483265 - DNA, 15 bp, Homo sapiens
aaacgatgataggtt

SEQ ID NO: 483266 - DNA, 15 bp, Homo sapiens
aaaacgatgataggt

SEQ ID NO: 483267 - DNA, 15 bp, Homo sapiens
gaaaacgatgatagg

SEQ ID NO: 483268 - DNA, 15 bp, Homo sapiens
ggaaaacgatgatag

SEQ ID NO: 483269 - DNA, 15 bp, Homo sapiens
tggaaaacgatgata

SEQ ID NO: 483270 - DNA, 15 bp, Homo sapiens
ttggaaaacgatgat

SEQ ID NO: 483271 - DNA, 15 bp, Homo sapiens
cttggaaaacgatga

SEQ ID NO: 483272 - DNA, 15 bp, Homo sapiens
acttggaaaacgatg

SEQ ID NO: 483273 - DNA, 15 bp, Homo sapiens
aacttggaaaacgat

SEQ ID NO: 483274 - DNA, 15 bp, Homo sapiens
taacttggaaaacga

SEQ ID NO: 483275 - DNA, 15 bp, Homo sapiens
ataacttggaaaacg

SEQ ID NO: 483276 - DNA, 15 bp, Homo sapiens
aataacttggaaaac

SEQ ID NO: 483277 - DNA, 15 bp, Homo sapiens
aaataacttggaaaa

SEQ ID NO: 483278 - DNA, 15 bp, Homo sapiens
aaaataacttggaaa

SEQ ID NO: 483279 - DNA, 15 bp, Homo sapiens
aaaaataacttggaa

SEQ ID NO: 483280 - DNA, 15 bp, Homo sapiens
caaaaataacttgga

SEQ ID NO: 483281 - DNA, 15 bp, Homo sapiens
acaaaaataacttgg

SEQ ID NO: 483282 - DNA, 15 bp, Homo sapiens
aacaaaaataacttg

SEQ ID NO: 483283 - DNA, 15 bp, Homo sapiens
taacaaaaataactt

SEQ ID NO: 483284 - DNA, 15 bp, Homo sapiens
ataacaaaaataact

SEQ ID NO: 483285 - DNA, 15 bp, Homo sapiens
tataacaaaaataac

SEQ ID NO: 483286 - DNA, 15 bp, Homo sapiens
ttataacaaaaataa

SEQ ID NO: 483287 - DNA, 15 bp, Homo sapiens
tttataacaaaaata

SEQ ID NO: 483288 - DNA, 15 bp, Homo sapiens
ctttataacaaaaat

SEQ ID NO: 483289 - DNA, 15 bp, Homo sapiens
cctttataacaaaaa

SEQ ID NO: 483290 - DNA, 15 bp, Homo sapiens
acctttataacaaaa

SEQ ID NO: 483291 - DNA, 15 bp, Homo sapiens
cacctttataacaaa

SEQ ID NO: 483292 - DNA, 15 bp, Homo sapiens
gcacctttataacaa

SEQ ID NO: 483293 - DNA, 15 bp, Homo sapiens
agcacctttataaca

SEQ ID NO: 483294 - DNA, 15 bp, Homo sapiens
aagcacctttataac

SEQ ID NO: 483295 - DNA, 15 bp, Homo sapiens
aaagcacctttataa

SEQ ID NO: 483296 - DNA, 15 bp, Homo sapiens
aaaagcacctttata

SEQ ID NO: 483297 - DNA, 15 bp, Homo sapiens
taaaagcacctttat

SEQ ID NO: 483298 - DNA, 15 bp, Homo sapiens
gtaaaagcaccttta

SEQ ID NO: 483299 - DNA, 15 bp, Homo sapiens
tgtaaaagcaccttt

SEQ ID NO: 483300 - DNA, 15 bp, Homo sapiens
atgtaaaagcacctt

SEQ ID NO: 483301 - DNA, 15 bp, Homo sapiens
gatgtaaaagcacct

SEQ ID NO: 483302 - DNA, 15 bp, Homo sapiens
agatgtaaaagcacc

SEQ ID NO: 483303 - DNA, 15 bp, Homo sapiens
aagatgtaaaagcac

SEQ ID NO: 483304 - DNA, 15 bp, Homo sapiens
gaagatgtaaaagca

SEQ ID NO: 483305 - DNA, 15 bp, Homo sapiens
agaagatgtaaaagc

SEQ ID NO: 483306 - DNA, 15 bp, Homo sapiens
tagaagatgtaaaag

SEQ ID NO: 483307 - DNA, 15 bp, Homo sapiens
atagaagatgtaaaa

SEQ ID NO: 483308 - DNA, 15 bp, Homo sapiens
aatagaagatgtaaa

SEQ ID NO: 483309 - DNA, 15 bp, Homo sapiens
caatagaagatgtaa

SEQ ID NO: 483310 - DNA, 15 bp, Homo sapiens
acaatagaagatgta

SEQ ID NO: 483311 - DNA, 15 bp, Homo sapiens
gacaatagaagatgt

SEQ ID NO: 483312 - DNA, 15 bp, Homo sapiens
tgacaatagaagatg

SEQ ID NO: 483313 - DNA, 15 bp, Homo sapiens
ttgacaatagaagat

SEQ ID NO: 483314 - DNA, 15 bp, Homo sapiens
gttgacaatagaaga

SEQ ID NO: 483315 - DNA, 15 bp, Homo sapiens
agttgacaatagaag

SEQ ID NO: 483316 - DNA, 15 bp, Homo sapiens
cagttgacaatagaa

SEQ ID NO: 483317 - DNA, 15 bp, Homo sapiens
ccagttgacaataga

SEQ ID NO: 483318 - DNA, 15 bp, Homo sapiens
accagttgacaatag

SEQ ID NO: 483319 - DNA, 15 bp, Homo sapiens
caccagttgacaata

SEQ ID NO: 483320 - DNA, 15 bp, Homo sapiens
acaccagttgacaat

SEQ ID NO: 483321 - DNA, 15 bp, Homo sapiens
gacaccagttgacaa

SEQ ID NO: 483322 - DNA, 15 bp, Homo sapiens
tgacaccagttgaca

SEQ ID NO: 483323 - DNA, 15 bp, Homo sapiens
ttgacaccagttgac

SEQ ID NO: 483324 - DNA, 15 bp, Homo sapiens
tttgacaccagttga

SEQ ID NO: 483325 - DNA, 15 bp, Homo sapiens
atttgacaccagttg

SEQ ID NO: 483326 - DNA, 15 bp, Homo sapiens
tatttgacaccagtt

SEQ ID NO: 483327 - DNA, 15 bp, Homo sapiens
ctatttgacaccagt

SEQ ID NO: 483328 - DNA, 15 bp, Homo sapiens
cctatttgacaccag

SEQ ID NO: 483329 - DNA, 15 bp, Homo sapiens
tcctatttgacacca

SEQ ID NO: 483330 - DNA, 15 bp, Homo sapiens
ttcctatttgacacc

SEQ ID NO: 483331 - DNA, 15 bp, Homo sapiens
tttcctatttgacac

SEQ ID NO: 483332 - DNA, 15 bp, Homo sapiens
atttcctatttgaca

SEQ ID NO: 483333 - DNA, 15 bp, Homo sapiens
tatttcctatttgac

SEQ ID NO: 483334 - DNA, 15 bp, Homo sapiens
gtatttcctatttga

SEQ ID NO: 483335 - DNA, 15 bp, Homo sapiens
agtatttcctatttg

SEQ ID NO: 483336 - DNA, 15 bp, Homo sapiens
cagtatttcctattt

SEQ ID NO: 483337 - DNA, 15 bp, Homo sapiens
acagtatttcctatt

SEQ ID NO: 483338 - DNA, 15 bp, Homo sapiens
aacagtatttcctat

SEQ ID NO: 483339 - DNA, 15 bp, Homo sapiens
aaacagtatttccta

SEQ ID NO: 483340 - DNA, 15 bp, Homo sapiens
aaaacagtatttcct

SEQ ID NO: 483341 - DNA, 15 bp, Homo sapiens
aaaaacagtatttcc

SEQ ID NO: 483342 - DNA, 15 bp, Homo sapiens
gaaaaacagtatttc

SEQ ID NO: 483343 - DNA, 15 bp, Homo sapiens
agaaaaacagtattt

SEQ ID NO: 483344 - DNA, 15 bp, Homo sapiens
gagaaaaacagtatt

SEQ ID NO: 483345 - DNA, 15 bp, Homo sapiens
agagaaaaacagtat

SEQ ID NO: 483346 - DNA, 15 bp, Homo sapiens
aagagaaaaacagta

SEQ ID NO: 483347 - DNA, 15 bp, Homo sapiens
taagagaaaaacagt

SEQ ID NO: 483348 - DNA, 15 bp, Homo sapiens
gtaagagaaaaacag

SEQ ID NO: 483349 - DNA, 15 bp, Homo sapiens
tgtaagagaaaaaca

SEQ ID NO: 483350 - DNA, 15 bp, Homo sapiens
atgtaagagaaaaac

SEQ ID NO: 483351 - DNA, 15 bp, Homo sapiens
aatgtaagagaaaaa

SEQ ID NO: 483352 - DNA, 15 bp, Homo sapiens
aaatgtaagagaaaa

SEQ ID NO: 483353 - DNA, 15 bp, Homo sapiens
gaaatgtaagagaaa

SEQ ID NO: 483354 - DNA, 15 bp, Homo sapiens
agaaatgtaagagaa

SEQ ID NO: 483355 - DNA, 15 bp, Homo sapiens
tagaaatgtaagaga

SEQ ID NO: 483356 - DNA, 15 bp, Homo sapiens
ttagaaatgtaagag

SEQ ID NO: 483357 - DNA, 15 bp, Homo sapiens
tttagaaatgtaaga

SEQ ID NO: 483358 - DNA, 15 bp, Homo sapiens
atttagaaatgtaag

SEQ ID NO: 483359 - DNA, 15 bp, Homo sapiens
aatttagaaatgtaa

SEQ ID NO: 483360 - DNA, 15 bp, Homo sapiens
taatttagaaatgta

SEQ ID NO: 483361 - DNA, 15 bp, Homo sapiens
ctaatttagaaatgt

SEQ ID NO: 483362 - DNA, 15 bp, Homo sapiens
cctaatttagaaatg

SEQ ID NO: 483363 - DNA, 15 bp, Homo sapiens
gcctaatttagaaat

SEQ ID NO: 483364 - DNA, 15 bp, Homo sapiens
ggcctaatttagaaa

SEQ ID NO: 483365 - DNA, 15 bp, Homo sapiens
gggcctaatttagaa

SEQ ID NO: 483366 - DNA, 15 bp, Homo sapiens
tgggcctaatttaga

SEQ ID NO: 483367 - DNA, 15 bp, Homo sapiens
ttgggcctaatttag

SEQ ID NO: 483368 - DNA, 15 bp, Homo sapiens
gttgggcctaattta

SEQ ID NO: 483369 - DNA, 15 bp, Homo sapiens
ggttgggcctaattt

SEQ ID NO: 483370 - DNA, 15 bp, Homo sapiens
gggttgggcctaatt

SEQ ID NO: 483371 - DNA, 15 bp, Homo sapiens
agggttgggcctaat

SEQ ID NO: 483372 - DNA, 15 bp, Homo sapiens
gagggttgggcctaa

SEQ ID NO: 483373 - DNA, 15 bp, Homo sapiens
agagggttgggccta

SEQ ID NO: 483374 - DNA, 15 bp, Homo sapiens
aagagggttgggcct

SEQ ID NO: 483375 - DNA, 15 bp, Homo sapiens
gaagagggttgggcc

SEQ ID NO: 483376 - DNA, 15 bp, Homo sapiens
ggaagagggttgggc

SEQ ID NO: 483377 - DNA, 15 bp, Homo sapiens
aggaagagggttggg

SEQ ID NO: 483378 - DNA, 15 bp, Homo sapiens
aaggaagagggttgg

SEQ ID NO: 483379 - DNA, 15 bp, Homo sapiens
aaaggaagagggttg

SEQ ID NO: 483380 - DNA, 15 bp, Homo sapiens
gaaaggaagagggtt

SEQ ID NO: 483381 - DNA, 15 bp, Homo sapiens
ggaaaggaagagggt

SEQ ID NO: 483382 - DNA, 15 bp, Homo sapiens
aggaaaggaagaggg

SEQ ID NO: 483383 - DNA, 15 bp, Homo sapiens
aaggaaaggaagagg

SEQ ID NO: 483384 - DNA, 15 bp, Homo sapiens
caaggaaaggaagag

SEQ ID NO: 483385 - DNA, 15 bp, Homo sapiens
ccaaggaaaggaaga

SEQ ID NO: 483386 - DNA, 15 bp, Homo sapiens
tccaaggaaaggaag

SEQ ID NO: 483387 - DNA, 15 bp, Homo sapiens
ctccaaggaaaggaa

SEQ ID NO: 483388 - DNA, 15 bp, Homo sapiens
gctccaaggaaagga

SEQ ID NO: 483389 - DNA, 15 bp, Homo sapiens
tgctccaaggaaagg

SEQ ID NO: 483390 - DNA, 15 bp, Homo sapiens
ttgctccaaggaaag

SEQ ID NO: 483391 - DNA, 15 bp, Homo sapiens
tttgctccaaggaaa

SEQ ID NO: 483392 - DNA, 15 bp, Homo sapiens
gtttgctccaaggaa

SEQ ID NO: 483393 - DNA, 15 bp, Homo sapiens
tgtttgctccaagga

SEQ ID NO: 483394 - DNA, 15 bp, Homo sapiens
ttgtttgctccaagg

SEQ ID NO: 483395 - DNA, 15 bp, Homo sapiens
tttgtttgctccaag

SEQ ID NO: 483396 - DNA, 15 bp, Homo sapiens
ctttgtttgctccaa

SEQ ID NO: 483397 - DNA, 15 bp, Homo sapiens
actttgtttgctcca

SEQ ID NO: 483398 - DNA, 15 bp, Homo sapiens
tactttgtttgctcc

SEQ ID NO: 483399 - DNA, 15 bp, Homo sapiens
ctactttgtttgctc

SEQ ID NO: 483400 - DNA, 15 bp, Homo sapiens
actactttgtttgct

SEQ ID NO: 483401 - DNA, 15 bp, Homo sapiens
aactactttgtttgc

SEQ ID NO: 483402 - DNA, 15 bp, Homo sapiens
aaactactttgtttg

SEQ ID NO: 483403 - DNA, 15 bp, Homo sapiens
caaactactttgttt

SEQ ID NO: 483404 - DNA, 15 bp, Homo sapiens
tcaaactactttgtt

SEQ ID NO: 483405 - DNA, 15 bp, Homo sapiens
ttcaaactactttgt

SEQ ID NO: 483406 - DNA, 15 bp, Homo sapiens
tttcaaactactttg

SEQ ID NO: 483407 - DNA, 15 bp, Homo sapiens
atttcaaactacttt

SEQ ID NO: 483408 - DNA, 15 bp, Homo sapiens
catttcaaactactt

SEQ ID NO: 483409 - DNA, 15 bp, Homo sapiens
tcatttcaaactact

SEQ ID NO: 483410 - DNA, 15 bp, Homo sapiens
ttcatttcaaactac

SEQ ID NO: 483411 - DNA, 15 bp, Homo sapiens
cttcatttcaaacta

SEQ ID NO: 483412 - DNA, 15 bp, Homo sapiens
ccttcatttcaaact

SEQ ID NO: 483413 - DNA, 15 bp, Homo sapiens
accttcatttcaaac

SEQ ID NO: 483414 - DNA, 15 bp, Homo sapiens
gaccttcatttcaaa

SEQ ID NO: 483415 - DNA, 15 bp, Homo sapiens
tgaccttcatttcaa

SEQ ID NO: 483416 - DNA, 15 bp, Homo sapiens
ctgaccttcatttca

SEQ ID NO: 483417 - DNA, 15 bp, Homo sapiens
tctgaccttcatttc

SEQ ID NO: 483418 - DNA, 15 bp, Homo sapiens
atctgaccttcattt

SEQ ID NO: 483419 - DNA, 15 bp, Homo sapiens
gatctgaccttcatt

SEQ ID NO: 483420 - DNA, 15 bp, Homo sapiens
agatctgaccttcat

SEQ ID NO: 483421 - DNA, 15 bp, Homo sapiens
aagatctgaccttca

SEQ ID NO: 483422 - DNA, 15 bp, Homo sapiens
aaagatctgaccttc

SEQ ID NO: 483423 - DNA, 15 bp, Homo sapiens
taaagatctgacctt

SEQ ID NO: 483424 - DNA, 15 bp, Homo sapiens
ctaaagatctgacct

SEQ ID NO: 483425 - DNA, 15 bp, Homo sapiens
tctaaagatctgacc

SEQ ID NO: 483426 - DNA, 15 bp, Homo sapiens
ctctaaagatctgac

SEQ ID NO: 483427 - DNA, 15 bp, Homo sapiens
gctctaaagatctga

SEQ ID NO: 483428 - DNA, 15 bp, Homo sapiens
agctctaaagatctg

SEQ ID NO: 483429 - DNA, 15 bp, Homo sapiens
cagctctaaagatct

SEQ ID NO: 483430 - DNA, 15 bp, Homo sapiens
acagctctaaagatc

SEQ ID NO: 483431 - DNA, 15 bp, Homo sapiens
cacagctctaaagat

SEQ ID NO: 483432 - DNA, 15 bp, Homo sapiens
tcacagctctaaaga

SEQ ID NO: 483433 - DNA, 15 bp, Homo sapiens
atcacagctctaaag

SEQ ID NO: 483434 - DNA, 15 bp, Homo sapiens
tatcacagctctaaa

SEQ ID NO: 483435 - DNA, 15 bp, Homo sapiens
ctatcacagctctaa

SEQ ID NO: 483436 - DNA, 15 bp, Homo sapiens
cctatcacagctcta

SEQ ID NO: 483437 - DNA, 15 bp, Homo sapiens
tcctatcacagctct

SEQ ID NO: 483438 - DNA, 15 bp, Homo sapiens
atcctatcacagctc

SEQ ID NO: 483439 - DNA, 15 bp, Homo sapiens
catcctatcacagct

SEQ ID NO: 483440 - DNA, 15 bp, Homo sapiens
ccatcctatcacagc

SEQ ID NO: 483441 - DNA, 15 bp, Homo sapiens
cccatcctatcacag

SEQ ID NO: 483442 - DNA, 15 bp, Homo sapiens
ccccatcctatcaca

SEQ ID NO: 483443 - DNA, 15 bp, Homo sapiens
accccatcctatcac

SEQ ID NO: 483444 - DNA, 15 bp, Homo sapiens
caccccatcctatca

SEQ ID NO: 483445 - DNA, 15 bp, Homo sapiens
acaccccatcctatc

SEQ ID NO: 483446 - DNA, 15 bp, Homo sapiens
aacaccccatcctat

SEQ ID NO: 483447 - DNA, 15 bp, Homo sapiens
aaacaccccatccta

SEQ ID NO: 483448 - DNA, 15 bp, Homo sapiens
caaacaccccatcct

SEQ ID NO: 483449 - DNA, 15 bp, Homo sapiens
ccaaacaccccatcc

SEQ ID NO: 483450 - DNA, 15 bp, Homo sapiens
gccaaacaccccatc

SEQ ID NO: 483451 - DNA, 15 bp, Homo sapiens
agccaaacaccccat

SEQ ID NO: 483452 - DNA, 15 bp, Homo sapiens
gagccaaacacccca

SEQ ID NO: 483453 - DNA, 15 bp, Homo sapiens
agagccaaacacccc

SEQ ID NO: 483454 - DNA, 15 bp, Homo sapiens
aagagccaaacaccc

SEQ ID NO: 483455 - DNA, 15 bp, Homo sapiens
aaagagccaaacacc

SEQ ID NO: 483456 - DNA, 15 bp, Homo sapiens
caaagagccaaacac

SEQ ID NO: 483457 - DNA, 15 bp, Homo sapiens
acaaagagccaaaca

SEQ ID NO: 483458 - DNA, 15 bp, Homo sapiens
aacaaagagccaaac

SEQ ID NO: 483459 - DNA, 15 bp, Homo sapiens
caacaaagagccaaa

SEQ ID NO: 483460 - DNA, 15 bp, Homo sapiens
acaacaaagagccaa

SEQ ID NO: 483461 - DNA, 15 bp, Homo sapiens
tacaacaaagagcca

SEQ ID NO: 483462 - DNA, 15 bp, Homo sapiens
ctacaacaaagagcc

SEQ ID NO: 483463 - DNA, 15 bp, Homo sapiens
tctacaacaaagagc

SEQ ID NO: 483464 - DNA, 15 bp, Homo sapiens
ctctacaacaaagag

SEQ ID NO: 483465 - DNA, 15 bp, Homo sapiens
tctctacaacaaaga

SEQ ID NO: 483466 - DNA, 15 bp, Homo sapiens
ttctctacaacaaag

SEQ ID NO: 483467 - DNA, 15 bp, Homo sapiens
cttctctacaacaaa

SEQ ID NO: 483468 - DNA, 15 bp, Homo sapiens
gcttctctacaacaa

SEQ ID NO: 483469 - DNA, 15 bp, Homo sapiens
tgcttctctacaaca

SEQ ID NO: 483470 - DNA, 15 bp, Homo sapiens
atgcttctctacaac

SEQ ID NO: 483471 - DNA, 15 bp, Homo sapiens
catgcttctctacaa

SEQ ID NO: 483472 - DNA, 15 bp, Homo sapiens
acatgcttctctaca

SEQ ID NO: 483473 - DNA, 15 bp, Homo sapiens
cacatgcttctctac

SEQ ID NO: 483474 - DNA, 15 bp, Homo sapiens
gcacatgcttctcta

SEQ ID NO: 483475 - DNA, 15 bp, Homo sapiens
agcacatgcttctct

SEQ ID NO: 483476 - DNA, 15 bp, Homo sapiens
gagcacatgcttctc

SEQ ID NO: 483477 - DNA, 15 bp, Homo sapiens
agagcacatgcttct

SEQ ID NO: 483478 - DNA, 15 bp, Homo sapiens
cagagcacatgcttc

SEQ ID NO: 483479 - DNA, 15 bp, Homo sapiens
tcagagcacatgctt

SEQ ID NO: 483480 - DNA, 15 bp, Homo sapiens
ttcagagcacatgct

SEQ ID NO: 483481 - DNA, 15 bp, Homo sapiens
cttcagagcacatgc

SEQ ID NO: 483482 - DNA, 15 bp, Homo sapiens
gcttcagagcacatg

SEQ ID NO: 483483 - DNA, 15 bp, Homo sapiens
agcttcagagcacat

SEQ ID NO: 483484 - DNA, 15 bp, Homo sapiens
aagcttcagagcaca

SEQ ID NO: 483485 - DNA, 15 bp, Homo sapiens
aaagcttcagagcac

SEQ ID NO: 483486 - DNA, 15 bp, Homo sapiens
taaagcttcagagca

SEQ ID NO: 483487 - DNA, 15 bp, Homo sapiens
ataaagcttcagagc

SEQ ID NO: 483488 - DNA, 15 bp, Homo sapiens
aataaagcttcagag

SEQ ID NO: 483489 - DNA, 15 bp, Homo sapiens
aaataaagcttcaga

SEQ ID NO: 483490 - DNA, 15 bp, Homo sapiens
aaaataaagcttcag

SEQ ID NO: 483491 - DNA, 15 bp, Homo sapiens
caaaataaagcttca

SEQ ID NO: 483492 - DNA, 15 bp, Homo sapiens
acaaaataaagcttc

SEQ ID NO: 483493 - DNA, 15 bp, Homo sapiens
tacaaaataaagctt

SEQ ID NO: 483494 - DNA, 15 bp, Homo sapiens
atacaaaataaagct

SEQ ID NO: 483495 - DNA, 15 bp, Homo sapiens
aatacaaaataaagc

SEQ ID NO: 483496 - DNA, 15 bp, Homo sapiens
aaatacaaaataaag

SEQ ID NO: 483497 - DNA, 15 bp, Homo sapiens
taaatacaaaataaa

SEQ ID NO: 483498 - DNA, 15 bp, Homo sapiens
ctaaatacaaaataa

SEQ ID NO: 483499 - DNA, 15 bp, Homo sapiens
cctaaatacaaaata

SEQ ID NO: 483500 - DNA, 15 bp, Homo sapiens
ccctaaatacaaaat

SEQ ID NO: 483501 - DNA, 15 bp, Homo sapiens
tccctaaatacaaaa

SEQ ID NO: 483502 - DNA, 15 bp, Homo sapiens
ctccctaaatacaaa

SEQ ID NO: 483503 - DNA, 15 bp, Homo sapiens
tctccctaaatacaa

SEQ ID NO: 483504 - DNA, 15 bp, Homo sapiens
atctccctaaataca

SEQ ID NO: 483505 - DNA, 15 bp, Homo sapiens
catctccctaaatac

SEQ ID NO: 483506 - DNA, 15 bp, Homo sapiens
acatctccctaaata

SEQ ID NO: 483507 - DNA, 15 bp, Homo sapiens
cacatctccctaaat

SEQ ID NO: 483508 - DNA, 15 bp, Homo sapiens
acacatctccctaaa

SEQ ID NO: 483509 - DNA, 15 bp, Homo sapiens
tacacatctccctaa

SEQ ID NO: 483510 - DNA, 15 bp, Homo sapiens
atacacatctcccta

SEQ ID NO: 483511 - DNA, 15 bp, Homo sapiens
tatacacatctccct

SEQ ID NO: 483512 - DNA, 15 bp, Homo sapiens
ttatacacatctccc

SEQ ID NO: 483513 - DNA, 15 bp, Homo sapiens
tttatacacatctcc

SEQ ID NO: 483514 - DNA, 15 bp, Homo sapiens
ctttatacacatctc

SEQ ID NO: 483515 - DNA, 15 bp, Homo sapiens
actttatacacatct

SEQ ID NO: 483516 - DNA, 15 bp, Homo sapiens
tactttatacacatc

SEQ ID NO: 483517 - DNA, 15 bp, Homo sapiens
ctactttatacacat

SEQ ID NO: 483518 - DNA, 15 bp, Homo sapiens
actactttatacaca

SEQ ID NO: 483519 - DNA, 15 bp, Homo sapiens
tactactttatacac

SEQ ID NO: 483520 - DNA, 15 bp, Homo sapiens
ttactactttataca

SEQ ID NO: 483521 - DNA, 15 bp, Homo sapiens
attactactttatac

SEQ ID NO: 483522 - DNA, 15 bp, Homo sapiens
tattactactttata

SEQ ID NO: 483523 - DNA, 15 bp, Homo sapiens
atattactactttat

SEQ ID NO: 483524 - DNA, 15 bp, Homo sapiens
aatattactacttta

SEQ ID NO: 483525 - DNA, 15 bp, Homo sapiens
gaatattactacttt

SEQ ID NO: 483526 - DNA, 15 bp, Homo sapiens
agaatattactactt

SEQ ID NO: 483527 - DNA, 15 bp, Homo sapiens
gagaatattactact

SEQ ID NO: 483528 - DNA, 15 bp, Homo sapiens
tgagaatattactac

SEQ ID NO: 483529 - DNA, 15 bp, Homo sapiens
gtgagaatattacta

SEQ ID NO: 483530 - DNA, 15 bp, Homo sapiens
ggtgagaatattact

SEQ ID NO: 483531 - DNA, 15 bp, Homo sapiens
aggtgagaatattac

SEQ ID NO: 483532 - DNA, 15 bp, Homo sapiens
taggtgagaatatta

SEQ ID NO: 483533 - DNA, 15 bp, Homo sapiens
ataggtgagaatatt

SEQ ID NO: 483534 - DNA, 15 bp, Homo sapiens
tataggtgagaatat

SEQ ID NO: 483535 - DNA, 15 bp, Homo sapiens
ttataggtgagaata

SEQ ID NO: 483536 - DNA, 15 bp, Homo sapiens
attataggtgagaat

SEQ ID NO: 483537 - DNA, 15 bp, Homo sapiens
cattataggtgagaa

SEQ ID NO: 483538 - DNA, 15 bp, Homo sapiens
acattataggtgaga

SEQ ID NO: 483539 - DNA, 15 bp, Homo sapiens
tacattataggtgag

SEQ ID NO: 483540 - DNA, 15 bp, Homo sapiens
ttacattataggtga

SEQ ID NO: 483541 - DNA, 15 bp, Homo sapiens
cttacattataggtg

SEQ ID NO: 483542 - DNA, 15 bp, Homo sapiens
tcttacattataggt

SEQ ID NO: 483543 - DNA, 15 bp, Homo sapiens
gtcttacattatagg

SEQ ID NO: 483544 - DNA, 15 bp, Homo sapiens
tgtcttacattatag

SEQ ID NO: 483545 - DNA, 15 bp, Homo sapiens
gtgtcttacattata

SEQ ID NO: 483546 - DNA, 15 bp, Homo sapiens
tgtgtcttacattat

SEQ ID NO: 483547 - DNA, 15 bp, Homo sapiens
ttgtgtcttacatta

SEQ ID NO: 483548 - DNA, 15 bp, Homo sapiens
gttgtgtcttacatt

SEQ ID NO: 483549 - DNA, 15 bp, Homo sapiens
agttgtgtcttacat

SEQ ID NO: 483550 - DNA, 15 bp, Homo sapiens
cagttgtgtcttaca

SEQ ID NO: 483551 - DNA, 15 bp, Homo sapiens
gcagttgtgtcttac

SEQ ID NO: 483552 - DNA, 15 bp, Homo sapiens
tgcagttgtgtctta

SEQ ID NO: 483553 - DNA, 15 bp, Homo sapiens
ttgcagttgtgtctt

SEQ ID NO: 483554 - DNA, 15 bp, Homo sapiens
cttgcagttgtgtct

SEQ ID NO: 483555 - DNA, 15 bp, Homo sapiens
ccttgcagttgtgtc

SEQ ID NO: 483556 - DNA, 15 bp, Homo sapiens
gccttgcagttgtgt

SEQ ID NO: 483557 - DNA, 15 bp, Homo sapiens
tgccttgcagttgtg

SEQ ID NO: 483558 - DNA, 15 bp, Homo sapiens
ctgccttgcagttgt

SEQ ID NO: 483559 - DNA, 15 bp, Homo sapiens
tctgccttgcagttg

SEQ ID NO: 483560 - DNA, 15 bp, Homo sapiens
ctctgccttgcagtt

SEQ ID NO: 483561 - DNA, 15 bp, Homo sapiens
tctctgccttgcagt

SEQ ID NO: 483562 - DNA, 15 bp, Homo sapiens
ttctctgccttgcag

SEQ ID NO: 483563 - DNA, 15 bp, Homo sapiens
attctctgccttgca

SEQ ID NO: 483564 - DNA, 15 bp, Homo sapiens
tattctctgccttgc

SEQ ID NO: 483565 - DNA, 15 bp, Homo sapiens
gtattctctgccttg

SEQ ID NO: 483566 - DNA, 15 bp, Homo sapiens
tgtattctctgcctt

SEQ ID NO: 483567 - DNA, 15 bp, Homo sapiens
ctgtattctctgcct

SEQ ID NO: 483568 - DNA, 15 bp, Homo sapiens
tctgtattctctgcc

SEQ ID NO: 483569 - DNA, 15 bp, Homo sapiens
gtctgtattctctgc

SEQ ID NO: 483570 - DNA, 15 bp, Homo sapiens
agtctgtattctctg

SEQ ID NO: 483571 - DNA, 15 bp, Homo sapiens
gagtctgtattctct

SEQ ID NO: 483572 - DNA, 15 bp, Homo sapiens
ggagtctgtattctc

SEQ ID NO: 483573 - DNA, 15 bp, Homo sapiens
aggagtctgtattct

SEQ ID NO: 483574 - DNA, 15 bp, Homo sapiens
caggagtctgtattc

SEQ ID NO: 483575 - DNA, 15 bp, Homo sapiens
ccaggagtctgtatt

SEQ ID NO: 483576 - DNA, 15 bp, Homo sapiens
tccaggagtctgtat

SEQ ID NO: 483577 - DNA, 15 bp, Homo sapiens
ctccaggagtctgta

SEQ ID NO: 483578 - DNA, 15 bp, Homo sapiens
tctccaggagtctgt

SEQ ID NO: 483579 - DNA, 15 bp, Homo sapiens
ttctccaggagtctg

SEQ ID NO: 483580 - DNA, 15 bp, Homo sapiens
gttctccaggagtct

SEQ ID NO: 483581 - DNA, 15 bp, Homo sapiens
agttctccaggagtc

SEQ ID NO: 483582 - DNA, 15 bp, Homo sapiens
aagttctccaggagt

SEQ ID NO: 483583 - DNA, 15 bp, Homo sapiens
aaagttctccaggag

SEQ ID NO: 483584 - DNA, 15 bp, Homo sapiens
caaagttctccagga

SEQ ID NO: 483585 - DNA, 15 bp, Homo sapiens
ccaaagttctccagg

SEQ ID NO: 483586 - DNA, 15 bp, Homo sapiens
accaaagttctccag

SEQ ID NO: 483587 - DNA, 15 bp, Homo sapiens
taccaaagttctcca

SEQ ID NO: 483588 - DNA, 15 bp, Homo sapiens
ttaccaaagttctcc

SEQ ID NO: 483589 - DNA, 15 bp, Homo sapiens
attaccaaagttctc

SEQ ID NO: 483590 - DNA, 15 bp, Homo sapiens
aattaccaaagttct

SEQ ID NO: 483591 - DNA, 15 bp, Homo sapiens
gaattaccaaagttc

SEQ ID NO: 483592 - DNA, 15 bp, Homo sapiens
agaattaccaaagtt

SEQ ID NO: 483593 - DNA, 15 bp, Homo sapiens
aagaattaccaaagt

SEQ ID NO: 483594 - DNA, 15 bp, Homo sapiens
aaagaattaccaaag

SEQ ID NO: 483595 - DNA, 15 bp, Homo sapiens
aaaagaattaccaaa

SEQ ID NO: 483596 - DNA, 15 bp, Homo sapiens
aaaaagaattaccaa

SEQ ID NO: 483597 - DNA, 15 bp, Homo sapiens
caaaaagaattacca

SEQ ID NO: 483598 - DNA, 15 bp, Homo sapiens
ccaaaaagaattacc

SEQ ID NO: 483599 - DNA, 15 bp, Homo sapiens
cccaaaaagaattac

SEQ ID NO: 483600 - DNA, 15 bp, Homo sapiens
tcccaaaaagaatta

SEQ ID NO: 483601 - DNA, 15 bp, Homo sapiens
ttcccaaaaagaatt

SEQ ID NO: 483602 - DNA, 15 bp, Homo sapiens
cttcccaaaaagaat

SEQ ID NO: 483603 - DNA, 15 bp, Homo sapiens
gcttcccaaaaagaa

SEQ ID NO: 483604 - DNA, 15 bp, Homo sapiens
agcttcccaaaaaga

SEQ ID NO: 483605 - DNA, 15 bp, Homo sapiens
cagcttcccaaaaag

SEQ ID NO: 483606 - DNA, 15 bp, Homo sapiens
acagcttcccaaaaa

SEQ ID NO: 483607 - DNA, 15 bp, Homo sapiens
aacagcttcccaaaa

SEQ ID NO: 483608 - DNA, 15 bp, Homo sapiens
gaacagcttcccaaa

SEQ ID NO: 483609 - DNA, 15 bp, Homo sapiens
tgaacagcttcccaa

SEQ ID NO: 483610 - DNA, 15 bp, Homo sapiens
ctgaacagcttccca

SEQ ID NO: 483611 - DNA, 15 bp, Homo sapiens
actgaacagcttccc

SEQ ID NO: 483612 - DNA, 15 bp, Homo sapiens
gactgaacagcttcc

SEQ ID NO: 483613 - DNA, 15 bp, Homo sapiens
agactgaacagcttc

SEQ ID NO: 483614 - DNA, 15 bp, Homo sapiens
aagactgaacagctt

SEQ ID NO: 483615 - DNA, 15 bp, Homo sapiens
aaagactgaacagct

SEQ ID NO: 483616 - DNA, 15 bp, Homo sapiens
caaagactgaacagc

SEQ ID NO: 483617 - DNA, 15 bp, Homo sapiens
acaaagactgaacag

SEQ ID NO: 483618 - DNA, 15 bp, Homo sapiens
aacaaagactgaaca

SEQ ID NO: 483619 - DNA, 15 bp, Homo sapiens
caacaaagactgaac

SEQ ID NO: 483620 - DNA, 15 bp, Homo sapiens
gcaacaaagactgaa

SEQ ID NO: 483621 - DNA, 15 bp, Homo sapiens
agcaacaaagactga

SEQ ID NO: 483622 - DNA, 15 bp, Homo sapiens
aagcaacaaagactg

SEQ ID NO: 483623 - DNA, 15 bp, Homo sapiens
caagcaacaaagact

SEQ ID NO: 483624 - DNA, 15 bp, Homo sapiens
ccaagcaacaaagac

SEQ ID NO: 483625 - DNA, 15 bp, Homo sapiens
cccaagcaacaaaga

SEQ ID NO: 483626 - DNA, 15 bp, Homo sapiens
acccaagcaacaaag

SEQ ID NO: 483627 - DNA, 15 bp, Homo sapiens
tacccaagcaacaaa

SEQ ID NO: 483628 - DNA, 15 bp, Homo sapiens
gtacccaagcaacaa

SEQ ID NO: 483629 - DNA, 15 bp, Homo sapiens
tgtacccaagcaaca

SEQ ID NO: 483630 - DNA, 15 bp, Homo sapiens
atgtacccaagcaac

SEQ ID NO: 483631 - DNA, 15 bp, Homo sapiens
gatgtacccaagcaa

SEQ ID NO: 483632 - DNA, 15 bp, Homo sapiens
tgatgtacccaagca

SEQ ID NO: 483633 - DNA, 15 bp, Homo sapiens
gtgatgtacccaagc

SEQ ID NO: 483634 - DNA, 15 bp, Homo sapiens
tgtgatgtacccaag

SEQ ID NO: 483635 - DNA, 15 bp, Homo sapiens
gtgtgatgtacccaa

SEQ ID NO: 483636 - DNA, 15 bp, Homo sapiens
agtgtgatgtaccca

SEQ ID NO: 483637 - DNA, 15 bp, Homo sapiens
aagtgtgatgtaccc

SEQ ID NO: 483638 - DNA, 15 bp, Homo sapiens
aaagtgtgatgtacc

SEQ ID NO: 483639 - DNA, 15 bp, Homo sapiens
caaagtgtgatgtac

SEQ ID NO: 483640 - DNA, 15 bp, Homo sapiens
gcaaagtgtgatgta

SEQ ID NO: 483641 - DNA, 15 bp, Homo sapiens
tgcaaagtgtgatgt

SEQ ID NO: 483642 - DNA, 15 bp, Homo sapiens
atgcaaagtgtgatg

SEQ ID NO: 483643 - DNA, 15 bp, Homo sapiens
tatgcaaagtgtgat

SEQ ID NO: 483644 - DNA, 15 bp, Homo sapiens
ttatgcaaagtgtga

SEQ ID NO: 483645 - DNA, 15 bp, Homo sapiens
cttatgcaaagtgtg

SEQ ID NO: 483646 - DNA, 15 bp, Homo sapiens
ccttatgcaaagtgt

SEQ ID NO: 483647 - DNA, 15 bp, Homo sapiens
gccttatgcaaagtg

SEQ ID NO: 483648 - DNA, 15 bp, Homo sapiens
ggccttatgcaaagt

SEQ ID NO: 483649 - DNA, 15 bp, Homo sapiens
gggccttatgcaaag

SEQ ID NO: 483650 - DNA, 15 bp, Homo sapiens
agggccttatgcaaa

SEQ ID NO: 483651 - DNA, 15 bp, Homo sapiens
aagggccttatgcaa

SEQ ID NO: 483652 - DNA, 15 bp, Homo sapiens
gaagggccttatgca

SEQ ID NO: 483653 - DNA, 15 bp, Homo sapiens
tgaagggccttatgc

SEQ ID NO: 483654 - DNA, 15 bp, Homo sapiens
gtgaagggccttatg

SEQ ID NO: 483655 - DNA, 15 bp, Homo sapiens
tgtgaagggccttat

SEQ ID NO: 483656 - DNA, 15 bp, Homo sapiens
ctgtgaagggcctta

SEQ ID NO: 483657 - DNA, 15 bp, Homo sapiens
actgtgaagggcctt

SEQ ID NO: 483658 - DNA, 15 bp, Homo sapiens
cactgtgaagggcct

SEQ ID NO: 483659 - DNA, 15 bp, Homo sapiens
tcactgtgaagggcc

SEQ ID NO: 483660 - DNA, 15 bp, Homo sapiens
ctcactgtgaagggc

SEQ ID NO: 483661 - DNA, 15 bp, Homo sapiens
tctcactgtgaaggg

SEQ ID NO: 483662 - DNA, 15 bp, Homo sapiens
gtctcactgtgaagg

SEQ ID NO: 483663 - DNA, 15 bp, Homo sapiens
agtctcactgtgaag

SEQ ID NO: 483664 - DNA, 15 bp, Homo sapiens
cagtctcactgtgaa

SEQ ID NO: 483665 - DNA, 15 bp, Homo sapiens
tcagtctcactgtga

SEQ ID NO: 483666 - DNA, 15 bp, Homo sapiens
ttcagtctcactgtg

SEQ ID NO: 483667 - DNA, 15 bp, Homo sapiens
attcagtctcactgt

SEQ ID NO: 483668 - DNA, 15 bp, Homo sapiens
tattcagtctcactg

SEQ ID NO: 483669 - DNA, 15 bp, Homo sapiens
gtattcagtctcact

SEQ ID NO: 483670 - DNA, 15 bp, Homo sapiens
tgtattcagtctcac

SEQ ID NO: 483671 - DNA, 15 bp, Homo sapiens
atgtattcagtctca

SEQ ID NO: 483672 - DNA, 15 bp, Homo sapiens
catgtattcagtctc

SEQ ID NO: 483673 - DNA, 15 bp, Homo sapiens
tcatgtattcagtct

SEQ ID NO: 483674 - DNA, 15 bp, Homo sapiens
atcatgtattcagtc

SEQ ID NO: 483675 - DNA, 15 bp, Homo sapiens
gatcatgtattcagt

SEQ ID NO: 483676 - DNA, 15 bp, Homo sapiens
tgatcatgtattcag

SEQ ID NO: 483677 - DNA, 15 bp, Homo sapiens
atgatcatgtattca

SEQ ID NO: 483678 - DNA, 15 bp, Homo sapiens
gatgatcatgtattc

SEQ ID NO: 483679 - DNA, 15 bp, Homo sapiens
ggatgatcatgtatt

SEQ ID NO: 483680 - DNA, 15 bp, Homo sapiens
tggatgatcatgtat

SEQ ID NO: 483681 - DNA, 15 bp, Homo sapiens
atggatgatcatgta

SEQ ID NO: 483682 - DNA, 15 bp, Homo sapiens
aatggatgatcatgt

SEQ ID NO: 483683 - DNA, 15 bp, Homo sapiens
gaatggatgatcatg

SEQ ID NO: 483684 - DNA, 15 bp, Homo sapiens
agaatggatgatcat

SEQ ID NO: 483685 - DNA, 15 bp, Homo sapiens
tagaatggatgatca

SEQ ID NO: 483686 - DNA, 15 bp, Homo sapiens
ttagaatggatgatc

SEQ ID NO: 483687 - DNA, 15 bp, Homo sapiens
tttagaatggatgat

SEQ ID NO: 483688 - DNA, 15 bp, Homo sapiens
ttttagaatggatga

SEQ ID NO: 483689 - DNA, 15 bp, Homo sapiens
attttagaatggatg

SEQ ID NO: 483690 - DNA, 15 bp, Homo sapiens
cattttagaatggat

SEQ ID NO: 483691 - DNA, 15 bp, Homo sapiens
acattttagaatgga

SEQ ID NO: 483692 - DNA, 15 bp, Homo sapiens
cacattttagaatgg

SEQ ID NO: 483693 - DNA, 15 bp, Homo sapiens
tcacattttagaatg

SEQ ID NO: 483694 - DNA, 15 bp, Homo sapiens
ctcacattttagaat

SEQ ID NO: 483695 - DNA, 15 bp, Homo sapiens
gctcacattttagaa

SEQ ID NO: 483696 - DNA, 15 bp, Homo sapiens
agctcacattttaga

SEQ ID NO: 483697 - DNA, 15 bp, Homo sapiens
aagctcacattttag

SEQ ID NO: 483698 - DNA, 15 bp, Homo sapiens
aaagctcacatttta

SEQ ID NO: 483699 - DNA, 15 bp, Homo sapiens
aaaagctcacatttt

SEQ ID NO: 483700 - DNA, 15 bp, Homo sapiens
gaaaagctcacattt

SEQ ID NO: 483701 - DNA, 15 bp, Homo sapiens
ggaaaagctcacatt

SEQ ID NO: 483702 - DNA, 15 bp, Homo sapiens
tggaaaagctcacat

SEQ ID NO: 483703 - DNA, 15 bp, Homo sapiens
ctggaaaagctcaca

SEQ ID NO: 483704 - DNA, 15 bp, Homo sapiens
cctggaaaagctcac

SEQ ID NO: 483705 - DNA, 15 bp, Homo sapiens
tcctggaaaagctca

SEQ ID NO: 483706 - DNA, 15 bp, Homo sapiens
atcctggaaaagctc

SEQ ID NO: 483707 - DNA, 15 bp, Homo sapiens
tatcctggaaaagct

SEQ ID NO: 483708 - DNA, 15 bp, Homo sapiens
ctatcctggaaaagc

SEQ ID NO: 483709 - DNA, 15 bp, Homo sapiens
tctatcctggaaaag

SEQ ID NO: 483710 - DNA, 15 bp, Homo sapiens
atctatcctggaaaa

SEQ ID NO: 483711 - DNA, 15 bp, Homo sapiens
gatctatcctggaaa

SEQ ID NO: 483712 - DNA, 15 bp, Homo sapiens
tgatctatcctggaa

SEQ ID NO: 483713 - DNA, 15 bp, Homo sapiens
ttgatctatcctgga

SEQ ID NO: 483714 - DNA, 15 bp, Homo sapiens
cttgatctatcctgg

SEQ ID NO: 483715 - DNA, 15 bp, Homo sapiens
tcttgatctatcctg

SEQ ID NO: 483716 - DNA, 15 bp, Homo sapiens
atcttgatctatcct

SEQ ID NO: 483717 - DNA, 15 bp, Homo sapiens
tatcttgatctatcc

SEQ ID NO: 483718 - DNA, 15 bp, Homo sapiens
ctatcttgatctatc

SEQ ID NO: 483719 - DNA, 15 bp, Homo sapiens
gctatcttgatctat

SEQ ID NO: 483720 - DNA, 15 bp, Homo sapiens
agctatcttgatcta

SEQ ID NO: 483721 - DNA, 15 bp, Homo sapiens
gagctatcttgatct

SEQ ID NO: 483722 - DNA, 15 bp, Homo sapiens
agagctatcttgatc

SEQ ID NO: 483723 - DNA, 15 bp, Homo sapiens
aagagctatcttgat

SEQ ID NO: 483724 - DNA, 15 bp, Homo sapiens
gaagagctatcttga

SEQ ID NO: 483725 - DNA, 15 bp, Homo sapiens
agaagagctatcttg

SEQ ID NO: 483726 - DNA, 15 bp, Homo sapiens
tagaagagctatctt

SEQ ID NO: 483727 - DNA, 15 bp, Homo sapiens
ttagaagagctatct

SEQ ID NO: 483728 - DNA, 15 bp, Homo sapiens
gttagaagagctatc

SEQ ID NO: 483729 - DNA, 15 bp, Homo sapiens
tgttagaagagctat

SEQ ID NO: 483730 - DNA, 15 bp, Homo sapiens
gtgttagaagagcta

SEQ ID NO: 483731 - DNA, 15 bp, Homo sapiens
tgtgttagaagagct

SEQ ID NO: 483732 - DNA, 15 bp, Homo sapiens
atgtgttagaagagc

SEQ ID NO: 483733 - DNA, 15 bp, Homo sapiens
tatgtgttagaagag

SEQ ID NO: 483734 - DNA, 15 bp, Homo sapiens
ctatgtgttagaaga

SEQ ID NO: 483735 - DNA, 15 bp, Homo sapiens
tctatgtgttagaag

SEQ ID NO: 483736 - DNA, 15 bp, Homo sapiens
gtctatgtgttagaa

SEQ ID NO: 483737 - DNA, 15 bp, Homo sapiens
tgtctatgtgttaga

SEQ ID NO: 483738 - DNA, 15 bp, Homo sapiens
ctgtctatgtgttag

SEQ ID NO: 483739 - DNA, 15 bp, Homo sapiens
actgtctatgtgtta

SEQ ID NO: 483740 - DNA, 15 bp, Homo sapiens
tactgtctatgtgtt

SEQ ID NO: 483741 - DNA, 15 bp, Homo sapiens
atactgtctatgtgt

SEQ ID NO: 483742 - DNA, 15 bp, Homo sapiens
aatactgtctatgtg

SEQ ID NO: 483743 - DNA, 15 bp, Homo sapiens
taatactgtctatgt

SEQ ID NO: 483744 - DNA, 15 bp, Homo sapiens
gtaatactgtctatg

SEQ ID NO: 483745 - DNA, 15 bp, Homo sapiens
tgtaatactgtctat

SEQ ID NO: 483746 - DNA, 15 bp, Homo sapiens
atgtaatactgtcta

SEQ ID NO: 483747 - DNA, 15 bp, Homo sapiens
aatgtaatactgtct

SEQ ID NO: 483748 - DNA, 15 bp, Homo sapiens
caatgtaatactgtc

SEQ ID NO: 483749 - DNA, 15 bp, Homo sapiens
gcaatgtaatactgt

SEQ ID NO: 483750 - DNA, 15 bp, Homo sapiens
agcaatgtaatactg

SEQ ID NO: 483751 - DNA, 15 bp, Homo sapiens
aagcaatgtaatact

SEQ ID NO: 483752 - DNA, 15 bp, Homo sapiens
caagcaatgtaatac

SEQ ID NO: 483753 - DNA, 15 bp, Homo sapiens
acaagcaatgtaata

SEQ ID NO: 483754 - DNA, 15 bp, Homo sapiens
gacaagcaatgtaat

SEQ ID NO: 483755 - DNA, 15 bp, Homo sapiens
agacaagcaatgtaa

SEQ ID NO: 483756 - DNA, 15 bp, Homo sapiens
tagacaagcaatgta

SEQ ID NO: 483757 - DNA, 15 bp, Homo sapiens
gtagacaagcaatgt

SEQ ID NO: 483758 - DNA, 15 bp, Homo sapiens
agtagacaagcaatg

SEQ ID NO: 483759 - DNA, 15 bp, Homo sapiens
aagtagacaagcaat

SEQ ID NO: 483760 - DNA, 15 bp, Homo sapiens
taagtagacaagcaa

SEQ ID NO: 483761 - DNA, 15 bp, Homo sapiens
gtaagtagacaagca

SEQ ID NO: 483762 - DNA, 15 bp, Homo sapiens
ggtaagtagacaagc

SEQ ID NO: 483763 - DNA, 15 bp, Homo sapiens
tggtaagtagacaag

SEQ ID NO: 483764 - DNA, 15 bp, Homo sapiens
ctggtaagtagacaa

SEQ ID NO: 483765 - DNA, 15 bp, Homo sapiens
tctggtaagtagaca

SEQ ID NO: 483766 - DNA, 15 bp, Homo sapiens
ttctggtaagtagac

SEQ ID NO: 483767 - DNA, 15 bp, Homo sapiens
attctggtaagtaga

SEQ ID NO: 483768 - DNA, 15 bp, Homo sapiens
cattctggtaagtag

SEQ ID NO: 483769 - DNA, 15 bp, Homo sapiens
gcattctggtaagta

SEQ ID NO: 483770 - DNA, 15 bp, Homo sapiens
tgcattctggtaagt

SEQ ID NO: 483771 - DNA, 15 bp, Homo sapiens
atgcattctggtaag

SEQ ID NO: 483772 - DNA, 15 bp, Homo sapiens
aatgcattctggtaa

SEQ ID NO: 483773 - DNA, 15 bp, Homo sapiens
aaatgcattctggta

SEQ ID NO: 483774 - DNA, 15 bp, Homo sapiens
caaatgcattctggt

SEQ ID NO: 483775 - DNA, 15 bp, Homo sapiens
acaaatgcattctgg

SEQ ID NO: 483776 - DNA, 15 bp, Homo sapiens
cacaaatgcattctg

SEQ ID NO: 483777 - DNA, 15 bp, Homo sapiens
acacaaatgcattct

SEQ ID NO: 483778 - DNA, 15 bp, Homo sapiens
tacacaaatgcattc

SEQ ID NO: 483779 - DNA, 15 bp, Homo sapiens
ctacacaaatgcatt

SEQ ID NO: 483780 - DNA, 15 bp, Homo sapiens
actacacaaatgcat

SEQ ID NO: 483781 - DNA, 15 bp, Homo sapiens
aactacacaaatgca

SEQ ID NO: 483782 - DNA, 15 bp, Homo sapiens
caactacacaaatgc

SEQ ID NO: 483783 - DNA, 15 bp, Homo sapiens
gcaactacacaaatg

SEQ ID NO: 483784 - DNA, 15 bp, Homo sapiens
agcaactacacaaat

SEQ ID NO: 483785 - DNA, 15 bp, Homo sapiens
aagcaactacacaaa

SEQ ID NO: 483786 - DNA, 15 bp, Homo sapiens
taagcaactacacaa

SEQ ID NO: 483787 - DNA, 15 bp, Homo sapiens
ttaagcaactacaca

SEQ ID NO: 483788 - DNA, 15 bp, Homo sapiens
tttaagcaactacac

SEQ ID NO: 483789 - DNA, 15 bp, Homo sapiens
atttaagcaactaca

SEQ ID NO: 483790 - DNA, 15 bp, Homo sapiens
catttaagcaactac

SEQ ID NO: 483791 - DNA, 15 bp, Homo sapiens
tcatttaagcaacta

SEQ ID NO: 483792 - DNA, 15 bp, Homo sapiens
ttcatttaagcaact

SEQ ID NO: 483793 - DNA, 15 bp, Homo sapiens
cttcatttaagcaac

SEQ ID NO: 483794 - DNA, 15 bp, Homo sapiens
acttcatttaagcaa

SEQ ID NO: 483795 - DNA, 15 bp, Homo sapiens
aacttcatttaagca

SEQ ID NO: 483796 - DNA, 15 bp, Homo sapiens
gaacttcatttaagc

SEQ ID NO: 483797 - DNA, 15 bp, Homo sapiens
ggaacttcatttaag

SEQ ID NO: 483798 - DNA, 15 bp, Homo sapiens
tggaacttcatttaa

SEQ ID NO: 483799 - DNA, 15 bp, Homo sapiens
atggaacttcattta

SEQ ID NO: 483800 - DNA, 15 bp, Homo sapiens
catggaacttcattt

SEQ ID NO: 483801 - DNA, 15 bp, Homo sapiens
acatggaacttcatt

SEQ ID NO: 483802 - DNA, 15 bp, Homo sapiens
aacatggaacttcat

SEQ ID NO: 483803 - DNA, 15 bp, Homo sapiens
aaacatggaacttca

SEQ ID NO: 483804 - DNA, 15 bp, Homo sapiens
taaacatggaacttc

SEQ ID NO: 483805 - DNA, 15 bp, Homo sapiens
ataaacatggaactt

SEQ ID NO: 483806 - DNA, 15 bp, Homo sapiens
gataaacatggaact

SEQ ID NO: 483807 - DNA, 15 bp, Homo sapiens
agataaacatggaac

SEQ ID NO: 483808 - DNA, 15 bp, Homo sapiens
aagataaacatggaa

SEQ ID NO: 483809 - DNA, 15 bp, Homo sapiens
aaagataaacatgga

SEQ ID NO: 483810 - DNA, 15 bp, Homo sapiens
aaaagataaacatgg

SEQ ID NO: 483811 - DNA, 15 bp, Homo sapiens
taaaagataaacatg

SEQ ID NO: 483812 - DNA, 15 bp, Homo sapiens
ttaaaagataaacat

SEQ ID NO: 483813 - DNA, 15 bp, Homo sapiens
tttaaaagataaaca

SEQ ID NO: 483814 - DNA, 15 bp, Homo sapiens
ttttaaaagataaac

SEQ ID NO: 483815 - DNA, 15 bp, Homo sapiens
tttttaaaagataaa

SEQ ID NO: 483816 - DNA, 15 bp, Homo sapiens
atttttaaaagataa

SEQ ID NO: 483817 - DNA, 15 bp, Homo sapiens
catttttaaaagata

SEQ ID NO: 483818 - DNA, 15 bp, Homo sapiens
acatttttaaaagat

SEQ ID NO: 483819 - DNA, 15 bp, Homo sapiens
aacatttttaaaaga

SEQ ID NO: 483820 - DNA, 15 bp, Homo sapiens
caacatttttaaaag

SEQ ID NO: 483821 - DNA, 15 bp, Homo sapiens
gcaacatttttaaaa

SEQ ID NO: 483822 - DNA, 15 bp, Homo sapiens
ggcaacatttttaaa

SEQ ID NO: 483823 - DNA, 15 bp, Homo sapiens
gggcaacatttttaa

SEQ ID NO: 483824 - DNA, 15 bp, Homo sapiens
agggcaacattttta

SEQ ID NO: 483825 - DNA, 15 bp, Homo sapiens
aagggcaacattttt

SEQ ID NO: 483826 - DNA, 15 bp, Homo sapiens
caagggcaacatttt

SEQ ID NO: 483827 - DNA, 15 bp, Homo sapiens
ccaagggcaacattt

SEQ ID NO: 483828 - DNA, 15 bp, Homo sapiens
cccaagggcaacatt

SEQ ID NO: 483829 - DNA, 15 bp, Homo sapiens
acccaagggcaacat

SEQ ID NO: 483830 - DNA, 15 bp, Homo sapiens
aacccaagggcaaca

SEQ ID NO: 483831 - DNA, 15 bp, Homo sapiens
aaacccaagggcaac

SEQ ID NO: 483832 - DNA, 15 bp, Homo sapiens
aaaacccaagggcaa

SEQ ID NO: 483833 - DNA, 15 bp, Homo sapiens
aaaaacccaagggca

SEQ ID NO: 483834 - DNA, 15 bp, Homo sapiens
taaaaacccaagggc

SEQ ID NO: 483835 - DNA, 15 bp, Homo sapiens
gtaaaaacccaaggg

SEQ ID NO: 483836 - DNA, 15 bp, Homo sapiens
tgtaaaaacccaagg

SEQ ID NO: 483837 - DNA, 15 bp, Homo sapiens
atgtaaaaacccaag

SEQ ID NO: 483838 - DNA, 15 bp, Homo sapiens
tatgtaaaaacccaa

SEQ ID NO: 483839 - DNA, 15 bp, Homo sapiens
ctatgtaaaaaccca

SEQ ID NO: 483840 - DNA, 15 bp, Homo sapiens
actatgtaaaaaccc

SEQ ID NO: 483841 - DNA, 15 bp, Homo sapiens
cactatgtaaaaacc

SEQ ID NO: 483842 - DNA, 15 bp, Homo sapiens
acactatgtaaaaac

SEQ ID NO: 483843 - DNA, 15 bp, Homo sapiens
gacactatgtaaaaa

SEQ ID NO: 483844 - DNA, 15 bp, Homo sapiens
tgacactatgtaaaa

SEQ ID NO: 483845 - DNA, 15 bp, Homo sapiens
ctgacactatgtaaa

SEQ ID NO: 483846 - DNA, 15 bp, Homo sapiens
gctgacactatgtaa

SEQ ID NO: 483847 - DNA, 15 bp, Homo sapiens
agctgacactatgta

SEQ ID NO: 483848 - DNA, 15 bp, Homo sapiens
aagctgacactatgt

SEQ ID NO: 483849 - DNA, 15 bp, Homo sapiens
aaagctgacactatg

SEQ ID NO: 483850 - DNA, 15 bp, Homo sapiens
aaaagctgacactat

SEQ ID NO: 483851 - DNA, 15 bp, Homo sapiens
taaaagctgacacta

SEQ ID NO: 483852 - DNA, 15 bp, Homo sapiens
gtaaaagctgacact

SEQ ID NO: 483853 - DNA, 15 bp, Homo sapiens
agtaaaagctgacac

SEQ ID NO: 483854 - DNA, 15 bp, Homo sapiens
aagtaaaagctgaca

SEQ ID NO: 483855 - DNA, 15 bp, Homo sapiens
aaagtaaaagctgac

SEQ ID NO: 483856 - DNA, 15 bp, Homo sapiens
taaagtaaaagctga

SEQ ID NO: 483857 - DNA, 15 bp, Homo sapiens
ttaaagtaaaagctg

SEQ ID NO: 483858 - DNA, 15 bp, Homo sapiens
attaaagtaaaagct

SEQ ID NO: 483859 - DNA, 15 bp, Homo sapiens
cattaaagtaaaagc

SEQ ID NO: 483860 - DNA, 15 bp, Homo sapiens
gcattaaagtaaaag

SEQ ID NO: 483861 - DNA, 15 bp, Homo sapiens
ggcattaaagtaaaa

SEQ ID NO: 483862 - DNA, 15 bp, Homo sapiens
tggcattaaagtaaa

SEQ ID NO: 483863 - DNA, 15 bp, Homo sapiens
ctggcattaaagtaa

SEQ ID NO: 483864 - DNA, 15 bp, Homo sapiens
cctggcattaaagta

SEQ ID NO: 483865 - DNA, 15 bp, Homo sapiens
ccctggcattaaagt

SEQ ID NO: 483866 - DNA, 15 bp, Homo sapiens
tccctggcattaaag

SEQ ID NO: 483867 - DNA, 15 bp, Homo sapiens
atccctggcattaaa

SEQ ID NO: 483868 - DNA, 15 bp, Homo sapiens
aatccctggcattaa

SEQ ID NO: 483869 - DNA, 15 bp, Homo sapiens
aaatccctggcatta

SEQ ID NO: 483870 - DNA, 15 bp, Homo sapiens
aaaatccctggcatt

SEQ ID NO: 483871 - DNA, 15 bp, Homo sapiens
caaaatccctggcat

SEQ ID NO: 483872 - DNA, 15 bp, Homo sapiens
acaaaatccctggca

SEQ ID NO: 483873 - DNA, 15 bp, Homo sapiens
aacaaaatccctggc

SEQ ID NO: 483874 - DNA, 15 bp, Homo sapiens
gaacaaaatccctgg

SEQ ID NO: 483875 - DNA, 15 bp, Homo sapiens
ggaacaaaatccctg

SEQ ID NO: 483876 - DNA, 15 bp, Homo sapiens
aggaacaaaatccct

SEQ ID NO: 483877 - DNA, 15 bp, Homo sapiens
taggaacaaaatccc

SEQ ID NO: 483878 - DNA, 15 bp, Homo sapiens
ataggaacaaaatcc

SEQ ID NO: 483879 - DNA, 15 bp, Homo sapiens
gataggaacaaaatc

SEQ ID NO: 483880 - DNA, 15 bp, Homo sapiens
agataggaacaaaat

SEQ ID NO: 483881 - DNA, 15 bp, Homo sapiens
tagataggaacaaaa

SEQ ID NO: 483882 - DNA, 15 bp, Homo sapiens
ttagataggaacaaa

SEQ ID NO: 483883 - DNA, 15 bp, Homo sapiens
attagataggaacaa

SEQ ID NO: 483884 - DNA, 15 bp, Homo sapiens
tattagataggaaca

SEQ ID NO: 483885 - DNA, 15 bp, Homo sapiens
ttattagataggaac

SEQ ID NO: 483886 - DNA, 15 bp, Homo sapiens
attattagataggaa

SEQ ID NO: 483887 - DNA, 15 bp, Homo sapiens
cattattagatagga

SEQ ID NO: 483888 - DNA, 15 bp, Homo sapiens
acattattagatagg

SEQ ID NO: 483889 - DNA, 15 bp, Homo sapiens
gacattattagatag

SEQ ID NO: 483890 - DNA, 15 bp, Homo sapiens
tgacattattagata

SEQ ID NO: 483891 - DNA, 15 bp, Homo sapiens
atgacattattagat

SEQ ID NO: 483892 - DNA, 15 bp, Homo sapiens
aatgacattattaga

SEQ ID NO: 483893 - DNA, 15 bp, Homo sapiens
aaatgacattattag

SEQ ID NO: 483894 - DNA, 15 bp, Homo sapiens
taaatgacattatta

SEQ ID NO: 483895 - DNA, 15 bp, Homo sapiens
ttaaatgacattatt

SEQ ID NO: 483896 - DNA, 15 bp, Homo sapiens
attaaatgacattat

SEQ ID NO: 483897 - DNA, 15 bp, Homo sapiens
tattaaatgacatta

SEQ ID NO: 483898 - DNA, 15 bp, Homo sapiens
atattaaatgacatt

SEQ ID NO: 483899 - DNA, 15 bp, Homo sapiens
tatattaaatgacat

SEQ ID NO: 483900 - DNA, 15 bp, Homo sapiens
atatattaaatgaca

SEQ ID NO: 483901 - DNA, 15 bp, Homo sapiens
aatatattaaatgac

SEQ ID NO: 483902 - DNA, 15 bp, Homo sapiens
aaatatattaaatga

SEQ ID NO: 483903 - DNA, 15 bp, Homo sapiens
aaaatatattaaatg

SEQ ID NO: 483904 - DNA, 15 bp, Homo sapiens
aaaaatatattaaat

SEQ ID NO: 483905 - DNA, 15 bp, Homo sapiens
gaaaaatatattaaa

SEQ ID NO: 483906 - DNA, 15 bp, Homo sapiens
tgaaaaatatattaa

SEQ ID NO: 483907 - DNA, 15 bp, Homo sapiens
atgaaaaatatatta

SEQ ID NO: 483908 - DNA, 15 bp, Homo sapiens
catgaaaaatatatt

SEQ ID NO: 483909 - DNA, 15 bp, Homo sapiens
gcatgaaaaatatat

SEQ ID NO: 483910 - DNA, 15 bp, Homo sapiens
tgcatgaaaaatata

SEQ ID NO: 483911 - DNA, 15 bp, Homo sapiens
ctgcatgaaaaatat

SEQ ID NO: 483912 - DNA, 15 bp, Homo sapiens
tctgcatgaaaaata

SEQ ID NO: 483913 - DNA, 15 bp, Homo sapiens
ttctgcatgaaaaat

SEQ ID NO: 483914 - DNA, 15 bp, Homo sapiens
attctgcatgaaaaa

SEQ ID NO: 483915 - DNA, 15 bp, Homo sapiens
cattctgcatgaaaa

SEQ ID NO: 483916 - DNA, 15 bp, Homo sapiens
acattctgcatgaaa

SEQ ID NO: 483917 - DNA, 15 bp, Homo sapiens
cacattctgcatgaa

SEQ ID NO: 483918 - DNA, 15 bp, Homo sapiens
gcacattctgcatga

SEQ ID NO: 483919 - DNA, 15 bp, Homo sapiens
tgcacattctgcatg

SEQ ID NO: 483920 - DNA, 15 bp, Homo sapiens
ctgcacattctgcat

SEQ ID NO: 483921 - DNA, 15 bp, Homo sapiens
tctgcacattctgca

SEQ ID NO: 483922 - DNA, 15 bp, Homo sapiens
ttctgcacattctgc

SEQ ID NO: 483923 - DNA, 15 bp, Homo sapiens
tttctgcacattctg

SEQ ID NO: 483924 - DNA, 15 bp, Homo sapiens
ttttctgcacattct

SEQ ID NO: 483925 - DNA, 15 bp, Homo sapiens
cttttctgcacattc

SEQ ID NO: 483926 - DNA, 15 bp, Homo sapiens
gcttttctgcacatt

SEQ ID NO: 483927 - DNA, 15 bp, Homo sapiens
agcttttctgcacat

SEQ ID NO: 483928 - DNA, 15 bp, Homo sapiens
tagcttttctgcaca

SEQ ID NO: 483929 - DNA, 15 bp, Homo sapiens
atagcttttctgcac

SEQ ID NO: 483930 - DNA, 15 bp, Homo sapiens
aatagcttttctgca

SEQ ID NO: 483931 - DNA, 15 bp, Homo sapiens
aaatagcttttctgc

SEQ ID NO: 483932 - DNA, 15 bp, Homo sapiens
caaatagcttttctg

SEQ ID NO: 483933 - DNA, 15 bp, Homo sapiens
tcaaatagcttttct

SEQ ID NO: 483934 - DNA, 15 bp, Homo sapiens
gtcaaatagcttttc

SEQ ID NO: 483935 - DNA, 15 bp, Homo sapiens
agtcaaatagctttt

SEQ ID NO: 483936 - DNA, 15 bp, Homo sapiens
aagtcaaatagcttt

SEQ ID NO: 483937 - DNA, 15 bp, Homo sapiens
caagtcaaatagctt

SEQ ID NO: 483938 - DNA, 15 bp, Homo sapiens
ccaagtcaaatagct

SEQ ID NO: 483939 - DNA, 15 bp, Homo sapiens
accaagtcaaatagc

SEQ ID NO: 483940 - DNA, 15 bp, Homo sapiens
caccaagtcaaatag

SEQ ID NO: 483941 - DNA, 15 bp, Homo sapiens
ccaccaagtcaaata

SEQ ID NO: 483942 - DNA, 15 bp, Homo sapiens
tccaccaagtcaaat

SEQ ID NO: 483943 - DNA, 15 bp, Homo sapiens
atccaccaagtcaaa

SEQ ID NO: 483944 - DNA, 15 bp, Homo sapiens
catccaccaagtcaa

SEQ ID NO: 483945 - DNA, 15 bp, Homo sapiens
ccatccaccaagtca

SEQ ID NO: 483946 - DNA, 15 bp, Homo sapiens
accatccaccaagtc

SEQ ID NO: 483947 - DNA, 15 bp, Homo sapiens
aaccatccaccaagt

SEQ ID NO: 483948 - DNA, 15 bp, Homo sapiens
aaaccatccaccaag

SEQ ID NO: 483949 - DNA, 15 bp, Homo sapiens
aaaaccatccaccaa

SEQ ID NO: 483950 - DNA, 15 bp, Homo sapiens
caaaaccatccacca

SEQ ID NO: 483951 - DNA, 15 bp, Homo sapiens
gcaaaaccatccacc

SEQ ID NO: 483952 - DNA, 15 bp, Homo sapiens
agcaaaaccatccac

SEQ ID NO: 483953 - DNA, 15 bp, Homo sapiens
cagcaaaaccatcca

SEQ ID NO: 483954 - DNA, 15 bp, Homo sapiens
tcagcaaaaccatcc

SEQ ID NO: 483955 - DNA, 15 bp, Homo sapiens
ttcagcaaaaccatc

SEQ ID NO: 483956 - DNA, 15 bp, Homo sapiens
tttcagcaaaaccat

SEQ ID NO: 483957 - DNA, 15 bp, Homo sapiens
ctttcagcaaaacca

SEQ ID NO: 483958 - DNA, 15 bp, Homo sapiens
gctttcagcaaaacc

SEQ ID NO: 483959 - DNA, 15 bp, Homo sapiens
tgctttcagcaaaac

SEQ ID NO: 483960 - DNA, 15 bp, Homo sapiens
gtgctttcagcaaaa

SEQ ID NO: 483961 - DNA, 15 bp, Homo sapiens
ggtgctttcagcaaa

SEQ ID NO: 483962 - DNA, 15 bp, Homo sapiens
tggtgctttcagcaa

SEQ ID NO: 483963 - DNA, 15 bp, Homo sapiens
ttggtgctttcagca

SEQ ID NO: 483964 - DNA, 15 bp, Homo sapiens
tttggtgctttcagc

SEQ ID NO: 483965 - DNA, 15 bp, Homo sapiens
gtttggtgctttcag

SEQ ID NO: 483966 - DNA, 15 bp, Homo sapiens
cgtttggtgctttca

SEQ ID NO: 483967 - DNA, 15 bp, Homo sapiens
acgtttggtgctttc

SEQ ID NO: 483968 - DNA, 15 bp, Homo sapiens
tacgtttggtgcttt

SEQ ID NO: 483969 - DNA, 15 bp, Homo sapiens
ttacgtttggtgctt

SEQ ID NO: 483970 - DNA, 15 bp, Homo sapiens
tttacgtttggtgct

SEQ ID NO: 483971 - DNA, 15 bp, Homo sapiens
ctttacgtttggtgc

SEQ ID NO: 483972 - DNA, 15 bp, Homo sapiens
gctttacgtttggtg

SEQ ID NO: 483973 - DNA, 15 bp, Homo sapiens
tgctttacgtttggt

SEQ ID NO: 483974 - DNA, 15 bp, Homo sapiens
ctgctttacgtttgg

SEQ ID NO: 483975 - DNA, 15 bp, Homo sapiens
gctgctttacgtttg

SEQ ID NO: 483976 - DNA, 15 bp, Homo sapiens
tgctgctttacgttt

SEQ ID NO: 483977 - DNA, 15 bp, Homo sapiens
ctgctgctttacgtt

SEQ ID NO: 483978 - DNA, 15 bp, Homo sapiens
actgctgctttacgt

SEQ ID NO: 483979 - DNA, 15 bp, Homo sapiens
aactgctgctttacg

SEQ ID NO: 483980 - DNA, 15 bp, Homo sapiens
aaactgctgctttac

SEQ ID NO: 483981 - DNA, 15 bp, Homo sapiens
caaactgctgcttta

SEQ ID NO: 483982 - DNA, 15 bp, Homo sapiens
ccaaactgctgcttt

SEQ ID NO: 483983 - DNA, 15 bp, Homo sapiens
gccaaactgctgctt

SEQ ID NO: 483984 - DNA, 15 bp, Homo sapiens
ggccaaactgctgct

SEQ ID NO: 483985 - DNA, 15 bp, Homo sapiens
tggccaaactgctgc

SEQ ID NO: 483986 - DNA, 15 bp, Homo sapiens
gtggccaaactgctg

SEQ ID NO: 483987 - DNA, 15 bp, Homo sapiens
agtggccaaactgct

SEQ ID NO: 483988 - DNA, 15 bp, Homo sapiens
tagtggccaaactgc

SEQ ID NO: 483989 - DNA, 15 bp, Homo sapiens
gtagtggccaaactg

SEQ ID NO: 483990 - DNA, 15 bp, Homo sapiens
tgtagtggccaaact

SEQ ID NO: 483991 - DNA, 15 bp, Homo sapiens
ttgtagtggccaaac

SEQ ID NO: 483992 - DNA, 15 bp, Homo sapiens
tttgtagtggccaaa

SEQ ID NO: 483993 - DNA, 15 bp, Homo sapiens
atttgtagtggccaa

SEQ ID NO: 483994 - DNA, 15 bp, Homo sapiens
gatttgtagtggcca

SEQ ID NO: 483995 - DNA, 15 bp, Homo sapiens
tgatttgtagtggcc

SEQ ID NO: 483996 - DNA, 15 bp, Homo sapiens
atgatttgtagtggc

SEQ ID NO: 483997 - DNA, 15 bp, Homo sapiens
aatgatttgtagtgg

SEQ ID NO: 483998 - DNA, 15 bp, Homo sapiens
gaatgatttgtagtg

SEQ ID NO: 483999 - DNA, 15 bp, Homo sapiens
agaatgatttgtagt

SEQ ID NO: 484000 - DNA, 15 bp, Homo sapiens
gagaatgatttgtag

SEQ ID NO: 484001 - DNA, 15 bp, Homo sapiens
ggagaatgatttgta

SEQ ID NO: 484002 - DNA, 15 bp, Homo sapiens
aggagaatgatttgt

SEQ ID NO: 484003 - DNA, 15 bp, Homo sapiens
aaggagaatgatttg

SEQ ID NO: 484004 - DNA, 15 bp, Homo sapiens
taaggagaatgattt

SEQ ID NO: 484005 - DNA, 15 bp, Homo sapiens
ataaggagaatgatt

SEQ ID NO: 484006 - DNA, 15 bp, Homo sapiens
gataaggagaatgat

SEQ ID NO: 484007 - DNA, 15 bp, Homo sapiens
agataaggagaatga

SEQ ID NO: 484008 - DNA, 15 bp, Homo sapiens
aagataaggagaatg

SEQ ID NO: 484009 - DNA, 15 bp, Homo sapiens
caagataaggagaat

SEQ ID NO: 484010 - DNA, 15 bp, Homo sapiens
acaagataaggagaa

SEQ ID NO: 484011 - DNA, 15 bp, Homo sapiens
cacaagataaggaga

SEQ ID NO: 484012 - DNA, 15 bp, Homo sapiens
acacaagataaggag

SEQ ID NO: 484013 - DNA, 15 bp, Homo sapiens
gacacaagataagga

SEQ ID NO: 484014 - DNA, 15 bp, Homo sapiens
ggacacaagataagg

SEQ ID NO: 484015 - DNA, 15 bp, Homo sapiens
tggacacaagataag

SEQ ID NO: 484016 - DNA, 15 bp, Homo sapiens
ctggacacaagataa

SEQ ID NO: 484017 - DNA, 15 bp, Homo sapiens
tctggacacaagata

SEQ ID NO: 484018 - DNA, 15 bp, Homo sapiens
ttctggacacaagat

SEQ ID NO: 484019 - DNA, 15 bp, Homo sapiens
tttctggacacaaga

SEQ ID NO: 484020 - DNA, 15 bp, Homo sapiens
atttctggacacaag

SEQ ID NO: 484021 - DNA, 15 bp, Homo sapiens
tatttctggacacaa

SEQ ID NO: 484022 - DNA, 15 bp, Homo sapiens
ttatttctggacaca

SEQ ID NO: 484023 - DNA, 15 bp, Homo sapiens
attatttctggacac

SEQ ID NO: 484024 - DNA, 15 bp, Homo sapiens
gattatttctggaca

SEQ ID NO: 484025 - DNA, 15 bp, Homo sapiens
ggattatttctggac

SEQ ID NO: 484026 - DNA, 15 bp, Homo sapiens
tggattatttctgga

SEQ ID NO: 484027 - DNA, 15 bp, Homo sapiens
ctggattatttctgg

SEQ ID NO: 484028 - DNA, 15 bp, Homo sapiens
cctggattatttctg

SEQ ID NO: 484029 - DNA, 15 bp, Homo sapiens
tcctggattatttct

SEQ ID NO: 484030 - DNA, 15 bp, Homo sapiens
atcctggattatttc

SEQ ID NO: 484031 - DNA, 15 bp, Homo sapiens
tatcctggattattt

SEQ ID NO: 484032 - DNA, 15 bp, Homo sapiens
atatcctggattatt

SEQ ID NO: 484033 - DNA, 15 bp, Homo sapiens
tatatcctggattat

SEQ ID NO: 484034 - DNA, 15 bp, Homo sapiens
atatatcctggatta

SEQ ID NO: 484035 - DNA, 15 bp, Homo sapiens
gatatatcctggatt

SEQ ID NO: 484036 - DNA, 15 bp, Homo sapiens
ggatatatcctggat

SEQ ID NO: 484037 - DNA, 15 bp, Homo sapiens
tggatatatcctgga

SEQ ID NO: 484038 - DNA, 15 bp, Homo sapiens
ttggatatatcctgg

SEQ ID NO: 484039 - DNA, 15 bp, Homo sapiens
tttggatatatcctg

SEQ ID NO: 484040 - DNA, 15 bp, Homo sapiens
ctttggatatatcct

SEQ ID NO: 484041 - DNA, 15 bp, Homo sapiens
tctttggatatatcc

SEQ ID NO: 484042 - DNA, 15 bp, Homo sapiens
gtctttggatatatc

SEQ ID NO: 484043 - DNA, 15 bp, Homo sapiens
cgtctttggatatat

SEQ ID NO: 484044 - DNA, 15 bp, Homo sapiens
acgtctttggatata

SEQ ID NO: 484045 - DNA, 15 bp, Homo sapiens
cacgtctttggatat

SEQ ID NO: 484046 - DNA, 15 bp, Homo sapiens
ccacgtctttggata

SEQ ID NO: 484047 - DNA, 15 bp, Homo sapiens
accacgtctttggat

SEQ ID NO: 484048 - DNA, 15 bp, Homo sapiens
aaccacgtctttgga

SEQ ID NO: 484049 - DNA, 15 bp, Homo sapiens
caaccacgtctttgg

SEQ ID NO: 484050 - DNA, 15 bp, Homo sapiens
tcaaccacgtctttg

SEQ ID NO: 484051 - DNA, 15 bp, Homo sapiens
atcaaccacgtcttt

SEQ ID NO: 484052 - DNA, 15 bp, Homo sapiens
catcaaccacgtctt

SEQ ID NO: 484053 - DNA, 15 bp, Homo sapiens
tcatcaaccacgtct

SEQ ID NO: 484054 - DNA, 15 bp, Homo sapiens
ttcatcaaccacgtc

SEQ ID NO: 484055 - DNA, 15 bp, Homo sapiens
tttcatcaaccacgt

SEQ ID NO: 484056 - DNA, 15 bp, Homo sapiens
ttttcatcaaccacg

SEQ ID NO: 484057 - DNA, 15 bp, Homo sapiens
gttttcatcaaccac

SEQ ID NO: 484058 - DNA, 15 bp, Homo sapiens
tgttttcatcaacca

SEQ ID NO: 484059 - DNA, 15 bp, Homo sapiens
ttgttttcatcaacc

SEQ ID NO: 484060 - DNA, 15 bp, Homo sapiens
gttgttttcatcaac

SEQ ID NO: 484061 - DNA, 15 bp, Homo sapiens
tgttgttttcatcaa

SEQ ID NO: 484062 - DNA, 15 bp, Homo sapiens
atgttgttttcatca

SEQ ID NO: 484063 - DNA, 15 bp, Homo sapiens
catgttgttttcatc

SEQ ID NO: 484064 - DNA, 15 bp, Homo sapiens
tcatgttgttttcat

SEQ ID NO: 484065 - DNA, 15 bp, Homo sapiens
ttcatgttgttttca

SEQ ID NO: 484066 - DNA, 15 bp, Homo sapiens
attcatgttgttttc

SEQ ID NO: 484067 - DNA, 15 bp, Homo sapiens
tattcatgttgtttt

SEQ ID NO: 484068 - DNA, 15 bp, Homo sapiens
ttattcatgttgttt

SEQ ID NO: 484069 - DNA, 15 bp, Homo sapiens
cttattcatgttgtt

SEQ ID NO: 484070 - DNA, 15 bp, Homo sapiens
ccttattcatgttgt

SEQ ID NO: 484071 - DNA, 15 bp, Homo sapiens
accttattcatgttg

SEQ ID NO: 484072 - DNA, 15 bp, Homo sapiens
taccttattcatgtt

SEQ ID NO: 484073 - DNA, 15 bp, Homo sapiens
ttaccttattcatgt

SEQ ID NO: 484074 - DNA, 15 bp, Homo sapiens
cttaccttattcatg

SEQ ID NO: 484075 - DNA, 15 bp, Homo sapiens
ccttaccttattcat

SEQ ID NO: 484076 - DNA, 15 bp, Homo sapiens
tccttaccttattca

SEQ ID NO: 484077 - DNA, 15 bp, Homo sapiens
ctccttaccttattc

SEQ ID NO: 484078 - DNA, 15 bp, Homo sapiens
cctccttaccttatt

SEQ ID NO: 484079 - DNA, 15 bp, Homo sapiens
ccctccttaccttat

SEQ ID NO: 484080 - DNA, 15 bp, Homo sapiens
gccctccttacctta

SEQ ID NO: 484081 - DNA, 15 bp, Homo sapiens
tgccctccttacctt

SEQ ID NO: 484082 - DNA, 15 bp, Homo sapiens
ttgccctccttacct

SEQ ID NO: 484083 - DNA, 15 bp, Homo sapiens
tttgccctccttacc

SEQ ID NO: 484084 - DNA, 15 bp, Homo sapiens
ttttgccctccttac

SEQ ID NO: 484085 - DNA, 15 bp, Homo sapiens
attttgccctcctta

SEQ ID NO: 484086 - DNA, 15 bp, Homo sapiens
aattttgccctcctt

SEQ ID NO: 484087 - DNA, 15 bp, Homo sapiens
taattttgccctcct

SEQ ID NO: 484088 - DNA, 15 bp, Homo sapiens
ataattttgccctcc

SEQ ID NO: 484089 - DNA, 15 bp, Homo sapiens
aataattttgccctc

SEQ ID NO: 484090 - DNA, 15 bp, Homo sapiens
aaataattttgccct

SEQ ID NO: 484091 - DNA, 15 bp, Homo sapiens
gaaataattttgccc

SEQ ID NO: 484092 - DNA, 15 bp, Homo sapiens
ggaaataattttgcc

SEQ ID NO: 484093 - DNA, 15 bp, Homo sapiens
tggaaataattttgc

SEQ ID NO: 484094 - DNA, 15 bp, Homo sapiens
atggaaataattttg

SEQ ID NO: 484095 - DNA, 15 bp, Homo sapiens
aatggaaataatttt

SEQ ID NO: 484096 - DNA, 15 bp, Homo sapiens
taatggaaataattt

SEQ ID NO: 484097 - DNA, 15 bp, Homo sapiens
ataatggaaataatt

SEQ ID NO: 484098 - DNA, 15 bp, Homo sapiens
tataatggaaataat

SEQ ID NO: 484099 - DNA, 15 bp, Homo sapiens
atataatggaaataa

SEQ ID NO: 484100 - DNA, 15 bp, Homo sapiens
gatataatggaaata

SEQ ID NO: 484101 - DNA, 15 bp, Homo sapiens
agatataatggaaat

SEQ ID NO: 484102 - DNA, 15 bp, Homo sapiens
tagatataatggaaa

SEQ ID NO: 484103 - DNA, 15 bp, Homo sapiens
ctagatataatggaa

SEQ ID NO: 484104 - DNA, 15 bp, Homo sapiens
tctagatataatgga

SEQ ID NO: 484105 - DNA, 15 bp, Homo sapiens
atctagatataatgg

SEQ ID NO: 484106 - DNA, 15 bp, Homo sapiens
catctagatataatg

SEQ ID NO: 484107 - DNA, 15 bp, Homo sapiens
acatctagatataat

SEQ ID NO: 484108 - DNA, 15 bp, Homo sapiens
cacatctagatataa

SEQ ID NO: 484109 - DNA, 15 bp, Homo sapiens
tcacatctagatata

SEQ ID NO: 484110 - DNA, 15 bp, Homo sapiens
ttcacatctagatat

SEQ ID NO: 484111 - DNA, 15 bp, Homo sapiens
cttcacatctagata

SEQ ID NO: 484112 - DNA, 15 bp, Homo sapiens
gcttcacatctagat

SEQ ID NO: 484113 - DNA, 15 bp, Homo sapiens
tgcttcacatctaga

SEQ ID NO: 484114 - DNA, 15 bp, Homo sapiens
ctgcttcacatctag

SEQ ID NO: 484115 - DNA, 15 bp, Homo sapiens
actgcttcacatcta

SEQ ID NO: 484116 - DNA, 15 bp, Homo sapiens
aactgcttcacatct

SEQ ID NO: 484117 - DNA, 15 bp, Homo sapiens
aaactgcttcacatc

SEQ ID NO: 484118 - DNA, 15 bp, Homo sapiens
taaactgcttcacat

SEQ ID NO: 484119 - DNA, 15 bp, Homo sapiens
ataaactgcttcaca

SEQ ID NO: 484120 - DNA, 15 bp, Homo sapiens
aataaactgcttcac

SEQ ID NO: 484121 - DNA, 15 bp, Homo sapiens
aaataaactgcttca

SEQ ID NO: 484122 - DNA, 15 bp, Homo sapiens
aaaataaactgcttc

SEQ ID NO: 484123 - DNA, 15 bp, Homo sapiens
taaaataaactgctt

SEQ ID NO: 484124 - DNA, 15 bp, Homo sapiens
gtaaaataaactgct

SEQ ID NO: 484125 - DNA, 15 bp, Homo sapiens
agtaaaataaactgc

SEQ ID NO: 484126 - DNA, 15 bp, Homo sapiens
gagtaaaataaactg

SEQ ID NO: 484127 - DNA, 15 bp, Homo sapiens
tgagtaaaataaact

SEQ ID NO: 484128 - DNA, 15 bp, Homo sapiens
ttgagtaaaataaac

SEQ ID NO: 484129 - DNA, 15 bp, Homo sapiens
cttgagtaaaataaa

SEQ ID NO: 484130 - DNA, 15 bp, Homo sapiens
ccttgagtaaaataa

SEQ ID NO: 484131 - DNA, 15 bp, Homo sapiens
accttgagtaaaata

SEQ ID NO: 484132 - DNA, 15 bp, Homo sapiens
caccttgagtaaaat

SEQ ID NO: 484133 - DNA, 15 bp, Homo sapiens
acaccttgagtaaaa

SEQ ID NO: 484134 - DNA, 15 bp, Homo sapiens
cacaccttgagtaaa

SEQ ID NO: 484135 - DNA, 15 bp, Homo sapiens
acacaccttgagtaa

SEQ ID NO: 484136 - DNA, 15 bp, Homo sapiens
tacacaccttgagta

SEQ ID NO: 484137 - DNA, 15 bp, Homo sapiens
atacacaccttgagt

SEQ ID NO: 484138 - DNA, 15 bp, Homo sapiens
aatacacaccttgag

SEQ ID NO: 484139 - DNA, 15 bp, Homo sapiens
taatacacaccttga

SEQ ID NO: 484140 - DNA, 15 bp, Homo sapiens
gtaatacacaccttg

SEQ ID NO: 484141 - DNA, 15 bp, Homo sapiens
agtaatacacacctt

SEQ ID NO: 484142 - DNA, 15 bp, Homo sapiens
aagtaatacacacct

SEQ ID NO: 484143 - DNA, 15 bp, Homo sapiens
aaagtaatacacacc

SEQ ID NO: 484144 - DNA, 15 bp, Homo sapiens
taaagtaatacacac

SEQ ID NO: 484145 - DNA, 15 bp, Homo sapiens
ctaaagtaatacaca

SEQ ID NO: 484146 - DNA, 15 bp, Homo sapiens
cctaaagtaatacac

SEQ ID NO: 484147 - DNA, 15 bp, Homo sapiens
gcctaaagtaataca

SEQ ID NO: 484148 - DNA, 15 bp, Homo sapiens
agcctaaagtaatac

SEQ ID NO: 484149 - DNA, 15 bp, Homo sapiens
aagcctaaagtaata

SEQ ID NO: 484150 - DNA, 15 bp, Homo sapiens
taagcctaaagtaat

SEQ ID NO: 484151 - DNA, 15 bp, Homo sapiens
ataagcctaaagtaa

SEQ ID NO: 484152 - DNA, 15 bp, Homo sapiens
aataagcctaaagta

SEQ ID NO: 484153 - DNA, 15 bp, Homo sapiens
taataagcctaaagt

SEQ ID NO: 484154 - DNA, 15 bp, Homo sapiens
ataataagcctaaag

SEQ ID NO: 484155 - DNA, 15 bp, Homo sapiens
aataataagcctaaa

SEQ ID NO: 484156 - DNA, 15 bp, Homo sapiens
aaataataagcctaa

SEQ ID NO: 484157 - DNA, 15 bp, Homo sapiens
taaataataagccta

SEQ ID NO: 484158 - DNA, 15 bp, Homo sapiens
ttaaataataagcct

SEQ ID NO: 484159 - DNA, 15 bp, Homo sapiens
cttaaataataagcc

SEQ ID NO: 484160 - DNA, 15 bp, Homo sapiens
gcttaaataataagc

SEQ ID NO: 484161 - DNA, 15 bp, Homo sapiens
tgcttaaataataag

SEQ ID NO: 484162 - DNA, 15 bp, Homo sapiens
ttgcttaaataataa

SEQ ID NO: 484163 - DNA, 15 bp, Homo sapiens
tttgcttaaataata

SEQ ID NO: 484164 - DNA, 15 bp, Homo sapiens
ctttgcttaaataat

SEQ ID NO: 484165 - DNA, 15 bp, Homo sapiens
actttgcttaaataa

SEQ ID NO: 484166 - DNA, 15 bp, Homo sapiens
tactttgcttaaata

SEQ ID NO: 484167 - DNA, 15 bp, Homo sapiens
atactttgcttaaat

SEQ ID NO: 484168 - DNA, 15 bp, Homo sapiens
aatactttgcttaaa

SEQ ID NO: 484169 - DNA, 15 bp, Homo sapiens
aaatactttgcttaa

SEQ ID NO: 484170 - DNA, 15 bp, Homo sapiens
gaaatactttgctta

SEQ ID NO: 484171 - DNA, 15 bp, Homo sapiens
tgaaatactttgctt

SEQ ID NO: 484172 - DNA, 15 bp, Homo sapiens
ctgaaatactttgct

SEQ ID NO: 484173 - DNA, 15 bp, Homo sapiens
cctgaaatactttgc

SEQ ID NO: 484174 - DNA, 15 bp, Homo sapiens
ccctgaaatactttg

SEQ ID NO: 484175 - DNA, 15 bp, Homo sapiens
tccctgaaatacttt

SEQ ID NO: 484176 - DNA, 15 bp, Homo sapiens
ttccctgaaatactt

SEQ ID NO: 484177 - DNA, 15 bp, Homo sapiens
gttccctgaaatact

SEQ ID NO: 484178 - DNA, 15 bp, Homo sapiens
ggttccctgaaatac

SEQ ID NO: 484179 - DNA, 15 bp, Homo sapiens
tggttccctgaaata

SEQ ID NO: 484180 - DNA, 15 bp, Homo sapiens
atggttccctgaaat

SEQ ID NO: 484181 - DNA, 15 bp, Homo sapiens
aatggttccctgaaa

SEQ ID NO: 484182 - DNA, 15 bp, Homo sapiens
aaatggttccctgaa

SEQ ID NO: 484183 - DNA, 15 bp, Homo sapiens
taaatggttccctga

SEQ ID NO: 484184 - DNA, 15 bp, Homo sapiens
ttaaatggttccctg

SEQ ID NO: 484185 - DNA, 15 bp, Homo sapiens
tttaaatggttccct

SEQ ID NO: 484186 - DNA, 15 bp, Homo sapiens
atttaaatggttccc

SEQ ID NO: 484187 - DNA, 15 bp, Homo sapiens
catttaaatggttcc

SEQ ID NO: 484188 - DNA, 15 bp, Homo sapiens
tcatttaaatggttc

SEQ ID NO: 484189 - DNA, 15 bp, Homo sapiens
atcatttaaatggtt

SEQ ID NO: 484190 - DNA, 15 bp, Homo sapiens
gatcatttaaatggt

SEQ ID NO: 484191 - DNA, 15 bp, Homo sapiens
tgatcatttaaatgg

SEQ ID NO: 484192 - DNA, 15 bp, Homo sapiens
atgatcatttaaatg

SEQ ID NO: 484193 - DNA, 15 bp, Homo sapiens
aatgatcatttaaat

SEQ ID NO: 484194 - DNA, 15 bp, Homo sapiens
aaatgatcatttaaa

SEQ ID NO: 484195 - DNA, 15 bp, Homo sapiens
aaaatgatcatttaa

SEQ ID NO: 484196 - DNA, 15 bp, Homo sapiens
taaaatgatcattta

SEQ ID NO: 484197 - DNA, 15 bp, Homo sapiens
ctaaaatgatcattt

SEQ ID NO: 484198 - DNA, 15 bp, Homo sapiens
cctaaaatgatcatt

SEQ ID NO: 484199 - DNA, 15 bp, Homo sapiens
acctaaaatgatcat

SEQ ID NO: 484200 - DNA, 15 bp, Homo sapiens
aacctaaaatgatca

SEQ ID NO: 484201 - DNA, 15 bp, Homo sapiens
aaacctaaaatgatc

SEQ ID NO: 484202 - DNA, 15 bp, Homo sapiens
gaaacctaaaatgat

SEQ ID NO: 484203 - DNA, 15 bp, Homo sapiens
agaaacctaaaatga

SEQ ID NO: 484204 - DNA, 15 bp, Homo sapiens
aagaaacctaaaatg

SEQ ID NO: 484205 - DNA, 15 bp, Homo sapiens
aaagaaacctaaaat

SEQ ID NO: 484206 - DNA, 15 bp, Homo sapiens
caaagaaacctaaaa

SEQ ID NO: 484207 - DNA, 15 bp, Homo sapiens
acaaagaaacctaaa

SEQ ID NO: 484208 - DNA, 15 bp, Homo sapiens
aacaaagaaacctaa

SEQ ID NO: 484209 - DNA, 15 bp, Homo sapiens
aaacaaagaaaccta

SEQ ID NO: 484210 - DNA, 15 bp, Homo sapiens
caaacaaagaaacct

SEQ ID NO: 484211 - DNA, 15 bp, Homo sapiens
tcaaacaaagaaacc

SEQ ID NO: 484212 - DNA, 15 bp, Homo sapiens
atcaaacaaagaaac

SEQ ID NO: 484213 - DNA, 15 bp, Homo sapiens
catcaaacaaagaaa

SEQ ID NO: 484214 - DNA, 15 bp, Homo sapiens
ccatcaaacaaagaa

SEQ ID NO: 484215 - DNA, 15 bp, Homo sapiens
tccatcaaacaaaga

SEQ ID NO: 484216 - DNA, 15 bp, Homo sapiens
gtccatcaaacaaag

SEQ ID NO: 484217 - DNA, 15 bp, Homo sapiens
agtccatcaaacaaa

SEQ ID NO: 484218 - DNA, 15 bp, Homo sapiens
aagtccatcaaacaa

SEQ ID NO: 484219 - DNA, 15 bp, Homo sapiens
taagtccatcaaaca

SEQ ID NO: 484220 - DNA, 15 bp, Homo sapiens
ctaagtccatcaaac

SEQ ID NO: 484221 - DNA, 15 bp, Homo sapiens
tctaagtccatcaaa

SEQ ID NO: 484222 - DNA, 15 bp, Homo sapiens
ttctaagtccatcaa

SEQ ID NO: 484223 - DNA, 15 bp, Homo sapiens
cttctaagtccatca

SEQ ID NO: 484224 - DNA, 15 bp, Homo sapiens
tcttctaagtccatc

SEQ ID NO: 484225 - DNA, 15 bp, Homo sapiens
ctcttctaagtccat

SEQ ID NO: 484226 - DNA, 15 bp, Homo sapiens
tctcttctaagtcca

SEQ ID NO: 484227 - DNA, 15 bp, Homo sapiens
gtctcttctaagtcc

SEQ ID NO: 484228 - DNA, 15 bp, Homo sapiens
tgtctcttctaagtc

SEQ ID NO: 484229 - DNA, 15 bp, Homo sapiens
atgtctcttctaagt

SEQ ID NO: 484230 - DNA, 15 bp, Homo sapiens
tatgtctcttctaag

SEQ ID NO: 484231 - DNA, 15 bp, Homo sapiens
gtatgtctcttctaa

SEQ ID NO: 484232 - DNA, 15 bp, Homo sapiens
agtatgtctcttcta

SEQ ID NO: 484233 - DNA, 15 bp, Homo sapiens
gagtatgtctcttct

SEQ ID NO: 484234 - DNA, 15 bp, Homo sapiens
tgagtatgtctcttc

SEQ ID NO: 484235 - DNA, 15 bp, Homo sapiens
atgagtatgtctctt

SEQ ID NO: 484236 - DNA, 15 bp, Homo sapiens
tatgagtatgtctct

SEQ ID NO: 484237 - DNA, 15 bp, Homo sapiens
gtatgagtatgtctc

SEQ ID NO: 484238 - DNA, 15 bp, Homo sapiens
tgtatgagtatgtct

SEQ ID NO: 484239 - DNA, 15 bp, Homo sapiens
atgtatgagtatgtc

SEQ ID NO: 484240 - DNA, 15 bp, Homo sapiens
tatgtatgagtatgt

SEQ ID NO: 484241 - DNA, 15 bp, Homo sapiens
ttatgtatgagtatg

SEQ ID NO: 484242 - DNA, 15 bp, Homo sapiens
attatgtatgagtat

SEQ ID NO: 484243 - DNA, 15 bp, Homo sapiens
aattatgtatgagta

SEQ ID NO: 484244 - DNA, 15 bp, Homo sapiens
aaattatgtatgagt

SEQ ID NO: 484245 - DNA, 15 bp, Homo sapiens
aaaattatgtatgag

SEQ ID NO: 484246 - DNA, 15 bp, Homo sapiens
taaaattatgtatga

SEQ ID NO: 484247 - DNA, 15 bp, Homo sapiens
ataaaattatgtatg

SEQ ID NO: 484248 - DNA, 15 bp, Homo sapiens
aataaaattatgtat

SEQ ID NO: 484249 - DNA, 15 bp, Homo sapiens
aaataaaattatgta

SEQ ID NO: 484250 - DNA, 15 bp, Homo sapiens
caaataaaattatgt

SEQ ID NO: 484251 - DNA, 15 bp, Homo sapiens
ccaaataaaattatg

SEQ ID NO: 484252 - DNA, 15 bp, Homo sapiens
gccaaataaaattat

SEQ ID NO: 484253 - DNA, 15 bp, Homo sapiens
tgccaaataaaatta

SEQ ID NO: 484254 - DNA, 15 bp, Homo sapiens
ctgccaaataaaatt

SEQ ID NO: 484255 - DNA, 15 bp, Homo sapiens
tctgccaaataaaat

SEQ ID NO: 484256 - DNA, 15 bp, Homo sapiens
ctctgccaaataaaa

SEQ ID NO: 484257 - DNA, 15 bp, Homo sapiens
cctctgccaaataaa

SEQ ID NO: 484258 - DNA, 15 bp, Homo sapiens
ccctctgccaaataa

SEQ ID NO: 484259 - DNA, 15 bp, Homo sapiens
tccctctgccaaata

SEQ ID NO: 484260 - DNA, 15 bp, Homo sapiens
ttccctctgccaaat

SEQ ID NO: 484261 - DNA, 15 bp, Homo sapiens
tttccctctgccaaa

SEQ ID NO: 484262 - DNA, 15 bp, Homo sapiens
ttttccctctgccaa

SEQ ID NO: 484263 - DNA, 15 bp, Homo sapiens
attttccctctgcca

SEQ ID NO: 484264 - DNA, 15 bp, Homo sapiens
tattttccctctgcc

SEQ ID NO: 484265 - DNA, 15 bp, Homo sapiens
ttattttccctctgc

SEQ ID NO: 484266 - DNA, 15 bp, Homo sapiens
attattttccctctg

SEQ ID NO: 484267 - DNA, 15 bp, Homo sapiens
tattattttccctct

SEQ ID NO: 484268 - DNA, 15 bp, Homo sapiens
gtattattttccctc

SEQ ID NO: 484269 - DNA, 15 bp, Homo sapiens
ggtattattttccct

SEQ ID NO: 484270 - DNA, 15 bp, Homo sapiens
tggtattattttccc

SEQ ID NO: 484271 - DNA, 15 bp, Homo sapiens
ctggtattattttcc

SEQ ID NO: 484272 - DNA, 15 bp, Homo sapiens
cctggtattattttc

SEQ ID NO: 484273 - DNA, 15 bp, Homo sapiens
gcctggtattatttt

SEQ ID NO: 484274 - DNA, 15 bp, Homo sapiens
tgcctggtattattt

SEQ ID NO: 484275 - DNA, 15 bp, Homo sapiens
ttgcctggtattatt

SEQ ID NO: 484276 - DNA, 15 bp, Homo sapiens
attgcctggtattat

SEQ ID NO: 484277 - DNA, 15 bp, Homo sapiens
cattgcctggtatta

SEQ ID NO: 484278 - DNA, 15 bp, Homo sapiens
tcattgcctggtatt

SEQ ID NO: 484279 - DNA, 15 bp, Homo sapiens
ttcattgcctggtat

SEQ ID NO: 484280 - DNA, 15 bp, Homo sapiens
gttcattgcctggta

SEQ ID NO: 484281 - DNA, 15 bp, Homo sapiens
tgttcattgcctggt

SEQ ID NO: 484282 - DNA, 15 bp, Homo sapiens
ttgttcattgcctgg

SEQ ID NO: 484283 - DNA, 15 bp, Homo sapiens
tttgttcattgcctg

SEQ ID NO: 484284 - DNA, 15 bp, Homo sapiens
ctttgttcattgcct

SEQ ID NO: 484285 - DNA, 15 bp, Homo sapiens
tctttgttcattgcc

SEQ ID NO: 484286 - DNA, 15 bp, Homo sapiens
atctttgttcattgc

SEQ ID NO: 484287 - DNA, 15 bp, Homo sapiens
aatctttgttcattg

SEQ ID NO: 484288 - DNA, 15 bp, Homo sapiens
aaatctttgttcatt

SEQ ID NO: 484289 - DNA, 15 bp, Homo sapiens
taaatctttgttcat

SEQ ID NO: 484290 - DNA, 15 bp, Homo sapiens
ttaaatctttgttca

SEQ ID NO: 484291 - DNA, 15 bp, Homo sapiens
tttaaatctttgttc

SEQ ID NO: 484292 - DNA, 15 bp, Homo sapiens
ttttaaatctttgtt

SEQ ID NO: 484293 - DNA, 15 bp, Homo sapiens
attttaaatctttgt

SEQ ID NO: 484294 - DNA, 15 bp, Homo sapiens
tattttaaatctttg

SEQ ID NO: 484295 - DNA, 15 bp, Homo sapiens
ttattttaaatcttt

SEQ ID NO: 484296 - DNA, 15 bp, Homo sapiens
attattttaaatctt

SEQ ID NO: 484297 - DNA, 15 bp, Homo sapiens
gattattttaaatct

SEQ ID NO: 484298 - DNA, 15 bp, Homo sapiens
ggattattttaaatc

SEQ ID NO: 484299 - DNA, 15 bp, Homo sapiens
gggattattttaaat

SEQ ID NO: 484300 - DNA, 15 bp, Homo sapiens
agggattattttaaa

SEQ ID NO: 484301 - DNA, 15 bp, Homo sapiens
aagggattattttaa

SEQ ID NO: 484302 - DNA, 15 bp, Homo sapiens
taagggattatttta

SEQ ID NO: 484303 - DNA, 15 bp, Homo sapiens
ctaagggattatttt

SEQ ID NO: 484304 - DNA, 15 bp, Homo sapiens
actaagggattattt

SEQ ID NO: 484305 - DNA, 15 bp, Homo sapiens
aactaagggattatt

SEQ ID NO: 484306 - DNA, 15 bp, Homo sapiens
aaactaagggattat

SEQ ID NO: 484307 - DNA, 15 bp, Homo sapiens
gaaactaagggatta

SEQ ID NO: 484308 - DNA, 15 bp, Homo sapiens
tgaaactaagggatt

SEQ ID NO: 484309 - DNA, 15 bp, Homo sapiens
atgaaactaagggat

SEQ ID NO: 484310 - DNA, 15 bp, Homo sapiens
aatgaaactaaggga

SEQ ID NO: 484311 - DNA, 15 bp, Homo sapiens
gaatgaaactaaggg

SEQ ID NO: 484312 - DNA, 15 bp, Homo sapiens
agaatgaaactaagg

SEQ ID NO: 484313 - DNA, 15 bp, Homo sapiens
aagaatgaaactaag

SEQ ID NO: 484314 - DNA, 15 bp, Homo sapiens
aaagaatgaaactaa

SEQ ID NO: 484315 - DNA, 15 bp, Homo sapiens
aaaagaatgaaacta

SEQ ID NO: 484316 - DNA, 15 bp, Homo sapiens
caaaagaatgaaact

SEQ ID NO: 484317 - DNA, 15 bp, Homo sapiens
acaaaagaatgaaac

SEQ ID NO: 484318 - DNA, 15 bp, Homo sapiens
cagacaaaagaatga

SEQ ID NO: 484319 - DNA, 15 bp, Homo sapiens
tcagacaaaagaatg

SEQ ID NO: 484320 - DNA, 15 bp, Homo sapiens
ctcagacaaaagaat

SEQ ID NO: 484321 - DNA, 15 bp, Homo sapiens
tctcagacaaaagaa

SEQ ID NO: 484322 - DNA, 15 bp, Homo sapiens
ttctcagacaaaaga

SEQ ID NO: 484323 - DNA, 15 bp, Homo sapiens
cttctcagacaaaag

SEQ ID NO: 484324 - DNA, 15 bp, Homo sapiens
tcttctcagacaaaa

SEQ ID NO: 484325 - DNA, 15 bp, Homo sapiens
gtcttctcagacaaa

SEQ ID NO: 484326 - DNA, 15 bp, Homo sapiens
agtcttctcagacaa

SEQ ID NO: 484327 - DNA, 15 bp, Homo sapiens
tagtcttctcagaca

SEQ ID NO: 484328 - DNA, 15 bp, Homo sapiens
ttagtcttctcagac

SEQ ID NO: 484329 - DNA, 15 bp, Homo sapiens
tttagtcttctcaga

SEQ ID NO: 484330 - DNA, 15 bp, Homo sapiens
gtttagtcttctcag

SEQ ID NO: 484331 - DNA, 15 bp, Homo sapiens
cgtttagtcttctca

SEQ ID NO: 484332 - DNA, 15 bp, Homo sapiens
tcgtttagtcttctc

SEQ ID NO: 484333 - DNA, 15 bp, Homo sapiens
atcgtttagtcttct

SEQ ID NO: 484334 - DNA, 15 bp, Homo sapiens
tatcgtttagtcttc

SEQ ID NO: 484335 - DNA, 15 bp, Homo sapiens
gtatcgtttagtctt

SEQ ID NO: 484336 - DNA, 15 bp, Homo sapiens
ggtatcgtttagtct

SEQ ID NO: 484337 - DNA, 15 bp, Homo sapiens
aggtatcgtttagtc

SEQ ID NO: 484338 - DNA, 15 bp, Homo sapiens
gaggtatcgtttagt

SEQ ID NO: 484339 - DNA, 15 bp, Homo sapiens
agaggtatcgtttag

SEQ ID NO: 484340 - DNA, 15 bp, Homo sapiens
cagaggtatcgttta

SEQ ID NO: 484341 - DNA, 15 bp, Homo sapiens
acagaggtatcgttt

SEQ ID NO: 484342 - DNA, 15 bp, Homo sapiens
aacagaggtatcgtt

SEQ ID NO: 484343 - DNA, 15 bp, Homo sapiens
taacagaggtatcgt

SEQ ID NO: 484344 - DNA, 15 bp, Homo sapiens
ataacagaggtatcg

SEQ ID NO: 484345 - DNA, 15 bp, Homo sapiens
aataacagaggtatc

SEQ ID NO: 484346 - DNA, 15 bp, Homo sapiens
taataacagaggtat

SEQ ID NO: 484347 - DNA, 15 bp, Homo sapiens
ataataacagaggta

SEQ ID NO: 484348 - DNA, 15 bp, Homo sapiens
aataataacagaggt

SEQ ID NO: 484349 - DNA, 15 bp, Homo sapiens
taataataacagagg

SEQ ID NO: 484350 - DNA, 15 bp, Homo sapiens
ttaataataacagag

SEQ ID NO: 484351 - DNA, 15 bp, Homo sapiens
tttaataataacaga

SEQ ID NO: 484352 - DNA, 15 bp, Homo sapiens
gtttaataataacag

SEQ ID NO: 484353 - DNA, 15 bp, Homo sapiens
cgtttaataataaca

SEQ ID NO: 484354 - DNA, 15 bp, Homo sapiens
acgtttaataataac

SEQ ID NO: 484355 - DNA, 15 bp, Homo sapiens
tacgtttaataataa

SEQ ID NO: 484356 - DNA, 15 bp, Homo sapiens
ctacgtttaataata

SEQ ID NO: 484357 - DNA, 15 bp, Homo sapiens
actacgtttaataat

SEQ ID NO: 484358 - DNA, 15 bp, Homo sapiens
aactacgtttaataa

SEQ ID NO: 484359 - DNA, 15 bp, Homo sapiens
aaactacgtttaata

SEQ ID NO: 484360 - DNA, 15 bp, Homo sapiens
gaaactacgtttaat

SEQ ID NO: 484361 - DNA, 15 bp, Homo sapiens
agaaactacgtttaa

SEQ ID NO: 484362 - DNA, 15 bp, Homo sapiens
gagaaactacgttta

SEQ ID NO: 484363 - DNA, 15 bp, Homo sapiens
agagaaactacgttt

SEQ ID NO: 484364 - DNA, 15 bp, Homo sapiens
tagagaaactacgtt

SEQ ID NO: 484365 - DNA, 15 bp, Homo sapiens
ttagagaaactacgt

SEQ ID NO: 484366 - DNA, 15 bp, Homo sapiens
attagagaaactacg

SEQ ID NO: 484367 - DNA, 15 bp, Homo sapiens
tattagagaaactac

SEQ ID NO: 484368 - DNA, 15 bp, Homo sapiens
atattagagaaacta

SEQ ID NO: 484369 - DNA, 15 bp, Homo sapiens
aatattagagaaact

SEQ ID NO: 484370 - DNA, 15 bp, Homo sapiens
gaatattagagaaac

SEQ ID NO: 484371 - DNA, 15 bp, Homo sapiens
tgaatattagagaaa

SEQ ID NO: 484372 - DNA, 15 bp, Homo sapiens
gtgaatattagagaa

SEQ ID NO: 484373 - DNA, 15 bp, Homo sapiens
agtgaatattagaga

SEQ ID NO: 484374 - DNA, 15 bp, Homo sapiens
tagtgaatattagag

SEQ ID NO: 484375 - DNA, 15 bp, Homo sapiens
gtagtgaatattaga

SEQ ID NO: 484376 - DNA, 15 bp, Homo sapiens
tgtagtgaatattag

SEQ ID NO: 484377 - DNA, 15 bp, Homo sapiens
ttgtagtgaatatta

SEQ ID NO: 484378 - DNA, 15 bp, Homo sapiens
cttgtagtgaatatt

SEQ ID NO: 484379 - DNA, 15 bp, Homo sapiens
ccttgtagtgaatat

SEQ ID NO: 484380 - DNA, 15 bp, Homo sapiens
tccttgtagtgaata

SEQ ID NO: 484381 - DNA, 15 bp, Homo sapiens
atccttgtagtgaat

SEQ ID NO: 484382 - DNA, 15 bp, Homo sapiens
aatccttgtagtgaa

SEQ ID NO: 484383 - DNA, 15 bp, Homo sapiens
caatccttgtagtga

SEQ ID NO: 484384 - DNA, 15 bp, Homo sapiens
gcaatccttgtagtg

SEQ ID NO: 484385 - DNA, 15 bp, Homo sapiens
ggcaatccttgtagt

SEQ ID NO: 484386 - DNA, 15 bp, Homo sapiens
gggcaatccttgtag

SEQ ID NO: 484387 - DNA, 15 bp, Homo sapiens
agggcaatccttgta

SEQ ID NO: 484388 - DNA, 15 bp, Homo sapiens
tagggcaatccttgt

SEQ ID NO: 484389 - DNA, 15 bp, Homo sapiens
gtagggcaatccttg

SEQ ID NO: 484390 - DNA, 15 bp, Homo sapiens
agtagggcaatcctt

SEQ ID NO: 484391 - DNA, 15 bp, Homo sapiens
aagtagggcaatcct

SEQ ID NO: 484392 - DNA, 15 bp, Homo sapiens
caagtagggcaatcc

SEQ ID NO: 484393 - DNA, 15 bp, Homo sapiens
tcaagtagggcaatc

SEQ ID NO: 484394 - DNA, 15 bp, Homo sapiens
ctcaagtagggcaat

SEQ ID NO: 484395 - DNA, 15 bp, Homo sapiens
actcaagtagggcaa

SEQ ID NO: 484396 - DNA, 15 bp, Homo sapiens
aactcaagtagggca

SEQ ID NO: 484397 - DNA, 15 bp, Homo sapiens
gaactcaagtagggc

SEQ ID NO: 484398 - DNA, 15 bp, Homo sapiens
tgaactcaagtaggg

SEQ ID NO: 484399 - DNA, 15 bp, Homo sapiens
atgaactcaagtagg

SEQ ID NO: 484400 - DNA, 15 bp, Homo sapiens
gatgaactcaagtag

SEQ ID NO: 484401 - DNA, 15 bp, Homo sapiens
tgatgaactcaagta

SEQ ID NO: 484402 - DNA, 15 bp, Homo sapiens
gtgatgaactcaagt

SEQ ID NO: 484403 - DNA, 15 bp, Homo sapiens
agtgatgaactcaag

SEQ ID NO: 484404 - DNA, 15 bp, Homo sapiens
aagtgatgaactcaa

SEQ ID NO: 484405 - DNA, 15 bp, Homo sapiens
aaagtgatgaactca

SEQ ID NO: 484406 - DNA, 15 bp, Homo sapiens
aaaagtgatgaactc

SEQ ID NO: 484407 - DNA, 15 bp, Homo sapiens
taaaagtgatgaact

SEQ ID NO: 484408 - DNA, 15 bp, Homo sapiens
ataaaagtgatgaac

SEQ ID NO: 484409 - DNA, 15 bp, Homo sapiens
tataaaagtgatgaa

SEQ ID NO: 484410 - DNA, 15 bp, Homo sapiens
ctataaaagtgatga

SEQ ID NO: 484411 - DNA, 15 bp, Homo sapiens
actataaaagtgatg

SEQ ID NO: 484412 - DNA, 15 bp, Homo sapiens
cactataaaagtgat

SEQ ID NO: 484413 - DNA, 15 bp, Homo sapiens
acactataaaagtga

SEQ ID NO: 484414 - DNA, 15 bp, Homo sapiens
cacactataaaagtg

SEQ ID NO: 484415 - DNA, 15 bp, Homo sapiens
acacactataaaagt

SEQ ID NO: 484416 - DNA, 15 bp, Homo sapiens
aacacactataaaag

SEQ ID NO: 484417 - DNA, 15 bp, Homo sapiens
taacacactataaaa

SEQ ID NO: 484418 - DNA, 15 bp, Homo sapiens
ataacacactataaa

SEQ ID NO: 484419 - DNA, 15 bp, Homo sapiens
aataacacactataa

SEQ ID NO: 484420 - DNA, 15 bp, Homo sapiens
aaataacacactata

SEQ ID NO: 484421 - DNA, 15 bp, Homo sapiens
caaataacacactat

SEQ ID NO: 484422 - DNA, 15 bp, Homo sapiens
gcaaataacacacta

SEQ ID NO: 484423 - DNA, 15 bp, Homo sapiens
tgcaaataacacact

SEQ ID NO: 484424 - DNA, 15 bp, Homo sapiens
atgcaaataacacac

SEQ ID NO: 484425 - DNA, 15 bp, Homo sapiens
catgcaaataacaca

SEQ ID NO: 484426 - DNA, 15 bp, Homo sapiens
acatgcaaataacac

SEQ ID NO: 484427 - DNA, 15 bp, Homo sapiens
tacatgcaaataaca

SEQ ID NO: 484428 - DNA, 15 bp, Homo sapiens
gtacatgcaaataac

SEQ ID NO: 484429 - DNA, 15 bp, Homo sapiens
agtacatgcaaataa

SEQ ID NO: 484430 - DNA, 15 bp, Homo sapiens
aagtacatgcaaata

SEQ ID NO: 484431 - DNA, 15 bp, Homo sapiens
taagtacatgcaaat

SEQ ID NO: 484432 - DNA, 15 bp, Homo sapiens
ctaagtacatgcaaa

SEQ ID NO: 484433 - DNA, 15 bp, Homo sapiens
cctaagtacatgcaa

SEQ ID NO: 484434 - DNA, 15 bp, Homo sapiens
ccctaagtacatgca

SEQ ID NO: 484435 - DNA, 15 bp, Homo sapiens
accctaagtacatgc

SEQ ID NO: 484436 - DNA, 15 bp, Homo sapiens
taccctaagtacatg

SEQ ID NO: 484437 - DNA, 15 bp, Homo sapiens
ataccctaagtacat

SEQ ID NO: 484438 - DNA, 15 bp, Homo sapiens
cataccctaagtaca

SEQ ID NO: 484439 - DNA, 15 bp, Homo sapiens
acataccctaagtac

SEQ ID NO: 484440 - DNA, 15 bp, Homo sapiens
cacataccctaagta

SEQ ID NO: 484441 - DNA, 15 bp, Homo sapiens
acacataccctaagt

SEQ ID NO: 484442 - DNA, 15 bp, Homo sapiens
gacacataccctaag

SEQ ID NO: 484443 - DNA, 15 bp, Homo sapiens
ggacacataccctaa

SEQ ID NO: 484444 - DNA, 15 bp, Homo sapiens
tggacacatacccta

SEQ ID NO: 484445 - DNA, 15 bp, Homo sapiens
atggacacataccct

SEQ ID NO: 484446 - DNA, 15 bp, Homo sapiens
tatggacacataccc

SEQ ID NO: 484447 - DNA, 15 bp, Homo sapiens
atatggacacatacc

SEQ ID NO: 484448 - DNA, 15 bp, Homo sapiens
tatatggacacatac

SEQ ID NO: 484449 - DNA, 15 bp, Homo sapiens
ctatatggacacata

SEQ ID NO: 484450 - DNA, 15 bp, Homo sapiens
actatatggacacat

SEQ ID NO: 484451 - DNA, 15 bp, Homo sapiens
cactatatggacaca

SEQ ID NO: 484452 - DNA, 15 bp, Homo sapiens
gcactatatggacac

SEQ ID NO: 484453 - DNA, 15 bp, Homo sapiens
agcactatatggaca

SEQ ID NO: 484454 - DNA, 15 bp, Homo sapiens
tagcactatatggac

SEQ ID NO: 484455 - DNA, 15 bp, Homo sapiens
gtagcactatatgga

SEQ ID NO: 484456 - DNA, 15 bp, Homo sapiens
agtagcactatatgg

SEQ ID NO: 484457 - DNA, 15 bp, Homo sapiens
cagtagcactatatg

SEQ ID NO: 484458 - DNA, 15 bp, Homo sapiens
tcagtagcactatat

SEQ ID NO: 484459 - DNA, 15 bp, Homo sapiens
ttcagtagcactata

SEQ ID NO: 484460 - DNA, 15 bp, Homo sapiens
tttcagtagcactat

SEQ ID NO: 484461 - DNA, 15 bp, Homo sapiens
atttcagtagcacta

SEQ ID NO: 484462 - DNA, 15 bp, Homo sapiens
aatttcagtagcact

SEQ ID NO: 484463 - DNA, 15 bp, Homo sapiens
taatttcagtagcac

SEQ ID NO: 484464 - DNA, 15 bp, Homo sapiens
ataatttcagtagca

SEQ ID NO: 484465 - DNA, 15 bp, Homo sapiens
gataatttcagtagc

SEQ ID NO: 484466 - DNA, 15 bp, Homo sapiens
agataatttcagtag

SEQ ID NO: 484467 - DNA, 15 bp, Homo sapiens
tagataatttcagta

SEQ ID NO: 484468 - DNA, 15 bp, Homo sapiens
ctagataatttcagt

SEQ ID NO: 484469 - DNA, 15 bp, Homo sapiens
actagataatttcag

SEQ ID NO: 484470 - DNA, 15 bp, Homo sapiens
tactagataatttca

SEQ ID NO: 484471 - DNA, 15 bp, Homo sapiens
ttactagataatttc

SEQ ID NO: 484472 - DNA, 15 bp, Homo sapiens
gttactagataattt

SEQ ID NO: 484473 - DNA, 15 bp, Homo sapiens
agttactagataatt

SEQ ID NO: 484474 - DNA, 15 bp, Homo sapiens
gagttactagataat

SEQ ID NO: 484475 - DNA, 15 bp, Homo sapiens
tgagttactagataa

SEQ ID NO: 484476 - DNA, 15 bp, Homo sapiens
atgagttactagata

SEQ ID NO: 484477 - DNA, 15 bp, Homo sapiens
aatgagttactagat

SEQ ID NO: 484478 - DNA, 15 bp, Homo sapiens
aaatgagttactaga

SEQ ID NO: 484479 - DNA, 15 bp, Homo sapiens
aaaatgagttactag

SEQ ID NO: 484480 - DNA, 15 bp, Homo sapiens
taaaatgagttacta

SEQ ID NO: 484481 - DNA, 15 bp, Homo sapiens
ttaaaatgagttact

SEQ ID NO: 484482 - DNA, 15 bp, Homo sapiens
cttaaaatgagttac

SEQ ID NO: 484483 - DNA, 15 bp, Homo sapiens
acttaaaatgagtta

SEQ ID NO: 484484 - DNA, 15 bp, Homo sapiens
tacttaaaatgagtt

SEQ ID NO: 484485 - DNA, 15 bp, Homo sapiens
atacttaaaatgagt

SEQ ID NO: 484486 - DNA, 15 bp, Homo sapiens
aatacttaaaatgag

SEQ ID NO: 484487 - DNA, 15 bp, Homo sapiens
aaatacttaaaatga

SEQ ID NO: 484488 - DNA, 15 bp, Homo sapiens
aaaatacttaaaatg

SEQ ID NO: 484489 - DNA, 15 bp, Homo sapiens
taaaatacttaaaat

SEQ ID NO: 484490 - DNA, 15 bp, Homo sapiens
ctaaaatacttaaaa

SEQ ID NO: 484491 - DNA, 15 bp, Homo sapiens
tctaaaatacttaaa

SEQ ID NO: 484492 - DNA, 15 bp, Homo sapiens
ttctaaaatacttaa

SEQ ID NO: 484493 - DNA, 15 bp, Homo sapiens
gttctaaaatactta

SEQ ID NO: 484494 - DNA, 15 bp, Homo sapiens
tgttctaaaatactt

SEQ ID NO: 484495 - DNA, 15 bp, Homo sapiens
ctgttctaaaatact

SEQ ID NO: 484496 - DNA, 15 bp, Homo sapiens
actgttctaaaatac

SEQ ID NO: 484497 - DNA, 15 bp, Homo sapiens
aactgttctaaaata

SEQ ID NO: 484498 - DNA, 15 bp, Homo sapiens
aaactgttctaaaat

SEQ ID NO: 484499 - DNA, 15 bp, Homo sapiens
aaaactgttctaaaa

SEQ ID NO: 484500 - DNA, 15 bp, Homo sapiens
gaaaactgttctaaa

SEQ ID NO: 484501 - DNA, 15 bp, Homo sapiens
tgaaaactgttctaa

SEQ ID NO: 484502 - DNA, 15 bp, Homo sapiens
ttgaaaactgttcta

SEQ ID NO: 484503 - DNA, 15 bp, Homo sapiens
tttgaaaactgttct

SEQ ID NO: 484504 - DNA, 15 bp, Homo sapiens
ctttgaaaactgttc

SEQ ID NO: 484505 - DNA, 15 bp, Homo sapiens
tctttgaaaactgtt

SEQ ID NO: 484506 - DNA, 15 bp, Homo sapiens
ttctttgaaaactgt

SEQ ID NO: 484507 - DNA, 15 bp, Homo sapiens
attctttgaaaactg

SEQ ID NO: 484508 - DNA, 15 bp, Homo sapiens
aattctttgaaaact

SEQ ID NO: 484509 - DNA, 15 bp, Homo sapiens
aaattctttgaaaac

SEQ ID NO: 484510 - DNA, 15 bp, Homo sapiens
aaaattctttgaaaa

SEQ ID NO: 484511 - DNA, 15 bp, Homo sapiens
caaaattctttgaaa

SEQ ID NO: 484512 - DNA, 15 bp, Homo sapiens
gcaaaattctttgaa

SEQ ID NO: 484513 - DNA, 15 bp, Homo sapiens
ggcaaaattctttga

SEQ ID NO: 484514 - DNA, 15 bp, Homo sapiens
tggcaaaattctttg

SEQ ID NO: 484515 - DNA, 15 bp, Homo sapiens
ctggcaaaattcttt

SEQ ID NO: 484516 - DNA, 15 bp, Homo sapiens
cctggcaaaattctt

SEQ ID NO: 484517 - DNA, 15 bp, Homo sapiens
tcctggcaaaattct

SEQ ID NO: 484518 - DNA, 15 bp, Homo sapiens
ttcctggcaaaattc

SEQ ID NO: 484519 - DNA, 15 bp, Homo sapiens
cttcctggcaaaatt

SEQ ID NO: 484520 - DNA, 15 bp, Homo sapiens
ccttcctggcaaaat

SEQ ID NO: 484521 - DNA, 15 bp, Homo sapiens
accttcctggcaaaa

SEQ ID NO: 484522 - DNA, 15 bp, Homo sapiens
taccttcctggcaaa

SEQ ID NO: 484523 - DNA, 15 bp, Homo sapiens
ttaccttcctggcaa

SEQ ID NO: 484524 - DNA, 15 bp, Homo sapiens
cttaccttcctggca

SEQ ID NO: 484525 - DNA, 15 bp, Homo sapiens
ccttaccttcctggc

SEQ ID NO: 484526 - DNA, 15 bp, Homo sapiens
gccttaccttcctgg

SEQ ID NO: 484527 - DNA, 15 bp, Homo sapiens
agccttaccttcctg

SEQ ID NO: 484528 - DNA, 15 bp, Homo sapiens
gagccttaccttcct

SEQ ID NO: 484529 - DNA, 15 bp, Homo sapiens
agagccttaccttcc

SEQ ID NO: 484530 - DNA, 15 bp, Homo sapiens
gagagccttaccttc

SEQ ID NO: 484531 - DNA, 15 bp, Homo sapiens
cgagagccttacctt

SEQ ID NO: 484532 - DNA, 15 bp, Homo sapiens
gcgagagccttacct

SEQ ID NO: 484533 - DNA, 15 bp, Homo sapiens
tgcgagagccttacc

SEQ ID NO: 484534 - DNA, 15 bp, Homo sapiens
atgcgagagccttac

SEQ ID NO: 484535 - DNA, 15 bp, Homo sapiens
tatgcgagagcctta

SEQ ID NO: 484536 - DNA, 15 bp, Homo sapiens
atatgcgagagcctt

SEQ ID NO: 484537 - DNA, 15 bp, Homo sapiens
tatatgcgagagcct

SEQ ID NO: 484538 - DNA, 15 bp, Homo sapiens
gtatatgcgagagcc

SEQ ID NO: 484539 - DNA, 15 bp, Homo sapiens
ggtatatgcgagagc

SEQ ID NO: 484540 - DNA, 15 bp, Homo sapiens
tggtatatgcgagag

SEQ ID NO: 484541 - DNA, 15 bp, Homo sapiens
atggtatatgcgaga

SEQ ID NO: 484542 - DNA, 15 bp, Homo sapiens
gatggtatatgcgag

SEQ ID NO: 484543 - DNA, 15 bp, Homo sapiens
agatggtatatgcga

SEQ ID NO: 484544 - DNA, 15 bp, Homo sapiens
tagatggtatatgcg

SEQ ID NO: 484545 - DNA, 15 bp, Homo sapiens
atagatggtatatgc

SEQ ID NO: 484546 - DNA, 15 bp, Homo sapiens
tatagatggtatatg

SEQ ID NO: 484547 - DNA, 15 bp, Homo sapiens
ctatagatggtatat

SEQ ID NO: 484548 - DNA, 15 bp, Homo sapiens
actatagatggtata

SEQ ID NO: 484549 - DNA, 15 bp, Homo sapiens
cactatagatggtat

SEQ ID NO: 484550 - DNA, 15 bp, Homo sapiens
tcactatagatggta

SEQ ID NO: 484551 - DNA, 15 bp, Homo sapiens
ttcactatagatggt

SEQ ID NO: 484552 - DNA, 15 bp, Homo sapiens
tttcactatagatgg

SEQ ID NO: 484553 - DNA, 15 bp, Homo sapiens
atttcactatagatg

SEQ ID NO: 484554 - DNA, 15 bp, Homo sapiens
aatttcactatagat

SEQ ID NO: 484555 - DNA, 15 bp, Homo sapiens
caatttcactataga

SEQ ID NO: 484556 - DNA, 15 bp, Homo sapiens
ccaatttcactatag

SEQ ID NO: 484557 - DNA, 15 bp, Homo sapiens
gccaatttcactata

SEQ ID NO: 484558 - DNA, 15 bp, Homo sapiens
tgccaatttcactat

SEQ ID NO: 484559 - DNA, 15 bp, Homo sapiens
gtgccaatttcacta

SEQ ID NO: 484560 - DNA, 15 bp, Homo sapiens
ggtgccaatttcact

SEQ ID NO: 484561 - DNA, 15 bp, Homo sapiens
tggtgccaatttcac

SEQ ID NO: 484562 - DNA, 15 bp, Homo sapiens
atggtgccaatttca

SEQ ID NO: 484563 - DNA, 15 bp, Homo sapiens
catggtgccaatttc

SEQ ID NO: 484564 - DNA, 15 bp, Homo sapiens
tcatggtgccaattt

SEQ ID NO: 484565 - DNA, 15 bp, Homo sapiens
gtcatggtgccaatt

SEQ ID NO: 484566 - DNA, 15 bp, Homo sapiens
tgtcatggtgccaat

SEQ ID NO: 484567 - DNA, 15 bp, Homo sapiens
ttgtcatggtgccaa

SEQ ID NO: 484568 - DNA, 15 bp, Homo sapiens
gttgtcatggtgcca

SEQ ID NO: 484569 - DNA, 15 bp, Homo sapiens
agttgtcatggtgcc

SEQ ID NO: 484570 - DNA, 15 bp, Homo sapiens
cagttgtcatggtgc

SEQ ID NO: 484571 - DNA, 15 bp, Homo sapiens
ccagttgtcatggtg

SEQ ID NO: 484572 - DNA, 15 bp, Homo sapiens
accagttgtcatggt

SEQ ID NO: 484573 - DNA, 15 bp, Homo sapiens
taccagttgtcatgg

SEQ ID NO: 484574 - DNA, 15 bp, Homo sapiens
ttaccagttgtcatg

SEQ ID NO: 484575 - DNA, 15 bp, Homo sapiens
attaccagttgtcat

SEQ ID NO: 484576 - DNA, 15 bp, Homo sapiens
aattaccagttgtca

SEQ ID NO: 484577 - DNA, 15 bp, Homo sapiens
gaattaccagttgtc

SEQ ID NO: 484578 - DNA, 15 bp, Homo sapiens
agaattaccagttgt

SEQ ID NO: 484579 - DNA, 15 bp, Homo sapiens
tagaattaccagttg

SEQ ID NO: 484580 - DNA, 15 bp, Homo sapiens
ctagaattaccagtt

SEQ ID NO: 484581 - DNA, 15 bp, Homo sapiens
cctagaattaccagt

SEQ ID NO: 484582 - DNA, 15 bp, Homo sapiens
tcctagaattaccag

SEQ ID NO: 484583 - DNA, 15 bp, Homo sapiens
ctcctagaattacca

SEQ ID NO: 484584 - DNA, 15 bp, Homo sapiens
cctcctagaattacc

SEQ ID NO: 484585 - DNA, 15 bp, Homo sapiens
gcctcctagaattac

SEQ ID NO: 484586 - DNA, 15 bp, Homo sapiens
agcctcctagaatta

SEQ ID NO: 484587 - DNA, 15 bp, Homo sapiens
gagcctcctagaatt

SEQ ID NO: 484588 - DNA, 15 bp, Homo sapiens
agagcctcctagaat

SEQ ID NO: 484589 - DNA, 15 bp, Homo sapiens
aagagcctcctagaa

SEQ ID NO: 484590 - DNA, 15 bp, Homo sapiens
taagagcctcctaga

SEQ ID NO: 484591 - DNA, 15 bp, Homo sapiens
ttaagagcctcctag

SEQ ID NO: 484592 - DNA, 15 bp, Homo sapiens
tttaagagcctccta

SEQ ID NO: 484593 - DNA, 15 bp, Homo sapiens
ttttaagagcctcct

SEQ ID NO: 484594 - DNA, 15 bp, Homo sapiens
attttaagagcctcc

SEQ ID NO: 484595 - DNA, 15 bp, Homo sapiens
aattttaagagcctc

SEQ ID NO: 484596 - DNA, 15 bp, Homo sapiens
aaattttaagagcct

SEQ ID NO: 484597 - DNA, 15 bp, Homo sapiens
aaaattttaagagcc

SEQ ID NO: 484598 - DNA, 15 bp, Homo sapiens
aaaaattttaagagc

SEQ ID NO: 484599 - DNA, 15 bp, Homo sapiens
aaaaaattttaagag

SEQ ID NO: 484600 - DNA, 15 bp, Homo sapiens
aaaaaaattttaaga

SEQ ID NO: 484601 - DNA, 15 bp, Homo sapiens
taaaaaaattttaag

SEQ ID NO: 484602 - DNA, 15 bp, Homo sapiens
ttaaaaaaattttaa

SEQ ID NO: 484603 - DNA, 15 bp, Homo sapiens
tttaaaaaaatttta

SEQ ID NO: 484604 - DNA, 15 bp, Homo sapiens
atttaaaaaaatttt

SEQ ID NO: 484605 - DNA, 15 bp, Homo sapiens
tatttaaaaaaattt

SEQ ID NO: 484606 - DNA, 15 bp, Homo sapiens
atatttaaaaaaatt

SEQ ID NO: 484607 - DNA, 15 bp, Homo sapiens
gatatttaaaaaaat

SEQ ID NO: 484608 - DNA, 15 bp, Homo sapiens
tgatatttaaaaaaa

SEQ ID NO: 484609 - DNA, 15 bp, Homo sapiens
gtgatatttaaaaaa

SEQ ID NO: 484610 - DNA, 15 bp, Homo sapiens
ggtgatatttaaaaa

SEQ ID NO: 484611 - DNA, 15 bp, Homo sapiens
aggtgatatttaaaa

SEQ ID NO: 484612 - DNA, 15 bp, Homo sapiens
taggtgatatttaaa

SEQ ID NO: 484613 - DNA, 15 bp, Homo sapiens
ctaggtgatatttaa

SEQ ID NO: 484614 - DNA, 15 bp, Homo sapiens
cctaggtgatattta

SEQ ID NO: 484615 - DNA, 15 bp, Homo sapiens
acctaggtgatattt

SEQ ID NO: 484616 - DNA, 15 bp, Homo sapiens
cacctaggtgatatt

SEQ ID NO: 484617 - DNA, 15 bp, Homo sapiens
tcacctaggtgatat

SEQ ID NO: 484618 - DNA, 15 bp, Homo sapiens
atcacctaggtgata

SEQ ID NO: 484619 - DNA, 15 bp, Homo sapiens
aatcacctaggtgat

SEQ ID NO: 484620 - DNA, 15 bp, Homo sapiens
caatcacctaggtga

SEQ ID NO: 484621 - DNA, 15 bp, Homo sapiens
tcaatcacctaggtg

SEQ ID NO: 484622 - DNA, 15 bp, Homo sapiens
ttcaatcacctaggt

SEQ ID NO: 484623 - DNA, 15 bp, Homo sapiens
tttcaatcacctagg

SEQ ID NO: 484624 - DNA, 15 bp, Homo sapiens
ttttcaatcacctag

SEQ ID NO: 484625 - DNA, 15 bp, Homo sapiens
tttttcaatcaccta

SEQ ID NO: 484626 - DNA, 15 bp, Homo sapiens
ttttttcaatcacct

SEQ ID NO: 484627 - DNA, 15 bp, Homo sapiens
tttttttcaatcacc

SEQ ID NO: 484628 - DNA, 15 bp, Homo sapiens
ttttttttcaatcac

SEQ ID NO: 484629 - DNA, 15 bp, Homo sapiens
tttttttttcaatca

SEQ ID NO: 484630 - DNA, 15 bp, Homo sapiens
ttttttttttcaatc

SEQ ID NO: 484631 - DNA, 15 bp, Homo sapiens
cttttttttttcaat

SEQ ID NO: 484632 - DNA, 15 bp, Homo sapiens
tcttttttttttcaa

SEQ ID NO: 484633 - DNA, 15 bp, Homo sapiens
ttcttttttttttca

SEQ ID NO: 484634 - DNA, 15 bp, Homo sapiens
gttcttttttttttc

SEQ ID NO: 484635 - DNA, 15 bp, Homo sapiens
agttctttttttttt

SEQ ID NO: 484636 - DNA, 15 bp, Homo sapiens
cagttcttttttttt

SEQ ID NO: 484637 - DNA, 15 bp, Homo sapiens
tcagttctttttttt

SEQ ID NO: 484638 - DNA, 15 bp, Homo sapiens
ctcagttcttttttt

SEQ ID NO: 484639 - DNA, 15 bp, Homo sapiens
actcagttctttttt

SEQ ID NO: 484640 - DNA, 15 bp, Homo sapiens
tactcagttcttttt

SEQ ID NO: 484641 - DNA, 15 bp, Homo sapiens
atactcagttctttt

SEQ ID NO: 484642 - DNA, 15 bp, Homo sapiens
aatactcagttcttt

SEQ ID NO: 484643 - DNA, 15 bp, Homo sapiens
taatactcagttctt

SEQ ID NO: 484644 - DNA, 15 bp, Homo sapiens
ttaatactcagttct

SEQ ID NO: 484645 - DNA, 15 bp, Homo sapiens
attaatactcagttc

SEQ ID NO: 484646 - DNA, 15 bp, Homo sapiens
gattaatactcagtt

SEQ ID NO: 484647 - DNA, 15 bp, Homo sapiens
ggattaatactcagt

SEQ ID NO: 484648 - DNA, 15 bp, Homo sapiens
aggattaatactcag

SEQ ID NO: 484649 - DNA, 15 bp, Homo sapiens
taggattaatactca

SEQ ID NO: 484650 - DNA, 15 bp, Homo sapiens
ctaggattaatactc

SEQ ID NO: 484651 - DNA, 15 bp, Homo sapiens
cctaggattaatact

SEQ ID NO: 484652 - DNA, 15 bp, Homo sapiens
ccctaggattaatac

SEQ ID NO: 484653 - DNA, 15 bp, Homo sapiens
accctaggattaata

SEQ ID NO: 484654 - DNA, 15 bp, Homo sapiens
aaccctaggattaat

SEQ ID NO: 484655 - DNA, 15 bp, Homo sapiens
aaaccctaggattaa

SEQ ID NO: 484656 - DNA, 15 bp, Homo sapiens
aaaaccctaggatta

SEQ ID NO: 484657 - DNA, 15 bp, Homo sapiens
taaaaccctaggatt

SEQ ID NO: 484658 - DNA, 15 bp, Homo sapiens
gtaaaaccctaggat

SEQ ID NO: 484659 - DNA, 15 bp, Homo sapiens
agtaaaaccctagga

SEQ ID NO: 484660 - DNA, 15 bp, Homo sapiens
cagtaaaaccctagg

SEQ ID NO: 484661 - DNA, 15 bp, Homo sapiens
tcagtaaaaccctag

SEQ ID NO: 484662 - DNA, 15 bp, Homo sapiens
ttcagtaaaacccta

SEQ ID NO: 484663 - DNA, 15 bp, Homo sapiens
tttcagtaaaaccct

SEQ ID NO: 484664 - DNA, 15 bp, Homo sapiens
atttcagtaaaaccc

SEQ ID NO: 484665 - DNA, 15 bp, Homo sapiens
aatttcagtaaaacc

SEQ ID NO: 484666 - DNA, 15 bp, Homo sapiens
aaatttcagtaaaac

SEQ ID NO: 484667 - DNA, 15 bp, Homo sapiens
gaaatttcagtaaaa

SEQ ID NO: 484668 - DNA, 15 bp, Homo sapiens
tgaaatttcagtaaa

SEQ ID NO: 484669 - DNA, 15 bp, Homo sapiens
ttgaaatttcagtaa

SEQ ID NO: 484670 - DNA, 15 bp, Homo sapiens
attgaaatttcagta

SEQ ID NO: 484671 - DNA, 15 bp, Homo sapiens
tattgaaatttcagt

SEQ ID NO: 484672 - DNA, 15 bp, Homo sapiens
atattgaaatttcag

SEQ ID NO: 484673 - DNA, 15 bp, Homo sapiens
catattgaaatttca

SEQ ID NO: 484674 - DNA, 15 bp, Homo sapiens
gcatattgaaatttc

SEQ ID NO: 484675 - DNA, 15 bp, Homo sapiens
tgcatattgaaattt

SEQ ID NO: 484676 - DNA, 15 bp, Homo sapiens
ctgcatattgaaatt

SEQ ID NO: 484677 - DNA, 15 bp, Homo sapiens
actgcatattgaaat

SEQ ID NO: 484678 - DNA, 15 bp, Homo sapiens
aactgcatattgaaa

SEQ ID NO: 484679 - DNA, 15 bp, Homo sapiens
aaactgcatattgaa

SEQ ID NO: 484680 - DNA, 15 bp, Homo sapiens
caaactgcatattga

SEQ ID NO: 484681 - DNA, 15 bp, Homo sapiens
acaaactgcatattg

SEQ ID NO: 484682 - DNA, 15 bp, Homo sapiens
aacaaactgcatatt

SEQ ID NO: 484683 - DNA, 15 bp, Homo sapiens
aaacaaactgcatat

SEQ ID NO: 484684 - DNA, 15 bp, Homo sapiens
aaaacaaactgcata

SEQ ID NO: 484685 - DNA, 15 bp, Homo sapiens
caaaacaaactgcat

SEQ ID NO: 484686 - DNA, 15 bp, Homo sapiens
gcaaaacaaactgca

SEQ ID NO: 484687 - DNA, 15 bp, Homo sapiens
tgcaaaacaaactgc

SEQ ID NO: 484688 - DNA, 15 bp, Homo sapiens
ttgcaaaacaaactg

SEQ ID NO: 484689 - DNA, 15 bp, Homo sapiens
tttgcaaaacaaact

SEQ ID NO: 484690 - DNA, 15 bp, Homo sapiens
atttgcaaaacaaac

SEQ ID NO: 484691 - DNA, 15 bp, Homo sapiens
tatttgcaaaacaaa

SEQ ID NO: 484692 - DNA, 15 bp, Homo sapiens
atatttgcaaaacaa

SEQ ID NO: 484693 - DNA, 15 bp, Homo sapiens
aatatttgcaaaaca

SEQ ID NO: 484694 - DNA, 15 bp, Homo sapiens
aaatatttgcaaaac

SEQ ID NO: 484695 - DNA, 15 bp, Homo sapiens
aaaatatttgcaaaa

SEQ ID NO: 484696 - DNA, 15 bp, Homo sapiens
aaaaatatttgcaaa

SEQ ID NO: 484697 - DNA, 15 bp, Homo sapiens
aaaaaatatttgcaa

SEQ ID NO: 484698 - DNA, 15 bp, Homo sapiens
aaaaaaatatttgca

SEQ ID NO: 484699 - DNA, 15 bp, Homo sapiens
aaaaaaaatatttgc

SEQ ID NO: 484700 - DNA, 15 bp, Homo sapiens
aaaaaaaaatatttg

SEQ ID NO: 484701 - DNA, 15 bp, Homo sapiens
aaaaaaaaaatattt

SEQ ID NO: 484702 - DNA, 15 bp, Homo sapiens
gaaaaaaaaaatatt

SEQ ID NO: 484703 - DNA, 15 bp, Homo sapiens
tgaaaaaaaaaatat

SEQ ID NO: 484704 - DNA, 15 bp, Homo sapiens
atgaaaaaaaaaata

SEQ ID NO: 484705 - DNA, 15 bp, Homo sapiens
aatgaaaaaaaaaat

SEQ ID NO: 484706 - DNA, 15 bp, Homo sapiens
aaatgaaaaaaaaaa

SEQ ID NO: 484707 - DNA, 15 bp, Homo sapiens
aaaatgaaaaaaaaa

SEQ ID NO: 484708 - DNA, 15 bp, Homo sapiens
aaaaatgaaaaaaaa

SEQ ID NO: 484709 - DNA, 15 bp, Homo sapiens
aaaaaatgaaaaaaa

SEQ ID NO: 484710 - DNA, 15 bp, Homo sapiens
caaaaaatgaaaaaa

SEQ ID NO: 484711 - DNA, 15 bp, Homo sapiens
gcaaaaaatgaaaaa

SEQ ID NO: 484712 - DNA, 15 bp, Homo sapiens
agcaaaaaatgaaaa

SEQ ID NO: 484713 - DNA, 15 bp, Homo sapiens
cagcaaaaaatgaaa

SEQ ID NO: 484714 - DNA, 15 bp, Homo sapiens
gcagcaaaaaatgaa

SEQ ID NO: 484715 - DNA, 15 bp, Homo sapiens
agcagcaaaaaatga

SEQ ID NO: 484716 - DNA, 15 bp, Homo sapiens
aagcagcaaaaaatg

SEQ ID NO: 484717 - DNA, 15 bp, Homo sapiens
aaagcagcaaaaaat

SEQ ID NO: 484718 - DNA, 15 bp, Homo sapiens
aaaagcagcaaaaaa

SEQ ID NO: 484719 - DNA, 15 bp, Homo sapiens
caaaagcagcaaaaa

SEQ ID NO: 484720 - DNA, 15 bp, Homo sapiens
ccaaaagcagcaaaa

SEQ ID NO: 484721 - DNA, 15 bp, Homo sapiens
tccaaaagcagcaaa

SEQ ID NO: 484722 - DNA, 15 bp, Homo sapiens
ctccaaaagcagcaa

SEQ ID NO: 484723 - DNA, 15 bp, Homo sapiens
tctccaaaagcagca

SEQ ID NO: 484724 - DNA, 15 bp, Homo sapiens
ttctccaaaagcagc

SEQ ID NO: 484725 - DNA, 15 bp, Homo sapiens
tttctccaaaagcag

SEQ ID NO: 484726 - DNA, 15 bp, Homo sapiens
atttctccaaaagca

SEQ ID NO: 484727 - DNA, 15 bp, Homo sapiens
tatttctccaaaagc

SEQ ID NO: 484728 - DNA, 15 bp, Homo sapiens
gtatttctccaaaag

SEQ ID NO: 484729 - DNA, 15 bp, Homo sapiens
agtatttctccaaaa

SEQ ID NO: 484730 - DNA, 15 bp, Homo sapiens
gagtatttctccaaa

SEQ ID NO: 484731 - DNA, 15 bp, Homo sapiens
agagtatttctccaa

SEQ ID NO: 484732 - DNA, 15 bp, Homo sapiens
aagagtatttctcca

SEQ ID NO: 484733 - DNA, 15 bp, Homo sapiens
taagagtatttctcc

SEQ ID NO: 484734 - DNA, 15 bp, Homo sapiens
ctaagagtatttctc

SEQ ID NO: 484735 - DNA, 15 bp, Homo sapiens
gctaagagtatttct

SEQ ID NO: 484736 - DNA, 15 bp, Homo sapiens
agctaagagtatttc

SEQ ID NO: 484737 - DNA, 15 bp, Homo sapiens
cagctaagagtattt

SEQ ID NO: 484738 - DNA, 15 bp, Homo sapiens
ccagctaagagtatt

SEQ ID NO: 484739 - DNA, 15 bp, Homo sapiens
gccagctaagagtat

SEQ ID NO: 484740 - DNA, 15 bp, Homo sapiens
agccagctaagagta

SEQ ID NO: 484741 - DNA, 15 bp, Homo sapiens
cagccagctaagagt

SEQ ID NO: 484742 - DNA, 15 bp, Homo sapiens
tcagccagctaagag

SEQ ID NO: 484743 - DNA, 15 bp, Homo sapiens
ttcagccagctaaga

SEQ ID NO: 484744 - DNA, 15 bp, Homo sapiens
gttcagccagctaag

SEQ ID NO: 484745 - DNA, 15 bp, Homo sapiens
tgttcagccagctaa

SEQ ID NO: 484746 - DNA, 15 bp, Homo sapiens
atgttcagccagcta

SEQ ID NO: 484747 - DNA, 15 bp, Homo sapiens
catgttcagccagct

SEQ ID NO: 484748 - DNA, 15 bp, Homo sapiens
tcatgttcagccagc

SEQ ID NO: 484749 - DNA, 15 bp, Homo sapiens
ctcatgttcagccag

SEQ ID NO: 484750 - DNA, 15 bp, Homo sapiens
tctcatgttcagcca

SEQ ID NO: 484751 - DNA, 15 bp, Homo sapiens
atctcatgttcagcc

SEQ ID NO: 484752 - DNA, 15 bp, Homo sapiens
catctcatgttcagc

SEQ ID NO: 484753 - DNA, 15 bp, Homo sapiens
ccatctcatgttcag

SEQ ID NO: 484754 - DNA, 15 bp, Homo sapiens
accatctcatgttca

SEQ ID NO: 484755 - DNA, 15 bp, Homo sapiens
aaccatctcatgttc

SEQ ID NO: 484756 - DNA, 15 bp, Homo sapiens
aaaccatctcatgtt

SEQ ID NO: 484757 - DNA, 15 bp, Homo sapiens
gaaaccatctcatgt

SEQ ID NO: 484758 - DNA, 15 bp, Homo sapiens
ggaaaccatctcatg

SEQ ID NO: 484759 - DNA, 15 bp, Homo sapiens
aggaaaccatctcat

SEQ ID NO: 484760 - DNA, 15 bp, Homo sapiens
aaggaaaccatctca

SEQ ID NO: 484761 - DNA, 15 bp, Homo sapiens
gaaggaaaccatctc

SEQ ID NO: 484762 - DNA, 15 bp, Homo sapiens
tgaaggaaaccatct

SEQ ID NO: 484763 - DNA, 15 bp, Homo sapiens
atgaaggaaaccatc

SEQ ID NO: 484764 - DNA, 15 bp, Homo sapiens
catgaaggaaaccat

SEQ ID NO: 484765 - DNA, 15 bp, Homo sapiens
ccatgaaggaaacca

SEQ ID NO: 484766 - DNA, 15 bp, Homo sapiens
accatgaaggaaacc

SEQ ID NO: 484767 - DNA, 15 bp, Homo sapiens
aaccatgaaggaaac

SEQ ID NO: 484768 - DNA, 15 bp, Homo sapiens
aaaccatgaaggaaa

SEQ ID NO: 484769 - DNA, 15 bp, Homo sapiens
caaaccatgaaggaa

SEQ ID NO: 484770 - DNA, 15 bp, Homo sapiens
gcaaaccatgaagga

SEQ ID NO: 484771 - DNA, 15 bp, Homo sapiens
ggcaaaccatgaagg

SEQ ID NO: 484772 - DNA, 15 bp, Homo sapiens
aggcaaaccatgaag

SEQ ID NO: 484773 - DNA, 15 bp, Homo sapiens
caggcaaaccatgaa

SEQ ID NO: 484774 - DNA, 15 bp, Homo sapiens
acaggcaaaccatga

SEQ ID NO: 484775 - DNA, 15 bp, Homo sapiens
tacaggcaaaccatg

SEQ ID NO: 484776 - DNA, 15 bp, Homo sapiens
ctacaggcaaaccat

SEQ ID NO: 484777 - DNA, 15 bp, Homo sapiens
tctacaggcaaacca

SEQ ID NO: 484778 - DNA, 15 bp, Homo sapiens
atctacaggcaaacc

SEQ ID NO: 484779 - DNA, 15 bp, Homo sapiens
catctacaggcaaac

SEQ ID NO: 484780 - DNA, 15 bp, Homo sapiens
ccatctacaggcaaa

SEQ ID NO: 484781 - DNA, 15 bp, Homo sapiens
tccatctacaggcaa

SEQ ID NO: 484782 - DNA, 15 bp, Homo sapiens
ctccatctacaggca

SEQ ID NO: 484783 - DNA, 15 bp, Homo sapiens
tctccatctacaggc

SEQ ID NO: 484784 - DNA, 15 bp, Homo sapiens
atctccatctacagg

SEQ ID NO: 484785 - DNA, 15 bp, Homo sapiens
catctccatctacag

SEQ ID NO: 484786 - DNA, 15 bp, Homo sapiens
acatctccatctaca

SEQ ID NO: 484787 - DNA, 15 bp, Homo sapiens
aacatctccatctac

SEQ ID NO: 484788 - DNA, 15 bp, Homo sapiens
gaacatctccatcta

SEQ ID NO: 484789 - DNA, 15 bp, Homo sapiens
tgaacatctccatct

SEQ ID NO: 484790 - DNA, 15 bp, Homo sapiens
ctgaacatctccatc

SEQ ID NO: 484791 - DNA, 15 bp, Homo sapiens
tctgaacatctccat

SEQ ID NO: 484792 - DNA, 15 bp, Homo sapiens
ttctgaacatctcca

SEQ ID NO: 484793 - DNA, 15 bp, Homo sapiens
attctgaacatctcc

SEQ ID NO: 484794 - DNA, 15 bp, Homo sapiens
gattctgaacatctc

SEQ ID NO: 484795 - DNA, 15 bp, Homo sapiens
tgattctgaacatct

SEQ ID NO: 484796 - DNA, 15 bp, Homo sapiens
ctgattctgaacatc

SEQ ID NO: 484797 - DNA, 15 bp, Homo sapiens
gctgattctgaacat

SEQ ID NO: 484798 - DNA, 15 bp, Homo sapiens
agctgattctgaaca

SEQ ID NO: 484799 - DNA, 15 bp, Homo sapiens
cagctgattctgaac

SEQ ID NO: 484800 - DNA, 15 bp, Homo sapiens
tcagctgattctgaa

SEQ ID NO: 484801 - DNA, 15 bp, Homo sapiens
ttcagctgattctga

SEQ ID NO: 484802 - DNA, 15 bp, Homo sapiens
attcagctgattctg

SEQ ID NO: 484803 - DNA, 15 bp, Homo sapiens
cattcagctgattct

SEQ ID NO: 484804 - DNA, 15 bp, Homo sapiens
tcattcagctgattc

SEQ ID NO: 484805 - DNA, 15 bp, Homo sapiens
atcattcagctgatt

SEQ ID NO: 484806 - DNA, 15 bp, Homo sapiens
aatcattcagctgat

SEQ ID NO: 484807 - DNA, 15 bp, Homo sapiens
aaatcattcagctga

SEQ ID NO: 484808 - DNA, 15 bp, Homo sapiens
taaatcattcagctg

SEQ ID NO: 484809 - DNA, 15 bp, Homo sapiens
ataaatcattcagct

SEQ ID NO: 484810 - DNA, 15 bp, Homo sapiens
aataaatcattcagc

SEQ ID NO: 484811 - DNA, 15 bp, Homo sapiens
taataaatcattcag

SEQ ID NO: 484812 - DNA, 15 bp, Homo sapiens
gtaataaatcattca

SEQ ID NO: 484813 - DNA, 15 bp, Homo sapiens
agtaataaatcattc

SEQ ID NO: 484814 - DNA, 15 bp, Homo sapiens
aagtaataaatcatt

SEQ ID NO: 484815 - DNA, 15 bp, Homo sapiens
aaagtaataaatcat

SEQ ID NO: 484816 - DNA, 15 bp, Homo sapiens
caaagtaataaatca

SEQ ID NO: 484817 - DNA, 15 bp, Homo sapiens
acaaagtaataaatc

SEQ ID NO: 484818 - DNA, 15 bp, Homo sapiens
tacaaagtaataaat

SEQ ID NO: 484819 - DNA, 15 bp, Homo sapiens
ctacaaagtaataaa

SEQ ID NO: 484820 - DNA, 15 bp, Homo sapiens
tctacaaagtaataa

SEQ ID NO: 484821 - DNA, 15 bp, Homo sapiens
ttctacaaagtaata

SEQ ID NO: 484822 - DNA, 15 bp, Homo sapiens
cttctacaaagtaat

SEQ ID NO: 484823 - DNA, 15 bp, Homo sapiens
acttctacaaagtaa

SEQ ID NO: 484824 - DNA, 15 bp, Homo sapiens
tacttctacaaagta

SEQ ID NO: 484825 - DNA, 15 bp, Homo sapiens
atacttctacaaagt

SEQ ID NO: 484826 - DNA, 15 bp, Homo sapiens
aatacttctacaaag

SEQ ID NO: 484827 - DNA, 15 bp, Homo sapiens
caatacttctacaaa

SEQ ID NO: 484828 - DNA, 15 bp, Homo sapiens
ccaatacttctacaa

SEQ ID NO: 484829 - DNA, 15 bp, Homo sapiens
tccaatacttctaca

SEQ ID NO: 484830 - DNA, 15 bp, Homo sapiens
gtccaatacttctac

SEQ ID NO: 484831 - DNA, 15 bp, Homo sapiens
ggtccaatacttcta

SEQ ID NO: 484832 - DNA, 15 bp, Homo sapiens
cggtccaatacttct

SEQ ID NO: 484833 - DNA, 15 bp, Homo sapiens
ccggtccaatacttc

SEQ ID NO: 484834 - DNA, 15 bp, Homo sapiens
cccggtccaatactt

SEQ ID NO: 484835 - DNA, 15 bp, Homo sapiens
tcccggtccaatact

SEQ ID NO: 484836 - DNA, 15 bp, Homo sapiens
ttcccggtccaatac

SEQ ID NO: 484837 - DNA, 15 bp, Homo sapiens
attcccggtccaata

SEQ ID NO: 484838 - DNA, 15 bp, Homo sapiens
aattcccggtccaat

SEQ ID NO: 484839 - DNA, 15 bp, Homo sapiens
aaattcccggtccaa

SEQ ID NO: 484840 - DNA, 15 bp, Homo sapiens
taaattcccggtcca

SEQ ID NO: 484841 - DNA, 15 bp, Homo sapiens
ataaattcccggtcc

SEQ ID NO: 484842 - DNA, 15 bp, Homo sapiens
tataaattcccggtc

SEQ ID NO: 484843 - DNA, 15 bp, Homo sapiens
gtataaattcccggt

SEQ ID NO: 484844 - DNA, 15 bp, Homo sapiens
tgtataaattcccgg

SEQ ID NO: 484845 - DNA, 15 bp, Homo sapiens
atgtataaattcccg

SEQ ID NO: 484846 - DNA, 15 bp, Homo sapiens
aatgtataaattccc

SEQ ID NO: 484847 - DNA, 15 bp, Homo sapiens
taatgtataaattcc

SEQ ID NO: 484848 - DNA, 15 bp, Homo sapiens
ttaatgtataaattc

SEQ ID NO: 484849 - DNA, 15 bp, Homo sapiens
tttaatgtataaatt

SEQ ID NO: 484850 - DNA, 15 bp, Homo sapiens
ctttaatgtataaat

SEQ ID NO: 484851 - DNA, 15 bp, Homo sapiens
cctttaatgtataaa

SEQ ID NO: 484852 - DNA, 15 bp, Homo sapiens
ccctttaatgtataa

SEQ ID NO: 484853 - DNA, 15 bp, Homo sapiens
accctttaatgtata

SEQ ID NO: 484854 - DNA, 15 bp, Homo sapiens
taccctttaatgtat

SEQ ID NO: 484855 - DNA, 15 bp, Homo sapiens
ttaccctttaatgta

SEQ ID NO: 484856 - DNA, 15 bp, Homo sapiens
tttaccctttaatgt

SEQ ID NO: 484857 - DNA, 15 bp, Homo sapiens
atttaccctttaatg

SEQ ID NO: 484858 - DNA, 15 bp, Homo sapiens
tatttaccctttaat

SEQ ID NO: 484859 - DNA, 15 bp, Homo sapiens
ttatttaccctttaa

SEQ ID NO: 484860 - DNA, 15 bp, Homo sapiens
tttatttacccttta

SEQ ID NO: 484861 - DNA, 15 bp, Homo sapiens
atttatttacccttt

SEQ ID NO: 484862 - DNA, 15 bp, Homo sapiens
catttatttaccctt

SEQ ID NO: 484863 - DNA, 15 bp, Homo sapiens
tcatttatttaccct

SEQ ID NO: 484864 - DNA, 15 bp, Homo sapiens
ttcatttatttaccc

SEQ ID NO: 484865 - DNA, 15 bp, Homo sapiens
gttcatttatttacc

SEQ ID NO: 484866 - DNA, 15 bp, Homo sapiens
ggttcatttatttac

SEQ ID NO: 484867 - DNA, 15 bp, Homo sapiens
tggttcatttattta

SEQ ID NO: 484868 - DNA, 15 bp, Homo sapiens
ctggttcatttattt

SEQ ID NO: 484869 - DNA, 15 bp, Homo sapiens
cctggttcatttatt

SEQ ID NO: 484870 - DNA, 15 bp, Homo sapiens
acctggttcatttat

SEQ ID NO: 484871 - DNA, 15 bp, Homo sapiens
tacctggttcattta

SEQ ID NO: 484872 - DNA, 15 bp, Homo sapiens
ttacctggttcattt

SEQ ID NO: 484873 - DNA, 15 bp, Homo sapiens
attacctggttcatt

SEQ ID NO: 484874 - DNA, 15 bp, Homo sapiens
gattacctggttcat

SEQ ID NO: 484875 - DNA, 15 bp, Homo sapiens
ggattacctggttca

SEQ ID NO: 484876 - DNA, 15 bp, Homo sapiens
aggattacctggttc

SEQ ID NO: 484877 - DNA, 15 bp, Homo sapiens
aaggattacctggtt

SEQ ID NO: 484878 - DNA, 15 bp, Homo sapiens
caaggattacctggt

SEQ ID NO: 484879 - DNA, 15 bp, Homo sapiens
tcaaggattacctgg

SEQ ID NO: 484880 - DNA, 15 bp, Homo sapiens
ctcaaggattacctg

SEQ ID NO: 484881 - DNA, 15 bp, Homo sapiens
tctcaaggattacct

SEQ ID NO: 484882 - DNA, 15 bp, Homo sapiens
ctctcaaggattacc

SEQ ID NO: 484883 - DNA, 15 bp, Homo sapiens
actctcaaggattac

SEQ ID NO: 484884 - DNA, 15 bp, Homo sapiens
gactctcaaggatta

SEQ ID NO: 484885 - DNA, 15 bp, Homo sapiens
agactctcaaggatt

SEQ ID NO: 484886 - DNA, 15 bp, Homo sapiens
cagactctcaaggat

SEQ ID NO: 484887 - DNA, 15 bp, Homo sapiens
acagactctcaagga

SEQ ID NO: 484888 - DNA, 15 bp, Homo sapiens
cacagactctcaagg

SEQ ID NO: 484889 - DNA, 15 bp, Homo sapiens
tcacagactctcaag

SEQ ID NO: 484890 - DNA, 15 bp, Homo sapiens
atcacagactctcaa

SEQ ID NO: 484891 - DNA, 15 bp, Homo sapiens
aatcacagactctca

SEQ ID NO: 484892 - DNA, 15 bp, Homo sapiens
caatcacagactctc

SEQ ID NO: 484893 - DNA, 15 bp, Homo sapiens
gcaatcacagactct

SEQ ID NO: 484894 - DNA, 15 bp, Homo sapiens
cgcaatcacagactc

SEQ ID NO: 484895 - DNA, 15 bp, Homo sapiens
acgcaatcacagact

SEQ ID NO: 484896 - DNA, 15 bp, Homo sapiens
cacgcaatcacagac

SEQ ID NO: 484897 - DNA, 15 bp, Homo sapiens
acacgcaatcacaga

SEQ ID NO: 484898 - DNA, 15 bp, Homo sapiens
aacacgcaatcacag

SEQ ID NO: 484899 - DNA, 15 bp, Homo sapiens
taacacgcaatcaca

SEQ ID NO: 484900 - DNA, 15 bp, Homo sapiens
gtaacacgcaatcac

SEQ ID NO: 484901 - DNA, 15 bp, Homo sapiens
agtaacacgcaatca

SEQ ID NO: 484902 - DNA, 15 bp, Homo sapiens
gagtaacacgcaatc

SEQ ID NO: 484903 - DNA, 15 bp, Homo sapiens
ggagtaacacgcaat

SEQ ID NO: 484904 - DNA, 15 bp, Homo sapiens
tggagtaacacgcaa

SEQ ID NO: 484905 - DNA, 15 bp, Homo sapiens
gtggagtaacacgca

SEQ ID NO: 484906 - DNA, 15 bp, Homo sapiens
agtggagtaacacgc

SEQ ID NO: 484907 - DNA, 15 bp, Homo sapiens
aagtggagtaacacg

SEQ ID NO: 484908 - DNA, 15 bp, Homo sapiens
taagtggagtaacac

SEQ ID NO: 484909 - DNA, 15 bp, Homo sapiens
ctaagtggagtaaca

SEQ ID NO: 484910 - DNA, 15 bp, Homo sapiens
cctaagtggagtaac

SEQ ID NO: 484911 - DNA, 15 bp, Homo sapiens
acctaagtggagtaa

SEQ ID NO: 484912 - DNA, 15 bp, Homo sapiens
cacctaagtggagta

SEQ ID NO: 484913 - DNA, 15 bp, Homo sapiens
acacctaagtggagt

SEQ ID NO: 484914 - DNA, 15 bp, Homo sapiens
tacacctaagtggag

SEQ ID NO: 484915 - DNA, 15 bp, Homo sapiens
atacacctaagtgga

SEQ ID NO: 484916 - DNA, 15 bp, Homo sapiens
tatacacctaagtgg

SEQ ID NO: 484917 - DNA, 15 bp, Homo sapiens
atatacacctaagtg

SEQ ID NO: 484918 - DNA, 15 bp, Homo sapiens
gatatacacctaagt

SEQ ID NO: 484919 - DNA, 15 bp, Homo sapiens
agatatacacctaag

SEQ ID NO: 484920 - DNA, 15 bp, Homo sapiens
gagatatacacctaa

SEQ ID NO: 484921 - DNA, 15 bp, Homo sapiens
tgagatatacaccta

SEQ ID NO: 484922 - DNA, 15 bp, Homo sapiens
ttgagatatacacct

SEQ ID NO: 484923 - DNA, 15 bp, Homo sapiens
gttgagatatacacc

SEQ ID NO: 484924 - DNA, 15 bp, Homo sapiens
agttgagatatacac

SEQ ID NO: 484925 - DNA, 15 bp, Homo sapiens
aagttgagatataca

SEQ ID NO: 484926 - DNA, 15 bp, Homo sapiens
aaagttgagatatac

SEQ ID NO: 484927 - DNA, 15 bp, Homo sapiens
aaaagttgagatata

SEQ ID NO: 484928 - DNA, 15 bp, Homo sapiens
gaaaagttgagatat

SEQ ID NO: 484929 - DNA, 15 bp, Homo sapiens
ggaaaagttgagata

SEQ ID NO: 484930 - DNA, 15 bp, Homo sapiens
tggaaaagttgagat

SEQ ID NO: 484931 - DNA, 15 bp, Homo sapiens
atggaaaagttgaga

SEQ ID NO: 484932 - DNA, 15 bp, Homo sapiens
aatggaaaagttgag

SEQ ID NO: 484933 - DNA, 15 bp, Homo sapiens
taatggaaaagttga

SEQ ID NO: 484934 - DNA, 15 bp, Homo sapiens
ataatggaaaagttg

SEQ ID NO: 484935 - DNA, 15 bp, Homo sapiens
cataatggaaaagtt

SEQ ID NO: 484936 - DNA, 15 bp, Homo sapiens
tcataatggaaaagt

SEQ ID NO: 484937 - DNA, 15 bp, Homo sapiens
ctcataatggaaaag

SEQ ID NO: 484938 - DNA, 15 bp, Homo sapiens
cctcataatggaaaa

SEQ ID NO: 484939 - DNA, 15 bp, Homo sapiens
tcctcataatggaaa

SEQ ID NO: 484940 - DNA, 15 bp, Homo sapiens
gtcctcataatggaa

SEQ ID NO: 484941 - DNA, 15 bp, Homo sapiens
tgtcctcataatgga

SEQ ID NO: 484942 - DNA, 15 bp, Homo sapiens
gtgtcctcataatgg

SEQ ID NO: 484943 - DNA, 15 bp, Homo sapiens
ggtgtcctcataatg

SEQ ID NO: 484944 - DNA, 15 bp, Homo sapiens
tggtgtcctcataat

SEQ ID NO: 484945 - DNA, 15 bp, Homo sapiens
atggtgtcctcataa

SEQ ID NO: 484946 - DNA, 15 bp, Homo sapiens
aatggtgtcctcata

SEQ ID NO: 484947 - DNA, 15 bp, Homo sapiens
aaatggtgtcctcat

SEQ ID NO: 484948 - DNA, 15 bp, Homo sapiens
aaaatggtgtcctca

SEQ ID NO: 484949 - DNA, 15 bp, Homo sapiens
aaaaatggtgtcctc

SEQ ID NO: 484950 - DNA, 15 bp, Homo sapiens
gaaaaatggtgtcct

SEQ ID NO: 484951 - DNA, 15 bp, Homo sapiens
tgaaaaatggtgtcc

SEQ ID NO: 484952 - DNA, 15 bp, Homo sapiens
atgaaaaatggtgtc

SEQ ID NO: 484953 - DNA, 15 bp, Homo sapiens
catgaaaaatggtgt

SEQ ID NO: 484954 - DNA, 15 bp, Homo sapiens
ccatgaaaaatggtg

SEQ ID NO: 484955 - DNA, 15 bp, Homo sapiens
accatgaaaaatggt

SEQ ID NO: 484956 - DNA, 15 bp, Homo sapiens
taccatgaaaaatgg

SEQ ID NO: 484957 - DNA, 15 bp, Homo sapiens
ctaccatgaaaaatg

SEQ ID NO: 484958 - DNA, 15 bp, Homo sapiens
tctaccatgaaaaat

SEQ ID NO: 484959 - DNA, 15 bp, Homo sapiens
atctaccatgaaaaa

SEQ ID NO: 484960 - DNA, 15 bp, Homo sapiens
aatctaccatgaaaa

SEQ ID NO: 484961 - DNA, 15 bp, Homo sapiens
caatctaccatgaaa

SEQ ID NO: 484962 - DNA, 15 bp, Homo sapiens
acaatctaccatgaa

SEQ ID NO: 484963 - DNA, 15 bp, Homo sapiens
aacaatctaccatga

SEQ ID NO: 484964 - DNA, 15 bp, Homo sapiens
aaacaatctaccatg

SEQ ID NO: 484965 - DNA, 15 bp, Homo sapiens
aaaacaatctaccat

SEQ ID NO: 484966 - DNA, 15 bp, Homo sapiens
caaaacaatctacca

SEQ ID NO: 484967 - DNA, 15 bp, Homo sapiens
ccaaaacaatctacc

SEQ ID NO: 484968 - DNA, 15 bp, Homo sapiens
tccaaaacaatctac

SEQ ID NO: 484969 - DNA, 15 bp, Homo sapiens
ctccaaaacaatcta

SEQ ID NO: 484970 - DNA, 15 bp, Homo sapiens
gctccaaaacaatct

SEQ ID NO: 484971 - DNA, 15 bp, Homo sapiens
ggctccaaaacaatc

SEQ ID NO: 484972 - DNA, 15 bp, Homo sapiens
gggctccaaaacaat

SEQ ID NO: 484973 - DNA, 15 bp, Homo sapiens
agggctccaaaacaa

SEQ ID NO: 484974 - DNA, 15 bp, Homo sapiens
aagggctccaaaaca

SEQ ID NO: 484975 - DNA, 15 bp, Homo sapiens
gaagggctccaaaac

SEQ ID NO: 484976 - DNA, 15 bp, Homo sapiens
tgaagggctccaaaa

SEQ ID NO: 484977 - DNA, 15 bp, Homo sapiens
ttgaagggctccaaa

SEQ ID NO: 484978 - DNA, 15 bp, Homo sapiens
tttgaagggctccaa

SEQ ID NO: 484979 - DNA, 15 bp, Homo sapiens
ttttgaagggctcca

SEQ ID NO: 484980 - DNA, 15 bp, Homo sapiens
attttgaagggctcc

SEQ ID NO: 484981 - DNA, 15 bp, Homo sapiens
tattttgaagggctc

SEQ ID NO: 484982 - DNA, 15 bp, Homo sapiens
ctattttgaagggct

SEQ ID NO: 484983 - DNA, 15 bp, Homo sapiens
actattttgaagggc

SEQ ID NO: 484984 - DNA, 15 bp, Homo sapiens
tactattttgaaggg

SEQ ID NO: 484985 - DNA, 15 bp, Homo sapiens
ctactattttgaagg

SEQ ID NO: 484986 - DNA, 15 bp, Homo sapiens
cctactattttgaag

SEQ ID NO: 484987 - DNA, 15 bp, Homo sapiens
acctactattttgaa

SEQ ID NO: 484988 - DNA, 15 bp, Homo sapiens
aacctactattttga

SEQ ID NO: 484989 - DNA, 15 bp, Homo sapiens
aaacctactattttg

SEQ ID NO: 484990 - DNA, 15 bp, Homo sapiens
caaacctactatttt

SEQ ID NO: 484991 - DNA, 15 bp, Homo sapiens
tcaaacctactattt

SEQ ID NO: 484992 - DNA, 15 bp, Homo sapiens
atcaaacctactatt

SEQ ID NO: 484993 - DNA, 15 bp, Homo sapiens
catcaaacctactat

SEQ ID NO: 484994 - DNA, 15 bp, Homo sapiens
tcatcaaacctacta

SEQ ID NO: 484995 - DNA, 15 bp, Homo sapiens
atcatcaaacctact

SEQ ID NO: 484996 - DNA, 15 bp, Homo sapiens
tatcatcaaacctac

SEQ ID NO: 484997 - DNA, 15 bp, Homo sapiens
ttatcatcaaaccta

SEQ ID NO: 484998 - DNA, 15 bp, Homo sapiens
tttatcatcaaacct

SEQ ID NO: 484999 - DNA, 15 bp, Homo sapiens
atttatcatcaaacc

SEQ ID NO: 485000 - DNA, 15 bp, Homo sapiens
tatttatcatcaaac

SEQ ID NO: 485001 - DNA, 15 bp, Homo sapiens
gtatttatcatcaaa

SEQ ID NO: 485002 - DNA, 15 bp, Homo sapiens
agtatttatcatcaa

SEQ ID NO: 485003 - DNA, 15 bp, Homo sapiens
cagtatttatcatca

SEQ ID NO: 485004 - DNA, 15 bp, Homo sapiens
tcagtatttatcatc

SEQ ID NO: 485005 - DNA, 15 bp, Homo sapiens
ctcagtatttatcat

SEQ ID NO: 485006 - DNA, 15 bp, Homo sapiens
actcagtatttatca

SEQ ID NO: 485007 - DNA, 15 bp, Homo sapiens
cactcagtatttatc

SEQ ID NO: 485008 - DNA, 15 bp, Homo sapiens
acactcagtatttat

SEQ ID NO: 485009 - DNA, 15 bp, Homo sapiens
gacactcagtattta

SEQ ID NO: 485010 - DNA, 15 bp, Homo sapiens
tgacactcagtattt

SEQ ID NO: 485011 - DNA, 15 bp, Homo sapiens
ttgacactcagtatt

SEQ ID NO: 485012 - DNA, 15 bp, Homo sapiens
gttgacactcagtat

SEQ ID NO: 485013 - DNA, 15 bp, Homo sapiens
agttgacactcagta

SEQ ID NO: 485014 - DNA, 15 bp, Homo sapiens
aagttgacactcagt

SEQ ID NO: 485015 - DNA, 15 bp, Homo sapiens
caagttgacactcag

SEQ ID NO: 485016 - DNA, 15 bp, Homo sapiens
tcaagttgacactca

SEQ ID NO: 485017 - DNA, 15 bp, Homo sapiens
atcaagttgacactc

SEQ ID NO: 485018 - DNA, 15 bp, Homo sapiens
aatcaagttgacact

SEQ ID NO: 485019 - DNA, 15 bp, Homo sapiens
caatcaagttgacac

SEQ ID NO: 485020 - DNA, 15 bp, Homo sapiens
ccaatcaagttgaca

SEQ ID NO: 485021 - DNA, 15 bp, Homo sapiens
tccaatcaagttgac

SEQ ID NO: 485022 - DNA, 15 bp, Homo sapiens
atccaatcaagttga

SEQ ID NO: 485023 - DNA, 15 bp, Homo sapiens
aatccaatcaagttg

SEQ ID NO: 485024 - DNA, 15 bp, Homo sapiens
caatccaatcaagtt

SEQ ID NO: 485025 - DNA, 15 bp, Homo sapiens
tcaatccaatcaagt

SEQ ID NO: 485026 - DNA, 15 bp, Homo sapiens
ttcaatccaatcaag

SEQ ID NO: 485027 - DNA, 15 bp, Homo sapiens
cttcaatccaatcaa

SEQ ID NO: 485028 - DNA, 15 bp, Homo sapiens
ccttcaatccaatca

SEQ ID NO: 485029 - DNA, 15 bp, Homo sapiens
tccttcaatccaatc

SEQ ID NO: 485030 - DNA, 15 bp, Homo sapiens
atccttcaatccaat

SEQ ID NO: 485031 - DNA, 15 bp, Homo sapiens
tatccttcaatccaa

SEQ ID NO: 485032 - DNA, 15 bp, Homo sapiens
gtatccttcaatcca

SEQ ID NO: 485033 - DNA, 15 bp, Homo sapiens
tgtatccttcaatcc

SEQ ID NO: 485034 - DNA, 15 bp, Homo sapiens
ttgtatccttcaatc

SEQ ID NO: 485035 - DNA, 15 bp, Homo sapiens
tttgtatccttcaat

SEQ ID NO: 485036 - DNA, 15 bp, Homo sapiens
ctttgtatccttcaa

SEQ ID NO: 485037 - DNA, 15 bp, Homo sapiens
actttgtatccttca

SEQ ID NO: 485038 - DNA, 15 bp, Homo sapiens
tactttgtatccttc

SEQ ID NO: 485039 - DNA, 15 bp, Homo sapiens
atactttgtatcctt

SEQ ID NO: 485040 - DNA, 15 bp, Homo sapiens
aatactttgtatcct

SEQ ID NO: 485041 - DNA, 15 bp, Homo sapiens
caatactttgtatcc

SEQ ID NO: 485042 - DNA, 15 bp, Homo sapiens
tcaatactttgtatc

SEQ ID NO: 485043 - DNA, 15 bp, Homo sapiens
atcaatactttgtat

SEQ ID NO: 485044 - DNA, 15 bp, Homo sapiens
gatcaatactttgta

SEQ ID NO: 485045 - DNA, 15 bp, Homo sapiens
ggatcaatactttgt

SEQ ID NO: 485046 - DNA, 15 bp, Homo sapiens
aggatcaatactttg

SEQ ID NO: 485047 - DNA, 15 bp, Homo sapiens
caggatcaatacttt

SEQ ID NO: 485048 - DNA, 15 bp, Homo sapiens
ccaggatcaatactt

SEQ ID NO: 485049 - DNA, 15 bp, Homo sapiens
cccaggatcaatact

SEQ ID NO: 485050 - DNA, 15 bp, Homo sapiens
acccaggatcaatac

SEQ ID NO: 485051 - DNA, 15 bp, Homo sapiens
cacccaggatcaata

SEQ ID NO: 485052 - DNA, 15 bp, Homo sapiens
acacccaggatcaat

SEQ ID NO: 485053 - DNA, 15 bp, Homo sapiens
tacacccaggatcaa

SEQ ID NO: 485054 - DNA, 15 bp, Homo sapiens
atacacccaggatca

SEQ ID NO: 485055 - DNA, 15 bp, Homo sapiens
gatacacccaggatc

SEQ ID NO: 485056 - DNA, 15 bp, Homo sapiens
agatacacccaggat

SEQ ID NO: 485057 - DNA, 15 bp, Homo sapiens
cagatacacccagga

SEQ ID NO: 485058 - DNA, 15 bp, Homo sapiens
acagatacacccagg

SEQ ID NO: 485059 - DNA, 15 bp, Homo sapiens
cacagatacacccag

SEQ ID NO: 485060 - DNA, 15 bp, Homo sapiens
tcacagatacaccca

SEQ ID NO: 485061 - DNA, 15 bp, Homo sapiens
ttcacagatacaccc

SEQ ID NO: 485062 - DNA, 15 bp, Homo sapiens
cttcacagatacacc

SEQ ID NO: 485063 - DNA, 15 bp, Homo sapiens
acttcacagatacac

SEQ ID NO: 485064 - DNA, 15 bp, Homo sapiens
aacttcacagataca

SEQ ID NO: 485065 - DNA, 15 bp, Homo sapiens
caacttcacagatac

SEQ ID NO: 485066 - DNA, 15 bp, Homo sapiens
acaacttcacagata

SEQ ID NO: 485067 - DNA, 15 bp, Homo sapiens
aacaacttcacagat

SEQ ID NO: 485068 - DNA, 15 bp, Homo sapiens
caacaacttcacaga

SEQ ID NO: 485069 - DNA, 15 bp, Homo sapiens
gcaacaacttcacag

SEQ ID NO: 485070 - DNA, 15 bp, Homo sapiens
ggcaacaacttcaca

SEQ ID NO: 485071 - DNA, 15 bp, Homo sapiens
tggcaacaacttcac

SEQ ID NO: 485072 - DNA, 15 bp, Homo sapiens
ttggcaacaacttca

SEQ ID NO: 485073 - DNA, 15 bp, Homo sapiens
tttggcaacaacttc

SEQ ID NO: 485074 - DNA, 15 bp, Homo sapiens
ctttggcaacaactt

SEQ ID NO: 485075 - DNA, 15 bp, Homo sapiens
cctttggcaacaact

SEQ ID NO: 485076 - DNA, 15 bp, Homo sapiens
tcctttggcaacaac

SEQ ID NO: 485077 - DNA, 15 bp, Homo sapiens
ctcctttggcaacaa

SEQ ID NO: 485078 - DNA, 15 bp, Homo sapiens
tctcctttggcaaca

SEQ ID NO: 485079 - DNA, 15 bp, Homo sapiens
atctcctttggcaac

SEQ ID NO: 485080 - DNA, 15 bp, Homo sapiens
aatctcctttggcaa

SEQ ID NO: 485081 - DNA, 15 bp, Homo sapiens
taatctcctttggca

SEQ ID NO: 485082 - DNA, 15 bp, Homo sapiens
ttaatctcctttggc

SEQ ID NO: 485083 - DNA, 15 bp, Homo sapiens
gttaatctcctttgg

SEQ ID NO: 485084 - DNA, 15 bp, Homo sapiens
tgttaatctcctttg

SEQ ID NO: 485085 - DNA, 15 bp, Homo sapiens
atgttaatctccttt

SEQ ID NO: 485086 - DNA, 15 bp, Homo sapiens
aatgttaatctcctt

SEQ ID NO: 485087 - DNA, 15 bp, Homo sapiens
aaatgttaatctcct

SEQ ID NO: 485088 - DNA, 15 bp, Homo sapiens
caaatgttaatctcc

SEQ ID NO: 485089 - DNA, 15 bp, Homo sapiens
tcaaatgttaatctc

SEQ ID NO: 485090 - DNA, 15 bp, Homo sapiens
ctcaaatgttaatct

SEQ ID NO: 485091 - DNA, 15 bp, Homo sapiens
actcaaatgttaatc

SEQ ID NO: 485092 - DNA, 15 bp, Homo sapiens
gactcaaatgttaat

SEQ ID NO: 485093 - DNA, 15 bp, Homo sapiens
tgactcaaatgttaa

SEQ ID NO: 485094 - DNA, 15 bp, Homo sapiens
ctgactcaaatgtta

SEQ ID NO: 485095 - DNA, 15 bp, Homo sapiens
actgactcaaatgtt

SEQ ID NO: 485096 - DNA, 15 bp, Homo sapiens
cactgactcaaatgt

SEQ ID NO: 485097 - DNA, 15 bp, Homo sapiens
ccactgactcaaatg

SEQ ID NO: 485098 - DNA, 15 bp, Homo sapiens
cccactgactcaaat

SEQ ID NO: 485099 - DNA, 15 bp, Homo sapiens
gcccactgactcaaa

SEQ ID NO: 485100 - DNA, 15 bp, Homo sapiens
agcccactgactcaa

SEQ ID NO: 485101 - DNA, 15 bp, Homo sapiens
cagcccactgactca

SEQ ID NO: 485102 - DNA, 15 bp, Homo sapiens
ccagcccactgactc

SEQ ID NO: 485103 - DNA, 15 bp, Homo sapiens
cccagcccactgact

SEQ ID NO: 485104 - DNA, 15 bp, Homo sapiens
tcccagcccactgac

SEQ ID NO: 485105 - DNA, 15 bp, Homo sapiens
ttcccagcccactga

SEQ ID NO: 485106 - DNA, 15 bp, Homo sapiens
tttcccagcccactg

SEQ ID NO: 485107 - DNA, 15 bp, Homo sapiens
ctttcccagcccact

SEQ ID NO: 485108 - DNA, 15 bp, Homo sapiens
cctttcccagcccac

SEQ ID NO: 485109 - DNA, 15 bp, Homo sapiens
gcctttcccagccca

SEQ ID NO: 485110 - DNA, 15 bp, Homo sapiens
tgcctttcccagccc

SEQ ID NO: 485111 - DNA, 15 bp, Homo sapiens
ctgcctttcccagcc

SEQ ID NO: 485112 - DNA, 15 bp, Homo sapiens
tctgcctttcccagc

SEQ ID NO: 485113 - DNA, 15 bp, Homo sapiens
gtctgcctttcccag

SEQ ID NO: 485114 - DNA, 15 bp, Homo sapiens
ggtctgcctttccca

SEQ ID NO: 485115 - DNA, 15 bp, Homo sapiens
gggtctgcctttccc

SEQ ID NO: 485116 - DNA, 15 bp, Homo sapiens
tgggtctgcctttcc

SEQ ID NO: 485117 - DNA, 15 bp, Homo sapiens
gtgggtctgcctttc

SEQ ID NO: 485118 - DNA, 15 bp, Homo sapiens
ggtgggtctgccttt

SEQ ID NO: 485119 - DNA, 15 bp, Homo sapiens
gggtgggtctgcctt

SEQ ID NO: 485120 - DNA, 15 bp, Homo sapiens
agggtgggtctgcct

SEQ ID NO: 485121 - DNA, 15 bp, Homo sapiens
aagggtgggtctgcc

SEQ ID NO: 485122 - DNA, 15 bp, Homo sapiens
taagggtgggtctgc

SEQ ID NO: 485123 - DNA, 15 bp, Homo sapiens
ttaagggtgggtctg

SEQ ID NO: 485124 - DNA, 15 bp, Homo sapiens
attaagggtgggtct

SEQ ID NO: 485125 - DNA, 15 bp, Homo sapiens
gattaagggtgggtc

SEQ ID NO: 485126 - DNA, 15 bp, Homo sapiens
agattaagggtgggt

SEQ ID NO: 485127 - DNA, 15 bp, Homo sapiens
cagattaagggtggg

SEQ ID NO: 485128 - DNA, 15 bp, Homo sapiens
ccagattaagggtgg

SEQ ID NO: 485129 - DNA, 15 bp, Homo sapiens
cccagattaagggtg

SEQ ID NO: 485130 - DNA, 15 bp, Homo sapiens
acccagattaagggt

SEQ ID NO: 485131 - DNA, 15 bp, Homo sapiens
cacccagattaaggg

SEQ ID NO: 485132 - DNA, 15 bp, Homo sapiens
ccacccagattaagg

SEQ ID NO: 485133 - DNA, 15 bp, Homo sapiens
accacccagattaag

SEQ ID NO: 485134 - DNA, 15 bp, Homo sapiens
caccacccagattaa

SEQ ID NO: 485135 - DNA, 15 bp, Homo sapiens
gcaccacccagatta

SEQ ID NO: 485136 - DNA, 15 bp, Homo sapiens
tgcaccacccagatt

SEQ ID NO: 485137 - DNA, 15 bp, Homo sapiens
gtgcaccacccagat

SEQ ID NO: 485138 - DNA, 15 bp, Homo sapiens
ggtgcaccacccaga

SEQ ID NO: 485139 - DNA, 15 bp, Homo sapiens
tggtgcaccacccag

SEQ ID NO: 485140 - DNA, 15 bp, Homo sapiens
atggtgcaccaccca

SEQ ID NO: 485141 - DNA, 15 bp, Homo sapiens
gatggtgcaccaccc

SEQ ID NO: 485142 - DNA, 15 bp, Homo sapiens
agatggtgcaccacc

SEQ ID NO: 485143 - DNA, 15 bp, Homo sapiens
tagatggtgcaccac

SEQ ID NO: 485144 - DNA, 15 bp, Homo sapiens
ttagatggtgcacca

SEQ ID NO: 485145 - DNA, 15 bp, Homo sapiens
attagatggtgcacc

SEQ ID NO: 485146 - DNA, 15 bp, Homo sapiens
gattagatggtgcac

SEQ ID NO: 485147 - DNA, 15 bp, Homo sapiens
tgattagatggtgca

SEQ ID NO: 485148 - DNA, 15 bp, Homo sapiens
ctgattagatggtgc

SEQ ID NO: 485149 - DNA, 15 bp, Homo sapiens
gctgattagatggtg

SEQ ID NO: 485150 - DNA, 15 bp, Homo sapiens
agctgattagatggt

SEQ ID NO: 485151 - DNA, 15 bp, Homo sapiens
cagctgattagatgg

SEQ ID NO: 485152 - DNA, 15 bp, Homo sapiens
gcagctgattagatg

SEQ ID NO: 485153 - DNA, 15 bp, Homo sapiens
ggcagctgattagat

SEQ ID NO: 485154 - DNA, 15 bp, Homo sapiens
tggcagctgattaga

SEQ ID NO: 485155 - DNA, 15 bp, Homo sapiens
ctggcagctgattag

SEQ ID NO: 485156 - DNA, 15 bp, Homo sapiens
gctggcagctgatta

SEQ ID NO: 485157 - DNA, 15 bp, Homo sapiens
tgctggcagctgatt

SEQ ID NO: 485158 - DNA, 15 bp, Homo sapiens
atgctggcagctgat

SEQ ID NO: 485159 - DNA, 15 bp, Homo sapiens
catgctggcagctga

SEQ ID NO: 485160 - DNA, 15 bp, Homo sapiens
ccatgctggcagctg

SEQ ID NO: 485161 - DNA, 15 bp, Homo sapiens
gccatgctggcagct

SEQ ID NO: 485162 - DNA, 15 bp, Homo sapiens
agccatgctggcagc

SEQ ID NO: 485163 - DNA, 15 bp, Homo sapiens
cagccatgctggcag

SEQ ID NO: 485164 - DNA, 15 bp, Homo sapiens
ccagccatgctggca

SEQ ID NO: 485165 - DNA, 15 bp, Homo sapiens
tccagccatgctggc

SEQ ID NO: 485166 - DNA, 15 bp, Homo sapiens
ctccagccatgctgg

SEQ ID NO: 485167 - DNA, 15 bp, Homo sapiens
actccagccatgctg

SEQ ID NO: 485168 - DNA, 15 bp, Homo sapiens
tactccagccatgct

SEQ ID NO: 485169 - DNA, 15 bp, Homo sapiens
atactccagccatgc

SEQ ID NO: 485170 - DNA, 15 bp, Homo sapiens
tatactccagccatg

SEQ ID NO: 485171 - DNA, 15 bp, Homo sapiens
ttatactccagccat

SEQ ID NO: 485172 - DNA, 15 bp, Homo sapiens
cttatactccagcca

SEQ ID NO: 485173 - DNA, 15 bp, Homo sapiens
gcttatactccagcc

SEQ ID NO: 485174 - DNA, 15 bp, Homo sapiens
tgcttatactccagc

SEQ ID NO: 485175 - DNA, 15 bp, Homo sapiens
ctgcttatactccag

SEQ ID NO: 485176 - DNA, 15 bp, Homo sapiens
cctgcttatactcca

SEQ ID NO: 485177 - DNA, 15 bp, Homo sapiens
gcctgcttatactcc

SEQ ID NO: 485178 - DNA, 15 bp, Homo sapiens
tgcctgcttatactc

SEQ ID NO: 485179 - DNA, 15 bp, Homo sapiens
ctgcctgcttatact

SEQ ID NO: 485180 - DNA, 15 bp, Homo sapiens
tctgcctgcttatac

SEQ ID NO: 485181 - DNA, 15 bp, Homo sapiens
ttctgcctgcttata

SEQ ID NO: 485182 - DNA, 15 bp, Homo sapiens
tttctgcctgcttat

SEQ ID NO: 485183 - DNA, 15 bp, Homo sapiens
ttttctgcctgctta

SEQ ID NO: 485184 - DNA, 15 bp, Homo sapiens
tttttctgcctgctt

SEQ ID NO: 485185 - DNA, 15 bp, Homo sapiens
atttttctgcctgct

SEQ ID NO: 485186 - DNA, 15 bp, Homo sapiens
catttttctgcctgc

SEQ ID NO: 485187 - DNA, 15 bp, Homo sapiens
acatttttctgcctg

SEQ ID NO: 485188 - DNA, 15 bp, Homo sapiens
cacatttttctgcct

SEQ ID NO: 485189 - DNA, 15 bp, Homo sapiens
tcacatttttctgcc

SEQ ID NO: 485190 - DNA, 15 bp, Homo sapiens
ttcacatttttctgc

SEQ ID NO: 485191 - DNA, 15 bp, Homo sapiens
tttcacatttttctg

SEQ ID NO: 485192 - DNA, 15 bp, Homo sapiens
ttttcacatttttct

SEQ ID NO: 485193 - DNA, 15 bp, Homo sapiens
cttttcacatttttc

SEQ ID NO: 485194 - DNA, 15 bp, Homo sapiens
tcttttcacattttt

SEQ ID NO: 485195 - DNA, 15 bp, Homo sapiens
ctcttttcacatttt

SEQ ID NO: 485196 - DNA, 15 bp, Homo sapiens
tctcttttcacattt

SEQ ID NO: 485197 - DNA, 15 bp, Homo sapiens
ctctcttttcacatt

SEQ ID NO: 485198 - DNA, 15 bp, Homo sapiens
tctctcttttcacat

SEQ ID NO: 485199 - DNA, 15 bp, Homo sapiens
gtctctcttttcaca

SEQ ID NO: 485200 - DNA, 15 bp, Homo sapiens
cgtctctcttttcac

SEQ ID NO: 485201 - DNA, 15 bp, Homo sapiens
ccgtctctcttttca

SEQ ID NO: 485202 - DNA, 15 bp, Homo sapiens
cccgtctctcttttc

SEQ ID NO: 485203 - DNA, 15 bp, Homo sapiens
gcccgtctctctttt

SEQ ID NO: 485204 - DNA, 15 bp, Homo sapiens
ggcccgtctctcttt

SEQ ID NO: 485205 - DNA, 15 bp, Homo sapiens
aggcccgtctctctt

SEQ ID NO: 485206 - DNA, 15 bp, Homo sapiens
taggcccgtctctct

SEQ ID NO: 485207 - DNA, 15 bp, Homo sapiens
ctaggcccgtctctc

SEQ ID NO: 485208 - DNA, 15 bp, Homo sapiens
gctaggcccgtctct

SEQ ID NO: 485209 - DNA, 15 bp, Homo sapiens
ggctaggcccgtctc

SEQ ID NO: 485210 - DNA, 15 bp, Homo sapiens
aggctaggcccgtct

SEQ ID NO: 485211 - DNA, 15 bp, Homo sapiens
gaggctaggcccgtc

SEQ ID NO: 485212 - DNA, 15 bp, Homo sapiens
ggaggctaggcccgt

SEQ ID NO: 485213 - DNA, 15 bp, Homo sapiens
gggaggctaggcccg

SEQ ID NO: 485214 - DNA, 15 bp, Homo sapiens
tgggaggctaggccc

SEQ ID NO: 485215 - DNA, 15 bp, Homo sapiens
ctgggaggctaggcc

SEQ ID NO: 485216 - DNA, 15 bp, Homo sapiens
gctgggaggctaggc

SEQ ID NO: 485217 - DNA, 15 bp, Homo sapiens
ggctgggaggctagg

SEQ ID NO: 485218 - DNA, 15 bp, Homo sapiens
aggctgggaggctag

SEQ ID NO: 485219 - DNA, 15 bp, Homo sapiens
taggctgggaggcta

SEQ ID NO: 485220 - DNA, 15 bp, Homo sapiens
gtaggctgggaggct

SEQ ID NO: 485221 - DNA, 15 bp, Homo sapiens
tgtaggctgggaggc

SEQ ID NO: 485222 - DNA, 15 bp, Homo sapiens
atgtaggctgggagg

SEQ ID NO: 485223 - DNA, 15 bp, Homo sapiens
gatgtaggctgggag

SEQ ID NO: 485224 - DNA, 15 bp, Homo sapiens
agatgtaggctggga

SEQ ID NO: 485225 - DNA, 15 bp, Homo sapiens
aagatgtaggctggg

SEQ ID NO: 485226 - DNA, 15 bp, Homo sapiens
aaagatgtaggctgg

SEQ ID NO: 485227 - DNA, 15 bp, Homo sapiens
gaaagatgtaggctg

SEQ ID NO: 485228 - DNA, 15 bp, Homo sapiens
agaaagatgtaggct

SEQ ID NO: 485229 - DNA, 15 bp, Homo sapiens
gagaaagatgtaggc

SEQ ID NO: 485230 - DNA, 15 bp, Homo sapiens
ggagaaagatgtagg

SEQ ID NO: 485231 - DNA, 15 bp, Homo sapiens
aggagaaagatgtag

SEQ ID NO: 485232 - DNA, 15 bp, Homo sapiens
caggagaaagatgta

SEQ ID NO: 485233 - DNA, 15 bp, Homo sapiens
acaggagaaagatgt

SEQ ID NO: 485234 - DNA, 15 bp, Homo sapiens
cacaggagaaagatg

SEQ ID NO: 485235 - DNA, 15 bp, Homo sapiens
acacaggagaaagat

SEQ ID NO: 485236 - DNA, 15 bp, Homo sapiens
aacacaggagaaaga

SEQ ID NO: 485237 - DNA, 15 bp, Homo sapiens
caacacaggagaaag

SEQ ID NO: 485238 - DNA, 15 bp, Homo sapiens
ccaacacaggagaaa

SEQ ID NO: 485239 - DNA, 15 bp, Homo sapiens
tccaacacaggagaa

SEQ ID NO: 485240 - DNA, 15 bp, Homo sapiens
atccaacacaggaga

SEQ ID NO: 485241 - DNA, 15 bp, Homo sapiens
catccaacacaggag

SEQ ID NO: 485242 - DNA, 15 bp, Homo sapiens
gcatccaacacagga

SEQ ID NO: 485243 - DNA, 15 bp, Homo sapiens
agcatccaacacagg

SEQ ID NO: 485244 - DNA, 15 bp, Homo sapiens
aagcatccaacacag

SEQ ID NO: 485245 - DNA, 15 bp, Homo sapiens
gaagcatccaacaca

SEQ ID NO: 485246 - DNA, 15 bp, Homo sapiens
ggaagcatccaacac

SEQ ID NO: 485247 - DNA, 15 bp, Homo sapiens
aggaagcatccaaca

SEQ ID NO: 485248 - DNA, 15 bp, Homo sapiens
caggaagcatccaac

SEQ ID NO: 485249 - DNA, 15 bp, Homo sapiens
gcaggaagcatccaa

SEQ ID NO: 485250 - DNA, 15 bp, Homo sapiens
ggcaggaagcatcca

SEQ ID NO: 485251 - DNA, 15 bp, Homo sapiens
gggcaggaagcatcc

SEQ ID NO: 485252 - DNA, 15 bp, Homo sapiens
agggcaggaagcatc

SEQ ID NO: 485253 - DNA, 15 bp, Homo sapiens
gagggcaggaagcat

SEQ ID NO: 485254 - DNA, 15 bp, Homo sapiens
cgagggcaggaagca

SEQ ID NO: 485255 - DNA, 15 bp, Homo sapiens
tcgagggcaggaagc

SEQ ID NO: 485256 - DNA, 15 bp, Homo sapiens
ttcgagggcaggaag

SEQ ID NO: 485257 - DNA, 15 bp, Homo sapiens
gttcgagggcaggaa

SEQ ID NO: 485258 - DNA, 15 bp, Homo sapiens
tgttcgagggcagga

SEQ ID NO: 485259 - DNA, 15 bp, Homo sapiens
atgttcgagggcagg

SEQ ID NO: 485260 - DNA, 15 bp, Homo sapiens
gatgttcgagggcag

SEQ ID NO: 485261 - DNA, 15 bp, Homo sapiens
tgatgttcgagggca

SEQ ID NO: 485262 - DNA, 15 bp, Homo sapiens
ctgatgttcgagggc

SEQ ID NO: 485263 - DNA, 15 bp, Homo sapiens
tctgatgttcgaggg

SEQ ID NO: 485264 - DNA, 15 bp, Homo sapiens
gtctgatgttcgagg

SEQ ID NO: 485265 - DNA, 15 bp, Homo sapiens
agtctgatgttcgag

SEQ ID NO: 485266 - DNA, 15 bp, Homo sapiens
gagtctgatgttcga

SEQ ID NO: 485267 - DNA, 15 bp, Homo sapiens
ggagtctgatgttcg

SEQ ID NO: 485268 - DNA, 15 bp, Homo sapiens
tggagtctgatgttc

SEQ ID NO: 485269 - DNA, 15 bp, Homo sapiens
ttggagtctgatgtt

SEQ ID NO: 485270 - DNA, 15 bp, Homo sapiens
cttggagtctgatgt

SEQ ID NO: 485271 - DNA, 15 bp, Homo sapiens
acttggagtctgatg

SEQ ID NO: 485272 - DNA, 15 bp, Homo sapiens
aacttggagtctgat

SEQ ID NO: 485273 - DNA, 15 bp, Homo sapiens
gaacttggagtctga

SEQ ID NO: 485274 - DNA, 15 bp, Homo sapiens
agaacttggagtctg

SEQ ID NO: 485275 - DNA, 15 bp, Homo sapiens
aagaacttggagtct

SEQ ID NO: 485276 - DNA, 15 bp, Homo sapiens
aaagaacttggagtc

SEQ ID NO: 485277 - DNA, 15 bp, Homo sapiens
taaagaacttggagt

SEQ ID NO: 485278 - DNA, 15 bp, Homo sapiens
ctaaagaacttggag

SEQ ID NO: 485279 - DNA, 15 bp, Homo sapiens
actaaagaacttgga

SEQ ID NO: 485280 - DNA, 15 bp, Homo sapiens
aactaaagaacttgg

SEQ ID NO: 485281 - DNA, 15 bp, Homo sapiens
aaactaaagaacttg

SEQ ID NO: 485282 - DNA, 15 bp, Homo sapiens
aaaactaaagaactt

SEQ ID NO: 485283 - DNA, 15 bp, Homo sapiens
caaaactaaagaact

SEQ ID NO: 485284 - DNA, 15 bp, Homo sapiens
ccaaaactaaagaac

SEQ ID NO: 485285 - DNA, 15 bp, Homo sapiens
tccaaaactaaagaa

SEQ ID NO: 485286 - DNA, 15 bp, Homo sapiens
ttccaaaactaaaga

SEQ ID NO: 485287 - DNA, 15 bp, Homo sapiens
gttccaaaactaaag

SEQ ID NO: 485288 - DNA, 15 bp, Homo sapiens
agttccaaaactaaa

SEQ ID NO: 485289 - DNA, 15 bp, Homo sapiens
aagttccaaaactaa

SEQ ID NO: 485290 - DNA, 15 bp, Homo sapiens
caagttccaaaacta

SEQ ID NO: 485291 - DNA, 15 bp, Homo sapiens
ccaagttccaaaact

SEQ ID NO: 485292 - DNA, 15 bp, Homo sapiens
tccaagttccaaaac

SEQ ID NO: 485293 - DNA, 15 bp, Homo sapiens
gtccaagttccaaaa

SEQ ID NO: 485294 - DNA, 15 bp, Homo sapiens
agtccaagttccaaa

SEQ ID NO: 485295 - DNA, 15 bp, Homo sapiens
cagtccaagttccaa

SEQ ID NO: 485296 - DNA, 15 bp, Homo sapiens
ccagtccaagttcca

SEQ ID NO: 485297 - DNA, 15 bp, Homo sapiens
gccagtccaagttcc

SEQ ID NO: 485298 - DNA, 15 bp, Homo sapiens
agccagtccaagttc

SEQ ID NO: 485299 - DNA, 15 bp, Homo sapiens
gagccagtccaagtt

SEQ ID NO: 485300 - DNA, 15 bp, Homo sapiens
agagccagtccaagt

SEQ ID NO: 485301 - DNA, 15 bp, Homo sapiens
aagagccagtccaag

SEQ ID NO: 485302 - DNA, 15 bp, Homo sapiens
gaagagccagtccaa

SEQ ID NO: 485303 - DNA, 15 bp, Homo sapiens
agaagagccagtcca

SEQ ID NO: 485304 - DNA, 15 bp, Homo sapiens
aagaagagccagtcc

SEQ ID NO: 485305 - DNA, 15 bp, Homo sapiens
caagaagagccagtc

SEQ ID NO: 485306 - DNA, 15 bp, Homo sapiens
gcaagaagagccagt

SEQ ID NO: 485307 - DNA, 15 bp, Homo sapiens
ggcaagaagagccag

SEQ ID NO: 485308 - DNA, 15 bp, Homo sapiens
aggcaagaagagcca

SEQ ID NO: 485309 - DNA, 15 bp, Homo sapiens
gaggcaagaagagcc

SEQ ID NO: 485310 - DNA, 15 bp, Homo sapiens
agaggcaagaagagc

SEQ ID NO: 485311 - DNA, 15 bp, Homo sapiens
aagaggcaagaagag

SEQ ID NO: 485312 - DNA, 15 bp, Homo sapiens
taagaggcaagaaga

SEQ ID NO: 485313 - DNA, 15 bp, Homo sapiens
ctaagaggcaagaag

SEQ ID NO: 485314 - DNA, 15 bp, Homo sapiens
gctaagaggcaagaa

SEQ ID NO: 485315 - DNA, 15 bp, Homo sapiens
ggctaagaggcaaga

SEQ ID NO: 485316 - DNA, 15 bp, Homo sapiens
aggctaagaggcaag

SEQ ID NO: 485317 - DNA, 15 bp, Homo sapiens
caggctaagaggcaa

SEQ ID NO: 485318 - DNA, 15 bp, Homo sapiens
gcaggctaagaggca

SEQ ID NO: 485319 - DNA, 15 bp, Homo sapiens
tgcaggctaagaggc

SEQ ID NO: 485320 - DNA, 15 bp, Homo sapiens
ctgcaggctaagagg

SEQ ID NO: 485321 - DNA, 15 bp, Homo sapiens
tctgcaggctaagag

SEQ ID NO: 485322 - DNA, 15 bp, Homo sapiens
gtctgcaggctaaga

SEQ ID NO: 485323 - DNA, 15 bp, Homo sapiens
cgtctgcaggctaag

SEQ ID NO: 485324 - DNA, 15 bp, Homo sapiens
ccgtctgcaggctaa

SEQ ID NO: 485325 - DNA, 15 bp, Homo sapiens
gccgtctgcaggcta

SEQ ID NO: 485326 - DNA, 15 bp, Homo sapiens
ggccgtctgcaggct

SEQ ID NO: 485327 - DNA, 15 bp, Homo sapiens
aggccgtctgcaggc

SEQ ID NO: 485328 - DNA, 15 bp, Homo sapiens
taggccgtctgcagg

SEQ ID NO: 485329 - DNA, 15 bp, Homo sapiens
ataggccgtctgcag

SEQ ID NO: 485330 - DNA, 15 bp, Homo sapiens
aataggccgtctgca

SEQ ID NO: 485331 - DNA, 15 bp, Homo sapiens
caataggccgtctgc

SEQ ID NO: 485332 - DNA, 15 bp, Homo sapiens
acaataggccgtctg

SEQ ID NO: 485333 - DNA, 15 bp, Homo sapiens
cacaataggccgtct

SEQ ID NO: 485334 - DNA, 15 bp, Homo sapiens
ccacaataggccgtc

SEQ ID NO: 485335 - DNA, 15 bp, Homo sapiens
cccacaataggccgt

SEQ ID NO: 485336 - DNA, 15 bp, Homo sapiens
tcccacaataggccg

SEQ ID NO: 485337 - DNA, 15 bp, Homo sapiens
gtcccacaataggcc

SEQ ID NO: 485338 - DNA, 15 bp, Homo sapiens
ggtcccacaataggc

SEQ ID NO: 485339 - DNA, 15 bp, Homo sapiens
aggtcccacaatagg

SEQ ID NO: 485340 - DNA, 15 bp, Homo sapiens
aaggtcccacaatag

SEQ ID NO: 485341 - DNA, 15 bp, Homo sapiens
caaggtcccacaata

SEQ ID NO: 485342 - DNA, 15 bp, Homo sapiens
acaaggtcccacaat

SEQ ID NO: 485343 - DNA, 15 bp, Homo sapiens
cacaaggtcccacaa

SEQ ID NO: 485344 - DNA, 15 bp, Homo sapiens
tcacaaggtcccaca

SEQ ID NO: 485345 - DNA, 15 bp, Homo sapiens
atcacaaggtcccac

SEQ ID NO: 485346 - DNA, 15 bp, Homo sapiens
gatcacaaggtccca

SEQ ID NO: 485347 - DNA, 15 bp, Homo sapiens
cgatcacaaggtccc

SEQ ID NO: 485348 - DNA, 15 bp, Homo sapiens
acgatcacaaggtcc

SEQ ID NO: 485349 - DNA, 15 bp, Homo sapiens
cacgatcacaaggtc

SEQ ID NO: 485350 - DNA, 15 bp, Homo sapiens
gcacgatcacaaggt

SEQ ID NO: 485351 - DNA, 15 bp, Homo sapiens
agcacgatcacaagg

SEQ ID NO: 485352 - DNA, 15 bp, Homo sapiens
tagcacgatcacaag

SEQ ID NO: 485353 - DNA, 15 bp, Homo sapiens
ctagcacgatcacaa

SEQ ID NO: 485354 - DNA, 15 bp, Homo sapiens
actagcacgatcaca

SEQ ID NO: 485355 - DNA, 15 bp, Homo sapiens
aactagcacgatcac

SEQ ID NO: 485356 - DNA, 15 bp, Homo sapiens
taactagcacgatca

SEQ ID NO: 485357 - DNA, 15 bp, Homo sapiens
ttaactagcacgatc

SEQ ID NO: 485358 - DNA, 15 bp, Homo sapiens
attaactagcacgat

SEQ ID NO: 485359 - DNA, 15 bp, Homo sapiens
tattaactagcacga

SEQ ID NO: 485360 - DNA, 15 bp, Homo sapiens
ctattaactagcacg

SEQ ID NO: 485361 - DNA, 15 bp, Homo sapiens
actattaactagcac

SEQ ID NO: 485362 - DNA, 15 bp, Homo sapiens
aactattaactagca

SEQ ID NO: 485363 - DNA, 15 bp, Homo sapiens
taactattaactagc

SEQ ID NO: 485364 - DNA, 15 bp, Homo sapiens
ttaactattaactag

SEQ ID NO: 485365 - DNA, 15 bp, Homo sapiens
attaactattaacta

SEQ ID NO: 485366 - DNA, 15 bp, Homo sapiens
tattaactattaact

SEQ ID NO: 485367 - DNA, 15 bp, Homo sapiens
atattaactattaac

SEQ ID NO: 485368 - DNA, 15 bp, Homo sapiens
gatattaactattaa

SEQ ID NO: 485369 - DNA, 15 bp, Homo sapiens
ggatattaactatta

SEQ ID NO: 485370 - DNA, 15 bp, Homo sapiens
gggatattaactatt

SEQ ID NO: 485371 - DNA, 15 bp, Homo sapiens
ggggatattaactat

SEQ ID NO: 485372 - DNA, 15 bp, Homo sapiens
aggggatattaacta

SEQ ID NO: 485373 - DNA, 15 bp, Homo sapiens
aaggggatattaact

SEQ ID NO: 485374 - DNA, 15 bp, Homo sapiens
aaaggggatattaac

SEQ ID NO: 485375 - DNA, 15 bp, Homo sapiens
taaaggggatattaa

SEQ ID NO: 485376 - DNA, 15 bp, Homo sapiens
ataaaggggatatta

SEQ ID NO: 485377 - DNA, 15 bp, Homo sapiens
tataaaggggatatt

SEQ ID NO: 485378 - DNA, 15 bp, Homo sapiens
atataaaggggatat

SEQ ID NO: 485379 - DNA, 15 bp, Homo sapiens
tatataaaggggata

SEQ ID NO: 485380 - DNA, 15 bp, Homo sapiens
ttatataaaggggat

SEQ ID NO: 485381 - DNA, 15 bp, Homo sapiens
tttatataaagggga

SEQ ID NO: 485382 - DNA, 15 bp, Homo sapiens
atttatataaagggg

SEQ ID NO: 485383 - DNA, 15 bp, Homo sapiens
tatttatataaaggg

SEQ ID NO: 485384 - DNA, 15 bp, Homo sapiens
atatttatataaagg

SEQ ID NO: 485385 - DNA, 15 bp, Homo sapiens
aatatttatataaag

SEQ ID NO: 485386 - DNA, 15 bp, Homo sapiens
gaatatttatataaa

SEQ ID NO: 485387 - DNA, 15 bp, Homo sapiens
agaatatttatataa

SEQ ID NO: 485388 - DNA, 15 bp, Homo sapiens
tagaatatttatata

SEQ ID NO: 485389 - DNA, 15 bp, Homo sapiens
atagaatatttatat

SEQ ID NO: 485390 - DNA, 15 bp, Homo sapiens
aatagaatatttata

SEQ ID NO: 485391 - DNA, 15 bp, Homo sapiens
taatagaatatttat

SEQ ID NO: 485392 - DNA, 15 bp, Homo sapiens
gtaatagaatattta

SEQ ID NO: 485393 - DNA, 15 bp, Homo sapiens
agtaatagaatattt

SEQ ID NO: 485394 - DNA, 15 bp, Homo sapiens
aagtaatagaatatt

SEQ ID NO: 485395 - DNA, 15 bp, Homo sapiens
gaagtaatagaatat

SEQ ID NO: 485396 - DNA, 15 bp, Homo sapiens
agaagtaatagaata

SEQ ID NO: 485397 - DNA, 15 bp, Homo sapiens
cagaagtaatagaat

SEQ ID NO: 485398 - DNA, 15 bp, Homo sapiens
acagaagtaatagaa

SEQ ID NO: 485399 - DNA, 15 bp, Homo sapiens
gacagaagtaataga

SEQ ID NO: 485400 - DNA, 15 bp, Homo sapiens
ggacagaagtaatag

SEQ ID NO: 485401 - DNA, 15 bp, Homo sapiens
gggacagaagtaata

SEQ ID NO: 485402 - DNA, 15 bp, Homo sapiens
agggacagaagtaat

SEQ ID NO: 485403 - DNA, 15 bp, Homo sapiens
gagggacagaagtaa

SEQ ID NO: 485404 - DNA, 15 bp, Homo sapiens
agagggacagaagta

SEQ ID NO: 485405 - DNA, 15 bp, Homo sapiens
tagagggacagaagt

SEQ ID NO: 485406 - DNA, 15 bp, Homo sapiens
ctagagggacagaag

SEQ ID NO: 485407 - DNA, 15 bp, Homo sapiens
tctagagggacagaa

SEQ ID NO: 485408 - DNA, 15 bp, Homo sapiens
ctctagagggacaga

SEQ ID NO: 485409 - DNA, 15 bp, Homo sapiens
tctctagagggacag

SEQ ID NO: 485410 - DNA, 15 bp, Homo sapiens
ttctctagagggaca

SEQ ID NO: 485411 - DNA, 15 bp, Homo sapiens
gttctctagagggac

SEQ ID NO: 485412 - DNA, 15 bp, Homo sapiens
ggttctctagaggga

SEQ ID NO: 485413 - DNA, 15 bp, Homo sapiens
gggttctctagaggg

SEQ ID NO: 485414 - DNA, 15 bp, Homo sapiens
agggttctctagagg

SEQ ID NO: 485415 - DNA, 15 bp, Homo sapiens
tagggttctctagag

SEQ ID NO: 485416 - DNA, 15 bp, Homo sapiens
ttagggttctctaga

SEQ ID NO: 485417 - DNA, 15 bp, Homo sapiens
attagggttctctag

SEQ ID NO: 485418 - DNA, 15 bp, Homo sapiens
tattagggttctcta

SEQ ID NO: 485419 - DNA, 15 bp, Homo sapiens
ctattagggttctct

SEQ ID NO: 485420 - DNA, 15 bp, Homo sapiens
tctattagggttctc

SEQ ID NO: 485421 - DNA, 15 bp, Homo sapiens
ctctattagggttct

SEQ ID NO: 485422 - DNA, 15 bp, Homo sapiens
tctctattagggttc

SEQ ID NO: 485423 - DNA, 15 bp, Homo sapiens
atctctattagggtt

SEQ ID NO: 485424 - DNA, 15 bp, Homo sapiens
aatctctattagggt

SEQ ID NO: 485425 - DNA, 15 bp, Homo sapiens
aaatctctattaggg

SEQ ID NO: 485426 - DNA, 15 bp, Homo sapiens
aaaatctctattagg

SEQ ID NO: 485427 - DNA, 15 bp, Homo sapiens
caaaatctctattag

SEQ ID NO: 485428 - DNA, 15 bp, Homo sapiens
ccaaaatctctatta

SEQ ID NO: 485429 - DNA, 15 bp, Homo sapiens
accaaaatctctatt

SEQ ID NO: 485430 - DNA, 15 bp, Homo sapiens
taccaaaatctctat

SEQ ID NO: 485431 - DNA, 15 bp, Homo sapiens
gtaccaaaatctcta

SEQ ID NO: 485432 - DNA, 15 bp, Homo sapiens
tgtaccaaaatctct

SEQ ID NO: 485433 - DNA, 15 bp, Homo sapiens
ttgtaccaaaatctc

SEQ ID NO: 485434 - DNA, 15 bp, Homo sapiens
cttgtaccaaaatct

SEQ ID NO: 485435 - DNA, 15 bp, Homo sapiens
ccttgtaccaaaatc

SEQ ID NO: 485436 - DNA, 15 bp, Homo sapiens
tccttgtaccaaaat

SEQ ID NO: 485437 - DNA, 15 bp, Homo sapiens
ctccttgtaccaaaa

SEQ ID NO: 485438 - DNA, 15 bp, Homo sapiens
actccttgtaccaaa

SEQ ID NO: 485439 - DNA, 15 bp, Homo sapiens
cactccttgtaccaa

SEQ ID NO: 485440 - DNA, 15 bp, Homo sapiens
acactccttgtacca

SEQ ID NO: 485441 - DNA, 15 bp, Homo sapiens
cacactccttgtacc

SEQ ID NO: 485442 - DNA, 15 bp, Homo sapiens
ccacactccttgtac

SEQ ID NO: 485443 - DNA, 15 bp, Homo sapiens
accacactccttgta

SEQ ID NO: 485444 - DNA, 15 bp, Homo sapiens
aaccacactccttgt

SEQ ID NO: 485445 - DNA, 15 bp, Homo sapiens
gaaccacactccttg

SEQ ID NO: 485446 - DNA, 15 bp, Homo sapiens
agaaccacactcctt

SEQ ID NO: 485447 - DNA, 15 bp, Homo sapiens
tagaaccacactcct

SEQ ID NO: 485448 - DNA, 15 bp, Homo sapiens
ctagaaccacactcc

SEQ ID NO: 485449 - DNA, 15 bp, Homo sapiens
tctagaaccacactc

SEQ ID NO: 485450 - DNA, 15 bp, Homo sapiens
ctctagaaccacact

SEQ ID NO: 485451 - DNA, 15 bp, Homo sapiens
cctctagaaccacac

SEQ ID NO: 485452 - DNA, 15 bp, Homo sapiens
tcctctagaaccaca

SEQ ID NO: 485453 - DNA, 15 bp, Homo sapiens
ttcctctagaaccac

SEQ ID NO: 485454 - DNA, 15 bp, Homo sapiens
gttcctctagaacca

SEQ ID NO: 485455 - DNA, 15 bp, Homo sapiens
cgttcctctagaacc

SEQ ID NO: 485456 - DNA, 15 bp, Homo sapiens
ccgttcctctagaac

SEQ ID NO: 485457 - DNA, 15 bp, Homo sapiens
tccgttcctctagaa

SEQ ID NO: 485458 - DNA, 15 bp, Homo sapiens
ctccgttcctctaga

SEQ ID NO: 485459 - DNA, 15 bp, Homo sapiens
actccgttcctctag

SEQ ID NO: 485460 - DNA, 15 bp, Homo sapiens
tactccgttcctcta

SEQ ID NO: 485461 - DNA, 15 bp, Homo sapiens
atactccgttcctct

SEQ ID NO: 485462 - DNA, 15 bp, Homo sapiens
aatactccgttcctc

SEQ ID NO: 485463 - DNA, 15 bp, Homo sapiens
taatactccgttcct

SEQ ID NO: 485464 - DNA, 15 bp, Homo sapiens
ttaatactccgttcc

SEQ ID NO: 485465 - DNA, 15 bp, Homo sapiens
cttaatactccgttc

SEQ ID NO: 485466 - DNA, 15 bp, Homo sapiens
ccttaatactccgtt

SEQ ID NO: 485467 - DNA, 15 bp, Homo sapiens
tccttaatactccgt

SEQ ID NO: 485468 - DNA, 15 bp, Homo sapiens
atccttaatactccg

SEQ ID NO: 485469 - DNA, 15 bp, Homo sapiens
catccttaatactcc

SEQ ID NO: 485470 - DNA, 15 bp, Homo sapiens
ccatccttaatactc

SEQ ID NO: 485471 - DNA, 15 bp, Homo sapiens
tccatccttaatact

SEQ ID NO: 485472 - DNA, 15 bp, Homo sapiens
ctccatccttaatac

SEQ ID NO: 485473 - DNA, 15 bp, Homo sapiens
actccatccttaata

SEQ ID NO: 485474 - DNA, 15 bp, Homo sapiens
aactccatccttaat

SEQ ID NO: 485475 - DNA, 15 bp, Homo sapiens
aaactccatccttaa

SEQ ID NO: 485476 - DNA, 15 bp, Homo sapiens
gaaactccatcctta

SEQ ID NO: 485477 - DNA, 15 bp, Homo sapiens
agaaactccatcctt

SEQ ID NO: 485478 - DNA, 15 bp, Homo sapiens
aagaaactccatcct

SEQ ID NO: 485479 - DNA, 15 bp, Homo sapiens
taagaaactccatcc

SEQ ID NO: 485480 - DNA, 15 bp, Homo sapiens
ctaagaaactccatc

SEQ ID NO: 485481 - DNA, 15 bp, Homo sapiens
actaagaaactccat

SEQ ID NO: 485482 - DNA, 15 bp, Homo sapiens
aactaagaaactcca

SEQ ID NO: 485483 - DNA, 15 bp, Homo sapiens
aaactaagaaactcc

SEQ ID NO: 485484 - DNA, 15 bp, Homo sapiens
caaactaagaaactc

SEQ ID NO: 485485 - DNA, 15 bp, Homo sapiens
acaaactaagaaact

SEQ ID NO: 485486 - DNA, 15 bp, Homo sapiens
aacaaactaagaaac

SEQ ID NO: 485487 - DNA, 15 bp, Homo sapiens
aaacaaactaagaaa

SEQ ID NO: 485488 - DNA, 15 bp, Homo sapiens
caaacaaactaagaa

SEQ ID NO: 485489 - DNA, 15 bp, Homo sapiens
ccaaacaaactaaga

SEQ ID NO: 485490 - DNA, 15 bp, Homo sapiens
cccaaacaaactaag

SEQ ID NO: 485491 - DNA, 15 bp, Homo sapiens
ccccaaacaaactaa

SEQ ID NO: 485492 - DNA, 15 bp, Homo sapiens
cccccaaacaaacta

SEQ ID NO: 485493 - DNA, 15 bp, Homo sapiens
acccccaaacaaact

SEQ ID NO: 485494 - DNA, 15 bp, Homo sapiens
aacccccaaacaaac

SEQ ID NO: 485495 - DNA, 15 bp, Homo sapiens
aaacccccaaacaaa

SEQ ID NO: 485496 - DNA, 15 bp, Homo sapiens
gaaacccccaaacaa

SEQ ID NO: 485497 - DNA, 15 bp, Homo sapiens
agaaacccccaaaca

SEQ ID NO: 485498 - DNA, 15 bp, Homo sapiens
cagaaacccccaaac

SEQ ID NO: 485499 - DNA, 15 bp, Homo sapiens
ccagaaacccccaaa

SEQ ID NO: 485500 - DNA, 15 bp, Homo sapiens
tccagaaacccccaa

SEQ ID NO: 485501 - DNA, 15 bp, Homo sapiens
ctccagaaaccccca

SEQ ID NO: 485502 - DNA, 15 bp, Homo sapiens
actccagaaaccccc

SEQ ID NO: 485503 - DNA, 15 bp, Homo sapiens
aactccagaaacccc

SEQ ID NO: 485504 - DNA, 15 bp, Homo sapiens
aaactccagaaaccc

SEQ ID NO: 485505 - DNA, 15 bp, Homo sapiens
caaactccagaaacc

SEQ ID NO: 485506 - DNA, 15 bp, Homo sapiens
gcaaactccagaaac

SEQ ID NO: 485507 - DNA, 15 bp, Homo sapiens
agcaaactccagaaa

SEQ ID NO: 485508 - DNA, 15 bp, Homo sapiens
cagcaaactccagaa

SEQ ID NO: 485509 - DNA, 15 bp, Homo sapiens
gcagcaaactccaga

SEQ ID NO: 485510 - DNA, 15 bp, Homo sapiens
agcagcaaactccag

SEQ ID NO: 485511 - DNA, 15 bp, Homo sapiens
aagcagcaaactcca

SEQ ID NO: 485512 - DNA, 15 bp, Homo sapiens
taagcagcaaactcc

SEQ ID NO: 485513 - DNA, 15 bp, Homo sapiens
ttaagcagcaaactc

SEQ ID NO: 485514 - DNA, 15 bp, Homo sapiens
attaagcagcaaact

SEQ ID NO: 485515 - DNA, 15 bp, Homo sapiens
tattaagcagcaaac

SEQ ID NO: 485516 - DNA, 15 bp, Homo sapiens
atattaagcagcaaa

SEQ ID NO: 485517 - DNA, 15 bp, Homo sapiens
catattaagcagcaa

SEQ ID NO: 485518 - DNA, 15 bp, Homo sapiens
tcatattaagcagca

SEQ ID NO: 485519 - DNA, 15 bp, Homo sapiens
atcatattaagcagc

SEQ ID NO: 485520 - DNA, 15 bp, Homo sapiens
aatcatattaagcag

SEQ ID NO: 485521 - DNA, 15 bp, Homo sapiens
taatcatattaagca

SEQ ID NO: 485522 - DNA, 15 bp, Homo sapiens
ctaatcatattaagc

SEQ ID NO: 485523 - DNA, 15 bp, Homo sapiens
tctaatcatattaag

SEQ ID NO: 485524 - DNA, 15 bp, Homo sapiens
gtctaatcatattaa

SEQ ID NO: 485525 - DNA, 15 bp, Homo sapiens
ggtctaatcatatta

SEQ ID NO: 485526 - DNA, 15 bp, Homo sapiens
gggtctaatcatatt

SEQ ID NO: 485527 - DNA, 15 bp, Homo sapiens
agggtctaatcatat

SEQ ID NO: 485528 - DNA, 15 bp, Homo sapiens
tagggtctaatcata

SEQ ID NO: 485529 - DNA, 15 bp, Homo sapiens
ttagggtctaatcat

SEQ ID NO: 485530 - DNA, 15 bp, Homo sapiens
tttagggtctaatca

SEQ ID NO: 485531 - DNA, 15 bp, Homo sapiens
ttttagggtctaatc

SEQ ID NO: 485532 - DNA, 15 bp, Homo sapiens
attttagggtctaat

SEQ ID NO: 485533 - DNA, 15 bp, Homo sapiens
tattttagggtctaa

SEQ ID NO: 485534 - DNA, 15 bp, Homo sapiens
atattttagggtcta

SEQ ID NO: 485535 - DNA, 15 bp, Homo sapiens
aatattttagggtct

SEQ ID NO: 485536 - DNA, 15 bp, Homo sapiens
taatattttagggtc

SEQ ID NO: 485537 - DNA, 15 bp, Homo sapiens
ttaatattttagggt

SEQ ID NO: 485538 - DNA, 15 bp, Homo sapiens
cttaatattttaggg

SEQ ID NO: 485539 - DNA, 15 bp, Homo sapiens
ccttaatattttagg

SEQ ID NO: 485540 - DNA, 15 bp, Homo sapiens
tccttaatattttag

SEQ ID NO: 485541 - DNA, 15 bp, Homo sapiens
gtccttaatatttta

SEQ ID NO: 485542 - DNA, 15 bp, Homo sapiens
agtccttaatatttt

SEQ ID NO: 485543 - DNA, 15 bp, Homo sapiens
gagtccttaatattt

SEQ ID NO: 485544 - DNA, 15 bp, Homo sapiens
agagtccttaatatt

SEQ ID NO: 485545 - DNA, 15 bp, Homo sapiens
tagagtccttaatat

SEQ ID NO: 485546 - DNA, 15 bp, Homo sapiens
gtagagtccttaata

SEQ ID NO: 485547 - DNA, 15 bp, Homo sapiens
agtagagtccttaat

SEQ ID NO: 485548 - DNA, 15 bp, Homo sapiens
aagtagagtccttaa

SEQ ID NO: 485549 - DNA, 15 bp, Homo sapiens
gaagtagagtcctta

SEQ ID NO: 485550 - DNA, 15 bp, Homo sapiens
agaagtagagtcctt

SEQ ID NO: 485551 - DNA, 15 bp, Homo sapiens
tagaagtagagtcct

SEQ ID NO: 485552 - DNA, 15 bp, Homo sapiens
ttagaagtagagtcc

SEQ ID NO: 485553 - DNA, 15 bp, Homo sapiens
attagaagtagagtc

SEQ ID NO: 485554 - DNA, 15 bp, Homo sapiens
tattagaagtagagt

SEQ ID NO: 485555 - DNA, 15 bp, Homo sapiens
atattagaagtagag

SEQ ID NO: 485556 - DNA, 15 bp, Homo sapiens
aatattagaagtaga

SEQ ID NO: 485557 - DNA, 15 bp, Homo sapiens
caatattagaagtag

SEQ ID NO: 485558 - DNA, 15 bp, Homo sapiens
acaatattagaagta

SEQ ID NO: 485559 - DNA, 15 bp, Homo sapiens
cacaatattagaagt

SEQ ID NO: 485560 - DNA, 15 bp, Homo sapiens
ccacaatattagaag

SEQ ID NO: 485561 - DNA, 15 bp, Homo sapiens
tccacaatattagaa

SEQ ID NO: 485562 - DNA, 15 bp, Homo sapiens
ctccacaatattaga

SEQ ID NO: 485563 - DNA, 15 bp, Homo sapiens
tctccacaatattag

SEQ ID NO: 485564 - DNA, 15 bp, Homo sapiens
ttctccacaatatta

SEQ ID NO: 485565 - DNA, 15 bp, Homo sapiens
gttctccacaatatt

SEQ ID NO: 485566 - DNA, 15 bp, Homo sapiens
tgttctccacaatat

SEQ ID NO: 485567 - DNA, 15 bp, Homo sapiens
gtgttctccacaata

SEQ ID NO: 485568 - DNA, 15 bp, Homo sapiens
agtgttctccacaat

SEQ ID NO: 485569 - DNA, 15 bp, Homo sapiens
cagtgttctccacaa

SEQ ID NO: 485570 - DNA, 15 bp, Homo sapiens
tcagtgttctccaca

SEQ ID NO: 485571 - DNA, 15 bp, Homo sapiens
atcagtgttctccac

SEQ ID NO: 485572 - DNA, 15 bp, Homo sapiens
tatcagtgttctcca

SEQ ID NO: 485573 - DNA, 15 bp, Homo sapiens
ctatcagtgttctcc

SEQ ID NO: 485574 - DNA, 15 bp, Homo sapiens
actatcagtgttctc

SEQ ID NO: 485575 - DNA, 15 bp, Homo sapiens
gactatcagtgttct

SEQ ID NO: 485576 - DNA, 15 bp, Homo sapiens
cgactatcagtgttc

SEQ ID NO: 485577 - DNA, 15 bp, Homo sapiens
acgactatcagtgtt

SEQ ID NO: 485578 - DNA, 15 bp, Homo sapiens
aacgactatcagtgt

SEQ ID NO: 485579 - DNA, 15 bp, Homo sapiens
caacgactatcagtg

SEQ ID NO: 485580 - DNA, 15 bp, Homo sapiens
gcaacgactatcagt

SEQ ID NO: 485581 - DNA, 15 bp, Homo sapiens
agcaacgactatcag

SEQ ID NO: 485582 - DNA, 15 bp, Homo sapiens
cagcaacgactatca

SEQ ID NO: 485583 - DNA, 15 bp, Homo sapiens
acagcaacgactatc

SEQ ID NO: 485584 - DNA, 15 bp, Homo sapiens
cacagcaacgactat

SEQ ID NO: 485585 - DNA, 15 bp, Homo sapiens
tcacagcaacgacta

SEQ ID NO: 485586 - DNA, 15 bp, Homo sapiens
ttcacagcaacgact

SEQ ID NO: 485587 - DNA, 15 bp, Homo sapiens
gttcacagcaacgac

SEQ ID NO: 485588 - DNA, 15 bp, Homo sapiens
agttcacagcaacga

SEQ ID NO: 485589 - DNA, 15 bp, Homo sapiens
cagttcacagcaacg

SEQ ID NO: 485590 - DNA, 15 bp, Homo sapiens
acagttcacagcaac

SEQ ID NO: 485591 - DNA, 15 bp, Homo sapiens
aacagttcacagcaa

SEQ ID NO: 485592 - DNA, 15 bp, Homo sapiens
aaacagttcacagca

SEQ ID NO: 485593 - DNA, 15 bp, Homo sapiens
taaacagttcacagc

SEQ ID NO: 485594 - DNA, 15 bp, Homo sapiens
ctaaacagttcacag

SEQ ID NO: 485595 - DNA, 15 bp, Homo sapiens
tctaaacagttcaca

SEQ ID NO: 485596 - DNA, 15 bp, Homo sapiens
ctctaaacagttcac

SEQ ID NO: 485597 - DNA, 15 bp, Homo sapiens
tctctaaacagttca

SEQ ID NO: 485598 - DNA, 15 bp, Homo sapiens
ctctctaaacagttc

SEQ ID NO: 485599 - DNA, 15 bp, Homo sapiens
actctctaaacagtt

SEQ ID NO: 485600 - DNA, 15 bp, Homo sapiens
aactctctaaacagt

SEQ ID NO: 485601 - DNA, 15 bp, Homo sapiens
aaactctctaaacag

SEQ ID NO: 485602 - DNA, 15 bp, Homo sapiens
caaactctctaaaca

SEQ ID NO: 485603 - DNA, 15 bp, Homo sapiens
gcaaactctctaaac

SEQ ID NO: 485604 - DNA, 15 bp, Homo sapiens
tgcaaactctctaaa

SEQ ID NO: 485605 - DNA, 15 bp, Homo sapiens
ttgcaaactctctaa

SEQ ID NO: 485606 - DNA, 15 bp, Homo sapiens
tttgcaaactctcta

SEQ ID NO: 485607 - DNA, 15 bp, Homo sapiens
ttttgcaaactctct

SEQ ID NO: 485608 - DNA, 15 bp, Homo sapiens
attttgcaaactctc

SEQ ID NO: 485609 - DNA, 15 bp, Homo sapiens
tattttgcaaactct

SEQ ID NO: 485610 - DNA, 15 bp, Homo sapiens
ttattttgcaaactc

SEQ ID NO: 485611 - DNA, 15 bp, Homo sapiens
tttattttgcaaact

SEQ ID NO: 485612 - DNA, 15 bp, Homo sapiens
atttattttgcaaac

SEQ ID NO: 485613 - DNA, 15 bp, Homo sapiens
catttattttgcaaa

SEQ ID NO: 485614 - DNA, 15 bp, Homo sapiens
gcatttattttgcaa

SEQ ID NO: 485615 - DNA, 15 bp, Homo sapiens
tgcatttattttgca

SEQ ID NO: 485616 - DNA, 15 bp, Homo sapiens
atgcatttattttgc

SEQ ID NO: 485617 - DNA, 15 bp, Homo sapiens
aatgcatttattttg

SEQ ID NO: 485618 - DNA, 15 bp, Homo sapiens
aaatgcatttatttt

SEQ ID NO: 485619 - DNA, 15 bp, Homo sapiens
caaatgcatttattt

SEQ ID NO: 485620 - DNA, 15 bp, Homo sapiens
tcaaatgcatttatt

SEQ ID NO: 485621 - DNA, 15 bp, Homo sapiens
gtcaaatgcatttat

SEQ ID NO: 485622 - DNA, 15 bp, Homo sapiens
tgtcaaatgcattta

SEQ ID NO: 485623 - DNA, 15 bp, Homo sapiens
gtgtcaaatgcattt

SEQ ID NO: 485624 - DNA, 15 bp, Homo sapiens
agtgtcaaatgcatt

SEQ ID NO: 485625 - DNA, 15 bp, Homo sapiens
gagtgtcaaatgcat

SEQ ID NO: 485626 - DNA, 15 bp, Homo sapiens
ggagtgtcaaatgca

SEQ ID NO: 485627 - DNA, 15 bp, Homo sapiens
aggagtgtcaaatgc

SEQ ID NO: 485628 - DNA, 15 bp, Homo sapiens
caggagtgtcaaatg

SEQ ID NO: 485629 - DNA, 15 bp, Homo sapiens
tcaggagtgtcaaat

SEQ ID NO: 485630 - DNA, 15 bp, Homo sapiens
atcaggagtgtcaaa

SEQ ID NO: 485631 - DNA, 15 bp, Homo sapiens
aatcaggagtgtcaa

SEQ ID NO: 485632 - DNA, 15 bp, Homo sapiens
gaatcaggagtgtca

SEQ ID NO: 485633 - DNA, 15 bp, Homo sapiens
tgaatcaggagtgtc

SEQ ID NO: 485634 - DNA, 15 bp, Homo sapiens
gtgaatcaggagtgt

SEQ ID NO: 485635 - DNA, 15 bp, Homo sapiens
ggtgaatcaggagtg

SEQ ID NO: 485636 - DNA, 15 bp, Homo sapiens
cggtgaatcaggagt

SEQ ID NO: 485637 - DNA, 15 bp, Homo sapiens
gcggtgaatcaggag

SEQ ID NO: 485638 - DNA, 15 bp, Homo sapiens
agcggtgaatcagga

SEQ ID NO: 485639 - DNA, 15 bp, Homo sapiens
tagcggtgaatcagg

SEQ ID NO: 485640 - DNA, 15 bp, Homo sapiens
ttagcggtgaatcag

SEQ ID NO: 485641 - DNA, 15 bp, Homo sapiens
attagcggtgaatca

SEQ ID NO: 485642 - DNA, 15 bp, Homo sapiens
cattagcggtgaatc

SEQ ID NO: 485643 - DNA, 15 bp, Homo sapiens
tcattagcggtgaat

SEQ ID NO: 485644 - DNA, 15 bp, Homo sapiens
ctcattagcggtgaa

SEQ ID NO: 485645 - DNA, 15 bp, Homo sapiens
tctcattagcggtga

SEQ ID NO: 485646 - DNA, 15 bp, Homo sapiens
ctctcattagcggtg

SEQ ID NO: 485647 - DNA, 15 bp, Homo sapiens
cctctcattagcggt

SEQ ID NO: 485648 - DNA, 15 bp, Homo sapiens
gcctctcattagcgg

SEQ ID NO: 485649 - DNA, 15 bp, Homo sapiens
tgcctctcattagcg

SEQ ID NO: 485650 - DNA, 15 bp, Homo sapiens
ttgcctctcattagc

SEQ ID NO: 485651 - DNA, 15 bp, Homo sapiens
cttgcctctcattag

SEQ ID NO: 485652 - DNA, 15 bp, Homo sapiens
ccttgcctctcatta

SEQ ID NO: 485653 - DNA, 15 bp, Homo sapiens
tccttgcctctcatt

SEQ ID NO: 485654 - DNA, 15 bp, Homo sapiens
ctccttgcctctcat

SEQ ID NO: 485655 - DNA, 15 bp, Homo sapiens
actccttgcctctca

SEQ ID NO: 485656 - DNA, 15 bp, Homo sapiens
aactccttgcctctc

SEQ ID NO: 485657 - DNA, 15 bp, Homo sapiens
aaactccttgcctct

SEQ ID NO: 485658 - DNA, 15 bp, Homo sapiens
taaactccttgcctc

SEQ ID NO: 485659 - DNA, 15 bp, Homo sapiens
ctaaactccttgcct

SEQ ID NO: 485660 - DNA, 15 bp, Homo sapiens
actaaactccttgcc

SEQ ID NO: 485661 - DNA, 15 bp, Homo sapiens
cactaaactccttgc

SEQ ID NO: 485662 - DNA, 15 bp, Homo sapiens
tcactaaactccttg

SEQ ID NO: 485663 - DNA, 15 bp, Homo sapiens
gtcactaaactcctt

SEQ ID NO: 485664 - DNA, 15 bp, Homo sapiens
ggtcactaaactcct

SEQ ID NO: 485665 - DNA, 15 bp, Homo sapiens
gggtcactaaactcc

SEQ ID NO: 485666 - DNA, 15 bp, Homo sapiens
agggtcactaaactc

SEQ ID NO: 485667 - DNA, 15 bp, Homo sapiens
tagggtcactaaact

SEQ ID NO: 485668 - DNA, 15 bp, Homo sapiens
atagggtcactaaac

SEQ ID NO: 485669 - DNA, 15 bp, Homo sapiens
tatagggtcactaaa

SEQ ID NO: 485670 - DNA, 15 bp, Homo sapiens
gtatagggtcactaa

SEQ ID NO: 485671 - DNA, 15 bp, Homo sapiens
tgtatagggtcacta

SEQ ID NO: 485672 - DNA, 15 bp, Homo sapiens
atgtatagggtcact

SEQ ID NO: 485673 - DNA, 15 bp, Homo sapiens
tatgtatagggtcac

SEQ ID NO: 485674 - DNA, 15 bp, Homo sapiens
ttatgtatagggtca

SEQ ID NO: 485675 - DNA, 15 bp, Homo sapiens
attatgtatagggtc

SEQ ID NO: 485676 - DNA, 15 bp, Homo sapiens
tattatgtatagggt

SEQ ID NO: 485677 - DNA, 15 bp, Homo sapiens
ttattatgtataggg

SEQ ID NO: 485678 - DNA, 15 bp, Homo sapiens
attattatgtatagg

SEQ ID NO: 485679 - DNA, 15 bp, Homo sapiens
tattattatgtatag

SEQ ID NO: 485680 - DNA, 15 bp, Homo sapiens
gtattattatgtata

SEQ ID NO: 485681 - DNA, 15 bp, Homo sapiens
ggtattattatgtat

SEQ ID NO: 485682 - DNA, 15 bp, Homo sapiens
aggtattattatgta

SEQ ID NO: 485683 - DNA, 15 bp, Homo sapiens
aaggtattattatgt

SEQ ID NO: 485684 - DNA, 15 bp, Homo sapiens
aaaggtattattatg

SEQ ID NO: 485685 - DNA, 15 bp, Homo sapiens
caaaggtattattat

SEQ ID NO: 485686 - DNA, 15 bp, Homo sapiens
tcaaaggtattatta

SEQ ID NO: 485687 - DNA, 15 bp, Homo sapiens
gtcaaaggtattatt

SEQ ID NO: 485688 - DNA, 15 bp, Homo sapiens
ggtcaaaggtattat

SEQ ID NO: 485689 - DNA, 15 bp, Homo sapiens
tggtcaaaggtatta

SEQ ID NO: 485690 - DNA, 15 bp, Homo sapiens
atggtcaaaggtatt

SEQ ID NO: 485691 - DNA, 15 bp, Homo sapiens
tatggtcaaaggtat

SEQ ID NO: 485692 - DNA, 15 bp, Homo sapiens
atatggtcaaaggta

SEQ ID NO: 485693 - DNA, 15 bp, Homo sapiens
tatatggtcaaaggt

SEQ ID NO: 485694 - DNA, 15 bp, Homo sapiens
atatatggtcaaagg

SEQ ID NO: 485695 - DNA, 15 bp, Homo sapiens
catatatggtcaaag

SEQ ID NO: 485696 - DNA, 15 bp, Homo sapiens
ccatatatggtcaaa

SEQ ID NO: 485697 - DNA, 15 bp, Homo sapiens
tccatatatggtcaa

SEQ ID NO: 485698 - DNA, 15 bp, Homo sapiens
ctccatatatggtca

SEQ ID NO: 485699 - DNA, 15 bp, Homo sapiens
tctccatatatggtc

SEQ ID NO: 485700 - DNA, 15 bp, Homo sapiens
ttctccatatatggt

SEQ ID NO: 485701 - DNA, 15 bp, Homo sapiens
gttctccatatatgg

SEQ ID NO: 485702 - DNA, 15 bp, Homo sapiens
ggttctccatatatg

SEQ ID NO: 485703 - DNA, 15 bp, Homo sapiens
tggttctccatatat

SEQ ID NO: 485704 - DNA, 15 bp, Homo sapiens
ttggttctccatata

SEQ ID NO: 485705 - DNA, 15 bp, Homo sapiens
cttggttctccatat

SEQ ID NO: 485706 - DNA, 15 bp, Homo sapiens
ccttggttctccata

SEQ ID NO: 485707 - DNA, 15 bp, Homo sapiens
tccttggttctccat

SEQ ID NO: 485708 - DNA, 15 bp, Homo sapiens
ttccttggttctcca

SEQ ID NO: 485709 - DNA, 15 bp, Homo sapiens
gttccttggttctcc

SEQ ID NO: 485710 - DNA, 15 bp, Homo sapiens
tgttccttggttctc

SEQ ID NO: 485711 - DNA, 15 bp, Homo sapiens
atgttccttggttct

SEQ ID NO: 485712 - DNA, 15 bp, Homo sapiens
tatgttccttggttc

SEQ ID NO: 485713 - DNA, 15 bp, Homo sapiens
ttatgttccttggtt

SEQ ID NO: 485714 - DNA, 15 bp, Homo sapiens
attatgttccttggt

SEQ ID NO: 485715 - DNA, 15 bp, Homo sapiens
cattatgttccttgg

SEQ ID NO: 485716 - DNA, 15 bp, Homo sapiens
tcattatgttccttg

SEQ ID NO: 485717 - DNA, 15 bp, Homo sapiens
ttcattatgttcctt

SEQ ID NO: 485718 - DNA, 15 bp, Homo sapiens
cttcattatgttcct

SEQ ID NO: 485719 - DNA, 15 bp, Homo sapiens
gcttcattatgttcc

SEQ ID NO: 485720 - DNA, 15 bp, Homo sapiens
agcttcattatgttc

SEQ ID NO: 485721 - DNA, 15 bp, Homo sapiens
cagcttcattatgtt

SEQ ID NO: 485722 - DNA, 15 bp, Homo sapiens
ccagcttcattatgt

SEQ ID NO: 485723 - DNA, 15 bp, Homo sapiens
accagcttcattatg

SEQ ID NO: 485724 - DNA, 15 bp, Homo sapiens
aaccagcttcattat

SEQ ID NO: 485725 - DNA, 15 bp, Homo sapiens
caaccagcttcatta

SEQ ID NO: 485726 - DNA, 15 bp, Homo sapiens
ccaaccagcttcatt

SEQ ID NO: 485727 - DNA, 15 bp, Homo sapiens
accaaccagcttcat

SEQ ID NO: 485728 - DNA, 15 bp, Homo sapiens
aaccaaccagcttca

SEQ ID NO: 485729 - DNA, 15 bp, Homo sapiens
caaccaaccagcttc

SEQ ID NO: 485730 - DNA, 15 bp, Homo sapiens
gcaaccaaccagctt

SEQ ID NO: 485731 - DNA, 15 bp, Homo sapiens
agcaaccaaccagct

SEQ ID NO: 485732 - DNA, 15 bp, Homo sapiens
gagcaaccaaccagc

SEQ ID NO: 485733 - DNA, 15 bp, Homo sapiens
ggagcaaccaaccag

SEQ ID NO: 485734 - DNA, 15 bp, Homo sapiens
aggagcaaccaacca

SEQ ID NO: 485735 - DNA, 15 bp, Homo sapiens
taggagcaaccaacc

SEQ ID NO: 485736 - DNA, 15 bp, Homo sapiens
ttaggagcaaccaac

SEQ ID NO: 485737 - DNA, 15 bp, Homo sapiens
tttaggagcaaccaa

SEQ ID NO: 485738 - DNA, 15 bp, Homo sapiens
atttaggagcaacca

SEQ ID NO: 485739 - DNA, 15 bp, Homo sapiens
aatttaggagcaacc

SEQ ID NO: 485740 - DNA, 15 bp, Homo sapiens
gaatttaggagcaac

SEQ ID NO: 485741 - DNA, 15 bp, Homo sapiens
tgaatttaggagcaa

SEQ ID NO: 485742 - DNA, 15 bp, Homo sapiens
ctgaatttaggagca

SEQ ID NO: 485743 - DNA, 15 bp, Homo sapiens
actgaatttaggagc

SEQ ID NO: 485744 - DNA, 15 bp, Homo sapiens
cactgaatttaggag

SEQ ID NO: 485745 - DNA, 15 bp, Homo sapiens
ccactgaatttagga

SEQ ID NO: 485746 - DNA, 15 bp, Homo sapiens
tccactgaatttagg

SEQ ID NO: 485747 - DNA, 15 bp, Homo sapiens
gtccactgaatttag

SEQ ID NO: 485748 - DNA, 15 bp, Homo sapiens
tgtccactgaattta

SEQ ID NO: 485749 - DNA, 15 bp, Homo sapiens
ttgtccactgaattt

SEQ ID NO: 485750 - DNA, 15 bp, Homo sapiens
tttgtccactgaatt

SEQ ID NO: 485751 - DNA, 15 bp, Homo sapiens
ctttgtccactgaat

SEQ ID NO: 485752 - DNA, 15 bp, Homo sapiens
actttgtccactgaa

SEQ ID NO: 485753 - DNA, 15 bp, Homo sapiens
cactttgtccactga

SEQ ID NO: 485754 - DNA, 15 bp, Homo sapiens
ccactttgtccactg

SEQ ID NO: 485755 - DNA, 15 bp, Homo sapiens
accactttgtccact

SEQ ID NO: 485756 - DNA, 15 bp, Homo sapiens
caccactttgtccac

SEQ ID NO: 485757 - DNA, 15 bp, Homo sapiens
tcaccactttgtcca

SEQ ID NO: 485758 - DNA, 15 bp, Homo sapiens
ttcaccactttgtcc

SEQ ID NO: 485759 - DNA, 15 bp, Homo sapiens
tttcaccactttgtc

SEQ ID NO: 485760 - DNA, 15 bp, Homo sapiens
ctttcaccactttgt

SEQ ID NO: 485761 - DNA, 15 bp, Homo sapiens
tctttcaccactttg

SEQ ID NO: 485762 - DNA, 15 bp, Homo sapiens
ttctttcaccacttt

SEQ ID NO: 485763 - DNA, 15 bp, Homo sapiens
tttctttcaccactt

SEQ ID NO: 485764 - DNA, 15 bp, Homo sapiens
ttttctttcaccact

SEQ ID NO: 485765 - DNA, 15 bp, Homo sapiens
attttctttcaccac

SEQ ID NO: 485766 - DNA, 15 bp, Homo sapiens
cattttctttcacca

SEQ ID NO: 485767 - DNA, 15 bp, Homo sapiens
tcattttctttcacc

SEQ ID NO: 485768 - DNA, 15 bp, Homo sapiens
atcattttctttcac

SEQ ID NO: 485769 - DNA, 15 bp, Homo sapiens
catcattttctttca

SEQ ID NO: 485770 - DNA, 15 bp, Homo sapiens
ccatcattttctttc

SEQ ID NO: 485771 - DNA, 15 bp, Homo sapiens
cccatcattttcttt

SEQ ID NO: 485772 - DNA, 15 bp, Homo sapiens
gcccatcattttctt

SEQ ID NO: 485773 - DNA, 15 bp, Homo sapiens
ggcccatcattttct

SEQ ID NO: 485774 - DNA, 15 bp, Homo sapiens
cggcccatcattttc

SEQ ID NO: 485775 - DNA, 15 bp, Homo sapiens
ccggcccatcatttt

SEQ ID NO: 485776 - DNA, 15 bp, Homo sapiens
cccggcccatcattt

SEQ ID NO: 485777 - DNA, 15 bp, Homo sapiens
gcccggcccatcatt

SEQ ID NO: 485778 - DNA, 15 bp, Homo sapiens
cgcccggcccatcat

SEQ ID NO: 485779 - DNA, 15 bp, Homo sapiens
gcgcccggcccatca

SEQ ID NO: 485780 - DNA, 15 bp, Homo sapiens
cgcgcccggcccatc

SEQ ID NO: 485781 - DNA, 15 bp, Homo sapiens
ccgcgcccggcccat

SEQ ID NO: 485782 - DNA, 15 bp, Homo sapiens
accgcgcccggccca

SEQ ID NO: 485783 - DNA, 15 bp, Homo sapiens
caccgcgcccggccc

SEQ ID NO: 485784 - DNA, 15 bp, Homo sapiens
ccaccgcgcccggcc

SEQ ID NO: 485785 - DNA, 15 bp, Homo sapiens
gccaccgcgcccggc

SEQ ID NO: 485786 - DNA, 15 bp, Homo sapiens
agccaccgcgcccgg

SEQ ID NO: 485787 - DNA, 15 bp, Homo sapiens
gagccaccgcgcccg

SEQ ID NO: 485788 - DNA, 15 bp, Homo sapiens
cgtgatccgcccgcc

SEQ ID NO: 485789 - DNA, 15 bp, Homo sapiens
tcgtgatccgcccgc

SEQ ID NO: 485790 - DNA, 15 bp, Homo sapiens
ggtttcaccgtgtta

SEQ ID NO: 485791 - DNA, 15 bp, Homo sapiens
gggtttcaccgtgtt

SEQ ID NO: 485792 - DNA, 15 bp, Homo sapiens
agggtttcaccgtgt

SEQ ID NO: 485793 - DNA, 15 bp, Homo sapiens
cagggtttcaccgtg

SEQ ID NO: 485794 - DNA, 15 bp, Homo sapiens
acagggtttcaccgt

SEQ ID NO: 485795 - DNA, 15 bp, Homo sapiens
gacagggtttcaccg

SEQ ID NO: 485796 - DNA, 15 bp, Homo sapiens
cgcccggctaatttt

SEQ ID NO: 485797 - DNA, 15 bp, Homo sapiens
tcgcccggctaattt

SEQ ID NO: 485798 - DNA, 15 bp, Homo sapiens
ctcgcccggctaatt

SEQ ID NO: 485799 - DNA, 15 bp, Homo sapiens
cctcgcccggctaat

SEQ ID NO: 485800 - DNA, 15 bp, Homo sapiens
acctcgcccggctaa

SEQ ID NO: 485801 - DNA, 15 bp, Homo sapiens
cacctcgcccggcta

SEQ ID NO: 485802 - DNA, 15 bp, Homo sapiens
ccacctcgcccggct

SEQ ID NO: 485803 - DNA, 15 bp, Homo sapiens
gccacctcgcccggc

SEQ ID NO: 485804 - DNA, 15 bp, Homo sapiens
cgccacctcgcccgg

SEQ ID NO: 485805 - DNA, 15 bp, Homo sapiens
ccgccacctcgcccg

SEQ ID NO: 485806 - DNA, 15 bp, Homo sapiens
cccgccacctcgccc

SEQ ID NO: 485807 - DNA, 15 bp, Homo sapiens
gcccgccacctcgcc

SEQ ID NO: 485808 - DNA, 15 bp, Homo sapiens
cgcccgccacctcgc

SEQ ID NO: 485809 - DNA, 15 bp, Homo sapiens
gcgcccgccacctcg

SEQ ID NO: 485810 - DNA, 15 bp, Homo sapiens
ggcgcccgccacctc

SEQ ID NO: 485811 - DNA, 15 bp, Homo sapiens
aggcgcccgccacct

SEQ ID NO: 485812 - DNA, 15 bp, Homo sapiens
ctacaggcgcccgcc

SEQ ID NO: 485813 - DNA, 15 bp, Homo sapiens
actacaggcgcccgc

SEQ ID NO: 485814 - DNA, 15 bp, Homo sapiens
gactacaggcgcccg

SEQ ID NO: 485815 - DNA, 15 bp, Homo sapiens
ggagtagctgggact

SEQ ID NO: 485816 - DNA, 15 bp, Homo sapiens
cggagtagctgggac

SEQ ID NO: 485817 - DNA, 15 bp, Homo sapiens
ccggagtagctggga

SEQ ID NO: 485818 - DNA, 15 bp, Homo sapiens
tccggagtagctggg

SEQ ID NO: 485819 - DNA, 15 bp, Homo sapiens
ctccggagtagctgg

SEQ ID NO: 485820 - DNA, 15 bp, Homo sapiens
cctccggagtagctg

SEQ ID NO: 485821 - DNA, 15 bp, Homo sapiens
gcctccggagtagct

SEQ ID NO: 485822 - DNA, 15 bp, Homo sapiens
agcctccggagtagc

SEQ ID NO: 485823 - DNA, 15 bp, Homo sapiens
cagcctccggagtag

SEQ ID NO: 485824 - DNA, 15 bp, Homo sapiens
tcagcctccggagta

SEQ ID NO: 485825 - DNA, 15 bp, Homo sapiens
ctcagcctccggagt

SEQ ID NO: 485826 - DNA, 15 bp, Homo sapiens
cctcagcctccggag

SEQ ID NO: 485827 - DNA, 15 bp, Homo sapiens
gcctcagcctccgga

SEQ ID NO: 485828 - DNA, 15 bp, Homo sapiens
tgcctcagcctccgg

SEQ ID NO: 485829 - DNA, 15 bp, Homo sapiens
ctgcctcagcctccg

SEQ ID NO: 485830 - DNA, 15 bp, Homo sapiens
ggggttcacgccatt

SEQ ID NO: 485831 - DNA, 15 bp, Homo sapiens
tggggttcacgccat

SEQ ID NO: 485832 - DNA, 15 bp, Homo sapiens
ctggggttcacgcca

SEQ ID NO: 485833 - DNA, 15 bp, Homo sapiens
cctggggttcacgcc

SEQ ID NO: 485834 - DNA, 15 bp, Homo sapiens
ccctggggttcacgc

SEQ ID NO: 485835 - DNA, 15 bp, Homo sapiens
cccctggggttcacg

SEQ ID NO: 485836 - DNA, 15 bp, Homo sapiens
ccccctggggttcac

SEQ ID NO: 485837 - DNA, 15 bp, Homo sapiens
gccccctggggttca

SEQ ID NO: 485838 - DNA, 15 bp, Homo sapiens
cgccccctggggttc

SEQ ID NO: 485839 - DNA, 15 bp, Homo sapiens
ccgccccctggggtt

SEQ ID NO: 485840 - DNA, 15 bp, Homo sapiens
tccgccccctggggt

SEQ ID NO: 485841 - DNA, 15 bp, Homo sapiens
ctccgccccctgggg

SEQ ID NO: 485842 - DNA, 15 bp, Homo sapiens
gctccgccccctggg

SEQ ID NO: 485843 - DNA, 15 bp, Homo sapiens
ggctccgccccctgg

SEQ ID NO: 485844 - DNA, 15 bp, Homo sapiens
aggctccgccccctg

SEQ ID NO: 485845 - DNA, 15 bp, Homo sapiens
caggctccgccccct

SEQ ID NO: 485846 - DNA, 15 bp, Homo sapiens
gcaggctccgccccc

SEQ ID NO: 485847 - DNA, 15 bp, Homo sapiens
tgcaggctccgcccc

SEQ ID NO: 485848 - DNA, 15 bp, Homo sapiens
ctgcaggctccgccc

SEQ ID NO: 485849 - DNA, 15 bp, Homo sapiens
actgcaggctccgcc

SEQ ID NO: 485850 - DNA, 15 bp, Homo sapiens
cactgcaggctccgc

SEQ ID NO: 485851 - DNA, 15 bp, Homo sapiens
tcactgcaggctccg

SEQ ID NO: 485852 - DNA, 15 bp, Homo sapiens
ctcactgcaggctcc

SEQ ID NO: 485853 - DNA, 15 bp, Homo sapiens
gctcactgcaggctc

SEQ ID NO: 485854 - DNA, 15 bp, Homo sapiens
ggctcactgcaggct

SEQ ID NO: 485855 - DNA, 15 bp, Homo sapiens
cggctcactgcaggc

SEQ ID NO: 485856 - DNA, 15 bp, Homo sapiens
tcggctcactgcagg

SEQ ID NO: 485857 - DNA, 15 bp, Homo sapiens
ctcggctcactgcag

SEQ ID NO: 485858 - DNA, 15 bp, Homo sapiens
gaacagaaaaacaat

SEQ ID NO: 485859 - DNA, 15 bp, Homo sapiens
agaacagaaaaacaa

SEQ ID NO: 485860 - DNA, 15 bp, Homo sapiens
gagaacagaaaaaca

SEQ ID NO: 485861 - DNA, 15 bp, Homo sapiens
agagaacagaaaaac

SEQ ID NO: 485862 - DNA, 15 bp, Homo sapiens
gagagaacagaaaaa

SEQ ID NO: 485863 - DNA, 15 bp, Homo sapiens
agagagaacagaaaa

SEQ ID NO: 485864 - DNA, 15 bp, Homo sapiens
aagagagaacagaaa

SEQ ID NO: 485865 - DNA, 15 bp, Homo sapiens
aaagagagaacagaa

SEQ ID NO: 485866 - DNA, 15 bp, Homo sapiens
aaaagagagaacaga

SEQ ID NO: 485867 - DNA, 15 bp, Homo sapiens
gaaaagagagaacag

SEQ ID NO: 485868 - DNA, 15 bp, Homo sapiens
tgaaaagagagaaca

SEQ ID NO: 485869 - DNA, 15 bp, Homo sapiens
gtgaaaagagagaac

SEQ ID NO: 485870 - DNA, 15 bp, Homo sapiens
agtgaaaagagagaa

SEQ ID NO: 485871 - DNA, 15 bp, Homo sapiens
gagtgaaaagagaga

SEQ ID NO: 485872 - DNA, 15 bp, Homo sapiens
agagtgaaaagagag

SEQ ID NO: 485873 - DNA, 15 bp, Homo sapiens
tagagtgaaaagaga

SEQ ID NO: 485874 - DNA, 15 bp, Homo sapiens
ttagagtgaaaagag

SEQ ID NO: 485875 - DNA, 15 bp, Homo sapiens
attagagtgaaaaga

SEQ ID NO: 485876 - DNA, 15 bp, Homo sapiens
aattagagtgaaaag

SEQ ID NO: 485877 - DNA, 15 bp, Homo sapiens
aaattagagtgaaaa

SEQ ID NO: 485878 - DNA, 15 bp, Homo sapiens
aaaattagagtgaaa

SEQ ID NO: 485879 - DNA, 15 bp, Homo sapiens
aaaaattagagtgaa

SEQ ID NO: 485880 - DNA, 15 bp, Homo sapiens
taaaaattagagtga

SEQ ID NO: 485881 - DNA, 15 bp, Homo sapiens
ataaaaattagagtg

SEQ ID NO: 485882 - DNA, 15 bp, Homo sapiens
aataaaaattagagt

SEQ ID NO: 485883 - DNA, 15 bp, Homo sapiens
taataaaaattagag

SEQ ID NO: 485884 - DNA, 15 bp, Homo sapiens
ataataaaaattaga

SEQ ID NO: 485885 - DNA, 15 bp, Homo sapiens
aataataaaaattag

SEQ ID NO: 485886 - DNA, 15 bp, Homo sapiens
aaataataaaaatta

SEQ ID NO: 485887 - DNA, 15 bp, Homo sapiens
aaaataataaaaatt

SEQ ID NO: 485888 - DNA, 15 bp, Homo sapiens
gaaaataataaaaat

SEQ ID NO: 485889 - DNA, 15 bp, Homo sapiens
agaaaataataaaaa

SEQ ID NO: 485890 - DNA, 15 bp, Homo sapiens
aagaaaataataaaa

SEQ ID NO: 485891 - DNA, 15 bp, Homo sapiens
aaagaaaataataaa

SEQ ID NO: 485892 - DNA, 15 bp, Homo sapiens
gaaagaaaataataa

SEQ ID NO: 485893 - DNA, 15 bp, Homo sapiens
agaaagaaaataata

SEQ ID NO: 485894 - DNA, 15 bp, Homo sapiens
aagaaagaaaataat

SEQ ID NO: 485895 - DNA, 15 bp, Homo sapiens
gaagaaagaaaataa

SEQ ID NO: 485896 - DNA, 15 bp, Homo sapiens
agaagaaagaaaata

SEQ ID NO: 485897 - DNA, 15 bp, Homo sapiens
cagaagaaagaaaat

SEQ ID NO: 485898 - DNA, 15 bp, Homo sapiens
gcagaagaaagaaaa

SEQ ID NO: 485899 - DNA, 15 bp, Homo sapiens
agcagaagaaagaaa

SEQ ID NO: 485900 - DNA, 15 bp, Homo sapiens
tagcagaagaaagaa

SEQ ID NO: 485901 - DNA, 15 bp, Homo sapiens
ctagcagaagaaaga

SEQ ID NO: 485902 - DNA, 15 bp, Homo sapiens
gctagcagaagaaag

SEQ ID NO: 485903 - DNA, 15 bp, Homo sapiens
agctagcagaagaaa

SEQ ID NO: 485904 - DNA, 15 bp, Homo sapiens
aagctagcagaagaa

SEQ ID NO: 485905 - DNA, 15 bp, Homo sapiens
aaagctagcagaaga

SEQ ID NO: 485906 - DNA, 15 bp, Homo sapiens
caaagctagcagaag

SEQ ID NO: 485907 - DNA, 15 bp, Homo sapiens
ccaaagctagcagaa

SEQ ID NO: 485908 - DNA, 15 bp, Homo sapiens
accaaagctagcaga

SEQ ID NO: 485909 - DNA, 15 bp, Homo sapiens
caccaaagctagcag

SEQ ID NO: 485910 - DNA, 15 bp, Homo sapiens
acaccaaagctagca

SEQ ID NO: 485911 - DNA, 15 bp, Homo sapiens
tacaccaaagctagc

SEQ ID NO: 485912 - DNA, 15 bp, Homo sapiens
ctacaccaaagctag

SEQ ID NO: 485913 - DNA, 15 bp, Homo sapiens
actacaccaaagcta

SEQ ID NO: 485914 - DNA, 15 bp, Homo sapiens
aactacaccaaagct

SEQ ID NO: 485915 - DNA, 15 bp, Homo sapiens
aaactacaccaaagc

SEQ ID NO: 485916 - DNA, 15 bp, Homo sapiens
taaactacaccaaag

SEQ ID NO: 485917 - DNA, 15 bp, Homo sapiens
gtaaactacaccaaa

SEQ ID NO: 485918 - DNA, 15 bp, Homo sapiens
agtaaactacaccaa

SEQ ID NO: 485919 - DNA, 15 bp, Homo sapiens
gagtaaactacacca

SEQ ID NO: 485920 - DNA, 15 bp, Homo sapiens
agagtaaactacacc

SEQ ID NO: 485921 - DNA, 15 bp, Homo sapiens
aagagtaaactacac

SEQ ID NO: 485922 - DNA, 15 bp, Homo sapiens
aaagagtaaactaca

SEQ ID NO: 485923 - DNA, 15 bp, Homo sapiens
aaaagagtaaactac

SEQ ID NO: 485924 - DNA, 15 bp, Homo sapiens
aaaaagagtaaacta

SEQ ID NO: 485925 - DNA, 15 bp, Homo sapiens
gaaaaagagtaaact

SEQ ID NO: 485926 - DNA, 15 bp, Homo sapiens
agaaaaagagtaaac

SEQ ID NO: 485927 - DNA, 15 bp, Homo sapiens
tagaaaaagagtaaa

SEQ ID NO: 485928 - DNA, 15 bp, Homo sapiens
ctagaaaaagagtaa

SEQ ID NO: 485929 - DNA, 15 bp, Homo sapiens
actagaaaaagagta

SEQ ID NO: 485930 - DNA, 15 bp, Homo sapiens
aactagaaaaagagt

SEQ ID NO: 485931 - DNA, 15 bp, Homo sapiens
gaactagaaaaagag

SEQ ID NO: 485932 - DNA, 15 bp, Homo sapiens
ggaactagaaaaaga

SEQ ID NO: 485933 - DNA, 15 bp, Homo sapiens
aggaactagaaaaag

SEQ ID NO: 485934 - DNA, 15 bp, Homo sapiens
aaggaactagaaaaa

SEQ ID NO: 485935 - DNA, 15 bp, Homo sapiens
caaggaactagaaaa

SEQ ID NO: 485936 - DNA, 15 bp, Homo sapiens
tcaaggaactagaaa

SEQ ID NO: 485937 - DNA, 15 bp, Homo sapiens
ctcaaggaactagaa

SEQ ID NO: 485938 - DNA, 15 bp, Homo sapiens
cctcaaggaactaga

SEQ ID NO: 485939 - DNA, 15 bp, Homo sapiens
acctcaaggaactag

SEQ ID NO: 485940 - DNA, 15 bp, Homo sapiens
tacctcaaggaacta

SEQ ID NO: 485941 - DNA, 15 bp, Homo sapiens
atacctcaaggaact

SEQ ID NO: 485942 - DNA, 15 bp, Homo sapiens
tatacctcaaggaac

SEQ ID NO: 485943 - DNA, 15 bp, Homo sapiens
atatacctcaaggaa

SEQ ID NO: 485944 - DNA, 15 bp, Homo sapiens
catatacctcaagga

SEQ ID NO: 485945 - DNA, 15 bp, Homo sapiens
ccatatacctcaagg

SEQ ID NO: 485946 - DNA, 15 bp, Homo sapiens
accatatacctcaag

SEQ ID NO: 485947 - DNA, 15 bp, Homo sapiens
aaccatatacctcaa

SEQ ID NO: 485948 - DNA, 15 bp, Homo sapiens
taaccatatacctca

SEQ ID NO: 485949 - DNA, 15 bp, Homo sapiens
ctaaccatatacctc

SEQ ID NO: 485950 - DNA, 15 bp, Homo sapiens
cctaaccatatacct

SEQ ID NO: 485951 - DNA, 15 bp, Homo sapiens
acctaaccatatacc

SEQ ID NO: 485952 - DNA, 15 bp, Homo sapiens
aacctaaccatatac

SEQ ID NO: 485953 - DNA, 15 bp, Homo sapiens
taacctaaccatata

SEQ ID NO: 485954 - DNA, 15 bp, Homo sapiens
ataacctaaccatat

SEQ ID NO: 485955 - DNA, 15 bp, Homo sapiens
aataacctaaccata

SEQ ID NO: 485956 - DNA, 15 bp, Homo sapiens
caataacctaaccat

SEQ ID NO: 485957 - DNA, 15 bp, Homo sapiens
tcaataacctaacca

SEQ ID NO: 485958 - DNA, 15 bp, Homo sapiens
ttcaataacctaacc

SEQ ID NO: 485959 - DNA, 15 bp, Homo sapiens
attcaataacctaac

SEQ ID NO: 485960 - DNA, 15 bp, Homo sapiens
cattcaataacctaa

SEQ ID NO: 485961 - DNA, 15 bp, Homo sapiens
tcattcaataaccta

SEQ ID NO: 485962 - DNA, 15 bp, Homo sapiens
ctcattcaataacct

SEQ ID NO: 485963 - DNA, 15 bp, Homo sapiens
tctcattcaataacc

SEQ ID NO: 485964 - DNA, 15 bp, Homo sapiens
ttctcattcaataac

SEQ ID NO: 485965 - DNA, 15 bp, Homo sapiens
gttctcattcaataa

SEQ ID NO: 485966 - DNA, 15 bp, Homo sapiens
agttctcattcaata

SEQ ID NO: 485967 - DNA, 15 bp, Homo sapiens
aagttctcattcaat

SEQ ID NO: 485968 - DNA, 15 bp, Homo sapiens
aaagttctcattcaa

SEQ ID NO: 485969 - DNA, 15 bp, Homo sapiens
gaaagttctcattca

SEQ ID NO: 485970 - DNA, 15 bp, Homo sapiens
agaaagttctcattc

SEQ ID NO: 485971 - DNA, 15 bp, Homo sapiens
aagaaagttctcatt

SEQ ID NO: 485972 - DNA, 15 bp, Homo sapiens
taagaaagttctcat

SEQ ID NO: 485973 - DNA, 15 bp, Homo sapiens
ataagaaagttctca

SEQ ID NO: 485974 - DNA, 15 bp, Homo sapiens
aataagaaagttctc

SEQ ID NO: 485975 - DNA, 15 bp, Homo sapiens
aaataagaaagttct

SEQ ID NO: 485976 - DNA, 15 bp, Homo sapiens
aaaataagaaagttc

SEQ ID NO: 485977 - DNA, 15 bp, Homo sapiens
aaaaataagaaagtt

SEQ ID NO: 485978 - DNA, 15 bp, Homo sapiens
aaaaaataagaaagt

SEQ ID NO: 485979 - DNA, 15 bp, Homo sapiens
caaaaaataagaaag

SEQ ID NO: 485980 - DNA, 15 bp, Homo sapiens
tcaaaaaataagaaa

SEQ ID NO: 485981 - DNA, 15 bp, Homo sapiens
atcaaaaaataagaa

SEQ ID NO: 485982 - DNA, 15 bp, Homo sapiens
catcaaaaaataaga

SEQ ID NO: 485983 - DNA, 15 bp, Homo sapiens
acatcaaaaaataag

SEQ ID NO: 485984 - DNA, 15 bp, Homo sapiens
gacatcaaaaaataa

SEQ ID NO: 485985 - DNA, 15 bp, Homo sapiens
tgacatcaaaaaata

SEQ ID NO: 485986 - DNA, 15 bp, Homo sapiens
ctgacatcaaaaaat

SEQ ID NO: 485987 - DNA, 15 bp, Homo sapiens
actgacatcaaaaaa

SEQ ID NO: 485988 - DNA, 15 bp, Homo sapiens
cactgacatcaaaaa

SEQ ID NO: 485989 - DNA, 15 bp, Homo sapiens
acactgacatcaaaa

SEQ ID NO: 485990 - DNA, 15 bp, Homo sapiens
aacactgacatcaaa

SEQ ID NO: 485991 - DNA, 15 bp, Homo sapiens
aaacactgacatcaa

SEQ ID NO: 485992 - DNA, 15 bp, Homo sapiens
taaacactgacatca

SEQ ID NO: 485993 - DNA, 15 bp, Homo sapiens
gtaaacactgacatc

SEQ ID NO: 485994 - DNA, 15 bp, Homo sapiens
tgtaaacactgacat

SEQ ID NO: 485995 - DNA, 15 bp, Homo sapiens
ctgtaaacactgaca

SEQ ID NO: 485996 - DNA, 15 bp, Homo sapiens
cctgtaaacactgac

SEQ ID NO: 485997 - DNA, 15 bp, Homo sapiens
acctgtaaacactga

SEQ ID NO: 485998 - DNA, 15 bp, Homo sapiens
aacctgtaaacactg

SEQ ID NO: 485999 - DNA, 15 bp, Homo sapiens
aaacctgtaaacact

SEQ ID NO: 486000 - DNA, 15 bp, Homo sapiens
taaacctgtaaacac

SEQ ID NO: 486001 - DNA, 15 bp, Homo sapiens
gtaaacctgtaaaca

SEQ ID NO: 486002 - DNA, 15 bp, Homo sapiens
tgtaaacctgtaaac

SEQ ID NO: 486003 - DNA, 15 bp, Homo sapiens
atgtaaacctgtaaa

SEQ ID NO: 486004 - DNA, 15 bp, Homo sapiens
aatgtaaacctgtaa

SEQ ID NO: 486005 - DNA, 15 bp, Homo sapiens
aaatgtaaacctgta

SEQ ID NO: 486006 - DNA, 15 bp, Homo sapiens
aaaatgtaaacctgt

SEQ ID NO: 486007 - DNA, 15 bp, Homo sapiens
aaaaatgtaaacctg

SEQ ID NO: 486008 - DNA, 15 bp, Homo sapiens
gaaaaatgtaaacct

SEQ ID NO: 486009 - DNA, 15 bp, Homo sapiens
agaaaaatgtaaacc

SEQ ID NO: 486010 - DNA, 15 bp, Homo sapiens
aagaaaaatgtaaac

SEQ ID NO: 486011 - DNA, 15 bp, Homo sapiens
aaagaaaaatgtaaa

SEQ ID NO: 486012 - DNA, 15 bp, Homo sapiens
aaaagaaaaatgtaa

SEQ ID NO: 486013 - DNA, 15 bp, Homo sapiens
taaaagaaaaatgta

SEQ ID NO: 486014 - DNA, 15 bp, Homo sapiens
ctaaaagaaaaatgt

SEQ ID NO: 486015 - DNA, 15 bp, Homo sapiens
gctaaaagaaaaatg

SEQ ID NO: 486016 - DNA, 15 bp, Homo sapiens
agctaaaagaaaaat

SEQ ID NO: 486017 - DNA, 15 bp, Homo sapiens
gagctaaaagaaaaa

SEQ ID NO: 486018 - DNA, 15 bp, Homo sapiens
agagctaaaagaaaa

SEQ ID NO: 486019 - DNA, 15 bp, Homo sapiens
cagagctaaaagaaa

SEQ ID NO: 486020 - DNA, 15 bp, Homo sapiens
gcagagctaaaagaa

SEQ ID NO: 486021 - DNA, 15 bp, Homo sapiens
tgcagagctaaaaga

SEQ ID NO: 486022 - DNA, 15 bp, Homo sapiens
atgcagagctaaaag

SEQ ID NO: 486023 - DNA, 15 bp, Homo sapiens
aatgcagagctaaaa

SEQ ID NO: 486024 - DNA, 15 bp, Homo sapiens
gaatgcagagctaaa

SEQ ID NO: 486025 - DNA, 15 bp, Homo sapiens
tgaatgcagagctaa

SEQ ID NO: 486026 - DNA, 15 bp, Homo sapiens
gtgaatgcagagcta

SEQ ID NO: 486027 - DNA, 15 bp, Homo sapiens
agtgaatgcagagct

SEQ ID NO: 486028 - DNA, 15 bp, Homo sapiens
cagtgaatgcagagc

SEQ ID NO: 486029 - DNA, 15 bp, Homo sapiens
gcagtgaatgcagag

SEQ ID NO: 486030 - DNA, 15 bp, Homo sapiens
tgcagtgaatgcaga

SEQ ID NO: 486031 - DNA, 15 bp, Homo sapiens
atgcagtgaatgcag

SEQ ID NO: 486032 - DNA, 15 bp, Homo sapiens
gatgcagtgaatgca

SEQ ID NO: 486033 - DNA, 15 bp, Homo sapiens
ggatgcagtgaatgc

SEQ ID NO: 486034 - DNA, 15 bp, Homo sapiens
aggatgcagtgaatg

SEQ ID NO: 486035 - DNA, 15 bp, Homo sapiens
taggatgcagtgaat

SEQ ID NO: 486036 - DNA, 15 bp, Homo sapiens
ataggatgcagtgaa

SEQ ID NO: 486037 - DNA, 15 bp, Homo sapiens
tataggatgcagtga

SEQ ID NO: 486038 - DNA, 15 bp, Homo sapiens
ttataggatgcagtg

SEQ ID NO: 486039 - DNA, 15 bp, Homo sapiens
cttataggatgcagt

SEQ ID NO: 486040 - DNA, 15 bp, Homo sapiens
acttataggatgcag

SEQ ID NO: 486041 - DNA, 15 bp, Homo sapiens
aacttataggatgca

SEQ ID NO: 486042 - DNA, 15 bp, Homo sapiens
aaacttataggatgc

SEQ ID NO: 486043 - DNA, 15 bp, Homo sapiens
aaaacttataggatg

SEQ ID NO: 486044 - DNA, 15 bp, Homo sapiens
taaaacttataggat

SEQ ID NO: 486045 - DNA, 15 bp, Homo sapiens
ctaaaacttatagga

SEQ ID NO: 486046 - DNA, 15 bp, Homo sapiens
actaaaacttatagg

SEQ ID NO: 486047 - DNA, 15 bp, Homo sapiens
tactaaaacttatag

SEQ ID NO: 486048 - DNA, 15 bp, Homo sapiens
atactaaaacttata

SEQ ID NO: 486049 - DNA, 15 bp, Homo sapiens
catactaaaacttat

SEQ ID NO: 486050 - DNA, 15 bp, Homo sapiens
acatactaaaactta

SEQ ID NO: 486051 - DNA, 15 bp, Homo sapiens
aacatactaaaactt

SEQ ID NO: 486052 - DNA, 15 bp, Homo sapiens
caacatactaaaact

SEQ ID NO: 486053 - DNA, 15 bp, Homo sapiens
acaacatactaaaac

SEQ ID NO: 486054 - DNA, 15 bp, Homo sapiens
cacaacatactaaaa

SEQ ID NO: 486055 - DNA, 15 bp, Homo sapiens
acacaacatactaaa

SEQ ID NO: 486056 - DNA, 15 bp, Homo sapiens
aacacaacatactaa

SEQ ID NO: 486057 - DNA, 15 bp, Homo sapiens
aaacacaacatacta

SEQ ID NO: 486058 - DNA, 15 bp, Homo sapiens
aaaacacaacatact

SEQ ID NO: 486059 - DNA, 15 bp, Homo sapiens
gaaaacacaacatac

SEQ ID NO: 486060 - DNA, 15 bp, Homo sapiens
cgaaaacacaacata

SEQ ID NO: 486061 - DNA, 15 bp, Homo sapiens
acgaaaacacaacat

SEQ ID NO: 486062 - DNA, 15 bp, Homo sapiens
aacgaaaacacaaca

SEQ ID NO: 486063 - DNA, 15 bp, Homo sapiens
aaacgaaaacacaac

SEQ ID NO: 486064 - DNA, 15 bp, Homo sapiens
aaaacgaaaacacaa

SEQ ID NO: 486065 - DNA, 15 bp, Homo sapiens
gaaaacgaaaacaca

SEQ ID NO: 486066 - DNA, 15 bp, Homo sapiens
tgaaaacgaaaacac

SEQ ID NO: 486067 - DNA, 15 bp, Homo sapiens
atgaaaacgaaaaca

SEQ ID NO: 486068 - DNA, 15 bp, Homo sapiens
aatgaaaacgaaaac

SEQ ID NO: 486069 - DNA, 15 bp, Homo sapiens
aaatgaaaacgaaaa

SEQ ID NO: 486070 - DNA, 15 bp, Homo sapiens
taaatgaaaacgaaa

SEQ ID NO: 486071 - DNA, 15 bp, Homo sapiens
ataaatgaaaacgaa

SEQ ID NO: 486072 - DNA, 15 bp, Homo sapiens
gataaatgaaaacga

SEQ ID NO: 486073 - DNA, 15 bp, Homo sapiens
agataaatgaaaacg

SEQ ID NO: 486074 - DNA, 15 bp, Homo sapiens
gagataaatgaaaac

SEQ ID NO: 486075 - DNA, 15 bp, Homo sapiens
tgagataaatgaaaa

SEQ ID NO: 486076 - DNA, 15 bp, Homo sapiens
gtgagataaatgaaa

SEQ ID NO: 486077 - DNA, 15 bp, Homo sapiens
cgtgagataaatgaa

SEQ ID NO: 486078 - DNA, 15 bp, Homo sapiens
acgtgagataaatga

SEQ ID NO: 486079 - DNA, 15 bp, Homo sapiens
aacgtgagataaatg

SEQ ID NO: 486080 - DNA, 15 bp, Homo sapiens
caacgtgagataaat

SEQ ID NO: 486081 - DNA, 15 bp, Homo sapiens
ccaacgtgagataaa

SEQ ID NO: 486082 - DNA, 15 bp, Homo sapiens
accaacgtgagataa

SEQ ID NO: 486083 - DNA, 15 bp, Homo sapiens
aaccaacgtgagata

SEQ ID NO: 486084 - DNA, 15 bp, Homo sapiens
aaaccaacgtgagat

SEQ ID NO: 486085 - DNA, 15 bp, Homo sapiens
gaaaccaacgtgaga

SEQ ID NO: 486086 - DNA, 15 bp, Homo sapiens
agaaaccaacgtgag

SEQ ID NO: 486087 - DNA, 15 bp, Homo sapiens
tagaaaccaacgtga

SEQ ID NO: 486088 - DNA, 15 bp, Homo sapiens
ttagaaaccaacgtg

SEQ ID NO: 486089 - DNA, 15 bp, Homo sapiens
attagaaaccaacgt

SEQ ID NO: 486090 - DNA, 15 bp, Homo sapiens
aattagaaaccaacg

SEQ ID NO: 486091 - DNA, 15 bp, Homo sapiens
aaattagaaaccaac

SEQ ID NO: 486092 - DNA, 15 bp, Homo sapiens
gaaattagaaaccaa

SEQ ID NO: 486093 - DNA, 15 bp, Homo sapiens
ggaaattagaaacca

SEQ ID NO: 486094 - DNA, 15 bp, Homo sapiens
aggaaattagaaacc

SEQ ID NO: 486095 - DNA, 15 bp, Homo sapiens
aaggaaattagaaac

SEQ ID NO: 486096 - DNA, 15 bp, Homo sapiens
aaaggaaattagaaa

SEQ ID NO: 486097 - DNA, 15 bp, Homo sapiens
caaaggaaattagaa

SEQ ID NO: 486098 - DNA, 15 bp, Homo sapiens
acaaaggaaattaga

SEQ ID NO: 486099 - DNA, 15 bp, Homo sapiens
cacaaaggaaattag

SEQ ID NO: 486100 - DNA, 15 bp, Homo sapiens
tcacaaaggaaatta

SEQ ID NO: 486101 - DNA, 15 bp, Homo sapiens
atcacaaaggaaatt

SEQ ID NO: 486102 - DNA, 15 bp, Homo sapiens
aatcacaaaggaaat

SEQ ID NO: 486103 - DNA, 15 bp, Homo sapiens
aaatcacaaaggaaa

SEQ ID NO: 486104 - DNA, 15 bp, Homo sapiens
aaaatcacaaaggaa

SEQ ID NO: 486105 - DNA, 15 bp, Homo sapiens
aaaaatcacaaagga

SEQ ID NO: 486106 - DNA, 15 bp, Homo sapiens
aaaaaatcacaaagg

SEQ ID NO: 486107 - DNA, 15 bp, Homo sapiens
gaaaaaatcacaaag

SEQ ID NO: 486108 - DNA, 15 bp, Homo sapiens
ggaaaaaatcacaaa

SEQ ID NO: 486109 - DNA, 15 bp, Homo sapiens
aggaaaaaatcacaa

SEQ ID NO: 486110 - DNA, 15 bp, Homo sapiens
aaggaaaaaatcaca

SEQ ID NO: 486111 - DNA, 15 bp, Homo sapiens
aaaggaaaaaatcac

SEQ ID NO: 486112 - DNA, 15 bp, Homo sapiens
caaaggaaaaaatca

SEQ ID NO: 486113 - DNA, 15 bp, Homo sapiens
tcaaaggaaaaaatc

SEQ ID NO: 486114 - DNA, 15 bp, Homo sapiens
atcaaaggaaaaaat

SEQ ID NO: 486115 - DNA, 15 bp, Homo sapiens
gatcaaaggaaaaaa

SEQ ID NO: 486116 - DNA, 15 bp, Homo sapiens
agatcaaaggaaaaa

SEQ ID NO: 486117 - DNA, 15 bp, Homo sapiens
tagatcaaaggaaaa

SEQ ID NO: 486118 - DNA, 15 bp, Homo sapiens
atagatcaaaggaaa

SEQ ID NO: 486119 - DNA, 15 bp, Homo sapiens
aatagatcaaaggaa

SEQ ID NO: 486120 - DNA, 15 bp, Homo sapiens
taatagatcaaagga

SEQ ID NO: 486121 - DNA, 15 bp, Homo sapiens
ctaatagatcaaagg

SEQ ID NO: 486122 - DNA, 15 bp, Homo sapiens
actaatagatcaaag

SEQ ID NO: 486123 - DNA, 15 bp, Homo sapiens
aactaatagatcaaa

SEQ ID NO: 486124 - DNA, 15 bp, Homo sapiens
taactaatagatcaa

SEQ ID NO: 486125 - DNA, 15 bp, Homo sapiens
ttaactaatagatca

SEQ ID NO: 486126 - DNA, 15 bp, Homo sapiens
gttaactaatagatc

SEQ ID NO: 486127 - DNA, 15 bp, Homo sapiens
tgttaactaatagat

SEQ ID NO: 486128 - DNA, 15 bp, Homo sapiens
atgttaactaataga

SEQ ID NO: 486129 - DNA, 15 bp, Homo sapiens
aatgttaactaatag

SEQ ID NO: 486130 - DNA, 15 bp, Homo sapiens
gaatgttaactaata

SEQ ID NO: 486131 - DNA, 15 bp, Homo sapiens
tgaatgttaactaat

SEQ ID NO: 486132 - DNA, 15 bp, Homo sapiens
gtgaatgttaactaa

SEQ ID NO: 486133 - DNA, 15 bp, Homo sapiens
tgtgaatgttaacta

SEQ ID NO: 486134 - DNA, 15 bp, Homo sapiens
ttgtgaatgttaact

SEQ ID NO: 486135 - DNA, 15 bp, Homo sapiens
tttgtgaatgttaac

SEQ ID NO: 486136 - DNA, 15 bp, Homo sapiens
atttgtgaatgttaa

SEQ ID NO: 486137 - DNA, 15 bp, Homo sapiens
aatttgtgaatgtta

SEQ ID NO: 486138 - DNA, 15 bp, Homo sapiens
aaatttgtgaatgtt

SEQ ID NO: 486139 - DNA, 15 bp, Homo sapiens
aaaatttgtgaatgt

SEQ ID NO: 486140 - DNA, 15 bp, Homo sapiens
gaaaatttgtgaatg

SEQ ID NO: 486141 - DNA, 15 bp, Homo sapiens
tgaaaatttgtgaat

SEQ ID NO: 486142 - DNA, 15 bp, Homo sapiens
gtgaaaatttgtgaa

SEQ ID NO: 486143 - DNA, 15 bp, Homo sapiens
tgtgaaaatttgtga

SEQ ID NO: 486144 - DNA, 15 bp, Homo sapiens
atgtgaaaatttgtg

SEQ ID NO: 486145 - DNA, 15 bp, Homo sapiens
tatgtgaaaatttgt

SEQ ID NO: 486146 - DNA, 15 bp, Homo sapiens
atatgtgaaaatttg

SEQ ID NO: 486147 - DNA, 15 bp, Homo sapiens
aatatgtgaaaattt

SEQ ID NO: 486148 - DNA, 15 bp, Homo sapiens
aaatatgtgaaaatt

SEQ ID NO: 486149 - DNA, 15 bp, Homo sapiens
caaatatgtgaaaat

SEQ ID NO: 486150 - DNA, 15 bp, Homo sapiens
acaaatatgtgaaaa

SEQ ID NO: 486151 - DNA, 15 bp, Homo sapiens
cacaaatatgtgaaa

SEQ ID NO: 486152 - DNA, 15 bp, Homo sapiens
tcacaaatatgtgaa

SEQ ID NO: 486153 - DNA, 15 bp, Homo sapiens
ttcacaaatatgtga

SEQ ID NO: 486154 - DNA, 15 bp, Homo sapiens
attcacaaatatgtg

SEQ ID NO: 486155 - DNA, 15 bp, Homo sapiens
aattcacaaatatgt

SEQ ID NO: 486156 - DNA, 15 bp, Homo sapiens
aaattcacaaatatg

SEQ ID NO: 486157 - DNA, 15 bp, Homo sapiens
aaaattcacaaatat

SEQ ID NO: 486158 - DNA, 15 bp, Homo sapiens
aaaaattcacaaata

SEQ ID NO: 486159 - DNA, 15 bp, Homo sapiens
aaaaaattcacaaat

SEQ ID NO: 486160 - DNA, 15 bp, Homo sapiens
taaaaaattcacaaa

SEQ ID NO: 486161 - DNA, 15 bp, Homo sapiens
ctaaaaaattcacaa

SEQ ID NO: 486162 - DNA, 15 bp, Homo sapiens
actaaaaaattcaca

SEQ ID NO: 486163 - DNA, 15 bp, Homo sapiens
aactaaaaaattcac

SEQ ID NO: 486164 - DNA, 15 bp, Homo sapiens
aaactaaaaaattca

SEQ ID NO: 486165 - DNA, 15 bp, Homo sapiens
aaaactaaaaaattc

SEQ ID NO: 486166 - DNA, 15 bp, Homo sapiens
aaaaactaaaaaatt

SEQ ID NO: 486167 - DNA, 15 bp, Homo sapiens
aaaaaactaaaaaat

SEQ ID NO: 486168 - DNA, 15 bp, Homo sapiens
aaaaaaactaaaaaa

SEQ ID NO: 486169 - DNA, 15 bp, Homo sapiens
taaaaaaactaaaaa

SEQ ID NO: 486170 - DNA, 15 bp, Homo sapiens
ataaaaaaactaaaa

SEQ ID NO: 486171 - DNA, 15 bp, Homo sapiens
gataaaaaaactaaa

SEQ ID NO: 486172 - DNA, 15 bp, Homo sapiens
agataaaaaaactaa

SEQ ID NO: 486173 - DNA, 15 bp, Homo sapiens
cagataaaaaaacta

SEQ ID NO: 486174 - DNA, 15 bp, Homo sapiens
gcagataaaaaaact

SEQ ID NO: 486175 - DNA, 15 bp, Homo sapiens
agcagataaaaaaac

SEQ ID NO: 486176 - DNA, 15 bp, Homo sapiens
cagcagataaaaaaa

SEQ ID NO: 486177 - DNA, 15 bp, Homo sapiens
acagcagataaaaaa

SEQ ID NO: 486178 - DNA, 15 bp, Homo sapiens
aacagcagataaaaa

SEQ ID NO: 486179 - DNA, 15 bp, Homo sapiens
caacagcagataaaa

SEQ ID NO: 486180 - DNA, 15 bp, Homo sapiens
ccaacagcagataaa

SEQ ID NO: 486181 - DNA, 15 bp, Homo sapiens
accaacagcagataa

SEQ ID NO: 486182 - DNA, 15 bp, Homo sapiens
aaccaacagcagata

SEQ ID NO: 486183 - DNA, 15 bp, Homo sapiens
aaaccaacagcagat

SEQ ID NO: 486184 - DNA, 15 bp, Homo sapiens
aaaaccaacagcaga

SEQ ID NO: 486185 - DNA, 15 bp, Homo sapiens
aaaaaccaacagcag

SEQ ID NO: 486186 - DNA, 15 bp, Homo sapiens
gaaaaaccaacagca

SEQ ID NO: 486187 - DNA, 15 bp, Homo sapiens
tgaaaaaccaacagc

SEQ ID NO: 486188 - DNA, 15 bp, Homo sapiens
atgaaaaaccaacag

SEQ ID NO: 486189 - DNA, 15 bp, Homo sapiens
aatgaaaaaccaaca

SEQ ID NO: 486190 - DNA, 15 bp, Homo sapiens
aaatgaaaaaccaac

SEQ ID NO: 486191 - DNA, 15 bp, Homo sapiens
gaaatgaaaaaccaa

SEQ ID NO: 486192 - DNA, 15 bp, Homo sapiens
ggaaatgaaaaacca

SEQ ID NO: 486193 - DNA, 15 bp, Homo sapiens
tggaaatgaaaaacc

SEQ ID NO: 486194 - DNA, 15 bp, Homo sapiens
atggaaatgaaaaac

SEQ ID NO: 486195 - DNA, 15 bp, Homo sapiens
aatggaaatgaaaaa

SEQ ID NO: 486196 - DNA, 15 bp, Homo sapiens
taatggaaatgaaaa

SEQ ID NO: 486197 - DNA, 15 bp, Homo sapiens
ataatggaaatgaaa

SEQ ID NO: 486198 - DNA, 15 bp, Homo sapiens
cataatggaaatgaa

SEQ ID NO: 486199 - DNA, 15 bp, Homo sapiens
tcataatggaaatga

SEQ ID NO: 486200 - DNA, 15 bp, Homo sapiens
atcataatggaaatg

SEQ ID NO: 486201 - DNA, 15 bp, Homo sapiens
gatcataatggaaat

SEQ ID NO: 486202 - DNA, 15 bp, Homo sapiens
tgatcataatggaaa

SEQ ID NO: 486203 - DNA, 15 bp, Homo sapiens
gtgatcataatggaa

SEQ ID NO: 486204 - DNA, 15 bp, Homo sapiens
tgtgatcataatgga

SEQ ID NO: 486205 - DNA, 15 bp, Homo sapiens
ttgtgatcataatgg

SEQ ID NO: 486206 - DNA, 15 bp, Homo sapiens
tttgtgatcataatg

SEQ ID NO: 486207 - DNA, 15 bp, Homo sapiens
ttttgtgatcataat

SEQ ID NO: 486208 - DNA, 15 bp, Homo sapiens
gttttgtgatcataa

SEQ ID NO: 486209 - DNA, 15 bp, Homo sapiens
tgttttgtgatcata

SEQ ID NO: 486210 - DNA, 15 bp, Homo sapiens
atgttttgtgatcat

SEQ ID NO: 486211 - DNA, 15 bp, Homo sapiens
tatgttttgtgatca

SEQ ID NO: 486212 - DNA, 15 bp, Homo sapiens
gtatgttttgtgatc

SEQ ID NO: 486213 - DNA, 15 bp, Homo sapiens
agtatgttttgtgat

SEQ ID NO: 486214 - DNA, 15 bp, Homo sapiens
aagtatgttttgtga

SEQ ID NO: 486215 - DNA, 15 bp, Homo sapiens
aaagtatgttttgtg

SEQ ID NO: 486216 - DNA, 15 bp, Homo sapiens
caaagtatgttttgt

SEQ ID NO: 486217 - DNA, 15 bp, Homo sapiens
acaaagtatgttttg

SEQ ID NO: 486218 - DNA, 15 bp, Homo sapiens
tacaaagtatgtttt

SEQ ID NO: 486219 - DNA, 15 bp, Homo sapiens
atacaaagtatgttt

SEQ ID NO: 486220 - DNA, 15 bp, Homo sapiens
catacaaagtatgtt

SEQ ID NO: 486221 - DNA, 15 bp, Homo sapiens
tcatacaaagtatgt

SEQ ID NO: 486222 - DNA, 15 bp, Homo sapiens
atcatacaaagtatg

SEQ ID NO: 486223 - DNA, 15 bp, Homo sapiens
aatcatacaaagtat

SEQ ID NO: 486224 - DNA, 15 bp, Homo sapiens
aaatcatacaaagta

SEQ ID NO: 486225 - DNA, 15 bp, Homo sapiens
gaaatcatacaaagt

SEQ ID NO: 486226 - DNA, 15 bp, Homo sapiens
tgaaatcatacaaag

SEQ ID NO: 486227 - DNA, 15 bp, Homo sapiens
ctgaaatcatacaaa

SEQ ID NO: 486228 - DNA, 15 bp, Homo sapiens
actgaaatcatacaa

SEQ ID NO: 486229 - DNA, 15 bp, Homo sapiens
aactgaaatcataca

SEQ ID NO: 486230 - DNA, 15 bp, Homo sapiens
aaactgaaatcatac

SEQ ID NO: 486231 - DNA, 15 bp, Homo sapiens
gaaactgaaatcata

SEQ ID NO: 486232 - DNA, 15 bp, Homo sapiens
agaaactgaaatcat

SEQ ID NO: 486233 - DNA, 15 bp, Homo sapiens
aagaaactgaaatca

SEQ ID NO: 486234 - DNA, 15 bp, Homo sapiens
aaagaaactgaaatc

SEQ ID NO: 486235 - DNA, 15 bp, Homo sapiens
taaagaaactgaaat

SEQ ID NO: 486236 - DNA, 15 bp, Homo sapiens
ttaaagaaactgaaa

SEQ ID NO: 486237 - DNA, 15 bp, Homo sapiens
tttaaagaaactgaa

SEQ ID NO: 486238 - DNA, 15 bp, Homo sapiens
atttaaagaaactga

SEQ ID NO: 486239 - DNA, 15 bp, Homo sapiens
catttaaagaaactg

SEQ ID NO: 486240 - DNA, 15 bp, Homo sapiens
acatttaaagaaact

SEQ ID NO: 486241 - DNA, 15 bp, Homo sapiens
tacatttaaagaaac

SEQ ID NO: 486242 - DNA, 15 bp, Homo sapiens
atacatttaaagaaa

SEQ ID NO: 486243 - DNA, 15 bp, Homo sapiens
aatacatttaaagaa

SEQ ID NO: 486244 - DNA, 15 bp, Homo sapiens
taatacatttaaaga

SEQ ID NO: 486245 - DNA, 15 bp, Homo sapiens
ttaatacatttaaag

SEQ ID NO: 486246 - DNA, 15 bp, Homo sapiens
cttaatacatttaaa

SEQ ID NO: 486247 - DNA, 15 bp, Homo sapiens
tcttaatacatttaa

SEQ ID NO: 486248 - DNA, 15 bp, Homo sapiens
gtcttaatacattta

SEQ ID NO: 486249 - DNA, 15 bp, Homo sapiens
agtcttaatacattt

SEQ ID NO: 486250 - DNA, 15 bp, Homo sapiens
aagtcttaatacatt

SEQ ID NO: 486251 - DNA, 15 bp, Homo sapiens
taagtcttaatacat

SEQ ID NO: 486252 - DNA, 15 bp, Homo sapiens
ataagtcttaataca

SEQ ID NO: 486253 - DNA, 15 bp, Homo sapiens
aataagtcttaatac

SEQ ID NO: 486254 - DNA, 15 bp, Homo sapiens
aaataagtcttaata

SEQ ID NO: 486255 - DNA, 15 bp, Homo sapiens
aaaataagtcttaat

SEQ ID NO: 486256 - DNA, 15 bp, Homo sapiens
caaaataagtcttaa

SEQ ID NO: 486257 - DNA, 15 bp, Homo sapiens
acaaaataagtctta

SEQ ID NO: 486258 - DNA, 15 bp, Homo sapiens
tacaaaataagtctt

SEQ ID NO: 486259 - DNA, 15 bp, Homo sapiens
ctacaaaataagtct

SEQ ID NO: 486260 - DNA, 15 bp, Homo sapiens
gctacaaaataagtc

SEQ ID NO: 486261 - DNA, 15 bp, Homo sapiens
ggctacaaaataagt

SEQ ID NO: 486262 - DNA, 15 bp, Homo sapiens
aggctacaaaataag

SEQ ID NO: 486263 - DNA, 15 bp, Homo sapiens
taggctacaaaataa

SEQ ID NO: 486264 - DNA, 15 bp, Homo sapiens
ttaggctacaaaata

SEQ ID NO: 486265 - DNA, 15 bp, Homo sapiens
gttaggctacaaaat

SEQ ID NO: 486266 - DNA, 15 bp, Homo sapiens
tgttaggctacaaaa

SEQ ID NO: 486267 - DNA, 15 bp, Homo sapiens
atgttaggctacaaa

SEQ ID NO: 486268 - DNA, 15 bp, Homo sapiens
tatgttaggctacaa

SEQ ID NO: 486269 - DNA, 15 bp, Homo sapiens
ctatgttaggctaca

SEQ ID NO: 486270 - DNA, 15 bp, Homo sapiens
cctatgttaggctac

SEQ ID NO: 486271 - DNA, 15 bp, Homo sapiens
acctatgttaggcta

SEQ ID NO: 486272 - DNA, 15 bp, Homo sapiens
gacctatgttaggct

SEQ ID NO: 486273 - DNA, 15 bp, Homo sapiens
agacctatgttaggc

SEQ ID NO: 486274 - DNA, 15 bp, Homo sapiens
cagacctatgttagg

SEQ ID NO: 486275 - DNA, 15 bp, Homo sapiens
acagacctatgttag

SEQ ID NO: 486276 - DNA, 15 bp, Homo sapiens
aacagacctatgtta

SEQ ID NO: 486277 - DNA, 15 bp, Homo sapiens
aaacagacctatgtt

SEQ ID NO: 486278 - DNA, 15 bp, Homo sapiens
aaaacagacctatgt

SEQ ID NO: 486279 - DNA, 15 bp, Homo sapiens
caaaacagacctatg

SEQ ID NO: 486280 - DNA, 15 bp, Homo sapiens
ccaaaacagacctat

SEQ ID NO: 486281 - DNA, 15 bp, Homo sapiens
tccaaaacagaccta

SEQ ID NO: 486282 - DNA, 15 bp, Homo sapiens
ctccaaaacagacct

SEQ ID NO: 486283 - DNA, 15 bp, Homo sapiens
tctccaaaacagacc

SEQ ID NO: 486284 - DNA, 15 bp, Homo sapiens
ttctccaaaacagac

SEQ ID NO: 486285 - DNA, 15 bp, Homo sapiens
attctccaaaacaga

SEQ ID NO: 486286 - DNA, 15 bp, Homo sapiens
cattctccaaaacag

SEQ ID NO: 486287 - DNA, 15 bp, Homo sapiens
acattctccaaaaca

SEQ ID NO: 486288 - DNA, 15 bp, Homo sapiens
aacattctccaaaac

SEQ ID NO: 486289 - DNA, 15 bp, Homo sapiens
gaacattctccaaaa

SEQ ID NO: 486290 - DNA, 15 bp, Homo sapiens
ggaacattctccaaa

SEQ ID NO: 486291 - DNA, 15 bp, Homo sapiens
tggaacattctccaa

SEQ ID NO: 486292 - DNA, 15 bp, Homo sapiens
atggaacattctcca

SEQ ID NO: 486293 - DNA, 15 bp, Homo sapiens
catggaacattctcc

SEQ ID NO: 486294 - DNA, 15 bp, Homo sapiens
acatggaacattctc

SEQ ID NO: 486295 - DNA, 15 bp, Homo sapiens
tacatggaacattct

SEQ ID NO: 486296 - DNA, 15 bp, Homo sapiens
gtacatggaacattc

SEQ ID NO: 486297 - DNA, 15 bp, Homo sapiens
tgtacatggaacatt

SEQ ID NO: 486298 - DNA, 15 bp, Homo sapiens
gtgtacatggaacat

SEQ ID NO: 486299 - DNA, 15 bp, Homo sapiens
agtgtacatggaaca

SEQ ID NO: 486300 - DNA, 15 bp, Homo sapiens
aagtgtacatggaac

SEQ ID NO: 486301 - DNA, 15 bp, Homo sapiens
caagtgtacatggaa

SEQ ID NO: 486302 - DNA, 15 bp, Homo sapiens
tcaagtgtacatgga

SEQ ID NO: 486303 - DNA, 15 bp, Homo sapiens
ctcaagtgtacatgg

SEQ ID NO: 486304 - DNA, 15 bp, Homo sapiens
tctcaagtgtacatg

SEQ ID NO: 486305 - DNA, 15 bp, Homo sapiens
ttctcaagtgtacat

SEQ ID NO: 486306 - DNA, 15 bp, Homo sapiens
cttctcaagtgtaca

SEQ ID NO: 486307 - DNA, 15 bp, Homo sapiens
tcttctcaagtgtac

SEQ ID NO: 486308 - DNA, 15 bp, Homo sapiens
ttcttctcaagtgta

SEQ ID NO: 486309 - DNA, 15 bp, Homo sapiens
attcttctcaagtgt

SEQ ID NO: 486310 - DNA, 15 bp, Homo sapiens
tattcttctcaagtg

SEQ ID NO: 486311 - DNA, 15 bp, Homo sapiens
atattcttctcaagt

SEQ ID NO: 486312 - DNA, 15 bp, Homo sapiens
tatattcttctcaag

SEQ ID NO: 486313 - DNA, 15 bp, Homo sapiens
atatattcttctcaa

SEQ ID NO: 486314 - DNA, 15 bp, Homo sapiens
aatatattcttctca

SEQ ID NO: 486315 - DNA, 15 bp, Homo sapiens
caatatattcttctc

SEQ ID NO: 486316 - DNA, 15 bp, Homo sapiens
acaatatattcttct

SEQ ID NO: 486317 - DNA, 15 bp, Homo sapiens
cacaatatattcttc

SEQ ID NO: 486318 - DNA, 15 bp, Homo sapiens
gcacaatatattctt

SEQ ID NO: 486319 - DNA, 15 bp, Homo sapiens
agcacaatatattct

SEQ ID NO: 486320 - DNA, 15 bp, Homo sapiens
cagcacaatatattc

SEQ ID NO: 486321 - DNA, 15 bp, Homo sapiens
ccagcacaatatatt

SEQ ID NO: 486322 - DNA, 15 bp, Homo sapiens
accagcacaatatat

SEQ ID NO: 486323 - DNA, 15 bp, Homo sapiens
caccagcacaatata

SEQ ID NO: 486324 - DNA, 15 bp, Homo sapiens
acaccagcacaatat

SEQ ID NO: 486325 - DNA, 15 bp, Homo sapiens
aacaccagcacaata

SEQ ID NO: 486326 - DNA, 15 bp, Homo sapiens
caacaccagcacaat

SEQ ID NO: 486327 - DNA, 15 bp, Homo sapiens
ccaacaccagcacaa

SEQ ID NO: 486328 - DNA, 15 bp, Homo sapiens
cccaacaccagcaca

SEQ ID NO: 486329 - DNA, 15 bp, Homo sapiens
acccaacaccagcac

SEQ ID NO: 486330 - DNA, 15 bp, Homo sapiens
cacccaacaccagca

SEQ ID NO: 486331 - DNA, 15 bp, Homo sapiens
tcacccaacaccagc

SEQ ID NO: 486332 - DNA, 15 bp, Homo sapiens
ctcacccaacaccag

SEQ ID NO: 486333 - DNA, 15 bp, Homo sapiens
actcacccaacacca

SEQ ID NO: 486334 - DNA, 15 bp, Homo sapiens
aactcacccaacacc

SEQ ID NO: 486335 - DNA, 15 bp, Homo sapiens
aaactcacccaacac

SEQ ID NO: 486336 - DNA, 15 bp, Homo sapiens
taaactcacccaaca

SEQ ID NO: 486337 - DNA, 15 bp, Homo sapiens
ctaaactcacccaac

SEQ ID NO: 486338 - DNA, 15 bp, Homo sapiens
actaaactcacccaa

SEQ ID NO: 486339 - DNA, 15 bp, Homo sapiens
aactaaactcaccca

SEQ ID NO: 486340 - DNA, 15 bp, Homo sapiens
aaactaaactcaccc

SEQ ID NO: 486341 - DNA, 15 bp, Homo sapiens
aaaactaaactcacc

SEQ ID NO: 486342 - DNA, 15 bp, Homo sapiens
aaaaactaaactcac

SEQ ID NO: 486343 - DNA, 15 bp, Homo sapiens
caaaaactaaactca

SEQ ID NO: 486344 - DNA, 15 bp, Homo sapiens
tcaaaaactaaactc

SEQ ID NO: 486345 - DNA, 15 bp, Homo sapiens
gtcaaaaactaaact

SEQ ID NO: 486346 - DNA, 15 bp, Homo sapiens
tgtcaaaaactaaac

SEQ ID NO: 486347 - DNA, 15 bp, Homo sapiens
atgtcaaaaactaaa

SEQ ID NO: 486348 - DNA, 15 bp, Homo sapiens
catgtcaaaaactaa

SEQ ID NO: 486349 - DNA, 15 bp, Homo sapiens
acatgtcaaaaacta

SEQ ID NO: 486350 - DNA, 15 bp, Homo sapiens
aacatgtcaaaaact

SEQ ID NO: 486351 - DNA, 15 bp, Homo sapiens
taacatgtcaaaaac

SEQ ID NO: 486352 - DNA, 15 bp, Homo sapiens
gtaacatgtcaaaaa

SEQ ID NO: 486353 - DNA, 15 bp, Homo sapiens
tgtaacatgtcaaaa

SEQ ID NO: 486354 - DNA, 15 bp, Homo sapiens
atgtaacatgtcaaa

SEQ ID NO: 486355 - DNA, 15 bp, Homo sapiens
aatgtaacatgtcaa

SEQ ID NO: 486356 - DNA, 15 bp, Homo sapiens
aaatgtaacatgtca

SEQ ID NO: 486357 - DNA, 15 bp, Homo sapiens
caaatgtaacatgtc

SEQ ID NO: 486358 - DNA, 15 bp, Homo sapiens
tcaaatgtaacatgt

SEQ ID NO: 486359 - DNA, 15 bp, Homo sapiens
ctcaaatgtaacatg

SEQ ID NO: 486360 - DNA, 15 bp, Homo sapiens
gctcaaatgtaacat

SEQ ID NO: 486361 - DNA, 15 bp, Homo sapiens
tgctcaaatgtaaca

SEQ ID NO: 486362 - DNA, 15 bp, Homo sapiens
atgctcaaatgtaac

SEQ ID NO: 486363 - DNA, 15 bp, Homo sapiens
aatgctcaaatgtaa

SEQ ID NO: 486364 - DNA, 15 bp, Homo sapiens
gaatgctcaaatgta

SEQ ID NO: 486365 - DNA, 15 bp, Homo sapiens
tgaatgctcaaatgt

SEQ ID NO: 486366 - DNA, 15 bp, Homo sapiens
atgaatgctcaaatg

SEQ ID NO: 486367 - DNA, 15 bp, Homo sapiens
aatgaatgctcaaat

SEQ ID NO: 486368 - DNA, 15 bp, Homo sapiens
aaatgaatgctcaaa

SEQ ID NO: 486369 - DNA, 15 bp, Homo sapiens
taaatgaatgctcaa

SEQ ID NO: 486370 - DNA, 15 bp, Homo sapiens
ctaaatgaatgctca

SEQ ID NO: 486371 - DNA, 15 bp, Homo sapiens
cctaaatgaatgctc

SEQ ID NO: 486372 - DNA, 15 bp, Homo sapiens
tcctaaatgaatgct

SEQ ID NO: 486373 - DNA, 15 bp, Homo sapiens
ctcctaaatgaatgc

SEQ ID NO: 486374 - DNA, 15 bp, Homo sapiens
tctcctaaatgaatg

SEQ ID NO: 486375 - DNA, 15 bp, Homo sapiens
ttctcctaaatgaat

SEQ ID NO: 486376 - DNA, 15 bp, Homo sapiens
tttctcctaaatgaa

SEQ ID NO: 486377 - DNA, 15 bp, Homo sapiens
ttttctcctaaatga

SEQ ID NO: 486378 - DNA, 15 bp, Homo sapiens
cttttctcctaaatg

SEQ ID NO: 486379 - DNA, 15 bp, Homo sapiens
gcttttctcctaaat

SEQ ID NO: 486380 - DNA, 15 bp, Homo sapiens
ggcttttctcctaaa

SEQ ID NO: 486381 - DNA, 15 bp, Homo sapiens
tggcttttctcctaa

SEQ ID NO: 486382 - DNA, 15 bp, Homo sapiens
ttggcttttctccta

SEQ ID NO: 486383 - DNA, 15 bp, Homo sapiens
tttggcttttctcct

SEQ ID NO: 486384 - DNA, 15 bp, Homo sapiens
ctttggcttttctcc

SEQ ID NO: 486385 - DNA, 15 bp, Homo sapiens
cctttggcttttctc

SEQ ID NO: 486386 - DNA, 15 bp, Homo sapiens
tcctttggcttttct

SEQ ID NO: 486387 - DNA, 15 bp, Homo sapiens
ttcctttggcttttc

SEQ ID NO: 486388 - DNA, 15 bp, Homo sapiens
cttcctttggctttt

SEQ ID NO: 486389 - DNA, 15 bp, Homo sapiens
tcttcctttggcttt

SEQ ID NO: 486390 - DNA, 15 bp, Homo sapiens
gtcttcctttggctt

SEQ ID NO: 486391 - DNA, 15 bp, Homo sapiens
tgtcttcctttggct

SEQ ID NO: 486392 - DNA, 15 bp, Homo sapiens
atgtcttcctttggc

SEQ ID NO: 486393 - DNA, 15 bp, Homo sapiens
aatgtcttcctttgg

SEQ ID NO: 486394 - DNA, 15 bp, Homo sapiens
aaatgtcttcctttg

SEQ ID NO: 486395 - DNA, 15 bp, Homo sapiens
caaatgtcttccttt

SEQ ID NO: 486396 - DNA, 15 bp, Homo sapiens
acaaatgtcttcctt

SEQ ID NO: 486397 - DNA, 15 bp, Homo sapiens
aacaaatgtcttcct

SEQ ID NO: 486398 - DNA, 15 bp, Homo sapiens
taacaaatgtcttcc

SEQ ID NO: 486399 - DNA, 15 bp, Homo sapiens
ttaacaaatgtcttc

SEQ ID NO: 486400 - DNA, 15 bp, Homo sapiens
attaacaaatgtctt

SEQ ID NO: 486401 - DNA, 15 bp, Homo sapiens
cattaacaaatgtct

SEQ ID NO: 486402 - DNA, 15 bp, Homo sapiens
tcattaacaaatgtc

SEQ ID NO: 486403 - DNA, 15 bp, Homo sapiens
ttcattaacaaatgt

SEQ ID NO: 486404 - DNA, 15 bp, Homo sapiens
gttcattaacaaatg

SEQ ID NO: 486405 - DNA, 15 bp, Homo sapiens
agttcattaacaaat

SEQ ID NO: 486406 - DNA, 15 bp, Homo sapiens
cagttcattaacaaa

SEQ ID NO: 486407 - DNA, 15 bp, Homo sapiens
acagttcattaacaa

SEQ ID NO: 486408 - DNA, 15 bp, Homo sapiens
tacagttcattaaca

SEQ ID NO: 486409 - DNA, 15 bp, Homo sapiens
ttacagttcattaac

SEQ ID NO: 486410 - DNA, 15 bp, Homo sapiens
tttacagttcattaa

SEQ ID NO: 486411 - DNA, 15 bp, Homo sapiens
ctttacagttcatta

SEQ ID NO: 486412 - DNA, 15 bp, Homo sapiens
tctttacagttcatt

SEQ ID NO: 486413 - DNA, 15 bp, Homo sapiens
ctctttacagttcat

SEQ ID NO: 486414 - DNA, 15 bp, Homo sapiens
cctctttacagttca

SEQ ID NO: 486415 - DNA, 15 bp, Homo sapiens
ccctctttacagttc

SEQ ID NO: 486416 - DNA, 15 bp, Homo sapiens
cccctctttacagtt

SEQ ID NO: 486417 - DNA, 15 bp, Homo sapiens
acccctctttacagt

SEQ ID NO: 486418 - DNA, 15 bp, Homo sapiens
aacccctctttacag

SEQ ID NO: 486419 - DNA, 15 bp, Homo sapiens
caacccctctttaca

SEQ ID NO: 486420 - DNA, 15 bp, Homo sapiens
tcaacccctctttac

SEQ ID NO: 486421 - DNA, 15 bp, Homo sapiens
gtcaacccctcttta

SEQ ID NO: 486422 - DNA, 15 bp, Homo sapiens
tgtcaacccctcttt

SEQ ID NO: 486423 - DNA, 15 bp, Homo sapiens
atgtcaacccctctt

SEQ ID NO: 486424 - DNA, 15 bp, Homo sapiens
gatgtcaacccctct

SEQ ID NO: 486425 - DNA, 15 bp, Homo sapiens
tgatgtcaacccctc

SEQ ID NO: 486426 - DNA, 15 bp, Homo sapiens
gtgatgtcaacccct

SEQ ID NO: 486427 - DNA, 15 bp, Homo sapiens
tgtgatgtcaacccc

SEQ ID NO: 486428 - DNA, 15 bp, Homo sapiens
ttgtgatgtcaaccc

SEQ ID NO: 486429 - DNA, 15 bp, Homo sapiens
cttgtgatgtcaacc

SEQ ID NO: 486430 - DNA, 15 bp, Homo sapiens
tcttgtgatgtcaac

SEQ ID NO: 486431 - DNA, 15 bp, Homo sapiens
ttcttgtgatgtcaa

SEQ ID NO: 486432 - DNA, 15 bp, Homo sapiens
attcttgtgatgtca

SEQ ID NO: 486433 - DNA, 15 bp, Homo sapiens
tattcttgtgatgtc

SEQ ID NO: 486434 - DNA, 15 bp, Homo sapiens
ctattcttgtgatgt

SEQ ID NO: 486435 - DNA, 15 bp, Homo sapiens
cctattcttgtgatg

SEQ ID NO: 486436 - DNA, 15 bp, Homo sapiens
acctattcttgtgat

SEQ ID NO: 486437 - DNA, 15 bp, Homo sapiens
tacctattcttgtga

SEQ ID NO: 486438 - DNA, 15 bp, Homo sapiens
ttacctattcttgtg

SEQ ID NO: 486439 - DNA, 15 bp, Homo sapiens
attacctattcttgt

SEQ ID NO: 486440 - DNA, 15 bp, Homo sapiens
aattacctattcttg

SEQ ID NO: 486441 - DNA, 15 bp, Homo sapiens
aaattacctattctt

SEQ ID NO: 486442 - DNA, 15 bp, Homo sapiens
aaaattacctattct

SEQ ID NO: 486443 - DNA, 15 bp, Homo sapiens
aaaaattacctattc

SEQ ID NO: 486444 - DNA, 15 bp, Homo sapiens
aaaaaattacctatt

SEQ ID NO: 486445 - DNA, 15 bp, Homo sapiens
aaaaaaattacctat

SEQ ID NO: 486446 - DNA, 15 bp, Homo sapiens
aaaaaaaattaccta

SEQ ID NO: 486447 - DNA, 15 bp, Homo sapiens
caaaaaaaattacct

SEQ ID NO: 486448 - DNA, 15 bp, Homo sapiens
tcaaaaaaaattacc

SEQ ID NO: 486449 - DNA, 15 bp, Homo sapiens
ctcaaaaaaaattac

SEQ ID NO: 486450 - DNA, 15 bp, Homo sapiens
tctcaaaaaaaatta

SEQ ID NO: 486451 - DNA, 15 bp, Homo sapiens
ttctcaaaaaaaatt

SEQ ID NO: 486452 - DNA, 15 bp, Homo sapiens
tttctcaaaaaaaat

SEQ ID NO: 486453 - DNA, 15 bp, Homo sapiens
gtttctcaaaaaaaa

SEQ ID NO: 486454 - DNA, 15 bp, Homo sapiens
tgtttctcaaaaaaa

SEQ ID NO: 486455 - DNA, 15 bp, Homo sapiens
ttgtttctcaaaaaa

SEQ ID NO: 486456 - DNA, 15 bp, Homo sapiens
tttgtttctcaaaaa

SEQ ID NO: 486457 - DNA, 15 bp, Homo sapiens
atttgtttctcaaaa

SEQ ID NO: 486458 - DNA, 15 bp, Homo sapiens
aatttgtttctcaaa

SEQ ID NO: 486459 - DNA, 15 bp, Homo sapiens
aaatttgtttctcaa

SEQ ID NO: 486460 - DNA, 15 bp, Homo sapiens
taaatttgtttctca

SEQ ID NO: 486461 - DNA, 15 bp, Homo sapiens
ctaaatttgtttctc

SEQ ID NO: 486462 - DNA, 15 bp, Homo sapiens
tctaaatttgtttct

SEQ ID NO: 486463 - DNA, 15 bp, Homo sapiens
ctctaaatttgtttc

SEQ ID NO: 486464 - DNA, 15 bp, Homo sapiens
gctctaaatttgttt

SEQ ID NO: 486465 - DNA, 15 bp, Homo sapiens
tgctctaaatttgtt

SEQ ID NO: 486466 - DNA, 15 bp, Homo sapiens
ttgctctaaatttgt

SEQ ID NO: 486467 - DNA, 15 bp, Homo sapiens
gttgctctaaatttg

SEQ ID NO: 486468 - DNA, 15 bp, Homo sapiens
tgttgctctaaattt

SEQ ID NO: 486469 - DNA, 15 bp, Homo sapiens
ctgttgctctaaatt

SEQ ID NO: 486470 - DNA, 15 bp, Homo sapiens
tctgttgctctaaat

SEQ ID NO: 486471 - DNA, 15 bp, Homo sapiens
ttctgttgctctaaa

SEQ ID NO: 486472 - DNA, 15 bp, Homo sapiens
gttctgttgctctaa

SEQ ID NO: 486473 - DNA, 15 bp, Homo sapiens
tgttctgttgctcta

SEQ ID NO: 486474 - DNA, 15 bp, Homo sapiens
ctgttctgttgctct

SEQ ID NO: 486475 - DNA, 15 bp, Homo sapiens
gctgttctgttgctc

SEQ ID NO: 486476 - DNA, 15 bp, Homo sapiens
ggctgttctgttgct

SEQ ID NO: 486477 - DNA, 15 bp, Homo sapiens
aggctgttctgttgc

SEQ ID NO: 486478 - DNA, 15 bp, Homo sapiens
aaggctgttctgttg

SEQ ID NO: 486479 - DNA, 15 bp, Homo sapiens
caaggctgttctgtt

SEQ ID NO: 486480 - DNA, 15 bp, Homo sapiens
tcaaggctgttctgt

SEQ ID NO: 486481 - DNA, 15 bp, Homo sapiens
ttcaaggctgttctg

SEQ ID NO: 486482 - DNA, 15 bp, Homo sapiens
attcaaggctgttct

SEQ ID NO: 486483 - DNA, 15 bp, Homo sapiens
tattcaaggctgttc

SEQ ID NO: 486484 - DNA, 15 bp, Homo sapiens
atattcaaggctgtt

SEQ ID NO: 486485 - DNA, 15 bp, Homo sapiens
tatattcaaggctgt

SEQ ID NO: 486486 - DNA, 15 bp, Homo sapiens
atatattcaaggctg

SEQ ID NO: 486487 - DNA, 15 bp, Homo sapiens
aatatattcaaggct

SEQ ID NO: 486488 - DNA, 15 bp, Homo sapiens
gaatatattcaaggc

SEQ ID NO: 486489 - DNA, 15 bp, Homo sapiens
agaatatattcaagg

SEQ ID NO: 486490 - DNA, 15 bp, Homo sapiens
aagaatatattcaag

SEQ ID NO: 486491 - DNA, 15 bp, Homo sapiens
taagaatatattcaa

SEQ ID NO: 486492 - DNA, 15 bp, Homo sapiens
ataagaatatattca

SEQ ID NO: 486493 - DNA, 15 bp, Homo sapiens
aataagaatatattc

SEQ ID NO: 486494 - DNA, 15 bp, Homo sapiens
aaataagaatatatt

SEQ ID NO: 486495 - DNA, 15 bp, Homo sapiens
taaataagaatatat

SEQ ID NO: 486496 - DNA, 15 bp, Homo sapiens
ctaaataagaatata

SEQ ID NO: 486497 - DNA, 15 bp, Homo sapiens
tctaaataagaatat

SEQ ID NO: 486498 - DNA, 15 bp, Homo sapiens
ttctaaataagaata

SEQ ID NO: 486499 - DNA, 15 bp, Homo sapiens
cttctaaataagaat

SEQ ID NO: 486500 - DNA, 15 bp, Homo sapiens
ccttctaaataagaa

SEQ ID NO: 486501 - DNA, 15 bp, Homo sapiens
gccttctaaataaga

SEQ ID NO: 486502 - DNA, 15 bp, Homo sapiens
agccttctaaataag

SEQ ID NO: 486503 - DNA, 15 bp, Homo sapiens
cagccttctaaataa

SEQ ID NO: 486504 - DNA, 15 bp, Homo sapiens
tcagccttctaaata

SEQ ID NO: 486505 - DNA, 15 bp, Homo sapiens
ttcagccttctaaat

SEQ ID NO: 486506 - DNA, 15 bp, Homo sapiens
cttcagccttctaaa

SEQ ID NO: 486507 - DNA, 15 bp, Homo sapiens
ccttcagccttctaa

SEQ ID NO: 486508 - DNA, 15 bp, Homo sapiens
accttcagccttcta

SEQ ID NO: 486509 - DNA, 15 bp, Homo sapiens
aaccttcagccttct

SEQ ID NO: 486510 - DNA, 15 bp, Homo sapiens
caaccttcagccttc

SEQ ID NO: 486511 - DNA, 15 bp, Homo sapiens
tcaaccttcagcctt

SEQ ID NO: 486512 - DNA, 15 bp, Homo sapiens
ttcaaccttcagcct

SEQ ID NO: 486513 - DNA, 15 bp, Homo sapiens
attcaaccttcagcc

SEQ ID NO: 486514 - DNA, 15 bp, Homo sapiens
tattcaaccttcagc

SEQ ID NO: 486515 - DNA, 15 bp, Homo sapiens
atattcaaccttcag

SEQ ID NO: 486516 - DNA, 15 bp, Homo sapiens
tatattcaaccttca

SEQ ID NO: 486517 - DNA, 15 bp, Homo sapiens
ttatattcaaccttc

SEQ ID NO: 486518 - DNA, 15 bp, Homo sapiens
gttatattcaacctt

SEQ ID NO: 486519 - DNA, 15 bp, Homo sapiens
ggttatattcaacct

SEQ ID NO: 486520 - DNA, 15 bp, Homo sapiens
aggttatattcaacc

SEQ ID NO: 486521 - DNA, 15 bp, Homo sapiens
caggttatattcaac

SEQ ID NO: 486522 - DNA, 15 bp, Homo sapiens
ccaggttatattcaa

SEQ ID NO: 486523 - DNA, 15 bp, Homo sapiens
tccaggttatattca

SEQ ID NO: 486524 - DNA, 15 bp, Homo sapiens
ctccaggttatattc

SEQ ID NO: 486525 - DNA, 15 bp, Homo sapiens
actccaggttatatt

SEQ ID NO: 486526 - DNA, 15 bp, Homo sapiens
cactccaggttatat

SEQ ID NO: 486527 - DNA, 15 bp, Homo sapiens
acactccaggttata

SEQ ID NO: 486528 - DNA, 15 bp, Homo sapiens
aacactccaggttat

SEQ ID NO: 486529 - DNA, 15 bp, Homo sapiens
taacactccaggtta

SEQ ID NO: 486530 - DNA, 15 bp, Homo sapiens
ctaacactccaggtt

SEQ ID NO: 486531 - DNA, 15 bp, Homo sapiens
tctaacactccaggt

SEQ ID NO: 486532 - DNA, 15 bp, Homo sapiens
ttctaacactccagg

SEQ ID NO: 486533 - DNA, 15 bp, Homo sapiens
tttctaacactccag

SEQ ID NO: 486534 - DNA, 15 bp, Homo sapiens
ttttctaacactcca

SEQ ID NO: 486535 - DNA, 15 bp, Homo sapiens
cttttctaacactcc

SEQ ID NO: 486536 - DNA, 15 bp, Homo sapiens
ccttttctaacactc

SEQ ID NO: 486537 - DNA, 15 bp, Homo sapiens
cccttttctaacact

SEQ ID NO: 486538 - DNA, 15 bp, Homo sapiens
acccttttctaacac

SEQ ID NO: 486539 - DNA, 15 bp, Homo sapiens
cacccttttctaaca

SEQ ID NO: 486540 - DNA, 15 bp, Homo sapiens
ccacccttttctaac

SEQ ID NO: 486541 - DNA, 15 bp, Homo sapiens
tccacccttttctaa

SEQ ID NO: 486542 - DNA, 15 bp, Homo sapiens
ttccacccttttcta

SEQ ID NO: 486543 - DNA, 15 bp, Homo sapiens
gttccacccttttct

SEQ ID NO: 486544 - DNA, 15 bp, Homo sapiens
tgttccacccttttc

SEQ ID NO: 486545 - DNA, 15 bp, Homo sapiens
ctgttccaccctttt

SEQ ID NO: 486546 - DNA, 15 bp, Homo sapiens
actgttccacccttt

SEQ ID NO: 486547 - DNA, 15 bp, Homo sapiens
aactgttccaccctt

SEQ ID NO: 486548 - DNA, 15 bp, Homo sapiens
aaactgttccaccct

SEQ ID NO: 486549 - DNA, 15 bp, Homo sapiens
taaactgttccaccc

SEQ ID NO: 486550 - DNA, 15 bp, Homo sapiens
ataaactgttccacc

SEQ ID NO: 486551 - DNA, 15 bp, Homo sapiens
gataaactgttccac

SEQ ID NO: 486552 - DNA, 15 bp, Homo sapiens
tgataaactgttcca

SEQ ID NO: 486553 - DNA, 15 bp, Homo sapiens
atgataaactgttcc

SEQ ID NO: 486554 - DNA, 15 bp, Homo sapiens
tatgataaactgttc

SEQ ID NO: 486555 - DNA, 15 bp, Homo sapiens
ctatgataaactgtt

SEQ ID NO: 486556 - DNA, 15 bp, Homo sapiens
tctatgataaactgt

SEQ ID NO: 486557 - DNA, 15 bp, Homo sapiens
gtctatgataaactg

SEQ ID NO: 486558 - DNA, 15 bp, Homo sapiens
ggtctatgataaact

SEQ ID NO: 486559 - DNA, 15 bp, Homo sapiens
tggtctatgataaac

SEQ ID NO: 486560 - DNA, 15 bp, Homo sapiens
ctggtctatgataaa

SEQ ID NO: 486561 - DNA, 15 bp, Homo sapiens
tctggtctatgataa

SEQ ID NO: 486562 - DNA, 15 bp, Homo sapiens
ctctggtctatgata

SEQ ID NO: 486563 - DNA, 15 bp, Homo sapiens
gctctggtctatgat

SEQ ID NO: 486564 - DNA, 15 bp, Homo sapiens
ggctctggtctatga

SEQ ID NO: 486565 - DNA, 15 bp, Homo sapiens
tggctctggtctatg

SEQ ID NO: 486566 - DNA, 15 bp, Homo sapiens
ttggctctggtctat

SEQ ID NO: 486567 - DNA, 15 bp, Homo sapiens
cttggctctggtcta

SEQ ID NO: 486568 - DNA, 15 bp, Homo sapiens
tcttggctctggtct

SEQ ID NO: 486569 - DNA, 15 bp, Homo sapiens
ttcttggctctggtc

SEQ ID NO: 486570 - DNA, 15 bp, Homo sapiens
tttcttggctctggt

SEQ ID NO: 486571 - DNA, 15 bp, Homo sapiens
ctttcttggctctgg

SEQ ID NO: 486572 - DNA, 15 bp, Homo sapiens
actttcttggctctg

SEQ ID NO: 486573 - DNA, 15 bp, Homo sapiens
tactttcttggctct

SEQ ID NO: 486574 - DNA, 15 bp, Homo sapiens
atactttcttggctc

SEQ ID NO: 486575 - DNA, 15 bp, Homo sapiens
tatactttcttggct

SEQ ID NO: 486576 - DNA, 15 bp, Homo sapiens
ttatactttcttggc

SEQ ID NO: 486577 - DNA, 15 bp, Homo sapiens
attatactttcttgg

SEQ ID NO: 486578 - DNA, 15 bp, Homo sapiens
tattatactttcttg

SEQ ID NO: 486579 - DNA, 15 bp, Homo sapiens
atattatactttctt

SEQ ID NO: 486580 - DNA, 15 bp, Homo sapiens
aatattatactttct

SEQ ID NO: 486581 - DNA, 15 bp, Homo sapiens
aaatattatactttc

SEQ ID NO: 486582 - DNA, 15 bp, Homo sapiens
taaatattatacttt

SEQ ID NO: 486583 - DNA, 15 bp, Homo sapiens
ctaaatattatactt

SEQ ID NO: 486584 - DNA, 15 bp, Homo sapiens
tctaaatattatact

SEQ ID NO: 486585 - DNA, 15 bp, Homo sapiens
gtctaaatattatac

SEQ ID NO: 486586 - DNA, 15 bp, Homo sapiens
agtctaaatattata

SEQ ID NO: 486587 - DNA, 15 bp, Homo sapiens
aagtctaaatattat

SEQ ID NO: 486588 - DNA, 15 bp, Homo sapiens
aaagtctaaatatta

SEQ ID NO: 486589 - DNA, 15 bp, Homo sapiens
taaagtctaaatatt

SEQ ID NO: 486590 - DNA, 15 bp, Homo sapiens
ttaaagtctaaatat

SEQ ID NO: 486591 - DNA, 15 bp, Homo sapiens
tttaaagtctaaata

SEQ ID NO: 486592 - DNA, 15 bp, Homo sapiens
atttaaagtctaaat

SEQ ID NO: 486593 - DNA, 15 bp, Homo sapiens
tatttaaagtctaaa

SEQ ID NO: 486594 - DNA, 15 bp, Homo sapiens
atatttaaagtctaa

SEQ ID NO: 486595 - DNA, 15 bp, Homo sapiens
gatatttaaagtcta

SEQ ID NO: 486596 - DNA, 15 bp, Homo sapiens
tgatatttaaagtct

SEQ ID NO: 486597 - DNA, 15 bp, Homo sapiens
ttgatatttaaagtc

SEQ ID NO: 486598 - DNA, 15 bp, Homo sapiens
tttgatatttaaagt

SEQ ID NO: 486599 - DNA, 15 bp, Homo sapiens
ttttgatatttaaag

SEQ ID NO: 486600 - DNA, 15 bp, Homo sapiens
tttttgatatttaaa

SEQ ID NO: 486601 - DNA, 15 bp, Homo sapiens
ctttttgatatttaa

SEQ ID NO: 486602 - DNA, 15 bp, Homo sapiens
tctttttgatattta

SEQ ID NO: 486603 - DNA, 15 bp, Homo sapiens
ttctttttgatattt

SEQ ID NO: 486604 - DNA, 15 bp, Homo sapiens
cttctttttgatatt

SEQ ID NO: 486605 - DNA, 15 bp, Homo sapiens
tcttctttttgatat

SEQ ID NO: 486606 - DNA, 15 bp, Homo sapiens
atcttctttttgata

SEQ ID NO: 486607 - DNA, 15 bp, Homo sapiens
tatcttctttttgat

SEQ ID NO: 486608 - DNA, 15 bp, Homo sapiens
atatcttctttttga

SEQ ID NO: 486609 - DNA, 15 bp, Homo sapiens
catatcttctttttg

SEQ ID NO: 486610 - DNA, 15 bp, Homo sapiens
ccatatcttcttttt

SEQ ID NO: 486611 - DNA, 15 bp, Homo sapiens
accatatcttctttt

SEQ ID NO: 486612 - DNA, 15 bp, Homo sapiens
gaccatatcttcttt

SEQ ID NO: 486613 - DNA, 15 bp, Homo sapiens
tgaccatatcttctt

SEQ ID NO: 486614 - DNA, 15 bp, Homo sapiens
ctgaccatatcttct

SEQ ID NO: 486615 - DNA, 15 bp, Homo sapiens
gctgaccatatcttc

SEQ ID NO: 486616 - DNA, 15 bp, Homo sapiens
agctgaccatatctt

SEQ ID NO: 486617 - DNA, 15 bp, Homo sapiens
cagctgaccatatct

SEQ ID NO: 486618 - DNA, 15 bp, Homo sapiens
tcagctgaccatatc

SEQ ID NO: 486619 - DNA, 15 bp, Homo sapiens
ttcagctgaccatat

SEQ ID NO: 486620 - DNA, 15 bp, Homo sapiens
attcagctgaccata

SEQ ID NO: 486621 - DNA, 15 bp, Homo sapiens
aattcagctgaccat

SEQ ID NO: 486622 - DNA, 15 bp, Homo sapiens
gaattcagctgacca

SEQ ID NO: 486623 - DNA, 15 bp, Homo sapiens
tgaattcagctgacc

SEQ ID NO: 486624 - DNA, 15 bp, Homo sapiens
ttgaattcagctgac

SEQ ID NO: 486625 - DNA, 15 bp, Homo sapiens
tttgaattcagctga

SEQ ID NO: 486626 - DNA, 15 bp, Homo sapiens
ctttgaattcagctg

SEQ ID NO: 486627 - DNA, 15 bp, Homo sapiens
actttgaattcagct

SEQ ID NO: 486628 - DNA, 15 bp, Homo sapiens
aactttgaattcagc

SEQ ID NO: 486629 - DNA, 15 bp, Homo sapiens
caactttgaattcag

SEQ ID NO: 486630 - DNA, 15 bp, Homo sapiens
tcaactttgaattca

SEQ ID NO: 486631 - DNA, 15 bp, Homo sapiens
ttcaactttgaattc

SEQ ID NO: 486632 - DNA, 15 bp, Homo sapiens
cttcaactttgaatt

SEQ ID NO: 486633 - DNA, 15 bp, Homo sapiens
ccttcaactttgaat

SEQ ID NO: 486634 - DNA, 15 bp, Homo sapiens
gccttcaactttgaa

SEQ ID NO: 486635 - DNA, 15 bp, Homo sapiens
agccttcaactttga

SEQ ID NO: 486636 - DNA, 15 bp, Homo sapiens
tagccttcaactttg

SEQ ID NO: 486637 - DNA, 15 bp, Homo sapiens
ctagccttcaacttt

SEQ ID NO: 486638 - DNA, 15 bp, Homo sapiens
cctagccttcaactt

SEQ ID NO: 486639 - DNA, 15 bp, Homo sapiens
acctagccttcaact

SEQ ID NO: 486640 - DNA, 15 bp, Homo sapiens
cacctagccttcaac

SEQ ID NO: 486641 - DNA, 15 bp, Homo sapiens
acacctagccttcaa

SEQ ID NO: 486642 - DNA, 15 bp, Homo sapiens
cacacctagccttca

SEQ ID NO: 486643 - DNA, 15 bp, Homo sapiens
ccacacctagccttc

SEQ ID NO: 486644 - DNA, 15 bp, Homo sapiens
accacacctagcctt

SEQ ID NO: 486645 - DNA, 15 bp, Homo sapiens
caccacacctagcct

SEQ ID NO: 486646 - DNA, 15 bp, Homo sapiens
ccaccacacctagcc

SEQ ID NO: 486647 - DNA, 15 bp, Homo sapiens
gccaccacacctagc

SEQ ID NO: 486648 - DNA, 15 bp, Homo sapiens
agccaccacacctag

SEQ ID NO: 486649 - DNA, 15 bp, Homo sapiens
gagccaccacaccta

SEQ ID NO: 486650 - DNA, 15 bp, Homo sapiens
tgagccaccacacct

SEQ ID NO: 486651 - DNA, 15 bp, Homo sapiens
atgagccaccacacc

SEQ ID NO: 486652 - DNA, 15 bp, Homo sapiens
catgagccaccacac

SEQ ID NO: 486653 - DNA, 15 bp, Homo sapiens
gcatgagccaccaca

SEQ ID NO: 486654 - DNA, 15 bp, Homo sapiens
ggcatgagccaccac

SEQ ID NO: 486655 - DNA, 15 bp, Homo sapiens
aggcatgagccacca

SEQ ID NO: 486656 - DNA, 15 bp, Homo sapiens
aattacaggcatgag

SEQ ID NO: 486657 - DNA, 15 bp, Homo sapiens
gaattacaggcatga

SEQ ID NO: 486658 - DNA, 15 bp, Homo sapiens
agaattacaggcatg

SEQ ID NO: 486659 - DNA, 15 bp, Homo sapiens
tagaattacaggcat

SEQ ID NO: 486660 - DNA, 15 bp, Homo sapiens
ctagaattacaggca

SEQ ID NO: 486661 - DNA, 15 bp, Homo sapiens
gctagaattacaggc

SEQ ID NO: 486662 - DNA, 15 bp, Homo sapiens
tgctagaattacagg

SEQ ID NO: 486663 - DNA, 15 bp, Homo sapiens
gtgctagaattacag

SEQ ID NO: 486664 - DNA, 15 bp, Homo sapiens
agtgctagaattaca

SEQ ID NO: 486665 - DNA, 15 bp, Homo sapiens
aagtgctagaattac

SEQ ID NO: 486666 - DNA, 15 bp, Homo sapiens
aaagtgctagaatta

SEQ ID NO: 486667 - DNA, 15 bp, Homo sapiens
caaagtgctagaatt

SEQ ID NO: 486668 - DNA, 15 bp, Homo sapiens
ccaaagtgctagaat

SEQ ID NO: 486669 - DNA, 15 bp, Homo sapiens
cccaaagtgctagaa

SEQ ID NO: 486670 - DNA, 15 bp, Homo sapiens
tcccaaagtgctaga

SEQ ID NO: 486671 - DNA, 15 bp, Homo sapiens
ctcccaaagtgctag

SEQ ID NO: 486672 - DNA, 15 bp, Homo sapiens
cctcccaaagtgcta

SEQ ID NO: 486673 - DNA, 15 bp, Homo sapiens
ccttctgcctcagcc

SEQ ID NO: 486674 - DNA, 15 bp, Homo sapiens
tccttctgcctcagc

SEQ ID NO: 486675 - DNA, 15 bp, Homo sapiens
atccttctgcctcag

SEQ ID NO: 486676 - DNA, 15 bp, Homo sapiens
gatccttctgcctca

SEQ ID NO: 486677 - DNA, 15 bp, Homo sapiens
tgatccttctgcctc

SEQ ID NO: 486678 - DNA, 15 bp, Homo sapiens
gtgatccttctgcct

SEQ ID NO: 486679 - DNA, 15 bp, Homo sapiens
agtgatccttctgcc

SEQ ID NO: 486680 - DNA, 15 bp, Homo sapiens
aagtgatccttctgc

SEQ ID NO: 486681 - DNA, 15 bp, Homo sapiens
caagtgatccttctg

SEQ ID NO: 486682 - DNA, 15 bp, Homo sapiens
tcaagtgatccttct

SEQ ID NO: 486683 - DNA, 15 bp, Homo sapiens
ctcaagtgatccttc

SEQ ID NO: 486684 - DNA, 15 bp, Homo sapiens
gctcaagtgatcctt

SEQ ID NO: 486685 - DNA, 15 bp, Homo sapiens
ccctgggctcaagtg

SEQ ID NO: 486686 - DNA, 15 bp, Homo sapiens
cccctgggctcaagt

SEQ ID NO: 486687 - DNA, 15 bp, Homo sapiens
acccctgggctcaag

SEQ ID NO: 486688 - DNA, 15 bp, Homo sapiens
aacccctgggctcaa

SEQ ID NO: 486689 - DNA, 15 bp, Homo sapiens
gaacccctgggctca

SEQ ID NO: 486690 - DNA, 15 bp, Homo sapiens
tgaacccctgggctc

SEQ ID NO: 486691 - DNA, 15 bp, Homo sapiens
ttgaacccctgggct

SEQ ID NO: 486692 - DNA, 15 bp, Homo sapiens
cttgaacccctgggc

SEQ ID NO: 486693 - DNA, 15 bp, Homo sapiens
tcttgaacccctggg

SEQ ID NO: 486694 - DNA, 15 bp, Homo sapiens
gtcttgaacccctgg

SEQ ID NO: 486695 - DNA, 15 bp, Homo sapiens
ggtcttgaacccctg

SEQ ID NO: 486696 - DNA, 15 bp, Homo sapiens
tggtcttgaacccct

SEQ ID NO: 486697 - DNA, 15 bp, Homo sapiens
ctggtcttgaacccc

SEQ ID NO: 486698 - DNA, 15 bp, Homo sapiens
gctggtcttgaaccc

SEQ ID NO: 486699 - DNA, 15 bp, Homo sapiens
agctggtcttgaacc

SEQ ID NO: 486700 - DNA, 15 bp, Homo sapiens
aagctggtcttgaac

SEQ ID NO: 486701 - DNA, 15 bp, Homo sapiens
caagctggtcttgaa

SEQ ID NO: 486702 - DNA, 15 bp, Homo sapiens
ccaagctggtcttga

SEQ ID NO: 486703 - DNA, 15 bp, Homo sapiens
gccaagctggtcttg

SEQ ID NO: 486704 - DNA, 15 bp, Homo sapiens
ggccaagctggtctt

SEQ ID NO: 486705 - DNA, 15 bp, Homo sapiens
tggccaagctggtct

SEQ ID NO: 486706 - DNA, 15 bp, Homo sapiens
ttggccaagctggtc

SEQ ID NO: 486707 - DNA, 15 bp, Homo sapiens
gttggccaagctggt

SEQ ID NO: 486708 - DNA, 15 bp, Homo sapiens
tgttggccaagctgg

SEQ ID NO: 486709 - DNA, 15 bp, Homo sapiens
atgttggccaagctg

SEQ ID NO: 486710 - DNA, 15 bp, Homo sapiens
catgttggccaagct

SEQ ID NO: 486711 - DNA, 15 bp, Homo sapiens
ccatgttggccaagc

SEQ ID NO: 486712 - DNA, 15 bp, Homo sapiens
accatgttggccaag

SEQ ID NO: 486713 - DNA, 15 bp, Homo sapiens
caccatgttggccaa

SEQ ID NO: 486714 - DNA, 15 bp, Homo sapiens
atttcaccatgttgg

SEQ ID NO: 486715 - DNA, 15 bp, Homo sapiens
gatttcaccatgttg

SEQ ID NO: 486716 - DNA, 15 bp, Homo sapiens
ggatttcaccatgtt

SEQ ID NO: 486717 - DNA, 15 bp, Homo sapiens
aggatttcaccatgt

SEQ ID NO: 486718 - DNA, 15 bp, Homo sapiens
caggatttcaccatg

SEQ ID NO: 486719 - DNA, 15 bp, Homo sapiens
acaggatttcaccat

SEQ ID NO: 486720 - DNA, 15 bp, Homo sapiens
gacaggatttcacca

SEQ ID NO: 486721 - DNA, 15 bp, Homo sapiens
agacaggatttcacc

SEQ ID NO: 486722 - DNA, 15 bp, Homo sapiens
gagacaggatttcac

SEQ ID NO: 486723 - DNA, 15 bp, Homo sapiens
agagacaggatttca

SEQ ID NO: 486724 - DNA, 15 bp, Homo sapiens
tagagacaggatttc

SEQ ID NO: 486725 - DNA, 15 bp, Homo sapiens
gtagagacaggattt

SEQ ID NO: 486726 - DNA, 15 bp, Homo sapiens
agtagagacaggatt

SEQ ID NO: 486727 - DNA, 15 bp, Homo sapiens
tagtagagacaggat

SEQ ID NO: 486728 - DNA, 15 bp, Homo sapiens
ttagtagagacagga

SEQ ID NO: 486729 - DNA, 15 bp, Homo sapiens
tgccaccatgcctgg

SEQ ID NO: 486730 - DNA, 15 bp, Homo sapiens
ctgccaccatgcctg

SEQ ID NO: 486731 - DNA, 15 bp, Homo sapiens
cctgccaccatgcct

SEQ ID NO: 486732 - DNA, 15 bp, Homo sapiens
cgcctgccaccatgc

SEQ ID NO: 486733 - DNA, 15 bp, Homo sapiens
gcgcctgccaccatg

SEQ ID NO: 486734 - DNA, 15 bp, Homo sapiens
ggcgcctgccaccat

SEQ ID NO: 486735 - DNA, 15 bp, Homo sapiens
tttacaggcgcctgc

SEQ ID NO: 486736 - DNA, 15 bp, Homo sapiens
gtttacaggcgcctg

SEQ ID NO: 486737 - DNA, 15 bp, Homo sapiens
ggtttacaggcgcct

SEQ ID NO: 486738 - DNA, 15 bp, Homo sapiens
gggtttacaggcgcc

SEQ ID NO: 486739 - DNA, 15 bp, Homo sapiens
tgggtttacaggcgc

SEQ ID NO: 486740 - DNA, 15 bp, Homo sapiens
ctgggtttacaggcg

SEQ ID NO: 486741 - DNA, 15 bp, Homo sapiens
gctgggtttacaggc

SEQ ID NO: 486742 - DNA, 15 bp, Homo sapiens
agctgggtttacagg

SEQ ID NO: 486743 - DNA, 15 bp, Homo sapiens
tagctgggtttacag

SEQ ID NO: 486744 - DNA, 15 bp, Homo sapiens
gtagctgggtttaca

SEQ ID NO: 486745 - DNA, 15 bp, Homo sapiens
agtagctgggtttac

SEQ ID NO: 486746 - DNA, 15 bp, Homo sapiens
gagtagctgggttta

SEQ ID NO: 486747 - DNA, 15 bp, Homo sapiens
agagtagctgggttt

SEQ ID NO: 486748 - DNA, 15 bp, Homo sapiens
cagagtagctgggtt

SEQ ID NO: 486749 - DNA, 15 bp, Homo sapiens
ccagagtagctgggt

SEQ ID NO: 486750 - DNA, 15 bp, Homo sapiens
cgcctcagcctccag

SEQ ID NO: 486751 - DNA, 15 bp, Homo sapiens
ccgcctcagcctcca

SEQ ID NO: 486752 - DNA, 15 bp, Homo sapiens
tcccgcctcagcctc

SEQ ID NO: 486753 - DNA, 15 bp, Homo sapiens
ctcccgcctcagcct

SEQ ID NO: 486754 - DNA, 15 bp, Homo sapiens
tctcccgcctcagcc

SEQ ID NO: 486755 - DNA, 15 bp, Homo sapiens
ttctcccgcctcagc

SEQ ID NO: 486756 - DNA, 15 bp, Homo sapiens
attctcccgcctcag

SEQ ID NO: 486757 - DNA, 15 bp, Homo sapiens
gattctcccgcctca

SEQ ID NO: 486758 - DNA, 15 bp, Homo sapiens
cgattctcccgcctc

SEQ ID NO: 486759 - DNA, 15 bp, Homo sapiens
gcgattctcccgcct

SEQ ID NO: 486760 - DNA, 15 bp, Homo sapiens
agcgattctcccgcc

SEQ ID NO: 486761 - DNA, 15 bp, Homo sapiens
aagcgattctcccgc

SEQ ID NO: 486762 - DNA, 15 bp, Homo sapiens
caagcgattctcccg

SEQ ID NO: 486763 - DNA, 15 bp, Homo sapiens
tcaagcgattctccc

SEQ ID NO: 486764 - DNA, 15 bp, Homo sapiens
gtcaagcgattctcc

SEQ ID NO: 486765 - DNA, 15 bp, Homo sapiens
ggtcaagcgattctc

SEQ ID NO: 486766 - DNA, 15 bp, Homo sapiens
gggtcaagcgattct

SEQ ID NO: 486767 - DNA, 15 bp, Homo sapiens
agggtcaagcgattc

SEQ ID NO: 486768 - DNA, 15 bp, Homo sapiens
cagggtcaagcgatt

SEQ ID NO: 486769 - DNA, 15 bp, Homo sapiens
ccagggtcaagcgat

SEQ ID NO: 486770 - DNA, 15 bp, Homo sapiens
cccagggtcaagcga

SEQ ID NO: 486771 - DNA, 15 bp, Homo sapiens
tcccagggtcaagcg

SEQ ID NO: 486772 - DNA, 15 bp, Homo sapiens
ctcccagggtcaagc

SEQ ID NO: 486773 - DNA, 15 bp, Homo sapiens
cctcccagggtcaag

SEQ ID NO: 486774 - DNA, 15 bp, Homo sapiens
gcctcccagggtcaa

SEQ ID NO: 486775 - DNA, 15 bp, Homo sapiens
tgcctcccagggtca

SEQ ID NO: 486776 - DNA, 15 bp, Homo sapiens
ctgcctcccagggtc

SEQ ID NO: 486777 - DNA, 15 bp, Homo sapiens
tctgcctcccagggt

SEQ ID NO: 486778 - DNA, 15 bp, Homo sapiens
ctctgcctcccaggg

SEQ ID NO: 486779 - DNA, 15 bp, Homo sapiens
ttgcaacctctgcct

SEQ ID NO: 486780 - DNA, 15 bp, Homo sapiens
attgcaacctctgcc

SEQ ID NO: 486781 - DNA, 15 bp, Homo sapiens
cattgcaacctctgc

SEQ ID NO: 486782 - DNA, 15 bp, Homo sapiens
tcattgcaacctctg

SEQ ID NO: 486783 - DNA, 15 bp, Homo sapiens
ctcattgcaacctct

SEQ ID NO: 486784 - DNA, 15 bp, Homo sapiens
gctcattgcaacctc

SEQ ID NO: 486785 - DNA, 15 bp, Homo sapiens
ggctcattgcaacct

SEQ ID NO: 486786 - DNA, 15 bp, Homo sapiens
tggctcattgcaacc

SEQ ID NO: 486787 - DNA, 15 bp, Homo sapiens
ttggctcattgcaac

SEQ ID NO: 486788 - DNA, 15 bp, Homo sapiens
cttggctcattgcaa

SEQ ID NO: 486789 - DNA, 15 bp, Homo sapiens
tcttggctcattgca

SEQ ID NO: 486790 - DNA, 15 bp, Homo sapiens
atcttggctcattgc

SEQ ID NO: 486791 - DNA, 15 bp, Homo sapiens
gatcttggctcattg

SEQ ID NO: 486792 - DNA, 15 bp, Homo sapiens
cgatcttggctcatt

SEQ ID NO: 486793 - DNA, 15 bp, Homo sapiens
acgatcttggctcat

SEQ ID NO: 486794 - DNA, 15 bp, Homo sapiens
cacgatcttggctca

SEQ ID NO: 486795 - DNA, 15 bp, Homo sapiens
gcacgatcttggctc

SEQ ID NO: 486796 - DNA, 15 bp, Homo sapiens
ggcacgatcttggct

SEQ ID NO: 486797 - DNA, 15 bp, Homo sapiens
aggcacgatcttggc

SEQ ID NO: 486798 - DNA, 15 bp, Homo sapiens
aaggcacgatcttgg

SEQ ID NO: 486799 - DNA, 15 bp, Homo sapiens
aaaggcacgatcttg

SEQ ID NO: 486800 - DNA, 15 bp, Homo sapiens
caaaggcacgatctt

SEQ ID NO: 486801 - DNA, 15 bp, Homo sapiens
acaaaggcacgatct

SEQ ID NO: 486802 - DNA, 15 bp, Homo sapiens
tacaaaggcacgatc

SEQ ID NO: 486803 - DNA, 15 bp, Homo sapiens
gtacaaaggcacgat

SEQ ID NO: 486804 - DNA, 15 bp, Homo sapiens
agtacaaaggcacga

SEQ ID NO: 486805 - DNA, 15 bp, Homo sapiens
gagtacaaaggcacg

SEQ ID NO: 486806 - DNA, 15 bp, Homo sapiens
ggagtacaaaggcac

SEQ ID NO: 486807 - DNA, 15 bp, Homo sapiens
tggagtacaaaggca

SEQ ID NO: 486808 - DNA, 15 bp, Homo sapiens
ctggagtacaaaggc

SEQ ID NO: 486809 - DNA, 15 bp, Homo sapiens
gctggagtacaaagg

SEQ ID NO: 486810 - DNA, 15 bp, Homo sapiens
ggctggagtacaaag

SEQ ID NO: 486811 - DNA, 15 bp, Homo sapiens
aggctggagtacaaa

SEQ ID NO: 486812 - DNA, 15 bp, Homo sapiens
caggctggagtacaa

SEQ ID NO: 486813 - DNA, 15 bp, Homo sapiens
cctctgttgcccagg

SEQ ID NO: 486814 - DNA, 15 bp, Homo sapiens
tcctctgttgcccag

SEQ ID NO: 486815 - DNA, 15 bp, Homo sapiens
ttcctctgttgccca

SEQ ID NO: 486816 - DNA, 15 bp, Homo sapiens
cttcctctgttgccc

SEQ ID NO: 486817 - DNA, 15 bp, Homo sapiens
tcttcctctgttgcc

SEQ ID NO: 486818 - DNA, 15 bp, Homo sapiens
gtcttcctctgttgc

SEQ ID NO: 486819 - DNA, 15 bp, Homo sapiens
tgtcttcctctgttg

SEQ ID NO: 486820 - DNA, 15 bp, Homo sapiens
gtgtcttcctctgtt

SEQ ID NO: 486821 - DNA, 15 bp, Homo sapiens
ggtgtcttcctctgt

SEQ ID NO: 486822 - DNA, 15 bp, Homo sapiens
tggtgtcttcctctg

SEQ ID NO: 486823 - DNA, 15 bp, Homo sapiens
atggtgtcttcctct

SEQ ID NO: 486824 - DNA, 15 bp, Homo sapiens
gatggtgtcttcctc

SEQ ID NO: 486825 - DNA, 15 bp, Homo sapiens
agatggtgtcttcct

SEQ ID NO: 486826 - DNA, 15 bp, Homo sapiens
aagatggtgtcttcc

SEQ ID NO: 486827 - DNA, 15 bp, Homo sapiens
caagatggtgtcttc

SEQ ID NO: 486828 - DNA, 15 bp, Homo sapiens
ccaagatggtgtctt

SEQ ID NO: 486829 - DNA, 15 bp, Homo sapiens
cccaagatggtgtct

SEQ ID NO: 486830 - DNA, 15 bp, Homo sapiens
tcccaagatggtgtc

SEQ ID NO: 486831 - DNA, 15 bp, Homo sapiens
ttcccaagatggtgt

SEQ ID NO: 486832 - DNA, 15 bp, Homo sapiens
tttcccaagatggtg

SEQ ID NO: 486833 - DNA, 15 bp, Homo sapiens
ttttcccaagatggt

SEQ ID NO: 486834 - DNA, 15 bp, Homo sapiens
tttttcccaagatgg

SEQ ID NO: 486835 - DNA, 15 bp, Homo sapiens
ttttttcccaagatg

SEQ ID NO: 486836 - DNA, 15 bp, Homo sapiens
tttttttcccaagat

SEQ ID NO: 486837 - DNA, 15 bp, Homo sapiens
ttttttttcccaaga

SEQ ID NO: 486838 - DNA, 15 bp, Homo sapiens
tttttttttcccaag

SEQ ID NO: 486839 - DNA, 15 bp, Homo sapiens
ttttttttttcccaa

SEQ ID NO: 486840 - DNA, 15 bp, Homo sapiens
tttttttttttccca

SEQ ID NO: 486841 - DNA, 15 bp, Homo sapiens
ttttttttttttccc

SEQ ID NO: 486842 - DNA, 15 bp, Homo sapiens
tttttttttttttcc

SEQ ID NO: 486843 - DNA, 15 bp, Homo sapiens
cttcttttttttttt

SEQ ID NO: 486844 - DNA, 15 bp, Homo sapiens
acttctttttttttt

SEQ ID NO: 486845 - DNA, 15 bp, Homo sapiens
aacttcttttttttt

SEQ ID NO: 486846 - DNA, 15 bp, Homo sapiens
gaacttctttttttt

SEQ ID NO: 486847 - DNA, 15 bp, Homo sapiens
tgaacttcttttttt

SEQ ID NO: 486848 - DNA, 15 bp, Homo sapiens
ctgaacttctttttt

SEQ ID NO: 486849 - DNA, 15 bp, Homo sapiens
tctgaacttcttttt

SEQ ID NO: 486850 - DNA, 15 bp, Homo sapiens
ttctgaacttctttt

SEQ ID NO: 486851 - DNA, 15 bp, Homo sapiens
tttctgaacttcttt

SEQ ID NO: 486852 - DNA, 15 bp, Homo sapiens
ttttctgaacttctt

SEQ ID NO: 486853 - DNA, 15 bp, Homo sapiens
gttttctgaacttct

SEQ ID NO: 486854 - DNA, 15 bp, Homo sapiens
tgttttctgaacttc

SEQ ID NO: 486855 - DNA, 15 bp, Homo sapiens
ctgttttctgaactt

SEQ ID NO: 486856 - DNA, 15 bp, Homo sapiens
gctgttttctgaact

SEQ ID NO: 486857 - DNA, 15 bp, Homo sapiens
agctgttttctgaac

SEQ ID NO: 486858 - DNA, 15 bp, Homo sapiens
aagctgttttctgaa

SEQ ID NO: 486859 - DNA, 15 bp, Homo sapiens
caagctgttttctga

SEQ ID NO: 486860 - DNA, 15 bp, Homo sapiens
acaagctgttttctg

SEQ ID NO: 486861 - DNA, 15 bp, Homo sapiens
aacaagctgttttct

SEQ ID NO: 486862 - DNA, 15 bp, Homo sapiens
aaacaagctgttttc

SEQ ID NO: 486863 - DNA, 15 bp, Homo sapiens
caaacaagctgtttt

SEQ ID NO: 486864 - DNA, 15 bp, Homo sapiens
ccaaacaagctgttt

SEQ ID NO: 486865 - DNA, 15 bp, Homo sapiens
cccaaacaagctgtt

SEQ ID NO: 486866 - DNA, 15 bp, Homo sapiens
tcccaaacaagctgt

SEQ ID NO: 486867 - DNA, 15 bp, Homo sapiens
ttcccaaacaagctg

SEQ ID NO: 486868 - DNA, 15 bp, Homo sapiens
cttcccaaacaagct

SEQ ID NO: 486869 - DNA, 15 bp, Homo sapiens
ccttcccaaacaagc

SEQ ID NO: 486870 - DNA, 15 bp, Homo sapiens
tccttcccaaacaag

SEQ ID NO: 486871 - DNA, 15 bp, Homo sapiens
gtccttcccaaacaa

SEQ ID NO: 486872 - DNA, 15 bp, Homo sapiens
agtccttcccaaaca

SEQ ID NO: 486873 - DNA, 15 bp, Homo sapiens
cagtccttcccaaac

SEQ ID NO: 486874 - DNA, 15 bp, Homo sapiens
acagtccttcccaaa

SEQ ID NO: 486875 - DNA, 15 bp, Homo sapiens
aacagtccttcccaa

SEQ ID NO: 486876 - DNA, 15 bp, Homo sapiens
aaacagtccttccca

SEQ ID NO: 486877 - DNA, 15 bp, Homo sapiens
aaaacagtccttccc

SEQ ID NO: 486878 - DNA, 15 bp, Homo sapiens
aaaaacagtccttcc

SEQ ID NO: 486879 - DNA, 15 bp, Homo sapiens
aaaaaacagtccttc

SEQ ID NO: 486880 - DNA, 15 bp, Homo sapiens
caaaaaacagtcctt

SEQ ID NO: 486881 - DNA, 15 bp, Homo sapiens
acaaaaaacagtcct

SEQ ID NO: 486882 - DNA, 15 bp, Homo sapiens
tacaaaaaacagtcc

SEQ ID NO: 486883 - DNA, 15 bp, Homo sapiens
atacaaaaaacagtc

SEQ ID NO: 486884 - DNA, 15 bp, Homo sapiens
aatacaaaaaacagt

SEQ ID NO: 486885 - DNA, 15 bp, Homo sapiens
gaatacaaaaaacag

SEQ ID NO: 486886 - DNA, 15 bp, Homo sapiens
ggaatacaaaaaaca

SEQ ID NO: 486887 - DNA, 15 bp, Homo sapiens
aggaatacaaaaaac

SEQ ID NO: 486888 - DNA, 15 bp, Homo sapiens
aaggaatacaaaaaa

SEQ ID NO: 486889 - DNA, 15 bp, Homo sapiens
aaaggaatacaaaaa

SEQ ID NO: 486890 - DNA, 15 bp, Homo sapiens
taaaggaatacaaaa

SEQ ID NO: 486891 - DNA, 15 bp, Homo sapiens
ttaaaggaatacaaa

SEQ ID NO: 486892 - DNA, 15 bp, Homo sapiens
attaaaggaatacaa

SEQ ID NO: 486893 - DNA, 15 bp, Homo sapiens
tattaaaggaataca

SEQ ID NO: 486894 - DNA, 15 bp, Homo sapiens
ttattaaaggaatac

SEQ ID NO: 486895 - DNA, 15 bp, Homo sapiens
attattaaaggaata

SEQ ID NO: 486896 - DNA, 15 bp, Homo sapiens
aattattaaaggaat

SEQ ID NO: 486897 - DNA, 15 bp, Homo sapiens
gaattattaaaggaa

SEQ ID NO: 486898 - DNA, 15 bp, Homo sapiens
tgaattattaaagga

SEQ ID NO: 486899 - DNA, 15 bp, Homo sapiens
ttgaattattaaagg

SEQ ID NO: 486900 - DNA, 15 bp, Homo sapiens
attgaattattaaag

SEQ ID NO: 486901 - DNA, 15 bp, Homo sapiens
tattgaattattaaa

SEQ ID NO: 486902 - DNA, 15 bp, Homo sapiens
ttattgaattattaa

SEQ ID NO: 486903 - DNA, 15 bp, Homo sapiens
tttattgaattatta

SEQ ID NO: 486904 - DNA, 15 bp, Homo sapiens
ctttattgaattatt

SEQ ID NO: 486905 - DNA, 15 bp, Homo sapiens
tctttattgaattat

SEQ ID NO: 486906 - DNA, 15 bp, Homo sapiens
ttctttattgaatta

SEQ ID NO: 486907 - DNA, 15 bp, Homo sapiens
tttctttattgaatt

SEQ ID NO: 486908 - DNA, 15 bp, Homo sapiens
ttttctttattgaat

SEQ ID NO: 486909 - DNA, 15 bp, Homo sapiens
attttctttattgaa

SEQ ID NO: 486910 - DNA, 15 bp, Homo sapiens
tattttctttattga

SEQ ID NO: 486911 - DNA, 15 bp, Homo sapiens
ctattttctttattg

SEQ ID NO: 486912 - DNA, 15 bp, Homo sapiens
tctattttctttatt

SEQ ID NO: 486913 - DNA, 15 bp, Homo sapiens
ttctattttctttat

SEQ ID NO: 486914 - DNA, 15 bp, Homo sapiens
tttctattttcttta

SEQ ID NO: 486915 - DNA, 15 bp, Homo sapiens
ttttctattttcttt

SEQ ID NO: 486916 - DNA, 15 bp, Homo sapiens
tttttctattttctt

SEQ ID NO: 486917 - DNA, 15 bp, Homo sapiens
ctttttctattttct

SEQ ID NO: 486918 - DNA, 15 bp, Homo sapiens
cctttttctattttc

SEQ ID NO: 486919 - DNA, 15 bp, Homo sapiens
tcctttttctatttt

SEQ ID NO: 486920 - DNA, 15 bp, Homo sapiens
atcctttttctattt

SEQ ID NO: 486921 - DNA, 15 bp, Homo sapiens
aatcctttttctatt

SEQ ID NO: 486922 - DNA, 15 bp, Homo sapiens
aaatcctttttctat

SEQ ID NO: 486923 - DNA, 15 bp, Homo sapiens
aaaatcctttttcta

SEQ ID NO: 486924 - DNA, 15 bp, Homo sapiens
aaaaatcctttttct

SEQ ID NO: 486925 - DNA, 15 bp, Homo sapiens
aaaaaatcctttttc

SEQ ID NO: 486926 - DNA, 15 bp, Homo sapiens
aaaaaaatccttttt

SEQ ID NO: 486927 - DNA, 15 bp, Homo sapiens
aaaaaaaatcctttt

SEQ ID NO: 486928 - DNA, 15 bp, Homo sapiens
taaaaaaaatccttt

SEQ ID NO: 486929 - DNA, 15 bp, Homo sapiens
ttaaaaaaaatcctt

SEQ ID NO: 486930 - DNA, 15 bp, Homo sapiens
tttaaaaaaaatcct

SEQ ID NO: 486931 - DNA, 15 bp, Homo sapiens
atttaaaaaaaatcc

SEQ ID NO: 486932 - DNA, 15 bp, Homo sapiens
aatttaaaaaaaatc

SEQ ID NO: 486933 - DNA, 15 bp, Homo sapiens
aaatttaaaaaaaat

SEQ ID NO: 486934 - DNA, 15 bp, Homo sapiens
caaatttaaaaaaaa

SEQ ID NO: 486935 - DNA, 15 bp, Homo sapiens
tcaaatttaaaaaaa

SEQ ID NO: 486936 - DNA, 15 bp, Homo sapiens
ctcaaatttaaaaaa

SEQ ID NO: 486937 - DNA, 15 bp, Homo sapiens
tctcaaatttaaaaa

SEQ ID NO: 486938 - DNA, 15 bp, Homo sapiens
ttctcaaatttaaaa

SEQ ID NO: 486939 - DNA, 15 bp, Homo sapiens
tttctcaaatttaaa

SEQ ID NO: 486940 - DNA, 15 bp, Homo sapiens
gtttctcaaatttaa

SEQ ID NO: 486941 - DNA, 15 bp, Homo sapiens
tgtttctcaaattta

SEQ ID NO: 486942 - DNA, 15 bp, Homo sapiens
atgtttctcaaattt

SEQ ID NO: 486943 - DNA, 15 bp, Homo sapiens
aatgtttctcaaatt

SEQ ID NO: 486944 - DNA, 15 bp, Homo sapiens
aaatgtttctcaaat

SEQ ID NO: 486945 - DNA, 15 bp, Homo sapiens
taaatgtttctcaaa

SEQ ID NO: 486946 - DNA, 15 bp, Homo sapiens
ttaaatgtttctcaa

SEQ ID NO: 486947 - DNA, 15 bp, Homo sapiens
tttaaatgtttctca

SEQ ID NO: 486948 - DNA, 15 bp, Homo sapiens
atttaaatgtttctc

SEQ ID NO: 486949 - DNA, 15 bp, Homo sapiens
catttaaatgtttct

SEQ ID NO: 486950 - DNA, 15 bp, Homo sapiens
tcatttaaatgtttc

SEQ ID NO: 486951 - DNA, 15 bp, Homo sapiens
atcatttaaatgttt

SEQ ID NO: 486952 - DNA, 15 bp, Homo sapiens
catcatttaaatgtt

SEQ ID NO: 486953 - DNA, 15 bp, Homo sapiens
tcatcatttaaatgt

SEQ ID NO: 486954 - DNA, 15 bp, Homo sapiens
gtcatcatttaaatg

SEQ ID NO: 486955 - DNA, 15 bp, Homo sapiens
ggtcatcatttaaat

SEQ ID NO: 486956 - DNA, 15 bp, Homo sapiens
tggtcatcatttaaa

SEQ ID NO: 486957 - DNA, 15 bp, Homo sapiens
gtggtcatcatttaa

SEQ ID NO: 486958 - DNA, 15 bp, Homo sapiens
agtggtcatcattta

SEQ ID NO: 486959 - DNA, 15 bp, Homo sapiens
tagtggtcatcattt

SEQ ID NO: 486960 - DNA, 15 bp, Homo sapiens
gtagtggtcatcatt

SEQ ID NO: 486961 - DNA, 15 bp, Homo sapiens
agtagtggtcatcat

SEQ ID NO: 486962 - DNA, 15 bp, Homo sapiens
aagtagtggtcatca

SEQ ID NO: 486963 - DNA, 15 bp, Homo sapiens
taagtagtggtcatc

SEQ ID NO: 486964 - DNA, 15 bp, Homo sapiens
ttaagtagtggtcat

SEQ ID NO: 486965 - DNA, 15 bp, Homo sapiens
tttaagtagtggtca

SEQ ID NO: 486966 - DNA, 15 bp, Homo sapiens
atttaagtagtggtc

SEQ ID NO: 486967 - DNA, 15 bp, Homo sapiens
aatttaagtagtggt

SEQ ID NO: 486968 - DNA, 15 bp, Homo sapiens
taatttaagtagtgg

SEQ ID NO: 486969 - DNA, 15 bp, Homo sapiens
ataatttaagtagtg

SEQ ID NO: 486970 - DNA, 15 bp, Homo sapiens
cataatttaagtagt

SEQ ID NO: 486971 - DNA, 15 bp, Homo sapiens
tcataatttaagtag

SEQ ID NO: 486972 - DNA, 15 bp, Homo sapiens
ttcataatttaagta

SEQ ID NO: 486973 - DNA, 15 bp, Homo sapiens
tttcataatttaagt

SEQ ID NO: 486974 - DNA, 15 bp, Homo sapiens
atttcataatttaag

SEQ ID NO: 486975 - DNA, 15 bp, Homo sapiens
aatttcataatttaa

SEQ ID NO: 486976 - DNA, 15 bp, Homo sapiens
caatttcataattta

SEQ ID NO: 486977 - DNA, 15 bp, Homo sapiens
tcaatttcataattt

SEQ ID NO: 486978 - DNA, 15 bp, Homo sapiens
ttcaatttcataatt

SEQ ID NO: 486979 - DNA, 15 bp, Homo sapiens
tttcaatttcataat

SEQ ID NO: 486980 - DNA, 15 bp, Homo sapiens
ttttcaatttcataa

SEQ ID NO: 486981 - DNA, 15 bp, Homo sapiens
gttttcaatttcata

SEQ ID NO: 486982 - DNA, 15 bp, Homo sapiens
ggttttcaatttcat

SEQ ID NO: 486983 - DNA, 15 bp, Homo sapiens
tggttttcaatttca

SEQ ID NO: 486984 - DNA, 15 bp, Homo sapiens
gtggttttcaatttc

SEQ ID NO: 486985 - DNA, 15 bp, Homo sapiens
tgtggttttcaattt

SEQ ID NO: 486986 - DNA, 15 bp, Homo sapiens
ttgtggttttcaatt

SEQ ID NO: 486987 - DNA, 15 bp, Homo sapiens
tttgtggttttcaat

SEQ ID NO: 486988 - DNA, 15 bp, Homo sapiens
atttgtggttttcaa

SEQ ID NO: 486989 - DNA, 15 bp, Homo sapiens
tatttgtggttttca

SEQ ID NO: 486990 - DNA, 15 bp, Homo sapiens
atatttgtggttttc

SEQ ID NO: 486991 - DNA, 15 bp, Homo sapiens
tatatttgtggtttt

SEQ ID NO: 486992 - DNA, 15 bp, Homo sapiens
ttatatttgtggttt

SEQ ID NO: 486993 - DNA, 15 bp, Homo sapiens
tttatatttgtggtt

SEQ ID NO: 486994 - DNA, 15 bp, Homo sapiens
atttatatttgtggt

SEQ ID NO: 486995 - DNA, 15 bp, Homo sapiens
aatttatatttgtgg

SEQ ID NO: 486996 - DNA, 15 bp, Homo sapiens
taatttatatttgtg

SEQ ID NO: 486997 - DNA, 15 bp, Homo sapiens
ataatttatatttgt

SEQ ID NO: 486998 - DNA, 15 bp, Homo sapiens
cataatttatatttg

SEQ ID NO: 486999 - DNA, 15 bp, Homo sapiens
gcataatttatattt

SEQ ID NO: 487000 - DNA, 15 bp, Homo sapiens
tgcataatttatatt

SEQ ID NO: 487001 - DNA, 15 bp, Homo sapiens
atgcataatttatat

SEQ ID NO: 487002 - DNA, 15 bp, Homo sapiens
aatgcataatttata

SEQ ID NO: 487003 - DNA, 15 bp, Homo sapiens
gaatgcataatttat

SEQ ID NO: 487004 - DNA, 15 bp, Homo sapiens
agaatgcataattta

SEQ ID NO: 487005 - DNA, 15 bp, Homo sapiens
aagaatgcataattt

SEQ ID NO: 487006 - DNA, 15 bp, Homo sapiens
aaagaatgcataatt

SEQ ID NO: 487007 - DNA, 15 bp, Homo sapiens
taaagaatgcataat

SEQ ID NO: 487008 - DNA, 15 bp, Homo sapiens
ataaagaatgcataa

SEQ ID NO: 487009 - DNA, 15 bp, Homo sapiens
tataaagaatgcata

SEQ ID NO: 487010 - DNA, 15 bp, Homo sapiens
ctataaagaatgcat

SEQ ID NO: 487011 - DNA, 15 bp, Homo sapiens
actataaagaatgca

SEQ ID NO: 487012 - DNA, 15 bp, Homo sapiens
tactataaagaatgc

SEQ ID NO: 487013 - DNA, 15 bp, Homo sapiens
atactataaagaatg

SEQ ID NO: 487014 - DNA, 15 bp, Homo sapiens
catactataaagaat

SEQ ID NO: 487015 - DNA, 15 bp, Homo sapiens
tcatactataaagaa

SEQ ID NO: 487016 - DNA, 15 bp, Homo sapiens
ctcatactataaaga

SEQ ID NO: 487017 - DNA, 15 bp, Homo sapiens
actcatactataaag

SEQ ID NO: 487018 - DNA, 15 bp, Homo sapiens
aactcatactataaa

SEQ ID NO: 487019 - DNA, 15 bp, Homo sapiens
aaactcatactataa

SEQ ID NO: 487020 - DNA, 15 bp, Homo sapiens
aaaactcatactata

SEQ ID NO: 487021 - DNA, 15 bp, Homo sapiens
taaaactcatactat

SEQ ID NO: 487022 - DNA, 15 bp, Homo sapiens
ctaaaactcatacta

SEQ ID NO: 487023 - DNA, 15 bp, Homo sapiens
tctaaaactcatact

SEQ ID NO: 487024 - DNA, 15 bp, Homo sapiens
ctctaaaactcatac

SEQ ID NO: 487025 - DNA, 15 bp, Homo sapiens
cctctaaaactcata

SEQ ID NO: 487026 - DNA, 15 bp, Homo sapiens
gcctctaaaactcat

SEQ ID NO: 487027 - DNA, 15 bp, Homo sapiens
agcctctaaaactca

SEQ ID NO: 487028 - DNA, 15 bp, Homo sapiens
cagcctctaaaactc

SEQ ID NO: 487029 - DNA, 15 bp, Homo sapiens
acagcctctaaaact

SEQ ID NO: 487030 - DNA, 15 bp, Homo sapiens
aacagcctctaaaac

SEQ ID NO: 487031 - DNA, 15 bp, Homo sapiens
taacagcctctaaaa

SEQ ID NO: 487032 - DNA, 15 bp, Homo sapiens
ttaacagcctctaaa

SEQ ID NO: 487033 - DNA, 15 bp, Homo sapiens
attaacagcctctaa

SEQ ID NO: 487034 - DNA, 15 bp, Homo sapiens
aattaacagcctcta

SEQ ID NO: 487035 - DNA, 15 bp, Homo sapiens
aaattaacagcctct

SEQ ID NO: 487036 - DNA, 15 bp, Homo sapiens
caaattaacagcctc

SEQ ID NO: 487037 - DNA, 15 bp, Homo sapiens
gcaaattaacagcct

SEQ ID NO: 487038 - DNA, 15 bp, Homo sapiens
agcaaattaacagcc

SEQ ID NO: 487039 - DNA, 15 bp, Homo sapiens
tagcaaattaacagc

SEQ ID NO: 487040 - DNA, 15 bp, Homo sapiens
atagcaaattaacag

SEQ ID NO: 487041 - DNA, 15 bp, Homo sapiens
tatagcaaattaaca

SEQ ID NO: 487042 - DNA, 15 bp, Homo sapiens
ttatagcaaattaac

SEQ ID NO: 487043 - DNA, 15 bp, Homo sapiens
attatagcaaattaa

SEQ ID NO: 487044 - DNA, 15 bp, Homo sapiens
tattatagcaaatta

SEQ ID NO: 487045 - DNA, 15 bp, Homo sapiens
atattatagcaaatt

SEQ ID NO: 487046 - DNA, 15 bp, Homo sapiens
aatattatagcaaat

SEQ ID NO: 487047 - DNA, 15 bp, Homo sapiens
taatattatagcaaa

SEQ ID NO: 487048 - DNA, 15 bp, Homo sapiens
ctaatattatagcaa

SEQ ID NO: 487049 - DNA, 15 bp, Homo sapiens
gctaatattatagca

SEQ ID NO: 487050 - DNA, 15 bp, Homo sapiens
agctaatattatagc

SEQ ID NO: 487051 - DNA, 15 bp, Homo sapiens
tagctaatattatag

SEQ ID NO: 487052 - DNA, 15 bp, Homo sapiens
gtagctaatattata

SEQ ID NO: 487053 - DNA, 15 bp, Homo sapiens
tgtagctaatattat

SEQ ID NO: 487054 - DNA, 15 bp, Homo sapiens
atgtagctaatatta

SEQ ID NO: 487055 - DNA, 15 bp, Homo sapiens
gatgtagctaatatt

SEQ ID NO: 487056 - DNA, 15 bp, Homo sapiens
agatgtagctaatat

SEQ ID NO: 487057 - DNA, 15 bp, Homo sapiens
cagatgtagctaata

SEQ ID NO: 487058 - DNA, 15 bp, Homo sapiens
ccagatgtagctaat

SEQ ID NO: 487059 - DNA, 15 bp, Homo sapiens
tccagatgtagctaa

SEQ ID NO: 487060 - DNA, 15 bp, Homo sapiens
ttccagatgtagcta

SEQ ID NO: 487061 - DNA, 15 bp, Homo sapiens
attccagatgtagct

SEQ ID NO: 487062 - DNA, 15 bp, Homo sapiens
tattccagatgtagc

SEQ ID NO: 487063 - DNA, 15 bp, Homo sapiens
ctattccagatgtag

SEQ ID NO: 487064 - DNA, 15 bp, Homo sapiens
tctattccagatgta

SEQ ID NO: 487065 - DNA, 15 bp, Homo sapiens
ttctattccagatgt

SEQ ID NO: 487066 - DNA, 15 bp, Homo sapiens
cttctattccagatg

SEQ ID NO: 487067 - DNA, 15 bp, Homo sapiens
tcttctattccagat

SEQ ID NO: 487068 - DNA, 15 bp, Homo sapiens
ttcttctattccaga

SEQ ID NO: 487069 - DNA, 15 bp, Homo sapiens
tttcttctattccag

SEQ ID NO: 487070 - DNA, 15 bp, Homo sapiens
gtttcttctattcca

SEQ ID NO: 487071 - DNA, 15 bp, Homo sapiens
agtttcttctattcc

SEQ ID NO: 487072 - DNA, 15 bp, Homo sapiens
aagtttcttctattc

SEQ ID NO: 487073 - DNA, 15 bp, Homo sapiens
gaagtttcttctatt

SEQ ID NO: 487074 - DNA, 15 bp, Homo sapiens
tgaagtttcttctat

SEQ ID NO: 487075 - DNA, 15 bp, Homo sapiens
atgaagtttcttcta

SEQ ID NO: 487076 - DNA, 15 bp, Homo sapiens
tatgaagtttcttct

SEQ ID NO: 487077 - DNA, 15 bp, Homo sapiens
atatgaagtttcttc

SEQ ID NO: 487078 - DNA, 15 bp, Homo sapiens
tatatgaagtttctt

SEQ ID NO: 487079 - DNA, 15 bp, Homo sapiens
atatatgaagtttct

SEQ ID NO: 487080 - DNA, 15 bp, Homo sapiens
aatatatgaagtttc

SEQ ID NO: 487081 - DNA, 15 bp, Homo sapiens
taatatatgaagttt

SEQ ID NO: 487082 - DNA, 15 bp, Homo sapiens
ataatatatgaagtt

SEQ ID NO: 487083 - DNA, 15 bp, Homo sapiens
gataatatatgaagt

SEQ ID NO: 487084 - DNA, 15 bp, Homo sapiens
agataatatatgaag

SEQ ID NO: 487085 - DNA, 15 bp, Homo sapiens
aagataatatatgaa

SEQ ID NO: 487086 - DNA, 15 bp, Homo sapiens
taagataatatatga

SEQ ID NO: 487087 - DNA, 15 bp, Homo sapiens
ataagataatatatg

SEQ ID NO: 487088 - DNA, 15 bp, Homo sapiens
gataagataatatat

SEQ ID NO: 487089 - DNA, 15 bp, Homo sapiens
cgataagataatata

SEQ ID NO: 487090 - DNA, 15 bp, Homo sapiens
gcgataagataatat

SEQ ID NO: 487091 - DNA, 15 bp, Homo sapiens
agcgataagataata

SEQ ID NO: 487092 - DNA, 15 bp, Homo sapiens
tagcgataagataat

SEQ ID NO: 487093 - DNA, 15 bp, Homo sapiens
atagcgataagataa

SEQ ID NO: 487094 - DNA, 15 bp, Homo sapiens
tatagcgataagata

SEQ ID NO: 487095 - DNA, 15 bp, Homo sapiens
atatagcgataagat

SEQ ID NO: 487096 - DNA, 15 bp, Homo sapiens
aatatagcgataaga

SEQ ID NO: 487097 - DNA, 15 bp, Homo sapiens
aaatatagcgataag

SEQ ID NO: 487098 - DNA, 15 bp, Homo sapiens
caaatatagcgataa

SEQ ID NO: 487099 - DNA, 15 bp, Homo sapiens
tcaaatatagcgata

SEQ ID NO: 487100 - DNA, 15 bp, Homo sapiens
ttcaaatatagcgat

SEQ ID NO: 487101 - DNA, 15 bp, Homo sapiens
attcaaatatagcga

SEQ ID NO: 487102 - DNA, 15 bp, Homo sapiens
aattcaaatatagcg

SEQ ID NO: 487103 - DNA, 15 bp, Homo sapiens
gaattcaaatatagc

SEQ ID NO: 487104 - DNA, 15 bp, Homo sapiens
agaattcaaatatag

SEQ ID NO: 487105 - DNA, 15 bp, Homo sapiens
cagaattcaaatata

SEQ ID NO: 487106 - DNA, 15 bp, Homo sapiens
acagaattcaaatat

SEQ ID NO: 487107 - DNA, 15 bp, Homo sapiens
tacagaattcaaata

SEQ ID NO: 487108 - DNA, 15 bp, Homo sapiens
ctacagaattcaaat

SEQ ID NO: 487109 - DNA, 15 bp, Homo sapiens
tctacagaattcaaa

SEQ ID NO: 487110 - DNA, 15 bp, Homo sapiens
ttctacagaattcaa

SEQ ID NO: 487111 - DNA, 15 bp, Homo sapiens
cttctacagaattca

SEQ ID NO: 487112 - DNA, 15 bp, Homo sapiens
acttctacagaattc

SEQ ID NO: 487113 - DNA, 15 bp, Homo sapiens
aacttctacagaatt

SEQ ID NO: 487114 - DNA, 15 bp, Homo sapiens
taacttctacagaat

SEQ ID NO: 487115 - DNA, 15 bp, Homo sapiens
ataacttctacagaa

SEQ ID NO: 487116 - DNA, 15 bp, Homo sapiens
aataacttctacaga

SEQ ID NO: 487117 - DNA, 15 bp, Homo sapiens
aaataacttctacag

SEQ ID NO: 487118 - DNA, 15 bp, Homo sapiens
gaaataacttctaca

SEQ ID NO: 487119 - DNA, 15 bp, Homo sapiens
agaaataacttctac

SEQ ID NO: 487120 - DNA, 15 bp, Homo sapiens
cagaaataacttcta

SEQ ID NO: 487121 - DNA, 15 bp, Homo sapiens
ccagaaataacttct

SEQ ID NO: 487122 - DNA, 15 bp, Homo sapiens
tccagaaataacttc

SEQ ID NO: 487123 - DNA, 15 bp, Homo sapiens
gtccagaaataactt

SEQ ID NO: 487124 - DNA, 15 bp, Homo sapiens
tgtccagaaataact

SEQ ID NO: 487125 - DNA, 15 bp, Homo sapiens
ctgtccagaaataac

SEQ ID NO: 487126 - DNA, 15 bp, Homo sapiens
actgtccagaaataa

SEQ ID NO: 487127 - DNA, 15 bp, Homo sapiens
gactgtccagaaata

SEQ ID NO: 487128 - DNA, 15 bp, Homo sapiens
agactgtccagaaat

SEQ ID NO: 487129 - DNA, 15 bp, Homo sapiens
tagactgtccagaaa

SEQ ID NO: 487130 - DNA, 15 bp, Homo sapiens
gtagactgtccagaa

SEQ ID NO: 487131 - DNA, 15 bp, Homo sapiens
cgtagactgtccaga

SEQ ID NO: 487132 - DNA, 15 bp, Homo sapiens
tcgtagactgtccag

SEQ ID NO: 487133 - DNA, 15 bp, Homo sapiens
ttcgtagactgtcca

SEQ ID NO: 487134 - DNA, 15 bp, Homo sapiens
tttcgtagactgtcc

SEQ ID NO: 487135 - DNA, 15 bp, Homo sapiens
ttttcgtagactgtc

SEQ ID NO: 487136 - DNA, 15 bp, Homo sapiens
cttttcgtagactgt

SEQ ID NO: 487137 - DNA, 15 bp, Homo sapiens
gcttttcgtagactg

SEQ ID NO: 487138 - DNA, 15 bp, Homo sapiens
agcttttcgtagact

SEQ ID NO: 487139 - DNA, 15 bp, Homo sapiens
gagcttttcgtagac

SEQ ID NO: 487140 - DNA, 15 bp, Homo sapiens
agagcttttcgtaga

SEQ ID NO: 487141 - DNA, 15 bp, Homo sapiens
aagagcttttcgtag

SEQ ID NO: 487142 - DNA, 15 bp, Homo sapiens
caagagcttttcgta

SEQ ID NO: 487143 - DNA, 15 bp, Homo sapiens
gcaagagcttttcgt

SEQ ID NO: 487144 - DNA, 15 bp, Homo sapiens
agcaagagcttttcg

SEQ ID NO: 487145 - DNA, 15 bp, Homo sapiens
cagcaagagcttttc

SEQ ID NO: 487146 - DNA, 15 bp, Homo sapiens
ccagcaagagctttt

SEQ ID NO: 487147 - DNA, 15 bp, Homo sapiens
gccagcaagagcttt

SEQ ID NO: 487148 - DNA, 15 bp, Homo sapiens
ggccagcaagagctt

SEQ ID NO: 487149 - DNA, 15 bp, Homo sapiens
tggccagcaagagct

SEQ ID NO: 487150 - DNA, 15 bp, Homo sapiens
atggccagcaagagc

SEQ ID NO: 487151 - DNA, 15 bp, Homo sapiens
catggccagcaagag

SEQ ID NO: 487152 - DNA, 15 bp, Homo sapiens
ccatggccagcaaga

SEQ ID NO: 487153 - DNA, 15 bp, Homo sapiens
tccatggccagcaag

SEQ ID NO: 487154 - DNA, 15 bp, Homo sapiens
ctccatggccagcaa

SEQ ID NO: 487155 - DNA, 15 bp, Homo sapiens
cctccatggccagca

SEQ ID NO: 487156 - DNA, 15 bp, Homo sapiens
tcctccatggccagc

SEQ ID NO: 487157 - DNA, 15 bp, Homo sapiens
ttcctccatggccag

SEQ ID NO: 487158 - DNA, 15 bp, Homo sapiens
cttcctccatggcca

SEQ ID NO: 487159 - DNA, 15 bp, Homo sapiens
acttcctccatggcc

SEQ ID NO: 487160 - DNA, 15 bp, Homo sapiens
tacttcctccatggc

SEQ ID NO: 487161 - DNA, 15 bp, Homo sapiens
ctacttcctccatgg

SEQ ID NO: 487162 - DNA, 15 bp, Homo sapiens
cctacttcctccatg

SEQ ID NO: 487163 - DNA, 15 bp, Homo sapiens
gcctacttcctccat

SEQ ID NO: 487164 - DNA, 15 bp, Homo sapiens
tgcctacttcctcca

SEQ ID NO: 487165 - DNA, 15 bp, Homo sapiens
ctgcctacttcctcc

SEQ ID NO: 487166 - DNA, 15 bp, Homo sapiens
gctgcctacttcctc

SEQ ID NO: 487167 - DNA, 15 bp, Homo sapiens
agctgcctacttcct

SEQ ID NO: 487168 - DNA, 15 bp, Homo sapiens
cagctgcctacttcc

SEQ ID NO: 487169 - DNA, 15 bp, Homo sapiens
tcagctgcctacttc

SEQ ID NO: 487170 - DNA, 15 bp, Homo sapiens
gtcagctgcctactt

SEQ ID NO: 487171 - DNA, 15 bp, Homo sapiens
tgtcagctgcctact

SEQ ID NO: 487172 - DNA, 15 bp, Homo sapiens
ctgtcagctgcctac

SEQ ID NO: 487173 - DNA, 15 bp, Homo sapiens
tctgtcagctgccta

SEQ ID NO: 487174 - DNA, 15 bp, Homo sapiens
ttctgtcagctgcct

SEQ ID NO: 487175 - DNA, 15 bp, Homo sapiens
tttctgtcagctgcc

SEQ ID NO: 487176 - DNA, 15 bp, Homo sapiens
ctttctgtcagctgc

SEQ ID NO: 487177 - DNA, 15 bp, Homo sapiens
actttctgtcagctg

SEQ ID NO: 487178 - DNA, 15 bp, Homo sapiens
cactttctgtcagct

SEQ ID NO: 487179 - DNA, 15 bp, Homo sapiens
gcactttctgtcagc

SEQ ID NO: 487180 - DNA, 15 bp, Homo sapiens
agcactttctgtcag

SEQ ID NO: 487181 - DNA, 15 bp, Homo sapiens
cagcactttctgtca

SEQ ID NO: 487182 - DNA, 15 bp, Homo sapiens
gcagcactttctgtc

SEQ ID NO: 487183 - DNA, 15 bp, Homo sapiens
tgcagcactttctgt

SEQ ID NO: 487184 - DNA, 15 bp, Homo sapiens
ttgcagcactttctg

SEQ ID NO: 487185 - DNA, 15 bp, Homo sapiens
attgcagcactttct

SEQ ID NO: 487186 - DNA, 15 bp, Homo sapiens
aattgcagcactttc

SEQ ID NO: 487187 - DNA, 15 bp, Homo sapiens
caattgcagcacttt

SEQ ID NO: 487188 - DNA, 15 bp, Homo sapiens
gcaattgcagcactt

SEQ ID NO: 487189 - DNA, 15 bp, Homo sapiens
ggcaattgcagcact

SEQ ID NO: 487190 - DNA, 15 bp, Homo sapiens
aggcaattgcagcac

SEQ ID NO: 487191 - DNA, 15 bp, Homo sapiens
caggcaattgcagca

SEQ ID NO: 487192 - DNA, 15 bp, Homo sapiens
acaggcaattgcagc

SEQ ID NO: 487193 - DNA, 15 bp, Homo sapiens
cacaggcaattgcag

SEQ ID NO: 487194 - DNA, 15 bp, Homo sapiens
acacaggcaattgca

SEQ ID NO: 487195 - DNA, 15 bp, Homo sapiens
gacacaggcaattgc

SEQ ID NO: 487196 - DNA, 15 bp, Homo sapiens
tgacacaggcaattg

SEQ ID NO: 487197 - DNA, 15 bp, Homo sapiens
ttgacacaggcaatt

SEQ ID NO: 487198 - DNA, 15 bp, Homo sapiens
tttgacacaggcaat

SEQ ID NO: 487199 - DNA, 15 bp, Homo sapiens
gtttgacacaggcaa

SEQ ID NO: 487200 - DNA, 15 bp, Homo sapiens
agtttgacacaggca

SEQ ID NO: 487201 - DNA, 15 bp, Homo sapiens
cagtttgacacaggc

SEQ ID NO: 487202 - DNA, 15 bp, Homo sapiens
acagtttgacacagg

SEQ ID NO: 487203 - DNA, 15 bp, Homo sapiens
cacagtttgacacag

SEQ ID NO: 487204 - DNA, 15 bp, Homo sapiens
acacagtttgacaca

SEQ ID NO: 487205 - DNA, 15 bp, Homo sapiens
tacacagtttgacac

SEQ ID NO: 487206 - DNA, 15 bp, Homo sapiens
ttacacagtttgaca

SEQ ID NO: 487207 - DNA, 15 bp, Homo sapiens
tttacacagtttgac

SEQ ID NO: 487208 - DNA, 15 bp, Homo sapiens
ctttacacagtttga

SEQ ID NO: 487209 - DNA, 15 bp, Homo sapiens
gctttacacagtttg

SEQ ID NO: 487210 - DNA, 15 bp, Homo sapiens
tgctttacacagttt

SEQ ID NO: 487211 - DNA, 15 bp, Homo sapiens
ttgctttacacagtt

SEQ ID NO: 487212 - DNA, 15 bp, Homo sapiens
cttgctttacacagt

SEQ ID NO: 487213 - DNA, 15 bp, Homo sapiens
acttgctttacacag

SEQ ID NO: 487214 - DNA, 15 bp, Homo sapiens
tacttgctttacaca

SEQ ID NO: 487215 - DNA, 15 bp, Homo sapiens
gtacttgctttacac

SEQ ID NO: 487216 - DNA, 15 bp, Homo sapiens
agtacttgctttaca

SEQ ID NO: 487217 - DNA, 15 bp, Homo sapiens
aagtacttgctttac

SEQ ID NO: 487218 - DNA, 15 bp, Homo sapiens
taagtacttgcttta

SEQ ID NO: 487219 - DNA, 15 bp, Homo sapiens
gtaagtacttgcttt

SEQ ID NO: 487220 - DNA, 15 bp, Homo sapiens
tgtaagtacttgctt

SEQ ID NO: 487221 - DNA, 15 bp, Homo sapiens
atgtaagtacttgct

SEQ ID NO: 487222 - DNA, 15 bp, Homo sapiens
gatgtaagtacttgc

SEQ ID NO: 487223 - DNA, 15 bp, Homo sapiens
tgatgtaagtacttg

SEQ ID NO: 487224 - DNA, 15 bp, Homo sapiens
ttgatgtaagtactt

SEQ ID NO: 487225 - DNA, 15 bp, Homo sapiens
attgatgtaagtact

SEQ ID NO: 487226 - DNA, 15 bp, Homo sapiens
aattgatgtaagtac

SEQ ID NO: 487227 - DNA, 15 bp, Homo sapiens
caattgatgtaagta

SEQ ID NO: 487228 - DNA, 15 bp, Homo sapiens
ccaattgatgtaagt

SEQ ID NO: 487229 - DNA, 15 bp, Homo sapiens
cccaattgatgtaag

SEQ ID NO: 487230 - DNA, 15 bp, Homo sapiens
tcccaattgatgtaa

SEQ ID NO: 487231 - DNA, 15 bp, Homo sapiens
ttcccaattgatgta

SEQ ID NO: 487232 - DNA, 15 bp, Homo sapiens
cttcccaattgatgt

SEQ ID NO: 487233 - DNA, 15 bp, Homo sapiens
tcttcccaattgatg

SEQ ID NO: 487234 - DNA, 15 bp, Homo sapiens
atcttcccaattgat

SEQ ID NO: 487235 - DNA, 15 bp, Homo sapiens
tatcttcccaattga

SEQ ID NO: 487236 - DNA, 15 bp, Homo sapiens
ttatcttcccaattg

SEQ ID NO: 487237 - DNA, 15 bp, Homo sapiens
gttatcttcccaatt

SEQ ID NO: 487238 - DNA, 15 bp, Homo sapiens
agttatcttcccaat

SEQ ID NO: 487239 - DNA, 15 bp, Homo sapiens
gagttatcttcccaa

SEQ ID NO: 487240 - DNA, 15 bp, Homo sapiens
agagttatcttccca

SEQ ID NO: 487241 - DNA, 15 bp, Homo sapiens
cagagttatcttccc

SEQ ID NO: 487242 - DNA, 15 bp, Homo sapiens
acagagttatcttcc

SEQ ID NO: 487243 - DNA, 15 bp, Homo sapiens
gacagagttatcttc

SEQ ID NO: 487244 - DNA, 15 bp, Homo sapiens
tgacagagttatctt

SEQ ID NO: 487245 - DNA, 15 bp, Homo sapiens
atgacagagttatct

SEQ ID NO: 487246 - DNA, 15 bp, Homo sapiens
aatgacagagttatc

SEQ ID NO: 487247 - DNA, 15 bp, Homo sapiens
aaatgacagagttat

SEQ ID NO: 487248 - DNA, 15 bp, Homo sapiens
aaaatgacagagtta

SEQ ID NO: 487249 - DNA, 15 bp, Homo sapiens
gaaaatgacagagtt

SEQ ID NO: 487250 - DNA, 15 bp, Homo sapiens
ggaaaatgacagagt

SEQ ID NO: 487251 - DNA, 15 bp, Homo sapiens
aggaaaatgacagag

SEQ ID NO: 487252 - DNA, 15 bp, Homo sapiens
taggaaaatgacaga

SEQ ID NO: 487253 - DNA, 15 bp, Homo sapiens
gtaggaaaatgacag

SEQ ID NO: 487254 - DNA, 15 bp, Homo sapiens
agtaggaaaatgaca

SEQ ID NO: 487255 - DNA, 15 bp, Homo sapiens
aagtaggaaaatgac

SEQ ID NO: 487256 - DNA, 15 bp, Homo sapiens
caagtaggaaaatga

SEQ ID NO: 487257 - DNA, 15 bp, Homo sapiens
acaagtaggaaaatg

SEQ ID NO: 487258 - DNA, 15 bp, Homo sapiens
aacaagtaggaaaat

SEQ ID NO: 487259 - DNA, 15 bp, Homo sapiens
gaacaagtaggaaaa

SEQ ID NO: 487260 - DNA, 15 bp, Homo sapiens
tgaacaagtaggaaa

SEQ ID NO: 487261 - DNA, 15 bp, Homo sapiens
ctgaacaagtaggaa

SEQ ID NO: 487262 - DNA, 15 bp, Homo sapiens
actgaacaagtagga

SEQ ID NO: 487263 - DNA, 15 bp, Homo sapiens
gactgaacaagtagg

SEQ ID NO: 487264 - DNA, 15 bp, Homo sapiens
ggactgaacaagtag

SEQ ID NO: 487265 - DNA, 15 bp, Homo sapiens
tggactgaacaagta

SEQ ID NO: 487266 - DNA, 15 bp, Homo sapiens
atggactgaacaagt

SEQ ID NO: 487267 - DNA, 15 bp, Homo sapiens
catggactgaacaag

SEQ ID NO: 487268 - DNA, 15 bp, Homo sapiens
ccatggactgaacaa

SEQ ID NO: 487269 - DNA, 15 bp, Homo sapiens
accatggactgaaca

SEQ ID NO: 487270 - DNA, 15 bp, Homo sapiens
caccatggactgaac

SEQ ID NO: 487271 - DNA, 15 bp, Homo sapiens
ccaccatggactgaa

SEQ ID NO: 487272 - DNA, 15 bp, Homo sapiens
accaccatggactga

SEQ ID NO: 487273 - DNA, 15 bp, Homo sapiens
aaccaccatggactg

SEQ ID NO: 487274 - DNA, 15 bp, Homo sapiens
caaccaccatggact

SEQ ID NO: 487275 - DNA, 15 bp, Homo sapiens
tcaaccaccatggac

SEQ ID NO: 487276 - DNA, 15 bp, Homo sapiens
atcaaccaccatgga

SEQ ID NO: 487277 - DNA, 15 bp, Homo sapiens
gatcaaccaccatgg

SEQ ID NO: 487278 - DNA, 15 bp, Homo sapiens
agatcaaccaccatg

SEQ ID NO: 487279 - DNA, 15 bp, Homo sapiens
aagatcaaccaccat

SEQ ID NO: 487280 - DNA, 15 bp, Homo sapiens
taagatcaaccacca

SEQ ID NO: 487281 - DNA, 15 bp, Homo sapiens
ttaagatcaaccacc

SEQ ID NO: 487282 - DNA, 15 bp, Homo sapiens
cttaagatcaaccac

SEQ ID NO: 487283 - DNA, 15 bp, Homo sapiens
ccttaagatcaacca

SEQ ID NO: 487284 - DNA, 15 bp, Homo sapiens
accttaagatcaacc

SEQ ID NO: 487285 - DNA, 15 bp, Homo sapiens
taccttaagatcaac

SEQ ID NO: 487286 - DNA, 15 bp, Homo sapiens
ttaccttaagatcaa

SEQ ID NO: 487287 - DNA, 15 bp, Homo sapiens
gttaccttaagatca

SEQ ID NO: 487288 - DNA, 15 bp, Homo sapiens
tgttaccttaagatc

SEQ ID NO: 487289 - DNA, 15 bp, Homo sapiens
atgttaccttaagat

SEQ ID NO: 487290 - DNA, 15 bp, Homo sapiens
catgttaccttaaga

SEQ ID NO: 487291 - DNA, 15 bp, Homo sapiens
gcatgttaccttaag

SEQ ID NO: 487292 - DNA, 15 bp, Homo sapiens
agcatgttaccttaa

SEQ ID NO: 487293 - DNA, 15 bp, Homo sapiens
aagcatgttacctta

SEQ ID NO: 487294 - DNA, 15 bp, Homo sapiens
taagcatgttacctt

SEQ ID NO: 487295 - DNA, 15 bp, Homo sapiens
ataagcatgttacct

SEQ ID NO: 487296 - DNA, 15 bp, Homo sapiens
aataagcatgttacc

SEQ ID NO: 487297 - DNA, 15 bp, Homo sapiens
gaataagcatgttac

SEQ ID NO: 487298 - DNA, 15 bp, Homo sapiens
agaataagcatgtta

SEQ ID NO: 487299 - DNA, 15 bp, Homo sapiens
aagaataagcatgtt

SEQ ID NO: 487300 - DNA, 15 bp, Homo sapiens
aaagaataagcatgt

SEQ ID NO: 487301 - DNA, 15 bp, Homo sapiens
gaaagaataagcatg

SEQ ID NO: 487302 - DNA, 15 bp, Homo sapiens
agaaagaataagcat

SEQ ID NO: 487303 - DNA, 15 bp, Homo sapiens
gagaaagaataagca

SEQ ID NO: 487304 - DNA, 15 bp, Homo sapiens
agagaaagaataagc

SEQ ID NO: 487305 - DNA, 15 bp, Homo sapiens
tagagaaagaataag

SEQ ID NO: 487306 - DNA, 15 bp, Homo sapiens
gtagagaaagaataa

SEQ ID NO: 487307 - DNA, 15 bp, Homo sapiens
agtagagaaagaata

SEQ ID NO: 487308 - DNA, 15 bp, Homo sapiens
tagtagagaaagaat

SEQ ID NO: 487309 - DNA, 15 bp, Homo sapiens
gtagtagagaaagaa

SEQ ID NO: 487310 - DNA, 15 bp, Homo sapiens
tgtagtagagaaaga

SEQ ID NO: 487311 - DNA, 15 bp, Homo sapiens
ttgtagtagagaaag

SEQ ID NO: 487312 - DNA, 15 bp, Homo sapiens
tttgtagtagagaaa

SEQ ID NO: 487313 - DNA, 15 bp, Homo sapiens
gtttgtagtagagaa

SEQ ID NO: 487314 - DNA, 15 bp, Homo sapiens
agtttgtagtagaga

SEQ ID NO: 487315 - DNA, 15 bp, Homo sapiens
aagtttgtagtagag

SEQ ID NO: 487316 - DNA, 15 bp, Homo sapiens
aaagtttgtagtaga

SEQ ID NO: 487317 - DNA, 15 bp, Homo sapiens
taaagtttgtagtag

SEQ ID NO: 487318 - DNA, 15 bp, Homo sapiens
ttaaagtttgtagta

SEQ ID NO: 487319 - DNA, 15 bp, Homo sapiens
cttaaagtttgtagt

SEQ ID NO: 487320 - DNA, 15 bp, Homo sapiens
tcttaaagtttgtag

SEQ ID NO: 487321 - DNA, 15 bp, Homo sapiens
ttcttaaagtttgta

SEQ ID NO: 487322 - DNA, 15 bp, Homo sapiens
tttcttaaagtttgt

SEQ ID NO: 487323 - DNA, 15 bp, Homo sapiens
ttttcttaaagtttg

SEQ ID NO: 487324 - DNA, 15 bp, Homo sapiens
attttcttaaagttt

SEQ ID NO: 487325 - DNA, 15 bp, Homo sapiens
aattttcttaaagtt

SEQ ID NO: 487326 - DNA, 15 bp, Homo sapiens
taattttcttaaagt

SEQ ID NO: 487327 - DNA, 15 bp, Homo sapiens
ttaattttcttaaag

SEQ ID NO: 487328 - DNA, 15 bp, Homo sapiens
tttaattttcttaaa

SEQ ID NO: 487329 - DNA, 15 bp, Homo sapiens
atttaattttcttaa

SEQ ID NO: 487330 - DNA, 15 bp, Homo sapiens
catttaattttctta

SEQ ID NO: 487331 - DNA, 15 bp, Homo sapiens
tcatttaattttctt

SEQ ID NO: 487332 - DNA, 15 bp, Homo sapiens
ttcatttaattttct

SEQ ID NO: 487333 - DNA, 15 bp, Homo sapiens
attcatttaattttc

SEQ ID NO: 487334 - DNA, 15 bp, Homo sapiens
aattcatttaatttt

SEQ ID NO: 487335 - DNA, 15 bp, Homo sapiens
aaattcatttaattt

SEQ ID NO: 487336 - DNA, 15 bp, Homo sapiens
aaaattcatttaatt

SEQ ID NO: 487337 - DNA, 15 bp, Homo sapiens
gaaaattcatttaat

SEQ ID NO: 487338 - DNA, 15 bp, Homo sapiens
agaaaattcatttaa

SEQ ID NO: 487339 - DNA, 15 bp, Homo sapiens
tagaaaattcattta

SEQ ID NO: 487340 - DNA, 15 bp, Homo sapiens
ctagaaaattcattt

SEQ ID NO: 487341 - DNA, 15 bp, Homo sapiens
gctagaaaattcatt

SEQ ID NO: 487342 - DNA, 15 bp, Homo sapiens
tgctagaaaattcat

SEQ ID NO: 487343 - DNA, 15 bp, Homo sapiens
atgctagaaaattca

SEQ ID NO: 487344 - DNA, 15 bp, Homo sapiens
tatgctagaaaattc

SEQ ID NO: 487345 - DNA, 15 bp, Homo sapiens
ttatgctagaaaatt

SEQ ID NO: 487346 - DNA, 15 bp, Homo sapiens
cttatgctagaaaat

SEQ ID NO: 487347 - DNA, 15 bp, Homo sapiens
acttatgctagaaaa

SEQ ID NO: 487348 - DNA, 15 bp, Homo sapiens
tacttatgctagaaa

SEQ ID NO: 487349 - DNA, 15 bp, Homo sapiens
atacttatgctagaa

SEQ ID NO: 487350 - DNA, 15 bp, Homo sapiens
aatacttatgctaga

SEQ ID NO: 487351 - DNA, 15 bp, Homo sapiens
taatacttatgctag

SEQ ID NO: 487352 - DNA, 15 bp, Homo sapiens
ataatacttatgcta

SEQ ID NO: 487353 - DNA, 15 bp, Homo sapiens
cataatacttatgct

SEQ ID NO: 487354 - DNA, 15 bp, Homo sapiens
acataatacttatgc

SEQ ID NO: 487355 - DNA, 15 bp, Homo sapiens
gacataatacttatg

SEQ ID NO: 487356 - DNA, 15 bp, Homo sapiens
tgacataatacttat

SEQ ID NO: 487357 - DNA, 15 bp, Homo sapiens
ttgacataatactta

SEQ ID NO: 487358 - DNA, 15 bp, Homo sapiens
tttgacataatactt

SEQ ID NO: 487359 - DNA, 15 bp, Homo sapiens
ctttgacataatact

SEQ ID NO: 487360 - DNA, 15 bp, Homo sapiens
tctttgacataatac

SEQ ID NO: 487361 - DNA, 15 bp, Homo sapiens
atctttgacataata

SEQ ID NO: 487362 - DNA, 15 bp, Homo sapiens
tatctttgacataat

SEQ ID NO: 487363 - DNA, 15 bp, Homo sapiens
ttatctttgacataa

SEQ ID NO: 487364 - DNA, 15 bp, Homo sapiens
attatctttgacata

SEQ ID NO: 487365 - DNA, 15 bp, Homo sapiens
aattatctttgacat

SEQ ID NO: 487366 - DNA, 15 bp, Homo sapiens
caattatctttgaca

SEQ ID NO: 487367 - DNA, 15 bp, Homo sapiens
gcaattatctttgac

SEQ ID NO: 487368 - DNA, 15 bp, Homo sapiens
agcaattatctttga

SEQ ID NO: 487369 - DNA, 15 bp, Homo sapiens
tagcaattatctttg

SEQ ID NO: 487370 - DNA, 15 bp, Homo sapiens
ttagcaattatcttt

SEQ ID NO: 487371 - DNA, 15 bp, Homo sapiens
gttagcaattatctt

SEQ ID NO: 487372 - DNA, 15 bp, Homo sapiens
tgttagcaattatct

SEQ ID NO: 487373 - DNA, 15 bp, Homo sapiens
atgttagcaattatc

SEQ ID NO: 487374 - DNA, 15 bp, Homo sapiens
aatgttagcaattat

SEQ ID NO: 487375 - DNA, 15 bp, Homo sapiens
taatgttagcaatta

SEQ ID NO: 487376 - DNA, 15 bp, Homo sapiens
ttaatgttagcaatt

SEQ ID NO: 487377 - DNA, 15 bp, Homo sapiens
tttaatgttagcaat

SEQ ID NO: 487378 - DNA, 15 bp, Homo sapiens
ctttaatgttagcaa

SEQ ID NO: 487379 - DNA, 15 bp, Homo sapiens
actttaatgttagca

SEQ ID NO: 487380 - DNA, 15 bp, Homo sapiens
aactttaatgttagc

SEQ ID NO: 487381 - DNA, 15 bp, Homo sapiens
gaactttaatgttag

SEQ ID NO: 487382 - DNA, 15 bp, Homo sapiens
agaactttaatgtta

SEQ ID NO: 487383 - DNA, 15 bp, Homo sapiens
cagaactttaatgtt

SEQ ID NO: 487384 - DNA, 15 bp, Homo sapiens
tcagaactttaatgt

SEQ ID NO: 487385 - DNA, 15 bp, Homo sapiens
gtcagaactttaatg

SEQ ID NO: 487386 - DNA, 15 bp, Homo sapiens
agtcagaactttaat

SEQ ID NO: 487387 - DNA, 15 bp, Homo sapiens
gagtcagaactttaa

SEQ ID NO: 487388 - DNA, 15 bp, Homo sapiens
agagtcagaacttta

SEQ ID NO: 487389 - DNA, 15 bp, Homo sapiens
aagagtcagaacttt

SEQ ID NO: 487390 - DNA, 15 bp, Homo sapiens
gaagagtcagaactt

SEQ ID NO: 487391 - DNA, 15 bp, Homo sapiens
cgaagagtcagaact

SEQ ID NO: 487392 - DNA, 15 bp, Homo sapiens
acgaagagtcagaac

SEQ ID NO: 487393 - DNA, 15 bp, Homo sapiens
aacgaagagtcagaa

SEQ ID NO: 487394 - DNA, 15 bp, Homo sapiens
caacgaagagtcaga

SEQ ID NO: 487395 - DNA, 15 bp, Homo sapiens
tcaacgaagagtcag

SEQ ID NO: 487396 - DNA, 15 bp, Homo sapiens
atcaacgaagagtca

SEQ ID NO: 487397 - DNA, 15 bp, Homo sapiens
tatcaacgaagagtc

SEQ ID NO: 487398 - DNA, 15 bp, Homo sapiens
ttatcaacgaagagt

SEQ ID NO: 487399 - DNA, 15 bp, Homo sapiens
cttatcaacgaagag

SEQ ID NO: 487400 - DNA, 15 bp, Homo sapiens
acttatcaacgaaga

SEQ ID NO: 487401 - DNA, 15 bp, Homo sapiens
aacttatcaacgaag

SEQ ID NO: 487402 - DNA, 15 bp, Homo sapiens
gaacttatcaacgaa

SEQ ID NO: 487403 - DNA, 15 bp, Homo sapiens
tgaacttatcaacga

SEQ ID NO: 487404 - DNA, 15 bp, Homo sapiens
atgaacttatcaacg

SEQ ID NO: 487405 - DNA, 15 bp, Homo sapiens
tatgaacttatcaac

SEQ ID NO: 487406 - DNA, 15 bp, Homo sapiens
ctatgaacttatcaa

SEQ ID NO: 487407 - DNA, 15 bp, Homo sapiens
cctatgaacttatca

SEQ ID NO: 487408 - DNA, 15 bp, Homo sapiens
tcctatgaacttatc

SEQ ID NO: 487409 - DNA, 15 bp, Homo sapiens
gtcctatgaacttat

SEQ ID NO: 487410 - DNA, 15 bp, Homo sapiens
agtcctatgaactta

SEQ ID NO: 487411 - DNA, 15 bp, Homo sapiens
aagtcctatgaactt

SEQ ID NO: 487412 - DNA, 15 bp, Homo sapiens
caagtcctatgaact

SEQ ID NO: 487413 - DNA, 15 bp, Homo sapiens
gcaagtcctatgaac

SEQ ID NO: 487414 - DNA, 15 bp, Homo sapiens
agcaagtcctatgaa

SEQ ID NO: 487415 - DNA, 15 bp, Homo sapiens
aagcaagtcctatga

SEQ ID NO: 487416 - DNA, 15 bp, Homo sapiens
aaagcaagtcctatg

SEQ ID NO: 487417 - DNA, 15 bp, Homo sapiens
aaaagcaagtcctat

SEQ ID NO: 487418 - DNA, 15 bp, Homo sapiens
caaaagcaagtccta

SEQ ID NO: 487419 - DNA, 15 bp, Homo sapiens
acaaaagcaagtcct

SEQ ID NO: 487420 - DNA, 15 bp, Homo sapiens
aacaaaagcaagtcc

SEQ ID NO: 487421 - DNA, 15 bp, Homo sapiens
caacaaaagcaagtc

SEQ ID NO: 487422 - DNA, 15 bp, Homo sapiens
acaacaaaagcaagt

SEQ ID NO: 487423 - DNA, 15 bp, Homo sapiens
aacaacaaaagcaag

SEQ ID NO: 487424 - DNA, 15 bp, Homo sapiens
taacaacaaaagcaa

SEQ ID NO: 487425 - DNA, 15 bp, Homo sapiens
gtaacaacaaaagca

SEQ ID NO: 487426 - DNA, 15 bp, Homo sapiens
agtaacaacaaaagc

SEQ ID NO: 487427 - DNA, 15 bp, Homo sapiens
cagtaacaacaaaag

SEQ ID NO: 487428 - DNA, 15 bp, Homo sapiens
acagtaacaacaaaa

SEQ ID NO: 487429 - DNA, 15 bp, Homo sapiens
cacagtaacaacaaa

SEQ ID NO: 487430 - DNA, 15 bp, Homo sapiens
acacagtaacaacaa

SEQ ID NO: 487431 - DNA, 15 bp, Homo sapiens
aacacagtaacaaca

SEQ ID NO: 487432 - DNA, 15 bp, Homo sapiens
gaacacagtaacaac

SEQ ID NO: 487433 - DNA, 15 bp, Homo sapiens
tgaacacagtaacaa

SEQ ID NO: 487434 - DNA, 15 bp, Homo sapiens
atgaacacagtaaca

SEQ ID NO: 487435 - DNA, 15 bp, Homo sapiens
gatgaacacagtaac

SEQ ID NO: 487436 - DNA, 15 bp, Homo sapiens
tgatgaacacagtaa

SEQ ID NO: 487437 - DNA, 15 bp, Homo sapiens
ctgatgaacacagta

SEQ ID NO: 487438 - DNA, 15 bp, Homo sapiens
gctgatgaacacagt

SEQ ID NO: 487439 - DNA, 15 bp, Homo sapiens
ggctgatgaacacag

SEQ ID NO: 487440 - DNA, 15 bp, Homo sapiens
aggctgatgaacaca

SEQ ID NO: 487441 - DNA, 15 bp, Homo sapiens
taggctgatgaacac

SEQ ID NO: 487442 - DNA, 15 bp, Homo sapiens
ttaggctgatgaaca

SEQ ID NO: 487443 - DNA, 15 bp, Homo sapiens
tttaggctgatgaac

SEQ ID NO: 487444 - DNA, 15 bp, Homo sapiens
atttaggctgatgaa

SEQ ID NO: 487445 - DNA, 15 bp, Homo sapiens
catttaggctgatga

SEQ ID NO: 487446 - DNA, 15 bp, Homo sapiens
ccatttaggctgatg

SEQ ID NO: 487447 - DNA, 15 bp, Homo sapiens
tccatttaggctgat

SEQ ID NO: 487448 - DNA, 15 bp, Homo sapiens
gtccatttaggctga

SEQ ID NO: 487449 - DNA, 15 bp, Homo sapiens
agtccatttaggctg

SEQ ID NO: 487450 - DNA, 15 bp, Homo sapiens
cagtccatttaggct

SEQ ID NO: 487451 - DNA, 15 bp, Homo sapiens
tcagtccatttaggc

SEQ ID NO: 487452 - DNA, 15 bp, Homo sapiens
ctcagtccatttagg

SEQ ID NO: 487453 - DNA, 15 bp, Homo sapiens
tctcagtccatttag

SEQ ID NO: 487454 - DNA, 15 bp, Homo sapiens
ttctcagtccattta

SEQ ID NO: 487455 - DNA, 15 bp, Homo sapiens
attctcagtccattt

SEQ ID NO: 487456 - DNA, 15 bp, Homo sapiens
tattctcagtccatt

SEQ ID NO: 487457 - DNA, 15 bp, Homo sapiens
atattctcagtccat

SEQ ID NO: 487458 - DNA, 15 bp, Homo sapiens
catattctcagtcca

SEQ ID NO: 487459 - DNA, 15 bp, Homo sapiens
tcatattctcagtcc

SEQ ID NO: 487460 - DNA, 15 bp, Homo sapiens
ttcatattctcagtc

SEQ ID NO: 487461 - DNA, 15 bp, Homo sapiens
cttcatattctcagt

SEQ ID NO: 487462 - DNA, 15 bp, Homo sapiens
tcttcatattctcag

SEQ ID NO: 487463 - DNA, 15 bp, Homo sapiens
ttcttcatattctca

SEQ ID NO: 487464 - DNA, 15 bp, Homo sapiens
tttcttcatattctc

SEQ ID NO: 487465 - DNA, 15 bp, Homo sapiens
ttttcttcatattct

SEQ ID NO: 487466 - DNA, 15 bp, Homo sapiens
gttttcttcatattc

SEQ ID NO: 487467 - DNA, 15 bp, Homo sapiens
tgttttcttcatatt

SEQ ID NO: 487468 - DNA, 15 bp, Homo sapiens
gtgttttcttcatat

SEQ ID NO: 487469 - DNA, 15 bp, Homo sapiens
ggtgttttcttcata

SEQ ID NO: 487470 - DNA, 15 bp, Homo sapiens
tggtgttttcttcat

SEQ ID NO: 487471 - DNA, 15 bp, Homo sapiens
atggtgttttcttca

SEQ ID NO: 487472 - DNA, 15 bp, Homo sapiens
aatggtgttttcttc

SEQ ID NO: 487473 - DNA, 15 bp, Homo sapiens
aaatggtgttttctt

SEQ ID NO: 487474 - DNA, 15 bp, Homo sapiens
aaaatggtgttttct

SEQ ID NO: 487475 - DNA, 15 bp, Homo sapiens
gaaaatggtgttttc

SEQ ID NO: 487476 - DNA, 15 bp, Homo sapiens
agaaaatggtgtttt

SEQ ID NO: 487477 - DNA, 15 bp, Homo sapiens
aagaaaatggtgttt

SEQ ID NO: 487478 - DNA, 15 bp, Homo sapiens
taagaaaatggtgtt

SEQ ID NO: 487479 - DNA, 15 bp, Homo sapiens
ttaagaaaatggtgt

SEQ ID NO: 487480 - DNA, 15 bp, Homo sapiens
tttaagaaaatggtg

SEQ ID NO: 487481 - DNA, 15 bp, Homo sapiens
atttaagaaaatggt

SEQ ID NO: 487482 - DNA, 15 bp, Homo sapiens
tatttaagaaaatgg

SEQ ID NO: 487483 - DNA, 15 bp, Homo sapiens
ttatttaagaaaatg

SEQ ID NO: 487484 - DNA, 15 bp, Homo sapiens
cttatttaagaaaat

SEQ ID NO: 487485 - DNA, 15 bp, Homo sapiens
gcttatttaagaaaa

SEQ ID NO: 487486 - DNA, 15 bp, Homo sapiens
tgcttatttaagaaa

SEQ ID NO: 487487 - DNA, 15 bp, Homo sapiens
atgcttatttaagaa

SEQ ID NO: 487488 - DNA, 15 bp, Homo sapiens
tatgcttatttaaga

SEQ ID NO: 487489 - DNA, 15 bp, Homo sapiens
ttatgcttatttaag

SEQ ID NO: 487490 - DNA, 15 bp, Homo sapiens
tttatgcttatttaa

SEQ ID NO: 487491 - DNA, 15 bp, Homo sapiens
atttatgcttattta

SEQ ID NO: 487492 - DNA, 15 bp, Homo sapiens
tatttatgcttattt

SEQ ID NO: 487493 - DNA, 15 bp, Homo sapiens
atatttatgcttatt

SEQ ID NO: 487494 - DNA, 15 bp, Homo sapiens
tatatttatgcttat

SEQ ID NO: 487495 - DNA, 15 bp, Homo sapiens
gtatatttatgctta

SEQ ID NO: 487496 - DNA, 15 bp, Homo sapiens
tgtatatttatgctt

SEQ ID NO: 487497 - DNA, 15 bp, Homo sapiens
ctgtatatttatgct

SEQ ID NO: 487498 - DNA, 15 bp, Homo sapiens
tctgtatatttatgc

SEQ ID NO: 487499 - DNA, 15 bp, Homo sapiens
gtctgtatatttatg

SEQ ID NO: 487500 - DNA, 15 bp, Homo sapiens
agtctgtatatttat

SEQ ID NO: 487501 - DNA, 15 bp, Homo sapiens
aagtctgtatattta

SEQ ID NO: 487502 - DNA, 15 bp, Homo sapiens
caagtctgtatattt

SEQ ID NO: 487503 - DNA, 15 bp, Homo sapiens
ccaagtctgtatatt

SEQ ID NO: 487504 - DNA, 15 bp, Homo sapiens
cccaagtctgtatat

SEQ ID NO: 487505 - DNA, 15 bp, Homo sapiens
acccaagtctgtata

SEQ ID NO: 487506 - DNA, 15 bp, Homo sapiens
aacccaagtctgtat

SEQ ID NO: 487507 - DNA, 15 bp, Homo sapiens
aaacccaagtctgta

SEQ ID NO: 487508 - DNA, 15 bp, Homo sapiens
taaacccaagtctgt

SEQ ID NO: 487509 - DNA, 15 bp, Homo sapiens
ttaaacccaagtctg

SEQ ID NO: 487510 - DNA, 15 bp, Homo sapiens
tttaaacccaagtct

SEQ ID NO: 487511 - DNA, 15 bp, Homo sapiens
ttttaaacccaagtc

SEQ ID NO: 487512 - DNA, 15 bp, Homo sapiens
attttaaacccaagt

SEQ ID NO: 487513 - DNA, 15 bp, Homo sapiens
tattttaaacccaag

SEQ ID NO: 487514 - DNA, 15 bp, Homo sapiens
ttattttaaacccaa

SEQ ID NO: 487515 - DNA, 15 bp, Homo sapiens
attattttaaaccca

SEQ ID NO: 487516 - DNA, 15 bp, Homo sapiens
cattattttaaaccc

SEQ ID NO: 487517 - DNA, 15 bp, Homo sapiens
acattattttaaacc

SEQ ID NO: 487518 - DNA, 15 bp, Homo sapiens
cacattattttaaac

SEQ ID NO: 487519 - DNA, 15 bp, Homo sapiens
ccacattattttaaa

SEQ ID NO: 487520 - DNA, 15 bp, Homo sapiens
gccacattattttaa

SEQ ID NO: 487521 - DNA, 15 bp, Homo sapiens
tgccacattatttta

SEQ ID NO: 487522 - DNA, 15 bp, Homo sapiens
ttgccacattatttt

SEQ ID NO: 487523 - DNA, 15 bp, Homo sapiens
attgccacattattt

SEQ ID NO: 487524 - DNA, 15 bp, Homo sapiens
aattgccacattatt

SEQ ID NO: 487525 - DNA, 15 bp, Homo sapiens
taattgccacattat

SEQ ID NO: 487526 - DNA, 15 bp, Homo sapiens
ctaattgccacatta

SEQ ID NO: 487527 - DNA, 15 bp, Homo sapiens
cctaattgccacatt

SEQ ID NO: 487528 - DNA, 15 bp, Homo sapiens
ccctaattgccacat

SEQ ID NO: 487529 - DNA, 15 bp, Homo sapiens
gccctaattgccaca

SEQ ID NO: 487530 - DNA, 15 bp, Homo sapiens
ggccctaattgccac

SEQ ID NO: 487531 - DNA, 15 bp, Homo sapiens
aggccctaattgcca

SEQ ID NO: 487532 - DNA, 15 bp, Homo sapiens
caggccctaattgcc

SEQ ID NO: 487533 - DNA, 15 bp, Homo sapiens
tcaggccctaattgc

SEQ ID NO: 487534 - DNA, 15 bp, Homo sapiens
ttcaggccctaattg

SEQ ID NO: 487535 - DNA, 15 bp, Homo sapiens
tttcaggccctaatt

SEQ ID NO: 487536 - DNA, 15 bp, Homo sapiens
atttcaggccctaat

SEQ ID NO: 487537 - DNA, 15 bp, Homo sapiens
catttcaggccctaa

SEQ ID NO: 487538 - DNA, 15 bp, Homo sapiens
tcatttcaggcccta

SEQ ID NO: 487539 - DNA, 15 bp, Homo sapiens
ttcatttcaggccct

SEQ ID NO: 487540 - DNA, 15 bp, Homo sapiens
gttcatttcaggccc

SEQ ID NO: 487541 - DNA, 15 bp, Homo sapiens
ggttcatttcaggcc

SEQ ID NO: 487542 - DNA, 15 bp, Homo sapiens
aggttcatttcaggc

SEQ ID NO: 487543 - DNA, 15 bp, Homo sapiens
taggttcatttcagg

SEQ ID NO: 487544 - DNA, 15 bp, Homo sapiens
ataggttcatttcag

SEQ ID NO: 487545 - DNA, 15 bp, Homo sapiens
tataggttcatttca

SEQ ID NO: 487546 - DNA, 15 bp, Homo sapiens
atataggttcatttc

SEQ ID NO: 487547 - DNA, 15 bp, Homo sapiens
tatataggttcattt

SEQ ID NO: 487548 - DNA, 15 bp, Homo sapiens
atatataggttcatt

SEQ ID NO: 487549 - DNA, 15 bp, Homo sapiens
catatataggttcat

SEQ ID NO: 487550 - DNA, 15 bp, Homo sapiens
ccatatataggttca

SEQ ID NO: 487551 - DNA, 15 bp, Homo sapiens
accatatataggttc

SEQ ID NO: 487552 - DNA, 15 bp, Homo sapiens
taccatatataggtt

SEQ ID NO: 487553 - DNA, 15 bp, Homo sapiens
ataccatatataggt

SEQ ID NO: 487554 - DNA, 15 bp, Homo sapiens
tataccatatatagg

SEQ ID NO: 487555 - DNA, 15 bp, Homo sapiens
ctataccatatatag

SEQ ID NO: 487556 - DNA, 15 bp, Homo sapiens
cctataccatatata

SEQ ID NO: 487557 - DNA, 15 bp, Homo sapiens
tcctataccatatat

SEQ ID NO: 487558 - DNA, 15 bp, Homo sapiens
ttcctataccatata

SEQ ID NO: 487559 - DNA, 15 bp, Homo sapiens
cttcctataccatat

SEQ ID NO: 487560 - DNA, 15 bp, Homo sapiens
tcttcctataccata

SEQ ID NO: 487561 - DNA, 15 bp, Homo sapiens
ttcttcctataccat

SEQ ID NO: 487562 - DNA, 15 bp, Homo sapiens
attcttcctatacca

SEQ ID NO: 487563 - DNA, 15 bp, Homo sapiens
aattcttcctatacc

SEQ ID NO: 487564 - DNA, 15 bp, Homo sapiens
caattcttcctatac

SEQ ID NO: 487565 - DNA, 15 bp, Homo sapiens
acaattcttcctata

SEQ ID NO: 487566 - DNA, 15 bp, Homo sapiens
tacaattcttcctat

SEQ ID NO: 487567 - DNA, 15 bp, Homo sapiens
atacaattcttccta

SEQ ID NO: 487568 - DNA, 15 bp, Homo sapiens
gatacaattcttcct

SEQ ID NO: 487569 - DNA, 15 bp, Homo sapiens
tgatacaattcttcc

SEQ ID NO: 487570 - DNA, 15 bp, Homo sapiens
ctgatacaattcttc

SEQ ID NO: 487571 - DNA, 15 bp, Homo sapiens
tctgatacaattctt

SEQ ID NO: 487572 - DNA, 15 bp, Homo sapiens
gtctgatacaattct

SEQ ID NO: 487573 - DNA, 15 bp, Homo sapiens
agtctgatacaattc

SEQ ID NO: 487574 - DNA, 15 bp, Homo sapiens
cagtctgatacaatt

SEQ ID NO: 487575 - DNA, 15 bp, Homo sapiens
tcagtctgatacaat

SEQ ID NO: 487576 - DNA, 15 bp, Homo sapiens
atcagtctgatacaa

SEQ ID NO: 487577 - DNA, 15 bp, Homo sapiens
catcagtctgataca

SEQ ID NO: 487578 - DNA, 15 bp, Homo sapiens
tcatcagtctgatac

SEQ ID NO: 487579 - DNA, 15 bp, Homo sapiens
ttcatcagtctgata

SEQ ID NO: 487580 - DNA, 15 bp, Homo sapiens
gttcatcagtctgat

SEQ ID NO: 487581 - DNA, 15 bp, Homo sapiens
ggttcatcagtctga

SEQ ID NO: 487582 - DNA, 15 bp, Homo sapiens
tggttcatcagtctg

SEQ ID NO: 487583 - DNA, 15 bp, Homo sapiens
gtggttcatcagtct

SEQ ID NO: 487584 - DNA, 15 bp, Homo sapiens
tgtggttcatcagtc

SEQ ID NO: 487585 - DNA, 15 bp, Homo sapiens
ctgtggttcatcagt

SEQ ID NO: 487586 - DNA, 15 bp, Homo sapiens
actgtggttcatcag

SEQ ID NO: 487587 - DNA, 15 bp, Homo sapiens
tactgtggttcatca

SEQ ID NO: 487588 - DNA, 15 bp, Homo sapiens
atactgtggttcatc

SEQ ID NO: 487589 - DNA, 15 bp, Homo sapiens
catactgtggttcat

SEQ ID NO: 487590 - DNA, 15 bp, Homo sapiens
ccatactgtggttca

SEQ ID NO: 487591 - DNA, 15 bp, Homo sapiens
cccatactgtggttc

SEQ ID NO: 487592 - DNA, 15 bp, Homo sapiens
acccatactgtggtt

SEQ ID NO: 487593 - DNA, 15 bp, Homo sapiens
cacccatactgtggt

SEQ ID NO: 487594 - DNA, 15 bp, Homo sapiens
gcacccatactgtgg

SEQ ID NO: 487595 - DNA, 15 bp, Homo sapiens
agcacccatactgtg

SEQ ID NO: 487596 - DNA, 15 bp, Homo sapiens
aagcacccatactgt

SEQ ID NO: 487597 - DNA, 15 bp, Homo sapiens
aaagcacccatactg

SEQ ID NO: 487598 - DNA, 15 bp, Homo sapiens
caaagcacccatact

SEQ ID NO: 487599 - DNA, 15 bp, Homo sapiens
acaaagcacccatac

SEQ ID NO: 487600 - DNA, 15 bp, Homo sapiens
cacaaagcacccata

SEQ ID NO: 487601 - DNA, 15 bp, Homo sapiens
gcacaaagcacccat

SEQ ID NO: 487602 - DNA, 15 bp, Homo sapiens
agcacaaagcaccca

SEQ ID NO: 487603 - DNA, 15 bp, Homo sapiens
aagcacaaagcaccc

SEQ ID NO: 487604 - DNA, 15 bp, Homo sapiens
gaagcacaaagcacc

SEQ ID NO: 487605 - DNA, 15 bp, Homo sapiens
agaagcacaaagcac

SEQ ID NO: 487606 - DNA, 15 bp, Homo sapiens
aagaagcacaaagca

SEQ ID NO: 487607 - DNA, 15 bp, Homo sapiens
gaagaagcacaaagc

SEQ ID NO: 487608 - DNA, 15 bp, Homo sapiens
agaagaagcacaaag

SEQ ID NO: 487609 - DNA, 15 bp, Homo sapiens
cagaagaagcacaaa

SEQ ID NO: 487610 - DNA, 15 bp, Homo sapiens
ccagaagaagcacaa

SEQ ID NO: 487611 - DNA, 15 bp, Homo sapiens
gccagaagaagcaca

SEQ ID NO: 487612 - DNA, 15 bp, Homo sapiens
tgccagaagaagcac

SEQ ID NO: 487613 - DNA, 15 bp, Homo sapiens
ctgccagaagaagca

SEQ ID NO: 487614 - DNA, 15 bp, Homo sapiens
gctgccagaagaagc

SEQ ID NO: 487615 - DNA, 15 bp, Homo sapiens
agctgccagaagaag

SEQ ID NO: 487616 - DNA, 15 bp, Homo sapiens
cagctgccagaagaa

SEQ ID NO: 487617 - DNA, 15 bp, Homo sapiens
ccagctgccagaaga

SEQ ID NO: 487618 - DNA, 15 bp, Homo sapiens
tccagctgccagaag

SEQ ID NO: 487619 - DNA, 15 bp, Homo sapiens
atccagctgccagaa

SEQ ID NO: 487620 - DNA, 15 bp, Homo sapiens
aatccagctgccaga

SEQ ID NO: 487621 - DNA, 15 bp, Homo sapiens
aaatccagctgccag

SEQ ID NO: 487622 - DNA, 15 bp, Homo sapiens
aaaatccagctgcca

SEQ ID NO: 487623 - DNA, 15 bp, Homo sapiens
taaaatccagctgcc

SEQ ID NO: 487624 - DNA, 15 bp, Homo sapiens
gtaaaatccagctgc

SEQ ID NO: 487625 - DNA, 15 bp, Homo sapiens
agtaaaatccagctg

SEQ ID NO: 487626 - DNA, 15 bp, Homo sapiens
cagtaaaatccagct

SEQ ID NO: 487627 - DNA, 15 bp, Homo sapiens
gcagtaaaatccagc

SEQ ID NO: 487628 - DNA, 15 bp, Homo sapiens
ggcagtaaaatccag

SEQ ID NO: 487629 - DNA, 15 bp, Homo sapiens
tggcagtaaaatcca

SEQ ID NO: 487630 - DNA, 15 bp, Homo sapiens
atggcagtaaaatcc

SEQ ID NO: 487631 - DNA, 15 bp, Homo sapiens
aatggcagtaaaatc

SEQ ID NO: 487632 - DNA, 15 bp, Homo sapiens
aaatggcagtaaaat

SEQ ID NO: 487633 - DNA, 15 bp, Homo sapiens
caaatggcagtaaaa

SEQ ID NO: 487634 - DNA, 15 bp, Homo sapiens
acaaatggcagtaaa

SEQ ID NO: 487635 - DNA, 15 bp, Homo sapiens
cacaaatggcagtaa

SEQ ID NO: 487636 - DNA, 15 bp, Homo sapiens
acacaaatggcagta

SEQ ID NO: 487637 - DNA, 15 bp, Homo sapiens
cacacaaatggcagt

SEQ ID NO: 487638 - DNA, 15 bp, Homo sapiens
ccacacaaatggcag

SEQ ID NO: 487639 - DNA, 15 bp, Homo sapiens
cccacacaaatggca

SEQ ID NO: 487640 - DNA, 15 bp, Homo sapiens
acccacacaaatggc

SEQ ID NO: 487641 - DNA, 15 bp, Homo sapiens
tacccacacaaatgg

SEQ ID NO: 487642 - DNA, 15 bp, Homo sapiens
ttacccacacaaatg

SEQ ID NO: 487643 - DNA, 15 bp, Homo sapiens
attacccacacaaat

SEQ ID NO: 487644 - DNA, 15 bp, Homo sapiens
cattacccacacaaa

SEQ ID NO: 487645 - DNA, 15 bp, Homo sapiens
acattacccacacaa

SEQ ID NO: 487646 - DNA, 15 bp, Homo sapiens
cacattacccacaca

SEQ ID NO: 487647 - DNA, 15 bp, Homo sapiens
acacattacccacac

SEQ ID NO: 487648 - DNA, 15 bp, Homo sapiens
aacacattacccaca

SEQ ID NO: 487649 - DNA, 15 bp, Homo sapiens
caacacattacccac

SEQ ID NO: 487650 - DNA, 15 bp, Homo sapiens
tcaacacattaccca

SEQ ID NO: 487651 - DNA, 15 bp, Homo sapiens
atcaacacattaccc

SEQ ID NO: 487652 - DNA, 15 bp, Homo sapiens
catcaacacattacc

SEQ ID NO: 487653 - DNA, 15 bp, Homo sapiens
acatcaacacattac

SEQ ID NO: 487654 - DNA, 15 bp, Homo sapiens
aacatcaacacatta

SEQ ID NO: 487655 - DNA, 15 bp, Homo sapiens
taacatcaacacatt

SEQ ID NO: 487656 - DNA, 15 bp, Homo sapiens
ataacatcaacacat

SEQ ID NO: 487657 - DNA, 15 bp, Homo sapiens
aataacatcaacaca

SEQ ID NO: 487658 - DNA, 15 bp, Homo sapiens
taataacatcaacac

SEQ ID NO: 487659 - DNA, 15 bp, Homo sapiens
gtaataacatcaaca

SEQ ID NO: 487660 - DNA, 15 bp, Homo sapiens
tgtaataacatcaac

SEQ ID NO: 487661 - DNA, 15 bp, Homo sapiens
atgtaataacatcaa

SEQ ID NO: 487662 - DNA, 15 bp, Homo sapiens
catgtaataacatca

SEQ ID NO: 487663 - DNA, 15 bp, Homo sapiens
acatgtaataacatc

SEQ ID NO: 487664 - DNA, 15 bp, Homo sapiens
aacatgtaataacat

SEQ ID NO: 487665 - DNA, 15 bp, Homo sapiens
taacatgtaataaca

SEQ ID NO: 487666 - DNA, 15 bp, Homo sapiens
ctaacatgtaataac

SEQ ID NO: 487667 - DNA, 15 bp, Homo sapiens
actaacatgtaataa

SEQ ID NO: 487668 - DNA, 15 bp, Homo sapiens
tactaacatgtaata

SEQ ID NO: 487669 - DNA, 15 bp, Homo sapiens
ttactaacatgtaat

SEQ ID NO: 487670 - DNA, 15 bp, Homo sapiens
tttactaacatgtaa

SEQ ID NO: 487671 - DNA, 15 bp, Homo sapiens
ctttactaacatgta

SEQ ID NO: 487672 - DNA, 15 bp, Homo sapiens
tctttactaacatgt

SEQ ID NO: 487673 - DNA, 15 bp, Homo sapiens
ttctttactaacatg

SEQ ID NO: 487674 - DNA, 15 bp, Homo sapiens
tttctttactaacat

SEQ ID NO: 487675 - DNA, 15 bp, Homo sapiens
atttctttactaaca

SEQ ID NO: 487676 - DNA, 15 bp, Homo sapiens
tatttctttactaac

SEQ ID NO: 487677 - DNA, 15 bp, Homo sapiens
gtatttctttactaa

SEQ ID NO: 487678 - DNA, 15 bp, Homo sapiens
agtatttctttacta

SEQ ID NO: 487679 - DNA, 15 bp, Homo sapiens
cagtatttctttact

SEQ ID NO: 487680 - DNA, 15 bp, Homo sapiens
gcagtatttctttac

SEQ ID NO: 487681 - DNA, 15 bp, Homo sapiens
tgcagtatttcttta

SEQ ID NO: 487682 - DNA, 15 bp, Homo sapiens
atgcagtatttcttt

SEQ ID NO: 487683 - DNA, 15 bp, Homo sapiens
catgcagtatttctt

SEQ ID NO: 487684 - DNA, 15 bp, Homo sapiens
ccatgcagtatttct

SEQ ID NO: 487685 - DNA, 15 bp, Homo sapiens
cccatgcagtatttc

SEQ ID NO: 487686 - DNA, 15 bp, Homo sapiens
acccatgcagtattt

SEQ ID NO: 487687 - DNA, 15 bp, Homo sapiens
tacccatgcagtatt

SEQ ID NO: 487688 - DNA, 15 bp, Homo sapiens
atacccatgcagtat

SEQ ID NO: 487689 - DNA, 15 bp, Homo sapiens
aatacccatgcagta

SEQ ID NO: 487690 - DNA, 15 bp, Homo sapiens
aaatacccatgcagt

SEQ ID NO: 487691 - DNA, 15 bp, Homo sapiens
taaatacccatgcag

SEQ ID NO: 487692 - DNA, 15 bp, Homo sapiens
ttaaatacccatgca

SEQ ID NO: 487693 - DNA, 15 bp, Homo sapiens
tttaaatacccatgc

SEQ ID NO: 487694 - DNA, 15 bp, Homo sapiens
ctttaaatacccatg

SEQ ID NO: 487695 - DNA, 15 bp, Homo sapiens
cctttaaatacccat

SEQ ID NO: 487696 - DNA, 15 bp, Homo sapiens
gcctttaaataccca

SEQ ID NO: 487697 - DNA, 15 bp, Homo sapiens
agcctttaaataccc

SEQ ID NO: 487698 - DNA, 15 bp, Homo sapiens
aagcctttaaatacc

SEQ ID NO: 487699 - DNA, 15 bp, Homo sapiens
aaagcctttaaatac

SEQ ID NO: 487700 - DNA, 15 bp, Homo sapiens
aaaagcctttaaata

SEQ ID NO: 487701 - DNA, 15 bp, Homo sapiens
caaaagcctttaaat

SEQ ID NO: 487702 - DNA, 15 bp, Homo sapiens
acaaaagcctttaaa

SEQ ID NO: 487703 - DNA, 15 bp, Homo sapiens
aacaaaagcctttaa

SEQ ID NO: 487704 - DNA, 15 bp, Homo sapiens
aaacaaaagccttta

SEQ ID NO: 487705 - DNA, 15 bp, Homo sapiens
aaaacaaaagccttt

SEQ ID NO: 487706 - DNA, 15 bp, Homo sapiens
gaaaacaaaagcctt

SEQ ID NO: 487707 - DNA, 15 bp, Homo sapiens
agaaaacaaaagcct

SEQ ID NO: 487708 - DNA, 15 bp, Homo sapiens
cagaaaacaaaagcc

SEQ ID NO: 487709 - DNA, 15 bp, Homo sapiens
acagaaaacaaaagc

SEQ ID NO: 487710 - DNA, 15 bp, Homo sapiens
aacagaaaacaaaag

SEQ ID NO: 487711 - DNA, 15 bp, Homo sapiens
caacagaaaacaaaa

SEQ ID NO: 487712 - DNA, 15 bp, Homo sapiens
ccaacagaaaacaaa

SEQ ID NO: 487713 - DNA, 15 bp, Homo sapiens
cccaacagaaaacaa

SEQ ID NO: 487714 - DNA, 15 bp, Homo sapiens
ccccaacagaaaaca

SEQ ID NO: 487715 - DNA, 15 bp, Homo sapiens
accccaacagaaaac

SEQ ID NO: 487716 - DNA, 15 bp, Homo sapiens
aaccccaacagaaaa

SEQ ID NO: 487717 - DNA, 15 bp, Homo sapiens
aaaccccaacagaaa

SEQ ID NO: 487718 - DNA, 15 bp, Homo sapiens
aaaaccccaacagaa

SEQ ID NO: 487719 - DNA, 15 bp, Homo sapiens
aaaaaccccaacaga

SEQ ID NO: 487720 - DNA, 15 bp, Homo sapiens
taaaaaccccaacag

SEQ ID NO: 487721 - DNA, 15 bp, Homo sapiens
ataaaaaccccaaca

SEQ ID NO: 487722 - DNA, 15 bp, Homo sapiens
tataaaaaccccaac

SEQ ID NO: 487723 - DNA, 15 bp, Homo sapiens
ctataaaaaccccaa

SEQ ID NO: 487724 - DNA, 15 bp, Homo sapiens
tctataaaaacccca

SEQ ID NO: 487725 - DNA, 15 bp, Homo sapiens
ttctataaaaacccc

SEQ ID NO: 487726 - DNA, 15 bp, Homo sapiens
gttctataaaaaccc

SEQ ID NO: 487727 - DNA, 15 bp, Homo sapiens
ggttctataaaaacc

SEQ ID NO: 487728 - DNA, 15 bp, Homo sapiens
aggttctataaaaac

SEQ ID NO: 487729 - DNA, 15 bp, Homo sapiens
caggttctataaaaa

SEQ ID NO: 487730 - DNA, 15 bp, Homo sapiens
gcaggttctataaaa

SEQ ID NO: 487731 - DNA, 15 bp, Homo sapiens
agcaggttctataaa

SEQ ID NO: 487732 - DNA, 15 bp, Homo sapiens
aagcaggttctataa

SEQ ID NO: 487733 - DNA, 15 bp, Homo sapiens
aaagcaggttctata

SEQ ID NO: 487734 - DNA, 15 bp, Homo sapiens
aaaagcaggttctat

SEQ ID NO: 487735 - DNA, 15 bp, Homo sapiens
aaaaagcaggttcta

SEQ ID NO: 487736 - DNA, 15 bp, Homo sapiens
taaaaagcaggttct

SEQ ID NO: 487737 - DNA, 15 bp, Homo sapiens
ttaaaaagcaggttc

SEQ ID NO: 487738 - DNA, 15 bp, Homo sapiens
attaaaaagcaggtt

SEQ ID NO: 487739 - DNA, 15 bp, Homo sapiens
gattaaaaagcaggt

SEQ ID NO: 487740 - DNA, 15 bp, Homo sapiens
ggattaaaaagcagg

SEQ ID NO: 487741 - DNA, 15 bp, Homo sapiens
tggattaaaaagcag

SEQ ID NO: 487742 - DNA, 15 bp, Homo sapiens
ttggattaaaaagca

SEQ ID NO: 487743 - DNA, 15 bp, Homo sapiens
cttggattaaaaagc

SEQ ID NO: 487744 - DNA, 15 bp, Homo sapiens
acttggattaaaaag

SEQ ID NO: 487745 - DNA, 15 bp, Homo sapiens
tacttggattaaaaa

SEQ ID NO: 487746 - DNA, 15 bp, Homo sapiens
ttacttggattaaaa

SEQ ID NO: 487747 - DNA, 15 bp, Homo sapiens
cttacttggattaaa

SEQ ID NO: 487748 - DNA, 15 bp, Homo sapiens
gcttacttggattaa

SEQ ID NO: 487749 - DNA, 15 bp, Homo sapiens
ggcttacttggatta

SEQ ID NO: 487750 - DNA, 15 bp, Homo sapiens
tggcttacttggatt

SEQ ID NO: 487751 - DNA, 15 bp, Homo sapiens
atggcttacttggat

SEQ ID NO: 487752 - DNA, 15 bp, Homo sapiens
aatggcttacttgga

SEQ ID NO: 487753 - DNA, 15 bp, Homo sapiens
gaatggcttacttgg

SEQ ID NO: 487754 - DNA, 15 bp, Homo sapiens
agaatggcttacttg

SEQ ID NO: 487755 - DNA, 15 bp, Homo sapiens
gagaatggcttactt

SEQ ID NO: 487756 - DNA, 15 bp, Homo sapiens
tgagaatggcttact

SEQ ID NO: 487757 - DNA, 15 bp, Homo sapiens
ttgagaatggcttac

SEQ ID NO: 487758 - DNA, 15 bp, Homo sapiens
cttgagaatggctta

SEQ ID NO: 487759 - DNA, 15 bp, Homo sapiens
tcttgagaatggctt

SEQ ID NO: 487760 - DNA, 15 bp, Homo sapiens
ctcttgagaatggct

SEQ ID NO: 487761 - DNA, 15 bp, Homo sapiens
cctcttgagaatggc

SEQ ID NO: 487762 - DNA, 15 bp, Homo sapiens
gcctcttgagaatgg

SEQ ID NO: 487763 - DNA, 15 bp, Homo sapiens
tgcctcttgagaatg

SEQ ID NO: 487764 - DNA, 15 bp, Homo sapiens
ctgcctcttgagaat

SEQ ID NO: 487765 - DNA, 15 bp, Homo sapiens
actgcctcttgagaa

SEQ ID NO: 487766 - DNA, 15 bp, Homo sapiens
gactgcctcttgaga

SEQ ID NO: 487767 - DNA, 15 bp, Homo sapiens
tgactgcctcttgag

SEQ ID NO: 487768 - DNA, 15 bp, Homo sapiens
ctgactgcctcttga

SEQ ID NO: 487769 - DNA, 15 bp, Homo sapiens
gctgactgcctcttg

SEQ ID NO: 487770 - DNA, 15 bp, Homo sapiens
ggctgactgcctctt

SEQ ID NO: 487771 - DNA, 15 bp, Homo sapiens
aggctgactgcctct

SEQ ID NO: 487772 - DNA, 15 bp, Homo sapiens
caggctgactgcctc

SEQ ID NO: 487773 - DNA, 15 bp, Homo sapiens
gcaggctgactgcct

SEQ ID NO: 487774 - DNA, 15 bp, Homo sapiens
tgcaggctgactgcc

SEQ ID NO: 487775 - DNA, 15 bp, Homo sapiens
ctgcaggctgactgc

SEQ ID NO: 487776 - DNA, 15 bp, Homo sapiens
tctgcaggctgactg

SEQ ID NO: 487777 - DNA, 15 bp, Homo sapiens
atctgcaggctgact

SEQ ID NO: 487778 - DNA, 15 bp, Homo sapiens
catctgcaggctgac

SEQ ID NO: 487779 - DNA, 15 bp, Homo sapiens
acatctgcaggctga

SEQ ID NO: 487780 - DNA, 15 bp, Homo sapiens
cacatctgcaggctg

SEQ ID NO: 487781 - DNA, 15 bp, Homo sapiens
ccacatctgcaggct

SEQ ID NO: 487782 - DNA, 15 bp, Homo sapiens
tccacatctgcaggc

SEQ ID NO: 487783 - DNA, 15 bp, Homo sapiens
atccacatctgcagg

SEQ ID NO: 487784 - DNA, 15 bp, Homo sapiens
gatccacatctgcag

SEQ ID NO: 487785 - DNA, 15 bp, Homo sapiens
agatccacatctgca

SEQ ID NO: 487786 - DNA, 15 bp, Homo sapiens
tagatccacatctgc

SEQ ID NO: 487787 - DNA, 15 bp, Homo sapiens
ttagatccacatctg

SEQ ID NO: 487788 - DNA, 15 bp, Homo sapiens
attagatccacatct

SEQ ID NO: 487789 - DNA, 15 bp, Homo sapiens
cattagatccacatc

SEQ ID NO: 487790 - DNA, 15 bp, Homo sapiens
tcattagatccacat

SEQ ID NO: 487791 - DNA, 15 bp, Homo sapiens
atcattagatccaca

SEQ ID NO: 487792 - DNA, 15 bp, Homo sapiens
aatcattagatccac

SEQ ID NO: 487793 - DNA, 15 bp, Homo sapiens
caatcattagatcca

SEQ ID NO: 487794 - DNA, 15 bp, Homo sapiens
tcaatcattagatcc

SEQ ID NO: 487795 - DNA, 15 bp, Homo sapiens
gtcaatcattagatc

SEQ ID NO: 487796 - DNA, 15 bp, Homo sapiens
agtcaatcattagat

SEQ ID NO: 487797 - DNA, 15 bp, Homo sapiens
cagtcaatcattaga

SEQ ID NO: 487798 - DNA, 15 bp, Homo sapiens
gcagtcaatcattag

SEQ ID NO: 487799 - DNA, 15 bp, Homo sapiens
ggcagtcaatcatta

SEQ ID NO: 487800 - DNA, 15 bp, Homo sapiens
aggcagtcaatcatt

SEQ ID NO: 487801 - DNA, 15 bp, Homo sapiens
aaggcagtcaatcat

SEQ ID NO: 487802 - DNA, 15 bp, Homo sapiens
caaggcagtcaatca

SEQ ID NO: 487803 - DNA, 15 bp, Homo sapiens
acaaggcagtcaatc

SEQ ID NO: 487804 - DNA, 15 bp, Homo sapiens
aacaaggcagtcaat

SEQ ID NO: 487805 - DNA, 15 bp, Homo sapiens
aaacaaggcagtcaa

SEQ ID NO: 487806 - DNA, 15 bp, Homo sapiens
gaaacaaggcagtca

SEQ ID NO: 487807 - DNA, 15 bp, Homo sapiens
agaaacaaggcagtc

SEQ ID NO: 487808 - DNA, 15 bp, Homo sapiens
aagaaacaaggcagt

SEQ ID NO: 487809 - DNA, 15 bp, Homo sapiens
caagaaacaaggcag

SEQ ID NO: 487810 - DNA, 15 bp, Homo sapiens
gcaagaaacaaggca

SEQ ID NO: 487811 - DNA, 15 bp, Homo sapiens
agcaagaaacaaggc

SEQ ID NO: 487812 - DNA, 15 bp, Homo sapiens
aagcaagaaacaagg

SEQ ID NO: 487813 - DNA, 15 bp, Homo sapiens
aaagcaagaaacaag

SEQ ID NO: 487814 - DNA, 15 bp, Homo sapiens
gaaagcaagaaacaa

SEQ ID NO: 487815 - DNA, 15 bp, Homo sapiens
cgaaagcaagaaaca

SEQ ID NO: 487816 - DNA, 15 bp, Homo sapiens
acgaaagcaagaaac

SEQ ID NO: 487817 - DNA, 15 bp, Homo sapiens
tacgaaagcaagaaa

SEQ ID NO: 487818 - DNA, 15 bp, Homo sapiens
atacgaaagcaagaa

SEQ ID NO: 487819 - DNA, 15 bp, Homo sapiens
tatacgaaagcaaga

SEQ ID NO: 487820 - DNA, 15 bp, Homo sapiens
ttatacgaaagcaag

SEQ ID NO: 487821 - DNA, 15 bp, Homo sapiens
cttatacgaaagcaa

SEQ ID NO: 487822 - DNA, 15 bp, Homo sapiens
gcttatacgaaagca

SEQ ID NO: 487823 - DNA, 15 bp, Homo sapiens
ggcttatacgaaagc

SEQ ID NO: 487824 - DNA, 15 bp, Homo sapiens
gggcttatacgaaag

SEQ ID NO: 487825 - DNA, 15 bp, Homo sapiens
agggcttatacgaaa

SEQ ID NO: 487826 - DNA, 15 bp, Homo sapiens
gagggcttatacgaa

SEQ ID NO: 487827 - DNA, 15 bp, Homo sapiens
tgagggcttatacga

SEQ ID NO: 487828 - DNA, 15 bp, Homo sapiens
gtgagggcttatacg

SEQ ID NO: 487829 - DNA, 15 bp, Homo sapiens
tgtgagggcttatac

SEQ ID NO: 487830 - DNA, 15 bp, Homo sapiens
ttgtgagggcttata

SEQ ID NO: 487831 - DNA, 15 bp, Homo sapiens
gttgtgagggcttat

SEQ ID NO: 487832 - DNA, 15 bp, Homo sapiens
tgttgtgagggctta

SEQ ID NO: 487833 - DNA, 15 bp, Homo sapiens
ttgttgtgagggctt

SEQ ID NO: 487834 - DNA, 15 bp, Homo sapiens
gttgttgtgagggct

SEQ ID NO: 487835 - DNA, 15 bp, Homo sapiens
ggttgttgtgagggc

SEQ ID NO: 487836 - DNA, 15 bp, Homo sapiens
tggttgttgtgaggg

SEQ ID NO: 487837 - DNA, 15 bp, Homo sapiens
ttggttgttgtgagg

SEQ ID NO: 487838 - DNA, 15 bp, Homo sapiens
gttggttgttgtgag

SEQ ID NO: 487839 - DNA, 15 bp, Homo sapiens
tgttggttgttgtga

SEQ ID NO: 487840 - DNA, 15 bp, Homo sapiens
gtgttggttgttgtg

SEQ ID NO: 487841 - DNA, 15 bp, Homo sapiens
agtgttggttgttgt

SEQ ID NO: 487842 - DNA, 15 bp, Homo sapiens
aagtgttggttgttg

SEQ ID NO: 487843 - DNA, 15 bp, Homo sapiens
aaagtgttggttgtt

SEQ ID NO: 487844 - DNA, 15 bp, Homo sapiens
taaagtgttggttgt

SEQ ID NO: 487845 - DNA, 15 bp, Homo sapiens
ttaaagtgttggttg

SEQ ID NO: 487846 - DNA, 15 bp, Homo sapiens
cttaaagtgttggtt

SEQ ID NO: 487847 - DNA, 15 bp, Homo sapiens
ccttaaagtgttggt

SEQ ID NO: 487848 - DNA, 15 bp, Homo sapiens
accttaaagtgttgg

SEQ ID NO: 487849 - DNA, 15 bp, Homo sapiens
caccttaaagtgttg

SEQ ID NO: 487850 - DNA, 15 bp, Homo sapiens
tcaccttaaagtgtt

SEQ ID NO: 487851 - DNA, 15 bp, Homo sapiens
ctcaccttaaagtgt

SEQ ID NO: 487852 - DNA, 15 bp, Homo sapiens
tctcaccttaaagtg

SEQ ID NO: 487853 - DNA, 15 bp, Homo sapiens
ctctcaccttaaagt

SEQ ID NO: 487854 - DNA, 15 bp, Homo sapiens
gctctcaccttaaag

SEQ ID NO: 487855 - DNA, 15 bp, Homo sapiens
tgctctcaccttaaa

SEQ ID NO: 487856 - DNA, 15 bp, Homo sapiens
atgctctcaccttaa

SEQ ID NO: 487857 - DNA, 15 bp, Homo sapiens
aatgctctcacctta

SEQ ID NO: 487858 - DNA, 15 bp, Homo sapiens
caatgctctcacctt

SEQ ID NO: 487859 - DNA, 15 bp, Homo sapiens
ccaatgctctcacct

SEQ ID NO: 487860 - DNA, 15 bp, Homo sapiens
accaatgctctcacc

SEQ ID NO: 487861 - DNA, 15 bp, Homo sapiens
aaccaatgctctcac

SEQ ID NO: 487862 - DNA, 15 bp, Homo sapiens
aaaccaatgctctca

SEQ ID NO: 487863 - DNA, 15 bp, Homo sapiens
aaaaccaatgctctc

SEQ ID NO: 487864 - DNA, 15 bp, Homo sapiens
aaaaaccaatgctct

SEQ ID NO: 487865 - DNA, 15 bp, Homo sapiens
taaaaaccaatgctc

SEQ ID NO: 487866 - DNA, 15 bp, Homo sapiens
ataaaaaccaatgct

SEQ ID NO: 487867 - DNA, 15 bp, Homo sapiens
gataaaaaccaatgc

SEQ ID NO: 487868 - DNA, 15 bp, Homo sapiens
agataaaaaccaatg

SEQ ID NO: 487869 - DNA, 15 bp, Homo sapiens
tagataaaaaccaat

SEQ ID NO: 487870 - DNA, 15 bp, Homo sapiens
ttagataaaaaccaa

SEQ ID NO: 487871 - DNA, 15 bp, Homo sapiens
gttagataaaaacca

SEQ ID NO: 487872 - DNA, 15 bp, Homo sapiens
agttagataaaaacc

SEQ ID NO: 487873 - DNA, 15 bp, Homo sapiens
tagttagataaaaac

SEQ ID NO: 487874 - DNA, 15 bp, Homo sapiens
atagttagataaaaa

SEQ ID NO: 487875 - DNA, 15 bp, Homo sapiens
tatagttagataaaa

SEQ ID NO: 487876 - DNA, 15 bp, Homo sapiens
atatagttagataaa

SEQ ID NO: 487877 - DNA, 15 bp, Homo sapiens
aatatagttagataa

SEQ ID NO: 487878 - DNA, 15 bp, Homo sapiens
aaatatagttagata

SEQ ID NO: 487879 - DNA, 15 bp, Homo sapiens
taaatatagttagat

SEQ ID NO: 487880 - DNA, 15 bp, Homo sapiens
gtaaatatagttaga

SEQ ID NO: 487881 - DNA, 15 bp, Homo sapiens
agtaaatatagttag

SEQ ID NO: 487882 - DNA, 15 bp, Homo sapiens
cagtaaatatagtta

SEQ ID NO: 487883 - DNA, 15 bp, Homo sapiens
tcagtaaatatagtt

SEQ ID NO: 487884 - DNA, 15 bp, Homo sapiens
atcagtaaatatagt

SEQ ID NO: 487885 - DNA, 15 bp, Homo sapiens
catcagtaaatatag

SEQ ID NO: 487886 - DNA, 15 bp, Homo sapiens
gcatcagtaaatata

SEQ ID NO: 487887 - DNA, 15 bp, Homo sapiens
agcatcagtaaatat

SEQ ID NO: 487888 - DNA, 15 bp, Homo sapiens
cagcatcagtaaata

SEQ ID NO: 487889 - DNA, 15 bp, Homo sapiens
acagcatcagtaaat

SEQ ID NO: 487890 - DNA, 15 bp, Homo sapiens
aacagcatcagtaaa

SEQ ID NO: 487891 - DNA, 15 bp, Homo sapiens
taacagcatcagtaa

SEQ ID NO: 487892 - DNA, 15 bp, Homo sapiens
ataacagcatcagta

SEQ ID NO: 487893 - DNA, 15 bp, Homo sapiens
gataacagcatcagt

SEQ ID NO: 487894 - DNA, 15 bp, Homo sapiens
ggataacagcatcag

SEQ ID NO: 487895 - DNA, 15 bp, Homo sapiens
aggataacagcatca

SEQ ID NO: 487896 - DNA, 15 bp, Homo sapiens
aaggataacagcatc

SEQ ID NO: 487897 - DNA, 15 bp, Homo sapiens
aaaggataacagcat

SEQ ID NO: 487898 - DNA, 15 bp, Homo sapiens
taaaggataacagca

SEQ ID NO: 487899 - DNA, 15 bp, Homo sapiens
ataaaggataacagc

SEQ ID NO: 487900 - DNA, 15 bp, Homo sapiens
tataaaggataacag

SEQ ID NO: 487901 - DNA, 15 bp, Homo sapiens
ttataaaggataaca

SEQ ID NO: 487902 - DNA, 15 bp, Homo sapiens
tttataaaggataac

SEQ ID NO: 487903 - DNA, 15 bp, Homo sapiens
gtttataaaggataa

SEQ ID NO: 487904 - DNA, 15 bp, Homo sapiens
tgtttataaaggata

SEQ ID NO: 487905 - DNA, 15 bp, Homo sapiens
ttgtttataaaggat

SEQ ID NO: 487906 - DNA, 15 bp, Homo sapiens
tttgtttataaagga

SEQ ID NO: 487907 - DNA, 15 bp, Homo sapiens
ttttgtttataaagg

SEQ ID NO: 487908 - DNA, 15 bp, Homo sapiens
tttttgtttataaag

SEQ ID NO: 487909 - DNA, 15 bp, Homo sapiens
ctttttgtttataaa

SEQ ID NO: 487910 - DNA, 15 bp, Homo sapiens
tctttttgtttataa

SEQ ID NO: 487911 - DNA, 15 bp, Homo sapiens
gtctttttgtttata

SEQ ID NO: 487912 - DNA, 15 bp, Homo sapiens
agtctttttgtttat

SEQ ID NO: 487913 - DNA, 15 bp, Homo sapiens
tagtctttttgttta

SEQ ID NO: 487914 - DNA, 15 bp, Homo sapiens
atagtctttttgttt

SEQ ID NO: 487915 - DNA, 15 bp, Homo sapiens
tatagtctttttgtt

SEQ ID NO: 487916 - DNA, 15 bp, Homo sapiens
ctatagtctttttgt

SEQ ID NO: 487917 - DNA, 15 bp, Homo sapiens
tctatagtctttttg

SEQ ID NO: 487918 - DNA, 15 bp, Homo sapiens
ctctatagtcttttt

SEQ ID NO: 487919 - DNA, 15 bp, Homo sapiens
tctctatagtctttt

SEQ ID NO: 487920 - DNA, 15 bp, Homo sapiens
atctctatagtcttt

SEQ ID NO: 487921 - DNA, 15 bp, Homo sapiens
aatctctatagtctt

SEQ ID NO: 487922 - DNA, 15 bp, Homo sapiens
taatctctatagtct

SEQ ID NO: 487923 - DNA, 15 bp, Homo sapiens
ttaatctctatagtc

SEQ ID NO: 487924 - DNA, 15 bp, Homo sapiens
attaatctctatagt

SEQ ID NO: 487925 - DNA, 15 bp, Homo sapiens
tattaatctctatag

SEQ ID NO: 487926 - DNA, 15 bp, Homo sapiens
ctattaatctctata

SEQ ID NO: 487927 - DNA, 15 bp, Homo sapiens
cctattaatctctat

SEQ ID NO: 487928 - DNA, 15 bp, Homo sapiens
acctattaatctcta

SEQ ID NO: 487929 - DNA, 15 bp, Homo sapiens
aacctattaatctct

SEQ ID NO: 487930 - DNA, 15 bp, Homo sapiens
gaacctattaatctc

SEQ ID NO: 487931 - DNA, 15 bp, Homo sapiens
tgaacctattaatct

SEQ ID NO: 487932 - DNA, 15 bp, Homo sapiens
gtgaacctattaatc

SEQ ID NO: 487933 - DNA, 15 bp, Homo sapiens
agtgaacctattaat

SEQ ID NO: 487934 - DNA, 15 bp, Homo sapiens
aagtgaacctattaa

SEQ ID NO: 487935 - DNA, 15 bp, Homo sapiens
aaagtgaacctatta

SEQ ID NO: 487936 - DNA, 15 bp, Homo sapiens
aaaagtgaacctatt

SEQ ID NO: 487937 - DNA, 15 bp, Homo sapiens
taaaagtgaacctat

SEQ ID NO: 487938 - DNA, 15 bp, Homo sapiens
ataaaagtgaaccta

SEQ ID NO: 487939 - DNA, 15 bp, Homo sapiens
gataaaagtgaacct

SEQ ID NO: 487940 - DNA, 15 bp, Homo sapiens
cgataaaagtgaacc

SEQ ID NO: 487941 - DNA, 15 bp, Homo sapiens
ccgataaaagtgaac

SEQ ID NO: 487942 - DNA, 15 bp, Homo sapiens
accgataaaagtgaa

SEQ ID NO: 487943 - DNA, 15 bp, Homo sapiens
taccgataaaagtga

SEQ ID NO: 487944 - DNA, 15 bp, Homo sapiens
ataccgataaaagtg

SEQ ID NO: 487945 - DNA, 15 bp, Homo sapiens
aataccgataaaagt

SEQ ID NO: 487946 - DNA, 15 bp, Homo sapiens
aaataccgataaaag

SEQ ID NO: 487947 - DNA, 15 bp, Homo sapiens
gaaataccgataaaa

SEQ ID NO: 487948 - DNA, 15 bp, Homo sapiens
agaaataccgataaa

SEQ ID NO: 487949 - DNA, 15 bp, Homo sapiens
gagaaataccgataa

SEQ ID NO: 487950 - DNA, 15 bp, Homo sapiens
tgagaaataccgata

SEQ ID NO: 487951 - DNA, 15 bp, Homo sapiens
gtgagaaataccgat

SEQ ID NO: 487952 - DNA, 15 bp, Homo sapiens
agtgagaaataccga

SEQ ID NO: 487953 - DNA, 15 bp, Homo sapiens
tagtgagaaataccg

SEQ ID NO: 487954 - DNA, 15 bp, Homo sapiens
atagtgagaaatacc

SEQ ID NO: 487955 - DNA, 15 bp, Homo sapiens
aatagtgagaaatac

SEQ ID NO: 487956 - DNA, 15 bp, Homo sapiens
taatagtgagaaata

SEQ ID NO: 487957 - DNA, 15 bp, Homo sapiens
ataatagtgagaaat

SEQ ID NO: 487958 - DNA, 15 bp, Homo sapiens
cataatagtgagaaa

SEQ ID NO: 487959 - DNA, 15 bp, Homo sapiens
acataatagtgagaa

SEQ ID NO: 487960 - DNA, 15 bp, Homo sapiens
tacataatagtgaga

SEQ ID NO: 487961 - DNA, 15 bp, Homo sapiens
atacataatagtgag

SEQ ID NO: 487962 - DNA, 15 bp, Homo sapiens
aatacataatagtga

SEQ ID NO: 487963 - DNA, 15 bp, Homo sapiens
caatacataatagtg

SEQ ID NO: 487964 - DNA, 15 bp, Homo sapiens
tcaatacataatagt

SEQ ID NO: 487965 - DNA, 15 bp, Homo sapiens
atcaatacataatag

SEQ ID NO: 487966 - DNA, 15 bp, Homo sapiens
catcaatacataata

SEQ ID NO: 487967 - DNA, 15 bp, Homo sapiens
acatcaatacataat

SEQ ID NO: 487968 - DNA, 15 bp, Homo sapiens
aacatcaatacataa

SEQ ID NO: 487969 - DNA, 15 bp, Homo sapiens
gaacatcaatacata

SEQ ID NO: 487970 - DNA, 15 bp, Homo sapiens
cgaacatcaatacat

SEQ ID NO: 487971 - DNA, 15 bp, Homo sapiens
acgaacatcaataca

SEQ ID NO: 487972 - DNA, 15 bp, Homo sapiens
aacgaacatcaatac

SEQ ID NO: 487973 - DNA, 15 bp, Homo sapiens
aaacgaacatcaata

SEQ ID NO: 487974 - DNA, 15 bp, Homo sapiens
gaaacgaacatcaat

SEQ ID NO: 487975 - DNA, 15 bp, Homo sapiens
tgaaacgaacatcaa

SEQ ID NO: 487976 - DNA, 15 bp, Homo sapiens
ttgaaacgaacatca

SEQ ID NO: 487977 - DNA, 15 bp, Homo sapiens
cttgaaacgaacatc

SEQ ID NO: 487978 - DNA, 15 bp, Homo sapiens
tcttgaaacgaacat

SEQ ID NO: 487979 - DNA, 15 bp, Homo sapiens
gtcttgaaacgaaca

SEQ ID NO: 487980 - DNA, 15 bp, Homo sapiens
ggtcttgaaacgaac

SEQ ID NO: 487981 - DNA, 15 bp, Homo sapiens
aggtcttgaaacgaa

SEQ ID NO: 487982 - DNA, 15 bp, Homo sapiens
aaggtcttgaaacga

SEQ ID NO: 487983 - DNA, 15 bp, Homo sapiens
taaggtcttgaaacg

SEQ ID NO: 487984 - DNA, 15 bp, Homo sapiens
ttaaggtcttgaaac

SEQ ID NO: 487985 - DNA, 15 bp, Homo sapiens
tttaaggtcttgaaa

SEQ ID NO: 487986 - DNA, 15 bp, Homo sapiens
ttttaaggtcttgaa

SEQ ID NO: 487987 - DNA, 15 bp, Homo sapiens
tttttaaggtcttga

SEQ ID NO: 487988 - DNA, 15 bp, Homo sapiens
gtttttaaggtcttg

SEQ ID NO: 487989 - DNA, 15 bp, Homo sapiens
agtttttaaggtctt

SEQ ID NO: 487990 - DNA, 15 bp, Homo sapiens
aagtttttaaggtct

SEQ ID NO: 487991 - DNA, 15 bp, Homo sapiens
taagtttttaaggtc

SEQ ID NO: 487992 - DNA, 15 bp, Homo sapiens
ctaagtttttaaggt

SEQ ID NO: 487993 - DNA, 15 bp, Homo sapiens
actaagtttttaagg

SEQ ID NO: 487994 - DNA, 15 bp, Homo sapiens
cactaagtttttaag

SEQ ID NO: 487995 - DNA, 15 bp, Homo sapiens
acactaagtttttaa

SEQ ID NO: 487996 - DNA, 15 bp, Homo sapiens
aacactaagttttta

SEQ ID NO: 487997 - DNA, 15 bp, Homo sapiens
aaacactaagttttt

SEQ ID NO: 487998 - DNA, 15 bp, Homo sapiens
aaaacactaagtttt

SEQ ID NO: 487999 - DNA, 15 bp, Homo sapiens
aaaaacactaagttt

SEQ ID NO: 488000 - DNA, 15 bp, Homo sapiens
aaaaaacactaagtt

SEQ ID NO: 488001 - DNA, 15 bp, Homo sapiens
aaaaaaacactaagt

SEQ ID NO: 488002 - DNA, 15 bp, Homo sapiens
aaaaaaaacactaag

SEQ ID NO: 488003 - DNA, 15 bp, Homo sapiens
aaaaaaaaacactaa

SEQ ID NO: 488004 - DNA, 15 bp, Homo sapiens
aaaaaaaaaacacta

SEQ ID NO: 488005 - DNA, 15 bp, Homo sapiens
taaaaaaaaaacact

SEQ ID NO: 488006 - DNA, 15 bp, Homo sapiens
ttaaaaaaaaaacac

SEQ ID NO: 488007 - DNA, 15 bp, Homo sapiens
tttaaaaaaaaaaca

SEQ ID NO: 488008 - DNA, 15 bp, Homo sapiens
gtttaaaaaaaaaac

SEQ ID NO: 488009 - DNA, 15 bp, Homo sapiens
agtttaaaaaaaaaa

SEQ ID NO: 488010 - DNA, 15 bp, Homo sapiens
aagtttaaaaaaaaa

SEQ ID NO: 488011 - DNA, 15 bp, Homo sapiens
aaagtttaaaaaaaa

SEQ ID NO: 488012 - DNA, 15 bp, Homo sapiens
gaaagtttaaaaaaa

SEQ ID NO: 488013 - DNA, 15 bp, Homo sapiens
agaaagtttaaaaaa

SEQ ID NO: 488014 - DNA, 15 bp, Homo sapiens
tagaaagtttaaaaa

SEQ ID NO: 488015 - DNA, 15 bp, Homo sapiens
atagaaagtttaaaa

SEQ ID NO: 488016 - DNA, 15 bp, Homo sapiens
aatagaaagtttaaa

SEQ ID NO: 488017 - DNA, 15 bp, Homo sapiens
aaatagaaagtttaa

SEQ ID NO: 488018 - DNA, 15 bp, Homo sapiens
caaatagaaagttta

SEQ ID NO: 488019 - DNA, 15 bp, Homo sapiens
gcaaatagaaagttt

SEQ ID NO: 488020 - DNA, 15 bp, Homo sapiens
agcaaatagaaagtt

SEQ ID NO: 488021 - DNA, 15 bp, Homo sapiens
cagcaaatagaaagt

SEQ ID NO: 488022 - DNA, 15 bp, Homo sapiens
acagcaaatagaaag

SEQ ID NO: 488023 - DNA, 15 bp, Homo sapiens
aacagcaaatagaaa

SEQ ID NO: 488024 - DNA, 15 bp, Homo sapiens
gaacagcaaatagaa

SEQ ID NO: 488025 - DNA, 15 bp, Homo sapiens
agaacagcaaataga

SEQ ID NO: 488026 - DNA, 15 bp, Homo sapiens
aagaacagcaaatag

SEQ ID NO: 488027 - DNA, 15 bp, Homo sapiens
aaagaacagcaaata

SEQ ID NO: 488028 - DNA, 15 bp, Homo sapiens
aaaagaacagcaaat

SEQ ID NO: 488029 - DNA, 15 bp, Homo sapiens
aaaaagaacagcaaa

SEQ ID NO: 488030 - DNA, 15 bp, Homo sapiens
caaaaagaacagcaa

SEQ ID NO: 488031 - DNA, 15 bp, Homo sapiens
ccaaaaagaacagca

SEQ ID NO: 488032 - DNA, 15 bp, Homo sapiens
gccaaaaagaacagc

SEQ ID NO: 488033 - DNA, 15 bp, Homo sapiens
agccaaaaagaacag

SEQ ID NO: 488034 - DNA, 15 bp, Homo sapiens
aagccaaaaagaaca

SEQ ID NO: 488035 - DNA, 15 bp, Homo sapiens
gaagccaaaaagaac

SEQ ID NO: 488036 - DNA, 15 bp, Homo sapiens
tgaagccaaaaagaa

SEQ ID NO: 488037 - DNA, 15 bp, Homo sapiens
atgaagccaaaaaga

SEQ ID NO: 488038 - DNA, 15 bp, Homo sapiens
aatgaagccaaaaag

SEQ ID NO: 488039 - DNA, 15 bp, Homo sapiens
aaatgaagccaaaaa

SEQ ID NO: 488040 - DNA, 15 bp, Homo sapiens
caaatgaagccaaaa

SEQ ID NO: 488041 - DNA, 15 bp, Homo sapiens
acaaatgaagccaaa

SEQ ID NO: 488042 - DNA, 15 bp, Homo sapiens
tacaaatgaagccaa

SEQ ID NO: 488043 - DNA, 15 bp, Homo sapiens
atacaaatgaagcca

SEQ ID NO: 488044 - DNA, 15 bp, Homo sapiens
aatacaaatgaagcc

SEQ ID NO: 488045 - DNA, 15 bp, Homo sapiens
taatacaaatgaagc

SEQ ID NO: 488046 - DNA, 15 bp, Homo sapiens
gtaatacaaatgaag

SEQ ID NO: 488047 - DNA, 15 bp, Homo sapiens
agtaatacaaatgaa

SEQ ID NO: 488048 - DNA, 15 bp, Homo sapiens
cagtaatacaaatga

SEQ ID NO: 488049 - DNA, 15 bp, Homo sapiens
tcagtaatacaaatg

SEQ ID NO: 488050 - DNA, 15 bp, Homo sapiens
ctcagtaatacaaat

SEQ ID NO: 488051 - DNA, 15 bp, Homo sapiens
actcagtaatacaaa

SEQ ID NO: 488052 - DNA, 15 bp, Homo sapiens
tactcagtaatacaa

SEQ ID NO: 488053 - DNA, 15 bp, Homo sapiens
atactcagtaataca

SEQ ID NO: 488054 - DNA, 15 bp, Homo sapiens
aatactcagtaatac

SEQ ID NO: 488055 - DNA, 15 bp, Homo sapiens
aaatactcagtaata

SEQ ID NO: 488056 - DNA, 15 bp, Homo sapiens
aaaatactcagtaat

SEQ ID NO: 488057 - DNA, 15 bp, Homo sapiens
aaaaatactcagtaa

SEQ ID NO: 488058 - DNA, 15 bp, Homo sapiens
gaaaaatactcagta

SEQ ID NO: 488059 - DNA, 15 bp, Homo sapiens
agaaaaatactcagt

SEQ ID NO: 488060 - DNA, 15 bp, Homo sapiens
gagaaaaatactcag

SEQ ID NO: 488061 - DNA, 15 bp, Homo sapiens
tgagaaaaatactca

SEQ ID NO: 488062 - DNA, 15 bp, Homo sapiens
atgagaaaaatactc

SEQ ID NO: 488063 - DNA, 15 bp, Homo sapiens
tatgagaaaaatact

SEQ ID NO: 488064 - DNA, 15 bp, Homo sapiens
ctatgagaaaaatac

SEQ ID NO: 488065 - DNA, 15 bp, Homo sapiens
tctatgagaaaaata

SEQ ID NO: 488066 - DNA, 15 bp, Homo sapiens
ttctatgagaaaaat

SEQ ID NO: 488067 - DNA, 15 bp, Homo sapiens
tttctatgagaaaaa

SEQ ID NO: 488068 - DNA, 15 bp, Homo sapiens
atttctatgagaaaa

SEQ ID NO: 488069 - DNA, 15 bp, Homo sapiens
tatttctatgagaaa

SEQ ID NO: 488070 - DNA, 15 bp, Homo sapiens
ttatttctatgagaa

SEQ ID NO: 488071 - DNA, 15 bp, Homo sapiens
attatttctatgaga

SEQ ID NO: 488072 - DNA, 15 bp, Homo sapiens
gattatttctatgag

SEQ ID NO: 488073 - DNA, 15 bp, Homo sapiens
agattatttctatga

SEQ ID NO: 488074 - DNA, 15 bp, Homo sapiens
cagattatttctatg

SEQ ID NO: 488075 - DNA, 15 bp, Homo sapiens
gcagattatttctat

SEQ ID NO: 488076 - DNA, 15 bp, Homo sapiens
agcagattatttcta

SEQ ID NO: 488077 - DNA, 15 bp, Homo sapiens
aagcagattatttct

SEQ ID NO: 488078 - DNA, 15 bp, Homo sapiens
aaagcagattatttc

SEQ ID NO: 488079 - DNA, 15 bp, Homo sapiens
aaaagcagattattt

SEQ ID NO: 488080 - DNA, 15 bp, Homo sapiens
aaaaagcagattatt

SEQ ID NO: 488081 - DNA, 15 bp, Homo sapiens
aaaaaagcagattat

SEQ ID NO: 488082 - DNA, 15 bp, Homo sapiens
aaaaaaagcagatta

SEQ ID NO: 488083 - DNA, 15 bp, Homo sapiens
aaaaaaaagcagatt

SEQ ID NO: 488084 - DNA, 15 bp, Homo sapiens
aaaaaaaaagcagat

SEQ ID NO: 488085 - DNA, 15 bp, Homo sapiens
aaaaaaaaaagcaga

SEQ ID NO: 488086 - DNA, 15 bp, Homo sapiens
gaaaaaaaaaagcag

SEQ ID NO: 488087 - DNA, 15 bp, Homo sapiens
agaaaaaaaaaagca

SEQ ID NO: 488088 - DNA, 15 bp, Homo sapiens
aagaaaaaaaaaagc

SEQ ID NO: 488089 - DNA, 15 bp, Homo sapiens
tagaaaaagaaaaaa

SEQ ID NO: 488090 - DNA, 15 bp, Homo sapiens
atagaaaaagaaaaa

SEQ ID NO: 488091 - DNA, 15 bp, Homo sapiens
tatagaaaaagaaaa

SEQ ID NO: 488092 - DNA, 15 bp, Homo sapiens
ctatagaaaaagaaa

SEQ ID NO: 488093 - DNA, 15 bp, Homo sapiens
tctatagaaaaagaa

SEQ ID NO: 488094 - DNA, 15 bp, Homo sapiens
atctatagaaaaaga

SEQ ID NO: 488095 - DNA, 15 bp, Homo sapiens
gatctatagaaaaag

SEQ ID NO: 488096 - DNA, 15 bp, Homo sapiens
agatctatagaaaaa

SEQ ID NO: 488097 - DNA, 15 bp, Homo sapiens
cagatctatagaaaa

SEQ ID NO: 488098 - DNA, 15 bp, Homo sapiens
gcagatctatagaaa

SEQ ID NO: 488099 - DNA, 15 bp, Homo sapiens
ggcagatctatagaa

SEQ ID NO: 488100 - DNA, 15 bp, Homo sapiens
aggcagatctataga

SEQ ID NO: 488101 - DNA, 15 bp, Homo sapiens
caggcagatctatag

SEQ ID NO: 488102 - DNA, 15 bp, Homo sapiens
ccaggcagatctata

SEQ ID NO: 488103 - DNA, 15 bp, Homo sapiens
gccaggcagatctat

SEQ ID NO: 488104 - DNA, 15 bp, Homo sapiens
agccaggcagatcta

SEQ ID NO: 488105 - DNA, 15 bp, Homo sapiens
gagccaggcagatct

SEQ ID NO: 488106 - DNA, 15 bp, Homo sapiens
tgagccaggcagatc

SEQ ID NO: 488107 - DNA, 15 bp, Homo sapiens
ctgagccaggcagat

SEQ ID NO: 488108 - DNA, 15 bp, Homo sapiens
tctgagccaggcaga

SEQ ID NO: 488109 - DNA, 15 bp, Homo sapiens
ttctgagccaggcag

SEQ ID NO: 488110 - DNA, 15 bp, Homo sapiens
attctgagccaggca

SEQ ID NO: 488111 - DNA, 15 bp, Homo sapiens
aattctgagccaggc

SEQ ID NO: 488112 - DNA, 15 bp, Homo sapiens
gaattctgagccagg

SEQ ID NO: 488113 - DNA, 15 bp, Homo sapiens
tgaattctgagccag

SEQ ID NO: 488114 - DNA, 15 bp, Homo sapiens
gtgaattctgagcca

SEQ ID NO: 488115 - DNA, 15 bp, Homo sapiens
ggtgaattctgagcc

SEQ ID NO: 488116 - DNA, 15 bp, Homo sapiens
aggtgaattctgagc

SEQ ID NO: 488117 - DNA, 15 bp, Homo sapiens
aaggtgaattctgag

SEQ ID NO: 488118 - DNA, 15 bp, Homo sapiens
gaaggtgaattctga

SEQ ID NO: 488119 - DNA, 15 bp, Homo sapiens
agaaggtgaattctg

SEQ ID NO: 488120 - DNA, 15 bp, Homo sapiens
tagaaggtgaattct

SEQ ID NO: 488121 - DNA, 15 bp, Homo sapiens
gtagaaggtgaattc

SEQ ID NO: 488122 - DNA, 15 bp, Homo sapiens
tgtagaaggtgaatt

SEQ ID NO: 488123 - DNA, 15 bp, Homo sapiens
atgtagaaggtgaat

SEQ ID NO: 488124 - DNA, 15 bp, Homo sapiens
aatgtagaaggtgaa

SEQ ID NO: 488125 - DNA, 15 bp, Homo sapiens
aaatgtagaaggtga

SEQ ID NO: 488126 - DNA, 15 bp, Homo sapiens
gaaatgtagaaggtg

SEQ ID NO: 488127 - DNA, 15 bp, Homo sapiens
tgaaatgtagaaggt

SEQ ID NO: 488128 - DNA, 15 bp, Homo sapiens
gtgaaatgtagaagg

SEQ ID NO: 488129 - DNA, 15 bp, Homo sapiens
agtgaaatgtagaag

SEQ ID NO: 488130 - DNA, 15 bp, Homo sapiens
tagtgaaatgtagaa

SEQ ID NO: 488131 - DNA, 15 bp, Homo sapiens
atagtgaaatgtaga

SEQ ID NO: 488132 - DNA, 15 bp, Homo sapiens
catagtgaaatgtag

SEQ ID NO: 488133 - DNA, 15 bp, Homo sapiens
acatagtgaaatgta

SEQ ID NO: 488134 - DNA, 15 bp, Homo sapiens
cacatagtgaaatgt

SEQ ID NO: 488135 - DNA, 15 bp, Homo sapiens
gcacatagtgaaatg

SEQ ID NO: 488136 - DNA, 15 bp, Homo sapiens
agcacatagtgaaat

SEQ ID NO: 488137 - DNA, 15 bp, Homo sapiens
cagcacatagtgaaa

SEQ ID NO: 488138 - DNA, 15 bp, Homo sapiens
ccagcacatagtgaa

SEQ ID NO: 488139 - DNA, 15 bp, Homo sapiens
accagcacatagtga

SEQ ID NO: 488140 - DNA, 15 bp, Homo sapiens
taccagcacatagtg

SEQ ID NO: 488141 - DNA, 15 bp, Homo sapiens
ttaccagcacatagt

SEQ ID NO: 488142 - DNA, 15 bp, Homo sapiens
tttaccagcacatag

SEQ ID NO: 488143 - DNA, 15 bp, Homo sapiens
atttaccagcacata

SEQ ID NO: 488144 - DNA, 15 bp, Homo sapiens
aatttaccagcacat

SEQ ID NO: 488145 - DNA, 15 bp, Homo sapiens
gaatttaccagcaca

SEQ ID NO: 488146 - DNA, 15 bp, Homo sapiens
tgaatttaccagcac

SEQ ID NO: 488147 - DNA, 15 bp, Homo sapiens
gtgaatttaccagca

SEQ ID NO: 488148 - DNA, 15 bp, Homo sapiens
agtgaatttaccagc

SEQ ID NO: 488149 - DNA, 15 bp, Homo sapiens
gagtgaatttaccag

SEQ ID NO: 488150 - DNA, 15 bp, Homo sapiens
ggagtgaatttacca

SEQ ID NO: 488151 - DNA, 15 bp, Homo sapiens
tggagtgaatttacc

SEQ ID NO: 488152 - DNA, 15 bp, Homo sapiens
atggagtgaatttac

SEQ ID NO: 488153 - DNA, 15 bp, Homo sapiens
gatggagtgaattta

SEQ ID NO: 488154 - DNA, 15 bp, Homo sapiens
cgatggagtgaattt

SEQ ID NO: 488155 - DNA, 15 bp, Homo sapiens
tcgatggagtgaatt

SEQ ID NO: 488156 - DNA, 15 bp, Homo sapiens
ttcgatggagtgaat

SEQ ID NO: 488157 - DNA, 15 bp, Homo sapiens
attcgatggagtgaa

SEQ ID NO: 488158 - DNA, 15 bp, Homo sapiens
gattcgatggagtga

SEQ ID NO: 488159 - DNA, 15 bp, Homo sapiens
tgattcgatggagtg

SEQ ID NO: 488160 - DNA, 15 bp, Homo sapiens
atgattcgatggagt

SEQ ID NO: 488161 - DNA, 15 bp, Homo sapiens
gatgattcgatggag

SEQ ID NO: 488162 - DNA, 15 bp, Homo sapiens
tgatgattcgatgga

SEQ ID NO: 488163 - DNA, 15 bp, Homo sapiens
gtgatgattcgatgg

SEQ ID NO: 488164 - DNA, 15 bp, Homo sapiens
ggtgatgattcgatg

SEQ ID NO: 488165 - DNA, 15 bp, Homo sapiens
tggtgatgattcgat

SEQ ID NO: 488166 - DNA, 15 bp, Homo sapiens
ttggtgatgattcga

SEQ ID NO: 488167 - DNA, 15 bp, Homo sapiens
attggtgatgattcg

SEQ ID NO: 488168 - DNA, 15 bp, Homo sapiens
cattggtgatgattc

SEQ ID NO: 488169 - DNA, 15 bp, Homo sapiens
acattggtgatgatt

SEQ ID NO: 488170 - DNA, 15 bp, Homo sapiens
tacattggtgatgat

SEQ ID NO: 488171 - DNA, 15 bp, Homo sapiens
ttacattggtgatga

SEQ ID NO: 488172 - DNA, 15 bp, Homo sapiens
cttacattggtgatg

SEQ ID NO: 488173 - DNA, 15 bp, Homo sapiens
acttacattggtgat

SEQ ID NO: 488174 - DNA, 15 bp, Homo sapiens
gacttacattggtga

SEQ ID NO: 488175 - DNA, 15 bp, Homo sapiens
ggacttacattggtg

SEQ ID NO: 488176 - DNA, 15 bp, Homo sapiens
tggacttacattggt

SEQ ID NO: 488177 - DNA, 15 bp, Homo sapiens
ttggacttacattgg

SEQ ID NO: 488178 - DNA, 15 bp, Homo sapiens
tttggacttacattg

SEQ ID NO: 488179 - DNA, 15 bp, Homo sapiens
ttttggacttacatt

SEQ ID NO: 488180 - DNA, 15 bp, Homo sapiens
cttttggacttacat

SEQ ID NO: 488181 - DNA, 15 bp, Homo sapiens
ccttttggacttaca

SEQ ID NO: 488182 - DNA, 15 bp, Homo sapiens
accttttggacttac

SEQ ID NO: 488183 - DNA, 15 bp, Homo sapiens
taccttttggactta

SEQ ID NO: 488184 - DNA, 15 bp, Homo sapiens
ataccttttggactt

SEQ ID NO: 488185 - DNA, 15 bp, Homo sapiens
aataccttttggact

SEQ ID NO: 488186 - DNA, 15 bp, Homo sapiens
caataccttttggac

SEQ ID NO: 488187 - DNA, 15 bp, Homo sapiens
gcaataccttttgga

SEQ ID NO: 488188 - DNA, 15 bp, Homo sapiens
agcaataccttttgg

SEQ ID NO: 488189 - DNA, 15 bp, Homo sapiens
tagcaataccttttg

SEQ ID NO: 488190 - DNA, 15 bp, Homo sapiens
ttagcaatacctttt

SEQ ID NO: 488191 - DNA, 15 bp, Homo sapiens
tttagcaataccttt

SEQ ID NO: 488192 - DNA, 15 bp, Homo sapiens
atttagcaatacctt

SEQ ID NO: 488193 - DNA, 15 bp, Homo sapiens
aatttagcaatacct

SEQ ID NO: 488194 - DNA, 15 bp, Homo sapiens
taatttagcaatacc

SEQ ID NO: 488195 - DNA, 15 bp, Homo sapiens
gtaatttagcaatac

SEQ ID NO: 488196 - DNA, 15 bp, Homo sapiens
agtaatttagcaata

SEQ ID NO: 488197 - DNA, 15 bp, Homo sapiens
tagtaatttagcaat

SEQ ID NO: 488198 - DNA, 15 bp, Homo sapiens
ttagtaatttagcaa

SEQ ID NO: 488199 - DNA, 15 bp, Homo sapiens
tttagtaatttagca

SEQ ID NO: 488200 - DNA, 15 bp, Homo sapiens
ttttagtaatttagc

SEQ ID NO: 488201 - DNA, 15 bp, Homo sapiens
tttttagtaatttag

SEQ ID NO: 488202 - DNA, 15 bp, Homo sapiens
ttttttagtaattta

SEQ ID NO: 488203 - DNA, 15 bp, Homo sapiens
tttttttagtaattt

SEQ ID NO: 488204 - DNA, 15 bp, Homo sapiens
atttttttagtaatt

SEQ ID NO: 488205 - DNA, 15 bp, Homo sapiens
aatttttttagtaat

SEQ ID NO: 488206 - DNA, 15 bp, Homo sapiens
aaatttttttagtaa

SEQ ID NO: 488207 - DNA, 15 bp, Homo sapiens
aaaatttttttagta

SEQ ID NO: 488208 - DNA, 15 bp, Homo sapiens
aaaaatttttttagt

SEQ ID NO: 488209 - DNA, 15 bp, Homo sapiens
aaaaaatttttttag

SEQ ID NO: 488210 - DNA, 15 bp, Homo sapiens
aaaaaaattttttta

SEQ ID NO: 488211 - DNA, 15 bp, Homo sapiens
gaaaaaaattttttt

SEQ ID NO: 488212 - DNA, 15 bp, Homo sapiens
agaaaaaaatttttt

SEQ ID NO: 488213 - DNA, 15 bp, Homo sapiens
aagaaaaaaattttt

SEQ ID NO: 488214 - DNA, 15 bp, Homo sapiens
aaagaaaaaaatttt

SEQ ID NO: 488215 - DNA, 15 bp, Homo sapiens
gaaagaaaaaaattt

SEQ ID NO: 488216 - DNA, 15 bp, Homo sapiens
agaaagaaaaaaatt

SEQ ID NO: 488217 - DNA, 15 bp, Homo sapiens
aagaaagaaaaaaat

SEQ ID NO: 488218 - DNA, 15 bp, Homo sapiens
aaagaaagaaaaaaa

SEQ ID NO: 488219 - DNA, 15 bp, Homo sapiens
aaaagaaagaaaaaa

SEQ ID NO: 488220 - DNA, 15 bp, Homo sapiens
gaaaagaaagaaaaa

SEQ ID NO: 488221 - DNA, 15 bp, Homo sapiens
agaaaagaaagaaaa

SEQ ID NO: 488222 - DNA, 15 bp, Homo sapiens
aagaaaagaaagaaa

SEQ ID NO: 488223 - DNA, 15 bp, Homo sapiens
aaagaaaagaaagaa

SEQ ID NO: 488224 - DNA, 15 bp, Homo sapiens
caaagaaaagaaaga

SEQ ID NO: 488225 - DNA, 15 bp, Homo sapiens
gcaaagaaaagaaag

SEQ ID NO: 488226 - DNA, 15 bp, Homo sapiens
cgcaaagaaaagaaa

SEQ ID NO: 488227 - DNA, 15 bp, Homo sapiens
acgcaaagaaaagaa

SEQ ID NO: 488228 - DNA, 15 bp, Homo sapiens
tacgcaaagaaaaga

SEQ ID NO: 488229 - DNA, 15 bp, Homo sapiens
atacgcaaagaaaag

SEQ ID NO: 488230 - DNA, 15 bp, Homo sapiens
aatacgcaaagaaaa

SEQ ID NO: 488231 - DNA, 15 bp, Homo sapiens
aaatacgcaaagaaa

SEQ ID NO: 488232 - DNA, 15 bp, Homo sapiens
gaaatacgcaaagaa

SEQ ID NO: 488233 - DNA, 15 bp, Homo sapiens
agaaatacgcaaaga

SEQ ID NO: 488234 - DNA, 15 bp, Homo sapiens
aagaaatacgcaaag

SEQ ID NO: 488235 - DNA, 15 bp, Homo sapiens
aaagaaatacgcaaa

SEQ ID NO: 488236 - DNA, 15 bp, Homo sapiens
aaaagaaatacgcaa

SEQ ID NO: 488237 - DNA, 15 bp, Homo sapiens
aaaaagaaatacgca

SEQ ID NO: 488238 - DNA, 15 bp, Homo sapiens
taaaaagaaatacgc

SEQ ID NO: 488239 - DNA, 15 bp, Homo sapiens
ttaaaaagaaatacg

SEQ ID NO: 488240 - DNA, 15 bp, Homo sapiens
cttaaaaagaaatac

SEQ ID NO: 488241 - DNA, 15 bp, Homo sapiens
tcttaaaaagaaata

SEQ ID NO: 488242 - DNA, 15 bp, Homo sapiens
ttcttaaaaagaaat

SEQ ID NO: 488243 - DNA, 15 bp, Homo sapiens
tttcttaaaaagaaa

SEQ ID NO: 488244 - DNA, 15 bp, Homo sapiens
atttcttaaaaagaa

SEQ ID NO: 488245 - DNA, 15 bp, Homo sapiens
catttcttaaaaaga

SEQ ID NO: 488246 - DNA, 15 bp, Homo sapiens
gcatttcttaaaaag

SEQ ID NO: 488247 - DNA, 15 bp, Homo sapiens
tgcatttcttaaaaa

SEQ ID NO: 488248 - DNA, 15 bp, Homo sapiens
gtgcatttcttaaaa

SEQ ID NO: 488249 - DNA, 15 bp, Homo sapiens
agtgcatttcttaaa

SEQ ID NO: 488250 - DNA, 15 bp, Homo sapiens
gagtgcatttcttaa

SEQ ID NO: 488251 - DNA, 15 bp, Homo sapiens
agagtgcatttctta

SEQ ID NO: 488252 - DNA, 15 bp, Homo sapiens
aagagtgcatttctt

SEQ ID NO: 488253 - DNA, 15 bp, Homo sapiens
caagagtgcatttct

SEQ ID NO: 488254 - DNA, 15 bp, Homo sapiens
ccaagagtgcatttc

SEQ ID NO: 488255 - DNA, 15 bp, Homo sapiens
accaagagtgcattt

SEQ ID NO: 488256 - DNA, 15 bp, Homo sapiens
aaccaagagtgcatt

SEQ ID NO: 488257 - DNA, 15 bp, Homo sapiens
aaaccaagagtgcat

SEQ ID NO: 488258 - DNA, 15 bp, Homo sapiens
aaaaccaagagtgca

SEQ ID NO: 488259 - DNA, 15 bp, Homo sapiens
gaaaaccaagagtgc

SEQ ID NO: 488260 - DNA, 15 bp, Homo sapiens
tgaaaaccaagagtg

SEQ ID NO: 488261 - DNA, 15 bp, Homo sapiens
ttgaaaaccaagagt

SEQ ID NO: 488262 - DNA, 15 bp, Homo sapiens
tttgaaaaccaagag

SEQ ID NO: 488263 - DNA, 15 bp, Homo sapiens
ttttgaaaaccaaga

SEQ ID NO: 488264 - DNA, 15 bp, Homo sapiens
tttttgaaaaccaag

SEQ ID NO: 488265 - DNA, 15 bp, Homo sapiens
ctttttgaaaaccaa

SEQ ID NO: 488266 - DNA, 15 bp, Homo sapiens
cctttttgaaaacca

SEQ ID NO: 488267 - DNA, 15 bp, Homo sapiens
acctttttgaaaacc

SEQ ID NO: 488268 - DNA, 15 bp, Homo sapiens
aacctttttgaaaac

SEQ ID NO: 488269 - DNA, 15 bp, Homo sapiens
gaacctttttgaaaa

SEQ ID NO: 488270 - DNA, 15 bp, Homo sapiens
agaacctttttgaaa

SEQ ID NO: 488271 - DNA, 15 bp, Homo sapiens
cagaacctttttgaa

SEQ ID NO: 488272 - DNA, 15 bp, Homo sapiens
tcagaacctttttga

SEQ ID NO: 488273 - DNA, 15 bp, Homo sapiens
ttcagaacctttttg

SEQ ID NO: 488274 - DNA, 15 bp, Homo sapiens
attcagaaccttttt

SEQ ID NO: 488275 - DNA, 15 bp, Homo sapiens
aattcagaacctttt

SEQ ID NO: 488276 - DNA, 15 bp, Homo sapiens
aaattcagaaccttt

SEQ ID NO: 488277 - DNA, 15 bp, Homo sapiens
taaattcagaacctt

SEQ ID NO: 488278 - DNA, 15 bp, Homo sapiens
ctaaattcagaacct

SEQ ID NO: 488279 - DNA, 15 bp, Homo sapiens
tctaaattcagaacc

SEQ ID NO: 488280 - DNA, 15 bp, Homo sapiens
atctaaattcagaac

SEQ ID NO: 488281 - DNA, 15 bp, Homo sapiens
catctaaattcagaa

SEQ ID NO: 488282 - DNA, 15 bp, Homo sapiens
acatctaaattcaga

SEQ ID NO: 488283 - DNA, 15 bp, Homo sapiens
tacatctaaattcag

SEQ ID NO: 488284 - DNA, 15 bp, Homo sapiens
atacatctaaattca

SEQ ID NO: 488285 - DNA, 15 bp, Homo sapiens
catacatctaaattc

SEQ ID NO: 488286 - DNA, 15 bp, Homo sapiens
tcatacatctaaatt

SEQ ID NO: 488287 - DNA, 15 bp, Homo sapiens
ttcatacatctaaat

SEQ ID NO: 488288 - DNA, 15 bp, Homo sapiens
tttcatacatctaaa

SEQ ID NO: 488289 - DNA, 15 bp, Homo sapiens
atttcatacatctaa

SEQ ID NO: 488290 - DNA, 15 bp, Homo sapiens
tatttcatacatcta

SEQ ID NO: 488291 - DNA, 15 bp, Homo sapiens
ctatttcatacatct

SEQ ID NO: 488292 - DNA, 15 bp, Homo sapiens
cctatttcatacatc

SEQ ID NO: 488293 - DNA, 15 bp, Homo sapiens
tcctatttcatacat

SEQ ID NO: 488294 - DNA, 15 bp, Homo sapiens
ttcctatttcataca

SEQ ID NO: 488295 - DNA, 15 bp, Homo sapiens
tttcctatttcatac

SEQ ID NO: 488296 - DNA, 15 bp, Homo sapiens
ttttcctatttcata

SEQ ID NO: 488297 - DNA, 15 bp, Homo sapiens
attttcctatttcat

SEQ ID NO: 488298 - DNA, 15 bp, Homo sapiens
aattttcctatttca

SEQ ID NO: 488299 - DNA, 15 bp, Homo sapiens
aaattttcctatttc

SEQ ID NO: 488300 - DNA, 15 bp, Homo sapiens
gaaattttcctattt

SEQ ID NO: 488301 - DNA, 15 bp, Homo sapiens
agaaattttcctatt

SEQ ID NO: 488302 - DNA, 15 bp, Homo sapiens
gagaaattttcctat

SEQ ID NO: 488303 - DNA, 15 bp, Homo sapiens
ggagaaattttccta

SEQ ID NO: 488304 - DNA, 15 bp, Homo sapiens
tggagaaattttcct

SEQ ID NO: 488305 - DNA, 15 bp, Homo sapiens
atggagaaattttcc

SEQ ID NO: 488306 - DNA, 15 bp, Homo sapiens
catggagaaattttc

SEQ ID NO: 488307 - DNA, 15 bp, Homo sapiens
ccatggagaaatttt

SEQ ID NO: 488308 - DNA, 15 bp, Homo sapiens
accatggagaaattt

SEQ ID NO: 488309 - DNA, 15 bp, Homo sapiens
caccatggagaaatt

SEQ ID NO: 488310 - DNA, 15 bp, Homo sapiens
tcaccatggagaaat

SEQ ID NO: 488311 - DNA, 15 bp, Homo sapiens
atcaccatggagaaa

SEQ ID NO: 488312 - DNA, 15 bp, Homo sapiens
aatcaccatggagaa

SEQ ID NO: 488313 - DNA, 15 bp, Homo sapiens
gaatcaccatggaga

SEQ ID NO: 488314 - DNA, 15 bp, Homo sapiens
agaatcaccatggag

SEQ ID NO: 488315 - DNA, 15 bp, Homo sapiens
tagaatcaccatgga

SEQ ID NO: 488316 - DNA, 15 bp, Homo sapiens
atagaatcaccatgg

SEQ ID NO: 488317 - DNA, 15 bp, Homo sapiens
aatagaatcaccatg

SEQ ID NO: 488318 - DNA, 15 bp, Homo sapiens
aaatagaatcaccat

SEQ ID NO: 488319 - DNA, 15 bp, Homo sapiens
caaatagaatcacca

SEQ ID NO: 488320 - DNA, 15 bp, Homo sapiens
tcaaatagaatcacc

SEQ ID NO: 488321 - DNA, 15 bp, Homo sapiens
atcaaatagaatcac

SEQ ID NO: 488322 - DNA, 15 bp, Homo sapiens
tatcaaatagaatca

SEQ ID NO: 488323 - DNA, 15 bp, Homo sapiens
ttatcaaatagaatc

SEQ ID NO: 488324 - DNA, 15 bp, Homo sapiens
attatcaaatagaat

SEQ ID NO: 488325 - DNA, 15 bp, Homo sapiens
aattatcaaatagaa

SEQ ID NO: 488326 - DNA, 15 bp, Homo sapiens
caattatcaaataga

SEQ ID NO: 488327 - DNA, 15 bp, Homo sapiens
tcaattatcaaatag

SEQ ID NO: 488328 - DNA, 15 bp, Homo sapiens
atcaattatcaaata

SEQ ID NO: 488329 - DNA, 15 bp, Homo sapiens
tatcaattatcaaat

SEQ ID NO: 488330 - DNA, 15 bp, Homo sapiens
ttatcaattatcaaa

SEQ ID NO: 488331 - DNA, 15 bp, Homo sapiens
tttatcaattatcaa

SEQ ID NO: 488332 - DNA, 15 bp, Homo sapiens
atttatcaattatca

SEQ ID NO: 488333 - DNA, 15 bp, Homo sapiens
tatttatcaattatc

SEQ ID NO: 488334 - DNA, 15 bp, Homo sapiens
atatttatcaattat

SEQ ID NO: 488335 - DNA, 15 bp, Homo sapiens
aatatttatcaatta

SEQ ID NO: 488336 - DNA, 15 bp, Homo sapiens
aaatatttatcaatt

SEQ ID NO: 488337 - DNA, 15 bp, Homo sapiens
caaatatttatcaat

SEQ ID NO: 488338 - DNA, 15 bp, Homo sapiens
acaaatatttatcaa

SEQ ID NO: 488339 - DNA, 15 bp, Homo sapiens
tacaaatatttatca

SEQ ID NO: 488340 - DNA, 15 bp, Homo sapiens
atacaaatatttatc

SEQ ID NO: 488341 - DNA, 15 bp, Homo sapiens
aatacaaatatttat

SEQ ID NO: 488342 - DNA, 15 bp, Homo sapiens
aaatacaaatattta

SEQ ID NO: 488343 - DNA, 15 bp, Homo sapiens
aaaatacaaatattt

SEQ ID NO: 488344 - DNA, 15 bp, Homo sapiens
aaaaatacaaatatt

SEQ ID NO: 488345 - DNA, 15 bp, Homo sapiens
gaaaaatacaaatat

SEQ ID NO: 488346 - DNA, 15 bp, Homo sapiens
tgaaaaatacaaata

SEQ ID NO: 488347 - DNA, 15 bp, Homo sapiens
atgaaaaatacaaat

SEQ ID NO: 488348 - DNA, 15 bp, Homo sapiens
tatgaaaaatacaaa

SEQ ID NO: 488349 - DNA, 15 bp, Homo sapiens
atatgaaaaatacaa

SEQ ID NO: 488350 - DNA, 15 bp, Homo sapiens
aatatgaaaaataca

SEQ ID NO: 488351 - DNA, 15 bp, Homo sapiens
taatatgaaaaatac

SEQ ID NO: 488352 - DNA, 15 bp, Homo sapiens
ttaatatgaaaaata

SEQ ID NO: 488353 - DNA, 15 bp, Homo sapiens
cttaatatgaaaaat

SEQ ID NO: 488354 - DNA, 15 bp, Homo sapiens
acttaatatgaaaaa

SEQ ID NO: 488355 - DNA, 15 bp, Homo sapiens
gacttaatatgaaaa

SEQ ID NO: 488356 - DNA, 15 bp, Homo sapiens
agacttaatatgaaa

SEQ ID NO: 488357 - DNA, 15 bp, Homo sapiens
aagacttaatatgaa

SEQ ID NO: 488358 - DNA, 15 bp, Homo sapiens
caagacttaatatga

SEQ ID NO: 488359 - DNA, 15 bp, Homo sapiens
tcaagacttaatatg

SEQ ID NO: 488360 - DNA, 15 bp, Homo sapiens
gtcaagacttaatat

SEQ ID NO: 488361 - DNA, 15 bp, Homo sapiens
ggtcaagacttaata

SEQ ID NO: 488362 - DNA, 15 bp, Homo sapiens
cggtcaagacttaat

SEQ ID NO: 488363 - DNA, 15 bp, Homo sapiens
tcggtcaagacttaa

SEQ ID NO: 488364 - DNA, 15 bp, Homo sapiens
ttcggtcaagactta

SEQ ID NO: 488365 - DNA, 15 bp, Homo sapiens
cttcggtcaagactt

SEQ ID NO: 488366 - DNA, 15 bp, Homo sapiens
ccttcggtcaagact

SEQ ID NO: 488367 - DNA, 15 bp, Homo sapiens
cccttcggtcaagac

SEQ ID NO: 488368 - DNA, 15 bp, Homo sapiens
tcccttcggtcaaga

SEQ ID NO: 488369 - DNA, 15 bp, Homo sapiens
gtcccttcggtcaag

SEQ ID NO: 488370 - DNA, 15 bp, Homo sapiens
ggtcccttcggtcaa

SEQ ID NO: 488371 - DNA, 15 bp, Homo sapiens
tggtcccttcggtca

SEQ ID NO: 488372 - DNA, 15 bp, Homo sapiens
atggtcccttcggtc

SEQ ID NO: 488373 - DNA, 15 bp, Homo sapiens
tatggtcccttcggt

SEQ ID NO: 488374 - DNA, 15 bp, Homo sapiens
atatggtcccttcgg

SEQ ID NO: 488375 - DNA, 15 bp, Homo sapiens
aatatggtcccttcg

SEQ ID NO: 488376 - DNA, 15 bp, Homo sapiens
taatatggtcccttc

SEQ ID NO: 488377 - DNA, 15 bp, Homo sapiens
ttaatatggtccctt

SEQ ID NO: 488378 - DNA, 15 bp, Homo sapiens
cttaatatggtccct

SEQ ID NO: 488379 - DNA, 15 bp, Homo sapiens
ccttaatatggtccc

SEQ ID NO: 488380 - DNA, 15 bp, Homo sapiens
tccttaatatggtcc

SEQ ID NO: 488381 - DNA, 15 bp, Homo sapiens
ttccttaatatggtc

SEQ ID NO: 488382 - DNA, 15 bp, Homo sapiens
cttccttaatatggt

SEQ ID NO: 488383 - DNA, 15 bp, Homo sapiens
tcttccttaatatgg

SEQ ID NO: 488384 - DNA, 15 bp, Homo sapiens
atcttccttaatatg

SEQ ID NO: 488385 - DNA, 15 bp, Homo sapiens
catcttccttaatat

SEQ ID NO: 488386 - DNA, 15 bp, Homo sapiens
ccatcttccttaata

SEQ ID NO: 488387 - DNA, 15 bp, Homo sapiens
tccatcttccttaat

SEQ ID NO: 488388 - DNA, 15 bp, Homo sapiens
ctccatcttccttaa

SEQ ID NO: 488389 - DNA, 15 bp, Homo sapiens
actccatcttcctta

SEQ ID NO: 488390 - DNA, 15 bp, Homo sapiens
aactccatcttcctt

SEQ ID NO: 488391 - DNA, 15 bp, Homo sapiens
taactccatcttcct

SEQ ID NO: 488392 - DNA, 15 bp, Homo sapiens
ttaactccatcttcc

SEQ ID NO: 488393 - DNA, 15 bp, Homo sapiens
attaactccatcttc

SEQ ID NO: 488394 - DNA, 15 bp, Homo sapiens
tattaactccatctt

SEQ ID NO: 488395 - DNA, 15 bp, Homo sapiens
ttattaactccatct

SEQ ID NO: 488396 - DNA, 15 bp, Homo sapiens
cttattaactccatc

SEQ ID NO: 488397 - DNA, 15 bp, Homo sapiens
tcttattaactccat

SEQ ID NO: 488398 - DNA, 15 bp, Homo sapiens
atcttattaactcca

SEQ ID NO: 488399 - DNA, 15 bp, Homo sapiens
catcttattaactcc

SEQ ID NO: 488400 - DNA, 15 bp, Homo sapiens
gcatcttattaactc

SEQ ID NO: 488401 - DNA, 15 bp, Homo sapiens
agcatcttattaact

SEQ ID NO: 488402 - DNA, 15 bp, Homo sapiens
aagcatcttattaac

SEQ ID NO: 488403 - DNA, 15 bp, Homo sapiens
aaagcatcttattaa

SEQ ID NO: 488404 - DNA, 15 bp, Homo sapiens
caaagcatcttatta

SEQ ID NO: 488405 - DNA, 15 bp, Homo sapiens
ccaaagcatcttatt

SEQ ID NO: 488406 - DNA, 15 bp, Homo sapiens
tccaaagcatcttat

SEQ ID NO: 488407 - DNA, 15 bp, Homo sapiens
ttccaaagcatctta

SEQ ID NO: 488408 - DNA, 15 bp, Homo sapiens
tttccaaagcatctt

SEQ ID NO: 488409 - DNA, 15 bp, Homo sapiens
ctttccaaagcatct

SEQ ID NO: 488410 - DNA, 15 bp, Homo sapiens
tctttccaaagcatc

SEQ ID NO: 488411 - DNA, 15 bp, Homo sapiens
atctttccaaagcat

SEQ ID NO: 488412 - DNA, 15 bp, Homo sapiens
aatctttccaaagca

SEQ ID NO: 488413 - DNA, 15 bp, Homo sapiens
taatctttccaaagc

SEQ ID NO: 488414 - DNA, 15 bp, Homo sapiens
ttaatctttccaaag

SEQ ID NO: 488415 - DNA, 15 bp, Homo sapiens
tttaatctttccaaa

SEQ ID NO: 488416 - DNA, 15 bp, Homo sapiens
atttaatctttccaa

SEQ ID NO: 488417 - DNA, 15 bp, Homo sapiens
gatttaatctttcca

SEQ ID NO: 488418 - DNA, 15 bp, Homo sapiens
agatttaatctttcc

SEQ ID NO: 488419 - DNA, 15 bp, Homo sapiens
tagatttaatctttc

SEQ ID NO: 488420 - DNA, 15 bp, Homo sapiens
ttagatttaatcttt

SEQ ID NO: 488421 - DNA, 15 bp, Homo sapiens
tttagatttaatctt

SEQ ID NO: 488422 - DNA, 15 bp, Homo sapiens
ttttagatttaatct

SEQ ID NO: 488423 - DNA, 15 bp, Homo sapiens
gttttagatttaatc

SEQ ID NO: 488424 - DNA, 15 bp, Homo sapiens
cgttttagatttaat

SEQ ID NO: 488425 - DNA, 15 bp, Homo sapiens
acgttttagatttaa

SEQ ID NO: 488426 - DNA, 15 bp, Homo sapiens
aacgttttagattta

SEQ ID NO: 488427 - DNA, 15 bp, Homo sapiens
aaacgttttagattt

SEQ ID NO: 488428 - DNA, 15 bp, Homo sapiens
aaaacgttttagatt

SEQ ID NO: 488429 - DNA, 15 bp, Homo sapiens
taaaacgttttagat

SEQ ID NO: 488430 - DNA, 15 bp, Homo sapiens
ataaaacgttttaga

SEQ ID NO: 488431 - DNA, 15 bp, Homo sapiens
aataaaacgttttag

SEQ ID NO: 488432 - DNA, 15 bp, Homo sapiens
gaataaaacgtttta

SEQ ID NO: 488433 - DNA, 15 bp, Homo sapiens
tgaataaaacgtttt

SEQ ID NO: 488434 - DNA, 15 bp, Homo sapiens
ctgaataaaacgttt

SEQ ID NO: 488435 - DNA, 15 bp, Homo sapiens
tctgaataaaacgtt

SEQ ID NO: 488436 - DNA, 15 bp, Homo sapiens
atctgaataaaacgt

SEQ ID NO: 488437 - DNA, 15 bp, Homo sapiens
gatctgaataaaacg

SEQ ID NO: 488438 - DNA, 15 bp, Homo sapiens
tgatctgaataaaac

SEQ ID NO: 488439 - DNA, 15 bp, Homo sapiens
ctgatctgaataaaa

SEQ ID NO: 488440 - DNA, 15 bp, Homo sapiens
tctgatctgaataaa

SEQ ID NO: 488441 - DNA, 15 bp, Homo sapiens
ttctgatctgaataa

SEQ ID NO: 488442 - DNA, 15 bp, Homo sapiens
cttctgatctgaata

SEQ ID NO: 488443 - DNA, 15 bp, Homo sapiens
gcttctgatctgaat

SEQ ID NO: 488444 - DNA, 15 bp, Homo sapiens
ggcttctgatctgaa

SEQ ID NO: 488445 - DNA, 15 bp, Homo sapiens
gggcttctgatctga

SEQ ID NO: 488446 - DNA, 15 bp, Homo sapiens
agggcttctgatctg

SEQ ID NO: 488447 - DNA, 15 bp, Homo sapiens
aagggcttctgatct

SEQ ID NO: 488448 - DNA, 15 bp, Homo sapiens
caagggcttctgatc

SEQ ID NO: 488449 - DNA, 15 bp, Homo sapiens
tcaagggcttctgat

SEQ ID NO: 488450 - DNA, 15 bp, Homo sapiens
ctcaagggcttctga

SEQ ID NO: 488451 - DNA, 15 bp, Homo sapiens
tctcaagggcttctg

SEQ ID NO: 488452 - DNA, 15 bp, Homo sapiens
ttctcaagggcttct

SEQ ID NO: 488453 - DNA, 15 bp, Homo sapiens
tttctcaagggcttc

SEQ ID NO: 488454 - DNA, 15 bp, Homo sapiens
ttttctcaagggctt

SEQ ID NO: 488455 - DNA, 15 bp, Homo sapiens
tttttctcaagggct

SEQ ID NO: 488456 - DNA, 15 bp, Homo sapiens
atttttctcaagggc

SEQ ID NO: 488457 - DNA, 15 bp, Homo sapiens
catttttctcaaggg

SEQ ID NO: 488458 - DNA, 15 bp, Homo sapiens
acatttttctcaagg

SEQ ID NO: 488459 - DNA, 15 bp, Homo sapiens
gacatttttctcaag

SEQ ID NO: 488460 - DNA, 15 bp, Homo sapiens
tgacatttttctcaa

SEQ ID NO: 488461 - DNA, 15 bp, Homo sapiens
gtgacatttttctca

SEQ ID NO: 488462 - DNA, 15 bp, Homo sapiens
agtgacatttttctc

SEQ ID NO: 488463 - DNA, 15 bp, Homo sapiens
cagtgacatttttct

SEQ ID NO: 488464 - DNA, 15 bp, Homo sapiens
tcagtgacatttttc

SEQ ID NO: 488465 - DNA, 15 bp, Homo sapiens
ttcagtgacattttt

SEQ ID NO: 488466 - DNA, 15 bp, Homo sapiens
tttcagtgacatttt

SEQ ID NO: 488467 - DNA, 15 bp, Homo sapiens
ttttcagtgacattt

SEQ ID NO: 488468 - DNA, 15 bp, Homo sapiens
attttcagtgacatt

SEQ ID NO: 488469 - DNA, 15 bp, Homo sapiens
tattttcagtgacat

SEQ ID NO: 488470 - DNA, 15 bp, Homo sapiens
gtattttcagtgaca

SEQ ID NO: 488471 - DNA, 15 bp, Homo sapiens
tgtattttcagtgac

SEQ ID NO: 488472 - DNA, 15 bp, Homo sapiens
ctgtattttcagtga

SEQ ID NO: 488473 - DNA, 15 bp, Homo sapiens
actgtattttcagtg

SEQ ID NO: 488474 - DNA, 15 bp, Homo sapiens
aactgtattttcagt

SEQ ID NO: 488475 - DNA, 15 bp, Homo sapiens
aaactgtattttcag

SEQ ID NO: 488476 - DNA, 15 bp, Homo sapiens
taaactgtattttca

SEQ ID NO: 488477 - DNA, 15 bp, Homo sapiens
ttaaactgtattttc

SEQ ID NO: 488478 - DNA, 15 bp, Homo sapiens
tttaaactgtatttt

SEQ ID NO: 488479 - DNA, 15 bp, Homo sapiens
ttttaaactgtattt

SEQ ID NO: 488480 - DNA, 15 bp, Homo sapiens
attttaaactgtatt

SEQ ID NO: 488481 - DNA, 15 bp, Homo sapiens
aattttaaactgtat

SEQ ID NO: 488482 - DNA, 15 bp, Homo sapiens
aaattttaaactgta

SEQ ID NO: 488483 - DNA, 15 bp, Homo sapiens
aaaattttaaactgt

SEQ ID NO: 488484 - DNA, 15 bp, Homo sapiens
gaaaattttaaactg

SEQ ID NO: 488485 - DNA, 15 bp, Homo sapiens
tgaaaattttaaact

SEQ ID NO: 488486 - DNA, 15 bp, Homo sapiens
atgaaaattttaaac

SEQ ID NO: 488487 - DNA, 15 bp, Homo sapiens
gatgaaaattttaaa

SEQ ID NO: 488488 - DNA, 15 bp, Homo sapiens
ggatgaaaattttaa

SEQ ID NO: 488489 - DNA, 15 bp, Homo sapiens
gggatgaaaatttta

SEQ ID NO: 488490 - DNA, 15 bp, Homo sapiens
cgggatgaaaatttt

SEQ ID NO: 488491 - DNA, 15 bp, Homo sapiens
tcgggatgaaaattt

SEQ ID NO: 488492 - DNA, 15 bp, Homo sapiens
ttcgggatgaaaatt

SEQ ID NO: 488493 - DNA, 15 bp, Homo sapiens
cttcgggatgaaaat

SEQ ID NO: 488494 - DNA, 15 bp, Homo sapiens
gcttcgggatgaaaa

SEQ ID NO: 488495 - DNA, 15 bp, Homo sapiens
agcttcgggatgaaa

SEQ ID NO: 488496 - DNA, 15 bp, Homo sapiens
aagcttcgggatgaa

SEQ ID NO: 488497 - DNA, 15 bp, Homo sapiens
aaagcttcgggatga

SEQ ID NO: 488498 - DNA, 15 bp, Homo sapiens
aaaagcttcgggatg

SEQ ID NO: 488499 - DNA, 15 bp, Homo sapiens
gaaaagcttcgggat

SEQ ID NO: 488500 - DNA, 15 bp, Homo sapiens
tgaaaagcttcggga

SEQ ID NO: 488501 - DNA, 15 bp, Homo sapiens
ttgaaaagcttcggg

SEQ ID NO: 488502 - DNA, 15 bp, Homo sapiens
tttgaaaagcttcgg

SEQ ID NO: 488503 - DNA, 15 bp, Homo sapiens
gtttgaaaagcttcg

SEQ ID NO: 488504 - DNA, 15 bp, Homo sapiens
tgtttgaaaagcttc

SEQ ID NO: 488505 - DNA, 15 bp, Homo sapiens
atgtttgaaaagctt

SEQ ID NO: 488506 - DNA, 15 bp, Homo sapiens
tatgtttgaaaagct

SEQ ID NO: 488507 - DNA, 15 bp, Homo sapiens
atatgtttgaaaagc

SEQ ID NO: 488508 - DNA, 15 bp, Homo sapiens
aatatgtttgaaaag

SEQ ID NO: 488509 - DNA, 15 bp, Homo sapiens
taatatgtttgaaaa

SEQ ID NO: 488510 - DNA, 15 bp, Homo sapiens
ataatatgtttgaaa

SEQ ID NO: 488511 - DNA, 15 bp, Homo sapiens
aataatatgtttgaa

SEQ ID NO: 488512 - DNA, 15 bp, Homo sapiens
aaataatatgtttga

SEQ ID NO: 488513 - DNA, 15 bp, Homo sapiens
gaaataatatgtttg

SEQ ID NO: 488514 - DNA, 15 bp, Homo sapiens
tgaaataatatgttt

SEQ ID NO: 488515 - DNA, 15 bp, Homo sapiens
ctgaaataatatgtt

SEQ ID NO: 488516 - DNA, 15 bp, Homo sapiens
gctgaaataatatgt

SEQ ID NO: 488517 - DNA, 15 bp, Homo sapiens
tgctgaaataatatg

SEQ ID NO: 488518 - DNA, 15 bp, Homo sapiens
atgctgaaataatat

SEQ ID NO: 488519 - DNA, 15 bp, Homo sapiens
aatgctgaaataata

SEQ ID NO: 488520 - DNA, 15 bp, Homo sapiens
aaatgctgaaataat

SEQ ID NO: 488521 - DNA, 15 bp, Homo sapiens
caaatgctgaaataa

SEQ ID NO: 488522 - DNA, 15 bp, Homo sapiens
tcaaatgctgaaata

SEQ ID NO: 488523 - DNA, 15 bp, Homo sapiens
atcaaatgctgaaat

SEQ ID NO: 488524 - DNA, 15 bp, Homo sapiens
tatcaaatgctgaaa

SEQ ID NO: 488525 - DNA, 15 bp, Homo sapiens
gtatcaaatgctgaa

SEQ ID NO: 488526 - DNA, 15 bp, Homo sapiens
tgtatcaaatgctga

SEQ ID NO: 488527 - DNA, 15 bp, Homo sapiens
atgtatcaaatgctg

SEQ ID NO: 488528 - DNA, 15 bp, Homo sapiens
aatgtatcaaatgct

SEQ ID NO: 488529 - DNA, 15 bp, Homo sapiens
caatgtatcaaatgc

SEQ ID NO: 488530 - DNA, 15 bp, Homo sapiens
tcaatgtatcaaatg

SEQ ID NO: 488531 - DNA, 15 bp, Homo sapiens
gtcaatgtatcaaat

SEQ ID NO: 488532 - DNA, 15 bp, Homo sapiens
agtcaatgtatcaaa

SEQ ID NO: 488533 - DNA, 15 bp, Homo sapiens
aagtcaatgtatcaa

SEQ ID NO: 488534 - DNA, 15 bp, Homo sapiens
caagtcaatgtatca

SEQ ID NO: 488535 - DNA, 15 bp, Homo sapiens
gcaagtcaatgtatc

SEQ ID NO: 488536 - DNA, 15 bp, Homo sapiens
ggcaagtcaatgtat

SEQ ID NO: 488537 - DNA, 15 bp, Homo sapiens
tggcaagtcaatgta

SEQ ID NO: 488538 - DNA, 15 bp, Homo sapiens
gtggcaagtcaatgt

SEQ ID NO: 488539 - DNA, 15 bp, Homo sapiens
ggtggcaagtcaatg

SEQ ID NO: 488540 - DNA, 15 bp, Homo sapiens
aggtggcaagtcaat

SEQ ID NO: 488541 - DNA, 15 bp, Homo sapiens
aaggtggcaagtcaa

SEQ ID NO: 488542 - DNA, 15 bp, Homo sapiens
taaggtggcaagtca

SEQ ID NO: 488543 - DNA, 15 bp, Homo sapiens
gtaaggtggcaagtc

SEQ ID NO: 488544 - DNA, 15 bp, Homo sapiens
ggtaaggtggcaagt

SEQ ID NO: 488545 - DNA, 15 bp, Homo sapiens
tggtaaggtggcaag

SEQ ID NO: 488546 - DNA, 15 bp, Homo sapiens
atggtaaggtggcaa

SEQ ID NO: 488547 - DNA, 15 bp, Homo sapiens
aatggtaaggtggca

SEQ ID NO: 488548 - DNA, 15 bp, Homo sapiens
aaatggtaaggtggc

SEQ ID NO: 488549 - DNA, 15 bp, Homo sapiens
taaatggtaaggtgg

SEQ ID NO: 488550 - DNA, 15 bp, Homo sapiens
ttaaatggtaaggtg

SEQ ID NO: 488551 - DNA, 15 bp, Homo sapiens
cttaaatggtaaggt

SEQ ID NO: 488552 - DNA, 15 bp, Homo sapiens
acttaaatggtaagg

SEQ ID NO: 488553 - DNA, 15 bp, Homo sapiens
aacttaaatggtaag

SEQ ID NO: 488554 - DNA, 15 bp, Homo sapiens
taacttaaatggtaa

SEQ ID NO: 488555 - DNA, 15 bp, Homo sapiens
ttaacttaaatggta

SEQ ID NO: 488556 - DNA, 15 bp, Homo sapiens
tttaacttaaatggt

SEQ ID NO: 488557 - DNA, 15 bp, Homo sapiens
ttttaacttaaatgg

SEQ ID NO: 488558 - DNA, 15 bp, Homo sapiens
cttttaacttaaatg

SEQ ID NO: 488559 - DNA, 15 bp, Homo sapiens
acttttaacttaaat

SEQ ID NO: 488560 - DNA, 15 bp, Homo sapiens
tacttttaacttaaa

SEQ ID NO: 488561 - DNA, 15 bp, Homo sapiens
ttacttttaacttaa

SEQ ID NO: 488562 - DNA, 15 bp, Homo sapiens
attacttttaactta

SEQ ID NO: 488563 - DNA, 15 bp, Homo sapiens
tattacttttaactt

SEQ ID NO: 488564 - DNA, 15 bp, Homo sapiens
ctattacttttaact

SEQ ID NO: 488565 - DNA, 15 bp, Homo sapiens
actattacttttaac

SEQ ID NO: 488566 - DNA, 15 bp, Homo sapiens
tactattacttttaa

SEQ ID NO: 488567 - DNA, 15 bp, Homo sapiens
atactattactttta

SEQ ID NO: 488568 - DNA, 15 bp, Homo sapiens
aatactattactttt

SEQ ID NO: 488569 - DNA, 15 bp, Homo sapiens
aaatactattacttt

SEQ ID NO: 488570 - DNA, 15 bp, Homo sapiens
taaatactattactt

SEQ ID NO: 488571 - DNA, 15 bp, Homo sapiens
ataaatactattact

SEQ ID NO: 488572 - DNA, 15 bp, Homo sapiens
cataaatactattac

SEQ ID NO: 488573 - DNA, 15 bp, Homo sapiens
acataaatactatta

SEQ ID NO: 488574 - DNA, 15 bp, Homo sapiens
aacataaatactatt

SEQ ID NO: 488575 - DNA, 15 bp, Homo sapiens
caacataaatactat

SEQ ID NO: 488576 - DNA, 15 bp, Homo sapiens
acaacataaatacta

SEQ ID NO: 488577 - DNA, 15 bp, Homo sapiens
tacaacataaatact

SEQ ID NO: 488578 - DNA, 15 bp, Homo sapiens
ctacaacataaatac

SEQ ID NO: 488579 - DNA, 15 bp, Homo sapiens
actacaacataaata

SEQ ID NO: 488580 - DNA, 15 bp, Homo sapiens
gactacaacataaat

SEQ ID NO: 488581 - DNA, 15 bp, Homo sapiens
agactacaacataaa

SEQ ID NO: 488582 - DNA, 15 bp, Homo sapiens
tagactacaacataa

SEQ ID NO: 488583 - DNA, 15 bp, Homo sapiens
ctagactacaacata

SEQ ID NO: 488584 - DNA, 15 bp, Homo sapiens
actagactacaacat

SEQ ID NO: 488585 - DNA, 15 bp, Homo sapiens
tactagactacaaca

SEQ ID NO: 488586 - DNA, 15 bp, Homo sapiens
atactagactacaac

SEQ ID NO: 488587 - DNA, 15 bp, Homo sapiens
tatactagactacaa

SEQ ID NO: 488588 - DNA, 15 bp, Homo sapiens
ctatactagactaca

SEQ ID NO: 488589 - DNA, 15 bp, Homo sapiens
gctatactagactac

SEQ ID NO: 488590 - DNA, 15 bp, Homo sapiens
tgctatactagacta

SEQ ID NO: 488591 - DNA, 15 bp, Homo sapiens
gtgctatactagact

SEQ ID NO: 488592 - DNA, 15 bp, Homo sapiens
tgtgctatactagac

SEQ ID NO: 488593 - DNA, 15 bp, Homo sapiens
atgtgctatactaga

SEQ ID NO: 488594 - DNA, 15 bp, Homo sapiens
aatgtgctatactag

SEQ ID NO: 488595 - DNA, 15 bp, Homo sapiens
caatgtgctatacta

SEQ ID NO: 488596 - DNA, 15 bp, Homo sapiens
tcaatgtgctatact

SEQ ID NO: 488597 - DNA, 15 bp, Homo sapiens
gtcaatgtgctatac

SEQ ID NO: 488598 - DNA, 15 bp, Homo sapiens
tgtcaatgtgctata

SEQ ID NO: 488599 - DNA, 15 bp, Homo sapiens
ttgtcaatgtgctat

SEQ ID NO: 488600 - DNA, 15 bp, Homo sapiens
tttgtcaatgtgcta

SEQ ID NO: 488601 - DNA, 15 bp, Homo sapiens
ttttgtcaatgtgct

SEQ ID NO: 488602 - DNA, 15 bp, Homo sapiens
attttgtcaatgtgc

SEQ ID NO: 488603 - DNA, 15 bp, Homo sapiens
cattttgtcaatgtg

SEQ ID NO: 488604 - DNA, 15 bp, Homo sapiens
tcattttgtcaatgt

SEQ ID NO: 488605 - DNA, 15 bp, Homo sapiens
atcattttgtcaatg

SEQ ID NO: 488606 - DNA, 15 bp, Homo sapiens
catcattttgtcaat

SEQ ID NO: 488607 - DNA, 15 bp, Homo sapiens
ccatcattttgtcaa

SEQ ID NO: 488608 - DNA, 15 bp, Homo sapiens
cccatcattttgtca

SEQ ID NO: 488609 - DNA, 15 bp, Homo sapiens
tcccatcattttgtc

SEQ ID NO: 488610 - DNA, 15 bp, Homo sapiens
gtcccatcattttgt

SEQ ID NO: 488611 - DNA, 15 bp, Homo sapiens
agtcccatcattttg

SEQ ID NO: 488612 - DNA, 15 bp, Homo sapiens
tagtcccatcatttt

SEQ ID NO: 488613 - DNA, 15 bp, Homo sapiens
atagtcccatcattt

SEQ ID NO: 488614 - DNA, 15 bp, Homo sapiens
tatagtcccatcatt

SEQ ID NO: 488615 - DNA, 15 bp, Homo sapiens
atatagtcccatcat

SEQ ID NO: 488616 - DNA, 15 bp, Homo sapiens
aatatagtcccatca

SEQ ID NO: 488617 - DNA, 15 bp, Homo sapiens
aaatatagtcccatc

SEQ ID NO: 488618 - DNA, 15 bp, Homo sapiens
caaatatagtcccat

SEQ ID NO: 488619 - DNA, 15 bp, Homo sapiens
tcaaatatagtccca

SEQ ID NO: 488620 - DNA, 15 bp, Homo sapiens
atcaaatatagtccc

SEQ ID NO: 488621 - DNA, 15 bp, Homo sapiens
catcaaatatagtcc

SEQ ID NO: 488622 - DNA, 15 bp, Homo sapiens
ccatcaaatatagtc

SEQ ID NO: 488623 - DNA, 15 bp, Homo sapiens
accatcaaatatagt

SEQ ID NO: 488624 - DNA, 15 bp, Homo sapiens
taccatcaaatatag

SEQ ID NO: 488625 - DNA, 15 bp, Homo sapiens
gtaccatcaaatata

SEQ ID NO: 488626 - DNA, 15 bp, Homo sapiens
agtaccatcaaatat

SEQ ID NO: 488627 - DNA, 15 bp, Homo sapiens
aagtaccatcaaata

SEQ ID NO: 488628 - DNA, 15 bp, Homo sapiens
aaagtaccatcaaat

SEQ ID NO: 488629 - DNA, 15 bp, Homo sapiens
aaaagtaccatcaaa

SEQ ID NO: 488630 - DNA, 15 bp, Homo sapiens
taaaagtaccatcaa

SEQ ID NO: 488631 - DNA, 15 bp, Homo sapiens
ttaaaagtaccatca

SEQ ID NO: 488632 - DNA, 15 bp, Homo sapiens
tttaaaagtaccatc

SEQ ID NO: 488633 - DNA, 15 bp, Homo sapiens
atttaaaagtaccat

SEQ ID NO: 488634 - DNA, 15 bp, Homo sapiens
gatttaaaagtacca

SEQ ID NO: 488635 - DNA, 15 bp, Homo sapiens
agatttaaaagtacc

SEQ ID NO: 488636 - DNA, 15 bp, Homo sapiens
aagatttaaaagtac

SEQ ID NO: 488637 - DNA, 15 bp, Homo sapiens
aaagatttaaaagta

SEQ ID NO: 488638 - DNA, 15 bp, Homo sapiens
aaaagatttaaaagt

SEQ ID NO: 488639 - DNA, 15 bp, Homo sapiens
caaaagatttaaaag

SEQ ID NO: 488640 - DNA, 15 bp, Homo sapiens
tcaaaagatttaaaa

SEQ ID NO: 488641 - DNA, 15 bp, Homo sapiens
atcaaaagatttaaa

SEQ ID NO: 488642 - DNA, 15 bp, Homo sapiens
gatcaaaagatttaa

SEQ ID NO: 488643 - DNA, 15 bp, Homo sapiens
ggatcaaaagattta

SEQ ID NO: 488644 - DNA, 15 bp, Homo sapiens
aggatcaaaagattt

SEQ ID NO: 488645 - DNA, 15 bp, Homo sapiens
taggatcaaaagatt

SEQ ID NO: 488646 - DNA, 15 bp, Homo sapiens
ttaggatcaaaagat

SEQ ID NO: 488647 - DNA, 15 bp, Homo sapiens
tttaggatcaaaaga

SEQ ID NO: 488648 - DNA, 15 bp, Homo sapiens
atttaggatcaaaag

SEQ ID NO: 488649 - DNA, 15 bp, Homo sapiens
aatttaggatcaaaa

SEQ ID NO: 488650 - DNA, 15 bp, Homo sapiens
gaatttaggatcaaa

SEQ ID NO: 488651 - DNA, 15 bp, Homo sapiens
tgaatttaggatcaa

SEQ ID NO: 488652 - DNA, 15 bp, Homo sapiens
atgaatttaggatca

SEQ ID NO: 488653 - DNA, 15 bp, Homo sapiens
aatgaatttaggatc

SEQ ID NO: 488654 - DNA, 15 bp, Homo sapiens
gaatgaatttaggat

SEQ ID NO: 488655 - DNA, 15 bp, Homo sapiens
tgaatgaatttagga

SEQ ID NO: 488656 - DNA, 15 bp, Homo sapiens
atgaatgaatttagg

SEQ ID NO: 488657 - DNA, 15 bp, Homo sapiens
tatgaatgaatttag

SEQ ID NO: 488658 - DNA, 15 bp, Homo sapiens
ctatgaatgaattta

SEQ ID NO: 488659 - DNA, 15 bp, Homo sapiens
actatgaatgaattt

SEQ ID NO: 488660 - DNA, 15 bp, Homo sapiens
cactatgaatgaatt

SEQ ID NO: 488661 - DNA, 15 bp, Homo sapiens
acactatgaatgaat

SEQ ID NO: 488662 - DNA, 15 bp, Homo sapiens
tacactatgaatgaa

SEQ ID NO: 488663 - DNA, 15 bp, Homo sapiens
ttacactatgaatga

SEQ ID NO: 488664 - DNA, 15 bp, Homo sapiens
tttacactatgaatg

SEQ ID NO: 488665 - DNA, 15 bp, Homo sapiens
ttttacactatgaat

SEQ ID NO: 488666 - DNA, 15 bp, Homo sapiens
attttacactatgaa

SEQ ID NO: 488667 - DNA, 15 bp, Homo sapiens
aattttacactatga

SEQ ID NO: 488668 - DNA, 15 bp, Homo sapiens
aaattttacactatg

SEQ ID NO: 488669 - DNA, 15 bp, Homo sapiens
gaaattttacactat

SEQ ID NO: 488670 - DNA, 15 bp, Homo sapiens
tgaaattttacacta

SEQ ID NO: 488671 - DNA, 15 bp, Homo sapiens
atgaaattttacact

SEQ ID NO: 488672 - DNA, 15 bp, Homo sapiens
aatgaaattttacac

SEQ ID NO: 488673 - DNA, 15 bp, Homo sapiens
aaatgaaattttaca

SEQ ID NO: 488674 - DNA, 15 bp, Homo sapiens
aaaatgaaattttac

SEQ ID NO: 488675 - DNA, 15 bp, Homo sapiens
aaaaatgaaatttta

SEQ ID NO: 488676 - DNA, 15 bp, Homo sapiens
gaaaaatgaaatttt

SEQ ID NO: 488677 - DNA, 15 bp, Homo sapiens
agaaaaatgaaattt

SEQ ID NO: 488678 - DNA, 15 bp, Homo sapiens
aagaaaaatgaaatt

SEQ ID NO: 488679 - DNA, 15 bp, Homo sapiens
taagaaaaatgaaat

SEQ ID NO: 488680 - DNA, 15 bp, Homo sapiens
ttaagaaaaatgaaa

SEQ ID NO: 488681 - DNA, 15 bp, Homo sapiens
tttaagaaaaatgaa

SEQ ID NO: 488682 - DNA, 15 bp, Homo sapiens
gtttaagaaaaatga

SEQ ID NO: 488683 - DNA, 15 bp, Homo sapiens
tgtttaagaaaaatg

SEQ ID NO: 488684 - DNA, 15 bp, Homo sapiens
ttgtttaagaaaaat

SEQ ID NO: 488685 - DNA, 15 bp, Homo sapiens
tttgtttaagaaaaa

SEQ ID NO: 488686 - DNA, 15 bp, Homo sapiens
ttttgtttaagaaaa

SEQ ID NO: 488687 - DNA, 15 bp, Homo sapiens
attttgtttaagaaa

SEQ ID NO: 488688 - DNA, 15 bp, Homo sapiens
cattttgtttaagaa

SEQ ID NO: 488689 - DNA, 15 bp, Homo sapiens
tcattttgtttaaga

SEQ ID NO: 488690 - DNA, 15 bp, Homo sapiens
ttcattttgtttaag

SEQ ID NO: 488691 - DNA, 15 bp, Homo sapiens
tttcattttgtttaa

SEQ ID NO: 488692 - DNA, 15 bp, Homo sapiens
atttcattttgttta

SEQ ID NO: 488693 - DNA, 15 bp, Homo sapiens
tatttcattttgttt

SEQ ID NO: 488694 - DNA, 15 bp, Homo sapiens
atatttcattttgtt

SEQ ID NO: 488695 - DNA, 15 bp, Homo sapiens
aatatttcattttgt

SEQ ID NO: 488696 - DNA, 15 bp, Homo sapiens
taatatttcattttg

SEQ ID NO: 488697 - DNA, 15 bp, Homo sapiens
ttaatatttcatttt

SEQ ID NO: 488698 - DNA, 15 bp, Homo sapiens
gttaatatttcattt

SEQ ID NO: 488699 - DNA, 15 bp, Homo sapiens
tgttaatatttcatt

SEQ ID NO: 488700 - DNA, 15 bp, Homo sapiens
atgttaatatttcat

SEQ ID NO: 488701 - DNA, 15 bp, Homo sapiens
tatgttaatatttca

SEQ ID NO: 488702 - DNA, 15 bp, Homo sapiens
gtatgttaatatttc

SEQ ID NO: 488703 - DNA, 15 bp, Homo sapiens
agtatgttaatattt

SEQ ID NO: 488704 - DNA, 15 bp, Homo sapiens
aagtatgttaatatt

SEQ ID NO: 488705 - DNA, 15 bp, Homo sapiens
aaagtatgttaatat

SEQ ID NO: 488706 - DNA, 15 bp, Homo sapiens
taaagtatgttaata

SEQ ID NO: 488707 - DNA, 15 bp, Homo sapiens
ttaaagtatgttaat

SEQ ID NO: 488708 - DNA, 15 bp, Homo sapiens
tttaaagtatgttaa

SEQ ID NO: 488709 - DNA, 15 bp, Homo sapiens
ctttaaagtatgtta

SEQ ID NO: 488710 - DNA, 15 bp, Homo sapiens
actttaaagtatgtt

SEQ ID NO: 488711 - DNA, 15 bp, Homo sapiens
tactttaaagtatgt

SEQ ID NO: 488712 - DNA, 15 bp, Homo sapiens
ctactttaaagtatg

SEQ ID NO: 488713 - DNA, 15 bp, Homo sapiens
cctactttaaagtat

SEQ ID NO: 488714 - DNA, 15 bp, Homo sapiens
acctactttaaagta

SEQ ID NO: 488715 - DNA, 15 bp, Homo sapiens
tacctactttaaagt

SEQ ID NO: 488716 - DNA, 15 bp, Homo sapiens
atacctactttaaag

SEQ ID NO: 488717 - DNA, 15 bp, Homo sapiens
aatacctactttaaa

SEQ ID NO: 488718 - DNA, 15 bp, Homo sapiens
taatacctactttaa

SEQ ID NO: 488719 - DNA, 15 bp, Homo sapiens
ttaatacctacttta

SEQ ID NO: 488720 - DNA, 15 bp, Homo sapiens
gttaatacctacttt

SEQ ID NO: 488721 - DNA, 15 bp, Homo sapiens
tgttaatacctactt

SEQ ID NO: 488722 - DNA, 15 bp, Homo sapiens
ttgttaatacctact

SEQ ID NO: 488723 - DNA, 15 bp, Homo sapiens
cttgttaatacctac

SEQ ID NO: 488724 - DNA, 15 bp, Homo sapiens
tcttgttaataccta

SEQ ID NO: 488725 - DNA, 15 bp, Homo sapiens
atcttgttaatacct

SEQ ID NO: 488726 - DNA, 15 bp, Homo sapiens
tatcttgttaatacc

SEQ ID NO: 488727 - DNA, 15 bp, Homo sapiens
gtatcttgttaatac

SEQ ID NO: 488728 - DNA, 15 bp, Homo sapiens
tgtatcttgttaata

SEQ ID NO: 488729 - DNA, 15 bp, Homo sapiens
ttgtatcttgttaat

SEQ ID NO: 488730 - DNA, 15 bp, Homo sapiens
tttgtatcttgttaa

SEQ ID NO: 488731 - DNA, 15 bp, Homo sapiens
ttttgtatcttgtta

SEQ ID NO: 488732 - DNA, 15 bp, Homo sapiens
cttttgtatcttgtt

SEQ ID NO: 488733 - DNA, 15 bp, Homo sapiens
gcttttgtatcttgt

SEQ ID NO: 488734 - DNA, 15 bp, Homo sapiens
tgcttttgtatcttg

SEQ ID NO: 488735 - DNA, 15 bp, Homo sapiens
atgcttttgtatctt

SEQ ID NO: 488736 - DNA, 15 bp, Homo sapiens
tatgcttttgtatct

SEQ ID NO: 488737 - DNA, 15 bp, Homo sapiens
atatgcttttgtatc

SEQ ID NO: 488738 - DNA, 15 bp, Homo sapiens
gatatgcttttgtat

SEQ ID NO: 488739 - DNA, 15 bp, Homo sapiens
tgatatgcttttgta

SEQ ID NO: 488740 - DNA, 15 bp, Homo sapiens
ctgatatgcttttgt

SEQ ID NO: 488741 - DNA, 15 bp, Homo sapiens
tctgatatgcttttg

SEQ ID NO: 488742 - DNA, 15 bp, Homo sapiens
gtctgatatgctttt

SEQ ID NO: 488743 - DNA, 15 bp, Homo sapiens
tgtctgatatgcttt

SEQ ID NO: 488744 - DNA, 15 bp, Homo sapiens
ttgtctgatatgctt

SEQ ID NO: 488745 - DNA, 15 bp, Homo sapiens
tttgtctgatatgct

SEQ ID NO: 488746 - DNA, 15 bp, Homo sapiens
ctttgtctgatatgc

SEQ ID NO: 488747 - DNA, 15 bp, Homo sapiens
actttgtctgatatg

SEQ ID NO: 488748 - DNA, 15 bp, Homo sapiens
tactttgtctgatat

SEQ ID NO: 488749 - DNA, 15 bp, Homo sapiens
ttactttgtctgata

SEQ ID NO: 488750 - DNA, 15 bp, Homo sapiens
cttactttgtctgat

SEQ ID NO: 488751 - DNA, 15 bp, Homo sapiens
acttactttgtctga

SEQ ID NO: 488752 - DNA, 15 bp, Homo sapiens
cacttactttgtctg

SEQ ID NO: 488753 - DNA, 15 bp, Homo sapiens
tcacttactttgtct

SEQ ID NO: 488754 - DNA, 15 bp, Homo sapiens
ttcacttactttgtc

SEQ ID NO: 488755 - DNA, 15 bp, Homo sapiens
tttcacttactttgt

SEQ ID NO: 488756 - DNA, 15 bp, Homo sapiens
atttcacttactttg

SEQ ID NO: 488757 - DNA, 15 bp, Homo sapiens
gatttcacttacttt

SEQ ID NO: 488758 - DNA, 15 bp, Homo sapiens
tgatttcacttactt

SEQ ID NO: 488759 - DNA, 15 bp, Homo sapiens
atgatttcacttact

SEQ ID NO: 488760 - DNA, 15 bp, Homo sapiens
aatgatttcacttac

SEQ ID NO: 488761 - DNA, 15 bp, Homo sapiens
taatgatttcactta

SEQ ID NO: 488762 - DNA, 15 bp, Homo sapiens
ttaatgatttcactt

SEQ ID NO: 488763 - DNA, 15 bp, Homo sapiens
tttaatgatttcact

SEQ ID NO: 488764 - DNA, 15 bp, Homo sapiens
ttttaatgatttcac

SEQ ID NO: 488765 - DNA, 15 bp, Homo sapiens
cttttaatgatttca

SEQ ID NO: 488766 - DNA, 15 bp, Homo sapiens
ccttttaatgatttc

SEQ ID NO: 488767 - DNA, 15 bp, Homo sapiens
accttttaatgattt

SEQ ID NO: 488768 - DNA, 15 bp, Homo sapiens
taccttttaatgatt

SEQ ID NO: 488769 - DNA, 15 bp, Homo sapiens
gtaccttttaatgat

SEQ ID NO: 488770 - DNA, 15 bp, Homo sapiens
agtaccttttaatga

SEQ ID NO: 488771 - DNA, 15 bp, Homo sapiens
aagtaccttttaatg

SEQ ID NO: 488772 - DNA, 15 bp, Homo sapiens
caagtaccttttaat

SEQ ID NO: 488773 - DNA, 15 bp, Homo sapiens
gcaagtaccttttaa

SEQ ID NO: 488774 - DNA, 15 bp, Homo sapiens
cgcaagtacctttta

SEQ ID NO: 488775 - DNA, 15 bp, Homo sapiens
tcgcaagtacctttt

SEQ ID NO: 488776 - DNA, 15 bp, Homo sapiens
ttcgcaagtaccttt

SEQ ID NO: 488777 - DNA, 15 bp, Homo sapiens
tttcgcaagtacctt

SEQ ID NO: 488778 - DNA, 15 bp, Homo sapiens
gtttcgcaagtacct

SEQ ID NO: 488779 - DNA, 15 bp, Homo sapiens
ggtttcgcaagtacc

SEQ ID NO: 488780 - DNA, 15 bp, Homo sapiens
aggtttcgcaagtac

SEQ ID NO: 488781 - DNA, 15 bp, Homo sapiens
aaggtttcgcaagta

SEQ ID NO: 488782 - DNA, 15 bp, Homo sapiens
gaaggtttcgcaagt

SEQ ID NO: 488783 - DNA, 15 bp, Homo sapiens
tgaaggtttcgcaag

SEQ ID NO: 488784 - DNA, 15 bp, Homo sapiens
ttgaaggtttcgcaa

SEQ ID NO: 488785 - DNA, 15 bp, Homo sapiens
gttgaaggtttcgca

SEQ ID NO: 488786 - DNA, 15 bp, Homo sapiens
agttgaaggtttcgc

SEQ ID NO: 488787 - DNA, 15 bp, Homo sapiens
gagttgaaggtttcg

SEQ ID NO: 488788 - DNA, 15 bp, Homo sapiens
agagttgaaggtttc

SEQ ID NO: 488789 - DNA, 15 bp, Homo sapiens
cagagttgaaggttt

SEQ ID NO: 488790 - DNA, 15 bp, Homo sapiens
acagagttgaaggtt

SEQ ID NO: 488791 - DNA, 15 bp, Homo sapiens
gacagagttgaaggt

SEQ ID NO: 488792 - DNA, 15 bp, Homo sapiens
agacagagttgaagg

SEQ ID NO: 488793 - DNA, 15 bp, Homo sapiens
cagacagagttgaag

SEQ ID NO: 488794 - DNA, 15 bp, Homo sapiens
tcagacagagttgaa

SEQ ID NO: 488795 - DNA, 15 bp, Homo sapiens
atcagacagagttga

SEQ ID NO: 488796 - DNA, 15 bp, Homo sapiens
catcagacagagttg

SEQ ID NO: 488797 - DNA, 15 bp, Homo sapiens
acatcagacagagtt

SEQ ID NO: 488798 - DNA, 15 bp, Homo sapiens
cacatcagacagagt

SEQ ID NO: 488799 - DNA, 15 bp, Homo sapiens
ccacatcagacagag

SEQ ID NO: 488800 - DNA, 15 bp, Homo sapiens
tccacatcagacaga

SEQ ID NO: 488801 - DNA, 15 bp, Homo sapiens
ctccacatcagacag

SEQ ID NO: 488802 - DNA, 15 bp, Homo sapiens
tctccacatcagaca

SEQ ID NO: 488803 - DNA, 15 bp, Homo sapiens
gtctccacatcagac

SEQ ID NO: 488804 - DNA, 15 bp, Homo sapiens
tgtctccacatcaga

SEQ ID NO: 488805 - DNA, 15 bp, Homo sapiens
atgtctccacatcag

SEQ ID NO: 488806 - DNA, 15 bp, Homo sapiens
aatgtctccacatca

SEQ ID NO: 488807 - DNA, 15 bp, Homo sapiens
taatgtctccacatc

SEQ ID NO: 488808 - DNA, 15 bp, Homo sapiens
ttaatgtctccacat

SEQ ID NO: 488809 - DNA, 15 bp, Homo sapiens
tttaatgtctccaca

SEQ ID NO: 488810 - DNA, 15 bp, Homo sapiens
atttaatgtctccac

SEQ ID NO: 488811 - DNA, 15 bp, Homo sapiens
tatttaatgtctcca

SEQ ID NO: 488812 - DNA, 15 bp, Homo sapiens
ctatttaatgtctcc

SEQ ID NO: 488813 - DNA, 15 bp, Homo sapiens
tctatttaatgtctc

SEQ ID NO: 488814 - DNA, 15 bp, Homo sapiens
gtctatttaatgtct

SEQ ID NO: 488815 - DNA, 15 bp, Homo sapiens
tgtctatttaatgtc

SEQ ID NO: 488816 - DNA, 15 bp, Homo sapiens
ctgtctatttaatgt

SEQ ID NO: 488817 - DNA, 15 bp, Homo sapiens
gctgtctatttaatg

SEQ ID NO: 488818 - DNA, 15 bp, Homo sapiens
tgctgtctatttaat

SEQ ID NO: 488819 - DNA, 15 bp, Homo sapiens
ttgctgtctatttaa

SEQ ID NO: 488820 - DNA, 15 bp, Homo sapiens
tttgctgtctattta

SEQ ID NO: 488821 - DNA, 15 bp, Homo sapiens
ttttgctgtctattt

SEQ ID NO: 488822 - DNA, 15 bp, Homo sapiens
gttttgctgtctatt

SEQ ID NO: 488823 - DNA, 15 bp, Homo sapiens
agttttgctgtctat

SEQ ID NO: 488824 - DNA, 15 bp, Homo sapiens
tagttttgctgtcta

SEQ ID NO: 488825 - DNA, 15 bp, Homo sapiens
atagttttgctgtct

SEQ ID NO: 488826 - DNA, 15 bp, Homo sapiens
gatagttttgctgtc

SEQ ID NO: 488827 - DNA, 15 bp, Homo sapiens
tgatagttttgctgt

SEQ ID NO: 488828 - DNA, 15 bp, Homo sapiens
ctgatagttttgctg

SEQ ID NO: 488829 - DNA, 15 bp, Homo sapiens
tctgatagttttgct

SEQ ID NO: 488830 - DNA, 15 bp, Homo sapiens
atctgatagttttgc

SEQ ID NO: 488831 - DNA, 15 bp, Homo sapiens
aatctgatagttttg

SEQ ID NO: 488832 - DNA, 15 bp, Homo sapiens
aaatctgatagtttt

SEQ ID NO: 488833 - DNA, 15 bp, Homo sapiens
caaatctgatagttt

SEQ ID NO: 488834 - DNA, 15 bp, Homo sapiens
ccaaatctgatagtt

SEQ ID NO: 488835 - DNA, 15 bp, Homo sapiens
tccaaatctgatagt

SEQ ID NO: 488836 - DNA, 15 bp, Homo sapiens
gtccaaatctgatag

SEQ ID NO: 488837 - DNA, 15 bp, Homo sapiens
agtccaaatctgata

SEQ ID NO: 488838 - DNA, 15 bp, Homo sapiens
cagtccaaatctgat

SEQ ID NO: 488839 - DNA, 15 bp, Homo sapiens
acagtccaaatctga

SEQ ID NO: 488840 - DNA, 15 bp, Homo sapiens
cacagtccaaatctg

SEQ ID NO: 488841 - DNA, 15 bp, Homo sapiens
ccacagtccaaatct

SEQ ID NO: 488842 - DNA, 15 bp, Homo sapiens
tccacagtccaaatc

SEQ ID NO: 488843 - DNA, 15 bp, Homo sapiens
atccacagtccaaat

SEQ ID NO: 488844 - DNA, 15 bp, Homo sapiens
aatccacagtccaaa

SEQ ID NO: 488845 - DNA, 15 bp, Homo sapiens
aaatccacagtccaa

SEQ ID NO: 488846 - DNA, 15 bp, Homo sapiens
aaaatccacagtcca

SEQ ID NO: 488847 - DNA, 15 bp, Homo sapiens
aaaaatccacagtcc

SEQ ID NO: 488848 - DNA, 15 bp, Homo sapiens
taaaaatccacagtc

SEQ ID NO: 488849 - DNA, 15 bp, Homo sapiens
ttaaaaatccacagt

SEQ ID NO: 488850 - DNA, 15 bp, Homo sapiens
tttaaaaatccacag

SEQ ID NO: 488851 - DNA, 15 bp, Homo sapiens
ttttaaaaatccaca

SEQ ID NO: 488852 - DNA, 15 bp, Homo sapiens
attttaaaaatccac

SEQ ID NO: 488853 - DNA, 15 bp, Homo sapiens
aattttaaaaatcca

SEQ ID NO: 488854 - DNA, 15 bp, Homo sapiens
gaattttaaaaatcc

SEQ ID NO: 488855 - DNA, 15 bp, Homo sapiens
agaattttaaaaatc

SEQ ID NO: 488856 - DNA, 15 bp, Homo sapiens
cagaattttaaaaat

SEQ ID NO: 488857 - DNA, 15 bp, Homo sapiens
acagaattttaaaaa

SEQ ID NO: 488858 - DNA, 15 bp, Homo sapiens
aacagaattttaaaa

SEQ ID NO: 488859 - DNA, 15 bp, Homo sapiens
gaacagaattttaaa

SEQ ID NO: 488860 - DNA, 15 bp, Homo sapiens
agaacagaattttaa

SEQ ID NO: 488861 - DNA, 15 bp, Homo sapiens
aagaacagaatttta

SEQ ID NO: 488862 - DNA, 15 bp, Homo sapiens
caagaacagaatttt

SEQ ID NO: 488863 - DNA, 15 bp, Homo sapiens
acaagaacagaattt

SEQ ID NO: 488864 - DNA, 15 bp, Homo sapiens
tacaagaacagaatt

SEQ ID NO: 488865 - DNA, 15 bp, Homo sapiens
ttacaagaacagaat

SEQ ID NO: 488866 - DNA, 15 bp, Homo sapiens
attacaagaacagaa

SEQ ID NO: 488867 - DNA, 15 bp, Homo sapiens
tattacaagaacaga

SEQ ID NO: 488868 - DNA, 15 bp, Homo sapiens
ttattacaagaacag

SEQ ID NO: 488869 - DNA, 15 bp, Homo sapiens
attattacaagaaca

SEQ ID NO: 488870 - DNA, 15 bp, Homo sapiens
cattattacaagaac

SEQ ID NO: 488871 - DNA, 15 bp, Homo sapiens
tcattattacaagaa

SEQ ID NO: 488872 - DNA, 15 bp, Homo sapiens
ttcattattacaaga

SEQ ID NO: 488873 - DNA, 15 bp, Homo sapiens
gttcattattacaag

SEQ ID NO: 488874 - DNA, 15 bp, Homo sapiens
tgttcattattacaa

SEQ ID NO: 488875 - DNA, 15 bp, Homo sapiens
ttgttcattattaca

SEQ ID NO: 488876 - DNA, 15 bp, Homo sapiens
gttgttcattattac

SEQ ID NO: 488877 - DNA, 15 bp, Homo sapiens
ggttgttcattatta

SEQ ID NO: 488878 - DNA, 15 bp, Homo sapiens
gggttgttcattatt

SEQ ID NO: 488879 - DNA, 15 bp, Homo sapiens
agggttgttcattat

SEQ ID NO: 488880 - DNA, 15 bp, Homo sapiens
tagggttgttcatta

SEQ ID NO: 488881 - DNA, 15 bp, Homo sapiens
atagggttgttcatt

SEQ ID NO: 488882 - DNA, 15 bp, Homo sapiens
aatagggttgttcat

SEQ ID NO: 488883 - DNA, 15 bp, Homo sapiens
aaatagggttgttca

SEQ ID NO: 488884 - DNA, 15 bp, Homo sapiens
aaaatagggttgttc

SEQ ID NO: 488885 - DNA, 15 bp, Homo sapiens
caaaatagggttgtt

SEQ ID NO: 488886 - DNA, 15 bp, Homo sapiens
tcaaaatagggttgt

SEQ ID NO: 488887 - DNA, 15 bp, Homo sapiens
ttcaaaatagggttg

SEQ ID NO: 488888 - DNA, 15 bp, Homo sapiens
tttcaaaatagggtt

SEQ ID NO: 488889 - DNA, 15 bp, Homo sapiens
ctttcaaaatagggt

SEQ ID NO: 488890 - DNA, 15 bp, Homo sapiens
actttcaaaataggg

SEQ ID NO: 488891 - DNA, 15 bp, Homo sapiens
aactttcaaaatagg

SEQ ID NO: 488892 - DNA, 15 bp, Homo sapiens
aaactttcaaaatag

SEQ ID NO: 488893 - DNA, 15 bp, Homo sapiens
aaaactttcaaaata

SEQ ID NO: 488894 - DNA, 15 bp, Homo sapiens
gaaaactttcaaaat

SEQ ID NO: 488895 - DNA, 15 bp, Homo sapiens
tgaaaactttcaaaa

SEQ ID NO: 488896 - DNA, 15 bp, Homo sapiens
ttgaaaactttcaaa

SEQ ID NO: 488897 - DNA, 15 bp, Homo sapiens
cttgaaaactttcaa

SEQ ID NO: 488898 - DNA, 15 bp, Homo sapiens
acttgaaaactttca

SEQ ID NO: 488899 - DNA, 15 bp, Homo sapiens
cacttgaaaactttc

SEQ ID NO: 488900 - DNA, 15 bp, Homo sapiens
acacttgaaaacttt

SEQ ID NO: 488901 - DNA, 15 bp, Homo sapiens
aacacttgaaaactt

SEQ ID NO: 488902 - DNA, 15 bp, Homo sapiens
taacacttgaaaact

SEQ ID NO: 488903 - DNA, 15 bp, Homo sapiens
ataacacttgaaaac

SEQ ID NO: 488904 - DNA, 15 bp, Homo sapiens
aataacacttgaaaa

SEQ ID NO: 488905 - DNA, 15 bp, Homo sapiens
aaataacacttgaaa

SEQ ID NO: 488906 - DNA, 15 bp, Homo sapiens
aaaataacacttgaa

SEQ ID NO: 488907 - DNA, 15 bp, Homo sapiens
gaaaataacacttga

SEQ ID NO: 488908 - DNA, 15 bp, Homo sapiens
ggaaaataacacttg

SEQ ID NO: 488909 - DNA, 15 bp, Homo sapiens
tggaaaataacactt

SEQ ID NO: 488910 - DNA, 15 bp, Homo sapiens
atggaaaataacact

SEQ ID NO: 488911 - DNA, 15 bp, Homo sapiens
aatggaaaataacac

SEQ ID NO: 488912 - DNA, 15 bp, Homo sapiens
caatggaaaataaca

SEQ ID NO: 488913 - DNA, 15 bp, Homo sapiens
acaatggaaaataac

SEQ ID NO: 488914 - DNA, 15 bp, Homo sapiens
aacaatggaaaataa

SEQ ID NO: 488915 - DNA, 15 bp, Homo sapiens
gaacaatggaaaata

SEQ ID NO: 488916 - DNA, 15 bp, Homo sapiens
ggaacaatggaaaat

SEQ ID NO: 488917 - DNA, 15 bp, Homo sapiens
tggaacaatggaaaa

SEQ ID NO: 488918 - DNA, 15 bp, Homo sapiens
gtggaacaatggaaa

SEQ ID NO: 488919 - DNA, 15 bp, Homo sapiens
agtggaacaatggaa

SEQ ID NO: 488920 - DNA, 15 bp, Homo sapiens
aagtggaacaatgga

SEQ ID NO: 488921 - DNA, 15 bp, Homo sapiens
aaagtggaacaatgg

SEQ ID NO: 488922 - DNA, 15 bp, Homo sapiens
aaaagtggaacaatg

SEQ ID NO: 488923 - DNA, 15 bp, Homo sapiens
taaaagtggaacaat

SEQ ID NO: 488924 - DNA, 15 bp, Homo sapiens
ataaaagtggaacaa

SEQ ID NO: 488925 - DNA, 15 bp, Homo sapiens
gataaaagtggaaca

SEQ ID NO: 488926 - DNA, 15 bp, Homo sapiens
tgataaaagtggaac

SEQ ID NO: 488927 - DNA, 15 bp, Homo sapiens
ttgataaaagtggaa

SEQ ID NO: 488928 - DNA, 15 bp, Homo sapiens
tttgataaaagtgga

SEQ ID NO: 488929 - DNA, 15 bp, Homo sapiens
atttgataaaagtgg

SEQ ID NO: 488930 - DNA, 15 bp, Homo sapiens
catttgataaaagtg

SEQ ID NO: 488931 - DNA, 15 bp, Homo sapiens
tcatttgataaaagt

SEQ ID NO: 488932 - DNA, 15 bp, Homo sapiens
atcatttgataaaag

SEQ ID NO: 488933 - DNA, 15 bp, Homo sapiens
tatcatttgataaaa

SEQ ID NO: 488934 - DNA, 15 bp, Homo sapiens
gtatcatttgataaa

SEQ ID NO: 488935 - DNA, 15 bp, Homo sapiens
agtatcatttgataa

SEQ ID NO: 488936 - DNA, 15 bp, Homo sapiens
gagtatcatttgata

SEQ ID NO: 488937 - DNA, 15 bp, Homo sapiens
tgagtatcatttgat

SEQ ID NO: 488938 - DNA, 15 bp, Homo sapiens
gtgagtatcatttga

SEQ ID NO: 488939 - DNA, 15 bp, Homo sapiens
tgtgagtatcatttg

SEQ ID NO: 488940 - DNA, 15 bp, Homo sapiens
atgtgagtatcattt

SEQ ID NO: 488941 - DNA, 15 bp, Homo sapiens
aatgtgagtatcatt

SEQ ID NO: 488942 - DNA, 15 bp, Homo sapiens
aaatgtgagtatcat

SEQ ID NO: 488943 - DNA, 15 bp, Homo sapiens
taaatgtgagtatca

SEQ ID NO: 488944 - DNA, 15 bp, Homo sapiens
ataaatgtgagtatc

SEQ ID NO: 488945 - DNA, 15 bp, Homo sapiens
cataaatgtgagtat

SEQ ID NO: 488946 - DNA, 15 bp, Homo sapiens
ccataaatgtgagta

SEQ ID NO: 488947 - DNA, 15 bp, Homo sapiens
cccataaatgtgagt

SEQ ID NO: 488948 - DNA, 15 bp, Homo sapiens
acccataaatgtgag

SEQ ID NO: 488949 - DNA, 15 bp, Homo sapiens
tacccataaatgtga

SEQ ID NO: 488950 - DNA, 15 bp, Homo sapiens
ttacccataaatgtg

SEQ ID NO: 488951 - DNA, 15 bp, Homo sapiens
tttacccataaatgt

SEQ ID NO: 488952 - DNA, 15 bp, Homo sapiens
atttacccataaatg

SEQ ID NO: 488953 - DNA, 15 bp, Homo sapiens
aatttacccataaat

SEQ ID NO: 488954 - DNA, 15 bp, Homo sapiens
caatttacccataaa

SEQ ID NO: 488955 - DNA, 15 bp, Homo sapiens
ccaatttacccataa

SEQ ID NO: 488956 - DNA, 15 bp, Homo sapiens
accaatttacccata

SEQ ID NO: 488957 - DNA, 15 bp, Homo sapiens
aaccaatttacccat

SEQ ID NO: 488958 - DNA, 15 bp, Homo sapiens
caaccaatttaccca

SEQ ID NO: 488959 - DNA, 15 bp, Homo sapiens
tcaaccaatttaccc

SEQ ID NO: 488960 - DNA, 15 bp, Homo sapiens
atcaaccaatttacc

SEQ ID NO: 488961 - DNA, 15 bp, Homo sapiens
catcaaccaatttac

SEQ ID NO: 488962 - DNA, 15 bp, Homo sapiens
gcatcaaccaattta

SEQ ID NO: 488963 - DNA, 15 bp, Homo sapiens
agcatcaaccaattt

SEQ ID NO: 488964 - DNA, 15 bp, Homo sapiens
aagcatcaaccaatt

SEQ ID NO: 488965 - DNA, 15 bp, Homo sapiens
aaagcatcaaccaat

SEQ ID NO: 488966 - DNA, 15 bp, Homo sapiens
gaaagcatcaaccaa

SEQ ID NO: 488967 - DNA, 15 bp, Homo sapiens
ggaaagcatcaacca

SEQ ID NO: 488968 - DNA, 15 bp, Homo sapiens
aggaaagcatcaacc

SEQ ID NO: 488969 - DNA, 15 bp, Homo sapiens
aaggaaagcatcaac

SEQ ID NO: 488970 - DNA, 15 bp, Homo sapiens
gaaggaaagcatcaa

SEQ ID NO: 488971 - DNA, 15 bp, Homo sapiens
ggaaggaaagcatca

SEQ ID NO: 488972 - DNA, 15 bp, Homo sapiens
aggaaggaaagcatc

SEQ ID NO: 488973 - DNA, 15 bp, Homo sapiens
aaggaaggaaagcat

SEQ ID NO: 488974 - DNA, 15 bp, Homo sapiens
taaggaaggaaagca

SEQ ID NO: 488975 - DNA, 15 bp, Homo sapiens
ttaaggaaggaaagc

SEQ ID NO: 488976 - DNA, 15 bp, Homo sapiens
tttaaggaaggaaag

SEQ ID NO: 488977 - DNA, 15 bp, Homo sapiens
ctttaaggaaggaaa

SEQ ID NO: 488978 - DNA, 15 bp, Homo sapiens
cctttaaggaaggaa

SEQ ID NO: 488979 - DNA, 15 bp, Homo sapiens
tcctttaaggaagga

SEQ ID NO: 488980 - DNA, 15 bp, Homo sapiens
ctcctttaaggaagg

SEQ ID NO: 488981 - DNA, 15 bp, Homo sapiens
cctcctttaaggaag

SEQ ID NO: 488982 - DNA, 15 bp, Homo sapiens
gcctcctttaaggaa

SEQ ID NO: 488983 - DNA, 15 bp, Homo sapiens
agcctcctttaagga

SEQ ID NO: 488984 - DNA, 15 bp, Homo sapiens
cagcctcctttaagg

SEQ ID NO: 488985 - DNA, 15 bp, Homo sapiens
acagcctcctttaag

SEQ ID NO: 488986 - DNA, 15 bp, Homo sapiens
tacagcctcctttaa

SEQ ID NO: 488987 - DNA, 15 bp, Homo sapiens
ttacagcctccttta

SEQ ID NO: 488988 - DNA, 15 bp, Homo sapiens
attacagcctccttt

SEQ ID NO: 488989 - DNA, 15 bp, Homo sapiens
gattacagcctcctt

SEQ ID NO: 488990 - DNA, 15 bp, Homo sapiens
tgattacagcctcct

SEQ ID NO: 488991 - DNA, 15 bp, Homo sapiens
atgattacagcctcc

SEQ ID NO: 488992 - DNA, 15 bp, Homo sapiens
aatgattacagcctc

SEQ ID NO: 488993 - DNA, 15 bp, Homo sapiens
caatgattacagcct

SEQ ID NO: 488994 - DNA, 15 bp, Homo sapiens
tcaatgattacagcc

SEQ ID NO: 488995 - DNA, 15 bp, Homo sapiens
atcaatgattacagc

SEQ ID NO: 488996 - DNA, 15 bp, Homo sapiens
tatcaatgattacag

SEQ ID NO: 488997 - DNA, 15 bp, Homo sapiens
ttatcaatgattaca

SEQ ID NO: 488998 - DNA, 15 bp, Homo sapiens
gttatcaatgattac

SEQ ID NO: 488999 - DNA, 15 bp, Homo sapiens
agttatcaatgatta

SEQ ID NO: 489000 - DNA, 15 bp, Homo sapiens
aagttatcaatgatt

SEQ ID NO: 489001 - DNA, 15 bp, Homo sapiens
taagttatcaatgat

SEQ ID NO: 489002 - DNA, 15 bp, Homo sapiens
ctaagttatcaatga

SEQ ID NO: 489003 - DNA, 15 bp, Homo sapiens
actaagttatcaatg

SEQ ID NO: 489004 - DNA, 15 bp, Homo sapiens
tactaagttatcaat

SEQ ID NO: 489005 - DNA, 15 bp, Homo sapiens
atactaagttatcaa

SEQ ID NO: 489006 - DNA, 15 bp, Homo sapiens
tatactaagttatca

SEQ ID NO: 489007 - DNA, 15 bp, Homo sapiens
atatactaagttatc

SEQ ID NO: 489008 - DNA, 15 bp, Homo sapiens
aatatactaagttat

SEQ ID NO: 489009 - DNA, 15 bp, Homo sapiens
aaatatactaagtta

SEQ ID NO: 489010 - DNA, 15 bp, Homo sapiens
caaatatactaagtt

SEQ ID NO: 489011 - DNA, 15 bp, Homo sapiens
tcaaatatactaagt

SEQ ID NO: 489012 - DNA, 15 bp, Homo sapiens
gtcaaatatactaag

SEQ ID NO: 489013 - DNA, 15 bp, Homo sapiens
ggtcaaatatactaa

SEQ ID NO: 489014 - DNA, 15 bp, Homo sapiens
aggtcaaatatacta

SEQ ID NO: 489015 - DNA, 15 bp, Homo sapiens
caggtcaaatatact

SEQ ID NO: 489016 - DNA, 15 bp, Homo sapiens
acaggtcaaatatac

SEQ ID NO: 489017 - DNA, 15 bp, Homo sapiens
aacaggtcaaatata

SEQ ID NO: 489018 - DNA, 15 bp, Homo sapiens
aaacaggtcaaatat

SEQ ID NO: 489019 - DNA, 15 bp, Homo sapiens
taaacaggtcaaata

SEQ ID NO: 489020 - DNA, 15 bp, Homo sapiens
ataaacaggtcaaat

SEQ ID NO: 489021 - DNA, 15 bp, Homo sapiens
tataaacaggtcaaa

SEQ ID NO: 489022 - DNA, 15 bp, Homo sapiens
ttataaacaggtcaa

SEQ ID NO: 489023 - DNA, 15 bp, Homo sapiens
attataaacaggtca

SEQ ID NO: 489024 - DNA, 15 bp, Homo sapiens
gattataaacaggtc

SEQ ID NO: 489025 - DNA, 15 bp, Homo sapiens
tgattataaacaggt

SEQ ID NO: 489026 - DNA, 15 bp, Homo sapiens
ttgattataaacagg

SEQ ID NO: 489027 - DNA, 15 bp, Homo sapiens
tttgattataaacag

SEQ ID NO: 489028 - DNA, 15 bp, Homo sapiens
atttgattataaaca

SEQ ID NO: 489029 - DNA, 15 bp, Homo sapiens
aatttgattataaac

SEQ ID NO: 489030 - DNA, 15 bp, Homo sapiens
gaatttgattataaa

SEQ ID NO: 489031 - DNA, 15 bp, Homo sapiens
ggaatttgattataa

SEQ ID NO: 489032 - DNA, 15 bp, Homo sapiens
tggaatttgattata

SEQ ID NO: 489033 - DNA, 15 bp, Homo sapiens
atggaatttgattat

SEQ ID NO: 489034 - DNA, 15 bp, Homo sapiens
aatggaatttgatta

SEQ ID NO: 489035 - DNA, 15 bp, Homo sapiens
aaatggaatttgatt

SEQ ID NO: 489036 - DNA, 15 bp, Homo sapiens
aaaatggaatttgat

SEQ ID NO: 489037 - DNA, 15 bp, Homo sapiens
taaaatggaatttga

SEQ ID NO: 489038 - DNA, 15 bp, Homo sapiens
ttaaaatggaatttg

SEQ ID NO: 489039 - DNA, 15 bp, Homo sapiens
cttaaaatggaattt

SEQ ID NO: 489040 - DNA, 15 bp, Homo sapiens
tcttaaaatggaatt

SEQ ID NO: 489041 - DNA, 15 bp, Homo sapiens
gtcttaaaatggaat

SEQ ID NO: 489042 - DNA, 15 bp, Homo sapiens
agtcttaaaatggaa

SEQ ID NO: 489043 - DNA, 15 bp, Homo sapiens
cagtcttaaaatgga

SEQ ID NO: 489044 - DNA, 15 bp, Homo sapiens
acagtcttaaaatgg

SEQ ID NO: 489045 - DNA, 15 bp, Homo sapiens
cacagtcttaaaatg

SEQ ID NO: 489046 - DNA, 15 bp, Homo sapiens
gcacagtcttaaaat

SEQ ID NO: 489047 - DNA, 15 bp, Homo sapiens
ggcacagtcttaaaa

SEQ ID NO: 489048 - DNA, 15 bp, Homo sapiens
aggcacagtcttaaa

SEQ ID NO: 489049 - DNA, 15 bp, Homo sapiens
gaggcacagtcttaa

SEQ ID NO: 489050 - DNA, 15 bp, Homo sapiens
agaggcacagtctta

SEQ ID NO: 489051 - DNA, 15 bp, Homo sapiens
cagaggcacagtctt

SEQ ID NO: 489052 - DNA, 15 bp, Homo sapiens
ccagaggcacagtct

SEQ ID NO: 489053 - DNA, 15 bp, Homo sapiens
accagaggcacagtc

SEQ ID NO: 489054 - DNA, 15 bp, Homo sapiens
caccagaggcacagt

SEQ ID NO: 489055 - DNA, 15 bp, Homo sapiens
tcaccagaggcacag

SEQ ID NO: 489056 - DNA, 15 bp, Homo sapiens
ctcaccagaggcaca

SEQ ID NO: 489057 - DNA, 15 bp, Homo sapiens
actcaccagaggcac

SEQ ID NO: 489058 - DNA, 15 bp, Homo sapiens
aactcaccagaggca

SEQ ID NO: 489059 - DNA, 15 bp, Homo sapiens
caactcaccagaggc

SEQ ID NO: 489060 - DNA, 15 bp, Homo sapiens
tcaactcaccagagg

SEQ ID NO: 489061 - DNA, 15 bp, Homo sapiens
ttcaactcaccagag

SEQ ID NO: 489062 - DNA, 15 bp, Homo sapiens
tttcaactcaccaga

SEQ ID NO: 489063 - DNA, 15 bp, Homo sapiens
ttttcaactcaccag

SEQ ID NO: 489064 - DNA, 15 bp, Homo sapiens
attttcaactcacca

SEQ ID NO: 489065 - DNA, 15 bp, Homo sapiens
tattttcaactcacc

SEQ ID NO: 489066 - DNA, 15 bp, Homo sapiens
ttattttcaactcac

SEQ ID NO: 489067 - DNA, 15 bp, Homo sapiens
gttattttcaactca

SEQ ID NO: 489068 - DNA, 15 bp, Homo sapiens
ggttattttcaactc

SEQ ID NO: 489069 - DNA, 15 bp, Homo sapiens
gggttattttcaact

SEQ ID NO: 489070 - DNA, 15 bp, Homo sapiens
agggttattttcaac

SEQ ID NO: 489071 - DNA, 15 bp, Homo sapiens
aagggttattttcaa

SEQ ID NO: 489072 - DNA, 15 bp, Homo sapiens
gaagggttattttca

SEQ ID NO: 489073 - DNA, 15 bp, Homo sapiens
tgaagggttattttc

SEQ ID NO: 489074 - DNA, 15 bp, Homo sapiens
gtgaagggttatttt

SEQ ID NO: 489075 - DNA, 15 bp, Homo sapiens
ggtgaagggttattt

SEQ ID NO: 489076 - DNA, 15 bp, Homo sapiens
aggtgaagggttatt

SEQ ID NO: 489077 - DNA, 15 bp, Homo sapiens
gaggtgaagggttat

SEQ ID NO: 489078 - DNA, 15 bp, Homo sapiens
tgaggtgaagggtta

SEQ ID NO: 489079 - DNA, 15 bp, Homo sapiens
atgaggtgaagggtt

SEQ ID NO: 489080 - DNA, 15 bp, Homo sapiens
aatgaggtgaagggt

SEQ ID NO: 489081 - DNA, 15 bp, Homo sapiens
aaatgaggtgaaggg

SEQ ID NO: 489082 - DNA, 15 bp, Homo sapiens
caaatgaggtgaagg

SEQ ID NO: 489083 - DNA, 15 bp, Homo sapiens
gcaaatgaggtgaag

SEQ ID NO: 489084 - DNA, 15 bp, Homo sapiens
ggcaaatgaggtgaa

SEQ ID NO: 489085 - DNA, 15 bp, Homo sapiens
gggcaaatgaggtga

SEQ ID NO: 489086 - DNA, 15 bp, Homo sapiens
agggcaaatgaggtg

SEQ ID NO: 489087 - DNA, 15 bp, Homo sapiens
cagggcaaatgaggt

SEQ ID NO: 489088 - DNA, 15 bp, Homo sapiens
ccagggcaaatgagg

SEQ ID NO: 489089 - DNA, 15 bp, Homo sapiens
tccagggcaaatgag

SEQ ID NO: 489090 - DNA, 15 bp, Homo sapiens
atccagggcaaatga

SEQ ID NO: 489091 - DNA, 15 bp, Homo sapiens
catccagggcaaatg

SEQ ID NO: 489092 - DNA, 15 bp, Homo sapiens
acatccagggcaaat

SEQ ID NO: 489093 - DNA, 15 bp, Homo sapiens
aacatccagggcaaa

SEQ ID NO: 489094 - DNA, 15 bp, Homo sapiens
caacatccagggcaa

SEQ ID NO: 489095 - DNA, 15 bp, Homo sapiens
acaacatccagggca

SEQ ID NO: 489096 - DNA, 15 bp, Homo sapiens
tacaacatccagggc

SEQ ID NO: 489097 - DNA, 15 bp, Homo sapiens
atacaacatccaggg

SEQ ID NO: 489098 - DNA, 15 bp, Homo sapiens
aatacaacatccagg

SEQ ID NO: 489099 - DNA, 15 bp, Homo sapiens
aaatacaacatccag

SEQ ID NO: 489100 - DNA, 15 bp, Homo sapiens
taaatacaacatcca

SEQ ID NO: 489101 - DNA, 15 bp, Homo sapiens
ataaatacaacatcc

SEQ ID NO: 489102 - DNA, 15 bp, Homo sapiens
aataaatacaacatc

SEQ ID NO: 489103 - DNA, 15 bp, Homo sapiens
aaataaatacaacat

SEQ ID NO: 489104 - DNA, 15 bp, Homo sapiens
taaataaatacaaca

SEQ ID NO: 489105 - DNA, 15 bp, Homo sapiens
ttaaataaatacaac

SEQ ID NO: 489106 - DNA, 15 bp, Homo sapiens
tttaaataaatacaa

SEQ ID NO: 489107 - DNA, 15 bp, Homo sapiens
ttttaaataaataca

SEQ ID NO: 489108 - DNA, 15 bp, Homo sapiens
attttaaataaatac

SEQ ID NO: 489109 - DNA, 15 bp, Homo sapiens
tattttaaataaata

SEQ ID NO: 489110 - DNA, 15 bp, Homo sapiens
ttattttaaataaat

SEQ ID NO: 489111 - DNA, 15 bp, Homo sapiens
tttattttaaataaa

SEQ ID NO: 489112 - DNA, 15 bp, Homo sapiens
atttattttaaataa

SEQ ID NO: 489113 - DNA, 15 bp, Homo sapiens
tatttattttaaata

SEQ ID NO: 489114 - DNA, 15 bp, Homo sapiens
gtatttattttaaat

SEQ ID NO: 489115 - DNA, 15 bp, Homo sapiens
agtatttattttaaa

SEQ ID NO: 489116 - DNA, 15 bp, Homo sapiens
cagtatttattttaa

SEQ ID NO: 489117 - DNA, 15 bp, Homo sapiens
gcagtatttatttta

SEQ ID NO: 489118 - DNA, 15 bp, Homo sapiens
ggcagtatttatttt

SEQ ID NO: 489119 - DNA, 15 bp, Homo sapiens
gggcagtatttattt

SEQ ID NO: 489120 - DNA, 15 bp, Homo sapiens
tgggcagtatttatt

SEQ ID NO: 489121 - DNA, 15 bp, Homo sapiens
atgggcagtatttat

SEQ ID NO: 489122 - DNA, 15 bp, Homo sapiens
tatgggcagtattta

SEQ ID NO: 489123 - DNA, 15 bp, Homo sapiens
atatgggcagtattt

SEQ ID NO: 489124 - DNA, 15 bp, Homo sapiens
aatatgggcagtatt

SEQ ID NO: 489125 - DNA, 15 bp, Homo sapiens
gaatatgggcagtat

SEQ ID NO: 489126 - DNA, 15 bp, Homo sapiens
agaatatgggcagta

SEQ ID NO: 489127 - DNA, 15 bp, Homo sapiens
tagaatatgggcagt

SEQ ID NO: 489128 - DNA, 15 bp, Homo sapiens
atagaatatgggcag

SEQ ID NO: 489129 - DNA, 15 bp, Homo sapiens
gatagaatatgggca

SEQ ID NO: 489130 - DNA, 15 bp, Homo sapiens
ggatagaatatgggc

SEQ ID NO: 489131 - DNA, 15 bp, Homo sapiens
tggatagaatatggg

SEQ ID NO: 489132 - DNA, 15 bp, Homo sapiens
atggatagaatatgg

SEQ ID NO: 489133 - DNA, 15 bp, Homo sapiens
aatggatagaatatg

SEQ ID NO: 489134 - DNA, 15 bp, Homo sapiens
gaatggatagaatat

SEQ ID NO: 489135 - DNA, 15 bp, Homo sapiens
ggaatggatagaata

SEQ ID NO: 489136 - DNA, 15 bp, Homo sapiens
aggaatggatagaat

SEQ ID NO: 489137 - DNA, 15 bp, Homo sapiens
caggaatggatagaa

SEQ ID NO: 489138 - DNA, 15 bp, Homo sapiens
gcaggaatggataga

SEQ ID NO: 489139 - DNA, 15 bp, Homo sapiens
tgcaggaatggatag

SEQ ID NO: 489140 - DNA, 15 bp, Homo sapiens
ctgcaggaatggata

SEQ ID NO: 489141 - DNA, 15 bp, Homo sapiens
actgcaggaatggat

SEQ ID NO: 489142 - DNA, 15 bp, Homo sapiens
cactgcaggaatgga

SEQ ID NO: 489143 - DNA, 15 bp, Homo sapiens
ccactgcaggaatgg

SEQ ID NO: 489144 - DNA, 15 bp, Homo sapiens
tccactgcaggaatg

SEQ ID NO: 489145 - DNA, 15 bp, Homo sapiens
ttccactgcaggaat

SEQ ID NO: 489146 - DNA, 15 bp, Homo sapiens
tttccactgcaggaa

SEQ ID NO: 489147 - DNA, 15 bp, Homo sapiens
ttttccactgcagga

SEQ ID NO: 489148 - DNA, 15 bp, Homo sapiens
attttccactgcagg

SEQ ID NO: 489149 - DNA, 15 bp, Homo sapiens
aattttccactgcag

SEQ ID NO: 489150 - DNA, 15 bp, Homo sapiens
taattttccactgca

SEQ ID NO: 489151 - DNA, 15 bp, Homo sapiens
ttaattttccactgc

SEQ ID NO: 489152 - DNA, 15 bp, Homo sapiens
gttaattttccactg

SEQ ID NO: 489153 - DNA, 15 bp, Homo sapiens
agttaattttccact

SEQ ID NO: 489154 - DNA, 15 bp, Homo sapiens
tagttaattttccac

SEQ ID NO: 489155 - DNA, 15 bp, Homo sapiens
atagttaattttcca

SEQ ID NO: 489156 - DNA, 15 bp, Homo sapiens
aatagttaattttcc

SEQ ID NO: 489157 - DNA, 15 bp, Homo sapiens
caatagttaattttc

SEQ ID NO: 489158 - DNA, 15 bp, Homo sapiens
tcaatagttaatttt

SEQ ID NO: 489159 - DNA, 15 bp, Homo sapiens
atcaatagttaattt

SEQ ID NO: 489160 - DNA, 15 bp, Homo sapiens
tatcaatagttaatt

SEQ ID NO: 489161 - DNA, 15 bp, Homo sapiens
ttatcaatagttaat

SEQ ID NO: 489162 - DNA, 15 bp, Homo sapiens
tttatcaatagttaa

SEQ ID NO: 489163 - DNA, 15 bp, Homo sapiens
ctttatcaatagtta

SEQ ID NO: 489164 - DNA, 15 bp, Homo sapiens
gctttatcaatagtt

SEQ ID NO: 489165 - DNA, 15 bp, Homo sapiens
agctttatcaatagt

SEQ ID NO: 489166 - DNA, 15 bp, Homo sapiens
tagctttatcaatag

SEQ ID NO: 489167 - DNA, 15 bp, Homo sapiens
atagctttatcaata

SEQ ID NO: 489168 - DNA, 15 bp, Homo sapiens
aatagctttatcaat

SEQ ID NO: 489169 - DNA, 15 bp, Homo sapiens
aaatagctttatcaa

SEQ ID NO: 489170 - DNA, 15 bp, Homo sapiens
caaatagctttatca

SEQ ID NO: 489171 - DNA, 15 bp, Homo sapiens
ccaaatagctttatc

SEQ ID NO: 489172 - DNA, 15 bp, Homo sapiens
accaaatagctttat

SEQ ID NO: 489173 - DNA, 15 bp, Homo sapiens
caccaaatagcttta

SEQ ID NO: 489174 - DNA, 15 bp, Homo sapiens
tcaccaaatagcttt

SEQ ID NO: 489175 - DNA, 15 bp, Homo sapiens
atcaccaaatagctt

SEQ ID NO: 489176 - DNA, 15 bp, Homo sapiens
tatcaccaaatagct

SEQ ID NO: 489177 - DNA, 15 bp, Homo sapiens
gtatcaccaaatagc

SEQ ID NO: 489178 - DNA, 15 bp, Homo sapiens
tgtatcaccaaatag

SEQ ID NO: 489179 - DNA, 15 bp, Homo sapiens
atgtatcaccaaata

SEQ ID NO: 489180 - DNA, 15 bp, Homo sapiens
aatgtatcaccaaat

SEQ ID NO: 489181 - DNA, 15 bp, Homo sapiens
aaatgtatcaccaaa

SEQ ID NO: 489182 - DNA, 15 bp, Homo sapiens
taaatgtatcaccaa

SEQ ID NO: 489183 - DNA, 15 bp, Homo sapiens
ttaaatgtatcacca

SEQ ID NO: 489184 - DNA, 15 bp, Homo sapiens
attaaatgtatcacc

SEQ ID NO: 489185 - DNA, 15 bp, Homo sapiens
aattaaatgtatcac

SEQ ID NO: 489186 - DNA, 15 bp, Homo sapiens
aaattaaatgtatca

SEQ ID NO: 489187 - DNA, 15 bp, Homo sapiens
aaaattaaatgtatc

SEQ ID NO: 489188 - DNA, 15 bp, Homo sapiens
aaaaattaaatgtat

SEQ ID NO: 489189 - DNA, 15 bp, Homo sapiens
gaaaaattaaatgta

SEQ ID NO: 489190 - DNA, 15 bp, Homo sapiens
agaaaaattaaatgt

SEQ ID NO: 489191 - DNA, 15 bp, Homo sapiens
gagaaaaattaaatg

SEQ ID NO: 489192 - DNA, 15 bp, Homo sapiens
tgagaaaaattaaat

SEQ ID NO: 489193 - DNA, 15 bp, Homo sapiens
ctgagaaaaattaaa

SEQ ID NO: 489194 - DNA, 15 bp, Homo sapiens
gctgagaaaaattaa

SEQ ID NO: 489195 - DNA, 15 bp, Homo sapiens
tgctgagaaaaatta

SEQ ID NO: 489196 - DNA, 15 bp, Homo sapiens
ctgctgagaaaaatt

SEQ ID NO: 489197 - DNA, 15 bp, Homo sapiens
cctgctgagaaaaat

SEQ ID NO: 489198 - DNA, 15 bp, Homo sapiens
acctgctgagaaaaa

SEQ ID NO: 489199 - DNA, 15 bp, Homo sapiens
cacctgctgagaaaa

SEQ ID NO: 489200 - DNA, 15 bp, Homo sapiens
acacctgctgagaaa

SEQ ID NO: 489201 - DNA, 15 bp, Homo sapiens
aacacctgctgagaa

SEQ ID NO: 489202 - DNA, 15 bp, Homo sapiens
aaacacctgctgaga

SEQ ID NO: 489203 - DNA, 15 bp, Homo sapiens
taaacacctgctgag

SEQ ID NO: 489204 - DNA, 15 bp, Homo sapiens
ctaaacacctgctga

SEQ ID NO: 489205 - DNA, 15 bp, Homo sapiens
actaaacacctgctg

SEQ ID NO: 489206 - DNA, 15 bp, Homo sapiens
cactaaacacctgct

SEQ ID NO: 489207 - DNA, 15 bp, Homo sapiens
tcactaaacacctgc

SEQ ID NO: 489208 - DNA, 15 bp, Homo sapiens
ctcactaaacacctg

SEQ ID NO: 489209 - DNA, 15 bp, Homo sapiens
gctcactaaacacct

SEQ ID NO: 489210 - DNA, 15 bp, Homo sapiens
tgctcactaaacacc

SEQ ID NO: 489211 - DNA, 15 bp, Homo sapiens
atgctcactaaacac

SEQ ID NO: 489212 - DNA, 15 bp, Homo sapiens
aatgctcactaaaca

SEQ ID NO: 489213 - DNA, 15 bp, Homo sapiens
aaatgctcactaaac

SEQ ID NO: 489214 - DNA, 15 bp, Homo sapiens
aaaatgctcactaaa

SEQ ID NO: 489215 - DNA, 15 bp, Homo sapiens
caaaatgctcactaa

SEQ ID NO: 489216 - DNA, 15 bp, Homo sapiens
ccaaaatgctcacta

SEQ ID NO: 489217 - DNA, 15 bp, Homo sapiens
cccaaaatgctcact

SEQ ID NO: 489218 - DNA, 15 bp, Homo sapiens
tcccaaaatgctcac

SEQ ID NO: 489219 - DNA, 15 bp, Homo sapiens
ctcccaaaatgctca

SEQ ID NO: 489220 - DNA, 15 bp, Homo sapiens
cctcccaaaatgctc

SEQ ID NO: 489221 - DNA, 15 bp, Homo sapiens
tcctcccaaaatgct

SEQ ID NO: 489222 - DNA, 15 bp, Homo sapiens
gtcctcccaaaatgc

SEQ ID NO: 489223 - DNA, 15 bp, Homo sapiens
tgtcctcccaaaatg

SEQ ID NO: 489224 - DNA, 15 bp, Homo sapiens
ctgtcctcccaaaat

SEQ ID NO: 489225 - DNA, 15 bp, Homo sapiens
actgtcctcccaaaa

SEQ ID NO: 489226 - DNA, 15 bp, Homo sapiens
gactgtcctcccaaa

SEQ ID NO: 489227 - DNA, 15 bp, Homo sapiens
ggactgtcctcccaa

SEQ ID NO: 489228 - DNA, 15 bp, Homo sapiens
aggactgtcctccca

SEQ ID NO: 489229 - DNA, 15 bp, Homo sapiens
aaggactgtcctccc

SEQ ID NO: 489230 - DNA, 15 bp, Homo sapiens
aaaggactgtcctcc

SEQ ID NO: 489231 - DNA, 15 bp, Homo sapiens
caaaggactgtcctc

SEQ ID NO: 489232 - DNA, 15 bp, Homo sapiens
acaaaggactgtcct

SEQ ID NO: 489233 - DNA, 15 bp, Homo sapiens
aacaaaggactgtcc

SEQ ID NO: 489234 - DNA, 15 bp, Homo sapiens
caacaaaggactgtc

SEQ ID NO: 489235 - DNA, 15 bp, Homo sapiens
acaacaaaggactgt

SEQ ID NO: 489236 - DNA, 15 bp, Homo sapiens
cacaacaaaggactg

SEQ ID NO: 489237 - DNA, 15 bp, Homo sapiens
gcacaacaaaggact

SEQ ID NO: 489238 - DNA, 15 bp, Homo sapiens
tgcacaacaaaggac

SEQ ID NO: 489239 - DNA, 15 bp, Homo sapiens
ctgcacaacaaagga

SEQ ID NO: 489240 - DNA, 15 bp, Homo sapiens
cctgcacaacaaagg

SEQ ID NO: 489241 - DNA, 15 bp, Homo sapiens
tcctgcacaacaaag

SEQ ID NO: 489242 - DNA, 15 bp, Homo sapiens
atcctgcacaacaaa

SEQ ID NO: 489243 - DNA, 15 bp, Homo sapiens
catcctgcacaacaa

SEQ ID NO: 489244 - DNA, 15 bp, Homo sapiens
gcatcctgcacaaca

SEQ ID NO: 489245 - DNA, 15 bp, Homo sapiens
ggcatcctgcacaac

SEQ ID NO: 489246 - DNA, 15 bp, Homo sapiens
aggcatcctgcacaa

SEQ ID NO: 489247 - DNA, 15 bp, Homo sapiens
aaggcatcctgcaca

SEQ ID NO: 489248 - DNA, 15 bp, Homo sapiens
caaggcatcctgcac

SEQ ID NO: 489249 - DNA, 15 bp, Homo sapiens
ccaaggcatcctgca

SEQ ID NO: 489250 - DNA, 15 bp, Homo sapiens
cccaaggcatcctgc

SEQ ID NO: 489251 - DNA, 15 bp, Homo sapiens
gcccaaggcatcctg

SEQ ID NO: 489252 - DNA, 15 bp, Homo sapiens
tgcccaaggcatcct

SEQ ID NO: 489253 - DNA, 15 bp, Homo sapiens
atgcccaaggcatcc

SEQ ID NO: 489254 - DNA, 15 bp, Homo sapiens
aatgcccaaggcatc

SEQ ID NO: 489255 - DNA, 15 bp, Homo sapiens
caatgcccaaggcat

SEQ ID NO: 489256 - DNA, 15 bp, Homo sapiens
gcaatgcccaaggca

SEQ ID NO: 489257 - DNA, 15 bp, Homo sapiens
tgcaatgcccaaggc

SEQ ID NO: 489258 - DNA, 15 bp, Homo sapiens
ctgcaatgcccaagg

SEQ ID NO: 489259 - DNA, 15 bp, Homo sapiens
cctgcaatgcccaag

SEQ ID NO: 489260 - DNA, 15 bp, Homo sapiens
tcctgcaatgcccaa

SEQ ID NO: 489261 - DNA, 15 bp, Homo sapiens
gtcctgcaatgccca

SEQ ID NO: 489262 - DNA, 15 bp, Homo sapiens
ggtcctgcaatgccc

SEQ ID NO: 489263 - DNA, 15 bp, Homo sapiens
aggtcctgcaatgcc

SEQ ID NO: 489264 - DNA, 15 bp, Homo sapiens
aaggtcctgcaatgc

SEQ ID NO: 489265 - DNA, 15 bp, Homo sapiens
aaaggtcctgcaatg

SEQ ID NO: 489266 - DNA, 15 bp, Homo sapiens
taaaggtcctgcaat

SEQ ID NO: 489267 - DNA, 15 bp, Homo sapiens
ttaaaggtcctgcaa

SEQ ID NO: 489268 - DNA, 15 bp, Homo sapiens
cttaaaggtcctgca

SEQ ID NO: 489269 - DNA, 15 bp, Homo sapiens
tcttaaaggtcctgc

SEQ ID NO: 489270 - DNA, 15 bp, Homo sapiens
atcttaaaggtcctg

SEQ ID NO: 489271 - DNA, 15 bp, Homo sapiens
gatcttaaaggtcct

SEQ ID NO: 489272 - DNA, 15 bp, Homo sapiens
cgatcttaaaggtcc

SEQ ID NO: 489273 - DNA, 15 bp, Homo sapiens
acgatcttaaaggtc

SEQ ID NO: 489274 - DNA, 15 bp, Homo sapiens
gacgatcttaaaggt

SEQ ID NO: 489275 - DNA, 15 bp, Homo sapiens
agacgatcttaaagg

SEQ ID NO: 489276 - DNA, 15 bp, Homo sapiens
cagacgatcttaaag

SEQ ID NO: 489277 - DNA, 15 bp, Homo sapiens
ccagacgatcttaaa

SEQ ID NO: 489278 - DNA, 15 bp, Homo sapiens
gccagacgatcttaa

SEQ ID NO: 489279 - DNA, 15 bp, Homo sapiens
ggccagacgatctta

SEQ ID NO: 489280 - DNA, 15 bp, Homo sapiens
aggccagacgatctt

SEQ ID NO: 489281 - DNA, 15 bp, Homo sapiens
gaggccagacgatct

SEQ ID NO: 489282 - DNA, 15 bp, Homo sapiens
tgaggccagacgatc

SEQ ID NO: 489283 - DNA, 15 bp, Homo sapiens
atgaggccagacgat

SEQ ID NO: 489284 - DNA, 15 bp, Homo sapiens
aatgaggccagacga

SEQ ID NO: 489285 - DNA, 15 bp, Homo sapiens
aaatgaggccagacg

SEQ ID NO: 489286 - DNA, 15 bp, Homo sapiens
gaaatgaggccagac

SEQ ID NO: 489287 - DNA, 15 bp, Homo sapiens
tgaaatgaggccaga

SEQ ID NO: 489288 - DNA, 15 bp, Homo sapiens
atgaaatgaggccag

SEQ ID NO: 489289 - DNA, 15 bp, Homo sapiens
aatgaaatgaggcca

SEQ ID NO: 489290 - DNA, 15 bp, Homo sapiens
taatgaaatgaggcc

SEQ ID NO: 489291 - DNA, 15 bp, Homo sapiens
ttaatgaaatgaggc

SEQ ID NO: 489292 - DNA, 15 bp, Homo sapiens
tttaatgaaatgagg

SEQ ID NO: 489293 - DNA, 15 bp, Homo sapiens
atttaatgaaatgag

SEQ ID NO: 489294 - DNA, 15 bp, Homo sapiens
catttaatgaaatga

SEQ ID NO: 489295 - DNA, 15 bp, Homo sapiens
gcatttaatgaaatg

SEQ ID NO: 489296 - DNA, 15 bp, Homo sapiens
ggcatttaatgaaat

SEQ ID NO: 489297 - DNA, 15 bp, Homo sapiens
tggcatttaatgaaa

SEQ ID NO: 489298 - DNA, 15 bp, Homo sapiens
ctggcatttaatgaa

SEQ ID NO: 489299 - DNA, 15 bp, Homo sapiens
actggcatttaatga

SEQ ID NO: 489300 - DNA, 15 bp, Homo sapiens
aactggcatttaatg

SEQ ID NO: 489301 - DNA, 15 bp, Homo sapiens
caactggcatttaat

SEQ ID NO: 489302 - DNA, 15 bp, Homo sapiens
acaactggcatttaa

SEQ ID NO: 489303 - DNA, 15 bp, Homo sapiens
cacaactggcattta

SEQ ID NO: 489304 - DNA, 15 bp, Homo sapiens
gcacaactggcattt

SEQ ID NO: 489305 - DNA, 15 bp, Homo sapiens
agcacaactggcatt

SEQ ID NO: 489306 - DNA, 15 bp, Homo sapiens
cagcacaactggcat

SEQ ID NO: 489307 - DNA, 15 bp, Homo sapiens
gcagcacaactggca

SEQ ID NO: 489308 - DNA, 15 bp, Homo sapiens
tgcagcacaactggc

SEQ ID NO: 489309 - DNA, 15 bp, Homo sapiens
atgcagcacaactgg

SEQ ID NO: 489310 - DNA, 15 bp, Homo sapiens
gatgcagcacaactg

SEQ ID NO: 489311 - DNA, 15 bp, Homo sapiens
agatgcagcacaact

SEQ ID NO: 489312 - DNA, 15 bp, Homo sapiens
gagatgcagcacaac

SEQ ID NO: 489313 - DNA, 15 bp, Homo sapiens
ggagatgcagcacaa

SEQ ID NO: 489314 - DNA, 15 bp, Homo sapiens
gggagatgcagcaca

SEQ ID NO: 489315 - DNA, 15 bp, Homo sapiens
ggggagatgcagcac

SEQ ID NO: 489316 - DNA, 15 bp, Homo sapiens
tggggagatgcagca

SEQ ID NO: 489317 - DNA, 15 bp, Homo sapiens
atggggagatgcagc

SEQ ID NO: 489318 - DNA, 15 bp, Homo sapiens
gatggggagatgcag

SEQ ID NO: 489319 - DNA, 15 bp, Homo sapiens
ggatggggagatgca

SEQ ID NO: 489320 - DNA, 15 bp, Homo sapiens
gggatggggagatgc

SEQ ID NO: 489321 - DNA, 15 bp, Homo sapiens
agggatggggagatg

SEQ ID NO: 489322 - DNA, 15 bp, Homo sapiens
tagggatggggagat

SEQ ID NO: 489323 - DNA, 15 bp, Homo sapiens
ctagggatggggaga

SEQ ID NO: 489324 - DNA, 15 bp, Homo sapiens
actagggatggggag

SEQ ID NO: 489325 - DNA, 15 bp, Homo sapiens
gactagggatgggga

SEQ ID NO: 489326 - DNA, 15 bp, Homo sapiens
tgactagggatgggg

SEQ ID NO: 489327 - DNA, 15 bp, Homo sapiens
atgactagggatggg

SEQ ID NO: 489328 - DNA, 15 bp, Homo sapiens
aatgactagggatgg

SEQ ID NO: 489329 - DNA, 15 bp, Homo sapiens
taatgactagggatg

SEQ ID NO: 489330 - DNA, 15 bp, Homo sapiens
ataatgactagggat

SEQ ID NO: 489331 - DNA, 15 bp, Homo sapiens
cataatgactaggga

SEQ ID NO: 489332 - DNA, 15 bp, Homo sapiens
tcataatgactaggg

SEQ ID NO: 489333 - DNA, 15 bp, Homo sapiens
ttcataatgactagg

SEQ ID NO: 489334 - DNA, 15 bp, Homo sapiens
gttcataatgactag

SEQ ID NO: 489335 - DNA, 15 bp, Homo sapiens
tgttcataatgacta

SEQ ID NO: 489336 - DNA, 15 bp, Homo sapiens
ttgttcataatgact

SEQ ID NO: 489337 - DNA, 15 bp, Homo sapiens
tttgttcataatgac

SEQ ID NO: 489338 - DNA, 15 bp, Homo sapiens
atttgttcataatga

SEQ ID NO: 489339 - DNA, 15 bp, Homo sapiens
tatttgttcataatg

SEQ ID NO: 489340 - DNA, 15 bp, Homo sapiens
ttatttgttcataat

SEQ ID NO: 489341 - DNA, 15 bp, Homo sapiens
tttatttgttcataa

SEQ ID NO: 489342 - DNA, 15 bp, Homo sapiens
gtttatttgttcata

SEQ ID NO: 489343 - DNA, 15 bp, Homo sapiens
tgtttatttgttcat

SEQ ID NO: 489344 - DNA, 15 bp, Homo sapiens
atgtttatttgttca

SEQ ID NO: 489345 - DNA, 15 bp, Homo sapiens
catgtttatttgttc

SEQ ID NO: 489346 - DNA, 15 bp, Homo sapiens
gcatgtttatttgtt

SEQ ID NO: 489347 - DNA, 15 bp, Homo sapiens
ggcatgtttatttgt

SEQ ID NO: 489348 - DNA, 15 bp, Homo sapiens
aggcatgtttatttg

SEQ ID NO: 489349 - DNA, 15 bp, Homo sapiens
caggcatgtttattt

SEQ ID NO: 489350 - DNA, 15 bp, Homo sapiens
tcaggcatgtttatt

SEQ ID NO: 489351 - DNA, 15 bp, Homo sapiens
ctcaggcatgtttat

SEQ ID NO: 489352 - DNA, 15 bp, Homo sapiens
cctcaggcatgttta

SEQ ID NO: 489353 - DNA, 15 bp, Homo sapiens
ccctcaggcatgttt

SEQ ID NO: 489354 - DNA, 15 bp, Homo sapiens
tccctcaggcatgtt

SEQ ID NO: 489355 - DNA, 15 bp, Homo sapiens
ttccctcaggcatgt

SEQ ID NO: 489356 - DNA, 15 bp, Homo sapiens
attccctcaggcatg

SEQ ID NO: 489357 - DNA, 15 bp, Homo sapiens
cattccctcaggcat

SEQ ID NO: 489358 - DNA, 15 bp, Homo sapiens
tcattccctcaggca

SEQ ID NO: 489359 - DNA, 15 bp, Homo sapiens
atcattccctcaggc

SEQ ID NO: 489360 - DNA, 15 bp, Homo sapiens
tatcattccctcagg

SEQ ID NO: 489361 - DNA, 15 bp, Homo sapiens
gtatcattccctcag

SEQ ID NO: 489362 - DNA, 15 bp, Homo sapiens
ggtatcattccctca

SEQ ID NO: 489363 - DNA, 15 bp, Homo sapiens
aggtatcattccctc

SEQ ID NO: 489364 - DNA, 15 bp, Homo sapiens
gaggtatcattccct

SEQ ID NO: 489365 - DNA, 15 bp, Homo sapiens
ggaggtatcattccc

SEQ ID NO: 489366 - DNA, 15 bp, Homo sapiens
aggaggtatcattcc

SEQ ID NO: 489367 - DNA, 15 bp, Homo sapiens
gaggaggtatcattc

SEQ ID NO: 489368 - DNA, 15 bp, Homo sapiens
ggaggaggtatcatt

SEQ ID NO: 489369 - DNA, 15 bp, Homo sapiens
gggaggaggtatcat

SEQ ID NO: 489370 - DNA, 15 bp, Homo sapiens
agggaggaggtatca

SEQ ID NO: 489371 - DNA, 15 bp, Homo sapiens
aagggaggaggtatc

SEQ ID NO: 489372 - DNA, 15 bp, Homo sapiens
taagggaggaggtat

SEQ ID NO: 489373 - DNA, 15 bp, Homo sapiens
ctaagggaggaggta

SEQ ID NO: 489374 - DNA, 15 bp, Homo sapiens
actaagggaggaggt

SEQ ID NO: 489375 - DNA, 15 bp, Homo sapiens
aactaagggaggagg

SEQ ID NO: 489376 - DNA, 15 bp, Homo sapiens
caactaagggaggag

SEQ ID NO: 489377 - DNA, 15 bp, Homo sapiens
tcaactaagggagga

SEQ ID NO: 489378 - DNA, 15 bp, Homo sapiens
ctcaactaagggagg

SEQ ID NO: 489379 - DNA, 15 bp, Homo sapiens
actcaactaagggag

SEQ ID NO: 489380 - DNA, 15 bp, Homo sapiens
tactcaactaaggga

SEQ ID NO: 489381 - DNA, 15 bp, Homo sapiens
atactcaactaaggg

SEQ ID NO: 489382 - DNA, 15 bp, Homo sapiens
gatactcaactaagg

SEQ ID NO: 489383 - DNA, 15 bp, Homo sapiens
tgatactcaactaag

SEQ ID NO: 489384 - DNA, 15 bp, Homo sapiens
gtgatactcaactaa

SEQ ID NO: 489385 - DNA, 15 bp, Homo sapiens
agtgatactcaacta

SEQ ID NO: 489386 - DNA, 15 bp, Homo sapiens
cagtgatactcaact

SEQ ID NO: 489387 - DNA, 15 bp, Homo sapiens
tcagtgatactcaac

SEQ ID NO: 489388 - DNA, 15 bp, Homo sapiens
ctcagtgatactcaa

SEQ ID NO: 489389 - DNA, 15 bp, Homo sapiens
actcagtgatactca

SEQ ID NO: 489390 - DNA, 15 bp, Homo sapiens
aactcagtgatactc

SEQ ID NO: 489391 - DNA, 15 bp, Homo sapiens
taactcagtgatact

SEQ ID NO: 489392 - DNA, 15 bp, Homo sapiens
ttaactcagtgatac

SEQ ID NO: 489393 - DNA, 15 bp, Homo sapiens
tttaactcagtgata

SEQ ID NO: 489394 - DNA, 15 bp, Homo sapiens
atttaactcagtgat

SEQ ID NO: 489395 - DNA, 15 bp, Homo sapiens
aatttaactcagtga

SEQ ID NO: 489396 - DNA, 15 bp, Homo sapiens
caatttaactcagtg

SEQ ID NO: 489397 - DNA, 15 bp, Homo sapiens
acaatttaactcagt

SEQ ID NO: 489398 - DNA, 15 bp, Homo sapiens
tacaatttaactcag

SEQ ID NO: 489399 - DNA, 15 bp, Homo sapiens
ctacaatttaactca

SEQ ID NO: 489400 - DNA, 15 bp, Homo sapiens
cctacaatttaactc

SEQ ID NO: 489401 - DNA, 15 bp, Homo sapiens
acctacaatttaact

SEQ ID NO: 489402 - DNA, 15 bp, Homo sapiens
tacctacaatttaac

SEQ ID NO: 489403 - DNA, 15 bp, Homo sapiens
ttacctacaatttaa

SEQ ID NO: 489404 - DNA, 15 bp, Homo sapiens
tttacctacaattta

SEQ ID NO: 489405 - DNA, 15 bp, Homo sapiens
ttttacctacaattt

SEQ ID NO: 489406 - DNA, 15 bp, Homo sapiens
cttttacctacaatt

SEQ ID NO: 489407 - DNA, 15 bp, Homo sapiens
acttttacctacaat

SEQ ID NO: 489408 - DNA, 15 bp, Homo sapiens
tacttttacctacaa

SEQ ID NO: 489409 - DNA, 15 bp, Homo sapiens
ttacttttacctaca

SEQ ID NO: 489410 - DNA, 15 bp, Homo sapiens
gttacttttacctac

SEQ ID NO: 489411 - DNA, 15 bp, Homo sapiens
tgttacttttaccta

SEQ ID NO: 489412 - DNA, 15 bp, Homo sapiens
atgttacttttacct

SEQ ID NO: 489413 - DNA, 15 bp, Homo sapiens
aatgttacttttacc

SEQ ID NO: 489414 - DNA, 15 bp, Homo sapiens
caatgttacttttac

SEQ ID NO: 489415 - DNA, 15 bp, Homo sapiens
tcaatgttactttta

SEQ ID NO: 489416 - DNA, 15 bp, Homo sapiens
ttcaatgttactttt

SEQ ID NO: 489417 - DNA, 15 bp, Homo sapiens
attcaatgttacttt

SEQ ID NO: 489418 - DNA, 15 bp, Homo sapiens
tattcaatgttactt

SEQ ID NO: 489419 - DNA, 15 bp, Homo sapiens
atattcaatgttact

SEQ ID NO: 489420 - DNA, 15 bp, Homo sapiens
catattcaatgttac

SEQ ID NO: 489421 - DNA, 15 bp, Homo sapiens
gcatattcaatgtta

SEQ ID NO: 489422 - DNA, 15 bp, Homo sapiens
agcatattcaatgtt

SEQ ID NO: 489423 - DNA, 15 bp, Homo sapiens
aagcatattcaatgt

SEQ ID NO: 489424 - DNA, 15 bp, Homo sapiens
aaagcatattcaatg

SEQ ID NO: 489425 - DNA, 15 bp, Homo sapiens
caaagcatattcaat

SEQ ID NO: 489426 - DNA, 15 bp, Homo sapiens
acaaagcatattcaa

SEQ ID NO: 489427 - DNA, 15 bp, Homo sapiens
aacaaagcatattca

SEQ ID NO: 489428 - DNA, 15 bp, Homo sapiens
gaacaaagcatattc

SEQ ID NO: 489429 - DNA, 15 bp, Homo sapiens
ggaacaaagcatatt

SEQ ID NO: 489430 - DNA, 15 bp, Homo sapiens
tggaacaaagcatat

SEQ ID NO: 489431 - DNA, 15 bp, Homo sapiens
ttggaacaaagcata

SEQ ID NO: 489432 - DNA, 15 bp, Homo sapiens
tttggaacaaagcat

SEQ ID NO: 489433 - DNA, 15 bp, Homo sapiens
ttttggaacaaagca

SEQ ID NO: 489434 - DNA, 15 bp, Homo sapiens
cttttggaacaaagc

SEQ ID NO: 489435 - DNA, 15 bp, Homo sapiens
ccttttggaacaaag

SEQ ID NO: 489436 - DNA, 15 bp, Homo sapiens
cccttttggaacaaa

SEQ ID NO: 489437 - DNA, 15 bp, Homo sapiens
tcccttttggaacaa

SEQ ID NO: 489438 - DNA, 15 bp, Homo sapiens
ttcccttttggaaca

SEQ ID NO: 489439 - DNA, 15 bp, Homo sapiens
tttcccttttggaac

SEQ ID NO: 489440 - DNA, 15 bp, Homo sapiens
ctttcccttttggaa

SEQ ID NO: 489441 - DNA, 15 bp, Homo sapiens
actttcccttttgga

SEQ ID NO: 489442 - DNA, 15 bp, Homo sapiens
aactttcccttttgg

SEQ ID NO: 489443 - DNA, 15 bp, Homo sapiens
aaactttcccttttg

SEQ ID NO: 489444 - DNA, 15 bp, Homo sapiens
taaactttccctttt

SEQ ID NO: 489445 - DNA, 15 bp, Homo sapiens
ttaaactttcccttt

SEQ ID NO: 489446 - DNA, 15 bp, Homo sapiens
attaaactttccctt

SEQ ID NO: 489447 - DNA, 15 bp, Homo sapiens
cattaaactttccct

SEQ ID NO: 489448 - DNA, 15 bp, Homo sapiens
tcattaaactttccc

SEQ ID NO: 489449 - DNA, 15 bp, Homo sapiens
ttcattaaactttcc

SEQ ID NO: 489450 - DNA, 15 bp, Homo sapiens
cttcattaaactttc

SEQ ID NO: 489451 - DNA, 15 bp, Homo sapiens
tcttcattaaacttt

SEQ ID NO: 489452 - DNA, 15 bp, Homo sapiens
atcttcattaaactt

SEQ ID NO: 489453 - DNA, 15 bp, Homo sapiens
aatcttcattaaact

SEQ ID NO: 489454 - DNA, 15 bp, Homo sapiens
caatcttcattaaac

SEQ ID NO: 489455 - DNA, 15 bp, Homo sapiens
acaatcttcattaaa

SEQ ID NO: 489456 - DNA, 15 bp, Homo sapiens
tacaatcttcattaa

SEQ ID NO: 489457 - DNA, 15 bp, Homo sapiens
ttacaatcttcatta

SEQ ID NO: 489458 - DNA, 15 bp, Homo sapiens
tttacaatcttcatt

SEQ ID NO: 489459 - DNA, 15 bp, Homo sapiens
atttacaatcttcat

SEQ ID NO: 489460 - DNA, 15 bp, Homo sapiens
tatttacaatcttca

SEQ ID NO: 489461 - DNA, 15 bp, Homo sapiens
ttatttacaatcttc

SEQ ID NO: 489462 - DNA, 15 bp, Homo sapiens
cttatttacaatctt

SEQ ID NO: 489463 - DNA, 15 bp, Homo sapiens
ccttatttacaatct

SEQ ID NO: 489464 - DNA, 15 bp, Homo sapiens
accttatttacaatc

SEQ ID NO: 489465 - DNA, 15 bp, Homo sapiens
taccttatttacaat

SEQ ID NO: 489466 - DNA, 15 bp, Homo sapiens
ataccttatttacaa

SEQ ID NO: 489467 - DNA, 15 bp, Homo sapiens
cataccttatttaca

SEQ ID NO: 489468 - DNA, 15 bp, Homo sapiens
acataccttatttac

SEQ ID NO: 489469 - DNA, 15 bp, Homo sapiens
aacataccttattta

SEQ ID NO: 489470 - DNA, 15 bp, Homo sapiens
aaacataccttattt

SEQ ID NO: 489471 - DNA, 15 bp, Homo sapiens
caaacataccttatt

SEQ ID NO: 489472 - DNA, 15 bp, Homo sapiens
acaaacataccttat

SEQ ID NO: 489473 - DNA, 15 bp, Homo sapiens
tacaaacatacctta

SEQ ID NO: 489474 - DNA, 15 bp, Homo sapiens
atacaaacatacctt

SEQ ID NO: 489475 - DNA, 15 bp, Homo sapiens
aatacaaacatacct

SEQ ID NO: 489476 - DNA, 15 bp, Homo sapiens
taatacaaacatacc

SEQ ID NO: 489477 - DNA, 15 bp, Homo sapiens
ttaatacaaacatac

SEQ ID NO: 489478 - DNA, 15 bp, Homo sapiens
tttaatacaaacata

SEQ ID NO: 489479 - DNA, 15 bp, Homo sapiens
ttttaatacaaacat

SEQ ID NO: 489480 - DNA, 15 bp, Homo sapiens
tttttaatacaaaca

SEQ ID NO: 489481 - DNA, 15 bp, Homo sapiens
gtttttaatacaaac

SEQ ID NO: 489482 - DNA, 15 bp, Homo sapiens
agtttttaatacaaa

SEQ ID NO: 489483 - DNA, 15 bp, Homo sapiens
aagtttttaatacaa

SEQ ID NO: 489484 - DNA, 15 bp, Homo sapiens
taagtttttaataca

SEQ ID NO: 489485 - DNA, 15 bp, Homo sapiens
ttaagtttttaatac

SEQ ID NO: 489486 - DNA, 15 bp, Homo sapiens
tttaagtttttaata

SEQ ID NO: 489487 - DNA, 15 bp, Homo sapiens
ttttaagtttttaat

SEQ ID NO: 489488 - DNA, 15 bp, Homo sapiens
tttttaagtttttaa

SEQ ID NO: 489489 - DNA, 15 bp, Homo sapiens
ttttttaagttttta

SEQ ID NO: 489490 - DNA, 15 bp, Homo sapiens
tttttttaagttttt

SEQ ID NO: 489491 - DNA, 15 bp, Homo sapiens
ttttttttaagtttt

SEQ ID NO: 489492 - DNA, 15 bp, Homo sapiens
attttttttaagttt

SEQ ID NO: 489493 - DNA, 15 bp, Homo sapiens
gattttttttaagtt

SEQ ID NO: 489494 - DNA, 15 bp, Homo sapiens
tgattttttttaagt

SEQ ID NO: 489495 - DNA, 15 bp, Homo sapiens
gtgattttttttaag

SEQ ID NO: 489496 - DNA, 15 bp, Homo sapiens
agtgattttttttaa

SEQ ID NO: 489497 - DNA, 15 bp, Homo sapiens
cagtgatttttttta

SEQ ID NO: 489498 - DNA, 15 bp, Homo sapiens
acagtgatttttttt

SEQ ID NO: 489499 - DNA, 15 bp, Homo sapiens
tacagtgattttttt

SEQ ID NO: 489500 - DNA, 15 bp, Homo sapiens
gtacagtgatttttt

SEQ ID NO: 489501 - DNA, 15 bp, Homo sapiens
agtacagtgattttt

SEQ ID NO: 489502 - DNA, 15 bp, Homo sapiens
aagtacagtgatttt

SEQ ID NO: 489503 - DNA, 15 bp, Homo sapiens
aaagtacagtgattt

SEQ ID NO: 489504 - DNA, 15 bp, Homo sapiens
aaaagtacagtgatt

SEQ ID NO: 489505 - DNA, 15 bp, Homo sapiens
caaaagtacagtgat

SEQ ID NO: 489506 - DNA, 15 bp, Homo sapiens
acaaaagtacagtga

SEQ ID NO: 489507 - DNA, 15 bp, Homo sapiens
gacaaaagtacagtg

SEQ ID NO: 489508 - DNA, 15 bp, Homo sapiens
tgacaaaagtacagt

SEQ ID NO: 489509 - DNA, 15 bp, Homo sapiens
ctgacaaaagtacag

SEQ ID NO: 489510 - DNA, 15 bp, Homo sapiens
gctgacaaaagtaca

SEQ ID NO: 489511 - DNA, 15 bp, Homo sapiens
cgctgacaaaagtac

SEQ ID NO: 489512 - DNA, 15 bp, Homo sapiens
acgctgacaaaagta

SEQ ID NO: 489513 - DNA, 15 bp, Homo sapiens
tacgctgacaaaagt

SEQ ID NO: 489514 - DNA, 15 bp, Homo sapiens
ttacgctgacaaaag

SEQ ID NO: 489515 - DNA, 15 bp, Homo sapiens
attacgctgacaaaa

SEQ ID NO: 489516 - DNA, 15 bp, Homo sapiens
cattacgctgacaaa

SEQ ID NO: 489517 - DNA, 15 bp, Homo sapiens
tcattacgctgacaa

SEQ ID NO: 489518 - DNA, 15 bp, Homo sapiens
ctcattacgctgaca

SEQ ID NO: 489519 - DNA, 15 bp, Homo sapiens
gctcattacgctgac

SEQ ID NO: 489520 - DNA, 15 bp, Homo sapiens
ggctcattacgctga

SEQ ID NO: 489521 - DNA, 15 bp, Homo sapiens
tggctcattacgctg

SEQ ID NO: 489522 - DNA, 15 bp, Homo sapiens
ctggctcattacgct

SEQ ID NO: 489523 - DNA, 15 bp, Homo sapiens
cctggctcattacgc

SEQ ID NO: 489524 - DNA, 15 bp, Homo sapiens
ccctggctcattacg

SEQ ID NO: 489525 - DNA, 15 bp, Homo sapiens
gccctggctcattac

SEQ ID NO: 489526 - DNA, 15 bp, Homo sapiens
tgccctggctcatta

SEQ ID NO: 489527 - DNA, 15 bp, Homo sapiens
atgccctggctcatt

SEQ ID NO: 489528 - DNA, 15 bp, Homo sapiens
aatgccctggctcat

SEQ ID NO: 489529 - DNA, 15 bp, Homo sapiens
caatgccctggctca

SEQ ID NO: 489530 - DNA, 15 bp, Homo sapiens
acaatgccctggctc

SEQ ID NO: 489531 - DNA, 15 bp, Homo sapiens
tacaatgccctggct

SEQ ID NO: 489532 - DNA, 15 bp, Homo sapiens
gtacaatgccctggc

SEQ ID NO: 489533 - DNA, 15 bp, Homo sapiens
ggtacaatgccctgg

SEQ ID NO: 489534 - DNA, 15 bp, Homo sapiens
aggtacaatgccctg

SEQ ID NO: 489535 - DNA, 15 bp, Homo sapiens
aaggtacaatgccct

SEQ ID NO: 489536 - DNA, 15 bp, Homo sapiens
gaaggtacaatgccc

SEQ ID NO: 489537 - DNA, 15 bp, Homo sapiens
tgaaggtacaatgcc

SEQ ID NO: 489538 - DNA, 15 bp, Homo sapiens
ttgaaggtacaatgc

SEQ ID NO: 489539 - DNA, 15 bp, Homo sapiens
cttgaaggtacaatg

SEQ ID NO: 489540 - DNA, 15 bp, Homo sapiens
ccttgaaggtacaat

SEQ ID NO: 489541 - DNA, 15 bp, Homo sapiens
accttgaaggtacaa

SEQ ID NO: 489542 - DNA, 15 bp, Homo sapiens
aaccttgaaggtaca

SEQ ID NO: 489543 - DNA, 15 bp, Homo sapiens
aaaccttgaaggtac

SEQ ID NO: 489544 - DNA, 15 bp, Homo sapiens
taaaccttgaaggta

SEQ ID NO: 489545 - DNA, 15 bp, Homo sapiens
gtaaaccttgaaggt

SEQ ID NO: 489546 - DNA, 15 bp, Homo sapiens
agtaaaccttgaagg

SEQ ID NO: 489547 - DNA, 15 bp, Homo sapiens
aagtaaaccttgaag

SEQ ID NO: 489548 - DNA, 15 bp, Homo sapiens
aaagtaaaccttgaa

SEQ ID NO: 489549 - DNA, 15 bp, Homo sapiens
gaaagtaaaccttga

SEQ ID NO: 489550 - DNA, 15 bp, Homo sapiens
tgaaagtaaaccttg

SEQ ID NO: 489551 - DNA, 15 bp, Homo sapiens
ttgaaagtaaacctt

SEQ ID NO: 489552 - DNA, 15 bp, Homo sapiens
cttgaaagtaaacct

SEQ ID NO: 489553 - DNA, 15 bp, Homo sapiens
ccttgaaagtaaacc

SEQ ID NO: 489554 - DNA, 15 bp, Homo sapiens
gccttgaaagtaaac

SEQ ID NO: 489555 - DNA, 15 bp, Homo sapiens
ggccttgaaagtaaa

SEQ ID NO: 489556 - DNA, 15 bp, Homo sapiens
tggccttgaaagtaa

SEQ ID NO: 489557 - DNA, 15 bp, Homo sapiens
atggccttgaaagta

SEQ ID NO: 489558 - DNA, 15 bp, Homo sapiens
aatggccttgaaagt

SEQ ID NO: 489559 - DNA, 15 bp, Homo sapiens
taatggccttgaaag

SEQ ID NO: 489560 - DNA, 15 bp, Homo sapiens
ttaatggccttgaaa

SEQ ID NO: 489561 - DNA, 15 bp, Homo sapiens
tttaatggccttgaa

SEQ ID NO: 489562 - DNA, 15 bp, Homo sapiens
ttttaatggccttga

SEQ ID NO: 489563 - DNA, 15 bp, Homo sapiens
gttttaatggccttg

SEQ ID NO: 489564 - DNA, 15 bp, Homo sapiens
tgttttaatggcctt

SEQ ID NO: 489565 - DNA, 15 bp, Homo sapiens
ttgttttaatggcct

SEQ ID NO: 489566 - DNA, 15 bp, Homo sapiens
tttgttttaatggcc

SEQ ID NO: 489567 - DNA, 15 bp, Homo sapiens
ttttgttttaatggc

SEQ ID NO: 489568 - DNA, 15 bp, Homo sapiens
tttttgttttaatgg

SEQ ID NO: 489569 - DNA, 15 bp, Homo sapiens
ctttttgttttaatg

SEQ ID NO: 489570 - DNA, 15 bp, Homo sapiens
tctttttgttttaat

SEQ ID NO: 489571 - DNA, 15 bp, Homo sapiens
atctttttgttttaa

SEQ ID NO: 489572 - DNA, 15 bp, Homo sapiens
catctttttgtttta

SEQ ID NO: 489573 - DNA, 15 bp, Homo sapiens
tcatctttttgtttt

SEQ ID NO: 489574 - DNA, 15 bp, Homo sapiens
atcatctttttgttt

SEQ ID NO: 489575 - DNA, 15 bp, Homo sapiens
aatcatctttttgtt

SEQ ID NO: 489576 - DNA, 15 bp, Homo sapiens
aaatcatctttttgt

SEQ ID NO: 489577 - DNA, 15 bp, Homo sapiens
gaaatcatctttttg

SEQ ID NO: 489578 - DNA, 15 bp, Homo sapiens
agaaatcatcttttt

SEQ ID NO: 489579 - DNA, 15 bp, Homo sapiens
gagaaatcatctttt

SEQ ID NO: 489580 - DNA, 15 bp, Homo sapiens
ggagaaatcatcttt

SEQ ID NO: 489581 - DNA, 15 bp, Homo sapiens
gggagaaatcatctt

SEQ ID NO: 489582 - DNA, 15 bp, Homo sapiens
ggggagaaatcatct

SEQ ID NO: 489583 - DNA, 15 bp, Homo sapiens
aggggagaaatcatc

SEQ ID NO: 489584 - DNA, 15 bp, Homo sapiens
gaggggagaaatcat

SEQ ID NO: 489585 - DNA, 15 bp, Homo sapiens
tgaggggagaaatca

SEQ ID NO: 489586 - DNA, 15 bp, Homo sapiens
ttgaggggagaaatc

SEQ ID NO: 489587 - DNA, 15 bp, Homo sapiens
cttgaggggagaaat

SEQ ID NO: 489588 - DNA, 15 bp, Homo sapiens
acttgaggggagaaa

SEQ ID NO: 489589 - DNA, 15 bp, Homo sapiens
aacttgaggggagaa

SEQ ID NO: 489590 - DNA, 15 bp, Homo sapiens
aaacttgaggggaga

SEQ ID NO: 489591 - DNA, 15 bp, Homo sapiens
taaacttgaggggag

SEQ ID NO: 489592 - DNA, 15 bp, Homo sapiens
ataaacttgagggga

SEQ ID NO: 489593 - DNA, 15 bp, Homo sapiens
cataaacttgagggg

SEQ ID NO: 489594 - DNA, 15 bp, Homo sapiens
acataaacttgaggg

SEQ ID NO: 489595 - DNA, 15 bp, Homo sapiens
cacataaacttgagg

SEQ ID NO: 489596 - DNA, 15 bp, Homo sapiens
acacataaacttgag

SEQ ID NO: 489597 - DNA, 15 bp, Homo sapiens
tacacataaacttga

SEQ ID NO: 489598 - DNA, 15 bp, Homo sapiens
ttacacataaacttg

SEQ ID NO: 489599 - DNA, 15 bp, Homo sapiens
gttacacataaactt

SEQ ID NO: 489600 - DNA, 15 bp, Homo sapiens
agttacacataaact

SEQ ID NO: 489601 - DNA, 15 bp, Homo sapiens
gagttacacataaac

SEQ ID NO: 489602 - DNA, 15 bp, Homo sapiens
tgagttacacataaa

SEQ ID NO: 489603 - DNA, 15 bp, Homo sapiens
ctgagttacacataa

SEQ ID NO: 489604 - DNA, 15 bp, Homo sapiens
tctgagttacacata

SEQ ID NO: 489605 - DNA, 15 bp, Homo sapiens
ttctgagttacacat

SEQ ID NO: 489606 - DNA, 15 bp, Homo sapiens
tttctgagttacaca

SEQ ID NO: 489607 - DNA, 15 bp, Homo sapiens
atttctgagttacac

SEQ ID NO: 489608 - DNA, 15 bp, Homo sapiens
tatttctgagttaca

SEQ ID NO: 489609 - DNA, 15 bp, Homo sapiens
ttatttctgagttac

SEQ ID NO: 489610 - DNA, 15 bp, Homo sapiens
cttatttctgagtta

SEQ ID NO: 489611 - DNA, 15 bp, Homo sapiens
acttatttctgagtt

SEQ ID NO: 489612 - DNA, 15 bp, Homo sapiens
gacttatttctgagt

SEQ ID NO: 489613 - DNA, 15 bp, Homo sapiens
tgacttatttctgag

SEQ ID NO: 489614 - DNA, 15 bp, Homo sapiens
atgacttatttctga

SEQ ID NO: 489615 - DNA, 15 bp, Homo sapiens
aatgacttatttctg

SEQ ID NO: 489616 - DNA, 15 bp, Homo sapiens
taatgacttatttct

SEQ ID NO: 489617 - DNA, 15 bp, Homo sapiens
ataatgacttatttc

SEQ ID NO: 489618 - DNA, 15 bp, Homo sapiens
aataatgacttattt

SEQ ID NO: 489619 - DNA, 15 bp, Homo sapiens
caataatgacttatt

SEQ ID NO: 489620 - DNA, 15 bp, Homo sapiens
gcaataatgacttat

SEQ ID NO: 489621 - DNA, 15 bp, Homo sapiens
agcaataatgactta

SEQ ID NO: 489622 - DNA, 15 bp, Homo sapiens
aagcaataatgactt

SEQ ID NO: 489623 - DNA, 15 bp, Homo sapiens
aaagcaataatgact

SEQ ID NO: 489624 - DNA, 15 bp, Homo sapiens
aaaagcaataatgac

SEQ ID NO: 489625 - DNA, 15 bp, Homo sapiens
aaaaagcaataatga

SEQ ID NO: 489626 - DNA, 15 bp, Homo sapiens
aaaaaagcaataatg

SEQ ID NO: 489627 - DNA, 15 bp, Homo sapiens
gaaaaaagcaataat

SEQ ID NO: 489628 - DNA, 15 bp, Homo sapiens
ggaaaaaagcaataa

SEQ ID NO: 489629 - DNA, 15 bp, Homo sapiens
cggaaaaaagcaata

SEQ ID NO: 489630 - DNA, 15 bp, Homo sapiens
gcggaaaaaagcaat

SEQ ID NO: 489631 - DNA, 15 bp, Homo sapiens
agcggaaaaaagcaa

SEQ ID NO: 489632 - DNA, 15 bp, Homo sapiens
cagcggaaaaaagca

SEQ ID NO: 489633 - DNA, 15 bp, Homo sapiens
acagcggaaaaaagc

SEQ ID NO: 489634 - DNA, 15 bp, Homo sapiens
cacagcggaaaaaag

SEQ ID NO: 489635 - DNA, 15 bp, Homo sapiens
ccacagcggaaaaaa

SEQ ID NO: 489636 - DNA, 15 bp, Homo sapiens
gccacagcggaaaaa

SEQ ID NO: 489637 - DNA, 15 bp, Homo sapiens
agccacagcggaaaa

SEQ ID NO: 489638 - DNA, 15 bp, Homo sapiens
gagccacagcggaaa

SEQ ID NO: 489639 - DNA, 15 bp, Homo sapiens
tgagccacagcggaa

SEQ ID NO: 489640 - DNA, 15 bp, Homo sapiens
ctgagccacagcgga

SEQ ID NO: 489641 - DNA, 15 bp, Homo sapiens
tctgagccacagcgg

SEQ ID NO: 489642 - DNA, 15 bp, Homo sapiens
ttctgagccacagcg

SEQ ID NO: 489643 - DNA, 15 bp, Homo sapiens
gttctgagccacagc

SEQ ID NO: 489644 - DNA, 15 bp, Homo sapiens
tgttctgagccacag

SEQ ID NO: 489645 - DNA, 15 bp, Homo sapiens
gtgttctgagccaca

SEQ ID NO: 489646 - DNA, 15 bp, Homo sapiens
agtgttctgagccac

SEQ ID NO: 489647 - DNA, 15 bp, Homo sapiens
tagtgttctgagcca

SEQ ID NO: 489648 - DNA, 15 bp, Homo sapiens
ttagtgttctgagcc

SEQ ID NO: 489649 - DNA, 15 bp, Homo sapiens
tttagtgttctgagc

SEQ ID NO: 489650 - DNA, 15 bp, Homo sapiens
ttttagtgttctgag

SEQ ID NO: 489651 - DNA, 15 bp, Homo sapiens
tttttagtgttctga

SEQ ID NO: 489652 - DNA, 15 bp, Homo sapiens
atttttagtgttctg

SEQ ID NO: 489653 - DNA, 15 bp, Homo sapiens
tatttttagtgttct

SEQ ID NO: 489654 - DNA, 15 bp, Homo sapiens
atatttttagtgttc

SEQ ID NO: 489655 - DNA, 15 bp, Homo sapiens
aatatttttagtgtt

SEQ ID NO: 489656 - DNA, 15 bp, Homo sapiens
gaatatttttagtgt

SEQ ID NO: 489657 - DNA, 15 bp, Homo sapiens
tgaatatttttagtg

SEQ ID NO: 489658 - DNA, 15 bp, Homo sapiens
ttgaatatttttagt

SEQ ID NO: 489659 - DNA, 15 bp, Homo sapiens
tttgaatatttttag

SEQ ID NO: 489660 - DNA, 15 bp, Homo sapiens
ctttgaatattttta

SEQ ID NO: 489661 - DNA, 15 bp, Homo sapiens
tctttgaatattttt

SEQ ID NO: 489662 - DNA, 15 bp, Homo sapiens
ctctttgaatatttt

SEQ ID NO: 489663 - DNA, 15 bp, Homo sapiens
actctttgaatattt

SEQ ID NO: 489664 - DNA, 15 bp, Homo sapiens
cactctttgaatatt

SEQ ID NO: 489665 - DNA, 15 bp, Homo sapiens
ccactctttgaatat

SEQ ID NO: 489666 - DNA, 15 bp, Homo sapiens
tccactctttgaata

SEQ ID NO: 489667 - DNA, 15 bp, Homo sapiens
atccactctttgaat

SEQ ID NO: 489668 - DNA, 15 bp, Homo sapiens
tatccactctttgaa

SEQ ID NO: 489669 - DNA, 15 bp, Homo sapiens
ctatccactctttga

SEQ ID NO: 489670 - DNA, 15 bp, Homo sapiens
gctatccactctttg

SEQ ID NO: 489671 - DNA, 15 bp, Homo sapiens
agctatccactcttt

SEQ ID NO: 489672 - DNA, 15 bp, Homo sapiens
aagctatccactctt

SEQ ID NO: 489673 - DNA, 15 bp, Homo sapiens
aaagctatccactct

SEQ ID NO: 489674 - DNA, 15 bp, Homo sapiens
caaagctatccactc

SEQ ID NO: 489675 - DNA, 15 bp, Homo sapiens
gcaaagctatccact

SEQ ID NO: 489676 - DNA, 15 bp, Homo sapiens
tgcaaagctatccac

SEQ ID NO: 489677 - DNA, 15 bp, Homo sapiens
atgcaaagctatcca

SEQ ID NO: 489678 - DNA, 15 bp, Homo sapiens
tatgcaaagctatcc

SEQ ID NO: 489679 - DNA, 15 bp, Homo sapiens
ttatgcaaagctatc

SEQ ID NO: 489680 - DNA, 15 bp, Homo sapiens
tttatgcaaagctat

SEQ ID NO: 489681 - DNA, 15 bp, Homo sapiens
atttatgcaaagcta

SEQ ID NO: 489682 - DNA, 15 bp, Homo sapiens
catttatgcaaagct

SEQ ID NO: 489683 - DNA, 15 bp, Homo sapiens
gcatttatgcaaagc

SEQ ID NO: 489684 - DNA, 15 bp, Homo sapiens
agcatttatgcaaag

SEQ ID NO: 489685 - DNA, 15 bp, Homo sapiens
aagcatttatgcaaa

SEQ ID NO: 489686 - DNA, 15 bp, Homo sapiens
taagcatttatgcaa

SEQ ID NO: 489687 - DNA, 15 bp, Homo sapiens
ttaagcatttatgca

SEQ ID NO: 489688 - DNA, 15 bp, Homo sapiens
tttaagcatttatgc

SEQ ID NO: 489689 - DNA, 15 bp, Homo sapiens
ttttaagcatttatg

SEQ ID NO: 489690 - DNA, 15 bp, Homo sapiens
attttaagcatttat

SEQ ID NO: 489691 - DNA, 15 bp, Homo sapiens
aattttaagcattta

SEQ ID NO: 489692 - DNA, 15 bp, Homo sapiens
aaattttaagcattt

SEQ ID NO: 489693 - DNA, 15 bp, Homo sapiens
caaattttaagcatt

SEQ ID NO: 489694 - DNA, 15 bp, Homo sapiens
acaaattttaagcat

SEQ ID NO: 489695 - DNA, 15 bp, Homo sapiens
tacaaattttaagca

SEQ ID NO: 489696 - DNA, 15 bp, Homo sapiens
atacaaattttaagc

SEQ ID NO: 489697 - DNA, 15 bp, Homo sapiens
tatacaaattttaag

SEQ ID NO: 489698 - DNA, 15 bp, Homo sapiens
gtatacaaattttaa

SEQ ID NO: 489699 - DNA, 15 bp, Homo sapiens
tgtatacaaatttta

SEQ ID NO: 489700 - DNA, 15 bp, Homo sapiens
ttgtatacaaatttt

SEQ ID NO: 489701 - DNA, 15 bp, Homo sapiens
attgtatacaaattt

SEQ ID NO: 489702 - DNA, 15 bp, Homo sapiens
tattgtatacaaatt

SEQ ID NO: 489703 - DNA, 15 bp, Homo sapiens
ttattgtatacaaat

SEQ ID NO: 489704 - DNA, 15 bp, Homo sapiens
tttattgtatacaaa

SEQ ID NO: 489705 - DNA, 15 bp, Homo sapiens
gtttattgtatacaa

SEQ ID NO: 489706 - DNA, 15 bp, Homo sapiens
ggtttattgtataca

SEQ ID NO: 489707 - DNA, 15 bp, Homo sapiens
gggtttattgtatac

SEQ ID NO: 489708 - DNA, 15 bp, Homo sapiens
tgggtttattgtata

SEQ ID NO: 489709 - DNA, 15 bp, Homo sapiens
ttgggtttattgtat

SEQ ID NO: 489710 - DNA, 15 bp, Homo sapiens
tttgggtttattgta

SEQ ID NO: 489711 - DNA, 15 bp, Homo sapiens
atttgggtttattgt

SEQ ID NO: 489712 - DNA, 15 bp, Homo sapiens
tatttgggtttattg

SEQ ID NO: 489713 - DNA, 15 bp, Homo sapiens
atatttgggtttatt

SEQ ID NO: 489714 - DNA, 15 bp, Homo sapiens
tatatttgggtttat

SEQ ID NO: 489715 - DNA, 15 bp, Homo sapiens
atatatttgggttta

SEQ ID NO: 489716 - DNA, 15 bp, Homo sapiens
tatatatttgggttt

SEQ ID NO: 489717 - DNA, 15 bp, Homo sapiens
gtatatatttgggtt

SEQ ID NO: 489718 - DNA, 15 bp, Homo sapiens
agtatatatttgggt

SEQ ID NO: 489719 - DNA, 15 bp, Homo sapiens
aagtatatatttggg

SEQ ID NO: 489720 - DNA, 15 bp, Homo sapiens
aaagtatatatttgg

SEQ ID NO: 489721 - DNA, 15 bp, Homo sapiens
aaaagtatatatttg

SEQ ID NO: 489722 - DNA, 15 bp, Homo sapiens
aaaaagtatatattt

SEQ ID NO: 489723 - DNA, 15 bp, Homo sapiens
aaaaaagtatatatt

SEQ ID NO: 489724 - DNA, 15 bp, Homo sapiens
caaaaaagtatatat

SEQ ID NO: 489725 - DNA, 15 bp, Homo sapiens
tcaaaaaagtatata

SEQ ID NO: 489726 - DNA, 15 bp, Homo sapiens
atcaaaaaagtatat

SEQ ID NO: 489727 - DNA, 15 bp, Homo sapiens
tatcaaaaaagtata

SEQ ID NO: 489728 - DNA, 15 bp, Homo sapiens
gtatcaaaaaagtat

SEQ ID NO: 489729 - DNA, 15 bp, Homo sapiens
agtatcaaaaaagta

SEQ ID NO: 489730 - DNA, 15 bp, Homo sapiens
aagtatcaaaaaagt

SEQ ID NO: 489731 - DNA, 15 bp, Homo sapiens
aaagtatcaaaaaag

SEQ ID NO: 489732 - DNA, 15 bp, Homo sapiens
caaagtatcaaaaaa

SEQ ID NO: 489733 - DNA, 15 bp, Homo sapiens
acaaagtatcaaaaa

SEQ ID NO: 489734 - DNA, 15 bp, Homo sapiens
cacaaagtatcaaaa

SEQ ID NO: 489735 - DNA, 15 bp, Homo sapiens
ccacaaagtatcaaa

SEQ ID NO: 489736 - DNA, 15 bp, Homo sapiens
gccacaaagtatcaa

SEQ ID NO: 489737 - DNA, 15 bp, Homo sapiens
agccacaaagtatca

SEQ ID NO: 489738 - DNA, 15 bp, Homo sapiens
tagccacaaagtatc

SEQ ID NO: 489739 - DNA, 15 bp, Homo sapiens
ctagccacaaagtat

SEQ ID NO: 489740 - DNA, 15 bp, Homo sapiens
actagccacaaagta

SEQ ID NO: 489741 - DNA, 15 bp, Homo sapiens
aactagccacaaagt

SEQ ID NO: 489742 - DNA, 15 bp, Homo sapiens
taactagccacaaag

SEQ ID NO: 489743 - DNA, 15 bp, Homo sapiens
gtaactagccacaaa

SEQ ID NO: 489744 - DNA, 15 bp, Homo sapiens
agtaactagccacaa

SEQ ID NO: 489745 - DNA, 15 bp, Homo sapiens
aagtaactagccaca

SEQ ID NO: 489746 - DNA, 15 bp, Homo sapiens
aaagtaactagccac

SEQ ID NO: 489747 - DNA, 15 bp, Homo sapiens
taaagtaactagcca

SEQ ID NO: 489748 - DNA, 15 bp, Homo sapiens
ttaaagtaactagcc

SEQ ID NO: 489749 - DNA, 15 bp, Homo sapiens
attaaagtaactagc

SEQ ID NO: 489750 - DNA, 15 bp, Homo sapiens
aattaaagtaactag

SEQ ID NO: 489751 - DNA, 15 bp, Homo sapiens
caattaaagtaacta

SEQ ID NO: 489752 - DNA, 15 bp, Homo sapiens
acaattaaagtaact

SEQ ID NO: 489753 - DNA, 15 bp, Homo sapiens
cacaattaaagtaac

SEQ ID NO: 489754 - DNA, 15 bp, Homo sapiens
tcacaattaaagtaa

SEQ ID NO: 489755 - DNA, 15 bp, Homo sapiens
ttcacaattaaagta

SEQ ID NO: 489756 - DNA, 15 bp, Homo sapiens
tttcacaattaaagt

SEQ ID NO: 489757 - DNA, 15 bp, Homo sapiens
atttcacaattaaag

SEQ ID NO: 489758 - DNA, 15 bp, Homo sapiens
tatttcacaattaaa

SEQ ID NO: 489759 - DNA, 15 bp, Homo sapiens
atatttcacaattaa

SEQ ID NO: 489760 - DNA, 15 bp, Homo sapiens
aatatttcacaatta

SEQ ID NO: 489761 - DNA, 15 bp, Homo sapiens
aaatatttcacaatt

SEQ ID NO: 489762 - DNA, 15 bp, Homo sapiens
aaaatatttcacaat

SEQ ID NO: 489763 - DNA, 15 bp, Homo sapiens
aaaaatatttcacaa

SEQ ID NO: 489764 - DNA, 15 bp, Homo sapiens
caaaaatatttcaca

SEQ ID NO: 489765 - DNA, 15 bp, Homo sapiens
acaaaaatatttcac

SEQ ID NO: 489766 - DNA, 15 bp, Homo sapiens
gacaaaaatatttca

SEQ ID NO: 489767 - DNA, 15 bp, Homo sapiens
agacaaaaatatttc

SEQ ID NO: 489768 - DNA, 15 bp, Homo sapiens
tagacaaaaatattt

SEQ ID NO: 489769 - DNA, 15 bp, Homo sapiens
gtagacaaaaatatt

SEQ ID NO: 489770 - DNA, 15 bp, Homo sapiens
tgtagacaaaaatat

SEQ ID NO: 489771 - DNA, 15 bp, Homo sapiens
ttgtagacaaaaata

SEQ ID NO: 489772 - DNA, 15 bp, Homo sapiens
gttgtagacaaaaat

SEQ ID NO: 489773 - DNA, 15 bp, Homo sapiens
agttgtagacaaaaa

SEQ ID NO: 489774 - DNA, 15 bp, Homo sapiens
cagttgtagacaaaa

SEQ ID NO: 489775 - DNA, 15 bp, Homo sapiens
tcagttgtagacaaa

SEQ ID NO: 489776 - DNA, 15 bp, Homo sapiens
gtcagttgtagacaa

SEQ ID NO: 489777 - DNA, 15 bp, Homo sapiens
agtcagttgtagaca

SEQ ID NO: 489778 - DNA, 15 bp, Homo sapiens
tagtcagttgtagac

SEQ ID NO: 489779 - DNA, 15 bp, Homo sapiens
gtagtcagttgtaga

SEQ ID NO: 489780 - DNA, 15 bp, Homo sapiens
tgtagtcagttgtag

SEQ ID NO: 489781 - DNA, 15 bp, Homo sapiens
atgtagtcagttgta

SEQ ID NO: 489782 - DNA, 15 bp, Homo sapiens
tatgtagtcagttgt

SEQ ID NO: 489783 - DNA, 15 bp, Homo sapiens
ctatgtagtcagttg

SEQ ID NO: 489784 - DNA, 15 bp, Homo sapiens
tctatgtagtcagtt

SEQ ID NO: 489785 - DNA, 15 bp, Homo sapiens
ctctatgtagtcagt

SEQ ID NO: 489786 - DNA, 15 bp, Homo sapiens
gctctatgtagtcag

SEQ ID NO: 489787 - DNA, 15 bp, Homo sapiens
tgctctatgtagtca

SEQ ID NO: 489788 - DNA, 15 bp, Homo sapiens
gtgctctatgtagtc

SEQ ID NO: 489789 - DNA, 15 bp, Homo sapiens
agtgctctatgtagt

SEQ ID NO: 489790 - DNA, 15 bp, Homo sapiens
aagtgctctatgtag

SEQ ID NO: 489791 - DNA, 15 bp, Homo sapiens
aaagtgctctatgta

SEQ ID NO: 489792 - DNA, 15 bp, Homo sapiens
gaaagtgctctatgt

SEQ ID NO: 489793 - DNA, 15 bp, Homo sapiens
tgaaagtgctctatg

SEQ ID NO: 489794 - DNA, 15 bp, Homo sapiens
ttgaaagtgctctat

SEQ ID NO: 489795 - DNA, 15 bp, Homo sapiens
cttgaaagtgctcta

SEQ ID NO: 489796 - DNA, 15 bp, Homo sapiens
gcttgaaagtgctct

SEQ ID NO: 489797 - DNA, 15 bp, Homo sapiens
tgcttgaaagtgctc

SEQ ID NO: 489798 - DNA, 15 bp, Homo sapiens
atgcttgaaagtgct

SEQ ID NO: 489799 - DNA, 15 bp, Homo sapiens
catgcttgaaagtgc

SEQ ID NO: 489800 - DNA, 15 bp, Homo sapiens
ccatgcttgaaagtg

SEQ ID NO: 489801 - DNA, 15 bp, Homo sapiens
tccatgcttgaaagt

SEQ ID NO: 489802 - DNA, 15 bp, Homo sapiens
gtccatgcttgaaag

SEQ ID NO: 489803 - DNA, 15 bp, Homo sapiens
agtccatgcttgaaa

SEQ ID NO: 489804 - DNA, 15 bp, Homo sapiens
aagtccatgcttgaa

SEQ ID NO: 489805 - DNA, 15 bp, Homo sapiens
caagtccatgcttga

SEQ ID NO: 489806 - DNA, 15 bp, Homo sapiens
ccaagtccatgcttg

SEQ ID NO: 489807 - DNA, 15 bp, Homo sapiens
gccaagtccatgctt

SEQ ID NO: 489808 - DNA, 15 bp, Homo sapiens
tgccaagtccatgct

SEQ ID NO: 489809 - DNA, 15 bp, Homo sapiens
gtgccaagtccatgc

SEQ ID NO: 489810 - DNA, 15 bp, Homo sapiens
agtgccaagtccatg

SEQ ID NO: 489811 - DNA, 15 bp, Homo sapiens
cagtgccaagtccat

SEQ ID NO: 489812 - DNA, 15 bp, Homo sapiens
gcagtgccaagtcca

SEQ ID NO: 489813 - DNA, 15 bp, Homo sapiens
agcagtgccaagtcc

SEQ ID NO: 489814 - DNA, 15 bp, Homo sapiens
cagcagtgccaagtc

SEQ ID NO: 489815 - DNA, 15 bp, Homo sapiens
acagcagtgccaagt

SEQ ID NO: 489816 - DNA, 15 bp, Homo sapiens
tacagcagtgccaag

SEQ ID NO: 489817 - DNA, 15 bp, Homo sapiens
ttacagcagtgccaa

SEQ ID NO: 489818 - DNA, 15 bp, Homo sapiens
cttacagcagtgcca

SEQ ID NO: 489819 - DNA, 15 bp, Homo sapiens
acttacagcagtgcc

SEQ ID NO: 489820 - DNA, 15 bp, Homo sapiens
cacttacagcagtgc

SEQ ID NO: 489821 - DNA, 15 bp, Homo sapiens
ccacttacagcagtg

SEQ ID NO: 489822 - DNA, 15 bp, Homo sapiens
gccacttacagcagt

SEQ ID NO: 489823 - DNA, 15 bp, Homo sapiens
agccacttacagcag

SEQ ID NO: 489824 - DNA, 15 bp, Homo sapiens
cagccacttacagca

SEQ ID NO: 489825 - DNA, 15 bp, Homo sapiens
tcagccacttacagc

SEQ ID NO: 489826 - DNA, 15 bp, Homo sapiens
ctcagccacttacag

SEQ ID NO: 489827 - DNA, 15 bp, Homo sapiens
gctcagccacttaca

SEQ ID NO: 489828 - DNA, 15 bp, Homo sapiens
agctcagccacttac

SEQ ID NO: 489829 - DNA, 15 bp, Homo sapiens
cagctcagccactta

SEQ ID NO: 489830 - DNA, 15 bp, Homo sapiens
gcagctcagccactt

SEQ ID NO: 489831 - DNA, 15 bp, Homo sapiens
agcagctcagccact

SEQ ID NO: 489832 - DNA, 15 bp, Homo sapiens
gagcagctcagccac

SEQ ID NO: 489833 - DNA, 15 bp, Homo sapiens
ggagcagctcagcca

SEQ ID NO: 489834 - DNA, 15 bp, Homo sapiens
aggagcagctcagcc

SEQ ID NO: 489835 - DNA, 15 bp, Homo sapiens
aaggagcagctcagc

SEQ ID NO: 489836 - DNA, 15 bp, Homo sapiens
aaaggagcagctcag

SEQ ID NO: 489837 - DNA, 15 bp, Homo sapiens
gaaaggagcagctca

SEQ ID NO: 489838 - DNA, 15 bp, Homo sapiens
agaaaggagcagctc

SEQ ID NO: 489839 - DNA, 15 bp, Homo sapiens
cagaaaggagcagct

SEQ ID NO: 489840 - DNA, 15 bp, Homo sapiens
ccagaaaggagcagc

SEQ ID NO: 489841 - DNA, 15 bp, Homo sapiens
cccagaaaggagcag

SEQ ID NO: 489842 - DNA, 15 bp, Homo sapiens
acccagaaaggagca

SEQ ID NO: 489843 - DNA, 15 bp, Homo sapiens
aacccagaaaggagc

SEQ ID NO: 489844 - DNA, 15 bp, Homo sapiens
gaacccagaaaggag

SEQ ID NO: 489845 - DNA, 15 bp, Homo sapiens
ggaacccagaaagga

SEQ ID NO: 489846 - DNA, 15 bp, Homo sapiens
tggaacccagaaagg

SEQ ID NO: 489847 - DNA, 15 bp, Homo sapiens
ttggaacccagaaag

SEQ ID NO: 489848 - DNA, 15 bp, Homo sapiens
cttggaacccagaaa

SEQ ID NO: 489849 - DNA, 15 bp, Homo sapiens
gcttggaacccagaa

SEQ ID NO: 489850 - DNA, 15 bp, Homo sapiens
tgcttggaacccaga

SEQ ID NO: 489851 - DNA, 15 bp, Homo sapiens
atgcttggaacccag

SEQ ID NO: 489852 - DNA, 15 bp, Homo sapiens
catgcttggaaccca

SEQ ID NO: 489853 - DNA, 15 bp, Homo sapiens
gcatgcttggaaccc

SEQ ID NO: 489854 - DNA, 15 bp, Homo sapiens
ggcatgcttggaacc

SEQ ID NO: 489855 - DNA, 15 bp, Homo sapiens
aggcatgcttggaac

SEQ ID NO: 489856 - DNA, 15 bp, Homo sapiens
caggcatgcttggaa

SEQ ID NO: 489857 - DNA, 15 bp, Homo sapiens
ccaggcatgcttgga

SEQ ID NO: 489858 - DNA, 15 bp, Homo sapiens
tccaggcatgcttgg

SEQ ID NO: 489859 - DNA, 15 bp, Homo sapiens
ctccaggcatgcttg

SEQ ID NO: 489860 - DNA, 15 bp, Homo sapiens
actccaggcatgctt

SEQ ID NO: 489861 - DNA, 15 bp, Homo sapiens
cactccaggcatgct

SEQ ID NO: 489862 - DNA, 15 bp, Homo sapiens
ccactccaggcatgc

SEQ ID NO: 489863 - DNA, 15 bp, Homo sapiens
accactccaggcatg

SEQ ID NO: 489864 - DNA, 15 bp, Homo sapiens
caccactccaggcat

SEQ ID NO: 489865 - DNA, 15 bp, Homo sapiens
gcaccactccaggca

SEQ ID NO: 489866 - DNA, 15 bp, Homo sapiens
agcaccactccaggc

SEQ ID NO: 489867 - DNA, 15 bp, Homo sapiens
aagcaccactccagg

SEQ ID NO: 489868 - DNA, 15 bp, Homo sapiens
gaagcaccactccag

SEQ ID NO: 489869 - DNA, 15 bp, Homo sapiens
tgaagcaccactcca

SEQ ID NO: 489870 - DNA, 15 bp, Homo sapiens
atgaagcaccactcc

SEQ ID NO: 489871 - DNA, 15 bp, Homo sapiens
catgaagcaccactc

SEQ ID NO: 489872 - DNA, 15 bp, Homo sapiens
gcatgaagcaccact

SEQ ID NO: 489873 - DNA, 15 bp, Homo sapiens
tgcatgaagcaccac

SEQ ID NO: 489874 - DNA, 15 bp, Homo sapiens
atgcatgaagcacca

SEQ ID NO: 489875 - DNA, 15 bp, Homo sapiens
catgcatgaagcacc

SEQ ID NO: 489876 - DNA, 15 bp, Homo sapiens
gcatgcatgaagcac

SEQ ID NO: 489877 - DNA, 15 bp, Homo sapiens
ggcatgcatgaagca

SEQ ID NO: 489878 - DNA, 15 bp, Homo sapiens
aggcatgcatgaagc

SEQ ID NO: 489879 - DNA, 15 bp, Homo sapiens
gaggcatgcatgaag

SEQ ID NO: 489880 - DNA, 15 bp, Homo sapiens
tgaggcatgcatgaa

SEQ ID NO: 489881 - DNA, 15 bp, Homo sapiens
ctgaggcatgcatga

SEQ ID NO: 489882 - DNA, 15 bp, Homo sapiens
actgaggcatgcatg

SEQ ID NO: 489883 - DNA, 15 bp, Homo sapiens
cactgaggcatgcat

SEQ ID NO: 489884 - DNA, 15 bp, Homo sapiens
acactgaggcatgca

SEQ ID NO: 489885 - DNA, 15 bp, Homo sapiens
tacactgaggcatgc

SEQ ID NO: 489886 - DNA, 15 bp, Homo sapiens
gtacactgaggcatg

SEQ ID NO: 489887 - DNA, 15 bp, Homo sapiens
agtacactgaggcat

SEQ ID NO: 489888 - DNA, 15 bp, Homo sapiens
aagtacactgaggca

SEQ ID NO: 489889 - DNA, 15 bp, Homo sapiens
caagtacactgaggc

SEQ ID NO: 489890 - DNA, 15 bp, Homo sapiens
ccaagtacactgagg

SEQ ID NO: 489891 - DNA, 15 bp, Homo sapiens
accaagtacactgag

SEQ ID NO: 489892 - DNA, 15 bp, Homo sapiens
caccaagtacactga

SEQ ID NO: 489893 - DNA, 15 bp, Homo sapiens
tcaccaagtacactg

SEQ ID NO: 489894 - DNA, 15 bp, Homo sapiens
ttcaccaagtacact

SEQ ID NO: 489895 - DNA, 15 bp, Homo sapiens
tttcaccaagtacac

SEQ ID NO: 489896 - DNA, 15 bp, Homo sapiens
ctttcaccaagtaca

SEQ ID NO: 489897 - DNA, 15 bp, Homo sapiens
actttcaccaagtac

SEQ ID NO: 489898 - DNA, 15 bp, Homo sapiens
cactttcaccaagta

SEQ ID NO: 489899 - DNA, 15 bp, Homo sapiens
ccactttcaccaagt

SEQ ID NO: 489900 - DNA, 15 bp, Homo sapiens
gccactttcaccaag

SEQ ID NO: 489901 - DNA, 15 bp, Homo sapiens
agccactttcaccaa

SEQ ID NO: 489902 - DNA, 15 bp, Homo sapiens
cagccactttcacca

SEQ ID NO: 489903 - DNA, 15 bp, Homo sapiens
acagccactttcacc

SEQ ID NO: 489904 - DNA, 15 bp, Homo sapiens
cacagccactttcac

SEQ ID NO: 489905 - DNA, 15 bp, Homo sapiens
gcacagccactttca

SEQ ID NO: 489906 - DNA, 15 bp, Homo sapiens
tgcacagccactttc

SEQ ID NO: 489907 - DNA, 15 bp, Homo sapiens
atgcacagccacttt

SEQ ID NO: 489908 - DNA, 15 bp, Homo sapiens
gatgcacagccactt

SEQ ID NO: 489909 - DNA, 15 bp, Homo sapiens
ggatgcacagccact

SEQ ID NO: 489910 - DNA, 15 bp, Homo sapiens
aggatgcacagccac

SEQ ID NO: 489911 - DNA, 15 bp, Homo sapiens
gaggatgcacagcca

SEQ ID NO: 489912 - DNA, 15 bp, Homo sapiens
agaggatgcacagcc

SEQ ID NO: 489913 - DNA, 15 bp, Homo sapiens
aagaggatgcacagc

SEQ ID NO: 489914 - DNA, 15 bp, Homo sapiens
gaagaggatgcacag

SEQ ID NO: 489915 - DNA, 15 bp, Homo sapiens
agaagaggatgcaca

SEQ ID NO: 489916 - DNA, 15 bp, Homo sapiens
tagaagaggatgcac

SEQ ID NO: 489917 - DNA, 15 bp, Homo sapiens
gtagaagaggatgca

SEQ ID NO: 489918 - DNA, 15 bp, Homo sapiens
agtagaagaggatgc

SEQ ID NO: 489919 - DNA, 15 bp, Homo sapiens
gagtagaagaggatg

SEQ ID NO: 489920 - DNA, 15 bp, Homo sapiens
agagtagaagaggat

SEQ ID NO: 489921 - DNA, 15 bp, Homo sapiens
tagagtagaagagga

SEQ ID NO: 489922 - DNA, 15 bp, Homo sapiens
ttagagtagaagagg

SEQ ID NO: 489923 - DNA, 15 bp, Homo sapiens
attagagtagaagag

SEQ ID NO: 489924 - DNA, 15 bp, Homo sapiens
cattagagtagaaga

SEQ ID NO: 489925 - DNA, 15 bp, Homo sapiens
tcattagagtagaag

SEQ ID NO: 489926 - DNA, 15 bp, Homo sapiens
ctcattagagtagaa

SEQ ID NO: 489927 - DNA, 15 bp, Homo sapiens
gctcattagagtaga

SEQ ID NO: 489928 - DNA, 15 bp, Homo sapiens
tgctcattagagtag

SEQ ID NO: 489929 - DNA, 15 bp, Homo sapiens
gtgctcattagagta

SEQ ID NO: 489930 - DNA, 15 bp, Homo sapiens
agtgctcattagagt

SEQ ID NO: 489931 - DNA, 15 bp, Homo sapiens
cagtgctcattagag

SEQ ID NO: 489932 - DNA, 15 bp, Homo sapiens
gcagtgctcattaga

SEQ ID NO: 489933 - DNA, 15 bp, Homo sapiens
tgcagtgctcattag

SEQ ID NO: 489934 - DNA, 15 bp, Homo sapiens
atgcagtgctcatta

SEQ ID NO: 489935 - DNA, 15 bp, Homo sapiens
catgcagtgctcatt

SEQ ID NO: 489936 - DNA, 15 bp, Homo sapiens
acatgcagtgctcat

SEQ ID NO: 489937 - DNA, 15 bp, Homo sapiens
cacatgcagtgctca

SEQ ID NO: 489938 - DNA, 15 bp, Homo sapiens
acacatgcagtgctc

SEQ ID NO: 489939 - DNA, 15 bp, Homo sapiens
cacacatgcagtgct

SEQ ID NO: 489940 - DNA, 15 bp, Homo sapiens
ccacacatgcagtgc

SEQ ID NO: 489941 - DNA, 15 bp, Homo sapiens
tccacacatgcagtg

SEQ ID NO: 489942 - DNA, 15 bp, Homo sapiens
ctccacacatgcagt

SEQ ID NO: 489943 - DNA, 15 bp, Homo sapiens
cctccacacatgcag

SEQ ID NO: 489944 - DNA, 15 bp, Homo sapiens
ccctccacacatgca

SEQ ID NO: 489945 - DNA, 15 bp, Homo sapiens
accctccacacatgc

SEQ ID NO: 489946 - DNA, 15 bp, Homo sapiens
caccctccacacatg

SEQ ID NO: 489947 - DNA, 15 bp, Homo sapiens
ccaccctccacacat

SEQ ID NO: 489948 - DNA, 15 bp, Homo sapiens
tccaccctccacaca

SEQ ID NO: 489949 - DNA, 15 bp, Homo sapiens
ctccaccctccacac

SEQ ID NO: 489950 - DNA, 15 bp, Homo sapiens
actccaccctccaca

SEQ ID NO: 489951 - DNA, 15 bp, Homo sapiens
cactccaccctccac

SEQ ID NO: 489952 - DNA, 15 bp, Homo sapiens
acactccaccctcca

SEQ ID NO: 489953 - DNA, 15 bp, Homo sapiens
cacactccaccctcc

SEQ ID NO: 489954 - DNA, 15 bp, Homo sapiens
acacactccaccctc

SEQ ID NO: 489955 - DNA, 15 bp, Homo sapiens
gacacactccaccct

SEQ ID NO: 489956 - DNA, 15 bp, Homo sapiens
agacacactccaccc

SEQ ID NO: 489957 - DNA, 15 bp, Homo sapiens
cagacacactccacc

SEQ ID NO: 489958 - DNA, 15 bp, Homo sapiens
acagacacactccac

SEQ ID NO: 489959 - DNA, 15 bp, Homo sapiens
tacagacacactcca

SEQ ID NO: 489960 - DNA, 15 bp, Homo sapiens
atacagacacactcc

SEQ ID NO: 489961 - DNA, 15 bp, Homo sapiens
gatacagacacactc

SEQ ID NO: 489962 - DNA, 15 bp, Homo sapiens
tgatacagacacact

SEQ ID NO: 489963 - DNA, 15 bp, Homo sapiens
ctgatacagacacac

SEQ ID NO: 489964 - DNA, 15 bp, Homo sapiens
tctgatacagacaca

SEQ ID NO: 489965 - DNA, 15 bp, Homo sapiens
ctctgatacagacac

SEQ ID NO: 489966 - DNA, 15 bp, Homo sapiens
tctctgatacagaca

SEQ ID NO: 489967 - DNA, 15 bp, Homo sapiens
atctctgatacagac

SEQ ID NO: 489968 - DNA, 15 bp, Homo sapiens
gatctctgatacaga

SEQ ID NO: 489969 - DNA, 15 bp, Homo sapiens
tgatctctgatacag

SEQ ID NO: 489970 - DNA, 15 bp, Homo sapiens
ttgatctctgataca

SEQ ID NO: 489971 - DNA, 15 bp, Homo sapiens
cttgatctctgatac

SEQ ID NO: 489972 - DNA, 15 bp, Homo sapiens
acttgatctctgata

SEQ ID NO: 489973 - DNA, 15 bp, Homo sapiens
aacttgatctctgat

SEQ ID NO: 489974 - DNA, 15 bp, Homo sapiens
taacttgatctctga

SEQ ID NO: 489975 - DNA, 15 bp, Homo sapiens
ataacttgatctctg

SEQ ID NO: 489976 - DNA, 15 bp, Homo sapiens
tataacttgatctct

SEQ ID NO: 489977 - DNA, 15 bp, Homo sapiens
atataacttgatctc

SEQ ID NO: 489978 - DNA, 15 bp, Homo sapiens
catataacttgatct

SEQ ID NO: 489979 - DNA, 15 bp, Homo sapiens
tcatataacttgatc

SEQ ID NO: 489980 - DNA, 15 bp, Homo sapiens
ttcatataacttgat

SEQ ID NO: 489981 - DNA, 15 bp, Homo sapiens
tttcatataacttga

SEQ ID NO: 489982 - DNA, 15 bp, Homo sapiens
ttttcatataacttg

SEQ ID NO: 489983 - DNA, 15 bp, Homo sapiens
attttcatataactt

SEQ ID NO: 489984 - DNA, 15 bp, Homo sapiens
gattttcatataact

SEQ ID NO: 489985 - DNA, 15 bp, Homo sapiens
agattttcatataac

SEQ ID NO: 489986 - DNA, 15 bp, Homo sapiens
cagattttcatataa

SEQ ID NO: 489987 - DNA, 15 bp, Homo sapiens
acagattttcatata

SEQ ID NO: 489988 - DNA, 15 bp, Homo sapiens
aacagattttcatat

SEQ ID NO: 489989 - DNA, 15 bp, Homo sapiens
aaacagattttcata

SEQ ID NO: 489990 - DNA, 15 bp, Homo sapiens
aaaacagattttcat

SEQ ID NO: 489991 - DNA, 15 bp, Homo sapiens
aaaaacagattttca

SEQ ID NO: 489992 - DNA, 15 bp, Homo sapiens
taaaaacagattttc

SEQ ID NO: 489993 - DNA, 15 bp, Homo sapiens
ataaaaacagatttt

SEQ ID NO: 489994 - DNA, 15 bp, Homo sapiens
tataaaaacagattt

SEQ ID NO: 489995 - DNA, 15 bp, Homo sapiens
ttataaaaacagatt

SEQ ID NO: 489996 - DNA, 15 bp, Homo sapiens
tttataaaaacagat

SEQ ID NO: 489997 - DNA, 15 bp, Homo sapiens
ctttataaaaacaga

SEQ ID NO: 489998 - DNA, 15 bp, Homo sapiens
tctttataaaaacag

SEQ ID NO: 489999 - DNA, 15 bp, Homo sapiens
ttctttataaaaaca

SEQ ID NO: 490000 - DNA, 15 bp, Homo sapiens
tttctttataaaaac

SEQ ID NO: 490001 - DNA, 15 bp, Homo sapiens
ttttctttataaaaa

SEQ ID NO: 490002 - DNA, 15 bp, Homo sapiens
tttttctttataaaa

SEQ ID NO: 490003 - DNA, 15 bp, Homo sapiens
ttttttctttataaa

SEQ ID NO: 490004 - DNA, 15 bp, Homo sapiens
tttttttctttataa

SEQ ID NO: 490005 - DNA, 15 bp, Homo sapiens
gtttttttctttata

SEQ ID NO: 490006 - DNA, 15 bp, Homo sapiens
agtttttttctttat

SEQ ID NO: 490007 - DNA, 15 bp, Homo sapiens
tagtttttttcttta

SEQ ID NO: 490008 - DNA, 15 bp, Homo sapiens
gtagtttttttcttt

SEQ ID NO: 490009 - DNA, 15 bp, Homo sapiens
tgtagtttttttctt

SEQ ID NO: 490010 - DNA, 15 bp, Homo sapiens
atgtagtttttttct

SEQ ID NO: 490011 - DNA, 15 bp, Homo sapiens
aatgtagtttttttc

SEQ ID NO: 490012 - DNA, 15 bp, Homo sapiens
caatgtagttttttt

SEQ ID NO: 490013 - DNA, 15 bp, Homo sapiens
tcaatgtagtttttt

SEQ ID NO: 490014 - DNA, 15 bp, Homo sapiens
ttcaatgtagttttt

SEQ ID NO: 490015 - DNA, 15 bp, Homo sapiens
attcaatgtagtttt

SEQ ID NO: 490016 - DNA, 15 bp, Homo sapiens
tattcaatgtagttt

SEQ ID NO: 490017 - DNA, 15 bp, Homo sapiens
ttattcaatgtagtt

SEQ ID NO: 490018 - DNA, 15 bp, Homo sapiens
attattcaatgtagt

SEQ ID NO: 490019 - DNA, 15 bp, Homo sapiens
aattattcaatgtag

SEQ ID NO: 490020 - DNA, 15 bp, Homo sapiens
aaattattcaatgta

SEQ ID NO: 490021 - DNA, 15 bp, Homo sapiens
aaaattattcaatgt

SEQ ID NO: 490022 - DNA, 15 bp, Homo sapiens
aaaaattattcaatg

SEQ ID NO: 490023 - DNA, 15 bp, Homo sapiens
taaaaattattcaat

SEQ ID NO: 490024 - DNA, 15 bp, Homo sapiens
ttaaaaattattcaa

SEQ ID NO: 490025 - DNA, 15 bp, Homo sapiens
tttaaaaattattca

SEQ ID NO: 490026 - DNA, 15 bp, Homo sapiens
gtttaaaaattattc

SEQ ID NO: 490027 - DNA, 15 bp, Homo sapiens
tgtttaaaaattatt

SEQ ID NO: 490028 - DNA, 15 bp, Homo sapiens
atgtttaaaaattat

SEQ ID NO: 490029 - DNA, 15 bp, Homo sapiens
aatgtttaaaaatta

SEQ ID NO: 490030 - DNA, 15 bp, Homo sapiens
taatgtttaaaaatt

SEQ ID NO: 490031 - DNA, 15 bp, Homo sapiens
ttaatgtttaaaaat

SEQ ID NO: 490032 - DNA, 15 bp, Homo sapiens
cttaatgtttaaaaa

SEQ ID NO: 490033 - DNA, 15 bp, Homo sapiens
acttaatgtttaaaa

SEQ ID NO: 490034 - DNA, 15 bp, Homo sapiens
tacttaatgtttaaa

SEQ ID NO: 490035 - DNA, 15 bp, Homo sapiens
atacttaatgtttaa

SEQ ID NO: 490036 - DNA, 15 bp, Homo sapiens
gatacttaatgttta

SEQ ID NO: 490037 - DNA, 15 bp, Homo sapiens
tgatacttaatgttt

SEQ ID NO: 490038 - DNA, 15 bp, Homo sapiens
ctgatacttaatgtt

SEQ ID NO: 490039 - DNA, 15 bp, Homo sapiens
actgatacttaatgt

SEQ ID NO: 490040 - DNA, 15 bp, Homo sapiens
tactgatacttaatg

SEQ ID NO: 490041 - DNA, 15 bp, Homo sapiens
ttactgatacttaat

SEQ ID NO: 490042 - DNA, 15 bp, Homo sapiens
gttactgatacttaa

SEQ ID NO: 490043 - DNA, 15 bp, Homo sapiens
agttactgatactta

SEQ ID NO: 490044 - DNA, 15 bp, Homo sapiens
aagttactgatactt

SEQ ID NO: 490045 - DNA, 15 bp, Homo sapiens
aaagttactgatact

SEQ ID NO: 490046 - DNA, 15 bp, Homo sapiens
aaaagttactgatac

SEQ ID NO: 490047 - DNA, 15 bp, Homo sapiens
gaaaagttactgata

SEQ ID NO: 490048 - DNA, 15 bp, Homo sapiens
tgaaaagttactgat

SEQ ID NO: 490049 - DNA, 15 bp, Homo sapiens
ttgaaaagttactga

SEQ ID NO: 490050 - DNA, 15 bp, Homo sapiens
attgaaaagttactg

SEQ ID NO: 490051 - DNA, 15 bp, Homo sapiens
cattgaaaagttact

SEQ ID NO: 490052 - DNA, 15 bp, Homo sapiens
tcattgaaaagttac

SEQ ID NO: 490053 - DNA, 15 bp, Homo sapiens
ttcattgaaaagtta

SEQ ID NO: 490054 - DNA, 15 bp, Homo sapiens
tttcattgaaaagtt

SEQ ID NO: 490055 - DNA, 15 bp, Homo sapiens
atttcattgaaaagt

SEQ ID NO: 490056 - DNA, 15 bp, Homo sapiens
tatttcattgaaaag

SEQ ID NO: 490057 - DNA, 15 bp, Homo sapiens
ctatttcattgaaaa

SEQ ID NO: 490058 - DNA, 15 bp, Homo sapiens
gctatttcattgaaa

SEQ ID NO: 490059 - DNA, 15 bp, Homo sapiens
agctatttcattgaa

SEQ ID NO: 490060 - DNA, 15 bp, Homo sapiens
aagctatttcattga

SEQ ID NO: 490061 - DNA, 15 bp, Homo sapiens
caagctatttcattg

SEQ ID NO: 490062 - DNA, 15 bp, Homo sapiens
tcaagctatttcatt

SEQ ID NO: 490063 - DNA, 15 bp, Homo sapiens
ttcaagctatttcat

SEQ ID NO: 490064 - DNA, 15 bp, Homo sapiens
tttcaagctatttca

SEQ ID NO: 490065 - DNA, 15 bp, Homo sapiens
ttttcaagctatttc

SEQ ID NO: 490066 - DNA, 15 bp, Homo sapiens
cttttcaagctattt

SEQ ID NO: 490067 - DNA, 15 bp, Homo sapiens
ccttttcaagctatt

SEQ ID NO: 490068 - DNA, 15 bp, Homo sapiens
tccttttcaagctat

SEQ ID NO: 490069 - DNA, 15 bp, Homo sapiens
ttccttttcaagcta

SEQ ID NO: 490070 - DNA, 15 bp, Homo sapiens
gttccttttcaagct

SEQ ID NO: 490071 - DNA, 15 bp, Homo sapiens
tgttccttttcaagc

SEQ ID NO: 490072 - DNA, 15 bp, Homo sapiens
atgttccttttcaag

SEQ ID NO: 490073 - DNA, 15 bp, Homo sapiens
tatgttccttttcaa

SEQ ID NO: 490074 - DNA, 15 bp, Homo sapiens
ttatgttccttttca

SEQ ID NO: 490075 - DNA, 15 bp, Homo sapiens
tttatgttccttttc

SEQ ID NO: 490076 - DNA, 15 bp, Homo sapiens
atttatgttcctttt

SEQ ID NO: 490077 - DNA, 15 bp, Homo sapiens
tatttatgttccttt

SEQ ID NO: 490078 - DNA, 15 bp, Homo sapiens
atatttatgttcctt

SEQ ID NO: 490079 - DNA, 15 bp, Homo sapiens
aatatttatgttcct

SEQ ID NO: 490080 - DNA, 15 bp, Homo sapiens
taatatttatgttcc

SEQ ID NO: 490081 - DNA, 15 bp, Homo sapiens
ctaatatttatgttc

SEQ ID NO: 490082 - DNA, 15 bp, Homo sapiens
actaatatttatgtt

SEQ ID NO: 490083 - DNA, 15 bp, Homo sapiens
aactaatatttatgt

SEQ ID NO: 490084 - DNA, 15 bp, Homo sapiens
gaactaatatttatg

SEQ ID NO: 490085 - DNA, 15 bp, Homo sapiens
tgaactaatatttat

SEQ ID NO: 490086 - DNA, 15 bp, Homo sapiens
ttgaactaatattta

SEQ ID NO: 490087 - DNA, 15 bp, Homo sapiens
tttgaactaatattt

SEQ ID NO: 490088 - DNA, 15 bp, Homo sapiens
ctttgaactaatatt

SEQ ID NO: 490089 - DNA, 15 bp, Homo sapiens
actttgaactaatat

SEQ ID NO: 490090 - DNA, 15 bp, Homo sapiens
tactttgaactaata

SEQ ID NO: 490091 - DNA, 15 bp, Homo sapiens
atactttgaactaat

SEQ ID NO: 490092 - DNA, 15 bp, Homo sapiens
gatactttgaactaa

SEQ ID NO: 490093 - DNA, 15 bp, Homo sapiens
agatactttgaacta

SEQ ID NO: 490094 - DNA, 15 bp, Homo sapiens
aagatactttgaact

SEQ ID NO: 490095 - DNA, 15 bp, Homo sapiens
aaagatactttgaac

SEQ ID NO: 490096 - DNA, 15 bp, Homo sapiens
aaaagatactttgaa

SEQ ID NO: 490097 - DNA, 15 bp, Homo sapiens
aaaaagatactttga

SEQ ID NO: 490098 - DNA, 15 bp, Homo sapiens
taaaaagatactttg

SEQ ID NO: 490099 - DNA, 15 bp, Homo sapiens
ttaaaaagatacttt

SEQ ID NO: 490100 - DNA, 15 bp, Homo sapiens
tttaaaaagatactt

SEQ ID NO: 490101 - DNA, 15 bp, Homo sapiens
atttaaaaagatact

SEQ ID NO: 490102 - DNA, 15 bp, Homo sapiens
aatttaaaaagatac

SEQ ID NO: 490103 - DNA, 15 bp, Homo sapiens
taatttaaaaagata

SEQ ID NO: 490104 - DNA, 15 bp, Homo sapiens
ataatttaaaaagat

SEQ ID NO: 490105 - DNA, 15 bp, Homo sapiens
cataatttaaaaaga

SEQ ID NO: 490106 - DNA, 15 bp, Homo sapiens
gcataatttaaaaag

SEQ ID NO: 490107 - DNA, 15 bp, Homo sapiens
agcataatttaaaaa

SEQ ID NO: 490108 - DNA, 15 bp, Homo sapiens
aagcataatttaaaa

SEQ ID NO: 490109 - DNA, 15 bp, Homo sapiens
aaagcataatttaaa

SEQ ID NO: 490110 - DNA, 15 bp, Homo sapiens
caaagcataatttaa

SEQ ID NO: 490111 - DNA, 15 bp, Homo sapiens
ccaaagcataattta

SEQ ID NO: 490112 - DNA, 15 bp, Homo sapiens
cccaaagcataattt

SEQ ID NO: 490113 - DNA, 15 bp, Homo sapiens
acccaaagcataatt

SEQ ID NO: 490114 - DNA, 15 bp, Homo sapiens
tacccaaagcataat

SEQ ID NO: 490115 - DNA, 15 bp, Homo sapiens
ctacccaaagcataa

SEQ ID NO: 490116 - DNA, 15 bp, Homo sapiens
actacccaaagcata

SEQ ID NO: 490117 - DNA, 15 bp, Homo sapiens
cactacccaaagcat

SEQ ID NO: 490118 - DNA, 15 bp, Homo sapiens
tcactacccaaagca

SEQ ID NO: 490119 - DNA, 15 bp, Homo sapiens
atcactacccaaagc

SEQ ID NO: 490120 - DNA, 15 bp, Homo sapiens
tatcactacccaaag

SEQ ID NO: 490121 - DNA, 15 bp, Homo sapiens
gtatcactacccaaa

SEQ ID NO: 490122 - DNA, 15 bp, Homo sapiens
agtatcactacccaa

SEQ ID NO: 490123 - DNA, 15 bp, Homo sapiens
aagtatcactaccca

SEQ ID NO: 490124 - DNA, 15 bp, Homo sapiens
aaagtatcactaccc

SEQ ID NO: 490125 - DNA, 15 bp, Homo sapiens
taaagtatcactacc

SEQ ID NO: 490126 - DNA, 15 bp, Homo sapiens
ataaagtatcactac

SEQ ID NO: 490127 - DNA, 15 bp, Homo sapiens
aataaagtatcacta

SEQ ID NO: 490128 - DNA, 15 bp, Homo sapiens
taataaagtatcact

SEQ ID NO: 490129 - DNA, 15 bp, Homo sapiens
ataataaagtatcac

SEQ ID NO: 490130 - DNA, 15 bp, Homo sapiens
aataataaagtatca

SEQ ID NO: 490131 - DNA, 15 bp, Homo sapiens
taataataaagtatc

SEQ ID NO: 490132 - DNA, 15 bp, Homo sapiens
ataataataaagtat

SEQ ID NO: 490133 - DNA, 15 bp, Homo sapiens
tataataataaagta

SEQ ID NO: 490134 - DNA, 15 bp, Homo sapiens
ctataataataaagt

SEQ ID NO: 490135 - DNA, 15 bp, Homo sapiens
tctataataataaag

SEQ ID NO: 490136 - DNA, 15 bp, Homo sapiens
atctataataataaa

SEQ ID NO: 490137 - DNA, 15 bp, Homo sapiens
tatctataataataa

SEQ ID NO: 490138 - DNA, 15 bp, Homo sapiens
ctatctataataata

SEQ ID NO: 490139 - DNA, 15 bp, Homo sapiens
actatctataataat

SEQ ID NO: 490140 - DNA, 15 bp, Homo sapiens
cactatctataataa

SEQ ID NO: 490141 - DNA, 15 bp, Homo sapiens
acactatctataata

SEQ ID NO: 490142 - DNA, 15 bp, Homo sapiens
cacactatctataat

SEQ ID NO: 490143 - DNA, 15 bp, Homo sapiens
ccacactatctataa

SEQ ID NO: 490144 - DNA, 15 bp, Homo sapiens
cccacactatctata

SEQ ID NO: 490145 - DNA, 15 bp, Homo sapiens
tcccacactatctat

SEQ ID NO: 490146 - DNA, 15 bp, Homo sapiens
ttcccacactatcta

SEQ ID NO: 490147 - DNA, 15 bp, Homo sapiens
tttcccacactatct

SEQ ID NO: 490148 - DNA, 15 bp, Homo sapiens
atttcccacactatc

SEQ ID NO: 490149 - DNA, 15 bp, Homo sapiens
aatttcccacactat

SEQ ID NO: 490150 - DNA, 15 bp, Homo sapiens
caatttcccacacta

SEQ ID NO: 490151 - DNA, 15 bp, Homo sapiens
acaatttcccacact

SEQ ID NO: 490152 - DNA, 15 bp, Homo sapiens
aacaatttcccacac

SEQ ID NO: 490153 - DNA, 15 bp, Homo sapiens
aaacaatttcccaca

SEQ ID NO: 490154 - DNA, 15 bp, Homo sapiens
gaaacaatttcccac

SEQ ID NO: 490155 - DNA, 15 bp, Homo sapiens
agaaacaatttccca

SEQ ID NO: 490156 - DNA, 15 bp, Homo sapiens
gagaaacaatttccc

SEQ ID NO: 490157 - DNA, 15 bp, Homo sapiens
cgagaaacaatttcc

SEQ ID NO: 490158 - DNA, 15 bp, Homo sapiens
acgagaaacaatttc

SEQ ID NO: 490159 - DNA, 15 bp, Homo sapiens
aacgagaaacaattt

SEQ ID NO: 490160 - DNA, 15 bp, Homo sapiens
taacgagaaacaatt

SEQ ID NO: 490161 - DNA, 15 bp, Homo sapiens
ctaacgagaaacaat

SEQ ID NO: 490162 - DNA, 15 bp, Homo sapiens
cctaacgagaaacaa

SEQ ID NO: 490163 - DNA, 15 bp, Homo sapiens
tcctaacgagaaaca

SEQ ID NO: 490164 - DNA, 15 bp, Homo sapiens
atcctaacgagaaac

SEQ ID NO: 490165 - DNA, 15 bp, Homo sapiens
tatcctaacgagaaa

SEQ ID NO: 490166 - DNA, 15 bp, Homo sapiens
atatcctaacgagaa

SEQ ID NO: 490167 - DNA, 15 bp, Homo sapiens
aatatcctaacgaga

SEQ ID NO: 490168 - DNA, 15 bp, Homo sapiens
aaatatcctaacgag

SEQ ID NO: 490169 - DNA, 15 bp, Homo sapiens
aaaatatcctaacga

SEQ ID NO: 490170 - DNA, 15 bp, Homo sapiens
gaaaatatcctaacg

SEQ ID NO: 490171 - DNA, 15 bp, Homo sapiens
ggaaaatatcctaac

SEQ ID NO: 490172 - DNA, 15 bp, Homo sapiens
gggaaaatatcctaa

SEQ ID NO: 490173 - DNA, 15 bp, Homo sapiens
ggggaaaatatccta

SEQ ID NO: 490174 - DNA, 15 bp, Homo sapiens
gggggaaaatatcct

SEQ ID NO: 490175 - DNA, 15 bp, Homo sapiens
agggggaaaatatcc

SEQ ID NO: 490176 - DNA, 15 bp, Homo sapiens
aagggggaaaatatc

SEQ ID NO: 490177 - DNA, 15 bp, Homo sapiens
caagggggaaaatat

SEQ ID NO: 490178 - DNA, 15 bp, Homo sapiens
ccaagggggaaaata

SEQ ID NO: 490179 - DNA, 15 bp, Homo sapiens
accaagggggaaaat

SEQ ID NO: 490180 - DNA, 15 bp, Homo sapiens
aaccaagggggaaaa

SEQ ID NO: 490181 - DNA, 15 bp, Homo sapiens
aaaccaagggggaaa

SEQ ID NO: 490182 - DNA, 15 bp, Homo sapiens
caaaccaagggggaa

SEQ ID NO: 490183 - DNA, 15 bp, Homo sapiens
tcaaaccaaggggga

SEQ ID NO: 490184 - DNA, 15 bp, Homo sapiens
ctcaaaccaaggggg

SEQ ID NO: 490185 - DNA, 15 bp, Homo sapiens
cctcaaaccaagggg

SEQ ID NO: 490186 - DNA, 15 bp, Homo sapiens
gcctcaaaccaaggg

SEQ ID NO: 490187 - DNA, 15 bp, Homo sapiens
agcctcaaaccaagg

SEQ ID NO: 490188 - DNA, 15 bp, Homo sapiens
tagcctcaaaccaag

SEQ ID NO: 490189 - DNA, 15 bp, Homo sapiens
ttagcctcaaaccaa

SEQ ID NO: 490190 - DNA, 15 bp, Homo sapiens
attagcctcaaacca

SEQ ID NO: 490191 - DNA, 15 bp, Homo sapiens
gattagcctcaaacc

SEQ ID NO: 490192 - DNA, 15 bp, Homo sapiens
cgattagcctcaaac

SEQ ID NO: 490193 - DNA, 15 bp, Homo sapiens
gcgattagcctcaaa

SEQ ID NO: 490194 - DNA, 15 bp, Homo sapiens
agcgattagcctcaa

SEQ ID NO: 490195 - DNA, 15 bp, Homo sapiens
tagcgattagcctca

SEQ ID NO: 490196 - DNA, 15 bp, Homo sapiens
atagcgattagcctc

SEQ ID NO: 490197 - DNA, 15 bp, Homo sapiens
aatagcgattagcct

SEQ ID NO: 490198 - DNA, 15 bp, Homo sapiens
caatagcgattagcc

SEQ ID NO: 490199 - DNA, 15 bp, Homo sapiens
tcaatagcgattagc

SEQ ID NO: 490200 - DNA, 15 bp, Homo sapiens
ttcaatagcgattag

SEQ ID NO: 490201 - DNA, 15 bp, Homo sapiens
attcaatagcgatta

SEQ ID NO: 490202 - DNA, 15 bp, Homo sapiens
gattcaatagcgatt

SEQ ID NO: 490203 - DNA, 15 bp, Homo sapiens
agattcaatagcgat

SEQ ID NO: 490204 - DNA, 15 bp, Homo sapiens
cagattcaatagcga

SEQ ID NO: 490205 - DNA, 15 bp, Homo sapiens
tcagattcaatagcg

SEQ ID NO: 490206 - DNA, 15 bp, Homo sapiens
ttcagattcaatagc

SEQ ID NO: 490207 - DNA, 15 bp, Homo sapiens
cttcagattcaatag

SEQ ID NO: 490208 - DNA, 15 bp, Homo sapiens
acttcagattcaata

SEQ ID NO: 490209 - DNA, 15 bp, Homo sapiens
tacttcagattcaat

SEQ ID NO: 490210 - DNA, 15 bp, Homo sapiens
gtacttcagattcaa

SEQ ID NO: 490211 - DNA, 15 bp, Homo sapiens
agtacttcagattca

SEQ ID NO: 490212 - DNA, 15 bp, Homo sapiens
gagtacttcagattc

SEQ ID NO: 490213 - DNA, 15 bp, Homo sapiens
agagtacttcagatt

SEQ ID NO: 490214 - DNA, 15 bp, Homo sapiens
aagagtacttcagat

SEQ ID NO: 490215 - DNA, 15 bp, Homo sapiens
aaagagtacttcaga

SEQ ID NO: 490216 - DNA, 15 bp, Homo sapiens
aaaagagtacttcag

SEQ ID NO: 490217 - DNA, 15 bp, Homo sapiens
caaaagagtacttca

SEQ ID NO: 490218 - DNA, 15 bp, Homo sapiens
ccaaaagagtacttc

SEQ ID NO: 490219 - DNA, 15 bp, Homo sapiens
accaaaagagtactt

SEQ ID NO: 490220 - DNA, 15 bp, Homo sapiens
aaccaaaagagtact

SEQ ID NO: 490221 - DNA, 15 bp, Homo sapiens
caaccaaaagagtac

SEQ ID NO: 490222 - DNA, 15 bp, Homo sapiens
tcaaccaaaagagta

SEQ ID NO: 490223 - DNA, 15 bp, Homo sapiens
ttcaaccaaaagagt

SEQ ID NO: 490224 - DNA, 15 bp, Homo sapiens
tttcaaccaaaagag

SEQ ID NO: 490225 - DNA, 15 bp, Homo sapiens
ttttcaaccaaaaga

SEQ ID NO: 490226 - DNA, 15 bp, Homo sapiens
cttttcaaccaaaag

SEQ ID NO: 490227 - DNA, 15 bp, Homo sapiens
ccttttcaaccaaaa

SEQ ID NO: 490228 - DNA, 15 bp, Homo sapiens
tccttttcaaccaaa

SEQ ID NO: 490229 - DNA, 15 bp, Homo sapiens
gtccttttcaaccaa

SEQ ID NO: 490230 - DNA, 15 bp, Homo sapiens
agtccttttcaacca

SEQ ID NO: 490231 - DNA, 15 bp, Homo sapiens
tagtccttttcaacc

SEQ ID NO: 490232 - DNA, 15 bp, Homo sapiens
atagtccttttcaac

SEQ ID NO: 490233 - DNA, 15 bp, Homo sapiens
aatagtccttttcaa

SEQ ID NO: 490234 - DNA, 15 bp, Homo sapiens
aaatagtccttttca

SEQ ID NO: 490235 - DNA, 15 bp, Homo sapiens
taaatagtccttttc

SEQ ID NO: 490236 - DNA, 15 bp, Homo sapiens
ataaatagtcctttt

SEQ ID NO: 490237 - DNA, 15 bp, Homo sapiens
tataaatagtccttt

SEQ ID NO: 490238 - DNA, 15 bp, Homo sapiens
ttataaatagtcctt

SEQ ID NO: 490239 - DNA, 15 bp, Homo sapiens
tttataaatagtcct

SEQ ID NO: 490240 - DNA, 15 bp, Homo sapiens
ctttataaatagtcc

SEQ ID NO: 490241 - DNA, 15 bp, Homo sapiens
actttataaatagtc

SEQ ID NO: 490242 - DNA, 15 bp, Homo sapiens
cactttataaatagt

SEQ ID NO: 490243 - DNA, 15 bp, Homo sapiens
tcactttataaatag

SEQ ID NO: 490244 - DNA, 15 bp, Homo sapiens
ttcactttataaata

SEQ ID NO: 490245 - DNA, 15 bp, Homo sapiens
attcactttataaat

SEQ ID NO: 490246 - DNA, 15 bp, Homo sapiens
tattcactttataaa

SEQ ID NO: 490247 - DNA, 15 bp, Homo sapiens
atattcactttataa

SEQ ID NO: 490248 - DNA, 15 bp, Homo sapiens
tatattcactttata

SEQ ID NO: 490249 - DNA, 15 bp, Homo sapiens
ctatattcactttat

SEQ ID NO: 490250 - DNA, 15 bp, Homo sapiens
tctatattcacttta

SEQ ID NO: 490251 - DNA, 15 bp, Homo sapiens
ttctatattcacttt

SEQ ID NO: 490252 - DNA, 15 bp, Homo sapiens
tttctatattcactt

SEQ ID NO: 490253 - DNA, 15 bp, Homo sapiens
atttctatattcact

SEQ ID NO: 490254 - DNA, 15 bp, Homo sapiens
aatttctatattcac

SEQ ID NO: 490255 - DNA, 15 bp, Homo sapiens
aaatttctatattca

SEQ ID NO: 490256 - DNA, 15 bp, Homo sapiens
taaatttctatattc

SEQ ID NO: 490257 - DNA, 15 bp, Homo sapiens
ataaatttctatatt

SEQ ID NO: 490258 - DNA, 15 bp, Homo sapiens
cataaatttctatat

SEQ ID NO: 490259 - DNA, 15 bp, Homo sapiens
tcataaatttctata

SEQ ID NO: 490260 - DNA, 15 bp, Homo sapiens
ctcataaatttctat

SEQ ID NO: 490261 - DNA, 15 bp, Homo sapiens
tctcataaatttcta

SEQ ID NO: 490262 - DNA, 15 bp, Homo sapiens
atctcataaatttct

SEQ ID NO: 490263 - DNA, 15 bp, Homo sapiens
aatctcataaatttc

SEQ ID NO: 490264 - DNA, 15 bp, Homo sapiens
caatctcataaattt

SEQ ID NO: 490265 - DNA, 15 bp, Homo sapiens
tcaatctcataaatt

SEQ ID NO: 490266 - DNA, 15 bp, Homo sapiens
gtcaatctcataaat

SEQ ID NO: 490267 - DNA, 15 bp, Homo sapiens
agtcaatctcataaa

SEQ ID NO: 490268 - DNA, 15 bp, Homo sapiens
tagtcaatctcataa

SEQ ID NO: 490269 - DNA, 15 bp, Homo sapiens
atagtcaatctcata

SEQ ID NO: 490270 - DNA, 15 bp, Homo sapiens
aatagtcaatctcat

SEQ ID NO: 490271 - DNA, 15 bp, Homo sapiens
aaatagtcaatctca

SEQ ID NO: 490272 - DNA, 15 bp, Homo sapiens
aaaatagtcaatctc

SEQ ID NO: 490273 - DNA, 15 bp, Homo sapiens
taaaatagtcaatct

SEQ ID NO: 490274 - DNA, 15 bp, Homo sapiens
ctaaaatagtcaatc

SEQ ID NO: 490275 - DNA, 15 bp, Homo sapiens
tctaaaatagtcaat

SEQ ID NO: 490276 - DNA, 15 bp, Homo sapiens
ctctaaaatagtcaa

SEQ ID NO: 490277 - DNA, 15 bp, Homo sapiens
actctaaaatagtca

SEQ ID NO: 490278 - DNA, 15 bp, Homo sapiens
aactctaaaatagtc

SEQ ID NO: 490279 - DNA, 15 bp, Homo sapiens
aaactctaaaatagt

SEQ ID NO: 490280 - DNA, 15 bp, Homo sapiens
gaaactctaaaatag

SEQ ID NO: 490281 - DNA, 15 bp, Homo sapiens
tgaaactctaaaata

SEQ ID NO: 490282 - DNA, 15 bp, Homo sapiens
atgaaactctaaaat

SEQ ID NO: 490283 - DNA, 15 bp, Homo sapiens
aatgaaactctaaaa

SEQ ID NO: 490284 - DNA, 15 bp, Homo sapiens
aaatgaaactctaaa

SEQ ID NO: 490285 - DNA, 15 bp, Homo sapiens
caaatgaaactctaa

SEQ ID NO: 490286 - DNA, 15 bp, Homo sapiens
tcaaatgaaactcta

SEQ ID NO: 490287 - DNA, 15 bp, Homo sapiens
ttcaaatgaaactct

SEQ ID NO: 490288 - DNA, 15 bp, Homo sapiens
cttcaaatgaaactc

SEQ ID NO: 490289 - DNA, 15 bp, Homo sapiens
tcttcaaatgaaact

SEQ ID NO: 490290 - DNA, 15 bp, Homo sapiens
gtcttcaaatgaaac

SEQ ID NO: 490291 - DNA, 15 bp, Homo sapiens
tgtcttcaaatgaaa

SEQ ID NO: 490292 - DNA, 15 bp, Homo sapiens
atgtcttcaaatgaa

SEQ ID NO: 490293 - DNA, 15 bp, Homo sapiens
aatgtcttcaaatga

SEQ ID NO: 490294 - DNA, 15 bp, Homo sapiens
aaatgtcttcaaatg

SEQ ID NO: 490295 - DNA, 15 bp, Homo sapiens
taaatgtcttcaaat

SEQ ID NO: 490296 - DNA, 15 bp, Homo sapiens
ataaatgtcttcaaa

SEQ ID NO: 490297 - DNA, 15 bp, Homo sapiens
aataaatgtcttcaa

SEQ ID NO: 490298 - DNA, 15 bp, Homo sapiens
taataaatgtcttca

SEQ ID NO: 490299 - DNA, 15 bp, Homo sapiens
ataataaatgtcttc

SEQ ID NO: 490300 - DNA, 15 bp, Homo sapiens
cataataaatgtctt

SEQ ID NO: 490301 - DNA, 15 bp, Homo sapiens
ccataataaatgtct

SEQ ID NO: 490302 - DNA, 15 bp, Homo sapiens
gccataataaatgtc

SEQ ID NO: 490303 - DNA, 15 bp, Homo sapiens
tgccataataaatgt

SEQ ID NO: 490304 - DNA, 15 bp, Homo sapiens
ttgccataataaatg

SEQ ID NO: 490305 - DNA, 15 bp, Homo sapiens
attgccataataaat

SEQ ID NO: 490306 - DNA, 15 bp, Homo sapiens
tattgccataataaa

SEQ ID NO: 490307 - DNA, 15 bp, Homo sapiens
atattgccataataa

SEQ ID NO: 490308 - DNA, 15 bp, Homo sapiens
aatattgccataata

SEQ ID NO: 490309 - DNA, 15 bp, Homo sapiens
aaatattgccataat

SEQ ID NO: 490310 - DNA, 15 bp, Homo sapiens
aaaatattgccataa

SEQ ID NO: 490311 - DNA, 15 bp, Homo sapiens
aaaaatattgccata

SEQ ID NO: 490312 - DNA, 15 bp, Homo sapiens
caaaaatattgccat

SEQ ID NO: 490313 - DNA, 15 bp, Homo sapiens
acaaaaatattgcca

SEQ ID NO: 490314 - DNA, 15 bp, Homo sapiens
gacaaaaatattgcc

SEQ ID NO: 490315 - DNA, 15 bp, Homo sapiens
agacaaaaatattgc

SEQ ID NO: 490316 - DNA, 15 bp, Homo sapiens
aagacaaaaatattg

SEQ ID NO: 490317 - DNA, 15 bp, Homo sapiens
caagacaaaaatatt

SEQ ID NO: 490318 - DNA, 15 bp, Homo sapiens
tcaagacaaaaatat

SEQ ID NO: 490319 - DNA, 15 bp, Homo sapiens
ttcaagacaaaaata

SEQ ID NO: 490320 - DNA, 15 bp, Homo sapiens
tttcaagacaaaaat

SEQ ID NO: 490321 - DNA, 15 bp, Homo sapiens
ttttcaagacaaaaa

SEQ ID NO: 490322 - DNA, 15 bp, Homo sapiens
tttttcaagacaaaa

SEQ ID NO: 490323 - DNA, 15 bp, Homo sapiens
atttttcaagacaaa

SEQ ID NO: 490324 - DNA, 15 bp, Homo sapiens
gatttttcaagacaa

SEQ ID NO: 490325 - DNA, 15 bp, Homo sapiens
tgatttttcaagaca

SEQ ID NO: 490326 - DNA, 15 bp, Homo sapiens
gtgatttttcaagac

SEQ ID NO: 490327 - DNA, 15 bp, Homo sapiens
tgtgatttttcaaga

SEQ ID NO: 490328 - DNA, 15 bp, Homo sapiens
atgtgatttttcaag

SEQ ID NO: 490329 - DNA, 15 bp, Homo sapiens
catgtgatttttcaa

SEQ ID NO: 490330 - DNA, 15 bp, Homo sapiens
tcatgtgatttttca

SEQ ID NO: 490331 - DNA, 15 bp, Homo sapiens
ttcatgtgatttttc

SEQ ID NO: 490332 - DNA, 15 bp, Homo sapiens
tttcatgtgattttt

SEQ ID NO: 490333 - DNA, 15 bp, Homo sapiens
atttcatgtgatttt

SEQ ID NO: 490334 - DNA, 15 bp, Homo sapiens
aatttcatgtgattt

SEQ ID NO: 490335 - DNA, 15 bp, Homo sapiens
taatttcatgtgatt

SEQ ID NO: 490336 - DNA, 15 bp, Homo sapiens
ataatttcatgtgat

SEQ ID NO: 490337 - DNA, 15 bp, Homo sapiens
aataatttcatgtga

SEQ ID NO: 490338 - DNA, 15 bp, Homo sapiens
gaataatttcatgtg

SEQ ID NO: 490339 - DNA, 15 bp, Homo sapiens
agaataatttcatgt

SEQ ID NO: 490340 - DNA, 15 bp, Homo sapiens
aagaataatttcatg

SEQ ID NO: 490341 - DNA, 15 bp, Homo sapiens
taagaataatttcat

SEQ ID NO: 490342 - DNA, 15 bp, Homo sapiens
ctaagaataatttca

SEQ ID NO: 490343 - DNA, 15 bp, Homo sapiens
tctaagaataatttc

SEQ ID NO: 490344 - DNA, 15 bp, Homo sapiens
atctaagaataattt

SEQ ID NO: 490345 - DNA, 15 bp, Homo sapiens
tatctaagaataatt

SEQ ID NO: 490346 - DNA, 15 bp, Homo sapiens
atatctaagaataat

SEQ ID NO: 490347 - DNA, 15 bp, Homo sapiens
aatatctaagaataa

SEQ ID NO: 490348 - DNA, 15 bp, Homo sapiens
aaatatctaagaata

SEQ ID NO: 490349 - DNA, 15 bp, Homo sapiens
caaatatctaagaat

SEQ ID NO: 490350 - DNA, 15 bp, Homo sapiens
ccaaatatctaagaa

SEQ ID NO: 490351 - DNA, 15 bp, Homo sapiens
tccaaatatctaaga

SEQ ID NO: 490352 - DNA, 15 bp, Homo sapiens
gtccaaatatctaag

SEQ ID NO: 490353 - DNA, 15 bp, Homo sapiens
agtccaaatatctaa

SEQ ID NO: 490354 - DNA, 15 bp, Homo sapiens
aagtccaaatatcta

SEQ ID NO: 490355 - DNA, 15 bp, Homo sapiens
gaagtccaaatatct

SEQ ID NO: 490356 - DNA, 15 bp, Homo sapiens
agaagtccaaatatc

SEQ ID NO: 490357 - DNA, 15 bp, Homo sapiens
cagaagtccaaatat

SEQ ID NO: 490358 - DNA, 15 bp, Homo sapiens
tcagaagtccaaata

SEQ ID NO: 490359 - DNA, 15 bp, Homo sapiens
atcagaagtccaaat

SEQ ID NO: 490360 - DNA, 15 bp, Homo sapiens
gatcagaagtccaaa

SEQ ID NO: 490361 - DNA, 15 bp, Homo sapiens
agatcagaagtccaa

SEQ ID NO: 490362 - DNA, 15 bp, Homo sapiens
aagatcagaagtcca

SEQ ID NO: 490363 - DNA, 15 bp, Homo sapiens
taagatcagaagtcc

SEQ ID NO: 490364 - DNA, 15 bp, Homo sapiens
ttaagatcagaagtc

SEQ ID NO: 490365 - DNA, 15 bp, Homo sapiens
tttaagatcagaagt

SEQ ID NO: 490366 - DNA, 15 bp, Homo sapiens
atttaagatcagaag

SEQ ID NO: 490367 - DNA, 15 bp, Homo sapiens
aatttaagatcagaa

SEQ ID NO: 490368 - DNA, 15 bp, Homo sapiens
gaatttaagatcaga

SEQ ID NO: 490369 - DNA, 15 bp, Homo sapiens
tgaatttaagatcag

SEQ ID NO: 490370 - DNA, 15 bp, Homo sapiens
atgaatttaagatca

SEQ ID NO: 490371 - DNA, 15 bp, Homo sapiens
aatgaatttaagatc

SEQ ID NO: 490372 - DNA, 15 bp, Homo sapiens
gaatgaatttaagat

SEQ ID NO: 490373 - DNA, 15 bp, Homo sapiens
cgaatgaatttaaga

SEQ ID NO: 490374 - DNA, 15 bp, Homo sapiens
acgaatgaatttaag

SEQ ID NO: 490375 - DNA, 15 bp, Homo sapiens
tacgaatgaatttaa

SEQ ID NO: 490376 - DNA, 15 bp, Homo sapiens
ctacgaatgaattta

SEQ ID NO: 490377 - DNA, 15 bp, Homo sapiens
actacgaatgaattt

SEQ ID NO: 490378 - DNA, 15 bp, Homo sapiens
cactacgaatgaatt

SEQ ID NO: 490379 - DNA, 15 bp, Homo sapiens
acactacgaatgaat

SEQ ID NO: 490380 - DNA, 15 bp, Homo sapiens
tacactacgaatgaa

SEQ ID NO: 490381 - DNA, 15 bp, Homo sapiens
ttacactacgaatga

SEQ ID NO: 490382 - DNA, 15 bp, Homo sapiens
tttacactacgaatg

SEQ ID NO: 490383 - DNA, 15 bp, Homo sapiens
atttacactacgaat

SEQ ID NO: 490384 - DNA, 15 bp, Homo sapiens
aatttacactacgaa

SEQ ID NO: 490385 - DNA, 15 bp, Homo sapiens
aaatttacactacga

SEQ ID NO: 490386 - DNA, 15 bp, Homo sapiens
aaaatttacactacg

SEQ ID NO: 490387 - DNA, 15 bp, Homo sapiens
aaaaatttacactac

SEQ ID NO: 490388 - DNA, 15 bp, Homo sapiens
aaaaaatttacacta

SEQ ID NO: 490389 - DNA, 15 bp, Homo sapiens
aaaaaaatttacact

SEQ ID NO: 490390 - DNA, 15 bp, Homo sapiens
aaaaaaaatttacac

SEQ ID NO: 490391 - DNA, 15 bp, Homo sapiens
gaaaaaaaatttaca

SEQ ID NO: 490392 - DNA, 15 bp, Homo sapiens
agaaaaaaaatttac

SEQ ID NO: 490393 - DNA, 15 bp, Homo sapiens
tagaaaaaaaattta

SEQ ID NO: 490394 - DNA, 15 bp, Homo sapiens
ttagaaaaaaaattt

SEQ ID NO: 490395 - DNA, 15 bp, Homo sapiens
attagaaaaaaaatt

SEQ ID NO: 490396 - DNA, 15 bp, Homo sapiens
cattagaaaaaaaat

SEQ ID NO: 490397 - DNA, 15 bp, Homo sapiens
tcattagaaaaaaaa

SEQ ID NO: 490398 - DNA, 15 bp, Homo sapiens
atcattagaaaaaaa

SEQ ID NO: 490399 - DNA, 15 bp, Homo sapiens
aatcattagaaaaaa

SEQ ID NO: 490400 - DNA, 15 bp, Homo sapiens
gaatcattagaaaaa

SEQ ID NO: 490401 - DNA, 15 bp, Homo sapiens
agaatcattagaaaa

SEQ ID NO: 490402 - DNA, 15 bp, Homo sapiens
aagaatcattagaaa

SEQ ID NO: 490403 - DNA, 15 bp, Homo sapiens
caagaatcattagaa

SEQ ID NO: 490404 - DNA, 15 bp, Homo sapiens
ccaagaatcattaga

SEQ ID NO: 490405 - DNA, 15 bp, Homo sapiens
accaagaatcattag

SEQ ID NO: 490406 - DNA, 15 bp, Homo sapiens
aaccaagaatcatta

SEQ ID NO: 490407 - DNA, 15 bp, Homo sapiens
gaaccaagaatcatt

SEQ ID NO: 490408 - DNA, 15 bp, Homo sapiens
tgaaccaagaatcat

SEQ ID NO: 490409 - DNA, 15 bp, Homo sapiens
ttgaaccaagaatca

SEQ ID NO: 490410 - DNA, 15 bp, Homo sapiens
attgaaccaagaatc

SEQ ID NO: 490411 - DNA, 15 bp, Homo sapiens
cattgaaccaagaat

SEQ ID NO: 490412 - DNA, 15 bp, Homo sapiens
acattgaaccaagaa

SEQ ID NO: 490413 - DNA, 15 bp, Homo sapiens
tacattgaaccaaga

SEQ ID NO: 490414 - DNA, 15 bp, Homo sapiens
gtacattgaaccaag

SEQ ID NO: 490415 - DNA, 15 bp, Homo sapiens
ggtacattgaaccaa

SEQ ID NO: 490416 - DNA, 15 bp, Homo sapiens
aggtacattgaacca

SEQ ID NO: 490417 - DNA, 15 bp, Homo sapiens
gaggtacattgaacc

SEQ ID NO: 490418 - DNA, 15 bp, Homo sapiens
tgaggtacattgaac

SEQ ID NO: 490419 - DNA, 15 bp, Homo sapiens
atgaggtacattgaa

SEQ ID NO: 490420 - DNA, 15 bp, Homo sapiens
tatgaggtacattga

SEQ ID NO: 490421 - DNA, 15 bp, Homo sapiens
ttatgaggtacattg

SEQ ID NO: 490422 - DNA, 15 bp, Homo sapiens
cttatgaggtacatt

SEQ ID NO: 490423 - DNA, 15 bp, Homo sapiens
acttatgaggtacat

SEQ ID NO: 490424 - DNA, 15 bp, Homo sapiens
aacttatgaggtaca

SEQ ID NO: 490425 - DNA, 15 bp, Homo sapiens
gaacttatgaggtac

SEQ ID NO: 490426 - DNA, 15 bp, Homo sapiens
agaacttatgaggta

SEQ ID NO: 490427 - DNA, 15 bp, Homo sapiens
gagaacttatgaggt

SEQ ID NO: 490428 - DNA, 15 bp, Homo sapiens
agagaacttatgagg

SEQ ID NO: 490429 - DNA, 15 bp, Homo sapiens
aagagaacttatgag

SEQ ID NO: 490430 - DNA, 15 bp, Homo sapiens
gaagagaacttatga

SEQ ID NO: 490431 - DNA, 15 bp, Homo sapiens
agaagagaacttatg

SEQ ID NO: 490432 - DNA, 15 bp, Homo sapiens
gagaagagaacttat

SEQ ID NO: 490433 - DNA, 15 bp, Homo sapiens
ggagaagagaactta

SEQ ID NO: 490434 - DNA, 15 bp, Homo sapiens
gggagaagagaactt

SEQ ID NO: 490435 - DNA, 15 bp, Homo sapiens
tgggagaagagaact

SEQ ID NO: 490436 - DNA, 15 bp, Homo sapiens
atgggagaagagaac

SEQ ID NO: 490437 - DNA, 15 bp, Homo sapiens
catgggagaagagaa

SEQ ID NO: 490438 - DNA, 15 bp, Homo sapiens
ccatgggagaagaga

SEQ ID NO: 490439 - DNA, 15 bp, Homo sapiens
accatgggagaagag

SEQ ID NO: 490440 - DNA, 15 bp, Homo sapiens
aaccatgggagaaga

SEQ ID NO: 490441 - DNA, 15 bp, Homo sapiens
gaaccatgggagaag

SEQ ID NO: 490442 - DNA, 15 bp, Homo sapiens
agaaccatgggagaa

SEQ ID NO: 490443 - DNA, 15 bp, Homo sapiens
aagaaccatgggaga

SEQ ID NO: 490444 - DNA, 15 bp, Homo sapiens
aaagaaccatgggag

SEQ ID NO: 490445 - DNA, 15 bp, Homo sapiens
taaagaaccatggga

SEQ ID NO: 490446 - DNA, 15 bp, Homo sapiens
ctaaagaaccatggg

SEQ ID NO: 490447 - DNA, 15 bp, Homo sapiens
gctaaagaaccatgg

SEQ ID NO: 490448 - DNA, 15 bp, Homo sapiens
ggctaaagaaccatg

SEQ ID NO: 490449 - DNA, 15 bp, Homo sapiens
tggctaaagaaccat

SEQ ID NO: 490450 - DNA, 15 bp, Homo sapiens
ctggctaaagaacca

SEQ ID NO: 490451 - DNA, 15 bp, Homo sapiens
actggctaaagaacc

SEQ ID NO: 490452 - DNA, 15 bp, Homo sapiens
gactggctaaagaac

SEQ ID NO: 490453 - DNA, 15 bp, Homo sapiens
ggactggctaaagaa

SEQ ID NO: 490454 - DNA, 15 bp, Homo sapiens
tggactggctaaaga

SEQ ID NO: 490455 - DNA, 15 bp, Homo sapiens
gtggactggctaaag

SEQ ID NO: 490456 - DNA, 15 bp, Homo sapiens
tgtggactggctaaa

SEQ ID NO: 490457 - DNA, 15 bp, Homo sapiens
gtgtggactggctaa

SEQ ID NO: 490458 - DNA, 15 bp, Homo sapiens
tgtgtggactggcta

SEQ ID NO: 490459 - DNA, 15 bp, Homo sapiens
atgtgtggactggct

SEQ ID NO: 490460 - DNA, 15 bp, Homo sapiens
aatgtgtggactggc

SEQ ID NO: 490461 - DNA, 15 bp, Homo sapiens
aaatgtgtggactgg

SEQ ID NO: 490462 - DNA, 15 bp, Homo sapiens
aaaatgtgtggactg

SEQ ID NO: 490463 - DNA, 15 bp, Homo sapiens
aaaaatgtgtggact

SEQ ID NO: 490464 - DNA, 15 bp, Homo sapiens
aaaaaatgtgtggac

SEQ ID NO: 490465 - DNA, 15 bp, Homo sapiens
aaaaaaatgtgtgga

SEQ ID NO: 490466 - DNA, 15 bp, Homo sapiens
aaaaaaaatgtgtgg

SEQ ID NO: 490467 - DNA, 15 bp, Homo sapiens
taaaaaaaatgtgtg

SEQ ID NO: 490468 - DNA, 15 bp, Homo sapiens
ttaaaaaaaatgtgt

SEQ ID NO: 490469 - DNA, 15 bp, Homo sapiens
tttaaaaaaaatgtg

SEQ ID NO: 490470 - DNA, 15 bp, Homo sapiens
ctttaaaaaaaatgt

SEQ ID NO: 490471 - DNA, 15 bp, Homo sapiens
gctttaaaaaaaatg

SEQ ID NO: 490472 - DNA, 15 bp, Homo sapiens
tgctttaaaaaaaat

SEQ ID NO: 490473 - DNA, 15 bp, Homo sapiens
atgctttaaaaaaaa

SEQ ID NO: 490474 - DNA, 15 bp, Homo sapiens
gatgctttaaaaaaa

SEQ ID NO: 490475 - DNA, 15 bp, Homo sapiens
tgatgctttaaaaaa

SEQ ID NO: 490476 - DNA, 15 bp, Homo sapiens
gtgatgctttaaaaa

SEQ ID NO: 490477 - DNA, 15 bp, Homo sapiens
tgtgatgctttaaaa

SEQ ID NO: 490478 - DNA, 15 bp, Homo sapiens
atgtgatgctttaaa

SEQ ID NO: 490479 - DNA, 15 bp, Homo sapiens
aatgtgatgctttaa

SEQ ID NO: 490480 - DNA, 15 bp, Homo sapiens
gaatgtgatgcttta

SEQ ID NO: 490481 - DNA, 15 bp, Homo sapiens
agaatgtgatgcttt

SEQ ID NO: 490482 - DNA, 15 bp, Homo sapiens
gagaatgtgatgctt

SEQ ID NO: 490483 - DNA, 15 bp, Homo sapiens
tgagaatgtgatgct

SEQ ID NO: 490484 - DNA, 15 bp, Homo sapiens
ttgagaatgtgatgc

SEQ ID NO: 490485 - DNA, 15 bp, Homo sapiens
tttgagaatgtgatg

SEQ ID NO: 490486 - DNA, 15 bp, Homo sapiens
atttgagaatgtgat

SEQ ID NO: 490487 - DNA, 15 bp, Homo sapiens
tatttgagaatgtga

SEQ ID NO: 490488 - DNA, 15 bp, Homo sapiens
ttatttgagaatgtg

SEQ ID NO: 490489 - DNA, 15 bp, Homo sapiens
cttatttgagaatgt

SEQ ID NO: 490490 - DNA, 15 bp, Homo sapiens
tcttatttgagaatg

SEQ ID NO: 490491 - DNA, 15 bp, Homo sapiens
atcttatttgagaat

SEQ ID NO: 490492 - DNA, 15 bp, Homo sapiens
tatcttatttgagaa

SEQ ID NO: 490493 - DNA, 15 bp, Homo sapiens
ttatcttatttgaga

SEQ ID NO: 490494 - DNA, 15 bp, Homo sapiens
tttatcttatttgag

SEQ ID NO: 490495 - DNA, 15 bp, Homo sapiens
ttttatcttatttga

SEQ ID NO: 490496 - DNA, 15 bp, Homo sapiens
cttttatcttatttg

SEQ ID NO: 490497 - DNA, 15 bp, Homo sapiens
acttttatcttattt

SEQ ID NO: 490498 - DNA, 15 bp, Homo sapiens
aacttttatcttatt

SEQ ID NO: 490499 - DNA, 15 bp, Homo sapiens
aaacttttatcttat

SEQ ID NO: 490500 - DNA, 15 bp, Homo sapiens
aaaacttttatctta

SEQ ID NO: 490501 - DNA, 15 bp, Homo sapiens
taaaacttttatctt

SEQ ID NO: 490502 - DNA, 15 bp, Homo sapiens
ctaaaacttttatct

SEQ ID NO: 490503 - DNA, 15 bp, Homo sapiens
actaaaacttttatc

SEQ ID NO: 490504 - DNA, 15 bp, Homo sapiens
cactaaaacttttat

SEQ ID NO: 490505 - DNA, 15 bp, Homo sapiens
tcactaaaactttta

SEQ ID NO: 490506 - DNA, 15 bp, Homo sapiens
atcactaaaactttt

SEQ ID NO: 490507 - DNA, 15 bp, Homo sapiens
catcactaaaacttt

SEQ ID NO: 490508 - DNA, 15 bp, Homo sapiens
acatcactaaaactt

SEQ ID NO: 490509 - DNA, 15 bp, Homo sapiens
cacatcactaaaact

SEQ ID NO: 490510 - DNA, 15 bp, Homo sapiens
acacatcactaaaac

SEQ ID NO: 490511 - DNA, 15 bp, Homo sapiens
tacacatcactaaaa

SEQ ID NO: 490512 - DNA, 15 bp, Homo sapiens
atacacatcactaaa

SEQ ID NO: 490513 - DNA, 15 bp, Homo sapiens
aatacacatcactaa

SEQ ID NO: 490514 - DNA, 15 bp, Homo sapiens
caatacacatcacta

SEQ ID NO: 490515 - DNA, 15 bp, Homo sapiens
tcaatacacatcact

SEQ ID NO: 490516 - DNA, 15 bp, Homo sapiens
ctcaatacacatcac

SEQ ID NO: 490517 - DNA, 15 bp, Homo sapiens
cctcaatacacatca

SEQ ID NO: 490518 - DNA, 15 bp, Homo sapiens
ccctcaatacacatc

SEQ ID NO: 490519 - DNA, 15 bp, Homo sapiens
accctcaatacacat

SEQ ID NO: 490520 - DNA, 15 bp, Homo sapiens
aaccctcaatacaca

SEQ ID NO: 490521 - DNA, 15 bp, Homo sapiens
aaaccctcaatacac

SEQ ID NO: 490522 - DNA, 15 bp, Homo sapiens
caaaccctcaataca

SEQ ID NO: 490523 - DNA, 15 bp, Homo sapiens
acaaaccctcaatac

SEQ ID NO: 490524 - DNA, 15 bp, Homo sapiens
cacaaaccctcaata

SEQ ID NO: 490525 - DNA, 15 bp, Homo sapiens
acacaaaccctcaat

SEQ ID NO: 490526 - DNA, 15 bp, Homo sapiens
tacacaaaccctcaa

SEQ ID NO: 490527 - DNA, 15 bp, Homo sapiens
ctacacaaaccctca

SEQ ID NO: 490528 - DNA, 15 bp, Homo sapiens
tctacacaaaccctc

SEQ ID NO: 490529 - DNA, 15 bp, Homo sapiens
ttctacacaaaccct

SEQ ID NO: 490530 - DNA, 15 bp, Homo sapiens
cttctacacaaaccc

SEQ ID NO: 490531 - DNA, 15 bp, Homo sapiens
acttctacacaaacc

SEQ ID NO: 490532 - DNA, 15 bp, Homo sapiens
tacttctacacaaac

SEQ ID NO: 490533 - DNA, 15 bp, Homo sapiens
ctacttctacacaaa

SEQ ID NO: 490534 - DNA, 15 bp, Homo sapiens
actacttctacacaa

SEQ ID NO: 490535 - DNA, 15 bp, Homo sapiens
tactacttctacaca

SEQ ID NO: 490536 - DNA, 15 bp, Homo sapiens
ttactacttctacac

SEQ ID NO: 490537 - DNA, 15 bp, Homo sapiens
cttactacttctaca

SEQ ID NO: 490538 - DNA, 15 bp, Homo sapiens
ccttactacttctac

SEQ ID NO: 490539 - DNA, 15 bp, Homo sapiens
accttactacttcta

SEQ ID NO: 490540 - DNA, 15 bp, Homo sapiens
caccttactacttct

SEQ ID NO: 490541 - DNA, 15 bp, Homo sapiens
acaccttactacttc

SEQ ID NO: 490542 - DNA, 15 bp, Homo sapiens
aacaccttactactt

SEQ ID NO: 490543 - DNA, 15 bp, Homo sapiens
aaacaccttactact

SEQ ID NO: 490544 - DNA, 15 bp, Homo sapiens
caaacaccttactac

SEQ ID NO: 490545 - DNA, 15 bp, Homo sapiens
ccaaacaccttacta

SEQ ID NO: 490546 - DNA, 15 bp, Homo sapiens
tccaaacaccttact

SEQ ID NO: 490547 - DNA, 15 bp, Homo sapiens
ctccaaacaccttac

SEQ ID NO: 490548 - DNA, 15 bp, Homo sapiens
actccaaacacctta

SEQ ID NO: 490549 - DNA, 15 bp, Homo sapiens
aactccaaacacctt

SEQ ID NO: 490550 - DNA, 15 bp, Homo sapiens
gaactccaaacacct

SEQ ID NO: 490551 - DNA, 15 bp, Homo sapiens
agaactccaaacacc

SEQ ID NO: 490552 - DNA, 15 bp, Homo sapiens
tagaactccaaacac

SEQ ID NO: 490553 - DNA, 15 bp, Homo sapiens
gtagaactccaaaca

SEQ ID NO: 490554 - DNA, 15 bp, Homo sapiens
agtagaactccaaac

SEQ ID NO: 490555 - DNA, 15 bp, Homo sapiens
aagtagaactccaaa

SEQ ID NO: 490556 - DNA, 15 bp, Homo sapiens
aaagtagaactccaa

SEQ ID NO: 490557 - DNA, 15 bp, Homo sapiens
aaaagtagaactcca

SEQ ID NO: 490558 - DNA, 15 bp, Homo sapiens
caaaagtagaactcc

SEQ ID NO: 490559 - DNA, 15 bp, Homo sapiens
acaaaagtagaactc

SEQ ID NO: 490560 - DNA, 15 bp, Homo sapiens
cacaaaagtagaact

SEQ ID NO: 490561 - DNA, 15 bp, Homo sapiens
tcacaaaagtagaac

SEQ ID NO: 490562 - DNA, 15 bp, Homo sapiens
ttcacaaaagtagaa

SEQ ID NO: 490563 - DNA, 15 bp, Homo sapiens
tttcacaaaagtaga

SEQ ID NO: 490564 - DNA, 15 bp, Homo sapiens
gtttcacaaaagtag

SEQ ID NO: 490565 - DNA, 15 bp, Homo sapiens
tgtttcacaaaagta

SEQ ID NO: 490566 - DNA, 15 bp, Homo sapiens
atgtttcacaaaagt

SEQ ID NO: 490567 - DNA, 15 bp, Homo sapiens
tatgtttcacaaaag

SEQ ID NO: 490568 - DNA, 15 bp, Homo sapiens
gtatgtttcacaaaa

SEQ ID NO: 490569 - DNA, 15 bp, Homo sapiens
agtatgtttcacaaa

SEQ ID NO: 490570 - DNA, 15 bp, Homo sapiens
gagtatgtttcacaa

SEQ ID NO: 490571 - DNA, 15 bp, Homo sapiens
tgagtatgtttcaca

SEQ ID NO: 490572 - DNA, 15 bp, Homo sapiens
atgagtatgtttcac

SEQ ID NO: 490573 - DNA, 15 bp, Homo sapiens
tatgagtatgtttca

SEQ ID NO: 490574 - DNA, 15 bp, Homo sapiens
gtatgagtatgtttc

SEQ ID NO: 490575 - DNA, 15 bp, Homo sapiens
agtatgagtatgttt

SEQ ID NO: 490576 - DNA, 15 bp, Homo sapiens
gagtatgagtatgtt

SEQ ID NO: 490577 - DNA, 15 bp, Homo sapiens
tgagtatgagtatgt

SEQ ID NO: 490578 - DNA, 15 bp, Homo sapiens
ctgagtatgagtatg

SEQ ID NO: 490579 - DNA, 15 bp, Homo sapiens
actgagtatgagtat

SEQ ID NO: 490580 - DNA, 15 bp, Homo sapiens
aactgagtatgagta

SEQ ID NO: 490581 - DNA, 15 bp, Homo sapiens
gaactgagtatgagt

SEQ ID NO: 490582 - DNA, 15 bp, Homo sapiens
tgaactgagtatgag

SEQ ID NO: 490583 - DNA, 15 bp, Homo sapiens
atgaactgagtatga

SEQ ID NO: 490584 - DNA, 15 bp, Homo sapiens
tatgaactgagtatg

SEQ ID NO: 490585 - DNA, 15 bp, Homo sapiens
ttatgaactgagtat

SEQ ID NO: 490586 - DNA, 15 bp, Homo sapiens
cttatgaactgagta

SEQ ID NO: 490587 - DNA, 15 bp, Homo sapiens
acttatgaactgagt

SEQ ID NO: 490588 - DNA, 15 bp, Homo sapiens
tacttatgaactgag

SEQ ID NO: 490589 - DNA, 15 bp, Homo sapiens
gtacttatgaactga

SEQ ID NO: 490590 - DNA, 15 bp, Homo sapiens
agtacttatgaactg

SEQ ID NO: 490591 - DNA, 15 bp, Homo sapiens
cagtacttatgaact

SEQ ID NO: 490592 - DNA, 15 bp, Homo sapiens
tcagtacttatgaac

SEQ ID NO: 490593 - DNA, 15 bp, Homo sapiens
ctcagtacttatgaa

SEQ ID NO: 490594 - DNA, 15 bp, Homo sapiens
actcagtacttatga

SEQ ID NO: 490595 - DNA, 15 bp, Homo sapiens
aactcagtacttatg

SEQ ID NO: 490596 - DNA, 15 bp, Homo sapiens
aaactcagtacttat

SEQ ID NO: 490597 - DNA, 15 bp, Homo sapiens
taaactcagtactta

SEQ ID NO: 490598 - DNA, 15 bp, Homo sapiens
ctaaactcagtactt

SEQ ID NO: 490599 - DNA, 15 bp, Homo sapiens
tctaaactcagtact

SEQ ID NO: 490600 - DNA, 15 bp, Homo sapiens
atctaaactcagtac

SEQ ID NO: 490601 - DNA, 15 bp, Homo sapiens
gatctaaactcagta

SEQ ID NO: 490602 - DNA, 15 bp, Homo sapiens
agatctaaactcagt

SEQ ID NO: 490603 - DNA, 15 bp, Homo sapiens
tagatctaaactcag

SEQ ID NO: 490604 - DNA, 15 bp, Homo sapiens
ttagatctaaactca

SEQ ID NO: 490605 - DNA, 15 bp, Homo sapiens
tttagatctaaactc

SEQ ID NO: 490606 - DNA, 15 bp, Homo sapiens
ttttagatctaaact

SEQ ID NO: 490607 - DNA, 15 bp, Homo sapiens
attttagatctaaac

SEQ ID NO: 490608 - DNA, 15 bp, Homo sapiens
tattttagatctaaa

SEQ ID NO: 490609 - DNA, 15 bp, Homo sapiens
atattttagatctaa

SEQ ID NO: 490610 - DNA, 15 bp, Homo sapiens
aatattttagatcta

SEQ ID NO: 490611 - DNA, 15 bp, Homo sapiens
gaatattttagatct

SEQ ID NO: 490612 - DNA, 15 bp, Homo sapiens
agaatattttagatc

SEQ ID NO: 490613 - DNA, 15 bp, Homo sapiens
tagaatattttagat

SEQ ID NO: 490614 - DNA, 15 bp, Homo sapiens
ctagaatattttaga

SEQ ID NO: 490615 - DNA, 15 bp, Homo sapiens
actagaatattttag

SEQ ID NO: 490616 - DNA, 15 bp, Homo sapiens
cactagaatatttta

SEQ ID NO: 490617 - DNA, 15 bp, Homo sapiens
acactagaatatttt

SEQ ID NO: 490618 - DNA, 15 bp, Homo sapiens
aacactagaatattt

SEQ ID NO: 490619 - DNA, 15 bp, Homo sapiens
aaacactagaatatt

SEQ ID NO: 490620 - DNA, 15 bp, Homo sapiens
gaaacactagaatat

SEQ ID NO: 490621 - DNA, 15 bp, Homo sapiens
agaaacactagaata

SEQ ID NO: 490622 - DNA, 15 bp, Homo sapiens
aagaaacactagaat

SEQ ID NO: 490623 - DNA, 15 bp, Homo sapiens
gaagaaacactagaa

SEQ ID NO: 490624 - DNA, 15 bp, Homo sapiens
agaagaaacactaga

SEQ ID NO: 490625 - DNA, 15 bp, Homo sapiens
aagaagaaacactag

SEQ ID NO: 490626 - DNA, 15 bp, Homo sapiens
taagaagaaacacta

SEQ ID NO: 490627 - DNA, 15 bp, Homo sapiens
ctaagaagaaacact

SEQ ID NO: 490628 - DNA, 15 bp, Homo sapiens
tctaagaagaaacac

SEQ ID NO: 490629 - DNA, 15 bp, Homo sapiens
ttctaagaagaaaca

SEQ ID NO: 490630 - DNA, 15 bp, Homo sapiens
tttctaagaagaaac

SEQ ID NO: 490631 - DNA, 15 bp, Homo sapiens
ttttctaagaagaaa

SEQ ID NO: 490632 - DNA, 15 bp, Homo sapiens
attttctaagaagaa

SEQ ID NO: 490633 - DNA, 15 bp, Homo sapiens
gattttctaagaaga

SEQ ID NO: 490634 - DNA, 15 bp, Homo sapiens
agattttctaagaag

SEQ ID NO: 490635 - DNA, 15 bp, Homo sapiens
tagattttctaagaa

SEQ ID NO: 490636 - DNA, 15 bp, Homo sapiens
ttagattttctaaga

SEQ ID NO: 490637 - DNA, 15 bp, Homo sapiens
tttagattttctaag

SEQ ID NO: 490638 - DNA, 15 bp, Homo sapiens
ttttagattttctaa

SEQ ID NO: 490639 - DNA, 15 bp, Homo sapiens
attttagattttcta

SEQ ID NO: 490640 - DNA, 15 bp, Homo sapiens
tattttagattttct

SEQ ID NO: 490641 - DNA, 15 bp, Homo sapiens
atattttagattttc

SEQ ID NO: 490642 - DNA, 15 bp, Homo sapiens
tatattttagatttt

SEQ ID NO: 490643 - DNA, 15 bp, Homo sapiens
atatattttagattt

SEQ ID NO: 490644 - DNA, 15 bp, Homo sapiens
gatatattttagatt

SEQ ID NO: 490645 - DNA, 15 bp, Homo sapiens
ggatatattttagat

SEQ ID NO: 490646 - DNA, 15 bp, Homo sapiens
tggatatattttaga

SEQ ID NO: 490647 - DNA, 15 bp, Homo sapiens
gtggatatattttag

SEQ ID NO: 490648 - DNA, 15 bp, Homo sapiens
agtggatatatttta

SEQ ID NO: 490649 - DNA, 15 bp, Homo sapiens
tagtggatatatttt

SEQ ID NO: 490650 - DNA, 15 bp, Homo sapiens
atagtggatatattt

SEQ ID NO: 490651 - DNA, 15 bp, Homo sapiens
aatagtggatatatt

SEQ ID NO: 490652 - DNA, 15 bp, Homo sapiens
aaatagtggatatat

SEQ ID NO: 490653 - DNA, 15 bp, Homo sapiens
caaatagtggatata

SEQ ID NO: 490654 - DNA, 15 bp, Homo sapiens
tcaaatagtggatat

SEQ ID NO: 490655 - DNA, 15 bp, Homo sapiens
atcaaatagtggata

SEQ ID NO: 490656 - DNA, 15 bp, Homo sapiens
aatcaaatagtggat

SEQ ID NO: 490657 - DNA, 15 bp, Homo sapiens
gaatcaaatagtgga

SEQ ID NO: 490658 - DNA, 15 bp, Homo sapiens
agaatcaaatagtgg

SEQ ID NO: 490659 - DNA, 15 bp, Homo sapiens
aagaatcaaatagtg

SEQ ID NO: 490660 - DNA, 15 bp, Homo sapiens
taagaatcaaatagt

SEQ ID NO: 490661 - DNA, 15 bp, Homo sapiens
ataagaatcaaatag

SEQ ID NO: 490662 - DNA, 15 bp, Homo sapiens
aataagaatcaaata

SEQ ID NO: 490663 - DNA, 15 bp, Homo sapiens
taataagaatcaaat

SEQ ID NO: 490664 - DNA, 15 bp, Homo sapiens
ataataagaatcaaa

SEQ ID NO: 490665 - DNA, 15 bp, Homo sapiens
tataataagaatcaa

SEQ ID NO: 490666 - DNA, 15 bp, Homo sapiens
ttataataagaatca

SEQ ID NO: 490667 - DNA, 15 bp, Homo sapiens
attataataagaatc

SEQ ID NO: 490668 - DNA, 15 bp, Homo sapiens
cattataataagaat

SEQ ID NO: 490669 - DNA, 15 bp, Homo sapiens
gcattataataagaa

SEQ ID NO: 490670 - DNA, 15 bp, Homo sapiens
tgcattataataaga

SEQ ID NO: 490671 - DNA, 15 bp, Homo sapiens
ctgcattataataag

SEQ ID NO: 490672 - DNA, 15 bp, Homo sapiens
cctgcattataataa

SEQ ID NO: 490673 - DNA, 15 bp, Homo sapiens
acctgcattataata

SEQ ID NO: 490674 - DNA, 15 bp, Homo sapiens
aacctgcattataat

SEQ ID NO: 490675 - DNA, 15 bp, Homo sapiens
gaacctgcattataa

SEQ ID NO: 490676 - DNA, 15 bp, Homo sapiens
ggaacctgcattata

SEQ ID NO: 490677 - DNA, 15 bp, Homo sapiens
aggaacctgcattat

SEQ ID NO: 490678 - DNA, 15 bp, Homo sapiens
taggaacctgcatta

SEQ ID NO: 490679 - DNA, 15 bp, Homo sapiens
ctaggaacctgcatt

SEQ ID NO: 490680 - DNA, 15 bp, Homo sapiens
gctaggaacctgcat

SEQ ID NO: 490681 - DNA, 15 bp, Homo sapiens
tgctaggaacctgca

SEQ ID NO: 490682 - DNA, 15 bp, Homo sapiens
ctgctaggaacctgc

SEQ ID NO: 490683 - DNA, 15 bp, Homo sapiens
actgctaggaacctg

SEQ ID NO: 490684 - DNA, 15 bp, Homo sapiens
aactgctaggaacct

SEQ ID NO: 490685 - DNA, 15 bp, Homo sapiens
taactgctaggaacc

SEQ ID NO: 490686 - DNA, 15 bp, Homo sapiens
gtaactgctaggaac

SEQ ID NO: 490687 - DNA, 15 bp, Homo sapiens
agtaactgctaggaa

SEQ ID NO: 490688 - DNA, 15 bp, Homo sapiens
tagtaactgctagga

SEQ ID NO: 490689 - DNA, 15 bp, Homo sapiens
ttagtaactgctagg

SEQ ID NO: 490690 - DNA, 15 bp, Homo sapiens
tttagtaactgctag

SEQ ID NO: 490691 - DNA, 15 bp, Homo sapiens
ttttagtaactgcta

SEQ ID NO: 490692 - DNA, 15 bp, Homo sapiens
attttagtaactgct

SEQ ID NO: 490693 - DNA, 15 bp, Homo sapiens
tattttagtaactgc

SEQ ID NO: 490694 - DNA, 15 bp, Homo sapiens
ctattttagtaactg

SEQ ID NO: 490695 - DNA, 15 bp, Homo sapiens
actattttagtaact

SEQ ID NO: 490696 - DNA, 15 bp, Homo sapiens
tactattttagtaac

SEQ ID NO: 490697 - DNA, 15 bp, Homo sapiens
ctactattttagtaa

SEQ ID NO: 490698 - DNA, 15 bp, Homo sapiens
actactattttagta

SEQ ID NO: 490699 - DNA, 15 bp, Homo sapiens
aactactattttagt

SEQ ID NO: 490700 - DNA, 15 bp, Homo sapiens
caactactattttag

SEQ ID NO: 490701 - DNA, 15 bp, Homo sapiens
acaactactatttta

SEQ ID NO: 490702 - DNA, 15 bp, Homo sapiens
tacaactactatttt

SEQ ID NO: 490703 - DNA, 15 bp, Homo sapiens
gtacaactactattt

SEQ ID NO: 490704 - DNA, 15 bp, Homo sapiens
agtacaactactatt

SEQ ID NO: 490705 - DNA, 15 bp, Homo sapiens
cagtacaactactat

SEQ ID NO: 490706 - DNA, 15 bp, Homo sapiens
acagtacaactacta

SEQ ID NO: 490707 - DNA, 15 bp, Homo sapiens
gacagtacaactact

SEQ ID NO: 490708 - DNA, 15 bp, Homo sapiens
tgacagtacaactac

SEQ ID NO: 490709 - DNA, 15 bp, Homo sapiens
atgacagtacaacta

SEQ ID NO: 490710 - DNA, 15 bp, Homo sapiens
gatgacagtacaact

SEQ ID NO: 490711 - DNA, 15 bp, Homo sapiens
agatgacagtacaac

SEQ ID NO: 490712 - DNA, 15 bp, Homo sapiens
aagatgacagtacaa

SEQ ID NO: 490713 - DNA, 15 bp, Homo sapiens
aaagatgacagtaca

SEQ ID NO: 490714 - DNA, 15 bp, Homo sapiens
aaaagatgacagtac

SEQ ID NO: 490715 - DNA, 15 bp, Homo sapiens
aaaaagatgacagta

SEQ ID NO: 490716 - DNA, 15 bp, Homo sapiens
aaaaaagatgacagt

SEQ ID NO: 490717 - DNA, 15 bp, Homo sapiens
taaaaaagatgacag

SEQ ID NO: 490718 - DNA, 15 bp, Homo sapiens
ataaaaaagatgaca

SEQ ID NO: 490719 - DNA, 15 bp, Homo sapiens
aataaaaaagatgac

SEQ ID NO: 490720 - DNA, 15 bp, Homo sapiens
taataaaaaagatga

SEQ ID NO: 490721 - DNA, 15 bp, Homo sapiens
ataataaaaaagatg

SEQ ID NO: 490722 - DNA, 15 bp, Homo sapiens
cataataaaaaagat

SEQ ID NO: 490723 - DNA, 15 bp, Homo sapiens
tcataataaaaaaga

SEQ ID NO: 490724 - DNA, 15 bp, Homo sapiens
atcataataaaaaag

SEQ ID NO: 490725 - DNA, 15 bp, Homo sapiens
catcataataaaaaa

SEQ ID NO: 490726 - DNA, 15 bp, Homo sapiens
acatcataataaaaa

SEQ ID NO: 490727 - DNA, 15 bp, Homo sapiens
cacatcataataaaa

SEQ ID NO: 490728 - DNA, 15 bp, Homo sapiens
gcacatcataataaa

SEQ ID NO: 490729 - DNA, 15 bp, Homo sapiens
ggcacatcataataa

SEQ ID NO: 490730 - DNA, 15 bp, Homo sapiens
tggcacatcataata

SEQ ID NO: 490731 - DNA, 15 bp, Homo sapiens
atggcacatcataat

SEQ ID NO: 490732 - DNA, 15 bp, Homo sapiens
tatggcacatcataa

SEQ ID NO: 490733 - DNA, 15 bp, Homo sapiens
ttatggcacatcata

SEQ ID NO: 490734 - DNA, 15 bp, Homo sapiens
cttatggcacatcat

SEQ ID NO: 490735 - DNA, 15 bp, Homo sapiens
tcttatggcacatca

SEQ ID NO: 490736 - DNA, 15 bp, Homo sapiens
ctcttatggcacatc

SEQ ID NO: 490737 - DNA, 15 bp, Homo sapiens
tctcttatggcacat

SEQ ID NO: 490738 - DNA, 15 bp, Homo sapiens
atctcttatggcaca

SEQ ID NO: 490739 - DNA, 15 bp, Homo sapiens
catctcttatggcac

SEQ ID NO: 490740 - DNA, 15 bp, Homo sapiens
tcatctcttatggca

SEQ ID NO: 490741 - DNA, 15 bp, Homo sapiens
ttcatctcttatggc

SEQ ID NO: 490742 - DNA, 15 bp, Homo sapiens
attcatctcttatgg

SEQ ID NO: 490743 - DNA, 15 bp, Homo sapiens
aattcatctcttatg

SEQ ID NO: 490744 - DNA, 15 bp, Homo sapiens
taattcatctcttat

SEQ ID NO: 490745 - DNA, 15 bp, Homo sapiens
ttaattcatctctta

SEQ ID NO: 490746 - DNA, 15 bp, Homo sapiens
attaattcatctctt

SEQ ID NO: 490747 - DNA, 15 bp, Homo sapiens
tattaattcatctct

SEQ ID NO: 490748 - DNA, 15 bp, Homo sapiens
ctattaattcatctc

SEQ ID NO: 490749 - DNA, 15 bp, Homo sapiens
actattaattcatct

SEQ ID NO: 490750 - DNA, 15 bp, Homo sapiens
aactattaattcatc

SEQ ID NO: 490751 - DNA, 15 bp, Homo sapiens
caactattaattcat

SEQ ID NO: 490752 - DNA, 15 bp, Homo sapiens
acaactattaattca

SEQ ID NO: 490753 - DNA, 15 bp, Homo sapiens
tacaactattaattc

SEQ ID NO: 490754 - DNA, 15 bp, Homo sapiens
ttacaactattaatt

SEQ ID NO: 490755 - DNA, 15 bp, Homo sapiens
cttacaactattaat

SEQ ID NO: 490756 - DNA, 15 bp, Homo sapiens
tcttacaactattaa

SEQ ID NO: 490757 - DNA, 15 bp, Homo sapiens
atcttacaactatta

SEQ ID NO: 490758 - DNA, 15 bp, Homo sapiens
gatcttacaactatt

SEQ ID NO: 490759 - DNA, 15 bp, Homo sapiens
agatcttacaactat

SEQ ID NO: 490760 - DNA, 15 bp, Homo sapiens
tagatcttacaacta

SEQ ID NO: 490761 - DNA, 15 bp, Homo sapiens
atagatcttacaact

SEQ ID NO: 490762 - DNA, 15 bp, Homo sapiens
catagatcttacaac

SEQ ID NO: 490763 - DNA, 15 bp, Homo sapiens
acatagatcttacaa

SEQ ID NO: 490764 - DNA, 15 bp, Homo sapiens
aacatagatcttaca

SEQ ID NO: 490765 - DNA, 15 bp, Homo sapiens
taacatagatcttac

SEQ ID NO: 490766 - DNA, 15 bp, Homo sapiens
ataacatagatctta

SEQ ID NO: 490767 - DNA, 15 bp, Homo sapiens
tataacatagatctt

SEQ ID NO: 490768 - DNA, 15 bp, Homo sapiens
atataacatagatct

SEQ ID NO: 490769 - DNA, 15 bp, Homo sapiens
catataacatagatc

SEQ ID NO: 490770 - DNA, 15 bp, Homo sapiens
gcatataacatagat

SEQ ID NO: 490771 - DNA, 15 bp, Homo sapiens
tgcatataacataga

SEQ ID NO: 490772 - DNA, 15 bp, Homo sapiens
atgcatataacatag

SEQ ID NO: 490773 - DNA, 15 bp, Homo sapiens
tatgcatataacata

SEQ ID NO: 490774 - DNA, 15 bp, Homo sapiens
ttatgcatataacat

SEQ ID NO: 490775 - DNA, 15 bp, Homo sapiens
attatgcatataaca

SEQ ID NO: 490776 - DNA, 15 bp, Homo sapiens
gattatgcatataac

SEQ ID NO: 490777 - DNA, 15 bp, Homo sapiens
agattatgcatataa

SEQ ID NO: 490778 - DNA, 15 bp, Homo sapiens
aagattatgcatata

SEQ ID NO: 490779 - DNA, 15 bp, Homo sapiens
gaagattatgcatat

SEQ ID NO: 490780 - DNA, 15 bp, Homo sapiens
tgaagattatgcata

SEQ ID NO: 490781 - DNA, 15 bp, Homo sapiens
atgaagattatgcat

SEQ ID NO: 490782 - DNA, 15 bp, Homo sapiens
tatgaagattatgca

SEQ ID NO: 490783 - DNA, 15 bp, Homo sapiens
ctatgaagattatgc

SEQ ID NO: 490784 - DNA, 15 bp, Homo sapiens
tctatgaagattatg

SEQ ID NO: 490785 - DNA, 15 bp, Homo sapiens
gtctatgaagattat

SEQ ID NO: 490786 - DNA, 15 bp, Homo sapiens
agtctatgaagatta

SEQ ID NO: 490787 - DNA, 15 bp, Homo sapiens
aagtctatgaagatt

SEQ ID NO: 490788 - DNA, 15 bp, Homo sapiens
gaagtctatgaagat

SEQ ID NO: 490789 - DNA, 15 bp, Homo sapiens
ggaagtctatgaaga

SEQ ID NO: 490790 - DNA, 15 bp, Homo sapiens
aggaagtctatgaag

SEQ ID NO: 490791 - DNA, 15 bp, Homo sapiens
aaggaagtctatgaa

SEQ ID NO: 490792 - DNA, 15 bp, Homo sapiens
aaaggaagtctatga

SEQ ID NO: 490793 - DNA, 15 bp, Homo sapiens
taaaggaagtctatg

SEQ ID NO: 490794 - DNA, 15 bp, Homo sapiens
ctaaaggaagtctat

SEQ ID NO: 490795 - DNA, 15 bp, Homo sapiens
cctaaaggaagtcta

SEQ ID NO: 490796 - DNA, 15 bp, Homo sapiens
acctaaaggaagtct

SEQ ID NO: 490797 - DNA, 15 bp, Homo sapiens
aacctaaaggaagtc

SEQ ID NO: 490798 - DNA, 15 bp, Homo sapiens
taacctaaaggaagt

SEQ ID NO: 490799 - DNA, 15 bp, Homo sapiens
ttaacctaaaggaag

SEQ ID NO: 490800 - DNA, 15 bp, Homo sapiens
tttaacctaaaggaa

SEQ ID NO: 490801 - DNA, 15 bp, Homo sapiens
atttaacctaaagga

SEQ ID NO: 490802 - DNA, 15 bp, Homo sapiens
aatttaacctaaagg

SEQ ID NO: 490803 - DNA, 15 bp, Homo sapiens
taatttaacctaaag

SEQ ID NO: 490804 - DNA, 15 bp, Homo sapiens
ctaatttaacctaaa

SEQ ID NO: 490805 - DNA, 15 bp, Homo sapiens
tctaatttaacctaa

SEQ ID NO: 490806 - DNA, 15 bp, Homo sapiens
atctaatttaaccta

SEQ ID NO: 490807 - DNA, 15 bp, Homo sapiens
tatctaatttaacct

SEQ ID NO: 490808 - DNA, 15 bp, Homo sapiens
atatctaatttaacc

SEQ ID NO: 490809 - DNA, 15 bp, Homo sapiens
catatctaatttaac

SEQ ID NO: 490810 - DNA, 15 bp, Homo sapiens
acatatctaatttaa

SEQ ID NO: 490811 - DNA, 15 bp, Homo sapiens
tacatatctaattta

SEQ ID NO: 490812 - DNA, 15 bp, Homo sapiens
ttacatatctaattt

SEQ ID NO: 490813 - DNA, 15 bp, Homo sapiens
attacatatctaatt

SEQ ID NO: 490814 - DNA, 15 bp, Homo sapiens
aattacatatctaat

SEQ ID NO: 490815 - DNA, 15 bp, Homo sapiens
caattacatatctaa

SEQ ID NO: 490816 - DNA, 15 bp, Homo sapiens
ccaattacatatcta

SEQ ID NO: 490817 - DNA, 15 bp, Homo sapiens
cccaattacatatct

SEQ ID NO: 490818 - DNA, 15 bp, Homo sapiens
tcccaattacatatc

SEQ ID NO: 490819 - DNA, 15 bp, Homo sapiens
ttcccaattacatat

SEQ ID NO: 490820 - DNA, 15 bp, Homo sapiens
tttcccaattacata

SEQ ID NO: 490821 - DNA, 15 bp, Homo sapiens
atttcccaattacat

SEQ ID NO: 490822 - DNA, 15 bp, Homo sapiens
aatttcccaattaca

SEQ ID NO: 490823 - DNA, 15 bp, Homo sapiens
aaatttcccaattac

SEQ ID NO: 490824 - DNA, 15 bp, Homo sapiens
taaatttcccaatta

SEQ ID NO: 490825 - DNA, 15 bp, Homo sapiens
ttaaatttcccaatt

SEQ ID NO: 490826 - DNA, 15 bp, Homo sapiens
tttaaatttcccaat

SEQ ID NO: 490827 - DNA, 15 bp, Homo sapiens
ttttaaatttcccaa

SEQ ID NO: 490828 - DNA, 15 bp, Homo sapiens
tttttaaatttccca

SEQ ID NO: 490829 - DNA, 15 bp, Homo sapiens
ctttttaaatttccc

SEQ ID NO: 490830 - DNA, 15 bp, Homo sapiens
actttttaaatttcc

SEQ ID NO: 490831 - DNA, 15 bp, Homo sapiens
tactttttaaatttc

SEQ ID NO: 490832 - DNA, 15 bp, Homo sapiens
ttactttttaaattt

SEQ ID NO: 490833 - DNA, 15 bp, Homo sapiens
attactttttaaatt

SEQ ID NO: 490834 - DNA, 15 bp, Homo sapiens
tattactttttaaat

SEQ ID NO: 490835 - DNA, 15 bp, Homo sapiens
atattactttttaaa

SEQ ID NO: 490836 - DNA, 15 bp, Homo sapiens
tatattactttttaa

SEQ ID NO: 490837 - DNA, 15 bp, Homo sapiens
gtatattacttttta

SEQ ID NO: 490838 - DNA, 15 bp, Homo sapiens
tgtatattacttttt

SEQ ID NO: 490839 - DNA, 15 bp, Homo sapiens
gtgtatattactttt

SEQ ID NO: 490840 - DNA, 15 bp, Homo sapiens
tgtgtatattacttt

SEQ ID NO: 490841 - DNA, 15 bp, Homo sapiens
gtgtgtatattactt

SEQ ID NO: 490842 - DNA, 15 bp, Homo sapiens
agtgtgtatattact

SEQ ID NO: 490843 - DNA, 15 bp, Homo sapiens
aagtgtgtatattac

SEQ ID NO: 490844 - DNA, 15 bp, Homo sapiens
taagtgtgtatatta

SEQ ID NO: 490845 - DNA, 15 bp, Homo sapiens
ataagtgtgtatatt

SEQ ID NO: 490846 - DNA, 15 bp, Homo sapiens
cataagtgtgtatat

SEQ ID NO: 490847 - DNA, 15 bp, Homo sapiens
tcataagtgtgtata

SEQ ID NO: 490848 - DNA, 15 bp, Homo sapiens
ttcataagtgtgtat

SEQ ID NO: 490849 - DNA, 15 bp, Homo sapiens
gttcataagtgtgta

SEQ ID NO: 490850 - DNA, 15 bp, Homo sapiens
ggttcataagtgtgt

SEQ ID NO: 490851 - DNA, 15 bp, Homo sapiens
tggttcataagtgtg

SEQ ID NO: 490852 - DNA, 15 bp, Homo sapiens
ttggttcataagtgt

SEQ ID NO: 490853 - DNA, 15 bp, Homo sapiens
attggttcataagtg

SEQ ID NO: 490854 - DNA, 15 bp, Homo sapiens
aattggttcataagt

SEQ ID NO: 490855 - DNA, 15 bp, Homo sapiens
taattggttcataag

SEQ ID NO: 490856 - DNA, 15 bp, Homo sapiens
ataattggttcataa

SEQ ID NO: 490857 - DNA, 15 bp, Homo sapiens
gataattggttcata

SEQ ID NO: 490858 - DNA, 15 bp, Homo sapiens
agataattggttcat

SEQ ID NO: 490859 - DNA, 15 bp, Homo sapiens
aagataattggttca

SEQ ID NO: 490860 - DNA, 15 bp, Homo sapiens
taagataattggttc

SEQ ID NO: 490861 - DNA, 15 bp, Homo sapiens
ctaagataattggtt

SEQ ID NO: 490862 - DNA, 15 bp, Homo sapiens
gctaagataattggt

SEQ ID NO: 490863 - DNA, 15 bp, Homo sapiens
ggctaagataattgg

SEQ ID NO: 490864 - DNA, 15 bp, Homo sapiens
tggctaagataattg

SEQ ID NO: 490865 - DNA, 15 bp, Homo sapiens
atggctaagataatt

SEQ ID NO: 490866 - DNA, 15 bp, Homo sapiens
gatggctaagataat

SEQ ID NO: 490867 - DNA, 15 bp, Homo sapiens
tgatggctaagataa

SEQ ID NO: 490868 - DNA, 15 bp, Homo sapiens
gtgatggctaagata

SEQ ID NO: 490869 - DNA, 15 bp, Homo sapiens
agtgatggctaagat

SEQ ID NO: 490870 - DNA, 15 bp, Homo sapiens
cagtgatggctaaga

SEQ ID NO: 490871 - DNA, 15 bp, Homo sapiens
ccagtgatggctaag

SEQ ID NO: 490872 - DNA, 15 bp, Homo sapiens
accagtgatggctaa

SEQ ID NO: 490873 - DNA, 15 bp, Homo sapiens
taccagtgatggcta

SEQ ID NO: 490874 - DNA, 15 bp, Homo sapiens
gtaccagtgatggct

SEQ ID NO: 490875 - DNA, 15 bp, Homo sapiens
tgtaccagtgatggc

SEQ ID NO: 490876 - DNA, 15 bp, Homo sapiens
atgtaccagtgatgg

SEQ ID NO: 490877 - DNA, 15 bp, Homo sapiens
catgtaccagtgatg

SEQ ID NO: 490878 - DNA, 15 bp, Homo sapiens
gcatgtaccagtgat

SEQ ID NO: 490879 - DNA, 15 bp, Homo sapiens
agcatgtaccagtga

SEQ ID NO: 490880 - DNA, 15 bp, Homo sapiens
tagcatgtaccagtg

SEQ ID NO: 490881 - DNA, 15 bp, Homo sapiens
atagcatgtaccagt

SEQ ID NO: 490882 - DNA, 15 bp, Homo sapiens
tatagcatgtaccag

SEQ ID NO: 490883 - DNA, 15 bp, Homo sapiens
ctatagcatgtacca

SEQ ID NO: 490884 - DNA, 15 bp, Homo sapiens
gctatagcatgtacc

SEQ ID NO: 490885 - DNA, 15 bp, Homo sapiens
agctatagcatgtac

SEQ ID NO: 490886 - DNA, 15 bp, Homo sapiens
cagctatagcatgta

SEQ ID NO: 490887 - DNA, 15 bp, Homo sapiens
ccagctatagcatgt

SEQ ID NO: 490888 - DNA, 15 bp, Homo sapiens
accagctatagcatg

SEQ ID NO: 490889 - DNA, 15 bp, Homo sapiens
taccagctatagcat

SEQ ID NO: 490890 - DNA, 15 bp, Homo sapiens
ataccagctatagca

SEQ ID NO: 490891 - DNA, 15 bp, Homo sapiens
tataccagctatagc

SEQ ID NO: 490892 - DNA, 15 bp, Homo sapiens
atataccagctatag

SEQ ID NO: 490893 - DNA, 15 bp, Homo sapiens
aatataccagctata

SEQ ID NO: 490894 - DNA, 15 bp, Homo sapiens
taatataccagctat

SEQ ID NO: 490895 - DNA, 15 bp, Homo sapiens
gtaatataccagcta

SEQ ID NO: 490896 - DNA, 15 bp, Homo sapiens
agtaatataccagct

SEQ ID NO: 490897 - DNA, 15 bp, Homo sapiens
aagtaatataccagc

SEQ ID NO: 490898 - DNA, 15 bp, Homo sapiens
taagtaatataccag

SEQ ID NO: 490899 - DNA, 15 bp, Homo sapiens
ataagtaatatacca

SEQ ID NO: 490900 - DNA, 15 bp, Homo sapiens
aataagtaatatacc

SEQ ID NO: 490901 - DNA, 15 bp, Homo sapiens
aaataagtaatatac

SEQ ID NO: 490902 - DNA, 15 bp, Homo sapiens
gaaataagtaatata

SEQ ID NO: 490903 - DNA, 15 bp, Homo sapiens
agaaataagtaatat

SEQ ID NO: 490904 - DNA, 15 bp, Homo sapiens
cagaaataagtaata

SEQ ID NO: 490905 - DNA, 15 bp, Homo sapiens
acagaaataagtaat

SEQ ID NO: 490906 - DNA, 15 bp, Homo sapiens
aacagaaataagtaa

SEQ ID NO: 490907 - DNA, 15 bp, Homo sapiens
aaacagaaataagta

SEQ ID NO: 490908 - DNA, 15 bp, Homo sapiens
aaaacagaaataagt

SEQ ID NO: 490909 - DNA, 15 bp, Homo sapiens
aaaaacagaaataag

SEQ ID NO: 490910 - DNA, 15 bp, Homo sapiens
aaaaaacagaaataa

SEQ ID NO: 490911 - DNA, 15 bp, Homo sapiens
gaaaaaacagaaata

SEQ ID NO: 490912 - DNA, 15 bp, Homo sapiens
ggaaaaaacagaaat

SEQ ID NO: 490913 - DNA, 15 bp, Homo sapiens
aggaaaaaacagaaa

SEQ ID NO: 490914 - DNA, 15 bp, Homo sapiens
aaggaaaaaacagaa

SEQ ID NO: 490915 - DNA, 15 bp, Homo sapiens
taaggaaaaaacaga

SEQ ID NO: 490916 - DNA, 15 bp, Homo sapiens
gtaaggaaaaaacag

SEQ ID NO: 490917 - DNA, 15 bp, Homo sapiens
cgtaaggaaaaaaca

SEQ ID NO: 490918 - DNA, 15 bp, Homo sapiens
tcgtaaggaaaaaac

SEQ ID NO: 490919 - DNA, 15 bp, Homo sapiens
gtcgtaaggaaaaaa

SEQ ID NO: 490920 - DNA, 15 bp, Homo sapiens
tgtcgtaaggaaaaa

SEQ ID NO: 490921 - DNA, 15 bp, Homo sapiens
ttgtcgtaaggaaaa

SEQ ID NO: 490922 - DNA, 15 bp, Homo sapiens
attgtcgtaaggaaa

SEQ ID NO: 490923 - DNA, 15 bp, Homo sapiens
aattgtcgtaaggaa

SEQ ID NO: 490924 - DNA, 15 bp, Homo sapiens
aaattgtcgtaagga

SEQ ID NO: 490925 - DNA, 15 bp, Homo sapiens
taaattgtcgtaagg

SEQ ID NO: 490926 - DNA, 15 bp, Homo sapiens
ataaattgtcgtaag

SEQ ID NO: 490927 - DNA, 15 bp, Homo sapiens
gataaattgtcgtaa

SEQ ID NO: 490928 - DNA, 15 bp, Homo sapiens
cgataaattgtcgta

SEQ ID NO: 490929 - DNA, 15 bp, Homo sapiens
acgataaattgtcgt

SEQ ID NO: 490930 - DNA, 15 bp, Homo sapiens
tacgataaattgtcg

SEQ ID NO: 490931 - DNA, 15 bp, Homo sapiens
ttacgataaattgtc

SEQ ID NO: 490932 - DNA, 15 bp, Homo sapiens
attacgataaattgt

SEQ ID NO: 490933 - DNA, 15 bp, Homo sapiens
aattacgataaattg

SEQ ID NO: 490934 - DNA, 15 bp, Homo sapiens
aaattacgataaatt

SEQ ID NO: 490935 - DNA, 15 bp, Homo sapiens
taaattacgataaat

SEQ ID NO: 490936 - DNA, 15 bp, Homo sapiens
gtaaattacgataaa

SEQ ID NO: 490937 - DNA, 15 bp, Homo sapiens
tgtaaattacgataa

SEQ ID NO: 490938 - DNA, 15 bp, Homo sapiens
atgtaaattacgata

SEQ ID NO: 490939 - DNA, 15 bp, Homo sapiens
tatgtaaattacgat

SEQ ID NO: 490940 - DNA, 15 bp, Homo sapiens
atatgtaaattacga

SEQ ID NO: 490941 - DNA, 15 bp, Homo sapiens
catatgtaaattacg

SEQ ID NO: 490942 - DNA, 15 bp, Homo sapiens
ccatatgtaaattac

SEQ ID NO: 490943 - DNA, 15 bp, Homo sapiens
tccatatgtaaatta

SEQ ID NO: 490944 - DNA, 15 bp, Homo sapiens
atccatatgtaaatt

SEQ ID NO: 490945 - DNA, 15 bp, Homo sapiens
tatccatatgtaaat

SEQ ID NO: 490946 - DNA, 15 bp, Homo sapiens
ctatccatatgtaaa

SEQ ID NO: 490947 - DNA, 15 bp, Homo sapiens
actatccatatgtaa

SEQ ID NO: 490948 - DNA, 15 bp, Homo sapiens
aactatccatatgta

SEQ ID NO: 490949 - DNA, 15 bp, Homo sapiens
gaactatccatatgt

SEQ ID NO: 490950 - DNA, 15 bp, Homo sapiens
tgaactatccatatg

SEQ ID NO: 490951 - DNA, 15 bp, Homo sapiens
gtgaactatccatat

SEQ ID NO: 490952 - DNA, 15 bp, Homo sapiens
tgtgaactatccata

SEQ ID NO: 490953 - DNA, 15 bp, Homo sapiens
atgtgaactatccat

SEQ ID NO: 490954 - DNA, 15 bp, Homo sapiens
tatgtgaactatcca

SEQ ID NO: 490955 - DNA, 15 bp, Homo sapiens
gtatgtgaactatcc

SEQ ID NO: 490956 - DNA, 15 bp, Homo sapiens
agtatgtgaactatc

SEQ ID NO: 490957 - DNA, 15 bp, Homo sapiens
cagtatgtgaactat

SEQ ID NO: 490958 - DNA, 15 bp, Homo sapiens
tcagtatgtgaacta

SEQ ID NO: 490959 - DNA, 15 bp, Homo sapiens
ttcagtatgtgaact

SEQ ID NO: 490960 - DNA, 15 bp, Homo sapiens
tttcagtatgtgaac

SEQ ID NO: 490961 - DNA, 15 bp, Homo sapiens
ttttcagtatgtgaa

SEQ ID NO: 490962 - DNA, 15 bp, Homo sapiens
attttcagtatgtga

SEQ ID NO: 490963 - DNA, 15 bp, Homo sapiens
cattttcagtatgtg

SEQ ID NO: 490964 - DNA, 15 bp, Homo sapiens
tcattttcagtatgt

SEQ ID NO: 490965 - DNA, 15 bp, Homo sapiens
ctcattttcagtatg

SEQ ID NO: 490966 - DNA, 15 bp, Homo sapiens
tctcattttcagtat

SEQ ID NO: 490967 - DNA, 15 bp, Homo sapiens
atctcattttcagta

SEQ ID NO: 490968 - DNA, 15 bp, Homo sapiens
catctcattttcagt

SEQ ID NO: 490969 - DNA, 15 bp, Homo sapiens
tcatctcattttcag

SEQ ID NO: 490970 - DNA, 15 bp, Homo sapiens
atcatctcattttca

SEQ ID NO: 490971 - DNA, 15 bp, Homo sapiens
aatcatctcattttc

SEQ ID NO: 490972 - DNA, 15 bp, Homo sapiens
caatcatctcatttt

SEQ ID NO: 490973 - DNA, 15 bp, Homo sapiens
gcaatcatctcattt

SEQ ID NO: 490974 - DNA, 15 bp, Homo sapiens
agcaatcatctcatt

SEQ ID NO: 490975 - DNA, 15 bp, Homo sapiens
aagcaatcatctcat

SEQ ID NO: 490976 - DNA, 15 bp, Homo sapiens
aaagcaatcatctca

SEQ ID NO: 490977 - DNA, 15 bp, Homo sapiens
gaaagcaatcatctc

SEQ ID NO: 490978 - DNA, 15 bp, Homo sapiens
agaaagcaatcatct

SEQ ID NO: 490979 - DNA, 15 bp, Homo sapiens
tagaaagcaatcatc

SEQ ID NO: 490980 - DNA, 15 bp, Homo sapiens
gtagaaagcaatcat

SEQ ID NO: 490981 - DNA, 15 bp, Homo sapiens
agtagaaagcaatca

SEQ ID NO: 490982 - DNA, 15 bp, Homo sapiens
cagtagaaagcaatc

SEQ ID NO: 490983 - DNA, 15 bp, Homo sapiens
tcagtagaaagcaat

SEQ ID NO: 490984 - DNA, 15 bp, Homo sapiens
ctcagtagaaagcaa

SEQ ID NO: 490985 - DNA, 15 bp, Homo sapiens
tctcagtagaaagca

SEQ ID NO: 490986 - DNA, 15 bp, Homo sapiens
ctctcagtagaaagc

SEQ ID NO: 490987 - DNA, 15 bp, Homo sapiens
cctctcagtagaaag

SEQ ID NO: 490988 - DNA, 15 bp, Homo sapiens
aacctctcagtagaa

SEQ ID NO: 490989 - DNA, 15 bp, Homo sapiens
caacctctcagtaga

SEQ ID NO: 490990 - DNA, 15 bp, Homo sapiens
acaacctctcagtag

SEQ ID NO: 490991 - DNA, 15 bp, Homo sapiens
tacaacctctcagta

SEQ ID NO: 490992 - DNA, 15 bp, Homo sapiens
ctacaacctctcagt

SEQ ID NO: 490993 - DNA, 15 bp, Homo sapiens
actacaacctctcag

SEQ ID NO: 490994 - DNA, 15 bp, Homo sapiens
aactacaacctctca

SEQ ID NO: 490995 - DNA, 15 bp, Homo sapiens
caactacaacctctc

SEQ ID NO: 490996 - DNA, 15 bp, Homo sapiens
tcaactacaacctct

SEQ ID NO: 490997 - DNA, 15 bp, Homo sapiens
ttcaactacaacctc

SEQ ID NO: 490998 - DNA, 15 bp, Homo sapiens
tttcaactacaacct

SEQ ID NO: 490999 - DNA, 15 bp, Homo sapiens
ctttcaactacaacc

SEQ ID NO: 491000 - DNA, 15 bp, Homo sapiens
cctttcaactacaac

SEQ ID NO: 491001 - DNA, 15 bp, Homo sapiens
tcctttcaactacaa

SEQ ID NO: 491002 - DNA, 15 bp, Homo sapiens
ttcctttcaactaca

SEQ ID NO: 491003 - DNA, 15 bp, Homo sapiens
attcctttcaactac

SEQ ID NO: 491004 - DNA, 15 bp, Homo sapiens
aattcctttcaacta

SEQ ID NO: 491005 - DNA, 15 bp, Homo sapiens
caattcctttcaact

SEQ ID NO: 491006 - DNA, 15 bp, Homo sapiens
acaattcctttcaac

SEQ ID NO: 491007 - DNA, 15 bp, Homo sapiens
aacaattcctttcaa

SEQ ID NO: 491008 - DNA, 15 bp, Homo sapiens
aaacaattcctttca

SEQ ID NO: 491009 - DNA, 15 bp, Homo sapiens
gaaacaattcctttc

SEQ ID NO: 491010 - DNA, 15 bp, Homo sapiens
ggaaacaattccttt

SEQ ID NO: 491011 - DNA, 15 bp, Homo sapiens
tggaaacaattcctt

SEQ ID NO: 491012 - DNA, 15 bp, Homo sapiens
ttggaaacaattcct

SEQ ID NO: 491013 - DNA, 15 bp, Homo sapiens
cttggaaacaattcc

SEQ ID NO: 491014 - DNA, 15 bp, Homo sapiens
ccttggaaacaattc

SEQ ID NO: 491015 - DNA, 15 bp, Homo sapiens
gccttggaaacaatt

SEQ ID NO: 491016 - DNA, 15 bp, Homo sapiens
tgccttggaaacaat

SEQ ID NO: 491017 - DNA, 15 bp, Homo sapiens
atgccttggaaacaa

SEQ ID NO: 491018 - DNA, 15 bp, Homo sapiens
aatgccttggaaaca

SEQ ID NO: 491019 - DNA, 15 bp, Homo sapiens
aaatgccttggaaac

SEQ ID NO: 491020 - DNA, 15 bp, Homo sapiens
caaatgccttggaaa

SEQ ID NO: 491021 - DNA, 15 bp, Homo sapiens
tcaaatgccttggaa

SEQ ID NO: 491022 - DNA, 15 bp, Homo sapiens
ttcaaatgccttgga

SEQ ID NO: 491023 - DNA, 15 bp, Homo sapiens
tttcaaatgccttgg

SEQ ID NO: 491024 - DNA, 15 bp, Homo sapiens
ttttcaaatgccttg

SEQ ID NO: 491025 - DNA, 15 bp, Homo sapiens
attttcaaatgcctt

SEQ ID NO: 491026 - DNA, 15 bp, Homo sapiens
aattttcaaatgcct

SEQ ID NO: 491027 - DNA, 15 bp, Homo sapiens
taattttcaaatgcc

SEQ ID NO: 491028 - DNA, 15 bp, Homo sapiens
ataattttcaaatgc

SEQ ID NO: 491029 - DNA, 15 bp, Homo sapiens
aataattttcaaatg

SEQ ID NO: 491030 - DNA, 15 bp, Homo sapiens
aaataattttcaaat

SEQ ID NO: 491031 - DNA, 15 bp, Homo sapiens
taaataattttcaaa

SEQ ID NO: 491032 - DNA, 15 bp, Homo sapiens
ttaaataattttcaa

SEQ ID NO: 491033 - DNA, 15 bp, Homo sapiens
tttaaataattttca

SEQ ID NO: 491034 - DNA, 15 bp, Homo sapiens
atttaaataattttc

SEQ ID NO: 491035 - DNA, 15 bp, Homo sapiens
gatttaaataatttt

SEQ ID NO: 491036 - DNA, 15 bp, Homo sapiens
agatttaaataattt

SEQ ID NO: 491037 - DNA, 15 bp, Homo sapiens
gagatttaaataatt

SEQ ID NO: 491038 - DNA, 15 bp, Homo sapiens
agagatttaaataat

SEQ ID NO: 491039 - DNA, 15 bp, Homo sapiens
aagagatttaaataa

SEQ ID NO: 491040 - DNA, 15 bp, Homo sapiens
taagagatttaaata

SEQ ID NO: 491041 - DNA, 15 bp, Homo sapiens
ttaagagatttaaat

SEQ ID NO: 491042 - DNA, 15 bp, Homo sapiens
cttaagagatttaaa

SEQ ID NO: 491043 - DNA, 15 bp, Homo sapiens
ccttaagagatttaa

SEQ ID NO: 491044 - DNA, 15 bp, Homo sapiens
tccttaagagattta

SEQ ID NO: 491045 - DNA, 15 bp, Homo sapiens
ttccttaagagattt

SEQ ID NO: 491046 - DNA, 15 bp, Homo sapiens
attccttaagagatt

SEQ ID NO: 491047 - DNA, 15 bp, Homo sapiens
aattccttaagagat

SEQ ID NO: 491048 - DNA, 15 bp, Homo sapiens
caattccttaagaga

SEQ ID NO: 491049 - DNA, 15 bp, Homo sapiens
gcaattccttaagag

SEQ ID NO: 491050 - DNA, 15 bp, Homo sapiens
ggcaattccttaaga

SEQ ID NO: 491051 - DNA, 15 bp, Homo sapiens
tggcaattccttaag

SEQ ID NO: 491052 - DNA, 15 bp, Homo sapiens
gtggcaattccttaa

SEQ ID NO: 491053 - DNA, 15 bp, Homo sapiens
tgtggcaattcctta

SEQ ID NO: 491054 - DNA, 15 bp, Homo sapiens
atgtggcaattcctt

SEQ ID NO: 491055 - DNA, 15 bp, Homo sapiens
tatgtggcaattcct

SEQ ID NO: 491056 - DNA, 15 bp, Homo sapiens
ttatgtggcaattcc

SEQ ID NO: 491057 - DNA, 15 bp, Homo sapiens
attatgtggcaattc

SEQ ID NO: 491058 - DNA, 15 bp, Homo sapiens
aattatgtggcaatt

SEQ ID NO: 491059 - DNA, 15 bp, Homo sapiens
aaattatgtggcaat

SEQ ID NO: 491060 - DNA, 15 bp, Homo sapiens
caaattatgtggcaa

SEQ ID NO: 491061 - DNA, 15 bp, Homo sapiens
acaaattatgtggca

SEQ ID NO: 491062 - DNA, 15 bp, Homo sapiens
aacaaattatgtggc

SEQ ID NO: 491063 - DNA, 15 bp, Homo sapiens
gaacaaattatgtgg

SEQ ID NO: 491064 - DNA, 15 bp, Homo sapiens
tgaacaaattatgtg

SEQ ID NO: 491065 - DNA, 15 bp, Homo sapiens
atgaacaaattatgt

SEQ ID NO: 491066 - DNA, 15 bp, Homo sapiens
tatgaacaaattatg

SEQ ID NO: 491067 - DNA, 15 bp, Homo sapiens
atatgaacaaattat

SEQ ID NO: 491068 - DNA, 15 bp, Homo sapiens
aatatgaacaaatta

SEQ ID NO: 491069 - DNA, 15 bp, Homo sapiens
taatatgaacaaatt

SEQ ID NO: 491070 - DNA, 15 bp, Homo sapiens
ataatatgaacaaat

SEQ ID NO: 491071 - DNA, 15 bp, Homo sapiens
cataatatgaacaaa

SEQ ID NO: 491072 - DNA, 15 bp, Homo sapiens
acataatatgaacaa

SEQ ID NO: 491073 - DNA, 15 bp, Homo sapiens
tacataatatgaaca

SEQ ID NO: 491074 - DNA, 15 bp, Homo sapiens
ttacataatatgaac

SEQ ID NO: 491075 - DNA, 15 bp, Homo sapiens
cttacataatatgaa

SEQ ID NO: 491076 - DNA, 15 bp, Homo sapiens
acttacataatatga

SEQ ID NO: 491077 - DNA, 15 bp, Homo sapiens
cacttacataatatg

SEQ ID NO: 491078 - DNA, 15 bp, Homo sapiens
acacttacataatat

SEQ ID NO: 491079 - DNA, 15 bp, Homo sapiens
aacacttacataata

SEQ ID NO: 491080 - DNA, 15 bp, Homo sapiens
caacacttacataat

SEQ ID NO: 491081 - DNA, 15 bp, Homo sapiens
gcaacacttacataa

SEQ ID NO: 491082 - DNA, 15 bp, Homo sapiens
ggcaacacttacata

SEQ ID NO: 491083 - DNA, 15 bp, Homo sapiens
tggcaacacttacat

SEQ ID NO: 491084 - DNA, 15 bp, Homo sapiens
atggcaacacttaca

SEQ ID NO: 491085 - DNA, 15 bp, Homo sapiens
aatggcaacacttac

SEQ ID NO: 491086 - DNA, 15 bp, Homo sapiens
aaatggcaacactta

SEQ ID NO: 491087 - DNA, 15 bp, Homo sapiens
caaatggcaacactt

SEQ ID NO: 491088 - DNA, 15 bp, Homo sapiens
ccaaatggcaacact

SEQ ID NO: 491089 - DNA, 15 bp, Homo sapiens
gccaaatggcaacac

SEQ ID NO: 491090 - DNA, 15 bp, Homo sapiens
agccaaatggcaaca

SEQ ID NO: 491091 - DNA, 15 bp, Homo sapiens
tagccaaatggcaac

SEQ ID NO: 491092 - DNA, 15 bp, Homo sapiens
atagccaaatggcaa

SEQ ID NO: 491093 - DNA, 15 bp, Homo sapiens
tatagccaaatggca

SEQ ID NO: 491094 - DNA, 15 bp, Homo sapiens
ttatagccaaatggc

SEQ ID NO: 491095 - DNA, 15 bp, Homo sapiens
tttatagccaaatgg

SEQ ID NO: 491096 - DNA, 15 bp, Homo sapiens
gtttatagccaaatg

SEQ ID NO: 491097 - DNA, 15 bp, Homo sapiens
tgtttatagccaaat

SEQ ID NO: 491098 - DNA, 15 bp, Homo sapiens
atgtttatagccaaa

SEQ ID NO: 491099 - DNA, 15 bp, Homo sapiens
catgtttatagccaa

SEQ ID NO: 491100 - DNA, 15 bp, Homo sapiens
ccatgtttatagcca

SEQ ID NO: 491101 - DNA, 15 bp, Homo sapiens
accatgtttatagcc

SEQ ID NO: 491102 - DNA, 15 bp, Homo sapiens
taccatgtttatagc

SEQ ID NO: 491103 - DNA, 15 bp, Homo sapiens
ataccatgtttatag

SEQ ID NO: 491104 - DNA, 15 bp, Homo sapiens
aataccatgtttata

SEQ ID NO: 491105 - DNA, 15 bp, Homo sapiens
aaataccatgtttat

SEQ ID NO: 491106 - DNA, 15 bp, Homo sapiens
aaaataccatgttta

SEQ ID NO: 491107 - DNA, 15 bp, Homo sapiens
gaaaataccatgttt

SEQ ID NO: 491108 - DNA, 15 bp, Homo sapiens
tgaaaataccatgtt

SEQ ID NO: 491109 - DNA, 15 bp, Homo sapiens
ttgaaaataccatgt

SEQ ID NO: 491110 - DNA, 15 bp, Homo sapiens
cttgaaaataccatg

SEQ ID NO: 491111 - DNA, 15 bp, Homo sapiens
ccttgaaaataccat

SEQ ID NO: 491112 - DNA, 15 bp, Homo sapiens
tccttgaaaatacca

SEQ ID NO: 491113 - DNA, 15 bp, Homo sapiens
ttccttgaaaatacc

SEQ ID NO: 491114 - DNA, 15 bp, Homo sapiens
tttccttgaaaatac

SEQ ID NO: 491115 - DNA, 15 bp, Homo sapiens
ttttccttgaaaata

SEQ ID NO: 491116 - DNA, 15 bp, Homo sapiens
tttttccttgaaaat

SEQ ID NO: 491117 - DNA, 15 bp, Homo sapiens
ttttttccttgaaaa

SEQ ID NO: 491118 - DNA, 15 bp, Homo sapiens
tttttttccttgaaa

SEQ ID NO: 491119 - DNA, 15 bp, Homo sapiens
ctttttttccttgaa

SEQ ID NO: 491120 - DNA, 15 bp, Homo sapiens
tctttttttccttga

SEQ ID NO: 491121 - DNA, 15 bp, Homo sapiens
ctctttttttccttg

SEQ ID NO: 491122 - DNA, 15 bp, Homo sapiens
actctttttttcctt

SEQ ID NO: 491123 - DNA, 15 bp, Homo sapiens
tactctttttttcct

SEQ ID NO: 491124 - DNA, 15 bp, Homo sapiens
ttactctttttttcc

SEQ ID NO: 491125 - DNA, 15 bp, Homo sapiens
cttactctttttttc

SEQ ID NO: 491126 - DNA, 15 bp, Homo sapiens
acttactcttttttt

SEQ ID NO: 491127 - DNA, 15 bp, Homo sapiens
gacttactctttttt

SEQ ID NO: 491128 - DNA, 15 bp, Homo sapiens
agacttactcttttt

SEQ ID NO: 491129 - DNA, 15 bp, Homo sapiens
tagacttactctttt

SEQ ID NO: 491130 - DNA, 15 bp, Homo sapiens
gtagacttactcttt

SEQ ID NO: 491131 - DNA, 15 bp, Homo sapiens
agtagacttactctt

SEQ ID NO: 491132 - DNA, 15 bp, Homo sapiens
aagtagacttactct

SEQ ID NO: 491133 - DNA, 15 bp, Homo sapiens
aaagtagacttactc

SEQ ID NO: 491134 - DNA, 15 bp, Homo sapiens
taaagtagacttact

SEQ ID NO: 491135 - DNA, 15 bp, Homo sapiens
ttaaagtagacttac

SEQ ID NO: 491136 - DNA, 15 bp, Homo sapiens
attaaagtagactta

SEQ ID NO: 491137 - DNA, 15 bp, Homo sapiens
aattaaagtagactt

SEQ ID NO: 491138 - DNA, 15 bp, Homo sapiens
caattaaagtagact

SEQ ID NO: 491139 - DNA, 15 bp, Homo sapiens
tcaattaaagtagac

SEQ ID NO: 491140 - DNA, 15 bp, Homo sapiens
gtcaattaaagtaga

SEQ ID NO: 491141 - DNA, 15 bp, Homo sapiens
agtcaattaaagtag

SEQ ID NO: 491142 - DNA, 15 bp, Homo sapiens
cagtcaattaaagta

SEQ ID NO: 491143 - DNA, 15 bp, Homo sapiens
ccagtcaattaaagt

SEQ ID NO: 491144 - DNA, 15 bp, Homo sapiens
accagtcaattaaag

SEQ ID NO: 491145 - DNA, 15 bp, Homo sapiens
caccagtcaattaaa

SEQ ID NO: 491146 - DNA, 15 bp, Homo sapiens
acaccagtcaattaa

SEQ ID NO: 491147 - DNA, 15 bp, Homo sapiens
aacaccagtcaatta

SEQ ID NO: 491148 - DNA, 15 bp, Homo sapiens
gaacaccagtcaatt

SEQ ID NO: 491149 - DNA, 15 bp, Homo sapiens
tgaacaccagtcaat

SEQ ID NO: 491150 - DNA, 15 bp, Homo sapiens
ctgaacaccagtcaa

SEQ ID NO: 491151 - DNA, 15 bp, Homo sapiens
cctgaacaccagtca

SEQ ID NO: 491152 - DNA, 15 bp, Homo sapiens
tcctgaacaccagtc

SEQ ID NO: 491153 - DNA, 15 bp, Homo sapiens
ttcctgaacaccagt

SEQ ID NO: 491154 - DNA, 15 bp, Homo sapiens
cttcctgaacaccag

SEQ ID NO: 491155 - DNA, 15 bp, Homo sapiens
ccttcctgaacacca

SEQ ID NO: 491156 - DNA, 15 bp, Homo sapiens
cccttcctgaacacc

SEQ ID NO: 491157 - DNA, 15 bp, Homo sapiens
gcccttcctgaacac

SEQ ID NO: 491158 - DNA, 15 bp, Homo sapiens
tgcccttcctgaaca

SEQ ID NO: 491159 - DNA, 15 bp, Homo sapiens
gtgcccttcctgaac

SEQ ID NO: 491160 - DNA, 15 bp, Homo sapiens
tgtgcccttcctgaa

SEQ ID NO: 491161 - DNA, 15 bp, Homo sapiens
atgtgcccttcctga

SEQ ID NO: 491162 - DNA, 15 bp, Homo sapiens
aatgtgcccttcctg

SEQ ID NO: 491163 - DNA, 15 bp, Homo sapiens
aaatgtgcccttcct

SEQ ID NO: 491164 - DNA, 15 bp, Homo sapiens
taaatgtgcccttcc

SEQ ID NO: 491165 - DNA, 15 bp, Homo sapiens
ctaaatgtgcccttc

SEQ ID NO: 491166 - DNA, 15 bp, Homo sapiens
actaaatgtgccctt

SEQ ID NO: 491167 - DNA, 15 bp, Homo sapiens
tactaaatgtgccct

SEQ ID NO: 491168 - DNA, 15 bp, Homo sapiens
ttactaaatgtgccc

SEQ ID NO: 491169 - DNA, 15 bp, Homo sapiens
gttactaaatgtgcc

SEQ ID NO: 491170 - DNA, 15 bp, Homo sapiens
agttactaaatgtgc

SEQ ID NO: 491171 - DNA, 15 bp, Homo sapiens
cagttactaaatgtg

SEQ ID NO: 491172 - DNA, 15 bp, Homo sapiens
gcagttactaaatgt

SEQ ID NO: 491173 - DNA, 15 bp, Homo sapiens
agcagttactaaatg

SEQ ID NO: 491174 - DNA, 15 bp, Homo sapiens
gagcagttactaaat

SEQ ID NO: 491175 - DNA, 15 bp, Homo sapiens
tgagcagttactaaa

SEQ ID NO: 491176 - DNA, 15 bp, Homo sapiens
ttgagcagttactaa

SEQ ID NO: 491177 - DNA, 15 bp, Homo sapiens
tttgagcagttacta

SEQ ID NO: 491178 - DNA, 15 bp, Homo sapiens
ttttgagcagttact

SEQ ID NO: 491179 - DNA, 15 bp, Homo sapiens
attttgagcagttac

SEQ ID NO: 491180 - DNA, 15 bp, Homo sapiens
tattttgagcagtta

SEQ ID NO: 491181 - DNA, 15 bp, Homo sapiens
gtattttgagcagtt

SEQ ID NO: 491182 - DNA, 15 bp, Homo sapiens
agtattttgagcagt

SEQ ID NO: 491183 - DNA, 15 bp, Homo sapiens
tagtattttgagcag

SEQ ID NO: 491184 - DNA, 15 bp, Homo sapiens
ttagtattttgagca

SEQ ID NO: 491185 - DNA, 15 bp, Homo sapiens
tttagtattttgagc

SEQ ID NO: 491186 - DNA, 15 bp, Homo sapiens
gtttagtattttgag

SEQ ID NO: 491187 - DNA, 15 bp, Homo sapiens
agtttagtattttga

SEQ ID NO: 491188 - DNA, 15 bp, Homo sapiens
aagtttagtattttg

SEQ ID NO: 491189 - DNA, 15 bp, Homo sapiens
aaagtttagtatttt

SEQ ID NO: 491190 - DNA, 15 bp, Homo sapiens
aaaagtttagtattt

SEQ ID NO: 491191 - DNA, 15 bp, Homo sapiens
aaaaagtttagtatt

SEQ ID NO: 491192 - DNA, 15 bp, Homo sapiens
aaaaaagtttagtat

SEQ ID NO: 491193 - DNA, 15 bp, Homo sapiens
caaaaaagtttagta

SEQ ID NO: 491194 - DNA, 15 bp, Homo sapiens
gcaaaaaagtttagt

SEQ ID NO: 491195 - DNA, 15 bp, Homo sapiens
ggcaaaaaagtttag

SEQ ID NO: 491196 - DNA, 15 bp, Homo sapiens
tggcaaaaaagttta

SEQ ID NO: 491197 - DNA, 15 bp, Homo sapiens
ttggcaaaaaagttt

SEQ ID NO: 491198 - DNA, 15 bp, Homo sapiens
gttggcaaaaaagtt

SEQ ID NO: 491199 - DNA, 15 bp, Homo sapiens
ggttggcaaaaaagt

SEQ ID NO: 491200 - DNA, 15 bp, Homo sapiens
tggttggcaaaaaag

SEQ ID NO: 491201 - DNA, 15 bp, Homo sapiens
gtggttggcaaaaaa

SEQ ID NO: 491202 - DNA, 15 bp, Homo sapiens
tgtggttggcaaaaa

SEQ ID NO: 491203 - DNA, 15 bp, Homo sapiens
atgtggttggcaaaa

SEQ ID NO: 491204 - DNA, 15 bp, Homo sapiens
catgtggttggcaaa

SEQ ID NO: 491205 - DNA, 15 bp, Homo sapiens
tcatgtggttggcaa

SEQ ID NO: 491206 - DNA, 15 bp, Homo sapiens
atcatgtggttggca

SEQ ID NO: 491207 - DNA, 15 bp, Homo sapiens
catcatgtggttggc

SEQ ID NO: 491208 - DNA, 15 bp, Homo sapiens
acatcatgtggttgg

SEQ ID NO: 491209 - DNA, 15 bp, Homo sapiens
gacatcatgtggttg

SEQ ID NO: 491210 - DNA, 15 bp, Homo sapiens
agacatcatgtggtt

SEQ ID NO: 491211 - DNA, 15 bp, Homo sapiens
tagacatcatgtggt

SEQ ID NO: 491212 - DNA, 15 bp, Homo sapiens
ctagacatcatgtgg

SEQ ID NO: 491213 - DNA, 15 bp, Homo sapiens
actagacatcatgtg

SEQ ID NO: 491214 - DNA, 15 bp, Homo sapiens
aactagacatcatgt

SEQ ID NO: 491215 - DNA, 15 bp, Homo sapiens
aaactagacatcatg

SEQ ID NO: 491216 - DNA, 15 bp, Homo sapiens
aaaactagacatcat

SEQ ID NO: 491217 - DNA, 15 bp, Homo sapiens
aaaaactagacatca

SEQ ID NO: 491218 - DNA, 15 bp, Homo sapiens
gaaaaactagacatc

SEQ ID NO: 491219 - DNA, 15 bp, Homo sapiens
tgaaaaactagacat

SEQ ID NO: 491220 - DNA, 15 bp, Homo sapiens
atgaaaaactagaca

SEQ ID NO: 491221 - DNA, 15 bp, Homo sapiens
tatgaaaaactagac

SEQ ID NO: 491222 - DNA, 15 bp, Homo sapiens
gtatgaaaaactaga

SEQ ID NO: 491223 - DNA, 15 bp, Homo sapiens
agtatgaaaaactag

SEQ ID NO: 491224 - DNA, 15 bp, Homo sapiens
aagtatgaaaaacta

SEQ ID NO: 491225 - DNA, 15 bp, Homo sapiens
taagtatgaaaaact

SEQ ID NO: 491226 - DNA, 15 bp, Homo sapiens
ataagtatgaaaaac

SEQ ID NO: 491227 - DNA, 15 bp, Homo sapiens
aataagtatgaaaaa

SEQ ID NO: 491228 - DNA, 15 bp, Homo sapiens
aaataagtatgaaaa

SEQ ID NO: 491229 - DNA, 15 bp, Homo sapiens
aaaataagtatgaaa

SEQ ID NO: 491230 - DNA, 15 bp, Homo sapiens
taaaataagtatgaa

SEQ ID NO: 491231 - DNA, 15 bp, Homo sapiens
ataaaataagtatga

SEQ ID NO: 491232 - DNA, 15 bp, Homo sapiens
aataaaataagtatg

SEQ ID NO: 491233 - DNA, 15 bp, Homo sapiens
aaataaaataagtat

SEQ ID NO: 491234 - DNA, 15 bp, Homo sapiens
caaataaaataagta

SEQ ID NO: 491235 - DNA, 15 bp, Homo sapiens
tcaaataaaataagt

SEQ ID NO: 491236 - DNA, 15 bp, Homo sapiens
ttcaaataaaataag

SEQ ID NO: 491237 - DNA, 15 bp, Homo sapiens
tttcaaataaaataa

SEQ ID NO: 491238 - DNA, 15 bp, Homo sapiens
ttttcaaataaaata

SEQ ID NO: 491239 - DNA, 15 bp, Homo sapiens
attttcaaataaaat

SEQ ID NO: 491240 - DNA, 15 bp, Homo sapiens
cattttcaaataaaa

SEQ ID NO: 491241 - DNA, 15 bp, Homo sapiens
acattttcaaataaa

SEQ ID NO: 491242 - DNA, 15 bp, Homo sapiens
cacattttcaaataa

SEQ ID NO: 491243 - DNA, 15 bp, Homo sapiens
acacattttcaaata

SEQ ID NO: 491244 - DNA, 15 bp, Homo sapiens
tacacattttcaaat

SEQ ID NO: 491245 - DNA, 15 bp, Homo sapiens
atacacattttcaaa

SEQ ID NO: 491246 - DNA, 15 bp, Homo sapiens
aatacacattttcaa

SEQ ID NO: 491247 - DNA, 15 bp, Homo sapiens
aaatacacattttca

SEQ ID NO: 491248 - DNA, 15 bp, Homo sapiens
aaaatacacattttc

SEQ ID NO: 491249 - DNA, 15 bp, Homo sapiens
taaaatacacatttt

SEQ ID NO: 491250 - DNA, 15 bp, Homo sapiens
gtaaaatacacattt

SEQ ID NO: 491251 - DNA, 15 bp, Homo sapiens
agtaaaatacacatt

SEQ ID NO: 491252 - DNA, 15 bp, Homo sapiens
aagtaaaatacacat

SEQ ID NO: 491253 - DNA, 15 bp, Homo sapiens
aaagtaaaatacaca

SEQ ID NO: 491254 - DNA, 15 bp, Homo sapiens
taaagtaaaatacac

SEQ ID NO: 491255 - DNA, 15 bp, Homo sapiens
ttaaagtaaaataca

SEQ ID NO: 491256 - DNA, 15 bp, Homo sapiens
tttaaagtaaaatac

SEQ ID NO: 491257 - DNA, 15 bp, Homo sapiens
ttttaaagtaaaata

SEQ ID NO: 491258 - DNA, 15 bp, Homo sapiens
attttaaagtaaaat

SEQ ID NO: 491259 - DNA, 15 bp, Homo sapiens
cattttaaagtaaaa

SEQ ID NO: 491260 - DNA, 15 bp, Homo sapiens
tcattttaaagtaaa

SEQ ID NO: 491261 - DNA, 15 bp, Homo sapiens
ttcattttaaagtaa

SEQ ID NO: 491262 - DNA, 15 bp, Homo sapiens
attcattttaaagta

SEQ ID NO: 491263 - DNA, 15 bp, Homo sapiens
tattcattttaaagt

SEQ ID NO: 491264 - DNA, 15 bp, Homo sapiens
atattcattttaaag

SEQ ID NO: 491265 - DNA, 15 bp, Homo sapiens
tatattcattttaaa

SEQ ID NO: 491266 - DNA, 15 bp, Homo sapiens
atatattcattttaa

SEQ ID NO: 491267 - DNA, 15 bp, Homo sapiens
aatatattcatttta

SEQ ID NO: 491268 - DNA, 15 bp, Homo sapiens
taatatattcatttt

SEQ ID NO: 491269 - DNA, 15 bp, Homo sapiens
ataatatattcattt

SEQ ID NO: 491270 - DNA, 15 bp, Homo sapiens
cataatatattcatt

SEQ ID NO: 491271 - DNA, 15 bp, Homo sapiens
tcataatatattcat

SEQ ID NO: 491272 - DNA, 15 bp, Homo sapiens
ttcataatatattca

SEQ ID NO: 491273 - DNA, 15 bp, Homo sapiens
tttcataatatattc

SEQ ID NO: 491274 - DNA, 15 bp, Homo sapiens
ttttcataatatatt

SEQ ID NO: 491275 - DNA, 15 bp, Homo sapiens
tttttcataatatat

SEQ ID NO: 491276 - DNA, 15 bp, Homo sapiens
atttttcataatata

SEQ ID NO: 491277 - DNA, 15 bp, Homo sapiens
catttttcataatat

SEQ ID NO: 491278 - DNA, 15 bp, Homo sapiens
tcatttttcataata

SEQ ID NO: 491279 - DNA, 15 bp, Homo sapiens
ttcatttttcataat

SEQ ID NO: 491280 - DNA, 15 bp, Homo sapiens
tttcatttttcataa

SEQ ID NO: 491281 - DNA, 15 bp, Homo sapiens
ttttcatttttcata

SEQ ID NO: 491282 - DNA, 15 bp, Homo sapiens
gttttcatttttcat

SEQ ID NO: 491283 - DNA, 15 bp, Homo sapiens
agttttcatttttca

SEQ ID NO: 491284 - DNA, 15 bp, Homo sapiens
tagttttcatttttc

SEQ ID NO: 491285 - DNA, 15 bp, Homo sapiens
atagttttcattttt

SEQ ID NO: 491286 - DNA, 15 bp, Homo sapiens
catagttttcatttt

SEQ ID NO: 491287 - DNA, 15 bp, Homo sapiens
tcatagttttcattt

SEQ ID NO: 491288 - DNA, 15 bp, Homo sapiens
ttcatagttttcatt

SEQ ID NO: 491289 - DNA, 15 bp, Homo sapiens
tttcatagttttcat

SEQ ID NO: 491290 - DNA, 15 bp, Homo sapiens
ttttcatagttttca

SEQ ID NO: 491291 - DNA, 15 bp, Homo sapiens
attttcatagttttc

SEQ ID NO: 491292 - DNA, 15 bp, Homo sapiens
aattttcatagtttt

SEQ ID NO: 491293 - DNA, 15 bp, Homo sapiens
taattttcatagttt

SEQ ID NO: 491294 - DNA, 15 bp, Homo sapiens
gtaattttcatagtt

SEQ ID NO: 491295 - DNA, 15 bp, Homo sapiens
agtaattttcatagt

SEQ ID NO: 491296 - DNA, 15 bp, Homo sapiens
tagtaattttcatag

SEQ ID NO: 491297 - DNA, 15 bp, Homo sapiens
ttagtaattttcata

SEQ ID NO: 491298 - DNA, 15 bp, Homo sapiens
tttagtaattttcat

SEQ ID NO: 491299 - DNA, 15 bp, Homo sapiens
atttagtaattttca

SEQ ID NO: 491300 - DNA, 15 bp, Homo sapiens
gatttagtaattttc

SEQ ID NO: 491301 - DNA, 15 bp, Homo sapiens
agatttagtaatttt

SEQ ID NO: 491302 - DNA, 15 bp, Homo sapiens
aagatttagtaattt

SEQ ID NO: 491303 - DNA, 15 bp, Homo sapiens
taagatttagtaatt

SEQ ID NO: 491304 - DNA, 15 bp, Homo sapiens
ttaagatttagtaat

SEQ ID NO: 491305 - DNA, 15 bp, Homo sapiens
cttaagatttagtaa

SEQ ID NO: 491306 - DNA, 15 bp, Homo sapiens
gcttaagatttagta

SEQ ID NO: 491307 - DNA, 15 bp, Homo sapiens
ggcttaagatttagt

SEQ ID NO: 491308 - DNA, 15 bp, Homo sapiens
aggcttaagatttag

SEQ ID NO: 491309 - DNA, 15 bp, Homo sapiens
taggcttaagattta

SEQ ID NO: 491310 - DNA, 15 bp, Homo sapiens
ttaggcttaagattt

SEQ ID NO: 491311 - DNA, 15 bp, Homo sapiens
tttaggcttaagatt

SEQ ID NO: 491312 - DNA, 15 bp, Homo sapiens
ctttaggcttaagat

SEQ ID NO: 491313 - DNA, 15 bp, Homo sapiens
actttaggcttaaga

SEQ ID NO: 491314 - DNA, 15 bp, Homo sapiens
aactttaggcttaag

SEQ ID NO: 491315 - DNA, 15 bp, Homo sapiens
taactttaggcttaa

SEQ ID NO: 491316 - DNA, 15 bp, Homo sapiens
ataactttaggctta

SEQ ID NO: 491317 - DNA, 15 bp, Homo sapiens
aataactttaggctt

SEQ ID NO: 491318 - DNA, 15 bp, Homo sapiens
aaataactttaggct

SEQ ID NO: 491319 - DNA, 15 bp, Homo sapiens
aaaataactttaggc

SEQ ID NO: 491320 - DNA, 15 bp, Homo sapiens
taaaataactttagg

SEQ ID NO: 491321 - DNA, 15 bp, Homo sapiens
ataaaataactttag

SEQ ID NO: 491322 - DNA, 15 bp, Homo sapiens
cataaaataacttta

SEQ ID NO: 491323 - DNA, 15 bp, Homo sapiens
acataaaataacttt

SEQ ID NO: 491324 - DNA, 15 bp, Homo sapiens
cacataaaataactt

SEQ ID NO: 491325 - DNA, 15 bp, Homo sapiens
ccacataaaataact

SEQ ID NO: 491326 - DNA, 15 bp, Homo sapiens
accacataaaataac

SEQ ID NO: 491327 - DNA, 15 bp, Homo sapiens
caccacataaaataa

SEQ ID NO: 491328 - DNA, 15 bp, Homo sapiens
gcaccacataaaata

SEQ ID NO: 491329 - DNA, 15 bp, Homo sapiens
tgcaccacataaaat

SEQ ID NO: 491330 - DNA, 15 bp, Homo sapiens
gtgcaccacataaaa

SEQ ID NO: 491331 - DNA, 15 bp, Homo sapiens
ggtgcaccacataaa

SEQ ID NO: 491332 - DNA, 15 bp, Homo sapiens
aggtgcaccacataa

SEQ ID NO: 491333 - DNA, 15 bp, Homo sapiens
caggtgcaccacata

SEQ ID NO: 491334 - DNA, 15 bp, Homo sapiens
ccaggtgcaccacat

SEQ ID NO: 491335 - DNA, 15 bp, Homo sapiens
accaggtgcaccaca

SEQ ID NO: 491336 - DNA, 15 bp, Homo sapiens
taccaggtgcaccac

SEQ ID NO: 491337 - DNA, 15 bp, Homo sapiens
gtaccaggtgcacca

SEQ ID NO: 491338 - DNA, 15 bp, Homo sapiens
ggtaccaggtgcacc

SEQ ID NO: 491339 - DNA, 15 bp, Homo sapiens
tggtaccaggtgcac

SEQ ID NO: 491340 - DNA, 15 bp, Homo sapiens
gtggtaccaggtgca

SEQ ID NO: 491341 - DNA, 15 bp, Homo sapiens
tgtggtaccaggtgc

SEQ ID NO: 491342 - DNA, 15 bp, Homo sapiens
ttgtggtaccaggtg

SEQ ID NO: 491343 - DNA, 15 bp, Homo sapiens
attgtggtaccaggt

SEQ ID NO: 491344 - DNA, 15 bp, Homo sapiens
tattgtggtaccagg

SEQ ID NO: 491345 - DNA, 15 bp, Homo sapiens
gtattgtggtaccag

SEQ ID NO: 491346 - DNA, 15 bp, Homo sapiens
cgtattgtggtacca

SEQ ID NO: 491347 - DNA, 15 bp, Homo sapiens
ccgtattgtggtacc

SEQ ID NO: 491348 - DNA, 15 bp, Homo sapiens
accgtattgtggtac

SEQ ID NO: 491349 - DNA, 15 bp, Homo sapiens
aaccgtattgtggta

SEQ ID NO: 491350 - DNA, 15 bp, Homo sapiens
aaaccgtattgtggt

SEQ ID NO: 491351 - DNA, 15 bp, Homo sapiens
gaaaccgtattgtgg

SEQ ID NO: 491352 - DNA, 15 bp, Homo sapiens
tgaaaccgtattgtg

SEQ ID NO: 491353 - DNA, 15 bp, Homo sapiens
ttgaaaccgtattgt

SEQ ID NO: 491354 - DNA, 15 bp, Homo sapiens
tttgaaaccgtattg

SEQ ID NO: 491355 - DNA, 15 bp, Homo sapiens
ttttgaaaccgtatt

SEQ ID NO: 491356 - DNA, 15 bp, Homo sapiens
cttttgaaaccgtat

SEQ ID NO: 491357 - DNA, 15 bp, Homo sapiens
gcttttgaaaccgta

SEQ ID NO: 491358 - DNA, 15 bp, Homo sapiens
agcttttgaaaccgt

SEQ ID NO: 491359 - DNA, 15 bp, Homo sapiens
tagcttttgaaaccg

SEQ ID NO: 491360 - DNA, 15 bp, Homo sapiens
atagcttttgaaacc

SEQ ID NO: 491361 - DNA, 15 bp, Homo sapiens
aatagcttttgaaac

SEQ ID NO: 491362 - DNA, 15 bp, Homo sapiens
taatagcttttgaaa

SEQ ID NO: 491363 - DNA, 15 bp, Homo sapiens
ttaatagcttttgaa

SEQ ID NO: 491364 - DNA, 15 bp, Homo sapiens
tttaatagcttttga

SEQ ID NO: 491365 - DNA, 15 bp, Homo sapiens
ttttaatagcttttg

SEQ ID NO: 491366 - DNA, 15 bp, Homo sapiens
tttttaatagctttt

SEQ ID NO: 491367 - DNA, 15 bp, Homo sapiens
ttttttaatagcttt

SEQ ID NO: 491368 - DNA, 15 bp, Homo sapiens
tttttttaatagctt

SEQ ID NO: 491369 - DNA, 15 bp, Homo sapiens
ctttttttaatagct

SEQ ID NO: 491370 - DNA, 15 bp, Homo sapiens
tctttttttaatagc

SEQ ID NO: 491371 - DNA, 15 bp, Homo sapiens
gtctttttttaatag

SEQ ID NO: 491372 - DNA, 15 bp, Homo sapiens
tgtctttttttaata

SEQ ID NO: 491373 - DNA, 15 bp, Homo sapiens
gtgtctttttttaat

SEQ ID NO: 491374 - DNA, 15 bp, Homo sapiens
tgtgtctttttttaa

SEQ ID NO: 491375 - DNA, 15 bp, Homo sapiens
ctgtgtcttttttta

SEQ ID NO: 491376 - DNA, 15 bp, Homo sapiens
actgtgtcttttttt

SEQ ID NO: 491377 - DNA, 15 bp, Homo sapiens
tactgtgtctttttt

SEQ ID NO: 491378 - DNA, 15 bp, Homo sapiens
ttactgtgtcttttt

SEQ ID NO: 491379 - DNA, 15 bp, Homo sapiens
attactgtgtctttt

SEQ ID NO: 491380 - DNA, 15 bp, Homo sapiens
aattactgtgtcttt

SEQ ID NO: 491381 - DNA, 15 bp, Homo sapiens
aaattactgtgtctt

SEQ ID NO: 491382 - DNA, 15 bp, Homo sapiens
caaattactgtgtct

SEQ ID NO: 491383 - DNA, 15 bp, Homo sapiens
tcaaattactgtgtc

SEQ ID NO: 491384 - DNA, 15 bp, Homo sapiens
ttcaaattactgtgt

SEQ ID NO: 491385 - DNA, 15 bp, Homo sapiens
attcaaattactgtg

SEQ ID NO: 491386 - DNA, 15 bp, Homo sapiens
tattcaaattactgt

SEQ ID NO: 491387 - DNA, 15 bp, Homo sapiens
ctattcaaattactg

SEQ ID NO: 491388 - DNA, 15 bp, Homo sapiens
cctattcaaattact

SEQ ID NO: 491389 - DNA, 15 bp, Homo sapiens
tcctattcaaattac

SEQ ID NO: 491390 - DNA, 15 bp, Homo sapiens
atcctattcaaatta

SEQ ID NO: 491391 - DNA, 15 bp, Homo sapiens
catcctattcaaatt

SEQ ID NO: 491392 - DNA, 15 bp, Homo sapiens
acatcctattcaaat

SEQ ID NO: 491393 - DNA, 15 bp, Homo sapiens
aacatcctattcaaa

SEQ ID NO: 491394 - DNA, 15 bp, Homo sapiens
taacatcctattcaa

SEQ ID NO: 491395 - DNA, 15 bp, Homo sapiens
ataacatcctattca

SEQ ID NO: 491396 - DNA, 15 bp, Homo sapiens
tataacatcctattc

SEQ ID NO: 491397 - DNA, 15 bp, Homo sapiens
atataacatcctatt

SEQ ID NO: 491398 - DNA, 15 bp, Homo sapiens
catataacatcctat

SEQ ID NO: 491399 - DNA, 15 bp, Homo sapiens
ccatataacatccta

SEQ ID NO: 491400 - DNA, 15 bp, Homo sapiens
cccatataacatcct

SEQ ID NO: 491401 - DNA, 15 bp, Homo sapiens
tcccatataacatcc

SEQ ID NO: 491402 - DNA, 15 bp, Homo sapiens
atcccatataacatc

SEQ ID NO: 491403 - DNA, 15 bp, Homo sapiens
catcccatataacat

SEQ ID NO: 491404 - DNA, 15 bp, Homo sapiens
gcatcccatataaca

SEQ ID NO: 491405 - DNA, 15 bp, Homo sapiens
ggcatcccatataac

SEQ ID NO: 491406 - DNA, 15 bp, Homo sapiens
aggcatcccatataa

SEQ ID NO: 491407 - DNA, 15 bp, Homo sapiens
aaggcatcccatata

SEQ ID NO: 491408 - DNA, 15 bp, Homo sapiens
aaaggcatcccatat

SEQ ID NO: 491409 - DNA, 15 bp, Homo sapiens
gaaaggcatcccata

SEQ ID NO: 491410 - DNA, 15 bp, Homo sapiens
agaaaggcatcccat

SEQ ID NO: 491411 - DNA, 15 bp, Homo sapiens
aagaaaggcatccca

SEQ ID NO: 491412 - DNA, 15 bp, Homo sapiens
taagaaaggcatccc

SEQ ID NO: 491413 - DNA, 15 bp, Homo sapiens
ctaagaaaggcatcc

SEQ ID NO: 491414 - DNA, 15 bp, Homo sapiens
actaagaaaggcatc

SEQ ID NO: 491415 - DNA, 15 bp, Homo sapiens
aactaagaaaggcat

SEQ ID NO: 491416 - DNA, 15 bp, Homo sapiens
aaactaagaaaggca

SEQ ID NO: 491417 - DNA, 15 bp, Homo sapiens
taaactaagaaaggc

SEQ ID NO: 491418 - DNA, 15 bp, Homo sapiens
ataaactaagaaagg

SEQ ID NO: 491419 - DNA, 15 bp, Homo sapiens
gataaactaagaaag

SEQ ID NO: 491420 - DNA, 15 bp, Homo sapiens
tgataaactaagaaa

SEQ ID NO: 491421 - DNA, 15 bp, Homo sapiens
ctgataaactaagaa

SEQ ID NO: 491422 - DNA, 15 bp, Homo sapiens
actgataaactaaga

SEQ ID NO: 491423 - DNA, 15 bp, Homo sapiens
aactgataaactaag

SEQ ID NO: 491424 - DNA, 15 bp, Homo sapiens
aaactgataaactaa

SEQ ID NO: 491425 - DNA, 15 bp, Homo sapiens
gaaactgataaacta

SEQ ID NO: 491426 - DNA, 15 bp, Homo sapiens
agaaactgataaact

SEQ ID NO: 491427 - DNA, 15 bp, Homo sapiens
cagaaactgataaac

SEQ ID NO: 491428 - DNA, 15 bp, Homo sapiens
tcagaaactgataaa

SEQ ID NO: 491429 - DNA, 15 bp, Homo sapiens
gtcagaaactgataa

SEQ ID NO: 491430 - DNA, 15 bp, Homo sapiens
tgtcagaaactgata

SEQ ID NO: 491431 - DNA, 15 bp, Homo sapiens
ttgtcagaaactgat

SEQ ID NO: 491432 - DNA, 15 bp, Homo sapiens
cttgtcagaaactga

SEQ ID NO: 491433 - DNA, 15 bp, Homo sapiens
tcttgtcagaaactg

SEQ ID NO: 491434 - DNA, 15 bp, Homo sapiens
atcttgtcagaaact

SEQ ID NO: 491435 - DNA, 15 bp, Homo sapiens
gatcttgtcagaaac

SEQ ID NO: 491436 - DNA, 15 bp, Homo sapiens
agatcttgtcagaaa

SEQ ID NO: 491437 - DNA, 15 bp, Homo sapiens
aagatcttgtcagaa

SEQ ID NO: 491438 - DNA, 15 bp, Homo sapiens
taagatcttgtcaga

SEQ ID NO: 491439 - DNA, 15 bp, Homo sapiens
gtaagatcttgtcag

SEQ ID NO: 491440 - DNA, 15 bp, Homo sapiens
cgtaagatcttgtca

SEQ ID NO: 491441 - DNA, 15 bp, Homo sapiens
tcgtaagatcttgtc

SEQ ID NO: 491442 - DNA, 15 bp, Homo sapiens
ctcgtaagatcttgt

SEQ ID NO: 491443 - DNA, 15 bp, Homo sapiens
tctcgtaagatcttg

SEQ ID NO: 491444 - DNA, 15 bp, Homo sapiens
atctcgtaagatctt

SEQ ID NO: 491445 - DNA, 15 bp, Homo sapiens
catctcgtaagatct

SEQ ID NO: 491446 - DNA, 15 bp, Homo sapiens
acatctcgtaagatc

SEQ ID NO: 491447 - DNA, 15 bp, Homo sapiens
cacatctcgtaagat

SEQ ID NO: 491448 - DNA, 15 bp, Homo sapiens
acacatctcgtaaga

SEQ ID NO: 491449 - DNA, 15 bp, Homo sapiens
aacacatctcgtaag

SEQ ID NO: 491450 - DNA, 15 bp, Homo sapiens
caacacatctcgtaa

SEQ ID NO: 491451 - DNA, 15 bp, Homo sapiens
ccaacacatctcgta

SEQ ID NO: 491452 - DNA, 15 bp, Homo sapiens
cccaacacatctcgt

SEQ ID NO: 491453 - DNA, 15 bp, Homo sapiens
acccaacacatctcg

SEQ ID NO: 491454 - DNA, 15 bp, Homo sapiens
tacccaacacatctc

SEQ ID NO: 491455 - DNA, 15 bp, Homo sapiens
ttacccaacacatct

SEQ ID NO: 491456 - DNA, 15 bp, Homo sapiens
cttacccaacacatc

SEQ ID NO: 491457 - DNA, 15 bp, Homo sapiens
ccttacccaacacat

SEQ ID NO: 491458 - DNA, 15 bp, Homo sapiens
tccttacccaacaca

SEQ ID NO: 491459 - DNA, 15 bp, Homo sapiens
ttccttacccaacac

SEQ ID NO: 491460 - DNA, 15 bp, Homo sapiens
cttccttacccaaca

SEQ ID NO: 491461 - DNA, 15 bp, Homo sapiens
tcttccttacccaac

SEQ ID NO: 491462 - DNA, 15 bp, Homo sapiens
gtcttccttacccaa

SEQ ID NO: 491463 - DNA, 15 bp, Homo sapiens
ggtcttccttaccca

SEQ ID NO: 491464 - DNA, 15 bp, Homo sapiens
gggtcttccttaccc

SEQ ID NO: 491465 - DNA, 15 bp, Homo sapiens
agggtcttccttacc

SEQ ID NO: 491466 - DNA, 15 bp, Homo sapiens
aagggtcttccttac

SEQ ID NO: 491467 - DNA, 15 bp, Homo sapiens
gaagggtcttcctta

SEQ ID NO: 491468 - DNA, 15 bp, Homo sapiens
tgaagggtcttcctt

SEQ ID NO: 491469 - DNA, 15 bp, Homo sapiens
gtgaagggtcttcct

SEQ ID NO: 491470 - DNA, 15 bp, Homo sapiens
agtgaagggtcttcc

SEQ ID NO: 491471 - DNA, 15 bp, Homo sapiens
gagtgaagggtcttc

SEQ ID NO: 491472 - DNA, 15 bp, Homo sapiens
tgagtgaagggtctt

SEQ ID NO: 491473 - DNA, 15 bp, Homo sapiens
ttgagtgaagggtct

SEQ ID NO: 491474 - DNA, 15 bp, Homo sapiens
attgagtgaagggtc

SEQ ID NO: 491475 - DNA, 15 bp, Homo sapiens
cattgagtgaagggt

SEQ ID NO: 491476 - DNA, 15 bp, Homo sapiens
acattgagtgaaggg

SEQ ID NO: 491477 - DNA, 15 bp, Homo sapiens
tacattgagtgaagg

SEQ ID NO: 491478 - DNA, 15 bp, Homo sapiens
gtacattgagtgaag

SEQ ID NO: 491479 - DNA, 15 bp, Homo sapiens
agtacattgagtgaa

SEQ ID NO: 491480 - DNA, 15 bp, Homo sapiens
aagtacattgagtga

SEQ ID NO: 491481 - DNA, 15 bp, Homo sapiens
aaagtacattgagtg

SEQ ID NO: 491482 - DNA, 15 bp, Homo sapiens
caaagtacattgagt

SEQ ID NO: 491483 - DNA, 15 bp, Homo sapiens
acaaagtacattgag

SEQ ID NO: 491484 - DNA, 15 bp, Homo sapiens
aacaaagtacattga

SEQ ID NO: 491485 - DNA, 15 bp, Homo sapiens
taacaaagtacattg

SEQ ID NO: 491486 - DNA, 15 bp, Homo sapiens
ataacaaagtacatt

SEQ ID NO: 491487 - DNA, 15 bp, Homo sapiens
aataacaaagtacat

SEQ ID NO: 491488 - DNA, 15 bp, Homo sapiens
taataacaaagtaca

SEQ ID NO: 491489 - DNA, 15 bp, Homo sapiens
ataataacaaagtac

SEQ ID NO: 491490 - DNA, 15 bp, Homo sapiens
aataataacaaagta

SEQ ID NO: 491491 - DNA, 15 bp, Homo sapiens
gaataataacaaagt

SEQ ID NO: 491492 - DNA, 15 bp, Homo sapiens
tgaataataacaaag

SEQ ID NO: 491493 - DNA, 15 bp, Homo sapiens
ctgaataataacaaa

SEQ ID NO: 491494 - DNA, 15 bp, Homo sapiens
gctgaataataacaa

SEQ ID NO: 491495 - DNA, 15 bp, Homo sapiens
agctgaataataaca

SEQ ID NO: 491496 - DNA, 15 bp, Homo sapiens
aagctgaataataac

SEQ ID NO: 491497 - DNA, 15 bp, Homo sapiens
aaagctgaataataa

SEQ ID NO: 491498 - DNA, 15 bp, Homo sapiens
aaaagctgaataata

SEQ ID NO: 491499 - DNA, 15 bp, Homo sapiens
aaaaagctgaataat

SEQ ID NO: 491500 - DNA, 15 bp, Homo sapiens
caaaaagctgaataa

SEQ ID NO: 491501 - DNA, 15 bp, Homo sapiens
acaaaaagctgaata

SEQ ID NO: 491502 - DNA, 15 bp, Homo sapiens
aacaaaaagctgaat

SEQ ID NO: 491503 - DNA, 15 bp, Homo sapiens
taacaaaaagctgaa

SEQ ID NO: 491504 - DNA, 15 bp, Homo sapiens
gtaacaaaaagctga

SEQ ID NO: 491505 - DNA, 15 bp, Homo sapiens
agtaacaaaaagctg

SEQ ID NO: 491506 - DNA, 15 bp, Homo sapiens
aagtaacaaaaagct

SEQ ID NO: 491507 - DNA, 15 bp, Homo sapiens
aaagtaacaaaaagc

SEQ ID NO: 491508 - DNA, 15 bp, Homo sapiens
taaagtaacaaaaag

SEQ ID NO: 491509 - DNA, 15 bp, Homo sapiens
ctaaagtaacaaaaa

SEQ ID NO: 491510 - DNA, 15 bp, Homo sapiens
cctaaagtaacaaaa

SEQ ID NO: 491511 - DNA, 15 bp, Homo sapiens
gcctaaagtaacaaa

SEQ ID NO: 491512 - DNA, 15 bp, Homo sapiens
agcctaaagtaacaa

SEQ ID NO: 491513 - DNA, 15 bp, Homo sapiens
cagcctaaagtaaca

SEQ ID NO: 491514 - DNA, 15 bp, Homo sapiens
tcagcctaaagtaac

SEQ ID NO: 491515 - DNA, 15 bp, Homo sapiens
atcagcctaaagtaa

SEQ ID NO: 491516 - DNA, 15 bp, Homo sapiens
aatcagcctaaagta

SEQ ID NO: 491517 - DNA, 15 bp, Homo sapiens
taatcagcctaaagt

SEQ ID NO: 491518 - DNA, 15 bp, Homo sapiens
ttaatcagcctaaag

SEQ ID NO: 491519 - DNA, 15 bp, Homo sapiens
gttaatcagcctaaa

SEQ ID NO: 491520 - DNA, 15 bp, Homo sapiens
tgttaatcagcctaa

SEQ ID NO: 491521 - DNA, 15 bp, Homo sapiens
gtgttaatcagccta

SEQ ID NO: 491522 - DNA, 15 bp, Homo sapiens
tgtgttaatcagcct

SEQ ID NO: 491523 - DNA, 15 bp, Homo sapiens
ttgtgttaatcagcc

SEQ ID NO: 491524 - DNA, 15 bp, Homo sapiens
cttgtgttaatcagc

SEQ ID NO: 491525 - DNA, 15 bp, Homo sapiens
gcttgtgttaatcag

SEQ ID NO: 491526 - DNA, 15 bp, Homo sapiens
agcttgtgttaatca

SEQ ID NO: 491527 - DNA, 15 bp, Homo sapiens
cagcttgtgttaatc

SEQ ID NO: 491528 - DNA, 15 bp, Homo sapiens
acagcttgtgttaat

SEQ ID NO: 491529 - DNA, 15 bp, Homo sapiens
tacagcttgtgttaa

SEQ ID NO: 491530 - DNA, 15 bp, Homo sapiens
atacagcttgtgtta

SEQ ID NO: 491531 - DNA, 15 bp, Homo sapiens
tatacagcttgtgtt

SEQ ID NO: 491532 - DNA, 15 bp, Homo sapiens
ttatacagcttgtgt

SEQ ID NO: 491533 - DNA, 15 bp, Homo sapiens
attatacagcttgtg

SEQ ID NO: 491534 - DNA, 15 bp, Homo sapiens
aattatacagcttgt

SEQ ID NO: 491535 - DNA, 15 bp, Homo sapiens
aaattatacagcttg

SEQ ID NO: 491536 - DNA, 15 bp, Homo sapiens
taaattatacagctt

SEQ ID NO: 491537 - DNA, 15 bp, Homo sapiens
ctaaattatacagct

SEQ ID NO: 491538 - DNA, 15 bp, Homo sapiens
actaaattatacagc

SEQ ID NO: 491539 - DNA, 15 bp, Homo sapiens
tactaaattatacag

SEQ ID NO: 491540 - DNA, 15 bp, Homo sapiens
ttactaaattataca

SEQ ID NO: 491541 - DNA, 15 bp, Homo sapiens
cttactaaattatac

SEQ ID NO: 491542 - DNA, 15 bp, Homo sapiens
acttactaaattata

SEQ ID NO: 491543 - DNA, 15 bp, Homo sapiens
tacttactaaattat

SEQ ID NO: 491544 - DNA, 15 bp, Homo sapiens
atacttactaaatta

SEQ ID NO: 491545 - DNA, 15 bp, Homo sapiens
tatacttactaaatt

SEQ ID NO: 491546 - DNA, 15 bp, Homo sapiens
ttatacttactaaat

SEQ ID NO: 491547 - DNA, 15 bp, Homo sapiens
cttatacttactaaa

SEQ ID NO: 491548 - DNA, 15 bp, Homo sapiens
ccttatacttactaa

SEQ ID NO: 491549 - DNA, 15 bp, Homo sapiens
tccttatacttacta

SEQ ID NO: 491550 - DNA, 15 bp, Homo sapiens
ttccttatacttact

SEQ ID NO: 491551 - DNA, 15 bp, Homo sapiens
tttccttatacttac

SEQ ID NO: 491552 - DNA, 15 bp, Homo sapiens
atttccttatactta

SEQ ID NO: 491553 - DNA, 15 bp, Homo sapiens
gatttccttatactt

SEQ ID NO: 491554 - DNA, 15 bp, Homo sapiens
tgatttccttatact

SEQ ID NO: 491555 - DNA, 15 bp, Homo sapiens
ttgatttccttatac

SEQ ID NO: 491556 - DNA, 15 bp, Homo sapiens
cttgatttccttata

SEQ ID NO: 491557 - DNA, 15 bp, Homo sapiens
acttgatttccttat

SEQ ID NO: 491558 - DNA, 15 bp, Homo sapiens
aacttgatttcctta

SEQ ID NO: 491559 - DNA, 15 bp, Homo sapiens
caacttgatttcctt

SEQ ID NO: 491560 - DNA, 15 bp, Homo sapiens
gcaacttgatttcct

SEQ ID NO: 491561 - DNA, 15 bp, Homo sapiens
tgcaacttgatttcc

SEQ ID NO: 491562 - DNA, 15 bp, Homo sapiens
atgcaacttgatttc

SEQ ID NO: 491563 - DNA, 15 bp, Homo sapiens
aatgcaacttgattt

SEQ ID NO: 491564 - DNA, 15 bp, Homo sapiens
caatgcaacttgatt

SEQ ID NO: 491565 - DNA, 15 bp, Homo sapiens
ccaatgcaacttgat

SEQ ID NO: 491566 - DNA, 15 bp, Homo sapiens
accaatgcaacttga

SEQ ID NO: 491567 - DNA, 15 bp, Homo sapiens
aaccaatgcaacttg

SEQ ID NO: 491568 - DNA, 15 bp, Homo sapiens
caaccaatgcaactt

SEQ ID NO: 491569 - DNA, 15 bp, Homo sapiens
gcaaccaatgcaact

SEQ ID NO: 491570 - DNA, 15 bp, Homo sapiens
agcaaccaatgcaac

SEQ ID NO: 491571 - DNA, 15 bp, Homo sapiens
aagcaaccaatgcaa

SEQ ID NO: 491572 - DNA, 15 bp, Homo sapiens
aaagcaaccaatgca

SEQ ID NO: 491573 - DNA, 15 bp, Homo sapiens
caaagcaaccaatgc

SEQ ID NO: 491574 - DNA, 15 bp, Homo sapiens
ccaaagcaaccaatg

SEQ ID NO: 491575 - DNA, 15 bp, Homo sapiens
cccaaagcaaccaat

SEQ ID NO: 491576 - DNA, 15 bp, Homo sapiens
gcccaaagcaaccaa

SEQ ID NO: 491577 - DNA, 15 bp, Homo sapiens
tgcccaaagcaacca

SEQ ID NO: 491578 - DNA, 15 bp, Homo sapiens
ttgcccaaagcaacc

SEQ ID NO: 491579 - DNA, 15 bp, Homo sapiens
cttgcccaaagcaac

SEQ ID NO: 491580 - DNA, 15 bp, Homo sapiens
acttgcccaaagcaa

SEQ ID NO: 491581 - DNA, 15 bp, Homo sapiens
gacttgcccaaagca

SEQ ID NO: 491582 - DNA, 15 bp, Homo sapiens
tgacttgcccaaagc

SEQ ID NO: 491583 - DNA, 15 bp, Homo sapiens
ttgacttgcccaaag

SEQ ID NO: 491584 - DNA, 15 bp, Homo sapiens
tttgacttgcccaaa

SEQ ID NO: 491585 - DNA, 15 bp, Homo sapiens
ttttgacttgcccaa

SEQ ID NO: 491586 - DNA, 15 bp, Homo sapiens
attttgacttgccca

SEQ ID NO: 491587 - DNA, 15 bp, Homo sapiens
aattttgacttgccc

SEQ ID NO: 491588 - DNA, 15 bp, Homo sapiens
caattttgacttgcc

SEQ ID NO: 491589 - DNA, 15 bp, Homo sapiens
gcaattttgacttgc

SEQ ID NO: 491590 - DNA, 15 bp, Homo sapiens
agcaattttgacttg

SEQ ID NO: 491591 - DNA, 15 bp, Homo sapiens
cagcaattttgactt

SEQ ID NO: 491592 - DNA, 15 bp, Homo sapiens
tcagcaattttgact

SEQ ID NO: 491593 - DNA, 15 bp, Homo sapiens
ctcagcaattttgac

SEQ ID NO: 491594 - DNA, 15 bp, Homo sapiens
tctcagcaattttga

SEQ ID NO: 491595 - DNA, 15 bp, Homo sapiens
ctctcagcaattttg

SEQ ID NO: 491596 - DNA, 15 bp, Homo sapiens
actctcagcaatttt

SEQ ID NO: 491597 - DNA, 15 bp, Homo sapiens
aactctcagcaattt

SEQ ID NO: 491598 - DNA, 15 bp, Homo sapiens
caactctcagcaatt

SEQ ID NO: 491599 - DNA, 15 bp, Homo sapiens
ccaactctcagcaat

SEQ ID NO: 491600 - DNA, 15 bp, Homo sapiens
tccaactctcagcaa

SEQ ID NO: 491601 - DNA, 15 bp, Homo sapiens
ctccaactctcagca

SEQ ID NO: 491602 - DNA, 15 bp, Homo sapiens
cctccaactctcagc

SEQ ID NO: 491603 - DNA, 15 bp, Homo sapiens
tcctccaactctcag

SEQ ID NO: 491604 - DNA, 15 bp, Homo sapiens
ttcctccaactctca

SEQ ID NO: 491605 - DNA, 15 bp, Homo sapiens
attcctccaactctc

SEQ ID NO: 491606 - DNA, 15 bp, Homo sapiens
gattcctccaactct

SEQ ID NO: 491607 - DNA, 15 bp, Homo sapiens
ggattcctccaactc

SEQ ID NO: 491608 - DNA, 15 bp, Homo sapiens
tggattcctccaact

SEQ ID NO: 491609 - DNA, 15 bp, Homo sapiens
atggattcctccaac

SEQ ID NO: 491610 - DNA, 15 bp, Homo sapiens
attgagatgtgctgt

SEQ ID NO: 491611 - DNA, 15 bp, Homo sapiens
aattgagatgtgctg

SEQ ID NO: 491612 - DNA, 15 bp, Homo sapiens
aaattgagatgtgct

SEQ ID NO: 491613 - DNA, 15 bp, Homo sapiens
caaattgagatgtgc

SEQ ID NO: 491614 - DNA, 15 bp, Homo sapiens
tcaaattgagatgtg

SEQ ID NO: 491615 - DNA, 15 bp, Homo sapiens
ttcaaattgagatgt

SEQ ID NO: 491616 - DNA, 15 bp, Homo sapiens
gttcaaattgagatg

SEQ ID NO: 491617 - DNA, 15 bp, Homo sapiens
tgttcaaattgagat

SEQ ID NO: 491618 - DNA, 15 bp, Homo sapiens
ttgttcaaattgaga

SEQ ID NO: 491619 - DNA, 15 bp, Homo sapiens
cttgttcaaattgag

SEQ ID NO: 491620 - DNA, 15 bp, Homo sapiens
gcttgttcaaattga

SEQ ID NO: 491621 - DNA, 15 bp, Homo sapiens
ggcttgttcaaattg

SEQ ID NO: 491622 - DNA, 15 bp, Homo sapiens
tggcttgttcaaatt

SEQ ID NO: 491623 - DNA, 15 bp, Homo sapiens
gtggcttgttcaaat

SEQ ID NO: 491624 - DNA, 15 bp, Homo sapiens
tgtggcttgttcaaa

SEQ ID NO: 491625 - DNA, 15 bp, Homo sapiens
gtgtggcttgttcaa

SEQ ID NO: 491626 - DNA, 15 bp, Homo sapiens
agtgtggcttgttca

SEQ ID NO: 491627 - DNA, 15 bp, Homo sapiens
aagtgtggcttgttc

SEQ ID NO: 491628 - DNA, 15 bp, Homo sapiens
taagtgtggcttgtt

SEQ ID NO: 491629 - DNA, 15 bp, Homo sapiens
ttaagtgtggcttgt

SEQ ID NO: 491630 - DNA, 15 bp, Homo sapiens
tttaagtgtggcttg

SEQ ID NO: 491631 - DNA, 15 bp, Homo sapiens
ctttaagtgtggctt

SEQ ID NO: 491632 - DNA, 15 bp, Homo sapiens
actttaagtgtggct

SEQ ID NO: 491633 - DNA, 15 bp, Homo sapiens
cactttaagtgtggc

SEQ ID NO: 491634 - DNA, 15 bp, Homo sapiens
gcactttaagtgtgg

SEQ ID NO: 491635 - DNA, 15 bp, Homo sapiens
agcactttaagtgtg

SEQ ID NO: 491636 - DNA, 15 bp, Homo sapiens
gagcactttaagtgt

SEQ ID NO: 491637 - DNA, 15 bp, Homo sapiens
tgagcactttaagtg

SEQ ID NO: 491638 - DNA, 15 bp, Homo sapiens
ttgagcactttaagt

SEQ ID NO: 491639 - DNA, 15 bp, Homo sapiens
attgagcactttaag

SEQ ID NO: 491640 - DNA, 15 bp, Homo sapiens
tattgagcactttaa

SEQ ID NO: 491641 - DNA, 15 bp, Homo sapiens
ctattgagcacttta

SEQ ID NO: 491642 - DNA, 15 bp, Homo sapiens
gctattgagcacttt

SEQ ID NO: 491643 - DNA, 15 bp, Homo sapiens
ggctattgagcactt

SEQ ID NO: 491644 - DNA, 15 bp, Homo sapiens
tggctattgagcact

SEQ ID NO: 491645 - DNA, 15 bp, Homo sapiens
gtggctattgagcac

SEQ ID NO: 491646 - DNA, 15 bp, Homo sapiens
cgtggctattgagca

SEQ ID NO: 491647 - DNA, 15 bp, Homo sapiens
acgtggctattgagc

SEQ ID NO: 491648 - DNA, 15 bp, Homo sapiens
cacgtggctattgag

SEQ ID NO: 491649 - DNA, 15 bp, Homo sapiens
acacgtggctattga

SEQ ID NO: 491650 - DNA, 15 bp, Homo sapiens
cacacgtggctattg

SEQ ID NO: 491651 - DNA, 15 bp, Homo sapiens
ccacacgtggctatt

SEQ ID NO: 491652 - DNA, 15 bp, Homo sapiens
gccacacgtggctat

SEQ ID NO: 491653 - DNA, 15 bp, Homo sapiens
agccacacgtggcta

SEQ ID NO: 491654 - DNA, 15 bp, Homo sapiens
cagccacacgtggct

SEQ ID NO: 491655 - DNA, 15 bp, Homo sapiens
ccagccacacgtggc

SEQ ID NO: 491656 - DNA, 15 bp, Homo sapiens
gccagccacacgtgg

SEQ ID NO: 491657 - DNA, 15 bp, Homo sapiens
agccagccacacgtg

SEQ ID NO: 491658 - DNA, 15 bp, Homo sapiens
tagccagccacacgt

SEQ ID NO: 491659 - DNA, 15 bp, Homo sapiens
ctagccagccacacg

SEQ ID NO: 491660 - DNA, 15 bp, Homo sapiens
actagccagccacac

SEQ ID NO: 491661 - DNA, 15 bp, Homo sapiens
cactagccagccaca

SEQ ID NO: 491662 - DNA, 15 bp, Homo sapiens
ccactagccagccac

SEQ ID NO: 491663 - DNA, 15 bp, Homo sapiens
gccactagccagcca

SEQ ID NO: 491664 - DNA, 15 bp, Homo sapiens
agccactagccagcc

SEQ ID NO: 491665 - DNA, 15 bp, Homo sapiens
tagccactagccagc

SEQ ID NO: 491666 - DNA, 15 bp, Homo sapiens
gtagccactagccag

SEQ ID NO: 491667 - DNA, 15 bp, Homo sapiens
ggtagccactagcca

SEQ ID NO: 491668 - DNA, 15 bp, Homo sapiens
tggtagccactagcc

SEQ ID NO: 491669 - DNA, 15 bp, Homo sapiens
atggtagccactagc

SEQ ID NO: 491670 - DNA, 15 bp, Homo sapiens
catggtagccactag

SEQ ID NO: 491671 - DNA, 15 bp, Homo sapiens
acatggtagccacta

SEQ ID NO: 491672 - DNA, 15 bp, Homo sapiens
aacatggtagccact

SEQ ID NO: 491673 - DNA, 15 bp, Homo sapiens
taacatggtagccac

SEQ ID NO: 491674 - DNA, 15 bp, Homo sapiens
ctaacatggtagcca

SEQ ID NO: 491675 - DNA, 15 bp, Homo sapiens
tctaacatggtagcc

SEQ ID NO: 491676 - DNA, 15 bp, Homo sapiens
gtctaacatggtagc

SEQ ID NO: 491677 - DNA, 15 bp, Homo sapiens
tgtctaacatggtag

SEQ ID NO: 491678 - DNA, 15 bp, Homo sapiens
ctgtctaacatggta

SEQ ID NO: 491679 - DNA, 15 bp, Homo sapiens
actgtctaacatggt

SEQ ID NO: 491680 - DNA, 15 bp, Homo sapiens
cactgtctaacatgg

SEQ ID NO: 491681 - DNA, 15 bp, Homo sapiens
gcactgtctaacatg

SEQ ID NO: 491682 - DNA, 15 bp, Homo sapiens
tgcactgtctaacat

SEQ ID NO: 491683 - DNA, 15 bp, Homo sapiens
ctgcactgtctaaca

SEQ ID NO: 491684 - DNA, 15 bp, Homo sapiens
gctgcactgtctaac

SEQ ID NO: 491685 - DNA, 15 bp, Homo sapiens
agctgcactgtctaa

SEQ ID NO: 491686 - DNA, 15 bp, Homo sapiens
gagctgcactgtcta

SEQ ID NO: 491687 - DNA, 15 bp, Homo sapiens
agagctgcactgtct

SEQ ID NO: 491688 - DNA, 15 bp, Homo sapiens
cagagctgcactgtc

SEQ ID NO: 491689 - DNA, 15 bp, Homo sapiens
ccagagctgcactgt

SEQ ID NO: 491690 - DNA, 15 bp, Homo sapiens
tccagagctgcactg

SEQ ID NO: 491691 - DNA, 15 bp, Homo sapiens
ctccagagctgcact

SEQ ID NO: 491692 - DNA, 15 bp, Homo sapiens
actccagagctgcac

SEQ ID NO: 491693 - DNA, 15 bp, Homo sapiens
tactccagagctgca

SEQ ID NO: 491694 - DNA, 15 bp, Homo sapiens
ctactccagagctgc

SEQ ID NO: 491695 - DNA, 15 bp, Homo sapiens
cctactccagagctg

SEQ ID NO: 491696 - DNA, 15 bp, Homo sapiens
ccctactccagagct

SEQ ID NO: 491697 - DNA, 15 bp, Homo sapiens
tccctactccagagc

SEQ ID NO: 491698 - DNA, 15 bp, Homo sapiens
atccctactccagag

SEQ ID NO: 491699 - DNA, 15 bp, Homo sapiens
gatccctactccaga

SEQ ID NO: 491700 - DNA, 15 bp, Homo sapiens
tgatccctactccag

SEQ ID NO: 491701 - DNA, 15 bp, Homo sapiens
ctgatccctactcca

SEQ ID NO: 491702 - DNA, 15 bp, Homo sapiens
cctgatccctactcc

SEQ ID NO: 491703 - DNA, 15 bp, Homo sapiens
tcctgatccctactc

SEQ ID NO: 491704 - DNA, 15 bp, Homo sapiens
ttcctgatccctact

SEQ ID NO: 491705 - DNA, 15 bp, Homo sapiens
tttcctgatccctac

SEQ ID NO: 491706 - DNA, 15 bp, Homo sapiens
gtttcctgatcccta

SEQ ID NO: 491707 - DNA, 15 bp, Homo sapiens
agtttcctgatccct

SEQ ID NO: 491708 - DNA, 15 bp, Homo sapiens
aagtttcctgatccc

SEQ ID NO: 491709 - DNA, 15 bp, Homo sapiens
aaagtttcctgatcc

SEQ ID NO: 491710 - DNA, 15 bp, Homo sapiens
aaaagtttcctgatc

SEQ ID NO: 491711 - DNA, 15 bp, Homo sapiens
gaaaagtttcctgat

SEQ ID NO: 491712 - DNA, 15 bp, Homo sapiens
agaaaagtttcctga

SEQ ID NO: 491713 - DNA, 15 bp, Homo sapiens
gagaaaagtttcctg

SEQ ID NO: 491714 - DNA, 15 bp, Homo sapiens
agagaaaagtttcct

SEQ ID NO: 491715 - DNA, 15 bp, Homo sapiens
tagagaaaagtttcc

SEQ ID NO: 491716 - DNA, 15 bp, Homo sapiens
ttagagaaaagtttc

SEQ ID NO: 491717 - DNA, 15 bp, Homo sapiens
tttagagaaaagttt

SEQ ID NO: 491718 - DNA, 15 bp, Homo sapiens
ttttagagaaaagtt

SEQ ID NO: 491719 - DNA, 15 bp, Homo sapiens
cttttagagaaaagt

SEQ ID NO: 491720 - DNA, 15 bp, Homo sapiens
ccttttagagaaaag

SEQ ID NO: 491721 - DNA, 15 bp, Homo sapiens
gccttttagagaaaa

SEQ ID NO: 491722 - DNA, 15 bp, Homo sapiens
ggccttttagagaaa

SEQ ID NO: 491723 - DNA, 15 bp, Homo sapiens
tggccttttagagaa

SEQ ID NO: 491724 - DNA, 15 bp, Homo sapiens
ctggccttttagaga

SEQ ID NO: 491725 - DNA, 15 bp, Homo sapiens
tctggccttttagag

SEQ ID NO: 491726 - DNA, 15 bp, Homo sapiens
atctggccttttaga

SEQ ID NO: 491727 - DNA, 15 bp, Homo sapiens
tatctggccttttag

SEQ ID NO: 491728 - DNA, 15 bp, Homo sapiens
ctatctggcctttta

SEQ ID NO: 491729 - DNA, 15 bp, Homo sapiens
actatctggcctttt

SEQ ID NO: 491730 - DNA, 15 bp, Homo sapiens
tactatctggccttt

SEQ ID NO: 491731 - DNA, 15 bp, Homo sapiens
ttactatctggcctt

SEQ ID NO: 491732 - DNA, 15 bp, Homo sapiens
tttactatctggcct

SEQ ID NO: 491733 - DNA, 15 bp, Homo sapiens
atttactatctggcc

SEQ ID NO: 491734 - DNA, 15 bp, Homo sapiens
tatttactatctggc

SEQ ID NO: 491735 - DNA, 15 bp, Homo sapiens
atatttactatctgg

SEQ ID NO: 491736 - DNA, 15 bp, Homo sapiens
aatatttactatctg

SEQ ID NO: 491737 - DNA, 15 bp, Homo sapiens
aaatatttactatct

SEQ ID NO: 491738 - DNA, 15 bp, Homo sapiens
aaaatatttactatc

SEQ ID NO: 491739 - DNA, 15 bp, Homo sapiens
taaaatatttactat

SEQ ID NO: 491740 - DNA, 15 bp, Homo sapiens
ctaaaatatttacta

SEQ ID NO: 491741 - DNA, 15 bp, Homo sapiens
cctaaaatatttact

SEQ ID NO: 491742 - DNA, 15 bp, Homo sapiens
ccctaaaatatttac

SEQ ID NO: 491743 - DNA, 15 bp, Homo sapiens
gccctaaaatattta

SEQ ID NO: 491744 - DNA, 15 bp, Homo sapiens
agccctaaaatattt

SEQ ID NO: 491745 - DNA, 15 bp, Homo sapiens
aagccctaaaatatt

SEQ ID NO: 491746 - DNA, 15 bp, Homo sapiens
caagccctaaaatat

SEQ ID NO: 491747 - DNA, 15 bp, Homo sapiens
acaagccctaaaata

SEQ ID NO: 491748 - DNA, 15 bp, Homo sapiens
cacaagccctaaaat

SEQ ID NO: 491749 - DNA, 15 bp, Homo sapiens
ccacaagccctaaaa

SEQ ID NO: 491750 - DNA, 15 bp, Homo sapiens
cccacaagccctaaa

SEQ ID NO: 491751 - DNA, 15 bp, Homo sapiens
acccacaagccctaa

SEQ ID NO: 491752 - DNA, 15 bp, Homo sapiens
gacccacaagcccta

SEQ ID NO: 491753 - DNA, 15 bp, Homo sapiens
tgacccacaagccct

SEQ ID NO: 491754 - DNA, 15 bp, Homo sapiens
atgacccacaagccc

SEQ ID NO: 491755 - DNA, 15 bp, Homo sapiens
tatgacccacaagcc

SEQ ID NO: 491756 - DNA, 15 bp, Homo sapiens
atatgacccacaagc

SEQ ID NO: 491757 - DNA, 15 bp, Homo sapiens
tatatgacccacaag

SEQ ID NO: 491758 - DNA, 15 bp, Homo sapiens
ctatatgacccacaa

SEQ ID NO: 491759 - DNA, 15 bp, Homo sapiens
actatatgacccaca

SEQ ID NO: 491760 - DNA, 15 bp, Homo sapiens
aactatatgacccac

SEQ ID NO: 491761 - DNA, 15 bp, Homo sapiens
aaactatatgaccca

SEQ ID NO: 491762 - DNA, 15 bp, Homo sapiens
gaaactatatgaccc

SEQ ID NO: 491763 - DNA, 15 bp, Homo sapiens
agaaactatatgacc

SEQ ID NO: 491764 - DNA, 15 bp, Homo sapiens
cagaaactatatgac

SEQ ID NO: 491765 - DNA, 15 bp, Homo sapiens
acagaaactatatga

SEQ ID NO: 491766 - DNA, 15 bp, Homo sapiens
gacagaaactatatg

SEQ ID NO: 491767 - DNA, 15 bp, Homo sapiens
tgacagaaactatat

SEQ ID NO: 491768 - DNA, 15 bp, Homo sapiens
atgacagaaactata

SEQ ID NO: 491769 - DNA, 15 bp, Homo sapiens
tatgacagaaactat

SEQ ID NO: 491770 - DNA, 15 bp, Homo sapiens
ttatgacagaaacta

SEQ ID NO: 491771 - DNA, 15 bp, Homo sapiens
gttatgacagaaact

SEQ ID NO: 491772 - DNA, 15 bp, Homo sapiens
ggttatgacagaaac

SEQ ID NO: 491773 - DNA, 15 bp, Homo sapiens
tggttatgacagaaa

SEQ ID NO: 491774 - DNA, 15 bp, Homo sapiens
atggttatgacagaa

SEQ ID NO: 491775 - DNA, 15 bp, Homo sapiens
aatggttatgacaga

SEQ ID NO: 491776 - DNA, 15 bp, Homo sapiens
gaatggttatgacag

SEQ ID NO: 491777 - DNA, 15 bp, Homo sapiens
tgaatggttatgaca

SEQ ID NO: 491778 - DNA, 15 bp, Homo sapiens
ctgaatggttatgac

SEQ ID NO: 491779 - DNA, 15 bp, Homo sapiens
actgaatggttatga

SEQ ID NO: 491780 - DNA, 15 bp, Homo sapiens
aactgaatggttatg

SEQ ID NO: 491781 - DNA, 15 bp, Homo sapiens
gaactgaatggttat

SEQ ID NO: 491782 - DNA, 15 bp, Homo sapiens
agaactgaatggtta

SEQ ID NO: 491783 - DNA, 15 bp, Homo sapiens
cagaactgaatggtt

SEQ ID NO: 491784 - DNA, 15 bp, Homo sapiens
gcagaactgaatggt

SEQ ID NO: 491785 - DNA, 15 bp, Homo sapiens
ggcagaactgaatgg

SEQ ID NO: 491786 - DNA, 15 bp, Homo sapiens
aggcagaactgaatg

SEQ ID NO: 491787 - DNA, 15 bp, Homo sapiens
aaggcagaactgaat

SEQ ID NO: 491788 - DNA, 15 bp, Homo sapiens
aaaggcagaactgaa

SEQ ID NO: 491789 - DNA, 15 bp, Homo sapiens
caaaggcagaactga

SEQ ID NO: 491790 - DNA, 15 bp, Homo sapiens
ccaaaggcagaactg

SEQ ID NO: 491791 - DNA, 15 bp, Homo sapiens
tccaaaggcagaact

SEQ ID NO: 491792 - DNA, 15 bp, Homo sapiens
ctccaaaggcagaac

SEQ ID NO: 491793 - DNA, 15 bp, Homo sapiens
gctccaaaggcagaa

SEQ ID NO: 491794 - DNA, 15 bp, Homo sapiens
tgctccaaaggcaga

SEQ ID NO: 491795 - DNA, 15 bp, Homo sapiens
atgctccaaaggcag

SEQ ID NO: 491796 - DNA, 15 bp, Homo sapiens
catgctccaaaggca

SEQ ID NO: 491797 - DNA, 15 bp, Homo sapiens
tcatgctccaaaggc

SEQ ID NO: 491798 - DNA, 15 bp, Homo sapiens
ttcatgctccaaagg

SEQ ID NO: 491799 - DNA, 15 bp, Homo sapiens
tttcatgctccaaag

SEQ ID NO: 491800 - DNA, 15 bp, Homo sapiens
ctttcatgctccaaa

SEQ ID NO: 491801 - DNA, 15 bp, Homo sapiens
actttcatgctccaa

SEQ ID NO: 491802 - DNA, 15 bp, Homo sapiens
cactttcatgctcca

SEQ ID NO: 491803 - DNA, 15 bp, Homo sapiens
ccactttcatgctcc

SEQ ID NO: 491804 - DNA, 15 bp, Homo sapiens
gccactttcatgctc

SEQ ID NO: 491805 - DNA, 15 bp, Homo sapiens
ggccactttcatgct

SEQ ID NO: 491806 - DNA, 15 bp, Homo sapiens
tggccactttcatgc

SEQ ID NO: 491807 - DNA, 15 bp, Homo sapiens
gtggccactttcatg

SEQ ID NO: 491808 - DNA, 15 bp, Homo sapiens
tgtggccactttcat

SEQ ID NO: 491809 - DNA, 15 bp, Homo sapiens
ctgtggccactttca

SEQ ID NO: 491810 - DNA, 15 bp, Homo sapiens
tctgtggccactttc

SEQ ID NO: 491811 - DNA, 15 bp, Homo sapiens
gtctgtggccacttt

SEQ ID NO: 491812 - DNA, 15 bp, Homo sapiens
tgtctgtggccactt

SEQ ID NO: 491813 - DNA, 15 bp, Homo sapiens
atgtctgtggccact

SEQ ID NO: 491814 - DNA, 15 bp, Homo sapiens
catgtctgtggccac

SEQ ID NO: 491815 - DNA, 15 bp, Homo sapiens
acatgtctgtggcca

SEQ ID NO: 491816 - DNA, 15 bp, Homo sapiens
cacatgtctgtggcc

SEQ ID NO: 491817 - DNA, 15 bp, Homo sapiens
tcacatgtctgtggc

SEQ ID NO: 491818 - DNA, 15 bp, Homo sapiens
ttcacatgtctgtgg

SEQ ID NO: 491819 - DNA, 15 bp, Homo sapiens
attcacatgtctgtg

SEQ ID NO: 491820 - DNA, 15 bp, Homo sapiens
cattcacatgtctgt

SEQ ID NO: 491821 - DNA, 15 bp, Homo sapiens
tcattcacatgtctg

SEQ ID NO: 491822 - DNA, 15 bp, Homo sapiens
ttcattcacatgtct

SEQ ID NO: 491823 - DNA, 15 bp, Homo sapiens
gttcattcacatgtc

SEQ ID NO: 491824 - DNA, 15 bp, Homo sapiens
cgttcattcacatgt

SEQ ID NO: 491825 - DNA, 15 bp, Homo sapiens
ccgttcattcacatg

SEQ ID NO: 491826 - DNA, 15 bp, Homo sapiens
cccgttcattcacat

SEQ ID NO: 491827 - DNA, 15 bp, Homo sapiens
gcccgttcattcaca

SEQ ID NO: 491828 - DNA, 15 bp, Homo sapiens
tgcccgttcattcac

SEQ ID NO: 491829 - DNA, 15 bp, Homo sapiens
atgcccgttcattca

SEQ ID NO: 491830 - DNA, 15 bp, Homo sapiens
catgcccgttcattc

SEQ ID NO: 491831 - DNA, 15 bp, Homo sapiens
ccatgcccgttcatt

SEQ ID NO: 491832 - DNA, 15 bp, Homo sapiens
gccatgcccgttcat

SEQ ID NO: 491833 - DNA, 15 bp, Homo sapiens
agccatgcccgttca

SEQ ID NO: 491834 - DNA, 15 bp, Homo sapiens
cagccatgcccgttc

SEQ ID NO: 491835 - DNA, 15 bp, Homo sapiens
acagccatgcccgtt

SEQ ID NO: 491836 - DNA, 15 bp, Homo sapiens
cacagccatgcccgt

SEQ ID NO: 491837 - DNA, 15 bp, Homo sapiens
acacagccatgcccg

SEQ ID NO: 491838 - DNA, 15 bp, Homo sapiens
aacacagccatgccc

SEQ ID NO: 491839 - DNA, 15 bp, Homo sapiens
aaacacagccatgcc

SEQ ID NO: 491840 - DNA, 15 bp, Homo sapiens
taaacacagccatgc

SEQ ID NO: 491841 - DNA, 15 bp, Homo sapiens
ttaaacacagccatg

SEQ ID NO: 491842 - DNA, 15 bp, Homo sapiens
gttaaacacagccat

SEQ ID NO: 491843 - DNA, 15 bp, Homo sapiens
agttaaacacagcca

SEQ ID NO: 491844 - DNA, 15 bp, Homo sapiens
tagttaaacacagcc

SEQ ID NO: 491845 - DNA, 15 bp, Homo sapiens
ttagttaaacacagc

SEQ ID NO: 491846 - DNA, 15 bp, Homo sapiens
tttagttaaacacag

SEQ ID NO: 491847 - DNA, 15 bp, Homo sapiens
ttttagttaaacaca

SEQ ID NO: 491848 - DNA, 15 bp, Homo sapiens
gttttagttaaacac

SEQ ID NO: 491849 - DNA, 15 bp, Homo sapiens
agttttagttaaaca

SEQ ID NO: 491850 - DNA, 15 bp, Homo sapiens
cagttttagttaaac

SEQ ID NO: 491851 - DNA, 15 bp, Homo sapiens
acagttttagttaaa

SEQ ID NO: 491852 - DNA, 15 bp, Homo sapiens
tacagttttagttaa

SEQ ID NO: 491853 - DNA, 15 bp, Homo sapiens
atacagttttagtta

SEQ ID NO: 491854 - DNA, 15 bp, Homo sapiens
tatacagttttagtt

SEQ ID NO: 491855 - DNA, 15 bp, Homo sapiens
atatacagttttagt

SEQ ID NO: 491856 - DNA, 15 bp, Homo sapiens
aatatacagttttag

SEQ ID NO: 491857 - DNA, 15 bp, Homo sapiens
aaatatacagtttta

SEQ ID NO: 491858 - DNA, 15 bp, Homo sapiens
taaatatacagtttt

SEQ ID NO: 491859 - DNA, 15 bp, Homo sapiens
gtaaatatacagttt

SEQ ID NO: 491860 - DNA, 15 bp, Homo sapiens
tgtaaatatacagtt

SEQ ID NO: 491861 - DNA, 15 bp, Homo sapiens
ttgtaaatatacagt

SEQ ID NO: 491862 - DNA, 15 bp, Homo sapiens
attgtaaatatacag

SEQ ID NO: 491863 - DNA, 15 bp, Homo sapiens
tattgtaaatataca

SEQ ID NO: 491864 - DNA, 15 bp, Homo sapiens
ctattgtaaatatac

SEQ ID NO: 491865 - DNA, 15 bp, Homo sapiens
gctattgtaaatata

SEQ ID NO: 491866 - DNA, 15 bp, Homo sapiens
tgctattgtaaatat

SEQ ID NO: 491867 - DNA, 15 bp, Homo sapiens
ttgctattgtaaata

SEQ ID NO: 491868 - DNA, 15 bp, Homo sapiens
cttgctattgtaaat

SEQ ID NO: 491869 - DNA, 15 bp, Homo sapiens
acttgctattgtaaa

SEQ ID NO: 491870 - DNA, 15 bp, Homo sapiens
cacttgctattgtaa

SEQ ID NO: 491871 - DNA, 15 bp, Homo sapiens
tcacttgctattgta

SEQ ID NO: 491872 - DNA, 15 bp, Homo sapiens
atcacttgctattgt

SEQ ID NO: 491873 - DNA, 15 bp, Homo sapiens
tatcacttgctattg

SEQ ID NO: 491874 - DNA, 15 bp, Homo sapiens
ctatcacttgctatt

SEQ ID NO: 491875 - DNA, 15 bp, Homo sapiens
cctatcacttgctat

SEQ ID NO: 491876 - DNA, 15 bp, Homo sapiens
gcctatcacttgcta

SEQ ID NO: 491877 - DNA, 15 bp, Homo sapiens
agcctatcacttgct

SEQ ID NO: 491878 - DNA, 15 bp, Homo sapiens
tagcctatcacttgc

SEQ ID NO: 491879 - DNA, 15 bp, Homo sapiens
ctagcctatcacttg

SEQ ID NO: 491880 - DNA, 15 bp, Homo sapiens
cctagcctatcactt

SEQ ID NO: 491881 - DNA, 15 bp, Homo sapiens
acctagcctatcact

SEQ ID NO: 491882 - DNA, 15 bp, Homo sapiens
aacctagcctatcac

SEQ ID NO: 491883 - DNA, 15 bp, Homo sapiens
aaacctagcctatca

SEQ ID NO: 491884 - DNA, 15 bp, Homo sapiens
caaacctagcctatc

SEQ ID NO: 491885 - DNA, 15 bp, Homo sapiens
ccaaacctagcctat

SEQ ID NO: 491886 - DNA, 15 bp, Homo sapiens
gccaaacctagccta

SEQ ID NO: 491887 - DNA, 15 bp, Homo sapiens
ggccaaacctagcct

SEQ ID NO: 491888 - DNA, 15 bp, Homo sapiens
aggccaaacctagcc

SEQ ID NO: 491889 - DNA, 15 bp, Homo sapiens
caggccaaacctagc

SEQ ID NO: 491890 - DNA, 15 bp, Homo sapiens
acaggccaaacctag

SEQ ID NO: 491891 - DNA, 15 bp, Homo sapiens
cacaggccaaaccta

SEQ ID NO: 491892 - DNA, 15 bp, Homo sapiens
ccacaggccaaacct

SEQ ID NO: 491893 - DNA, 15 bp, Homo sapiens
tccacaggccaaacc

SEQ ID NO: 491894 - DNA, 15 bp, Homo sapiens
atccacaggccaaac

SEQ ID NO: 491895 - DNA, 15 bp, Homo sapiens
catccacaggccaaa

SEQ ID NO: 491896 - DNA, 15 bp, Homo sapiens
ccatccacaggccaa

SEQ ID NO: 491897 - DNA, 15 bp, Homo sapiens
accatccacaggcca

SEQ ID NO: 491898 - DNA, 15 bp, Homo sapiens
taccatccacaggcc

SEQ ID NO: 491899 - DNA, 15 bp, Homo sapiens
ctaccatccacaggc

SEQ ID NO: 491900 - DNA, 15 bp, Homo sapiens
gctaccatccacagg

SEQ ID NO: 491901 - DNA, 15 bp, Homo sapiens
agctaccatccacag

SEQ ID NO: 491902 - DNA, 15 bp, Homo sapiens
aagctaccatccaca

SEQ ID NO: 491903 - DNA, 15 bp, Homo sapiens
caagctaccatccac

SEQ ID NO: 491904 - DNA, 15 bp, Homo sapiens
gcaagctaccatcca

SEQ ID NO: 491905 - DNA, 15 bp, Homo sapiens
tgcaagctaccatcc

SEQ ID NO: 491906 - DNA, 15 bp, Homo sapiens
ctgcaagctaccatc

SEQ ID NO: 491907 - DNA, 15 bp, Homo sapiens
tctgcaagctaccat

SEQ ID NO: 491908 - DNA, 15 bp, Homo sapiens
gtctgcaagctacca

SEQ ID NO: 491909 - DNA, 15 bp, Homo sapiens
ggtctgcaagctacc

SEQ ID NO: 491910 - DNA, 15 bp, Homo sapiens
gggtctgcaagctac

SEQ ID NO: 491911 - DNA, 15 bp, Homo sapiens
ggggtctgcaagcta

SEQ ID NO: 491912 - DNA, 15 bp, Homo sapiens
gggggtctgcaagct

SEQ ID NO: 491913 - DNA, 15 bp, Homo sapiens
tgggggtctgcaagc

SEQ ID NO: 491914 - DNA, 15 bp, Homo sapiens
gtgggggtctgcaag

SEQ ID NO: 491915 - DNA, 15 bp, Homo sapiens
agtgggggtctgcaa

SEQ ID NO: 491916 - DNA, 15 bp, Homo sapiens
cagtgggggtctgca

SEQ ID NO: 491917 - DNA, 15 bp, Homo sapiens
acagtgggggtctgc

SEQ ID NO: 491918 - DNA, 15 bp, Homo sapiens
cacagtgggggtctg

SEQ ID NO: 491919 - DNA, 15 bp, Homo sapiens
ccacagtgggggtct

SEQ ID NO: 491920 - DNA, 15 bp, Homo sapiens
tccacagtgggggtc

SEQ ID NO: 491921 - DNA, 15 bp, Homo sapiens
ctccacagtgggggt

SEQ ID NO: 491922 - DNA, 15 bp, Homo sapiens
gctccacagtggggg

SEQ ID NO: 491923 - DNA, 15 bp, Homo sapiens
tgctccacagtgggg

SEQ ID NO: 491924 - DNA, 15 bp, Homo sapiens
gtgctccacagtggg

SEQ ID NO: 491925 - DNA, 15 bp, Homo sapiens
agtgctccacagtgg

SEQ ID NO: 491926 - DNA, 15 bp, Homo sapiens
cagtgctccacagtg

SEQ ID NO: 491927 - DNA, 15 bp, Homo sapiens
ccagtgctccacagt

SEQ ID NO: 491928 - DNA, 15 bp, Homo sapiens
cccagtgctccacag

SEQ ID NO: 491929 - DNA, 15 bp, Homo sapiens
acccagtgctccaca

SEQ ID NO: 491930 - DNA, 15 bp, Homo sapiens
aacccagtgctccac

SEQ ID NO: 491931 - DNA, 15 bp, Homo sapiens
aaacccagtgctcca

SEQ ID NO: 491932 - DNA, 15 bp, Homo sapiens
taaacccagtgctcc

SEQ ID NO: 491933 - DNA, 15 bp, Homo sapiens
ataaacccagtgctc

SEQ ID NO: 491934 - DNA, 15 bp, Homo sapiens
tataaacccagtgct

SEQ ID NO: 491935 - DNA, 15 bp, Homo sapiens
ctataaacccagtgc

SEQ ID NO: 491936 - DNA, 15 bp, Homo sapiens
cctataaacccagtg

SEQ ID NO: 491937 - DNA, 15 bp, Homo sapiens
gcctataaacccagt

SEQ ID NO: 491938 - DNA, 15 bp, Homo sapiens
tgcctataaacccag

SEQ ID NO: 491939 - DNA, 15 bp, Homo sapiens
ctgcctataaaccca

SEQ ID NO: 491940 - DNA, 15 bp, Homo sapiens
actgcctataaaccc

SEQ ID NO: 491941 - DNA, 15 bp, Homo sapiens
gactgcctataaacc

SEQ ID NO: 491942 - DNA, 15 bp, Homo sapiens
agactgcctataaac

SEQ ID NO: 491943 - DNA, 15 bp, Homo sapiens
gagactgcctataaa

SEQ ID NO: 491944 - DNA, 15 bp, Homo sapiens
agagactgcctataa

SEQ ID NO: 491945 - DNA, 15 bp, Homo sapiens
cagagactgcctata

SEQ ID NO: 491946 - DNA, 15 bp, Homo sapiens
gcagagactgcctat

SEQ ID NO: 491947 - DNA, 15 bp, Homo sapiens
agcagagactgccta

SEQ ID NO: 491948 - DNA, 15 bp, Homo sapiens
cagcagagactgcct

SEQ ID NO: 491949 - DNA, 15 bp, Homo sapiens
acagcagagactgcc

SEQ ID NO: 491950 - DNA, 15 bp, Homo sapiens
cacagcagagactgc

SEQ ID NO: 491951 - DNA, 15 bp, Homo sapiens
gcacagcagagactg

SEQ ID NO: 491952 - DNA, 15 bp, Homo sapiens
tgcacagcagagact

SEQ ID NO: 491953 - DNA, 15 bp, Homo sapiens
atgcacagcagagac

SEQ ID NO: 491954 - DNA, 15 bp, Homo sapiens
catgcacagcagaga

SEQ ID NO: 491955 - DNA, 15 bp, Homo sapiens
acatgcacagcagag

SEQ ID NO: 491956 - DNA, 15 bp, Homo sapiens
cacatgcacagcaga

SEQ ID NO: 491957 - DNA, 15 bp, Homo sapiens
ccacatgcacagcag

SEQ ID NO: 491958 - DNA, 15 bp, Homo sapiens
accacatgcacagca

SEQ ID NO: 491959 - DNA, 15 bp, Homo sapiens
aaccacatgcacagc

SEQ ID NO: 491960 - DNA, 15 bp, Homo sapiens
aaaccacatgcacag

SEQ ID NO: 491961 - DNA, 15 bp, Homo sapiens
taaaccacatgcaca

SEQ ID NO: 491962 - DNA, 15 bp, Homo sapiens
ataaaccacatgcac

SEQ ID NO: 491963 - DNA, 15 bp, Homo sapiens
aataaaccacatgca

SEQ ID NO: 491964 - DNA, 15 bp, Homo sapiens
caataaaccacatgc

SEQ ID NO: 491965 - DNA, 15 bp, Homo sapiens
acaataaaccacatg

SEQ ID NO: 491966 - DNA, 15 bp, Homo sapiens
aacaataaaccacat

SEQ ID NO: 491967 - DNA, 15 bp, Homo sapiens
aaacaataaaccaca

SEQ ID NO: 491968 - DNA, 15 bp, Homo sapiens
gaaacaataaaccac

SEQ ID NO: 491969 - DNA, 15 bp, Homo sapiens
agaaacaataaacca

SEQ ID NO: 491970 - DNA, 15 bp, Homo sapiens
aagaaacaataaacc

SEQ ID NO: 491971 - DNA, 15 bp, Homo sapiens
gaagaaacaataaac

SEQ ID NO: 491972 - DNA, 15 bp, Homo sapiens
agaagaaacaataaa

SEQ ID NO: 491973 - DNA, 15 bp, Homo sapiens
aagaagaaacaataa

SEQ ID NO: 491974 - DNA, 15 bp, Homo sapiens
taagaagaaacaata

SEQ ID NO: 491975 - DNA, 15 bp, Homo sapiens
ataagaagaaacaat

SEQ ID NO: 491976 - DNA, 15 bp, Homo sapiens
cataagaagaaacaa

SEQ ID NO: 491977 - DNA, 15 bp, Homo sapiens
acataagaagaaaca

SEQ ID NO: 491978 - DNA, 15 bp, Homo sapiens
gacataagaagaaac

SEQ ID NO: 491979 - DNA, 15 bp, Homo sapiens
agacataagaagaaa

SEQ ID NO: 491980 - DNA, 15 bp, Homo sapiens
tagacataagaagaa

SEQ ID NO: 491981 - DNA, 15 bp, Homo sapiens
gtagacataagaaga

SEQ ID NO: 491982 - DNA, 15 bp, Homo sapiens
agtagacataagaag

SEQ ID NO: 491983 - DNA, 15 bp, Homo sapiens
tagtagacataagaa

SEQ ID NO: 491984 - DNA, 15 bp, Homo sapiens
gtagtagacataaga

SEQ ID NO: 491985 - DNA, 15 bp, Homo sapiens
tgtagtagacataag

SEQ ID NO: 491986 - DNA, 15 bp, Homo sapiens
ttgtagtagacataa

SEQ ID NO: 491987 - DNA, 15 bp, Homo sapiens
cttgtagtagacata

SEQ ID NO: 491988 - DNA, 15 bp, Homo sapiens
ccttgtagtagacat

SEQ ID NO: 491989 - DNA, 15 bp, Homo sapiens
tccttgtagtagaca

SEQ ID NO: 491990 - DNA, 15 bp, Homo sapiens
atccttgtagtagac

SEQ ID NO: 491991 - DNA, 15 bp, Homo sapiens
catccttgtagtaga

SEQ ID NO: 491992 - DNA, 15 bp, Homo sapiens
tcatccttgtagtag

SEQ ID NO: 491993 - DNA, 15 bp, Homo sapiens
ctcatccttgtagta

SEQ ID NO: 491994 - DNA, 15 bp, Homo sapiens
tctcatccttgtagt

SEQ ID NO: 491995 - DNA, 15 bp, Homo sapiens
atctcatccttgtag

SEQ ID NO: 491996 - DNA, 15 bp, Homo sapiens
tatctcatccttgta

SEQ ID NO: 491997 - DNA, 15 bp, Homo sapiens
gtatctcatccttgt

SEQ ID NO: 491998 - DNA, 15 bp, Homo sapiens
tgtatctcatccttg

SEQ ID NO: 491999 - DNA, 15 bp, Homo sapiens
atgtatctcatcctt

SEQ ID NO: 492000 - DNA, 15 bp, Homo sapiens
catgtatctcatcct

SEQ ID NO: 492001 - DNA, 15 bp, Homo sapiens
ccatgtatctcatcc

SEQ ID NO: 492002 - DNA, 15 bp, Homo sapiens
tccatgtatctcatc

SEQ ID NO: 492003 - DNA, 15 bp, Homo sapiens
atccatgtatctcat

SEQ ID NO: 492004 - DNA, 15 bp, Homo sapiens
tatccatgtatctca

SEQ ID NO: 492005 - DNA, 15 bp, Homo sapiens
ctatccatgtatctc

SEQ ID NO: 492006 - DNA, 15 bp, Homo sapiens
tctatccatgtatct

SEQ ID NO: 492007 - DNA, 15 bp, Homo sapiens
ttctatccatgtatc

SEQ ID NO: 492008 - DNA, 15 bp, Homo sapiens
tttctatccatgtat

SEQ ID NO: 492009 - DNA, 15 bp, Homo sapiens
gtttctatccatgta

SEQ ID NO: 492010 - DNA, 15 bp, Homo sapiens
tgtttctatccatgt

SEQ ID NO: 492011 - DNA, 15 bp, Homo sapiens
gtgtttctatccatg

SEQ ID NO: 492012 - DNA, 15 bp, Homo sapiens
agtgtttctatccat

SEQ ID NO: 492013 - DNA, 15 bp, Homo sapiens
cagtgtttctatcca

SEQ ID NO: 492014 - DNA, 15 bp, Homo sapiens
ccagtgtttctatcc

SEQ ID NO: 492015 - DNA, 15 bp, Homo sapiens
cccagtgtttctatc

SEQ ID NO: 492016 - DNA, 15 bp, Homo sapiens
tcccagtgtttctat

SEQ ID NO: 492017 - DNA, 15 bp, Homo sapiens
ctcccagtgtttcta

SEQ ID NO: 492018 - DNA, 15 bp, Homo sapiens
actcccagtgtttct

SEQ ID NO: 492019 - DNA, 15 bp, Homo sapiens
aactcccagtgtttc

SEQ ID NO: 492020 - DNA, 15 bp, Homo sapiens
aaactcccagtgttt

SEQ ID NO: 492021 - DNA, 15 bp, Homo sapiens
taaactcccagtgtt

SEQ ID NO: 492022 - DNA, 15 bp, Homo sapiens
ttaaactcccagtgt

SEQ ID NO: 492023 - DNA, 15 bp, Homo sapiens
attaaactcccagtg

SEQ ID NO: 492024 - DNA, 15 bp, Homo sapiens
cattaaactcccagt

SEQ ID NO: 492025 - DNA, 15 bp, Homo sapiens
tcattaaactcccag

SEQ ID NO: 492026 - DNA, 15 bp, Homo sapiens
ttcattaaactccca

SEQ ID NO: 492027 - DNA, 15 bp, Homo sapiens
tttcattaaactccc

SEQ ID NO: 492028 - DNA, 15 bp, Homo sapiens
gtttcattaaactcc

SEQ ID NO: 492029 - DNA, 15 bp, Homo sapiens
tgtttcattaaactc

SEQ ID NO: 492030 - DNA, 15 bp, Homo sapiens
atgtttcattaaact

SEQ ID NO: 492031 - DNA, 15 bp, Homo sapiens
tatgtttcattaaac

SEQ ID NO: 492032 - DNA, 15 bp, Homo sapiens
ctatgtttcattaaa

SEQ ID NO: 492033 - DNA, 15 bp, Homo sapiens
cctatgtttcattaa

SEQ ID NO: 492034 - DNA, 15 bp, Homo sapiens
ccctatgtttcatta

SEQ ID NO: 492035 - DNA, 15 bp, Homo sapiens
cccctatgtttcatt

SEQ ID NO: 492036 - DNA, 15 bp, Homo sapiens
ccccctatgtttcat

SEQ ID NO: 492037 - DNA, 15 bp, Homo sapiens
gccccctatgtttca

SEQ ID NO: 492038 - DNA, 15 bp, Homo sapiens
agccccctatgtttc

SEQ ID NO: 492039 - DNA, 15 bp, Homo sapiens
aagccccctatgttt

SEQ ID NO: 492040 - DNA, 15 bp, Homo sapiens
taagccccctatgtt

SEQ ID NO: 492041 - DNA, 15 bp, Homo sapiens
ataagccccctatgt

SEQ ID NO: 492042 - DNA, 15 bp, Homo sapiens
tataagccccctatg

SEQ ID NO: 492043 - DNA, 15 bp, Homo sapiens
ctataagccccctat

SEQ ID NO: 492044 - DNA, 15 bp, Homo sapiens
tctataagcccccta

SEQ ID NO: 492045 - DNA, 15 bp, Homo sapiens
atctataagccccct

SEQ ID NO: 492046 - DNA, 15 bp, Homo sapiens
tatctataagccccc

SEQ ID NO: 492047 - DNA, 15 bp, Homo sapiens
ttatctataagcccc

SEQ ID NO: 492048 - DNA, 15 bp, Homo sapiens
tttatctataagccc

SEQ ID NO: 492049 - DNA, 15 bp, Homo sapiens
atttatctataagcc

SEQ ID NO: 492050 - DNA, 15 bp, Homo sapiens
tatttatctataagc

SEQ ID NO: 492051 - DNA, 15 bp, Homo sapiens
gtatttatctataag

SEQ ID NO: 492052 - DNA, 15 bp, Homo sapiens
agtatttatctataa

SEQ ID NO: 492053 - DNA, 15 bp, Homo sapiens
aagtatttatctata

SEQ ID NO: 492054 - DNA, 15 bp, Homo sapiens
caagtatttatctat

SEQ ID NO: 492055 - DNA, 15 bp, Homo sapiens
gcaagtatttatcta

SEQ ID NO: 492056 - DNA, 15 bp, Homo sapiens
agcaagtatttatct

SEQ ID NO: 492057 - DNA, 15 bp, Homo sapiens
aagcaagtatttatc

SEQ ID NO: 492058 - DNA, 15 bp, Homo sapiens
aaagcaagtatttat

SEQ ID NO: 492059 - DNA, 15 bp, Homo sapiens
aaaagcaagtattta

SEQ ID NO: 492060 - DNA, 15 bp, Homo sapiens
aaaaagcaagtattt

SEQ ID NO: 492061 - DNA, 15 bp, Homo sapiens
aaaaaagcaagtatt

SEQ ID NO: 492062 - DNA, 15 bp, Homo sapiens
aaaaaaagcaagtat

SEQ ID NO: 492063 - DNA, 15 bp, Homo sapiens
gaaaaaaagcaagta

SEQ ID NO: 492064 - DNA, 15 bp, Homo sapiens
agaaaaaaagcaagt

SEQ ID NO: 492065 - DNA, 15 bp, Homo sapiens
tagaaaaaaagcaag

SEQ ID NO: 492066 - DNA, 15 bp, Homo sapiens
atagaaaaaaagcaa

SEQ ID NO: 492067 - DNA, 15 bp, Homo sapiens
tatagaaaaaaagca

SEQ ID NO: 492068 - DNA, 15 bp, Homo sapiens
ttatagaaaaaaagc

SEQ ID NO: 492069 - DNA, 15 bp, Homo sapiens
gttatagaaaaaaag

SEQ ID NO: 492070 - DNA, 15 bp, Homo sapiens
ggttatagaaaaaaa

SEQ ID NO: 492071 - DNA, 15 bp, Homo sapiens
aggttatagaaaaaa

SEQ ID NO: 492072 - DNA, 15 bp, Homo sapiens
caggttatagaaaaa

SEQ ID NO: 492073 - DNA, 15 bp, Homo sapiens
acaggttatagaaaa

SEQ ID NO: 492074 - DNA, 15 bp, Homo sapiens
tacaggttatagaaa

SEQ ID NO: 492075 - DNA, 15 bp, Homo sapiens
ctacaggttatagaa

SEQ ID NO: 492076 - DNA, 15 bp, Homo sapiens
tctacaggttataga

SEQ ID NO: 492077 - DNA, 15 bp, Homo sapiens
gtctacaggttatag

SEQ ID NO: 492078 - DNA, 15 bp, Homo sapiens
agtctacaggttata

SEQ ID NO: 492079 - DNA, 15 bp, Homo sapiens
aagtctacaggttat

SEQ ID NO: 492080 - DNA, 15 bp, Homo sapiens
taagtctacaggtta

SEQ ID NO: 492081 - DNA, 15 bp, Homo sapiens
ataagtctacaggtt

SEQ ID NO: 492082 - DNA, 15 bp, Homo sapiens
aataagtctacaggt

SEQ ID NO: 492083 - DNA, 15 bp, Homo sapiens
aaataagtctacagg

SEQ ID NO: 492084 - DNA, 15 bp, Homo sapiens
gaaataagtctacag

SEQ ID NO: 492085 - DNA, 15 bp, Homo sapiens
ggaaataagtctaca

SEQ ID NO: 492086 - DNA, 15 bp, Homo sapiens
aggaaataagtctac

SEQ ID NO: 492087 - DNA, 15 bp, Homo sapiens
aaggaaataagtcta

SEQ ID NO: 492088 - DNA, 15 bp, Homo sapiens
aaaggaaataagtct

SEQ ID NO: 492089 - DNA, 15 bp, Homo sapiens
caaaggaaataagtc

SEQ ID NO: 492090 - DNA, 15 bp, Homo sapiens
tcaaaggaaataagt

SEQ ID NO: 492091 - DNA, 15 bp, Homo sapiens
atcaaaggaaataag

SEQ ID NO: 492092 - DNA, 15 bp, Homo sapiens
aatcaaaggaaataa

SEQ ID NO: 492093 - DNA, 15 bp, Homo sapiens
taatcaaaggaaata

SEQ ID NO: 492094 - DNA, 15 bp, Homo sapiens
ataatcaaaggaaat

SEQ ID NO: 492095 - DNA, 15 bp, Homo sapiens
tataatcaaaggaaa

SEQ ID NO: 492096 - DNA, 15 bp, Homo sapiens
ttataatcaaaggaa

SEQ ID NO: 492097 - DNA, 15 bp, Homo sapiens
attataatcaaagga

SEQ ID NO: 492098 - DNA, 15 bp, Homo sapiens
cattataatcaaagg

SEQ ID NO: 492099 - DNA, 15 bp, Homo sapiens
gcattataatcaaag

SEQ ID NO: 492100 - DNA, 15 bp, Homo sapiens
agcattataatcaaa

SEQ ID NO: 492101 - DNA, 15 bp, Homo sapiens
tagcattataatcaa

SEQ ID NO: 492102 - DNA, 15 bp, Homo sapiens
atagcattataatca

SEQ ID NO: 492103 - DNA, 15 bp, Homo sapiens
aatagcattataatc

SEQ ID NO: 492104 - DNA, 15 bp, Homo sapiens
caatagcattataat

SEQ ID NO: 492105 - DNA, 15 bp, Homo sapiens
tcaatagcattataa

SEQ ID NO: 492106 - DNA, 15 bp, Homo sapiens
gtcaatagcattata

SEQ ID NO: 492107 - DNA, 15 bp, Homo sapiens
tgtcaatagcattat

SEQ ID NO: 492108 - DNA, 15 bp, Homo sapiens
gtgtcaatagcatta

SEQ ID NO: 492109 - DNA, 15 bp, Homo sapiens
agtgtcaatagcatt

SEQ ID NO: 492110 - DNA, 15 bp, Homo sapiens
aagtgtcaatagcat

SEQ ID NO: 492111 - DNA, 15 bp, Homo sapiens
aaagtgtcaatagca

SEQ ID NO: 492112 - DNA, 15 bp, Homo sapiens
caaagtgtcaatagc

SEQ ID NO: 492113 - DNA, 15 bp, Homo sapiens
tcaaagtgtcaatag

SEQ ID NO: 492114 - DNA, 15 bp, Homo sapiens
atcaaagtgtcaata

SEQ ID NO: 492115 - DNA, 15 bp, Homo sapiens
tatcaaagtgtcaat

SEQ ID NO: 492116 - DNA, 15 bp, Homo sapiens
ttatcaaagtgtcaa

SEQ ID NO: 492117 - DNA, 15 bp, Homo sapiens
gttatcaaagtgtca

SEQ ID NO: 492118 - DNA, 15 bp, Homo sapiens
agttatcaaagtgtc

SEQ ID NO: 492119 - DNA, 15 bp, Homo sapiens
cagttatcaaagtgt

SEQ ID NO: 492120 - DNA, 15 bp, Homo sapiens
acagttatcaaagtg

SEQ ID NO: 492121 - DNA, 15 bp, Homo sapiens
aacagttatcaaagt

SEQ ID NO: 492122 - DNA, 15 bp, Homo sapiens
aaacagttatcaaag

SEQ ID NO: 492123 - DNA, 15 bp, Homo sapiens
gaaacagttatcaaa

SEQ ID NO: 492124 - DNA, 15 bp, Homo sapiens
agaaacagttatcaa

SEQ ID NO: 492125 - DNA, 15 bp, Homo sapiens
gagaaacagttatca

SEQ ID NO: 492126 - DNA, 15 bp, Homo sapiens
agagaaacagttatc

SEQ ID NO: 492127 - DNA, 15 bp, Homo sapiens
tagagaaacagttat

SEQ ID NO: 492128 - DNA, 15 bp, Homo sapiens
ttagagaaacagtta

SEQ ID NO: 492129 - DNA, 15 bp, Homo sapiens
tttagagaaacagtt

SEQ ID NO: 492130 - DNA, 15 bp, Homo sapiens
ttttagagaaacagt

SEQ ID NO: 492131 - DNA, 15 bp, Homo sapiens
gttttagagaaacag

SEQ ID NO: 492132 - DNA, 15 bp, Homo sapiens
ggttttagagaaaca

SEQ ID NO: 492133 - DNA, 15 bp, Homo sapiens
aggttttagagaaac

SEQ ID NO: 492134 - DNA, 15 bp, Homo sapiens
aaggttttagagaaa

SEQ ID NO: 492135 - DNA, 15 bp, Homo sapiens
taaggttttagagaa

SEQ ID NO: 492136 - DNA, 15 bp, Homo sapiens
gtaaggttttagaga

SEQ ID NO: 492137 - DNA, 15 bp, Homo sapiens
tgtaaggttttagag

SEQ ID NO: 492138 - DNA, 15 bp, Homo sapiens
ttgtaaggttttaga

SEQ ID NO: 492139 - DNA, 15 bp, Homo sapiens
cttgtaaggttttag

SEQ ID NO: 492140 - DNA, 15 bp, Homo sapiens
tcttgtaaggtttta

SEQ ID NO: 492141 - DNA, 15 bp, Homo sapiens
ttcttgtaaggtttt

SEQ ID NO: 492142 - DNA, 15 bp, Homo sapiens
tttcttgtaaggttt

SEQ ID NO: 492143 - DNA, 15 bp, Homo sapiens
ttttcttgtaaggtt

SEQ ID NO: 492144 - DNA, 15 bp, Homo sapiens
tttttcttgtaaggt

SEQ ID NO: 492145 - DNA, 15 bp, Homo sapiens
gtttttcttgtaagg

SEQ ID NO: 492146 - DNA, 15 bp, Homo sapiens
agtttttcttgtaag

SEQ ID NO: 492147 - DNA, 15 bp, Homo sapiens
tagtttttcttgtaa

SEQ ID NO: 492148 - DNA, 15 bp, Homo sapiens
ttagtttttcttgta

SEQ ID NO: 492149 - DNA, 15 bp, Homo sapiens
cttagtttttcttgt

SEQ ID NO: 492150 - DNA, 15 bp, Homo sapiens
gcttagtttttcttg

SEQ ID NO: 492151 - DNA, 15 bp, Homo sapiens
agcttagtttttctt

SEQ ID NO: 492152 - DNA, 15 bp, Homo sapiens
aagcttagtttttct

SEQ ID NO: 492153 - DNA, 15 bp, Homo sapiens
gaagcttagtttttc

SEQ ID NO: 492154 - DNA, 15 bp, Homo sapiens
agaagcttagttttt

SEQ ID NO: 492155 - DNA, 15 bp, Homo sapiens
gagaagcttagtttt

SEQ ID NO: 492156 - DNA, 15 bp, Homo sapiens
agagaagcttagttt

SEQ ID NO: 492157 - DNA, 15 bp, Homo sapiens
tagagaagcttagtt

SEQ ID NO: 492158 - DNA, 15 bp, Homo sapiens
ttagagaagcttagt

SEQ ID NO: 492159 - DNA, 15 bp, Homo sapiens
tttagagaagcttag

SEQ ID NO: 492160 - DNA, 15 bp, Homo sapiens
gtttagagaagctta

SEQ ID NO: 492161 - DNA, 15 bp, Homo sapiens
agtttagagaagctt

SEQ ID NO: 492162 - DNA, 15 bp, Homo sapiens
aagtttagagaagct

SEQ ID NO: 492163 - DNA, 15 bp, Homo sapiens
caagtttagagaagc

SEQ ID NO: 492164 - DNA, 15 bp, Homo sapiens
acaagtttagagaag

SEQ ID NO: 492165 - DNA, 15 bp, Homo sapiens
tacaagtttagagaa

SEQ ID NO: 492166 - DNA, 15 bp, Homo sapiens
atacaagtttagaga

SEQ ID NO: 492167 - DNA, 15 bp, Homo sapiens
aatacaagtttagag

SEQ ID NO: 492168 - DNA, 15 bp, Homo sapiens
gaatacaagtttaga

SEQ ID NO: 492169 - DNA, 15 bp, Homo sapiens
tgaatacaagtttag

SEQ ID NO: 492170 - DNA, 15 bp, Homo sapiens
atgaatacaagttta

SEQ ID NO: 492171 - DNA, 15 bp, Homo sapiens
aatgaatacaagttt

SEQ ID NO: 492172 - DNA, 15 bp, Homo sapiens
taatgaatacaagtt

SEQ ID NO: 492173 - DNA, 15 bp, Homo sapiens
ataatgaatacaagt

SEQ ID NO: 492174 - DNA, 15 bp, Homo sapiens
cataatgaatacaag

SEQ ID NO: 492175 - DNA, 15 bp, Homo sapiens
ccataatgaatacaa

SEQ ID NO: 492176 - DNA, 15 bp, Homo sapiens
cccataatgaataca

SEQ ID NO: 492177 - DNA, 15 bp, Homo sapiens
tcccataatgaatac

SEQ ID NO: 492178 - DNA, 15 bp, Homo sapiens
ctcccataatgaata

SEQ ID NO: 492179 - DNA, 15 bp, Homo sapiens
tctcccataatgaat

SEQ ID NO: 492180 - DNA, 15 bp, Homo sapiens
ttctcccataatgaa

SEQ ID NO: 492181 - DNA, 15 bp, Homo sapiens
attctcccataatga

SEQ ID NO: 492182 - DNA, 15 bp, Homo sapiens
cattctcccataatg

SEQ ID NO: 492183 - DNA, 15 bp, Homo sapiens
gcattctcccataat

SEQ ID NO: 492184 - DNA, 15 bp, Homo sapiens
ggcattctcccataa

SEQ ID NO: 492185 - DNA, 15 bp, Homo sapiens
tggcattctcccata

SEQ ID NO: 492186 - DNA, 15 bp, Homo sapiens
atggcattctcccat

SEQ ID NO: 492187 - DNA, 15 bp, Homo sapiens
aatggcattctccca

SEQ ID NO: 492188 - DNA, 15 bp, Homo sapiens
gaatggcattctccc

SEQ ID NO: 492189 - DNA, 15 bp, Homo sapiens
agaatggcattctcc

SEQ ID NO: 492190 - DNA, 15 bp, Homo sapiens
aagaatggcattctc

SEQ ID NO: 492191 - DNA, 15 bp, Homo sapiens
taagaatggcattct

SEQ ID NO: 492192 - DNA, 15 bp, Homo sapiens
ataagaatggcattc

SEQ ID NO: 492193 - DNA, 15 bp, Homo sapiens
cataagaatggcatt

SEQ ID NO: 492194 - DNA, 15 bp, Homo sapiens
acataagaatggcat

SEQ ID NO: 492195 - DNA, 15 bp, Homo sapiens
gacataagaatggca

SEQ ID NO: 492196 - DNA, 15 bp, Homo sapiens
agacataagaatggc

SEQ ID NO: 492197 - DNA, 15 bp, Homo sapiens
cagacataagaatgg

SEQ ID NO: 492198 - DNA, 15 bp, Homo sapiens
ccagacataagaatg

SEQ ID NO: 492199 - DNA, 15 bp, Homo sapiens
accagacataagaat

SEQ ID NO: 492200 - DNA, 15 bp, Homo sapiens
aaccagacataagaa

SEQ ID NO: 492201 - DNA, 15 bp, Homo sapiens
taaccagacataaga

SEQ ID NO: 492202 - DNA, 15 bp, Homo sapiens
ataaccagacataag

SEQ ID NO: 492203 - DNA, 15 bp, Homo sapiens
tataaccagacataa

SEQ ID NO: 492204 - DNA, 15 bp, Homo sapiens
atataaccagacata

SEQ ID NO: 492205 - DNA, 15 bp, Homo sapiens
gatataaccagacat

SEQ ID NO: 492206 - DNA, 15 bp, Homo sapiens
agatataaccagaca

SEQ ID NO: 492207 - DNA, 15 bp, Homo sapiens
cagatataaccagac

SEQ ID NO: 492208 - DNA, 15 bp, Homo sapiens
gcagatataaccaga

SEQ ID NO: 492209 - DNA, 15 bp, Homo sapiens
tgcagatataaccag

SEQ ID NO: 492210 - DNA, 15 bp, Homo sapiens
atgcagatataacca

SEQ ID NO: 492211 - DNA, 15 bp, Homo sapiens
aatgcagatataacc

SEQ ID NO: 492212 - DNA, 15 bp, Homo sapiens
taatgcagatataac

SEQ ID NO: 492213 - DNA, 15 bp, Homo sapiens
ctaatgcagatataa

SEQ ID NO: 492214 - DNA, 15 bp, Homo sapiens
cctaatgcagatata

SEQ ID NO: 492215 - DNA, 15 bp, Homo sapiens
acctaatgcagatat

SEQ ID NO: 492216 - DNA, 15 bp, Homo sapiens
aacctaatgcagata

SEQ ID NO: 492217 - DNA, 15 bp, Homo sapiens
taacctaatgcagat

SEQ ID NO: 492218 - DNA, 15 bp, Homo sapiens
ataacctaatgcaga

SEQ ID NO: 492219 - DNA, 15 bp, Homo sapiens
aataacctaatgcag

SEQ ID NO: 492220 - DNA, 15 bp, Homo sapiens
caataacctaatgca

SEQ ID NO: 492221 - DNA, 15 bp, Homo sapiens
tcaataacctaatgc

SEQ ID NO: 492222 - DNA, 15 bp, Homo sapiens
atcaataacctaatg

SEQ ID NO: 492223 - DNA, 15 bp, Homo sapiens
catcaataacctaat

SEQ ID NO: 492224 - DNA, 15 bp, Homo sapiens
tcatcaataacctaa

SEQ ID NO: 492225 - DNA, 15 bp, Homo sapiens
atcatcaataaccta

SEQ ID NO: 492226 - DNA, 15 bp, Homo sapiens
catcatcaataacct

SEQ ID NO: 492227 - DNA, 15 bp, Homo sapiens
gcatcatcaataacc

SEQ ID NO: 492228 - DNA, 15 bp, Homo sapiens
agcatcatcaataac

SEQ ID NO: 492229 - DNA, 15 bp, Homo sapiens
tagcatcatcaataa

SEQ ID NO: 492230 - DNA, 15 bp, Homo sapiens
ctagcatcatcaata

SEQ ID NO: 492231 - DNA, 15 bp, Homo sapiens
actagcatcatcaat

SEQ ID NO: 492232 - DNA, 15 bp, Homo sapiens
tactagcatcatcaa

SEQ ID NO: 492233 - DNA, 15 bp, Homo sapiens
ttactagcatcatca

SEQ ID NO: 492234 - DNA, 15 bp, Homo sapiens
gttactagcatcatc

SEQ ID NO: 492235 - DNA, 15 bp, Homo sapiens
tgttactagcatcat

SEQ ID NO: 492236 - DNA, 15 bp, Homo sapiens
ttgttactagcatca

SEQ ID NO: 492237 - DNA, 15 bp, Homo sapiens
attgttactagcatc

SEQ ID NO: 492238 - DNA, 15 bp, Homo sapiens
cattgttactagcat

SEQ ID NO: 492239 - DNA, 15 bp, Homo sapiens
tcattgttactagca

SEQ ID NO: 492240 - DNA, 15 bp, Homo sapiens
ttcattgttactagc

SEQ ID NO: 492241 - DNA, 15 bp, Homo sapiens
gttcattgttactag

SEQ ID NO: 492242 - DNA, 15 bp, Homo sapiens
agttcattgttacta

SEQ ID NO: 492243 - DNA, 15 bp, Homo sapiens
aagttcattgttact

SEQ ID NO: 492244 - DNA, 15 bp, Homo sapiens
aaagttcattgttac

SEQ ID NO: 492245 - DNA, 15 bp, Homo sapiens
taaagttcattgtta

SEQ ID NO: 492246 - DNA, 15 bp, Homo sapiens
ataaagttcattgtt

SEQ ID NO: 492247 - DNA, 15 bp, Homo sapiens
cataaagttcattgt

SEQ ID NO: 492248 - DNA, 15 bp, Homo sapiens
acataaagttcattg

SEQ ID NO: 492249 - DNA, 15 bp, Homo sapiens
aacataaagttcatt

SEQ ID NO: 492250 - DNA, 15 bp, Homo sapiens
taacataaagttcat

SEQ ID NO: 492251 - DNA, 15 bp, Homo sapiens
gtaacataaagttca

SEQ ID NO: 492252 - DNA, 15 bp, Homo sapiens
agtaacataaagttc

SEQ ID NO: 492253 - DNA, 15 bp, Homo sapiens
cagtaacataaagtt

SEQ ID NO: 492254 - DNA, 15 bp, Homo sapiens
gcagtaacataaagt

SEQ ID NO: 492255 - DNA, 15 bp, Homo sapiens
tgcagtaacataaag

SEQ ID NO: 492256 - DNA, 15 bp, Homo sapiens
ctgcagtaacataaa

SEQ ID NO: 492257 - DNA, 15 bp, Homo sapiens
gctgcagtaacataa

SEQ ID NO: 492258 - DNA, 15 bp, Homo sapiens
agctgcagtaacata

SEQ ID NO: 492259 - DNA, 15 bp, Homo sapiens
gagctgcagtaacat

SEQ ID NO: 492260 - DNA, 15 bp, Homo sapiens
tgagctgcagtaaca

SEQ ID NO: 492261 - DNA, 15 bp, Homo sapiens
gtgagctgcagtaac

SEQ ID NO: 492262 - DNA, 15 bp, Homo sapiens
tgtgagctgcagtaa

SEQ ID NO: 492263 - DNA, 15 bp, Homo sapiens
ttgtgagctgcagta

SEQ ID NO: 492264 - DNA, 15 bp, Homo sapiens
tttgtgagctgcagt

SEQ ID NO: 492265 - DNA, 15 bp, Homo sapiens
atttgtgagctgcag

SEQ ID NO: 492266 - DNA, 15 bp, Homo sapiens
catttgtgagctgca

SEQ ID NO: 492267 - DNA, 15 bp, Homo sapiens
gcatttgtgagctgc

SEQ ID NO: 492268 - DNA, 15 bp, Homo sapiens
agcatttgtgagctg

SEQ ID NO: 492269 - DNA, 15 bp, Homo sapiens
aagcatttgtgagct

SEQ ID NO: 492270 - DNA, 15 bp, Homo sapiens
aaagcatttgtgagc

SEQ ID NO: 492271 - DNA, 15 bp, Homo sapiens
aaaagcatttgtgag

SEQ ID NO: 492272 - DNA, 15 bp, Homo sapiens
aaaaagcatttgtga

SEQ ID NO: 492273 - DNA, 15 bp, Homo sapiens
aaaaaagcatttgtg

SEQ ID NO: 492274 - DNA, 15 bp, Homo sapiens
taaaaaagcatttgt

SEQ ID NO: 492275 - DNA, 15 bp, Homo sapiens
gtaaaaaagcatttg

SEQ ID NO: 492276 - DNA, 15 bp, Homo sapiens
tgtaaaaaagcattt

SEQ ID NO: 492277 - DNA, 15 bp, Homo sapiens
atgtaaaaaagcatt

SEQ ID NO: 492278 - DNA, 15 bp, Homo sapiens
gatgtaaaaaagcat

SEQ ID NO: 492279 - DNA, 15 bp, Homo sapiens
agatgtaaaaaagca

SEQ ID NO: 492280 - DNA, 15 bp, Homo sapiens
cagatgtaaaaaagc

SEQ ID NO: 492281 - DNA, 15 bp, Homo sapiens
gcagatgtaaaaaag

SEQ ID NO: 492282 - DNA, 15 bp, Homo sapiens
tgcagatgtaaaaaa

SEQ ID NO: 492283 - DNA, 15 bp, Homo sapiens
ttgcagatgtaaaaa

SEQ ID NO: 492284 - DNA, 15 bp, Homo sapiens
cttgcagatgtaaaa

SEQ ID NO: 492285 - DNA, 15 bp, Homo sapiens
tcttgcagatgtaaa

SEQ ID NO: 492286 - DNA, 15 bp, Homo sapiens
ttcttgcagatgtaa

SEQ ID NO: 492287 - DNA, 15 bp, Homo sapiens
tttcttgcagatgta

SEQ ID NO: 492288 - DNA, 15 bp, Homo sapiens
atttcttgcagatgt

SEQ ID NO: 492289 - DNA, 15 bp, Homo sapiens
aatttcttgcagatg

SEQ ID NO: 492290 - DNA, 15 bp, Homo sapiens
taatttcttgcagat

SEQ ID NO: 492291 - DNA, 15 bp, Homo sapiens
ttaatttcttgcaga

SEQ ID NO: 492292 - DNA, 15 bp, Homo sapiens
gttaatttcttgcag

SEQ ID NO: 492293 - DNA, 15 bp, Homo sapiens
agttaatttcttgca

SEQ ID NO: 492294 - DNA, 15 bp, Homo sapiens
tagttaatttcttgc

SEQ ID NO: 492295 - DNA, 15 bp, Homo sapiens
ctagttaatttcttg

SEQ ID NO: 492296 - DNA, 15 bp, Homo sapiens
actagttaatttctt

SEQ ID NO: 492297 - DNA, 15 bp, Homo sapiens
gactagttaatttct

SEQ ID NO: 492298 - DNA, 15 bp, Homo sapiens
tgactagttaatttc

SEQ ID NO: 492299 - DNA, 15 bp, Homo sapiens
atgactagttaattt

SEQ ID NO: 492300 - DNA, 15 bp, Homo sapiens
gatgactagttaatt

SEQ ID NO: 492301 - DNA, 15 bp, Homo sapiens
tgatgactagttaat

SEQ ID NO: 492302 - DNA, 15 bp, Homo sapiens
ttgatgactagttaa

SEQ ID NO: 492303 - DNA, 15 bp, Homo sapiens
tttgatgactagtta

SEQ ID NO: 492304 - DNA, 15 bp, Homo sapiens
atttgatgactagtt

SEQ ID NO: 492305 - DNA, 15 bp, Homo sapiens
catttgatgactagt

SEQ ID NO: 492306 - DNA, 15 bp, Homo sapiens
gcatttgatgactag

SEQ ID NO: 492307 - DNA, 15 bp, Homo sapiens
agcatttgatgacta

SEQ ID NO: 492308 - DNA, 15 bp, Homo sapiens
aagcatttgatgact

SEQ ID NO: 492309 - DNA, 15 bp, Homo sapiens
taagcatttgatgac

SEQ ID NO: 492310 - DNA, 15 bp, Homo sapiens
ctaagcatttgatga

SEQ ID NO: 492311 - DNA, 15 bp, Homo sapiens
actaagcatttgatg

SEQ ID NO: 492312 - DNA, 15 bp, Homo sapiens
tactaagcatttgat

SEQ ID NO: 492313 - DNA, 15 bp, Homo sapiens
ctactaagcatttga

SEQ ID NO: 492314 - DNA, 15 bp, Homo sapiens
gctactaagcatttg

SEQ ID NO: 492315 - DNA, 15 bp, Homo sapiens
tgctactaagcattt

SEQ ID NO: 492316 - DNA, 15 bp, Homo sapiens
gtgctactaagcatt

SEQ ID NO: 492317 - DNA, 15 bp, Homo sapiens
tgtgctactaagcat

SEQ ID NO: 492318 - DNA, 15 bp, Homo sapiens
ctgtgctactaagca

SEQ ID NO: 492319 - DNA, 15 bp, Homo sapiens
tctgtgctactaagc

SEQ ID NO: 492320 - DNA, 15 bp, Homo sapiens
ttctgtgctactaag

SEQ ID NO: 492321 - DNA, 15 bp, Homo sapiens
tttctgtgctactaa

SEQ ID NO: 492322 - DNA, 15 bp, Homo sapiens
atttctgtgctacta

SEQ ID NO: 492323 - DNA, 15 bp, Homo sapiens
aatttctgtgctact

SEQ ID NO: 492324 - DNA, 15 bp, Homo sapiens
gaatttctgtgctac

SEQ ID NO: 492325 - DNA, 15 bp, Homo sapiens
agaatttctgtgcta

SEQ ID NO: 492326 - DNA, 15 bp, Homo sapiens
gagaatttctgtgct

SEQ ID NO: 492327 - DNA, 15 bp, Homo sapiens
tgagaatttctgtgc

SEQ ID NO: 492328 - DNA, 15 bp, Homo sapiens
ttgagaatttctgtg

SEQ ID NO: 492329 - DNA, 15 bp, Homo sapiens
cttgagaatttctgt

SEQ ID NO: 492330 - DNA, 15 bp, Homo sapiens
acttgagaatttctg

SEQ ID NO: 492331 - DNA, 15 bp, Homo sapiens
cacttgagaatttct

SEQ ID NO: 492332 - DNA, 15 bp, Homo sapiens
ccacttgagaatttc

SEQ ID NO: 492333 - DNA, 15 bp, Homo sapiens
accacttgagaattt

SEQ ID NO: 492334 - DNA, 15 bp, Homo sapiens
aaccacttgagaatt

SEQ ID NO: 492335 - DNA, 15 bp, Homo sapiens
caaccacttgagaat

SEQ ID NO: 492336 - DNA, 15 bp, Homo sapiens
gcaaccacttgagaa

SEQ ID NO: 492337 - DNA, 15 bp, Homo sapiens
cgcaaccacttgaga

SEQ ID NO: 492338 - DNA, 15 bp, Homo sapiens
ccgcaaccacttgag

SEQ ID NO: 492339 - DNA, 15 bp, Homo sapiens
cccgcaaccacttga

SEQ ID NO: 492340 - DNA, 15 bp, Homo sapiens
tcccgcaaccacttg

SEQ ID NO: 492341 - DNA, 15 bp, Homo sapiens
ttcccgcaaccactt

SEQ ID NO: 492342 - DNA, 15 bp, Homo sapiens
tttcccgcaaccact

SEQ ID NO: 492343 - DNA, 15 bp, Homo sapiens
atttcccgcaaccac

SEQ ID NO: 492344 - DNA, 15 bp, Homo sapiens
tatttcccgcaacca

SEQ ID NO: 492345 - DNA, 15 bp, Homo sapiens
atatttcccgcaacc

SEQ ID NO: 492346 - DNA, 15 bp, Homo sapiens
aatatttcccgcaac

SEQ ID NO: 492347 - DNA, 15 bp, Homo sapiens
caatatttcccgcaa

SEQ ID NO: 492348 - DNA, 15 bp, Homo sapiens
tcaatatttcccgca

SEQ ID NO: 492349 - DNA, 15 bp, Homo sapiens
atcaatatttcccgc

SEQ ID NO: 492350 - DNA, 15 bp, Homo sapiens
gatcaatatttcccg

SEQ ID NO: 492351 - DNA, 15 bp, Homo sapiens
agatcaatatttccc

SEQ ID NO: 492352 - DNA, 15 bp, Homo sapiens
cagatcaatatttcc

SEQ ID NO: 492353 - DNA, 15 bp, Homo sapiens
gcagatcaatatttc

SEQ ID NO: 492354 - DNA, 15 bp, Homo sapiens
tgcagatcaatattt

SEQ ID NO: 492355 - DNA, 15 bp, Homo sapiens
ctgcagatcaatatt

SEQ ID NO: 492356 - DNA, 15 bp, Homo sapiens
cctgcagatcaatat

SEQ ID NO: 492357 - DNA, 15 bp, Homo sapiens
tcctgcagatcaata

SEQ ID NO: 492358 - DNA, 15 bp, Homo sapiens
ttcctgcagatcaat

SEQ ID NO: 492359 - DNA, 15 bp, Homo sapiens
attcctgcagatcaa

SEQ ID NO: 492360 - DNA, 15 bp, Homo sapiens
tattcctgcagatca

SEQ ID NO: 492361 - DNA, 15 bp, Homo sapiens
ttattcctgcagatc

SEQ ID NO: 492362 - DNA, 15 bp, Homo sapiens
tttattcctgcagat

SEQ ID NO: 492363 - DNA, 15 bp, Homo sapiens
atttattcctgcaga

SEQ ID NO: 492364 - DNA, 15 bp, Homo sapiens
aatttattcctgcag

SEQ ID NO: 492365 - DNA, 15 bp, Homo sapiens
aaatttattcctgca

SEQ ID NO: 492366 - DNA, 15 bp, Homo sapiens
gaaatttattcctgc

SEQ ID NO: 492367 - DNA, 15 bp, Homo sapiens
agaaatttattcctg

SEQ ID NO: 492368 - DNA, 15 bp, Homo sapiens
aagaaatttattcct

SEQ ID NO: 492369 - DNA, 15 bp, Homo sapiens
gaagaaatttattcc

SEQ ID NO: 492370 - DNA, 15 bp, Homo sapiens
agaagaaatttattc

SEQ ID NO: 492371 - DNA, 15 bp, Homo sapiens
aagaagaaatttatt

SEQ ID NO: 492372 - DNA, 15 bp, Homo sapiens
taagaagaaatttat

SEQ ID NO: 492373 - DNA, 15 bp, Homo sapiens
ttaagaagaaattta

SEQ ID NO: 492374 - DNA, 15 bp, Homo sapiens
tttaagaagaaattt

SEQ ID NO: 492375 - DNA, 15 bp, Homo sapiens
ttttaagaagaaatt

SEQ ID NO: 492376 - DNA, 15 bp, Homo sapiens
tttttaagaagaaat

SEQ ID NO: 492377 - DNA, 15 bp, Homo sapiens
atttttaagaagaaa

SEQ ID NO: 492378 - DNA, 15 bp, Homo sapiens
tatttttaagaagaa

SEQ ID NO: 492379 - DNA, 15 bp, Homo sapiens
ttatttttaagaaga

SEQ ID NO: 492380 - DNA, 15 bp, Homo sapiens
cttatttttaagaag

SEQ ID NO: 492381 - DNA, 15 bp, Homo sapiens
ccttatttttaagaa

SEQ ID NO: 492382 - DNA, 15 bp, Homo sapiens
accttatttttaaga

SEQ ID NO: 492383 - DNA, 15 bp, Homo sapiens
taccttatttttaag

SEQ ID NO: 492384 - DNA, 15 bp, Homo sapiens
ttaccttatttttaa

SEQ ID NO: 492385 - DNA, 15 bp, Homo sapiens
cttaccttattttta

SEQ ID NO: 492386 - DNA, 15 bp, Homo sapiens
gcttaccttattttt

SEQ ID NO: 492387 - DNA, 15 bp, Homo sapiens
tgcttaccttatttt

SEQ ID NO: 492388 - DNA, 15 bp, Homo sapiens
ttgcttaccttattt

SEQ ID NO: 492389 - DNA, 15 bp, Homo sapiens
tttgcttaccttatt

SEQ ID NO: 492390 - DNA, 15 bp, Homo sapiens
ttttgcttaccttat

SEQ ID NO: 492391 - DNA, 15 bp, Homo sapiens
attttgcttacctta

SEQ ID NO: 492392 - DNA, 15 bp, Homo sapiens
cattttgcttacctt

SEQ ID NO: 492393 - DNA, 15 bp, Homo sapiens
tcattttgcttacct

SEQ ID NO: 492394 - DNA, 15 bp, Homo sapiens
gtcattttgcttacc

SEQ ID NO: 492395 - DNA, 15 bp, Homo sapiens
tgtcattttgcttac

SEQ ID NO: 492396 - DNA, 15 bp, Homo sapiens
atgtcattttgctta

SEQ ID NO: 492397 - DNA, 15 bp, Homo sapiens
tatgtcattttgctt

SEQ ID NO: 492398 - DNA, 15 bp, Homo sapiens
atatgtcattttgct

SEQ ID NO: 492399 - DNA, 15 bp, Homo sapiens
aatatgtcattttgc

SEQ ID NO: 492400 - DNA, 15 bp, Homo sapiens
aaatatgtcattttg

SEQ ID NO: 492401 - DNA, 15 bp, Homo sapiens
taaatatgtcatttt

SEQ ID NO: 492402 - DNA, 15 bp, Homo sapiens
ttaaatatgtcattt

SEQ ID NO: 492403 - DNA, 15 bp, Homo sapiens
tttaaatatgtcatt

SEQ ID NO: 492404 - DNA, 15 bp, Homo sapiens
ttttaaatatgtcat

SEQ ID NO: 492405 - DNA, 15 bp, Homo sapiens
tttttaaatatgtca

SEQ ID NO: 492406 - DNA, 15 bp, Homo sapiens
ttttttaaatatgtc

SEQ ID NO: 492407 - DNA, 15 bp, Homo sapiens
attttttaaatatgt

SEQ ID NO: 492408 - DNA, 15 bp, Homo sapiens
cattttttaaatatg

SEQ ID NO: 492409 - DNA, 15 bp, Homo sapiens
ccattttttaaatat

SEQ ID NO: 492410 - DNA, 15 bp, Homo sapiens
tccattttttaaata

SEQ ID NO: 492411 - DNA, 15 bp, Homo sapiens
ttccattttttaaat

SEQ ID NO: 492412 - DNA, 15 bp, Homo sapiens
cttccattttttaaa

SEQ ID NO: 492413 - DNA, 15 bp, Homo sapiens
tcttccattttttaa

SEQ ID NO: 492414 - DNA, 15 bp, Homo sapiens
ttcttccatttttta

SEQ ID NO: 492415 - DNA, 15 bp, Homo sapiens
attcttccatttttt

SEQ ID NO: 492416 - DNA, 15 bp, Homo sapiens
tattcttccattttt

SEQ ID NO: 492417 - DNA, 15 bp, Homo sapiens
atattcttccatttt

SEQ ID NO: 492418 - DNA, 15 bp, Homo sapiens
aatattcttccattt

SEQ ID NO: 492419 - DNA, 15 bp, Homo sapiens
aaatattcttccatt

SEQ ID NO: 492420 - DNA, 15 bp, Homo sapiens
caaatattcttccat

SEQ ID NO: 492421 - DNA, 15 bp, Homo sapiens
ccaaatattcttcca

SEQ ID NO: 492422 - DNA, 15 bp, Homo sapiens
tccaaatattcttcc

SEQ ID NO: 492423 - DNA, 15 bp, Homo sapiens
ttccaaatattcttc

SEQ ID NO: 492424 - DNA, 15 bp, Homo sapiens
attccaaatattctt

SEQ ID NO: 492425 - DNA, 15 bp, Homo sapiens
cattccaaatattct

SEQ ID NO: 492426 - DNA, 15 bp, Homo sapiens
ccattccaaatattc

SEQ ID NO: 492427 - DNA, 15 bp, Homo sapiens
accattccaaatatt

SEQ ID NO: 492428 - DNA, 15 bp, Homo sapiens
taccattccaaatat

SEQ ID NO: 492429 - DNA, 15 bp, Homo sapiens
ttaccattccaaata

SEQ ID NO: 492430 - DNA, 15 bp, Homo sapiens
attaccattccaaat

SEQ ID NO: 492431 - DNA, 15 bp, Homo sapiens
cattaccattccaaa

SEQ ID NO: 492432 - DNA, 15 bp, Homo sapiens
ccattaccattccaa

SEQ ID NO: 492433 - DNA, 15 bp, Homo sapiens
accattaccattcca

SEQ ID NO: 492434 - DNA, 15 bp, Homo sapiens
caccattaccattcc

SEQ ID NO: 492435 - DNA, 15 bp, Homo sapiens
tcaccattaccattc

SEQ ID NO: 492436 - DNA, 15 bp, Homo sapiens
ctcaccattaccatt

SEQ ID NO: 492437 - DNA, 15 bp, Homo sapiens
tctcaccattaccat

SEQ ID NO: 492438 - DNA, 15 bp, Homo sapiens
ctctcaccattacca

SEQ ID NO: 492439 - DNA, 15 bp, Homo sapiens
tctctcaccattacc

SEQ ID NO: 492440 - DNA, 15 bp, Homo sapiens
atctctcaccattac

SEQ ID NO: 492441 - DNA, 15 bp, Homo sapiens
aatctctcaccatta

SEQ ID NO: 492442 - DNA, 15 bp, Homo sapiens
taatctctcaccatt

SEQ ID NO: 492443 - DNA, 15 bp, Homo sapiens
gtaatctctcaccat

SEQ ID NO: 492444 - DNA, 15 bp, Homo sapiens
agtaatctctcacca

SEQ ID NO: 492445 - DNA, 15 bp, Homo sapiens
tagtaatctctcacc

SEQ ID NO: 492446 - DNA, 15 bp, Homo sapiens
ttagtaatctctcac

SEQ ID NO: 492447 - DNA, 15 bp, Homo sapiens
tttagtaatctctca

SEQ ID NO: 492448 - DNA, 15 bp, Homo sapiens
ctttagtaatctctc

SEQ ID NO: 492449 - DNA, 15 bp, Homo sapiens
actttagtaatctct

SEQ ID NO: 492450 - DNA, 15 bp, Homo sapiens
cactttagtaatctc

SEQ ID NO: 492451 - DNA, 15 bp, Homo sapiens
acactttagtaatct

SEQ ID NO: 492452 - DNA, 15 bp, Homo sapiens
aacactttagtaatc

SEQ ID NO: 492453 - DNA, 15 bp, Homo sapiens
aaacactttagtaat

SEQ ID NO: 492454 - DNA, 15 bp, Homo sapiens
aaaacactttagtaa

SEQ ID NO: 492455 - DNA, 15 bp, Homo sapiens
taaaacactttagta

SEQ ID NO: 492456 - DNA, 15 bp, Homo sapiens
ataaaacactttagt

SEQ ID NO: 492457 - DNA, 15 bp, Homo sapiens
tataaaacactttag

SEQ ID NO: 492458 - DNA, 15 bp, Homo sapiens
ctataaaacacttta

SEQ ID NO: 492459 - DNA, 15 bp, Homo sapiens
gctataaaacacttt

SEQ ID NO: 492460 - DNA, 15 bp, Homo sapiens
ggctataaaacactt

SEQ ID NO: 492461 - DNA, 15 bp, Homo sapiens
tggctataaaacact

SEQ ID NO: 492462 - DNA, 15 bp, Homo sapiens
ttggctataaaacac

SEQ ID NO: 492463 - DNA, 15 bp, Homo sapiens
tttggctataaaaca

SEQ ID NO: 492464 - DNA, 15 bp, Homo sapiens
atttggctataaaac

SEQ ID NO: 492465 - DNA, 15 bp, Homo sapiens
aatttggctataaaa

SEQ ID NO: 492466 - DNA, 15 bp, Homo sapiens
taatttggctataaa

SEQ ID NO: 492467 - DNA, 15 bp, Homo sapiens
ctaatttggctataa

SEQ ID NO: 492468 - DNA, 15 bp, Homo sapiens
cctaatttggctata

SEQ ID NO: 492469 - DNA, 15 bp, Homo sapiens
acctaatttggctat

SEQ ID NO: 492470 - DNA, 15 bp, Homo sapiens
aacctaatttggcta

SEQ ID NO: 492471 - DNA, 15 bp, Homo sapiens
gaacctaatttggct

SEQ ID NO: 492472 - DNA, 15 bp, Homo sapiens
agaacctaatttggc

SEQ ID NO: 492473 - DNA, 15 bp, Homo sapiens
tagaacctaatttgg

SEQ ID NO: 492474 - DNA, 15 bp, Homo sapiens
atagaacctaatttg

SEQ ID NO: 492475 - DNA, 15 bp, Homo sapiens
aatagaacctaattt

SEQ ID NO: 492476 - DNA, 15 bp, Homo sapiens
aaatagaacctaatt

SEQ ID NO: 492477 - DNA, 15 bp, Homo sapiens
gaaatagaacctaat

SEQ ID NO: 492478 - DNA, 15 bp, Homo sapiens
tgaaatagaacctaa

SEQ ID NO: 492479 - DNA, 15 bp, Homo sapiens
ctgaaatagaaccta

SEQ ID NO: 492480 - DNA, 15 bp, Homo sapiens
gctgaaatagaacct

SEQ ID NO: 492481 - DNA, 15 bp, Homo sapiens
agctgaaatagaacc

SEQ ID NO: 492482 - DNA, 15 bp, Homo sapiens
aagctgaaatagaac

SEQ ID NO: 492483 - DNA, 15 bp, Homo sapiens
gaagctgaaatagaa

SEQ ID NO: 492484 - DNA, 15 bp, Homo sapiens
agaagctgaaataga

SEQ ID NO: 492485 - DNA, 15 bp, Homo sapiens
gagaagctgaaatag

SEQ ID NO: 492486 - DNA, 15 bp, Homo sapiens
ggagaagctgaaata

SEQ ID NO: 492487 - DNA, 15 bp, Homo sapiens
aggagaagctgaaat

SEQ ID NO: 492488 - DNA, 15 bp, Homo sapiens
aaggagaagctgaaa

SEQ ID NO: 492489 - DNA, 15 bp, Homo sapiens
gaaggagaagctgaa

SEQ ID NO: 492490 - DNA, 15 bp, Homo sapiens
ggaaggagaagctga

SEQ ID NO: 492491 - DNA, 15 bp, Homo sapiens
aggaaggagaagctg

SEQ ID NO: 492492 - DNA, 15 bp, Homo sapiens
gaggaaggagaagct

SEQ ID NO: 492493 - DNA, 15 bp, Homo sapiens
ggaggaaggagaagc

SEQ ID NO: 492494 - DNA, 15 bp, Homo sapiens
gggaggaaggagaag

SEQ ID NO: 492495 - DNA, 15 bp, Homo sapiens
tgggaggaaggagaa

SEQ ID NO: 492496 - DNA, 15 bp, Homo sapiens
ttgggaggaaggaga

SEQ ID NO: 492497 - DNA, 15 bp, Homo sapiens
attgggaggaaggag

SEQ ID NO: 492498 - DNA, 15 bp, Homo sapiens
cattgggaggaagga

SEQ ID NO: 492499 - DNA, 15 bp, Homo sapiens
acattgggaggaagg

SEQ ID NO: 492500 - DNA, 15 bp, Homo sapiens
aacattgggaggaag

SEQ ID NO: 492501 - DNA, 15 bp, Homo sapiens
gaacattgggaggaa

SEQ ID NO: 492502 - DNA, 15 bp, Homo sapiens
agaacattgggagga

SEQ ID NO: 492503 - DNA, 15 bp, Homo sapiens
gagaacattgggagg

SEQ ID NO: 492504 - DNA, 15 bp, Homo sapiens
tgagaacattgggag

SEQ ID NO: 492505 - DNA, 15 bp, Homo sapiens
ttgagaacattggga

SEQ ID NO: 492506 - DNA, 15 bp, Homo sapiens
tttgagaacattggg

SEQ ID NO: 492507 - DNA, 15 bp, Homo sapiens
ttttgagaacattgg

SEQ ID NO: 492508 - DNA, 15 bp, Homo sapiens
cttttgagaacattg

SEQ ID NO: 492509 - DNA, 15 bp, Homo sapiens
ccttttgagaacatt

SEQ ID NO: 492510 - DNA, 15 bp, Homo sapiens
tccttttgagaacat

SEQ ID NO: 492511 - DNA, 15 bp, Homo sapiens
ttccttttgagaaca

SEQ ID NO: 492512 - DNA, 15 bp, Homo sapiens
tttccttttgagaac

SEQ ID NO: 492513 - DNA, 15 bp, Homo sapiens
atttccttttgagaa

SEQ ID NO: 492514 - DNA, 15 bp, Homo sapiens
tatttccttttgaga

SEQ ID NO: 492515 - DNA, 15 bp, Homo sapiens
atatttccttttgag

SEQ ID NO: 492516 - DNA, 15 bp, Homo sapiens
catatttccttttga

SEQ ID NO: 492517 - DNA, 15 bp, Homo sapiens
acatatttccttttg

SEQ ID NO: 492518 - DNA, 15 bp, Homo sapiens
tacatatttcctttt

SEQ ID NO: 492519 - DNA, 15 bp, Homo sapiens
atacatatttccttt

SEQ ID NO: 492520 - DNA, 15 bp, Homo sapiens
catacatatttcctt

SEQ ID NO: 492521 - DNA, 15 bp, Homo sapiens
gcatacatatttcct

SEQ ID NO: 492522 - DNA, 15 bp, Homo sapiens
tgcatacatatttcc

SEQ ID NO: 492523 - DNA, 15 bp, Homo sapiens
ctgcatacatatttc

SEQ ID NO: 492524 - DNA, 15 bp, Homo sapiens
tctgcatacatattt

SEQ ID NO: 492525 - DNA, 15 bp, Homo sapiens
ctctgcatacatatt

SEQ ID NO: 492526 - DNA, 15 bp, Homo sapiens
cctctgcatacatat

SEQ ID NO: 492527 - DNA, 15 bp, Homo sapiens
tcctctgcatacata

SEQ ID NO: 492528 - DNA, 15 bp, Homo sapiens
gtcctctgcatacat

SEQ ID NO: 492529 - DNA, 15 bp, Homo sapiens
tgtcctctgcataca

SEQ ID NO: 492530 - DNA, 15 bp, Homo sapiens
ttgtcctctgcatac

SEQ ID NO: 492531 - DNA, 15 bp, Homo sapiens
attgtcctctgcata

SEQ ID NO: 492532 - DNA, 15 bp, Homo sapiens
cattgtcctctgcat

SEQ ID NO: 492533 - DNA, 15 bp, Homo sapiens
tcattgtcctctgca

SEQ ID NO: 492534 - DNA, 15 bp, Homo sapiens
gtcattgtcctctgc

SEQ ID NO: 492535 - DNA, 15 bp, Homo sapiens
agtcattgtcctctg

SEQ ID NO: 492536 - DNA, 15 bp, Homo sapiens
cagtcattgtcctct

SEQ ID NO: 492537 - DNA, 15 bp, Homo sapiens
ccagtcattgtcctc

SEQ ID NO: 492538 - DNA, 15 bp, Homo sapiens
gccagtcattgtcct

SEQ ID NO: 492539 - DNA, 15 bp, Homo sapiens
tgccagtcattgtcc

SEQ ID NO: 492540 - DNA, 15 bp, Homo sapiens
ttgccagtcattgtc

SEQ ID NO: 492541 - DNA, 15 bp, Homo sapiens
tttgccagtcattgt

SEQ ID NO: 492542 - DNA, 15 bp, Homo sapiens
atttgccagtcattg

SEQ ID NO: 492543 - DNA, 15 bp, Homo sapiens
gatttgccagtcatt

SEQ ID NO: 492544 - DNA, 15 bp, Homo sapiens
tgatttgccagtcat

SEQ ID NO: 492545 - DNA, 15 bp, Homo sapiens
ctgatttgccagtca

SEQ ID NO: 492546 - DNA, 15 bp, Homo sapiens
gctgatttgccagtc

SEQ ID NO: 492547 - DNA, 15 bp, Homo sapiens
tgctgatttgccagt

SEQ ID NO: 492548 - DNA, 15 bp, Homo sapiens
atgctgatttgccag

SEQ ID NO: 492549 - DNA, 15 bp, Homo sapiens
aatgctgatttgcca

SEQ ID NO: 492550 - DNA, 15 bp, Homo sapiens
aaatgctgatttgcc

SEQ ID NO: 492551 - DNA, 15 bp, Homo sapiens
aaaatgctgatttgc

SEQ ID NO: 492552 - DNA, 15 bp, Homo sapiens
taaaatgctgatttg

SEQ ID NO: 492553 - DNA, 15 bp, Homo sapiens
ttaaaatgctgattt

SEQ ID NO: 492554 - DNA, 15 bp, Homo sapiens
tttaaaatgctgatt

SEQ ID NO: 492555 - DNA, 15 bp, Homo sapiens
ttttaaaatgctgat

SEQ ID NO: 492556 - DNA, 15 bp, Homo sapiens
tttttaaaatgctga

SEQ ID NO: 492557 - DNA, 15 bp, Homo sapiens
atttttaaaatgctg

SEQ ID NO: 492558 - DNA, 15 bp, Homo sapiens
aatttttaaaatgct

SEQ ID NO: 492559 - DNA, 15 bp, Homo sapiens
taatttttaaaatgc

SEQ ID NO: 492560 - DNA, 15 bp, Homo sapiens
ataatttttaaaatg

SEQ ID NO: 492561 - DNA, 15 bp, Homo sapiens
aataatttttaaaat

SEQ ID NO: 492562 - DNA, 15 bp, Homo sapiens
gaataatttttaaaa

SEQ ID NO: 492563 - DNA, 15 bp, Homo sapiens
agaataatttttaaa

SEQ ID NO: 492564 - DNA, 15 bp, Homo sapiens
cagaataatttttaa

SEQ ID NO: 492565 - DNA, 15 bp, Homo sapiens
tcagaataattttta

SEQ ID NO: 492566 - DNA, 15 bp, Homo sapiens
ctcagaataattttt

SEQ ID NO: 492567 - DNA, 15 bp, Homo sapiens
cctcagaataatttt

SEQ ID NO: 492568 - DNA, 15 bp, Homo sapiens
gcctcagaataattt

SEQ ID NO: 492569 - DNA, 15 bp, Homo sapiens
agcctcagaataatt

SEQ ID NO: 492570 - DNA, 15 bp, Homo sapiens
aagcctcagaataat

SEQ ID NO: 492571 - DNA, 15 bp, Homo sapiens
aaagcctcagaataa

SEQ ID NO: 492572 - DNA, 15 bp, Homo sapiens
caaagcctcagaata

SEQ ID NO: 492573 - DNA, 15 bp, Homo sapiens
ccaaagcctcagaat

SEQ ID NO: 492574 - DNA, 15 bp, Homo sapiens
gccaaagcctcagaa

SEQ ID NO: 492575 - DNA, 15 bp, Homo sapiens
ggccaaagcctcaga

SEQ ID NO: 492576 - DNA, 15 bp, Homo sapiens
aggccaaagcctcag

SEQ ID NO: 492577 - DNA, 15 bp, Homo sapiens
aaggccaaagcctca

SEQ ID NO: 492578 - DNA, 15 bp, Homo sapiens
taaggccaaagcctc

SEQ ID NO: 492579 - DNA, 15 bp, Homo sapiens
ctaaggccaaagcct

SEQ ID NO: 492580 - DNA, 15 bp, Homo sapiens
tctaaggccaaagcc

SEQ ID NO: 492581 - DNA, 15 bp, Homo sapiens
ttctaaggccaaagc

SEQ ID NO: 492582 - DNA, 15 bp, Homo sapiens
gttctaaggccaaag

SEQ ID NO: 492583 - DNA, 15 bp, Homo sapiens
ggttctaaggccaaa

SEQ ID NO: 492584 - DNA, 15 bp, Homo sapiens
tggttctaaggccaa

SEQ ID NO: 492585 - DNA, 15 bp, Homo sapiens
gtggttctaaggcca

SEQ ID NO: 492586 - DNA, 15 bp, Homo sapiens
tgtggttctaaggcc

SEQ ID NO: 492587 - DNA, 15 bp, Homo sapiens
gtgtggttctaaggc

SEQ ID NO: 492588 - DNA, 15 bp, Homo sapiens
agtgtggttctaagg

SEQ ID NO: 492589 - DNA, 15 bp, Homo sapiens
cagtgtggttctaag

SEQ ID NO: 492590 - DNA, 15 bp, Homo sapiens
acagtgtggttctaa

SEQ ID NO: 492591 - DNA, 15 bp, Homo sapiens
aacagtgtggttcta

SEQ ID NO: 492592 - DNA, 15 bp, Homo sapiens
caacagtgtggttct

SEQ ID NO: 492593 - DNA, 15 bp, Homo sapiens
tcaacagtgtggttc

SEQ ID NO: 492594 - DNA, 15 bp, Homo sapiens
atcaacagtgtggtt

SEQ ID NO: 492595 - DNA, 15 bp, Homo sapiens
catcaacagtgtggt

SEQ ID NO: 492596 - DNA, 15 bp, Homo sapiens
tcatcaacagtgtgg

SEQ ID NO: 492597 - DNA, 15 bp, Homo sapiens
ttcatcaacagtgtg

SEQ ID NO: 492598 - DNA, 15 bp, Homo sapiens
attcatcaacagtgt

SEQ ID NO: 492599 - DNA, 15 bp, Homo sapiens
aattcatcaacagtg

SEQ ID NO: 492600 - DNA, 15 bp, Homo sapiens
gaattcatcaacagt

SEQ ID NO: 492601 - DNA, 15 bp, Homo sapiens
agaattcatcaacag

SEQ ID NO: 492602 - DNA, 15 bp, Homo sapiens
tagaattcatcaaca

SEQ ID NO: 492603 - DNA, 15 bp, Homo sapiens
ctagaattcatcaac

SEQ ID NO: 492604 - DNA, 15 bp, Homo sapiens
actagaattcatcaa

SEQ ID NO: 492605 - DNA, 15 bp, Homo sapiens
aactagaattcatca

SEQ ID NO: 492606 - DNA, 15 bp, Homo sapiens
gaactagaattcatc

SEQ ID NO: 492607 - DNA, 15 bp, Homo sapiens
agaactagaattcat

SEQ ID NO: 492608 - DNA, 15 bp, Homo sapiens
tagaactagaattca

SEQ ID NO: 492609 - DNA, 15 bp, Homo sapiens
ctagaactagaattc

SEQ ID NO: 492610 - DNA, 15 bp, Homo sapiens
actagaactagaatt

SEQ ID NO: 492611 - DNA, 15 bp, Homo sapiens
aactagaactagaat

SEQ ID NO: 492612 - DNA, 15 bp, Homo sapiens
caactagaactagaa

SEQ ID NO: 492613 - DNA, 15 bp, Homo sapiens
tcaactagaactaga

SEQ ID NO: 492614 - DNA, 15 bp, Homo sapiens
ctcaactagaactag

SEQ ID NO: 492615 - DNA, 15 bp, Homo sapiens
actcaactagaacta

SEQ ID NO: 492616 - DNA, 15 bp, Homo sapiens
aactcaactagaact

SEQ ID NO: 492617 - DNA, 15 bp, Homo sapiens
taactcaactagaac

SEQ ID NO: 492618 - DNA, 15 bp, Homo sapiens
ttaactcaactagaa

SEQ ID NO: 492619 - DNA, 15 bp, Homo sapiens
tttaactcaactaga

SEQ ID NO: 492620 - DNA, 15 bp, Homo sapiens
atttaactcaactag

SEQ ID NO: 492621 - DNA, 15 bp, Homo sapiens
tatttaactcaacta

SEQ ID NO: 492622 - DNA, 15 bp, Homo sapiens
ctatttaactcaact

SEQ ID NO: 492623 - DNA, 15 bp, Homo sapiens
cctatttaactcaac

SEQ ID NO: 492624 - DNA, 15 bp, Homo sapiens
acctatttaactcaa

SEQ ID NO: 492625 - DNA, 15 bp, Homo sapiens
gacctatttaactca

SEQ ID NO: 492626 - DNA, 15 bp, Homo sapiens
agacctatttaactc

SEQ ID NO: 492627 - DNA, 15 bp, Homo sapiens
gagacctatttaact

SEQ ID NO: 492628 - DNA, 15 bp, Homo sapiens
agagacctatttaac

SEQ ID NO: 492629 - DNA, 15 bp, Homo sapiens
tagagacctatttaa

SEQ ID NO: 492630 - DNA, 15 bp, Homo sapiens
atagagacctattta

SEQ ID NO: 492631 - DNA, 15 bp, Homo sapiens
catagagacctattt

SEQ ID NO: 492632 - DNA, 15 bp, Homo sapiens
ccatagagacctatt

SEQ ID NO: 492633 - DNA, 15 bp, Homo sapiens
cccatagagacctat

SEQ ID NO: 492634 - DNA, 15 bp, Homo sapiens
ccccatagagaccta

SEQ ID NO: 492635 - DNA, 15 bp, Homo sapiens
gccccatagagacct

SEQ ID NO: 492636 - DNA, 15 bp, Homo sapiens
tgccccatagagacc

SEQ ID NO: 492637 - DNA, 15 bp, Homo sapiens
ctgccccatagagac

SEQ ID NO: 492638 - DNA, 15 bp, Homo sapiens
cctgccccatagaga

SEQ ID NO: 492639 - DNA, 15 bp, Homo sapiens
gcctgccccatagag

SEQ ID NO: 492640 - DNA, 15 bp, Homo sapiens
ggcctgccccataga

SEQ ID NO: 492641 - DNA, 15 bp, Homo sapiens
aggcctgccccatag

SEQ ID NO: 492642 - DNA, 15 bp, Homo sapiens
taggcctgccccata

SEQ ID NO: 492643 - DNA, 15 bp, Homo sapiens
ctaggcctgccccat

SEQ ID NO: 492644 - DNA, 15 bp, Homo sapiens
cctaggcctgcccca

SEQ ID NO: 492645 - DNA, 15 bp, Homo sapiens
tcctaggcctgcccc

SEQ ID NO: 492646 - DNA, 15 bp, Homo sapiens
ttcctaggcctgccc

SEQ ID NO: 492647 - DNA, 15 bp, Homo sapiens
tttcctaggcctgcc

SEQ ID NO: 492648 - DNA, 15 bp, Homo sapiens
ttttcctaggcctgc

SEQ ID NO: 492649 - DNA, 15 bp, Homo sapiens
cttttcctaggcctg

SEQ ID NO: 492650 - DNA, 15 bp, Homo sapiens
acttttcctaggcct

SEQ ID NO: 492651 - DNA, 15 bp, Homo sapiens
cacttttcctaggcc

SEQ ID NO: 492652 - DNA, 15 bp, Homo sapiens
ccacttttcctaggc

SEQ ID NO: 492653 - DNA, 15 bp, Homo sapiens
cccacttttcctagg

SEQ ID NO: 492654 - DNA, 15 bp, Homo sapiens
ccccacttttcctag

SEQ ID NO: 492655 - DNA, 15 bp, Homo sapiens
cccccacttttccta

SEQ ID NO: 492656 - DNA, 15 bp, Homo sapiens
gcccccacttttcct

SEQ ID NO: 492657 - DNA, 15 bp, Homo sapiens
agcccccacttttcc

SEQ ID NO: 492658 - DNA, 15 bp, Homo sapiens
cagcccccacttttc

SEQ ID NO: 492659 - DNA, 15 bp, Homo sapiens
gcagcccccactttt

SEQ ID NO: 492660 - DNA, 15 bp, Homo sapiens
agcagcccccacttt

SEQ ID NO: 492661 - DNA, 15 bp, Homo sapiens
tagcagcccccactt

SEQ ID NO: 492662 - DNA, 15 bp, Homo sapiens
atagcagcccccact

SEQ ID NO: 492663 - DNA, 15 bp, Homo sapiens
tatagcagcccccac

SEQ ID NO: 492664 - DNA, 15 bp, Homo sapiens
ttatagcagccccca

SEQ ID NO: 492665 - DNA, 15 bp, Homo sapiens
gttatagcagccccc

SEQ ID NO: 492666 - DNA, 15 bp, Homo sapiens
ggttatagcagcccc

SEQ ID NO: 492667 - DNA, 15 bp, Homo sapiens
tggttatagcagccc

SEQ ID NO: 492668 - DNA, 15 bp, Homo sapiens
ctggttatagcagcc

SEQ ID NO: 492669 - DNA, 15 bp, Homo sapiens
tctggttatagcagc

SEQ ID NO: 492670 - DNA, 15 bp, Homo sapiens
ctctggttatagcag

SEQ ID NO: 492671 - DNA, 15 bp, Homo sapiens
actctggttatagca

SEQ ID NO: 492672 - DNA, 15 bp, Homo sapiens
tactctggttatagc

SEQ ID NO: 492673 - DNA, 15 bp, Homo sapiens
ctactctggttatag

SEQ ID NO: 492674 - DNA, 15 bp, Homo sapiens
gctactctggttata

SEQ ID NO: 492675 - DNA, 15 bp, Homo sapiens
agctactctggttat

SEQ ID NO: 492676 - DNA, 15 bp, Homo sapiens
aagctactctggtta

SEQ ID NO: 492677 - DNA, 15 bp, Homo sapiens
caagctactctggtt

SEQ ID NO: 492678 - DNA, 15 bp, Homo sapiens
tcaagctactctggt

SEQ ID NO: 492679 - DNA, 15 bp, Homo sapiens
ctcaagctactctgg

SEQ ID NO: 492680 - DNA, 15 bp, Homo sapiens
cctcaagctactctg

SEQ ID NO: 492681 - DNA, 15 bp, Homo sapiens
tcctcaagctactct

SEQ ID NO: 492682 - DNA, 15 bp, Homo sapiens
ctcctcaagctactc

SEQ ID NO: 492683 - DNA, 15 bp, Homo sapiens
gctcctcaagctact

SEQ ID NO: 492684 - DNA, 15 bp, Homo sapiens
tgctcctcaagctac

SEQ ID NO: 492685 - DNA, 15 bp, Homo sapiens
atgctcctcaagcta

SEQ ID NO: 492686 - DNA, 15 bp, Homo sapiens
tatgctcctcaagct

SEQ ID NO: 492687 - DNA, 15 bp, Homo sapiens
atatgctcctcaagc

SEQ ID NO: 492688 - DNA, 15 bp, Homo sapiens
aatatgctcctcaag

SEQ ID NO: 492689 - DNA, 15 bp, Homo sapiens
caatatgctcctcaa

SEQ ID NO: 492690 - DNA, 15 bp, Homo sapiens
acaatatgctcctca

SEQ ID NO: 492691 - DNA, 15 bp, Homo sapiens
tacaatatgctcctc

SEQ ID NO: 492692 - DNA, 15 bp, Homo sapiens
atacaatatgctcct

SEQ ID NO: 492693 - DNA, 15 bp, Homo sapiens
gatacaatatgctcc

SEQ ID NO: 492694 - DNA, 15 bp, Homo sapiens
agatacaatatgctc

SEQ ID NO: 492695 - DNA, 15 bp, Homo sapiens
aagatacaatatgct

SEQ ID NO: 492696 - DNA, 15 bp, Homo sapiens
aaagatacaatatgc

SEQ ID NO: 492697 - DNA, 15 bp, Homo sapiens
taaagatacaatatg

SEQ ID NO: 492698 - DNA, 15 bp, Homo sapiens
gtaaagatacaatat

SEQ ID NO: 492699 - DNA, 15 bp, Homo sapiens
agtaaagatacaata

SEQ ID NO: 492700 - DNA, 15 bp, Homo sapiens
gagtaaagatacaat

SEQ ID NO: 492701 - DNA, 15 bp, Homo sapiens
agagtaaagatacaa

SEQ ID NO: 492702 - DNA, 15 bp, Homo sapiens
aagagtaaagataca

SEQ ID NO: 492703 - DNA, 15 bp, Homo sapiens
taagagtaaagatac

SEQ ID NO: 492704 - DNA, 15 bp, Homo sapiens
ttaagagtaaagata

SEQ ID NO: 492705 - DNA, 15 bp, Homo sapiens
cttaagagtaaagat

SEQ ID NO: 492706 - DNA, 15 bp, Homo sapiens
acttaagagtaaaga

SEQ ID NO: 492707 - DNA, 15 bp, Homo sapiens
aacttaagagtaaag

SEQ ID NO: 492708 - DNA, 15 bp, Homo sapiens
gaacttaagagtaaa

SEQ ID NO: 492709 - DNA, 15 bp, Homo sapiens
tgaacttaagagtaa

SEQ ID NO: 492710 - DNA, 15 bp, Homo sapiens
atgaacttaagagta

SEQ ID NO: 492711 - DNA, 15 bp, Homo sapiens
tatgaacttaagagt

SEQ ID NO: 492712 - DNA, 15 bp, Homo sapiens
gtatgaacttaagag

SEQ ID NO: 492713 - DNA, 15 bp, Homo sapiens
tgtatgaacttaaga

SEQ ID NO: 492714 - DNA, 15 bp, Homo sapiens
atgtatgaacttaag

SEQ ID NO: 492715 - DNA, 15 bp, Homo sapiens
tatgtatgaacttaa

SEQ ID NO: 492716 - DNA, 15 bp, Homo sapiens
ttatgtatgaactta

SEQ ID NO: 492717 - DNA, 15 bp, Homo sapiens
cttatgtatgaactt

SEQ ID NO: 492718 - DNA, 15 bp, Homo sapiens
tcttatgtatgaact

SEQ ID NO: 492719 - DNA, 15 bp, Homo sapiens
gtcttatgtatgaac

SEQ ID NO: 492720 - DNA, 15 bp, Homo sapiens
tgtcttatgtatgaa

SEQ ID NO: 492721 - DNA, 15 bp, Homo sapiens
atgtcttatgtatga

SEQ ID NO: 492722 - DNA, 15 bp, Homo sapiens
tatgtcttatgtatg

SEQ ID NO: 492723 - DNA, 15 bp, Homo sapiens
ttatgtcttatgtat

SEQ ID NO: 492724 - DNA, 15 bp, Homo sapiens
attatgtcttatgta

SEQ ID NO: 492725 - DNA, 15 bp, Homo sapiens
aattatgtcttatgt

SEQ ID NO: 492726 - DNA, 15 bp, Homo sapiens
gaattatgtcttatg

SEQ ID NO: 492727 - DNA, 15 bp, Homo sapiens
tgaattatgtcttat

SEQ ID NO: 492728 - DNA, 15 bp, Homo sapiens
atgaattatgtctta

SEQ ID NO: 492729 - DNA, 15 bp, Homo sapiens
tatgaattatgtctt

SEQ ID NO: 492730 - DNA, 15 bp, Homo sapiens
gtatgaattatgtct

SEQ ID NO: 492731 - DNA, 15 bp, Homo sapiens
tgtatgaattatgtc

SEQ ID NO: 492732 - DNA, 15 bp, Homo sapiens
atgtatgaattatgt

SEQ ID NO: 492733 - DNA, 15 bp, Homo sapiens
tatgtatgaattatg

SEQ ID NO: 492734 - DNA, 15 bp, Homo sapiens
ttatgtatgaattat

SEQ ID NO: 492735 - DNA, 15 bp, Homo sapiens
tttatgtatgaatta

SEQ ID NO: 492736 - DNA, 15 bp, Homo sapiens
ttttatgtatgaatt

SEQ ID NO: 492737 - DNA, 15 bp, Homo sapiens
attttatgtatgaat

SEQ ID NO: 492738 - DNA, 15 bp, Homo sapiens
aattttatgtatgaa

SEQ ID NO: 492739 - DNA, 15 bp, Homo sapiens
aaattttatgtatga

SEQ ID NO: 492740 - DNA, 15 bp, Homo sapiens
taaattttatgtatg

SEQ ID NO: 492741 - DNA, 15 bp, Homo sapiens
ataaattttatgtat

SEQ ID NO: 492742 - DNA, 15 bp, Homo sapiens
aataaattttatgta

SEQ ID NO: 492743 - DNA, 15 bp, Homo sapiens
aaataaattttatgt

SEQ ID NO: 492744 - DNA, 15 bp, Homo sapiens
aaaataaattttatg

SEQ ID NO: 492745 - DNA, 15 bp, Homo sapiens
taaaataaattttat

SEQ ID NO: 492746 - DNA, 15 bp, Homo sapiens
ttaaaataaatttta

SEQ ID NO: 492747 - DNA, 15 bp, Homo sapiens
gttaaaataaatttt

SEQ ID NO: 492748 - DNA, 15 bp, Homo sapiens
tgttaaaataaattt

SEQ ID NO: 492749 - DNA, 15 bp, Homo sapiens
atgttaaaataaatt

SEQ ID NO: 492750 - DNA, 15 bp, Homo sapiens
tatgttaaaataaat

SEQ ID NO: 492751 - DNA, 15 bp, Homo sapiens
atatgttaaaataaa

SEQ ID NO: 492752 - DNA, 15 bp, Homo sapiens
tatatgttaaaataa

SEQ ID NO: 492753 - DNA, 15 bp, Homo sapiens
ctatatgttaaaata

SEQ ID NO: 492754 - DNA, 15 bp, Homo sapiens
gctatatgttaaaat

SEQ ID NO: 492755 - DNA, 15 bp, Homo sapiens
agctatatgttaaaa

SEQ ID NO: 492756 - DNA, 15 bp, Homo sapiens
aagctatatgttaaa

SEQ ID NO: 492757 - DNA, 15 bp, Homo sapiens
gaagctatatgttaa

SEQ ID NO: 492758 - DNA, 15 bp, Homo sapiens
agaagctatatgtta

SEQ ID NO: 492759 - DNA, 15 bp, Homo sapiens
cagaagctatatgtt

SEQ ID NO: 492760 - DNA, 15 bp, Homo sapiens
acagaagctatatgt

SEQ ID NO: 492761 - DNA, 15 bp, Homo sapiens
tacagaagctatatg

SEQ ID NO: 492762 - DNA, 15 bp, Homo sapiens
ttacagaagctatat

SEQ ID NO: 492763 - DNA, 15 bp, Homo sapiens
attacagaagctata

SEQ ID NO: 492764 - DNA, 15 bp, Homo sapiens
aattacagaagctat

SEQ ID NO: 492765 - DNA, 15 bp, Homo sapiens
aaattacagaagcta

SEQ ID NO: 492766 - DNA, 15 bp, Homo sapiens
taaattacagaagct

SEQ ID NO: 492767 - DNA, 15 bp, Homo sapiens
ttaaattacagaagc

SEQ ID NO: 492768 - DNA, 15 bp, Homo sapiens
cttaaattacagaag

SEQ ID NO: 492769 - DNA, 15 bp, Homo sapiens
tcttaaattacagaa

SEQ ID NO: 492770 - DNA, 15 bp, Homo sapiens
ttcttaaattacaga

SEQ ID NO: 492771 - DNA, 15 bp, Homo sapiens
attcttaaattacag

SEQ ID NO: 492772 - DNA, 15 bp, Homo sapiens
aattcttaaattaca

SEQ ID NO: 492773 - DNA, 15 bp, Homo sapiens
gaattcttaaattac

SEQ ID NO: 492774 - DNA, 15 bp, Homo sapiens
agaattcttaaatta

SEQ ID NO: 492775 - DNA, 15 bp, Homo sapiens
tagaattcttaaatt

SEQ ID NO: 492776 - DNA, 15 bp, Homo sapiens
atagaattcttaaat

SEQ ID NO: 492777 - DNA, 15 bp, Homo sapiens
aatagaattcttaaa

SEQ ID NO: 492778 - DNA, 15 bp, Homo sapiens
taatagaattcttaa

SEQ ID NO: 492779 - DNA, 15 bp, Homo sapiens
ataatagaattctta

SEQ ID NO: 492780 - DNA, 15 bp, Homo sapiens
cataatagaattctt

SEQ ID NO: 492781 - DNA, 15 bp, Homo sapiens
ccataatagaattct

SEQ ID NO: 492782 - DNA, 15 bp, Homo sapiens
gccataatagaattc

SEQ ID NO: 492783 - DNA, 15 bp, Homo sapiens
cgccataatagaatt

SEQ ID NO: 492784 - DNA, 15 bp, Homo sapiens
acgccataatagaat

SEQ ID NO: 492785 - DNA, 15 bp, Homo sapiens
tacgccataatagaa

SEQ ID NO: 492786 - DNA, 15 bp, Homo sapiens
ctacgccataataga

SEQ ID NO: 492787 - DNA, 15 bp, Homo sapiens
tctacgccataatag

SEQ ID NO: 492788 - DNA, 15 bp, Homo sapiens
atctacgccataata

SEQ ID NO: 492789 - DNA, 15 bp, Homo sapiens
aatctacgccataat

SEQ ID NO: 492790 - DNA, 15 bp, Homo sapiens
aaatctacgccataa

SEQ ID NO: 492791 - DNA, 15 bp, Homo sapiens
caaatctacgccata

SEQ ID NO: 492792 - DNA, 15 bp, Homo sapiens
ccaaatctacgccat

SEQ ID NO: 492793 - DNA, 15 bp, Homo sapiens
cccaaatctacgcca

SEQ ID NO: 492794 - DNA, 15 bp, Homo sapiens
tcccaaatctacgcc

SEQ ID NO: 492795 - DNA, 15 bp, Homo sapiens
ctcccaaatctacgc

SEQ ID NO: 492796 - DNA, 15 bp, Homo sapiens
actcccaaatctacg

SEQ ID NO: 492797 - DNA, 15 bp, Homo sapiens
tactcccaaatctac

SEQ ID NO: 492798 - DNA, 15 bp, Homo sapiens
gtactcccaaatcta

SEQ ID NO: 492799 - DNA, 15 bp, Homo sapiens
agtactcccaaatct

SEQ ID NO: 492800 - DNA, 15 bp, Homo sapiens
aagtactcccaaatc

SEQ ID NO: 492801 - DNA, 15 bp, Homo sapiens
caagtactcccaaat

SEQ ID NO: 492802 - DNA, 15 bp, Homo sapiens
tcaagtactcccaaa

SEQ ID NO: 492803 - DNA, 15 bp, Homo sapiens
atcaagtactcccaa

SEQ ID NO: 492804 - DNA, 15 bp, Homo sapiens
aatcaagtactccca

SEQ ID NO: 492805 - DNA, 15 bp, Homo sapiens
aaatcaagtactccc

SEQ ID NO: 492806 - DNA, 15 bp, Homo sapiens
taaatcaagtactcc

SEQ ID NO: 492807 - DNA, 15 bp, Homo sapiens
ttaaatcaagtactc

SEQ ID NO: 492808 - DNA, 15 bp, Homo sapiens
attaaatcaagtact

SEQ ID NO: 492809 - DNA, 15 bp, Homo sapiens
cattaaatcaagtac

SEQ ID NO: 492810 - DNA, 15 bp, Homo sapiens
ccattaaatcaagta

SEQ ID NO: 492811 - DNA, 15 bp, Homo sapiens
cccattaaatcaagt

SEQ ID NO: 492812 - DNA, 15 bp, Homo sapiens
acccattaaatcaag

SEQ ID NO: 492813 - DNA, 15 bp, Homo sapiens
aacccattaaatcaa

SEQ ID NO: 492814 - DNA, 15 bp, Homo sapiens
aaacccattaaatca

SEQ ID NO: 492815 - DNA, 15 bp, Homo sapiens
aaaacccattaaatc

SEQ ID NO: 492816 - DNA, 15 bp, Homo sapiens
aaaaacccattaaat

SEQ ID NO: 492817 - DNA, 15 bp, Homo sapiens
caaaaacccattaaa

SEQ ID NO: 492818 - DNA, 15 bp, Homo sapiens
acaaaaacccattaa

SEQ ID NO: 492819 - DNA, 15 bp, Homo sapiens
gacaaaaacccatta

SEQ ID NO: 492820 - DNA, 15 bp, Homo sapiens
ggacaaaaacccatt

SEQ ID NO: 492821 - DNA, 15 bp, Homo sapiens
tggacaaaaacccat

SEQ ID NO: 492822 - DNA, 15 bp, Homo sapiens
ctggacaaaaaccca

SEQ ID NO: 492823 - DNA, 15 bp, Homo sapiens
actggacaaaaaccc

SEQ ID NO: 492824 - DNA, 15 bp, Homo sapiens
aactggacaaaaacc

SEQ ID NO: 492825 - DNA, 15 bp, Homo sapiens
gaactggacaaaaac

SEQ ID NO: 492826 - DNA, 15 bp, Homo sapiens
agaactggacaaaaa

SEQ ID NO: 492827 - DNA, 15 bp, Homo sapiens
tagaactggacaaaa

SEQ ID NO: 492828 - DNA, 15 bp, Homo sapiens
ctagaactggacaaa

SEQ ID NO: 492829 - DNA, 15 bp, Homo sapiens
tctagaactggacaa

SEQ ID NO: 492830 - DNA, 15 bp, Homo sapiens
ttctagaactggaca

SEQ ID NO: 492831 - DNA, 15 bp, Homo sapiens
attctagaactggac

SEQ ID NO: 492832 - DNA, 15 bp, Homo sapiens
gattctagaactgga

SEQ ID NO: 492833 - DNA, 15 bp, Homo sapiens
tgattctagaactgg

SEQ ID NO: 492834 - DNA, 15 bp, Homo sapiens
atgattctagaactg

SEQ ID NO: 492835 - DNA, 15 bp, Homo sapiens
tatgattctagaact

SEQ ID NO: 492836 - DNA, 15 bp, Homo sapiens
ctatgattctagaac

SEQ ID NO: 492837 - DNA, 15 bp, Homo sapiens
gctatgattctagaa

SEQ ID NO: 492838 - DNA, 15 bp, Homo sapiens
agctatgattctaga

SEQ ID NO: 492839 - DNA, 15 bp, Homo sapiens
gagctatgattctag

SEQ ID NO: 492840 - DNA, 15 bp, Homo sapiens
agagctatgattcta

SEQ ID NO: 492841 - DNA, 15 bp, Homo sapiens
cagagctatgattct

SEQ ID NO: 492842 - DNA, 15 bp, Homo sapiens
tcagagctatgattc

SEQ ID NO: 492843 - DNA, 15 bp, Homo sapiens
ctcagagctatgatt

SEQ ID NO: 492844 - DNA, 15 bp, Homo sapiens
tctcagagctatgat

SEQ ID NO: 492845 - DNA, 15 bp, Homo sapiens
ttctcagagctatga

SEQ ID NO: 492846 - DNA, 15 bp, Homo sapiens
tttctcagagctatg

SEQ ID NO: 492847 - DNA, 15 bp, Homo sapiens
atttctcagagctat

SEQ ID NO: 492848 - DNA, 15 bp, Homo sapiens
gatttctcagagcta

SEQ ID NO: 492849 - DNA, 15 bp, Homo sapiens
cgatttctcagagct

SEQ ID NO: 492850 - DNA, 15 bp, Homo sapiens
acgatttctcagagc

SEQ ID NO: 492851 - DNA, 15 bp, Homo sapiens
tacgatttctcagag

SEQ ID NO: 492852 - DNA, 15 bp, Homo sapiens
ttacgatttctcaga

SEQ ID NO: 492853 - DNA, 15 bp, Homo sapiens
tttacgatttctcag

SEQ ID NO: 492854 - DNA, 15 bp, Homo sapiens
ctttacgatttctca

SEQ ID NO: 492855 - DNA, 15 bp, Homo sapiens
tctttacgatttctc

SEQ ID NO: 492856 - DNA, 15 bp, Homo sapiens
gtctttacgatttct

SEQ ID NO: 492857 - DNA, 15 bp, Homo sapiens
ggtctttacgatttc

SEQ ID NO: 492858 - DNA, 15 bp, Homo sapiens
aggtctttacgattt

SEQ ID NO: 492859 - DNA, 15 bp, Homo sapiens
taggtctttacgatt

SEQ ID NO: 492860 - DNA, 15 bp, Homo sapiens
ctaggtctttacgat

SEQ ID NO: 492861 - DNA, 15 bp, Homo sapiens
tctaggtctttacga

SEQ ID NO: 492862 - DNA, 15 bp, Homo sapiens
atctaggtctttacg

SEQ ID NO: 492863 - DNA, 15 bp, Homo sapiens
gatctaggtctttac

SEQ ID NO: 492864 - DNA, 15 bp, Homo sapiens
agatctaggtcttta

SEQ ID NO: 492865 - DNA, 15 bp, Homo sapiens
gagatctaggtcttt

SEQ ID NO: 492866 - DNA, 15 bp, Homo sapiens
tgagatctaggtctt

SEQ ID NO: 492867 - DNA, 15 bp, Homo sapiens
atgagatctaggtct

SEQ ID NO: 492868 - DNA, 15 bp, Homo sapiens
catgagatctaggtc

SEQ ID NO: 492869 - DNA, 15 bp, Homo sapiens
ccatgagatctaggt

SEQ ID NO: 492870 - DNA, 15 bp, Homo sapiens
gccatgagatctagg

SEQ ID NO: 492871 - DNA, 15 bp, Homo sapiens
agccatgagatctag

SEQ ID NO: 492872 - DNA, 15 bp, Homo sapiens
tagccatgagatcta

SEQ ID NO: 492873 - DNA, 15 bp, Homo sapiens
ctagccatgagatct

SEQ ID NO: 492874 - DNA, 15 bp, Homo sapiens
tctagccatgagatc

SEQ ID NO: 492875 - DNA, 15 bp, Homo sapiens
gtctagccatgagat

SEQ ID NO: 492876 - DNA, 15 bp, Homo sapiens
agtctagccatgaga

SEQ ID NO: 492877 - DNA, 15 bp, Homo sapiens
tagtctagccatgag

SEQ ID NO: 492878 - DNA, 15 bp, Homo sapiens
ctagtctagccatga

SEQ ID NO: 492879 - DNA, 15 bp, Homo sapiens
actagtctagccatg

SEQ ID NO: 492880 - DNA, 15 bp, Homo sapiens
gactagtctagccat

SEQ ID NO: 492881 - DNA, 15 bp, Homo sapiens
ggactagtctagcca

SEQ ID NO: 492882 - DNA, 15 bp, Homo sapiens
tggactagtctagcc

SEQ ID NO: 492883 - DNA, 15 bp, Homo sapiens
ctggactagtctagc

SEQ ID NO: 492884 - DNA, 15 bp, Homo sapiens
tctggactagtctag

SEQ ID NO: 492885 - DNA, 15 bp, Homo sapiens
ctctggactagtcta

SEQ ID NO: 492886 - DNA, 15 bp, Homo sapiens
tctctggactagtct

SEQ ID NO: 492887 - DNA, 15 bp, Homo sapiens
ttctctggactagtc

SEQ ID NO: 492888 - DNA, 15 bp, Homo sapiens
attctctggactagt

SEQ ID NO: 492889 - DNA, 15 bp, Homo sapiens
aattctctggactag

SEQ ID NO: 492890 - DNA, 15 bp, Homo sapiens
taattctctggacta

SEQ ID NO: 492891 - DNA, 15 bp, Homo sapiens
ataattctctggact

SEQ ID NO: 492892 - DNA, 15 bp, Homo sapiens
gataattctctggac

SEQ ID NO: 492893 - DNA, 15 bp, Homo sapiens
agataattctctgga

SEQ ID NO: 492894 - DNA, 15 bp, Homo sapiens
tagataattctctgg

SEQ ID NO: 492895 - DNA, 15 bp, Homo sapiens
atagataattctctg

SEQ ID NO: 492896 - DNA, 15 bp, Homo sapiens
gatagataattctct

SEQ ID NO: 492897 - DNA, 15 bp, Homo sapiens
tgatagataattctc

SEQ ID NO: 492898 - DNA, 15 bp, Homo sapiens
ttgatagataattct

SEQ ID NO: 492899 - DNA, 15 bp, Homo sapiens
cttgatagataattc

SEQ ID NO: 492900 - DNA, 15 bp, Homo sapiens
tcttgatagataatt

SEQ ID NO: 492901 - DNA, 15 bp, Homo sapiens
ttcttgatagataat

SEQ ID NO: 492902 - DNA, 15 bp, Homo sapiens
cttcttgatagataa

SEQ ID NO: 492903 - DNA, 15 bp, Homo sapiens
gcttcttgatagata

SEQ ID NO: 492904 - DNA, 15 bp, Homo sapiens
tgcttcttgatagat

SEQ ID NO: 492905 - DNA, 15 bp, Homo sapiens
ttgcttcttgataga

SEQ ID NO: 492906 - DNA, 15 bp, Homo sapiens
tttgcttcttgatag

SEQ ID NO: 492907 - DNA, 15 bp, Homo sapiens
ttttgcttcttgata

SEQ ID NO: 492908 - DNA, 15 bp, Homo sapiens
cttttgcttcttgat

SEQ ID NO: 492909 - DNA, 15 bp, Homo sapiens
ccttttgcttcttga

SEQ ID NO: 492910 - DNA, 15 bp, Homo sapiens
cccttttgcttcttg

SEQ ID NO: 492911 - DNA, 15 bp, Homo sapiens
tcccttttgcttctt

SEQ ID NO: 492912 - DNA, 15 bp, Homo sapiens
ttcccttttgcttct

SEQ ID NO: 492913 - DNA, 15 bp, Homo sapiens
tttcccttttgcttc

SEQ ID NO: 492914 - DNA, 15 bp, Homo sapiens
gtttcccttttgctt

SEQ ID NO: 492915 - DNA, 15 bp, Homo sapiens
tgtttcccttttgct

SEQ ID NO: 492916 - DNA, 15 bp, Homo sapiens
ctgtttcccttttgc

SEQ ID NO: 492917 - DNA, 15 bp, Homo sapiens
actgtttcccttttg

SEQ ID NO: 492918 - DNA, 15 bp, Homo sapiens
aactgtttccctttt

SEQ ID NO: 492919 - DNA, 15 bp, Homo sapiens
caactgtttcccttt

SEQ ID NO: 492920 - DNA, 15 bp, Homo sapiens
tcaactgtttccctt

SEQ ID NO: 492921 - DNA, 15 bp, Homo sapiens
ctcaactgtttccct

SEQ ID NO: 492922 - DNA, 15 bp, Homo sapiens
cctcaactgtttccc

SEQ ID NO: 492923 - DNA, 15 bp, Homo sapiens
ccctcaactgtttcc

SEQ ID NO: 492924 - DNA, 15 bp, Homo sapiens
accctcaactgtttc

SEQ ID NO: 492925 - DNA, 15 bp, Homo sapiens
gaccctcaactgttt

SEQ ID NO: 492926 - DNA, 15 bp, Homo sapiens
ggaccctcaactgtt

SEQ ID NO: 492927 - DNA, 15 bp, Homo sapiens
aggaccctcaactgt

SEQ ID NO: 492928 - DNA, 15 bp, Homo sapiens
gaggaccctcaactg

SEQ ID NO: 492929 - DNA, 15 bp, Homo sapiens
tgaggaccctcaact

SEQ ID NO: 492930 - DNA, 15 bp, Homo sapiens
ttgaggaccctcaac

SEQ ID NO: 492931 - DNA, 15 bp, Homo sapiens
attgaggaccctcaa

SEQ ID NO: 492932 - DNA, 15 bp, Homo sapiens
gattgaggaccctca

SEQ ID NO: 492933 - DNA, 15 bp, Homo sapiens
agattgaggaccctc

SEQ ID NO: 492934 - DNA, 15 bp, Homo sapiens
tagattgaggaccct

SEQ ID NO: 492935 - DNA, 15 bp, Homo sapiens
ctagattgaggaccc

SEQ ID NO: 492936 - DNA, 15 bp, Homo sapiens
tctagattgaggacc

SEQ ID NO: 492937 - DNA, 15 bp, Homo sapiens
atctagattgaggac

SEQ ID NO: 492938 - DNA, 15 bp, Homo sapiens
aatctagattgagga

SEQ ID NO: 492939 - DNA, 15 bp, Homo sapiens
aaatctagattgagg

SEQ ID NO: 492940 - DNA, 15 bp, Homo sapiens
taaatctagattgag

SEQ ID NO: 492941 - DNA, 15 bp, Homo sapiens
ataaatctagattga

SEQ ID NO: 492942 - DNA, 15 bp, Homo sapiens
aataaatctagattg

SEQ ID NO: 492943 - DNA, 15 bp, Homo sapiens
aaataaatctagatt

SEQ ID NO: 492944 - DNA, 15 bp, Homo sapiens
gaaataaatctagat

SEQ ID NO: 492945 - DNA, 15 bp, Homo sapiens
cgaaataaatctaga

SEQ ID NO: 492946 - DNA, 15 bp, Homo sapiens
tcgaaataaatctag

SEQ ID NO: 492947 - DNA, 15 bp, Homo sapiens
atcgaaataaatcta

SEQ ID NO: 492948 - DNA, 15 bp, Homo sapiens
aatcgaaataaatct

SEQ ID NO: 492949 - DNA, 15 bp, Homo sapiens
gaatcgaaataaatc

SEQ ID NO: 492950 - DNA, 15 bp, Homo sapiens
ggaatcgaaataaat

SEQ ID NO: 492951 - DNA, 15 bp, Homo sapiens
aggaatcgaaataaa

SEQ ID NO: 492952 - DNA, 15 bp, Homo sapiens
gaggaatcgaaataa

SEQ ID NO: 492953 - DNA, 15 bp, Homo sapiens
ggaggaatcgaaata

SEQ ID NO: 492954 - DNA, 15 bp, Homo sapiens
tggaggaatcgaaat

SEQ ID NO: 492955 - DNA, 15 bp, Homo sapiens
ttggaggaatcgaaa

SEQ ID NO: 492956 - DNA, 15 bp, Homo sapiens
attggaggaatcgaa

SEQ ID NO: 492957 - DNA, 15 bp, Homo sapiens
tattggaggaatcga

SEQ ID NO: 492958 - DNA, 15 bp, Homo sapiens
ttattggaggaatcg

SEQ ID NO: 492959 - DNA, 15 bp, Homo sapiens
cttattggaggaatc

SEQ ID NO: 492960 - DNA, 15 bp, Homo sapiens
ccttattggaggaat

SEQ ID NO: 492961 - DNA, 15 bp, Homo sapiens
cccttattggaggaa

SEQ ID NO: 492962 - DNA, 15 bp, Homo sapiens
acccttattggagga

SEQ ID NO: 492963 - DNA, 15 bp, Homo sapiens
aacccttattggagg

SEQ ID NO: 492964 - DNA, 15 bp, Homo sapiens
aaacccttattggag

SEQ ID NO: 492965 - DNA, 15 bp, Homo sapiens
gaaacccttattgga

SEQ ID NO: 492966 - DNA, 15 bp, Homo sapiens
tgaaacccttattgg

SEQ ID NO: 492967 - DNA, 15 bp, Homo sapiens
gtgaaacccttattg

SEQ ID NO: 492968 - DNA, 15 bp, Homo sapiens
ggtgaaacccttatt

SEQ ID NO: 492969 - DNA, 15 bp, Homo sapiens
aggtgaaacccttat

SEQ ID NO: 492970 - DNA, 15 bp, Homo sapiens
gaggtgaaaccctta

SEQ ID NO: 492971 - DNA, 15 bp, Homo sapiens
agaggtgaaaccctt

SEQ ID NO: 492972 - DNA, 15 bp, Homo sapiens
aagaggtgaaaccct

SEQ ID NO: 492973 - DNA, 15 bp, Homo sapiens
caagaggtgaaaccc

SEQ ID NO: 492974 - DNA, 15 bp, Homo sapiens
tcaagaggtgaaacc

SEQ ID NO: 492975 - DNA, 15 bp, Homo sapiens
ttcaagaggtgaaac

SEQ ID NO: 492976 - DNA, 15 bp, Homo sapiens
tttcaagaggtgaaa

SEQ ID NO: 492977 - DNA, 15 bp, Homo sapiens
ttttcaagaggtgaa

SEQ ID NO: 492978 - DNA, 15 bp, Homo sapiens
attttcaagaggtga

SEQ ID NO: 492979 - DNA, 15 bp, Homo sapiens
tattttcaagaggtg

SEQ ID NO: 492980 - DNA, 15 bp, Homo sapiens
atattttcaagaggt

SEQ ID NO: 492981 - DNA, 15 bp, Homo sapiens
gatattttcaagagg

SEQ ID NO: 492982 - DNA, 15 bp, Homo sapiens
tgatattttcaagag

SEQ ID NO: 492983 - DNA, 15 bp, Homo sapiens
ctgatattttcaaga

SEQ ID NO: 492984 - DNA, 15 bp, Homo sapiens
cctgatattttcaag

SEQ ID NO: 492985 - DNA, 15 bp, Homo sapiens
tcctgatattttcaa

SEQ ID NO: 492986 - DNA, 15 bp, Homo sapiens
ctcctgatattttca

SEQ ID NO: 492987 - DNA, 15 bp, Homo sapiens
tctcctgatattttc

SEQ ID NO: 492988 - DNA, 15 bp, Homo sapiens
gtctcctgatatttt

SEQ ID NO: 492989 - DNA, 15 bp, Homo sapiens
agtctcctgatattt

SEQ ID NO: 492990 - DNA, 15 bp, Homo sapiens
aagtctcctgatatt

SEQ ID NO: 492991 - DNA, 15 bp, Homo sapiens
aaagtctcctgatat

SEQ ID NO: 492992 - DNA, 15 bp, Homo sapiens
aaaagtctcctgata

SEQ ID NO: 492993 - DNA, 15 bp, Homo sapiens
aaaaagtctcctgat

SEQ ID NO: 492994 - DNA, 15 bp, Homo sapiens
gaaaaagtctcctga

SEQ ID NO: 492995 - DNA, 15 bp, Homo sapiens
tgaaaaagtctcctg

SEQ ID NO: 492996 - DNA, 15 bp, Homo sapiens
atgaaaaagtctcct

SEQ ID NO: 492997 - DNA, 15 bp, Homo sapiens
aatgaaaaagtctcc

SEQ ID NO: 492998 - DNA, 15 bp, Homo sapiens
caatgaaaaagtctc

SEQ ID NO: 492999 - DNA, 15 bp, Homo sapiens
ccaatgaaaaagtct

SEQ ID NO: 493000 - DNA, 15 bp, Homo sapiens
cccaatgaaaaagtc

SEQ ID NO: 493001 - DNA, 15 bp, Homo sapiens
ccccaatgaaaaagt

SEQ ID NO: 493002 - DNA, 15 bp, Homo sapiens
accccaatgaaaaag

SEQ ID NO: 493003 - DNA, 15 bp, Homo sapiens
caccccaatgaaaaa

SEQ ID NO: 493004 - DNA, 15 bp, Homo sapiens
ccaccccaatgaaaa

SEQ ID NO: 493005 - DNA, 15 bp, Homo sapiens
tccaccccaatgaaa

SEQ ID NO: 493006 - DNA, 15 bp, Homo sapiens
ctccaccccaatgaa

SEQ ID NO: 493007 - DNA, 15 bp, Homo sapiens
actccaccccaatga

SEQ ID NO: 493008 - DNA, 15 bp, Homo sapiens
cactccaccccaatg

SEQ ID NO: 493009 - DNA, 15 bp, Homo sapiens
tcactccaccccaat

SEQ ID NO: 493010 - DNA, 15 bp, Homo sapiens
ttcactccaccccaa

SEQ ID NO: 493011 - DNA, 15 bp, Homo sapiens
tttcactccacccca

SEQ ID NO: 493012 - DNA, 15 bp, Homo sapiens
atttcactccacccc

SEQ ID NO: 493013 - DNA, 15 bp, Homo sapiens
catttcactccaccc

SEQ ID NO: 493014 - DNA, 15 bp, Homo sapiens
acatttcactccacc

SEQ ID NO: 493015 - DNA, 15 bp, Homo sapiens
aacatttcactccac

SEQ ID NO: 493016 - DNA, 15 bp, Homo sapiens
aaacatttcactcca

SEQ ID NO: 493017 - DNA, 15 bp, Homo sapiens
aaaacatttcactcc

SEQ ID NO: 493018 - DNA, 15 bp, Homo sapiens
caaaacatttcactc

SEQ ID NO: 493019 - DNA, 15 bp, Homo sapiens
tcaaaacatttcact

SEQ ID NO: 493020 - DNA, 15 bp, Homo sapiens
atcaaaacatttcac

SEQ ID NO: 493021 - DNA, 15 bp, Homo sapiens
aatcaaaacatttca

SEQ ID NO: 493022 - DNA, 15 bp, Homo sapiens
gaatcaaaacatttc

SEQ ID NO: 493023 - DNA, 15 bp, Homo sapiens
agaatcaaaacattt

SEQ ID NO: 493024 - DNA, 15 bp, Homo sapiens
cagaatcaaaacatt

SEQ ID NO: 493025 - DNA, 15 bp, Homo sapiens
tcagaatcaaaacat

SEQ ID NO: 493026 - DNA, 15 bp, Homo sapiens
ttcagaatcaaaaca

SEQ ID NO: 493027 - DNA, 15 bp, Homo sapiens
gttcagaatcaaaac

SEQ ID NO: 493028 - DNA, 15 bp, Homo sapiens
agttcagaatcaaaa

SEQ ID NO: 493029 - DNA, 15 bp, Homo sapiens
tagttcagaatcaaa

SEQ ID NO: 493030 - DNA, 15 bp, Homo sapiens
atagttcagaatcaa

SEQ ID NO: 493031 - DNA, 15 bp, Homo sapiens
aatagttcagaatca

SEQ ID NO: 493032 - DNA, 15 bp, Homo sapiens
caatagttcagaatc

SEQ ID NO: 493033 - DNA, 15 bp, Homo sapiens
tcaatagttcagaat

SEQ ID NO: 493034 - DNA, 15 bp, Homo sapiens
ttcaatagttcagaa

SEQ ID NO: 493035 - DNA, 15 bp, Homo sapiens
tttcaatagttcaga

SEQ ID NO: 493036 - DNA, 15 bp, Homo sapiens
gtttcaatagttcag

SEQ ID NO: 493037 - DNA, 15 bp, Homo sapiens
tgtttcaatagttca

SEQ ID NO: 493038 - DNA, 15 bp, Homo sapiens
atgtttcaatagttc

SEQ ID NO: 493039 - DNA, 15 bp, Homo sapiens
catgtttcaatagtt

SEQ ID NO: 493040 - DNA, 15 bp, Homo sapiens
ccatgtttcaatagt

SEQ ID NO: 493041 - DNA, 15 bp, Homo sapiens
accatgtttcaatag

SEQ ID NO: 493042 - DNA, 15 bp, Homo sapiens
caccatgtttcaata

SEQ ID NO: 493043 - DNA, 15 bp, Homo sapiens
tcaccatgtttcaat

SEQ ID NO: 493044 - DNA, 15 bp, Homo sapiens
ctcaccatgtttcaa

SEQ ID NO: 493045 - DNA, 15 bp, Homo sapiens
cctcaccatgtttca

SEQ ID NO: 493046 - DNA, 15 bp, Homo sapiens
acctcaccatgtttc

SEQ ID NO: 493047 - DNA, 15 bp, Homo sapiens
aacctcaccatgttt

SEQ ID NO: 493048 - DNA, 15 bp, Homo sapiens
caacctcaccatgtt

SEQ ID NO: 493049 - DNA, 15 bp, Homo sapiens
acaacctcaccatgt

SEQ ID NO: 493050 - DNA, 15 bp, Homo sapiens
cacaacctcaccatg

SEQ ID NO: 493051 - DNA, 15 bp, Homo sapiens
ccacaacctcaccat

SEQ ID NO: 493052 - DNA, 15 bp, Homo sapiens
tccacaacctcacca

SEQ ID NO: 493053 - DNA, 15 bp, Homo sapiens
ttccacaacctcacc

SEQ ID NO: 493054 - DNA, 15 bp, Homo sapiens
cttccacaacctcac

SEQ ID NO: 493055 - DNA, 15 bp, Homo sapiens
tcttccacaacctca

SEQ ID NO: 493056 - DNA, 15 bp, Homo sapiens
atcttccacaacctc

SEQ ID NO: 493057 - DNA, 15 bp, Homo sapiens
tatcttccacaacct

SEQ ID NO: 493058 - DNA, 15 bp, Homo sapiens
ctatcttccacaacc

SEQ ID NO: 493059 - DNA, 15 bp, Homo sapiens
tctatcttccacaac

SEQ ID NO: 493060 - DNA, 15 bp, Homo sapiens
ctctatcttccacaa

SEQ ID NO: 493061 - DNA, 15 bp, Homo sapiens
tctctatcttccaca

SEQ ID NO: 493062 - DNA, 15 bp, Homo sapiens
ttctctatcttccac

SEQ ID NO: 493063 - DNA, 15 bp, Homo sapiens
cttctctatcttcca

SEQ ID NO: 493064 - DNA, 15 bp, Homo sapiens
tcttctctatcttcc

SEQ ID NO: 493065 - DNA, 15 bp, Homo sapiens
ctcttctctatcttc

SEQ ID NO: 493066 - DNA, 15 bp, Homo sapiens
gctcttctctatctt

SEQ ID NO: 493067 - DNA, 15 bp, Homo sapiens
ggctcttctctatct

SEQ ID NO: 493068 - DNA, 15 bp, Homo sapiens
aggctcttctctatc

SEQ ID NO: 493069 - DNA, 15 bp, Homo sapiens
aaggctcttctctat

SEQ ID NO: 493070 - DNA, 15 bp, Homo sapiens
taaggctcttctcta

SEQ ID NO: 493071 - DNA, 15 bp, Homo sapiens
ttaaggctcttctct

SEQ ID NO: 493072 - DNA, 15 bp, Homo sapiens
tttaaggctcttctc

SEQ ID NO: 493073 - DNA, 15 bp, Homo sapiens
atttaaggctcttct

SEQ ID NO: 493074 - DNA, 15 bp, Homo sapiens
aatttaaggctcttc

SEQ ID NO: 493075 - DNA, 15 bp, Homo sapiens
aaatttaaggctctt

SEQ ID NO: 493076 - DNA, 15 bp, Homo sapiens
gaaatttaaggctct

SEQ ID NO: 493077 - DNA, 15 bp, Homo sapiens
agaaatttaaggctc

SEQ ID NO: 493078 - DNA, 15 bp, Homo sapiens
aagaaatttaaggct

SEQ ID NO: 493079 - DNA, 15 bp, Homo sapiens
aaagaaatttaaggc

SEQ ID NO: 493080 - DNA, 15 bp, Homo sapiens
aaaagaaatttaagg

SEQ ID NO: 493081 - DNA, 15 bp, Homo sapiens
taaaagaaatttaag

SEQ ID NO: 493082 - DNA, 15 bp, Homo sapiens
ttaaaagaaatttaa

SEQ ID NO: 493083 - DNA, 15 bp, Homo sapiens
gttaaaagaaattta

SEQ ID NO: 493084 - DNA, 15 bp, Homo sapiens
tgttaaaagaaattt

SEQ ID NO: 493085 - DNA, 15 bp, Homo sapiens
atgttaaaagaaatt

SEQ ID NO: 493086 - DNA, 15 bp, Homo sapiens
tatgttaaaagaaat

SEQ ID NO: 493087 - DNA, 15 bp, Homo sapiens
atatgttaaaagaaa

SEQ ID NO: 493088 - DNA, 15 bp, Homo sapiens
tatatgttaaaagaa

SEQ ID NO: 493089 - DNA, 15 bp, Homo sapiens
ctatatgttaaaaga

SEQ ID NO: 493090 - DNA, 15 bp, Homo sapiens
actatatgttaaaag

SEQ ID NO: 493091 - DNA, 15 bp, Homo sapiens
aactatatgttaaaa

SEQ ID NO: 493092 - DNA, 15 bp, Homo sapiens
aaactatatgttaaa

SEQ ID NO: 493093 - DNA, 15 bp, Homo sapiens
gaaactatatgttaa

SEQ ID NO: 493094 - DNA, 15 bp, Homo sapiens
agaaactatatgtta

SEQ ID NO: 493095 - DNA, 15 bp, Homo sapiens
cagaaactatatgtt

SEQ ID NO: 493096 - DNA, 15 bp, Homo sapiens
acagaaactatatgt

SEQ ID NO: 493097 - DNA, 15 bp, Homo sapiens
tacagaaactatatg

SEQ ID NO: 493098 - DNA, 15 bp, Homo sapiens
ttacagaaactatat

SEQ ID NO: 493099 - DNA, 15 bp, Homo sapiens
attacagaaactata

SEQ ID NO: 493100 - DNA, 15 bp, Homo sapiens
aattacagaaactat

SEQ ID NO: 493101 - DNA, 15 bp, Homo sapiens
taattacagaaacta

SEQ ID NO: 493102 - DNA, 15 bp, Homo sapiens
ttaattacagaaact

SEQ ID NO: 493103 - DNA, 15 bp, Homo sapiens
attaattacagaaac

SEQ ID NO: 493104 - DNA, 15 bp, Homo sapiens
gattaattacagaaa

SEQ ID NO: 493105 - DNA, 15 bp, Homo sapiens
tgattaattacagaa

SEQ ID NO: 493106 - DNA, 15 bp, Homo sapiens
ttgattaattacaga

SEQ ID NO: 493107 - DNA, 15 bp, Homo sapiens
attgattaattacag

SEQ ID NO: 493108 - DNA, 15 bp, Homo sapiens
aattgattaattaca

SEQ ID NO: 493109 - DNA, 15 bp, Homo sapiens
aaattgattaattac

SEQ ID NO: 493110 - DNA, 15 bp, Homo sapiens
taaattgattaatta

SEQ ID NO: 493111 - DNA, 15 bp, Homo sapiens
ctaaattgattaatt

SEQ ID NO: 493112 - DNA, 15 bp, Homo sapiens
cctaaattgattaat

SEQ ID NO: 493113 - DNA, 15 bp, Homo sapiens
tcctaaattgattaa

SEQ ID NO: 493114 - DNA, 15 bp, Homo sapiens
ttcctaaattgatta

SEQ ID NO: 493115 - DNA, 15 bp, Homo sapiens
attcctaaattgatt

SEQ ID NO: 493116 - DNA, 15 bp, Homo sapiens
aattcctaaattgat

SEQ ID NO: 493117 - DNA, 15 bp, Homo sapiens
gaattcctaaattga

SEQ ID NO: 493118 - DNA, 15 bp, Homo sapiens
agaattcctaaattg

SEQ ID NO: 493119 - DNA, 15 bp, Homo sapiens
cagaattcctaaatt

SEQ ID NO: 493120 - DNA, 15 bp, Homo sapiens
acagaattcctaaat

SEQ ID NO: 493121 - DNA, 15 bp, Homo sapiens
aacagaattcctaaa

SEQ ID NO: 493122 - DNA, 15 bp, Homo sapiens
taacagaattcctaa

SEQ ID NO: 493123 - DNA, 15 bp, Homo sapiens
ataacagaattccta

SEQ ID NO: 493124 - DNA, 15 bp, Homo sapiens
cataacagaattcct

SEQ ID NO: 493125 - DNA, 15 bp, Homo sapiens
ccataacagaattcc

SEQ ID NO: 493126 - DNA, 15 bp, Homo sapiens
gccataacagaattc

SEQ ID NO: 493127 - DNA, 15 bp, Homo sapiens
ggccataacagaatt

SEQ ID NO: 493128 - DNA, 15 bp, Homo sapiens
aggccataacagaat

SEQ ID NO: 493129 - DNA, 15 bp, Homo sapiens
taggccataacagaa

SEQ ID NO: 493130 - DNA, 15 bp, Homo sapiens
ctaggccataacaga

SEQ ID NO: 493131 - DNA, 15 bp, Homo sapiens
actaggccataacag

SEQ ID NO: 493132 - DNA, 15 bp, Homo sapiens
aactaggccataaca

SEQ ID NO: 493133 - DNA, 15 bp, Homo sapiens
aaactaggccataac

SEQ ID NO: 493134 - DNA, 15 bp, Homo sapiens
aaaactaggccataa

SEQ ID NO: 493135 - DNA, 15 bp, Homo sapiens
gaaaactaggccata

SEQ ID NO: 493136 - DNA, 15 bp, Homo sapiens
cgaaaactaggccat

SEQ ID NO: 493137 - DNA, 15 bp, Homo sapiens
ccgaaaactaggcca

SEQ ID NO: 493138 - DNA, 15 bp, Homo sapiens
tccgaaaactaggcc

SEQ ID NO: 493139 - DNA, 15 bp, Homo sapiens
ctccgaaaactaggc

SEQ ID NO: 493140 - DNA, 15 bp, Homo sapiens
actccgaaaactagg

SEQ ID NO: 493141 - DNA, 15 bp, Homo sapiens
tactccgaaaactag

SEQ ID NO: 493142 - DNA, 15 bp, Homo sapiens
gtactccgaaaacta

SEQ ID NO: 493143 - DNA, 15 bp, Homo sapiens
agtactccgaaaact

SEQ ID NO: 493144 - DNA, 15 bp, Homo sapiens
aagtactccgaaaac

SEQ ID NO: 493145 - DNA, 15 bp, Homo sapiens
caagtactccgaaaa

SEQ ID NO: 493146 - DNA, 15 bp, Homo sapiens
tcaagtactccgaaa

SEQ ID NO: 493147 - DNA, 15 bp, Homo sapiens
atcaagtactccgaa

SEQ ID NO: 493148 - DNA, 15 bp, Homo sapiens
aatcaagtactccga

SEQ ID NO: 493149 - DNA, 15 bp, Homo sapiens
aaatcaagtactccg

SEQ ID NO: 493150 - DNA, 15 bp, Homo sapiens
tcattaaatcaagta

SEQ ID NO: 493151 - DNA, 15 bp, Homo sapiens
ctcattaaatcaagt

SEQ ID NO: 493152 - DNA, 15 bp, Homo sapiens
actcattaaatcaag

SEQ ID NO: 493153 - DNA, 15 bp, Homo sapiens
aactcattaaatcaa

SEQ ID NO: 493154 - DNA, 15 bp, Homo sapiens
aaactcattaaatca

SEQ ID NO: 493155 - DNA, 15 bp, Homo sapiens
aaaactcattaaatc

SEQ ID NO: 493156 - DNA, 15 bp, Homo sapiens
aaaaactcattaaat

SEQ ID NO: 493157 - DNA, 15 bp, Homo sapiens
taaaaactcattaaa

SEQ ID NO: 493158 - DNA, 15 bp, Homo sapiens
ataaaaactcattaa

SEQ ID NO: 493159 - DNA, 15 bp, Homo sapiens
gataaaaactcatta

SEQ ID NO: 493160 - DNA, 15 bp, Homo sapiens
agataaaaactcatt

SEQ ID NO: 493161 - DNA, 15 bp, Homo sapiens
cagataaaaactcat

SEQ ID NO: 493162 - DNA, 15 bp, Homo sapiens
ccagataaaaactca

SEQ ID NO: 493163 - DNA, 15 bp, Homo sapiens
accagataaaaactc

SEQ ID NO: 493164 - DNA, 15 bp, Homo sapiens
taccagataaaaact

SEQ ID NO: 493165 - DNA, 15 bp, Homo sapiens
gtaccagataaaaac

SEQ ID NO: 493166 - DNA, 15 bp, Homo sapiens
agtaccagataaaaa

SEQ ID NO: 493167 - DNA, 15 bp, Homo sapiens
tagtaccagataaaa

SEQ ID NO: 493168 - DNA, 15 bp, Homo sapiens
ctagtaccagataaa

SEQ ID NO: 493169 - DNA, 15 bp, Homo sapiens
tctagtaccagataa

SEQ ID NO: 493170 - DNA, 15 bp, Homo sapiens
ttctagtaccagata

SEQ ID NO: 493171 - DNA, 15 bp, Homo sapiens
cttctagtaccagat

SEQ ID NO: 493172 - DNA, 15 bp, Homo sapiens
gcttctagtaccaga

SEQ ID NO: 493173 - DNA, 15 bp, Homo sapiens
tgcttctagtaccag

SEQ ID NO: 493174 - DNA, 15 bp, Homo sapiens
atgcttctagtacca

SEQ ID NO: 493175 - DNA, 15 bp, Homo sapiens
tatgcttctagtacc

SEQ ID NO: 493176 - DNA, 15 bp, Homo sapiens
ctatgcttctagtac

SEQ ID NO: 493177 - DNA, 15 bp, Homo sapiens
gctatgcttctagta

SEQ ID NO: 493178 - DNA, 15 bp, Homo sapiens
agctatgcttctagt

SEQ ID NO: 493179 - DNA, 15 bp, Homo sapiens
cagctatgcttctag

SEQ ID NO: 493180 - DNA, 15 bp, Homo sapiens
acagctatgcttcta

SEQ ID NO: 493181 - DNA, 15 bp, Homo sapiens
cacagctatgcttct

SEQ ID NO: 493182 - DNA, 15 bp, Homo sapiens
tcacagctatgcttc

SEQ ID NO: 493183 - DNA, 15 bp, Homo sapiens
ttcacagctatgctt

SEQ ID NO: 493184 - DNA, 15 bp, Homo sapiens
tttcacagctatgct

SEQ ID NO: 493185 - DNA, 15 bp, Homo sapiens
ctttcacagctatgc

SEQ ID NO: 493186 - DNA, 15 bp, Homo sapiens
tctttcacagctatg

SEQ ID NO: 493187 - DNA, 15 bp, Homo sapiens
gtctttcacagctat

SEQ ID NO: 493188 - DNA, 15 bp, Homo sapiens
ggtctttcacagcta

SEQ ID NO: 493189 - DNA, 15 bp, Homo sapiens
aggtctttcacagct

SEQ ID NO: 493190 - DNA, 15 bp, Homo sapiens
aaggtctttcacagc

SEQ ID NO: 493191 - DNA, 15 bp, Homo sapiens
taaggtctttcacag

SEQ ID NO: 493192 - DNA, 15 bp, Homo sapiens
ttaaggtctttcaca

SEQ ID NO: 493193 - DNA, 15 bp, Homo sapiens
tttaaggtctttcac

SEQ ID NO: 493194 - DNA, 15 bp, Homo sapiens
atttaaggtctttca

SEQ ID NO: 493195 - DNA, 15 bp, Homo sapiens
catttaaggtctttc

SEQ ID NO: 493196 - DNA, 15 bp, Homo sapiens
acatttaaggtcttt

SEQ ID NO: 493197 - DNA, 15 bp, Homo sapiens
tacatttaaggtctt

SEQ ID NO: 493198 - DNA, 15 bp, Homo sapiens
atacatttaaggtct

SEQ ID NO: 493199 - DNA, 15 bp, Homo sapiens
catacatttaaggtc

SEQ ID NO: 493200 - DNA, 15 bp, Homo sapiens
tcatacatttaaggt

SEQ ID NO: 493201 - DNA, 15 bp, Homo sapiens
ttcatacatttaagg

SEQ ID NO: 493202 - DNA, 15 bp, Homo sapiens
tttcatacatttaag

SEQ ID NO: 493203 - DNA, 15 bp, Homo sapiens
gtttcatacatttaa

SEQ ID NO: 493204 - DNA, 15 bp, Homo sapiens
agtttcatacattta

SEQ ID NO: 493205 - DNA, 15 bp, Homo sapiens
gagtttcatacattt

SEQ ID NO: 493206 - DNA, 15 bp, Homo sapiens
tgagtttcatacatt

SEQ ID NO: 493207 - DNA, 15 bp, Homo sapiens
atgagtttcatacat

SEQ ID NO: 493208 - DNA, 15 bp, Homo sapiens
tatgagtttcataca

SEQ ID NO: 493209 - DNA, 15 bp, Homo sapiens
atatgagtttcatac

SEQ ID NO: 493210 - DNA, 15 bp, Homo sapiens
gatatgagtttcata

SEQ ID NO: 493211 - DNA, 15 bp, Homo sapiens
ggatatgagtttcat

SEQ ID NO: 493212 - DNA, 15 bp, Homo sapiens
aggatatgagtttca

SEQ ID NO: 493213 - DNA, 15 bp, Homo sapiens
aaggatatgagtttc

SEQ ID NO: 493214 - DNA, 15 bp, Homo sapiens
aaaggatatgagttt

SEQ ID NO: 493215 - DNA, 15 bp, Homo sapiens
aaaaggatatgagtt

SEQ ID NO: 493216 - DNA, 15 bp, Homo sapiens
gaaaaggatatgagt

SEQ ID NO: 493217 - DNA, 15 bp, Homo sapiens
tgaaaaggatatgag

SEQ ID NO: 493218 - DNA, 15 bp, Homo sapiens
ctgaaaaggatatga

SEQ ID NO: 493219 - DNA, 15 bp, Homo sapiens
actgaaaaggatatg

SEQ ID NO: 493220 - DNA, 15 bp, Homo sapiens
tactgaaaaggatat

SEQ ID NO: 493221 - DNA, 15 bp, Homo sapiens
atactgaaaaggata

SEQ ID NO: 493222 - DNA, 15 bp, Homo sapiens
aatactgaaaaggat

SEQ ID NO: 493223 - DNA, 15 bp, Homo sapiens
aaatactgaaaagga

SEQ ID NO: 493224 - DNA, 15 bp, Homo sapiens
taaatactgaaaagg

SEQ ID NO: 493225 - DNA, 15 bp, Homo sapiens
gtaaatactgaaaag

SEQ ID NO: 493226 - DNA, 15 bp, Homo sapiens
tgtaaatactgaaaa

SEQ ID NO: 493227 - DNA, 15 bp, Homo sapiens
ctgtaaatactgaaa

SEQ ID NO: 493228 - DNA, 15 bp, Homo sapiens
gctgtaaatactgaa

SEQ ID NO: 493229 - DNA, 15 bp, Homo sapiens
agctgtaaatactga

SEQ ID NO: 493230 - DNA, 15 bp, Homo sapiens
aagctgtaaatactg

SEQ ID NO: 493231 - DNA, 15 bp, Homo sapiens
caagctgtaaatact

SEQ ID NO: 493232 - DNA, 15 bp, Homo sapiens
acaagctgtaaatac

SEQ ID NO: 493233 - DNA, 15 bp, Homo sapiens
aacaagctgtaaata

SEQ ID NO: 493234 - DNA, 15 bp, Homo sapiens
taacaagctgtaaat

SEQ ID NO: 493235 - DNA, 15 bp, Homo sapiens
ataacaagctgtaaa

SEQ ID NO: 493236 - DNA, 15 bp, Homo sapiens
aataacaagctgtaa

SEQ ID NO: 493237 - DNA, 15 bp, Homo sapiens
taataacaagctgta

SEQ ID NO: 493238 - DNA, 15 bp, Homo sapiens
ttaataacaagctgt

SEQ ID NO: 493239 - DNA, 15 bp, Homo sapiens
attaataacaagctg

SEQ ID NO: 493240 - DNA, 15 bp, Homo sapiens
tattaataacaagct

SEQ ID NO: 493241 - DNA, 15 bp, Homo sapiens
ttattaataacaagc

SEQ ID NO: 493242 - DNA, 15 bp, Homo sapiens
tttattaataacaag

SEQ ID NO: 493243 - DNA, 15 bp, Homo sapiens
atttattaataacaa

SEQ ID NO: 493244 - DNA, 15 bp, Homo sapiens
aatttattaataaca

SEQ ID NO: 493245 - DNA, 15 bp, Homo sapiens
caatttattaataac

SEQ ID NO: 493246 - DNA, 15 bp, Homo sapiens
acaatttattaataa

SEQ ID NO: 493247 - DNA, 15 bp, Homo sapiens
gacaatttattaata

SEQ ID NO: 493248 - DNA, 15 bp, Homo sapiens
agacaatttattaat

SEQ ID NO: 493249 - DNA, 15 bp, Homo sapiens
gagacaatttattaa

SEQ ID NO: 493250 - DNA, 15 bp, Homo sapiens
agagacaatttatta

SEQ ID NO: 493251 - DNA, 15 bp, Homo sapiens
aagagacaatttatt

SEQ ID NO: 493252 - DNA, 15 bp, Homo sapiens
aaagagacaatttat

SEQ ID NO: 493253 - DNA, 15 bp, Homo sapiens
taaagagacaattta

SEQ ID NO: 493254 - DNA, 15 bp, Homo sapiens
ctaaagagacaattt

SEQ ID NO: 493255 - DNA, 15 bp, Homo sapiens
tctaaagagacaatt

SEQ ID NO: 493256 - DNA, 15 bp, Homo sapiens
ttctaaagagacaat

SEQ ID NO: 493257 - DNA, 15 bp, Homo sapiens
tttctaaagagacaa

SEQ ID NO: 493258 - DNA, 15 bp, Homo sapiens
atttctaaagagaca

SEQ ID NO: 493259 - DNA, 15 bp, Homo sapiens
tatttctaaagagac

SEQ ID NO: 493260 - DNA, 15 bp, Homo sapiens
ctatttctaaagaga

SEQ ID NO: 493261 - DNA, 15 bp, Homo sapiens
tctatttctaaagag

SEQ ID NO: 493262 - DNA, 15 bp, Homo sapiens
gtctatttctaaaga

SEQ ID NO: 493263 - DNA, 15 bp, Homo sapiens
agtctatttctaaag

SEQ ID NO: 493264 - DNA, 15 bp, Homo sapiens
tagtctatttctaaa

SEQ ID NO: 493265 - DNA, 15 bp, Homo sapiens
ttagtctatttctaa

SEQ ID NO: 493266 - DNA, 15 bp, Homo sapiens
attagtctatttcta

SEQ ID NO: 493267 - DNA, 15 bp, Homo sapiens
cattagtctatttct

SEQ ID NO: 493268 - DNA, 15 bp, Homo sapiens
ccattagtctatttc

SEQ ID NO: 493269 - DNA, 15 bp, Homo sapiens
accattagtctattt

SEQ ID NO: 493270 - DNA, 15 bp, Homo sapiens
caccattagtctatt

SEQ ID NO: 493271 - DNA, 15 bp, Homo sapiens
tcaccattagtctat

SEQ ID NO: 493272 - DNA, 15 bp, Homo sapiens
ttcaccattagtcta

SEQ ID NO: 493273 - DNA, 15 bp, Homo sapiens
cttcaccattagtct

SEQ ID NO: 493274 - DNA, 15 bp, Homo sapiens
acttcaccattagtc

SEQ ID NO: 493275 - DNA, 15 bp, Homo sapiens
cacttcaccattagt

SEQ ID NO: 493276 - DNA, 15 bp, Homo sapiens
ccacttcaccattag

SEQ ID NO: 493277 - DNA, 15 bp, Homo sapiens
cccacttcaccatta

SEQ ID NO: 493278 - DNA, 15 bp, Homo sapiens
acccacttcaccatt

SEQ ID NO: 493279 - DNA, 15 bp, Homo sapiens
aacccacttcaccat

SEQ ID NO: 493280 - DNA, 15 bp, Homo sapiens
aaacccacttcacca

SEQ ID NO: 493281 - DNA, 15 bp, Homo sapiens
taaacccacttcacc

SEQ ID NO: 493282 - DNA, 15 bp, Homo sapiens
ataaacccacttcac

SEQ ID NO: 493283 - DNA, 15 bp, Homo sapiens
aataaacccacttca

SEQ ID NO: 493284 - DNA, 15 bp, Homo sapiens
gaataaacccacttc

SEQ ID NO: 493285 - DNA, 15 bp, Homo sapiens
tgaataaacccactt

SEQ ID NO: 493286 - DNA, 15 bp, Homo sapiens
gtgaataaacccact

SEQ ID NO: 493287 - DNA, 15 bp, Homo sapiens
tgtgaataaacccac

SEQ ID NO: 493288 - DNA, 15 bp, Homo sapiens
atgtgaataaaccca

SEQ ID NO: 493289 - DNA, 15 bp, Homo sapiens
catgtgaataaaccc

SEQ ID NO: 493290 - DNA, 15 bp, Homo sapiens
acatgtgaataaacc

SEQ ID NO: 493291 - DNA, 15 bp, Homo sapiens
cacatgtgaataaac

SEQ ID NO: 493292 - DNA, 15 bp, Homo sapiens
tcacatgtgaataaa

SEQ ID NO: 493293 - DNA, 15 bp, Homo sapiens
gtcacatgtgaataa

SEQ ID NO: 493294 - DNA, 15 bp, Homo sapiens
agtcacatgtgaata

SEQ ID NO: 493295 - DNA, 15 bp, Homo sapiens
aagtcacatgtgaat

SEQ ID NO: 493296 - DNA, 15 bp, Homo sapiens
taagtcacatgtgaa

SEQ ID NO: 493297 - DNA, 15 bp, Homo sapiens
ataagtcacatgtga

SEQ ID NO: 493298 - DNA, 15 bp, Homo sapiens
aataagtcacatgtg

SEQ ID NO: 493299 - DNA, 15 bp, Homo sapiens
aaataagtcacatgt

SEQ ID NO: 493300 - DNA, 15 bp, Homo sapiens
caaataagtcacatg

SEQ ID NO: 493301 - DNA, 15 bp, Homo sapiens
tcaaataagtcacat

SEQ ID NO: 493302 - DNA, 15 bp, Homo sapiens
atcaaataagtcaca

SEQ ID NO: 493303 - DNA, 15 bp, Homo sapiens
tatcaaataagtcac

SEQ ID NO: 493304 - DNA, 15 bp, Homo sapiens
atatcaaataagtca

SEQ ID NO: 493305 - DNA, 15 bp, Homo sapiens
catatcaaataagtc

SEQ ID NO: 493306 - DNA, 15 bp, Homo sapiens
acatatcaaataagt

SEQ ID NO: 493307 - DNA, 15 bp, Homo sapiens
aacatatcaaataag

SEQ ID NO: 493308 - DNA, 15 bp, Homo sapiens
taacatatcaaataa

SEQ ID NO: 493309 - DNA, 15 bp, Homo sapiens
ttaacatatcaaata

SEQ ID NO: 493310 - DNA, 15 bp, Homo sapiens
attaacatatcaaat

SEQ ID NO: 493311 - DNA, 15 bp, Homo sapiens
cattaacatatcaaa

SEQ ID NO: 493312 - DNA, 15 bp, Homo sapiens
acattaacatatcaa

SEQ ID NO: 493313 - DNA, 15 bp, Homo sapiens
tacattaacatatca

SEQ ID NO: 493314 - DNA, 15 bp, Homo sapiens
ctacattaacatatc

SEQ ID NO: 493315 - DNA, 15 bp, Homo sapiens
actacattaacatat

SEQ ID NO: 493316 - DNA, 15 bp, Homo sapiens
cactacattaacata

SEQ ID NO: 493317 - DNA, 15 bp, Homo sapiens
ccactacattaacat

SEQ ID NO: 493318 - DNA, 15 bp, Homo sapiens
tccactacattaaca

SEQ ID NO: 493319 - DNA, 15 bp, Homo sapiens
ttccactacattaac

SEQ ID NO: 493320 - DNA, 15 bp, Homo sapiens
attccactacattaa

SEQ ID NO: 493321 - DNA, 15 bp, Homo sapiens
aattccactacatta

SEQ ID NO: 493322 - DNA, 15 bp, Homo sapiens
aaattccactacatt

SEQ ID NO: 493323 - DNA, 15 bp, Homo sapiens
caaattccactacat

SEQ ID NO: 493324 - DNA, 15 bp, Homo sapiens
ccaaattccactaca

SEQ ID NO: 493325 - DNA, 15 bp, Homo sapiens
gccaaattccactac

SEQ ID NO: 493326 - DNA, 15 bp, Homo sapiens
tgccaaattccacta

SEQ ID NO: 493327 - DNA, 15 bp, Homo sapiens
atgccaaattccact

SEQ ID NO: 493328 - DNA, 15 bp, Homo sapiens
aatgccaaattccac

SEQ ID NO: 493329 - DNA, 15 bp, Homo sapiens
taatgccaaattcca

SEQ ID NO: 493330 - DNA, 15 bp, Homo sapiens
ataatgccaaattcc

SEQ ID NO: 493331 - DNA, 15 bp, Homo sapiens
aataatgccaaattc

SEQ ID NO: 493332 - DNA, 15 bp, Homo sapiens
gaataatgccaaatt

SEQ ID NO: 493333 - DNA, 15 bp, Homo sapiens
ggaataatgccaaat

SEQ ID NO: 493334 - DNA, 15 bp, Homo sapiens
tggaataatgccaaa

SEQ ID NO: 493335 - DNA, 15 bp, Homo sapiens
ttggaataatgccaa

SEQ ID NO: 493336 - DNA, 15 bp, Homo sapiens
tttggaataatgcca

SEQ ID NO: 493337 - DNA, 15 bp, Homo sapiens
ctttggaataatgcc

SEQ ID NO: 493338 - DNA, 15 bp, Homo sapiens
tctttggaataatgc

SEQ ID NO: 493339 - DNA, 15 bp, Homo sapiens
atctttggaataatg

SEQ ID NO: 493340 - DNA, 15 bp, Homo sapiens
tatctttggaataat

SEQ ID NO: 493341 - DNA, 15 bp, Homo sapiens
gtatctttggaataa

SEQ ID NO: 493342 - DNA, 15 bp, Homo sapiens
tgtatctttggaata

SEQ ID NO: 493343 - DNA, 15 bp, Homo sapiens
ctgtatctttggaat

SEQ ID NO: 493344 - DNA, 15 bp, Homo sapiens
tctgtatctttggaa

SEQ ID NO: 493345 - DNA, 15 bp, Homo sapiens
ttctgtatctttgga

SEQ ID NO: 493346 - DNA, 15 bp, Homo sapiens
tttctgtatctttgg

SEQ ID NO: 493347 - DNA, 15 bp, Homo sapiens
ctttctgtatctttg

SEQ ID NO: 493348 - DNA, 15 bp, Homo sapiens
tctttctgtatcttt

SEQ ID NO: 493349 - DNA, 15 bp, Homo sapiens
ctctttctgtatctt

SEQ ID NO: 493350 - DNA, 15 bp, Homo sapiens
tctctttctgtatct

SEQ ID NO: 493351 - DNA, 15 bp, Homo sapiens
atctctttctgtatc

SEQ ID NO: 493352 - DNA, 15 bp, Homo sapiens
aatctctttctgtat

SEQ ID NO: 493353 - DNA, 15 bp, Homo sapiens
taatctctttctgta

SEQ ID NO: 493354 - DNA, 15 bp, Homo sapiens
ctaatctctttctgt

SEQ ID NO: 493355 - DNA, 15 bp, Homo sapiens
tctaatctctttctg

SEQ ID NO: 493356 - DNA, 15 bp, Homo sapiens
gtctaatctctttct

SEQ ID NO: 493357 - DNA, 15 bp, Homo sapiens
agtctaatctctttc

SEQ ID NO: 493358 - DNA, 15 bp, Homo sapiens
aagtctaatctcttt

SEQ ID NO: 493359 - DNA, 15 bp, Homo sapiens
gaagtctaatctctt

SEQ ID NO: 493360 - DNA, 15 bp, Homo sapiens
tgaagtctaatctct

SEQ ID NO: 493361 - DNA, 15 bp, Homo sapiens
ctgaagtctaatctc

SEQ ID NO: 493362 - DNA, 15 bp, Homo sapiens
tctgaagtctaatct

SEQ ID NO: 493363 - DNA, 15 bp, Homo sapiens
gtctgaagtctaatc

SEQ ID NO: 493364 - DNA, 15 bp, Homo sapiens
agtctgaagtctaat

SEQ ID NO: 493365 - DNA, 15 bp, Homo sapiens
aagtctgaagtctaa

SEQ ID NO: 493366 - DNA, 15 bp, Homo sapiens
aaagtctgaagtcta

SEQ ID NO: 493367 - DNA, 15 bp, Homo sapiens
gaaagtctgaagtct

SEQ ID NO: 493368 - DNA, 15 bp, Homo sapiens
tgaaagtctgaagtc

SEQ ID NO: 493369 - DNA, 15 bp, Homo sapiens
atgaaagtctgaagt

SEQ ID NO: 493370 - DNA, 15 bp, Homo sapiens
catgaaagtctgaag

SEQ ID NO: 493371 - DNA, 15 bp, Homo sapiens
ccatgaaagtctgaa

SEQ ID NO: 493372 - DNA, 15 bp, Homo sapiens
gccatgaaagtctga

SEQ ID NO: 493373 - DNA, 15 bp, Homo sapiens
ggccatgaaagtctg

SEQ ID NO: 493374 - DNA, 15 bp, Homo sapiens
aggccatgaaagtct

SEQ ID NO: 493375 - DNA, 15 bp, Homo sapiens
gaggccatgaaagtc

SEQ ID NO: 493376 - DNA, 15 bp, Homo sapiens
cgaggccatgaaagt

SEQ ID NO: 493377 - DNA, 15 bp, Homo sapiens
gcgaggccatgaaag

SEQ ID NO: 493378 - DNA, 15 bp, Homo sapiens
ggcgaggccatgaaa

SEQ ID NO: 493379 - DNA, 15 bp, Homo sapiens
aggcgaggccatgaa

SEQ ID NO: 493380 - DNA, 15 bp, Homo sapiens
taggcgaggccatga

SEQ ID NO: 493381 - DNA, 15 bp, Homo sapiens
ataggcgaggccatg

SEQ ID NO: 493382 - DNA, 15 bp, Homo sapiens
cataggcgaggccat

SEQ ID NO: 493383 - DNA, 15 bp, Homo sapiens
ccataggcgaggcca

SEQ ID NO: 493384 - DNA, 15 bp, Homo sapiens
accataggcgaggcc

SEQ ID NO: 493385 - DNA, 15 bp, Homo sapiens
taccataggcgaggc

SEQ ID NO: 493386 - DNA, 15 bp, Homo sapiens
ataccataggcgagg

SEQ ID NO: 493387 - DNA, 15 bp, Homo sapiens
tataccataggcgag

SEQ ID NO: 493388 - DNA, 15 bp, Homo sapiens
ttataccataggcga

SEQ ID NO: 493389 - DNA, 15 bp, Homo sapiens
attataccataggcg

SEQ ID NO: 493390 - DNA, 15 bp, Homo sapiens
gattataccataggc

SEQ ID NO: 493391 - DNA, 15 bp, Homo sapiens
agattataccatagg

SEQ ID NO: 493392 - DNA, 15 bp, Homo sapiens
gagattataccatag

SEQ ID NO: 493393 - DNA, 15 bp, Homo sapiens
ggagattataccata

SEQ ID NO: 493394 - DNA, 15 bp, Homo sapiens
tggagattataccat

SEQ ID NO: 493395 - DNA, 15 bp, Homo sapiens
ctggagattatacca

SEQ ID NO: 493396 - DNA, 15 bp, Homo sapiens
tctggagattatacc

SEQ ID NO: 493397 - DNA, 15 bp, Homo sapiens
ttctggagattatac

SEQ ID NO: 493398 - DNA, 15 bp, Homo sapiens
attctggagattata

SEQ ID NO: 493399 - DNA, 15 bp, Homo sapiens
cattctggagattat

SEQ ID NO: 493400 - DNA, 15 bp, Homo sapiens
acattctggagatta

SEQ ID NO: 493401 - DNA, 15 bp, Homo sapiens
cacattctggagatt

SEQ ID NO: 493402 - DNA, 15 bp, Homo sapiens
tcacattctggagat

SEQ ID NO: 493403 - DNA, 15 bp, Homo sapiens
ctcacattctggaga

SEQ ID NO: 493404 - DNA, 15 bp, Homo sapiens
actcacattctggag

SEQ ID NO: 493405 - DNA, 15 bp, Homo sapiens
tactcacattctgga

SEQ ID NO: 493406 - DNA, 15 bp, Homo sapiens
atactcacattctgg

SEQ ID NO: 493407 - DNA, 15 bp, Homo sapiens
catactcacattctg

SEQ ID NO: 493408 - DNA, 15 bp, Homo sapiens
tcatactcacattct

SEQ ID NO: 493409 - DNA, 15 bp, Homo sapiens
ctcatactcacattc

SEQ ID NO: 493410 - DNA, 15 bp, Homo sapiens
cctcatactcacatt

SEQ ID NO: 493411 - DNA, 15 bp, Homo sapiens
tcctcatactcacat

SEQ ID NO: 493412 - DNA, 15 bp, Homo sapiens
ttcctcatactcaca

SEQ ID NO: 493413 - DNA, 15 bp, Homo sapiens
attcctcatactcac

SEQ ID NO: 493414 - DNA, 15 bp, Homo sapiens
gattcctcatactca

SEQ ID NO: 493415 - DNA, 15 bp, Homo sapiens
ggattcctcatactc

SEQ ID NO: 493416 - DNA, 15 bp, Homo sapiens
tggattcctcatact

SEQ ID NO: 493417 - DNA, 15 bp, Homo sapiens
ctggattcctcatac

SEQ ID NO: 493418 - DNA, 15 bp, Homo sapiens
actggattcctcata

SEQ ID NO: 493419 - DNA, 15 bp, Homo sapiens
tactggattcctcat

SEQ ID NO: 493420 - DNA, 15 bp, Homo sapiens
ttactggattcctca

SEQ ID NO: 493421 - DNA, 15 bp, Homo sapiens
attactggattcctc

SEQ ID NO: 493422 - DNA, 15 bp, Homo sapiens
cattactggattcct

SEQ ID NO: 493423 - DNA, 15 bp, Homo sapiens
tcattactggattcc

SEQ ID NO: 493424 - DNA, 15 bp, Homo sapiens
ttcattactggattc

SEQ ID NO: 493425 - DNA, 15 bp, Homo sapiens
attcattactggatt

SEQ ID NO: 493426 - DNA, 15 bp, Homo sapiens
aattcattactggat

SEQ ID NO: 493427 - DNA, 15 bp, Homo sapiens
gaattcattactgga

SEQ ID NO: 493428 - DNA, 15 bp, Homo sapiens
tgaattcattactgg

SEQ ID NO: 493429 - DNA, 15 bp, Homo sapiens
atgaattcattactg

SEQ ID NO: 493430 - DNA, 15 bp, Homo sapiens
tatgaattcattact

SEQ ID NO: 493431 - DNA, 15 bp, Homo sapiens
ctatgaattcattac

SEQ ID NO: 493432 - DNA, 15 bp, Homo sapiens
actatgaattcatta

SEQ ID NO: 493433 - DNA, 15 bp, Homo sapiens
cactatgaattcatt

SEQ ID NO: 493434 - DNA, 15 bp, Homo sapiens
gcactatgaattcat

SEQ ID NO: 493435 - DNA, 15 bp, Homo sapiens
ggcactatgaattca

SEQ ID NO: 493436 - DNA, 15 bp, Homo sapiens
gggcactatgaattc

SEQ ID NO: 493437 - DNA, 15 bp, Homo sapiens
agggcactatgaatt

SEQ ID NO: 493438 - DNA, 15 bp, Homo sapiens
cagggcactatgaat

SEQ ID NO: 493439 - DNA, 15 bp, Homo sapiens
ccagggcactatgaa

SEQ ID NO: 493440 - DNA, 15 bp, Homo sapiens
accagggcactatga

SEQ ID NO: 493441 - DNA, 15 bp, Homo sapiens
taccagggcactatg

SEQ ID NO: 493442 - DNA, 15 bp, Homo sapiens
ctaccagggcactat

SEQ ID NO: 493443 - DNA, 15 bp, Homo sapiens
cctaccagggcacta

SEQ ID NO: 493444 - DNA, 15 bp, Homo sapiens
gcctaccagggcact

SEQ ID NO: 493445 - DNA, 15 bp, Homo sapiens
tgcctaccagggcac

SEQ ID NO: 493446 - DNA, 15 bp, Homo sapiens
atgcctaccagggca

SEQ ID NO: 493447 - DNA, 15 bp, Homo sapiens
tatgcctaccagggc

SEQ ID NO: 493448 - DNA, 15 bp, Homo sapiens
ctatgcctaccaggg

SEQ ID NO: 493449 - DNA, 15 bp, Homo sapiens
actatgcctaccagg

SEQ ID NO: 493450 - DNA, 15 bp, Homo sapiens
gactatgcctaccag

SEQ ID NO: 493451 - DNA, 15 bp, Homo sapiens
tgactatgcctacca

SEQ ID NO: 493452 - DNA, 15 bp, Homo sapiens
gtgactatgcctacc

SEQ ID NO: 493453 - DNA, 15 bp, Homo sapiens
agtgactatgcctac

SEQ ID NO: 493454 - DNA, 15 bp, Homo sapiens
gagtgactatgccta

SEQ ID NO: 493455 - DNA, 15 bp, Homo sapiens
agagtgactatgcct

SEQ ID NO: 493456 - DNA, 15 bp, Homo sapiens
aagagtgactatgcc

SEQ ID NO: 493457 - DNA, 15 bp, Homo sapiens
caagagtgactatgc

SEQ ID NO: 493458 - DNA, 15 bp, Homo sapiens
acaagagtgactatg

SEQ ID NO: 493459 - DNA, 15 bp, Homo sapiens
cacaagagtgactat

SEQ ID NO: 493460 - DNA, 15 bp, Homo sapiens
tcacaagagtgacta

SEQ ID NO: 493461 - DNA, 15 bp, Homo sapiens
gtcacaagagtgact

SEQ ID NO: 493462 - DNA, 15 bp, Homo sapiens
tgtcacaagagtgac

SEQ ID NO: 493463 - DNA, 15 bp, Homo sapiens
atgtcacaagagtga

SEQ ID NO: 493464 - DNA, 15 bp, Homo sapiens
tatgtcacaagagtg

SEQ ID NO: 493465 - DNA, 15 bp, Homo sapiens
gtatgtcacaagagt

SEQ ID NO: 493466 - DNA, 15 bp, Homo sapiens
agtatgtcacaagag

SEQ ID NO: 493467 - DNA, 15 bp, Homo sapiens
aagtatgtcacaaga

SEQ ID NO: 493468 - DNA, 15 bp, Homo sapiens
caagtatgtcacaag

SEQ ID NO: 493469 - DNA, 15 bp, Homo sapiens
ccaagtatgtcacaa

SEQ ID NO: 493470 - DNA, 15 bp, Homo sapiens
accaagtatgtcaca

SEQ ID NO: 493471 - DNA, 15 bp, Homo sapiens
caccaagtatgtcac

SEQ ID NO: 493472 - DNA, 15 bp, Homo sapiens
acaccaagtatgtca

SEQ ID NO: 493473 - DNA, 15 bp, Homo sapiens
tacaccaagtatgtc

SEQ ID NO: 493474 - DNA, 15 bp, Homo sapiens
atacaccaagtatgt

SEQ ID NO: 493475 - DNA, 15 bp, Homo sapiens
tatacaccaagtatg

SEQ ID NO: 493476 - DNA, 15 bp, Homo sapiens
atatacaccaagtat

SEQ ID NO: 493477 - DNA, 15 bp, Homo sapiens
tatatacaccaagta

SEQ ID NO: 493478 - DNA, 15 bp, Homo sapiens
gtatatacaccaagt

SEQ ID NO: 493479 - DNA, 15 bp, Homo sapiens
tgtatatacaccaag

SEQ ID NO: 493480 - DNA, 15 bp, Homo sapiens
atgtatatacaccaa

SEQ ID NO: 493481 - DNA, 15 bp, Homo sapiens
tatgtatatacacca

SEQ ID NO: 493482 - DNA, 15 bp, Homo sapiens
gtatgtatatacacc

SEQ ID NO: 493483 - DNA, 15 bp, Homo sapiens
ggtatgtatatacac

SEQ ID NO: 493484 - DNA, 15 bp, Homo sapiens
tggtatgtatataca

SEQ ID NO: 493485 - DNA, 15 bp, Homo sapiens
ctggtatgtatatac

SEQ ID NO: 493486 - DNA, 15 bp, Homo sapiens
tctggtatgtatata

SEQ ID NO: 493487 - DNA, 15 bp, Homo sapiens
ctctggtatgtatat

SEQ ID NO: 493488 - DNA, 15 bp, Homo sapiens
actctggtatgtata

SEQ ID NO: 493489 - DNA, 15 bp, Homo sapiens
aactctggtatgtat

SEQ ID NO: 493490 - DNA, 15 bp, Homo sapiens
taactctggtatgta

SEQ ID NO: 493491 - DNA, 15 bp, Homo sapiens
ttaactctggtatgt

SEQ ID NO: 493492 - DNA, 15 bp, Homo sapiens
attaactctggtatg

SEQ ID NO: 493493 - DNA, 15 bp, Homo sapiens
aattaactctggtat

SEQ ID NO: 493494 - DNA, 15 bp, Homo sapiens
taattaactctggta

SEQ ID NO: 493495 - DNA, 15 bp, Homo sapiens
gtaattaactctggt

SEQ ID NO: 493496 - DNA, 15 bp, Homo sapiens
agtaattaactctgg

SEQ ID NO: 493497 - DNA, 15 bp, Homo sapiens
cagtaattaactctg

SEQ ID NO: 493498 - DNA, 15 bp, Homo sapiens
ccagtaattaactct

SEQ ID NO: 493499 - DNA, 15 bp, Homo sapiens
accagtaattaactc

SEQ ID NO: 493500 - DNA, 15 bp, Homo sapiens
gaccagtaattaact

SEQ ID NO: 493501 - DNA, 15 bp, Homo sapiens
ggaccagtaattaac

SEQ ID NO: 493502 - DNA, 15 bp, Homo sapiens
tggaccagtaattaa

SEQ ID NO: 493503 - DNA, 15 bp, Homo sapiens
ctggaccagtaatta

SEQ ID NO: 493504 - DNA, 15 bp, Homo sapiens
tctggaccagtaatt

SEQ ID NO: 493505 - DNA, 15 bp, Homo sapiens
ttctggaccagtaat

SEQ ID NO: 493506 - DNA, 15 bp, Homo sapiens
cttctggaccagtaa

SEQ ID NO: 493507 - DNA, 15 bp, Homo sapiens
tcttctggaccagta

SEQ ID NO: 493508 - DNA, 15 bp, Homo sapiens
ttcttctggaccagt

SEQ ID NO: 493509 - DNA, 15 bp, Homo sapiens
gttcttctggaccag

SEQ ID NO: 493510 - DNA, 15 bp, Homo sapiens
agttcttctggacca

SEQ ID NO: 493511 - DNA, 15 bp, Homo sapiens
aagttcttctggacc

SEQ ID NO: 493512 - DNA, 15 bp, Homo sapiens
taagttcttctggac

SEQ ID NO: 493513 - DNA, 15 bp, Homo sapiens
ttaagttcttctgga

SEQ ID NO: 493514 - DNA, 15 bp, Homo sapiens
attaagttcttctgg

SEQ ID NO: 493515 - DNA, 15 bp, Homo sapiens
gattaagttcttctg

SEQ ID NO: 493516 - DNA, 15 bp, Homo sapiens
agattaagttcttct

SEQ ID NO: 493517 - DNA, 15 bp, Homo sapiens
gagattaagttcttc

SEQ ID NO: 493518 - DNA, 15 bp, Homo sapiens
tgagattaagttctt

SEQ ID NO: 493519 - DNA, 15 bp, Homo sapiens
ttgagattaagttct

SEQ ID NO: 493520 - DNA, 15 bp, Homo sapiens
cttgagattaagttc

SEQ ID NO: 493521 - DNA, 15 bp, Homo sapiens
tcttgagattaagtt

SEQ ID NO: 493522 - DNA, 15 bp, Homo sapiens
ctcttgagattaagt

SEQ ID NO: 493523 - DNA, 15 bp, Homo sapiens
gctcttgagattaag

SEQ ID NO: 493524 - DNA, 15 bp, Homo sapiens
ggctcttgagattaa

SEQ ID NO: 493525 - DNA, 15 bp, Homo sapiens
tggctcttgagatta

SEQ ID NO: 493526 - DNA, 15 bp, Homo sapiens
ttggctcttgagatt

SEQ ID NO: 493527 - DNA, 15 bp, Homo sapiens
attggctcttgagat

SEQ ID NO: 493528 - DNA, 15 bp, Homo sapiens
aattggctcttgaga

SEQ ID NO: 493529 - DNA, 15 bp, Homo sapiens
aaattggctcttgag

SEQ ID NO: 493530 - DNA, 15 bp, Homo sapiens
gaaattggctcttga

SEQ ID NO: 493531 - DNA, 15 bp, Homo sapiens
agaaattggctcttg

SEQ ID NO: 493532 - DNA, 15 bp, Homo sapiens
cagaaattggctctt

SEQ ID NO: 493533 - DNA, 15 bp, Homo sapiens
ccagaaattggctct

SEQ ID NO: 493534 - DNA, 15 bp, Homo sapiens
accagaaattggctc

SEQ ID NO: 493535 - DNA, 15 bp, Homo sapiens
aaccagaaattggct

SEQ ID NO: 493536 - DNA, 15 bp, Homo sapiens
taaccagaaattggc

SEQ ID NO: 493537 - DNA, 15 bp, Homo sapiens
ataaccagaaattgg

SEQ ID NO: 493538 - DNA, 15 bp, Homo sapiens
gataaccagaaattg

SEQ ID NO: 493539 - DNA, 15 bp, Homo sapiens
ggataaccagaaatt

SEQ ID NO: 493540 - DNA, 15 bp, Homo sapiens
gggataaccagaaat

SEQ ID NO: 493541 - DNA, 15 bp, Homo sapiens
tgggataaccagaaa

SEQ ID NO: 493542 - DNA, 15 bp, Homo sapiens
ttgggataaccagaa

SEQ ID NO: 493543 - DNA, 15 bp, Homo sapiens
gttgggataaccaga

SEQ ID NO: 493544 - DNA, 15 bp, Homo sapiens
tgttgggataaccag

SEQ ID NO: 493545 - DNA, 15 bp, Homo sapiens
atgttgggataacca

SEQ ID NO: 493546 - DNA, 15 bp, Homo sapiens
catgttgggataacc

SEQ ID NO: 493547 - DNA, 15 bp, Homo sapiens
ccatgttgggataac

SEQ ID NO: 493548 - DNA, 15 bp, Homo sapiens
gccatgttgggataa

SEQ ID NO: 493549 - DNA, 15 bp, Homo sapiens
tgccatgttgggata

SEQ ID NO: 493550 - DNA, 15 bp, Homo sapiens
gtgccatgttgggat

SEQ ID NO: 493551 - DNA, 15 bp, Homo sapiens
tgtgccatgttggga

SEQ ID NO: 493552 - DNA, 15 bp, Homo sapiens
ctgtgccatgttggg

SEQ ID NO: 493553 - DNA, 15 bp, Homo sapiens
actgtgccatgttgg

SEQ ID NO: 493554 - DNA, 15 bp, Homo sapiens
tactgtgccatgttg

SEQ ID NO: 493555 - DNA, 15 bp, Homo sapiens
atactgtgccatgtt

SEQ ID NO: 493556 - DNA, 15 bp, Homo sapiens
tatactgtgccatgt

SEQ ID NO: 493557 - DNA, 15 bp, Homo sapiens
ttatactgtgccatg

SEQ ID NO: 493558 - DNA, 15 bp, Homo sapiens
tttatactgtgccat

SEQ ID NO: 493559 - DNA, 15 bp, Homo sapiens
ttttatactgtgcca

SEQ ID NO: 493560 - DNA, 15 bp, Homo sapiens
attttatactgtgcc

SEQ ID NO: 493561 - DNA, 15 bp, Homo sapiens
gattttatactgtgc

SEQ ID NO: 493562 - DNA, 15 bp, Homo sapiens
agattttatactgtg

SEQ ID NO: 493563 - DNA, 15 bp, Homo sapiens
aagattttatactgt

SEQ ID NO: 493564 - DNA, 15 bp, Homo sapiens
taagattttatactg

SEQ ID NO: 493565 - DNA, 15 bp, Homo sapiens
ataagattttatact

SEQ ID NO: 493566 - DNA, 15 bp, Homo sapiens
cataagattttatac

SEQ ID NO: 493567 - DNA, 15 bp, Homo sapiens
ccataagattttata

SEQ ID NO: 493568 - DNA, 15 bp, Homo sapiens
tccataagattttat

SEQ ID NO: 493569 - DNA, 15 bp, Homo sapiens
ttccataagatttta

SEQ ID NO: 493570 - DNA, 15 bp, Homo sapiens
tttccataagatttt

SEQ ID NO: 493571 - DNA, 15 bp, Homo sapiens
ttttccataagattt

SEQ ID NO: 493572 - DNA, 15 bp, Homo sapiens
tttttccataagatt

SEQ ID NO: 493573 - DNA, 15 bp, Homo sapiens
ttttttccataagat

SEQ ID NO: 493574 - DNA, 15 bp, Homo sapiens
tttttttccataaga

SEQ ID NO: 493575 - DNA, 15 bp, Homo sapiens
ttttttttccataag

SEQ ID NO: 493576 - DNA, 15 bp, Homo sapiens
attttttttccataa

SEQ ID NO: 493577 - DNA, 15 bp, Homo sapiens
gattttttttccata

SEQ ID NO: 493578 - DNA, 15 bp, Homo sapiens
agattttttttccat

SEQ ID NO: 493579 - DNA, 15 bp, Homo sapiens
aagattttttttcca

SEQ ID NO: 493580 - DNA, 15 bp, Homo sapiens
aaagattttttttcc

SEQ ID NO: 493581 - DNA, 15 bp, Homo sapiens
caaagattttttttc

SEQ ID NO: 493582 - DNA, 15 bp, Homo sapiens
acaaagatttttttt

SEQ ID NO: 493583 - DNA, 15 bp, Homo sapiens
gacaaagattttttt

SEQ ID NO: 493584 - DNA, 15 bp, Homo sapiens
tgacaaagatttttt

SEQ ID NO: 493585 - DNA, 15 bp, Homo sapiens
atgacaaagattttt

SEQ ID NO: 493586 - DNA, 15 bp, Homo sapiens
aatgacaaagatttt

SEQ ID NO: 493587 - DNA, 15 bp, Homo sapiens
caatgacaaagattt

SEQ ID NO: 493588 - DNA, 15 bp, Homo sapiens
tcaatgacaaagatt

SEQ ID NO: 493589 - DNA, 15 bp, Homo sapiens
ctcaatgacaaagat

SEQ ID NO: 493590 - DNA, 15 bp, Homo sapiens
tctcaatgacaaaga

SEQ ID NO: 493591 - DNA, 15 bp, Homo sapiens
atctcaatgacaaag

SEQ ID NO: 493592 - DNA, 15 bp, Homo sapiens
gatctcaatgacaaa

SEQ ID NO: 493593 - DNA, 15 bp, Homo sapiens
tgatctcaatgacaa

SEQ ID NO: 493594 - DNA, 15 bp, Homo sapiens
ttgatctcaatgaca

SEQ ID NO: 493595 - DNA, 15 bp, Homo sapiens
tttgatctcaatgac

SEQ ID NO: 493596 - DNA, 15 bp, Homo sapiens
atttgatctcaatga

SEQ ID NO: 493597 - DNA, 15 bp, Homo sapiens
aatttgatctcaatg

SEQ ID NO: 493598 - DNA, 15 bp, Homo sapiens
taatttgatctcaat

SEQ ID NO: 493599 - DNA, 15 bp, Homo sapiens
ataatttgatctcaa

SEQ ID NO: 493600 - DNA, 15 bp, Homo sapiens
tataatttgatctca

SEQ ID NO: 493601 - DNA, 15 bp, Homo sapiens
ctataatttgatctc

SEQ ID NO: 493602 - DNA, 15 bp, Homo sapiens
actataatttgatct

SEQ ID NO: 493603 - DNA, 15 bp, Homo sapiens
aactataatttgatc

SEQ ID NO: 493604 - DNA, 15 bp, Homo sapiens
aaactataatttgat

SEQ ID NO: 493605 - DNA, 15 bp, Homo sapiens
aaaactataatttga

SEQ ID NO: 493606 - DNA, 15 bp, Homo sapiens
gaaaactataatttg

SEQ ID NO: 493607 - DNA, 15 bp, Homo sapiens
tgaaaactataattt

SEQ ID NO: 493608 - DNA, 15 bp, Homo sapiens
atgaaaactataatt

SEQ ID NO: 493609 - DNA, 15 bp, Homo sapiens
tatgaaaactataat

SEQ ID NO: 493610 - DNA, 15 bp, Homo sapiens
gtatgaaaactataa

SEQ ID NO: 493611 - DNA, 15 bp, Homo sapiens
tgtatgaaaactata

SEQ ID NO: 493612 - DNA, 15 bp, Homo sapiens
ctgtatgaaaactat

SEQ ID NO: 493613 - DNA, 15 bp, Homo sapiens
actgtatgaaaacta

SEQ ID NO: 493614 - DNA, 15 bp, Homo sapiens
tactgtatgaaaact

SEQ ID NO: 493615 - DNA, 15 bp, Homo sapiens
ctactgtatgaaaac

SEQ ID NO: 493616 - DNA, 15 bp, Homo sapiens
tctactgtatgaaaa

SEQ ID NO: 493617 - DNA, 15 bp, Homo sapiens
atctactgtatgaaa

SEQ ID NO: 493618 - DNA, 15 bp, Homo sapiens
aatctactgtatgaa

SEQ ID NO: 493619 - DNA, 15 bp, Homo sapiens
aaatctactgtatga

SEQ ID NO: 493620 - DNA, 15 bp, Homo sapiens
taaatctactgtatg

SEQ ID NO: 493621 - DNA, 15 bp, Homo sapiens
ataaatctactgtat

SEQ ID NO: 493622 - DNA, 15 bp, Homo sapiens
tataaatctactgta

SEQ ID NO: 493623 - DNA, 15 bp, Homo sapiens
atataaatctactgt

SEQ ID NO: 493624 - DNA, 15 bp, Homo sapiens
aatataaatctactg

SEQ ID NO: 493625 - DNA, 15 bp, Homo sapiens
caatataaatctact

SEQ ID NO: 493626 - DNA, 15 bp, Homo sapiens
acaatataaatctac

SEQ ID NO: 493627 - DNA, 15 bp, Homo sapiens
aacaatataaatcta

SEQ ID NO: 493628 - DNA, 15 bp, Homo sapiens
caacaatataaatct

SEQ ID NO: 493629 - DNA, 15 bp, Homo sapiens
tcaacaatataaatc

SEQ ID NO: 493630 - DNA, 15 bp, Homo sapiens
atcaacaatataaat

SEQ ID NO: 493631 - DNA, 15 bp, Homo sapiens
catcaacaatataaa

SEQ ID NO: 493632 - DNA, 15 bp, Homo sapiens
acatcaacaatataa

SEQ ID NO: 493633 - DNA, 15 bp, Homo sapiens
aacatcaacaatata

SEQ ID NO: 493634 - DNA, 15 bp, Homo sapiens
aaacatcaacaatat

SEQ ID NO: 493635 - DNA, 15 bp, Homo sapiens
aaaacatcaacaata

SEQ ID NO: 493636 - DNA, 15 bp, Homo sapiens
taaaacatcaacaat

SEQ ID NO: 493637 - DNA, 15 bp, Homo sapiens
gtaaaacatcaacaa

SEQ ID NO: 493638 - DNA, 15 bp, Homo sapiens
agtaaaacatcaaca

SEQ ID NO: 493639 - DNA, 15 bp, Homo sapiens
gagtaaaacatcaac

SEQ ID NO: 493640 - DNA, 15 bp, Homo sapiens
tgagtaaaacatcaa

SEQ ID NO: 493641 - DNA, 15 bp, Homo sapiens
atgagtaaaacatca

SEQ ID NO: 493642 - DNA, 15 bp, Homo sapiens
catgagtaaaacatc

SEQ ID NO: 493643 - DNA, 15 bp, Homo sapiens
acatgagtaaaacat

SEQ ID NO: 493644 - DNA, 15 bp, Homo sapiens
aacatgagtaaaaca

SEQ ID NO: 493645 - DNA, 15 bp, Homo sapiens
aaacatgagtaaaac

SEQ ID NO: 493646 - DNA, 15 bp, Homo sapiens
taaacatgagtaaaa

SEQ ID NO: 493647 - DNA, 15 bp, Homo sapiens
ataaacatgagtaaa

SEQ ID NO: 493648 - DNA, 15 bp, Homo sapiens
cataaacatgagtaa

SEQ ID NO: 493649 - DNA, 15 bp, Homo sapiens
acataaacatgagta

SEQ ID NO: 493650 - DNA, 15 bp, Homo sapiens
gacataaacatgagt

SEQ ID NO: 493651 - DNA, 15 bp, Homo sapiens
tgacataaacatgag

SEQ ID NO: 493652 - DNA, 15 bp, Homo sapiens
ctgacataaacatga

SEQ ID NO: 493653 - DNA, 15 bp, Homo sapiens
tctgacataaacatg

SEQ ID NO: 493654 - DNA, 15 bp, Homo sapiens
gtctgacataaacat

SEQ ID NO: 493655 - DNA, 15 bp, Homo sapiens
agtctgacataaaca

SEQ ID NO: 493656 - DNA, 15 bp, Homo sapiens
aagtctgacataaac

SEQ ID NO: 493657 - DNA, 15 bp, Homo sapiens
taagtctgacataaa

SEQ ID NO: 493658 - DNA, 15 bp, Homo sapiens
ttaagtctgacataa

SEQ ID NO: 493659 - DNA, 15 bp, Homo sapiens
attaagtctgacata

SEQ ID NO: 493660 - DNA, 15 bp, Homo sapiens
aattaagtctgacat

SEQ ID NO: 493661 - DNA, 15 bp, Homo sapiens
aaattaagtctgaca

SEQ ID NO: 493662 - DNA, 15 bp, Homo sapiens
taaattaagtctgac

SEQ ID NO: 493663 - DNA, 15 bp, Homo sapiens
ataaattaagtctga

SEQ ID NO: 493664 - DNA, 15 bp, Homo sapiens
tataaattaagtctg

SEQ ID NO: 493665 - DNA, 15 bp, Homo sapiens
atataaattaagtct

SEQ ID NO: 493666 - DNA, 15 bp, Homo sapiens
aatataaattaagtc

SEQ ID NO: 493667 - DNA, 15 bp, Homo sapiens
aaatataaattaagt

SEQ ID NO: 493668 - DNA, 15 bp, Homo sapiens
caaatataaattaag

SEQ ID NO: 493669 - DNA, 15 bp, Homo sapiens
acaaatataaattaa

SEQ ID NO: 493670 - DNA, 15 bp, Homo sapiens
tacaaatataaatta

SEQ ID NO: 493671 - DNA, 15 bp, Homo sapiens
ctacaaatataaatt

SEQ ID NO: 493672 - DNA, 15 bp, Homo sapiens
tctacaaatataaat

SEQ ID NO: 493673 - DNA, 15 bp, Homo sapiens
ttctacaaatataaa

SEQ ID NO: 493674 - DNA, 15 bp, Homo sapiens
attctacaaatataa

SEQ ID NO: 493675 - DNA, 15 bp, Homo sapiens
gattctacaaatata

SEQ ID NO: 493676 - DNA, 15 bp, Homo sapiens
agattctacaaatat

SEQ ID NO: 493677 - DNA, 15 bp, Homo sapiens
tagattctacaaata

SEQ ID NO: 493678 - DNA, 15 bp, Homo sapiens
gtagattctacaaat

SEQ ID NO: 493679 - DNA, 15 bp, Homo sapiens
agtagattctacaaa

SEQ ID NO: 493680 - DNA, 15 bp, Homo sapiens
cagtagattctacaa

SEQ ID NO: 493681 - DNA, 15 bp, Homo sapiens
acagtagattctaca

SEQ ID NO: 493682 - DNA, 15 bp, Homo sapiens
aacagtagattctac

SEQ ID NO: 493683 - DNA, 15 bp, Homo sapiens
aaacagtagattcta

SEQ ID NO: 493684 - DNA, 15 bp, Homo sapiens
gaaacagtagattct

SEQ ID NO: 493685 - DNA, 15 bp, Homo sapiens
agaaacagtagattc

SEQ ID NO: 493686 - DNA, 15 bp, Homo sapiens
cagaaacagtagatt

SEQ ID NO: 493687 - DNA, 15 bp, Homo sapiens
tcagaaacagtagat

SEQ ID NO: 493688 - DNA, 15 bp, Homo sapiens
atcagaaacagtaga

SEQ ID NO: 493689 - DNA, 15 bp, Homo sapiens
catcagaaacagtag

SEQ ID NO: 493690 - DNA, 15 bp, Homo sapiens
tcatcagaaacagta

SEQ ID NO: 493691 - DNA, 15 bp, Homo sapiens
atcatcagaaacagt

SEQ ID NO: 493692 - DNA, 15 bp, Homo sapiens
aatcatcagaaacag

SEQ ID NO: 493693 - DNA, 15 bp, Homo sapiens
aaatcatcagaaaca

SEQ ID NO: 493694 - DNA, 15 bp, Homo sapiens
taaatcatcagaaac

SEQ ID NO: 493695 - DNA, 15 bp, Homo sapiens
ctaaatcatcagaaa

SEQ ID NO: 493696 - DNA, 15 bp, Homo sapiens
tctaaatcatcagaa

SEQ ID NO: 493697 - DNA, 15 bp, Homo sapiens
ctctaaatcatcaga

SEQ ID NO: 493698 - DNA, 15 bp, Homo sapiens
tctctaaatcatcag

SEQ ID NO: 493699 - DNA, 15 bp, Homo sapiens
ttctctaaatcatca

SEQ ID NO: 493700 - DNA, 15 bp, Homo sapiens
attctctaaatcatc

SEQ ID NO: 493701 - DNA, 15 bp, Homo sapiens
cattctctaaatcat

SEQ ID NO: 493702 - DNA, 15 bp, Homo sapiens
ccattctctaaatca

SEQ ID NO: 493703 - DNA, 15 bp, Homo sapiens
cccattctctaaatc

SEQ ID NO: 493704 - DNA, 15 bp, Homo sapiens
tcccattctctaaat

SEQ ID NO: 493705 - DNA, 15 bp, Homo sapiens
ttcccattctctaaa

SEQ ID NO: 493706 - DNA, 15 bp, Homo sapiens
tttcccattctctaa

SEQ ID NO: 493707 - DNA, 15 bp, Homo sapiens
gtttcccattctcta

SEQ ID NO: 493708 - DNA, 15 bp, Homo sapiens
agtttcccattctct

SEQ ID NO: 493709 - DNA, 15 bp, Homo sapiens
cagtttcccattctc

SEQ ID NO: 493710 - DNA, 15 bp, Homo sapiens
tcagtttcccattct

SEQ ID NO: 493711 - DNA, 15 bp, Homo sapiens
ttcagtttcccattc

SEQ ID NO: 493712 - DNA, 15 bp, Homo sapiens
tttcagtttcccatt

SEQ ID NO: 493713 - DNA, 15 bp, Homo sapiens
ctttcagtttcccat

SEQ ID NO: 493714 - DNA, 15 bp, Homo sapiens
tctttcagtttccca

SEQ ID NO: 493715 - DNA, 15 bp, Homo sapiens
ttctttcagtttccc

SEQ ID NO: 493716 - DNA, 15 bp, Homo sapiens
tttctttcagtttcc

SEQ ID NO: 493717 - DNA, 15 bp, Homo sapiens
atttctttcagtttc

SEQ ID NO: 493718 - DNA, 15 bp, Homo sapiens
aatttctttcagttt

SEQ ID NO: 493719 - DNA, 15 bp, Homo sapiens
aaatttctttcagtt

SEQ ID NO: 493720 - DNA, 15 bp, Homo sapiens
aaaatttctttcagt

SEQ ID NO: 493721 - DNA, 15 bp, Homo sapiens
taaaatttctttcag

SEQ ID NO: 493722 - DNA, 15 bp, Homo sapiens
ttaaaatttctttca

SEQ ID NO: 493723 - DNA, 15 bp, Homo sapiens
tttaaaatttctttc

SEQ ID NO: 493724 - DNA, 15 bp, Homo sapiens
ctttaaaatttcttt

SEQ ID NO: 493725 - DNA, 15 bp, Homo sapiens
tctttaaaatttctt

SEQ ID NO: 493726 - DNA, 15 bp, Homo sapiens
ttctttaaaatttct

SEQ ID NO: 493727 - DNA, 15 bp, Homo sapiens
attctttaaaatttc

SEQ ID NO: 493728 - DNA, 15 bp, Homo sapiens
aattctttaaaattt

SEQ ID NO: 493729 - DNA, 15 bp, Homo sapiens
taattctttaaaatt

SEQ ID NO: 493730 - DNA, 15 bp, Homo sapiens
ttaattctttaaaat

SEQ ID NO: 493731 - DNA, 15 bp, Homo sapiens
cttaattctttaaaa

SEQ ID NO: 493732 - DNA, 15 bp, Homo sapiens
acttaattctttaaa

SEQ ID NO: 493733 - DNA, 15 bp, Homo sapiens
tacttaattctttaa

SEQ ID NO: 493734 - DNA, 15 bp, Homo sapiens
ttacttaattcttta

SEQ ID NO: 493735 - DNA, 15 bp, Homo sapiens
tttacttaattcttt

SEQ ID NO: 493736 - DNA, 15 bp, Homo sapiens
gtttacttaattctt

SEQ ID NO: 493737 - DNA, 15 bp, Homo sapiens
ggtttacttaattct

SEQ ID NO: 493738 - DNA, 15 bp, Homo sapiens
aggtttacttaattc

SEQ ID NO: 493739 - DNA, 15 bp, Homo sapiens
aaggtttacttaatt

SEQ ID NO: 493740 - DNA, 15 bp, Homo sapiens
caaggtttacttaat

SEQ ID NO: 493741 - DNA, 15 bp, Homo sapiens
acaaggtttacttaa

SEQ ID NO: 493742 - DNA, 15 bp, Homo sapiens
aacaaggtttactta

SEQ ID NO: 493743 - DNA, 15 bp, Homo sapiens
aaacaaggtttactt

SEQ ID NO: 493744 - DNA, 15 bp, Homo sapiens
caaacaaggtttact

SEQ ID NO: 493745 - DNA, 15 bp, Homo sapiens
acaaacaaggtttac

SEQ ID NO: 493746 - DNA, 15 bp, Homo sapiens
aacaaacaaggttta

SEQ ID NO: 493747 - DNA, 15 bp, Homo sapiens
gaacaaacaaggttt

SEQ ID NO: 493748 - DNA, 15 bp, Homo sapiens
agaacaaacaaggtt

SEQ ID NO: 493749 - DNA, 15 bp, Homo sapiens
tagaacaaacaaggt

SEQ ID NO: 493750 - DNA, 15 bp, Homo sapiens
ttagaacaaacaagg

SEQ ID NO: 493751 - DNA, 15 bp, Homo sapiens
attagaacaaacaag

SEQ ID NO: 493752 - DNA, 15 bp, Homo sapiens
cattagaacaaacaa

SEQ ID NO: 493753 - DNA, 15 bp, Homo sapiens
ccattagaacaaaca

SEQ ID NO: 493754 - DNA, 15 bp, Homo sapiens
cccattagaacaaac

SEQ ID NO: 493755 - DNA, 15 bp, Homo sapiens
acccattagaacaaa

SEQ ID NO: 493756 - DNA, 15 bp, Homo sapiens
aacccattagaacaa

SEQ ID NO: 493757 - DNA, 15 bp, Homo sapiens
aaacccattagaaca

SEQ ID NO: 493758 - DNA, 15 bp, Homo sapiens
gaaacccattagaac

SEQ ID NO: 493759 - DNA, 15 bp, Homo sapiens
agaaacccattagaa

SEQ ID NO: 493760 - DNA, 15 bp, Homo sapiens
tagaaacccattaga

SEQ ID NO: 493761 - DNA, 15 bp, Homo sapiens
ctagaaacccattag

SEQ ID NO: 493762 - DNA, 15 bp, Homo sapiens
actagaaacccatta

SEQ ID NO: 493763 - DNA, 15 bp, Homo sapiens
cactagaaacccatt

SEQ ID NO: 493764 - DNA, 15 bp, Homo sapiens
tcactagaaacccat

SEQ ID NO: 493765 - DNA, 15 bp, Homo sapiens
ttcactagaaaccca

SEQ ID NO: 493766 - DNA, 15 bp, Homo sapiens
attcactagaaaccc

SEQ ID NO: 493767 - DNA, 15 bp, Homo sapiens
gattcactagaaacc

SEQ ID NO: 493768 - DNA, 15 bp, Homo sapiens
agattcactagaaac

SEQ ID NO: 493769 - DNA, 15 bp, Homo sapiens
gagattcactagaaa

SEQ ID NO: 493770 - DNA, 15 bp, Homo sapiens
ggagattcactagaa

SEQ ID NO: 493771 - DNA, 15 bp, Homo sapiens
aggagattcactaga

SEQ ID NO: 493772 - DNA, 15 bp, Homo sapiens
aaggagattcactag

SEQ ID NO: 493773 - DNA, 15 bp, Homo sapiens
gaaggagattcacta

SEQ ID NO: 493774 - DNA, 15 bp, Homo sapiens
tgaaggagattcact

SEQ ID NO: 493775 - DNA, 15 bp, Homo sapiens
ttgaaggagattcac

SEQ ID NO: 493776 - DNA, 15 bp, Homo sapiens
cttgaaggagattca

SEQ ID NO: 493777 - DNA, 15 bp, Homo sapiens
acttgaaggagattc

SEQ ID NO: 493778 - DNA, 15 bp, Homo sapiens
aacttgaaggagatt

SEQ ID NO: 493779 - DNA, 15 bp, Homo sapiens
caacttgaaggagat

SEQ ID NO: 493780 - DNA, 15 bp, Homo sapiens
ccaacttgaaggaga

SEQ ID NO: 493781 - DNA, 15 bp, Homo sapiens
cccaacttgaaggag

SEQ ID NO: 493782 - DNA, 15 bp, Homo sapiens
ccccaacttgaagga

SEQ ID NO: 493783 - DNA, 15 bp, Homo sapiens
gccccaacttgaagg

SEQ ID NO: 493784 - DNA, 15 bp, Homo sapiens
tgccccaacttgaag

SEQ ID NO: 493785 - DNA, 15 bp, Homo sapiens
atgccccaacttgaa

SEQ ID NO: 493786 - DNA, 15 bp, Homo sapiens
tatgccccaacttga

SEQ ID NO: 493787 - DNA, 15 bp, Homo sapiens
ctatgccccaacttg

SEQ ID NO: 493788 - DNA, 15 bp, Homo sapiens
tctatgccccaactt

SEQ ID NO: 493789 - DNA, 15 bp, Homo sapiens
ctctatgccccaact

SEQ ID NO: 493790 - DNA, 15 bp, Homo sapiens
tctctatgccccaac

SEQ ID NO: 493791 - DNA, 15 bp, Homo sapiens
atctctatgccccaa

SEQ ID NO: 493792 - DNA, 15 bp, Homo sapiens
aatctctatgcccca

SEQ ID NO: 493793 - DNA, 15 bp, Homo sapiens
caatctctatgcccc

SEQ ID NO: 493794 - DNA, 15 bp, Homo sapiens
tcaatctctatgccc

SEQ ID NO: 493795 - DNA, 15 bp, Homo sapiens
ctcaatctctatgcc

SEQ ID NO: 493796 - DNA, 15 bp, Homo sapiens
tctcaatctctatgc

SEQ ID NO: 493797 - DNA, 15 bp, Homo sapiens
ctctcaatctctatg

SEQ ID NO: 493798 - DNA, 15 bp, Homo sapiens
cctctcaatctctat

SEQ ID NO: 493799 - DNA, 15 bp, Homo sapiens
tcctctcaatctcta

SEQ ID NO: 493800 - DNA, 15 bp, Homo sapiens
ctcctctcaatctct

SEQ ID NO: 493801 - DNA, 15 bp, Homo sapiens
tctcctctcaatctc

SEQ ID NO: 493802 - DNA, 15 bp, Homo sapiens
ctctcctctcaatct

SEQ ID NO: 493803 - DNA, 15 bp, Homo sapiens
cctctcctctcaatc

SEQ ID NO: 493804 - DNA, 15 bp, Homo sapiens
acctctcctctcaat

SEQ ID NO: 493805 - DNA, 15 bp, Homo sapiens
aacctctcctctcaa

SEQ ID NO: 493806 - DNA, 15 bp, Homo sapiens
aaacctctcctctca

SEQ ID NO: 493807 - DNA, 15 bp, Homo sapiens
aaaacctctcctctc

SEQ ID NO: 493808 - DNA, 15 bp, Homo sapiens
aaaaacctctcctct

SEQ ID NO: 493809 - DNA, 15 bp, Homo sapiens
aaaaaacctctcctc

SEQ ID NO: 493810 - DNA, 15 bp, Homo sapiens
taaaaaacctctcct

SEQ ID NO: 493811 - DNA, 15 bp, Homo sapiens
ctaaaaaacctctcc

SEQ ID NO: 493812 - DNA, 15 bp, Homo sapiens
cctaaaaaacctctc

SEQ ID NO: 493813 - DNA, 15 bp, Homo sapiens
tcctaaaaaacctct

SEQ ID NO: 493814 - DNA, 15 bp, Homo sapiens
ctcctaaaaaacctc

SEQ ID NO: 493815 - DNA, 15 bp, Homo sapiens
tctcctaaaaaacct

SEQ ID NO: 493816 - DNA, 15 bp, Homo sapiens
ctctcctaaaaaacc

SEQ ID NO: 493817 - DNA, 15 bp, Homo sapiens
actctcctaaaaaac

SEQ ID NO: 493818 - DNA, 15 bp, Homo sapiens
gactctcctaaaaaa

SEQ ID NO: 493819 - DNA, 15 bp, Homo sapiens
agactctcctaaaaa

SEQ ID NO: 493820 - DNA, 15 bp, Homo sapiens
gagactctcctaaaa

SEQ ID NO: 493821 - DNA, 15 bp, Homo sapiens
tgagactctcctaaa

SEQ ID NO: 493822 - DNA, 15 bp, Homo sapiens
ttgagactctcctaa

SEQ ID NO: 493823 - DNA, 15 bp, Homo sapiens
tttgagactctccta

SEQ ID NO: 493824 - DNA, 15 bp, Homo sapiens
gtttgagactctcct

SEQ ID NO: 493825 - DNA, 15 bp, Homo sapiens
tgtttgagactctcc

SEQ ID NO: 493826 - DNA, 15 bp, Homo sapiens
ctgtttgagactctc

SEQ ID NO: 493827 - DNA, 15 bp, Homo sapiens
cctgtttgagactct

SEQ ID NO: 493828 - DNA, 15 bp, Homo sapiens
tcctgtttgagactc

SEQ ID NO: 493829 - DNA, 15 bp, Homo sapiens
ttcctgtttgagact

SEQ ID NO: 493830 - DNA, 15 bp, Homo sapiens
cttcctgtttgagac

SEQ ID NO: 493831 - DNA, 15 bp, Homo sapiens
tcttcctgtttgaga

SEQ ID NO: 493832 - DNA, 15 bp, Homo sapiens
gtcttcctgtttgag

SEQ ID NO: 493833 - DNA, 15 bp, Homo sapiens
tgtcttcctgtttga

SEQ ID NO: 493834 - DNA, 15 bp, Homo sapiens
ttgtcttcctgtttg

SEQ ID NO: 493835 - DNA, 15 bp, Homo sapiens
gttgtcttcctgttt

SEQ ID NO: 493836 - DNA, 15 bp, Homo sapiens
agttgtcttcctgtt

SEQ ID NO: 493837 - DNA, 15 bp, Homo sapiens
gagttgtcttcctgt

SEQ ID NO: 493838 - DNA, 15 bp, Homo sapiens
tgagttgtcttcctg

SEQ ID NO: 493839 - DNA, 15 bp, Homo sapiens
ttgagttgtcttcct

SEQ ID NO: 493840 - DNA, 15 bp, Homo sapiens
tttgagttgtcttcc

SEQ ID NO: 493841 - DNA, 15 bp, Homo sapiens
tatttgagttgtctt

SEQ ID NO: 493842 - DNA, 15 bp, Homo sapiens
ttatttgagttgtct

SEQ ID NO: 493843 - DNA, 15 bp, Homo sapiens
cttatttgagttgtc

SEQ ID NO: 493844 - DNA, 15 bp, Homo sapiens
acttatttgagttgt

SEQ ID NO: 493845 - DNA, 15 bp, Homo sapiens
cacttatttgagttg

SEQ ID NO: 493846 - DNA, 15 bp, Homo sapiens
acacttatttgagtt

SEQ ID NO: 493847 - DNA, 15 bp, Homo sapiens
aacacttatttgagt

SEQ ID NO: 493848 - DNA, 15 bp, Homo sapiens
aaacacttatttgag

SEQ ID NO: 493849 - DNA, 15 bp, Homo sapiens
taaacacttatttga

SEQ ID NO: 493850 - DNA, 15 bp, Homo sapiens
ataaacacttatttg

SEQ ID NO: 493851 - DNA, 15 bp, Homo sapiens
aataaacacttattt

SEQ ID NO: 493852 - DNA, 15 bp, Homo sapiens
gaataaacacttatt

SEQ ID NO: 493853 - DNA, 15 bp, Homo sapiens
ggaataaacacttat

SEQ ID NO: 493854 - DNA, 15 bp, Homo sapiens
aggaataaacactta

SEQ ID NO: 493855 - DNA, 15 bp, Homo sapiens
gaggaataaacactt

SEQ ID NO: 493856 - DNA, 15 bp, Homo sapiens
agaggaataaacact

SEQ ID NO: 493857 - DNA, 15 bp, Homo sapiens
aagaggaataaacac

SEQ ID NO: 493858 - DNA, 15 bp, Homo sapiens
caagaggaataaaca

SEQ ID NO: 493859 - DNA, 15 bp, Homo sapiens
ccaagaggaataaac

SEQ ID NO: 493860 - DNA, 15 bp, Homo sapiens
accaagaggaataaa

SEQ ID NO: 493861 - DNA, 15 bp, Homo sapiens
aaccaagaggaataa

SEQ ID NO: 493862 - DNA, 15 bp, Homo sapiens
caaccaagaggaata

SEQ ID NO: 493863 - DNA, 15 bp, Homo sapiens
acaaccaagaggaat

SEQ ID NO: 493864 - DNA, 15 bp, Homo sapiens
gacaaccaagaggaa

SEQ ID NO: 493865 - DNA, 15 bp, Homo sapiens
tgacaaccaagagga

SEQ ID NO: 493866 - DNA, 15 bp, Homo sapiens
ctgacaaccaagagg

SEQ ID NO: 493867 - DNA, 15 bp, Homo sapiens
actgacaaccaagag

SEQ ID NO: 493868 - DNA, 15 bp, Homo sapiens
cactgacaaccaaga

SEQ ID NO: 493869 - DNA, 15 bp, Homo sapiens
gcactgacaaccaag

SEQ ID NO: 493870 - DNA, 15 bp, Homo sapiens
agcactgacaaccaa

SEQ ID NO: 493871 - DNA, 15 bp, Homo sapiens
aagcactgacaacca

SEQ ID NO: 493872 - DNA, 15 bp, Homo sapiens
gaagcactgacaacc

SEQ ID NO: 493873 - DNA, 15 bp, Homo sapiens
tgaagcactgacaac

SEQ ID NO: 493874 - DNA, 15 bp, Homo sapiens
ctgaagcactgacaa

SEQ ID NO: 493875 - DNA, 15 bp, Homo sapiens
actgaagcactgaca

SEQ ID NO: 493876 - DNA, 15 bp, Homo sapiens
tactgaagcactgac

SEQ ID NO: 493877 - DNA, 15 bp, Homo sapiens
ttactgaagcactga

SEQ ID NO: 493878 - DNA, 15 bp, Homo sapiens
tttactgaagcactg

SEQ ID NO: 493879 - DNA, 15 bp, Homo sapiens
ctttactgaagcact

SEQ ID NO: 493880 - DNA, 15 bp, Homo sapiens
gctttactgaagcac

SEQ ID NO: 493881 - DNA, 15 bp, Homo sapiens
agctttactgaagca

SEQ ID NO: 493882 - DNA, 15 bp, Homo sapiens
aagctttactgaagc

SEQ ID NO: 493883 - DNA, 15 bp, Homo sapiens
taagctttactgaag

SEQ ID NO: 493884 - DNA, 15 bp, Homo sapiens
ataagctttactgaa

SEQ ID NO: 493885 - DNA, 15 bp, Homo sapiens
aataagctttactga

SEQ ID NO: 493886 - DNA, 15 bp, Homo sapiens
aaataagctttactg

SEQ ID NO: 493887 - DNA, 15 bp, Homo sapiens
taaataagctttact

SEQ ID NO: 493888 - DNA, 15 bp, Homo sapiens
ataaataagctttac

SEQ ID NO: 493889 - DNA, 15 bp, Homo sapiens
aataaataagcttta

SEQ ID NO: 493890 - DNA, 15 bp, Homo sapiens
aaataaataagcttt

SEQ ID NO: 493891 - DNA, 15 bp, Homo sapiens
taaataaataagctt

SEQ ID NO: 493892 - DNA, 15 bp, Homo sapiens
ataaataaataagct

SEQ ID NO: 493893 - DNA, 15 bp, Homo sapiens
aataaataaataagc

SEQ ID NO: 493894 - DNA, 15 bp, Homo sapiens
agaaaaaaataaata

SEQ ID NO: 493895 - DNA, 15 bp, Homo sapiens
tagaaaaaaataaat

SEQ ID NO: 493896 - DNA, 15 bp, Homo sapiens
ctagaaaaaaataaa

SEQ ID NO: 493897 - DNA, 15 bp, Homo sapiens
gctagaaaaaaataa

SEQ ID NO: 493898 - DNA, 15 bp, Homo sapiens
tgctagaaaaaaata

SEQ ID NO: 493899 - DNA, 15 bp, Homo sapiens
ctgctagaaaaaaat

SEQ ID NO: 493900 - DNA, 15 bp, Homo sapiens
cctgctagaaaaaaa

SEQ ID NO: 493901 - DNA, 15 bp, Homo sapiens
gcctgctagaaaaaa

SEQ ID NO: 493902 - DNA, 15 bp, Homo sapiens
tgcctgctagaaaaa

SEQ ID NO: 493903 - DNA, 15 bp, Homo sapiens
ctgcctgctagaaaa

SEQ ID NO: 493904 - DNA, 15 bp, Homo sapiens
tctgcctgctagaaa

SEQ ID NO: 493905 - DNA, 15 bp, Homo sapiens
atctgcctgctagaa

SEQ ID NO: 493906 - DNA, 15 bp, Homo sapiens
tatctgcctgctaga

SEQ ID NO: 493907 - DNA, 15 bp, Homo sapiens
ctatctgcctgctag

SEQ ID NO: 493908 - DNA, 15 bp, Homo sapiens
tctatctgcctgcta

SEQ ID NO: 493909 - DNA, 15 bp, Homo sapiens
ttctatctgcctgct

SEQ ID NO: 493910 - DNA, 15 bp, Homo sapiens
cttctatctgcctgc

SEQ ID NO: 493911 - DNA, 15 bp, Homo sapiens
acttctatctgcctg

SEQ ID NO: 493912 - DNA, 15 bp, Homo sapiens
aacttctatctgcct

SEQ ID NO: 493913 - DNA, 15 bp, Homo sapiens
gaacttctatctgcc

SEQ ID NO: 493914 - DNA, 15 bp, Homo sapiens
ggaacttctatctgc

SEQ ID NO: 493915 - DNA, 15 bp, Homo sapiens
aggaacttctatctg

SEQ ID NO: 493916 - DNA, 15 bp, Homo sapiens
caggaacttctatct

SEQ ID NO: 493917 - DNA, 15 bp, Homo sapiens
acaggaacttctatc

SEQ ID NO: 493918 - DNA, 15 bp, Homo sapiens
gacaggaacttctat

SEQ ID NO: 493919 - DNA, 15 bp, Homo sapiens
tgacaggaacttcta

SEQ ID NO: 493920 - DNA, 15 bp, Homo sapiens
gtgacaggaacttct

SEQ ID NO: 493921 - DNA, 15 bp, Homo sapiens
agtgacaggaacttc

SEQ ID NO: 493922 - DNA, 15 bp, Homo sapiens
aagtgacaggaactt

SEQ ID NO: 493923 - DNA, 15 bp, Homo sapiens
aaagtgacaggaact

SEQ ID NO: 493924 - DNA, 15 bp, Homo sapiens
gaaagtgacaggaac

SEQ ID NO: 493925 - DNA, 15 bp, Homo sapiens
agaaagtgacaggaa

SEQ ID NO: 493926 - DNA, 15 bp, Homo sapiens
gagaaagtgacagga

SEQ ID NO: 493927 - DNA, 15 bp, Homo sapiens
ggagaaagtgacagg

SEQ ID NO: 493928 - DNA, 15 bp, Homo sapiens
aggagaaagtgacag

SEQ ID NO: 493929 - DNA, 15 bp, Homo sapiens
aaggagaaagtgaca

SEQ ID NO: 493930 - DNA, 15 bp, Homo sapiens
aaaggagaaagtgac

SEQ ID NO: 493931 - DNA, 15 bp, Homo sapiens
aaaaggagaaagtga

SEQ ID NO: 493932 - DNA, 15 bp, Homo sapiens
aaaaaggagaaagtg

SEQ ID NO: 493933 - DNA, 15 bp, Homo sapiens
aaaaaaggagaaagt

SEQ ID NO: 493934 - DNA, 15 bp, Homo sapiens
taaaaaaggagaaag

SEQ ID NO: 493935 - DNA, 15 bp, Homo sapiens
gtaaaaaaggagaaa

SEQ ID NO: 493936 - DNA, 15 bp, Homo sapiens
cgtaaaaaaggagaa

SEQ ID NO: 493937 - DNA, 15 bp, Homo sapiens
ccgtaaaaaaggaga

SEQ ID NO: 493938 - DNA, 15 bp, Homo sapiens
cccgtaaaaaaggag

SEQ ID NO: 493939 - DNA, 15 bp, Homo sapiens
ccccgtaaaaaagga

SEQ ID NO: 493940 - DNA, 15 bp, Homo sapiens
accccgtaaaaaagg

SEQ ID NO: 493941 - DNA, 15 bp, Homo sapiens
taccccgtaaaaaag

SEQ ID NO: 493942 - DNA, 15 bp, Homo sapiens
ctaccccgtaaaaaa

SEQ ID NO: 493943 - DNA, 15 bp, Homo sapiens
cctaccccgtaaaaa

SEQ ID NO: 493944 - DNA, 15 bp, Homo sapiens
tcctaccccgtaaaa

SEQ ID NO: 493945 - DNA, 15 bp, Homo sapiens
atcctaccccgtaaa

SEQ ID NO: 493946 - DNA, 15 bp, Homo sapiens
catcctaccccgtaa

SEQ ID NO: 493947 - DNA, 15 bp, Homo sapiens
acatcctaccccgta

SEQ ID NO: 493948 - DNA, 15 bp, Homo sapiens
cacatcctaccccgt

SEQ ID NO: 493949 - DNA, 15 bp, Homo sapiens
tcacatcctaccccg

SEQ ID NO: 493950 - DNA, 15 bp, Homo sapiens
atcacatcctacccc

SEQ ID NO: 493951 - DNA, 15 bp, Homo sapiens
tatcacatcctaccc

SEQ ID NO: 493952 - DNA, 15 bp, Homo sapiens
atatcacatcctacc

SEQ ID NO: 493953 - DNA, 15 bp, Homo sapiens
aatatcacatcctac

SEQ ID NO: 493954 - DNA, 15 bp, Homo sapiens
gaatatcacatccta

SEQ ID NO: 493955 - DNA, 15 bp, Homo sapiens
ggaatatcacatcct

SEQ ID NO: 493956 - DNA, 15 bp, Homo sapiens
aggaatatcacatcc

SEQ ID NO: 493957 - DNA, 15 bp, Homo sapiens
aaggaatatcacatc

SEQ ID NO: 493958 - DNA, 15 bp, Homo sapiens
gaaggaatatcacat

SEQ ID NO: 493959 - DNA, 15 bp, Homo sapiens
agaaggaatatcaca

SEQ ID NO: 493960 - DNA, 15 bp, Homo sapiens
tagaaggaatatcac

SEQ ID NO: 493961 - DNA, 15 bp, Homo sapiens
ctagaaggaatatca

SEQ ID NO: 493962 - DNA, 15 bp, Homo sapiens
actagaaggaatatc

SEQ ID NO: 493963 - DNA, 15 bp, Homo sapiens
cactagaaggaatat

SEQ ID NO: 493964 - DNA, 15 bp, Homo sapiens
ccactagaaggaata

SEQ ID NO: 493965 - DNA, 15 bp, Homo sapiens
tccactagaaggaat

SEQ ID NO: 493966 - DNA, 15 bp, Homo sapiens
ttccactagaaggaa

SEQ ID NO: 493967 - DNA, 15 bp, Homo sapiens
tttccactagaagga

SEQ ID NO: 493968 - DNA, 15 bp, Homo sapiens
atttccactagaagg

SEQ ID NO: 493969 - DNA, 15 bp, Homo sapiens
tatttccactagaag

SEQ ID NO: 493970 - DNA, 15 bp, Homo sapiens
gtatttccactagaa

SEQ ID NO: 493971 - DNA, 15 bp, Homo sapiens
ggtatttccactaga

SEQ ID NO: 493972 - DNA, 15 bp, Homo sapiens
tggtatttccactag

SEQ ID NO: 493973 - DNA, 15 bp, Homo sapiens
ctggtatttccacta

SEQ ID NO: 493974 - DNA, 15 bp, Homo sapiens
actggtatttccact

SEQ ID NO: 493975 - DNA, 15 bp, Homo sapiens
gactggtatttccac

SEQ ID NO: 493976 - DNA, 15 bp, Homo sapiens
tgactggtatttcca

SEQ ID NO: 493977 - DNA, 15 bp, Homo sapiens
ttgactggtatttcc

SEQ ID NO: 493978 - DNA, 15 bp, Homo sapiens
tttgactggtatttc

SEQ ID NO: 493979 - DNA, 15 bp, Homo sapiens
atttgactggtattt

SEQ ID NO: 493980 - DNA, 15 bp, Homo sapiens
catttgactggtatt

SEQ ID NO: 493981 - DNA, 15 bp, Homo sapiens
acatttgactggtat

SEQ ID NO: 493982 - DNA, 15 bp, Homo sapiens
gacatttgactggta

SEQ ID NO: 493983 - DNA, 15 bp, Homo sapiens
ggacatttgactggt

SEQ ID NO: 493984 - DNA, 15 bp, Homo sapiens
tggacatttgactgg

SEQ ID NO: 493985 - DNA, 15 bp, Homo sapiens
atggacatttgactg

SEQ ID NO: 493986 - DNA, 15 bp, Homo sapiens
catggacatttgact

SEQ ID NO: 493987 - DNA, 15 bp, Homo sapiens
ccatggacatttgac

SEQ ID NO: 493988 - DNA, 15 bp, Homo sapiens
tccatggacatttga

SEQ ID NO: 493989 - DNA, 15 bp, Homo sapiens
atccatggacatttg

SEQ ID NO: 493990 - DNA, 15 bp, Homo sapiens
gatccatggacattt

SEQ ID NO: 493991 - DNA, 15 bp, Homo sapiens
tgatccatggacatt

SEQ ID NO: 493992 - DNA, 15 bp, Homo sapiens
atgatccatggacat

SEQ ID NO: 493993 - DNA, 15 bp, Homo sapiens
catgatccatggaca

SEQ ID NO: 493994 - DNA, 15 bp, Homo sapiens
tcatgatccatggac

SEQ ID NO: 493995 - DNA, 15 bp, Homo sapiens
ttcatgatccatgga

SEQ ID NO: 493996 - DNA, 15 bp, Homo sapiens
cttcatgatccatgg

SEQ ID NO: 493997 - DNA, 15 bp, Homo sapiens
tcttcatgatccatg

SEQ ID NO: 493998 - DNA, 15 bp, Homo sapiens
ttcttcatgatccat

SEQ ID NO: 493999 - DNA, 15 bp, Homo sapiens
attcttcatgatcca

SEQ ID NO: 494000 - DNA, 15 bp, Homo sapiens
aattcttcatgatcc

SEQ ID NO: 494001 - DNA, 15 bp, Homo sapiens
taattcttcatgatc

SEQ ID NO: 494002 - DNA, 15 bp, Homo sapiens
gtaattcttcatgat

SEQ ID NO: 494003 - DNA, 15 bp, Homo sapiens
agtaattcttcatga

SEQ ID NO: 494004 - DNA, 15 bp, Homo sapiens
tagtaattcttcatg

SEQ ID NO: 494005 - DNA, 15 bp, Homo sapiens
gtagtaattcttcat

SEQ ID NO: 494006 - DNA, 15 bp, Homo sapiens
cgtagtaattcttca

SEQ ID NO: 494007 - DNA, 15 bp, Homo sapiens
acgtagtaattcttc

SEQ ID NO: 494008 - DNA, 15 bp, Homo sapiens
tacgtagtaattctt

SEQ ID NO: 494009 - DNA, 15 bp, Homo sapiens
gtacgtagtaattct

SEQ ID NO: 494010 - DNA, 15 bp, Homo sapiens
agtacgtagtaattc

SEQ ID NO: 494011 - DNA, 15 bp, Homo sapiens
gagtacgtagtaatt

SEQ ID NO: 494012 - DNA, 15 bp, Homo sapiens
ggagtacgtagtaat

SEQ ID NO: 494013 - DNA, 15 bp, Homo sapiens
aggagtacgtagtaa

SEQ ID NO: 494014 - DNA, 15 bp, Homo sapiens
caggagtacgtagta

SEQ ID NO: 494015 - DNA, 15 bp, Homo sapiens
ccaggagtacgtagt

SEQ ID NO: 494016 - DNA, 15 bp, Homo sapiens
tccaggagtacgtag

SEQ ID NO: 494017 - DNA, 15 bp, Homo sapiens
ctccaggagtacgta

SEQ ID NO: 494018 - DNA, 15 bp, Homo sapiens
gctccaggagtacgt

SEQ ID NO: 494019 - DNA, 15 bp, Homo sapiens
ggctccaggagtacg

SEQ ID NO: 494020 - DNA, 15 bp, Homo sapiens
aggctccaggagtac

SEQ ID NO: 494021 - DNA, 15 bp, Homo sapiens
gaggctccaggagta

SEQ ID NO: 494022 - DNA, 15 bp, Homo sapiens
agaggctccaggagt

SEQ ID NO: 494023 - DNA, 15 bp, Homo sapiens
gagaggctccaggag

SEQ ID NO: 494024 - DNA, 15 bp, Homo sapiens
agagaggctccagga

SEQ ID NO: 494025 - DNA, 15 bp, Homo sapiens
gagagaggctccagg

SEQ ID NO: 494026 - DNA, 15 bp, Homo sapiens
ggagagaggctccag

SEQ ID NO: 494027 - DNA, 15 bp, Homo sapiens
cggagagaggctcca

SEQ ID NO: 494028 - DNA, 15 bp, Homo sapiens
ccggagagaggctcc

SEQ ID NO: 494029 - DNA, 15 bp, Homo sapiens
tccggagagaggctc

SEQ ID NO: 494030 - DNA, 15 bp, Homo sapiens
ttccggagagaggct

SEQ ID NO: 494031 - DNA, 15 bp, Homo sapiens
cttccggagagaggc

SEQ ID NO: 494032 - DNA, 15 bp, Homo sapiens
ccttccggagagagg

SEQ ID NO: 494033 - DNA, 15 bp, Homo sapiens
cccttccggagagag

SEQ ID NO: 494034 - DNA, 15 bp, Homo sapiens
tcccttccggagaga

SEQ ID NO: 494035 - DNA, 15 bp, Homo sapiens
ttcccttccggagag

SEQ ID NO: 494036 - DNA, 15 bp, Homo sapiens
tttcccttccggaga

SEQ ID NO: 494037 - DNA, 15 bp, Homo sapiens
ttttcccttccggag

SEQ ID NO: 494038 - DNA, 15 bp, Homo sapiens
cttttcccttccgga

SEQ ID NO: 494039 - DNA, 15 bp, Homo sapiens
ccttttcccttccgg

SEQ ID NO: 494040 - DNA, 15 bp, Homo sapiens
cccttttcccttccg

SEQ ID NO: 494041 - DNA, 15 bp, Homo sapiens
tcccttttcccttcc

SEQ ID NO: 494042 - DNA, 15 bp, Homo sapiens
ttcccttttcccttc

SEQ ID NO: 494043 - DNA, 15 bp, Homo sapiens
gttcccttttccctt

SEQ ID NO: 494044 - DNA, 15 bp, Homo sapiens
agttcccttttccct

SEQ ID NO: 494045 - DNA, 15 bp, Homo sapiens
gagttcccttttccc

SEQ ID NO: 494046 - DNA, 15 bp, Homo sapiens
ggagttcccttttcc

SEQ ID NO: 494047 - DNA, 15 bp, Homo sapiens
aggagttcccttttc

SEQ ID NO: 494048 - DNA, 15 bp, Homo sapiens
gaggagttccctttt

SEQ ID NO: 494049 - DNA, 15 bp, Homo sapiens
agaggagttcccttt

SEQ ID NO: 494050 - DNA, 15 bp, Homo sapiens
tagaggagttccctt

SEQ ID NO: 494051 - DNA, 15 bp, Homo sapiens
atagaggagttccct

SEQ ID NO: 494052 - DNA, 15 bp, Homo sapiens
catagaggagttccc

SEQ ID NO: 494053 - DNA, 15 bp, Homo sapiens
ccatagaggagttcc

SEQ ID NO: 494054 - DNA, 15 bp, Homo sapiens
accatagaggagttc

SEQ ID NO: 494055 - DNA, 15 bp, Homo sapiens
gaccatagaggagtt

SEQ ID NO: 494056 - DNA, 15 bp, Homo sapiens
tgaccatagaggagt

SEQ ID NO: 494057 - DNA, 15 bp, Homo sapiens
ctgaccatagaggag

SEQ ID NO: 494058 - DNA, 15 bp, Homo sapiens
gctgaccatagagga

SEQ ID NO: 494059 - DNA, 15 bp, Homo sapiens
agctgaccatagagg

SEQ ID NO: 494060 - DNA, 15 bp, Homo sapiens
aagctgaccatagag

SEQ ID NO: 494061 - DNA, 15 bp, Homo sapiens
gaagctgaccataga

SEQ ID NO: 494062 - DNA, 15 bp, Homo sapiens
agaagctgaccatag

SEQ ID NO: 494063 - DNA, 15 bp, Homo sapiens
aagaagctgaccata

SEQ ID NO: 494064 - DNA, 15 bp, Homo sapiens
gaagaagctgaccat

SEQ ID NO: 494065 - DNA, 15 bp, Homo sapiens
agaagaagctgacca

SEQ ID NO: 494066 - DNA, 15 bp, Homo sapiens
cagaagaagctgacc

SEQ ID NO: 494067 - DNA, 15 bp, Homo sapiens
acagaagaagctgac

SEQ ID NO: 494068 - DNA, 15 bp, Homo sapiens
tacagaagaagctga

SEQ ID NO: 494069 - DNA, 15 bp, Homo sapiens
gtacagaagaagctg

SEQ ID NO: 494070 - DNA, 15 bp, Homo sapiens
agtacagaagaagct

SEQ ID NO: 494071 - DNA, 15 bp, Homo sapiens
aagtacagaagaagc

SEQ ID NO: 494072 - DNA, 15 bp, Homo sapiens
aaagtacagaagaag

SEQ ID NO: 494073 - DNA, 15 bp, Homo sapiens
aaaagtacagaagaa

SEQ ID NO: 494074 - DNA, 15 bp, Homo sapiens
aaaaagtacagaaga

SEQ ID NO: 494075 - DNA, 15 bp, Homo sapiens
gaaaaagtacagaag

SEQ ID NO: 494076 - DNA, 15 bp, Homo sapiens
agaaaaagtacagaa

SEQ ID NO: 494077 - DNA, 15 bp, Homo sapiens
cagaaaaagtacaga

SEQ ID NO: 494078 - DNA, 15 bp, Homo sapiens
acagaaaaagtacag

SEQ ID NO: 494079 - DNA, 15 bp, Homo sapiens
tacagaaaaagtaca

SEQ ID NO: 494080 - DNA, 15 bp, Homo sapiens
atacagaaaaagtac

SEQ ID NO: 494081 - DNA, 15 bp, Homo sapiens
gatacagaaaaagta

SEQ ID NO: 494082 - DNA, 15 bp, Homo sapiens
tgatacagaaaaagt

SEQ ID NO: 494083 - DNA, 15 bp, Homo sapiens
atgatacagaaaaag

SEQ ID NO: 494084 - DNA, 15 bp, Homo sapiens
aatgatacagaaaaa

SEQ ID NO: 494085 - DNA, 15 bp, Homo sapiens
aaatgatacagaaaa

SEQ ID NO: 494086 - DNA, 15 bp, Homo sapiens
aaaatgatacagaaa

SEQ ID NO: 494087 - DNA, 15 bp, Homo sapiens
taaaatgatacagaa

SEQ ID NO: 494088 - DNA, 15 bp, Homo sapiens
ataaaatgatacaga

SEQ ID NO: 494089 - DNA, 15 bp, Homo sapiens
cataaaatgatacag

SEQ ID NO: 494090 - DNA, 15 bp, Homo sapiens
acataaaatgataca

SEQ ID NO: 494091 - DNA, 15 bp, Homo sapiens
cacataaaatgatac

SEQ ID NO: 494092 - DNA, 15 bp, Homo sapiens
gcacataaaatgata

SEQ ID NO: 494093 - DNA, 15 bp, Homo sapiens
agcacataaaatgat

SEQ ID NO: 494094 - DNA, 15 bp, Homo sapiens
gagcacataaaatga

SEQ ID NO: 494095 - DNA, 15 bp, Homo sapiens
agagcacataaaatg

SEQ ID NO: 494096 - DNA, 15 bp, Homo sapiens
cagagcacataaaat

SEQ ID NO: 494097 - DNA, 15 bp, Homo sapiens
acagagcacataaaa

SEQ ID NO: 494098 - DNA, 15 bp, Homo sapiens
aacagagcacataaa

SEQ ID NO: 494099 - DNA, 15 bp, Homo sapiens
aaacagagcacataa

SEQ ID NO: 494100 - DNA, 15 bp, Homo sapiens
caaacagagcacata

SEQ ID NO: 494101 - DNA, 15 bp, Homo sapiens
acaaacagagcacat

SEQ ID NO: 494102 - DNA, 15 bp, Homo sapiens
aacaaacagagcaca

SEQ ID NO: 494103 - DNA, 15 bp, Homo sapiens
aaacaaacagagcac

SEQ ID NO: 494104 - DNA, 15 bp, Homo sapiens
aaaacaaacagagca

SEQ ID NO: 494105 - DNA, 15 bp, Homo sapiens
gaaaacaaacagagc

SEQ ID NO: 494106 - DNA, 15 bp, Homo sapiens
agaaaacaaacagag

SEQ ID NO: 494107 - DNA, 15 bp, Homo sapiens
cagaaaacaaacaga

SEQ ID NO: 494108 - DNA, 15 bp, Homo sapiens
tcagaaaacaaacag

SEQ ID NO: 494109 - DNA, 15 bp, Homo sapiens
ttcagaaaacaaaca

SEQ ID NO: 494110 - DNA, 15 bp, Homo sapiens
attcagaaaacaaac

SEQ ID NO: 494111 - DNA, 15 bp, Homo sapiens
cattcagaaaacaaa

SEQ ID NO: 494112 - DNA, 15 bp, Homo sapiens
tcattcagaaaacaa

SEQ ID NO: 494113 - DNA, 15 bp, Homo sapiens
ttcattcagaaaaca

SEQ ID NO: 494114 - DNA, 15 bp, Homo sapiens
tttcattcagaaaac

SEQ ID NO: 494115 - DNA, 15 bp, Homo sapiens
atttcattcagaaaa

SEQ ID NO: 494116 - DNA, 15 bp, Homo sapiens
aatttcattcagaaa

SEQ ID NO: 494117 - DNA, 15 bp, Homo sapiens
aaatttcattcagaa

SEQ ID NO: 494118 - DNA, 15 bp, Homo sapiens
caaatttcattcaga

SEQ ID NO: 494119 - DNA, 15 bp, Homo sapiens
ccaaatttcattcag

SEQ ID NO: 494120 - DNA, 15 bp, Homo sapiens
accaaatttcattca

SEQ ID NO: 494121 - DNA, 15 bp, Homo sapiens
taccaaatttcattc

SEQ ID NO: 494122 - DNA, 15 bp, Homo sapiens
ttaccaaatttcatt

SEQ ID NO: 494123 - DNA, 15 bp, Homo sapiens
tttaccaaatttcat

SEQ ID NO: 494124 - DNA, 15 bp, Homo sapiens
atttaccaaatttca

SEQ ID NO: 494125 - DNA, 15 bp, Homo sapiens
aatttaccaaatttc

SEQ ID NO: 494126 - DNA, 15 bp, Homo sapiens
aaatttaccaaattt

SEQ ID NO: 494127 - DNA, 15 bp, Homo sapiens
gaaatttaccaaatt

SEQ ID NO: 494128 - DNA, 15 bp, Homo sapiens
tgaaatttaccaaat

SEQ ID NO: 494129 - DNA, 15 bp, Homo sapiens
atgaaatttaccaaa

SEQ ID NO: 494130 - DNA, 15 bp, Homo sapiens
gatgaaatttaccaa

SEQ ID NO: 494131 - DNA, 15 bp, Homo sapiens
agatgaaatttacca

SEQ ID NO: 494132 - DNA, 15 bp, Homo sapiens
tagatgaaatttacc

SEQ ID NO: 494133 - DNA, 15 bp, Homo sapiens
ctagatgaaatttac

SEQ ID NO: 494134 - DNA, 15 bp, Homo sapiens
cctagatgaaattta

SEQ ID NO: 494135 - DNA, 15 bp, Homo sapiens
acctagatgaaattt

SEQ ID NO: 494136 - DNA, 15 bp, Homo sapiens
tacctagatgaaatt

SEQ ID NO: 494137 - DNA, 15 bp, Homo sapiens
ttacctagatgaaat

SEQ ID NO: 494138 - DNA, 15 bp, Homo sapiens
attacctagatgaaa

SEQ ID NO: 494139 - DNA, 15 bp, Homo sapiens
tattacctagatgaa

SEQ ID NO: 494140 - DNA, 15 bp, Homo sapiens
atattacctagatga

SEQ ID NO: 494141 - DNA, 15 bp, Homo sapiens
tatattacctagatg

SEQ ID NO: 494142 - DNA, 15 bp, Homo sapiens
ctatattacctagat

SEQ ID NO: 494143 - DNA, 15 bp, Homo sapiens
actatattacctaga

SEQ ID NO: 494144 - DNA, 15 bp, Homo sapiens
cactatattacctag

SEQ ID NO: 494145 - DNA, 15 bp, Homo sapiens
acactatattaccta

SEQ ID NO: 494146 - DNA, 15 bp, Homo sapiens
tacactatattacct

SEQ ID NO: 494147 - DNA, 15 bp, Homo sapiens
ttacactatattacc

SEQ ID NO: 494148 - DNA, 15 bp, Homo sapiens
attacactatattac

SEQ ID NO: 494149 - DNA, 15 bp, Homo sapiens
tattacactatatta

SEQ ID NO: 494150 - DNA, 15 bp, Homo sapiens
ctattacactatatt

SEQ ID NO: 494151 - DNA, 15 bp, Homo sapiens
actattacactatat

SEQ ID NO: 494152 - DNA, 15 bp, Homo sapiens
cactattacactata

SEQ ID NO: 494153 - DNA, 15 bp, Homo sapiens
tcactattacactat

SEQ ID NO: 494154 - DNA, 15 bp, Homo sapiens
ttcactattacacta

SEQ ID NO: 494155 - DNA, 15 bp, Homo sapiens
tttcactattacact

SEQ ID NO: 494156 - DNA, 15 bp, Homo sapiens
ttttcactattacac

SEQ ID NO: 494157 - DNA, 15 bp, Homo sapiens
tttttcactattaca

SEQ ID NO: 494158 - DNA, 15 bp, Homo sapiens
gtttttcactattac

SEQ ID NO: 494159 - DNA, 15 bp, Homo sapiens
agtttttcactatta

SEQ ID NO: 494160 - DNA, 15 bp, Homo sapiens
cagtttttcactatt

SEQ ID NO: 494161 - DNA, 15 bp, Homo sapiens
gcagtttttcactat

SEQ ID NO: 494162 - DNA, 15 bp, Homo sapiens
agcagtttttcacta

SEQ ID NO: 494163 - DNA, 15 bp, Homo sapiens
aagcagtttttcact

SEQ ID NO: 494164 - DNA, 15 bp, Homo sapiens
taagcagtttttcac

SEQ ID NO: 494165 - DNA, 15 bp, Homo sapiens
ctaagcagtttttca

SEQ ID NO: 494166 - DNA, 15 bp, Homo sapiens
tctaagcagtttttc

SEQ ID NO: 494167 - DNA, 15 bp, Homo sapiens
ttctaagcagttttt

SEQ ID NO: 494168 - DNA, 15 bp, Homo sapiens
attctaagcagtttt

SEQ ID NO: 494169 - DNA, 15 bp, Homo sapiens
gattctaagcagttt

SEQ ID NO: 494170 - DNA, 15 bp, Homo sapiens
agattctaagcagtt

SEQ ID NO: 494171 - DNA, 15 bp, Homo sapiens
tagattctaagcagt

SEQ ID NO: 494172 - DNA, 15 bp, Homo sapiens
ctagattctaagcag

SEQ ID NO: 494173 - DNA, 15 bp, Homo sapiens
actagattctaagca

SEQ ID NO: 494174 - DNA, 15 bp, Homo sapiens
aactagattctaagc

SEQ ID NO: 494175 - DNA, 15 bp, Homo sapiens
gaactagattctaag

SEQ ID NO: 494176 - DNA, 15 bp, Homo sapiens
agaactagattctaa

SEQ ID NO: 494177 - DNA, 15 bp, Homo sapiens
tagaactagattcta

SEQ ID NO: 494178 - DNA, 15 bp, Homo sapiens
atagaactagattct

SEQ ID NO: 494179 - DNA, 15 bp, Homo sapiens
aatagaactagattc

SEQ ID NO: 494180 - DNA, 15 bp, Homo sapiens
taatagaactagatt

SEQ ID NO: 494181 - DNA, 15 bp, Homo sapiens
gtaatagaactagat

SEQ ID NO: 494182 - DNA, 15 bp, Homo sapiens
agtaatagaactaga

SEQ ID NO: 494183 - DNA, 15 bp, Homo sapiens
cagtaatagaactag

SEQ ID NO: 494184 - DNA, 15 bp, Homo sapiens
gcagtaatagaacta

SEQ ID NO: 494185 - DNA, 15 bp, Homo sapiens
agcagtaatagaact

SEQ ID NO: 494186 - DNA, 15 bp, Homo sapiens
gagcagtaatagaac

SEQ ID NO: 494187 - DNA, 15 bp, Homo sapiens
agagcagtaatagaa

SEQ ID NO: 494188 - DNA, 15 bp, Homo sapiens
aagagcagtaataga

SEQ ID NO: 494189 - DNA, 15 bp, Homo sapiens
aaagagcagtaatag

SEQ ID NO: 494190 - DNA, 15 bp, Homo sapiens
caaagagcagtaata

SEQ ID NO: 494191 - DNA, 15 bp, Homo sapiens
acaaagagcagtaat

SEQ ID NO: 494192 - DNA, 15 bp, Homo sapiens
cacaaagagcagtaa

SEQ ID NO: 494193 - DNA, 15 bp, Homo sapiens
ccacaaagagcagta

SEQ ID NO: 494194 - DNA, 15 bp, Homo sapiens
tccacaaagagcagt

SEQ ID NO: 494195 - DNA, 15 bp, Homo sapiens
ttccacaaagagcag

SEQ ID NO: 494196 - DNA, 15 bp, Homo sapiens
gttccacaaagagca

SEQ ID NO: 494197 - DNA, 15 bp, Homo sapiens
agttccacaaagagc

SEQ ID NO: 494198 - DNA, 15 bp, Homo sapiens
aagttccacaaagag

SEQ ID NO: 494199 - DNA, 15 bp, Homo sapiens
aaagttccacaaaga

SEQ ID NO: 494200 - DNA, 15 bp, Homo sapiens
caaagttccacaaag

SEQ ID NO: 494201 - DNA, 15 bp, Homo sapiens
ccaaagttccacaaa

SEQ ID NO: 494202 - DNA, 15 bp, Homo sapiens
cccaaagttccacaa

SEQ ID NO: 494203 - DNA, 15 bp, Homo sapiens
gcccaaagttccaca

SEQ ID NO: 494204 - DNA, 15 bp, Homo sapiens
tgcccaaagttccac

SEQ ID NO: 494205 - DNA, 15 bp, Homo sapiens
ttgcccaaagttcca

SEQ ID NO: 494206 - DNA, 15 bp, Homo sapiens
cttgcccaaagttcc

SEQ ID NO: 494207 - DNA, 15 bp, Homo sapiens
acttgcccaaagttc

SEQ ID NO: 494208 - DNA, 15 bp, Homo sapiens
aacttgcccaaagtt

SEQ ID NO: 494209 - DNA, 15 bp, Homo sapiens
gaacttgcccaaagt

SEQ ID NO: 494210 - DNA, 15 bp, Homo sapiens
agaacttgcccaaag

SEQ ID NO: 494211 - DNA, 15 bp, Homo sapiens
aagaacttgcccaaa

SEQ ID NO: 494212 - DNA, 15 bp, Homo sapiens
taagaacttgcccaa

SEQ ID NO: 494213 - DNA, 15 bp, Homo sapiens
ttaagaacttgccca

SEQ ID NO: 494214 - DNA, 15 bp, Homo sapiens
gttaagaacttgccc

SEQ ID NO: 494215 - DNA, 15 bp, Homo sapiens
tgttaagaacttgcc

SEQ ID NO: 494216 - DNA, 15 bp, Homo sapiens
atgttaagaacttgc

SEQ ID NO: 494217 - DNA, 15 bp, Homo sapiens
gatgttaagaacttg

SEQ ID NO: 494218 - DNA, 15 bp, Homo sapiens
ggatgttaagaactt

SEQ ID NO: 494219 - DNA, 15 bp, Homo sapiens
aggatgttaagaact

SEQ ID NO: 494220 - DNA, 15 bp, Homo sapiens
aaggatgttaagaac

SEQ ID NO: 494221 - DNA, 15 bp, Homo sapiens
caaggatgttaagaa

SEQ ID NO: 494222 - DNA, 15 bp, Homo sapiens
acaaggatgttaaga

SEQ ID NO: 494223 - DNA, 15 bp, Homo sapiens
aacaaggatgttaag

SEQ ID NO: 494224 - DNA, 15 bp, Homo sapiens
gaacaaggatgttaa

SEQ ID NO: 494225 - DNA, 15 bp, Homo sapiens
ggaacaaggatgtta

SEQ ID NO: 494226 - DNA, 15 bp, Homo sapiens
aggaacaaggatgtt

SEQ ID NO: 494227 - DNA, 15 bp, Homo sapiens
gaggaacaaggatgt

SEQ ID NO: 494228 - DNA, 15 bp, Homo sapiens
tgaggaacaaggatg

SEQ ID NO: 494229 - DNA, 15 bp, Homo sapiens
ctgaggaacaaggat

SEQ ID NO: 494230 - DNA, 15 bp, Homo sapiens
actgaggaacaagga

SEQ ID NO: 494231 - DNA, 15 bp, Homo sapiens
aactgaggaacaagg

SEQ ID NO: 494232 - DNA, 15 bp, Homo sapiens
gaactgaggaacaag

SEQ ID NO: 494233 - DNA, 15 bp, Homo sapiens
ggaactgaggaacaa

SEQ ID NO: 494234 - DNA, 15 bp, Homo sapiens
aggaactgaggaaca

SEQ ID NO: 494235 - DNA, 15 bp, Homo sapiens
gaggaactgaggaac

SEQ ID NO: 494236 - DNA, 15 bp, Homo sapiens
tgaggaactgaggaa

SEQ ID NO: 494237 - DNA, 15 bp, Homo sapiens
ttgaggaactgagga

SEQ ID NO: 494238 - DNA, 15 bp, Homo sapiens
gttgaggaactgagg

SEQ ID NO: 494239 - DNA, 15 bp, Homo sapiens
agttgaggaactgag

SEQ ID NO: 494240 - DNA, 15 bp, Homo sapiens
aagttgaggaactga

SEQ ID NO: 494241 - DNA, 15 bp, Homo sapiens
aaagttgaggaactg

SEQ ID NO: 494242 - DNA, 15 bp, Homo sapiens
taaagttgaggaact

SEQ ID NO: 494243 - DNA, 15 bp, Homo sapiens
ttaaagttgaggaac

SEQ ID NO: 494244 - DNA, 15 bp, Homo sapiens
tttaaagttgaggaa

SEQ ID NO: 494245 - DNA, 15 bp, Homo sapiens
ttttaaagttgagga

SEQ ID NO: 494246 - DNA, 15 bp, Homo sapiens
attttaaagttgagg

SEQ ID NO: 494247 - DNA, 15 bp, Homo sapiens
cattttaaagttgag

SEQ ID NO: 494248 - DNA, 15 bp, Homo sapiens
ccattttaaagttga

SEQ ID NO: 494249 - DNA, 15 bp, Homo sapiens
cccattttaaagttg

SEQ ID NO: 494250 - DNA, 15 bp, Homo sapiens
ccccattttaaagtt

SEQ ID NO: 494251 - DNA, 15 bp, Homo sapiens
tccccattttaaagt

SEQ ID NO: 494252 - DNA, 15 bp, Homo sapiens
gtccccattttaaag

SEQ ID NO: 494253 - DNA, 15 bp, Homo sapiens
tgtccccattttaaa

SEQ ID NO: 494254 - DNA, 15 bp, Homo sapiens
ctgtccccattttaa

SEQ ID NO: 494255 - DNA, 15 bp, Homo sapiens
actgtccccatttta

SEQ ID NO: 494256 - DNA, 15 bp, Homo sapiens
tactgtccccatttt

SEQ ID NO: 494257 - DNA, 15 bp, Homo sapiens
ttactgtccccattt

SEQ ID NO: 494258 - DNA, 15 bp, Homo sapiens
attactgtccccatt

SEQ ID NO: 494259 - DNA, 15 bp, Homo sapiens
tattactgtccccat

SEQ ID NO: 494260 - DNA, 15 bp, Homo sapiens
ctattactgtcccca

SEQ ID NO: 494261 - DNA, 15 bp, Homo sapiens
actattactgtcccc

SEQ ID NO: 494262 - DNA, 15 bp, Homo sapiens
aactattactgtccc

SEQ ID NO: 494263 - DNA, 15 bp, Homo sapiens
gaactattactgtcc

SEQ ID NO: 494264 - DNA, 15 bp, Homo sapiens
ggaactattactgtc

SEQ ID NO: 494265 - DNA, 15 bp, Homo sapiens
aggaactattactgt

SEQ ID NO: 494266 - DNA, 15 bp, Homo sapiens
caggaactattactg

SEQ ID NO: 494267 - DNA, 15 bp, Homo sapiens
gcaggaactattact

SEQ ID NO: 494268 - DNA, 15 bp, Homo sapiens
ggcaggaactattac

SEQ ID NO: 494269 - DNA, 15 bp, Homo sapiens
gggcaggaactatta

SEQ ID NO: 494270 - DNA, 15 bp, Homo sapiens
ggggcaggaactatt

SEQ ID NO: 494271 - DNA, 15 bp, Homo sapiens
tggggcaggaactat

SEQ ID NO: 494272 - DNA, 15 bp, Homo sapiens
ctggggcaggaacta

SEQ ID NO: 494273 - DNA, 15 bp, Homo sapiens
tctggggcaggaact

SEQ ID NO: 494274 - DNA, 15 bp, Homo sapiens
ctctggggcaggaac

SEQ ID NO: 494275 - DNA, 15 bp, Homo sapiens
actctggggcaggaa

SEQ ID NO: 494276 - DNA, 15 bp, Homo sapiens
aactctggggcagga

SEQ ID NO: 494277 - DNA, 15 bp, Homo sapiens
caactctggggcagg

SEQ ID NO: 494278 - DNA, 15 bp, Homo sapiens
acaactctggggcag

SEQ ID NO: 494279 - DNA, 15 bp, Homo sapiens
aacaactctggggca

SEQ ID NO: 494280 - DNA, 15 bp, Homo sapiens
taacaactctggggc

SEQ ID NO: 494281 - DNA, 15 bp, Homo sapiens
ttaacaactctgggg

SEQ ID NO: 494282 - DNA, 15 bp, Homo sapiens
tttaacaactctggg

SEQ ID NO: 494283 - DNA, 15 bp, Homo sapiens
ctttaacaactctgg

SEQ ID NO: 494284 - DNA, 15 bp, Homo sapiens
tctttaacaactctg

SEQ ID NO: 494285 - DNA, 15 bp, Homo sapiens
ctctttaacaactct

SEQ ID NO: 494286 - DNA, 15 bp, Homo sapiens
cctctttaacaactc

SEQ ID NO: 494287 - DNA, 15 bp, Homo sapiens
ccctctttaacaact

SEQ ID NO: 494288 - DNA, 15 bp, Homo sapiens
accctctttaacaac

SEQ ID NO: 494289 - DNA, 15 bp, Homo sapiens
aaccctctttaacaa

SEQ ID NO: 494290 - DNA, 15 bp, Homo sapiens
taaccctctttaaca

SEQ ID NO: 494291 - DNA, 15 bp, Homo sapiens
ttaaccctctttaac

SEQ ID NO: 494292 - DNA, 15 bp, Homo sapiens
tttaaccctctttaa

SEQ ID NO: 494293 - DNA, 15 bp, Homo sapiens
atttaaccctcttta

SEQ ID NO: 494294 - DNA, 15 bp, Homo sapiens
tatttaaccctcttt

SEQ ID NO: 494295 - DNA, 15 bp, Homo sapiens
ttatttaaccctctt

SEQ ID NO: 494296 - DNA, 15 bp, Homo sapiens
tttatttaaccctct

SEQ ID NO: 494297 - DNA, 15 bp, Homo sapiens
ttttatttaaccctc

SEQ ID NO: 494298 - DNA, 15 bp, Homo sapiens
cttttatttaaccct

SEQ ID NO: 494299 - DNA, 15 bp, Homo sapiens
ccttttatttaaccc

SEQ ID NO: 494300 - DNA, 15 bp, Homo sapiens
tccttttatttaacc

SEQ ID NO: 494301 - DNA, 15 bp, Homo sapiens
atccttttatttaac

SEQ ID NO: 494302 - DNA, 15 bp, Homo sapiens
catccttttatttaa

SEQ ID NO: 494303 - DNA, 15 bp, Homo sapiens
acatccttttattta

SEQ ID NO: 494304 - DNA, 15 bp, Homo sapiens
cacatccttttattt

SEQ ID NO: 494305 - DNA, 15 bp, Homo sapiens
acacatccttttatt

SEQ ID NO: 494306 - DNA, 15 bp, Homo sapiens
tacacatccttttat

SEQ ID NO: 494307 - DNA, 15 bp, Homo sapiens
ttacacatcctttta

SEQ ID NO: 494308 - DNA, 15 bp, Homo sapiens
tttacacatcctttt

SEQ ID NO: 494309 - DNA, 15 bp, Homo sapiens
atttacacatccttt

SEQ ID NO: 494310 - DNA, 15 bp, Homo sapiens
tatttacacatcctt

SEQ ID NO: 494311 - DNA, 15 bp, Homo sapiens
ctatttacacatcct

SEQ ID NO: 494312 - DNA, 15 bp, Homo sapiens
gctatttacacatcc

SEQ ID NO: 494313 - DNA, 15 bp, Homo sapiens
tgctatttacacatc

SEQ ID NO: 494314 - DNA, 15 bp, Homo sapiens
gtgctatttacacat

SEQ ID NO: 494315 - DNA, 15 bp, Homo sapiens
agtgctatttacaca

SEQ ID NO: 494316 - DNA, 15 bp, Homo sapiens
aagtgctatttacac

SEQ ID NO: 494317 - DNA, 15 bp, Homo sapiens
caagtgctatttaca

SEQ ID NO: 494318 - DNA, 15 bp, Homo sapiens
tcaagtgctatttac

SEQ ID NO: 494319 - DNA, 15 bp, Homo sapiens
gtcaagtgctattta

SEQ ID NO: 494320 - DNA, 15 bp, Homo sapiens
tgtcaagtgctattt

SEQ ID NO: 494321 - DNA, 15 bp, Homo sapiens
gtgtcaagtgctatt

SEQ ID NO: 494322 - DNA, 15 bp, Homo sapiens
agtgtcaagtgctat

SEQ ID NO: 494323 - DNA, 15 bp, Homo sapiens
aagtgtcaagtgcta

SEQ ID NO: 494324 - DNA, 15 bp, Homo sapiens
taagtgtcaagtgct

SEQ ID NO: 494325 - DNA, 15 bp, Homo sapiens
gtaagtgtcaagtgc

SEQ ID NO: 494326 - DNA, 15 bp, Homo sapiens
tgtaagtgtcaagtg

SEQ ID NO: 494327 - DNA, 15 bp, Homo sapiens
ttgtaagtgtcaagt

SEQ ID NO: 494328 - DNA, 15 bp, Homo sapiens
cttgtaagtgtcaag

SEQ ID NO: 494329 - DNA, 15 bp, Homo sapiens
gcttgtaagtgtcaa

SEQ ID NO: 494330 - DNA, 15 bp, Homo sapiens
agcttgtaagtgtca

SEQ ID NO: 494331 - DNA, 15 bp, Homo sapiens
tagcttgtaagtgtc

SEQ ID NO: 494332 - DNA, 15 bp, Homo sapiens
atagcttgtaagtgt

SEQ ID NO: 494333 - DNA, 15 bp, Homo sapiens
tatagcttgtaagtg

SEQ ID NO: 494334 - DNA, 15 bp, Homo sapiens
atatagcttgtaagt

SEQ ID NO: 494335 - DNA, 15 bp, Homo sapiens
gatatagcttgtaag

SEQ ID NO: 494336 - DNA, 15 bp, Homo sapiens
agatatagcttgtaa

SEQ ID NO: 494337 - DNA, 15 bp, Homo sapiens
cagatatagcttgta

SEQ ID NO: 494338 - DNA, 15 bp, Homo sapiens
tcagatatagcttgt

SEQ ID NO: 494339 - DNA, 15 bp, Homo sapiens
atcagatatagcttg

SEQ ID NO: 494340 - DNA, 15 bp, Homo sapiens
tatcagatatagctt

SEQ ID NO: 494341 - DNA, 15 bp, Homo sapiens
ttatcagatatagct

SEQ ID NO: 494342 - DNA, 15 bp, Homo sapiens
attatcagatatagc

SEQ ID NO: 494343 - DNA, 15 bp, Homo sapiens
aattatcagatatag

SEQ ID NO: 494344 - DNA, 15 bp, Homo sapiens
taattatcagatata

SEQ ID NO: 494345 - DNA, 15 bp, Homo sapiens
ataattatcagatat

SEQ ID NO: 494346 - DNA, 15 bp, Homo sapiens
tataattatcagata

SEQ ID NO: 494347 - DNA, 15 bp, Homo sapiens
ttataattatcagat

SEQ ID NO: 494348 - DNA, 15 bp, Homo sapiens
attataattatcaga

SEQ ID NO: 494349 - DNA, 15 bp, Homo sapiens
aattataattatcag

SEQ ID NO: 494350 - DNA, 15 bp, Homo sapiens
taattataattatca

SEQ ID NO: 494351 - DNA, 15 bp, Homo sapiens
ataattataattatc

SEQ ID NO: 494352 - DNA, 15 bp, Homo sapiens
aataattataattat

SEQ ID NO: 494353 - DNA, 15 bp, Homo sapiens
taataattataatta

SEQ ID NO: 494354 - DNA, 15 bp, Homo sapiens
ataataattataatt

SEQ ID NO: 494355 - DNA, 15 bp, Homo sapiens
tataataattataat

SEQ ID NO: 494356 - DNA, 15 bp, Homo sapiens
ttataataattataa

SEQ ID NO: 494357 - DNA, 15 bp, Homo sapiens
tttataataattata

SEQ ID NO: 494358 - DNA, 15 bp, Homo sapiens
gtttataataattat

SEQ ID NO: 494359 - DNA, 15 bp, Homo sapiens
ggtttataataatta

SEQ ID NO: 494360 - DNA, 15 bp, Homo sapiens
aggtttataataatt

SEQ ID NO: 494361 - DNA, 15 bp, Homo sapiens
gaggtttataataat

SEQ ID NO: 494362 - DNA, 15 bp, Homo sapiens
ggaggtttataataa

SEQ ID NO: 494363 - DNA, 15 bp, Homo sapiens
tggaggtttataata

SEQ ID NO: 494364 - DNA, 15 bp, Homo sapiens
gtggaggtttataat

SEQ ID NO: 494365 - DNA, 15 bp, Homo sapiens
agtggaggtttataa

SEQ ID NO: 494366 - DNA, 15 bp, Homo sapiens
gagtggaggtttata

SEQ ID NO: 494367 - DNA, 15 bp, Homo sapiens
ggagtggaggtttat

SEQ ID NO: 494368 - DNA, 15 bp, Homo sapiens
tggagtggaggttta

SEQ ID NO: 494369 - DNA, 15 bp, Homo sapiens
atggagtggaggttt

SEQ ID NO: 494370 - DNA, 15 bp, Homo sapiens
tatggagtggaggtt

SEQ ID NO: 494371 - DNA, 15 bp, Homo sapiens
ttatggagtggaggt

SEQ ID NO: 494372 - DNA, 15 bp, Homo sapiens
tttatggagtggagg

SEQ ID NO: 494373 - DNA, 15 bp, Homo sapiens
ttttatggagtggag

SEQ ID NO: 494374 - DNA, 15 bp, Homo sapiens
tttttatggagtgga

SEQ ID NO: 494375 - DNA, 15 bp, Homo sapiens
ttttttatggagtgg

SEQ ID NO: 494376 - DNA, 15 bp, Homo sapiens
gttttttatggagtg

SEQ ID NO: 494377 - DNA, 15 bp, Homo sapiens
ggttttttatggagt

SEQ ID NO: 494378 - DNA, 15 bp, Homo sapiens
gggttttttatggag

SEQ ID NO: 494379 - DNA, 15 bp, Homo sapiens
tgggttttttatgga

SEQ ID NO: 494380 - DNA, 15 bp, Homo sapiens
atgggttttttatgg

SEQ ID NO: 494381 - DNA, 15 bp, Homo sapiens
aatgggttttttatg

SEQ ID NO: 494382 - DNA, 15 bp, Homo sapiens
gaatgggttttttat

SEQ ID NO: 494383 - DNA, 15 bp, Homo sapiens
tgaatgggtttttta

SEQ ID NO: 494384 - DNA, 15 bp, Homo sapiens
atgaatgggtttttt

SEQ ID NO: 494385 - DNA, 15 bp, Homo sapiens
tatgaatgggttttt

SEQ ID NO: 494386 - DNA, 15 bp, Homo sapiens
gtatgaatgggtttt

SEQ ID NO: 494387 - DNA, 15 bp, Homo sapiens
ggtatgaatgggttt

SEQ ID NO: 494388 - DNA, 15 bp, Homo sapiens
tggtatgaatgggtt

SEQ ID NO: 494389 - DNA, 15 bp, Homo sapiens
gtggtatgaatgggt

SEQ ID NO: 494390 - DNA, 15 bp, Homo sapiens
tgtggtatgaatggg

SEQ ID NO: 494391 - DNA, 15 bp, Homo sapiens
ctgtggtatgaatgg

SEQ ID NO: 494392 - DNA, 15 bp, Homo sapiens
tctgtggtatgaatg

SEQ ID NO: 494393 - DNA, 15 bp, Homo sapiens
ttctgtggtatgaat

SEQ ID NO: 494394 - DNA, 15 bp, Homo sapiens
cttctgtggtatgaa

SEQ ID NO: 494395 - DNA, 15 bp, Homo sapiens
acttctgtggtatga

SEQ ID NO: 494396 - DNA, 15 bp, Homo sapiens
tacttctgtggtatg

SEQ ID NO: 494397 - DNA, 15 bp, Homo sapiens
atacttctgtggtat

SEQ ID NO: 494398 - DNA, 15 bp, Homo sapiens
tatacttctgtggta

SEQ ID NO: 494399 - DNA, 15 bp, Homo sapiens
ctatacttctgtggt

SEQ ID NO: 494400 - DNA, 15 bp, Homo sapiens
tctatacttctgtgg

SEQ ID NO: 494401 - DNA, 15 bp, Homo sapiens
ttctatacttctgtg

SEQ ID NO: 494402 - DNA, 15 bp, Homo sapiens
attctatacttctgt

SEQ ID NO: 494403 - DNA, 15 bp, Homo sapiens
aattctatacttctg

SEQ ID NO: 494404 - DNA, 15 bp, Homo sapiens
gaattctatacttct

SEQ ID NO: 494405 - DNA, 15 bp, Homo sapiens
cgaattctatacttc

SEQ ID NO: 494406 - DNA, 15 bp, Homo sapiens
acgaattctatactt

SEQ ID NO: 494407 - DNA, 15 bp, Homo sapiens
tacgaattctatact

SEQ ID NO: 494408 - DNA, 15 bp, Homo sapiens
gtacgaattctatac

SEQ ID NO: 494409 - DNA, 15 bp, Homo sapiens
ggtacgaattctata

SEQ ID NO: 494410 - DNA, 15 bp, Homo sapiens
cggtacgaattctat

SEQ ID NO: 494411 - DNA, 15 bp, Homo sapiens
ccggtacgaattcta

SEQ ID NO: 494412 - DNA, 15 bp, Homo sapiens
gccggtacgaattct

SEQ ID NO: 494413 - DNA, 15 bp, Homo sapiens
agccggtacgaattc

SEQ ID NO: 494414 - DNA, 15 bp, Homo sapiens
tagccggtacgaatt

SEQ ID NO: 494415 - DNA, 15 bp, Homo sapiens
ttagccggtacgaat

SEQ ID NO: 494416 - DNA, 15 bp, Homo sapiens
gttagccggtacgaa

SEQ ID NO: 494417 - DNA, 15 bp, Homo sapiens
tgttagccggtacga

SEQ ID NO: 494418 - DNA, 15 bp, Homo sapiens
ttgttagccggtacg

SEQ ID NO: 494419 - DNA, 15 bp, Homo sapiens
tttgttagccggtac

SEQ ID NO: 494420 - DNA, 15 bp, Homo sapiens
ctttgttagccggta

SEQ ID NO: 494421 - DNA, 15 bp, Homo sapiens
cctttgttagccggt

SEQ ID NO: 494422 - DNA, 15 bp, Homo sapiens
acctttgttagccgg

SEQ ID NO: 494423 - DNA, 15 bp, Homo sapiens
tacctttgttagccg

SEQ ID NO: 494424 - DNA, 15 bp, Homo sapiens
gtacctttgttagcc

SEQ ID NO: 494425 - DNA, 15 bp, Homo sapiens
tgtacctttgttagc

SEQ ID NO: 494426 - DNA, 15 bp, Homo sapiens
ctgtacctttgttag

SEQ ID NO: 494427 - DNA, 15 bp, Homo sapiens
tctgtacctttgtta

SEQ ID NO: 494428 - DNA, 15 bp, Homo sapiens
atctgtacctttgtt

SEQ ID NO: 494429 - DNA, 15 bp, Homo sapiens
aatctgtacctttgt

SEQ ID NO: 494430 - DNA, 15 bp, Homo sapiens
aaatctgtacctttg

SEQ ID NO: 494431 - DNA, 15 bp, Homo sapiens
taaatctgtaccttt

SEQ ID NO: 494432 - DNA, 15 bp, Homo sapiens
gtaaatctgtacctt

SEQ ID NO: 494433 - DNA, 15 bp, Homo sapiens
tgtaaatctgtacct

SEQ ID NO: 494434 - DNA, 15 bp, Homo sapiens
ctgtaaatctgtacc

SEQ ID NO: 494435 - DNA, 15 bp, Homo sapiens
cctgtaaatctgtac

SEQ ID NO: 494436 - DNA, 15 bp, Homo sapiens
ccctgtaaatctgta

SEQ ID NO: 494437 - DNA, 15 bp, Homo sapiens
tccctgtaaatctgt

SEQ ID NO: 494438 - DNA, 15 bp, Homo sapiens
atccctgtaaatctg

SEQ ID NO: 494439 - DNA, 15 bp, Homo sapiens
tatccctgtaaatct

SEQ ID NO: 494440 - DNA, 15 bp, Homo sapiens
ttatccctgtaaatc

SEQ ID NO: 494441 - DNA, 15 bp, Homo sapiens
tttatccctgtaaat

SEQ ID NO: 494442 - DNA, 15 bp, Homo sapiens
ttttatccctgtaaa

SEQ ID NO: 494443 - DNA, 15 bp, Homo sapiens
tttttatccctgtaa

SEQ ID NO: 494444 - DNA, 15 bp, Homo sapiens
gtttttatccctgta

SEQ ID NO: 494445 - DNA, 15 bp, Homo sapiens
tgtttttatccctgt

SEQ ID NO: 494446 - DNA, 15 bp, Homo sapiens
ttgtttttatccctg

SEQ ID NO: 494447 - DNA, 15 bp, Homo sapiens
tttgtttttatccct

SEQ ID NO: 494448 - DNA, 15 bp, Homo sapiens
ctttgtttttatccc

SEQ ID NO: 494449 - DNA, 15 bp, Homo sapiens
actttgtttttatcc

SEQ ID NO: 494450 - DNA, 15 bp, Homo sapiens
tactttgtttttatc

SEQ ID NO: 494451 - DNA, 15 bp, Homo sapiens
atactttgtttttat

SEQ ID NO: 494452 - DNA, 15 bp, Homo sapiens
aatactttgttttta

SEQ ID NO: 494453 - DNA, 15 bp, Homo sapiens
aaatactttgttttt

SEQ ID NO: 494454 - DNA, 15 bp, Homo sapiens
aaaatactttgtttt

SEQ ID NO: 494455 - DNA, 15 bp, Homo sapiens
caaaatactttgttt

SEQ ID NO: 494456 - DNA, 15 bp, Homo sapiens
gcaaaatactttgtt

SEQ ID NO: 494457 - DNA, 15 bp, Homo sapiens
agcaaaatactttgt

SEQ ID NO: 494458 - DNA, 15 bp, Homo sapiens
aagcaaaatactttg

SEQ ID NO: 494459 - DNA, 15 bp, Homo sapiens
gaagcaaaatacttt

SEQ ID NO: 494460 - DNA, 15 bp, Homo sapiens
tgaagcaaaatactt

SEQ ID NO: 494461 - DNA, 15 bp, Homo sapiens
atgaagcaaaatact

SEQ ID NO: 494462 - DNA, 15 bp, Homo sapiens
catgaagcaaaatac

SEQ ID NO: 494463 - DNA, 15 bp, Homo sapiens
acatgaagcaaaata

SEQ ID NO: 494464 - DNA, 15 bp, Homo sapiens
aacatgaagcaaaat

SEQ ID NO: 494465 - DNA, 15 bp, Homo sapiens
taacatgaagcaaaa

SEQ ID NO: 494466 - DNA, 15 bp, Homo sapiens
ttaacatgaagcaaa

SEQ ID NO: 494467 - DNA, 15 bp, Homo sapiens
tttaacatgaagcaa

SEQ ID NO: 494468 - DNA, 15 bp, Homo sapiens
ctttaacatgaagca

SEQ ID NO: 494469 - DNA, 15 bp, Homo sapiens
tctttaacatgaagc

SEQ ID NO: 494470 - DNA, 15 bp, Homo sapiens
atctttaacatgaag

SEQ ID NO: 494471 - DNA, 15 bp, Homo sapiens
tatctttaacatgaa

SEQ ID NO: 494472 - DNA, 15 bp, Homo sapiens
ttatctttaacatga

SEQ ID NO: 494473 - DNA, 15 bp, Homo sapiens
cttatctttaacatg

SEQ ID NO: 494474 - DNA, 15 bp, Homo sapiens
acttatctttaacat

SEQ ID NO: 494475 - DNA, 15 bp, Homo sapiens
cacttatctttaaca

SEQ ID NO: 494476 - DNA, 15 bp, Homo sapiens
acacttatctttaac

SEQ ID NO: 494477 - DNA, 15 bp, Homo sapiens
aacacttatctttaa

SEQ ID NO: 494478 - DNA, 15 bp, Homo sapiens
aaacacttatcttta

SEQ ID NO: 494479 - DNA, 15 bp, Homo sapiens
gaaacacttatcttt

SEQ ID NO: 494480 - DNA, 15 bp, Homo sapiens
agaaacacttatctt

SEQ ID NO: 494481 - DNA, 15 bp, Homo sapiens
cagaaacacttatct

SEQ ID NO: 494482 - DNA, 15 bp, Homo sapiens
acagaaacacttatc

SEQ ID NO: 494483 - DNA, 15 bp, Homo sapiens
cacagaaacacttat

SEQ ID NO: 494484 - DNA, 15 bp, Homo sapiens
tcacagaaacactta

SEQ ID NO: 494485 - DNA, 15 bp, Homo sapiens
atcacagaaacactt

SEQ ID NO: 494486 - DNA, 15 bp, Homo sapiens
aatcacagaaacact

SEQ ID NO: 494487 - DNA, 15 bp, Homo sapiens
aaatcacagaaacac

SEQ ID NO: 494488 - DNA, 15 bp, Homo sapiens
caaatcacagaaaca

SEQ ID NO: 494489 - DNA, 15 bp, Homo sapiens
acaaatcacagaaac

SEQ ID NO: 494490 - DNA, 15 bp, Homo sapiens
cacaaatcacagaaa

SEQ ID NO: 494491 - DNA, 15 bp, Homo sapiens
acacaaatcacagaa

SEQ ID NO: 494492 - DNA, 15 bp, Homo sapiens
aacacaaatcacaga

SEQ ID NO: 494493 - DNA, 15 bp, Homo sapiens
aaacacaaatcacag

SEQ ID NO: 494494 - DNA, 15 bp, Homo sapiens
caaacacaaatcaca

SEQ ID NO: 494495 - DNA, 15 bp, Homo sapiens
acaaacacaaatcac

SEQ ID NO: 494496 - DNA, 15 bp, Homo sapiens
cacaaacacaaatca

SEQ ID NO: 494497 - DNA, 15 bp, Homo sapiens
acacaaacacaaatc

SEQ ID NO: 494498 - DNA, 15 bp, Homo sapiens
cacacaaacacaaat

SEQ ID NO: 494499 - DNA, 15 bp, Homo sapiens
acacacaaacacaaa

SEQ ID NO: 494500 - DNA, 15 bp, Homo sapiens
tacacacaaacacaa

SEQ ID NO: 494501 - DNA, 15 bp, Homo sapiens
atacacacaaacaca

SEQ ID NO: 494502 - DNA, 15 bp, Homo sapiens
tatacacacaaacac

SEQ ID NO: 494503 - DNA, 15 bp, Homo sapiens
ttatacacacaaaca

SEQ ID NO: 494504 - DNA, 15 bp, Homo sapiens
attatacacacaaac

SEQ ID NO: 494505 - DNA, 15 bp, Homo sapiens
aattatacacacaaa

SEQ ID NO: 494506 - DNA, 15 bp, Homo sapiens
aaattatacacacaa

SEQ ID NO: 494507 - DNA, 15 bp, Homo sapiens
gaaattatacacaca

SEQ ID NO: 494508 - DNA, 15 bp, Homo sapiens
agaaattatacacac

SEQ ID NO: 494509 - DNA, 15 bp, Homo sapiens
aagaaattatacaca

SEQ ID NO: 494510 - DNA, 15 bp, Homo sapiens
aaagaaattatacac

SEQ ID NO: 494511 - DNA, 15 bp, Homo sapiens
aaaagaaattataca

SEQ ID NO: 494512 - DNA, 15 bp, Homo sapiens
taaaagaaattatac

SEQ ID NO: 494513 - DNA, 15 bp, Homo sapiens
ttaaaagaaattata

SEQ ID NO: 494514 - DNA, 15 bp, Homo sapiens
tttaaaagaaattat

SEQ ID NO: 494515 - DNA, 15 bp, Homo sapiens
atttaaaagaaatta

SEQ ID NO: 494516 - DNA, 15 bp, Homo sapiens
tatttaaaagaaatt

SEQ ID NO: 494517 - DNA, 15 bp, Homo sapiens
atatttaaaagaaat

SEQ ID NO: 494518 - DNA, 15 bp, Homo sapiens
tatatttaaaagaaa

SEQ ID NO: 494519 - DNA, 15 bp, Homo sapiens
ttatatttaaaagaa

SEQ ID NO: 494520 - DNA, 15 bp, Homo sapiens
tttatatttaaaaga

SEQ ID NO: 494521 - DNA, 15 bp, Homo sapiens
atttatatttaaaag

SEQ ID NO: 494522 - DNA, 15 bp, Homo sapiens
gatttatatttaaaa

SEQ ID NO: 494523 - DNA, 15 bp, Homo sapiens
tgatttatatttaaa

SEQ ID NO: 494524 - DNA, 15 bp, Homo sapiens
atgatttatatttaa

SEQ ID NO: 494525 - DNA, 15 bp, Homo sapiens
tatgatttatattta

SEQ ID NO: 494526 - DNA, 15 bp, Homo sapiens
atatgatttatattt

SEQ ID NO: 494527 - DNA, 15 bp, Homo sapiens
aatatgatttatatt

SEQ ID NO: 494528 - DNA, 15 bp, Homo sapiens
aaatatgatttatat

SEQ ID NO: 494529 - DNA, 15 bp, Homo sapiens
gaaatatgatttata

SEQ ID NO: 494530 - DNA, 15 bp, Homo sapiens
tgaaatatgatttat

SEQ ID NO: 494531 - DNA, 15 bp, Homo sapiens
ttgaaatatgattta

SEQ ID NO: 494532 - DNA, 15 bp, Homo sapiens
cttgaaatatgattt

SEQ ID NO: 494533 - DNA, 15 bp, Homo sapiens
acttgaaatatgatt

SEQ ID NO: 494534 - DNA, 15 bp, Homo sapiens
cacttgaaatatgat

SEQ ID NO: 494535 - DNA, 15 bp, Homo sapiens
tcacttgaaatatga

SEQ ID NO: 494536 - DNA, 15 bp, Homo sapiens
ttcacttgaaatatg

SEQ ID NO: 494537 - DNA, 15 bp, Homo sapiens
tttcacttgaaatat

SEQ ID NO: 494538 - DNA, 15 bp, Homo sapiens
ttttcacttgaaata

SEQ ID NO: 494539 - DNA, 15 bp, Homo sapiens
attttcacttgaaat

SEQ ID NO: 494540 - DNA, 15 bp, Homo sapiens
tattttcacttgaaa

SEQ ID NO: 494541 - DNA, 15 bp, Homo sapiens
atattttcacttgaa

SEQ ID NO: 494542 - DNA, 15 bp, Homo sapiens
gatattttcacttga

SEQ ID NO: 494543 - DNA, 15 bp, Homo sapiens
tgatattttcacttg

SEQ ID NO: 494544 - DNA, 15 bp, Homo sapiens
gtgatattttcactt

SEQ ID NO: 494545 - DNA, 15 bp, Homo sapiens
tgtgatattttcact

SEQ ID NO: 494546 - DNA, 15 bp, Homo sapiens
atgtgatattttcac

SEQ ID NO: 494547 - DNA, 15 bp, Homo sapiens
gatgtgatattttca

SEQ ID NO: 494548 - DNA, 15 bp, Homo sapiens
tgatgtgatattttc

SEQ ID NO: 494549 - DNA, 15 bp, Homo sapiens
atgatgtgatatttt

SEQ ID NO: 494550 - DNA, 15 bp, Homo sapiens
aatgatgtgatattt

SEQ ID NO: 494551 - DNA, 15 bp, Homo sapiens
taatgatgtgatatt

SEQ ID NO: 494552 - DNA, 15 bp, Homo sapiens
gtaatgatgtgatat

SEQ ID NO: 494553 - DNA, 15 bp, Homo sapiens
tgtaatgatgtgata

SEQ ID NO: 494554 - DNA, 15 bp, Homo sapiens
ctgtaatgatgtgat

SEQ ID NO: 494555 - DNA, 15 bp, Homo sapiens
tctgtaatgatgtga

SEQ ID NO: 494556 - DNA, 15 bp, Homo sapiens
ttctgtaatgatgtg

SEQ ID NO: 494557 - DNA, 15 bp, Homo sapiens
cttctgtaatgatgt

SEQ ID NO: 494558 - DNA, 15 bp, Homo sapiens
tcttctgtaatgatg

SEQ ID NO: 494559 - DNA, 15 bp, Homo sapiens
ctcttctgtaatgat

SEQ ID NO: 494560 - DNA, 15 bp, Homo sapiens
actcttctgtaatga

SEQ ID NO: 494561 - DNA, 15 bp, Homo sapiens
aactcttctgtaatg

SEQ ID NO: 494562 - DNA, 15 bp, Homo sapiens
aaactcttctgtaat

SEQ ID NO: 494563 - DNA, 15 bp, Homo sapiens
taaactcttctgtaa

SEQ ID NO: 494564 - DNA, 15 bp, Homo sapiens
ataaactcttctgta

SEQ ID NO: 494565 - DNA, 15 bp, Homo sapiens
aataaactcttctgt

SEQ ID NO: 494566 - DNA, 15 bp, Homo sapiens
aaataaactcttctg

SEQ ID NO: 494567 - DNA, 15 bp, Homo sapiens
aaaataaactcttct

SEQ ID NO: 494568 - DNA, 15 bp, Homo sapiens
gaaaataaactcttc

SEQ ID NO: 494569 - DNA, 15 bp, Homo sapiens
ggaaaataaactctt

SEQ ID NO: 494570 - DNA, 15 bp, Homo sapiens
tggaaaataaactct

SEQ ID NO: 494571 - DNA, 15 bp, Homo sapiens
ttggaaaataaactc

SEQ ID NO: 494572 - DNA, 15 bp, Homo sapiens
tttggaaaataaact

SEQ ID NO: 494573 - DNA, 15 bp, Homo sapiens
gtttggaaaataaac

SEQ ID NO: 494574 - DNA, 15 bp, Homo sapiens
ggtttggaaaataaa

SEQ ID NO: 494575 - DNA, 15 bp, Homo sapiens
tggtttggaaaataa

SEQ ID NO: 494576 - DNA, 15 bp, Homo sapiens
ttggtttggaaaata

SEQ ID NO: 494577 - DNA, 15 bp, Homo sapiens
tttggtttggaaaat

SEQ ID NO: 494578 - DNA, 15 bp, Homo sapiens
ttttggtttggaaaa

SEQ ID NO: 494579 - DNA, 15 bp, Homo sapiens
gttttggtttggaaa

SEQ ID NO: 494580 - DNA, 15 bp, Homo sapiens
agttttggtttggaa

SEQ ID NO: 494581 - DNA, 15 bp, Homo sapiens
aagttttggtttgga

SEQ ID NO: 494582 - DNA, 15 bp, Homo sapiens
aaagttttggtttgg

SEQ ID NO: 494583 - DNA, 15 bp, Homo sapiens
aaaagttttggtttg

SEQ ID NO: 494584 - DNA, 15 bp, Homo sapiens
aaaaagttttggttt

SEQ ID NO: 494585 - DNA, 15 bp, Homo sapiens
aaaaaagttttggtt

SEQ ID NO: 494586 - DNA, 15 bp, Homo sapiens
gaaaaaagttttggt

SEQ ID NO: 494587 - DNA, 15 bp, Homo sapiens
tgaaaaaagttttgg

SEQ ID NO: 494588 - DNA, 15 bp, Homo sapiens
atgaaaaaagttttg

SEQ ID NO: 494589 - DNA, 15 bp, Homo sapiens
aatgaaaaaagtttt

SEQ ID NO: 494590 - DNA, 15 bp, Homo sapiens
gaatgaaaaaagttt

SEQ ID NO: 494591 - DNA, 15 bp, Homo sapiens
ggaatgaaaaaagtt

SEQ ID NO: 494592 - DNA, 15 bp, Homo sapiens
aggaatgaaaaaagt

SEQ ID NO: 494593 - DNA, 15 bp, Homo sapiens
taggaatgaaaaaag

SEQ ID NO: 494594 - DNA, 15 bp, Homo sapiens
ttaggaatgaaaaaa

SEQ ID NO: 494595 - DNA, 15 bp, Homo sapiens
attaggaatgaaaaa

SEQ ID NO: 494596 - DNA, 15 bp, Homo sapiens
aattaggaatgaaaa

SEQ ID NO: 494597 - DNA, 15 bp, Homo sapiens
aaattaggaatgaaa

SEQ ID NO: 494598 - DNA, 15 bp, Homo sapiens
aaaattaggaatgaa

SEQ ID NO: 494599 - DNA, 15 bp, Homo sapiens
aaaaattaggaatga

SEQ ID NO: 494600 - DNA, 15 bp, Homo sapiens
taaaaattaggaatg

SEQ ID NO: 494601 - DNA, 15 bp, Homo sapiens
ttaaaaattaggaat

SEQ ID NO: 494602 - DNA, 15 bp, Homo sapiens
attaaaaattaggaa

SEQ ID NO: 494603 - DNA, 15 bp, Homo sapiens
cattaaaaattagga

SEQ ID NO: 494604 - DNA, 15 bp, Homo sapiens
gcattaaaaattagg

SEQ ID NO: 494605 - DNA, 15 bp, Homo sapiens
tgcattaaaaattag

SEQ ID NO: 494606 - DNA, 15 bp, Homo sapiens
ttgcattaaaaatta

SEQ ID NO: 494607 - DNA, 15 bp, Homo sapiens
gttgcattaaaaatt

SEQ ID NO: 494608 - DNA, 15 bp, Homo sapiens
ggttgcattaaaaat

SEQ ID NO: 494609 - DNA, 15 bp, Homo sapiens
aggttgcattaaaaa

SEQ ID NO: 494610 - DNA, 15 bp, Homo sapiens
aaggttgcattaaaa

SEQ ID NO: 494611 - DNA, 15 bp, Homo sapiens
caaggttgcattaaa

SEQ ID NO: 494612 - DNA, 15 bp, Homo sapiens
acaaggttgcattaa

SEQ ID NO: 494613 - DNA, 15 bp, Homo sapiens
aacaaggttgcatta

SEQ ID NO: 494614 - DNA, 15 bp, Homo sapiens
taacaaggttgcatt

SEQ ID NO: 494615 - DNA, 15 bp, Homo sapiens
ttaacaaggttgcat

SEQ ID NO: 494616 - DNA, 15 bp, Homo sapiens
cttaacaaggttgca

SEQ ID NO: 494617 - DNA, 15 bp, Homo sapiens
ccttaacaaggttgc

SEQ ID NO: 494618 - DNA, 15 bp, Homo sapiens
tccttaacaaggttg

SEQ ID NO: 494619 - DNA, 15 bp, Homo sapiens
ttccttaacaaggtt

SEQ ID NO: 494620 - DNA, 15 bp, Homo sapiens
cttccttaacaaggt

SEQ ID NO: 494621 - DNA, 15 bp, Homo sapiens
tcttccttaacaagg

SEQ ID NO: 494622 - DNA, 15 bp, Homo sapiens
ttcttccttaacaag

SEQ ID NO: 494623 - DNA, 15 bp, Homo sapiens
tttcttccttaacaa

SEQ ID NO: 494624 - DNA, 15 bp, Homo sapiens
gtttcttccttaaca

SEQ ID NO: 494625 - DNA, 15 bp, Homo sapiens
tgtttcttccttaac

SEQ ID NO: 494626 - DNA, 15 bp, Homo sapiens
gtgtttcttccttaa

SEQ ID NO: 494627 - DNA, 15 bp, Homo sapiens
ggtgtttcttcctta

SEQ ID NO: 494628 - DNA, 15 bp, Homo sapiens
aggtgtttcttcctt

SEQ ID NO: 494629 - DNA, 15 bp, Homo sapiens
taggtgtttcttcct

SEQ ID NO: 494630 - DNA, 15 bp, Homo sapiens
ttaggtgtttcttcc

SEQ ID NO: 494631 - DNA, 15 bp, Homo sapiens
cttaggtgtttcttc

SEQ ID NO: 494632 - DNA, 15 bp, Homo sapiens
gcttaggtgtttctt

SEQ ID NO: 494633 - DNA, 15 bp, Homo sapiens
tgcttaggtgtttct

SEQ ID NO: 494634 - DNA, 15 bp, Homo sapiens
ctgcttaggtgtttc

SEQ ID NO: 494635 - DNA, 15 bp, Homo sapiens
actgcttaggtgttt

SEQ ID NO: 494636 - DNA, 15 bp, Homo sapiens
tactgcttaggtgtt

SEQ ID NO: 494637 - DNA, 15 bp, Homo sapiens
atactgcttaggtgt

SEQ ID NO: 494638 - DNA, 15 bp, Homo sapiens
catactgcttaggtg

SEQ ID NO: 494639 - DNA, 15 bp, Homo sapiens
tcatactgcttaggt

SEQ ID NO: 494640 - DNA, 15 bp, Homo sapiens
atcatactgcttagg

SEQ ID NO: 494641 - DNA, 15 bp, Homo sapiens
tatcatactgcttag

SEQ ID NO: 494642 - DNA, 15 bp, Homo sapiens
atatcatactgctta

SEQ ID NO: 494643 - DNA, 15 bp, Homo sapiens
aatatcatactgctt

SEQ ID NO: 494644 - DNA, 15 bp, Homo sapiens
aaatatcatactgct

SEQ ID NO: 494645 - DNA, 15 bp, Homo sapiens
taaatatcatactgc

SEQ ID NO: 494646 - DNA, 15 bp, Homo sapiens
gtaaatatcatactg

SEQ ID NO: 494647 - DNA, 15 bp, Homo sapiens
agtaaatatcatact

SEQ ID NO: 494648 - DNA, 15 bp, Homo sapiens
tagtaaatatcatac

SEQ ID NO: 494649 - DNA, 15 bp, Homo sapiens
ttagtaaatatcata

SEQ ID NO: 494650 - DNA, 15 bp, Homo sapiens
attagtaaatatcat

SEQ ID NO: 494651 - DNA, 15 bp, Homo sapiens
cattagtaaatatca

SEQ ID NO: 494652 - DNA, 15 bp, Homo sapiens
acattagtaaatatc

SEQ ID NO: 494653 - DNA, 15 bp, Homo sapiens
gacattagtaaatat

SEQ ID NO: 494654 - DNA, 15 bp, Homo sapiens
agacattagtaaata

SEQ ID NO: 494655 - DNA, 15 bp, Homo sapiens
cagacattagtaaat

SEQ ID NO: 494656 - DNA, 15 bp, Homo sapiens
acagacattagtaaa

SEQ ID NO: 494657 - DNA, 15 bp, Homo sapiens
aacagacattagtaa

SEQ ID NO: 494658 - DNA, 15 bp, Homo sapiens
aaacagacattagta

SEQ ID NO: 494659 - DNA, 15 bp, Homo sapiens
aaaacagacattagt

SEQ ID NO: 494660 - DNA, 15 bp, Homo sapiens
taaaacagacattag

SEQ ID NO: 494661 - DNA, 15 bp, Homo sapiens
gtaaaacagacatta

SEQ ID NO: 494662 - DNA, 15 bp, Homo sapiens
agtaaaacagacatt

SEQ ID NO: 494663 - DNA, 15 bp, Homo sapiens
aagtaaaacagacat

SEQ ID NO: 494664 - DNA, 15 bp, Homo sapiens
caagtaaaacagaca

SEQ ID NO: 494665 - DNA, 15 bp, Homo sapiens
acaagtaaaacagac

SEQ ID NO: 494666 - DNA, 15 bp, Homo sapiens
tacaagtaaaacaga

SEQ ID NO: 494667 - DNA, 15 bp, Homo sapiens
ctacaagtaaaacag

SEQ ID NO: 494668 - DNA, 15 bp, Homo sapiens
tctacaagtaaaaca

SEQ ID NO: 494669 - DNA, 15 bp, Homo sapiens
ttctacaagtaaaac

SEQ ID NO: 494670 - DNA, 15 bp, Homo sapiens
attctacaagtaaaa

SEQ ID NO: 494671 - DNA, 15 bp, Homo sapiens
aattctacaagtaaa

SEQ ID NO: 494672 - DNA, 15 bp, Homo sapiens
aaattctacaagtaa

SEQ ID NO: 494673 - DNA, 15 bp, Homo sapiens
caaattctacaagta

SEQ ID NO: 494674 - DNA, 15 bp, Homo sapiens
gcaaattctacaagt

SEQ ID NO: 494675 - DNA, 15 bp, Homo sapiens
tgcaaattctacaag

SEQ ID NO: 494676 - DNA, 15 bp, Homo sapiens
atgcaaattctacaa

SEQ ID NO: 494677 - DNA, 15 bp, Homo sapiens
aatgcaaattctaca

SEQ ID NO: 494678 - DNA, 15 bp, Homo sapiens
aaatgcaaattctac

SEQ ID NO: 494679 - DNA, 15 bp, Homo sapiens
taaatgcaaattcta

SEQ ID NO: 494680 - DNA, 15 bp, Homo sapiens
ataaatgcaaattct

SEQ ID NO: 494681 - DNA, 15 bp, Homo sapiens
aataaatgcaaattc

SEQ ID NO: 494682 - DNA, 15 bp, Homo sapiens
aaataaatgcaaatt

SEQ ID NO: 494683 - DNA, 15 bp, Homo sapiens
aaaataaatgcaaat

SEQ ID NO: 494684 - DNA, 15 bp, Homo sapiens
taaaataaatgcaaa

SEQ ID NO: 494685 - DNA, 15 bp, Homo sapiens
ataaaataaatgcaa

SEQ ID NO: 494686 - DNA, 15 bp, Homo sapiens
gataaaataaatgca

SEQ ID NO: 494687 - DNA, 15 bp, Homo sapiens
tgataaaataaatgc

SEQ ID NO: 494688 - DNA, 15 bp, Homo sapiens
ttgataaaataaatg

SEQ ID NO: 494689 - DNA, 15 bp, Homo sapiens
attgataaaataaat

SEQ ID NO: 494690 - DNA, 15 bp, Homo sapiens
aattgataaaataaa

SEQ ID NO: 494691 - DNA, 15 bp, Homo sapiens
taattgataaaataa

SEQ ID NO: 494692 - DNA, 15 bp, Homo sapiens
ataattgataaaata

SEQ ID NO: 494693 - DNA, 15 bp, Homo sapiens
aataattgataaaat

SEQ ID NO: 494694 - DNA, 15 bp, Homo sapiens
aaataattgataaaa

SEQ ID NO: 494695 - DNA, 15 bp, Homo sapiens
aaaataattgataaa

SEQ ID NO: 494696 - DNA, 15 bp, Homo sapiens
gaaaataattgataa

SEQ ID NO: 494697 - DNA, 15 bp, Homo sapiens
agaaaataattgata

SEQ ID NO: 494698 - DNA, 15 bp, Homo sapiens
gagaaaataattgat

SEQ ID NO: 494699 - DNA, 15 bp, Homo sapiens
ggagaaaataattga

SEQ ID NO: 494700 - DNA, 15 bp, Homo sapiens
tggagaaaataattg

SEQ ID NO: 494701 - DNA, 15 bp, Homo sapiens
atggagaaaataatt

SEQ ID NO: 494702 - DNA, 15 bp, Homo sapiens
aatggagaaaataat

SEQ ID NO: 494703 - DNA, 15 bp, Homo sapiens
aaatggagaaaataa

SEQ ID NO: 494704 - DNA, 15 bp, Homo sapiens
gaaatggagaaaata

SEQ ID NO: 494705 - DNA, 15 bp, Homo sapiens
cgaaatggagaaaat

SEQ ID NO: 494706 - DNA, 15 bp, Homo sapiens
acgaaatggagaaaa

SEQ ID NO: 494707 - DNA, 15 bp, Homo sapiens
cacgaaatggagaaa

SEQ ID NO: 494708 - DNA, 15 bp, Homo sapiens
acacgaaatggagaa

SEQ ID NO: 494709 - DNA, 15 bp, Homo sapiens
aacacgaaatggaga

SEQ ID NO: 494710 - DNA, 15 bp, Homo sapiens
aaacacgaaatggag

SEQ ID NO: 494711 - DNA, 15 bp, Homo sapiens
caaacacgaaatgga

SEQ ID NO: 494712 - DNA, 15 bp, Homo sapiens
ccaaacacgaaatgg

SEQ ID NO: 494713 - DNA, 15 bp, Homo sapiens
tccaaacacgaaatg

SEQ ID NO: 494714 - DNA, 15 bp, Homo sapiens
ctccaaacacgaaat

SEQ ID NO: 494715 - DNA, 15 bp, Homo sapiens
tctccaaacacgaaa

SEQ ID NO: 494716 - DNA, 15 bp, Homo sapiens
ttctccaaacacgaa

SEQ ID NO: 494717 - DNA, 15 bp, Homo sapiens
attctccaaacacga

SEQ ID NO: 494718 - DNA, 15 bp, Homo sapiens
tattctccaaacacg

SEQ ID NO: 494719 - DNA, 15 bp, Homo sapiens
ttattctccaaacac

SEQ ID NO: 494720 - DNA, 15 bp, Homo sapiens
cttattctccaaaca

SEQ ID NO: 494721 - DNA, 15 bp, Homo sapiens
acttattctccaaac

SEQ ID NO: 494722 - DNA, 15 bp, Homo sapiens
tacttattctccaaa

SEQ ID NO: 494723 - DNA, 15 bp, Homo sapiens
ttacttattctccaa

SEQ ID NO: 494724 - DNA, 15 bp, Homo sapiens
attacttattctcca

SEQ ID NO: 494725 - DNA, 15 bp, Homo sapiens
aattacttattctcc

SEQ ID NO: 494726 - DNA, 15 bp, Homo sapiens
gaattacttattctc

SEQ ID NO: 494727 - DNA, 15 bp, Homo sapiens
tgaattacttattct

SEQ ID NO: 494728 - DNA, 15 bp, Homo sapiens
ctgaattacttattc

SEQ ID NO: 494729 - DNA, 15 bp, Homo sapiens
tctgaattacttatt

SEQ ID NO: 494730 - DNA, 15 bp, Homo sapiens
ttctgaattacttat

SEQ ID NO: 494731 - DNA, 15 bp, Homo sapiens
attctgaattactta

SEQ ID NO: 494732 - DNA, 15 bp, Homo sapiens
gattctgaattactt

SEQ ID NO: 494733 - DNA, 15 bp, Homo sapiens
tgattctgaattact

SEQ ID NO: 494734 - DNA, 15 bp, Homo sapiens
ttgattctgaattac

SEQ ID NO: 494735 - DNA, 15 bp, Homo sapiens
tttgattctgaatta

SEQ ID NO: 494736 - DNA, 15 bp, Homo sapiens
atttgattctgaatt

SEQ ID NO: 494737 - DNA, 15 bp, Homo sapiens
catttgattctgaat

SEQ ID NO: 494738 - DNA, 15 bp, Homo sapiens
acatttgattctgaa

SEQ ID NO: 494739 - DNA, 15 bp, Homo sapiens
tacatttgattctga

SEQ ID NO: 494740 - DNA, 15 bp, Homo sapiens
atacatttgattctg

SEQ ID NO: 494741 - DNA, 15 bp, Homo sapiens
gatacatttgattct

SEQ ID NO: 494742 - DNA, 15 bp, Homo sapiens
agatacatttgattc

SEQ ID NO: 494743 - DNA, 15 bp, Homo sapiens
aagatacatttgatt

SEQ ID NO: 494744 - DNA, 15 bp, Homo sapiens
gaagatacatttgat

SEQ ID NO: 494745 - DNA, 15 bp, Homo sapiens
agaagatacatttga

SEQ ID NO: 494746 - DNA, 15 bp, Homo sapiens
tagaagatacatttg

SEQ ID NO: 494747 - DNA, 15 bp, Homo sapiens
gtagaagatacattt

SEQ ID NO: 494748 - DNA, 15 bp, Homo sapiens
tgtagaagatacatt

SEQ ID NO: 494749 - DNA, 15 bp, Homo sapiens
ctgtagaagatacat

SEQ ID NO: 494750 - DNA, 15 bp, Homo sapiens
gctgtagaagataca

SEQ ID NO: 494751 - DNA, 15 bp, Homo sapiens
tgctgtagaagatac

SEQ ID NO: 494752 - DNA, 15 bp, Homo sapiens
ttgctgtagaagata

SEQ ID NO: 494753 - DNA, 15 bp, Homo sapiens
attgctgtagaagat

SEQ ID NO: 494754 - DNA, 15 bp, Homo sapiens
tattgctgtagaaga

SEQ ID NO: 494755 - DNA, 15 bp, Homo sapiens
atattgctgtagaag

SEQ ID NO: 494756 - DNA, 15 bp, Homo sapiens
aatattgctgtagaa

SEQ ID NO: 494757 - DNA, 15 bp, Homo sapiens
aaatattgctgtaga

SEQ ID NO: 494758 - DNA, 15 bp, Homo sapiens
taaatattgctgtag

SEQ ID NO: 494759 - DNA, 15 bp, Homo sapiens
ctaaatattgctgta

SEQ ID NO: 494760 - DNA, 15 bp, Homo sapiens
actaaatattgctgt

SEQ ID NO: 494761 - DNA, 15 bp, Homo sapiens
aactaaatattgctg

SEQ ID NO: 494762 - DNA, 15 bp, Homo sapiens
gaactaaatattgct

SEQ ID NO: 494763 - DNA, 15 bp, Homo sapiens
agaactaaatattgc

SEQ ID NO: 494764 - DNA, 15 bp, Homo sapiens
aagaactaaatattg

SEQ ID NO: 494765 - DNA, 15 bp, Homo sapiens
caagaactaaatatt

SEQ ID NO: 494766 - DNA, 15 bp, Homo sapiens
acaagaactaaatat

SEQ ID NO: 494767 - DNA, 15 bp, Homo sapiens
aacaagaactaaata

SEQ ID NO: 494768 - DNA, 15 bp, Homo sapiens
aaacaagaactaaat

SEQ ID NO: 494769 - DNA, 15 bp, Homo sapiens
taaacaagaactaaa

SEQ ID NO: 494770 - DNA, 15 bp, Homo sapiens
ataaacaagaactaa

SEQ ID NO: 494771 - DNA, 15 bp, Homo sapiens
cataaacaagaacta

SEQ ID NO: 494772 - DNA, 15 bp, Homo sapiens
gcataaacaagaact

SEQ ID NO: 494773 - DNA, 15 bp, Homo sapiens
ggcataaacaagaac

SEQ ID NO: 494774 - DNA, 15 bp, Homo sapiens
gggcataaacaagaa

SEQ ID NO: 494775 - DNA, 15 bp, Homo sapiens
agggcataaacaaga

SEQ ID NO: 494776 - DNA, 15 bp, Homo sapiens
aagggcataaacaag

SEQ ID NO: 494777 - DNA, 15 bp, Homo sapiens
caagggcataaacaa

SEQ ID NO: 494778 - DNA, 15 bp, Homo sapiens
acaagggcataaaca

SEQ ID NO: 494779 - DNA, 15 bp, Homo sapiens
aacaagggcataaac

SEQ ID NO: 494780 - DNA, 15 bp, Homo sapiens
aaacaagggcataaa

SEQ ID NO: 494781 - DNA, 15 bp, Homo sapiens
gaaacaagggcataa

SEQ ID NO: 494782 - DNA, 15 bp, Homo sapiens
tgaaacaagggcata

SEQ ID NO: 494783 - DNA, 15 bp, Homo sapiens
ttgaaacaagggcat

SEQ ID NO: 494784 - DNA, 15 bp, Homo sapiens
attgaaacaagggca

SEQ ID NO: 494785 - DNA, 15 bp, Homo sapiens
cattgaaacaagggc

SEQ ID NO: 494786 - DNA, 15 bp, Homo sapiens
tcattgaaacaaggg

SEQ ID NO: 494787 - DNA, 15 bp, Homo sapiens
ctcattgaaacaagg

SEQ ID NO: 494788 - DNA, 15 bp, Homo sapiens
actcattgaaacaag

SEQ ID NO: 494789 - DNA, 15 bp, Homo sapiens
cactcattgaaacaa

SEQ ID NO: 494790 - DNA, 15 bp, Homo sapiens
gcactcattgaaaca

SEQ ID NO: 494791 - DNA, 15 bp, Homo sapiens
agcactcattgaaac

SEQ ID NO: 494792 - DNA, 15 bp, Homo sapiens
cagcactcattgaaa

SEQ ID NO: 494793 - DNA, 15 bp, Homo sapiens
gcagcactcattgaa

SEQ ID NO: 494794 - DNA, 15 bp, Homo sapiens
tgcagcactcattga

SEQ ID NO: 494795 - DNA, 15 bp, Homo sapiens
ctgcagcactcattg

SEQ ID NO: 494796 - DNA, 15 bp, Homo sapiens
actgcagcactcatt

SEQ ID NO: 494797 - DNA, 15 bp, Homo sapiens
cactgcagcactcat

SEQ ID NO: 494798 - DNA, 15 bp, Homo sapiens
acactgcagcactca

SEQ ID NO: 494799 - DNA, 15 bp, Homo sapiens
tacactgcagcactc

SEQ ID NO: 494800 - DNA, 15 bp, Homo sapiens
gtacactgcagcact

SEQ ID NO: 494801 - DNA, 15 bp, Homo sapiens
agtacactgcagcac

SEQ ID NO: 494802 - DNA, 15 bp, Homo sapiens
aagtacactgcagca

SEQ ID NO: 494803 - DNA, 15 bp, Homo sapiens
taagtacactgcagc

SEQ ID NO: 494804 - DNA, 15 bp, Homo sapiens
ataagtacactgcag

SEQ ID NO: 494805 - DNA, 15 bp, Homo sapiens
aataagtacactgca

SEQ ID NO: 494806 - DNA, 15 bp, Homo sapiens
aaataagtacactgc

SEQ ID NO: 494807 - DNA, 15 bp, Homo sapiens
aaaataagtacactg

SEQ ID NO: 494808 - DNA, 15 bp, Homo sapiens
taaaataagtacact

SEQ ID NO: 494809 - DNA, 15 bp, Homo sapiens
ataaaataagtacac

SEQ ID NO: 494810 - DNA, 15 bp, Homo sapiens
aataaaataagtaca

SEQ ID NO: 494811 - DNA, 15 bp, Homo sapiens
taataaaataagtac

SEQ ID NO: 494812 - DNA, 15 bp, Homo sapiens
gtaataaaataagta

SEQ ID NO: 494813 - DNA, 15 bp, Homo sapiens
agtaataaaataagt

SEQ ID NO: 494814 - DNA, 15 bp, Homo sapiens
aagtaataaaataag

SEQ ID NO: 494815 - DNA, 15 bp, Homo sapiens
gaagtaataaaataa

SEQ ID NO: 494816 - DNA, 15 bp, Homo sapiens
ggaagtaataaaata

SEQ ID NO: 494817 - DNA, 15 bp, Homo sapiens
gggaagtaataaaat

SEQ ID NO: 494818 - DNA, 15 bp, Homo sapiens
agggaagtaataaaa

SEQ ID NO: 494819 - DNA, 15 bp, Homo sapiens
tagggaagtaataaa

SEQ ID NO: 494820 - DNA, 15 bp, Homo sapiens
atagggaagtaataa

SEQ ID NO: 494821 - DNA, 15 bp, Homo sapiens
tatagggaagtaata

SEQ ID NO: 494822 - DNA, 15 bp, Homo sapiens
ctatagggaagtaat

SEQ ID NO: 494823 - DNA, 15 bp, Homo sapiens
gctatagggaagtaa

SEQ ID NO: 494824 - DNA, 15 bp, Homo sapiens
tgctatagggaagta

SEQ ID NO: 494825 - DNA, 15 bp, Homo sapiens
ttgctatagggaagt

SEQ ID NO: 494826 - DNA, 15 bp, Homo sapiens
cttgctatagggaag

SEQ ID NO: 494827 - DNA, 15 bp, Homo sapiens
acttgctatagggaa

SEQ ID NO: 494828 - DNA, 15 bp, Homo sapiens
tacttgctataggga

SEQ ID NO: 494829 - DNA, 15 bp, Homo sapiens
ctacttgctataggg

SEQ ID NO: 494830 - DNA, 15 bp, Homo sapiens
tctacttgctatagg

SEQ ID NO: 494831 - DNA, 15 bp, Homo sapiens
atctacttgctatag

SEQ ID NO: 494832 - DNA, 15 bp, Homo sapiens
tatctacttgctata

SEQ ID NO: 494833 - DNA, 15 bp, Homo sapiens
ctatctacttgctat

SEQ ID NO: 494834 - DNA, 15 bp, Homo sapiens
tctatctacttgcta

SEQ ID NO: 494835 - DNA, 15 bp, Homo sapiens
ttctatctacttgct

SEQ ID NO: 494836 - DNA, 15 bp, Homo sapiens
attctatctacttgc

SEQ ID NO: 494837 - DNA, 15 bp, Homo sapiens
aattctatctacttg

SEQ ID NO: 494838 - DNA, 15 bp, Homo sapiens
aaattctatctactt

SEQ ID NO: 494839 - DNA, 15 bp, Homo sapiens
gaaattctatctact

SEQ ID NO: 494840 - DNA, 15 bp, Homo sapiens
ggaaattctatctac

SEQ ID NO: 494841 - DNA, 15 bp, Homo sapiens
aggaaattctatcta

SEQ ID NO: 494842 - DNA, 15 bp, Homo sapiens
caggaaattctatct

SEQ ID NO: 494843 - DNA, 15 bp, Homo sapiens
acaggaaattctatc

SEQ ID NO: 494844 - DNA, 15 bp, Homo sapiens
aacaggaaattctat

SEQ ID NO: 494845 - DNA, 15 bp, Homo sapiens
taacaggaaattcta

SEQ ID NO: 494846 - DNA, 15 bp, Homo sapiens
gtaacaggaaattct

SEQ ID NO: 494847 - DNA, 15 bp, Homo sapiens
agtaacaggaaattc

SEQ ID NO: 494848 - DNA, 15 bp, Homo sapiens
aagtaacaggaaatt

SEQ ID NO: 494849 - DNA, 15 bp, Homo sapiens
gaagtaacaggaaat

SEQ ID NO: 494850 - DNA, 15 bp, Homo sapiens
ggaagtaacaggaaa

SEQ ID NO: 494851 - DNA, 15 bp, Homo sapiens
aggaagtaacaggaa

SEQ ID NO: 494852 - DNA, 15 bp, Homo sapiens
gaggaagtaacagga

SEQ ID NO: 494853 - DNA, 15 bp, Homo sapiens
agaggaagtaacagg

SEQ ID NO: 494854 - DNA, 15 bp, Homo sapiens
aagaggaagtaacag

SEQ ID NO: 494855 - DNA, 15 bp, Homo sapiens
aaagaggaagtaaca

SEQ ID NO: 494856 - DNA, 15 bp, Homo sapiens
aaaagaggaagtaac

SEQ ID NO: 494857 - DNA, 15 bp, Homo sapiens
aaaaagaggaagtaa

SEQ ID NO: 494858 - DNA, 15 bp, Homo sapiens
aaaaaagaggaagta

SEQ ID NO: 494859 - DNA, 15 bp, Homo sapiens
aaaaaaagaggaagt

SEQ ID NO: 494860 - DNA, 15 bp, Homo sapiens
caaaaaaagaggaag

SEQ ID NO: 494861 - DNA, 15 bp, Homo sapiens
acaaaaaaagaggaa

SEQ ID NO: 494862 - DNA, 15 bp, Homo sapiens
gacaaaaaaagagga

SEQ ID NO: 494863 - DNA, 15 bp, Homo sapiens
tgacaaaaaaagagg

SEQ ID NO: 494864 - DNA, 15 bp, Homo sapiens
atgacaaaaaaagag

SEQ ID NO: 494865 - DNA, 15 bp, Homo sapiens
aatgacaaaaaaaga

SEQ ID NO: 494866 - DNA, 15 bp, Homo sapiens
aaatgacaaaaaaag

SEQ ID NO: 494867 - DNA, 15 bp, Homo sapiens
gaaatgacaaaaaaa

SEQ ID NO: 494868 - DNA, 15 bp, Homo sapiens
agaaatgacaaaaaa

SEQ ID NO: 494869 - DNA, 15 bp, Homo sapiens
tagaaatgacaaaaa

SEQ ID NO: 494870 - DNA, 15 bp, Homo sapiens
ttagaaatgacaaaa

SEQ ID NO: 494871 - DNA, 15 bp, Homo sapiens
attagaaatgacaaa

SEQ ID NO: 494872 - DNA, 15 bp, Homo sapiens
aattagaaatgacaa

SEQ ID NO: 494873 - DNA, 15 bp, Homo sapiens
caattagaaatgaca

SEQ ID NO: 494874 - DNA, 15 bp, Homo sapiens
tcaattagaaatgac

SEQ ID NO: 494875 - DNA, 15 bp, Homo sapiens
gtcaattagaaatga

SEQ ID NO: 494876 - DNA, 15 bp, Homo sapiens
agtcaattagaaatg

SEQ ID NO: 494877 - DNA, 15 bp, Homo sapiens
cagtcaattagaaat

SEQ ID NO: 494878 - DNA, 15 bp, Homo sapiens
ccagtcaattagaaa

SEQ ID NO: 494879 - DNA, 15 bp, Homo sapiens
cccagtcaattagaa

SEQ ID NO: 494880 - DNA, 15 bp, Homo sapiens
tcccagtcaattaga

SEQ ID NO: 494881 - DNA, 15 bp, Homo sapiens
ctcccagtcaattag

SEQ ID NO: 494882 - DNA, 15 bp, Homo sapiens
cctcccagtcaatta

SEQ ID NO: 494883 - DNA, 15 bp, Homo sapiens
acctcccagtcaatt

SEQ ID NO: 494884 - DNA, 15 bp, Homo sapiens
tacctcccagtcaat

SEQ ID NO: 494885 - DNA, 15 bp, Homo sapiens
gtacctcccagtcaa

SEQ ID NO: 494886 - DNA, 15 bp, Homo sapiens
tgtacctcccagtca

SEQ ID NO: 494887 - DNA, 15 bp, Homo sapiens
atgtacctcccagtc

SEQ ID NO: 494888 - DNA, 15 bp, Homo sapiens
aatgtacctcccagt

SEQ ID NO: 494889 - DNA, 15 bp, Homo sapiens
taatgtacctcccag

SEQ ID NO: 494890 - DNA, 15 bp, Homo sapiens
ataatgtacctccca

SEQ ID NO: 494891 - DNA, 15 bp, Homo sapiens
tataatgtacctccc

SEQ ID NO: 494892 - DNA, 15 bp, Homo sapiens
atataatgtacctcc

SEQ ID NO: 494893 - DNA, 15 bp, Homo sapiens
aatataatgtacctc

SEQ ID NO: 494894 - DNA, 15 bp, Homo sapiens
caatataatgtacct

SEQ ID NO: 494895 - DNA, 15 bp, Homo sapiens
acaatataatgtacc

SEQ ID NO: 494896 - DNA, 15 bp, Homo sapiens
aacaatataatgtac

SEQ ID NO: 494897 - DNA, 15 bp, Homo sapiens
taacaatataatgta

SEQ ID NO: 494898 - DNA, 15 bp, Homo sapiens
gtaacaatataatgt

SEQ ID NO: 494899 - DNA, 15 bp, Homo sapiens
agtaacaatataatg

SEQ ID NO: 494900 - DNA, 15 bp, Homo sapiens
cagtaacaatataat

SEQ ID NO: 494901 - DNA, 15 bp, Homo sapiens
gcagtaacaatataa

SEQ ID NO: 494902 - DNA, 15 bp, Homo sapiens
tgcagtaacaatata

SEQ ID NO: 494903 - DNA, 15 bp, Homo sapiens
ctgcagtaacaatat

SEQ ID NO: 494904 - DNA, 15 bp, Homo sapiens
actgcagtaacaata

SEQ ID NO: 494905 - DNA, 15 bp, Homo sapiens
tactgcagtaacaat

SEQ ID NO: 494906 - DNA, 15 bp, Homo sapiens
ctactgcagtaacaa

SEQ ID NO: 494907 - DNA, 15 bp, Homo sapiens
tctactgcagtaaca

SEQ ID NO: 494908 - DNA, 15 bp, Homo sapiens
atctactgcagtaac

SEQ ID NO: 494909 - DNA, 15 bp, Homo sapiens
aatctactgcagtaa

SEQ ID NO: 494910 - DNA, 15 bp, Homo sapiens
aaatctactgcagta

SEQ ID NO: 494911 - DNA, 15 bp, Homo sapiens
taaatctactgcagt

SEQ ID NO: 494912 - DNA, 15 bp, Homo sapiens
gtaaatctactgcag

SEQ ID NO: 494913 - DNA, 15 bp, Homo sapiens
cgtaaatctactgca

SEQ ID NO: 494914 - DNA, 15 bp, Homo sapiens
acgtaaatctactgc

SEQ ID NO: 494915 - DNA, 15 bp, Homo sapiens
aacgtaaatctactg

SEQ ID NO: 494916 - DNA, 15 bp, Homo sapiens
taacgtaaatctact

SEQ ID NO: 494917 - DNA, 15 bp, Homo sapiens
ataacgtaaatctac

SEQ ID NO: 494918 - DNA, 15 bp, Homo sapiens
cataacgtaaatcta

SEQ ID NO: 494919 - DNA, 15 bp, Homo sapiens
ccataacgtaaatct

SEQ ID NO: 494920 - DNA, 15 bp, Homo sapiens
accataacgtaaatc

SEQ ID NO: 494921 - DNA, 15 bp, Homo sapiens
caccataacgtaaat

SEQ ID NO: 494922 - DNA, 15 bp, Homo sapiens
acaccataacgtaaa

SEQ ID NO: 494923 - DNA, 15 bp, Homo sapiens
aacaccataacgtaa

SEQ ID NO: 494924 - DNA, 15 bp, Homo sapiens
aaacaccataacgta

SEQ ID NO: 494925 - DNA, 15 bp, Homo sapiens
taaacaccataacgt

SEQ ID NO: 494926 - DNA, 15 bp, Homo sapiens
gtaaacaccataacg

SEQ ID NO: 494927 - DNA, 15 bp, Homo sapiens
ggtaaacaccataac

SEQ ID NO: 494928 - DNA, 15 bp, Homo sapiens
aggtaaacaccataa

SEQ ID NO: 494929 - DNA, 15 bp, Homo sapiens
caggtaaacaccata

SEQ ID NO: 494930 - DNA, 15 bp, Homo sapiens
acaggtaaacaccat

SEQ ID NO: 494931 - DNA, 15 bp, Homo sapiens
gacaggtaaacacca

SEQ ID NO: 494932 - DNA, 15 bp, Homo sapiens
ggacaggtaaacacc

SEQ ID NO: 494933 - DNA, 15 bp, Homo sapiens
tggacaggtaaacac

SEQ ID NO: 494934 - DNA, 15 bp, Homo sapiens
atggacaggtaaaca

SEQ ID NO: 494935 - DNA, 15 bp, Homo sapiens
catggacaggtaaac

SEQ ID NO: 494936 - DNA, 15 bp, Homo sapiens
acatggacaggtaaa

SEQ ID NO: 494937 - DNA, 15 bp, Homo sapiens
aacatggacaggtaa

SEQ ID NO: 494938 - DNA, 15 bp, Homo sapiens
taacatggacaggta

SEQ ID NO: 494939 - DNA, 15 bp, Homo sapiens
ctaacatggacaggt

SEQ ID NO: 494940 - DNA, 15 bp, Homo sapiens
tctaacatggacagg

SEQ ID NO: 494941 - DNA, 15 bp, Homo sapiens
ttctaacatggacag

SEQ ID NO: 494942 - DNA, 15 bp, Homo sapiens
attctaacatggaca

SEQ ID NO: 494943 - DNA, 15 bp, Homo sapiens
gattctaacatggac

SEQ ID NO: 494944 - DNA, 15 bp, Homo sapiens
tgattctaacatgga

SEQ ID NO: 494945 - DNA, 15 bp, Homo sapiens
ctgattctaacatgg

SEQ ID NO: 494946 - DNA, 15 bp, Homo sapiens
actgattctaacatg

SEQ ID NO: 494947 - DNA, 15 bp, Homo sapiens
aactgattctaacat

SEQ ID NO: 494948 - DNA, 15 bp, Homo sapiens
aaactgattctaaca

SEQ ID NO: 494949 - DNA, 15 bp, Homo sapiens
taaactgattctaac

SEQ ID NO: 494950 - DNA, 15 bp, Homo sapiens
gtaaactgattctaa

SEQ ID NO: 494951 - DNA, 15 bp, Homo sapiens
tgtaaactgattcta

SEQ ID NO: 494952 - DNA, 15 bp, Homo sapiens
atgtaaactgattct

SEQ ID NO: 494953 - DNA, 15 bp, Homo sapiens
aatgtaaactgattc

SEQ ID NO: 494954 - DNA, 15 bp, Homo sapiens
aaatgtaaactgatt

SEQ ID NO: 494955 - DNA, 15 bp, Homo sapiens
gaaatgtaaactgat

SEQ ID NO: 494956 - DNA, 15 bp, Homo sapiens
agaaatgtaaactga

SEQ ID NO: 494957 - DNA, 15 bp, Homo sapiens
cagaaatgtaaactg

SEQ ID NO: 494958 - DNA, 15 bp, Homo sapiens
ccagaaatgtaaact

SEQ ID NO: 494959 - DNA, 15 bp, Homo sapiens
tccagaaatgtaaac

SEQ ID NO: 494960 - DNA, 15 bp, Homo sapiens
ttccagaaatgtaaa

SEQ ID NO: 494961 - DNA, 15 bp, Homo sapiens
attccagaaatgtaa

SEQ ID NO: 494962 - DNA, 15 bp, Homo sapiens
gattccagaaatgta

SEQ ID NO: 494963 - DNA, 15 bp, Homo sapiens
agattccagaaatgt

SEQ ID NO: 494964 - DNA, 15 bp, Homo sapiens
cagattccagaaatg

SEQ ID NO: 494965 - DNA, 15 bp, Homo sapiens
ccagattccagaaat

SEQ ID NO: 494966 - DNA, 15 bp, Homo sapiens
tccagattccagaaa

SEQ ID NO: 494967 - DNA, 15 bp, Homo sapiens
ttccagattccagaa

SEQ ID NO: 494968 - DNA, 15 bp, Homo sapiens
attccagattccaga

SEQ ID NO: 494969 - DNA, 15 bp, Homo sapiens
tattccagattccag

SEQ ID NO: 494970 - DNA, 15 bp, Homo sapiens
ctattccagattcca

SEQ ID NO: 494971 - DNA, 15 bp, Homo sapiens
cctattccagattcc

SEQ ID NO: 494972 - DNA, 15 bp, Homo sapiens
tcctattccagattc

SEQ ID NO: 494973 - DNA, 15 bp, Homo sapiens
atcctattccagatt

SEQ ID NO: 494974 - DNA, 15 bp, Homo sapiens
tatcctattccagat

SEQ ID NO: 494975 - DNA, 15 bp, Homo sapiens
ttatcctattccaga

SEQ ID NO: 494976 - DNA, 15 bp, Homo sapiens
attatcctattccag

SEQ ID NO: 494977 - DNA, 15 bp, Homo sapiens
tattatcctattcca

SEQ ID NO: 494978 - DNA, 15 bp, Homo sapiens
atattatcctattcc

SEQ ID NO: 494979 - DNA, 15 bp, Homo sapiens
gatattatcctattc

SEQ ID NO: 494980 - DNA, 15 bp, Homo sapiens
agatattatcctatt

SEQ ID NO: 494981 - DNA, 15 bp, Homo sapiens
tagatattatcctat

SEQ ID NO: 494982 - DNA, 15 bp, Homo sapiens
atagatattatccta

SEQ ID NO: 494983 - DNA, 15 bp, Homo sapiens
aatagatattatcct

SEQ ID NO: 494984 - DNA, 15 bp, Homo sapiens
aaatagatattatcc

SEQ ID NO: 494985 - DNA, 15 bp, Homo sapiens
caaatagatattatc

SEQ ID NO: 494986 - DNA, 15 bp, Homo sapiens
tcaaatagatattat

SEQ ID NO: 494987 - DNA, 15 bp, Homo sapiens
atcaaatagatatta

SEQ ID NO: 494988 - DNA, 15 bp, Homo sapiens
aatcaaatagatatt

SEQ ID NO: 494989 - DNA, 15 bp, Homo sapiens
aaatcaaatagatat

SEQ ID NO: 494990 - DNA, 15 bp, Homo sapiens
caaatcaaatagata

SEQ ID NO: 494991 - DNA, 15 bp, Homo sapiens
tcaaatcaaatagat

SEQ ID NO: 494992 - DNA, 15 bp, Homo sapiens
ttcaaatcaaataga

SEQ ID NO: 494993 - DNA, 15 bp, Homo sapiens
tttcaaatcaaatag

SEQ ID NO: 494994 - DNA, 15 bp, Homo sapiens
atttcaaatcaaata

SEQ ID NO: 494995 - DNA, 15 bp, Homo sapiens
aatttcaaatcaaat

SEQ ID NO: 494996 - DNA, 15 bp, Homo sapiens
caatttcaaatcaaa

SEQ ID NO: 494997 - DNA, 15 bp, Homo sapiens
tcaatttcaaatcaa

SEQ ID NO: 494998 - DNA, 15 bp, Homo sapiens
ttcaatttcaaatca

SEQ ID NO: 494999 - DNA, 15 bp, Homo sapiens
gttcaatttcaaatc

SEQ ID NO: 495000 - DNA, 15 bp, Homo sapiens
tgttcaatttcaaat

SEQ ID NO: 495001 - DNA, 15 bp, Homo sapiens
ctgttcaatttcaaa

SEQ ID NO: 495002 - DNA, 15 bp, Homo sapiens
tctgttcaatttcaa

SEQ ID NO: 495003 - DNA, 15 bp, Homo sapiens
atctgttcaatttca

SEQ ID NO: 495004 - DNA, 15 bp, Homo sapiens
catctgttcaatttc

SEQ ID NO: 495005 - DNA, 15 bp, Homo sapiens
ccatctgttcaattt

SEQ ID NO: 495006 - DNA, 15 bp, Homo sapiens
accatctgttcaatt

SEQ ID NO: 495007 - DNA, 15 bp, Homo sapiens
taccatctgttcaat

SEQ ID NO: 495008 - DNA, 15 bp, Homo sapiens
ctaccatctgttcaa

SEQ ID NO: 495009 - DNA, 15 bp, Homo sapiens
gctaccatctgttca

SEQ ID NO: 495010 - DNA, 15 bp, Homo sapiens
tgctaccatctgttc

SEQ ID NO: 495011 - DNA, 15 bp, Homo sapiens
atgctaccatctgtt

SEQ ID NO: 495012 - DNA, 15 bp, Homo sapiens
aatgctaccatctgt

SEQ ID NO: 495013 - DNA, 15 bp, Homo sapiens
taatgctaccatctg

SEQ ID NO: 495014 - DNA, 15 bp, Homo sapiens
ataatgctaccatct

SEQ ID NO: 495015 - DNA, 15 bp, Homo sapiens
cataatgctaccatc

SEQ ID NO: 495016 - DNA, 15 bp, Homo sapiens
acataatgctaccat

SEQ ID NO: 495017 - DNA, 15 bp, Homo sapiens
aacataatgctacca

SEQ ID NO: 495018 - DNA, 15 bp, Homo sapiens
caacataatgctacc

SEQ ID NO: 495019 - DNA, 15 bp, Homo sapiens
ccaacataatgctac

SEQ ID NO: 495020 - DNA, 15 bp, Homo sapiens
accaacataatgcta

SEQ ID NO: 495021 - DNA, 15 bp, Homo sapiens
gaccaacataatgct

SEQ ID NO: 495022 - DNA, 15 bp, Homo sapiens
ggaccaacataatgc

SEQ ID NO: 495023 - DNA, 15 bp, Homo sapiens
tggaccaacataatg

SEQ ID NO: 495024 - DNA, 15 bp, Homo sapiens
ctggaccaacataat

SEQ ID NO: 495025 - DNA, 15 bp, Homo sapiens
tctggaccaacataa

SEQ ID NO: 495026 - DNA, 15 bp, Homo sapiens
atctggaccaacata

SEQ ID NO: 495027 - DNA, 15 bp, Homo sapiens
tatctggaccaacat

SEQ ID NO: 495028 - DNA, 15 bp, Homo sapiens
ttatctggaccaaca

SEQ ID NO: 495029 - DNA, 15 bp, Homo sapiens
attatctggaccaac

SEQ ID NO: 495030 - DNA, 15 bp, Homo sapiens
gattatctggaccaa

SEQ ID NO: 495031 - DNA, 15 bp, Homo sapiens
agattatctggacca

SEQ ID NO: 495032 - DNA, 15 bp, Homo sapiens
gagattatctggacc

SEQ ID NO: 495033 - DNA, 15 bp, Homo sapiens
tgagattatctggac

SEQ ID NO: 495034 - DNA, 15 bp, Homo sapiens
atgagattatctgga

SEQ ID NO: 495035 - DNA, 15 bp, Homo sapiens
aatgagattatctgg

SEQ ID NO: 495036 - DNA, 15 bp, Homo sapiens
aaatgagattatctg

SEQ ID NO: 495037 - DNA, 15 bp, Homo sapiens
gaaatgagattatct

SEQ ID NO: 495038 - DNA, 15 bp, Homo sapiens
agaaatgagattatc

SEQ ID NO: 495039 - DNA, 15 bp, Homo sapiens
gagaaatgagattat

SEQ ID NO: 495040 - DNA, 15 bp, Homo sapiens
tgagaaatgagatta

SEQ ID NO: 495041 - DNA, 15 bp, Homo sapiens
atgagaaatgagatt

SEQ ID NO: 495042 - DNA, 15 bp, Homo sapiens
aatgagaaatgagat

SEQ ID NO: 495043 - DNA, 15 bp, Homo sapiens
aaatgagaaatgaga

SEQ ID NO: 495044 - DNA, 15 bp, Homo sapiens
caaatgagaaatgag

SEQ ID NO: 495045 - DNA, 15 bp, Homo sapiens
ccaaatgagaaatga

SEQ ID NO: 495046 - DNA, 15 bp, Homo sapiens
tccaaatgagaaatg

SEQ ID NO: 495047 - DNA, 15 bp, Homo sapiens
gtccaaatgagaaat

SEQ ID NO: 495048 - DNA, 15 bp, Homo sapiens
tgtccaaatgagaaa

SEQ ID NO: 495049 - DNA, 15 bp, Homo sapiens
ttgtccaaatgagaa

SEQ ID NO: 495050 - DNA, 15 bp, Homo sapiens
cttgtccaaatgaga

SEQ ID NO: 495051 - DNA, 15 bp, Homo sapiens
tcttgtccaaatgag

SEQ ID NO: 495052 - DNA, 15 bp, Homo sapiens
atcttgtccaaatga

SEQ ID NO: 495053 - DNA, 15 bp, Homo sapiens
tatcttgtccaaatg

SEQ ID NO: 495054 - DNA, 15 bp, Homo sapiens
atatcttgtccaaat

SEQ ID NO: 495055 - DNA, 15 bp, Homo sapiens
aatatcttgtccaaa

SEQ ID NO: 495056 - DNA, 15 bp, Homo sapiens
aaatatcttgtccaa

SEQ ID NO: 495057 - DNA, 15 bp, Homo sapiens
aaaatatcttgtcca

SEQ ID NO: 495058 - DNA, 15 bp, Homo sapiens
caaaatatcttgtcc

SEQ ID NO: 495059 - DNA, 15 bp, Homo sapiens
ccaaaatatcttgtc

SEQ ID NO: 495060 - DNA, 15 bp, Homo sapiens
cccaaaatatcttgt

SEQ ID NO: 495061 - DNA, 15 bp, Homo sapiens
ccccaaaatatcttg

SEQ ID NO: 495062 - DNA, 15 bp, Homo sapiens
accccaaaatatctt

SEQ ID NO: 495063 - DNA, 15 bp, Homo sapiens
aaccccaaaatatct

SEQ ID NO: 495064 - DNA, 15 bp, Homo sapiens
aaaccccaaaatatc

SEQ ID NO: 495065 - DNA, 15 bp, Homo sapiens
caaaccccaaaatat

SEQ ID NO: 495066 - DNA, 15 bp, Homo sapiens
tcaaaccccaaaata

SEQ ID NO: 495067 - DNA, 15 bp, Homo sapiens
ttcaaaccccaaaat

SEQ ID NO: 495068 - DNA, 15 bp, Homo sapiens
tttcaaaccccaaaa

SEQ ID NO: 495069 - DNA, 15 bp, Homo sapiens
ttttcaaaccccaaa

SEQ ID NO: 495070 - DNA, 15 bp, Homo sapiens
tttttcaaaccccaa

SEQ ID NO: 495071 - DNA, 15 bp, Homo sapiens
atttttcaaacccca

SEQ ID NO: 495072 - DNA, 15 bp, Homo sapiens
aatttttcaaacccc

SEQ ID NO: 495073 - DNA, 15 bp, Homo sapiens
gaatttttcaaaccc

SEQ ID NO: 495074 - DNA, 15 bp, Homo sapiens
ggaatttttcaaacc

SEQ ID NO: 495075 - DNA, 15 bp, Homo sapiens
aggaatttttcaaac

SEQ ID NO: 495076 - DNA, 15 bp, Homo sapiens
taggaatttttcaaa

SEQ ID NO: 495077 - DNA, 15 bp, Homo sapiens
ataggaatttttcaa

SEQ ID NO: 495078 - DNA, 15 bp, Homo sapiens
tataggaatttttca

SEQ ID NO: 495079 - DNA, 15 bp, Homo sapiens
ttataggaatttttc

SEQ ID NO: 495080 - DNA, 15 bp, Homo sapiens
attataggaattttt

SEQ ID NO: 495081 - DNA, 15 bp, Homo sapiens
cattataggaatttt

SEQ ID NO: 495082 - DNA, 15 bp, Homo sapiens
tcattataggaattt

SEQ ID NO: 495083 - DNA, 15 bp, Homo sapiens
atcattataggaatt

SEQ ID NO: 495084 - DNA, 15 bp, Homo sapiens
aatcattataggaat

SEQ ID NO: 495085 - DNA, 15 bp, Homo sapiens
taatcattataggaa

SEQ ID NO: 495086 - DNA, 15 bp, Homo sapiens
ttaatcattatagga

SEQ ID NO: 495087 - DNA, 15 bp, Homo sapiens
tttaatcattatagg

SEQ ID NO: 495088 - DNA, 15 bp, Homo sapiens
ctttaatcattatag

SEQ ID NO: 495089 - DNA, 15 bp, Homo sapiens
cctttaatcattata

SEQ ID NO: 495090 - DNA, 15 bp, Homo sapiens
tcctttaatcattat

SEQ ID NO: 495091 - DNA, 15 bp, Homo sapiens
ttcctttaatcatta

SEQ ID NO: 495092 - DNA, 15 bp, Homo sapiens
tttcctttaatcatt

SEQ ID NO: 495093 - DNA, 15 bp, Homo sapiens
ttttcctttaatcat

SEQ ID NO: 495094 - DNA, 15 bp, Homo sapiens
tttttcctttaatca

SEQ ID NO: 495095 - DNA, 15 bp, Homo sapiens
ctttttcctttaatc

SEQ ID NO: 495096 - DNA, 15 bp, Homo sapiens
gctttttcctttaat

SEQ ID NO: 495097 - DNA, 15 bp, Homo sapiens
agctttttcctttaa

SEQ ID NO: 495098 - DNA, 15 bp, Homo sapiens
gagctttttccttta

SEQ ID NO: 495099 - DNA, 15 bp, Homo sapiens
agagctttttccttt

SEQ ID NO: 495100 - DNA, 15 bp, Homo sapiens
aagagctttttcctt

SEQ ID NO: 495101 - DNA, 15 bp, Homo sapiens
caagagctttttcct

SEQ ID NO: 495102 - DNA, 15 bp, Homo sapiens
acaagagctttttcc

SEQ ID NO: 495103 - DNA, 15 bp, Homo sapiens
cacaagagctttttc

SEQ ID NO: 495104 - DNA, 15 bp, Homo sapiens
tcacaagagcttttt

SEQ ID NO: 495105 - DNA, 15 bp, Homo sapiens
ctcacaagagctttt

SEQ ID NO: 495106 - DNA, 15 bp, Homo sapiens
actcacaagagcttt

SEQ ID NO: 495107 - DNA, 15 bp, Homo sapiens
aactcacaagagctt

SEQ ID NO: 495108 - DNA, 15 bp, Homo sapiens
taactcacaagagct

SEQ ID NO: 495109 - DNA, 15 bp, Homo sapiens
ataactcacaagagc

SEQ ID NO: 495110 - DNA, 15 bp, Homo sapiens
aataactcacaagag

SEQ ID NO: 495111 - DNA, 15 bp, Homo sapiens
caataactcacaaga

SEQ ID NO: 495112 - DNA, 15 bp, Homo sapiens
acaataactcacaag

SEQ ID NO: 495113 - DNA, 15 bp, Homo sapiens
tacaataactcacaa

SEQ ID NO: 495114 - DNA, 15 bp, Homo sapiens
atacaataactcaca

SEQ ID NO: 495115 - DNA, 15 bp, Homo sapiens
catacaataactcac

SEQ ID NO: 495116 - DNA, 15 bp, Homo sapiens
gcatacaataactca

SEQ ID NO: 495117 - DNA, 15 bp, Homo sapiens
cgcatacaataactc

SEQ ID NO: 495118 - DNA, 15 bp, Homo sapiens
ccgcatacaataact

SEQ ID NO: 495119 - DNA, 15 bp, Homo sapiens
tccgcatacaataac

SEQ ID NO: 495120 - DNA, 15 bp, Homo sapiens
ctccgcatacaataa

SEQ ID NO: 495121 - DNA, 15 bp, Homo sapiens
tctccgcatacaata

SEQ ID NO: 495122 - DNA, 15 bp, Homo sapiens
gtctccgcatacaat

SEQ ID NO: 495123 - DNA, 15 bp, Homo sapiens
tgtctccgcatacaa

SEQ ID NO: 495124 - DNA, 15 bp, Homo sapiens
gtgtctccgcataca

SEQ ID NO: 495125 - DNA, 15 bp, Homo sapiens
tgtgtctccgcatac

SEQ ID NO: 495126 - DNA, 15 bp, Homo sapiens
gtgtgtctccgcata

SEQ ID NO: 495127 - DNA, 15 bp, Homo sapiens
tgtgtgtctccgcat

SEQ ID NO: 495128 - DNA, 15 bp, Homo sapiens
gtgtgtgtctccgca

SEQ ID NO: 495129 - DNA, 15 bp, Homo sapiens
tgtgtgtgtctccgc

SEQ ID NO: 495130 - DNA, 15 bp, Homo sapiens
gtgtgtgtgtctccg

SEQ ID NO: 495131 - DNA, 15 bp, Homo sapiens
tgtgtgtgtgtctcc

SEQ ID NO: 495132 - DNA, 15 bp, Homo sapiens
gtgtgtgtgtgtctc

SEQ ID NO: 495133 - DNA, 15 bp, Homo sapiens
ctgtgtgtgtgtgtg

SEQ ID NO: 495134 - DNA, 15 bp, Homo sapiens
actgtgtgtgtgtgt

SEQ ID NO: 495135 - DNA, 15 bp, Homo sapiens
aactgtgtgtgtgtg

SEQ ID NO: 495136 - DNA, 15 bp, Homo sapiens
aaactgtgtgtgtgt

SEQ ID NO: 495137 - DNA, 15 bp, Homo sapiens
taaactgtgtgtgtg

SEQ ID NO: 495138 - DNA, 15 bp, Homo sapiens
ataaactgtgtgtgt

SEQ ID NO: 495139 - DNA, 15 bp, Homo sapiens
aataaactgtgtgtg

SEQ ID NO: 495140 - DNA, 15 bp, Homo sapiens
caataaactgtgtgt

SEQ ID NO: 495141 - DNA, 15 bp, Homo sapiens
gcaataaactgtgtg

SEQ ID NO: 495142 - DNA, 15 bp, Homo sapiens
tgcaataaactgtgt

SEQ ID NO: 495143 - DNA, 15 bp, Homo sapiens
atgcaataaactgtg

SEQ ID NO: 495144 - DNA, 15 bp, Homo sapiens
aatgcaataaactgt

SEQ ID NO: 495145 - DNA, 15 bp, Homo sapiens
caatgcaataaactg

SEQ ID NO: 495146 - DNA, 15 bp, Homo sapiens
acaatgcaataaact

SEQ ID NO: 495147 - DNA, 15 bp, Homo sapiens
aacaatgcaataaac

SEQ ID NO: 495148 - DNA, 15 bp, Homo sapiens
taacaatgcaataaa

SEQ ID NO: 495149 - DNA, 15 bp, Homo sapiens
ctaacaatgcaataa

SEQ ID NO: 495150 - DNA, 15 bp, Homo sapiens
tctaacaatgcaata

SEQ ID NO: 495151 - DNA, 15 bp, Homo sapiens
atctaacaatgcaat

SEQ ID NO: 495152 - DNA, 15 bp, Homo sapiens
aatctaacaatgcaa

SEQ ID NO: 495153 - DNA, 15 bp, Homo sapiens
aaatctaacaatgca

SEQ ID NO: 495154 - DNA, 15 bp, Homo sapiens
aaaatctaacaatgc

SEQ ID NO: 495155 - DNA, 15 bp, Homo sapiens
taaaatctaacaatg

SEQ ID NO: 495156 - DNA, 15 bp, Homo sapiens
ataaaatctaacaat

SEQ ID NO: 495157 - DNA, 15 bp, Homo sapiens
tataaaatctaacaa

SEQ ID NO: 495158 - DNA, 15 bp, Homo sapiens
gtataaaatctaaca

SEQ ID NO: 495159 - DNA, 15 bp, Homo sapiens
tgtataaaatctaac

SEQ ID NO: 495160 - DNA, 15 bp, Homo sapiens
atgtataaaatctaa

SEQ ID NO: 495161 - DNA, 15 bp, Homo sapiens
tatgtataaaatcta

SEQ ID NO: 495162 - DNA, 15 bp, Homo sapiens
ttatgtataaaatct

SEQ ID NO: 495163 - DNA, 15 bp, Homo sapiens
tttatgtataaaatc

SEQ ID NO: 495164 - DNA, 15 bp, Homo sapiens
ttttatgtataaaat

SEQ ID NO: 495165 - DNA, 15 bp, Homo sapiens
attttatgtataaaa

SEQ ID NO: 495166 - DNA, 15 bp, Homo sapiens
aattttatgtataaa

SEQ ID NO: 495167 - DNA, 15 bp, Homo sapiens
taattttatgtataa

SEQ ID NO: 495168 - DNA, 15 bp, Homo sapiens
gtaattttatgtata

SEQ ID NO: 495169 - DNA, 15 bp, Homo sapiens
ggtaattttatgtat

SEQ ID NO: 495170 - DNA, 15 bp, Homo sapiens
gggtaattttatgta

SEQ ID NO: 495171 - DNA, 15 bp, Homo sapiens
tgggtaattttatgt

SEQ ID NO: 495172 - DNA, 15 bp, Homo sapiens
ttgggtaattttatg

SEQ ID NO: 495173 - DNA, 15 bp, Homo sapiens
cttgggtaattttat

SEQ ID NO: 495174 - DNA, 15 bp, Homo sapiens
acttgggtaatttta

SEQ ID NO: 495175 - DNA, 15 bp, Homo sapiens
aacttgggtaatttt

SEQ ID NO: 495176 - DNA, 15 bp, Homo sapiens
caacttgggtaattt

SEQ ID NO: 495177 - DNA, 15 bp, Homo sapiens
gcaacttgggtaatt

SEQ ID NO: 495178 - DNA, 15 bp, Homo sapiens
tgcaacttgggtaat

SEQ ID NO: 495179 - DNA, 15 bp, Homo sapiens
ttgcaacttgggtaa

SEQ ID NO: 495180 - DNA, 15 bp, Homo sapiens
tttgcaacttgggta

SEQ ID NO: 495181 - DNA, 15 bp, Homo sapiens
atttgcaacttgggt

SEQ ID NO: 495182 - DNA, 15 bp, Homo sapiens
tatttgcaacttggg

SEQ ID NO: 495183 - DNA, 15 bp, Homo sapiens
atatttgcaacttgg

SEQ ID NO: 495184 - DNA, 15 bp, Homo sapiens
tatatttgcaacttg

SEQ ID NO: 495185 - DNA, 15 bp, Homo sapiens
atatatttgcaactt

SEQ ID NO: 495186 - DNA, 15 bp, Homo sapiens
catatatttgcaact

SEQ ID NO: 495187 - DNA, 15 bp, Homo sapiens
acatatatttgcaac

SEQ ID NO: 495188 - DNA, 15 bp, Homo sapiens
gacatatatttgcaa

SEQ ID NO: 495189 - DNA, 15 bp, Homo sapiens
agacatatatttgca

SEQ ID NO: 495190 - DNA, 15 bp, Homo sapiens
aagacatatatttgc

SEQ ID NO: 495191 - DNA, 15 bp, Homo sapiens
gaagacatatatttg

SEQ ID NO: 495192 - DNA, 15 bp, Homo sapiens
ggaagacatatattt

SEQ ID NO: 495193 - DNA, 15 bp, Homo sapiens
tggaagacatatatt

SEQ ID NO: 495194 - DNA, 15 bp, Homo sapiens
gtggaagacatatat

SEQ ID NO: 495195 - DNA, 15 bp, Homo sapiens
ggtggaagacatata

SEQ ID NO: 495196 - DNA, 15 bp, Homo sapiens
gggtggaagacatat

SEQ ID NO: 495197 - DNA, 15 bp, Homo sapiens
agggtggaagacata

SEQ ID NO: 495198 - DNA, 15 bp, Homo sapiens
aagggtggaagacat

SEQ ID NO: 495199 - DNA, 15 bp, Homo sapiens
caagggtggaagaca

SEQ ID NO: 495200 - DNA, 15 bp, Homo sapiens
tcaagggtggaagac

SEQ ID NO: 495201 - DNA, 15 bp, Homo sapiens
gtcaagggtggaaga

SEQ ID NO: 495202 - DNA, 15 bp, Homo sapiens
agtcaagggtggaag

SEQ ID NO: 495203 - DNA, 15 bp, Homo sapiens
gagtcaagggtggaa

SEQ ID NO: 495204 - DNA, 15 bp, Homo sapiens
agagtcaagggtgga

SEQ ID NO: 495205 - DNA, 15 bp, Homo sapiens
gagagtcaagggtgg

SEQ ID NO: 495206 - DNA, 15 bp, Homo sapiens
tgagagtcaagggtg

SEQ ID NO: 495207 - DNA, 15 bp, Homo sapiens
ctgagagtcaagggt

SEQ ID NO: 495208 - DNA, 15 bp, Homo sapiens
cctgagagtcaaggg

SEQ ID NO: 495209 - DNA, 15 bp, Homo sapiens
tcctgagagtcaagg

SEQ ID NO: 495210 - DNA, 15 bp, Homo sapiens
atcctgagagtcaag

SEQ ID NO: 495211 - DNA, 15 bp, Homo sapiens
tatcctgagagtcaa

SEQ ID NO: 495212 - DNA, 15 bp, Homo sapiens
ctatcctgagagtca

SEQ ID NO: 495213 - DNA, 15 bp, Homo sapiens
actatcctgagagtc

SEQ ID NO: 495214 - DNA, 15 bp, Homo sapiens
cactatcctgagagt

SEQ ID NO: 495215 - DNA, 15 bp, Homo sapiens
gcactatcctgagag

SEQ ID NO: 495216 - DNA, 15 bp, Homo sapiens
tgcactatcctgaga

SEQ ID NO: 495217 - DNA, 15 bp, Homo sapiens
ctgcactatcctgag

SEQ ID NO: 495218 - DNA, 15 bp, Homo sapiens
gctgcactatcctga

SEQ ID NO: 495219 - DNA, 15 bp, Homo sapiens
tgctgcactatcctg

SEQ ID NO: 495220 - DNA, 15 bp, Homo sapiens
ctgctgcactatcct

SEQ ID NO: 495221 - DNA, 15 bp, Homo sapiens
cctgctgcactatcc

SEQ ID NO: 495222 - DNA, 15 bp, Homo sapiens
tcctgctgcactatc

SEQ ID NO: 495223 - DNA, 15 bp, Homo sapiens
atcctgctgcactat

SEQ ID NO: 495224 - DNA, 15 bp, Homo sapiens
catcctgctgcacta

SEQ ID NO: 495225 - DNA, 15 bp, Homo sapiens
gcatcctgctgcact

SEQ ID NO: 495226 - DNA, 15 bp, Homo sapiens
tgcatcctgctgcac

SEQ ID NO: 495227 - DNA, 15 bp, Homo sapiens
ctgcatcctgctgca

SEQ ID NO: 495228 - DNA, 15 bp, Homo sapiens
gctgcatcctgctgc

SEQ ID NO: 495229 - DNA, 15 bp, Homo sapiens
cgctgcatcctgctg

SEQ ID NO: 495230 - DNA, 15 bp, Homo sapiens
ccgctgcatcctgct

SEQ ID NO: 495231 - DNA, 15 bp, Homo sapiens
tccgctgcatcctgc

SEQ ID NO: 495232 - DNA, 15 bp, Homo sapiens
ttccgctgcatcctg

SEQ ID NO: 495233 - DNA, 15 bp, Homo sapiens
gttccgctgcatcct

SEQ ID NO: 495234 - DNA, 15 bp, Homo sapiens
ggttccgctgcatcc

SEQ ID NO: 495235 - DNA, 15 bp, Homo sapiens
gggttccgctgcatc

SEQ ID NO: 495236 - DNA, 15 bp, Homo sapiens
ggggttccgctgcat

SEQ ID NO: 495237 - DNA, 15 bp, Homo sapiens
gggggttccgctgca

SEQ ID NO: 495238 - DNA, 15 bp, Homo sapiens
ggggggttccgctgc

SEQ ID NO: 495239 - DNA, 15 bp, Homo sapiens
gggggggttccgctg

SEQ ID NO: 495240 - DNA, 15 bp, Homo sapiens
cgggggggttccgct

SEQ ID NO: 495241 - DNA, 15 bp, Homo sapiens
tcgggggggttccgc

SEQ ID NO: 495242 - DNA, 15 bp, Homo sapiens
atcgggggggttccg

SEQ ID NO: 495243 - DNA, 15 bp, Homo sapiens
aatcgggggggttcc

SEQ ID NO: 495244 - DNA, 15 bp, Homo sapiens
aaatcgggggggttc

SEQ ID NO: 495245 - DNA, 15 bp, Homo sapiens
caaatcgggggggtt

SEQ ID NO: 495246 - DNA, 15 bp, Homo sapiens
gcaaatcgggggggt

SEQ ID NO: 495247 - DNA, 15 bp, Homo sapiens
ggcaaatcggggggg

SEQ ID NO: 495248 - DNA, 15 bp, Homo sapiens
cggcaaatcgggggg

SEQ ID NO: 495249 - DNA, 15 bp, Homo sapiens
tcggcaaatcggggg

SEQ ID NO: 495250 - DNA, 15 bp, Homo sapiens
gtcggcaaatcgggg

SEQ ID NO: 495251 - DNA, 15 bp, Homo sapiens
tgtcggcaaatcggg

SEQ ID NO: 495252 - DNA, 15 bp, Homo sapiens
ttgtcggcaaatcgg

SEQ ID NO: 495253 - DNA, 15 bp, Homo sapiens
cttgtcggcaaatcg

SEQ ID NO: 495254 - DNA, 15 bp, Homo sapiens
gcttgtcggcaaatc

SEQ ID NO: 495255 - DNA, 15 bp, Homo sapiens
ggcttgtcggcaaat

SEQ ID NO: 495256 - DNA, 15 bp, Homo sapiens
gggcttgtcggcaaa

SEQ ID NO: 495257 - DNA, 15 bp, Homo sapiens
tgggcttgtcggcaa

SEQ ID NO: 495258 - DNA, 15 bp, Homo sapiens
ctgggcttgtcggca

SEQ ID NO: 495259 - DNA, 15 bp, Homo sapiens
tctgggcttgtcggc

SEQ ID NO: 495260 - DNA, 15 bp, Homo sapiens
gtctgggcttgtcgg

SEQ ID NO: 495261 - DNA, 15 bp, Homo sapiens
ggtctgggcttgtcg

SEQ ID NO: 495262 - DNA, 15 bp, Homo sapiens
tggtctgggcttgtc

SEQ ID NO: 495263 - DNA, 15 bp, Homo sapiens
ttggtctgggcttgt

SEQ ID NO: 495264 - DNA, 15 bp, Homo sapiens
tttggtctgggcttg

SEQ ID NO: 495265 - DNA, 15 bp, Homo sapiens
gtttggtctgggctt

SEQ ID NO: 495266 - DNA, 15 bp, Homo sapiens
agtttggtctgggct

SEQ ID NO: 495267 - DNA, 15 bp, Homo sapiens
tagtttggtctgggc

SEQ ID NO: 495268 - DNA, 15 bp, Homo sapiens
ctagtttggtctggg

SEQ ID NO: 495269 - DNA, 15 bp, Homo sapiens
tctagtttggtctgg

SEQ ID NO: 495270 - DNA, 15 bp, Homo sapiens
ttctagtttggtctg

SEQ ID NO: 495271 - DNA, 15 bp, Homo sapiens
cttctagtttggtct

SEQ ID NO: 495272 - DNA, 15 bp, Homo sapiens
acttctagtttggtc

SEQ ID NO: 495273 - DNA, 15 bp, Homo sapiens
cacttctagtttggt

SEQ ID NO: 495274 - DNA, 15 bp, Homo sapiens
ccacttctagtttgg

SEQ ID NO: 495275 - DNA, 15 bp, Homo sapiens
gccacttctagtttg

SEQ ID NO: 495276 - DNA, 15 bp, Homo sapiens
ggccacttctagttt

SEQ ID NO: 495277 - DNA, 15 bp, Homo sapiens
gggccacttctagtt

SEQ ID NO: 495278 - DNA, 15 bp, Homo sapiens
agggccacttctagt

SEQ ID NO: 495279 - DNA, 15 bp, Homo sapiens
cagggccacttctag

SEQ ID NO: 495280 - DNA, 15 bp, Homo sapiens
acagggccacttcta

SEQ ID NO: 495281 - DNA, 15 bp, Homo sapiens
tacagggccacttct

SEQ ID NO: 495282 - DNA, 15 bp, Homo sapiens
gtacagggccacttc

SEQ ID NO: 495283 - DNA, 15 bp, Homo sapiens
tgtacagggccactt

SEQ ID NO: 495284 - DNA, 15 bp, Homo sapiens
atgtacagggccact

SEQ ID NO: 495285 - DNA, 15 bp, Homo sapiens
catgtacagggccac

SEQ ID NO: 495286 - DNA, 15 bp, Homo sapiens
acatgtacagggcca

SEQ ID NO: 495287 - DNA, 15 bp, Homo sapiens
aacatgtacagggcc

SEQ ID NO: 495288 - DNA, 15 bp, Homo sapiens
aaacatgtacagggc

SEQ ID NO: 495289 - DNA, 15 bp, Homo sapiens
gaaacatgtacaggg

SEQ ID NO: 495290 - DNA, 15 bp, Homo sapiens
agaaacatgtacagg

SEQ ID NO: 495291 - DNA, 15 bp, Homo sapiens
cagaaacatgtacag

SEQ ID NO: 495292 - DNA, 15 bp, Homo sapiens
acagaaacatgtaca

SEQ ID NO: 495293 - DNA, 15 bp, Homo sapiens
cacagaaacatgtac

SEQ ID NO: 495294 - DNA, 15 bp, Homo sapiens
ccacagaaacatgta

SEQ ID NO: 495295 - DNA, 15 bp, Homo sapiens
tccacagaaacatgt

SEQ ID NO: 495296 - DNA, 15 bp, Homo sapiens
ttccacagaaacatg

SEQ ID NO: 495297 - DNA, 15 bp, Homo sapiens
gttccacagaaacat

SEQ ID NO: 495298 - DNA, 15 bp, Homo sapiens
ggttccacagaaaca

SEQ ID NO: 495299 - DNA, 15 bp, Homo sapiens
gggttccacagaaac

SEQ ID NO: 495300 - DNA, 15 bp, Homo sapiens
agggttccacagaaa

SEQ ID NO: 495301 - DNA, 15 bp, Homo sapiens
cagggttccacagaa

SEQ ID NO: 495302 - DNA, 15 bp, Homo sapiens
tcagggttccacaga

SEQ ID NO: 495303 - DNA, 15 bp, Homo sapiens
gtcagggttccacag

SEQ ID NO: 495304 - DNA, 15 bp, Homo sapiens
tgtcagggttccaca

SEQ ID NO: 495305 - DNA, 15 bp, Homo sapiens
gtgtcagggttccac

SEQ ID NO: 495306 - DNA, 15 bp, Homo sapiens
agtgtcagggttcca

SEQ ID NO: 495307 - DNA, 15 bp, Homo sapiens
cagtgtcagggttcc

SEQ ID NO: 495308 - DNA, 15 bp, Homo sapiens
tcagtgtcagggttc

SEQ ID NO: 495309 - DNA, 15 bp, Homo sapiens
ttcagtgtcagggtt

SEQ ID NO: 495310 - DNA, 15 bp, Homo sapiens
cttcagtgtcagggt

SEQ ID NO: 495311 - DNA, 15 bp, Homo sapiens
gcttcagtgtcaggg

SEQ ID NO: 495312 - DNA, 15 bp, Homo sapiens
agcttcagtgtcagg

SEQ ID NO: 495313 - DNA, 15 bp, Homo sapiens
cagcttcagtgtcag

SEQ ID NO: 495314 - DNA, 15 bp, Homo sapiens
acagcttcagtgtca

SEQ ID NO: 495315 - DNA, 15 bp, Homo sapiens
aacagcttcagtgtc

SEQ ID NO: 495316 - DNA, 15 bp, Homo sapiens
gaacagcttcagtgt

SEQ ID NO: 495317 - DNA, 15 bp, Homo sapiens
agaacagcttcagtg

SEQ ID NO: 495318 - DNA, 15 bp, Homo sapiens
cagaacagcttcagt

SEQ ID NO: 495319 - DNA, 15 bp, Homo sapiens
ccagaacagcttcag

SEQ ID NO: 495320 - DNA, 15 bp, Homo sapiens
accagaacagcttca

SEQ ID NO: 495321 - DNA, 15 bp, Homo sapiens
aaccagaacagcttc

SEQ ID NO: 495322 - DNA, 15 bp, Homo sapiens
caaccagaacagctt

SEQ ID NO: 495323 - DNA, 15 bp, Homo sapiens
gcaaccagaacagct

SEQ ID NO: 495324 - DNA, 15 bp, Homo sapiens
ggcaaccagaacagc

SEQ ID NO: 495325 - DNA, 15 bp, Homo sapiens
tggcaaccagaacag

SEQ ID NO: 495326 - DNA, 15 bp, Homo sapiens
atggcaaccagaaca

SEQ ID NO: 495327 - DNA, 15 bp, Homo sapiens
catggcaaccagaac

SEQ ID NO: 495328 - DNA, 15 bp, Homo sapiens
acatggcaaccagaa

SEQ ID NO: 495329 - DNA, 15 bp, Homo sapiens
gacatggcaaccaga

SEQ ID NO: 495330 - DNA, 15 bp, Homo sapiens
ggacatggcaaccag

SEQ ID NO: 495331 - DNA, 15 bp, Homo sapiens
aggacatggcaacca

SEQ ID NO: 495332 - DNA, 15 bp, Homo sapiens
caggacatggcaacc

SEQ ID NO: 495333 - DNA, 15 bp, Homo sapiens
acaggacatggcaac

SEQ ID NO: 495334 - DNA, 15 bp, Homo sapiens
aacaggacatggcaa

SEQ ID NO: 495335 - DNA, 15 bp, Homo sapiens
aaacaggacatggca

SEQ ID NO: 495336 - DNA, 15 bp, Homo sapiens
gaaacaggacatggc

SEQ ID NO: 495337 - DNA, 15 bp, Homo sapiens
ggaaacaggacatgg

SEQ ID NO: 495338 - DNA, 15 bp, Homo sapiens
cggaaacaggacatg

SEQ ID NO: 495339 - DNA, 15 bp, Homo sapiens
gcggaaacaggacat

SEQ ID NO: 495340 - DNA, 15 bp, Homo sapiens
ggcggaaacaggaca

SEQ ID NO: 495341 - DNA, 15 bp, Homo sapiens
tggcggaaacaggac

SEQ ID NO: 495342 - DNA, 15 bp, Homo sapiens
gtggcggaaacagga

SEQ ID NO: 495343 - DNA, 15 bp, Homo sapiens
ggtggcggaaacagg

SEQ ID NO: 495344 - DNA, 15 bp, Homo sapiens
aggtggcggaaacag

SEQ ID NO: 495345 - DNA, 15 bp, Homo sapiens
gaggtggcggaaaca

SEQ ID NO: 495346 - DNA, 15 bp, Homo sapiens
agaggtggcggaaac

SEQ ID NO: 495347 - DNA, 15 bp, Homo sapiens
cagaggtggcggaaa

SEQ ID NO: 495348 - DNA, 15 bp, Homo sapiens
acagaggtggcggaa

SEQ ID NO: 495349 - DNA, 15 bp, Homo sapiens
cacagaggtggcgga

SEQ ID NO: 495350 - DNA, 15 bp, Homo sapiens
tcacagaggtggcgg

SEQ ID NO: 495351 - DNA, 15 bp, Homo sapiens
ctcacagaggtggcg

SEQ ID NO: 495352 - DNA, 15 bp, Homo sapiens
cctcacagaggtggc

SEQ ID NO: 495353 - DNA, 15 bp, Homo sapiens
tcctcacagaggtgg

SEQ ID NO: 495354 - DNA, 15 bp, Homo sapiens
ttcctcacagaggtg

SEQ ID NO: 495355 - DNA, 15 bp, Homo sapiens
cttcctcacagaggt

SEQ ID NO: 495356 - DNA, 15 bp, Homo sapiens
gcttcctcacagagg

SEQ ID NO: 495357 - DNA, 15 bp, Homo sapiens
tgcttcctcacagag

SEQ ID NO: 495358 - DNA, 15 bp, Homo sapiens
ctgcttcctcacaga

SEQ ID NO: 495359 - DNA, 15 bp, Homo sapiens
tctgcttcctcacag

SEQ ID NO: 495360 - DNA, 15 bp, Homo sapiens
atctgcttcctcaca

SEQ ID NO: 495361 - DNA, 15 bp, Homo sapiens
tatctgcttcctcac

SEQ ID NO: 495362 - DNA, 15 bp, Homo sapiens
atatctgcttcctca

SEQ ID NO: 495363 - DNA, 15 bp, Homo sapiens
gatatctgcttcctc

SEQ ID NO: 495364 - DNA, 15 bp, Homo sapiens
ggatatctgcttcct

SEQ ID NO: 495365 - DNA, 15 bp, Homo sapiens
cggatatctgcttcc

SEQ ID NO: 495366 - DNA, 15 bp, Homo sapiens
ccggatatctgcttc

SEQ ID NO: 495367 - DNA, 15 bp, Homo sapiens
accggatatctgctt

SEQ ID NO: 495368 - DNA, 15 bp, Homo sapiens
caccggatatctgct

SEQ ID NO: 495369 - DNA, 15 bp, Homo sapiens
acaccggatatctgc

SEQ ID NO: 495370 - DNA, 15 bp, Homo sapiens
cacaccggatatctg

SEQ ID NO: 495371 - DNA, 15 bp, Homo sapiens
ccacaccggatatct

SEQ ID NO: 495372 - DNA, 15 bp, Homo sapiens
cccacaccggatatc

SEQ ID NO: 495373 - DNA, 15 bp, Homo sapiens
ccccacaccggatat

SEQ ID NO: 495374 - DNA, 15 bp, Homo sapiens
accccacaccggata

SEQ ID NO: 495375 - DNA, 15 bp, Homo sapiens
caccccacaccggat

SEQ ID NO: 495376 - DNA, 15 bp, Homo sapiens
ccaccccacaccgga

SEQ ID NO: 495377 - DNA, 15 bp, Homo sapiens
tccaccccacaccgg

SEQ ID NO: 495378 - DNA, 15 bp, Homo sapiens
atccaccccacaccg

SEQ ID NO: 495379 - DNA, 15 bp, Homo sapiens
catccaccccacacc

SEQ ID NO: 495380 - DNA, 15 bp, Homo sapiens
tcatccaccccacac

SEQ ID NO: 495381 - DNA, 15 bp, Homo sapiens
ttcatccaccccaca

SEQ ID NO: 495382 - DNA, 15 bp, Homo sapiens
cttcatccaccccac

SEQ ID NO: 495383 - DNA, 15 bp, Homo sapiens
acttcatccacccca

SEQ ID NO: 495384 - DNA, 15 bp, Homo sapiens
cacttcatccacccc

SEQ ID NO: 495385 - DNA, 15 bp, Homo sapiens
acacttcatccaccc

SEQ ID NO: 495386 - DNA, 15 bp, Homo sapiens
gacacttcatccacc

SEQ ID NO: 495387 - DNA, 15 bp, Homo sapiens
tgacacttcatccac

SEQ ID NO: 495388 - DNA, 15 bp, Homo sapiens
ctgacacttcatcca

SEQ ID NO: 495389 - DNA, 15 bp, Homo sapiens
actgacacttcatcc

SEQ ID NO: 495390 - DNA, 15 bp, Homo sapiens
cactgacacttcatc

SEQ ID NO: 495391 - DNA, 15 bp, Homo sapiens
gcactgacacttcat

SEQ ID NO: 495392 - DNA, 15 bp, Homo sapiens
tgcactgacacttca

SEQ ID NO: 495393 - DNA, 15 bp, Homo sapiens
atgcactgacacttc

SEQ ID NO: 495394 - DNA, 15 bp, Homo sapiens
tatgcactgacactt

SEQ ID NO: 495395 - DNA, 15 bp, Homo sapiens
ttatgcactgacact

SEQ ID NO: 495396 - DNA, 15 bp, Homo sapiens
gttatgcactgacac

SEQ ID NO: 495397 - DNA, 15 bp, Homo sapiens
ggttatgcactgaca

SEQ ID NO: 495398 - DNA, 15 bp, Homo sapiens
aggttatgcactgac

SEQ ID NO: 495399 - DNA, 15 bp, Homo sapiens
gaggttatgcactga

SEQ ID NO: 495400 - DNA, 15 bp, Homo sapiens
agaggttatgcactg

SEQ ID NO: 495401 - DNA, 15 bp, Homo sapiens
aagaggttatgcact

SEQ ID NO: 495402 - DNA, 15 bp, Homo sapiens
caagaggttatgcac

SEQ ID NO: 495403 - DNA, 15 bp, Homo sapiens
gcaagaggttatgca

SEQ ID NO: 495404 - DNA, 15 bp, Homo sapiens
ggcaagaggttatgc

SEQ ID NO: 495405 - DNA, 15 bp, Homo sapiens
gggcaagaggttatg

SEQ ID NO: 495406 - DNA, 15 bp, Homo sapiens
tgggcaagaggttat

SEQ ID NO: 495407 - DNA, 15 bp, Homo sapiens
ttgggcaagaggtta

SEQ ID NO: 495408 - DNA, 15 bp, Homo sapiens
gttgggcaagaggtt

SEQ ID NO: 495409 - DNA, 15 bp, Homo sapiens
agttgggcaagaggt

SEQ ID NO: 495410 - DNA, 15 bp, Homo sapiens
tagttgggcaagagg

SEQ ID NO: 495411 - DNA, 15 bp, Homo sapiens
atagttgggcaagag

SEQ ID NO: 495412 - DNA, 15 bp, Homo sapiens
tatagttgggcaaga

SEQ ID NO: 495413 - DNA, 15 bp, Homo sapiens
ttatagttgggcaag

SEQ ID NO: 495414 - DNA, 15 bp, Homo sapiens
gttatagttgggcaa

SEQ ID NO: 495415 - DNA, 15 bp, Homo sapiens
tgttatagttgggca

SEQ ID NO: 495416 - DNA, 15 bp, Homo sapiens
gtgttatagttgggc

SEQ ID NO: 495417 - DNA, 15 bp, Homo sapiens
tgtgttatagttggg

SEQ ID NO: 495418 - DNA, 15 bp, Homo sapiens
atgtgttatagttgg

SEQ ID NO: 495419 - DNA, 15 bp, Homo sapiens
aatgtgttatagttg

SEQ ID NO: 495420 - DNA, 15 bp, Homo sapiens
gaatgtgttatagtt

SEQ ID NO: 495421 - DNA, 15 bp, Homo sapiens
tgaatgtgttatagt

SEQ ID NO: 495422 - DNA, 15 bp, Homo sapiens
atgaatgtgttatag

SEQ ID NO: 495423 - DNA, 15 bp, Homo sapiens
catgaatgtgttata

SEQ ID NO: 495424 - DNA, 15 bp, Homo sapiens
ccatgaatgtgttat

SEQ ID NO: 495425 - DNA, 15 bp, Homo sapiens
tccatgaatgtgtta

SEQ ID NO: 495426 - DNA, 15 bp, Homo sapiens
ctccatgaatgtgtt

SEQ ID NO: 495427 - DNA, 15 bp, Homo sapiens
actccatgaatgtgt

SEQ ID NO: 495428 - DNA, 15 bp, Homo sapiens
aactccatgaatgtg

SEQ ID NO: 495429 - DNA, 15 bp, Homo sapiens
aaactccatgaatgt

SEQ ID NO: 495430 - DNA, 15 bp, Homo sapiens
caaactccatgaatg

SEQ ID NO: 495431 - DNA, 15 bp, Homo sapiens
gcaaactccatgaat

SEQ ID NO: 495432 - DNA, 15 bp, Homo sapiens
ggcaaactccatgaa

SEQ ID NO: 495433 - DNA, 15 bp, Homo sapiens
aggcaaactccatga

SEQ ID NO: 495434 - DNA, 15 bp, Homo sapiens
gaggcaaactccatg

SEQ ID NO: 495435 - DNA, 15 bp, Homo sapiens
agaggcaaactccat

SEQ ID NO: 495436 - DNA, 15 bp, Homo sapiens
cagaggcaaactcca

SEQ ID NO: 495437 - DNA, 15 bp, Homo sapiens
acagaggcaaactcc

SEQ ID NO: 495438 - DNA, 15 bp, Homo sapiens
gacagaggcaaactc

SEQ ID NO: 495439 - DNA, 15 bp, Homo sapiens
tgacagaggcaaact

SEQ ID NO: 495440 - DNA, 15 bp, Homo sapiens
ctgacagaggcaaac

SEQ ID NO: 495441 - DNA, 15 bp, Homo sapiens
gctgacagaggcaaa

SEQ ID NO: 495442 - DNA, 15 bp, Homo sapiens
tgctgacagaggcaa

SEQ ID NO: 495443 - DNA, 15 bp, Homo sapiens
ttgctgacagaggca

SEQ ID NO: 495444 - DNA, 15 bp, Homo sapiens
attgctgacagaggc

SEQ ID NO: 495445 - DNA, 15 bp, Homo sapiens
tattgctgacagagg

SEQ ID NO: 495446 - DNA, 15 bp, Homo sapiens
atattgctgacagag

SEQ ID NO: 495447 - DNA, 15 bp, Homo sapiens
catattgctgacaga

SEQ ID NO: 495448 - DNA, 15 bp, Homo sapiens
tcatattgctgacag

SEQ ID NO: 495449 - DNA, 15 bp, Homo sapiens
atcatattgctgaca

SEQ ID NO: 495450 - DNA, 15 bp, Homo sapiens
catcatattgctgac

SEQ ID NO: 495451 - DNA, 15 bp, Homo sapiens
acatcatattgctga

SEQ ID NO: 495452 - DNA, 15 bp, Homo sapiens
gacatcatattgctg

SEQ ID NO: 495453 - DNA, 15 bp, Homo sapiens
tgacatcatattgct

SEQ ID NO: 495454 - DNA, 15 bp, Homo sapiens
ttgacatcatattgc

SEQ ID NO: 495455 - DNA, 15 bp, Homo sapiens
gttgacatcatattg

SEQ ID NO: 495456 - DNA, 15 bp, Homo sapiens
tgttgacatcatatt

SEQ ID NO: 495457 - DNA, 15 bp, Homo sapiens
ctgttgacatcatat

SEQ ID NO: 495458 - DNA, 15 bp, Homo sapiens
cctgttgacatcata

SEQ ID NO: 495459 - DNA, 15 bp, Homo sapiens
acctgttgacatcat

SEQ ID NO: 495460 - DNA, 15 bp, Homo sapiens
tacctgttgacatca

SEQ ID NO: 495461 - DNA, 15 bp, Homo sapiens
ttacctgttgacatc

SEQ ID NO: 495462 - DNA, 15 bp, Homo sapiens
tttacctgttgacat

SEQ ID NO: 495463 - DNA, 15 bp, Homo sapiens
atttacctgttgaca

SEQ ID NO: 495464 - DNA, 15 bp, Homo sapiens
catttacctgttgac

SEQ ID NO: 495465 - DNA, 15 bp, Homo sapiens
acatttacctgttga

SEQ ID NO: 495466 - DNA, 15 bp, Homo sapiens
cacatttacctgttg

SEQ ID NO: 495467 - DNA, 15 bp, Homo sapiens
tcacatttacctgtt

SEQ ID NO: 495468 - DNA, 15 bp, Homo sapiens
ttcacatttacctgt

SEQ ID NO: 495469 - DNA, 15 bp, Homo sapiens
attcacatttacctg

SEQ ID NO: 495470 - DNA, 15 bp, Homo sapiens
tattcacatttacct

SEQ ID NO: 495471 - DNA, 15 bp, Homo sapiens
ctattcacatttacc

SEQ ID NO: 495472 - DNA, 15 bp, Homo sapiens
actattcacatttac

SEQ ID NO: 495473 - DNA, 15 bp, Homo sapiens
cactattcacattta

SEQ ID NO: 495474 - DNA, 15 bp, Homo sapiens
ccactattcacattt

SEQ ID NO: 495475 - DNA, 15 bp, Homo sapiens
accactattcacatt

SEQ ID NO: 495476 - DNA, 15 bp, Homo sapiens
aaccactattcacat

SEQ ID NO: 495477 - DNA, 15 bp, Homo sapiens
aaaccactattcaca

SEQ ID NO: 495478 - DNA, 15 bp, Homo sapiens
aaaaccactattcac

SEQ ID NO: 495479 - DNA, 15 bp, Homo sapiens
aaaaaccactattca

SEQ ID NO: 495480 - DNA, 15 bp, Homo sapiens
aaaaaaccactattc

SEQ ID NO: 495481 - DNA, 15 bp, Homo sapiens
aaaaaaaccactatt

SEQ ID NO: 495482 - DNA, 15 bp, Homo sapiens
aaaaaaaaccactat

SEQ ID NO: 495483 - DNA, 15 bp, Homo sapiens
taaaaaaaaccacta

SEQ ID NO: 495484 - DNA, 15 bp, Homo sapiens
gtaaaaaaaaccact

SEQ ID NO: 495485 - DNA, 15 bp, Homo sapiens
agtaaaaaaaaccac

SEQ ID NO: 495486 - DNA, 15 bp, Homo sapiens
gagtaaaaaaaacca

SEQ ID NO: 495487 - DNA, 15 bp, Homo sapiens
tgagtaaaaaaaacc

SEQ ID NO: 495488 - DNA, 15 bp, Homo sapiens
ctgagtaaaaaaaac

SEQ ID NO: 495489 - DNA, 15 bp, Homo sapiens
actgagtaaaaaaaa

SEQ ID NO: 495490 - DNA, 15 bp, Homo sapiens
gactgagtaaaaaaa

SEQ ID NO: 495491 - DNA, 15 bp, Homo sapiens
agactgagtaaaaaa

SEQ ID NO: 495492 - DNA, 15 bp, Homo sapiens
cagactgagtaaaaa

SEQ ID NO: 495493 - DNA, 15 bp, Homo sapiens
gcagactgagtaaaa

SEQ ID NO: 495494 - DNA, 15 bp, Homo sapiens
ggcagactgagtaaa

SEQ ID NO: 495495 - DNA, 15 bp, Homo sapiens
aggcagactgagtaa

SEQ ID NO: 495496 - DNA, 15 bp, Homo sapiens
gaggcagactgagta

SEQ ID NO: 495497 - DNA, 15 bp, Homo sapiens
tgaggcagactgagt

SEQ ID NO: 495498 - DNA, 15 bp, Homo sapiens
ttgaggcagactgag

SEQ ID NO: 495499 - DNA, 15 bp, Homo sapiens
tttgaggcagactga

SEQ ID NO: 495500 - DNA, 15 bp, Homo sapiens
ctttgaggcagactg

SEQ ID NO: 495501 - DNA, 15 bp, Homo sapiens
gctttgaggcagact

SEQ ID NO: 495502 - DNA, 15 bp, Homo sapiens
tgctttgaggcagac

SEQ ID NO: 495503 - DNA, 15 bp, Homo sapiens
gtgctttgaggcaga

SEQ ID NO: 495504 - DNA, 15 bp, Homo sapiens
tgtgctttgaggcag

SEQ ID NO: 495505 - DNA, 15 bp, Homo sapiens
atgtgctttgaggca

SEQ ID NO: 495506 - DNA, 15 bp, Homo sapiens
catgtgctttgaggc

SEQ ID NO: 495507 - DNA, 15 bp, Homo sapiens
ccatgtgctttgagg

SEQ ID NO: 495508 - DNA, 15 bp, Homo sapiens
gccatgtgctttgag

SEQ ID NO: 495509 - DNA, 15 bp, Homo sapiens
tgccatgtgctttga

SEQ ID NO: 495510 - DNA, 15 bp, Homo sapiens
atgccatgtgctttg

SEQ ID NO: 495511 - DNA, 15 bp, Homo sapiens
gatgccatgtgcttt

SEQ ID NO: 495512 - DNA, 15 bp, Homo sapiens
agatgccatgtgctt

SEQ ID NO: 495513 - DNA, 15 bp, Homo sapiens
cagatgccatgtgct

SEQ ID NO: 495514 - DNA, 15 bp, Homo sapiens
tcagatgccatgtgc

SEQ ID NO: 495515 - DNA, 15 bp, Homo sapiens
atcagatgccatgtg

SEQ ID NO: 495516 - DNA, 15 bp, Homo sapiens
aatcagatgccatgt

SEQ ID NO: 495517 - DNA, 15 bp, Homo sapiens
aaatcagatgccatg

SEQ ID NO: 495518 - DNA, 15 bp, Homo sapiens
aaaatcagatgccat

SEQ ID NO: 495519 - DNA, 15 bp, Homo sapiens
caaaatcagatgcca

SEQ ID NO: 495520 - DNA, 15 bp, Homo sapiens
tcaaaatcagatgcc

SEQ ID NO: 495521 - DNA, 15 bp, Homo sapiens
ctcaaaatcagatgc

SEQ ID NO: 495522 - DNA, 15 bp, Homo sapiens
tctcaaaatcagatg

SEQ ID NO: 495523 - DNA, 15 bp, Homo sapiens
ttctcaaaatcagat

SEQ ID NO: 495524 - DNA, 15 bp, Homo sapiens
attctcaaaatcaga

SEQ ID NO: 495525 - DNA, 15 bp, Homo sapiens
cattctcaaaatcag

SEQ ID NO: 495526 - DNA, 15 bp, Homo sapiens
acattctcaaaatca

SEQ ID NO: 495527 - DNA, 15 bp, Homo sapiens
tacattctcaaaatc

SEQ ID NO: 495528 - DNA, 15 bp, Homo sapiens
atacattctcaaaat

SEQ ID NO: 495529 - DNA, 15 bp, Homo sapiens
aatacattctcaaaa

SEQ ID NO: 495530 - DNA, 15 bp, Homo sapiens
aaatacattctcaaa

SEQ ID NO: 495531 - DNA, 15 bp, Homo sapiens
taaatacattctcaa

SEQ ID NO: 495532 - DNA, 15 bp, Homo sapiens
ttaaatacattctca

SEQ ID NO: 495533 - DNA, 15 bp, Homo sapiens
cttaaatacattctc

SEQ ID NO: 495534 - DNA, 15 bp, Homo sapiens
ccttaaatacattct

SEQ ID NO: 495535 - DNA, 15 bp, Homo sapiens
accttaaatacattc

SEQ ID NO: 495536 - DNA, 15 bp, Homo sapiens
gaccttaaatacatt

SEQ ID NO: 495537 - DNA, 15 bp, Homo sapiens
tgaccttaaatacat

SEQ ID NO: 495538 - DNA, 15 bp, Homo sapiens
gtgaccttaaataca

SEQ ID NO: 495539 - DNA, 15 bp, Homo sapiens
agtgaccttaaatac

SEQ ID NO: 495540 - DNA, 15 bp, Homo sapiens
tagtgaccttaaata

SEQ ID NO: 495541 - DNA, 15 bp, Homo sapiens
gtagtgaccttaaat

SEQ ID NO: 495542 - DNA, 15 bp, Homo sapiens
agtagtgaccttaaa

SEQ ID NO: 495543 - DNA, 15 bp, Homo sapiens
aagtagtgaccttaa

SEQ ID NO: 495544 - DNA, 15 bp, Homo sapiens
aaagtagtgacctta

SEQ ID NO: 495545 - DNA, 15 bp, Homo sapiens
caaagtagtgacctt

SEQ ID NO: 495546 - DNA, 15 bp, Homo sapiens
acaaagtagtgacct

SEQ ID NO: 495547 - DNA, 15 bp, Homo sapiens
tacaaagtagtgacc

SEQ ID NO: 495548 - DNA, 15 bp, Homo sapiens
ttacaaagtagtgac

SEQ ID NO: 495549 - DNA, 15 bp, Homo sapiens
cttacaaagtagtga

SEQ ID NO: 495550 - DNA, 15 bp, Homo sapiens
acttacaaagtagtg

SEQ ID NO: 495551 - DNA, 15 bp, Homo sapiens
aacttacaaagtagt

SEQ ID NO: 495552 - DNA, 15 bp, Homo sapiens
aaacttacaaagtag

SEQ ID NO: 495553 - DNA, 15 bp, Homo sapiens
taaacttacaaagta

SEQ ID NO: 495554 - DNA, 15 bp, Homo sapiens
gtaaacttacaaagt

SEQ ID NO: 495555 - DNA, 15 bp, Homo sapiens
tgtaaacttacaaag

SEQ ID NO: 495556 - DNA, 15 bp, Homo sapiens
ctgtaaacttacaaa

SEQ ID NO: 495557 - DNA, 15 bp, Homo sapiens
cctgtaaacttacaa

SEQ ID NO: 495558 - DNA, 15 bp, Homo sapiens
ccctgtaaacttaca

SEQ ID NO: 495559 - DNA, 15 bp, Homo sapiens
cccctgtaaacttac

SEQ ID NO: 495560 - DNA, 15 bp, Homo sapiens
tcccctgtaaactta

SEQ ID NO: 495561 - DNA, 15 bp, Homo sapiens
ttcccctgtaaactt

SEQ ID NO: 495562 - DNA, 15 bp, Homo sapiens
tttcccctgtaaact

SEQ ID NO: 495563 - DNA, 15 bp, Homo sapiens
atttcccctgtaaac

SEQ ID NO: 495564 - DNA, 15 bp, Homo sapiens
aatttcccctgtaaa

SEQ ID NO: 495565 - DNA, 15 bp, Homo sapiens
gaatttcccctgtaa

SEQ ID NO: 495566 - DNA, 15 bp, Homo sapiens
tgaatttcccctgta

SEQ ID NO: 495567 - DNA, 15 bp, Homo sapiens
ttgaatttcccctgt

SEQ ID NO: 495568 - DNA, 15 bp, Homo sapiens
cttgaatttcccctg

SEQ ID NO: 495569 - DNA, 15 bp, Homo sapiens
acttgaatttcccct

SEQ ID NO: 495570 - DNA, 15 bp, Homo sapiens
tacttgaatttcccc

SEQ ID NO: 495571 - DNA, 15 bp, Homo sapiens
ctacttgaatttccc

SEQ ID NO: 495572 - DNA, 15 bp, Homo sapiens
gctacttgaatttcc

SEQ ID NO: 495573 - DNA, 15 bp, Homo sapiens
agctacttgaatttc

SEQ ID NO: 495574 - DNA, 15 bp, Homo sapiens
aagctacttgaattt

SEQ ID NO: 495575 - DNA, 15 bp, Homo sapiens
taagctacttgaatt

SEQ ID NO: 495576 - DNA, 15 bp, Homo sapiens
gtaagctacttgaat

SEQ ID NO: 495577 - DNA, 15 bp, Homo sapiens
agtaagctacttgaa

SEQ ID NO: 495578 - DNA, 15 bp, Homo sapiens
aagtaagctacttga

SEQ ID NO: 495579 - DNA, 15 bp, Homo sapiens
caagtaagctacttg

SEQ ID NO: 495580 - DNA, 15 bp, Homo sapiens
tcaagtaagctactt

SEQ ID NO: 495581 - DNA, 15 bp, Homo sapiens
ttcaagtaagctact

SEQ ID NO: 495582 - DNA, 15 bp, Homo sapiens
tttcaagtaagctac

SEQ ID NO: 495583 - DNA, 15 bp, Homo sapiens
atttcaagtaagcta

SEQ ID NO: 495584 - DNA, 15 bp, Homo sapiens
gatttcaagtaagct

SEQ ID NO: 495585 - DNA, 15 bp, Homo sapiens
ggatttcaagtaagc

SEQ ID NO: 495586 - DNA, 15 bp, Homo sapiens
aggatttcaagtaag

SEQ ID NO: 495587 - DNA, 15 bp, Homo sapiens
aaggatttcaagtaa

SEQ ID NO: 495588 - DNA, 15 bp, Homo sapiens
aaaggatttcaagta

SEQ ID NO: 495589 - DNA, 15 bp, Homo sapiens
aaaaggatttcaagt

SEQ ID NO: 495590 - DNA, 15 bp, Homo sapiens
gaaaaggatttcaag

SEQ ID NO: 495591 - DNA, 15 bp, Homo sapiens
agaaaaggatttcaa

SEQ ID NO: 495592 - DNA, 15 bp, Homo sapiens
cagaaaaggatttca

SEQ ID NO: 495593 - DNA, 15 bp, Homo sapiens
tcagaaaaggatttc

SEQ ID NO: 495594 - DNA, 15 bp, Homo sapiens
ttcagaaaaggattt

SEQ ID NO: 495595 - DNA, 15 bp, Homo sapiens
gttcagaaaaggatt

SEQ ID NO: 495596 - DNA, 15 bp, Homo sapiens
tgttcagaaaaggat

SEQ ID NO: 495597 - DNA, 15 bp, Homo sapiens
ttgttcagaaaagga

SEQ ID NO: 495598 - DNA, 15 bp, Homo sapiens
tttgttcagaaaagg

SEQ ID NO: 495599 - DNA, 15 bp, Homo sapiens
ctttgttcagaaaag

SEQ ID NO: 495600 - DNA, 15 bp, Homo sapiens
actttgttcagaaaa

SEQ ID NO: 495601 - DNA, 15 bp, Homo sapiens
tactttgttcagaaa

SEQ ID NO: 495602 - DNA, 15 bp, Homo sapiens
ttactttgttcagaa

SEQ ID NO: 495603 - DNA, 15 bp, Homo sapiens
cttactttgttcaga

SEQ ID NO: 495604 - DNA, 15 bp, Homo sapiens
tcttactttgttcag

SEQ ID NO: 495605 - DNA, 15 bp, Homo sapiens
atcttactttgttca

SEQ ID NO: 495606 - DNA, 15 bp, Homo sapiens
catcttactttgttc

SEQ ID NO: 495607 - DNA, 15 bp, Homo sapiens
tcatcttactttgtt

SEQ ID NO: 495608 - DNA, 15 bp, Homo sapiens
ttcatcttactttgt

SEQ ID NO: 495609 - DNA, 15 bp, Homo sapiens
tttcatcttactttg

SEQ ID NO: 495610 - DNA, 15 bp, Homo sapiens
ttttcatcttacttt

SEQ ID NO: 495611 - DNA, 15 bp, Homo sapiens
attttcatcttactt

SEQ ID NO: 495612 - DNA, 15 bp, Homo sapiens
tattttcatcttact

SEQ ID NO: 495613 - DNA, 15 bp, Homo sapiens
ttattttcatcttac

SEQ ID NO: 495614 - DNA, 15 bp, Homo sapiens
tttattttcatctta

SEQ ID NO: 495615 - DNA, 15 bp, Homo sapiens
ttttattttcatctt

SEQ ID NO: 495616 - DNA, 15 bp, Homo sapiens
tttttattttcatct

SEQ ID NO: 495617 - DNA, 15 bp, Homo sapiens
ctttttattttcatc

SEQ ID NO: 495618 - DNA, 15 bp, Homo sapiens
gctttttattttcat

SEQ ID NO: 495619 - DNA, 15 bp, Homo sapiens
tgctttttattttca

SEQ ID NO: 495620 - DNA, 15 bp, Homo sapiens
atgctttttattttc

SEQ ID NO: 495621 - DNA, 15 bp, Homo sapiens
aatgctttttatttt

SEQ ID NO: 495622 - DNA, 15 bp, Homo sapiens
aaatgctttttattt

SEQ ID NO: 495623 - DNA, 15 bp, Homo sapiens
caaatgctttttatt

SEQ ID NO: 495624 - DNA, 15 bp, Homo sapiens
tcaaatgctttttat

SEQ ID NO: 495625 - DNA, 15 bp, Homo sapiens
ttcaaatgcttttta

SEQ ID NO: 495626 - DNA, 15 bp, Homo sapiens
tttcaaatgcttttt

SEQ ID NO: 495627 - DNA, 15 bp, Homo sapiens
atttcaaatgctttt

SEQ ID NO: 495628 - DNA, 15 bp, Homo sapiens
tatttcaaatgcttt

SEQ ID NO: 495629 - DNA, 15 bp, Homo sapiens
ttatttcaaatgctt

SEQ ID NO: 495630 - DNA, 15 bp, Homo sapiens
tttatttcaaatgct

SEQ ID NO: 495631 - DNA, 15 bp, Homo sapiens
atttatttcaaatgc

SEQ ID NO: 495632 - DNA, 15 bp, Homo sapiens
aatttatttcaaatg

SEQ ID NO: 495633 - DNA, 15 bp, Homo sapiens
caatttatttcaaat

SEQ ID NO: 495634 - DNA, 15 bp, Homo sapiens
acaatttatttcaaa

SEQ ID NO: 495635 - DNA, 15 bp, Homo sapiens
aacaatttatttcaa

SEQ ID NO: 495636 - DNA, 15 bp, Homo sapiens
taacaatttatttca

SEQ ID NO: 495637 - DNA, 15 bp, Homo sapiens
ctaacaatttatttc

SEQ ID NO: 495638 - DNA, 15 bp, Homo sapiens
actaacaatttattt

SEQ ID NO: 495639 - DNA, 15 bp, Homo sapiens
gactaacaatttatt

SEQ ID NO: 495640 - DNA, 15 bp, Homo sapiens
agactaacaatttat

SEQ ID NO: 495641 - DNA, 15 bp, Homo sapiens
aagactaacaattta

SEQ ID NO: 495642 - DNA, 15 bp, Homo sapiens
gaagactaacaattt

SEQ ID NO: 495643 - DNA, 15 bp, Homo sapiens
ggaagactaacaatt

SEQ ID NO: 495644 - DNA, 15 bp, Homo sapiens
tggaagactaacaat

SEQ ID NO: 495645 - DNA, 15 bp, Homo sapiens
gtggaagactaacaa

SEQ ID NO: 495646 - DNA, 15 bp, Homo sapiens
agtggaagactaaca

SEQ ID NO: 495647 - DNA, 15 bp, Homo sapiens
cagtggaagactaac

SEQ ID NO: 495648 - DNA, 15 bp, Homo sapiens
tcagtggaagactaa

SEQ ID NO: 495649 - DNA, 15 bp, Homo sapiens
ctcagtggaagacta

SEQ ID NO: 495650 - DNA, 15 bp, Homo sapiens
actcagtggaagact

SEQ ID NO: 495651 - DNA, 15 bp, Homo sapiens
aactcagtggaagac

SEQ ID NO: 495652 - DNA, 15 bp, Homo sapiens
caactcagtggaaga

SEQ ID NO: 495653 - DNA, 15 bp, Homo sapiens
acaactcagtggaag

SEQ ID NO: 495654 - DNA, 15 bp, Homo sapiens
aacaactcagtggaa

SEQ ID NO: 495655 - DNA, 15 bp, Homo sapiens
taacaactcagtgga

SEQ ID NO: 495656 - DNA, 15 bp, Homo sapiens
ttaacaactcagtgg

SEQ ID NO: 495657 - DNA, 15 bp, Homo sapiens
attaacaactcagtg

SEQ ID NO: 495658 - DNA, 15 bp, Homo sapiens
tattaacaactcagt

SEQ ID NO: 495659 - DNA, 15 bp, Homo sapiens
atattaacaactcag

SEQ ID NO: 495660 - DNA, 15 bp, Homo sapiens
catattaacaactca

SEQ ID NO: 495661 - DNA, 15 bp, Homo sapiens
gcatattaacaactc

SEQ ID NO: 495662 - DNA, 15 bp, Homo sapiens
agcatattaacaact

SEQ ID NO: 495663 - DNA, 15 bp, Homo sapiens
tagcatattaacaac

SEQ ID NO: 495664 - DNA, 15 bp, Homo sapiens
atagcatattaacaa

SEQ ID NO: 495665 - DNA, 15 bp, Homo sapiens
tatagcatattaaca

SEQ ID NO: 495666 - DNA, 15 bp, Homo sapiens
gtatagcatattaac

SEQ ID NO: 495667 - DNA, 15 bp, Homo sapiens
tgtatagcatattaa

SEQ ID NO: 495668 - DNA, 15 bp, Homo sapiens
atgtatagcatatta

SEQ ID NO: 495669 - DNA, 15 bp, Homo sapiens
aatgtatagcatatt

SEQ ID NO: 495670 - DNA, 15 bp, Homo sapiens
aaatgtatagcatat

SEQ ID NO: 495671 - DNA, 15 bp, Homo sapiens
aaaatgtatagcata

SEQ ID NO: 495672 - DNA, 15 bp, Homo sapiens
taaaatgtatagcat

SEQ ID NO: 495673 - DNA, 15 bp, Homo sapiens
ttaaaatgtatagca

SEQ ID NO: 495674 - DNA, 15 bp, Homo sapiens
tttaaaatgtatagc

SEQ ID NO: 495675 - DNA, 15 bp, Homo sapiens
ttttaaaatgtatag

SEQ ID NO: 495676 - DNA, 15 bp, Homo sapiens
tttttaaaatgtata

SEQ ID NO: 495677 - DNA, 15 bp, Homo sapiens
atttttaaaatgtat

SEQ ID NO: 495678 - DNA, 15 bp, Homo sapiens
tatttttaaaatgta

SEQ ID NO: 495679 - DNA, 15 bp, Homo sapiens
ttatttttaaaatgt

SEQ ID NO: 495680 - DNA, 15 bp, Homo sapiens
gttatttttaaaatg

SEQ ID NO: 495681 - DNA, 15 bp, Homo sapiens
agttatttttaaaat

SEQ ID NO: 495682 - DNA, 15 bp, Homo sapiens
cagttatttttaaaa

SEQ ID NO: 495683 - DNA, 15 bp, Homo sapiens
ccagttatttttaaa

SEQ ID NO: 495684 - DNA, 15 bp, Homo sapiens
gccagttatttttaa

SEQ ID NO: 495685 - DNA, 15 bp, Homo sapiens
tgccagttattttta

SEQ ID NO: 495686 - DNA, 15 bp, Homo sapiens
ctgccagttattttt

SEQ ID NO: 495687 - DNA, 15 bp, Homo sapiens
actgccagttatttt

SEQ ID NO: 495688 - DNA, 15 bp, Homo sapiens
tactgccagttattt

SEQ ID NO: 495689 - DNA, 15 bp, Homo sapiens
ctactgccagttatt

SEQ ID NO: 495690 - DNA, 15 bp, Homo sapiens
tctactgccagttat

SEQ ID NO: 495691 - DNA, 15 bp, Homo sapiens
atctactgccagtta

SEQ ID NO: 495692 - DNA, 15 bp, Homo sapiens
catctactgccagtt

SEQ ID NO: 495693 - DNA, 15 bp, Homo sapiens
acatctactgccagt

SEQ ID NO: 495694 - DNA, 15 bp, Homo sapiens
aacatctactgccag

SEQ ID NO: 495695 - DNA, 15 bp, Homo sapiens
taacatctactgcca

SEQ ID NO: 495696 - DNA, 15 bp, Homo sapiens
gtaacatctactgcc

SEQ ID NO: 495697 - DNA, 15 bp, Homo sapiens
agtaacatctactgc

SEQ ID NO: 495698 - DNA, 15 bp, Homo sapiens
tagtaacatctactg

SEQ ID NO: 495699 - DNA, 15 bp, Homo sapiens
atagtaacatctact

SEQ ID NO: 495700 - DNA, 15 bp, Homo sapiens
gatagtaacatctac

SEQ ID NO: 495701 - DNA, 15 bp, Homo sapiens
tgatagtaacatcta

SEQ ID NO: 495702 - DNA, 15 bp, Homo sapiens
ctgatagtaacatct

SEQ ID NO: 495703 - DNA, 15 bp, Homo sapiens
actgatagtaacatc

SEQ ID NO: 495704 - DNA, 15 bp, Homo sapiens
aactgatagtaacat

SEQ ID NO: 495705 - DNA, 15 bp, Homo sapiens
taactgatagtaaca

SEQ ID NO: 495706 - DNA, 15 bp, Homo sapiens
ataactgatagtaac

SEQ ID NO: 495707 - DNA, 15 bp, Homo sapiens
cataactgatagtaa

SEQ ID NO: 495708 - DNA, 15 bp, Homo sapiens
tcataactgatagta

SEQ ID NO: 495709 - DNA, 15 bp, Homo sapiens
atcataactgatagt

SEQ ID NO: 495710 - DNA, 15 bp, Homo sapiens
aatcataactgatag

SEQ ID NO: 495711 - DNA, 15 bp, Homo sapiens
taatcataactgata

SEQ ID NO: 495712 - DNA, 15 bp, Homo sapiens
ataatcataactgat

SEQ ID NO: 495713 - DNA, 15 bp, Homo sapiens
cataatcataactga

SEQ ID NO: 495714 - DNA, 15 bp, Homo sapiens
acataatcataactg

SEQ ID NO: 495715 - DNA, 15 bp, Homo sapiens
tacataatcataact

SEQ ID NO: 495716 - DNA, 15 bp, Homo sapiens
ttacataatcataac

SEQ ID NO: 495717 - DNA, 15 bp, Homo sapiens
attacataatcataa

SEQ ID NO: 495718 - DNA, 15 bp, Homo sapiens
aattacataatcata

SEQ ID NO: 495719 - DNA, 15 bp, Homo sapiens
aaattacataatcat

SEQ ID NO: 495720 - DNA, 15 bp, Homo sapiens
taaattacataatca

SEQ ID NO: 495721 - DNA, 15 bp, Homo sapiens
gtaaattacataatc

SEQ ID NO: 495722 - DNA, 15 bp, Homo sapiens
agtaaattacataat

SEQ ID NO: 495723 - DNA, 15 bp, Homo sapiens
gagtaaattacataa

SEQ ID NO: 495724 - DNA, 15 bp, Homo sapiens
agagtaaattacata

SEQ ID NO: 495725 - DNA, 15 bp, Homo sapiens
cagagtaaattacat

SEQ ID NO: 495726 - DNA, 15 bp, Homo sapiens
gcagagtaaattaca

SEQ ID NO: 495727 - DNA, 15 bp, Homo sapiens
ggcagagtaaattac

SEQ ID NO: 495728 - DNA, 15 bp, Homo sapiens
aggcagagtaaatta

SEQ ID NO: 495729 - DNA, 15 bp, Homo sapiens
taggcagagtaaatt

SEQ ID NO: 495730 - DNA, 15 bp, Homo sapiens
ttaggcagagtaaat

SEQ ID NO: 495731 - DNA, 15 bp, Homo sapiens
cttaggcagagtaaa

SEQ ID NO: 495732 - DNA, 15 bp, Homo sapiens
acttaggcagagtaa

SEQ ID NO: 495733 - DNA, 15 bp, Homo sapiens
aacttaggcagagta

SEQ ID NO: 495734 - DNA, 15 bp, Homo sapiens
caacttaggcagagt

SEQ ID NO: 495735 - DNA, 15 bp, Homo sapiens
acaacttaggcagag

SEQ ID NO: 495736 - DNA, 15 bp, Homo sapiens
tacaacttaggcaga

SEQ ID NO: 495737 - DNA, 15 bp, Homo sapiens
ctacaacttaggcag

SEQ ID NO: 495738 - DNA, 15 bp, Homo sapiens
tctacaacttaggca

SEQ ID NO: 495739 - DNA, 15 bp, Homo sapiens
atctacaacttaggc

SEQ ID NO: 495740 - DNA, 15 bp, Homo sapiens
tatctacaacttagg

SEQ ID NO: 495741 - DNA, 15 bp, Homo sapiens
ctatctacaacttag

SEQ ID NO: 495742 - DNA, 15 bp, Homo sapiens
actatctacaactta

SEQ ID NO: 495743 - DNA, 15 bp, Homo sapiens
cactatctacaactt

SEQ ID NO: 495744 - DNA, 15 bp, Homo sapiens
tcactatctacaact

SEQ ID NO: 495745 - DNA, 15 bp, Homo sapiens
ttcactatctacaac

SEQ ID NO: 495746 - DNA, 15 bp, Homo sapiens
cttcactatctacaa

SEQ ID NO: 495747 - DNA, 15 bp, Homo sapiens
acttcactatctaca

SEQ ID NO: 495748 - DNA, 15 bp, Homo sapiens
aacttcactatctac

SEQ ID NO: 495749 - DNA, 15 bp, Homo sapiens
aaacttcactatcta

SEQ ID NO: 495750 - DNA, 15 bp, Homo sapiens
aaaacttcactatct

SEQ ID NO: 495751 - DNA, 15 bp, Homo sapiens
taaaacttcactatc

SEQ ID NO: 495752 - DNA, 15 bp, Homo sapiens
gtaaaacttcactat

SEQ ID NO: 495753 - DNA, 15 bp, Homo sapiens
tgtaaaacttcacta

SEQ ID NO: 495754 - DNA, 15 bp, Homo sapiens
ttgtaaaacttcact

SEQ ID NO: 495755 - DNA, 15 bp, Homo sapiens
tttgtaaaacttcac

SEQ ID NO: 495756 - DNA, 15 bp, Homo sapiens
gtttgtaaaacttca

SEQ ID NO: 495757 - DNA, 15 bp, Homo sapiens
tgtttgtaaaacttc

SEQ ID NO: 495758 - DNA, 15 bp, Homo sapiens
atgtttgtaaaactt

SEQ ID NO: 495759 - DNA, 15 bp, Homo sapiens
aatgtttgtaaaact

SEQ ID NO: 495760 - DNA, 15 bp, Homo sapiens
caatgtttgtaaaac

SEQ ID NO: 495761 - DNA, 15 bp, Homo sapiens
ccaatgtttgtaaaa

SEQ ID NO: 495762 - DNA, 15 bp, Homo sapiens
gccaatgtttgtaaa

SEQ ID NO: 495763 - DNA, 15 bp, Homo sapiens
cgccaatgtttgtaa

SEQ ID NO: 495764 - DNA, 15 bp, Homo sapiens
acgccaatgtttgta

SEQ ID NO: 495765 - DNA, 15 bp, Homo sapiens
tacgccaatgtttgt

SEQ ID NO: 495766 - DNA, 15 bp, Homo sapiens
atacgccaatgtttg

SEQ ID NO: 495767 - DNA, 15 bp, Homo sapiens
catacgccaatgttt

SEQ ID NO: 495768 - DNA, 15 bp, Homo sapiens
acatacgccaatgtt

SEQ ID NO: 495769 - DNA, 15 bp, Homo sapiens
aacatacgccaatgt

SEQ ID NO: 495770 - DNA, 15 bp, Homo sapiens
aaacatacgccaatg

SEQ ID NO: 495771 - DNA, 15 bp, Homo sapiens
aaaacatacgccaat

SEQ ID NO: 495772 - DNA, 15 bp, Homo sapiens
caaaacatacgccaa

SEQ ID NO: 495773 - DNA, 15 bp, Homo sapiens
tcaaaacatacgcca

SEQ ID NO: 495774 - DNA, 15 bp, Homo sapiens
ctcaaaacatacgcc

SEQ ID NO: 495775 - DNA, 15 bp, Homo sapiens
actcaaaacatacgc

SEQ ID NO: 495776 - DNA, 15 bp, Homo sapiens
tactcaaaacatacg

SEQ ID NO: 495777 - DNA, 15 bp, Homo sapiens
ttactcaaaacatac

SEQ ID NO: 495778 - DNA, 15 bp, Homo sapiens
tttactcaaaacata

SEQ ID NO: 495779 - DNA, 15 bp, Homo sapiens
atttactcaaaacat

SEQ ID NO: 495780 - DNA, 15 bp, Homo sapiens
aatttactcaaaaca

SEQ ID NO: 495781 - DNA, 15 bp, Homo sapiens
caatttactcaaaac

SEQ ID NO: 495782 - DNA, 15 bp, Homo sapiens
acaatttactcaaaa

SEQ ID NO: 495783 - DNA, 15 bp, Homo sapiens
tacaatttactcaaa

SEQ ID NO: 495784 - DNA, 15 bp, Homo sapiens
ctacaatttactcaa

SEQ ID NO: 495785 - DNA, 15 bp, Homo sapiens
cctacaatttactca

SEQ ID NO: 495786 - DNA, 15 bp, Homo sapiens
acctacaatttactc

SEQ ID NO: 495787 - DNA, 15 bp, Homo sapiens
cacctacaatttact

SEQ ID NO: 495788 - DNA, 15 bp, Homo sapiens
ccacctacaatttac

SEQ ID NO: 495789 - DNA, 15 bp, Homo sapiens
cccacctacaattta

SEQ ID NO: 495790 - DNA, 15 bp, Homo sapiens
tcccacctacaattt

SEQ ID NO: 495791 - DNA, 15 bp, Homo sapiens
ttcccacctacaatt

SEQ ID NO: 495792 - DNA, 15 bp, Homo sapiens
attcccacctacaat

SEQ ID NO: 495793 - DNA, 15 bp, Homo sapiens
tattcccacctacaa

SEQ ID NO: 495794 - DNA, 15 bp, Homo sapiens
ctattcccacctaca

SEQ ID NO: 495795 - DNA, 15 bp, Homo sapiens
gctattcccacctac

SEQ ID NO: 495796 - DNA, 15 bp, Homo sapiens
agctattcccaccta

SEQ ID NO: 495797 - DNA, 15 bp, Homo sapiens
tagctattcccacct

SEQ ID NO: 495798 - DNA, 15 bp, Homo sapiens
atagctattcccacc

SEQ ID NO: 495799 - DNA, 15 bp, Homo sapiens
aatagctattcccac

SEQ ID NO: 495800 - DNA, 15 bp, Homo sapiens
aaatagctattccca

SEQ ID NO: 495801 - DNA, 15 bp, Homo sapiens
aaaatagctattccc

SEQ ID NO: 495802 - DNA, 15 bp, Homo sapiens
taaaatagctattcc

SEQ ID NO: 495803 - DNA, 15 bp, Homo sapiens
ataaaatagctattc

SEQ ID NO: 495804 - DNA, 15 bp, Homo sapiens
aataaaatagctatt

SEQ ID NO: 495805 - DNA, 15 bp, Homo sapiens
gaataaaatagctat

SEQ ID NO: 495806 - DNA, 15 bp, Homo sapiens
agaataaaatagcta

SEQ ID NO: 495807 - DNA, 15 bp, Homo sapiens
cagaataaaatagct

SEQ ID NO: 495808 - DNA, 15 bp, Homo sapiens
acagaataaaatagc

SEQ ID NO: 495809 - DNA, 15 bp, Homo sapiens
cacagaataaaatag

SEQ ID NO: 495810 - DNA, 15 bp, Homo sapiens
ccacagaataaaata

SEQ ID NO: 495811 - DNA, 15 bp, Homo sapiens
tccacagaataaaat

SEQ ID NO: 495812 - DNA, 15 bp, Homo sapiens
gtccacagaataaaa

SEQ ID NO: 495813 - DNA, 15 bp, Homo sapiens
tgtccacagaataaa

SEQ ID NO: 495814 - DNA, 15 bp, Homo sapiens
atgtccacagaataa

SEQ ID NO: 495815 - DNA, 15 bp, Homo sapiens
aatgtccacagaata

SEQ ID NO: 495816 - DNA, 15 bp, Homo sapiens
caatgtccacagaat

SEQ ID NO: 495817 - DNA, 15 bp, Homo sapiens
acaatgtccacagaa

SEQ ID NO: 495818 - DNA, 15 bp, Homo sapiens
tacaatgtccacaga

SEQ ID NO: 495819 - DNA, 15 bp, Homo sapiens
ctacaatgtccacag

SEQ ID NO: 495820 - DNA, 15 bp, Homo sapiens
tctacaatgtccaca

SEQ ID NO: 495821 - DNA, 15 bp, Homo sapiens
ctctacaatgtccac

SEQ ID NO: 495822 - DNA, 15 bp, Homo sapiens
actctacaatgtcca

SEQ ID NO: 495823 - DNA, 15 bp, Homo sapiens
gactctacaatgtcc

SEQ ID NO: 495824 - DNA, 15 bp, Homo sapiens
ggactctacaatgtc

SEQ ID NO: 495825 - DNA, 15 bp, Homo sapiens
tggactctacaatgt

SEQ ID NO: 495826 - DNA, 15 bp, Homo sapiens
ttggactctacaatg

SEQ ID NO: 495827 - DNA, 15 bp, Homo sapiens
cttggactctacaat

SEQ ID NO: 495828 - DNA, 15 bp, Homo sapiens
tcttggactctacaa

SEQ ID NO: 495829 - DNA, 15 bp, Homo sapiens
atcttggactctaca

SEQ ID NO: 495830 - DNA, 15 bp, Homo sapiens
tatcttggactctac

SEQ ID NO: 495831 - DNA, 15 bp, Homo sapiens
ttatcttggactcta

SEQ ID NO: 495832 - DNA, 15 bp, Homo sapiens
cttatcttggactct

SEQ ID NO: 495833 - DNA, 15 bp, Homo sapiens
acttatcttggactc

SEQ ID NO: 495834 - DNA, 15 bp, Homo sapiens
tacttatcttggact

SEQ ID NO: 495835 - DNA, 15 bp, Homo sapiens
gtacttatcttggac

SEQ ID NO: 495836 - DNA, 15 bp, Homo sapiens
ggtacttatcttgga

SEQ ID NO: 495837 - DNA, 15 bp, Homo sapiens
aggtacttatcttgg

SEQ ID NO: 495838 - DNA, 15 bp, Homo sapiens
aaggtacttatcttg

SEQ ID NO: 495839 - DNA, 15 bp, Homo sapiens
aaaggtacttatctt

SEQ ID NO: 495840 - DNA, 15 bp, Homo sapiens
gaaaggtacttatct

SEQ ID NO: 495841 - DNA, 15 bp, Homo sapiens
ggaaaggtacttatc

SEQ ID NO: 495842 - DNA, 15 bp, Homo sapiens
aggaaaggtacttat

SEQ ID NO: 495843 - DNA, 15 bp, Homo sapiens
caggaaaggtactta

SEQ ID NO: 495844 - DNA, 15 bp, Homo sapiens
acaggaaaggtactt

SEQ ID NO: 495845 - DNA, 15 bp, Homo sapiens
cacaggaaaggtact

SEQ ID NO: 495846 - DNA, 15 bp, Homo sapiens
tcacaggaaaggtac

SEQ ID NO: 495847 - DNA, 15 bp, Homo sapiens
ctcacaggaaaggta

SEQ ID NO: 495848 - DNA, 15 bp, Homo sapiens
cctcacaggaaaggt

SEQ ID NO: 495849 - DNA, 15 bp, Homo sapiens
acctcacaggaaagg

SEQ ID NO: 495850 - DNA, 15 bp, Homo sapiens
aacctcacaggaaag

SEQ ID NO: 495851 - DNA, 15 bp, Homo sapiens
taacctcacaggaaa

SEQ ID NO: 495852 - DNA, 15 bp, Homo sapiens
ctaacctcacaggaa

SEQ ID NO: 495853 - DNA, 15 bp, Homo sapiens
actaacctcacagga

SEQ ID NO: 495854 - DNA, 15 bp, Homo sapiens
cactaacctcacagg

SEQ ID NO: 495855 - DNA, 15 bp, Homo sapiens
tcactaacctcacag

SEQ ID NO: 495856 - DNA, 15 bp, Homo sapiens
ttcactaacctcaca

SEQ ID NO: 495857 - DNA, 15 bp, Homo sapiens
tttcactaacctcac

SEQ ID NO: 495858 - DNA, 15 bp, Homo sapiens
ctttcactaacctca

SEQ ID NO: 495859 - DNA, 15 bp, Homo sapiens
cctttcactaacctc

SEQ ID NO: 495860 - DNA, 15 bp, Homo sapiens
tcctttcactaacct

SEQ ID NO: 495861 - DNA, 15 bp, Homo sapiens
ttcctttcactaacc

SEQ ID NO: 495862 - DNA, 15 bp, Homo sapiens
cttcctttcactaac

SEQ ID NO: 495863 - DNA, 15 bp, Homo sapiens
acttcctttcactaa

SEQ ID NO: 495864 - DNA, 15 bp, Homo sapiens
aacttcctttcacta

SEQ ID NO: 495865 - DNA, 15 bp, Homo sapiens
aaacttcctttcact

SEQ ID NO: 495866 - DNA, 15 bp, Homo sapiens
aaaacttcctttcac

SEQ ID NO: 495867 - DNA, 15 bp, Homo sapiens
aaaaacttcctttca

SEQ ID NO: 495868 - DNA, 15 bp, Homo sapiens
caaaaacttcctttc

SEQ ID NO: 495869 - DNA, 15 bp, Homo sapiens
ccaaaaacttccttt

SEQ ID NO: 495870 - DNA, 15 bp, Homo sapiens
gccaaaaacttcctt

SEQ ID NO: 495871 - DNA, 15 bp, Homo sapiens
agccaaaaacttcct

SEQ ID NO: 495872 - DNA, 15 bp, Homo sapiens
aagccaaaaacttcc

SEQ ID NO: 495873 - DNA, 15 bp, Homo sapiens
aaagccaaaaacttc

SEQ ID NO: 495874 - DNA, 15 bp, Homo sapiens
taaagccaaaaactt

SEQ ID NO: 495875 - DNA, 15 bp, Homo sapiens
ataaagccaaaaact

SEQ ID NO: 495876 - DNA, 15 bp, Homo sapiens
gataaagccaaaaac

SEQ ID NO: 495877 - DNA, 15 bp, Homo sapiens
tgataaagccaaaaa

SEQ ID NO: 495878 - DNA, 15 bp, Homo sapiens
atgataaagccaaaa

SEQ ID NO: 495879 - DNA, 15 bp, Homo sapiens
aatgataaagccaaa

SEQ ID NO: 495880 - DNA, 15 bp, Homo sapiens
aaatgataaagccaa

SEQ ID NO: 495881 - DNA, 15 bp, Homo sapiens
caaatgataaagcca

SEQ ID NO: 495882 - DNA, 15 bp, Homo sapiens
tcaaatgataaagcc

SEQ ID NO: 495883 - DNA, 15 bp, Homo sapiens
ttcaaatgataaagc

SEQ ID NO: 495884 - DNA, 15 bp, Homo sapiens
cttcaaatgataaag

SEQ ID NO: 495885 - DNA, 15 bp, Homo sapiens
gcttcaaatgataaa

SEQ ID NO: 495886 - DNA, 15 bp, Homo sapiens
tgcttcaaatgataa

SEQ ID NO: 495887 - DNA, 15 bp, Homo sapiens
atgcttcaaatgata

SEQ ID NO: 495888 - DNA, 15 bp, Homo sapiens
aatgcttcaaatgat

SEQ ID NO: 495889 - DNA, 15 bp, Homo sapiens
aaatgcttcaaatga

SEQ ID NO: 495890 - DNA, 15 bp, Homo sapiens
caaatgcttcaaatg

SEQ ID NO: 495891 - DNA, 15 bp, Homo sapiens
gcaaatgcttcaaat

SEQ ID NO: 495892 - DNA, 15 bp, Homo sapiens
agcaaatgcttcaaa

SEQ ID NO: 495893 - DNA, 15 bp, Homo sapiens
gagcaaatgcttcaa

SEQ ID NO: 495894 - DNA, 15 bp, Homo sapiens
agagcaaatgcttca

SEQ ID NO: 495895 - DNA, 15 bp, Homo sapiens
cagagcaaatgcttc

SEQ ID NO: 495896 - DNA, 15 bp, Homo sapiens
gcagagcaaatgctt

SEQ ID NO: 495897 - DNA, 15 bp, Homo sapiens
agcagagcaaatgct

SEQ ID NO: 495898 - DNA, 15 bp, Homo sapiens
gagcagagcaaatgc

SEQ ID NO: 495899 - DNA, 15 bp, Homo sapiens
agagcagagcaaatg

SEQ ID NO: 495900 - DNA, 15 bp, Homo sapiens
aagagcagagcaaat

SEQ ID NO: 495901 - DNA, 15 bp, Homo sapiens
gaagagcagagcaaa

SEQ ID NO: 495902 - DNA, 15 bp, Homo sapiens
ggaagagcagagcaa

SEQ ID NO: 495903 - DNA, 15 bp, Homo sapiens
aggaagagcagagca

SEQ ID NO: 495904 - DNA, 15 bp, Homo sapiens
taggaagagcagagc

SEQ ID NO: 495905 - DNA, 15 bp, Homo sapiens
gtaggaagagcagag

SEQ ID NO: 495906 - DNA, 15 bp, Homo sapiens
agtaggaagagcaga

SEQ ID NO: 495907 - DNA, 15 bp, Homo sapiens
gagtaggaagagcag

SEQ ID NO: 495908 - DNA, 15 bp, Homo sapiens
ggagtaggaagagca

SEQ ID NO: 495909 - DNA, 15 bp, Homo sapiens
aggagtaggaagagc

SEQ ID NO: 495910 - DNA, 15 bp, Homo sapiens
aaggagtaggaagag

SEQ ID NO: 495911 - DNA, 15 bp, Homo sapiens
aaaggagtaggaaga

SEQ ID NO: 495912 - DNA, 15 bp, Homo sapiens
aaaaggagtaggaag

SEQ ID NO: 495913 - DNA, 15 bp, Homo sapiens
caaaaggagtaggaa

SEQ ID NO: 495914 - DNA, 15 bp, Homo sapiens
ccaaaaggagtagga

SEQ ID NO: 495915 - DNA, 15 bp, Homo sapiens
cccaaaaggagtagg

SEQ ID NO: 495916 - DNA, 15 bp, Homo sapiens
acccaaaaggagtag

SEQ ID NO: 495917 - DNA, 15 bp, Homo sapiens
cacccaaaaggagta

SEQ ID NO: 495918 - DNA, 15 bp, Homo sapiens
ccacccaaaaggagt

SEQ ID NO: 495919 - DNA, 15 bp, Homo sapiens
tccacccaaaaggag

SEQ ID NO: 495920 - DNA, 15 bp, Homo sapiens
ctccacccaaaagga

SEQ ID NO: 495921 - DNA, 15 bp, Homo sapiens
gctccacccaaaagg

SEQ ID NO: 495922 - DNA, 15 bp, Homo sapiens
agctccacccaaaag

SEQ ID NO: 495923 - DNA, 15 bp, Homo sapiens
aagctccacccaaaa

SEQ ID NO: 495924 - DNA, 15 bp, Homo sapiens
taagctccacccaaa

SEQ ID NO: 495925 - DNA, 15 bp, Homo sapiens
ataagctccacccaa

SEQ ID NO: 495926 - DNA, 15 bp, Homo sapiens
gataagctccaccca

SEQ ID NO: 495927 - DNA, 15 bp, Homo sapiens
tgataagctccaccc

SEQ ID NO: 495928 - DNA, 15 bp, Homo sapiens
ctgataagctccacc

SEQ ID NO: 495929 - DNA, 15 bp, Homo sapiens
cctgataagctccac

SEQ ID NO: 495930 - DNA, 15 bp, Homo sapiens
acctgataagctcca

SEQ ID NO: 495931 - DNA, 15 bp, Homo sapiens
aacctgataagctcc

SEQ ID NO: 495932 - DNA, 15 bp, Homo sapiens
gaacctgataagctc

SEQ ID NO: 495933 - DNA, 15 bp, Homo sapiens
agaacctgataagct

SEQ ID NO: 495934 - DNA, 15 bp, Homo sapiens
gagaacctgataagc

SEQ ID NO: 495935 - DNA, 15 bp, Homo sapiens
ggagaacctgataag

SEQ ID NO: 495936 - DNA, 15 bp, Homo sapiens
tggagaacctgataa

SEQ ID NO: 495937 - DNA, 15 bp, Homo sapiens
atggagaacctgata

SEQ ID NO: 495938 - DNA, 15 bp, Homo sapiens
aatggagaacctgat

SEQ ID NO: 495939 - DNA, 15 bp, Homo sapiens
caatggagaacctga

SEQ ID NO: 495940 - DNA, 15 bp, Homo sapiens
ccaatggagaacctg

SEQ ID NO: 495941 - DNA, 15 bp, Homo sapiens
gccaatggagaacct

SEQ ID NO: 495942 - DNA, 15 bp, Homo sapiens
tgccaatggagaacc

SEQ ID NO: 495943 - DNA, 15 bp, Homo sapiens
ctgccaatggagaac

SEQ ID NO: 495944 - DNA, 15 bp, Homo sapiens
cctgccaatggagaa

SEQ ID NO: 495945 - DNA, 15 bp, Homo sapiens
gcctgccaatggaga

SEQ ID NO: 495946 - DNA, 15 bp, Homo sapiens
tgcctgccaatggag

SEQ ID NO: 495947 - DNA, 15 bp, Homo sapiens
ctgcctgccaatgga

SEQ ID NO: 495948 - DNA, 15 bp, Homo sapiens
cctgcctgccaatgg

SEQ ID NO: 495949 - DNA, 15 bp, Homo sapiens
ccctgcctgccaatg

SEQ ID NO: 495950 - DNA, 15 bp, Homo sapiens
gccctgcctgccaat

SEQ ID NO: 495951 - DNA, 15 bp, Homo sapiens
agccctgcctgccaa

SEQ ID NO: 495952 - DNA, 15 bp, Homo sapiens
gagccctgcctgcca

SEQ ID NO: 495953 - DNA, 15 bp, Homo sapiens
agagccctgcctgcc

SEQ ID NO: 495954 - DNA, 15 bp, Homo sapiens
tagagccctgcctgc

SEQ ID NO: 495955 - DNA, 15 bp, Homo sapiens
ttagagccctgcctg

SEQ ID NO: 495956 - DNA, 15 bp, Homo sapiens
cttagagccctgcct

SEQ ID NO: 495957 - DNA, 15 bp, Homo sapiens
acttagagccctgcc

SEQ ID NO: 495958 - DNA, 15 bp, Homo sapiens
cacttagagccctgc

SEQ ID NO: 495959 - DNA, 15 bp, Homo sapiens
gcacttagagccctg

SEQ ID NO: 495960 - DNA, 15 bp, Homo sapiens
tgcacttagagccct

SEQ ID NO: 495961 - DNA, 15 bp, Homo sapiens
ctgcacttagagccc

SEQ ID NO: 495962 - DNA, 15 bp, Homo sapiens
actgcacttagagcc

SEQ ID NO: 495963 - DNA, 15 bp, Homo sapiens
tactgcacttagagc

SEQ ID NO: 495964 - DNA, 15 bp, Homo sapiens
ttactgcacttagag

SEQ ID NO: 495965 - DNA, 15 bp, Homo sapiens
gttactgcacttaga

SEQ ID NO: 495966 - DNA, 15 bp, Homo sapiens
agttactgcacttag

SEQ ID NO: 495967 - DNA, 15 bp, Homo sapiens
aagttactgcactta

SEQ ID NO: 495968 - DNA, 15 bp, Homo sapiens
caagttactgcactt

SEQ ID NO: 495969 - DNA, 15 bp, Homo sapiens
tcaagttactgcact

SEQ ID NO: 495970 - DNA, 15 bp, Homo sapiens
atcaagttactgcac

SEQ ID NO: 495971 - DNA, 15 bp, Homo sapiens
aatcaagttactgca

SEQ ID NO: 495972 - DNA, 15 bp, Homo sapiens
aaatcaagttactgc

SEQ ID NO: 495973 - DNA, 15 bp, Homo sapiens
caaatcaagttactg

SEQ ID NO: 495974 - DNA, 15 bp, Homo sapiens
gcaaatcaagttact

SEQ ID NO: 495975 - DNA, 15 bp, Homo sapiens
agcaaatcaagttac

SEQ ID NO: 495976 - DNA, 15 bp, Homo sapiens
cagcaaatcaagtta

SEQ ID NO: 495977 - DNA, 15 bp, Homo sapiens
acagcaaatcaagtt

SEQ ID NO: 495978 - DNA, 15 bp, Homo sapiens
aacagcaaatcaagt

SEQ ID NO: 495979 - DNA, 15 bp, Homo sapiens
caacagcaaatcaag

SEQ ID NO: 495980 - DNA, 15 bp, Homo sapiens
acaacagcaaatcaa

SEQ ID NO: 495981 - DNA, 15 bp, Homo sapiens
tacaacagcaaatca

SEQ ID NO: 495982 - DNA, 15 bp, Homo sapiens
atacaacagcaaatc

SEQ ID NO: 495983 - DNA, 15 bp, Homo sapiens
aatacaacagcaaat

SEQ ID NO: 495984 - DNA, 15 bp, Homo sapiens
aaatacaacagcaaa

SEQ ID NO: 495985 - DNA, 15 bp, Homo sapiens
caaatacaacagcaa

SEQ ID NO: 495986 - DNA, 15 bp, Homo sapiens
gcaaatacaacagca

SEQ ID NO: 495987 - DNA, 15 bp, Homo sapiens
agcaaatacaacagc

SEQ ID NO: 495988 - DNA, 15 bp, Homo sapiens
aagcaaatacaacag

SEQ ID NO: 495989 - DNA, 15 bp, Homo sapiens
taagcaaatacaaca

SEQ ID NO: 495990 - DNA, 15 bp, Homo sapiens
ctaagcaaatacaac

SEQ ID NO: 495991 - DNA, 15 bp, Homo sapiens
cctaagcaaatacaa

SEQ ID NO: 495992 - DNA, 15 bp, Homo sapiens
tcctaagcaaataca

SEQ ID NO: 495993 - DNA, 15 bp, Homo sapiens
ttcctaagcaaatac

SEQ ID NO: 495994 - DNA, 15 bp, Homo sapiens
cttcctaagcaaata

SEQ ID NO: 495995 - DNA, 15 bp, Homo sapiens
tcttcctaagcaaat

SEQ ID NO: 495996 - DNA, 15 bp, Homo sapiens
ctcttcctaagcaaa

SEQ ID NO: 495997 - DNA, 15 bp, Homo sapiens
gctcttcctaagcaa

SEQ ID NO: 495998 - DNA, 15 bp, Homo sapiens
tgctcttcctaagca

SEQ ID NO: 495999 - DNA, 15 bp, Homo sapiens
ctgctcttcctaagc

SEQ ID NO: 496000 - DNA, 15 bp, Homo sapiens
gctgctcttcctaag

SEQ ID NO: 496001 - DNA, 15 bp, Homo sapiens
tgctgctcttcctaa

SEQ ID NO: 496002 - DNA, 15 bp, Homo sapiens
gtgctgctcttccta

SEQ ID NO: 496003 - DNA, 15 bp, Homo sapiens
agtgctgctcttcct

SEQ ID NO: 496004 - DNA, 15 bp, Homo sapiens
aagtgctgctcttcc

SEQ ID NO: 496005 - DNA, 15 bp, Homo sapiens
gaagtgctgctcttc

SEQ ID NO: 496006 - DNA, 15 bp, Homo sapiens
tgaagtgctgctctt

SEQ ID NO: 496007 - DNA, 15 bp, Homo sapiens
ctgaagtgctgctct

SEQ ID NO: 496008 - DNA, 15 bp, Homo sapiens
tctgaagtgctgctc

SEQ ID NO: 496009 - DNA, 15 bp, Homo sapiens
ttctgaagtgctgct

SEQ ID NO: 496010 - DNA, 15 bp, Homo sapiens
tttctgaagtgctgc

SEQ ID NO: 496011 - DNA, 15 bp, Homo sapiens
ttttctgaagtgctg

SEQ ID NO: 496012 - DNA, 15 bp, Homo sapiens
cttttctgaagtgct

SEQ ID NO: 496013 - DNA, 15 bp, Homo sapiens
tcttttctgaagtgc

SEQ ID NO: 496014 - DNA, 15 bp, Homo sapiens
ctcttttctgaagtg

SEQ ID NO: 496015 - DNA, 15 bp, Homo sapiens
actcttttctgaagt

SEQ ID NO: 496016 - DNA, 15 bp, Homo sapiens
cactcttttctgaag

SEQ ID NO: 496017 - DNA, 15 bp, Homo sapiens
tcactcttttctgaa

SEQ ID NO: 496018 - DNA, 15 bp, Homo sapiens
atcactcttttctga

SEQ ID NO: 496019 - DNA, 15 bp, Homo sapiens
catcactcttttctg

SEQ ID NO: 496020 - DNA, 15 bp, Homo sapiens
ccatcactcttttct

SEQ ID NO: 496021 - DNA, 15 bp, Homo sapiens
gccatcactcttttc

SEQ ID NO: 496022 - DNA, 15 bp, Homo sapiens
tgccatcactctttt

SEQ ID NO: 496023 - DNA, 15 bp, Homo sapiens
gtgccatcactcttt

SEQ ID NO: 496024 - DNA, 15 bp, Homo sapiens
agtgccatcactctt

SEQ ID NO: 496025 - DNA, 15 bp, Homo sapiens
cagtgccatcactct

SEQ ID NO: 496026 - DNA, 15 bp, Homo sapiens
gcagtgccatcactc

SEQ ID NO: 496027 - DNA, 15 bp, Homo sapiens
agcagtgccatcact

SEQ ID NO: 496028 - DNA, 15 bp, Homo sapiens
cagcagtgccatcac

SEQ ID NO: 496029 - DNA, 15 bp, Homo sapiens
tcagcagtgccatca

SEQ ID NO: 496030 - DNA, 15 bp, Homo sapiens
ctcagcagtgccatc

SEQ ID NO: 496031 - DNA, 15 bp, Homo sapiens
cctcagcagtgccat

SEQ ID NO: 496032 - DNA, 15 bp, Homo sapiens
gcctcagcagtgcca

SEQ ID NO: 496033 - DNA, 15 bp, Homo sapiens
cgcctcagcagtgcc

SEQ ID NO: 496034 - DNA, 15 bp, Homo sapiens
gcgcctcagcagtgc

SEQ ID NO: 496035 - DNA, 15 bp, Homo sapiens
tgcgcctcagcagtg

SEQ ID NO: 496036 - DNA, 15 bp, Homo sapiens
atgcgcctcagcagt

SEQ ID NO: 496037 - DNA, 15 bp, Homo sapiens
aatgcgcctcagcag

SEQ ID NO: 496038 - DNA, 15 bp, Homo sapiens
caatgcgcctcagca

SEQ ID NO: 496039 - DNA, 15 bp, Homo sapiens
tcaatgcgcctcagc

SEQ ID NO: 496040 - DNA, 15 bp, Homo sapiens
ctcaatgcgcctcag

SEQ ID NO: 496041 - DNA, 15 bp, Homo sapiens
gctcaatgcgcctca

SEQ ID NO: 496042 - DNA, 15 bp, Homo sapiens
tgctcaatgcgcctc

SEQ ID NO: 496043 - DNA, 15 bp, Homo sapiens
atgctcaatgcgcct

SEQ ID NO: 496044 - DNA, 15 bp, Homo sapiens
gatgctcaatgcgcc

SEQ ID NO: 496045 - DNA, 15 bp, Homo sapiens
ggatgctcaatgcgc

SEQ ID NO: 496046 - DNA, 15 bp, Homo sapiens
gggatgctcaatgcg

SEQ ID NO: 496047 - DNA, 15 bp, Homo sapiens
tgggatgctcaatgc

SEQ ID NO: 496048 - DNA, 15 bp, Homo sapiens
gtgggatgctcaatg

SEQ ID NO: 496049 - DNA, 15 bp, Homo sapiens
agtgggatgctcaat

SEQ ID NO: 496050 - DNA, 15 bp, Homo sapiens
cagtgggatgctcaa

SEQ ID NO: 496051 - DNA, 15 bp, Homo sapiens
gcagtgggatgctca

SEQ ID NO: 496052 - DNA, 15 bp, Homo sapiens
tgcagtgggatgctc

SEQ ID NO: 496053 - DNA, 15 bp, Homo sapiens
ctgcagtgggatgct

SEQ ID NO: 496054 - DNA, 15 bp, Homo sapiens
cctgcagtgggatgc

SEQ ID NO: 496055 - DNA, 15 bp, Homo sapiens
tcctgcagtgggatg

SEQ ID NO: 496056 - DNA, 15 bp, Homo sapiens
ttcctgcagtgggat

SEQ ID NO: 496057 - DNA, 15 bp, Homo sapiens
tttcctgcagtggga

SEQ ID NO: 496058 - DNA, 15 bp, Homo sapiens
gtttcctgcagtggg

SEQ ID NO: 496059 - DNA, 15 bp, Homo sapiens
tgtttcctgcagtgg

SEQ ID NO: 496060 - DNA, 15 bp, Homo sapiens
gtgtttcctgcagtg

SEQ ID NO: 496061 - DNA, 15 bp, Homo sapiens
agtgtttcctgcagt

SEQ ID NO: 496062 - DNA, 15 bp, Homo sapiens
cagtgtttcctgcag

SEQ ID NO: 496063 - DNA, 15 bp, Homo sapiens
tcagtgtttcctgca

SEQ ID NO: 496064 - DNA, 15 bp, Homo sapiens
ctcagtgtttcctgc

SEQ ID NO: 496065 - DNA, 15 bp, Homo sapiens
cctcagtgtttcctg

SEQ ID NO: 496066 - DNA, 15 bp, Homo sapiens
acctcagtgtttcct

SEQ ID NO: 496067 - DNA, 15 bp, Homo sapiens
tacctcagtgtttcc

SEQ ID NO: 496068 - DNA, 15 bp, Homo sapiens
atacctcagtgtttc

SEQ ID NO: 496069 - DNA, 15 bp, Homo sapiens
catacctcagtgttt

SEQ ID NO: 496070 - DNA, 15 bp, Homo sapiens
gcatacctcagtgtt

SEQ ID NO: 496071 - DNA, 15 bp, Homo sapiens
ggcatacctcagtgt

SEQ ID NO: 496072 - DNA, 15 bp, Homo sapiens
gggcatacctcagtg

SEQ ID NO: 496073 - DNA, 15 bp, Homo sapiens
agggcatacctcagt

SEQ ID NO: 496074 - DNA, 15 bp, Homo sapiens
aagggcatacctcag

SEQ ID NO: 496075 - DNA, 15 bp, Homo sapiens
taagggcatacctca

SEQ ID NO: 496076 - DNA, 15 bp, Homo sapiens
ctaagggcatacctc

SEQ ID NO: 496077 - DNA, 15 bp, Homo sapiens
gctaagggcatacct

SEQ ID NO: 496078 - DNA, 15 bp, Homo sapiens
tgctaagggcatacc

SEQ ID NO: 496079 - DNA, 15 bp, Homo sapiens
ttgctaagggcatac

SEQ ID NO: 496080 - DNA, 15 bp, Homo sapiens
gttgctaagggcata

SEQ ID NO: 496081 - DNA, 15 bp, Homo sapiens
tgttgctaagggcat

SEQ ID NO: 496082 - DNA, 15 bp, Homo sapiens
ctgttgctaagggca

SEQ ID NO: 496083 - DNA, 15 bp, Homo sapiens
tctgttgctaagggc

SEQ ID NO: 496084 - DNA, 15 bp, Homo sapiens
ttctgttgctaaggg

SEQ ID NO: 496085 - DNA, 15 bp, Homo sapiens
tttctgttgctaagg

SEQ ID NO: 496086 - DNA, 15 bp, Homo sapiens
gtttctgttgctaag

SEQ ID NO: 496087 - DNA, 15 bp, Homo sapiens
tgtttctgttgctaa

SEQ ID NO: 496088 - DNA, 15 bp, Homo sapiens
gtgtttctgttgcta

SEQ ID NO: 496089 - DNA, 15 bp, Homo sapiens
ggtgtttctgttgct

SEQ ID NO: 496090 - DNA, 15 bp, Homo sapiens
gggtgtttctgttgc

SEQ ID NO: 496091 - DNA, 15 bp, Homo sapiens
ggggtgtttctgttg

SEQ ID NO: 496092 - DNA, 15 bp, Homo sapiens
aggggtgtttctgtt

SEQ ID NO: 496093 - DNA, 15 bp, Homo sapiens
gaggggtgtttctgt

SEQ ID NO: 496094 - DNA, 15 bp, Homo sapiens
ggaggggtgtttctg

SEQ ID NO: 496095 - DNA, 15 bp, Homo sapiens
gggaggggtgtttct

SEQ ID NO: 496096 - DNA, 15 bp, Homo sapiens
tgggaggggtgtttc

SEQ ID NO: 496097 - DNA, 15 bp, Homo sapiens
ctgggaggggtgttt

SEQ ID NO: 496098 - DNA, 15 bp, Homo sapiens
cctgggaggggtgtt

SEQ ID NO: 496099 - DNA, 15 bp, Homo sapiens
gcctgggaggggtgt

SEQ ID NO: 496100 - DNA, 15 bp, Homo sapiens
cgcctgggaggggtg

SEQ ID NO: 496101 - DNA, 15 bp, Homo sapiens
gcgcctgggaggggt

SEQ ID NO: 496102 - DNA, 15 bp, Homo sapiens
ggcgcctgggagggg

SEQ ID NO: 496103 - DNA, 15 bp, Homo sapiens
gggcgcctgggaggg

SEQ ID NO: 496104 - DNA, 15 bp, Homo sapiens
tgggcgcctgggagg

SEQ ID NO: 496105 - DNA, 15 bp, Homo sapiens
gtgggcgcctgggag

SEQ ID NO: 496106 - DNA, 15 bp, Homo sapiens
ggtgggcgcctggga

SEQ ID NO: 496107 - DNA, 15 bp, Homo sapiens
gggtgggcgcctggg

SEQ ID NO: 496108 - DNA, 15 bp, Homo sapiens
agggtgggcgcctgg

SEQ ID NO: 496109 - DNA, 15 bp, Homo sapiens
gagggtgggcgcctg

SEQ ID NO: 496110 - DNA, 15 bp, Homo sapiens
tgagggtgggcgcct

SEQ ID NO: 496111 - DNA, 15 bp, Homo sapiens
ttgagggtgggcgcc

SEQ ID NO: 496112 - DNA, 15 bp, Homo sapiens
attgagggtgggcgc

SEQ ID NO: 496113 - DNA, 15 bp, Homo sapiens
aattgagggtgggcg

SEQ ID NO: 496114 - DNA, 15 bp, Homo sapiens
aaattgagggtgggc

SEQ ID NO: 496115 - DNA, 15 bp, Homo sapiens
caaattgagggtggg

SEQ ID NO: 496116 - DNA, 15 bp, Homo sapiens
ccaaattgagggtgg

SEQ ID NO: 496117 - DNA, 15 bp, Homo sapiens
tccaaattgagggtg

SEQ ID NO: 496118 - DNA, 15 bp, Homo sapiens
ttccaaattgagggt

SEQ ID NO: 496119 - DNA, 15 bp, Homo sapiens
cttccaaattgaggg

SEQ ID NO: 496120 - DNA, 15 bp, Homo sapiens
gcttccaaattgagg

SEQ ID NO: 496121 - DNA, 15 bp, Homo sapiens
ggcttccaaattgag

SEQ ID NO: 496122 - DNA, 15 bp, Homo sapiens
aggcttccaaattga

SEQ ID NO: 496123 - DNA, 15 bp, Homo sapiens
gaggcttccaaattg

SEQ ID NO: 496124 - DNA, 15 bp, Homo sapiens
agaggcttccaaatt

SEQ ID NO: 496125 - DNA, 15 bp, Homo sapiens
aagaggcttccaaat

SEQ ID NO: 496126 - DNA, 15 bp, Homo sapiens
caagaggcttccaaa

SEQ ID NO: 496127 - DNA, 15 bp, Homo sapiens
acaagaggcttccaa

SEQ ID NO: 496128 - DNA, 15 bp, Homo sapiens
aacaagaggcttcca

SEQ ID NO: 496129 - DNA, 15 bp, Homo sapiens
taacaagaggcttcc

SEQ ID NO: 496130 - DNA, 15 bp, Homo sapiens
gtaacaagaggcttc

SEQ ID NO: 496131 - DNA, 15 bp, Homo sapiens
tgtaacaagaggctt

SEQ ID NO: 496132 - DNA, 15 bp, Homo sapiens
atgtaacaagaggct

SEQ ID NO: 496133 - DNA, 15 bp, Homo sapiens
tatgtaacaagaggc

SEQ ID NO: 496134 - DNA, 15 bp, Homo sapiens
atatgtaacaagagg

SEQ ID NO: 496135 - DNA, 15 bp, Homo sapiens
catatgtaacaagag

SEQ ID NO: 496136 - DNA, 15 bp, Homo sapiens
acatatgtaacaaga

SEQ ID NO: 496137 - DNA, 15 bp, Homo sapiens
cacatatgtaacaag

SEQ ID NO: 496138 - DNA, 15 bp, Homo sapiens
acacatatgtaacaa

SEQ ID NO: 496139 - DNA, 15 bp, Homo sapiens
cacacatatgtaaca

SEQ ID NO: 496140 - DNA, 15 bp, Homo sapiens
tcacacatatgtaac

SEQ ID NO: 496141 - DNA, 15 bp, Homo sapiens
atcacacatatgtaa

SEQ ID NO: 496142 - DNA, 15 bp, Homo sapiens
gatcacacatatgta

SEQ ID NO: 496143 - DNA, 15 bp, Homo sapiens
tgatcacacatatgt

SEQ ID NO: 496144 - DNA, 15 bp, Homo sapiens
ctgatcacacatatg

SEQ ID NO: 496145 - DNA, 15 bp, Homo sapiens
cctgatcacacatat

SEQ ID NO: 496146 - DNA, 15 bp, Homo sapiens
tcctgatcacacata

SEQ ID NO: 496147 - DNA, 15 bp, Homo sapiens
ttcctgatcacacat

SEQ ID NO: 496148 - DNA, 15 bp, Homo sapiens
attcctgatcacaca

SEQ ID NO: 496149 - DNA, 15 bp, Homo sapiens
tattcctgatcacac

SEQ ID NO: 496150 - DNA, 15 bp, Homo sapiens
ctattcctgatcaca

SEQ ID NO: 496151 - DNA, 15 bp, Homo sapiens
gctattcctgatcac

SEQ ID NO: 496152 - DNA, 15 bp, Homo sapiens
agctattcctgatca

SEQ ID NO: 496153 - DNA, 15 bp, Homo sapiens
aagctattcctgatc

SEQ ID NO: 496154 - DNA, 15 bp, Homo sapiens
aaagctattcctgat

SEQ ID NO: 496155 - DNA, 15 bp, Homo sapiens
aaaagctattcctga

SEQ ID NO: 496156 - DNA, 15 bp, Homo sapiens
caaaagctattcctg

SEQ ID NO: 496157 - DNA, 15 bp, Homo sapiens
tcaaaagctattcct

SEQ ID NO: 496158 - DNA, 15 bp, Homo sapiens
ttcaaaagctattcc

SEQ ID NO: 496159 - DNA, 15 bp, Homo sapiens
cttcaaaagctattc

SEQ ID NO: 496160 - DNA, 15 bp, Homo sapiens
acttcaaaagctatt

SEQ ID NO: 496161 - DNA, 15 bp, Homo sapiens
tacttcaaaagctat

SEQ ID NO: 496162 - DNA, 15 bp, Homo sapiens
ttacttcaaaagcta

SEQ ID NO: 496163 - DNA, 15 bp, Homo sapiens
tttacttcaaaagct

SEQ ID NO: 496164 - DNA, 15 bp, Homo sapiens
atttacttcaaaagc

SEQ ID NO: 496165 - DNA, 15 bp, Homo sapiens
gatttacttcaaaag

SEQ ID NO: 496166 - DNA, 15 bp, Homo sapiens
ggatttacttcaaaa

SEQ ID NO: 496167 - DNA, 15 bp, Homo sapiens
tggatttacttcaaa

SEQ ID NO: 496168 - DNA, 15 bp, Homo sapiens
ttggatttacttcaa

SEQ ID NO: 496169 - DNA, 15 bp, Homo sapiens
cttggatttacttca

SEQ ID NO: 496170 - DNA, 15 bp, Homo sapiens
tcttggatttacttc

SEQ ID NO: 496171 - DNA, 15 bp, Homo sapiens
atcttggatttactt

SEQ ID NO: 496172 - DNA, 15 bp, Homo sapiens
tatcttggatttact

SEQ ID NO: 496173 - DNA, 15 bp, Homo sapiens
gtatcttggatttac

SEQ ID NO: 496174 - DNA, 15 bp, Homo sapiens
cgtatcttggattta

SEQ ID NO: 496175 - DNA, 15 bp, Homo sapiens
acgtatcttggattt

SEQ ID NO: 496176 - DNA, 15 bp, Homo sapiens
cacgtatcttggatt

SEQ ID NO: 496177 - DNA, 15 bp, Homo sapiens
gcacgtatcttggat

SEQ ID NO: 496178 - DNA, 15 bp, Homo sapiens
tgcacgtatcttgga

SEQ ID NO: 496179 - DNA, 15 bp, Homo sapiens
atgcacgtatcttgg

SEQ ID NO: 496180 - DNA, 15 bp, Homo sapiens
tatgcacgtatcttg

SEQ ID NO: 496181 - DNA, 15 bp, Homo sapiens
atatgcacgtatctt

SEQ ID NO: 496182 - DNA, 15 bp, Homo sapiens
aatatgcacgtatct

SEQ ID NO: 496183 - DNA, 15 bp, Homo sapiens
taatatgcacgtatc

SEQ ID NO: 496184 - DNA, 15 bp, Homo sapiens
gtaatatgcacgtat

SEQ ID NO: 496185 - DNA, 15 bp, Homo sapiens
tgtaatatgcacgta

SEQ ID NO: 496186 - DNA, 15 bp, Homo sapiens
ttgtaatatgcacgt

SEQ ID NO: 496187 - DNA, 15 bp, Homo sapiens
cttgtaatatgcacg

SEQ ID NO: 496188 - DNA, 15 bp, Homo sapiens
acttgtaatatgcac

SEQ ID NO: 496189 - DNA, 15 bp, Homo sapiens
tacttgtaatatgca

SEQ ID NO: 496190 - DNA, 15 bp, Homo sapiens
atacttgtaatatgc

SEQ ID NO: 496191 - DNA, 15 bp, Homo sapiens
tatacttgtaatatg

SEQ ID NO: 496192 - DNA, 15 bp, Homo sapiens
ttatacttgtaatat

SEQ ID NO: 496193 - DNA, 15 bp, Homo sapiens
attatacttgtaata

SEQ ID NO: 496194 - DNA, 15 bp, Homo sapiens
tattatacttgtaat

SEQ ID NO: 496195 - DNA, 15 bp, Homo sapiens
atattatacttgtaa

SEQ ID NO: 496196 - DNA, 15 bp, Homo sapiens
gatattatacttgta

SEQ ID NO: 496197 - DNA, 15 bp, Homo sapiens
agatattatacttgt

SEQ ID NO: 496198 - DNA, 15 bp, Homo sapiens
cagatattatacttg

SEQ ID NO: 496199 - DNA, 15 bp, Homo sapiens
tcagatattatactt

SEQ ID NO: 496200 - DNA, 15 bp, Homo sapiens
ctcagatattatact

SEQ ID NO: 496201 - DNA, 15 bp, Homo sapiens
actcagatattatac

SEQ ID NO: 496202 - DNA, 15 bp, Homo sapiens
tactcagatattata

SEQ ID NO: 496203 - DNA, 15 bp, Homo sapiens
atactcagatattat

SEQ ID NO: 496204 - DNA, 15 bp, Homo sapiens
aatactcagatatta

SEQ ID NO: 496205 - DNA, 15 bp, Homo sapiens
aaatactcagatatt

SEQ ID NO: 496206 - DNA, 15 bp, Homo sapiens
taaatactcagatat

SEQ ID NO: 496207 - DNA, 15 bp, Homo sapiens
ttaaatactcagata

SEQ ID NO: 496208 - DNA, 15 bp, Homo sapiens
attaaatactcagat

SEQ ID NO: 496209 - DNA, 15 bp, Homo sapiens
tattaaatactcaga

SEQ ID NO: 496210 - DNA, 15 bp, Homo sapiens
atattaaatactcag

SEQ ID NO: 496211 - DNA, 15 bp, Homo sapiens
tatattaaatactca

SEQ ID NO: 496212 - DNA, 15 bp, Homo sapiens
gtatattaaatactc

SEQ ID NO: 496213 - DNA, 15 bp, Homo sapiens
tgtatattaaatact

SEQ ID NO: 496214 - DNA, 15 bp, Homo sapiens
atgtatattaaatac

SEQ ID NO: 496215 - DNA, 15 bp, Homo sapiens
gatgtatattaaata

SEQ ID NO: 496216 - DNA, 15 bp, Homo sapiens
tgatgtatattaaat

SEQ ID NO: 496217 - DNA, 15 bp, Homo sapiens
ttgatgtatattaaa

SEQ ID NO: 496218 - DNA, 15 bp, Homo sapiens
cttgatgtatattaa

SEQ ID NO: 496219 - DNA, 15 bp, Homo sapiens
acttgatgtatatta

SEQ ID NO: 496220 - DNA, 15 bp, Homo sapiens
aacttgatgtatatt

SEQ ID NO: 496221 - DNA, 15 bp, Homo sapiens
aaacttgatgtatat

SEQ ID NO: 496222 - DNA, 15 bp, Homo sapiens
caaacttgatgtata

SEQ ID NO: 496223 - DNA, 15 bp, Homo sapiens
tcaaacttgatgtat

SEQ ID NO: 496224 - DNA, 15 bp, Homo sapiens
ttcaaacttgatgta

SEQ ID NO: 496225 - DNA, 15 bp, Homo sapiens
tttcaaacttgatgt

SEQ ID NO: 496226 - DNA, 15 bp, Homo sapiens
gtttcaaacttgatg

SEQ ID NO: 496227 - DNA, 15 bp, Homo sapiens
agtttcaaacttgat

SEQ ID NO: 496228 - DNA, 15 bp, Homo sapiens
aagtttcaaacttga

SEQ ID NO: 496229 - DNA, 15 bp, Homo sapiens
caagtttcaaacttg

SEQ ID NO: 496230 - DNA, 15 bp, Homo sapiens
ccaagtttcaaactt

SEQ ID NO: 496231 - DNA, 15 bp, Homo sapiens
gccaagtttcaaact

SEQ ID NO: 496232 - DNA, 15 bp, Homo sapiens
agccaagtttcaaac

SEQ ID NO: 496233 - DNA, 15 bp, Homo sapiens
cagccaagtttcaaa

SEQ ID NO: 496234 - DNA, 15 bp, Homo sapiens
acagccaagtttcaa

SEQ ID NO: 496235 - DNA, 15 bp, Homo sapiens
tacagccaagtttca

SEQ ID NO: 496236 - DNA, 15 bp, Homo sapiens
ctacagccaagtttc

SEQ ID NO: 496237 - DNA, 15 bp, Homo sapiens
gctacagccaagttt

SEQ ID NO: 496238 - DNA, 15 bp, Homo sapiens
agctacagccaagtt

SEQ ID NO: 496239 - DNA, 15 bp, Homo sapiens
cagctacagccaagt

SEQ ID NO: 496240 - DNA, 15 bp, Homo sapiens
tcagctacagccaag

SEQ ID NO: 496241 - DNA, 15 bp, Homo sapiens
atcagctacagccaa

SEQ ID NO: 496242 - DNA, 15 bp, Homo sapiens
aatcagctacagcca

SEQ ID NO: 496243 - DNA, 15 bp, Homo sapiens
caatcagctacagcc

SEQ ID NO: 496244 - DNA, 15 bp, Homo sapiens
tcaatcagctacagc

SEQ ID NO: 496245 - DNA, 15 bp, Homo sapiens
atcaatcagctacag

SEQ ID NO: 496246 - DNA, 15 bp, Homo sapiens
catcaatcagctaca

SEQ ID NO: 496247 - DNA, 15 bp, Homo sapiens
acatcaatcagctac

SEQ ID NO: 496248 - DNA, 15 bp, Homo sapiens
aacatcaatcagcta

SEQ ID NO: 496249 - DNA, 15 bp, Homo sapiens
aaacatcaatcagct

SEQ ID NO: 496250 - DNA, 15 bp, Homo sapiens
taaacatcaatcagc

SEQ ID NO: 496251 - DNA, 15 bp, Homo sapiens
ctaaacatcaatcag

SEQ ID NO: 496252 - DNA, 15 bp, Homo sapiens
gctaaacatcaatca

SEQ ID NO: 496253 - DNA, 15 bp, Homo sapiens
agctaaacatcaatc

SEQ ID NO: 496254 - DNA, 15 bp, Homo sapiens
gagctaaacatcaat

SEQ ID NO: 496255 - DNA, 15 bp, Homo sapiens
agagctaaacatcaa

SEQ ID NO: 496256 - DNA, 15 bp, Homo sapiens
tagagctaaacatca

SEQ ID NO: 496257 - DNA, 15 bp, Homo sapiens
ctagagctaaacatc

SEQ ID NO: 496258 - DNA, 15 bp, Homo sapiens
tctagagctaaacat

SEQ ID NO: 496259 - DNA, 15 bp, Homo sapiens
gtctagagctaaaca

SEQ ID NO: 496260 - DNA, 15 bp, Homo sapiens
agtctagagctaaac

SEQ ID NO: 496261 - DNA, 15 bp, Homo sapiens
tagtctagagctaaa

SEQ ID NO: 496262 - DNA, 15 bp, Homo sapiens
ttagtctagagctaa

SEQ ID NO: 496263 - DNA, 15 bp, Homo sapiens
cttagtctagagcta

SEQ ID NO: 496264 - DNA, 15 bp, Homo sapiens
acttagtctagagct

SEQ ID NO: 496265 - DNA, 15 bp, Homo sapiens
aacttagtctagagc

SEQ ID NO: 496266 - DNA, 15 bp, Homo sapiens
caacttagtctagag

SEQ ID NO: 496267 - DNA, 15 bp, Homo sapiens
gcaacttagtctaga

SEQ ID NO: 496268 - DNA, 15 bp, Homo sapiens
agcaacttagtctag

SEQ ID NO: 496269 - DNA, 15 bp, Homo sapiens
aagcaacttagtcta

SEQ ID NO: 496270 - DNA, 15 bp, Homo sapiens
aaagcaacttagtct

SEQ ID NO: 496271 - DNA, 15 bp, Homo sapiens
gaaagcaacttagtc

SEQ ID NO: 496272 - DNA, 15 bp, Homo sapiens
tgaaagcaacttagt

SEQ ID NO: 496273 - DNA, 15 bp, Homo sapiens
ttgaaagcaacttag

SEQ ID NO: 496274 - DNA, 15 bp, Homo sapiens
cttgaaagcaactta

SEQ ID NO: 496275 - DNA, 15 bp, Homo sapiens
acttgaaagcaactt

SEQ ID NO: 496276 - DNA, 15 bp, Homo sapiens
cacttgaaagcaact

SEQ ID NO: 496277 - DNA, 15 bp, Homo sapiens
tcacttgaaagcaac

SEQ ID NO: 496278 - DNA, 15 bp, Homo sapiens
atcacttgaaagcaa

SEQ ID NO: 496279 - DNA, 15 bp, Homo sapiens
tatcacttgaaagca

SEQ ID NO: 496280 - DNA, 15 bp, Homo sapiens
ttatcacttgaaagc

SEQ ID NO: 496281 - DNA, 15 bp, Homo sapiens
attatcacttgaaag

SEQ ID NO: 496282 - DNA, 15 bp, Homo sapiens
aattatcacttgaaa

SEQ ID NO: 496283 - DNA, 15 bp, Homo sapiens
caattatcacttgaa

SEQ ID NO: 496284 - DNA, 15 bp, Homo sapiens
gcaattatcacttga

SEQ ID NO: 496285 - DNA, 15 bp, Homo sapiens
ggcaattatcacttg

SEQ ID NO: 496286 - DNA, 15 bp, Homo sapiens
aggcaattatcactt

SEQ ID NO: 496287 - DNA, 15 bp, Homo sapiens
aaggcaattatcact

SEQ ID NO: 496288 - DNA, 15 bp, Homo sapiens
gaaggcaattatcac

SEQ ID NO: 496289 - DNA, 15 bp, Homo sapiens
tgaaggcaattatca

SEQ ID NO: 496290 - DNA, 15 bp, Homo sapiens
atgaaggcaattatc

SEQ ID NO: 496291 - DNA, 15 bp, Homo sapiens
aatgaaggcaattat

SEQ ID NO: 496292 - DNA, 15 bp, Homo sapiens
aaatgaaggcaatta

SEQ ID NO: 496293 - DNA, 15 bp, Homo sapiens
aaaatgaaggcaatt

SEQ ID NO: 496294 - DNA, 15 bp, Homo sapiens
taaaatgaaggcaat

SEQ ID NO: 496295 - DNA, 15 bp, Homo sapiens
ctaaaatgaaggcaa

SEQ ID NO: 496296 - DNA, 15 bp, Homo sapiens
cctaaaatgaaggca

SEQ ID NO: 496297 - DNA, 15 bp, Homo sapiens
gcctaaaatgaaggc

SEQ ID NO: 496298 - DNA, 15 bp, Homo sapiens
agcctaaaatgaagg

SEQ ID NO: 496299 - DNA, 15 bp, Homo sapiens
aagcctaaaatgaag

SEQ ID NO: 496300 - DNA, 15 bp, Homo sapiens
caagcctaaaatgaa

SEQ ID NO: 496301 - DNA, 15 bp, Homo sapiens
ccaagcctaaaatga

SEQ ID NO: 496302 - DNA, 15 bp, Homo sapiens
cccaagcctaaaatg

SEQ ID NO: 496303 - DNA, 15 bp, Homo sapiens
tcccaagcctaaaat

SEQ ID NO: 496304 - DNA, 15 bp, Homo sapiens
ttcccaagcctaaaa

SEQ ID NO: 496305 - DNA, 15 bp, Homo sapiens
cttcccaagcctaaa

SEQ ID NO: 496306 - DNA, 15 bp, Homo sapiens
tcttcccaagcctaa

SEQ ID NO: 496307 - DNA, 15 bp, Homo sapiens
atcttcccaagccta

SEQ ID NO: 496308 - DNA, 15 bp, Homo sapiens
tatcttcccaagcct

SEQ ID NO: 496309 - DNA, 15 bp, Homo sapiens
gtatcttcccaagcc

SEQ ID NO: 496310 - DNA, 15 bp, Homo sapiens
tgtatcttcccaagc

SEQ ID NO: 496311 - DNA, 15 bp, Homo sapiens
gtgtatcttcccaag

SEQ ID NO: 496312 - DNA, 15 bp, Homo sapiens
tgtgtatcttcccaa

SEQ ID NO: 496313 - DNA, 15 bp, Homo sapiens
atgtgtatcttccca

SEQ ID NO: 496314 - DNA, 15 bp, Homo sapiens
catgtgtatcttccc

SEQ ID NO: 496315 - DNA, 15 bp, Homo sapiens
gcatgtgtatcttcc

SEQ ID NO: 496316 - DNA, 15 bp, Homo sapiens
tgcatgtgtatcttc

SEQ ID NO: 496317 - DNA, 15 bp, Homo sapiens
ttgcatgtgtatctt

SEQ ID NO: 496318 - DNA, 15 bp, Homo sapiens
tttgcatgtgtatct

SEQ ID NO: 496319 - DNA, 15 bp, Homo sapiens
ttttgcatgtgtatc

SEQ ID NO: 496320 - DNA, 15 bp, Homo sapiens
attttgcatgtgtat

SEQ ID NO: 496321 - DNA, 15 bp, Homo sapiens
cattttgcatgtgta

SEQ ID NO: 496322 - DNA, 15 bp, Homo sapiens
ccattttgcatgtgt

SEQ ID NO: 496323 - DNA, 15 bp, Homo sapiens
cccattttgcatgtg

SEQ ID NO: 496324 - DNA, 15 bp, Homo sapiens
tcccattttgcatgt

SEQ ID NO: 496325 - DNA, 15 bp, Homo sapiens
ttcccattttgcatg

SEQ ID NO: 496326 - DNA, 15 bp, Homo sapiens
gttcccattttgcat

SEQ ID NO: 496327 - DNA, 15 bp, Homo sapiens
tgttcccattttgca

SEQ ID NO: 496328 - DNA, 15 bp, Homo sapiens
ttgttcccattttgc

SEQ ID NO: 496329 - DNA, 15 bp, Homo sapiens
cttgttcccattttg

SEQ ID NO: 496330 - DNA, 15 bp, Homo sapiens
gcttgttcccatttt

SEQ ID NO: 496331 - DNA, 15 bp, Homo sapiens
tgcttgttcccattt

SEQ ID NO: 496332 - DNA, 15 bp, Homo sapiens
ttgcttgttcccatt

SEQ ID NO: 496333 - DNA, 15 bp, Homo sapiens
gttgcttgttcccat

SEQ ID NO: 496334 - DNA, 15 bp, Homo sapiens
tgttgcttgttccca

SEQ ID NO: 496335 - DNA, 15 bp, Homo sapiens
ttgttgcttgttccc

SEQ ID NO: 496336 - DNA, 15 bp, Homo sapiens
tttgttgcttgttcc

SEQ ID NO: 496337 - DNA, 15 bp, Homo sapiens
ctttgttgcttgttc

SEQ ID NO: 496338 - DNA, 15 bp, Homo sapiens
gctttgttgcttgtt

SEQ ID NO: 496339 - DNA, 15 bp, Homo sapiens
agctttgttgcttgt

SEQ ID NO: 496340 - DNA, 15 bp, Homo sapiens
tagctttgttgcttg

SEQ ID NO: 496341 - DNA, 15 bp, Homo sapiens
ttagctttgttgctt

SEQ ID NO: 496342 - DNA, 15 bp, Homo sapiens
attagctttgttgct

SEQ ID NO: 496343 - DNA, 15 bp, Homo sapiens
gattagctttgttgc

SEQ ID NO: 496344 - DNA, 15 bp, Homo sapiens
ggattagctttgttg

SEQ ID NO: 496345 - DNA, 15 bp, Homo sapiens
aggattagctttgtt

SEQ ID NO: 496346 - DNA, 15 bp, Homo sapiens
aaggattagctttgt

SEQ ID NO: 496347 - DNA, 15 bp, Homo sapiens
taaggattagctttg

SEQ ID NO: 496348 - DNA, 15 bp, Homo sapiens
ttaaggattagcttt

SEQ ID NO: 496349 - DNA, 15 bp, Homo sapiens
gttaaggattagctt

SEQ ID NO: 496350 - DNA, 15 bp, Homo sapiens
agttaaggattagct

SEQ ID NO: 496351 - DNA, 15 bp, Homo sapiens
tagttaaggattagc

SEQ ID NO: 496352 - DNA, 15 bp, Homo sapiens
atagttaaggattag

SEQ ID NO: 496353 - DNA, 15 bp, Homo sapiens
gatagttaaggatta

SEQ ID NO: 496354 - DNA, 15 bp, Homo sapiens
ggatagttaaggatt

SEQ ID NO: 496355 - DNA, 15 bp, Homo sapiens
tggatagttaaggat

SEQ ID NO: 496356 - DNA, 15 bp, Homo sapiens
ttggatagttaagga

SEQ ID NO: 496357 - DNA, 15 bp, Homo sapiens
tttggatagttaagg

SEQ ID NO: 496358 - DNA, 15 bp, Homo sapiens
ttttggatagttaag

SEQ ID NO: 496359 - DNA, 15 bp, Homo sapiens
cttttggatagttaa

SEQ ID NO: 496360 - DNA, 15 bp, Homo sapiens
gcttttggatagtta

SEQ ID NO: 496361 - DNA, 15 bp, Homo sapiens
ggcttttggatagtt

SEQ ID NO: 496362 - DNA, 15 bp, Homo sapiens
tggcttttggatagt

SEQ ID NO: 496363 - DNA, 15 bp, Homo sapiens
ttggcttttggatag

SEQ ID NO: 496364 - DNA, 15 bp, Homo sapiens
tttggcttttggata

SEQ ID NO: 496365 - DNA, 15 bp, Homo sapiens
ttttggcttttggat

SEQ ID NO: 496366 - DNA, 15 bp, Homo sapiens
attttggcttttgga

SEQ ID NO: 496367 - DNA, 15 bp, Homo sapiens
cattttggcttttgg

SEQ ID NO: 496368 - DNA, 15 bp, Homo sapiens
ccattttggcttttg

SEQ ID NO: 496369 - DNA, 15 bp, Homo sapiens
tccattttggctttt

SEQ ID NO: 496370 - DNA, 15 bp, Homo sapiens
ttccattttggcttt

SEQ ID NO: 496371 - DNA, 15 bp, Homo sapiens
cttccattttggctt

SEQ ID NO: 496372 - DNA, 15 bp, Homo sapiens
tcttccattttggct

SEQ ID NO: 496373 - DNA, 15 bp, Homo sapiens
atcttccattttggc

SEQ ID NO: 496374 - DNA, 15 bp, Homo sapiens
catcttccattttgg

SEQ ID NO: 496375 - DNA, 15 bp, Homo sapiens
ccatcttccattttg

SEQ ID NO: 496376 - DNA, 15 bp, Homo sapiens
gccatcttccatttt

SEQ ID NO: 496377 - DNA, 15 bp, Homo sapiens
ggccatcttccattt

SEQ ID NO: 496378 - DNA, 15 bp, Homo sapiens
tggccatcttccatt

SEQ ID NO: 496379 - DNA, 15 bp, Homo sapiens
ctggccatcttccat

SEQ ID NO: 496380 - DNA, 15 bp, Homo sapiens
cctggccatcttcca

SEQ ID NO: 496381 - DNA, 15 bp, Homo sapiens
acctggccatcttcc

SEQ ID NO: 496382 - DNA, 15 bp, Homo sapiens
tacctggccatcttc

SEQ ID NO: 496383 - DNA, 15 bp, Homo sapiens
ttacctggccatctt

SEQ ID NO: 496384 - DNA, 15 bp, Homo sapiens
cttacctggccatct

SEQ ID NO: 496385 - DNA, 15 bp, Homo sapiens
acttacctggccatc

SEQ ID NO: 496386 - DNA, 15 bp, Homo sapiens
gacttacctggccat

SEQ ID NO: 496387 - DNA, 15 bp, Homo sapiens
agacttacctggcca

SEQ ID NO: 496388 - DNA, 15 bp, Homo sapiens
cagacttacctggcc

SEQ ID NO: 496389 - DNA, 15 bp, Homo sapiens
acagacttacctggc

SEQ ID NO: 496390 - DNA, 15 bp, Homo sapiens
tacagacttacctgg

SEQ ID NO: 496391 - DNA, 15 bp, Homo sapiens
ttacagacttacctg

SEQ ID NO: 496392 - DNA, 15 bp, Homo sapiens
tttacagacttacct

SEQ ID NO: 496393 - DNA, 15 bp, Homo sapiens
ctttacagacttacc

SEQ ID NO: 496394 - DNA, 15 bp, Homo sapiens
actttacagacttac

SEQ ID NO: 496395 - DNA, 15 bp, Homo sapiens
aactttacagactta

SEQ ID NO: 496396 - DNA, 15 bp, Homo sapiens
caactttacagactt

SEQ ID NO: 496397 - DNA, 15 bp, Homo sapiens
tcaactttacagact

SEQ ID NO: 496398 - DNA, 15 bp, Homo sapiens
gtcaactttacagac

SEQ ID NO: 496399 - DNA, 15 bp, Homo sapiens
agtcaactttacaga

SEQ ID NO: 496400 - DNA, 15 bp, Homo sapiens
aagtcaactttacag

SEQ ID NO: 496401 - DNA, 15 bp, Homo sapiens
aaagtcaactttaca

SEQ ID NO: 496402 - DNA, 15 bp, Homo sapiens
aaaagtcaactttac

SEQ ID NO: 496403 - DNA, 15 bp, Homo sapiens
caaaagtcaacttta

SEQ ID NO: 496404 - DNA, 15 bp, Homo sapiens
acaaaagtcaacttt

SEQ ID NO: 496405 - DNA, 15 bp, Homo sapiens
gacaaaagtcaactt

SEQ ID NO: 496406 - DNA, 15 bp, Homo sapiens
agacaaaagtcaact

SEQ ID NO: 496407 - DNA, 15 bp, Homo sapiens
cagacaaaagtcaac

SEQ ID NO: 496408 - DNA, 15 bp, Homo sapiens
acagacaaaagtcaa

SEQ ID NO: 496409 - DNA, 15 bp, Homo sapiens
aacagacaaaagtca

SEQ ID NO: 496410 - DNA, 15 bp, Homo sapiens
taacagacaaaagtc

SEQ ID NO: 496411 - DNA, 15 bp, Homo sapiens
ttaacagacaaaagt

SEQ ID NO: 496412 - DNA, 15 bp, Homo sapiens
gttaacagacaaaag

SEQ ID NO: 496413 - DNA, 15 bp, Homo sapiens
agttaacagacaaaa

SEQ ID NO: 496414 - DNA, 15 bp, Homo sapiens
cagttaacagacaaa

SEQ ID NO: 496415 - DNA, 15 bp, Homo sapiens
tcagttaacagacaa

SEQ ID NO: 496416 - DNA, 15 bp, Homo sapiens
atcagttaacagaca

SEQ ID NO: 496417 - DNA, 15 bp, Homo sapiens
gatcagttaacagac

SEQ ID NO: 496418 - DNA, 15 bp, Homo sapiens
agatcagttaacaga

SEQ ID NO: 496419 - DNA, 15 bp, Homo sapiens
cagatcagttaacag

SEQ ID NO: 496420 - DNA, 15 bp, Homo sapiens
gcagatcagttaaca

SEQ ID NO: 496421 - DNA, 15 bp, Homo sapiens
agcagatcagttaac

SEQ ID NO: 496422 - DNA, 15 bp, Homo sapiens
tagcagatcagttaa

SEQ ID NO: 496423 - DNA, 15 bp, Homo sapiens
ttagcagatcagtta

SEQ ID NO: 496424 - DNA, 15 bp, Homo sapiens
tttagcagatcagtt

SEQ ID NO: 496425 - DNA, 15 bp, Homo sapiens
atttagcagatcagt

SEQ ID NO: 496426 - DNA, 15 bp, Homo sapiens
tatttagcagatcag

SEQ ID NO: 496427 - DNA, 15 bp, Homo sapiens
atatttagcagatca

SEQ ID NO: 496428 - DNA, 15 bp, Homo sapiens
tatatttagcagatc

SEQ ID NO: 496429 - DNA, 15 bp, Homo sapiens
atatatttagcagat

SEQ ID NO: 496430 - DNA, 15 bp, Homo sapiens
catatatttagcaga

SEQ ID NO: 496431 - DNA, 15 bp, Homo sapiens
acatatatttagcag

SEQ ID NO: 496432 - DNA, 15 bp, Homo sapiens
tacatatatttagca

SEQ ID NO: 496433 - DNA, 15 bp, Homo sapiens
gtacatatatttagc

SEQ ID NO: 496434 - DNA, 15 bp, Homo sapiens
agtacatatatttag

SEQ ID NO: 496435 - DNA, 15 bp, Homo sapiens
aagtacatatattta

SEQ ID NO: 496436 - DNA, 15 bp, Homo sapiens
gaagtacatatattt

SEQ ID NO: 496437 - DNA, 15 bp, Homo sapiens
tgaagtacatatatt

SEQ ID NO: 496438 - DNA, 15 bp, Homo sapiens
gtgaagtacatatat

SEQ ID NO: 496439 - DNA, 15 bp, Homo sapiens
agtgaagtacatata

SEQ ID NO: 496440 - DNA, 15 bp, Homo sapiens
aagtgaagtacatat

SEQ ID NO: 496441 - DNA, 15 bp, Homo sapiens
aaagtgaagtacata

SEQ ID NO: 496442 - DNA, 15 bp, Homo sapiens
caaagtgaagtacat

SEQ ID NO: 496443 - DNA, 15 bp, Homo sapiens
tcaaagtgaagtaca

SEQ ID NO: 496444 - DNA, 15 bp, Homo sapiens
atcaaagtgaagtac

SEQ ID NO: 496445 - DNA, 15 bp, Homo sapiens
tatcaaagtgaagta

SEQ ID NO: 496446 - DNA, 15 bp, Homo sapiens
ttatcaaagtgaagt

SEQ ID NO: 496447 - DNA, 15 bp, Homo sapiens
attatcaaagtgaag

SEQ ID NO: 496448 - DNA, 15 bp, Homo sapiens
gattatcaaagtgaa

SEQ ID NO: 496449 - DNA, 15 bp, Homo sapiens
agattatcaaagtga

SEQ ID NO: 496450 - DNA, 15 bp, Homo sapiens
aagattatcaaagtg

SEQ ID NO: 496451 - DNA, 15 bp, Homo sapiens
aaagattatcaaagt

SEQ ID NO: 496452 - DNA, 15 bp, Homo sapiens
gaaagattatcaaag

SEQ ID NO: 496453 - DNA, 15 bp, Homo sapiens
tgaaagattatcaaa

SEQ ID NO: 496454 - DNA, 15 bp, Homo sapiens
ttgaaagattatcaa

SEQ ID NO: 496455 - DNA, 15 bp, Homo sapiens
cttgaaagattatca

SEQ ID NO: 496456 - DNA, 15 bp, Homo sapiens
tcttgaaagattatc

SEQ ID NO: 496457 - DNA, 15 bp, Homo sapiens
ctcttgaaagattat

SEQ ID NO: 496458 - DNA, 15 bp, Homo sapiens
actcttgaaagatta

SEQ ID NO: 496459 - DNA, 15 bp, Homo sapiens
gactcttgaaagatt

SEQ ID NO: 496460 - DNA, 15 bp, Homo sapiens
cgactcttgaaagat

SEQ ID NO: 496461 - DNA, 15 bp, Homo sapiens
gcgactcttgaaaga

SEQ ID NO: 496462 - DNA, 15 bp, Homo sapiens
agcgactcttgaaag

SEQ ID NO: 496463 - DNA, 15 bp, Homo sapiens
gagcgactcttgaaa

SEQ ID NO: 496464 - DNA, 15 bp, Homo sapiens
tgagcgactcttgaa

SEQ ID NO: 496465 - DNA, 15 bp, Homo sapiens
ctgagcgactcttga

SEQ ID NO: 496466 - DNA, 15 bp, Homo sapiens
actgagcgactcttg

SEQ ID NO: 496467 - DNA, 15 bp, Homo sapiens
tactgagcgactctt

SEQ ID NO: 496468 - DNA, 15 bp, Homo sapiens
ttactgagcgactct

SEQ ID NO: 496469 - DNA, 15 bp, Homo sapiens
tttactgagcgactc

SEQ ID NO: 496470 - DNA, 15 bp, Homo sapiens
ctttactgagcgact

SEQ ID NO: 496471 - DNA, 15 bp, Homo sapiens
actttactgagcgac

SEQ ID NO: 496472 - DNA, 15 bp, Homo sapiens
tactttactgagcga

SEQ ID NO: 496473 - DNA, 15 bp, Homo sapiens
ttactttactgagcg

SEQ ID NO: 496474 - DNA, 15 bp, Homo sapiens
tttactttactgagc

SEQ ID NO: 496475 - DNA, 15 bp, Homo sapiens
gtttactttactgag

SEQ ID NO: 496476 - DNA, 15 bp, Homo sapiens
tgtttactttactga

SEQ ID NO: 496477 - DNA, 15 bp, Homo sapiens
atgtttactttactg

SEQ ID NO: 496478 - DNA, 15 bp, Homo sapiens
tatgtttactttact

SEQ ID NO: 496479 - DNA, 15 bp, Homo sapiens
atatgtttactttac

SEQ ID NO: 496480 - DNA, 15 bp, Homo sapiens
tatatgtttacttta

SEQ ID NO: 496481 - DNA, 15 bp, Homo sapiens
ctatatgtttacttt

SEQ ID NO: 496482 - DNA, 15 bp, Homo sapiens
gctatatgtttactt

SEQ ID NO: 496483 - DNA, 15 bp, Homo sapiens
agctatatgtttact

SEQ ID NO: 496484 - DNA, 15 bp, Homo sapiens
cagctatatgtttac

SEQ ID NO: 496485 - DNA, 15 bp, Homo sapiens
acagctatatgttta

SEQ ID NO: 496486 - DNA, 15 bp, Homo sapiens
cacagctatatgttt

SEQ ID NO: 496487 - DNA, 15 bp, Homo sapiens
acacagctatatgtt

SEQ ID NO: 496488 - DNA, 15 bp, Homo sapiens
cacacagctatatgt

SEQ ID NO: 496489 - DNA, 15 bp, Homo sapiens
tcacacagctatatg

SEQ ID NO: 496490 - DNA, 15 bp, Homo sapiens
ttcacacagctatat

SEQ ID NO: 496491 - DNA, 15 bp, Homo sapiens
cttcacacagctata

SEQ ID NO: 496492 - DNA, 15 bp, Homo sapiens
tcttcacacagctat

SEQ ID NO: 496493 - DNA, 15 bp, Homo sapiens
gtcttcacacagcta

SEQ ID NO: 496494 - DNA, 15 bp, Homo sapiens
agtcttcacacagct

SEQ ID NO: 496495 - DNA, 15 bp, Homo sapiens
cagtcttcacacagc

SEQ ID NO: 496496 - DNA, 15 bp, Homo sapiens
tcagtcttcacacag

SEQ ID NO: 496497 - DNA, 15 bp, Homo sapiens
atcagtcttcacaca

SEQ ID NO: 496498 - DNA, 15 bp, Homo sapiens
tatcagtcttcacac

SEQ ID NO: 496499 - DNA, 15 bp, Homo sapiens
atatcagtcttcaca

SEQ ID NO: 496500 - DNA, 15 bp, Homo sapiens
aatatcagtcttcac

SEQ ID NO: 496501 - DNA, 15 bp, Homo sapiens
aaatatcagtcttca

SEQ ID NO: 496502 - DNA, 15 bp, Homo sapiens
taaatatcagtcttc

SEQ ID NO: 496503 - DNA, 15 bp, Homo sapiens
ctaaatatcagtctt

SEQ ID NO: 496504 - DNA, 15 bp, Homo sapiens
actaaatatcagtct

SEQ ID NO: 496505 - DNA, 15 bp, Homo sapiens
aactaaatatcagtc

SEQ ID NO: 496506 - DNA, 15 bp, Homo sapiens
caactaaatatcagt

SEQ ID NO: 496507 - DNA, 15 bp, Homo sapiens
acaactaaatatcag

SEQ ID NO: 496508 - DNA, 15 bp, Homo sapiens
cacaactaaatatca

SEQ ID NO: 496509 - DNA, 15 bp, Homo sapiens
ccacaactaaatatc

SEQ ID NO: 496510 - DNA, 15 bp, Homo sapiens
accacaactaaatat

SEQ ID NO: 496511 - DNA, 15 bp, Homo sapiens
aaccacaactaaata

SEQ ID NO: 496512 - DNA, 15 bp, Homo sapiens
aaaccacaactaaat

SEQ ID NO: 496513 - DNA, 15 bp, Homo sapiens
taaaccacaactaaa

SEQ ID NO: 496514 - DNA, 15 bp, Homo sapiens
ataaaccacaactaa

SEQ ID NO: 496515 - DNA, 15 bp, Homo sapiens
gataaaccacaacta

SEQ ID NO: 496516 - DNA, 15 bp, Homo sapiens
agataaaccacaact

SEQ ID NO: 496517 - DNA, 15 bp, Homo sapiens
tagataaaccacaac

SEQ ID NO: 496518 - DNA, 15 bp, Homo sapiens
ctagataaaccacaa

SEQ ID NO: 496519 - DNA, 15 bp, Homo sapiens
tctagataaaccaca

SEQ ID NO: 496520 - DNA, 15 bp, Homo sapiens
gtctagataaaccac

SEQ ID NO: 496521 - DNA, 15 bp, Homo sapiens
ggtctagataaacca

SEQ ID NO: 496522 - DNA, 15 bp, Homo sapiens
aggtctagataaacc

SEQ ID NO: 496523 - DNA, 15 bp, Homo sapiens
caggtctagataaac

SEQ ID NO: 496524 - DNA, 15 bp, Homo sapiens
acaggtctagataaa

SEQ ID NO: 496525 - DNA, 15 bp, Homo sapiens
tacaggtctagataa

SEQ ID NO: 496526 - DNA, 15 bp, Homo sapiens
gtacaggtctagata

SEQ ID NO: 496527 - DNA, 15 bp, Homo sapiens
agtacaggtctagat

SEQ ID NO: 496528 - DNA, 15 bp, Homo sapiens
aagtacaggtctaga

SEQ ID NO: 496529 - DNA, 15 bp, Homo sapiens
aaagtacaggtctag

SEQ ID NO: 496530 - DNA, 15 bp, Homo sapiens
caaagtacaggtcta

SEQ ID NO: 496531 - DNA, 15 bp, Homo sapiens
acaaagtacaggtct

SEQ ID NO: 496532 - DNA, 15 bp, Homo sapiens
tacaaagtacaggtc

SEQ ID NO: 496533 - DNA, 15 bp, Homo sapiens
ttacaaagtacaggt

SEQ ID NO: 496534 - DNA, 15 bp, Homo sapiens
attacaaagtacagg

SEQ ID NO: 496535 - DNA, 15 bp, Homo sapiens
cattacaaagtacag

SEQ ID NO: 496536 - DNA, 15 bp, Homo sapiens
acattacaaagtaca

SEQ ID NO: 496537 - DNA, 15 bp, Homo sapiens
cacattacaaagtac

SEQ ID NO: 496538 - DNA, 15 bp, Homo sapiens
ccacattacaaagta

SEQ ID NO: 496539 - DNA, 15 bp, Homo sapiens
accacattacaaagt

SEQ ID NO: 496540 - DNA, 15 bp, Homo sapiens
taccacattacaaag

SEQ ID NO: 496541 - DNA, 15 bp, Homo sapiens
ctaccacattacaaa

SEQ ID NO: 496542 - DNA, 15 bp, Homo sapiens
gctaccacattacaa

SEQ ID NO: 496543 - DNA, 15 bp, Homo sapiens
agctaccacattaca

SEQ ID NO: 496544 - DNA, 15 bp, Homo sapiens
tagctaccacattac

SEQ ID NO: 496545 - DNA, 15 bp, Homo sapiens
gtagctaccacatta

SEQ ID NO: 496546 - DNA, 15 bp, Homo sapiens
agtagctaccacatt

SEQ ID NO: 496547 - DNA, 15 bp, Homo sapiens
tagtagctaccacat

SEQ ID NO: 496548 - DNA, 15 bp, Homo sapiens
ctagtagctaccaca

SEQ ID NO: 496549 - DNA, 15 bp, Homo sapiens
gctagtagctaccac

SEQ ID NO: 496550 - DNA, 15 bp, Homo sapiens
agctagtagctacca

SEQ ID NO: 496551 - DNA, 15 bp, Homo sapiens
tagctagtagctacc

SEQ ID NO: 496552 - DNA, 15 bp, Homo sapiens
atagctagtagctac

SEQ ID NO: 496553 - DNA, 15 bp, Homo sapiens
catagctagtagcta

SEQ ID NO: 496554 - DNA, 15 bp, Homo sapiens
acatagctagtagct

SEQ ID NO: 496555 - DNA, 15 bp, Homo sapiens
cacatagctagtagc

SEQ ID NO: 496556 - DNA, 15 bp, Homo sapiens
acacatagctagtag

SEQ ID NO: 496557 - DNA, 15 bp, Homo sapiens
cacacatagctagta

SEQ ID NO: 496558 - DNA, 15 bp, Homo sapiens
tcacacatagctagt

SEQ ID NO: 496559 - DNA, 15 bp, Homo sapiens
gtcacacatagctag

SEQ ID NO: 496560 - DNA, 15 bp, Homo sapiens
agtcacacatagcta

SEQ ID NO: 496561 - DNA, 15 bp, Homo sapiens
tagtcacacatagct

SEQ ID NO: 496562 - DNA, 15 bp, Homo sapiens
atagtcacacatagc

SEQ ID NO: 496563 - DNA, 15 bp, Homo sapiens
aatagtcacacatag

SEQ ID NO: 496564 - DNA, 15 bp, Homo sapiens
aaatagtcacacata

SEQ ID NO: 496565 - DNA, 15 bp, Homo sapiens
taaatagtcacacat

SEQ ID NO: 496566 - DNA, 15 bp, Homo sapiens
ttaaatagtcacaca

SEQ ID NO: 496567 - DNA, 15 bp, Homo sapiens
gttaaatagtcacac

SEQ ID NO: 496568 - DNA, 15 bp, Homo sapiens
agttaaatagtcaca

SEQ ID NO: 496569 - DNA, 15 bp, Homo sapiens
aagttaaatagtcac

SEQ ID NO: 496570 - DNA, 15 bp, Homo sapiens
taagttaaatagtca

SEQ ID NO: 496571 - DNA, 15 bp, Homo sapiens
ttaagttaaatagtc

SEQ ID NO: 496572 - DNA, 15 bp, Homo sapiens
tttaagttaaatagt

SEQ ID NO: 496573 - DNA, 15 bp, Homo sapiens
atttaagttaaatag

SEQ ID NO: 496574 - DNA, 15 bp, Homo sapiens
aatttaagttaaata

SEQ ID NO: 496575 - DNA, 15 bp, Homo sapiens
aaatttaagttaaat

SEQ ID NO: 496576 - DNA, 15 bp, Homo sapiens
aaaatttaagttaaa

SEQ ID NO: 496577 - DNA, 15 bp, Homo sapiens
taaaatttaagttaa

SEQ ID NO: 496578 - DNA, 15 bp, Homo sapiens
ttaaaatttaagtta

SEQ ID NO: 496579 - DNA, 15 bp, Homo sapiens
gttaaaatttaagtt

SEQ ID NO: 496580 - DNA, 15 bp, Homo sapiens
tgttaaaatttaagt

SEQ ID NO: 496581 - DNA, 15 bp, Homo sapiens
atgttaaaatttaag

SEQ ID NO: 496582 - DNA, 15 bp, Homo sapiens
tatgttaaaatttaa

SEQ ID NO: 496583 - DNA, 15 bp, Homo sapiens
ttatgttaaaattta

SEQ ID NO: 496584 - DNA, 15 bp, Homo sapiens
attatgttaaaattt

SEQ ID NO: 496585 - DNA, 15 bp, Homo sapiens
aattatgttaaaatt

SEQ ID NO: 496586 - DNA, 15 bp, Homo sapiens
taattatgttaaaat

SEQ ID NO: 496587 - DNA, 15 bp, Homo sapiens
ttaattatgttaaaa

SEQ ID NO: 496588 - DNA, 15 bp, Homo sapiens
tttaattatgttaaa

SEQ ID NO: 496589 - DNA, 15 bp, Homo sapiens
ttttaattatgttaa

SEQ ID NO: 496590 - DNA, 15 bp, Homo sapiens
attttaattatgtta

SEQ ID NO: 496591 - DNA, 15 bp, Homo sapiens
aattttaattatgtt

SEQ ID NO: 496592 - DNA, 15 bp, Homo sapiens
taattttaattatgt

SEQ ID NO: 496593 - DNA, 15 bp, Homo sapiens
ttaattttaattatg

SEQ ID NO: 496594 - DNA, 15 bp, Homo sapiens
tttaattttaattat

SEQ ID NO: 496595 - DNA, 15 bp, Homo sapiens
atttaattttaatta

SEQ ID NO: 496596 - DNA, 15 bp, Homo sapiens
tatttaattttaatt

SEQ ID NO: 496597 - DNA, 15 bp, Homo sapiens
ttatttaattttaat

SEQ ID NO: 496598 - DNA, 15 bp, Homo sapiens
tttatttaattttaa

SEQ ID NO: 496599 - DNA, 15 bp, Homo sapiens
ttttatttaatttta

SEQ ID NO: 496600 - DNA, 15 bp, Homo sapiens
attttatttaatttt

SEQ ID NO: 496601 - DNA, 15 bp, Homo sapiens
aattttatttaattt

SEQ ID NO: 496602 - DNA, 15 bp, Homo sapiens
aaattttatttaatt

SEQ ID NO: 496603 - DNA, 15 bp, Homo sapiens
taaattttatttaat

SEQ ID NO: 496604 - DNA, 15 bp, Homo sapiens
ctaaattttatttaa

SEQ ID NO: 496605 - DNA, 15 bp, Homo sapiens
actaaattttattta

SEQ ID NO: 496606 - DNA, 15 bp, Homo sapiens
aactaaattttattt

SEQ ID NO: 496607 - DNA, 15 bp, Homo sapiens
gaactaaattttatt

SEQ ID NO: 496608 - DNA, 15 bp, Homo sapiens
ggaactaaattttat

SEQ ID NO: 496609 - DNA, 15 bp, Homo sapiens
aggaactaaatttta

SEQ ID NO: 496610 - DNA, 15 bp, Homo sapiens
gaggaactaaatttt

SEQ ID NO: 496611 - DNA, 15 bp, Homo sapiens
tgaggaactaaattt

SEQ ID NO: 496612 - DNA, 15 bp, Homo sapiens
ttgaggaactaaatt

SEQ ID NO: 496613 - DNA, 15 bp, Homo sapiens
attgaggaactaaat

SEQ ID NO: 496614 - DNA, 15 bp, Homo sapiens
gattgaggaactaaa

SEQ ID NO: 496615 - DNA, 15 bp, Homo sapiens
tgattgaggaactaa

SEQ ID NO: 496616 - DNA, 15 bp, Homo sapiens
atgattgaggaacta

SEQ ID NO: 496617 - DNA, 15 bp, Homo sapiens
tatgattgaggaact

SEQ ID NO: 496618 - DNA, 15 bp, Homo sapiens
atatgattgaggaac

SEQ ID NO: 496619 - DNA, 15 bp, Homo sapiens
tatatgattgaggaa

SEQ ID NO: 496620 - DNA, 15 bp, Homo sapiens
ctatatgattgagga

SEQ ID NO: 496621 - DNA, 15 bp, Homo sapiens
actatatgattgagg

SEQ ID NO: 496622 - DNA, 15 bp, Homo sapiens
tactatatgattgag

SEQ ID NO: 496623 - DNA, 15 bp, Homo sapiens
ttactatatgattga

SEQ ID NO: 496624 - DNA, 15 bp, Homo sapiens
gttactatatgattg

SEQ ID NO: 496625 - DNA, 15 bp, Homo sapiens
ggttactatatgatt

SEQ ID NO: 496626 - DNA, 15 bp, Homo sapiens
tggttactatatgat

SEQ ID NO: 496627 - DNA, 15 bp, Homo sapiens
gtggttactatatga

SEQ ID NO: 496628 - DNA, 15 bp, Homo sapiens
tgtggttactatatg

SEQ ID NO: 496629 - DNA, 15 bp, Homo sapiens
atgtggttactatat

SEQ ID NO: 496630 - DNA, 15 bp, Homo sapiens
gatgtggttactata

SEQ ID NO: 496631 - DNA, 15 bp, Homo sapiens
cgatgtggttactat

SEQ ID NO: 496632 - DNA, 15 bp, Homo sapiens
gcgatgtggttacta

SEQ ID NO: 496633 - DNA, 15 bp, Homo sapiens
tgcgatgtggttact

SEQ ID NO: 496634 - DNA, 15 bp, Homo sapiens
ttgcgatgtggttac

SEQ ID NO: 496635 - DNA, 15 bp, Homo sapiens
cttgcgatgtggtta

SEQ ID NO: 496636 - DNA, 15 bp, Homo sapiens
acttgcgatgtggtt

SEQ ID NO: 496637 - DNA, 15 bp, Homo sapiens
tacttgcgatgtggt

SEQ ID NO: 496638 - DNA, 15 bp, Homo sapiens
gtacttgcgatgtgg

SEQ ID NO: 496639 - DNA, 15 bp, Homo sapiens
ggtacttgcgatgtg

SEQ ID NO: 496640 - DNA, 15 bp, Homo sapiens
tggtacttgcgatgt

SEQ ID NO: 496641 - DNA, 15 bp, Homo sapiens
ctggtacttgcgatg

SEQ ID NO: 496642 - DNA, 15 bp, Homo sapiens
actggtacttgcgat

SEQ ID NO: 496643 - DNA, 15 bp, Homo sapiens
tactggtacttgcga

SEQ ID NO: 496644 - DNA, 15 bp, Homo sapiens
ctactggtacttgcg

SEQ ID NO: 496645 - DNA, 15 bp, Homo sapiens
gctactggtacttgc

SEQ ID NO: 496646 - DNA, 15 bp, Homo sapiens
ggctactggtacttg

SEQ ID NO: 496647 - DNA, 15 bp, Homo sapiens
tggctactggtactt

SEQ ID NO: 496648 - DNA, 15 bp, Homo sapiens
gtggctactggtact

SEQ ID NO: 496649 - DNA, 15 bp, Homo sapiens
tgtggctactggtac

SEQ ID NO: 496650 - DNA, 15 bp, Homo sapiens
atgtggctactggta

SEQ ID NO: 496651 - DNA, 15 bp, Homo sapiens
tatgtggctactggt

SEQ ID NO: 496652 - DNA, 15 bp, Homo sapiens
atatgtggctactgg

SEQ ID NO: 496653 - DNA, 15 bp, Homo sapiens
catatgtggctactg

SEQ ID NO: 496654 - DNA, 15 bp, Homo sapiens
tcatatgtggctact

SEQ ID NO: 496655 - DNA, 15 bp, Homo sapiens
gtcatatgtggctac

SEQ ID NO: 496656 - DNA, 15 bp, Homo sapiens
tgtcatatgtggcta

SEQ ID NO: 496657 - DNA, 15 bp, Homo sapiens
ttgtcatatgtggct

SEQ ID NO: 496658 - DNA, 15 bp, Homo sapiens
attgtcatatgtggc

SEQ ID NO: 496659 - DNA, 15 bp, Homo sapiens
aattgtcatatgtgg

SEQ ID NO: 496660 - DNA, 15 bp, Homo sapiens
taattgtcatatgtg

SEQ ID NO: 496661 - DNA, 15 bp, Homo sapiens
gtaattgtcatatgt

SEQ ID NO: 496662 - DNA, 15 bp, Homo sapiens
agtaattgtcatatg

SEQ ID NO: 496663 - DNA, 15 bp, Homo sapiens
aagtaattgtcatat

SEQ ID NO: 496664 - DNA, 15 bp, Homo sapiens
taagtaattgtcata

SEQ ID NO: 496665 - DNA, 15 bp, Homo sapiens
gtaagtaattgtcat

SEQ ID NO: 496666 - DNA, 15 bp, Homo sapiens
agtaagtaattgtca

SEQ ID NO: 496667 - DNA, 15 bp, Homo sapiens
gagtaagtaattgtc

SEQ ID NO: 496668 - DNA, 15 bp, Homo sapiens
agagtaagtaattgt

SEQ ID NO: 496669 - DNA, 15 bp, Homo sapiens
tagagtaagtaattg

SEQ ID NO: 496670 - DNA, 15 bp, Homo sapiens
atagagtaagtaatt

SEQ ID NO: 496671 - DNA, 15 bp, Homo sapiens
aatagagtaagtaat

SEQ ID NO: 496672 - DNA, 15 bp, Homo sapiens
caatagagtaagtaa

SEQ ID NO: 496673 - DNA, 15 bp, Homo sapiens
ccaatagagtaagta

SEQ ID NO: 496674 - DNA, 15 bp, Homo sapiens
tccaatagagtaagt

SEQ ID NO: 496675 - DNA, 15 bp, Homo sapiens
gtccaatagagtaag

SEQ ID NO: 496676 - DNA, 15 bp, Homo sapiens
tgtccaatagagtaa

SEQ ID NO: 496677 - DNA, 15 bp, Homo sapiens
ctgtccaatagagta

SEQ ID NO: 496678 - DNA, 15 bp, Homo sapiens
gctgtccaatagagt

SEQ ID NO: 496679 - DNA, 15 bp, Homo sapiens
tgctgtccaatagag

SEQ ID NO: 496680 - DNA, 15 bp, Homo sapiens
ctgctgtccaataga

SEQ ID NO: 496681 - DNA, 15 bp, Homo sapiens
tctgctgtccaatag

SEQ ID NO: 496682 - DNA, 15 bp, Homo sapiens
ctctgctgtccaata

SEQ ID NO: 496683 - DNA, 15 bp, Homo sapiens
tctctgctgtccaat

SEQ ID NO: 496684 - DNA, 15 bp, Homo sapiens
ctctctgctgtccaa

SEQ ID NO: 496685 - DNA, 15 bp, Homo sapiens
tctctctgctgtcca

SEQ ID NO: 496686 - DNA, 15 bp, Homo sapiens
ctctctctgctgtcc

SEQ ID NO: 496687 - DNA, 15 bp, Homo sapiens
tctctctctgctgtc

SEQ ID NO: 496688 - DNA, 15 bp, Homo sapiens
ttctctctctgctgt

SEQ ID NO: 496689 - DNA, 15 bp, Homo sapiens
tttctctctctgctg

SEQ ID NO: 496690 - DNA, 15 bp, Homo sapiens
ttttctctctctgct

SEQ ID NO: 496691 - DNA, 15 bp, Homo sapiens
attttctctctctgc

SEQ ID NO: 496692 - DNA, 15 bp, Homo sapiens
cattttctctctctg

SEQ ID NO: 496693 - DNA, 15 bp, Homo sapiens
acattttctctctct

SEQ ID NO: 496694 - DNA, 15 bp, Homo sapiens
aacattttctctctc

SEQ ID NO: 496695 - DNA, 15 bp, Homo sapiens
gaacattttctctct

SEQ ID NO: 496696 - DNA, 15 bp, Homo sapiens
ggaacattttctctc

SEQ ID NO: 496697 - DNA, 15 bp, Homo sapiens
aggaacattttctct

SEQ ID NO: 496698 - DNA, 15 bp, Homo sapiens
caggaacattttctc

SEQ ID NO: 496699 - DNA, 15 bp, Homo sapiens
acaggaacattttct

SEQ ID NO: 496700 - DNA, 15 bp, Homo sapiens
gacaggaacattttc

SEQ ID NO: 496701 - DNA, 15 bp, Homo sapiens
tgacaggaacatttt

SEQ ID NO: 496702 - DNA, 15 bp, Homo sapiens
atgacaggaacattt

SEQ ID NO: 496703 - DNA, 15 bp, Homo sapiens
gatgacaggaacatt

SEQ ID NO: 496704 - DNA, 15 bp, Homo sapiens
tgatgacaggaacat

SEQ ID NO: 496705 - DNA, 15 bp, Homo sapiens
gtgatgacaggaaca

SEQ ID NO: 496706 - DNA, 15 bp, Homo sapiens
tgtgatgacaggaac

SEQ ID NO: 496707 - DNA, 15 bp, Homo sapiens
ctgtgatgacaggaa

SEQ ID NO: 496708 - DNA, 15 bp, Homo sapiens
tctgtgatgacagga

SEQ ID NO: 496709 - DNA, 15 bp, Homo sapiens
ttctgtgatgacagg

SEQ ID NO: 496710 - DNA, 15 bp, Homo sapiens
tttctgtgatgacag

SEQ ID NO: 496711 - DNA, 15 bp, Homo sapiens
atttctgtgatgaca

SEQ ID NO: 496712 - DNA, 15 bp, Homo sapiens
tatttctgtgatgac

SEQ ID NO: 496713 - DNA, 15 bp, Homo sapiens
gtatttctgtgatga

SEQ ID NO: 496714 - DNA, 15 bp, Homo sapiens
agtatttctgtgatg

SEQ ID NO: 496715 - DNA, 15 bp, Homo sapiens
cagtatttctgtgat

SEQ ID NO: 496716 - DNA, 15 bp, Homo sapiens
ccagtatttctgtga

SEQ ID NO: 496717 - DNA, 15 bp, Homo sapiens
cccagtatttctgtg

SEQ ID NO: 496718 - DNA, 15 bp, Homo sapiens
gcccagtatttctgt

SEQ ID NO: 496719 - DNA, 15 bp, Homo sapiens
tgcccagtatttctg

SEQ ID NO: 496720 - DNA, 15 bp, Homo sapiens
ctgcccagtatttct

SEQ ID NO: 496721 - DNA, 15 bp, Homo sapiens
gctgcccagtatttc

SEQ ID NO: 496722 - DNA, 15 bp, Homo sapiens
tgctgcccagtattt

SEQ ID NO: 496723 - DNA, 15 bp, Homo sapiens
gtgctgcccagtatt

SEQ ID NO: 496724 - DNA, 15 bp, Homo sapiens
agtgctgcccagtat

SEQ ID NO: 496725 - DNA, 15 bp, Homo sapiens
cagtgctgcccagta

SEQ ID NO: 496726 - DNA, 15 bp, Homo sapiens
gcagtgctgcccagt

SEQ ID NO: 496727 - DNA, 15 bp, Homo sapiens
agcagtgctgcccag

SEQ ID NO: 496728 - DNA, 15 bp, Homo sapiens
tagcagtgctgccca

SEQ ID NO: 496729 - DNA, 15 bp, Homo sapiens
ctagcagtgctgccc

SEQ ID NO: 496730 - DNA, 15 bp, Homo sapiens
tctagcagtgctgcc

SEQ ID NO: 496731 - DNA, 15 bp, Homo sapiens
ctctagcagtgctgc

SEQ ID NO: 496732 - DNA, 15 bp, Homo sapiens
tctctagcagtgctg

SEQ ID NO: 496733 - DNA, 15 bp, Homo sapiens
gtctctagcagtgct

SEQ ID NO: 496734 - DNA, 15 bp, Homo sapiens
agtctctagcagtgc

SEQ ID NO: 496735 - DNA, 15 bp, Homo sapiens
cagtctctagcagtg

SEQ ID NO: 496736 - DNA, 15 bp, Homo sapiens
acagtctctagcagt

SEQ ID NO: 496737 - DNA, 15 bp, Homo sapiens
aacagtctctagcag

SEQ ID NO: 496738 - DNA, 15 bp, Homo sapiens
aaacagtctctagca

SEQ ID NO: 496739 - DNA, 15 bp, Homo sapiens
caaacagtctctagc

SEQ ID NO: 496740 - DNA, 15 bp, Homo sapiens
acaaacagtctctag

SEQ ID NO: 496741 - DNA, 15 bp, Homo sapiens
aacaaacagtctcta

SEQ ID NO: 496742 - DNA, 15 bp, Homo sapiens
caacaaacagtctct

SEQ ID NO: 496743 - DNA, 15 bp, Homo sapiens
gcaacaaacagtctc

SEQ ID NO: 496744 - DNA, 15 bp, Homo sapiens
tgcaacaaacagtct

SEQ ID NO: 496745 - DNA, 15 bp, Homo sapiens
ctgcaacaaacagtc

SEQ ID NO: 496746 - DNA, 15 bp, Homo sapiens
tctgcaacaaacagt

SEQ ID NO: 496747 - DNA, 15 bp, Homo sapiens
ctctgcaacaaacag

SEQ ID NO: 496748 - DNA, 15 bp, Homo sapiens
tctctgcaacaaaca

SEQ ID NO: 496749 - DNA, 15 bp, Homo sapiens
gtctctgcaacaaac

SEQ ID NO: 496750 - DNA, 15 bp, Homo sapiens
ggtctctgcaacaaa

SEQ ID NO: 496751 - DNA, 15 bp, Homo sapiens
tggtctctgcaacaa

SEQ ID NO: 496752 - DNA, 15 bp, Homo sapiens
atggtctctgcaaca

SEQ ID NO: 496753 - DNA, 15 bp, Homo sapiens
aatggtctctgcaac

SEQ ID NO: 496754 - DNA, 15 bp, Homo sapiens
aaatggtctctgcaa

SEQ ID NO: 496755 - DNA, 15 bp, Homo sapiens
gaaatggtctctgca

SEQ ID NO: 496756 - DNA, 15 bp, Homo sapiens
agaaatggtctctgc

SEQ ID NO: 496757 - DNA, 15 bp, Homo sapiens
aagaaatggtctctg

SEQ ID NO: 496758 - DNA, 15 bp, Homo sapiens
aaagaaatggtctct

SEQ ID NO: 496759 - DNA, 15 bp, Homo sapiens
taaagaaatggtctc

SEQ ID NO: 496760 - DNA, 15 bp, Homo sapiens
gtaaagaaatggtct

SEQ ID NO: 496761 - DNA, 15 bp, Homo sapiens
ggtaaagaaatggtc

SEQ ID NO: 496762 - DNA, 15 bp, Homo sapiens
aggtaaagaaatggt

SEQ ID NO: 496763 - DNA, 15 bp, Homo sapiens
aaggtaaagaaatgg

SEQ ID NO: 496764 - DNA, 15 bp, Homo sapiens
aaaggtaaagaaatg

SEQ ID NO: 496765 - DNA, 15 bp, Homo sapiens
aaaaggtaaagaaat

SEQ ID NO: 496766 - DNA, 15 bp, Homo sapiens
gaaaaggtaaagaaa

SEQ ID NO: 496767 - DNA, 15 bp, Homo sapiens
agaaaaggtaaagaa

SEQ ID NO: 496768 - DNA, 15 bp, Homo sapiens
aagaaaaggtaaaga

SEQ ID NO: 496769 - DNA, 15 bp, Homo sapiens
caagaaaaggtaaag

SEQ ID NO: 496770 - DNA, 15 bp, Homo sapiens
gcaagaaaaggtaaa

SEQ ID NO: 496771 - DNA, 15 bp, Homo sapiens
agcaagaaaaggtaa

SEQ ID NO: 496772 - DNA, 15 bp, Homo sapiens
gagcaagaaaaggta

SEQ ID NO: 496773 - DNA, 15 bp, Homo sapiens
agagcaagaaaaggt

SEQ ID NO: 496774 - DNA, 15 bp, Homo sapiens
aagagcaagaaaagg

SEQ ID NO: 496775 - DNA, 15 bp, Homo sapiens
aaagagcaagaaaag

SEQ ID NO: 496776 - DNA, 15 bp, Homo sapiens
gaaagagcaagaaaa

SEQ ID NO: 496777 - DNA, 15 bp, Homo sapiens
agaaagagcaagaaa

SEQ ID NO: 496778 - DNA, 15 bp, Homo sapiens
gagaaagagcaagaa

SEQ ID NO: 496779 - DNA, 15 bp, Homo sapiens
ggagaaagagcaaga

SEQ ID NO: 496780 - DNA, 15 bp, Homo sapiens
gggagaaagagcaag

SEQ ID NO: 496781 - DNA, 15 bp, Homo sapiens
agggagaaagagcaa

SEQ ID NO: 496782 - DNA, 15 bp, Homo sapiens
aagggagaaagagca

SEQ ID NO: 496783 - DNA, 15 bp, Homo sapiens
gaagggagaaagagc

SEQ ID NO: 496784 - DNA, 15 bp, Homo sapiens
tgaagggagaaagag

SEQ ID NO: 496785 - DNA, 15 bp, Homo sapiens
atgaagggagaaaga

SEQ ID NO: 496786 - DNA, 15 bp, Homo sapiens
gatgaagggagaaag

SEQ ID NO: 496787 - DNA, 15 bp, Homo sapiens
tgatgaagggagaaa

SEQ ID NO: 496788 - DNA, 15 bp, Homo sapiens
ctgatgaagggagaa

SEQ ID NO: 496789 - DNA, 15 bp, Homo sapiens
cctgatgaagggaga

SEQ ID NO: 496790 - DNA, 15 bp, Homo sapiens
ccctgatgaagggag

SEQ ID NO: 496791 - DNA, 15 bp, Homo sapiens
accctgatgaaggga

SEQ ID NO: 496792 - DNA, 15 bp, Homo sapiens
caccctgatgaaggg

SEQ ID NO: 496793 - DNA, 15 bp, Homo sapiens
acaccctgatgaagg

SEQ ID NO: 496794 - DNA, 15 bp, Homo sapiens
aacaccctgatgaag

SEQ ID NO: 496795 - DNA, 15 bp, Homo sapiens
aaacaccctgatgaa

SEQ ID NO: 496796 - DNA, 15 bp, Homo sapiens
gaaacaccctgatga

SEQ ID NO: 496797 - DNA, 15 bp, Homo sapiens
tgaaacaccctgatg

SEQ ID NO: 496798 - DNA, 15 bp, Homo sapiens
gtgaaacaccctgat

SEQ ID NO: 496799 - DNA, 15 bp, Homo sapiens
tgtgaaacaccctga

SEQ ID NO: 496800 - DNA, 15 bp, Homo sapiens
ctgtgaaacaccctg

SEQ ID NO: 496801 - DNA, 15 bp, Homo sapiens
tctgtgaaacaccct

SEQ ID NO: 496802 - DNA, 15 bp, Homo sapiens
ttctgtgaaacaccc

SEQ ID NO: 496803 - DNA, 15 bp, Homo sapiens
attctgtgaaacacc

SEQ ID NO: 496804 - DNA, 15 bp, Homo sapiens
aattctgtgaaacac

SEQ ID NO: 496805 - DNA, 15 bp, Homo sapiens
aaattctgtgaaaca

SEQ ID NO: 496806 - DNA, 15 bp, Homo sapiens
aaaattctgtgaaac

SEQ ID NO: 496807 - DNA, 15 bp, Homo sapiens
gaaaattctgtgaaa

SEQ ID NO: 496808 - DNA, 15 bp, Homo sapiens
tgaaaattctgtgaa

SEQ ID NO: 496809 - DNA, 15 bp, Homo sapiens
ctgaaaattctgtga

SEQ ID NO: 496810 - DNA, 15 bp, Homo sapiens
tctgaaaattctgtg

SEQ ID NO: 496811 - DNA, 15 bp, Homo sapiens
ttctgaaaattctgt

SEQ ID NO: 496812 - DNA, 15 bp, Homo sapiens
tttctgaaaattctg

SEQ ID NO: 496813 - DNA, 15 bp, Homo sapiens
ttttctgaaaattct

SEQ ID NO: 496814 - DNA, 15 bp, Homo sapiens
cttttctgaaaattc

SEQ ID NO: 496815 - DNA, 15 bp, Homo sapiens
ccttttctgaaaatt

SEQ ID NO: 496816 - DNA, 15 bp, Homo sapiens
tccttttctgaaaat

SEQ ID NO: 496817 - DNA, 15 bp, Homo sapiens
ctccttttctgaaaa

SEQ ID NO: 496818 - DNA, 15 bp, Homo sapiens
gctccttttctgaaa

SEQ ID NO: 496819 - DNA, 15 bp, Homo sapiens
tgctccttttctgaa

SEQ ID NO: 496820 - DNA, 15 bp, Homo sapiens
ttgctccttttctga

SEQ ID NO: 496821 - DNA, 15 bp, Homo sapiens
gttgctccttttctg

SEQ ID NO: 496822 - DNA, 15 bp, Homo sapiens
tgttgctccttttct

SEQ ID NO: 496823 - DNA, 15 bp, Homo sapiens
ctgttgctccttttc

SEQ ID NO: 496824 - DNA, 15 bp, Homo sapiens
tctgttgctcctttt

SEQ ID NO: 496825 - DNA, 15 bp, Homo sapiens
ctctgttgctccttt

SEQ ID NO: 496826 - DNA, 15 bp, Homo sapiens
cctctgttgctcctt

SEQ ID NO: 496827 - DNA, 15 bp, Homo sapiens
acctctgttgctcct

SEQ ID NO: 496828 - DNA, 15 bp, Homo sapiens
tacctctgttgctcc

SEQ ID NO: 496829 - DNA, 15 bp, Homo sapiens
ctacctctgttgctc

SEQ ID NO: 496830 - DNA, 15 bp, Homo sapiens
tctacctctgttgct

SEQ ID NO: 496831 - DNA, 15 bp, Homo sapiens
ctctacctctgttgc

SEQ ID NO: 496832 - DNA, 15 bp, Homo sapiens
tctctacctctgttg

SEQ ID NO: 496833 - DNA, 15 bp, Homo sapiens
atctctacctctgtt

SEQ ID NO: 496834 - DNA, 15 bp, Homo sapiens
tatctctacctctgt

SEQ ID NO: 496835 - DNA, 15 bp, Homo sapiens
ttatctctacctctg

SEQ ID NO: 496836 - DNA, 15 bp, Homo sapiens
tttatctctacctct

SEQ ID NO: 496837 - DNA, 15 bp, Homo sapiens
atttatctctacctc

SEQ ID NO: 496838 - DNA, 15 bp, Homo sapiens
aatttatctctacct

SEQ ID NO: 496839 - DNA, 15 bp, Homo sapiens
taatttatctctacc

SEQ ID NO: 496840 - DNA, 15 bp, Homo sapiens
ttaatttatctctac

SEQ ID NO: 496841 - DNA, 15 bp, Homo sapiens
gttaatttatctcta

SEQ ID NO: 496842 - DNA, 15 bp, Homo sapiens
tgttaatttatctct

SEQ ID NO: 496843 - DNA, 15 bp, Homo sapiens
atgttaatttatctc

SEQ ID NO: 496844 - DNA, 15 bp, Homo sapiens
catgttaatttatct

SEQ ID NO: 496845 - DNA, 15 bp, Homo sapiens
ccatgttaatttatc

SEQ ID NO: 496846 - DNA, 15 bp, Homo sapiens
tccatgttaatttat

SEQ ID NO: 496847 - DNA, 15 bp, Homo sapiens
ttccatgttaattta

SEQ ID NO: 496848 - DNA, 15 bp, Homo sapiens
tttccatgttaattt

SEQ ID NO: 496849 - DNA, 15 bp, Homo sapiens
gtttccatgttaatt

SEQ ID NO: 496850 - DNA, 15 bp, Homo sapiens
tgtttccatgttaat

SEQ ID NO: 496851 - DNA, 15 bp, Homo sapiens
ttgtttccatgttaa

SEQ ID NO: 496852 - DNA, 15 bp, Homo sapiens
attgtttccatgtta

SEQ ID NO: 496853 - DNA, 15 bp, Homo sapiens
aattgtttccatgtt

SEQ ID NO: 496854 - DNA, 15 bp, Homo sapiens
gaattgtttccatgt

SEQ ID NO: 496855 - DNA, 15 bp, Homo sapiens
tgaattgtttccatg

SEQ ID NO: 496856 - DNA, 15 bp, Homo sapiens
atgaattgtttccat

SEQ ID NO: 496857 - DNA, 15 bp, Homo sapiens
aatgaattgtttcca

SEQ ID NO: 496858 - DNA, 15 bp, Homo sapiens
aaatgaattgtttcc

SEQ ID NO: 496859 - DNA, 15 bp, Homo sapiens
aaaatgaattgtttc

SEQ ID NO: 496860 - DNA, 15 bp, Homo sapiens
caaaatgaattgttt

SEQ ID NO: 496861 - DNA, 15 bp, Homo sapiens
gcaaaatgaattgtt

SEQ ID NO: 496862 - DNA, 15 bp, Homo sapiens
agcaaaatgaattgt

SEQ ID NO: 496863 - DNA, 15 bp, Homo sapiens
tagcaaaatgaattg

SEQ ID NO: 496864 - DNA, 15 bp, Homo sapiens
atagcaaaatgaatt

SEQ ID NO: 496865 - DNA, 15 bp, Homo sapiens
aatagcaaaatgaat

SEQ ID NO: 496866 - DNA, 15 bp, Homo sapiens
aaatagcaaaatgaa

SEQ ID NO: 496867 - DNA, 15 bp, Homo sapiens
aaaatagcaaaatga

SEQ ID NO: 496868 - DNA, 15 bp, Homo sapiens
caaaatagcaaaatg

SEQ ID NO: 496869 - DNA, 15 bp, Homo sapiens
acaaaatagcaaaat

SEQ ID NO: 496870 - DNA, 15 bp, Homo sapiens
aacaaaatagcaaaa

SEQ ID NO: 496871 - DNA, 15 bp, Homo sapiens
taacaaaatagcaaa

SEQ ID NO: 496872 - DNA, 15 bp, Homo sapiens
ctaacaaaatagcaa

SEQ ID NO: 496873 - DNA, 15 bp, Homo sapiens
cctaacaaaatagca

SEQ ID NO: 496874 - DNA, 15 bp, Homo sapiens
acctaacaaaatagc

SEQ ID NO: 496875 - DNA, 15 bp, Homo sapiens
tacctaacaaaatag

SEQ ID NO: 496876 - DNA, 15 bp, Homo sapiens
atacctaacaaaata

SEQ ID NO: 496877 - DNA, 15 bp, Homo sapiens
aatacctaacaaaat

SEQ ID NO: 496878 - DNA, 15 bp, Homo sapiens
gaatacctaacaaaa

SEQ ID NO: 496879 - DNA, 15 bp, Homo sapiens
agaatacctaacaaa

SEQ ID NO: 496880 - DNA, 15 bp, Homo sapiens
tagaatacctaacaa

SEQ ID NO: 496881 - DNA, 15 bp, Homo sapiens
ttagaatacctaaca

SEQ ID NO: 496882 - DNA, 15 bp, Homo sapiens
attagaatacctaac

SEQ ID NO: 496883 - DNA, 15 bp, Homo sapiens
aattagaatacctaa

SEQ ID NO: 496884 - DNA, 15 bp, Homo sapiens
taattagaataccta

SEQ ID NO: 496885 - DNA, 15 bp, Homo sapiens
ttaattagaatacct

SEQ ID NO: 496886 - DNA, 15 bp, Homo sapiens
cttaattagaatacc

SEQ ID NO: 496887 - DNA, 15 bp, Homo sapiens
ccttaattagaatac

SEQ ID NO: 496888 - DNA, 15 bp, Homo sapiens
tccttaattagaata

SEQ ID NO: 496889 - DNA, 15 bp, Homo sapiens
ttccttaattagaat

SEQ ID NO: 496890 - DNA, 15 bp, Homo sapiens
attccttaattagaa

SEQ ID NO: 496891 - DNA, 15 bp, Homo sapiens
cattccttaattaga

SEQ ID NO: 496892 - DNA, 15 bp, Homo sapiens
acattccttaattag

SEQ ID NO: 496893 - DNA, 15 bp, Homo sapiens
gacattccttaatta

SEQ ID NO: 496894 - DNA, 15 bp, Homo sapiens
agacattccttaatt

SEQ ID NO: 496895 - DNA, 15 bp, Homo sapiens
aagacattccttaat

SEQ ID NO: 496896 - DNA, 15 bp, Homo sapiens
taagacattccttaa

SEQ ID NO: 496897 - DNA, 15 bp, Homo sapiens
ctaagacattcctta

SEQ ID NO: 496898 - DNA, 15 bp, Homo sapiens
cctaagacattcctt

SEQ ID NO: 496899 - DNA, 15 bp, Homo sapiens
gcctaagacattcct

SEQ ID NO: 496900 - DNA, 15 bp, Homo sapiens
tgcctaagacattcc

SEQ ID NO: 496901 - DNA, 15 bp, Homo sapiens
ctgcctaagacattc

SEQ ID NO: 496902 - DNA, 15 bp, Homo sapiens
actgcctaagacatt

SEQ ID NO: 496903 - DNA, 15 bp, Homo sapiens
tactgcctaagacat

SEQ ID NO: 496904 - DNA, 15 bp, Homo sapiens
ctactgcctaagaca

SEQ ID NO: 496905 - DNA, 15 bp, Homo sapiens
tctactgcctaagac

SEQ ID NO: 496906 - DNA, 15 bp, Homo sapiens
atctactgcctaaga

SEQ ID NO: 496907 - DNA, 15 bp, Homo sapiens
aatctactgcctaag

SEQ ID NO: 496908 - DNA, 15 bp, Homo sapiens
caatctactgcctaa

SEQ ID NO: 496909 - DNA, 15 bp, Homo sapiens
tcaatctactgccta

SEQ ID NO: 496910 - DNA, 15 bp, Homo sapiens
atcaatctactgcct

SEQ ID NO: 496911 - DNA, 15 bp, Homo sapiens
gatcaatctactgcc

SEQ ID NO: 496912 - DNA, 15 bp, Homo sapiens
ggatcaatctactgc

SEQ ID NO: 496913 - DNA, 15 bp, Homo sapiens
gggatcaatctactg

SEQ ID NO: 496914 - DNA, 15 bp, Homo sapiens
tgggatcaatctact

SEQ ID NO: 496915 - DNA, 15 bp, Homo sapiens
atgggatcaatctac

SEQ ID NO: 496916 - DNA, 15 bp, Homo sapiens
tatgggatcaatcta

SEQ ID NO: 496917 - DNA, 15 bp, Homo sapiens
ctatgggatcaatct

SEQ ID NO: 496918 - DNA, 15 bp, Homo sapiens
tctatgggatcaatc

SEQ ID NO: 496919 - DNA, 15 bp, Homo sapiens
ctctatgggatcaat

SEQ ID NO: 496920 - DNA, 15 bp, Homo sapiens
actctatgggatcaa

SEQ ID NO: 496921 - DNA, 15 bp, Homo sapiens
tactctatgggatca

SEQ ID NO: 496922 - DNA, 15 bp, Homo sapiens
ttactctatgggatc

SEQ ID NO: 496923 - DNA, 15 bp, Homo sapiens
tttactctatgggat

SEQ ID NO: 496924 - DNA, 15 bp, Homo sapiens
atttactctatggga

SEQ ID NO: 496925 - DNA, 15 bp, Homo sapiens
catttactctatggg

SEQ ID NO: 496926 - DNA, 15 bp, Homo sapiens
tcatttactctatgg

SEQ ID NO: 496927 - DNA, 15 bp, Homo sapiens
ttcatttactctatg

SEQ ID NO: 496928 - DNA, 15 bp, Homo sapiens
tttcatttactctat

SEQ ID NO: 496929 - DNA, 15 bp, Homo sapiens
atttcatttactcta

SEQ ID NO: 496930 - DNA, 15 bp, Homo sapiens
aatttcatttactct

SEQ ID NO: 496931 - DNA, 15 bp, Homo sapiens
aaatttcatttactc

SEQ ID NO: 496932 - DNA, 15 bp, Homo sapiens
aaaatttcatttact

SEQ ID NO: 496933 - DNA, 15 bp, Homo sapiens
taaaatttcatttac

SEQ ID NO: 496934 - DNA, 15 bp, Homo sapiens
ttaaaatttcattta

SEQ ID NO: 496935 - DNA, 15 bp, Homo sapiens
tttaaaatttcattt

SEQ ID NO: 496936 - DNA, 15 bp, Homo sapiens
ttttaaaatttcatt

SEQ ID NO: 496937 - DNA, 15 bp, Homo sapiens
attttaaaatttcat

SEQ ID NO: 496938 - DNA, 15 bp, Homo sapiens
cattttaaaatttca

SEQ ID NO: 496939 - DNA, 15 bp, Homo sapiens
acattttaaaatttc

SEQ ID NO: 496940 - DNA, 15 bp, Homo sapiens
cacattttaaaattt

SEQ ID NO: 496941 - DNA, 15 bp, Homo sapiens
ccacattttaaaatt

SEQ ID NO: 496942 - DNA, 15 bp, Homo sapiens
tccacattttaaaat

SEQ ID NO: 496943 - DNA, 15 bp, Homo sapiens
gtccacattttaaaa

SEQ ID NO: 496944 - DNA, 15 bp, Homo sapiens
tgtccacattttaaa

SEQ ID NO: 496945 - DNA, 15 bp, Homo sapiens
ctgtccacattttaa

SEQ ID NO: 496946 - DNA, 15 bp, Homo sapiens
actgtccacatttta

SEQ ID NO: 496947 - DNA, 15 bp, Homo sapiens
aactgtccacatttt

SEQ ID NO: 496948 - DNA, 15 bp, Homo sapiens
gaactgtccacattt

SEQ ID NO: 496949 - DNA, 15 bp, Homo sapiens
tgaactgtccacatt

SEQ ID NO: 496950 - DNA, 15 bp, Homo sapiens
atgaactgtccacat

SEQ ID NO: 496951 - DNA, 15 bp, Homo sapiens
aatgaactgtccaca

SEQ ID NO: 496952 - DNA, 15 bp, Homo sapiens
gaatgaactgtccac

SEQ ID NO: 496953 - DNA, 15 bp, Homo sapiens
tgaatgaactgtcca

SEQ ID NO: 496954 - DNA, 15 bp, Homo sapiens
ttgaatgaactgtcc

SEQ ID NO: 496955 - DNA, 15 bp, Homo sapiens
gttgaatgaactgtc

SEQ ID NO: 496956 - DNA, 15 bp, Homo sapiens
agttgaatgaactgt

SEQ ID NO: 496957 - DNA, 15 bp, Homo sapiens
tagttgaatgaactg

SEQ ID NO: 496958 - DNA, 15 bp, Homo sapiens
atagttgaatgaact

SEQ ID NO: 496959 - DNA, 15 bp, Homo sapiens
aatagttgaatgaac

SEQ ID NO: 496960 - DNA, 15 bp, Homo sapiens
taatagttgaatgaa

SEQ ID NO: 496961 - DNA, 15 bp, Homo sapiens
gtaatagttgaatga

SEQ ID NO: 496962 - DNA, 15 bp, Homo sapiens
agtaatagttgaatg

SEQ ID NO: 496963 - DNA, 15 bp, Homo sapiens
tagtaatagttgaat

SEQ ID NO: 496964 - DNA, 15 bp, Homo sapiens
atagtaatagttgaa

SEQ ID NO: 496965 - DNA, 15 bp, Homo sapiens
aatagtaatagttga

SEQ ID NO: 496966 - DNA, 15 bp, Homo sapiens
caatagtaatagttg

SEQ ID NO: 496967 - DNA, 15 bp, Homo sapiens
tcaatagtaatagtt

SEQ ID NO: 496968 - DNA, 15 bp, Homo sapiens
gtcaatagtaatagt

SEQ ID NO: 496969 - DNA, 15 bp, Homo sapiens
agtcaatagtaatag

SEQ ID NO: 496970 - DNA, 15 bp, Homo sapiens
tagtcaatagtaata

SEQ ID NO: 496971 - DNA, 15 bp, Homo sapiens
atagtcaatagtaat

SEQ ID NO: 496972 - DNA, 15 bp, Homo sapiens
tatagtcaatagtaa

SEQ ID NO: 496973 - DNA, 15 bp, Homo sapiens
atatagtcaatagta

SEQ ID NO: 496974 - DNA, 15 bp, Homo sapiens
aatatagtcaatagt

SEQ ID NO: 496975 - DNA, 15 bp, Homo sapiens
taatatagtcaatag

SEQ ID NO: 496976 - DNA, 15 bp, Homo sapiens
ataatatagtcaata

SEQ ID NO: 496977 - DNA, 15 bp, Homo sapiens
gataatatagtcaat

SEQ ID NO: 496978 - DNA, 15 bp, Homo sapiens
agataatatagtcaa

SEQ ID NO: 496979 - DNA, 15 bp, Homo sapiens
cagataatatagtca

SEQ ID NO: 496980 - DNA, 15 bp, Homo sapiens
acagataatatagtc

SEQ ID NO: 496981 - DNA, 15 bp, Homo sapiens
aacagataatatagt

SEQ ID NO: 496982 - DNA, 15 bp, Homo sapiens
taacagataatatag

SEQ ID NO: 496983 - DNA, 15 bp, Homo sapiens
gtaacagataatata

SEQ ID NO: 496984 - DNA, 15 bp, Homo sapiens
agtaacagataatat

SEQ ID NO: 496985 - DNA, 15 bp, Homo sapiens
aagtaacagataata

SEQ ID NO: 496986 - DNA, 15 bp, Homo sapiens
aaagtaacagataat

SEQ ID NO: 496987 - DNA, 15 bp, Homo sapiens
caaagtaacagataa

SEQ ID NO: 496988 - DNA, 15 bp, Homo sapiens
ccaaagtaacagata

SEQ ID NO: 496989 - DNA, 15 bp, Homo sapiens
tccaaagtaacagat

SEQ ID NO: 496990 - DNA, 15 bp, Homo sapiens
ttccaaagtaacaga

SEQ ID NO: 496991 - DNA, 15 bp, Homo sapiens
tttccaaagtaacag

SEQ ID NO: 496992 - DNA, 15 bp, Homo sapiens
atttccaaagtaaca

SEQ ID NO: 496993 - DNA, 15 bp, Homo sapiens
aatttccaaagtaac

SEQ ID NO: 496994 - DNA, 15 bp, Homo sapiens
taatttccaaagtaa

SEQ ID NO: 496995 - DNA, 15 bp, Homo sapiens
ttaatttccaaagta

SEQ ID NO: 496996 - DNA, 15 bp, Homo sapiens
attaatttccaaagt

SEQ ID NO: 496997 - DNA, 15 bp, Homo sapiens
cattaatttccaaag

SEQ ID NO: 496998 - DNA, 15 bp, Homo sapiens
tcattaatttccaaa

SEQ ID NO: 496999 - DNA, 15 bp, Homo sapiens
atcattaatttccaa

SEQ ID NO: 497000 - DNA, 15 bp, Homo sapiens
gatcattaatttcca

SEQ ID NO: 497001 - DNA, 15 bp, Homo sapiens
tgatcattaatttcc

SEQ ID NO: 497002 - DNA, 15 bp, Homo sapiens
ctgatcattaatttc

SEQ ID NO: 497003 - DNA, 15 bp, Homo sapiens
actgatcattaattt

SEQ ID NO: 497004 - DNA, 15 bp, Homo sapiens
aactgatcattaatt

SEQ ID NO: 497005 - DNA, 15 bp, Homo sapiens
taactgatcattaat

SEQ ID NO: 497006 - DNA, 15 bp, Homo sapiens
ctaactgatcattaa

SEQ ID NO: 497007 - DNA, 15 bp, Homo sapiens
actaactgatcatta

SEQ ID NO: 497008 - DNA, 15 bp, Homo sapiens
cactaactgatcatt

SEQ ID NO: 497009 - DNA, 15 bp, Homo sapiens
acactaactgatcat

SEQ ID NO: 497010 - DNA, 15 bp, Homo sapiens
aacactaactgatca

SEQ ID NO: 497011 - DNA, 15 bp, Homo sapiens
aaacactaactgatc

SEQ ID NO: 497012 - DNA, 15 bp, Homo sapiens
caaacactaactgat

SEQ ID NO: 497013 - DNA, 15 bp, Homo sapiens
acaaacactaactga

SEQ ID NO: 497014 - DNA, 15 bp, Homo sapiens
cacaaacactaactg

SEQ ID NO: 497015 - DNA, 15 bp, Homo sapiens
acacaaacactaact

SEQ ID NO: 497016 - DNA, 15 bp, Homo sapiens
cacacaaacactaac

SEQ ID NO: 497017 - DNA, 15 bp, Homo sapiens
acacacaaacactaa

SEQ ID NO: 497018 - DNA, 15 bp, Homo sapiens
tacacacaaacacta

SEQ ID NO: 497019 - DNA, 15 bp, Homo sapiens
atacacacaaacact

SEQ ID NO: 497020 - DNA, 15 bp, Homo sapiens
aatacacacaaacac

SEQ ID NO: 497021 - DNA, 15 bp, Homo sapiens
aaatacacacaaaca

SEQ ID NO: 497022 - DNA, 15 bp, Homo sapiens
caaatacacacaaac

SEQ ID NO: 497023 - DNA, 15 bp, Homo sapiens
tcaaatacacacaaa

SEQ ID NO: 497024 - DNA, 15 bp, Homo sapiens
atcaaatacacacaa

SEQ ID NO: 497025 - DNA, 15 bp, Homo sapiens
aatcaaatacacaca

SEQ ID NO: 497026 - DNA, 15 bp, Homo sapiens
aaatcaaatacacac

SEQ ID NO: 497027 - DNA, 15 bp, Homo sapiens
caaatcaaatacaca

SEQ ID NO: 497028 - DNA, 15 bp, Homo sapiens
acaaatcaaatacac

SEQ ID NO: 497029 - DNA, 15 bp, Homo sapiens
tacaaatcaaataca

SEQ ID NO: 497030 - DNA, 15 bp, Homo sapiens
ttacaaatcaaatac

SEQ ID NO: 497031 - DNA, 15 bp, Homo sapiens
attacaaatcaaata

SEQ ID NO: 497032 - DNA, 15 bp, Homo sapiens
cattacaaatcaaat

SEQ ID NO: 497033 - DNA, 15 bp, Homo sapiens
acattacaaatcaaa

SEQ ID NO: 497034 - DNA, 15 bp, Homo sapiens
aacattacaaatcaa

SEQ ID NO: 497035 - DNA, 15 bp, Homo sapiens
gaacattacaaatca

SEQ ID NO: 497036 - DNA, 15 bp, Homo sapiens
tgaacattacaaatc

SEQ ID NO: 497037 - DNA, 15 bp, Homo sapiens
atgaacattacaaat

SEQ ID NO: 497038 - DNA, 15 bp, Homo sapiens
tatgaacattacaaa

SEQ ID NO: 497039 - DNA, 15 bp, Homo sapiens
atatgaacattacaa

SEQ ID NO: 497040 - DNA, 15 bp, Homo sapiens
aatatgaacattaca

SEQ ID NO: 497041 - DNA, 15 bp, Homo sapiens
caatatgaacattac

SEQ ID NO: 497042 - DNA, 15 bp, Homo sapiens
gcaatatgaacatta

SEQ ID NO: 497043 - DNA, 15 bp, Homo sapiens
agcaatatgaacatt

SEQ ID NO: 497044 - DNA, 15 bp, Homo sapiens
gagcaatatgaacat

SEQ ID NO: 497045 - DNA, 15 bp, Homo sapiens
agagcaatatgaaca

SEQ ID NO: 497046 - DNA, 15 bp, Homo sapiens
gagagcaatatgaac

SEQ ID NO: 497047 - DNA, 15 bp, Homo sapiens
tgagagcaatatgaa

SEQ ID NO: 497048 - DNA, 15 bp, Homo sapiens
atgagagcaatatga

SEQ ID NO: 497049 - DNA, 15 bp, Homo sapiens
aatgagagcaatatg

SEQ ID NO: 497050 - DNA, 15 bp, Homo sapiens
taatgagagcaatat

SEQ ID NO: 497051 - DNA, 15 bp, Homo sapiens
ataatgagagcaata

SEQ ID NO: 497052 - DNA, 15 bp, Homo sapiens
aataatgagagcaat

SEQ ID NO: 497053 - DNA, 15 bp, Homo sapiens
taataatgagagcaa

SEQ ID NO: 497054 - DNA, 15 bp, Homo sapiens
ctaataatgagagca

SEQ ID NO: 497055 - DNA, 15 bp, Homo sapiens
cctaataatgagagc

SEQ ID NO: 497056 - DNA, 15 bp, Homo sapiens
acctaataatgagag

SEQ ID NO: 497057 - DNA, 15 bp, Homo sapiens
cacctaataatgaga

SEQ ID NO: 497058 - DNA, 15 bp, Homo sapiens
tcacctaataatgag

SEQ ID NO: 497059 - DNA, 15 bp, Homo sapiens
atcacctaataatga

SEQ ID NO: 497060 - DNA, 15 bp, Homo sapiens
aatcacctaataatg

SEQ ID NO: 497061 - DNA, 15 bp, Homo sapiens
aaatcacctaataat

SEQ ID NO: 497062 - DNA, 15 bp, Homo sapiens
taaatcacctaataa

SEQ ID NO: 497063 - DNA, 15 bp, Homo sapiens
ataaatcacctaata

SEQ ID NO: 497064 - DNA, 15 bp, Homo sapiens
tataaatcacctaat

SEQ ID NO: 497065 - DNA, 15 bp, Homo sapiens
ttataaatcacctaa

SEQ ID NO: 497066 - DNA, 15 bp, Homo sapiens
tttataaatcaccta

SEQ ID NO: 497067 - DNA, 15 bp, Homo sapiens
ttttataaatcacct

SEQ ID NO: 497068 - DNA, 15 bp, Homo sapiens
tttttataaatcacc

SEQ ID NO: 497069 - DNA, 15 bp, Homo sapiens
gtttttataaatcac

SEQ ID NO: 497070 - DNA, 15 bp, Homo sapiens
agtttttataaatca

SEQ ID NO: 497071 - DNA, 15 bp, Homo sapiens
cagtttttataaatc

SEQ ID NO: 497072 - DNA, 15 bp, Homo sapiens
ccagtttttataaat

SEQ ID NO: 497073 - DNA, 15 bp, Homo sapiens
accagtttttataaa

SEQ ID NO: 497074 - DNA, 15 bp, Homo sapiens
aaccagtttttataa

SEQ ID NO: 497075 - DNA, 15 bp, Homo sapiens
caaccagtttttata

SEQ ID NO: 497076 - DNA, 15 bp, Homo sapiens
acaaccagtttttat

SEQ ID NO: 497077 - DNA, 15 bp, Homo sapiens
aacaaccagttttta

SEQ ID NO: 497078 - DNA, 15 bp, Homo sapiens
gaacaaccagttttt

SEQ ID NO: 497079 - DNA, 15 bp, Homo sapiens
ggaacaaccagtttt

SEQ ID NO: 497080 - DNA, 15 bp, Homo sapiens
aggaacaaccagttt

SEQ ID NO: 497081 - DNA, 15 bp, Homo sapiens
gaggaacaaccagtt

SEQ ID NO: 497082 - DNA, 15 bp, Homo sapiens
ggaggaacaaccagt

SEQ ID NO: 497083 - DNA, 15 bp, Homo sapiens
tggaggaacaaccag

SEQ ID NO: 497084 - DNA, 15 bp, Homo sapiens
atggaggaacaacca

SEQ ID NO: 497085 - DNA, 15 bp, Homo sapiens
catggaggaacaacc

SEQ ID NO: 497086 - DNA, 15 bp, Homo sapiens
ccatggaggaacaac

SEQ ID NO: 497087 - DNA, 15 bp, Homo sapiens
accatggaggaacaa

SEQ ID NO: 497088 - DNA, 15 bp, Homo sapiens
caccatggaggaaca

SEQ ID NO: 497089 - DNA, 15 bp, Homo sapiens
acaccatggaggaac

SEQ ID NO: 497090 - DNA, 15 bp, Homo sapiens
aacaccatggaggaa

SEQ ID NO: 497091 - DNA, 15 bp, Homo sapiens
aaacaccatggagga

SEQ ID NO: 497092 - DNA, 15 bp, Homo sapiens
aaaacaccatggagg

SEQ ID NO: 497093 - DNA, 15 bp, Homo sapiens
aaaaacaccatggag

SEQ ID NO: 497094 - DNA, 15 bp, Homo sapiens
caaaaacaccatgga

SEQ ID NO: 497095 - DNA, 15 bp, Homo sapiens
acaaaaacaccatgg

SEQ ID NO: 497096 - DNA, 15 bp, Homo sapiens
gacaaaaacaccatg

SEQ ID NO: 497097 - DNA, 15 bp, Homo sapiens
tgacaaaaacaccat

SEQ ID NO: 497098 - DNA, 15 bp, Homo sapiens
atgacaaaaacacca

SEQ ID NO: 497099 - DNA, 15 bp, Homo sapiens
catgacaaaaacacc

SEQ ID NO: 497100 - DNA, 15 bp, Homo sapiens
gcatgacaaaaacac

SEQ ID NO: 497101 - DNA, 15 bp, Homo sapiens
agcatgacaaaaaca

SEQ ID NO: 497102 - DNA, 15 bp, Homo sapiens
aagcatgacaaaaac

SEQ ID NO: 497103 - DNA, 15 bp, Homo sapiens
taagcatgacaaaaa

SEQ ID NO: 497104 - DNA, 15 bp, Homo sapiens
ttaagcatgacaaaa

SEQ ID NO: 497105 - DNA, 15 bp, Homo sapiens
attaagcatgacaaa

SEQ ID NO: 497106 - DNA, 15 bp, Homo sapiens
aattaagcatgacaa

SEQ ID NO: 497107 - DNA, 15 bp, Homo sapiens
taattaagcatgaca

SEQ ID NO: 497108 - DNA, 15 bp, Homo sapiens
gtaattaagcatgac

SEQ ID NO: 497109 - DNA, 15 bp, Homo sapiens
tgtaattaagcatga

SEQ ID NO: 497110 - DNA, 15 bp, Homo sapiens
ttgtaattaagcatg

SEQ ID NO: 497111 - DNA, 15 bp, Homo sapiens
attgtaattaagcat

SEQ ID NO: 497112 - DNA, 15 bp, Homo sapiens
tattgtaattaagca

SEQ ID NO: 497113 - DNA, 15 bp, Homo sapiens
ctattgtaattaagc

SEQ ID NO: 497114 - DNA, 15 bp, Homo sapiens
cctattgtaattaag

SEQ ID NO: 497115 - DNA, 15 bp, Homo sapiens
tcctattgtaattaa

SEQ ID NO: 497116 - DNA, 15 bp, Homo sapiens
ttcctattgtaatta

SEQ ID NO: 497117 - DNA, 15 bp, Homo sapiens
tttcctattgtaatt

SEQ ID NO: 497118 - DNA, 15 bp, Homo sapiens
ttttcctattgtaat

SEQ ID NO: 497119 - DNA, 15 bp, Homo sapiens
tttttcctattgtaa

SEQ ID NO: 497120 - DNA, 15 bp, Homo sapiens
ctttttcctattgta

SEQ ID NO: 497121 - DNA, 15 bp, Homo sapiens
actttttcctattgt

SEQ ID NO: 497122 - DNA, 15 bp, Homo sapiens
aactttttcctattg

SEQ ID NO: 497123 - DNA, 15 bp, Homo sapiens
taactttttcctatt

SEQ ID NO: 497124 - DNA, 15 bp, Homo sapiens
ataactttttcctat

SEQ ID NO: 497125 - DNA, 15 bp, Homo sapiens
tataactttttccta

SEQ ID NO: 497126 - DNA, 15 bp, Homo sapiens
atataactttttcct

SEQ ID NO: 497127 - DNA, 15 bp, Homo sapiens
aatataactttttcc

SEQ ID NO: 497128 - DNA, 15 bp, Homo sapiens
aaatataactttttc

SEQ ID NO: 497129 - DNA, 15 bp, Homo sapiens
aaaaatataactttt

SEQ ID NO: 497130 - DNA, 15 bp, Homo sapiens
taaaaatataacttt

SEQ ID NO: 497131 - DNA, 15 bp, Homo sapiens
gtaaaaatataactt

SEQ ID NO: 497132 - DNA, 15 bp, Homo sapiens
cgtaaaaatataact

SEQ ID NO: 497133 - DNA, 15 bp, Homo sapiens
tcgtaaaaatataac

SEQ ID NO: 497134 - DNA, 15 bp, Homo sapiens
ttcgtaaaaatataa

SEQ ID NO: 497135 - DNA, 15 bp, Homo sapiens
cttcgtaaaaatata

SEQ ID NO: 497136 - DNA, 15 bp, Homo sapiens
gcttcgtaaaaatat

SEQ ID NO: 497137 - DNA, 15 bp, Homo sapiens
tgcttcgtaaaaata

SEQ ID NO: 497138 - DNA, 15 bp, Homo sapiens
ttgcttcgtaaaaat

SEQ ID NO: 497139 - DNA, 15 bp, Homo sapiens
tttgcttcgtaaaaa

SEQ ID NO: 497140 - DNA, 15 bp, Homo sapiens
atttgcttcgtaaaa

SEQ ID NO: 497141 - DNA, 15 bp, Homo sapiens
catttgcttcgtaaa

SEQ ID NO: 497142 - DNA, 15 bp, Homo sapiens
acatttgcttcgtaa

SEQ ID NO: 497143 - DNA, 15 bp, Homo sapiens
cacatttgcttcgta

SEQ ID NO: 497144 - DNA, 15 bp, Homo sapiens
acacatttgcttcgt

SEQ ID NO: 497145 - DNA, 15 bp, Homo sapiens
cacacatttgcttcg

SEQ ID NO: 497146 - DNA, 15 bp, Homo sapiens
acacacatttgcttc

SEQ ID NO: 497147 - DNA, 15 bp, Homo sapiens
tacacacatttgctt

SEQ ID NO: 497148 - DNA, 15 bp, Homo sapiens
gtacacacatttgct

SEQ ID NO: 497149 - DNA, 15 bp, Homo sapiens
ggtacacacatttgc

SEQ ID NO: 497150 - DNA, 15 bp, Homo sapiens
aggtacacacatttg

SEQ ID NO: 497151 - DNA, 15 bp, Homo sapiens
taggtacacacattt

SEQ ID NO: 497152 - DNA, 15 bp, Homo sapiens
ttaggtacacacatt

SEQ ID NO: 497153 - DNA, 15 bp, Homo sapiens
attaggtacacacat

SEQ ID NO: 497154 - DNA, 15 bp, Homo sapiens
tattaggtacacaca

SEQ ID NO: 497155 - DNA, 15 bp, Homo sapiens
gtattaggtacacac

SEQ ID NO: 497156 - DNA, 15 bp, Homo sapiens
ggtattaggtacaca

SEQ ID NO: 497157 - DNA, 15 bp, Homo sapiens
aggtattaggtacac

SEQ ID NO: 497158 - DNA, 15 bp, Homo sapiens
aaggtattaggtaca

SEQ ID NO: 497159 - DNA, 15 bp, Homo sapiens
aaaggtattaggtac

SEQ ID NO: 497160 - DNA, 15 bp, Homo sapiens
taaaggtattaggta

SEQ ID NO: 497161 - DNA, 15 bp, Homo sapiens
ataaaggtattaggt

SEQ ID NO: 497162 - DNA, 15 bp, Homo sapiens
aataaaggtattagg

SEQ ID NO: 497163 - DNA, 15 bp, Homo sapiens
aaataaaggtattag

SEQ ID NO: 497164 - DNA, 15 bp, Homo sapiens
caaataaaggtatta

SEQ ID NO: 497165 - DNA, 15 bp, Homo sapiens
ccaaataaaggtatt

SEQ ID NO: 497166 - DNA, 15 bp, Homo sapiens
tccaaataaaggtat

SEQ ID NO: 497167 - DNA, 15 bp, Homo sapiens
ctccaaataaaggta

SEQ ID NO: 497168 - DNA, 15 bp, Homo sapiens
cctccaaataaaggt

SEQ ID NO: 497169 - DNA, 15 bp, Homo sapiens
ccctccaaataaagg

SEQ ID NO: 497170 - DNA, 15 bp, Homo sapiens
cccctccaaataaag

SEQ ID NO: 497171 - DNA, 15 bp, Homo sapiens
tcccctccaaataaa

SEQ ID NO: 497172 - DNA, 15 bp, Homo sapiens
gtcccctccaaataa

SEQ ID NO: 497173 - DNA, 15 bp, Homo sapiens
tgtcccctccaaata

SEQ ID NO: 497174 - DNA, 15 bp, Homo sapiens
atgtcccctccaaat

SEQ ID NO: 497175 - DNA, 15 bp, Homo sapiens
catgtcccctccaaa

SEQ ID NO: 497176 - DNA, 15 bp, Homo sapiens
acatgtcccctccaa

SEQ ID NO: 497177 - DNA, 15 bp, Homo sapiens
tacatgtcccctcca

SEQ ID NO: 497178 - DNA, 15 bp, Homo sapiens
ctacatgtcccctcc

SEQ ID NO: 497179 - DNA, 15 bp, Homo sapiens
gctacatgtcccctc

SEQ ID NO: 497180 - DNA, 15 bp, Homo sapiens
agctacatgtcccct

SEQ ID NO: 497181 - DNA, 15 bp, Homo sapiens
aagctacatgtcccc

SEQ ID NO: 497182 - DNA, 15 bp, Homo sapiens
aaagctacatgtccc

SEQ ID NO: 497183 - DNA, 15 bp, Homo sapiens
taaagctacatgtcc

SEQ ID NO: 497184 - DNA, 15 bp, Homo sapiens
ctaaagctacatgtc

SEQ ID NO: 497185 - DNA, 15 bp, Homo sapiens
tctaaagctacatgt

SEQ ID NO: 497186 - DNA, 15 bp, Homo sapiens
ttctaaagctacatg

SEQ ID NO: 497187 - DNA, 15 bp, Homo sapiens
attctaaagctacat

SEQ ID NO: 497188 - DNA, 15 bp, Homo sapiens
cattctaaagctaca

SEQ ID NO: 497189 - DNA, 15 bp, Homo sapiens
tcattctaaagctac

SEQ ID NO: 497190 - DNA, 15 bp, Homo sapiens
ttcattctaaagcta

SEQ ID NO: 497191 - DNA, 15 bp, Homo sapiens
tttcattctaaagct

SEQ ID NO: 497192 - DNA, 15 bp, Homo sapiens
ctttcattctaaagc

SEQ ID NO: 497193 - DNA, 15 bp, Homo sapiens
gctttcattctaaag

SEQ ID NO: 497194 - DNA, 15 bp, Homo sapiens
agctttcattctaaa

SEQ ID NO: 497195 - DNA, 15 bp, Homo sapiens
aagctttcattctaa

SEQ ID NO: 497196 - DNA, 15 bp, Homo sapiens
aaagctttcattcta

SEQ ID NO: 497197 - DNA, 15 bp, Homo sapiens
aaaagctttcattct

SEQ ID NO: 497198 - DNA, 15 bp, Homo sapiens
caaaagctttcattc

SEQ ID NO: 497199 - DNA, 15 bp, Homo sapiens
ccaaaagctttcatt

SEQ ID NO: 497200 - DNA, 15 bp, Homo sapiens
cccaaaagctttcat

SEQ ID NO: 497201 - DNA, 15 bp, Homo sapiens
ccccaaaagctttca

SEQ ID NO: 497202 - DNA, 15 bp, Homo sapiens
cccccaaaagctttc

SEQ ID NO: 497203 - DNA, 15 bp, Homo sapiens
ccccccaaaagcttt

SEQ ID NO: 497204 - DNA, 15 bp, Homo sapiens
tccccccaaaagctt

SEQ ID NO: 497205 - DNA, 15 bp, Homo sapiens
atccccccaaaagct

SEQ ID NO: 497206 - DNA, 15 bp, Homo sapiens
tatccccccaaaagc

SEQ ID NO: 497207 - DNA, 15 bp, Homo sapiens
ttatccccccaaaag

SEQ ID NO: 497208 - DNA, 15 bp, Homo sapiens
gttatccccccaaaa

SEQ ID NO: 497209 - DNA, 15 bp, Homo sapiens
agttatccccccaaa

SEQ ID NO: 497210 - DNA, 15 bp, Homo sapiens
cagttatccccccaa

SEQ ID NO: 497211 - DNA, 15 bp, Homo sapiens
acagttatcccccca

SEQ ID NO: 497212 - DNA, 15 bp, Homo sapiens
aacagttatcccccc

SEQ ID NO: 497213 - DNA, 15 bp, Homo sapiens
aaacagttatccccc

SEQ ID NO: 497214 - DNA, 15 bp, Homo sapiens
aaaacagttatcccc

SEQ ID NO: 497215 - DNA, 15 bp, Homo sapiens
taaaacagttatccc

SEQ ID NO: 497216 - DNA, 15 bp, Homo sapiens
ataaaacagttatcc

SEQ ID NO: 497217 - DNA, 15 bp, Homo sapiens
tataaaacagttatc

SEQ ID NO: 497218 - DNA, 15 bp, Homo sapiens
atataaaacagttat

SEQ ID NO: 497219 - DNA, 15 bp, Homo sapiens
tatataaaacagtta

SEQ ID NO: 497220 - DNA, 15 bp, Homo sapiens
ttatataaaacagtt

SEQ ID NO: 497221 - DNA, 15 bp, Homo sapiens
attatataaaacagt

SEQ ID NO: 497222 - DNA, 15 bp, Homo sapiens
aattatataaaacag

SEQ ID NO: 497223 - DNA, 15 bp, Homo sapiens
taattatataaaaca

SEQ ID NO: 497224 - DNA, 15 bp, Homo sapiens
gtaattatataaaac

SEQ ID NO: 497225 - DNA, 15 bp, Homo sapiens
tgtaattatataaaa

SEQ ID NO: 497226 - DNA, 15 bp, Homo sapiens
atgtaattatataaa

SEQ ID NO: 497227 - DNA, 15 bp, Homo sapiens
tatgtaattatataa

SEQ ID NO: 497228 - DNA, 15 bp, Homo sapiens
gtatgtaattatata

SEQ ID NO: 497229 - DNA, 15 bp, Homo sapiens
ggtatgtaattatat

SEQ ID NO: 497230 - DNA, 15 bp, Homo sapiens
tggtatgtaattata

SEQ ID NO: 497231 - DNA, 15 bp, Homo sapiens
atggtatgtaattat

SEQ ID NO: 497232 - DNA, 15 bp, Homo sapiens
tatggtatgtaatta

SEQ ID NO: 497233 - DNA, 15 bp, Homo sapiens
gtatggtatgtaatt

SEQ ID NO: 497234 - DNA, 15 bp, Homo sapiens
tgtatggtatgtaat

SEQ ID NO: 497235 - DNA, 15 bp, Homo sapiens
ctgtatggtatgtaa

SEQ ID NO: 497236 - DNA, 15 bp, Homo sapiens
actgtatggtatgta

SEQ ID NO: 497237 - DNA, 15 bp, Homo sapiens
aactgtatggtatgt

SEQ ID NO: 497238 - DNA, 15 bp, Homo sapiens
gaactgtatggtatg

SEQ ID NO: 497239 - DNA, 15 bp, Homo sapiens
tgaactgtatggtat

SEQ ID NO: 497240 - DNA, 15 bp, Homo sapiens
gtgaactgtatggta

SEQ ID NO: 497241 - DNA, 15 bp, Homo sapiens
ggtgaactgtatggt

SEQ ID NO: 497242 - DNA, 15 bp, Homo sapiens
gggtgaactgtatgg

SEQ ID NO: 497243 - DNA, 15 bp, Homo sapiens
tgggtgaactgtatg

SEQ ID NO: 497244 - DNA, 15 bp, Homo sapiens
atgggtgaactgtat

SEQ ID NO: 497245 - DNA, 15 bp, Homo sapiens
aatgggtgaactgta

SEQ ID NO: 497246 - DNA, 15 bp, Homo sapiens
aaatgggtgaactgt

SEQ ID NO: 497247 - DNA, 15 bp, Homo sapiens
taaatgggtgaactg

SEQ ID NO: 497248 - DNA, 15 bp, Homo sapiens
ttaaatgggtgaact

SEQ ID NO: 497249 - DNA, 15 bp, Homo sapiens
tttaaatgggtgaac

SEQ ID NO: 497250 - DNA, 15 bp, Homo sapiens
ctttaaatgggtgaa

SEQ ID NO: 497251 - DNA, 15 bp, Homo sapiens
actttaaatgggtga

SEQ ID NO: 497252 - DNA, 15 bp, Homo sapiens
cactttaaatgggtg

SEQ ID NO: 497253 - DNA, 15 bp, Homo sapiens
acactttaaatgggt

SEQ ID NO: 497254 - DNA, 15 bp, Homo sapiens
gacactttaaatggg

SEQ ID NO: 497255 - DNA, 15 bp, Homo sapiens
ggacactttaaatgg

SEQ ID NO: 497256 - DNA, 15 bp, Homo sapiens
tggacactttaaatg

SEQ ID NO: 497257 - DNA, 15 bp, Homo sapiens
ttggacactttaaat

SEQ ID NO: 497258 - DNA, 15 bp, Homo sapiens
attggacactttaaa

SEQ ID NO: 497259 - DNA, 15 bp, Homo sapiens
aattggacactttaa

SEQ ID NO: 497260 - DNA, 15 bp, Homo sapiens
gaattggacacttta

SEQ ID NO: 497261 - DNA, 15 bp, Homo sapiens
tgaattggacacttt

SEQ ID NO: 497262 - DNA, 15 bp, Homo sapiens
ctgaattggacactt

SEQ ID NO: 497263 - DNA, 15 bp, Homo sapiens
actgaattggacact

SEQ ID NO: 497264 - DNA, 15 bp, Homo sapiens
cactgaattggacac

SEQ ID NO: 497265 - DNA, 15 bp, Homo sapiens
tcactgaattggaca

SEQ ID NO: 497266 - DNA, 15 bp, Homo sapiens
gtcactgaattggac

SEQ ID NO: 497267 - DNA, 15 bp, Homo sapiens
agtcactgaattgga

SEQ ID NO: 497268 - DNA, 15 bp, Homo sapiens
cagtcactgaattgg

SEQ ID NO: 497269 - DNA, 15 bp, Homo sapiens
acagtcactgaattg

SEQ ID NO: 497270 - DNA, 15 bp, Homo sapiens
aacagtcactgaatt

SEQ ID NO: 497271 - DNA, 15 bp, Homo sapiens
aaacagtcactgaat

SEQ ID NO: 497272 - DNA, 15 bp, Homo sapiens
aaaacagtcactgaa

SEQ ID NO: 497273 - DNA, 15 bp, Homo sapiens
aaaaacagtcactga

SEQ ID NO: 497274 - DNA, 15 bp, Homo sapiens
taaaaacagtcactg

SEQ ID NO: 497275 - DNA, 15 bp, Homo sapiens
ttaaaaacagtcact

SEQ ID NO: 497276 - DNA, 15 bp, Homo sapiens
attaaaaacagtcac

SEQ ID NO: 497277 - DNA, 15 bp, Homo sapiens
cattaaaaacagtca

SEQ ID NO: 497278 - DNA, 15 bp, Homo sapiens
acattaaaaacagtc

SEQ ID NO: 497279 - DNA, 15 bp, Homo sapiens
tacattaaaaacagt

SEQ ID NO: 497280 - DNA, 15 bp, Homo sapiens
atacattaaaaacag

SEQ ID NO: 497281 - DNA, 15 bp, Homo sapiens
aatacattaaaaaca

SEQ ID NO: 497282 - DNA, 15 bp, Homo sapiens
gaatacattaaaaac

SEQ ID NO: 497283 - DNA, 15 bp, Homo sapiens
tgaatacattaaaaa

SEQ ID NO: 497284 - DNA, 15 bp, Homo sapiens
gtgaatacattaaaa

SEQ ID NO: 497285 - DNA, 15 bp, Homo sapiens
tgtgaatacattaaa

SEQ ID NO: 497286 - DNA, 15 bp, Homo sapiens
ctgtgaatacattaa

SEQ ID NO: 497287 - DNA, 15 bp, Homo sapiens
tctgtgaatacatta

SEQ ID NO: 497288 - DNA, 15 bp, Homo sapiens
ctctgtgaatacatt

SEQ ID NO: 497289 - DNA, 15 bp, Homo sapiens
actctgtgaatacat

SEQ ID NO: 497290 - DNA, 15 bp, Homo sapiens
aactctgtgaataca

SEQ ID NO: 497291 - DNA, 15 bp, Homo sapiens
caactctgtgaatac

SEQ ID NO: 497292 - DNA, 15 bp, Homo sapiens
acaactctgtgaata

SEQ ID NO: 497293 - DNA, 15 bp, Homo sapiens
cacaactctgtgaat

SEQ ID NO: 497294 - DNA, 15 bp, Homo sapiens
gcacaactctgtgaa

SEQ ID NO: 497295 - DNA, 15 bp, Homo sapiens
tgcacaactctgtga

SEQ ID NO: 497296 - DNA, 15 bp, Homo sapiens
ttgcacaactctgtg

SEQ ID NO: 497297 - DNA, 15 bp, Homo sapiens
gttgcacaactctgt

SEQ ID NO: 497298 - DNA, 15 bp, Homo sapiens
ggttgcacaactctg

SEQ ID NO: 497299 - DNA, 15 bp, Homo sapiens
tggttgcacaactct

SEQ ID NO: 497300 - DNA, 15 bp, Homo sapiens
atggttgcacaactc

SEQ ID NO: 497301 - DNA, 15 bp, Homo sapiens
gatggttgcacaact

SEQ ID NO: 497302 - DNA, 15 bp, Homo sapiens
tgatggttgcacaac

SEQ ID NO: 497303 - DNA, 15 bp, Homo sapiens
gtgatggttgcacaa

SEQ ID NO: 497304 - DNA, 15 bp, Homo sapiens
ggtgatggttgcaca

SEQ ID NO: 497305 - DNA, 15 bp, Homo sapiens
tggtgatggttgcac

SEQ ID NO: 497306 - DNA, 15 bp, Homo sapiens
gtggtgatggttgca

SEQ ID NO: 497307 - DNA, 15 bp, Homo sapiens
tgtggtgatggttgc

SEQ ID NO: 497308 - DNA, 15 bp, Homo sapiens
ttgtggtgatggttg

SEQ ID NO: 497309 - DNA, 15 bp, Homo sapiens
attgtggtgatggtt

SEQ ID NO: 497310 - DNA, 15 bp, Homo sapiens
acttgattgtggtga

SEQ ID NO: 497311 - DNA, 15 bp, Homo sapiens
aacttgattgtggtg

SEQ ID NO: 497312 - DNA, 15 bp, Homo sapiens
aaacttgattgtggt

SEQ ID NO: 497313 - DNA, 15 bp, Homo sapiens
aaaacttgattgtgg

SEQ ID NO: 497314 - DNA, 15 bp, Homo sapiens
taaaacttgattgtg

SEQ ID NO: 497315 - DNA, 15 bp, Homo sapiens
ctaaaacttgattgt

SEQ ID NO: 497316 - DNA, 15 bp, Homo sapiens
tctaaaacttgattg

SEQ ID NO: 497317 - DNA, 15 bp, Homo sapiens
ttctaaaacttgatt

SEQ ID NO: 497318 - DNA, 15 bp, Homo sapiens
gttctaaaacttgat

SEQ ID NO: 497319 - DNA, 15 bp, Homo sapiens
tgttctaaaacttga

SEQ ID NO: 497320 - DNA, 15 bp, Homo sapiens
ttgttctaaaacttg

SEQ ID NO: 497321 - DNA, 15 bp, Homo sapiens
attgttctaaaactt

SEQ ID NO: 497322 - DNA, 15 bp, Homo sapiens
aattgttctaaaact

SEQ ID NO: 497323 - DNA, 15 bp, Homo sapiens
aaattgttctaaaac

SEQ ID NO: 497324 - DNA, 15 bp, Homo sapiens
gaaattgttctaaaa

SEQ ID NO: 497325 - DNA, 15 bp, Homo sapiens
tgaaattgttctaaa

SEQ ID NO: 497326 - DNA, 15 bp, Homo sapiens
atgaaattgttctaa

SEQ ID NO: 497327 - DNA, 15 bp, Homo sapiens
gatgaaattgttcta

SEQ ID NO: 497328 - DNA, 15 bp, Homo sapiens
tgatgaaattgttct

SEQ ID NO: 497329 - DNA, 15 bp, Homo sapiens
ttgatgaaattgttc

SEQ ID NO: 497330 - DNA, 15 bp, Homo sapiens
attgatgaaattgtt

SEQ ID NO: 497331 - DNA, 15 bp, Homo sapiens
aattgatgaaattgt

SEQ ID NO: 497332 - DNA, 15 bp, Homo sapiens
caattgatgaaattg

SEQ ID NO: 497333 - DNA, 15 bp, Homo sapiens
tcaattgatgaaatt

SEQ ID NO: 497334 - DNA, 15 bp, Homo sapiens
ctcaattgatgaaat

SEQ ID NO: 497335 - DNA, 15 bp, Homo sapiens
tctcaattgatgaaa

SEQ ID NO: 497336 - DNA, 15 bp, Homo sapiens
ttctcaattgatgaa

SEQ ID NO: 497337 - DNA, 15 bp, Homo sapiens
tttctcaattgatga

SEQ ID NO: 497338 - DNA, 15 bp, Homo sapiens
ttttctcaattgatg

SEQ ID NO: 497339 - DNA, 15 bp, Homo sapiens
tttttctcaattgat

SEQ ID NO: 497340 - DNA, 15 bp, Homo sapiens
ttttttctcaattga

SEQ ID NO: 497341 - DNA, 15 bp, Homo sapiens
tttttttctcaattg

SEQ ID NO: 497342 - DNA, 15 bp, Homo sapiens
gtttttttctcaatt

SEQ ID NO: 497343 - DNA, 15 bp, Homo sapiens
ggtttttttctcaat

SEQ ID NO: 497344 - DNA, 15 bp, Homo sapiens
gggtttttttctcaa

SEQ ID NO: 497345 - DNA, 15 bp, Homo sapiens
ggggtttttttctca

SEQ ID NO: 497346 - DNA, 15 bp, Homo sapiens
cggggtttttttctc

SEQ ID NO: 497347 - DNA, 15 bp, Homo sapiens
acggggtttttttct

SEQ ID NO: 497348 - DNA, 15 bp, Homo sapiens
tacggggtttttttc

SEQ ID NO: 497349 - DNA, 15 bp, Homo sapiens
gtacggggttttttt

SEQ ID NO: 497350 - DNA, 15 bp, Homo sapiens
ggtacggggtttttt

SEQ ID NO: 497351 - DNA, 15 bp, Homo sapiens
gggtacggggttttt

SEQ ID NO: 497352 - DNA, 15 bp, Homo sapiens
agggtacggggtttt

SEQ ID NO: 497353 - DNA, 15 bp, Homo sapiens
aagggtacggggttt

SEQ ID NO: 497354 - DNA, 15 bp, Homo sapiens
aaagggtacggggtt

SEQ ID NO: 497355 - DNA, 15 bp, Homo sapiens
taaagggtacggggt

SEQ ID NO: 497356 - DNA, 15 bp, Homo sapiens
ctaaagggtacgggg

SEQ ID NO: 497357 - DNA, 15 bp, Homo sapiens
gctaaagggtacggg

SEQ ID NO: 497358 - DNA, 15 bp, Homo sapiens
agctaaagggtacgg

SEQ ID NO: 497359 - DNA, 15 bp, Homo sapiens
tagctaaagggtacg

SEQ ID NO: 497360 - DNA, 15 bp, Homo sapiens
atagctaaagggtac

SEQ ID NO: 497361 - DNA, 15 bp, Homo sapiens
gatagctaaagggta

SEQ ID NO: 497362 - DNA, 15 bp, Homo sapiens
agatagctaaagggt

SEQ ID NO: 497363 - DNA, 15 bp, Homo sapiens
gagatagctaaaggg

SEQ ID NO: 497364 - DNA, 15 bp, Homo sapiens
agagatagctaaagg

SEQ ID NO: 497365 - DNA, 15 bp, Homo sapiens
cagagatagctaaag

SEQ ID NO: 497366 - DNA, 15 bp, Homo sapiens
gcagagatagctaaa

SEQ ID NO: 497367 - DNA, 15 bp, Homo sapiens
ggcagagatagctaa

SEQ ID NO: 497368 - DNA, 15 bp, Homo sapiens
aggcagagatagcta

SEQ ID NO: 497369 - DNA, 15 bp, Homo sapiens
gaggcagagatagct

SEQ ID NO: 497370 - DNA, 15 bp, Homo sapiens
agaggcagagatagc

SEQ ID NO: 497371 - DNA, 15 bp, Homo sapiens
tagaggcagagatag

SEQ ID NO: 497372 - DNA, 15 bp, Homo sapiens
ttagaggcagagata

SEQ ID NO: 497373 - DNA, 15 bp, Homo sapiens
gttagaggcagagat

SEQ ID NO: 497374 - DNA, 15 bp, Homo sapiens
ggttagaggcagaga

SEQ ID NO: 497375 - DNA, 15 bp, Homo sapiens
tggttagaggcagag

SEQ ID NO: 497376 - DNA, 15 bp, Homo sapiens
gtggttagaggcaga

SEQ ID NO: 497377 - DNA, 15 bp, Homo sapiens
ggtggttagaggcag

SEQ ID NO: 497378 - DNA, 15 bp, Homo sapiens
gggtggttagaggca

SEQ ID NO: 497379 - DNA, 15 bp, Homo sapiens
ggggtggttagaggc

SEQ ID NO: 497380 - DNA, 15 bp, Homo sapiens
gggggtggttagagg

SEQ ID NO: 497381 - DNA, 15 bp, Homo sapiens
ggggggtggttagag

SEQ ID NO: 497382 - DNA, 15 bp, Homo sapiens
tggggggtggttaga

SEQ ID NO: 497383 - DNA, 15 bp, Homo sapiens
gtggggggtggttag

SEQ ID NO: 497384 - DNA, 15 bp, Homo sapiens
ggtggggggtggtta

SEQ ID NO: 497385 - DNA, 15 bp, Homo sapiens
gggtggggggtggtt

SEQ ID NO: 497386 - DNA, 15 bp, Homo sapiens
tgggtggggggtggt

SEQ ID NO: 497387 - DNA, 15 bp, Homo sapiens
gtgggtggggggtgg

SEQ ID NO: 497388 - DNA, 15 bp, Homo sapiens
agtgggtggggggtg

SEQ ID NO: 497389 - DNA, 15 bp, Homo sapiens
aagtgggtggggggt

SEQ ID NO: 497390 - DNA, 15 bp, Homo sapiens
aaagtgggtgggggg

SEQ ID NO: 497391 - DNA, 15 bp, Homo sapiens
gaaagtgggtggggg

SEQ ID NO: 497392 - DNA, 15 bp, Homo sapiens
agaaagtgggtgggg

SEQ ID NO: 497393 - DNA, 15 bp, Homo sapiens
aagaaagtgggtggg

SEQ ID NO: 497394 - DNA, 15 bp, Homo sapiens
caagaaagtgggtgg

SEQ ID NO: 497395 - DNA, 15 bp, Homo sapiens
gcaagaaagtgggtg

SEQ ID NO: 497396 - DNA, 15 bp, Homo sapiens
ggcaagaaagtgggt

SEQ ID NO: 497397 - DNA, 15 bp, Homo sapiens
aggcaagaaagtggg

SEQ ID NO: 497398 - DNA, 15 bp, Homo sapiens
gaggcaagaaagtgg

SEQ ID NO: 497399 - DNA, 15 bp, Homo sapiens
agaggcaagaaagtg

SEQ ID NO: 497400 - DNA, 15 bp, Homo sapiens
gagaggcaagaaagt

SEQ ID NO: 497401 - DNA, 15 bp, Homo sapiens
agagaggcaagaaag

SEQ ID NO: 497402 - DNA, 15 bp, Homo sapiens
aagagaggcaagaaa

SEQ ID NO: 497403 - DNA, 15 bp, Homo sapiens
gaagagaggcaagaa

SEQ ID NO: 497404 - DNA, 15 bp, Homo sapiens
ggaagagaggcaaga

SEQ ID NO: 497405 - DNA, 15 bp, Homo sapiens
gggaagagaggcaag

SEQ ID NO: 497406 - DNA, 15 bp, Homo sapiens
ggggaagagaggcaa

SEQ ID NO: 497407 - DNA, 15 bp, Homo sapiens
gggggaagagaggca

SEQ ID NO: 497408 - DNA, 15 bp, Homo sapiens
tgggggaagagaggc

SEQ ID NO: 497409 - DNA, 15 bp, Homo sapiens
ttgggggaagagagg

SEQ ID NO: 497410 - DNA, 15 bp, Homo sapiens
gttgggggaagagag

SEQ ID NO: 497411 - DNA, 15 bp, Homo sapiens
cgttgggggaagaga

SEQ ID NO: 497412 - DNA, 15 bp, Homo sapiens
acgttgggggaagag

SEQ ID NO: 497413 - DNA, 15 bp, Homo sapiens
gacgttgggggaaga

SEQ ID NO: 497414 - DNA, 15 bp, Homo sapiens
agacgttgggggaag

SEQ ID NO: 497415 - DNA, 15 bp, Homo sapiens
gagacgttgggggaa

SEQ ID NO: 497416 - DNA, 15 bp, Homo sapiens
agagacgttggggga

SEQ ID NO: 497417 - DNA, 15 bp, Homo sapiens
tagagacgttggggg

SEQ ID NO: 497418 - DNA, 15 bp, Homo sapiens
ctagagacgttgggg

SEQ ID NO: 497419 - DNA, 15 bp, Homo sapiens
gctagagacgttggg

SEQ ID NO: 497420 - DNA, 15 bp, Homo sapiens
ggctagagacgttgg

SEQ ID NO: 497421 - DNA, 15 bp, Homo sapiens
gggctagagacgttg

SEQ ID NO: 497422 - DNA, 15 bp, Homo sapiens
agggctagagacgtt

SEQ ID NO: 497423 - DNA, 15 bp, Homo sapiens
tagggctagagacgt

SEQ ID NO: 497424 - DNA, 15 bp, Homo sapiens
ctagggctagagacg

SEQ ID NO: 497425 - DNA, 15 bp, Homo sapiens
cctagggctagagac

SEQ ID NO: 497426 - DNA, 15 bp, Homo sapiens
gcctagggctagaga

SEQ ID NO: 497427 - DNA, 15 bp, Homo sapiens
tgcctagggctagag

SEQ ID NO: 497428 - DNA, 15 bp, Homo sapiens
ttgcctagggctaga

SEQ ID NO: 497429 - DNA, 15 bp, Homo sapiens
gttgcctagggctag

SEQ ID NO: 497430 - DNA, 15 bp, Homo sapiens
ggttgcctagggcta

SEQ ID NO: 497431 - DNA, 15 bp, Homo sapiens
tggttgcctagggct

SEQ ID NO: 497432 - DNA, 15 bp, Homo sapiens
atggttgcctagggc

SEQ ID NO: 497433 - DNA, 15 bp, Homo sapiens
catggttgcctaggg

SEQ ID NO: 497434 - DNA, 15 bp, Homo sapiens
tcatggttgcctagg

SEQ ID NO: 497435 - DNA, 15 bp, Homo sapiens
ttcatggttgcctag

SEQ ID NO: 497436 - DNA, 15 bp, Homo sapiens
attcatggttgccta

SEQ ID NO: 497437 - DNA, 15 bp, Homo sapiens
gattcatggttgcct

SEQ ID NO: 497438 - DNA, 15 bp, Homo sapiens
agattcatggttgcc

SEQ ID NO: 497439 - DNA, 15 bp, Homo sapiens
tagattcatggttgc

SEQ ID NO: 497440 - DNA, 15 bp, Homo sapiens
gtagattcatggttg

SEQ ID NO: 497441 - DNA, 15 bp, Homo sapiens
agtagattcatggtt

SEQ ID NO: 497442 - DNA, 15 bp, Homo sapiens
aagtagattcatggt

SEQ ID NO: 497443 - DNA, 15 bp, Homo sapiens
aaagtagattcatgg

SEQ ID NO: 497444 - DNA, 15 bp, Homo sapiens
gaaagtagattcatg

SEQ ID NO: 497445 - DNA, 15 bp, Homo sapiens
agaaagtagattcat

SEQ ID NO: 497446 - DNA, 15 bp, Homo sapiens
cagaaagtagattca

SEQ ID NO: 497447 - DNA, 15 bp, Homo sapiens
acagaaagtagattc

SEQ ID NO: 497448 - DNA, 15 bp, Homo sapiens
gacagaaagtagatt

SEQ ID NO: 497449 - DNA, 15 bp, Homo sapiens
agacagaaagtagat

SEQ ID NO: 497450 - DNA, 15 bp, Homo sapiens
aagacagaaagtaga

SEQ ID NO: 497451 - DNA, 15 bp, Homo sapiens
aaagacagaaagtag

SEQ ID NO: 497452 - DNA, 15 bp, Homo sapiens
caaagacagaaagta

SEQ ID NO: 497453 - DNA, 15 bp, Homo sapiens
acaaagacagaaagt

SEQ ID NO: 497454 - DNA, 15 bp, Homo sapiens
tacaaagacagaaag

SEQ ID NO: 497455 - DNA, 15 bp, Homo sapiens
ctacaaagacagaaa

SEQ ID NO: 497456 - DNA, 15 bp, Homo sapiens
tctacaaagacagaa

SEQ ID NO: 497457 - DNA, 15 bp, Homo sapiens
atctacaaagacaga

SEQ ID NO: 497458 - DNA, 15 bp, Homo sapiens
aatctacaaagacag

SEQ ID NO: 497459 - DNA, 15 bp, Homo sapiens
aaatctacaaagaca

SEQ ID NO: 497460 - DNA, 15 bp, Homo sapiens
caaatctacaaagac

SEQ ID NO: 497461 - DNA, 15 bp, Homo sapiens
gcaaatctacaaaga

SEQ ID NO: 497462 - DNA, 15 bp, Homo sapiens
ggcaaatctacaaag

SEQ ID NO: 497463 - DNA, 15 bp, Homo sapiens
aggcaaatctacaaa

SEQ ID NO: 497464 - DNA, 15 bp, Homo sapiens
taggcaaatctacaa

SEQ ID NO: 497465 - DNA, 15 bp, Homo sapiens
ataggcaaatctaca

SEQ ID NO: 497466 - DNA, 15 bp, Homo sapiens
aataggcaaatctac

SEQ ID NO: 497467 - DNA, 15 bp, Homo sapiens
gaataggcaaatcta

SEQ ID NO: 497468 - DNA, 15 bp, Homo sapiens
ggaataggcaaatct

SEQ ID NO: 497469 - DNA, 15 bp, Homo sapiens
cggaataggcaaatc

SEQ ID NO: 497470 - DNA, 15 bp, Homo sapiens
ccggaataggcaaat

SEQ ID NO: 497471 - DNA, 15 bp, Homo sapiens
tccggaataggcaaa

SEQ ID NO: 497472 - DNA, 15 bp, Homo sapiens
atccggaataggcaa

SEQ ID NO: 497473 - DNA, 15 bp, Homo sapiens
tatccggaataggca

SEQ ID NO: 497474 - DNA, 15 bp, Homo sapiens
atatccggaataggc

SEQ ID NO: 497475 - DNA, 15 bp, Homo sapiens
tatatccggaatagg

SEQ ID NO: 497476 - DNA, 15 bp, Homo sapiens
atatatccggaatag

SEQ ID NO: 497477 - DNA, 15 bp, Homo sapiens
aatatatccggaata

SEQ ID NO: 497478 - DNA, 15 bp, Homo sapiens
gaatatatccggaat

SEQ ID NO: 497479 - DNA, 15 bp, Homo sapiens
agaatatatccggaa

SEQ ID NO: 497480 - DNA, 15 bp, Homo sapiens
cagaatatatccgga

SEQ ID NO: 497481 - DNA, 15 bp, Homo sapiens
acagaatatatccgg

SEQ ID NO: 497482 - DNA, 15 bp, Homo sapiens
tacagaatatatccg

SEQ ID NO: 497483 - DNA, 15 bp, Homo sapiens
ttacagaatatatcc

SEQ ID NO: 497484 - DNA, 15 bp, Homo sapiens
tttacagaatatatc

SEQ ID NO: 497485 - DNA, 15 bp, Homo sapiens
atttacagaatatat

SEQ ID NO: 497486 - DNA, 15 bp, Homo sapiens
catttacagaatata

SEQ ID NO: 497487 - DNA, 15 bp, Homo sapiens
ccatttacagaatat

SEQ ID NO: 497488 - DNA, 15 bp, Homo sapiens
tccatttacagaata

SEQ ID NO: 497489 - DNA, 15 bp, Homo sapiens
ttccatttacagaat

SEQ ID NO: 497490 - DNA, 15 bp, Homo sapiens
attccatttacagaa

SEQ ID NO: 497491 - DNA, 15 bp, Homo sapiens
aattccatttacaga

SEQ ID NO: 497492 - DNA, 15 bp, Homo sapiens
taattccatttacag

SEQ ID NO: 497493 - DNA, 15 bp, Homo sapiens
ataattccatttaca

SEQ ID NO: 497494 - DNA, 15 bp, Homo sapiens
tataattccatttac

SEQ ID NO: 497495 - DNA, 15 bp, Homo sapiens
ctataattccattta

SEQ ID NO: 497496 - DNA, 15 bp, Homo sapiens
tctataattccattt

SEQ ID NO: 497497 - DNA, 15 bp, Homo sapiens
ttctataattccatt

SEQ ID NO: 497498 - DNA, 15 bp, Homo sapiens
attctataattccat

SEQ ID NO: 497499 - DNA, 15 bp, Homo sapiens
tattctataattcca

SEQ ID NO: 497500 - DNA, 15 bp, Homo sapiens
atattctataattcc

SEQ ID NO: 497501 - DNA, 15 bp, Homo sapiens
catattctataattc

SEQ ID NO: 497502 - DNA, 15 bp, Homo sapiens
acatattctataatt

SEQ ID NO: 497503 - DNA, 15 bp, Homo sapiens
cacatattctataat

SEQ ID NO: 497504 - DNA, 15 bp, Homo sapiens
ccacatattctataa

SEQ ID NO: 497505 - DNA, 15 bp, Homo sapiens
cccacatattctata

SEQ ID NO: 497506 - DNA, 15 bp, Homo sapiens
gcccacatattctat

SEQ ID NO: 497507 - DNA, 15 bp, Homo sapiens
agcccacatattcta

SEQ ID NO: 497508 - DNA, 15 bp, Homo sapiens
aagcccacatattct

SEQ ID NO: 497509 - DNA, 15 bp, Homo sapiens
aaagcccacatattc

SEQ ID NO: 497510 - DNA, 15 bp, Homo sapiens
aaaagcccacatatt

SEQ ID NO: 497511 - DNA, 15 bp, Homo sapiens
caaaagcccacatat

SEQ ID NO: 497512 - DNA, 15 bp, Homo sapiens
acaaaagcccacata

SEQ ID NO: 497513 - DNA, 15 bp, Homo sapiens
cacaaaagcccacat

SEQ ID NO: 497514 - DNA, 15 bp, Homo sapiens
tcacaaaagcccaca

SEQ ID NO: 497515 - DNA, 15 bp, Homo sapiens
atcacaaaagcccac

SEQ ID NO: 497516 - DNA, 15 bp, Homo sapiens
aatcacaaaagccca

SEQ ID NO: 497517 - DNA, 15 bp, Homo sapiens
taatcacaaaagccc

SEQ ID NO: 497518 - DNA, 15 bp, Homo sapiens
ctaatcacaaaagcc

SEQ ID NO: 497519 - DNA, 15 bp, Homo sapiens
gctaatcacaaaagc

SEQ ID NO: 497520 - DNA, 15 bp, Homo sapiens
agctaatcacaaaag

SEQ ID NO: 497521 - DNA, 15 bp, Homo sapiens
aagctaatcacaaaa

SEQ ID NO: 497522 - DNA, 15 bp, Homo sapiens
gaagctaatcacaaa

SEQ ID NO: 497523 - DNA, 15 bp, Homo sapiens
agaagctaatcacaa

SEQ ID NO: 497524 - DNA, 15 bp, Homo sapiens
aagaagctaatcaca

SEQ ID NO: 497525 - DNA, 15 bp, Homo sapiens
aaagaagctaatcac

SEQ ID NO: 497526 - DNA, 15 bp, Homo sapiens
gaaagaagctaatca

SEQ ID NO: 497527 - DNA, 15 bp, Homo sapiens
tgaaagaagctaatc

SEQ ID NO: 497528 - DNA, 15 bp, Homo sapiens
gtgaaagaagctaat

SEQ ID NO: 497529 - DNA, 15 bp, Homo sapiens
agtgaaagaagctaa

SEQ ID NO: 497530 - DNA, 15 bp, Homo sapiens
aagtgaaagaagcta

SEQ ID NO: 497531 - DNA, 15 bp, Homo sapiens
taagtgaaagaagct

SEQ ID NO: 497532 - DNA, 15 bp, Homo sapiens
ctaagtgaaagaagc

SEQ ID NO: 497533 - DNA, 15 bp, Homo sapiens
gctaagtgaaagaag

SEQ ID NO: 497534 - DNA, 15 bp, Homo sapiens
tgctaagtgaaagaa

SEQ ID NO: 497535 - DNA, 15 bp, Homo sapiens
atgctaagtgaaaga

SEQ ID NO: 497536 - DNA, 15 bp, Homo sapiens
catgctaagtgaaag

SEQ ID NO: 497537 - DNA, 15 bp, Homo sapiens
tcatgctaagtgaaa

SEQ ID NO: 497538 - DNA, 15 bp, Homo sapiens
atcatgctaagtgaa

SEQ ID NO: 497539 - DNA, 15 bp, Homo sapiens
catcatgctaagtga

SEQ ID NO: 497540 - DNA, 15 bp, Homo sapiens
acatcatgctaagtg

SEQ ID NO: 497541 - DNA, 15 bp, Homo sapiens
aacatcatgctaagt

SEQ ID NO: 497542 - DNA, 15 bp, Homo sapiens
aaacatcatgctaag

SEQ ID NO: 497543 - DNA, 15 bp, Homo sapiens
gaaacatcatgctaa

SEQ ID NO: 497544 - DNA, 15 bp, Homo sapiens
ggaaacatcatgcta

SEQ ID NO: 497545 - DNA, 15 bp, Homo sapiens
tggaaacatcatgct

SEQ ID NO: 497546 - DNA, 15 bp, Homo sapiens
ttggaaacatcatgc

SEQ ID NO: 497547 - DNA, 15 bp, Homo sapiens
cttggaaacatcatg

SEQ ID NO: 497548 - DNA, 15 bp, Homo sapiens
ccttggaaacatcat

SEQ ID NO: 497549 - DNA, 15 bp, Homo sapiens
accttggaaacatca

SEQ ID NO: 497550 - DNA, 15 bp, Homo sapiens
aaccttggaaacatc

SEQ ID NO: 497551 - DNA, 15 bp, Homo sapiens
gaaccttggaaacat

SEQ ID NO: 497552 - DNA, 15 bp, Homo sapiens
tgaaccttggaaaca

SEQ ID NO: 497553 - DNA, 15 bp, Homo sapiens
atgaaccttggaaac

SEQ ID NO: 497554 - DNA, 15 bp, Homo sapiens
gatgaaccttggaaa

SEQ ID NO: 497555 - DNA, 15 bp, Homo sapiens
ggatgaaccttggaa

SEQ ID NO: 497556 - DNA, 15 bp, Homo sapiens
tggatgaaccttgga

SEQ ID NO: 497557 - DNA, 15 bp, Homo sapiens
atggatgaaccttgg

SEQ ID NO: 497558 - DNA, 15 bp, Homo sapiens
catggatgaaccttg

SEQ ID NO: 497559 - DNA, 15 bp, Homo sapiens
acatggatgaacctt

SEQ ID NO: 497560 - DNA, 15 bp, Homo sapiens
cacatggatgaacct

SEQ ID NO: 497561 - DNA, 15 bp, Homo sapiens
tcacatggatgaacc

SEQ ID NO: 497562 - DNA, 15 bp, Homo sapiens
ttcacatggatgaac

SEQ ID NO: 497563 - DNA, 15 bp, Homo sapiens
tttcacatggatgaa

SEQ ID NO: 497564 - DNA, 15 bp, Homo sapiens
atttcacatggatga

SEQ ID NO: 497565 - DNA, 15 bp, Homo sapiens
gatttcacatggatg

SEQ ID NO: 497566 - DNA, 15 bp, Homo sapiens
tgatttcacatggat

SEQ ID NO: 497567 - DNA, 15 bp, Homo sapiens
ttgatttcacatgga

SEQ ID NO: 497568 - DNA, 15 bp, Homo sapiens
tttgatttcacatgg

SEQ ID NO: 497569 - DNA, 15 bp, Homo sapiens
ttttgatttcacatg

SEQ ID NO: 497570 - DNA, 15 bp, Homo sapiens
gttttgatttcacat

SEQ ID NO: 497571 - DNA, 15 bp, Homo sapiens
agttttgatttcaca

SEQ ID NO: 497572 - DNA, 15 bp, Homo sapiens
aagttttgatttcac

SEQ ID NO: 497573 - DNA, 15 bp, Homo sapiens
aaagttttgatttca

SEQ ID NO: 497574 - DNA, 15 bp, Homo sapiens
aaaagttttgatttc

SEQ ID NO: 497575 - DNA, 15 bp, Homo sapiens
aaaaagttttgattt

SEQ ID NO: 497576 - DNA, 15 bp, Homo sapiens
taaaaagttttgatt

SEQ ID NO: 497577 - DNA, 15 bp, Homo sapiens
ttaaaaagttttgat

SEQ ID NO: 497578 - DNA, 15 bp, Homo sapiens
tttaaaaagttttga

SEQ ID NO: 497579 - DNA, 15 bp, Homo sapiens
ttttaaaaagttttg

SEQ ID NO: 497580 - DNA, 15 bp, Homo sapiens
cttttaaaaagtttt

SEQ ID NO: 497581 - DNA, 15 bp, Homo sapiens
tcttttaaaaagttt

SEQ ID NO: 497582 - DNA, 15 bp, Homo sapiens
ttcttttaaaaagtt

SEQ ID NO: 497583 - DNA, 15 bp, Homo sapiens
tttcttttaaaaagt

SEQ ID NO: 497584 - DNA, 15 bp, Homo sapiens
atttcttttaaaaag

SEQ ID NO: 497585 - DNA, 15 bp, Homo sapiens
aatttcttttaaaaa

SEQ ID NO: 497586 - DNA, 15 bp, Homo sapiens
aaatttcttttaaaa

SEQ ID NO: 497587 - DNA, 15 bp, Homo sapiens
caaatttcttttaaa

SEQ ID NO: 497588 - DNA, 15 bp, Homo sapiens
tcaaatttcttttaa

SEQ ID NO: 497589 - DNA, 15 bp, Homo sapiens
gtcaaatttctttta

SEQ ID NO: 497590 - DNA, 15 bp, Homo sapiens
tgtcaaatttctttt

SEQ ID NO: 497591 - DNA, 15 bp, Homo sapiens
gtgtcaaatttcttt

SEQ ID NO: 497592 - DNA, 15 bp, Homo sapiens
agtgtcaaatttctt

SEQ ID NO: 497593 - DNA, 15 bp, Homo sapiens
gagtgtcaaatttct

SEQ ID NO: 497594 - DNA, 15 bp, Homo sapiens
cgagtgtcaaatttc

SEQ ID NO: 497595 - DNA, 15 bp, Homo sapiens
ccgagtgtcaaattt

SEQ ID NO: 497596 - DNA, 15 bp, Homo sapiens
gccgagtgtcaaatt

SEQ ID NO: 497597 - DNA, 15 bp, Homo sapiens
agccgagtgtcaaat

SEQ ID NO: 497598 - DNA, 15 bp, Homo sapiens
cagccgagtgtcaaa

SEQ ID NO: 497599 - DNA, 15 bp, Homo sapiens
tcagccgagtgtcaa

SEQ ID NO: 497600 - DNA, 15 bp, Homo sapiens
atcagccgagtgtca

SEQ ID NO: 497601 - DNA, 15 bp, Homo sapiens
aatcagccgagtgtc

SEQ ID NO: 497602 - DNA, 15 bp, Homo sapiens
taatcagccgagtgt

SEQ ID NO: 497603 - DNA, 15 bp, Homo sapiens
ataatcagccgagtg

SEQ ID NO: 497604 - DNA, 15 bp, Homo sapiens
tataatcagccgagt

SEQ ID NO: 497605 - DNA, 15 bp, Homo sapiens
atataatcagccgag

SEQ ID NO: 497606 - DNA, 15 bp, Homo sapiens
aatataatcagccga

SEQ ID NO: 497607 - DNA, 15 bp, Homo sapiens
taatataatcagccg

SEQ ID NO: 497608 - DNA, 15 bp, Homo sapiens
ctaatataatcagcc

SEQ ID NO: 497609 - DNA, 15 bp, Homo sapiens
actaatataatcagc

SEQ ID NO: 497610 - DNA, 15 bp, Homo sapiens
cactaatataatcag

SEQ ID NO: 497611 - DNA, 15 bp, Homo sapiens
acactaatataatca

SEQ ID NO: 497612 - DNA, 15 bp, Homo sapiens
tacactaatataatc

SEQ ID NO: 497613 - DNA, 15 bp, Homo sapiens
atacactaatataat

SEQ ID NO: 497614 - DNA, 15 bp, Homo sapiens
catacactaatataa

SEQ ID NO: 497615 - DNA, 15 bp, Homo sapiens
tcatacactaatata

SEQ ID NO: 497616 - DNA, 15 bp, Homo sapiens
atcatacactaatat

SEQ ID NO: 497617 - DNA, 15 bp, Homo sapiens
tatcatacactaata

SEQ ID NO: 497618 - DNA, 15 bp, Homo sapiens
ttatcatacactaat

SEQ ID NO: 497619 - DNA, 15 bp, Homo sapiens
tttatcatacactaa

SEQ ID NO: 497620 - DNA, 15 bp, Homo sapiens
ttttatcatacacta

SEQ ID NO: 497621 - DNA, 15 bp, Homo sapiens
tttttatcatacact

SEQ ID NO: 497622 - DNA, 15 bp, Homo sapiens
atttttatcatacac

SEQ ID NO: 497623 - DNA, 15 bp, Homo sapiens
tatttttatcataca

SEQ ID NO: 497624 - DNA, 15 bp, Homo sapiens
ctatttttatcatac

SEQ ID NO: 497625 - DNA, 15 bp, Homo sapiens
tctatttttatcata

SEQ ID NO: 497626 - DNA, 15 bp, Homo sapiens
atctatttttatcat

SEQ ID NO: 497627 - DNA, 15 bp, Homo sapiens
gatctatttttatca

SEQ ID NO: 497628 - DNA, 15 bp, Homo sapiens
tgatctatttttatc

SEQ ID NO: 497629 - DNA, 15 bp, Homo sapiens
ctgatctatttttat

SEQ ID NO: 497630 - DNA, 15 bp, Homo sapiens
actgatctattttta

SEQ ID NO: 497631 - DNA, 15 bp, Homo sapiens
cactgatctattttt

SEQ ID NO: 497632 - DNA, 15 bp, Homo sapiens
ccactgatctatttt

SEQ ID NO: 497633 - DNA, 15 bp, Homo sapiens
gccactgatctattt

SEQ ID NO: 497634 - DNA, 15 bp, Homo sapiens
agccactgatctatt

SEQ ID NO: 497635 - DNA, 15 bp, Homo sapiens
gagccactgatctat

SEQ ID NO: 497636 - DNA, 15 bp, Homo sapiens
agagccactgatcta

SEQ ID NO: 497637 - DNA, 15 bp, Homo sapiens
aagagccactgatct

SEQ ID NO: 497638 - DNA, 15 bp, Homo sapiens
aaagagccactgatc

SEQ ID NO: 497639 - DNA, 15 bp, Homo sapiens
taaagagccactgat

SEQ ID NO: 497640 - DNA, 15 bp, Homo sapiens
ttaaagagccactga

SEQ ID NO: 497641 - DNA, 15 bp, Homo sapiens
tttaaagagccactg

SEQ ID NO: 497642 - DNA, 15 bp, Homo sapiens
ttttaaagagccact

SEQ ID NO: 497643 - DNA, 15 bp, Homo sapiens
tttttaaagagccac

SEQ ID NO: 497644 - DNA, 15 bp, Homo sapiens
atttttaaagagcca

SEQ ID NO: 497645 - DNA, 15 bp, Homo sapiens
catttttaaagagcc

SEQ ID NO: 497646 - DNA, 15 bp, Homo sapiens
acatttttaaagagc

SEQ ID NO: 497647 - DNA, 15 bp, Homo sapiens
tacatttttaaagag

SEQ ID NO: 497648 - DNA, 15 bp, Homo sapiens
atacatttttaaaga

SEQ ID NO: 497649 - DNA, 15 bp, Homo sapiens
tatacatttttaaag

SEQ ID NO: 497650 - DNA, 15 bp, Homo sapiens
atatacatttttaaa

SEQ ID NO: 497651 - DNA, 15 bp, Homo sapiens
catatacatttttaa

SEQ ID NO: 497652 - DNA, 15 bp, Homo sapiens
ccatatacattttta

SEQ ID NO: 497653 - DNA, 15 bp, Homo sapiens
accatatacattttt

SEQ ID NO: 497654 - DNA, 15 bp, Homo sapiens
taccatatacatttt

SEQ ID NO: 497655 - DNA, 15 bp, Homo sapiens
ttaccatatacattt

SEQ ID NO: 497656 - DNA, 15 bp, Homo sapiens
attaccatatacatt

SEQ ID NO: 497657 - DNA, 15 bp, Homo sapiens
aattaccatatacat

SEQ ID NO: 497658 - DNA, 15 bp, Homo sapiens
aaattaccatataca

SEQ ID NO: 497659 - DNA, 15 bp, Homo sapiens
aaaattaccatatac

SEQ ID NO: 497660 - DNA, 15 bp, Homo sapiens
taaaattaccatata

SEQ ID NO: 497661 - DNA, 15 bp, Homo sapiens
ataaaattaccatat

SEQ ID NO: 497662 - DNA, 15 bp, Homo sapiens
cataaaattaccata

SEQ ID NO: 497663 - DNA, 15 bp, Homo sapiens
ccataaaattaccat

SEQ ID NO: 497664 - DNA, 15 bp, Homo sapiens
cccataaaattacca

SEQ ID NO: 497665 - DNA, 15 bp, Homo sapiens
acccataaaattacc

SEQ ID NO: 497666 - DNA, 15 bp, Homo sapiens
aacccataaaattac

SEQ ID NO: 497667 - DNA, 15 bp, Homo sapiens
caacccataaaatta

SEQ ID NO: 497668 - DNA, 15 bp, Homo sapiens
tcaacccataaaatt

SEQ ID NO: 497669 - DNA, 15 bp, Homo sapiens
atcaacccataaaat

SEQ ID NO: 497670 - DNA, 15 bp, Homo sapiens
aatcaacccataaaa

SEQ ID NO: 497671 - DNA, 15 bp, Homo sapiens
aaatcaacccataaa

SEQ ID NO: 497672 - DNA, 15 bp, Homo sapiens
aaaatcaacccataa

SEQ ID NO: 497673 - DNA, 15 bp, Homo sapiens
taaaatcaacccata

SEQ ID NO: 497674 - DNA, 15 bp, Homo sapiens
ttaaaatcaacccat

SEQ ID NO: 497675 - DNA, 15 bp, Homo sapiens
attaaaatcaaccca

SEQ ID NO: 497676 - DNA, 15 bp, Homo sapiens
cattaaaatcaaccc

SEQ ID NO: 497677 - DNA, 15 bp, Homo sapiens
acattaaaatcaacc

SEQ ID NO: 497678 - DNA, 15 bp, Homo sapiens
tacattaaaatcaac

SEQ ID NO: 497679 - DNA, 15 bp, Homo sapiens
atacattaaaatcaa

SEQ ID NO: 497680 - DNA, 15 bp, Homo sapiens
tatacattaaaatca

SEQ ID NO: 497681 - DNA, 15 bp, Homo sapiens
atatacattaaaatc

SEQ ID NO: 497682 - DNA, 15 bp, Homo sapiens
aatatacattaaaat

SEQ ID NO: 497683 - DNA, 15 bp, Homo sapiens
aaatatacattaaaa

SEQ ID NO: 497684 - DNA, 15 bp, Homo sapiens
aaaatatacattaaa

SEQ ID NO: 497685 - DNA, 15 bp, Homo sapiens
taaaatatacattaa

SEQ ID NO: 497686 - DNA, 15 bp, Homo sapiens
gtaaaatatacatta

SEQ ID NO: 497687 - DNA, 15 bp, Homo sapiens
tgtaaaatatacatt

SEQ ID NO: 497688 - DNA, 15 bp, Homo sapiens
atgtaaaatatacat

SEQ ID NO: 497689 - DNA, 15 bp, Homo sapiens
aatgtaaaatataca

SEQ ID NO: 497690 - DNA, 15 bp, Homo sapiens
aaatgtaaaatatac

SEQ ID NO: 497691 - DNA, 15 bp, Homo sapiens
aaaatgtaaaatata

SEQ ID NO: 497692 - DNA, 15 bp, Homo sapiens
aaaaatgtaaaatat

SEQ ID NO: 497693 - DNA, 15 bp, Homo sapiens
aaaaaatgtaaaata

SEQ ID NO: 497694 - DNA, 15 bp, Homo sapiens
caaaaaatgtaaaat

SEQ ID NO: 497695 - DNA, 15 bp, Homo sapiens
acaaaaaatgtaaaa

SEQ ID NO: 497696 - DNA, 15 bp, Homo sapiens
tacaaaaaatgtaaa

SEQ ID NO: 497697 - DNA, 15 bp, Homo sapiens
gtacaaaaaatgtaa

SEQ ID NO: 497698 - DNA, 15 bp, Homo sapiens
agtacaaaaaatgta

SEQ ID NO: 497699 - DNA, 15 bp, Homo sapiens
aagtacaaaaaatgt

SEQ ID NO: 497700 - DNA, 15 bp, Homo sapiens
aaagtacaaaaaatg

SEQ ID NO: 497701 - DNA, 15 bp, Homo sapiens
aaaagtacaaaaaat

SEQ ID NO: 497702 - DNA, 15 bp, Homo sapiens
caaaagtacaaaaaa

SEQ ID NO: 497703 - DNA, 15 bp, Homo sapiens
acaaaagtacaaaaa

SEQ ID NO: 497704 - DNA, 15 bp, Homo sapiens
gacaaaagtacaaaa

SEQ ID NO: 497705 - DNA, 15 bp, Homo sapiens
tgacaaaagtacaaa

SEQ ID NO: 497706 - DNA, 15 bp, Homo sapiens
atgacaaaagtacaa

SEQ ID NO: 497707 - DNA, 15 bp, Homo sapiens
catgacaaaagtaca

SEQ ID NO: 497708 - DNA, 15 bp, Homo sapiens
ccatgacaaaagtac

SEQ ID NO: 497709 - DNA, 15 bp, Homo sapiens
tccatgacaaaagta

SEQ ID NO: 497710 - DNA, 15 bp, Homo sapiens
ttccatgacaaaagt

SEQ ID NO: 497711 - DNA, 15 bp, Homo sapiens
cttccatgacaaaag

SEQ ID NO: 497712 - DNA, 15 bp, Homo sapiens
tcttccatgacaaaa

SEQ ID NO: 497713 - DNA, 15 bp, Homo sapiens
ttcttccatgacaaa

SEQ ID NO: 497714 - DNA, 15 bp, Homo sapiens
tttcttccatgacaa

SEQ ID NO: 497715 - DNA, 15 bp, Homo sapiens
atttcttccatgaca

SEQ ID NO: 497716 - DNA, 15 bp, Homo sapiens
catttcttccatgac

SEQ ID NO: 497717 - DNA, 15 bp, Homo sapiens
acatttcttccatga

SEQ ID NO: 497718 - DNA, 15 bp, Homo sapiens
aacatttcttccatg

SEQ ID NO: 497719 - DNA, 15 bp, Homo sapiens
caacatttcttccat

SEQ ID NO: 497720 - DNA, 15 bp, Homo sapiens
ccaacatttcttcca

SEQ ID NO: 497721 - DNA, 15 bp, Homo sapiens
tccaacatttcttcc

SEQ ID NO: 497722 - DNA, 15 bp, Homo sapiens
atccaacatttcttc

SEQ ID NO: 497723 - DNA, 15 bp, Homo sapiens
tatccaacatttctt

SEQ ID NO: 497724 - DNA, 15 bp, Homo sapiens
ttatccaacatttct

SEQ ID NO: 497725 - DNA, 15 bp, Homo sapiens
tttatccaacatttc

SEQ ID NO: 497726 - DNA, 15 bp, Homo sapiens
ctttatccaacattt

SEQ ID NO: 497727 - DNA, 15 bp, Homo sapiens
gctttatccaacatt

SEQ ID NO: 497728 - DNA, 15 bp, Homo sapiens
tgctttatccaacat

SEQ ID NO: 497729 - DNA, 15 bp, Homo sapiens
atgctttatccaaca

SEQ ID NO: 497730 - DNA, 15 bp, Homo sapiens
tatgctttatccaac

SEQ ID NO: 497731 - DNA, 15 bp, Homo sapiens
ttatgctttatccaa

SEQ ID NO: 497732 - DNA, 15 bp, Homo sapiens
attatgctttatcca

SEQ ID NO: 497733 - DNA, 15 bp, Homo sapiens
aattatgctttatcc

SEQ ID NO: 497734 - DNA, 15 bp, Homo sapiens
aaattatgctttatc

SEQ ID NO: 497735 - DNA, 15 bp, Homo sapiens
caaattatgctttat

SEQ ID NO: 497736 - DNA, 15 bp, Homo sapiens
acaaattatgcttta

SEQ ID NO: 497737 - DNA, 15 bp, Homo sapiens
gacaaattatgcttt

SEQ ID NO: 497738 - DNA, 15 bp, Homo sapiens
tgacaaattatgctt

SEQ ID NO: 497739 - DNA, 15 bp, Homo sapiens
ttgacaaattatgct

SEQ ID NO: 497740 - DNA, 15 bp, Homo sapiens
cttgacaaattatgc

SEQ ID NO: 497741 - DNA, 15 bp, Homo sapiens
acttgacaaattatg

SEQ ID NO: 497742 - DNA, 15 bp, Homo sapiens
gacttgacaaattat

SEQ ID NO: 497743 - DNA, 15 bp, Homo sapiens
agacttgacaaatta

SEQ ID NO: 497744 - DNA, 15 bp, Homo sapiens
gagacttgacaaatt

SEQ ID NO: 497745 - DNA, 15 bp, Homo sapiens
tgagacttgacaaat

SEQ ID NO: 497746 - DNA, 15 bp, Homo sapiens
ttgagacttgacaaa

SEQ ID NO: 497747 - DNA, 15 bp, Homo sapiens
gttgagacttgacaa

SEQ ID NO: 497748 - DNA, 15 bp, Homo sapiens
agttgagacttgaca

SEQ ID NO: 497749 - DNA, 15 bp, Homo sapiens
tagttgagacttgac

SEQ ID NO: 497750 - DNA, 15 bp, Homo sapiens
ttagttgagacttga

SEQ ID NO: 497751 - DNA, 15 bp, Homo sapiens
attagttgagacttg

SEQ ID NO: 497752 - DNA, 15 bp, Homo sapiens
aattagttgagactt

SEQ ID NO: 497753 - DNA, 15 bp, Homo sapiens
taattagttgagact

SEQ ID NO: 497754 - DNA, 15 bp, Homo sapiens
ttaattagttgagac

SEQ ID NO: 497755 - DNA, 15 bp, Homo sapiens
cttaattagttgaga

SEQ ID NO: 497756 - DNA, 15 bp, Homo sapiens
ccttaattagttgag

SEQ ID NO: 497757 - DNA, 15 bp, Homo sapiens
accttaattagttga

SEQ ID NO: 497758 - DNA, 15 bp, Homo sapiens
aaccttaattagttg

SEQ ID NO: 497759 - DNA, 15 bp, Homo sapiens
aaaccttaattagtt

SEQ ID NO: 497760 - DNA, 15 bp, Homo sapiens
taaaccttaattagt

SEQ ID NO: 497761 - DNA, 15 bp, Homo sapiens
ttaaaccttaattag

SEQ ID NO: 497762 - DNA, 15 bp, Homo sapiens
attaaaccttaatta

SEQ ID NO: 497763 - DNA, 15 bp, Homo sapiens
aattaaaccttaatt

SEQ ID NO: 497764 - DNA, 15 bp, Homo sapiens
gaattaaaccttaat

SEQ ID NO: 497765 - DNA, 15 bp, Homo sapiens
tgaattaaaccttaa

SEQ ID NO: 497766 - DNA, 15 bp, Homo sapiens
atgaattaaacctta

SEQ ID NO: 497767 - DNA, 15 bp, Homo sapiens
catgaattaaacctt

SEQ ID NO: 497768 - DNA, 15 bp, Homo sapiens
gcatgaattaaacct

SEQ ID NO: 497769 - DNA, 15 bp, Homo sapiens
agcatgaattaaacc

SEQ ID NO: 497770 - DNA, 15 bp, Homo sapiens
aagcatgaattaaac

SEQ ID NO: 497771 - DNA, 15 bp, Homo sapiens
aaagcatgaattaaa

SEQ ID NO: 497772 - DNA, 15 bp, Homo sapiens
caaagcatgaattaa

SEQ ID NO: 497773 - DNA, 15 bp, Homo sapiens
gcaaagcatgaatta

SEQ ID NO: 497774 - DNA, 15 bp, Homo sapiens
tgcaaagcatgaatt

SEQ ID NO: 497775 - DNA, 15 bp, Homo sapiens
gtgcaaagcatgaat

SEQ ID NO: 497776 - DNA, 15 bp, Homo sapiens
tgtgcaaagcatgaa

SEQ ID NO: 497777 - DNA, 15 bp, Homo sapiens
ttgtgcaaagcatga

SEQ ID NO: 497778 - DNA, 15 bp, Homo sapiens
tttgtgcaaagcatg

SEQ ID NO: 497779 - DNA, 15 bp, Homo sapiens
ttttgtgcaaagcat

SEQ ID NO: 497780 - DNA, 15 bp, Homo sapiens
tttttgtgcaaagca

SEQ ID NO: 497781 - DNA, 15 bp, Homo sapiens
atttttgtgcaaagc

SEQ ID NO: 497782 - DNA, 15 bp, Homo sapiens
aatttttgtgcaaag

SEQ ID NO: 497783 - DNA, 15 bp, Homo sapiens
aaatttttgtgcaaa

SEQ ID NO: 497784 - DNA, 15 bp, Homo sapiens
aaaatttttgtgcaa

SEQ ID NO: 497785 - DNA, 15 bp, Homo sapiens
caaaatttttgtgca

SEQ ID NO: 497786 - DNA, 15 bp, Homo sapiens
acaaaatttttgtgc

SEQ ID NO: 497787 - DNA, 15 bp, Homo sapiens
cacaaaatttttgtg

SEQ ID NO: 497788 - DNA, 15 bp, Homo sapiens
acacaaaatttttgt

SEQ ID NO: 497789 - DNA, 15 bp, Homo sapiens
aacacaaaatttttg

SEQ ID NO: 497790 - DNA, 15 bp, Homo sapiens
aaacacaaaattttt

SEQ ID NO: 497791 - DNA, 15 bp, Homo sapiens
taaacacaaaatttt

SEQ ID NO: 497792 - DNA, 15 bp, Homo sapiens
ctaaacacaaaattt

SEQ ID NO: 497793 - DNA, 15 bp, Homo sapiens
cctaaacacaaaatt

SEQ ID NO: 497794 - DNA, 15 bp, Homo sapiens
gcctaaacacaaaat

SEQ ID NO: 497795 - DNA, 15 bp, Homo sapiens
agcctaaacacaaaa

SEQ ID NO: 497796 - DNA, 15 bp, Homo sapiens
cagcctaaacacaaa

SEQ ID NO: 497797 - DNA, 15 bp, Homo sapiens
gcagcctaaacacaa

SEQ ID NO: 497798 - DNA, 15 bp, Homo sapiens
agcagcctaaacaca

SEQ ID NO: 497799 - DNA, 15 bp, Homo sapiens
cagcagcctaaacac

SEQ ID NO: 497800 - DNA, 15 bp, Homo sapiens
tcagcagcctaaaca

SEQ ID NO: 497801 - DNA, 15 bp, Homo sapiens
ttcagcagcctaaac

SEQ ID NO: 497802 - DNA, 15 bp, Homo sapiens
tttcagcagcctaaa

SEQ ID NO: 497803 - DNA, 15 bp, Homo sapiens
ctttcagcagcctaa

SEQ ID NO: 497804 - DNA, 15 bp, Homo sapiens
gctttcagcagccta

SEQ ID NO: 497805 - DNA, 15 bp, Homo sapiens
ggctttcagcagcct

SEQ ID NO: 497806 - DNA, 15 bp, Homo sapiens
aggctttcagcagcc

SEQ ID NO: 497807 - DNA, 15 bp, Homo sapiens
aaggctttcagcagc

SEQ ID NO: 497808 - DNA, 15 bp, Homo sapiens
gaaggctttcagcag

SEQ ID NO: 497809 - DNA, 15 bp, Homo sapiens
tgaaggctttcagca

SEQ ID NO: 497810 - DNA, 15 bp, Homo sapiens
gtgaaggctttcagc

SEQ ID NO: 497811 - DNA, 15 bp, Homo sapiens
tgtgaaggctttcag

SEQ ID NO: 497812 - DNA, 15 bp, Homo sapiens
ttgtgaaggctttca

SEQ ID NO: 497813 - DNA, 15 bp, Homo sapiens
cttgtgaaggctttc

SEQ ID NO: 497814 - DNA, 15 bp, Homo sapiens
tcttgtgaaggcttt

SEQ ID NO: 497815 - DNA, 15 bp, Homo sapiens
gtcttgtgaaggctt

SEQ ID NO: 497816 - DNA, 15 bp, Homo sapiens
ggtcttgtgaaggct

SEQ ID NO: 497817 - DNA, 15 bp, Homo sapiens
tggtcttgtgaaggc

SEQ ID NO: 497818 - DNA, 15 bp, Homo sapiens
atggtcttgtgaagg

SEQ ID NO: 497819 - DNA, 15 bp, Homo sapiens
aatggtcttgtgaag

SEQ ID NO: 497820 - DNA, 15 bp, Homo sapiens
caatggtcttgtgaa

SEQ ID NO: 497821 - DNA, 15 bp, Homo sapiens
acaatggtcttgtga

SEQ ID NO: 497822 - DNA, 15 bp, Homo sapiens
aacaatggtcttgtg

SEQ ID NO: 497823 - DNA, 15 bp, Homo sapiens
taacaatggtcttgt

SEQ ID NO: 497824 - DNA, 15 bp, Homo sapiens
ttaacaatggtcttg

SEQ ID NO: 497825 - DNA, 15 bp, Homo sapiens
cttaacaatggtctt

SEQ ID NO: 497826 - DNA, 15 bp, Homo sapiens
tcttaacaatggtct

SEQ ID NO: 497827 - DNA, 15 bp, Homo sapiens
ctcttaacaatggtc

SEQ ID NO: 497828 - DNA, 15 bp, Homo sapiens
cctcttaacaatggt

SEQ ID NO: 497829 - DNA, 15 bp, Homo sapiens
gcctcttaacaatgg

SEQ ID NO: 497830 - DNA, 15 bp, Homo sapiens
cgcctcttaacaatg

SEQ ID NO: 497831 - DNA, 15 bp, Homo sapiens
tcgcctcttaacaat

SEQ ID NO: 497832 - DNA, 15 bp, Homo sapiens
ttcgcctcttaacaa

SEQ ID NO: 497833 - DNA, 15 bp, Homo sapiens
attcgcctcttaaca

SEQ ID NO: 497834 - DNA, 15 bp, Homo sapiens
cattcgcctcttaac

SEQ ID NO: 497835 - DNA, 15 bp, Homo sapiens
acattcgcctcttaa

SEQ ID NO: 497836 - DNA, 15 bp, Homo sapiens
gacattcgcctctta

SEQ ID NO: 497837 - DNA, 15 bp, Homo sapiens
ggacattcgcctctt

SEQ ID NO: 497838 - DNA, 15 bp, Homo sapiens
gggacattcgcctct

SEQ ID NO: 497839 - DNA, 15 bp, Homo sapiens
tgggacattcgcctc

SEQ ID NO: 497840 - DNA, 15 bp, Homo sapiens
atgggacattcgcct

SEQ ID NO: 497841 - DNA, 15 bp, Homo sapiens
catgggacattcgcc

SEQ ID NO: 497842 - DNA, 15 bp, Homo sapiens
acatgggacattcgc

SEQ ID NO: 497843 - DNA, 15 bp, Homo sapiens
cacatgggacattcg

SEQ ID NO: 497844 - DNA, 15 bp, Homo sapiens
tcacatgggacattc

SEQ ID NO: 497845 - DNA, 15 bp, Homo sapiens
ctcacatgggacatt

SEQ ID NO: 497846 - DNA, 15 bp, Homo sapiens
actcacatgggacat

SEQ ID NO: 497847 - DNA, 15 bp, Homo sapiens
cactcacatgggaca

SEQ ID NO: 497848 - DNA, 15 bp, Homo sapiens
ccactcacatgggac

SEQ ID NO: 497849 - DNA, 15 bp, Homo sapiens
tccactcacatggga

SEQ ID NO: 497850 - DNA, 15 bp, Homo sapiens
ctccactcacatggg

SEQ ID NO: 497851 - DNA, 15 bp, Homo sapiens
cctccactcacatgg

SEQ ID NO: 497852 - DNA, 15 bp, Homo sapiens
tcctccactcacatg

SEQ ID NO: 497853 - DNA, 15 bp, Homo sapiens
ctcctccactcacat

SEQ ID NO: 497854 - DNA, 15 bp, Homo sapiens
cctcctccactcaca

SEQ ID NO: 497855 - DNA, 15 bp, Homo sapiens
tcctcctccactcac

SEQ ID NO: 497856 - DNA, 15 bp, Homo sapiens
atcctcctccactca

SEQ ID NO: 497857 - DNA, 15 bp, Homo sapiens
gatcctcctccactc

SEQ ID NO: 497858 - DNA, 15 bp, Homo sapiens
ggatcctcctccact

SEQ ID NO: 497859 - DNA, 15 bp, Homo sapiens
tggatcctcctccac

SEQ ID NO: 497860 - DNA, 15 bp, Homo sapiens
atggatcctcctcca

SEQ ID NO: 497861 - DNA, 15 bp, Homo sapiens
tatggatcctcctcc

SEQ ID NO: 497862 - DNA, 15 bp, Homo sapiens
ctatggatcctcctc

SEQ ID NO: 497863 - DNA, 15 bp, Homo sapiens
tctatggatcctcct

SEQ ID NO: 497864 - DNA, 15 bp, Homo sapiens
atctatggatcctcc

SEQ ID NO: 497865 - DNA, 15 bp, Homo sapiens
aatctatggatcctc

SEQ ID NO: 497866 - DNA, 15 bp, Homo sapiens
aaatctatggatcct

SEQ ID NO: 497867 - DNA, 15 bp, Homo sapiens
caaatctatggatcc

SEQ ID NO: 497868 - DNA, 15 bp, Homo sapiens
acaaatctatggatc

SEQ ID NO: 497869 - DNA, 15 bp, Homo sapiens
gacaaatctatggat

SEQ ID NO: 497870 - DNA, 15 bp, Homo sapiens
agacaaatctatgga

SEQ ID NO: 497871 - DNA, 15 bp, Homo sapiens
cagacaaatctatgg

SEQ ID NO: 497872 - DNA, 15 bp, Homo sapiens
tcagacaaatctatg

SEQ ID NO: 497873 - DNA, 15 bp, Homo sapiens
gtcagacaaatctat

SEQ ID NO: 497874 - DNA, 15 bp, Homo sapiens
tgtcagacaaatcta

SEQ ID NO: 497875 - DNA, 15 bp, Homo sapiens
gtgtcagacaaatct

SEQ ID NO: 497876 - DNA, 15 bp, Homo sapiens
tgtgtcagacaaatc

SEQ ID NO: 497877 - DNA, 15 bp, Homo sapiens
ctgtgtcagacaaat

SEQ ID NO: 497878 - DNA, 15 bp, Homo sapiens
tctgtgtcagacaaa

SEQ ID NO: 497879 - DNA, 15 bp, Homo sapiens
gtctgtgtcagacaa

SEQ ID NO: 497880 - DNA, 15 bp, Homo sapiens
agtctgtgtcagaca

SEQ ID NO: 497881 - DNA, 15 bp, Homo sapiens
gagtctgtgtcagac

SEQ ID NO: 497882 - DNA, 15 bp, Homo sapiens
ggagtctgtgtcaga

SEQ ID NO: 497883 - DNA, 15 bp, Homo sapiens
gggagtctgtgtcag

SEQ ID NO: 497884 - DNA, 15 bp, Homo sapiens
agggagtctgtgtca

SEQ ID NO: 497885 - DNA, 15 bp, Homo sapiens
tagggagtctgtgtc

SEQ ID NO: 497886 - DNA, 15 bp, Homo sapiens
gtagggagtctgtgt

SEQ ID NO: 497887 - DNA, 15 bp, Homo sapiens
tgtagggagtctgtg

SEQ ID NO: 497888 - DNA, 15 bp, Homo sapiens
ctgtagggagtctgt

SEQ ID NO: 497889 - DNA, 15 bp, Homo sapiens
cctgtagggagtctg

SEQ ID NO: 497890 - DNA, 15 bp, Homo sapiens
tcctgtagggagtct

SEQ ID NO: 497891 - DNA, 15 bp, Homo sapiens
ttcctgtagggagtc

SEQ ID NO: 497892 - DNA, 15 bp, Homo sapiens
attcctgtagggagt

SEQ ID NO: 497893 - DNA, 15 bp, Homo sapiens
cattcctgtagggag

SEQ ID NO: 497894 - DNA, 15 bp, Homo sapiens
ccattcctgtaggga

SEQ ID NO: 497895 - DNA, 15 bp, Homo sapiens
tccattcctgtaggg

SEQ ID NO: 497896 - DNA, 15 bp, Homo sapiens
atccattcctgtagg

SEQ ID NO: 497897 - DNA, 15 bp, Homo sapiens
gatccattcctgtag

SEQ ID NO: 497898 - DNA, 15 bp, Homo sapiens
tgatccattcctgta

SEQ ID NO: 497899 - DNA, 15 bp, Homo sapiens
ttgatccattcctgt

SEQ ID NO: 497900 - DNA, 15 bp, Homo sapiens
gttgatccattcctg

SEQ ID NO: 497901 - DNA, 15 bp, Homo sapiens
tgttgatccattcct

SEQ ID NO: 497902 - DNA, 15 bp, Homo sapiens
atgttgatccattcc

SEQ ID NO: 497903 - DNA, 15 bp, Homo sapiens
catgttgatccattc

SEQ ID NO: 497904 - DNA, 15 bp, Homo sapiens
tcatgttgatccatt

SEQ ID NO: 497905 - DNA, 15 bp, Homo sapiens
gtcatgttgatccat

SEQ ID NO: 497906 - DNA, 15 bp, Homo sapiens
agtcatgttgatcca

SEQ ID NO: 497907 - DNA, 15 bp, Homo sapiens
cagtcatgttgatcc

SEQ ID NO: 497908 - DNA, 15 bp, Homo sapiens
ccagtcatgttgatc

SEQ ID NO: 497909 - DNA, 15 bp, Homo sapiens
gccagtcatgttgat

SEQ ID NO: 497910 - DNA, 15 bp, Homo sapiens
agccagtcatgttga

SEQ ID NO: 497911 - DNA, 15 bp, Homo sapiens
aagccagtcatgttg

SEQ ID NO: 497912 - DNA, 15 bp, Homo sapiens
gaagccagtcatgtt

SEQ ID NO: 497913 - DNA, 15 bp, Homo sapiens
ggaagccagtcatgt

SEQ ID NO: 497914 - DNA, 15 bp, Homo sapiens
aggaagccagtcatg

SEQ ID NO: 497915 - DNA, 15 bp, Homo sapiens
aaggaagccagtcat

SEQ ID NO: 497916 - DNA, 15 bp, Homo sapiens
aaaggaagccagtca

SEQ ID NO: 497917 - DNA, 15 bp, Homo sapiens
caaaggaagccagtc

SEQ ID NO: 497918 - DNA, 15 bp, Homo sapiens
acaaaggaagccagt

SEQ ID NO: 497919 - DNA, 15 bp, Homo sapiens
cacaaaggaagccag

SEQ ID NO: 497920 - DNA, 15 bp, Homo sapiens
gcacaaaggaagcca

SEQ ID NO: 497921 - DNA, 15 bp, Homo sapiens
ggcacaaaggaagcc

SEQ ID NO: 497922 - DNA, 15 bp, Homo sapiens
gggcacaaaggaagc

SEQ ID NO: 497923 - DNA, 15 bp, Homo sapiens
agggcacaaaggaag

SEQ ID NO: 497924 - DNA, 15 bp, Homo sapiens
aagggcacaaaggaa

SEQ ID NO: 497925 - DNA, 15 bp, Homo sapiens
caagggcacaaagga

SEQ ID NO: 497926 - DNA, 15 bp, Homo sapiens
ccaagggcacaaagg

SEQ ID NO: 497927 - DNA, 15 bp, Homo sapiens
cccaagggcacaaag

SEQ ID NO: 497928 - DNA, 15 bp, Homo sapiens
ccccaagggcacaaa

SEQ ID NO: 497929 - DNA, 15 bp, Homo sapiens
cccccaagggcacaa

SEQ ID NO: 497930 - DNA, 15 bp, Homo sapiens
tcccccaagggcaca

SEQ ID NO: 497931 - DNA, 15 bp, Homo sapiens
ctcccccaagggcac

SEQ ID NO: 497932 - DNA, 15 bp, Homo sapiens
actcccccaagggca

SEQ ID NO: 497933 - DNA, 15 bp, Homo sapiens
cactcccccaagggc

SEQ ID NO: 497934 - DNA, 15 bp, Homo sapiens
acactcccccaaggg

SEQ ID NO: 497935 - DNA, 15 bp, Homo sapiens
cacactcccccaagg

SEQ ID NO: 497936 - DNA, 15 bp, Homo sapiens
gcacactcccccaag

SEQ ID NO: 497937 - DNA, 15 bp, Homo sapiens
ggcacactcccccaa

SEQ ID NO: 497938 - DNA, 15 bp, Homo sapiens
aggcacactccccca

SEQ ID NO: 497939 - DNA, 15 bp, Homo sapiens
gaggcacactccccc

SEQ ID NO: 497940 - DNA, 15 bp, Homo sapiens
ggaggcacactcccc

SEQ ID NO: 497941 - DNA, 15 bp, Homo sapiens
tggaggcacactccc

SEQ ID NO: 497942 - DNA, 15 bp, Homo sapiens
ctggaggcacactcc

SEQ ID NO: 497943 - DNA, 15 bp, Homo sapiens
gctggaggcacactc

SEQ ID NO: 497944 - DNA, 15 bp, Homo sapiens
tgctggaggcacact

SEQ ID NO: 497945 - DNA, 15 bp, Homo sapiens
ctgctggaggcacac

SEQ ID NO: 497946 - DNA, 15 bp, Homo sapiens
tctgctggaggcaca

SEQ ID NO: 497947 - DNA, 15 bp, Homo sapiens
ctctgctggaggcac

SEQ ID NO: 497948 - DNA, 15 bp, Homo sapiens
tctctgctggaggca

SEQ ID NO: 497949 - DNA, 15 bp, Homo sapiens
ttctctgctggaggc

SEQ ID NO: 497950 - DNA, 15 bp, Homo sapiens
cttctctgctggagg

SEQ ID NO: 497951 - DNA, 15 bp, Homo sapiens
gcttctctgctggag

SEQ ID NO: 497952 - DNA, 15 bp, Homo sapiens
tgcttctctgctgga

SEQ ID NO: 497953 - DNA, 15 bp, Homo sapiens
ttgcttctctgctgg

SEQ ID NO: 497954 - DNA, 15 bp, Homo sapiens
attgcttctctgctg

SEQ ID NO: 497955 - DNA, 15 bp, Homo sapiens
aattgcttctctgct

SEQ ID NO: 497956 - DNA, 15 bp, Homo sapiens
gaattgcttctctgc

SEQ ID NO: 497957 - DNA, 15 bp, Homo sapiens
agaattgcttctctg

SEQ ID NO: 497958 - DNA, 15 bp, Homo sapiens
cagaattgcttctct

SEQ ID NO: 497959 - DNA, 15 bp, Homo sapiens
ccagaattgcttctc

SEQ ID NO: 497960 - DNA, 15 bp, Homo sapiens
gccagaattgcttct

SEQ ID NO: 497961 - DNA, 15 bp, Homo sapiens
ggccagaattgcttc

SEQ ID NO: 497962 - DNA, 15 bp, Homo sapiens
aggccagaattgctt

SEQ ID NO: 497963 - DNA, 15 bp, Homo sapiens
caggccagaattgct

SEQ ID NO: 497964 - DNA, 15 bp, Homo sapiens
ccaggccagaattgc

SEQ ID NO: 497965 - DNA, 15 bp, Homo sapiens
gccaggccagaattg

SEQ ID NO: 497966 - DNA, 15 bp, Homo sapiens
tgccaggccagaatt

SEQ ID NO: 497967 - DNA, 15 bp, Homo sapiens
ttgccaggccagaat

SEQ ID NO: 497968 - DNA, 15 bp, Homo sapiens
gttgccaggccagaa

SEQ ID NO: 497969 - DNA, 15 bp, Homo sapiens
ggttgccaggccaga

SEQ ID NO: 497970 - DNA, 15 bp, Homo sapiens
aggttgccaggccag

SEQ ID NO: 497971 - DNA, 15 bp, Homo sapiens
taggttgccaggcca

SEQ ID NO: 497972 - DNA, 15 bp, Homo sapiens
ataggttgccaggcc

SEQ ID NO: 497973 - DNA, 15 bp, Homo sapiens
tataggttgccaggc

SEQ ID NO: 497974 - DNA, 15 bp, Homo sapiens
ctataggttgccagg

SEQ ID NO: 497975 - DNA, 15 bp, Homo sapiens
gctataggttgccag

SEQ ID NO: 497976 - DNA, 15 bp, Homo sapiens
ggctataggttgcca

SEQ ID NO: 497977 - DNA, 15 bp, Homo sapiens
gggctataggttgcc

SEQ ID NO: 497978 - DNA, 15 bp, Homo sapiens
tgggctataggttgc

SEQ ID NO: 497979 - DNA, 15 bp, Homo sapiens
gtgggctataggttg

SEQ ID NO: 497980 - DNA, 15 bp, Homo sapiens
ggtgggctataggtt

SEQ ID NO: 497981 - DNA, 15 bp, Homo sapiens
gggtgggctataggt

SEQ ID NO: 497982 - DNA, 15 bp, Homo sapiens
tgggtgggctatagg

SEQ ID NO: 497983 - DNA, 15 bp, Homo sapiens
atgggtgggctatag

SEQ ID NO: 497984 - DNA, 15 bp, Homo sapiens
catgggtgggctata

SEQ ID NO: 497985 - DNA, 15 bp, Homo sapiens
ccatgggtgggctat

SEQ ID NO: 497986 - DNA, 15 bp, Homo sapiens
cccatgggtgggcta

SEQ ID NO: 497987 - DNA, 15 bp, Homo sapiens
acccatgggtgggct

SEQ ID NO: 497988 - DNA, 15 bp, Homo sapiens
gacccatgggtgggc

SEQ ID NO: 497989 - DNA, 15 bp, Homo sapiens
ggacccatgggtggg

SEQ ID NO: 497990 - DNA, 15 bp, Homo sapiens
tggacccatgggtgg

SEQ ID NO: 497991 - DNA, 15 bp, Homo sapiens
ctggacccatgggtg

SEQ ID NO: 497992 - DNA, 15 bp, Homo sapiens
actggacccatgggt

SEQ ID NO: 497993 - DNA, 15 bp, Homo sapiens
gactggacccatggg

SEQ ID NO: 497994 - DNA, 15 bp, Homo sapiens
tgactggacccatgg

SEQ ID NO: 497995 - DNA, 15 bp, Homo sapiens
ctgactggacccatg

SEQ ID NO: 497996 - DNA, 15 bp, Homo sapiens
actgactggacccat

SEQ ID NO: 497997 - DNA, 15 bp, Homo sapiens
cactgactggaccca

SEQ ID NO: 497998 - DNA, 15 bp, Homo sapiens
tcactgactggaccc

SEQ ID NO: 497999 - DNA, 15 bp, Homo sapiens
ttcactgactggacc

SEQ ID NO: 498000 - DNA, 15 bp, Homo sapiens
gttcactgactggac

SEQ ID NO: 498001 - DNA, 15 bp, Homo sapiens
cgttcactgactgga

SEQ ID NO: 498002 - DNA, 15 bp, Homo sapiens
acgttcactgactgg

SEQ ID NO: 498003 - DNA, 15 bp, Homo sapiens
tacgttcactgactg

SEQ ID NO: 498004 - DNA, 15 bp, Homo sapiens
ttacgttcactgact

SEQ ID NO: 498005 - DNA, 15 bp, Homo sapiens
cttacgttcactgac

SEQ ID NO: 498006 - DNA, 15 bp, Homo sapiens
ccttacgttcactga

SEQ ID NO: 498007 - DNA, 15 bp, Homo sapiens
cccttacgttcactg

SEQ ID NO: 498008 - DNA, 15 bp, Homo sapiens
acccttacgttcact

SEQ ID NO: 498009 - DNA, 15 bp, Homo sapiens
aacccttacgttcac

SEQ ID NO: 498010 - DNA, 15 bp, Homo sapiens
gaacccttacgttca

SEQ ID NO: 498011 - DNA, 15 bp, Homo sapiens
agaacccttacgttc

SEQ ID NO: 498012 - DNA, 15 bp, Homo sapiens
tagaacccttacgtt

SEQ ID NO: 498013 - DNA, 15 bp, Homo sapiens
atagaacccttacgt

SEQ ID NO: 498014 - DNA, 15 bp, Homo sapiens
catagaacccttacg

SEQ ID NO: 498015 - DNA, 15 bp, Homo sapiens
tcatagaacccttac

SEQ ID NO: 498016 - DNA, 15 bp, Homo sapiens
atcatagaaccctta

SEQ ID NO: 498017 - DNA, 15 bp, Homo sapiens
aatcatagaaccctt

SEQ ID NO: 498018 - DNA, 15 bp, Homo sapiens
aaatcatagaaccct

SEQ ID NO: 498019 - DNA, 15 bp, Homo sapiens
gaaatcatagaaccc

SEQ ID NO: 498020 - DNA, 15 bp, Homo sapiens
tgaaatcatagaacc

SEQ ID NO: 498021 - DNA, 15 bp, Homo sapiens
ctgaaatcatagaac

SEQ ID NO: 498022 - DNA, 15 bp, Homo sapiens
actgaaatcatagaa

SEQ ID NO: 498023 - DNA, 15 bp, Homo sapiens
cactgaaatcataga

SEQ ID NO: 498024 - DNA, 15 bp, Homo sapiens
tcactgaaatcatag

SEQ ID NO: 498025 - DNA, 15 bp, Homo sapiens
atcactgaaatcata

SEQ ID NO: 498026 - DNA, 15 bp, Homo sapiens
catcactgaaatcat

SEQ ID NO: 498027 - DNA, 15 bp, Homo sapiens
acatcactgaaatca

SEQ ID NO: 498028 - DNA, 15 bp, Homo sapiens
gacatcactgaaatc

SEQ ID NO: 498029 - DNA, 15 bp, Homo sapiens
agacatcactgaaat

SEQ ID NO: 498030 - DNA, 15 bp, Homo sapiens
aagacatcactgaaa

SEQ ID NO: 498031 - DNA, 15 bp, Homo sapiens
gaagacatcactgaa

SEQ ID NO: 498032 - DNA, 15 bp, Homo sapiens
tgaagacatcactga

SEQ ID NO: 498033 - DNA, 15 bp, Homo sapiens
ctgaagacatcactg

SEQ ID NO: 498034 - DNA, 15 bp, Homo sapiens
tctgaagacatcact

SEQ ID NO: 498035 - DNA, 15 bp, Homo sapiens
ctctgaagacatcac

SEQ ID NO: 498036 - DNA, 15 bp, Homo sapiens
cctctgaagacatca

SEQ ID NO: 498037 - DNA, 15 bp, Homo sapiens
ccctctgaagacatc

SEQ ID NO: 498038 - DNA, 15 bp, Homo sapiens
tccctctgaagacat

SEQ ID NO: 498039 - DNA, 15 bp, Homo sapiens
ttccctctgaagaca

SEQ ID NO: 498040 - DNA, 15 bp, Homo sapiens
tttccctctgaagac

SEQ ID NO: 498041 - DNA, 15 bp, Homo sapiens
gtttccctctgaaga

SEQ ID NO: 498042 - DNA, 15 bp, Homo sapiens
cgtttccctctgaag

SEQ ID NO: 498043 - DNA, 15 bp, Homo sapiens
gcgtttccctctgaa

SEQ ID NO: 498044 - DNA, 15 bp, Homo sapiens
tgcgtttccctctga

SEQ ID NO: 498045 - DNA, 15 bp, Homo sapiens
ctgcgtttccctctg

SEQ ID NO: 498046 - DNA, 15 bp, Homo sapiens
tctgcgtttccctct

SEQ ID NO: 498047 - DNA, 15 bp, Homo sapiens
atctgcgtttccctc

SEQ ID NO: 498048 - DNA, 15 bp, Homo sapiens
tatctgcgtttccct

SEQ ID NO: 498049 - DNA, 15 bp, Homo sapiens
gtatctgcgtttccc

SEQ ID NO: 498050 - DNA, 15 bp, Homo sapiens
tgtatctgcgtttcc

SEQ ID NO: 498051 - DNA, 15 bp, Homo sapiens
gtgtatctgcgtttc

SEQ ID NO: 498052 - DNA, 15 bp, Homo sapiens
ggtgtatctgcgttt

SEQ ID NO: 498053 - DNA, 15 bp, Homo sapiens
aggtgtatctgcgtt

SEQ ID NO: 498054 - DNA, 15 bp, Homo sapiens
caggtgtatctgcgt

SEQ ID NO: 498055 - DNA, 15 bp, Homo sapiens
acaggtgtatctgcg

SEQ ID NO: 498056 - DNA, 15 bp, Homo sapiens
gacaggtgtatctgc

SEQ ID NO: 498057 - DNA, 15 bp, Homo sapiens
tgacaggtgtatctg

SEQ ID NO: 498058 - DNA, 15 bp, Homo sapiens
ctgacaggtgtatct

SEQ ID NO: 498059 - DNA, 15 bp, Homo sapiens
gctgacaggtgtatc

SEQ ID NO: 498060 - DNA, 15 bp, Homo sapiens
tgctgacaggtgtat

SEQ ID NO: 498061 - DNA, 15 bp, Homo sapiens
ttgctgacaggtgta

SEQ ID NO: 498062 - DNA, 15 bp, Homo sapiens
tttgctgacaggtgt

SEQ ID NO: 498063 - DNA, 15 bp, Homo sapiens
atttgctgacaggtg

SEQ ID NO: 498064 - DNA, 15 bp, Homo sapiens
aatttgctgacaggt

SEQ ID NO: 498065 - DNA, 15 bp, Homo sapiens
aaatttgctgacagg

SEQ ID NO: 498066 - DNA, 15 bp, Homo sapiens
taaatttgctgacag

SEQ ID NO: 498067 - DNA, 15 bp, Homo sapiens
ataaatttgctgaca

SEQ ID NO: 498068 - DNA, 15 bp, Homo sapiens
cataaatttgctgac

SEQ ID NO: 498069 - DNA, 15 bp, Homo sapiens
ccataaatttgctga

SEQ ID NO: 498070 - DNA, 15 bp, Homo sapiens
tccataaatttgctg

SEQ ID NO: 498071 - DNA, 15 bp, Homo sapiens
atccataaatttgct

SEQ ID NO: 498072 - DNA, 15 bp, Homo sapiens
gatccataaatttgc

SEQ ID NO: 498073 - DNA, 15 bp, Homo sapiens
cgatccataaatttg

SEQ ID NO: 498074 - DNA, 15 bp, Homo sapiens
ccgatccataaattt

SEQ ID NO: 498075 - DNA, 15 bp, Homo sapiens
gccgatccataaatt

SEQ ID NO: 498076 - DNA, 15 bp, Homo sapiens
agccgatccataaat

SEQ ID NO: 498077 - DNA, 15 bp, Homo sapiens
cagccgatccataaa

SEQ ID NO: 498078 - DNA, 15 bp, Homo sapiens
acagccgatccataa

SEQ ID NO: 498079 - DNA, 15 bp, Homo sapiens
aacagccgatccata

SEQ ID NO: 498080 - DNA, 15 bp, Homo sapiens
caacagccgatccat

SEQ ID NO: 498081 - DNA, 15 bp, Homo sapiens
acaacagccgatcca

SEQ ID NO: 498082 - DNA, 15 bp, Homo sapiens
gacaacagccgatcc

SEQ ID NO: 498083 - DNA, 15 bp, Homo sapiens
ggacaacagccgatc

SEQ ID NO: 498084 - DNA, 15 bp, Homo sapiens
aggacaacagccgat

SEQ ID NO: 498085 - DNA, 15 bp, Homo sapiens
aaggacaacagccga

SEQ ID NO: 498086 - DNA, 15 bp, Homo sapiens
taaggacaacagccg

SEQ ID NO: 498087 - DNA, 15 bp, Homo sapiens
ttaaggacaacagcc

SEQ ID NO: 498088 - DNA, 15 bp, Homo sapiens
attaaggacaacagc

SEQ ID NO: 498089 - DNA, 15 bp, Homo sapiens
cattaaggacaacag

SEQ ID NO: 498090 - DNA, 15 bp, Homo sapiens
ccattaaggacaaca

SEQ ID NO: 498091 - DNA, 15 bp, Homo sapiens
accattaaggacaac

SEQ ID NO: 498092 - DNA, 15 bp, Homo sapiens
caccattaaggacaa

SEQ ID NO: 498093 - DNA, 15 bp, Homo sapiens
acaccattaaggaca

SEQ ID NO: 498094 - DNA, 15 bp, Homo sapiens
cacaccattaaggac

SEQ ID NO: 498095 - DNA, 15 bp, Homo sapiens
acacaccattaagga

SEQ ID NO: 498096 - DNA, 15 bp, Homo sapiens
tacacaccattaagg

SEQ ID NO: 498097 - DNA, 15 bp, Homo sapiens
ttacacaccattaag

SEQ ID NO: 498098 - DNA, 15 bp, Homo sapiens
gttacacaccattaa

SEQ ID NO: 498099 - DNA, 15 bp, Homo sapiens
ggttacacaccatta

SEQ ID NO: 498100 - DNA, 15 bp, Homo sapiens
tggttacacaccatt

SEQ ID NO: 498101 - DNA, 15 bp, Homo sapiens
atggttacacaccat

SEQ ID NO: 498102 - DNA, 15 bp, Homo sapiens
catggttacacacca

SEQ ID NO: 498103 - DNA, 15 bp, Homo sapiens
tcatggttacacacc

SEQ ID NO: 498104 - DNA, 15 bp, Homo sapiens
ctcatggttacacac

SEQ ID NO: 498105 - DNA, 15 bp, Homo sapiens
tctcatggttacaca

SEQ ID NO: 498106 - DNA, 15 bp, Homo sapiens
ttctcatggttacac

SEQ ID NO: 498107 - DNA, 15 bp, Homo sapiens
tttctcatggttaca

SEQ ID NO: 498108 - DNA, 15 bp, Homo sapiens
ctttctcatggttac

SEQ ID NO: 498109 - DNA, 15 bp, Homo sapiens
actttctcatggtta

SEQ ID NO: 498110 - DNA, 15 bp, Homo sapiens
cactttctcatggtt

SEQ ID NO: 498111 - DNA, 15 bp, Homo sapiens
ccactttctcatggt

SEQ ID NO: 498112 - DNA, 15 bp, Homo sapiens
cccactttctcatgg

SEQ ID NO: 498113 - DNA, 15 bp, Homo sapiens
tcccactttctcatg

SEQ ID NO: 498114 - DNA, 15 bp, Homo sapiens
gtcccactttctcat

SEQ ID NO: 498115 - DNA, 15 bp, Homo sapiens
agtcccactttctca

SEQ ID NO: 498116 - DNA, 15 bp, Homo sapiens
aagtcccactttctc

SEQ ID NO: 498117 - DNA, 15 bp, Homo sapiens
gaagtcccactttct

SEQ ID NO: 498118 - DNA, 15 bp, Homo sapiens
tgaagtcccactttc

SEQ ID NO: 498119 - DNA, 15 bp, Homo sapiens
ttgaagtcccacttt

SEQ ID NO: 498120 - DNA, 15 bp, Homo sapiens
tttgaagtcccactt

SEQ ID NO: 498121 - DNA, 15 bp, Homo sapiens
atttgaagtcccact

SEQ ID NO: 498122 - DNA, 15 bp, Homo sapiens
tatttgaagtcccac

SEQ ID NO: 498123 - DNA, 15 bp, Homo sapiens
gtatttgaagtccca

SEQ ID NO: 498124 - DNA, 15 bp, Homo sapiens
cgtatttgaagtccc

SEQ ID NO: 498125 - DNA, 15 bp, Homo sapiens
ccgtatttgaagtcc

SEQ ID NO: 498126 - DNA, 15 bp, Homo sapiens
tccgtatttgaagtc

SEQ ID NO: 498127 - DNA, 15 bp, Homo sapiens
gtccgtatttgaagt

SEQ ID NO: 498128 - DNA, 15 bp, Homo sapiens
ggtccgtatttgaag

SEQ ID NO: 498129 - DNA, 15 bp, Homo sapiens
tggtccgtatttgaa

SEQ ID NO: 498130 - DNA, 15 bp, Homo sapiens
ttggtccgtatttga

SEQ ID NO: 498131 - DNA, 15 bp, Homo sapiens
attggtccgtatttg

SEQ ID NO: 498132 - DNA, 15 bp, Homo sapiens
cattggtccgtattt

SEQ ID NO: 498133 - DNA, 15 bp, Homo sapiens
acattggtccgtatt

SEQ ID NO: 498134 - DNA, 15 bp, Homo sapiens
aacattggtccgtat

SEQ ID NO: 498135 - DNA, 15 bp, Homo sapiens
taacattggtccgta

SEQ ID NO: 498136 - DNA, 15 bp, Homo sapiens
ttaacattggtccgt

SEQ ID NO: 498137 - DNA, 15 bp, Homo sapiens
cttaacattggtccg

SEQ ID NO: 498138 - DNA, 15 bp, Homo sapiens
ccttaacattggtcc

SEQ ID NO: 498139 - DNA, 15 bp, Homo sapiens
tccttaacattggtc

SEQ ID NO: 498140 - DNA, 15 bp, Homo sapiens
atccttaacattggt

SEQ ID NO: 498141 - DNA, 15 bp, Homo sapiens
gatccttaacattgg

SEQ ID NO: 498142 - DNA, 15 bp, Homo sapiens
agatccttaacattg

SEQ ID NO: 498143 - DNA, 15 bp, Homo sapiens
cagatccttaacatt

SEQ ID NO: 498144 - DNA, 15 bp, Homo sapiens
ccagatccttaacat

SEQ ID NO: 498145 - DNA, 15 bp, Homo sapiens
accagatccttaaca

SEQ ID NO: 498146 - DNA, 15 bp, Homo sapiens
caccagatccttaac

SEQ ID NO: 498147 - DNA, 15 bp, Homo sapiens
ccaccagatccttaa

SEQ ID NO: 498148 - DNA, 15 bp, Homo sapiens
cccaccagatcctta

SEQ ID NO: 498149 - DNA, 15 bp, Homo sapiens
acccaccagatcctt

SEQ ID NO: 498150 - DNA, 15 bp, Homo sapiens
gacccaccagatcct

SEQ ID NO: 498151 - DNA, 15 bp, Homo sapiens
agacccaccagatcc

SEQ ID NO: 498152 - DNA, 15 bp, Homo sapiens
tagacccaccagatc

SEQ ID NO: 498153 - DNA, 15 bp, Homo sapiens
ctagacccaccagat

SEQ ID NO: 498154 - DNA, 15 bp, Homo sapiens
tctagacccaccaga

SEQ ID NO: 498155 - DNA, 15 bp, Homo sapiens
ttctagacccaccag

SEQ ID NO: 498156 - DNA, 15 bp, Homo sapiens
attctagacccacca

SEQ ID NO: 498157 - DNA, 15 bp, Homo sapiens
aattctagacccacc

SEQ ID NO: 498158 - DNA, 15 bp, Homo sapiens
caattctagacccac

SEQ ID NO: 498159 - DNA, 15 bp, Homo sapiens
tcaattctagaccca

SEQ ID NO: 498160 - DNA, 15 bp, Homo sapiens
ctcaattctagaccc

SEQ ID NO: 498161 - DNA, 15 bp, Homo sapiens
actcaattctagacc

SEQ ID NO: 498162 - DNA, 15 bp, Homo sapiens
gactcaattctagac

SEQ ID NO: 498163 - DNA, 15 bp, Homo sapiens
ggactcaattctaga

SEQ ID NO: 498164 - DNA, 15 bp, Homo sapiens
aggactcaattctag

SEQ ID NO: 498165 - DNA, 15 bp, Homo sapiens
caggactcaattcta

SEQ ID NO: 498166 - DNA, 15 bp, Homo sapiens
gcaggactcaattct

SEQ ID NO: 498167 - DNA, 15 bp, Homo sapiens
agcaggactcaattc

SEQ ID NO: 498168 - DNA, 15 bp, Homo sapiens
gagcaggactcaatt

SEQ ID NO: 498169 - DNA, 15 bp, Homo sapiens
agagcaggactcaat

SEQ ID NO: 498170 - DNA, 15 bp, Homo sapiens
cagagcaggactcaa

SEQ ID NO: 498171 - DNA, 15 bp, Homo sapiens
acagagcaggactca

SEQ ID NO: 498172 - DNA, 15 bp, Homo sapiens
tacagagcaggactc

SEQ ID NO: 498173 - DNA, 15 bp, Homo sapiens
atacagagcaggact

SEQ ID NO: 498174 - DNA, 15 bp, Homo sapiens
gatacagagcaggac

SEQ ID NO: 498175 - DNA, 15 bp, Homo sapiens
ggatacagagcagga

SEQ ID NO: 498176 - DNA, 15 bp, Homo sapiens
tggatacagagcagg

SEQ ID NO: 498177 - DNA, 15 bp, Homo sapiens
ttggatacagagcag

SEQ ID NO: 498178 - DNA, 15 bp, Homo sapiens
attggatacagagca

SEQ ID NO: 498179 - DNA, 15 bp, Homo sapiens
cattggatacagagc

SEQ ID NO: 498180 - DNA, 15 bp, Homo sapiens
gcattggatacagag

SEQ ID NO: 498181 - DNA, 15 bp, Homo sapiens
agcattggatacaga

SEQ ID NO: 498182 - DNA, 15 bp, Homo sapiens
tagcattggatacag

SEQ ID NO: 498183 - DNA, 15 bp, Homo sapiens
atagcattggataca

SEQ ID NO: 498184 - DNA, 15 bp, Homo sapiens
aatagcattggatac

SEQ ID NO: 498185 - DNA, 15 bp, Homo sapiens
aaatagcattggata

SEQ ID NO: 498186 - DNA, 15 bp, Homo sapiens
taaatagcattggat

SEQ ID NO: 498187 - DNA, 15 bp, Homo sapiens
ttaaatagcattgga

SEQ ID NO: 498188 - DNA, 15 bp, Homo sapiens
gttaaatagcattgg

SEQ ID NO: 498189 - DNA, 15 bp, Homo sapiens
tgttaaatagcattg

SEQ ID NO: 498190 - DNA, 15 bp, Homo sapiens
ttgttaaatagcatt

SEQ ID NO: 498191 - DNA, 15 bp, Homo sapiens
tttgttaaatagcat

SEQ ID NO: 498192 - DNA, 15 bp, Homo sapiens
atttgttaaatagca

SEQ ID NO: 498193 - DNA, 15 bp, Homo sapiens
aatttgttaaatagc

SEQ ID NO: 498194 - DNA, 15 bp, Homo sapiens
caatttgttaaatag

SEQ ID NO: 498195 - DNA, 15 bp, Homo sapiens
tcaatttgttaaata

SEQ ID NO: 498196 - DNA, 15 bp, Homo sapiens
ttcaatttgttaaat

SEQ ID NO: 498197 - DNA, 15 bp, Homo sapiens
cttcaatttgttaaa

SEQ ID NO: 498198 - DNA, 15 bp, Homo sapiens
tcttcaatttgttaa

SEQ ID NO: 498199 - DNA, 15 bp, Homo sapiens
ttcttcaatttgtta

SEQ ID NO: 498200 - DNA, 15 bp, Homo sapiens
attcttcaatttgtt

SEQ ID NO: 498201 - DNA, 15 bp, Homo sapiens
tattcttcaatttgt

SEQ ID NO: 498202 - DNA, 15 bp, Homo sapiens
gtattcttcaatttg

SEQ ID NO: 498203 - DNA, 15 bp, Homo sapiens
ggtattcttcaattt

SEQ ID NO: 498204 - DNA, 15 bp, Homo sapiens
tggtattcttcaatt

SEQ ID NO: 498205 - DNA, 15 bp, Homo sapiens
atggtattcttcaat

SEQ ID NO: 498206 - DNA, 15 bp, Homo sapiens
gatggtattcttcaa

SEQ ID NO: 498207 - DNA, 15 bp, Homo sapiens
tgatggtattcttca

SEQ ID NO: 498208 - DNA, 15 bp, Homo sapiens
ctgatggtattcttc

SEQ ID NO: 498209 - DNA, 15 bp, Homo sapiens
gctgatggtattctt

SEQ ID NO: 498210 - DNA, 15 bp, Homo sapiens
tgctgatggtattct

SEQ ID NO: 498211 - DNA, 15 bp, Homo sapiens
ttgctgatggtattc

SEQ ID NO: 498212 - DNA, 15 bp, Homo sapiens
cttgctgatggtatt

SEQ ID NO: 498213 - DNA, 15 bp, Homo sapiens
acttgctgatggtat

SEQ ID NO: 498214 - DNA, 15 bp, Homo sapiens
aacttgctgatggta

SEQ ID NO: 498215 - DNA, 15 bp, Homo sapiens
aaacttgctgatggt

SEQ ID NO: 498216 - DNA, 15 bp, Homo sapiens
aaaacttgctgatgg

SEQ ID NO: 498217 - DNA, 15 bp, Homo sapiens
aaaaacttgctgatg

SEQ ID NO: 498218 - DNA, 15 bp, Homo sapiens
aaaaaacttgctgat

SEQ ID NO: 498219 - DNA, 15 bp, Homo sapiens
caaaaaacttgctga

SEQ ID NO: 498220 - DNA, 15 bp, Homo sapiens
tcaaaaaacttgctg

SEQ ID NO: 498221 - DNA, 15 bp, Homo sapiens
gtcaaaaaacttgct

SEQ ID NO: 498222 - DNA, 15 bp, Homo sapiens
agtcaaaaaacttgc

SEQ ID NO: 498223 - DNA, 15 bp, Homo sapiens
gagtcaaaaaacttg

SEQ ID NO: 498224 - DNA, 15 bp, Homo sapiens
ggagtcaaaaaactt

SEQ ID NO: 498225 - DNA, 15 bp, Homo sapiens
gggagtcaaaaaact

SEQ ID NO: 498226 - DNA, 15 bp, Homo sapiens
tgggagtcaaaaaac

SEQ ID NO: 498227 - DNA, 15 bp, Homo sapiens
ttgggagtcaaaaaa

SEQ ID NO: 498228 - DNA, 15 bp, Homo sapiens
cttgggagtcaaaaa

SEQ ID NO: 498229 - DNA, 15 bp, Homo sapiens
ccttgggagtcaaaa

SEQ ID NO: 498230 - DNA, 15 bp, Homo sapiens
tccttgggagtcaaa

SEQ ID NO: 498231 - DNA, 15 bp, Homo sapiens
gtccttgggagtcaa

SEQ ID NO: 498232 - DNA, 15 bp, Homo sapiens
tgtccttgggagtca

SEQ ID NO: 498233 - DNA, 15 bp, Homo sapiens
ctgtccttgggagtc

SEQ ID NO: 498234 - DNA, 15 bp, Homo sapiens
cctgtccttgggagt

SEQ ID NO: 498235 - DNA, 15 bp, Homo sapiens
acctgtccttgggag

SEQ ID NO: 498236 - DNA, 15 bp, Homo sapiens
tacctgtccttggga

SEQ ID NO: 498237 - DNA, 15 bp, Homo sapiens
ttacctgtccttggg

SEQ ID NO: 498238 - DNA, 15 bp, Homo sapiens
tttacctgtccttgg

SEQ ID NO: 498239 - DNA, 15 bp, Homo sapiens
ctttacctgtccttg

SEQ ID NO: 498240 - DNA, 15 bp, Homo sapiens
actttacctgtcctt

SEQ ID NO: 498241 - DNA, 15 bp, Homo sapiens
cactttacctgtcct

SEQ ID NO: 498242 - DNA, 15 bp, Homo sapiens
acactttacctgtcc

SEQ ID NO: 498243 - DNA, 15 bp, Homo sapiens
aacactttacctgtc

SEQ ID NO: 498244 - DNA, 15 bp, Homo sapiens
gaacactttacctgt

SEQ ID NO: 498245 - DNA, 15 bp, Homo sapiens
agaacactttacctg

SEQ ID NO: 498246 - DNA, 15 bp, Homo sapiens
gagaacactttacct

SEQ ID NO: 498247 - DNA, 15 bp, Homo sapiens
agagaacactttacc

SEQ ID NO: 498248 - DNA, 15 bp, Homo sapiens
aagagaacactttac

SEQ ID NO: 498249 - DNA, 15 bp, Homo sapiens
taagagaacacttta

SEQ ID NO: 498250 - DNA, 15 bp, Homo sapiens
ataagagaacacttt

SEQ ID NO: 498251 - DNA, 15 bp, Homo sapiens
aataagagaacactt

SEQ ID NO: 498252 - DNA, 15 bp, Homo sapiens
aaataagagaacact

SEQ ID NO: 498253 - DNA, 15 bp, Homo sapiens
aaaataagagaacac

SEQ ID NO: 498254 - DNA, 15 bp, Homo sapiens
aaaaataagagaaca

SEQ ID NO: 498255 - DNA, 15 bp, Homo sapiens
gaaaaataagagaac

SEQ ID NO: 498256 - DNA, 15 bp, Homo sapiens
tgaaaaataagagaa

SEQ ID NO: 498257 - DNA, 15 bp, Homo sapiens
gtgaaaaataagaga

SEQ ID NO: 498258 - DNA, 15 bp, Homo sapiens
ggtgaaaaataagag

SEQ ID NO: 498259 - DNA, 15 bp, Homo sapiens
aggtgaaaaataaga

SEQ ID NO: 498260 - DNA, 15 bp, Homo sapiens
aaggtgaaaaataag

SEQ ID NO: 498261 - DNA, 15 bp, Homo sapiens
aaaggtgaaaaataa

SEQ ID NO: 498262 - DNA, 15 bp, Homo sapiens
gaaaggtgaaaaata

SEQ ID NO: 498263 - DNA, 15 bp, Homo sapiens
agaaaggtgaaaaat

SEQ ID NO: 498264 - DNA, 15 bp, Homo sapiens
gagaaaggtgaaaaa

SEQ ID NO: 498265 - DNA, 15 bp, Homo sapiens
agagaaaggtgaaaa

SEQ ID NO: 498266 - DNA, 15 bp, Homo sapiens
tagagaaaggtgaaa

SEQ ID NO: 498267 - DNA, 15 bp, Homo sapiens
atagagaaaggtgaa

SEQ ID NO: 498268 - DNA, 15 bp, Homo sapiens
catagagaaaggtga

SEQ ID NO: 498269 - DNA, 15 bp, Homo sapiens
tcatagagaaaggtg

SEQ ID NO: 498270 - DNA, 15 bp, Homo sapiens
ttcatagagaaaggt

SEQ ID NO: 498271 - DNA, 15 bp, Homo sapiens
attcatagagaaagg

SEQ ID NO: 498272 - DNA, 15 bp, Homo sapiens
tattcatagagaaag

SEQ ID NO: 498273 - DNA, 15 bp, Homo sapiens
ctattcatagagaaa

SEQ ID NO: 498274 - DNA, 15 bp, Homo sapiens
tctattcatagagaa

SEQ ID NO: 498275 - DNA, 15 bp, Homo sapiens
ctctattcatagaga

SEQ ID NO: 498276 - DNA, 15 bp, Homo sapiens
actctattcatagag

SEQ ID NO: 498277 - DNA, 15 bp, Homo sapiens
cactctattcataga

SEQ ID NO: 498278 - DNA, 15 bp, Homo sapiens
tcactctattcatag

SEQ ID NO: 498279 - DNA, 15 bp, Homo sapiens
gtcactctattcata

SEQ ID NO: 498280 - DNA, 15 bp, Homo sapiens
agtcactctattcat

SEQ ID NO: 498281 - DNA, 15 bp, Homo sapiens
aagtcactctattca

SEQ ID NO: 498282 - DNA, 15 bp, Homo sapiens
caagtcactctattc

SEQ ID NO: 498283 - DNA, 15 bp, Homo sapiens
acaagtcactctatt

SEQ ID NO: 498284 - DNA, 15 bp, Homo sapiens
aacaagtcactctat

SEQ ID NO: 498285 - DNA, 15 bp, Homo sapiens
aaacaagtcactcta

SEQ ID NO: 498286 - DNA, 15 bp, Homo sapiens
caaacaagtcactct

SEQ ID NO: 498287 - DNA, 15 bp, Homo sapiens
tcaaacaagtcactc

SEQ ID NO: 498288 - DNA, 15 bp, Homo sapiens
ttcaaacaagtcact

SEQ ID NO: 498289 - DNA, 15 bp, Homo sapiens
tttcaaacaagtcac

SEQ ID NO: 498290 - DNA, 15 bp, Homo sapiens
atttcaaacaagtca

SEQ ID NO: 498291 - DNA, 15 bp, Homo sapiens
tatttcaaacaagtc

SEQ ID NO: 498292 - DNA, 15 bp, Homo sapiens
ttatttcaaacaagt

SEQ ID NO: 498293 - DNA, 15 bp, Homo sapiens
cttatttcaaacaag

SEQ ID NO: 498294 - DNA, 15 bp, Homo sapiens
gcttatttcaaacaa

SEQ ID NO: 498295 - DNA, 15 bp, Homo sapiens
ggcttatttcaaaca

SEQ ID NO: 498296 - DNA, 15 bp, Homo sapiens
aggcttatttcaaac

SEQ ID NO: 498297 - DNA, 15 bp, Homo sapiens
aaggcttatttcaaa

SEQ ID NO: 498298 - DNA, 15 bp, Homo sapiens
aaaggcttatttcaa

SEQ ID NO: 498299 - DNA, 15 bp, Homo sapiens
aaaaggcttatttca

SEQ ID NO: 498300 - DNA, 15 bp, Homo sapiens
aaaaaggcttatttc

SEQ ID NO: 498301 - DNA, 15 bp, Homo sapiens
gaaaaaggcttattt

SEQ ID NO: 498302 - DNA, 15 bp, Homo sapiens
agaaaaaggcttatt

SEQ ID NO: 498303 - DNA, 15 bp, Homo sapiens
aagaaaaaggcttat

SEQ ID NO: 498304 - DNA, 15 bp, Homo sapiens
aaagaaaaaggctta

SEQ ID NO: 498305 - DNA, 15 bp, Homo sapiens
gaaagaaaaaggctt

SEQ ID NO: 498306 - DNA, 15 bp, Homo sapiens
tgaaagaaaaaggct

SEQ ID NO: 498307 - DNA, 15 bp, Homo sapiens
ctgaaagaaaaaggc

SEQ ID NO: 498308 - DNA, 15 bp, Homo sapiens
tctgaaagaaaaagg

SEQ ID NO: 498309 - DNA, 15 bp, Homo sapiens
atctgaaagaaaaag

SEQ ID NO: 498310 - DNA, 15 bp, Homo sapiens
aatctgaaagaaaaa

SEQ ID NO: 498311 - DNA, 15 bp, Homo sapiens
taatctgaaagaaaa

SEQ ID NO: 498312 - DNA, 15 bp, Homo sapiens
ataatctgaaagaaa

SEQ ID NO: 498313 - DNA, 15 bp, Homo sapiens
aataatctgaaagaa

SEQ ID NO: 498314 - DNA, 15 bp, Homo sapiens
aaataatctgaaaga

SEQ ID NO: 498315 - DNA, 15 bp, Homo sapiens
taaataatctgaaag

SEQ ID NO: 498316 - DNA, 15 bp, Homo sapiens
ttaaataatctgaaa

SEQ ID NO: 498317 - DNA, 15 bp, Homo sapiens
tttaaataatctgaa

SEQ ID NO: 498318 - DNA, 15 bp, Homo sapiens
atttaaataatctga

SEQ ID NO: 498319 - DNA, 15 bp, Homo sapiens
aatttaaataatctg

SEQ ID NO: 498320 - DNA, 15 bp, Homo sapiens
taatttaaataatct

SEQ ID NO: 498321 - DNA, 15 bp, Homo sapiens
ctaatttaaataatc

SEQ ID NO: 498322 - DNA, 15 bp, Homo sapiens
cctaatttaaataat

SEQ ID NO: 498323 - DNA, 15 bp, Homo sapiens
acctaatttaaataa

SEQ ID NO: 498324 - DNA, 15 bp, Homo sapiens
tacctaatttaaata

SEQ ID NO: 498325 - DNA, 15 bp, Homo sapiens
gtacctaatttaaat

SEQ ID NO: 498326 - DNA, 15 bp, Homo sapiens
agtacctaatttaaa

SEQ ID NO: 498327 - DNA, 15 bp, Homo sapiens
gagtacctaatttaa

SEQ ID NO: 498328 - DNA, 15 bp, Homo sapiens
tgagtacctaattta

SEQ ID NO: 498329 - DNA, 15 bp, Homo sapiens
gtgagtacctaattt

SEQ ID NO: 498330 - DNA, 15 bp, Homo sapiens
tgtgagtacctaatt

SEQ ID NO: 498331 - DNA, 15 bp, Homo sapiens
ctgtgagtacctaat

SEQ ID NO: 498332 - DNA, 15 bp, Homo sapiens
actgtgagtacctaa

SEQ ID NO: 498333 - DNA, 15 bp, Homo sapiens
aactgtgagtaccta

SEQ ID NO: 498334 - DNA, 15 bp, Homo sapiens
aaactgtgagtacct

SEQ ID NO: 498335 - DNA, 15 bp, Homo sapiens
aaaactgtgagtacc

SEQ ID NO: 498336 - DNA, 15 bp, Homo sapiens
aaaaactgtgagtac

SEQ ID NO: 498337 - DNA, 15 bp, Homo sapiens
taaaaactgtgagta

SEQ ID NO: 498338 - DNA, 15 bp, Homo sapiens
ttaaaaactgtgagt

SEQ ID NO: 498339 - DNA, 15 bp, Homo sapiens
tttaaaaactgtgag

SEQ ID NO: 498340 - DNA, 15 bp, Homo sapiens
ttttaaaaactgtga

SEQ ID NO: 498341 - DNA, 15 bp, Homo sapiens
tttttaaaaactgtg

SEQ ID NO: 498342 - DNA, 15 bp, Homo sapiens
atttttaaaaactgt

SEQ ID NO: 498343 - DNA, 15 bp, Homo sapiens
aatttttaaaaactg

SEQ ID NO: 498344 - DNA, 15 bp, Homo sapiens
ggaaatttttaaaaa

SEQ ID NO: 498345 - DNA, 15 bp, Homo sapiens
tggaaatttttaaaa

SEQ ID NO: 498346 - DNA, 15 bp, Homo sapiens
ttggaaatttttaaa

SEQ ID NO: 498347 - DNA, 15 bp, Homo sapiens
tttggaaatttttaa

SEQ ID NO: 498348 - DNA, 15 bp, Homo sapiens
ttttggaaattttta

SEQ ID NO: 498349 - DNA, 15 bp, Homo sapiens
tttttggaaattttt

SEQ ID NO: 498350 - DNA, 15 bp, Homo sapiens
ttttttggaaatttt

SEQ ID NO: 498351 - DNA, 15 bp, Homo sapiens
attttttggaaattt

SEQ ID NO: 498352 - DNA, 15 bp, Homo sapiens
aattttttggaaatt

SEQ ID NO: 498353 - DNA, 15 bp, Homo sapiens
caattttttggaaat

SEQ ID NO: 498354 - DNA, 15 bp, Homo sapiens
gcaattttttggaaa

SEQ ID NO: 498355 - DNA, 15 bp, Homo sapiens
tgcaattttttggaa

SEQ ID NO: 498356 - DNA, 15 bp, Homo sapiens
ctgcaattttttgga

SEQ ID NO: 498357 - DNA, 15 bp, Homo sapiens
tctgcaattttttgg

SEQ ID NO: 498358 - DNA, 15 bp, Homo sapiens
ttctgcaattttttg

SEQ ID NO: 498359 - DNA, 15 bp, Homo sapiens
tttctgcaatttttt

SEQ ID NO: 498360 - DNA, 15 bp, Homo sapiens
ctttctgcaattttt

SEQ ID NO: 498361 - DNA, 15 bp, Homo sapiens
tctttctgcaatttt

SEQ ID NO: 498362 - DNA, 15 bp, Homo sapiens
ttctttctgcaattt

SEQ ID NO: 498363 - DNA, 15 bp, Homo sapiens
cttctttctgcaatt

SEQ ID NO: 498364 - DNA, 15 bp, Homo sapiens
tcttctttctgcaat

SEQ ID NO: 498365 - DNA, 15 bp, Homo sapiens
ctcttctttctgcaa

SEQ ID NO: 498366 - DNA, 15 bp, Homo sapiens
actcttctttctgca

SEQ ID NO: 498367 - DNA, 15 bp, Homo sapiens
gactcttctttctgc

SEQ ID NO: 498368 - DNA, 15 bp, Homo sapiens
tgactcttctttctg

SEQ ID NO: 498369 - DNA, 15 bp, Homo sapiens
atgactcttctttct

SEQ ID NO: 498370 - DNA, 15 bp, Homo sapiens
gatgactcttctttc

SEQ ID NO: 498371 - DNA, 15 bp, Homo sapiens
agatgactcttcttt

SEQ ID NO: 498372 - DNA, 15 bp, Homo sapiens
gagatgactcttctt

SEQ ID NO: 498373 - DNA, 15 bp, Homo sapiens
tgagatgactcttct

SEQ ID NO: 498374 - DNA, 15 bp, Homo sapiens
ttgagatgactcttc

SEQ ID NO: 498375 - DNA, 15 bp, Homo sapiens
attgagatgactctt

SEQ ID NO: 498376 - DNA, 15 bp, Homo sapiens
cattgagatgactct

SEQ ID NO: 498377 - DNA, 15 bp, Homo sapiens
acattgagatgactc

SEQ ID NO: 498378 - DNA, 15 bp, Homo sapiens
tacattgagatgact

SEQ ID NO: 498379 - DNA, 15 bp, Homo sapiens
ctacattgagatgac

SEQ ID NO: 498380 - DNA, 15 bp, Homo sapiens
cctacattgagatga

SEQ ID NO: 498381 - DNA, 15 bp, Homo sapiens
ccctacattgagatg

SEQ ID NO: 498382 - DNA, 15 bp, Homo sapiens
cccctacattgagat

SEQ ID NO: 498383 - DNA, 15 bp, Homo sapiens
acccctacattgaga

SEQ ID NO: 498384 - DNA, 15 bp, Homo sapiens
gacccctacattgag

SEQ ID NO: 498385 - DNA, 15 bp, Homo sapiens
tgacccctacattga

SEQ ID NO: 498386 - DNA, 15 bp, Homo sapiens
ctgacccctacattg

SEQ ID NO: 498387 - DNA, 15 bp, Homo sapiens
gctgacccctacatt

SEQ ID NO: 498388 - DNA, 15 bp, Homo sapiens
agctgacccctacat

SEQ ID NO: 498389 - DNA, 15 bp, Homo sapiens
aagctgacccctaca

SEQ ID NO: 498390 - DNA, 15 bp, Homo sapiens
caagctgacccctac

SEQ ID NO: 498391 - DNA, 15 bp, Homo sapiens
gcaagctgaccccta

SEQ ID NO: 498392 - DNA, 15 bp, Homo sapiens
ggcaagctgacccct

SEQ ID NO: 498393 - DNA, 15 bp, Homo sapiens
aggcaagctgacccc

SEQ ID NO: 498394 - DNA, 15 bp, Homo sapiens
gaggcaagctgaccc

SEQ ID NO: 498395 - DNA, 15 bp, Homo sapiens
agaggcaagctgacc

SEQ ID NO: 498396 - DNA, 15 bp, Homo sapiens
aagaggcaagctgac

SEQ ID NO: 498397 - DNA, 15 bp, Homo sapiens
taagaggcaagctga

SEQ ID NO: 498398 - DNA, 15 bp, Homo sapiens
ctaagaggcaagctg

SEQ ID NO: 498399 - DNA, 15 bp, Homo sapiens
cctaagaggcaagct

SEQ ID NO: 498400 - DNA, 15 bp, Homo sapiens
tcctaagaggcaagc

SEQ ID NO: 498401 - DNA, 15 bp, Homo sapiens
ttcctaagaggcaag

SEQ ID NO: 498402 - DNA, 15 bp, Homo sapiens
gttcctaagaggcaa

SEQ ID NO: 498403 - DNA, 15 bp, Homo sapiens
agttcctaagaggca

SEQ ID NO: 498404 - DNA, 15 bp, Homo sapiens
gagttcctaagaggc

SEQ ID NO: 498405 - DNA, 15 bp, Homo sapiens
agagttcctaagagg

SEQ ID NO: 498406 - DNA, 15 bp, Homo sapiens
cagagttcctaagag

SEQ ID NO: 498407 - DNA, 15 bp, Homo sapiens
ccagagttcctaaga

SEQ ID NO: 498408 - DNA, 15 bp, Homo sapiens
accagagttcctaag

SEQ ID NO: 498409 - DNA, 15 bp, Homo sapiens
caccagagttcctaa

SEQ ID NO: 498410 - DNA, 15 bp, Homo sapiens
acaccagagttccta

SEQ ID NO: 498411 - DNA, 15 bp, Homo sapiens
cacaccagagttcct

SEQ ID NO: 498412 - DNA, 15 bp, Homo sapiens
acacaccagagttcc

SEQ ID NO: 498413 - DNA, 15 bp, Homo sapiens
tacacaccagagttc

SEQ ID NO: 498414 - DNA, 15 bp, Homo sapiens
atacacaccagagtt

SEQ ID NO: 498415 - DNA, 15 bp, Homo sapiens
catacacaccagagt

SEQ ID NO: 498416 - DNA, 15 bp, Homo sapiens
acatacacaccagag

SEQ ID NO: 498417 - DNA, 15 bp, Homo sapiens
cacatacacaccaga

SEQ ID NO: 498418 - DNA, 15 bp, Homo sapiens
acacatacacaccag

SEQ ID NO: 498419 - DNA, 15 bp, Homo sapiens
cacacatacacacca

SEQ ID NO: 498420 - DNA, 15 bp, Homo sapiens
gcacacatacacacc

SEQ ID NO: 498421 - DNA, 15 bp, Homo sapiens
ggcacacatacacac

SEQ ID NO: 498422 - DNA, 15 bp, Homo sapiens
aggcacacatacaca

SEQ ID NO: 498423 - DNA, 15 bp, Homo sapiens
taggcacacatacac

SEQ ID NO: 498424 - DNA, 15 bp, Homo sapiens
ttaggcacacataca

SEQ ID NO: 498425 - DNA, 15 bp, Homo sapiens
cttaggcacacatac

SEQ ID NO: 498426 - DNA, 15 bp, Homo sapiens
ccttaggcacacata

SEQ ID NO: 498427 - DNA, 15 bp, Homo sapiens
cccttaggcacacat

SEQ ID NO: 498428 - DNA, 15 bp, Homo sapiens
acccttaggcacaca

SEQ ID NO: 498429 - DNA, 15 bp, Homo sapiens
tacccttaggcacac

SEQ ID NO: 498430 - DNA, 15 bp, Homo sapiens
atacccttaggcaca

SEQ ID NO: 498431 - DNA, 15 bp, Homo sapiens
tatacccttaggcac

SEQ ID NO: 498432 - DNA, 15 bp, Homo sapiens
gtatacccttaggca

SEQ ID NO: 498433 - DNA, 15 bp, Homo sapiens
cgtatacccttaggc

SEQ ID NO: 498434 - DNA, 15 bp, Homo sapiens
acgtatacccttagg

SEQ ID NO: 498435 - DNA, 15 bp, Homo sapiens
cacgtatacccttag

SEQ ID NO: 498436 - DNA, 15 bp, Homo sapiens
gcacgtataccctta

SEQ ID NO: 498437 - DNA, 15 bp, Homo sapiens
ggcacgtataccctt

SEQ ID NO: 498438 - DNA, 15 bp, Homo sapiens
gggcacgtataccct

SEQ ID NO: 498439 - DNA, 15 bp, Homo sapiens
agggcacgtataccc

SEQ ID NO: 498440 - DNA, 15 bp, Homo sapiens
cagggcacgtatacc

SEQ ID NO: 498441 - DNA, 15 bp, Homo sapiens
acagggcacgtatac

SEQ ID NO: 498442 - DNA, 15 bp, Homo sapiens
cacagggcacgtata

SEQ ID NO: 498443 - DNA, 15 bp, Homo sapiens
acacagggcacgtat

SEQ ID NO: 498444 - DNA, 15 bp, Homo sapiens
tacacagggcacgta

SEQ ID NO: 498445 - DNA, 15 bp, Homo sapiens
atacacagggcacgt

SEQ ID NO: 498446 - DNA, 15 bp, Homo sapiens
catacacagggcacg

SEQ ID NO: 498447 - DNA, 15 bp, Homo sapiens
ccatacacagggcac

SEQ ID NO: 498448 - DNA, 15 bp, Homo sapiens
cccatacacagggca

SEQ ID NO: 498449 - DNA, 15 bp, Homo sapiens
acccatacacagggc

SEQ ID NO: 498450 - DNA, 15 bp, Homo sapiens
tacccatacacaggg

SEQ ID NO: 498451 - DNA, 15 bp, Homo sapiens
gtacccatacacagg

SEQ ID NO: 498452 - DNA, 15 bp, Homo sapiens
cgtacccatacacag

SEQ ID NO: 498453 - DNA, 15 bp, Homo sapiens
tcgtacccatacaca

SEQ ID NO: 498454 - DNA, 15 bp, Homo sapiens
ctcgtacccatacac

SEQ ID NO: 498455 - DNA, 15 bp, Homo sapiens
actcgtacccataca

SEQ ID NO: 498456 - DNA, 15 bp, Homo sapiens
cactcgtacccatac

SEQ ID NO: 498457 - DNA, 15 bp, Homo sapiens
acactcgtacccata

SEQ ID NO: 498458 - DNA, 15 bp, Homo sapiens
gacactcgtacccat

SEQ ID NO: 498459 - DNA, 15 bp, Homo sapiens
agacactcgtaccca

SEQ ID NO: 498460 - DNA, 15 bp, Homo sapiens
cagacactcgtaccc

SEQ ID NO: 498461 - DNA, 15 bp, Homo sapiens
gcagacactcgtacc

SEQ ID NO: 498462 - DNA, 15 bp, Homo sapiens
cgcagacactcgtac

SEQ ID NO: 498463 - DNA, 15 bp, Homo sapiens
acgcagacactcgta

SEQ ID NO: 498464 - DNA, 15 bp, Homo sapiens
tacgcagacactcgt

SEQ ID NO: 498465 - DNA, 15 bp, Homo sapiens
atacgcagacactcg

SEQ ID NO: 498466 - DNA, 15 bp, Homo sapiens
tatacgcagacactc

SEQ ID NO: 498467 - DNA, 15 bp, Homo sapiens
atatacgcagacact

SEQ ID NO: 498468 - DNA, 15 bp, Homo sapiens
gatatacgcagacac

SEQ ID NO: 498469 - DNA, 15 bp, Homo sapiens
agatatacgcagaca

SEQ ID NO: 498470 - DNA, 15 bp, Homo sapiens
cagatatacgcagac

SEQ ID NO: 498471 - DNA, 15 bp, Homo sapiens
acagatatacgcaga

SEQ ID NO: 498472 - DNA, 15 bp, Homo sapiens
tacagatatacgcag

SEQ ID NO: 498473 - DNA, 15 bp, Homo sapiens
atacagatatacgca

SEQ ID NO: 498474 - DNA, 15 bp, Homo sapiens
catacagatatacgc

SEQ ID NO: 498475 - DNA, 15 bp, Homo sapiens
gcatacagatatacg

SEQ ID NO: 498476 - DNA, 15 bp, Homo sapiens
agcatacagatatac

SEQ ID NO: 498477 - DNA, 15 bp, Homo sapiens
aagcatacagatata

SEQ ID NO: 498478 - DNA, 15 bp, Homo sapiens
taagcatacagatat

SEQ ID NO: 498479 - DNA, 15 bp, Homo sapiens
ataagcatacagata

SEQ ID NO: 498480 - DNA, 15 bp, Homo sapiens
aataagcatacagat

SEQ ID NO: 498481 - DNA, 15 bp, Homo sapiens
aaataagcatacaga

SEQ ID NO: 498482 - DNA, 15 bp, Homo sapiens
caaataagcatacag

SEQ ID NO: 498483 - DNA, 15 bp, Homo sapiens
ccaaataagcataca

SEQ ID NO: 498484 - DNA, 15 bp, Homo sapiens
gccaaataagcatac

SEQ ID NO: 498485 - DNA, 15 bp, Homo sapiens
agccaaataagcata

SEQ ID NO: 498486 - DNA, 15 bp, Homo sapiens
gagccaaataagcat

SEQ ID NO: 498487 - DNA, 15 bp, Homo sapiens
agagccaaataagca

SEQ ID NO: 498488 - DNA, 15 bp, Homo sapiens
tagagccaaataagc

SEQ ID NO: 498489 - DNA, 15 bp, Homo sapiens
atagagccaaataag

SEQ ID NO: 498490 - DNA, 15 bp, Homo sapiens
catagagccaaataa

SEQ ID NO: 498491 - DNA, 15 bp, Homo sapiens
gcatagagccaaata

SEQ ID NO: 498492 - DNA, 15 bp, Homo sapiens
ggcatagagccaaat

SEQ ID NO: 498493 - DNA, 15 bp, Homo sapiens
aggcatagagccaaa

SEQ ID NO: 498494 - DNA, 15 bp, Homo sapiens
caggcatagagccaa

SEQ ID NO: 498495 - DNA, 15 bp, Homo sapiens
acaggcatagagcca

SEQ ID NO: 498496 - DNA, 15 bp, Homo sapiens
cacaggcatagagcc

SEQ ID NO: 498497 - DNA, 15 bp, Homo sapiens
ccacaggcatagagc

SEQ ID NO: 498498 - DNA, 15 bp, Homo sapiens
cccacaggcatagag

SEQ ID NO: 498499 - DNA, 15 bp, Homo sapiens
acccacaggcataga

SEQ ID NO: 498500 - DNA, 15 bp, Homo sapiens
cacccacaggcatag

SEQ ID NO: 498501 - DNA, 15 bp, Homo sapiens
gcacccacaggcata

SEQ ID NO: 498502 - DNA, 15 bp, Homo sapiens
tgcacccacaggcat

SEQ ID NO: 498503 - DNA, 15 bp, Homo sapiens
gtgcacccacaggca

SEQ ID NO: 498504 - DNA, 15 bp, Homo sapiens
agtgcacccacaggc

SEQ ID NO: 498505 - DNA, 15 bp, Homo sapiens
aagtgcacccacagg

SEQ ID NO: 498506 - DNA, 15 bp, Homo sapiens
taagtgcacccacag

SEQ ID NO: 498507 - DNA, 15 bp, Homo sapiens
gtaagtgcacccaca

SEQ ID NO: 498508 - DNA, 15 bp, Homo sapiens
agtaagtgcacccac

SEQ ID NO: 498509 - DNA, 15 bp, Homo sapiens
gagtaagtgcaccca

SEQ ID NO: 498510 - DNA, 15 bp, Homo sapiens
agagtaagtgcaccc

SEQ ID NO: 498511 - DNA, 15 bp, Homo sapiens
cagagtaagtgcacc

SEQ ID NO: 498512 - DNA, 15 bp, Homo sapiens
acagagtaagtgcac

SEQ ID NO: 498513 - DNA, 15 bp, Homo sapiens
cacagagtaagtgca

SEQ ID NO: 498514 - DNA, 15 bp, Homo sapiens
acacagagtaagtgc

SEQ ID NO: 498515 - DNA, 15 bp, Homo sapiens
cacacagagtaagtg

SEQ ID NO: 498516 - DNA, 15 bp, Homo sapiens
acacacagagtaagt

SEQ ID NO: 498517 - DNA, 15 bp, Homo sapiens
aacacacagagtaag

SEQ ID NO: 498518 - DNA, 15 bp, Homo sapiens
aaacacacagagtaa

SEQ ID NO: 498519 - DNA, 15 bp, Homo sapiens
taaacacacagagta

SEQ ID NO: 498520 - DNA, 15 bp, Homo sapiens
ctaaacacacagagt

SEQ ID NO: 498521 - DNA, 15 bp, Homo sapiens
tctaaacacacagag

SEQ ID NO: 498522 - DNA, 15 bp, Homo sapiens
atctaaacacacaga

SEQ ID NO: 498523 - DNA, 15 bp, Homo sapiens
gatctaaacacacag

SEQ ID NO: 498524 - DNA, 15 bp, Homo sapiens
tgatctaaacacaca

SEQ ID NO: 498525 - DNA, 15 bp, Homo sapiens
ctgatctaaacacac

SEQ ID NO: 498526 - DNA, 15 bp, Homo sapiens
actgatctaaacaca

SEQ ID NO: 498527 - DNA, 15 bp, Homo sapiens
gactgatctaaacac

SEQ ID NO: 498528 - DNA, 15 bp, Homo sapiens
tgactgatctaaaca

SEQ ID NO: 498529 - DNA, 15 bp, Homo sapiens
ctgactgatctaaac

SEQ ID NO: 498530 - DNA, 15 bp, Homo sapiens
actgactgatctaaa

SEQ ID NO: 498531 - DNA, 15 bp, Homo sapiens
aactgactgatctaa

SEQ ID NO: 498532 - DNA, 15 bp, Homo sapiens
aaactgactgatcta

SEQ ID NO: 498533 - DNA, 15 bp, Homo sapiens
gaaactgactgatct

SEQ ID NO: 498534 - DNA, 15 bp, Homo sapiens
tgaaactgactgatc

SEQ ID NO: 498535 - DNA, 15 bp, Homo sapiens
atgaaactgactgat

SEQ ID NO: 498536 - DNA, 15 bp, Homo sapiens
gatgaaactgactga

SEQ ID NO: 498537 - DNA, 15 bp, Homo sapiens
agatgaaactgactg

SEQ ID NO: 498538 - DNA, 15 bp, Homo sapiens
gagatgaaactgact

SEQ ID NO: 498539 - DNA, 15 bp, Homo sapiens
agagatgaaactgac

SEQ ID NO: 498540 - DNA, 15 bp, Homo sapiens
gagagatgaaactga

SEQ ID NO: 498541 - DNA, 15 bp, Homo sapiens
agagagatgaaactg

SEQ ID NO: 498542 - DNA, 15 bp, Homo sapiens
tagagagatgaaact

SEQ ID NO: 498543 - DNA, 15 bp, Homo sapiens
ctagagagatgaaac

SEQ ID NO: 498544 - DNA, 15 bp, Homo sapiens
cctagagagatgaaa

SEQ ID NO: 498545 - DNA, 15 bp, Homo sapiens
ccctagagagatgaa

SEQ ID NO: 498546 - DNA, 15 bp, Homo sapiens
cccctagagagatga

SEQ ID NO: 498547 - DNA, 15 bp, Homo sapiens
ccccctagagagatg

SEQ ID NO: 498548 - DNA, 15 bp, Homo sapiens
accccctagagagat

SEQ ID NO: 498549 - DNA, 15 bp, Homo sapiens
gaccccctagagaga

SEQ ID NO: 498550 - DNA, 15 bp, Homo sapiens
agaccccctagagag

SEQ ID NO: 498551 - DNA, 15 bp, Homo sapiens
cagaccccctagaga

SEQ ID NO: 498552 - DNA, 15 bp, Homo sapiens
acagaccccctagag

SEQ ID NO: 498553 - DNA, 15 bp, Homo sapiens
gacagaccccctaga

SEQ ID NO: 498554 - DNA, 15 bp, Homo sapiens
agacagaccccctag

SEQ ID NO: 498555 - DNA, 15 bp, Homo sapiens
aagacagacccccta

SEQ ID NO: 498556 - DNA, 15 bp, Homo sapiens
gaagacagaccccct

SEQ ID NO: 498557 - DNA, 15 bp, Homo sapiens
agaagacagaccccc

SEQ ID NO: 498558 - DNA, 15 bp, Homo sapiens
cagaagacagacccc

SEQ ID NO: 498559 - DNA, 15 bp, Homo sapiens
ccagaagacagaccc

SEQ ID NO: 498560 - DNA, 15 bp, Homo sapiens
cccagaagacagacc

SEQ ID NO: 498561 - DNA, 15 bp, Homo sapiens
gcccagaagacagac

SEQ ID NO: 498562 - DNA, 15 bp, Homo sapiens
tgcccagaagacaga

SEQ ID NO: 498563 - DNA, 15 bp, Homo sapiens
atgcccagaagacag

SEQ ID NO: 498564 - DNA, 15 bp, Homo sapiens
aatgcccagaagaca

SEQ ID NO: 498565 - DNA, 15 bp, Homo sapiens
caatgcccagaagac

SEQ ID NO: 498566 - DNA, 15 bp, Homo sapiens
tcaatgcccagaaga

SEQ ID NO: 498567 - DNA, 15 bp, Homo sapiens
atcaatgcccagaag

SEQ ID NO: 498568 - DNA, 15 bp, Homo sapiens
catcaatgcccagaa

SEQ ID NO: 498569 - DNA, 15 bp, Homo sapiens
ccatcaatgcccaga

SEQ ID NO: 498570 - DNA, 15 bp, Homo sapiens
gccatcaatgcccag

SEQ ID NO: 498571 - DNA, 15 bp, Homo sapiens
tgccatcaatgccca

SEQ ID NO: 498572 - DNA, 15 bp, Homo sapiens
ttgccatcaatgccc

SEQ ID NO: 498573 - DNA, 15 bp, Homo sapiens
tttgccatcaatgcc

SEQ ID NO: 498574 - DNA, 15 bp, Homo sapiens
atttgccatcaatgc

SEQ ID NO: 498575 - DNA, 15 bp, Homo sapiens
gatttgccatcaatg

SEQ ID NO: 498576 - DNA, 15 bp, Homo sapiens
tgatttgccatcaat

SEQ ID NO: 498577 - DNA, 15 bp, Homo sapiens
atgatttgccatcaa

SEQ ID NO: 498578 - DNA, 15 bp, Homo sapiens
aatgatttgccatca

SEQ ID NO: 498579 - DNA, 15 bp, Homo sapiens
taatgatttgccatc

SEQ ID NO: 498580 - DNA, 15 bp, Homo sapiens
ttaatgatttgccat

SEQ ID NO: 498581 - DNA, 15 bp, Homo sapiens
attaatgatttgcca

SEQ ID NO: 498582 - DNA, 15 bp, Homo sapiens
cattaatgatttgcc

SEQ ID NO: 498583 - DNA, 15 bp, Homo sapiens
acattaatgatttgc

SEQ ID NO: 498584 - DNA, 15 bp, Homo sapiens
tacattaatgatttg

SEQ ID NO: 498585 - DNA, 15 bp, Homo sapiens
atacattaatgattt

SEQ ID NO: 498586 - DNA, 15 bp, Homo sapiens
aatacattaatgatt

SEQ ID NO: 498587 - DNA, 15 bp, Homo sapiens
aaatacattaatgat

SEQ ID NO: 498588 - DNA, 15 bp, Homo sapiens
caaatacattaatga

SEQ ID NO: 498589 - DNA, 15 bp, Homo sapiens
acaaatacattaatg

SEQ ID NO: 498590 - DNA, 15 bp, Homo sapiens
aacaaatacattaat

SEQ ID NO: 498591 - DNA, 15 bp, Homo sapiens
gaacaaatacattaa

SEQ ID NO: 498592 - DNA, 15 bp, Homo sapiens
agaacaaatacatta

SEQ ID NO: 498593 - DNA, 15 bp, Homo sapiens
aagaacaaatacatt

SEQ ID NO: 498594 - DNA, 15 bp, Homo sapiens
aaagaacaaatacat

SEQ ID NO: 498595 - DNA, 15 bp, Homo sapiens
gaaagaacaaataca

SEQ ID NO: 498596 - DNA, 15 bp, Homo sapiens
agaaagaacaaatac

SEQ ID NO: 498597 - DNA, 15 bp, Homo sapiens
aagaaagaacaaata

SEQ ID NO: 498598 - DNA, 15 bp, Homo sapiens
aaagaaagaacaaat

SEQ ID NO: 498599 - DNA, 15 bp, Homo sapiens
taaagaaagaacaaa

SEQ ID NO: 498600 - DNA, 15 bp, Homo sapiens
ctaaagaaagaacaa

SEQ ID NO: 498601 - DNA, 15 bp, Homo sapiens
cctaaagaaagaaca

SEQ ID NO: 498602 - DNA, 15 bp, Homo sapiens
acctaaagaaagaac

SEQ ID NO: 498603 - DNA, 15 bp, Homo sapiens
aacctaaagaaagaa

SEQ ID NO: 498604 - DNA, 15 bp, Homo sapiens
aaacctaaagaaaga

SEQ ID NO: 498605 - DNA, 15 bp, Homo sapiens
aaaacctaaagaaag

SEQ ID NO: 498606 - DNA, 15 bp, Homo sapiens
taaaacctaaagaaa

SEQ ID NO: 498607 - DNA, 15 bp, Homo sapiens
ataaaacctaaagaa

SEQ ID NO: 498608 - DNA, 15 bp, Homo sapiens
aataaaacctaaaga

SEQ ID NO: 498609 - DNA, 15 bp, Homo sapiens
caataaaacctaaag

SEQ ID NO: 498610 - DNA, 15 bp, Homo sapiens
tcaataaaacctaaa

SEQ ID NO: 498611 - DNA, 15 bp, Homo sapiens
gtcaataaaacctaa

SEQ ID NO: 498612 - DNA, 15 bp, Homo sapiens
agtcaataaaaccta

SEQ ID NO: 498613 - DNA, 15 bp, Homo sapiens
cagtcaataaaacct

SEQ ID NO: 498614 - DNA, 15 bp, Homo sapiens
tcagtcaataaaacc

SEQ ID NO: 498615 - DNA, 15 bp, Homo sapiens
atcagtcaataaaac

SEQ ID NO: 498616 - DNA, 15 bp, Homo sapiens
tatcagtcaataaaa

SEQ ID NO: 498617 - DNA, 15 bp, Homo sapiens
gtatcagtcaataaa

SEQ ID NO: 498618 - DNA, 15 bp, Homo sapiens
ggtatcagtcaataa

SEQ ID NO: 498619 - DNA, 15 bp, Homo sapiens
tggtatcagtcaata

SEQ ID NO: 498620 - DNA, 15 bp, Homo sapiens
ttggtatcagtcaat

SEQ ID NO: 498621 - DNA, 15 bp, Homo sapiens
attggtatcagtcaa

SEQ ID NO: 498622 - DNA, 15 bp, Homo sapiens
tattggtatcagtca

SEQ ID NO: 498623 - DNA, 15 bp, Homo sapiens
gtattggtatcagtc

SEQ ID NO: 498624 - DNA, 15 bp, Homo sapiens
agtattggtatcagt

SEQ ID NO: 498625 - DNA, 15 bp, Homo sapiens
gagtattggtatcag

SEQ ID NO: 498626 - DNA, 15 bp, Homo sapiens
tgagtattggtatca

SEQ ID NO: 498627 - DNA, 15 bp, Homo sapiens
ttgagtattggtatc

SEQ ID NO: 498628 - DNA, 15 bp, Homo sapiens
attgagtattggtat

SEQ ID NO: 498629 - DNA, 15 bp, Homo sapiens
aattgagtattggta

SEQ ID NO: 498630 - DNA, 15 bp, Homo sapiens
aaattgagtattggt

SEQ ID NO: 498631 - DNA, 15 bp, Homo sapiens
caaattgagtattgg

SEQ ID NO: 498632 - DNA, 15 bp, Homo sapiens
acaaattgagtattg

SEQ ID NO: 498633 - DNA, 15 bp, Homo sapiens
tacaaattgagtatt

SEQ ID NO: 498634 - DNA, 15 bp, Homo sapiens
ctacaaattgagtat

SEQ ID NO: 498635 - DNA, 15 bp, Homo sapiens
tctacaaattgagta

SEQ ID NO: 498636 - DNA, 15 bp, Homo sapiens
ttctacaaattgagt

SEQ ID NO: 498637 - DNA, 15 bp, Homo sapiens
gttctacaaattgag

SEQ ID NO: 498638 - DNA, 15 bp, Homo sapiens
tgttctacaaattga

SEQ ID NO: 498639 - DNA, 15 bp, Homo sapiens
ttgttctacaaattg

SEQ ID NO: 498640 - DNA, 15 bp, Homo sapiens
tttgttctacaaatt

SEQ ID NO: 498641 - DNA, 15 bp, Homo sapiens
gtttgttctacaaat

SEQ ID NO: 498642 - DNA, 15 bp, Homo sapiens
ggtttgttctacaaa

SEQ ID NO: 498643 - DNA, 15 bp, Homo sapiens
tggtttgttctacaa

SEQ ID NO: 498644 - DNA, 15 bp, Homo sapiens
atggtttgttctaca

SEQ ID NO: 498645 - DNA, 15 bp, Homo sapiens
tatggtttgttctac

SEQ ID NO: 498646 - DNA, 15 bp, Homo sapiens
ctatggtttgttcta

SEQ ID NO: 498647 - DNA, 15 bp, Homo sapiens
gctatggtttgttct

SEQ ID NO: 498648 - DNA, 15 bp, Homo sapiens
agctatggtttgttc

SEQ ID NO: 498649 - DNA, 15 bp, Homo sapiens
tagctatggtttgtt

SEQ ID NO: 498650 - DNA, 15 bp, Homo sapiens
atagctatggtttgt

SEQ ID NO: 498651 - DNA, 15 bp, Homo sapiens
tatagctatggtttg

SEQ ID NO: 498652 - DNA, 15 bp, Homo sapiens
ttatagctatggttt

SEQ ID NO: 498653 - DNA, 15 bp, Homo sapiens
attatagctatggtt

SEQ ID NO: 498654 - DNA, 15 bp, Homo sapiens
cattatagctatggt

SEQ ID NO: 498655 - DNA, 15 bp, Homo sapiens
tcattatagctatgg

SEQ ID NO: 498656 - DNA, 15 bp, Homo sapiens
ttcattatagctatg

SEQ ID NO: 498657 - DNA, 15 bp, Homo sapiens
cttcattatagctat

SEQ ID NO: 498658 - DNA, 15 bp, Homo sapiens
tcttcattatagcta

SEQ ID NO: 498659 - DNA, 15 bp, Homo sapiens
ttcttcattatagct

SEQ ID NO: 498660 - DNA, 15 bp, Homo sapiens
gttcttcattatagc

SEQ ID NO: 498661 - DNA, 15 bp, Homo sapiens
agttcttcattatag

SEQ ID NO: 498662 - DNA, 15 bp, Homo sapiens
aagttcttcattata

SEQ ID NO: 498663 - DNA, 15 bp, Homo sapiens
caagttcttcattat

SEQ ID NO: 498664 - DNA, 15 bp, Homo sapiens
gcaagttcttcatta

SEQ ID NO: 498665 - DNA, 15 bp, Homo sapiens
agcaagttcttcatt

SEQ ID NO: 498666 - DNA, 15 bp, Homo sapiens
tagcaagttcttcat

SEQ ID NO: 498667 - DNA, 15 bp, Homo sapiens
ctagcaagttcttca

SEQ ID NO: 498668 - DNA, 15 bp, Homo sapiens
tctagcaagttcttc

SEQ ID NO: 498669 - DNA, 15 bp, Homo sapiens
atctagcaagttctt

SEQ ID NO: 498670 - DNA, 15 bp, Homo sapiens
tatctagcaagttct

SEQ ID NO: 498671 - DNA, 15 bp, Homo sapiens
ttatctagcaagttc

SEQ ID NO: 498672 - DNA, 15 bp, Homo sapiens
attatctagcaagtt

SEQ ID NO: 498673 - DNA, 15 bp, Homo sapiens
gattatctagcaagt

SEQ ID NO: 498674 - DNA, 15 bp, Homo sapiens
tgattatctagcaag

SEQ ID NO: 498675 - DNA, 15 bp, Homo sapiens
atgattatctagcaa

SEQ ID NO: 498676 - DNA, 15 bp, Homo sapiens
tatgattatctagca

SEQ ID NO: 498677 - DNA, 15 bp, Homo sapiens
gtatgattatctagc

SEQ ID NO: 498678 - DNA, 15 bp, Homo sapiens
agtatgattatctag

SEQ ID NO: 498679 - DNA, 15 bp, Homo sapiens
cagtatgattatcta

SEQ ID NO: 498680 - DNA, 15 bp, Homo sapiens
tcagtatgattatct

SEQ ID NO: 498681 - DNA, 15 bp, Homo sapiens
ttcagtatgattatc

SEQ ID NO: 498682 - DNA, 15 bp, Homo sapiens
cttcagtatgattat

SEQ ID NO: 498683 - DNA, 15 bp, Homo sapiens
ccttcagtatgatta

SEQ ID NO: 498684 - DNA, 15 bp, Homo sapiens
gccttcagtatgatt

SEQ ID NO: 498685 - DNA, 15 bp, Homo sapiens
tgccttcagtatgat

SEQ ID NO: 498686 - DNA, 15 bp, Homo sapiens
ctgccttcagtatga

SEQ ID NO: 498687 - DNA, 15 bp, Homo sapiens
gctgccttcagtatg

SEQ ID NO: 498688 - DNA, 15 bp, Homo sapiens
agctgccttcagtat

SEQ ID NO: 498689 - DNA, 15 bp, Homo sapiens
gagctgccttcagta

SEQ ID NO: 498690 - DNA, 15 bp, Homo sapiens
agagctgccttcagt

SEQ ID NO: 498691 - DNA, 15 bp, Homo sapiens
cagagctgccttcag

SEQ ID NO: 498692 - DNA, 15 bp, Homo sapiens
tcagagctgccttca

SEQ ID NO: 498693 - DNA, 15 bp, Homo sapiens
ttcagagctgccttc

SEQ ID NO: 498694 - DNA, 15 bp, Homo sapiens
gttcagagctgcctt

SEQ ID NO: 498695 - DNA, 15 bp, Homo sapiens
tgttcagagctgcct

SEQ ID NO: 498696 - DNA, 15 bp, Homo sapiens
atgttcagagctgcc

SEQ ID NO: 498697 - DNA, 15 bp, Homo sapiens
gatgttcagagctgc

SEQ ID NO: 498698 - DNA, 15 bp, Homo sapiens
agatgttcagagctg

SEQ ID NO: 498699 - DNA, 15 bp, Homo sapiens
tagatgttcagagct

SEQ ID NO: 498700 - DNA, 15 bp, Homo sapiens
ctagatgttcagagc

SEQ ID NO: 498701 - DNA, 15 bp, Homo sapiens
cctagatgttcagag

SEQ ID NO: 498702 - DNA, 15 bp, Homo sapiens
ccctagatgttcaga

SEQ ID NO: 498703 - DNA, 15 bp, Homo sapiens
gccctagatgttcag

SEQ ID NO: 498704 - DNA, 15 bp, Homo sapiens
tgccctagatgttca

SEQ ID NO: 498705 - DNA, 15 bp, Homo sapiens
ttgccctagatgttc

SEQ ID NO: 498706 - DNA, 15 bp, Homo sapiens
cttgccctagatgtt

SEQ ID NO: 498707 - DNA, 15 bp, Homo sapiens
gcttgccctagatgt

SEQ ID NO: 498708 - DNA, 15 bp, Homo sapiens
agcttgccctagatg

SEQ ID NO: 498709 - DNA, 15 bp, Homo sapiens
tagcttgccctagat

SEQ ID NO: 498710 - DNA, 15 bp, Homo sapiens
ctagcttgccctaga

SEQ ID NO: 498711 - DNA, 15 bp, Homo sapiens
gctagcttgccctag

SEQ ID NO: 498712 - DNA, 15 bp, Homo sapiens
tgctagcttgcccta

SEQ ID NO: 498713 - DNA, 15 bp, Homo sapiens
atgctagcttgccct

SEQ ID NO: 498714 - DNA, 15 bp, Homo sapiens
aatgctagcttgccc

SEQ ID NO: 498715 - DNA, 15 bp, Homo sapiens
caatgctagcttgcc

SEQ ID NO: 498716 - DNA, 15 bp, Homo sapiens
tcaatgctagcttgc

SEQ ID NO: 498717 - DNA, 15 bp, Homo sapiens
ttcaatgctagcttg

SEQ ID NO: 498718 - DNA, 15 bp, Homo sapiens
tttcaatgctagctt

SEQ ID NO: 498719 - DNA, 15 bp, Homo sapiens
gtttcaatgctagct

SEQ ID NO: 498720 - DNA, 15 bp, Homo sapiens
tgtttcaatgctagc

SEQ ID NO: 498721 - DNA, 15 bp, Homo sapiens
ttgtttcaatgctag

SEQ ID NO: 498722 - DNA, 15 bp, Homo sapiens
attgtttcaatgcta

SEQ ID NO: 498723 - DNA, 15 bp, Homo sapiens
cattgtttcaatgct

SEQ ID NO: 498724 - DNA, 15 bp, Homo sapiens
tcattgtttcaatgc

SEQ ID NO: 498725 - DNA, 15 bp, Homo sapiens
atcattgtttcaatg

SEQ ID NO: 498726 - DNA, 15 bp, Homo sapiens
catcattgtttcaat

SEQ ID NO: 498727 - DNA, 15 bp, Homo sapiens
acatcattgtttcaa

SEQ ID NO: 498728 - DNA, 15 bp, Homo sapiens
aacatcattgtttca

SEQ ID NO: 498729 - DNA, 15 bp, Homo sapiens
taacatcattgtttc

SEQ ID NO: 498730 - DNA, 15 bp, Homo sapiens
ttaacatcattgttt

SEQ ID NO: 498731 - DNA, 15 bp, Homo sapiens
tttaacatcattgtt

SEQ ID NO: 498732 - DNA, 15 bp, Homo sapiens
atttaacatcattgt

SEQ ID NO: 498733 - DNA, 15 bp, Homo sapiens
gatttaacatcattg

SEQ ID NO: 498734 - DNA, 15 bp, Homo sapiens
agatttaacatcatt

SEQ ID NO: 498735 - DNA, 15 bp, Homo sapiens
cagatttaacatcat

SEQ ID NO: 498736 - DNA, 15 bp, Homo sapiens
ccagatttaacatca

SEQ ID NO: 498737 - DNA, 15 bp, Homo sapiens
accagatttaacatc

SEQ ID NO: 498738 - DNA, 15 bp, Homo sapiens
gaccagatttaacat

SEQ ID NO: 498739 - DNA, 15 bp, Homo sapiens
tgaccagatttaaca

SEQ ID NO: 498740 - DNA, 15 bp, Homo sapiens
ctgaccagatttaac

SEQ ID NO: 498741 - DNA, 15 bp, Homo sapiens
cctgaccagatttaa

SEQ ID NO: 498742 - DNA, 15 bp, Homo sapiens
acctgaccagattta

SEQ ID NO: 498743 - DNA, 15 bp, Homo sapiens
tacctgaccagattt

SEQ ID NO: 498744 - DNA, 15 bp, Homo sapiens
ttacctgaccagatt

SEQ ID NO: 498745 - DNA, 15 bp, Homo sapiens
cttacctgaccagat

SEQ ID NO: 498746 - DNA, 15 bp, Homo sapiens
gcttacctgaccaga

SEQ ID NO: 498747 - DNA, 15 bp, Homo sapiens
tgcttacctgaccag

SEQ ID NO: 498748 - DNA, 15 bp, Homo sapiens
atgcttacctgacca

SEQ ID NO: 498749 - DNA, 15 bp, Homo sapiens
aatgcttacctgacc

SEQ ID NO: 498750 - DNA, 15 bp, Homo sapiens
gaatgcttacctgac

SEQ ID NO: 498751 - DNA, 15 bp, Homo sapiens
agaatgcttacctga

SEQ ID NO: 498752 - DNA, 15 bp, Homo sapiens
tagaatgcttacctg

SEQ ID NO: 498753 - DNA, 15 bp, Homo sapiens
gtagaatgcttacct

SEQ ID NO: 498754 - DNA, 15 bp, Homo sapiens
agtagaatgcttacc

SEQ ID NO: 498755 - DNA, 15 bp, Homo sapiens
cagtagaatgcttac

SEQ ID NO: 498756 - DNA, 15 bp, Homo sapiens
tcagtagaatgctta

SEQ ID NO: 498757 - DNA, 15 bp, Homo sapiens
ttcagtagaatgctt

SEQ ID NO: 498758 - DNA, 15 bp, Homo sapiens
tttcagtagaatgct

SEQ ID NO: 498759 - DNA, 15 bp, Homo sapiens
atttcagtagaatgc

SEQ ID NO: 498760 - DNA, 15 bp, Homo sapiens
catttcagtagaatg

SEQ ID NO: 498761 - DNA, 15 bp, Homo sapiens
acatttcagtagaat

SEQ ID NO: 498762 - DNA, 15 bp, Homo sapiens
tacatttcagtagaa

SEQ ID NO: 498763 - DNA, 15 bp, Homo sapiens
ctacatttcagtaga

SEQ ID NO: 498764 - DNA, 15 bp, Homo sapiens
gctacatttcagtag

SEQ ID NO: 498765 - DNA, 15 bp, Homo sapiens
tgctacatttcagta

SEQ ID NO: 498766 - DNA, 15 bp, Homo sapiens
ctgctacatttcagt

SEQ ID NO: 498767 - DNA, 15 bp, Homo sapiens
tctgctacatttcag

SEQ ID NO: 498768 - DNA, 15 bp, Homo sapiens
ttctgctacatttca

SEQ ID NO: 498769 - DNA, 15 bp, Homo sapiens
tttctgctacatttc

SEQ ID NO: 498770 - DNA, 15 bp, Homo sapiens
gtttctgctacattt

SEQ ID NO: 498771 - DNA, 15 bp, Homo sapiens
tgtttctgctacatt

SEQ ID NO: 498772 - DNA, 15 bp, Homo sapiens
atgtttctgctacat

SEQ ID NO: 498773 - DNA, 15 bp, Homo sapiens
aatgtttctgctaca

SEQ ID NO: 498774 - DNA, 15 bp, Homo sapiens
aaatgtttctgctac

SEQ ID NO: 498775 - DNA, 15 bp, Homo sapiens
aaaatgtttctgcta

SEQ ID NO: 498776 - DNA, 15 bp, Homo sapiens
taaaatgtttctgct

SEQ ID NO: 498777 - DNA, 15 bp, Homo sapiens
ttaaaatgtttctgc

SEQ ID NO: 498778 - DNA, 15 bp, Homo sapiens
cttaaaatgtttctg

SEQ ID NO: 498779 - DNA, 15 bp, Homo sapiens
tcttaaaatgtttct

SEQ ID NO: 498780 - DNA, 15 bp, Homo sapiens
ctcttaaaatgtttc

SEQ ID NO: 498781 - DNA, 15 bp, Homo sapiens
tctcttaaaatgttt

SEQ ID NO: 498782 - DNA, 15 bp, Homo sapiens
atctcttaaaatgtt

SEQ ID NO: 498783 - DNA, 15 bp, Homo sapiens
tatctcttaaaatgt

SEQ ID NO: 498784 - DNA, 15 bp, Homo sapiens
ttatctcttaaaatg

SEQ ID NO: 498785 - DNA, 15 bp, Homo sapiens
cttatctcttaaaat

SEQ ID NO: 498786 - DNA, 15 bp, Homo sapiens
tcttatctcttaaaa

SEQ ID NO: 498787 - DNA, 15 bp, Homo sapiens
ttcttatctcttaaa

SEQ ID NO: 498788 - DNA, 15 bp, Homo sapiens
tttcttatctcttaa

SEQ ID NO: 498789 - DNA, 15 bp, Homo sapiens
ttttcttatctctta

SEQ ID NO: 498790 - DNA, 15 bp, Homo sapiens
tttttcttatctctt

SEQ ID NO: 498791 - DNA, 15 bp, Homo sapiens
gtttttcttatctct

SEQ ID NO: 498792 - DNA, 15 bp, Homo sapiens
ggtttttcttatctc

SEQ ID NO: 498793 - DNA, 15 bp, Homo sapiens
aggtttttcttatct

SEQ ID NO: 498794 - DNA, 15 bp, Homo sapiens
gaggtttttcttatc

SEQ ID NO: 498795 - DNA, 15 bp, Homo sapiens
agaggtttttcttat

SEQ ID NO: 498796 - DNA, 15 bp, Homo sapiens
aagaggtttttctta

SEQ ID NO: 498797 - DNA, 15 bp, Homo sapiens
taagaggtttttctt

SEQ ID NO: 498798 - DNA, 15 bp, Homo sapiens
gtaagaggtttttct

SEQ ID NO: 498799 - DNA, 15 bp, Homo sapiens
tgtaagaggtttttc

SEQ ID NO: 498800 - DNA, 15 bp, Homo sapiens
gtgtaagaggttttt

SEQ ID NO: 498801 - DNA, 15 bp, Homo sapiens
tgtgtaagaggtttt

SEQ ID NO: 498802 - DNA, 15 bp, Homo sapiens
gtgtgtaagaggttt

SEQ ID NO: 498803 - DNA, 15 bp, Homo sapiens
agtgtgtaagaggtt

SEQ ID NO: 498804 - DNA, 15 bp, Homo sapiens
cagtgtgtaagaggt

SEQ ID NO: 498805 - DNA, 15 bp, Homo sapiens
tcagtgtgtaagagg

SEQ ID NO: 498806 - DNA, 15 bp, Homo sapiens
atcagtgtgtaagag

SEQ ID NO: 498807 - DNA, 15 bp, Homo sapiens
tatcagtgtgtaaga

SEQ ID NO: 498808 - DNA, 15 bp, Homo sapiens
gtatcagtgtgtaag

SEQ ID NO: 498809 - DNA, 15 bp, Homo sapiens
agtatcagtgtgtaa

SEQ ID NO: 498810 - DNA, 15 bp, Homo sapiens
cagtatcagtgtgta

SEQ ID NO: 498811 - DNA, 15 bp, Homo sapiens
ccagtatcagtgtgt

SEQ ID NO: 498812 - DNA, 15 bp, Homo sapiens
accagtatcagtgtg

SEQ ID NO: 498813 - DNA, 15 bp, Homo sapiens
taccagtatcagtgt

SEQ ID NO: 498814 - DNA, 15 bp, Homo sapiens
ctaccagtatcagtg

SEQ ID NO: 498815 - DNA, 15 bp, Homo sapiens
actaccagtatcagt

SEQ ID NO: 498816 - DNA, 15 bp, Homo sapiens
tactaccagtatcag

SEQ ID NO: 498817 - DNA, 15 bp, Homo sapiens
ttactaccagtatca

SEQ ID NO: 498818 - DNA, 15 bp, Homo sapiens
attactaccagtatc

SEQ ID NO: 498819 - DNA, 15 bp, Homo sapiens
aattactaccagtat

SEQ ID NO: 498820 - DNA, 15 bp, Homo sapiens
caattactaccagta

SEQ ID NO: 498821 - DNA, 15 bp, Homo sapiens
tcaattactaccagt

SEQ ID NO: 498822 - DNA, 15 bp, Homo sapiens
atcaattactaccag

SEQ ID NO: 498823 - DNA, 15 bp, Homo sapiens
tatcaattactacca

SEQ ID NO: 498824 - DNA, 15 bp, Homo sapiens
ttatcaattactacc

SEQ ID NO: 498825 - DNA, 15 bp, Homo sapiens
tttatcaattactac

SEQ ID NO: 498826 - DNA, 15 bp, Homo sapiens
ttttatcaattacta

SEQ ID NO: 498827 - DNA, 15 bp, Homo sapiens
attttatcaattact

SEQ ID NO: 498828 - DNA, 15 bp, Homo sapiens
tattttatcaattac

SEQ ID NO: 498829 - DNA, 15 bp, Homo sapiens
ttattttatcaatta

SEQ ID NO: 498830 - DNA, 15 bp, Homo sapiens
gttattttatcaatt

SEQ ID NO: 498831 - DNA, 15 bp, Homo sapiens
agttattttatcaat

SEQ ID NO: 498832 - DNA, 15 bp, Homo sapiens
cagttattttatcaa

SEQ ID NO: 498833 - DNA, 15 bp, Homo sapiens
ccagttattttatca

SEQ ID NO: 498834 - DNA, 15 bp, Homo sapiens
gccagttattttatc

SEQ ID NO: 498835 - DNA, 15 bp, Homo sapiens
ggccagttattttat

SEQ ID NO: 498836 - DNA, 15 bp, Homo sapiens
tggccagttatttta

SEQ ID NO: 498837 - DNA, 15 bp, Homo sapiens
atggccagttatttt

SEQ ID NO: 498838 - DNA, 15 bp, Homo sapiens
aatggccagttattt

SEQ ID NO: 498839 - DNA, 15 bp, Homo sapiens
gaatggccagttatt

SEQ ID NO: 498840 - DNA, 15 bp, Homo sapiens
agaatggccagttat

SEQ ID NO: 498841 - DNA, 15 bp, Homo sapiens
aagaatggccagtta

SEQ ID NO: 498842 - DNA, 15 bp, Homo sapiens
aaagaatggccagtt

SEQ ID NO: 498843 - DNA, 15 bp, Homo sapiens
taaagaatggccagt

SEQ ID NO: 498844 - DNA, 15 bp, Homo sapiens
gtaaagaatggccag

SEQ ID NO: 498845 - DNA, 15 bp, Homo sapiens
agtaaagaatggcca

SEQ ID NO: 498846 - DNA, 15 bp, Homo sapiens
cagtaaagaatggcc

SEQ ID NO: 498847 - DNA, 15 bp, Homo sapiens
gcagtaaagaatggc

SEQ ID NO: 498848 - DNA, 15 bp, Homo sapiens
tgcagtaaagaatgg

SEQ ID NO: 498849 - DNA, 15 bp, Homo sapiens
gtgcagtaaagaatg

SEQ ID NO: 498850 - DNA, 15 bp, Homo sapiens
tgtgcagtaaagaat

SEQ ID NO: 498851 - DNA, 15 bp, Homo sapiens
gtgtgcagtaaagaa

SEQ ID NO: 498852 - DNA, 15 bp, Homo sapiens
tgtgtgcagtaaaga

SEQ ID NO: 498853 - DNA, 15 bp, Homo sapiens
ttgtgtgcagtaaag

SEQ ID NO: 498854 - DNA, 15 bp, Homo sapiens
tttgtgtgcagtaaa

SEQ ID NO: 498855 - DNA, 15 bp, Homo sapiens
gtttgtgtgcagtaa

SEQ ID NO: 498856 - DNA, 15 bp, Homo sapiens
agtttgtgtgcagta

SEQ ID NO: 498857 - DNA, 15 bp, Homo sapiens
tagtttgtgtgcagt

SEQ ID NO: 498858 - DNA, 15 bp, Homo sapiens
ctagtttgtgtgcag

SEQ ID NO: 498859 - DNA, 15 bp, Homo sapiens
cctagtttgtgtgca

SEQ ID NO: 498860 - DNA, 15 bp, Homo sapiens
ccctagtttgtgtgc

SEQ ID NO: 498861 - DNA, 15 bp, Homo sapiens
accctagtttgtgtg

SEQ ID NO: 498862 - DNA, 15 bp, Homo sapiens
caccctagtttgtgt

SEQ ID NO: 498863 - DNA, 15 bp, Homo sapiens
acaccctagtttgtg

SEQ ID NO: 498864 - DNA, 15 bp, Homo sapiens
cacaccctagtttgt

SEQ ID NO: 498865 - DNA, 15 bp, Homo sapiens
tcacaccctagtttg

SEQ ID NO: 498866 - DNA, 15 bp, Homo sapiens
gtcacaccctagttt

SEQ ID NO: 498867 - DNA, 15 bp, Homo sapiens
tgtcacaccctagtt

SEQ ID NO: 498868 - DNA, 15 bp, Homo sapiens
ctgtcacaccctagt

SEQ ID NO: 498869 - DNA, 15 bp, Homo sapiens
actgtcacaccctag

SEQ ID NO: 498870 - DNA, 15 bp, Homo sapiens
tactgtcacacccta

SEQ ID NO: 498871 - DNA, 15 bp, Homo sapiens
ttactgtcacaccct

SEQ ID NO: 498872 - DNA, 15 bp, Homo sapiens
cttactgtcacaccc

SEQ ID NO: 498873 - DNA, 15 bp, Homo sapiens
ccttactgtcacacc

SEQ ID NO: 498874 - DNA, 15 bp, Homo sapiens
accttactgtcacac

SEQ ID NO: 498875 - DNA, 15 bp, Homo sapiens
taccttactgtcaca

SEQ ID NO: 498876 - DNA, 15 bp, Homo sapiens
ctaccttactgtcac

SEQ ID NO: 498877 - DNA, 15 bp, Homo sapiens
gctaccttactgtca

SEQ ID NO: 498878 - DNA, 15 bp, Homo sapiens
ggctaccttactgtc

SEQ ID NO: 498879 - DNA, 15 bp, Homo sapiens
tggctaccttactgt

SEQ ID NO: 498880 - DNA, 15 bp, Homo sapiens
ctggctaccttactg

SEQ ID NO: 498881 - DNA, 15 bp, Homo sapiens
tctggctaccttact

SEQ ID NO: 498882 - DNA, 15 bp, Homo sapiens
ttctggctaccttac

SEQ ID NO: 498883 - DNA, 15 bp, Homo sapiens
cttctggctacctta

SEQ ID NO: 498884 - DNA, 15 bp, Homo sapiens
acttctggctacctt

SEQ ID NO: 498885 - DNA, 15 bp, Homo sapiens
aacttctggctacct

SEQ ID NO: 498886 - DNA, 15 bp, Homo sapiens
caacttctggctacc

SEQ ID NO: 498887 - DNA, 15 bp, Homo sapiens
acaacttctggctac

SEQ ID NO: 498888 - DNA, 15 bp, Homo sapiens
cacaacttctggcta

SEQ ID NO: 498889 - DNA, 15 bp, Homo sapiens
acacaacttctggct

SEQ ID NO: 498890 - DNA, 15 bp, Homo sapiens
tacacaacttctggc

SEQ ID NO: 498891 - DNA, 15 bp, Homo sapiens
gtacacaacttctgg

SEQ ID NO: 498892 - DNA, 15 bp, Homo sapiens
cgtacacaacttctg

SEQ ID NO: 498893 - DNA, 15 bp, Homo sapiens
acgtacacaacttct

SEQ ID NO: 498894 - DNA, 15 bp, Homo sapiens
aacgtacacaacttc

SEQ ID NO: 498895 - DNA, 15 bp, Homo sapiens
gaacgtacacaactt

SEQ ID NO: 498896 - DNA, 15 bp, Homo sapiens
agaacgtacacaact

SEQ ID NO: 498897 - DNA, 15 bp, Homo sapiens
aagaacgtacacaac

SEQ ID NO: 498898 - DNA, 15 bp, Homo sapiens
aaagaacgtacacaa

SEQ ID NO: 498899 - DNA, 15 bp, Homo sapiens
aaaagaacgtacaca

SEQ ID NO: 498900 - DNA, 15 bp, Homo sapiens
gaaaagaacgtacac

SEQ ID NO: 498901 - DNA, 15 bp, Homo sapiens
agaaaagaacgtaca

SEQ ID NO: 498902 - DNA, 15 bp, Homo sapiens
tagaaaagaacgtac

SEQ ID NO: 498903 - DNA, 15 bp, Homo sapiens
ttagaaaagaacgta

SEQ ID NO: 498904 - DNA, 15 bp, Homo sapiens
tttagaaaagaacgt

SEQ ID NO: 498905 - DNA, 15 bp, Homo sapiens
atttagaaaagaacg

SEQ ID NO: 498906 - DNA, 15 bp, Homo sapiens
tatttagaaaagaac

SEQ ID NO: 498907 - DNA, 15 bp, Homo sapiens
ttatttagaaaagaa

SEQ ID NO: 498908 - DNA, 15 bp, Homo sapiens
tttatttagaaaaga

SEQ ID NO: 498909 - DNA, 15 bp, Homo sapiens
atttatttagaaaag

SEQ ID NO: 498910 - DNA, 15 bp, Homo sapiens
tatttatttagaaaa

SEQ ID NO: 498911 - DNA, 15 bp, Homo sapiens
atatttatttagaaa

SEQ ID NO: 498912 - DNA, 15 bp, Homo sapiens
gatatttatttagaa

SEQ ID NO: 498913 - DNA, 15 bp, Homo sapiens
agatatttatttaga

SEQ ID NO: 498914 - DNA, 15 bp, Homo sapiens
aagatatttatttag

SEQ ID NO: 498915 - DNA, 15 bp, Homo sapiens
taagatatttattta

SEQ ID NO: 498916 - DNA, 15 bp, Homo sapiens
ataagatatttattt

SEQ ID NO: 498917 - DNA, 15 bp, Homo sapiens
aataagatatttatt

SEQ ID NO: 498918 - DNA, 15 bp, Homo sapiens
caataagatatttat

SEQ ID NO: 498919 - DNA, 15 bp, Homo sapiens
acaataagatattta

SEQ ID NO: 498920 - DNA, 15 bp, Homo sapiens
aacaataagatattt

SEQ ID NO: 498921 - DNA, 15 bp, Homo sapiens
aaacaataagatatt

SEQ ID NO: 498922 - DNA, 15 bp, Homo sapiens
aaaacaataagatat

SEQ ID NO: 498923 - DNA, 15 bp, Homo sapiens
gaaaacaataagata

SEQ ID NO: 498924 - DNA, 15 bp, Homo sapiens
tgaaaacaataagat

SEQ ID NO: 498925 - DNA, 15 bp, Homo sapiens
ttgaaaacaataaga

SEQ ID NO: 498926 - DNA, 15 bp, Homo sapiens
tttgaaaacaataag

SEQ ID NO: 498927 - DNA, 15 bp, Homo sapiens
gtttgaaaacaataa

SEQ ID NO: 498928 - DNA, 15 bp, Homo sapiens
agtttgaaaacaata

SEQ ID NO: 498929 - DNA, 15 bp, Homo sapiens
aagtttgaaaacaat

SEQ ID NO: 498930 - DNA, 15 bp, Homo sapiens
taagtttgaaaacaa

SEQ ID NO: 498931 - DNA, 15 bp, Homo sapiens
gtaagtttgaaaaca

SEQ ID NO: 498932 - DNA, 15 bp, Homo sapiens
tgtaagtttgaaaac

SEQ ID NO: 498933 - DNA, 15 bp, Homo sapiens
atgtaagtttgaaaa

SEQ ID NO: 498934 - DNA, 15 bp, Homo sapiens
aatgtaagtttgaaa

SEQ ID NO: 498935 - DNA, 15 bp, Homo sapiens
aaatgtaagtttgaa

SEQ ID NO: 498936 - DNA, 15 bp, Homo sapiens
taaatgtaagtttga

SEQ ID NO: 498937 - DNA, 15 bp, Homo sapiens
ttaaatgtaagtttg

SEQ ID NO: 498938 - DNA, 15 bp, Homo sapiens
attaaatgtaagttt

SEQ ID NO: 498939 - DNA, 15 bp, Homo sapiens
aattaaatgtaagtt

SEQ ID NO: 498940 - DNA, 15 bp, Homo sapiens
gaattaaatgtaagt

SEQ ID NO: 498941 - DNA, 15 bp, Homo sapiens
cgaattaaatgtaag

SEQ ID NO: 498942 - DNA, 15 bp, Homo sapiens
acgaattaaatgtaa

SEQ ID NO: 498943 - DNA, 15 bp, Homo sapiens
aacgaattaaatgta

SEQ ID NO: 498944 - DNA, 15 bp, Homo sapiens
aaacgaattaaatgt

SEQ ID NO: 498945 - DNA, 15 bp, Homo sapiens
aaaacgaattaaatg

SEQ ID NO: 498946 - DNA, 15 bp, Homo sapiens
taaaacgaattaaat

SEQ ID NO: 498947 - DNA, 15 bp, Homo sapiens
gtaaaacgaattaaa

SEQ ID NO: 498948 - DNA, 15 bp, Homo sapiens
agtaaaacgaattaa

SEQ ID NO: 498949 - DNA, 15 bp, Homo sapiens
aagtaaaacgaatta

SEQ ID NO: 498950 - DNA, 15 bp, Homo sapiens
caagtaaaacgaatt

SEQ ID NO: 498951 - DNA, 15 bp, Homo sapiens
tcaagtaaaacgaat

SEQ ID NO: 498952 - DNA, 15 bp, Homo sapiens
atcaagtaaaacgaa

SEQ ID NO: 498953 - DNA, 15 bp, Homo sapiens
catcaagtaaaacga

SEQ ID NO: 498954 - DNA, 15 bp, Homo sapiens
tcatcaagtaaaacg

SEQ ID NO: 498955 - DNA, 15 bp, Homo sapiens
gtcatcaagtaaaac

SEQ ID NO: 498956 - DNA, 15 bp, Homo sapiens
agtcatcaagtaaaa

SEQ ID NO: 498957 - DNA, 15 bp, Homo sapiens
tagtcatcaagtaaa

SEQ ID NO: 498958 - DNA, 15 bp, Homo sapiens
ttagtcatcaagtaa

SEQ ID NO: 498959 - DNA, 15 bp, Homo sapiens
tttagtcatcaagta

SEQ ID NO: 498960 - DNA, 15 bp, Homo sapiens
ctttagtcatcaagt

SEQ ID NO: 498961 - DNA, 15 bp, Homo sapiens
actttagtcatcaag

SEQ ID NO: 498962 - DNA, 15 bp, Homo sapiens
tactttagtcatcaa

SEQ ID NO: 498963 - DNA, 15 bp, Homo sapiens
atactttagtcatca

SEQ ID NO: 498964 - DNA, 15 bp, Homo sapiens
aatactttagtcatc

SEQ ID NO: 498965 - DNA, 15 bp, Homo sapiens
aaatactttagtcat

SEQ ID NO: 498966 - DNA, 15 bp, Homo sapiens
taaatactttagtca

SEQ ID NO: 498967 - DNA, 15 bp, Homo sapiens
ctaaatactttagtc

SEQ ID NO: 498968 - DNA, 15 bp, Homo sapiens
tctaaatactttagt

SEQ ID NO: 498969 - DNA, 15 bp, Homo sapiens
ttctaaatactttag

SEQ ID NO: 498970 - DNA, 15 bp, Homo sapiens
attctaaatacttta

SEQ ID NO: 498971 - DNA, 15 bp, Homo sapiens
cattctaaatacttt

SEQ ID NO: 498972 - DNA, 15 bp, Homo sapiens
gcattctaaatactt

SEQ ID NO: 498973 - DNA, 15 bp, Homo sapiens
ggcattctaaatact

SEQ ID NO: 498974 - DNA, 15 bp, Homo sapiens
aggcattctaaatac

SEQ ID NO: 498975 - DNA, 15 bp, Homo sapiens
aaggcattctaaata

SEQ ID NO: 498976 - DNA, 15 bp, Homo sapiens
gaaggcattctaaat

SEQ ID NO: 498977 - DNA, 15 bp, Homo sapiens
agaaggcattctaaa

SEQ ID NO: 498978 - DNA, 15 bp, Homo sapiens
gagaaggcattctaa

SEQ ID NO: 498979 - DNA, 15 bp, Homo sapiens
agagaaggcattcta

SEQ ID NO: 498980 - DNA, 15 bp, Homo sapiens
aagagaaggcattct

SEQ ID NO: 498981 - DNA, 15 bp, Homo sapiens
aaagagaaggcattc

SEQ ID NO: 498982 - DNA, 15 bp, Homo sapiens
aaaagagaaggcatt

SEQ ID NO: 498983 - DNA, 15 bp, Homo sapiens
caaaagagaaggcat

SEQ ID NO: 498984 - DNA, 15 bp, Homo sapiens
acaaaagagaaggca

SEQ ID NO: 498985 - DNA, 15 bp, Homo sapiens
gacaaaagagaaggc

SEQ ID NO: 498986 - DNA, 15 bp, Homo sapiens
agacaaaagagaagg

SEQ ID NO: 498987 - DNA, 15 bp, Homo sapiens
tagacaaaagagaag

SEQ ID NO: 498988 - DNA, 15 bp, Homo sapiens
atagacaaaagagaa

SEQ ID NO: 498989 - DNA, 15 bp, Homo sapiens
tatagacaaaagaga

SEQ ID NO: 498990 - DNA, 15 bp, Homo sapiens
atatagacaaaagag

SEQ ID NO: 498991 - DNA, 15 bp, Homo sapiens
gatatagacaaaaga

SEQ ID NO: 498992 - DNA, 15 bp, Homo sapiens
agatatagacaaaag

SEQ ID NO: 498993 - DNA, 15 bp, Homo sapiens
cagatatagacaaaa

SEQ ID NO: 498994 - DNA, 15 bp, Homo sapiens
tcagatatagacaaa

SEQ ID NO: 498995 - DNA, 15 bp, Homo sapiens
atcagatatagacaa

SEQ ID NO: 498996 - DNA, 15 bp, Homo sapiens
tatcagatatagaca

SEQ ID NO: 498997 - DNA, 15 bp, Homo sapiens
ttatcagatatagac

SEQ ID NO: 498998 - DNA, 15 bp, Homo sapiens
attatcagatataga

SEQ ID NO: 498999 - DNA, 15 bp, Homo sapiens
aaattatcagatata

SEQ ID NO: 499000 - DNA, 15 bp, Homo sapiens
aaaattatcagatat

SEQ ID NO: 499001 - DNA, 15 bp, Homo sapiens
aaaaattatcagata

SEQ ID NO: 499002 - DNA, 15 bp, Homo sapiens
aaaaaattatcagat

SEQ ID NO: 499003 - DNA, 15 bp, Homo sapiens
aaaaaaattatcaga

SEQ ID NO: 499004 - DNA, 15 bp, Homo sapiens
taaaaaaattatcag

SEQ ID NO: 499005 - DNA, 15 bp, Homo sapiens
ataaaaaaattatca

SEQ ID NO: 499006 - DNA, 15 bp, Homo sapiens
aataaaaaaattatc

SEQ ID NO: 499007 - DNA, 15 bp, Homo sapiens
caataaaaaaattat

SEQ ID NO: 499008 - DNA, 15 bp, Homo sapiens
acaataaaaaaatta

SEQ ID NO: 499009 - DNA, 15 bp, Homo sapiens
aacaataaaaaaatt

SEQ ID NO: 499010 - DNA, 15 bp, Homo sapiens
aaacaataaaaaaat

SEQ ID NO: 499011 - DNA, 15 bp, Homo sapiens
gaaacaataaaaaaa

SEQ ID NO: 499012 - DNA, 15 bp, Homo sapiens
agaaacaataaaaaa

SEQ ID NO: 499013 - DNA, 15 bp, Homo sapiens
tagaaacaataaaaa

SEQ ID NO: 499014 - DNA, 15 bp, Homo sapiens
atagaaacaataaaa

SEQ ID NO: 499015 - DNA, 15 bp, Homo sapiens
catagaaacaataaa

SEQ ID NO: 499016 - DNA, 15 bp, Homo sapiens
acatagaaacaataa

SEQ ID NO: 499017 - DNA, 15 bp, Homo sapiens
gacatagaaacaata

SEQ ID NO: 499018 - DNA, 15 bp, Homo sapiens
agacatagaaacaat

SEQ ID NO: 499019 - DNA, 15 bp, Homo sapiens
tagacatagaaacaa

SEQ ID NO: 499020 - DNA, 15 bp, Homo sapiens
atagacatagaaaca

SEQ ID NO: 499021 - DNA, 15 bp, Homo sapiens
tatagacatagaaac

SEQ ID NO: 499022 - DNA, 15 bp, Homo sapiens
atatagacatagaaa

SEQ ID NO: 499023 - DNA, 15 bp, Homo sapiens
tatatagacatagaa

SEQ ID NO: 499024 - DNA, 15 bp, Homo sapiens
ctatatagacataga

SEQ ID NO: 499025 - DNA, 15 bp, Homo sapiens
cctatatagacatag

SEQ ID NO: 499026 - DNA, 15 bp, Homo sapiens
acctatatagacata

SEQ ID NO: 499027 - DNA, 15 bp, Homo sapiens
tacctatatagacat

SEQ ID NO: 499028 - DNA, 15 bp, Homo sapiens
atacctatatagaca

SEQ ID NO: 499029 - DNA, 15 bp, Homo sapiens
catacctatatagac

SEQ ID NO: 499030 - DNA, 15 bp, Homo sapiens
acatacctatataga

SEQ ID NO: 499031 - DNA, 15 bp, Homo sapiens
aacatacctatatag

SEQ ID NO: 499032 - DNA, 15 bp, Homo sapiens
gaacatacctatata

SEQ ID NO: 499033 - DNA, 15 bp, Homo sapiens
cgaacatacctatat

SEQ ID NO: 499034 - DNA, 15 bp, Homo sapiens
acgaacatacctata

SEQ ID NO: 499035 - DNA, 15 bp, Homo sapiens
cacgaacatacctat

SEQ ID NO: 499036 - DNA, 15 bp, Homo sapiens
acacgaacataccta

SEQ ID NO: 499037 - DNA, 15 bp, Homo sapiens
cacacgaacatacct

SEQ ID NO: 499038 - DNA, 15 bp, Homo sapiens
gcacacgaacatacc

SEQ ID NO: 499039 - DNA, 15 bp, Homo sapiens
agcacacgaacatac

SEQ ID NO: 499040 - DNA, 15 bp, Homo sapiens
aagcacacgaacata

SEQ ID NO: 499041 - DNA, 15 bp, Homo sapiens
caagcacacgaacat

SEQ ID NO: 499042 - DNA, 15 bp, Homo sapiens
ccaagcacacgaaca

SEQ ID NO: 499043 - DNA, 15 bp, Homo sapiens
cccaagcacacgaac

SEQ ID NO: 499044 - DNA, 15 bp, Homo sapiens
tcccaagcacacgaa

SEQ ID NO: 499045 - DNA, 15 bp, Homo sapiens
ttcccaagcacacga

SEQ ID NO: 499046 - DNA, 15 bp, Homo sapiens
attcccaagcacacg

SEQ ID NO: 499047 - DNA, 15 bp, Homo sapiens
tattcccaagcacac

SEQ ID NO: 499048 - DNA, 15 bp, Homo sapiens
atattcccaagcaca

SEQ ID NO: 499049 - DNA, 15 bp, Homo sapiens
catattcccaagcac

SEQ ID NO: 499050 - DNA, 15 bp, Homo sapiens
ccatattcccaagca

SEQ ID NO: 499051 - DNA, 15 bp, Homo sapiens
accatattcccaagc

SEQ ID NO: 499052 - DNA, 15 bp, Homo sapiens
gaccatattcccaag

SEQ ID NO: 499053 - DNA, 15 bp, Homo sapiens
ggaccatattcccaa

SEQ ID NO: 499054 - DNA, 15 bp, Homo sapiens
tggaccatattccca

SEQ ID NO: 499055 - DNA, 15 bp, Homo sapiens
atggaccatattccc

SEQ ID NO: 499056 - DNA, 15 bp, Homo sapiens
catggaccatattcc

SEQ ID NO: 499057 - DNA, 15 bp, Homo sapiens
gcatggaccatattc

SEQ ID NO: 499058 - DNA, 15 bp, Homo sapiens
tgcatggaccatatt

SEQ ID NO: 499059 - DNA, 15 bp, Homo sapiens
ttgcatggaccatat

SEQ ID NO: 499060 - DNA, 15 bp, Homo sapiens
attgcatggaccata

SEQ ID NO: 499061 - DNA, 15 bp, Homo sapiens
aattgcatggaccat

SEQ ID NO: 499062 - DNA, 15 bp, Homo sapiens
gaattgcatggacca

SEQ ID NO: 499063 - DNA, 15 bp, Homo sapiens
tgaattgcatggacc

SEQ ID NO: 499064 - DNA, 15 bp, Homo sapiens
ttgaattgcatggac

SEQ ID NO: 499065 - DNA, 15 bp, Homo sapiens
tttgaattgcatgga

SEQ ID NO: 499066 - DNA, 15 bp, Homo sapiens
atttgaattgcatgg

SEQ ID NO: 499067 - DNA, 15 bp, Homo sapiens
tatttgaattgcatg

SEQ ID NO: 499068 - DNA, 15 bp, Homo sapiens
ttatttgaattgcat

SEQ ID NO: 499069 - DNA, 15 bp, Homo sapiens
tttatttgaattgca

SEQ ID NO: 499070 - DNA, 15 bp, Homo sapiens
ttttatttgaattgc

SEQ ID NO: 499071 - DNA, 15 bp, Homo sapiens
tttttatttgaattg

SEQ ID NO: 499072 - DNA, 15 bp, Homo sapiens
gtttttatttgaatt

SEQ ID NO: 499073 - DNA, 15 bp, Homo sapiens
cgtttttatttgaat

SEQ ID NO: 499074 - DNA, 15 bp, Homo sapiens
tcgtttttatttgaa

SEQ ID NO: 499075 - DNA, 15 bp, Homo sapiens
ttcgtttttatttga

SEQ ID NO: 499076 - DNA, 15 bp, Homo sapiens
tttcgtttttatttg

SEQ ID NO: 499077 - DNA, 15 bp, Homo sapiens
gtttcgtttttattt

SEQ ID NO: 499078 - DNA, 15 bp, Homo sapiens
agtttcgtttttatt

SEQ ID NO: 499079 - DNA, 15 bp, Homo sapiens
cagtttcgtttttat

SEQ ID NO: 499080 - DNA, 15 bp, Homo sapiens
acagtttcgttttta

SEQ ID NO: 499081 - DNA, 15 bp, Homo sapiens
cacagtttcgttttt

SEQ ID NO: 499082 - DNA, 15 bp, Homo sapiens
acacagtttcgtttt

SEQ ID NO: 499083 - DNA, 15 bp, Homo sapiens
gacacagtttcgttt

SEQ ID NO: 499084 - DNA, 15 bp, Homo sapiens
tgacacagtttcgtt

SEQ ID NO: 499085 - DNA, 15 bp, Homo sapiens
ttgacacagtttcgt

SEQ ID NO: 499086 - DNA, 15 bp, Homo sapiens
attgacacagtttcg

SEQ ID NO: 499087 - DNA, 15 bp, Homo sapiens
aattgacacagtttc

SEQ ID NO: 499088 - DNA, 15 bp, Homo sapiens
taattgacacagttt

SEQ ID NO: 499089 - DNA, 15 bp, Homo sapiens
ctaattgacacagtt

SEQ ID NO: 499090 - DNA, 15 bp, Homo sapiens
actaattgacacagt

SEQ ID NO: 499091 - DNA, 15 bp, Homo sapiens
aactaattgacacag

SEQ ID NO: 499092 - DNA, 15 bp, Homo sapiens
caactaattgacaca

SEQ ID NO: 499093 - DNA, 15 bp, Homo sapiens
tcaactaattgacac

SEQ ID NO: 499094 - DNA, 15 bp, Homo sapiens
ttcaactaattgaca

SEQ ID NO: 499095 - DNA, 15 bp, Homo sapiens
cttcaactaattgac

SEQ ID NO: 499096 - DNA, 15 bp, Homo sapiens
acttcaactaattga

SEQ ID NO: 499097 - DNA, 15 bp, Homo sapiens
tacttcaactaattg

SEQ ID NO: 499098 - DNA, 15 bp, Homo sapiens
ttacttcaactaatt

SEQ ID NO: 499099 - DNA, 15 bp, Homo sapiens
attacttcaactaat

SEQ ID NO: 499100 - DNA, 15 bp, Homo sapiens
cattacttcaactaa

SEQ ID NO: 499101 - DNA, 15 bp, Homo sapiens
tcattacttcaacta

SEQ ID NO: 499102 - DNA, 15 bp, Homo sapiens
atcattacttcaact

SEQ ID NO: 499103 - DNA, 15 bp, Homo sapiens
catcattacttcaac

SEQ ID NO: 499104 - DNA, 15 bp, Homo sapiens
ccatcattacttcaa

SEQ ID NO: 499105 - DNA, 15 bp, Homo sapiens
gccatcattacttca

SEQ ID NO: 499106 - DNA, 15 bp, Homo sapiens
tgccatcattacttc

SEQ ID NO: 499107 - DNA, 15 bp, Homo sapiens
ttgccatcattactt

SEQ ID NO: 499108 - DNA, 15 bp, Homo sapiens
cttgccatcattact

SEQ ID NO: 499109 - DNA, 15 bp, Homo sapiens
ccttgccatcattac

SEQ ID NO: 499110 - DNA, 15 bp, Homo sapiens
tccttgccatcatta

SEQ ID NO: 499111 - DNA, 15 bp, Homo sapiens
ctccttgccatcatt

SEQ ID NO: 499112 - DNA, 15 bp, Homo sapiens
tctccttgccatcat

SEQ ID NO: 499113 - DNA, 15 bp, Homo sapiens
ctctccttgccatca

SEQ ID NO: 499114 - DNA, 15 bp, Homo sapiens
tctctccttgccatc

SEQ ID NO: 499115 - DNA, 15 bp, Homo sapiens
atctctccttgccat

SEQ ID NO: 499116 - DNA, 15 bp, Homo sapiens
catctctccttgcca

SEQ ID NO: 499117 - DNA, 15 bp, Homo sapiens
tcatctctccttgcc

SEQ ID NO: 499118 - DNA, 15 bp, Homo sapiens
gtcatctctccttgc

SEQ ID NO: 499119 - DNA, 15 bp, Homo sapiens
ggtcatctctccttg

SEQ ID NO: 499120 - DNA, 15 bp, Homo sapiens
aggtcatctctcctt

SEQ ID NO: 499121 - DNA, 15 bp, Homo sapiens
gaggtcatctctcct

SEQ ID NO: 499122 - DNA, 15 bp, Homo sapiens
agaggtcatctctcc

SEQ ID NO: 499123 - DNA, 15 bp, Homo sapiens
gagaggtcatctctc

SEQ ID NO: 499124 - DNA, 15 bp, Homo sapiens
tgagaggtcatctct

SEQ ID NO: 499125 - DNA, 15 bp, Homo sapiens
atgagaggtcatctc

SEQ ID NO: 499126 - DNA, 15 bp, Homo sapiens
aatgagaggtcatct

SEQ ID NO: 499127 - DNA, 15 bp, Homo sapiens
aaatgagaggtcatc

SEQ ID NO: 499128 - DNA, 15 bp, Homo sapiens
aaaatgagaggtcat

SEQ ID NO: 499129 - DNA, 15 bp, Homo sapiens
caaaatgagaggtca

SEQ ID NO: 499130 - DNA, 15 bp, Homo sapiens
gcaaaatgagaggtc

SEQ ID NO: 499131 - DNA, 15 bp, Homo sapiens
ggcaaaatgagaggt

SEQ ID NO: 499132 - DNA, 15 bp, Homo sapiens
tggcaaaatgagagg

SEQ ID NO: 499133 - DNA, 15 bp, Homo sapiens
ttggcaaaatgagag

SEQ ID NO: 499134 - DNA, 15 bp, Homo sapiens
cttggcaaaatgaga

SEQ ID NO: 499135 - DNA, 15 bp, Homo sapiens
tcttggcaaaatgag

SEQ ID NO: 499136 - DNA, 15 bp, Homo sapiens
ctcttggcaaaatga

SEQ ID NO: 499137 - DNA, 15 bp, Homo sapiens
tctcttggcaaaatg

SEQ ID NO: 499138 - DNA, 15 bp, Homo sapiens
atctcttggcaaaat

SEQ ID NO: 499139 - DNA, 15 bp, Homo sapiens
catctcttggcaaaa

SEQ ID NO: 499140 - DNA, 15 bp, Homo sapiens
tcatctcttggcaaa

SEQ ID NO: 499141 - DNA, 15 bp, Homo sapiens
ttcatctcttggcaa

SEQ ID NO: 499142 - DNA, 15 bp, Homo sapiens
tttcatctcttggca

SEQ ID NO: 499143 - DNA, 15 bp, Homo sapiens
atttcatctcttggc

SEQ ID NO: 499144 - DNA, 15 bp, Homo sapiens
aatttcatctcttgg

SEQ ID NO: 499145 - DNA, 15 bp, Homo sapiens
aaatttcatctcttg

SEQ ID NO: 499146 - DNA, 15 bp, Homo sapiens
taaatttcatctctt

SEQ ID NO: 499147 - DNA, 15 bp, Homo sapiens
ctaaatttcatctct

SEQ ID NO: 499148 - DNA, 15 bp, Homo sapiens
cctaaatttcatctc

SEQ ID NO: 499149 - DNA, 15 bp, Homo sapiens
acctaaatttcatct

SEQ ID NO: 499150 - DNA, 15 bp, Homo sapiens
cacctaaatttcatc

SEQ ID NO: 499151 - DNA, 15 bp, Homo sapiens
tcacctaaatttcat

SEQ ID NO: 499152 - DNA, 15 bp, Homo sapiens
ctcacctaaatttca

SEQ ID NO: 499153 - DNA, 15 bp, Homo sapiens
actcacctaaatttc

SEQ ID NO: 499154 - DNA, 15 bp, Homo sapiens
aactcacctaaattt

SEQ ID NO: 499155 - DNA, 15 bp, Homo sapiens
gaactcacctaaatt

SEQ ID NO: 499156 - DNA, 15 bp, Homo sapiens
agaactcacctaaat

SEQ ID NO: 499157 - DNA, 15 bp, Homo sapiens
gagaactcacctaaa

SEQ ID NO: 499158 - DNA, 15 bp, Homo sapiens
tgagaactcacctaa

SEQ ID NO: 499159 - DNA, 15 bp, Homo sapiens
ttgagaactcaccta

SEQ ID NO: 499160 - DNA, 15 bp, Homo sapiens
tttgagaactcacct

SEQ ID NO: 499161 - DNA, 15 bp, Homo sapiens
ttttgagaactcacc

SEQ ID NO: 499162 - DNA, 15 bp, Homo sapiens
cttttgagaactcac

SEQ ID NO: 499163 - DNA, 15 bp, Homo sapiens
tcttttgagaactca

SEQ ID NO: 499164 - DNA, 15 bp, Homo sapiens
ctcttttgagaactc

SEQ ID NO: 499165 - DNA, 15 bp, Homo sapiens
gctcttttgagaact

SEQ ID NO: 499166 - DNA, 15 bp, Homo sapiens
tgctcttttgagaac

SEQ ID NO: 499167 - DNA, 15 bp, Homo sapiens
ttgctcttttgagaa

SEQ ID NO: 499168 - DNA, 15 bp, Homo sapiens
attgctcttttgaga

SEQ ID NO: 499169 - DNA, 15 bp, Homo sapiens
cattgctcttttgag

SEQ ID NO: 499170 - DNA, 15 bp, Homo sapiens
acattgctcttttga

SEQ ID NO: 499171 - DNA, 15 bp, Homo sapiens
tacattgctcttttg

SEQ ID NO: 499172 - DNA, 15 bp, Homo sapiens
ctacattgctctttt

SEQ ID NO: 499173 - DNA, 15 bp, Homo sapiens
cctacattgctcttt

SEQ ID NO: 499174 - DNA, 15 bp, Homo sapiens
ccctacattgctctt

SEQ ID NO: 499175 - DNA, 15 bp, Homo sapiens
accctacattgctct

SEQ ID NO: 499176 - DNA, 15 bp, Homo sapiens
gaccctacattgctc

SEQ ID NO: 499177 - DNA, 15 bp, Homo sapiens
agaccctacattgct

SEQ ID NO: 499178 - DNA, 15 bp, Homo sapiens
aagaccctacattgc

SEQ ID NO: 499179 - DNA, 15 bp, Homo sapiens
caagaccctacattg

SEQ ID NO: 499180 - DNA, 15 bp, Homo sapiens
acaagaccctacatt

SEQ ID NO: 499181 - DNA, 15 bp, Homo sapiens
tacaagaccctacat

SEQ ID NO: 499182 - DNA, 15 bp, Homo sapiens
ttacaagaccctaca

SEQ ID NO: 499183 - DNA, 15 bp, Homo sapiens
tttacaagaccctac

SEQ ID NO: 499184 - DNA, 15 bp, Homo sapiens
atttacaagacccta

SEQ ID NO: 499185 - DNA, 15 bp, Homo sapiens
gatttacaagaccct

SEQ ID NO: 499186 - DNA, 15 bp, Homo sapiens
agatttacaagaccc

SEQ ID NO: 499187 - DNA, 15 bp, Homo sapiens
aagatttacaagacc

SEQ ID NO: 499188 - DNA, 15 bp, Homo sapiens
taagatttacaagac

SEQ ID NO: 499189 - DNA, 15 bp, Homo sapiens
ttaagatttacaaga

SEQ ID NO: 499190 - DNA, 15 bp, Homo sapiens
attaagatttacaag

SEQ ID NO: 499191 - DNA, 15 bp, Homo sapiens
tattaagatttacaa

SEQ ID NO: 499192 - DNA, 15 bp, Homo sapiens
atattaagatttaca

SEQ ID NO: 499193 - DNA, 15 bp, Homo sapiens
catattaagatttac

SEQ ID NO: 499194 - DNA, 15 bp, Homo sapiens
acatattaagattta

SEQ ID NO: 499195 - DNA, 15 bp, Homo sapiens
gacatattaagattt

SEQ ID NO: 499196 - DNA, 15 bp, Homo sapiens
ggacatattaagatt

SEQ ID NO: 499197 - DNA, 15 bp, Homo sapiens
tggacatattaagat

SEQ ID NO: 499198 - DNA, 15 bp, Homo sapiens
ttggacatattaaga

SEQ ID NO: 499199 - DNA, 15 bp, Homo sapiens
attggacatattaag

SEQ ID NO: 499200 - DNA, 15 bp, Homo sapiens
cattggacatattaa

SEQ ID NO: 499201 - DNA, 15 bp, Homo sapiens
tcattggacatatta

SEQ ID NO: 499202 - DNA, 15 bp, Homo sapiens
ttcattggacatatt

SEQ ID NO: 499203 - DNA, 15 bp, Homo sapiens
cttcattggacatat

SEQ ID NO: 499204 - DNA, 15 bp, Homo sapiens
acttcattggacata

SEQ ID NO: 499205 - DNA, 15 bp, Homo sapiens
tacttcattggacat

SEQ ID NO: 499206 - DNA, 15 bp, Homo sapiens
gtacttcattggaca

SEQ ID NO: 499207 - DNA, 15 bp, Homo sapiens
tgtacttcattggac

SEQ ID NO: 499208 - DNA, 15 bp, Homo sapiens
ctgtacttcattgga

SEQ ID NO: 499209 - DNA, 15 bp, Homo sapiens
tctgtacttcattgg

SEQ ID NO: 499210 - DNA, 15 bp, Homo sapiens
ttctgtacttcattg

SEQ ID NO: 499211 - DNA, 15 bp, Homo sapiens
tttctgtacttcatt

SEQ ID NO: 499212 - DNA, 15 bp, Homo sapiens
ttttctgtacttcat

SEQ ID NO: 499213 - DNA, 15 bp, Homo sapiens
tttttctgtacttca

SEQ ID NO: 499214 - DNA, 15 bp, Homo sapiens
ctttttctgtacttc

SEQ ID NO: 499215 - DNA, 15 bp, Homo sapiens
tctttttctgtactt

SEQ ID NO: 499216 - DNA, 15 bp, Homo sapiens
ctctttttctgtact

SEQ ID NO: 499217 - DNA, 15 bp, Homo sapiens
actctttttctgtac

SEQ ID NO: 499218 - DNA, 15 bp, Homo sapiens
tactctttttctgta

SEQ ID NO: 499219 - DNA, 15 bp, Homo sapiens
ctactctttttctgt

SEQ ID NO: 499220 - DNA, 15 bp, Homo sapiens
tctactctttttctg

SEQ ID NO: 499221 - DNA, 15 bp, Homo sapiens
atctactctttttct

SEQ ID NO: 499222 - DNA, 15 bp, Homo sapiens
tatctactctttttc

SEQ ID NO: 499223 - DNA, 15 bp, Homo sapiens
atatctactcttttt

SEQ ID NO: 499224 - DNA, 15 bp, Homo sapiens
catatctactctttt

SEQ ID NO: 499225 - DNA, 15 bp, Homo sapiens
gcatatctactcttt

SEQ ID NO: 499226 - DNA, 15 bp, Homo sapiens
cgcatatctactctt

SEQ ID NO: 499227 - DNA, 15 bp, Homo sapiens
ccgcatatctactct

SEQ ID NO: 499228 - DNA, 15 bp, Homo sapiens
accgcatatctactc

SEQ ID NO: 499229 - DNA, 15 bp, Homo sapiens
aaccgcatatctact

SEQ ID NO: 499230 - DNA, 15 bp, Homo sapiens
taaccgcatatctac

SEQ ID NO: 499231 - DNA, 15 bp, Homo sapiens
ataaccgcatatcta

SEQ ID NO: 499232 - DNA, 15 bp, Homo sapiens
aataaccgcatatct

SEQ ID NO: 499233 - DNA, 15 bp, Homo sapiens
caataaccgcatatc

SEQ ID NO: 499234 - DNA, 15 bp, Homo sapiens
ccaataaccgcatat

SEQ ID NO: 499235 - DNA, 15 bp, Homo sapiens
accaataaccgcata

SEQ ID NO: 499236 - DNA, 15 bp, Homo sapiens
taccaataaccgcat

SEQ ID NO: 499237 - DNA, 15 bp, Homo sapiens
ctaccaataaccgca

SEQ ID NO: 499238 - DNA, 15 bp, Homo sapiens
tctaccaataaccgc

SEQ ID NO: 499239 - DNA, 15 bp, Homo sapiens
ttctaccaataaccg

SEQ ID NO: 499240 - DNA, 15 bp, Homo sapiens
tttctaccaataacc

SEQ ID NO: 499241 - DNA, 15 bp, Homo sapiens
ctttctaccaataac

SEQ ID NO: 499242 - DNA, 15 bp, Homo sapiens
cctttctaccaataa

SEQ ID NO: 499243 - DNA, 15 bp, Homo sapiens
tcctttctaccaata

SEQ ID NO: 499244 - DNA, 15 bp, Homo sapiens
ctcctttctaccaat

SEQ ID NO: 499245 - DNA, 15 bp, Homo sapiens
cctcctttctaccaa

SEQ ID NO: 499246 - DNA, 15 bp, Homo sapiens
tcctcctttctacca

SEQ ID NO: 499247 - DNA, 15 bp, Homo sapiens
gtcctcctttctacc

SEQ ID NO: 499248 - DNA, 15 bp, Homo sapiens
tgtcctcctttctac

SEQ ID NO: 499249 - DNA, 15 bp, Homo sapiens
atgtcctcctttcta

SEQ ID NO: 499250 - DNA, 15 bp, Homo sapiens
catgtcctcctttct

SEQ ID NO: 499251 - DNA, 15 bp, Homo sapiens
tcatgtcctcctttc

SEQ ID NO: 499252 - DNA, 15 bp, Homo sapiens
ttcatgtcctccttt

SEQ ID NO: 499253 - DNA, 15 bp, Homo sapiens
tttcatgtcctcctt

SEQ ID NO: 499254 - DNA, 15 bp, Homo sapiens
ttttcatgtcctcct

SEQ ID NO: 499255 - DNA, 15 bp, Homo sapiens
cttttcatgtcctcc

SEQ ID NO: 499256 - DNA, 15 bp, Homo sapiens
tcttttcatgtcctc

SEQ ID NO: 499257 - DNA, 15 bp, Homo sapiens
ctcttttcatgtcct

SEQ ID NO: 499258 - DNA, 15 bp, Homo sapiens
tctcttttcatgtcc

SEQ ID NO: 499259 - DNA, 15 bp, Homo sapiens
ctctcttttcatgtc

SEQ ID NO: 499260 - DNA, 15 bp, Homo sapiens
gctctcttttcatgt

SEQ ID NO: 499261 - DNA, 15 bp, Homo sapiens
tgctctcttttcatg

SEQ ID NO: 499262 - DNA, 15 bp, Homo sapiens
ttgctctcttttcat

SEQ ID NO: 499263 - DNA, 15 bp, Homo sapiens
attgctctcttttca

SEQ ID NO: 499264 - DNA, 15 bp, Homo sapiens
aattgctctcttttc

SEQ ID NO: 499265 - DNA, 15 bp, Homo sapiens
aaattgctctctttt

SEQ ID NO: 499266 - DNA, 15 bp, Homo sapiens
taaattgctctcttt

SEQ ID NO: 499267 - DNA, 15 bp, Homo sapiens
gtaaattgctctctt

SEQ ID NO: 499268 - DNA, 15 bp, Homo sapiens
tgtaaattgctctct

SEQ ID NO: 499269 - DNA, 15 bp, Homo sapiens
atgtaaattgctctc

SEQ ID NO: 499270 - DNA, 15 bp, Homo sapiens
catgtaaattgctct

SEQ ID NO: 499271 - DNA, 15 bp, Homo sapiens
acatgtaaattgctc

SEQ ID NO: 499272 - DNA, 15 bp, Homo sapiens
aacatgtaaattgct

SEQ ID NO: 499273 - DNA, 15 bp, Homo sapiens
aaacatgtaaattgc

SEQ ID NO: 499274 - DNA, 15 bp, Homo sapiens
caaacatgtaaattg

SEQ ID NO: 499275 - DNA, 15 bp, Homo sapiens
acaaacatgtaaatt

SEQ ID NO: 499276 - DNA, 15 bp, Homo sapiens
aacaaacatgtaaat

SEQ ID NO: 499277 - DNA, 15 bp, Homo sapiens
aaacaaacatgtaaa

SEQ ID NO: 499278 - DNA, 15 bp, Homo sapiens
aaaacaaacatgtaa

SEQ ID NO: 499279 - DNA, 15 bp, Homo sapiens
aaaaacaaacatgta

SEQ ID NO: 499280 - DNA, 15 bp, Homo sapiens
gaaaaacaaacatgt

SEQ ID NO: 499281 - DNA, 15 bp, Homo sapiens
agaaaaacaaacatg

SEQ ID NO: 499282 - DNA, 15 bp, Homo sapiens
gagaaaaacaaacat

SEQ ID NO: 499283 - DNA, 15 bp, Homo sapiens
agagaaaaacaaaca

SEQ ID NO: 499284 - DNA, 15 bp, Homo sapiens
tagagaaaaacaaac

SEQ ID NO: 499285 - DNA, 15 bp, Homo sapiens
gtagagaaaaacaaa

SEQ ID NO: 499286 - DNA, 15 bp, Homo sapiens
tgtagagaaaaacaa

SEQ ID NO: 499287 - DNA, 15 bp, Homo sapiens
atgtagagaaaaaca

SEQ ID NO: 499288 - DNA, 15 bp, Homo sapiens
gatgtagagaaaaac

SEQ ID NO: 499289 - DNA, 15 bp, Homo sapiens
agatgtagagaaaaa

SEQ ID NO: 499290 - DNA, 15 bp, Homo sapiens
gagatgtagagaaaa

SEQ ID NO: 499291 - DNA, 15 bp, Homo sapiens
agagatgtagagaaa

SEQ ID NO: 499292 - DNA, 15 bp, Homo sapiens
aagagatgtagagaa

SEQ ID NO: 499293 - DNA, 15 bp, Homo sapiens
gaagagatgtagaga

SEQ ID NO: 499294 - DNA, 15 bp, Homo sapiens
agaagagatgtagag

SEQ ID NO: 499295 - DNA, 15 bp, Homo sapiens
gagaagagatgtaga

SEQ ID NO: 499296 - DNA, 15 bp, Homo sapiens
tgagaagagatgtag

SEQ ID NO: 499297 - DNA, 15 bp, Homo sapiens
ttgagaagagatgta

SEQ ID NO: 499298 - DNA, 15 bp, Homo sapiens
tttgagaagagatgt

SEQ ID NO: 499299 - DNA, 15 bp, Homo sapiens
atttgagaagagatg

SEQ ID NO: 499300 - DNA, 15 bp, Homo sapiens
aatttgagaagagat

SEQ ID NO: 499301 - DNA, 15 bp, Homo sapiens
aaatttgagaagaga

SEQ ID NO: 499302 - DNA, 15 bp, Homo sapiens
gaaatttgagaagag

SEQ ID NO: 499303 - DNA, 15 bp, Homo sapiens
ggaaatttgagaaga

SEQ ID NO: 499304 - DNA, 15 bp, Homo sapiens
gggaaatttgagaag

SEQ ID NO: 499305 - DNA, 15 bp, Homo sapiens
agggaaatttgagaa

SEQ ID NO: 499306 - DNA, 15 bp, Homo sapiens
tagggaaatttgaga

SEQ ID NO: 499307 - DNA, 15 bp, Homo sapiens
ttagggaaatttgag

SEQ ID NO: 499308 - DNA, 15 bp, Homo sapiens
cttagggaaatttga

SEQ ID NO: 499309 - DNA, 15 bp, Homo sapiens
gcttagggaaatttg

SEQ ID NO: 499310 - DNA, 15 bp, Homo sapiens
agcttagggaaattt

SEQ ID NO: 499311 - DNA, 15 bp, Homo sapiens
aagcttagggaaatt

SEQ ID NO: 499312 - DNA, 15 bp, Homo sapiens
aaagcttagggaaat

SEQ ID NO: 499313 - DNA, 15 bp, Homo sapiens
caaagcttagggaaa

SEQ ID NO: 499314 - DNA, 15 bp, Homo sapiens
acaaagcttagggaa

SEQ ID NO: 499315 - DNA, 15 bp, Homo sapiens
cacaaagcttaggga

SEQ ID NO: 499316 - DNA, 15 bp, Homo sapiens
gcacaaagcttaggg

SEQ ID NO: 499317 - DNA, 15 bp, Homo sapiens
ggcacaaagcttagg

SEQ ID NO: 499318 - DNA, 15 bp, Homo sapiens
aggcacaaagcttag

SEQ ID NO: 499319 - DNA, 15 bp, Homo sapiens
caggcacaaagctta

SEQ ID NO: 499320 - DNA, 15 bp, Homo sapiens
acaggcacaaagctt

SEQ ID NO: 499321 - DNA, 15 bp, Homo sapiens
cacaggcacaaagct

SEQ ID NO: 499322 - DNA, 15 bp, Homo sapiens
tcacaggcacaaagc

SEQ ID NO: 499323 - DNA, 15 bp, Homo sapiens
gtcacaggcacaaag

SEQ ID NO: 499324 - DNA, 15 bp, Homo sapiens
tgtcacaggcacaaa

SEQ ID NO: 499325 - DNA, 15 bp, Homo sapiens
ttgtcacaggcacaa

SEQ ID NO: 499326 - DNA, 15 bp, Homo sapiens
attgtcacaggcaca

SEQ ID NO: 499327 - DNA, 15 bp, Homo sapiens
cattgtcacaggcac

SEQ ID NO: 499328 - DNA, 15 bp, Homo sapiens
gcattgtcacaggca

SEQ ID NO: 499329 - DNA, 15 bp, Homo sapiens
agcattgtcacaggc

SEQ ID NO: 499330 - DNA, 15 bp, Homo sapiens
gagcattgtcacagg

SEQ ID NO: 499331 - DNA, 15 bp, Homo sapiens
ggagcattgtcacag

SEQ ID NO: 499332 - DNA, 15 bp, Homo sapiens
gggagcattgtcaca

SEQ ID NO: 499333 - DNA, 15 bp, Homo sapiens
agggagcattgtcac

SEQ ID NO: 499334 - DNA, 15 bp, Homo sapiens
aagggagcattgtca

SEQ ID NO: 499335 - DNA, 15 bp, Homo sapiens
aaagggagcattgtc

SEQ ID NO: 499336 - DNA, 15 bp, Homo sapiens
aaaagggagcattgt

SEQ ID NO: 499337 - DNA, 15 bp, Homo sapiens
aaaaagggagcattg

SEQ ID NO: 499338 - DNA, 15 bp, Homo sapiens
gaaaaagggagcatt

SEQ ID NO: 499339 - DNA, 15 bp, Homo sapiens
agaaaaagggagcat

SEQ ID NO: 499340 - DNA, 15 bp, Homo sapiens
tagaaaaagggagca

SEQ ID NO: 499341 - DNA, 15 bp, Homo sapiens
ttagaaaaagggagc

SEQ ID NO: 499342 - DNA, 15 bp, Homo sapiens
tttagaaaaagggag

SEQ ID NO: 499343 - DNA, 15 bp, Homo sapiens
ttttagaaaaaggga

SEQ ID NO: 499344 - DNA, 15 bp, Homo sapiens
gttttagaaaaaggg

SEQ ID NO: 499345 - DNA, 15 bp, Homo sapiens
agttttagaaaaagg

SEQ ID NO: 499346 - DNA, 15 bp, Homo sapiens
cagttttagaaaaag

SEQ ID NO: 499347 - DNA, 15 bp, Homo sapiens
acagttttagaaaaa

SEQ ID NO: 499348 - DNA, 15 bp, Homo sapiens
cacagttttagaaaa

SEQ ID NO: 499349 - DNA, 15 bp, Homo sapiens
gcacagttttagaaa

SEQ ID NO: 499350 - DNA, 15 bp, Homo sapiens
agcacagttttagaa

SEQ ID NO: 499351 - DNA, 15 bp, Homo sapiens
tagcacagttttaga

SEQ ID NO: 499352 - DNA, 15 bp, Homo sapiens
atagcacagttttag

SEQ ID NO: 499353 - DNA, 15 bp, Homo sapiens
tatagcacagtttta

SEQ ID NO: 499354 - DNA, 15 bp, Homo sapiens
gtatagcacagtttt

SEQ ID NO: 499355 - DNA, 15 bp, Homo sapiens
agtatagcacagttt

SEQ ID NO: 499356 - DNA, 15 bp, Homo sapiens
aagtatagcacagtt

SEQ ID NO: 499357 - DNA, 15 bp, Homo sapiens
caagtatagcacagt

SEQ ID NO: 499358 - DNA, 15 bp, Homo sapiens
tcaagtatagcacag

SEQ ID NO: 499359 - DNA, 15 bp, Homo sapiens
ctcaagtatagcaca

SEQ ID NO: 499360 - DNA, 15 bp, Homo sapiens
gctcaagtatagcac

SEQ ID NO: 499361 - DNA, 15 bp, Homo sapiens
agctcaagtatagca

SEQ ID NO: 499362 - DNA, 15 bp, Homo sapiens
tagctcaagtatagc

SEQ ID NO: 499363 - DNA, 15 bp, Homo sapiens
ttagctcaagtatag

SEQ ID NO: 499364 - DNA, 15 bp, Homo sapiens
cttagctcaagtata

SEQ ID NO: 499365 - DNA, 15 bp, Homo sapiens
tcttagctcaagtat

SEQ ID NO: 499366 - DNA, 15 bp, Homo sapiens
ttcttagctcaagta

SEQ ID NO: 499367 - DNA, 15 bp, Homo sapiens
attcttagctcaagt

SEQ ID NO: 499368 - DNA, 15 bp, Homo sapiens
aattcttagctcaag

SEQ ID NO: 499369 - DNA, 15 bp, Homo sapiens
aaattcttagctcaa

SEQ ID NO: 499370 - DNA, 15 bp, Homo sapiens
caaattcttagctca

SEQ ID NO: 499371 - DNA, 15 bp, Homo sapiens
tcaaattcttagctc

SEQ ID NO: 499372 - DNA, 15 bp, Homo sapiens
atcaaattcttagct

SEQ ID NO: 499373 - DNA, 15 bp, Homo sapiens
aatcaaattcttagc

SEQ ID NO: 499374 - DNA, 15 bp, Homo sapiens
gaatcaaattcttag

SEQ ID NO: 499375 - DNA, 15 bp, Homo sapiens
agaatcaaattctta

SEQ ID NO: 499376 - DNA, 15 bp, Homo sapiens
tagaatcaaattctt

SEQ ID NO: 499377 - DNA, 15 bp, Homo sapiens
atagaatcaaattct

SEQ ID NO: 499378 - DNA, 15 bp, Homo sapiens
aatagaatcaaattc

SEQ ID NO: 499379 - DNA, 15 bp, Homo sapiens
aaatagaatcaaatt

SEQ ID NO: 499380 - DNA, 15 bp, Homo sapiens
gaaatagaatcaaat

SEQ ID NO: 499381 - DNA, 15 bp, Homo sapiens
ggaaatagaatcaaa

SEQ ID NO: 499382 - DNA, 15 bp, Homo sapiens
tggaaatagaatcaa

SEQ ID NO: 499383 - DNA, 15 bp, Homo sapiens
ttggaaatagaatca

SEQ ID NO: 499384 - DNA, 15 bp, Homo sapiens
attggaaatagaatc

SEQ ID NO: 499385 - DNA, 15 bp, Homo sapiens
gattggaaatagaat

SEQ ID NO: 499386 - DNA, 15 bp, Homo sapiens
agattggaaatagaa

SEQ ID NO: 499387 - DNA, 15 bp, Homo sapiens
cagattggaaataga

SEQ ID NO: 499388 - DNA, 15 bp, Homo sapiens
tcagattggaaatag

SEQ ID NO: 499389 - DNA, 15 bp, Homo sapiens
atcagattggaaata

SEQ ID NO: 499390 - DNA, 15 bp, Homo sapiens
tatcagattggaaat

SEQ ID NO: 499391 - DNA, 15 bp, Homo sapiens
gtatcagattggaaa

SEQ ID NO: 499392 - DNA, 15 bp, Homo sapiens
ggtatcagattggaa

SEQ ID NO: 499393 - DNA, 15 bp, Homo sapiens
tggtatcagattgga

SEQ ID NO: 499394 - DNA, 15 bp, Homo sapiens
atggtatcagattgg

SEQ ID NO: 499395 - DNA, 15 bp, Homo sapiens
tatggtatcagattg

SEQ ID NO: 499396 - DNA, 15 bp, Homo sapiens
ttatggtatcagatt

SEQ ID NO: 499397 - DNA, 15 bp, Homo sapiens
gttatggtatcagat

SEQ ID NO: 499398 - DNA, 15 bp, Homo sapiens
agttatggtatcaga

SEQ ID NO: 499399 - DNA, 15 bp, Homo sapiens
tagttatggtatcag

SEQ ID NO: 499400 - DNA, 15 bp, Homo sapiens
ttagttatggtatca

SEQ ID NO: 499401 - DNA, 15 bp, Homo sapiens
cttagttatggtatc

SEQ ID NO: 499402 - DNA, 15 bp, Homo sapiens
ccttagttatggtat

SEQ ID NO: 499403 - DNA, 15 bp, Homo sapiens
cccttagttatggta

SEQ ID NO: 499404 - DNA, 15 bp, Homo sapiens
gcccttagttatggt

SEQ ID NO: 499405 - DNA, 15 bp, Homo sapiens
ggcccttagttatgg

SEQ ID NO: 499406 - DNA, 15 bp, Homo sapiens
tggcccttagttatg

SEQ ID NO: 499407 - DNA, 15 bp, Homo sapiens
atggcccttagttat

SEQ ID NO: 499408 - DNA, 15 bp, Homo sapiens
catggcccttagtta

SEQ ID NO: 499409 - DNA, 15 bp, Homo sapiens
tcatggcccttagtt

SEQ ID NO: 499410 - DNA, 15 bp, Homo sapiens
atcatggcccttagt

SEQ ID NO: 499411 - DNA, 15 bp, Homo sapiens
catcatggcccttag

SEQ ID NO: 499412 - DNA, 15 bp, Homo sapiens
ccatcatggccctta

SEQ ID NO: 499413 - DNA, 15 bp, Homo sapiens
tccatcatggccctt

SEQ ID NO: 499414 - DNA, 15 bp, Homo sapiens
ctccatcatggccct

SEQ ID NO: 499415 - DNA, 15 bp, Homo sapiens
cctccatcatggccc

SEQ ID NO: 499416 - DNA, 15 bp, Homo sapiens
tcctccatcatggcc

SEQ ID NO: 499417 - DNA, 15 bp, Homo sapiens
atcctccatcatggc

SEQ ID NO: 499418 - DNA, 15 bp, Homo sapiens
tatcctccatcatgg

SEQ ID NO: 499419 - DNA, 15 bp, Homo sapiens
ttatcctccatcatg

SEQ ID NO: 499420 - DNA, 15 bp, Homo sapiens
tttatcctccatcat

SEQ ID NO: 499421 - DNA, 15 bp, Homo sapiens
atttatcctccatca

SEQ ID NO: 499422 - DNA, 15 bp, Homo sapiens
tatttatcctccatc

SEQ ID NO: 499423 - DNA, 15 bp, Homo sapiens
atatttatcctccat

SEQ ID NO: 499424 - DNA, 15 bp, Homo sapiens
gatatttatcctcca

SEQ ID NO: 499425 - DNA, 15 bp, Homo sapiens
ggatatttatcctcc

SEQ ID NO: 499426 - DNA, 15 bp, Homo sapiens
tggatatttatcctc

SEQ ID NO: 499427 - DNA, 15 bp, Homo sapiens
atggatatttatcct

SEQ ID NO: 499428 - DNA, 15 bp, Homo sapiens
catggatatttatcc

SEQ ID NO: 499429 - DNA, 15 bp, Homo sapiens
acatggatatttatc

SEQ ID NO: 499430 - DNA, 15 bp, Homo sapiens
aacatggatatttat

SEQ ID NO: 499431 - DNA, 15 bp, Homo sapiens
caacatggatattta

SEQ ID NO: 499432 - DNA, 15 bp, Homo sapiens
gcaacatggatattt

SEQ ID NO: 499433 - DNA, 15 bp, Homo sapiens
agcaacatggatatt

SEQ ID NO: 499434 - DNA, 15 bp, Homo sapiens
aagcaacatggatat

SEQ ID NO: 499435 - DNA, 15 bp, Homo sapiens
caagcaacatggata

SEQ ID NO: 499436 - DNA, 15 bp, Homo sapiens
acaagcaacatggat

SEQ ID NO: 499437 - DNA, 15 bp, Homo sapiens
aacaagcaacatgga

SEQ ID NO: 499438 - DNA, 15 bp, Homo sapiens
gaacaagcaacatgg

SEQ ID NO: 499439 - DNA, 15 bp, Homo sapiens
ggaacaagcaacatg

SEQ ID NO: 499440 - DNA, 15 bp, Homo sapiens
gggaacaagcaacat

SEQ ID NO: 499441 - DNA, 15 bp, Homo sapiens
agggaacaagcaaca

SEQ ID NO: 499442 - DNA, 15 bp, Homo sapiens
aagggaacaagcaac

SEQ ID NO: 499443 - DNA, 15 bp, Homo sapiens
gaagggaacaagcaa

SEQ ID NO: 499444 - DNA, 15 bp, Homo sapiens
agaagggaacaagca

SEQ ID NO: 499445 - DNA, 15 bp, Homo sapiens
cagaagggaacaagc

SEQ ID NO: 499446 - DNA, 15 bp, Homo sapiens
ccagaagggaacaag

SEQ ID NO: 499447 - DNA, 15 bp, Homo sapiens
gccagaagggaacaa

SEQ ID NO: 499448 - DNA, 15 bp, Homo sapiens
agccagaagggaaca

SEQ ID NO: 499449 - DNA, 15 bp, Homo sapiens
aagccagaagggaac

SEQ ID NO: 499450 - DNA, 15 bp, Homo sapiens
aaagccagaagggaa

SEQ ID NO: 499451 - DNA, 15 bp, Homo sapiens
aaaagccagaaggga

SEQ ID NO: 499452 - DNA, 15 bp, Homo sapiens
taaaagccagaaggg

SEQ ID NO: 499453 - DNA, 15 bp, Homo sapiens
ataaaagccagaagg

SEQ ID NO: 499454 - DNA, 15 bp, Homo sapiens
cataaaagccagaag

SEQ ID NO: 499455 - DNA, 15 bp, Homo sapiens
acataaaagccagaa

SEQ ID NO: 499456 - DNA, 15 bp, Homo sapiens
gacataaaagccaga

SEQ ID NO: 499457 - DNA, 15 bp, Homo sapiens
agacataaaagccag

SEQ ID NO: 499458 - DNA, 15 bp, Homo sapiens
cagacataaaagcca

SEQ ID NO: 499459 - DNA, 15 bp, Homo sapiens
acagacataaaagcc

SEQ ID NO: 499460 - DNA, 15 bp, Homo sapiens
cacagacataaaagc

SEQ ID NO: 499461 - DNA, 15 bp, Homo sapiens
tcacagacataaaag

SEQ ID NO: 499462 - DNA, 15 bp, Homo sapiens
atcacagacataaaa

SEQ ID NO: 499463 - DNA, 15 bp, Homo sapiens
tatcacagacataaa

SEQ ID NO: 499464 - DNA, 15 bp, Homo sapiens
ctatcacagacataa

SEQ ID NO: 499465 - DNA, 15 bp, Homo sapiens
gctatcacagacata

SEQ ID NO: 499466 - DNA, 15 bp, Homo sapiens
tgctatcacagacat

SEQ ID NO: 499467 - DNA, 15 bp, Homo sapiens
ctgctatcacagaca

SEQ ID NO: 499468 - DNA, 15 bp, Homo sapiens
actgctatcacagac

SEQ ID NO: 499469 - DNA, 15 bp, Homo sapiens
tactgctatcacaga

SEQ ID NO: 499470 - DNA, 15 bp, Homo sapiens
atactgctatcacag

SEQ ID NO: 499471 - DNA, 15 bp, Homo sapiens
gatactgctatcaca

SEQ ID NO: 499472 - DNA, 15 bp, Homo sapiens
agatactgctatcac

SEQ ID NO: 499473 - DNA, 15 bp, Homo sapiens
gagatactgctatca

SEQ ID NO: 499474 - DNA, 15 bp, Homo sapiens
agagatactgctatc

SEQ ID NO: 499475 - DNA, 15 bp, Homo sapiens
aagagatactgctat

SEQ ID NO: 499476 - DNA, 15 bp, Homo sapiens
aaagagatactgcta

SEQ ID NO: 499477 - DNA, 15 bp, Homo sapiens
aaaagagatactgct

SEQ ID NO: 499478 - DNA, 15 bp, Homo sapiens
taaaagagatactgc

SEQ ID NO: 499479 - DNA, 15 bp, Homo sapiens
ataaaagagatactg

SEQ ID NO: 499480 - DNA, 15 bp, Homo sapiens
tataaaagagatact

SEQ ID NO: 499481 - DNA, 15 bp, Homo sapiens
ttataaaagagatac

SEQ ID NO: 499482 - DNA, 15 bp, Homo sapiens
tttataaaagagata

SEQ ID NO: 499483 - DNA, 15 bp, Homo sapiens
ctttataaaagagat

SEQ ID NO: 499484 - DNA, 15 bp, Homo sapiens
actttataaaagaga

SEQ ID NO: 499485 - DNA, 15 bp, Homo sapiens
gactttataaaagag

SEQ ID NO: 499486 - DNA, 15 bp, Homo sapiens
cgactttataaaaga

SEQ ID NO: 499487 - DNA, 15 bp, Homo sapiens
acgactttataaaag

SEQ ID NO: 499488 - DNA, 15 bp, Homo sapiens
gacgactttataaaa

SEQ ID NO: 499489 - DNA, 15 bp, Homo sapiens
tgacgactttataaa

SEQ ID NO: 499490 - DNA, 15 bp, Homo sapiens
atgacgactttataa

SEQ ID NO: 499491 - DNA, 15 bp, Homo sapiens
catgacgactttata

SEQ ID NO: 499492 - DNA, 15 bp, Homo sapiens
acatgacgactttat

SEQ ID NO: 499493 - DNA, 15 bp, Homo sapiens
gacatgacgacttta

SEQ ID NO: 499494 - DNA, 15 bp, Homo sapiens
tgacatgacgacttt

SEQ ID NO: 499495 - DNA, 15 bp, Homo sapiens
gtgacatgacgactt

SEQ ID NO: 499496 - DNA, 15 bp, Homo sapiens
agtgacatgacgact

SEQ ID NO: 499497 - DNA, 15 bp, Homo sapiens
aagtgacatgacgac

SEQ ID NO: 499498 - DNA, 15 bp, Homo sapiens
taagtgacatgacga

SEQ ID NO: 499499 - DNA, 15 bp, Homo sapiens
ctaagtgacatgacg

SEQ ID NO: 499500 - DNA, 15 bp, Homo sapiens
cctaagtgacatgac

SEQ ID NO: 499501 - DNA, 15 bp, Homo sapiens
acctaagtgacatga

SEQ ID NO: 499502 - DNA, 15 bp, Homo sapiens
aacctaagtgacatg

SEQ ID NO: 499503 - DNA, 15 bp, Homo sapiens
taacctaagtgacat

SEQ ID NO: 499504 - DNA, 15 bp, Homo sapiens
ataacctaagtgaca

SEQ ID NO: 499505 - DNA, 15 bp, Homo sapiens
gataacctaagtgac

SEQ ID NO: 499506 - DNA, 15 bp, Homo sapiens
agataacctaagtga

SEQ ID NO: 499507 - DNA, 15 bp, Homo sapiens
cagataacctaagtg

SEQ ID NO: 499508 - DNA, 15 bp, Homo sapiens
ccagataacctaagt

SEQ ID NO: 499509 - DNA, 15 bp, Homo sapiens
gccagataacctaag

SEQ ID NO: 499510 - DNA, 15 bp, Homo sapiens
tgccagataacctaa

SEQ ID NO: 499511 - DNA, 15 bp, Homo sapiens
ttgccagataaccta

SEQ ID NO: 499512 - DNA, 15 bp, Homo sapiens
tttgccagataacct

SEQ ID NO: 499513 - DNA, 15 bp, Homo sapiens
atttgccagataacc

SEQ ID NO: 499514 - DNA, 15 bp, Homo sapiens
aatttgccagataac

SEQ ID NO: 499515 - DNA, 15 bp, Homo sapiens
taatttgccagataa

SEQ ID NO: 499516 - DNA, 15 bp, Homo sapiens
ataatttgccagata

SEQ ID NO: 499517 - DNA, 15 bp, Homo sapiens
aataatttgccagat

SEQ ID NO: 499518 - DNA, 15 bp, Homo sapiens
aaataatttgccaga

SEQ ID NO: 499519 - DNA, 15 bp, Homo sapiens
caaataatttgccag

SEQ ID NO: 499520 - DNA, 15 bp, Homo sapiens
gcaaataatttgcca

SEQ ID NO: 499521 - DNA, 15 bp, Homo sapiens
tgcaaataatttgcc

SEQ ID NO: 499522 - DNA, 15 bp, Homo sapiens
gtgcaaataatttgc

SEQ ID NO: 499523 - DNA, 15 bp, Homo sapiens
agtgcaaataatttg

SEQ ID NO: 499524 - DNA, 15 bp, Homo sapiens
tagtgcaaataattt

SEQ ID NO: 499525 - DNA, 15 bp, Homo sapiens
atagtgcaaataatt

SEQ ID NO: 499526 - DNA, 15 bp, Homo sapiens
tatagtgcaaataat

SEQ ID NO: 499527 - DNA, 15 bp, Homo sapiens
ttatagtgcaaataa

SEQ ID NO: 499528 - DNA, 15 bp, Homo sapiens
cttatagtgcaaata

SEQ ID NO: 499529 - DNA, 15 bp, Homo sapiens
tcttatagtgcaaat

SEQ ID NO: 499530 - DNA, 15 bp, Homo sapiens
ttcttatagtgcaaa

SEQ ID NO: 499531 - DNA, 15 bp, Homo sapiens
tttcttatagtgcaa

SEQ ID NO: 499532 - DNA, 15 bp, Homo sapiens
atttcttatagtgca

SEQ ID NO: 499533 - DNA, 15 bp, Homo sapiens
gatttcttatagtgc

SEQ ID NO: 499534 - DNA, 15 bp, Homo sapiens
agatttcttatagtg

SEQ ID NO: 499535 - DNA, 15 bp, Homo sapiens
aagatttcttatagt

SEQ ID NO: 499536 - DNA, 15 bp, Homo sapiens
taagatttcttatag

SEQ ID NO: 499537 - DNA, 15 bp, Homo sapiens
gtaagatttcttata

SEQ ID NO: 499538 - DNA, 15 bp, Homo sapiens
cgtaagatttcttat

SEQ ID NO: 499539 - DNA, 15 bp, Homo sapiens
acgtaagatttctta

SEQ ID NO: 499540 - DNA, 15 bp, Homo sapiens
cacgtaagatttctt

SEQ ID NO: 499541 - DNA, 15 bp, Homo sapiens
tcacgtaagatttct

SEQ ID NO: 499542 - DNA, 15 bp, Homo sapiens
gtcacgtaagatttc

SEQ ID NO: 499543 - DNA, 15 bp, Homo sapiens
agtcacgtaagattt

SEQ ID NO: 499544 - DNA, 15 bp, Homo sapiens
tagtcacgtaagatt

SEQ ID NO: 499545 - DNA, 15 bp, Homo sapiens
ttagtcacgtaagat

SEQ ID NO: 499546 - DNA, 15 bp, Homo sapiens
tttagtcacgtaaga

SEQ ID NO: 499547 - DNA, 15 bp, Homo sapiens
ctttagtcacgtaag

SEQ ID NO: 499548 - DNA, 15 bp, Homo sapiens
cctttagtcacgtaa

SEQ ID NO: 499549 - DNA, 15 bp, Homo sapiens
acctttagtcacgta

SEQ ID NO: 499550 - DNA, 15 bp, Homo sapiens
cacctttagtcacgt

SEQ ID NO: 499551 - DNA, 15 bp, Homo sapiens
acacctttagtcacg

SEQ ID NO: 499552 - DNA, 15 bp, Homo sapiens
cacacctttagtcac

SEQ ID NO: 499553 - DNA, 15 bp, Homo sapiens
acacacctttagtca

SEQ ID NO: 499554 - DNA, 15 bp, Homo sapiens
cacacacctttagtc

SEQ ID NO: 499555 - DNA, 15 bp, Homo sapiens
acacacacctttagt

SEQ ID NO: 499556 - DNA, 15 bp, Homo sapiens
cacacacacctttag

SEQ ID NO: 499557 - DNA, 15 bp, Homo sapiens
acacacacaccttta

SEQ ID NO: 499558 - DNA, 15 bp, Homo sapiens
cacacacacaccttt

SEQ ID NO: 499559 - DNA, 15 bp, Homo sapiens
ccacacacacacctt

SEQ ID NO: 499560 - DNA, 15 bp, Homo sapiens
gccacacacacacct

SEQ ID NO: 499561 - DNA, 15 bp, Homo sapiens
agccacacacacacc

SEQ ID NO: 499562 - DNA, 15 bp, Homo sapiens
aagccacacacacac

SEQ ID NO: 499563 - DNA, 15 bp, Homo sapiens
gaagccacacacaca

SEQ ID NO: 499564 - DNA, 15 bp, Homo sapiens
tgaagccacacacac

SEQ ID NO: 499565 - DNA, 15 bp, Homo sapiens
ttgaagccacacaca

SEQ ID NO: 499566 - DNA, 15 bp, Homo sapiens
tttgaagccacacac

SEQ ID NO: 499567 - DNA, 15 bp, Homo sapiens
ttttgaagccacaca

SEQ ID NO: 499568 - DNA, 15 bp, Homo sapiens
tttttgaagccacac

SEQ ID NO: 499569 - DNA, 15 bp, Homo sapiens
gtttttgaagccaca

SEQ ID NO: 499570 - DNA, 15 bp, Homo sapiens
tgtttttgaagccac

SEQ ID NO: 499571 - DNA, 15 bp, Homo sapiens
atgtttttgaagcca

SEQ ID NO: 499572 - DNA, 15 bp, Homo sapiens
aatgtttttgaagcc

SEQ ID NO: 499573 - DNA, 15 bp, Homo sapiens
caatgtttttgaagc

SEQ ID NO: 499574 - DNA, 15 bp, Homo sapiens
acaatgtttttgaag

SEQ ID NO: 499575 - DNA, 15 bp, Homo sapiens
aacaatgtttttgaa

SEQ ID NO: 499576 - DNA, 15 bp, Homo sapiens
aaacaatgtttttga

SEQ ID NO: 499577 - DNA, 15 bp, Homo sapiens
caaacaatgtttttg

SEQ ID NO: 499578 - DNA, 15 bp, Homo sapiens
gcaaacaatgttttt

SEQ ID NO: 499579 - DNA, 15 bp, Homo sapiens
agcaaacaatgtttt

SEQ ID NO: 499580 - DNA, 15 bp, Homo sapiens
cagcaaacaatgttt

SEQ ID NO: 499581 - DNA, 15 bp, Homo sapiens
acagcaaacaatgtt

SEQ ID NO: 499582 - DNA, 15 bp, Homo sapiens
aacagcaaacaatgt

SEQ ID NO: 499583 - DNA, 15 bp, Homo sapiens
aaacagcaaacaatg

SEQ ID NO: 499584 - DNA, 15 bp, Homo sapiens
gaaacagcaaacaat

SEQ ID NO: 499585 - DNA, 15 bp, Homo sapiens
agaaacagcaaacaa

SEQ ID NO: 499586 - DNA, 15 bp, Homo sapiens
gagaaacagcaaaca

SEQ ID NO: 499587 - DNA, 15 bp, Homo sapiens
agagaaacagcaaac

SEQ ID NO: 499588 - DNA, 15 bp, Homo sapiens
aagagaaacagcaaa

SEQ ID NO: 499589 - DNA, 15 bp, Homo sapiens
aaagagaaacagcaa

SEQ ID NO: 499590 - DNA, 15 bp, Homo sapiens
aaaagagaaacagca

SEQ ID NO: 499591 - DNA, 15 bp, Homo sapiens
gaaaagagaaacagc

SEQ ID NO: 499592 - DNA, 15 bp, Homo sapiens
agaaaagagaaacag

SEQ ID NO: 499593 - DNA, 15 bp, Homo sapiens
gagaaaagagaaaca

SEQ ID NO: 499594 - DNA, 15 bp, Homo sapiens
ggagaaaagagaaac

SEQ ID NO: 499595 - DNA, 15 bp, Homo sapiens
tggagaaaagagaaa

SEQ ID NO: 499596 - DNA, 15 bp, Homo sapiens
gtggagaaaagagaa

SEQ ID NO: 499597 - DNA, 15 bp, Homo sapiens
ggtggagaaaagaga

SEQ ID NO: 499598 - DNA, 15 bp, Homo sapiens
tggtggagaaaagag

SEQ ID NO: 499599 - DNA, 15 bp, Homo sapiens
atggtggagaaaaga

SEQ ID NO: 499600 - DNA, 15 bp, Homo sapiens
aatggtggagaaaag

SEQ ID NO: 499601 - DNA, 15 bp, Homo sapiens
gaatggtggagaaaa

SEQ ID NO: 499602 - DNA, 15 bp, Homo sapiens
agaatggtggagaaa

SEQ ID NO: 499603 - DNA, 15 bp, Homo sapiens
tagaatggtggagaa

SEQ ID NO: 499604 - DNA, 15 bp, Homo sapiens
atagaatggtggaga

SEQ ID NO: 499605 - DNA, 15 bp, Homo sapiens
tatagaatggtggag

SEQ ID NO: 499606 - DNA, 15 bp, Homo sapiens
ctatagaatggtgga

SEQ ID NO: 499607 - DNA, 15 bp, Homo sapiens
cctatagaatggtgg

SEQ ID NO: 499608 - DNA, 15 bp, Homo sapiens
tcctatagaatggtg

SEQ ID NO: 499609 - DNA, 15 bp, Homo sapiens
ttcctatagaatggt

SEQ ID NO: 499610 - DNA, 15 bp, Homo sapiens
attcctatagaatgg

SEQ ID NO: 499611 - DNA, 15 bp, Homo sapiens
tattcctatagaatg

SEQ ID NO: 499612 - DNA, 15 bp, Homo sapiens
ttattcctatagaat

SEQ ID NO: 499613 - DNA, 15 bp, Homo sapiens
cttattcctatagaa

SEQ ID NO: 499614 - DNA, 15 bp, Homo sapiens
tcttattcctataga

SEQ ID NO: 499615 - DNA, 15 bp, Homo sapiens
atcttattcctatag

SEQ ID NO: 499616 - DNA, 15 bp, Homo sapiens
catcttattcctata

SEQ ID NO: 499617 - DNA, 15 bp, Homo sapiens
ccatcttattcctat

SEQ ID NO: 499618 - DNA, 15 bp, Homo sapiens
accatcttattccta

SEQ ID NO: 499619 - DNA, 15 bp, Homo sapiens
taccatcttattcct

SEQ ID NO: 499620 - DNA, 15 bp, Homo sapiens
ctaccatcttattcc

SEQ ID NO: 499621 - DNA, 15 bp, Homo sapiens
tctaccatcttattc

SEQ ID NO: 499622 - DNA, 15 bp, Homo sapiens
ttctaccatcttatt

SEQ ID NO: 499623 - DNA, 15 bp, Homo sapiens
attctaccatcttat

SEQ ID NO: 499624 - DNA, 15 bp, Homo sapiens
tattctaccatctta

SEQ ID NO: 499625 - DNA, 15 bp, Homo sapiens
gtattctaccatctt

SEQ ID NO: 499626 - DNA, 15 bp, Homo sapiens
ggtattctaccatct

SEQ ID NO: 499627 - DNA, 15 bp, Homo sapiens
aggtattctaccatc

SEQ ID NO: 499628 - DNA, 15 bp, Homo sapiens
caggtattctaccat

SEQ ID NO: 499629 - DNA, 15 bp, Homo sapiens
tcaggtattctacca

SEQ ID NO: 499630 - DNA, 15 bp, Homo sapiens
gtcaggtattctacc

SEQ ID NO: 499631 - DNA, 15 bp, Homo sapiens
tgtcaggtattctac

SEQ ID NO: 499632 - DNA, 15 bp, Homo sapiens
ctgtcaggtattcta

SEQ ID NO: 499633 - DNA, 15 bp, Homo sapiens
tctgtcaggtattct

SEQ ID NO: 499634 - DNA, 15 bp, Homo sapiens
gtctgtcaggtattc

SEQ ID NO: 499635 - DNA, 15 bp, Homo sapiens
agtctgtcaggtatt

SEQ ID NO: 499636 - DNA, 15 bp, Homo sapiens
cagtctgtcaggtat

SEQ ID NO: 499637 - DNA, 15 bp, Homo sapiens
ccagtctgtcaggta

SEQ ID NO: 499638 - DNA, 15 bp, Homo sapiens
cccagtctgtcaggt

SEQ ID NO: 499639 - DNA, 15 bp, Homo sapiens
acccagtctgtcagg

SEQ ID NO: 499640 - DNA, 15 bp, Homo sapiens
aacccagtctgtcag

SEQ ID NO: 499641 - DNA, 15 bp, Homo sapiens
taacccagtctgtca

SEQ ID NO: 499642 - DNA, 15 bp, Homo sapiens
ataacccagtctgtc

SEQ ID NO: 499643 - DNA, 15 bp, Homo sapiens
cataacccagtctgt

SEQ ID NO: 499644 - DNA, 15 bp, Homo sapiens
ccataacccagtctg

SEQ ID NO: 499645 - DNA, 15 bp, Homo sapiens
cccataacccagtct

SEQ ID NO: 499646 - DNA, 15 bp, Homo sapiens
tcccataacccagtc

SEQ ID NO: 499647 - DNA, 15 bp, Homo sapiens
ttcccataacccagt

SEQ ID NO: 499648 - DNA, 15 bp, Homo sapiens
gttcccataacccag

SEQ ID NO: 499649 - DNA, 15 bp, Homo sapiens
tgttcccataaccca

SEQ ID NO: 499650 - DNA, 15 bp, Homo sapiens
atgttcccataaccc

SEQ ID NO: 499651 - DNA, 15 bp, Homo sapiens
gatgttcccataacc

SEQ ID NO: 499652 - DNA, 15 bp, Homo sapiens
tgatgttcccataac

SEQ ID NO: 499653 - DNA, 15 bp, Homo sapiens
ttgatgttcccataa

SEQ ID NO: 499654 - DNA, 15 bp, Homo sapiens
tttgatgttcccata

SEQ ID NO: 499655 - DNA, 15 bp, Homo sapiens
gtttgatgttcccat

SEQ ID NO: 499656 - DNA, 15 bp, Homo sapiens
ggtttgatgttccca

SEQ ID NO: 499657 - DNA, 15 bp, Homo sapiens
tggtttgatgttccc

SEQ ID NO: 499658 - DNA, 15 bp, Homo sapiens
ttggtttgatgttcc

SEQ ID NO: 499659 - DNA, 15 bp, Homo sapiens
cttggtttgatgttc

SEQ ID NO: 499660 - DNA, 15 bp, Homo sapiens
gcttggtttgatgtt

SEQ ID NO: 499661 - DNA, 15 bp, Homo sapiens
tgcttggtttgatgt

SEQ ID NO: 499662 - DNA, 15 bp, Homo sapiens
ctgcttggtttgatg

SEQ ID NO: 499663 - DNA, 15 bp, Homo sapiens
gctgcttggtttgat

SEQ ID NO: 499664 - DNA, 15 bp, Homo sapiens
tgctgcttggtttga

SEQ ID NO: 499665 - DNA, 15 bp, Homo sapiens
ctgctgcttggtttg

SEQ ID NO: 499666 - DNA, 15 bp, Homo sapiens
tctgctgcttggttt

SEQ ID NO: 499667 - DNA, 15 bp, Homo sapiens
atctgctgcttggtt

SEQ ID NO: 499668 - DNA, 15 bp, Homo sapiens
catctgctgcttggt

SEQ ID NO: 499669 - DNA, 15 bp, Homo sapiens
tcatctgctgcttgg

SEQ ID NO: 499670 - DNA, 15 bp, Homo sapiens
atcatctgctgcttg

SEQ ID NO: 499671 - DNA, 15 bp, Homo sapiens
catcatctgctgctt

SEQ ID NO: 499672 - DNA, 15 bp, Homo sapiens
tcatcatctgctgct

SEQ ID NO: 499673 - DNA, 15 bp, Homo sapiens
atcatcatctgctgc

SEQ ID NO: 499674 - DNA, 15 bp, Homo sapiens
catcatcatctgctg

SEQ ID NO: 499675 - DNA, 15 bp, Homo sapiens
acatcatcatctgct

SEQ ID NO: 499676 - DNA, 15 bp, Homo sapiens
tacatcatcatctgc

SEQ ID NO: 499677 - DNA, 15 bp, Homo sapiens
ttacatcatcatctg

SEQ ID NO: 499678 - DNA, 15 bp, Homo sapiens
tttacatcatcatct

SEQ ID NO: 499679 - DNA, 15 bp, Homo sapiens
ttttacatcatcatc

SEQ ID NO: 499680 - DNA, 15 bp, Homo sapiens
attttacatcatcat

SEQ ID NO: 499681 - DNA, 15 bp, Homo sapiens
cattttacatcatca

SEQ ID NO: 499682 - DNA, 15 bp, Homo sapiens
acattttacatcatc

SEQ ID NO: 499683 - DNA, 15 bp, Homo sapiens
gacattttacatcat

SEQ ID NO: 499684 - DNA, 15 bp, Homo sapiens
agacattttacatca

SEQ ID NO: 499685 - DNA, 15 bp, Homo sapiens
aagacattttacatc

SEQ ID NO: 499686 - DNA, 15 bp, Homo sapiens
taagacattttacat

SEQ ID NO: 499687 - DNA, 15 bp, Homo sapiens
gtaagacattttaca

SEQ ID NO: 499688 - DNA, 15 bp, Homo sapiens
tgtaagacattttac

SEQ ID NO: 499689 - DNA, 15 bp, Homo sapiens
ttgtaagacatttta

SEQ ID NO: 499690 - DNA, 15 bp, Homo sapiens
cttgtaagacatttt

SEQ ID NO: 499691 - DNA, 15 bp, Homo sapiens
ccttgtaagacattt

SEQ ID NO: 499692 - DNA, 15 bp, Homo sapiens
accttgtaagacatt

SEQ ID NO: 499693 - DNA, 15 bp, Homo sapiens
taccttgtaagacat

SEQ ID NO: 499694 - DNA, 15 bp, Homo sapiens
ttaccttgtaagaca

SEQ ID NO: 499695 - DNA, 15 bp, Homo sapiens
tttaccttgtaagac

SEQ ID NO: 499696 - DNA, 15 bp, Homo sapiens
ttttaccttgtaaga

SEQ ID NO: 499697 - DNA, 15 bp, Homo sapiens
tttttaccttgtaag

SEQ ID NO: 499698 - DNA, 15 bp, Homo sapiens
ttttttaccttgtaa

SEQ ID NO: 499699 - DNA, 15 bp, Homo sapiens
tttttttaccttgta

SEQ ID NO: 499700 - DNA, 15 bp, Homo sapiens
ctttttttaccttgt

SEQ ID NO: 499701 - DNA, 15 bp, Homo sapiens
tctttttttaccttg

SEQ ID NO: 499702 - DNA, 15 bp, Homo sapiens
ttctttttttacctt

SEQ ID NO: 499703 - DNA, 15 bp, Homo sapiens
attctttttttacct

SEQ ID NO: 499704 - DNA, 15 bp, Homo sapiens
cattctttttttacc

SEQ ID NO: 499705 - DNA, 15 bp, Homo sapiens
tcattctttttttac

SEQ ID NO: 499706 - DNA, 15 bp, Homo sapiens
gtcattcttttttta

SEQ ID NO: 499707 - DNA, 15 bp, Homo sapiens
ggtcattcttttttt

SEQ ID NO: 499708 - DNA, 15 bp, Homo sapiens
aggtcattctttttt

SEQ ID NO: 499709 - DNA, 15 bp, Homo sapiens
aaggtcattcttttt

SEQ ID NO: 499710 - DNA, 15 bp, Homo sapiens
gaaggtcattctttt

SEQ ID NO: 499711 - DNA, 15 bp, Homo sapiens
tgaaggtcattcttt

SEQ ID NO: 499712 - DNA, 15 bp, Homo sapiens
ttgaaggtcattctt

SEQ ID NO: 499713 - DNA, 15 bp, Homo sapiens
cttgaaggtcattct

SEQ ID NO: 499714 - DNA, 15 bp, Homo sapiens
acttgaaggtcattc

SEQ ID NO: 499715 - DNA, 15 bp, Homo sapiens
tacttgaaggtcatt

SEQ ID NO: 499716 - DNA, 15 bp, Homo sapiens
atacttgaaggtcat

SEQ ID NO: 499717 - DNA, 15 bp, Homo sapiens
aatacttgaaggtca

SEQ ID NO: 499718 - DNA, 15 bp, Homo sapiens
taatacttgaaggtc

SEQ ID NO: 499719 - DNA, 15 bp, Homo sapiens
ctaatacttgaaggt

SEQ ID NO: 499720 - DNA, 15 bp, Homo sapiens
actaatacttgaagg

SEQ ID NO: 499721 - DNA, 15 bp, Homo sapiens
cactaatacttgaag

SEQ ID NO: 499722 - DNA, 15 bp, Homo sapiens
ccactaatacttgaa

SEQ ID NO: 499723 - DNA, 15 bp, Homo sapiens
cccactaatacttga

SEQ ID NO: 499724 - DNA, 15 bp, Homo sapiens
acccactaatacttg

SEQ ID NO: 499725 - DNA, 15 bp, Homo sapiens
aacccactaatactt

SEQ ID NO: 499726 - DNA, 15 bp, Homo sapiens
aaacccactaatact

SEQ ID NO: 499727 - DNA, 15 bp, Homo sapiens
aaaacccactaatac

SEQ ID NO: 499728 - DNA, 15 bp, Homo sapiens
taaaacccactaata

SEQ ID NO: 499729 - DNA, 15 bp, Homo sapiens
gtaaaacccactaat

SEQ ID NO: 499730 - DNA, 15 bp, Homo sapiens
agtaaaacccactaa

SEQ ID NO: 499731 - DNA, 15 bp, Homo sapiens
cagtaaaacccacta

SEQ ID NO: 499732 - DNA, 15 bp, Homo sapiens
acagtaaaacccact

SEQ ID NO: 499733 - DNA, 15 bp, Homo sapiens
cacagtaaaacccac

SEQ ID NO: 499734 - DNA, 15 bp, Homo sapiens
tcacagtaaaaccca

SEQ ID NO: 499735 - DNA, 15 bp, Homo sapiens
ctcacagtaaaaccc

SEQ ID NO: 499736 - DNA, 15 bp, Homo sapiens
tctcacagtaaaacc

SEQ ID NO: 499737 - DNA, 15 bp, Homo sapiens
ctctcacagtaaaac

SEQ ID NO: 499738 - DNA, 15 bp, Homo sapiens
actctcacagtaaaa

SEQ ID NO: 499739 - DNA, 15 bp, Homo sapiens
aactctcacagtaaa

SEQ ID NO: 499740 - DNA, 15 bp, Homo sapiens
taactctcacagtaa

SEQ ID NO: 499741 - DNA, 15 bp, Homo sapiens
ataactctcacagta

SEQ ID NO: 499742 - DNA, 15 bp, Homo sapiens
tataactctcacagt

SEQ ID NO: 499743 - DNA, 15 bp, Homo sapiens
ttataactctcacag

SEQ ID NO: 499744 - DNA, 15 bp, Homo sapiens
gttataactctcaca

SEQ ID NO: 499745 - DNA, 15 bp, Homo sapiens
agttataactctcac

SEQ ID NO: 499746 - DNA, 15 bp, Homo sapiens
tagttataactctca

SEQ ID NO: 499747 - DNA, 15 bp, Homo sapiens
gtagttataactctc

SEQ ID NO: 499748 - DNA, 15 bp, Homo sapiens
agtagttataactct

SEQ ID NO: 499749 - DNA, 15 bp, Homo sapiens
aagtagttataactc

SEQ ID NO: 499750 - DNA, 15 bp, Homo sapiens
taagtagttataact

SEQ ID NO: 499751 - DNA, 15 bp, Homo sapiens
ttaagtagttataac

SEQ ID NO: 499752 - DNA, 15 bp, Homo sapiens
attaagtagttataa

SEQ ID NO: 499753 - DNA, 15 bp, Homo sapiens
aattaagtagttata

SEQ ID NO: 499754 - DNA, 15 bp, Homo sapiens
taattaagtagttat

SEQ ID NO: 499755 - DNA, 15 bp, Homo sapiens
gtaattaagtagtta

SEQ ID NO: 499756 - DNA, 15 bp, Homo sapiens
tgtaattaagtagtt

SEQ ID NO: 499757 - DNA, 15 bp, Homo sapiens
ctgtaattaagtagt

SEQ ID NO: 499758 - DNA, 15 bp, Homo sapiens
gctgtaattaagtag

SEQ ID NO: 499759 - DNA, 15 bp, Homo sapiens
agctgtaattaagta

SEQ ID NO: 499760 - DNA, 15 bp, Homo sapiens
aagctgtaattaagt

SEQ ID NO: 499761 - DNA, 15 bp, Homo sapiens
aaagctgtaattaag

SEQ ID NO: 499762 - DNA, 15 bp, Homo sapiens
taaagctgtaattaa

SEQ ID NO: 499763 - DNA, 15 bp, Homo sapiens
ataaagctgtaatta

SEQ ID NO: 499764 - DNA, 15 bp, Homo sapiens
tataaagctgtaatt

SEQ ID NO: 499765 - DNA, 15 bp, Homo sapiens
gtataaagctgtaat

SEQ ID NO: 499766 - DNA, 15 bp, Homo sapiens
agtataaagctgtaa

SEQ ID NO: 499767 - DNA, 15 bp, Homo sapiens
aagtataaagctgta

SEQ ID NO: 499768 - DNA, 15 bp, Homo sapiens
caagtataaagctgt

SEQ ID NO: 499769 - DNA, 15 bp, Homo sapiens
acaagtataaagctg

SEQ ID NO: 499770 - DNA, 15 bp, Homo sapiens
tacaagtataaagct

SEQ ID NO: 499771 - DNA, 15 bp, Homo sapiens
atacaagtataaagc

SEQ ID NO: 499772 - DNA, 15 bp, Homo sapiens
aatacaagtataaag

SEQ ID NO: 499773 - DNA, 15 bp, Homo sapiens
aaatacaagtataaa

SEQ ID NO: 499774 - DNA, 15 bp, Homo sapiens
aaaatacaagtataa

SEQ ID NO: 499775 - DNA, 15 bp, Homo sapiens
caaaatacaagtata

SEQ ID NO: 499776 - DNA, 15 bp, Homo sapiens
acaaaatacaagtat

SEQ ID NO: 499777 - DNA, 15 bp, Homo sapiens
cacaaaatacaagta

SEQ ID NO: 499778 - DNA, 15 bp, Homo sapiens
acacaaaatacaagt

SEQ ID NO: 499779 - DNA, 15 bp, Homo sapiens
cacacaaaatacaag

SEQ ID NO: 499780 - DNA, 15 bp, Homo sapiens
acacacaaaatacaa

SEQ ID NO: 499781 - DNA, 15 bp, Homo sapiens
tacacacaaaataca

SEQ ID NO: 499782 - DNA, 15 bp, Homo sapiens
atacacacaaaatac

SEQ ID NO: 499783 - DNA, 15 bp, Homo sapiens
aatacacacaaaata

SEQ ID NO: 499784 - DNA, 15 bp, Homo sapiens
aaatacacacaaaat

SEQ ID NO: 499785 - DNA, 15 bp, Homo sapiens
taaatacacacaaaa

SEQ ID NO: 499786 - DNA, 15 bp, Homo sapiens
ttaaatacacacaaa

SEQ ID NO: 499787 - DNA, 15 bp, Homo sapiens
tttaaatacacacaa

SEQ ID NO: 499788 - DNA, 15 bp, Homo sapiens
gtttaaatacacaca

SEQ ID NO: 499789 - DNA, 15 bp, Homo sapiens
agtttaaatacacac

SEQ ID NO: 499790 - DNA, 15 bp, Homo sapiens
aagtttaaatacaca

SEQ ID NO: 499791 - DNA, 15 bp, Homo sapiens
aaagtttaaatacac

SEQ ID NO: 499792 - DNA, 15 bp, Homo sapiens
aaaagtttaaataca

SEQ ID NO: 499793 - DNA, 15 bp, Homo sapiens
caaaagtttaaatac

SEQ ID NO: 499794 - DNA, 15 bp, Homo sapiens
tcaaaagtttaaata

SEQ ID NO: 499795 - DNA, 15 bp, Homo sapiens
ctcaaaagtttaaat

SEQ ID NO: 499796 - DNA, 15 bp, Homo sapiens
tctcaaaagtttaaa

SEQ ID NO: 499797 - DNA, 15 bp, Homo sapiens
atctcaaaagtttaa

SEQ ID NO: 499798 - DNA, 15 bp, Homo sapiens
catctcaaaagttta

SEQ ID NO: 499799 - DNA, 15 bp, Homo sapiens
acatctcaaaagttt

SEQ ID NO: 499800 - DNA, 15 bp, Homo sapiens
gacatctcaaaagtt

SEQ ID NO: 499801 - DNA, 15 bp, Homo sapiens
tgacatctcaaaagt

SEQ ID NO: 499802 - DNA, 15 bp, Homo sapiens
ttgacatctcaaaag

SEQ ID NO: 499803 - DNA, 15 bp, Homo sapiens
tttgacatctcaaaa

SEQ ID NO: 499804 - DNA, 15 bp, Homo sapiens
gtttgacatctcaaa

SEQ ID NO: 499805 - DNA, 15 bp, Homo sapiens
agtttgacatctcaa

SEQ ID NO: 499806 - DNA, 15 bp, Homo sapiens
aagtttgacatctca

SEQ ID NO: 499807 - DNA, 15 bp, Homo sapiens
aaagtttgacatctc

SEQ ID NO: 499808 - DNA, 15 bp, Homo sapiens
aaaagtttgacatct

SEQ ID NO: 499809 - DNA, 15 bp, Homo sapiens
caaaagtttgacatc

SEQ ID NO: 499810 - DNA, 15 bp, Homo sapiens
acaaaagtttgacat

SEQ ID NO: 499811 - DNA, 15 bp, Homo sapiens
cacaaaagtttgaca

SEQ ID NO: 499812 - DNA, 15 bp, Homo sapiens
acacaaaagtttgac

SEQ ID NO: 499813 - DNA, 15 bp, Homo sapiens
aacacaaaagtttga

SEQ ID NO: 499814 - DNA, 15 bp, Homo sapiens
aaacacaaaagtttg

SEQ ID NO: 499815 - DNA, 15 bp, Homo sapiens
caaacacaaaagttt

SEQ ID NO: 499816 - DNA, 15 bp, Homo sapiens
tcaaacacaaaagtt

SEQ ID NO: 499817 - DNA, 15 bp, Homo sapiens
ttcaaacacaaaagt

SEQ ID NO: 499818 - DNA, 15 bp, Homo sapiens
tttcaaacacaaaag

SEQ ID NO: 499819 - DNA, 15 bp, Homo sapiens
atttcaaacacaaaa

SEQ ID NO: 499820 - DNA, 15 bp, Homo sapiens
tatttcaaacacaaa

SEQ ID NO: 499821 - DNA, 15 bp, Homo sapiens
atatttcaaacacaa

SEQ ID NO: 499822 - DNA, 15 bp, Homo sapiens
catatttcaaacaca

SEQ ID NO: 499823 - DNA, 15 bp, Homo sapiens
acatatttcaaacac

SEQ ID NO: 499824 - DNA, 15 bp, Homo sapiens
tacatatttcaaaca

SEQ ID NO: 499825 - DNA, 15 bp, Homo sapiens
ttacatatttcaaac

SEQ ID NO: 499826 - DNA, 15 bp, Homo sapiens
tttacatatttcaaa

SEQ ID NO: 499827 - DNA, 15 bp, Homo sapiens
ctttacatatttcaa

SEQ ID NO: 499828 - DNA, 15 bp, Homo sapiens
tctttacatatttca

SEQ ID NO: 499829 - DNA, 15 bp, Homo sapiens
atctttacatatttc

SEQ ID NO: 499830 - DNA, 15 bp, Homo sapiens
catctttacatattt

SEQ ID NO: 499831 - DNA, 15 bp, Homo sapiens
gcatctttacatatt

SEQ ID NO: 499832 - DNA, 15 bp, Homo sapiens
agcatctttacatat

SEQ ID NO: 499833 - DNA, 15 bp, Homo sapiens
tagcatctttacata

SEQ ID NO: 499834 - DNA, 15 bp, Homo sapiens
ttagcatctttacat

SEQ ID NO: 499835 - DNA, 15 bp, Homo sapiens
attagcatctttaca

SEQ ID NO: 499836 - DNA, 15 bp, Homo sapiens
gattagcatctttac

SEQ ID NO: 499837 - DNA, 15 bp, Homo sapiens
agattagcatcttta

SEQ ID NO: 499838 - DNA, 15 bp, Homo sapiens
aagattagcatcttt

SEQ ID NO: 499839 - DNA, 15 bp, Homo sapiens
aaagattagcatctt

SEQ ID NO: 499840 - DNA, 15 bp, Homo sapiens
taaagattagcatct

SEQ ID NO: 499841 - DNA, 15 bp, Homo sapiens
ataaagattagcatc

SEQ ID NO: 499842 - DNA, 15 bp, Homo sapiens
aataaagattagcat

SEQ ID NO: 499843 - DNA, 15 bp, Homo sapiens
taataaagattagca

SEQ ID NO: 499844 - DNA, 15 bp, Homo sapiens
gtaataaagattagc

SEQ ID NO: 499845 - DNA, 15 bp, Homo sapiens
agtaataaagattag

SEQ ID NO: 499846 - DNA, 15 bp, Homo sapiens
cagtaataaagatta

SEQ ID NO: 499847 - DNA, 15 bp, Homo sapiens
gcagtaataaagatt

SEQ ID NO: 499848 - DNA, 15 bp, Homo sapiens
agcagtaataaagat

SEQ ID NO: 499849 - DNA, 15 bp, Homo sapiens
aagcagtaataaaga

SEQ ID NO: 499850 - DNA, 15 bp, Homo sapiens
aaagcagtaataaag

SEQ ID NO: 499851 - DNA, 15 bp, Homo sapiens
aaaagcagtaataaa

SEQ ID NO: 499852 - DNA, 15 bp, Homo sapiens
aaaaagcagtaataa

SEQ ID NO: 499853 - DNA, 15 bp, Homo sapiens
aaaaaagcagtaata

SEQ ID NO: 499854 - DNA, 15 bp, Homo sapiens
aaaaaaagcagtaat

SEQ ID NO: 499855 - DNA, 15 bp, Homo sapiens
aaaaaaaagcagtaa

SEQ ID NO: 499856 - DNA, 15 bp, Homo sapiens
caaaaaaaagcagta

SEQ ID NO: 499857 - DNA, 15 bp, Homo sapiens
tcaaaaaaaagcagt

SEQ ID NO: 499858 - DNA, 15 bp, Homo sapiens
gtcaaaaaaaagcag

SEQ ID NO: 499859 - DNA, 15 bp, Homo sapiens
agtcaaaaaaaagca

SEQ ID NO: 499860 - DNA, 15 bp, Homo sapiens
cagtcaaaaaaaagc

SEQ ID NO: 499861 - DNA, 15 bp, Homo sapiens
tcagtcaaaaaaaag

SEQ ID NO: 499862 - DNA, 15 bp, Homo sapiens
atcagtcaaaaaaaa

SEQ ID NO: 499863 - DNA, 15 bp, Homo sapiens
tatcagtcaaaaaaa

SEQ ID NO: 499864 - DNA, 15 bp, Homo sapiens
ctatcagtcaaaaaa

SEQ ID NO: 499865 - DNA, 15 bp, Homo sapiens
tctatcagtcaaaaa

SEQ ID NO: 499866 - DNA, 15 bp, Homo sapiens
gtctatcagtcaaaa

SEQ ID NO: 499867 - DNA, 15 bp, Homo sapiens
agtctatcagtcaaa

SEQ ID NO: 499868 - DNA, 15 bp, Homo sapiens
aagtctatcagtcaa

SEQ ID NO: 499869 - DNA, 15 bp, Homo sapiens
aaagtctatcagtca

SEQ ID NO: 499870 - DNA, 15 bp, Homo sapiens
gaaagtctatcagtc

SEQ ID NO: 499871 - DNA, 15 bp, Homo sapiens
tgaaagtctatcagt

SEQ ID NO: 499872 - DNA, 15 bp, Homo sapiens
ctgaaagtctatcag

SEQ ID NO: 499873 - DNA, 15 bp, Homo sapiens
actgaaagtctatca

SEQ ID NO: 499874 - DNA, 15 bp, Homo sapiens
tactgaaagtctatc

SEQ ID NO: 499875 - DNA, 15 bp, Homo sapiens
ttactgaaagtctat

SEQ ID NO: 499876 - DNA, 15 bp, Homo sapiens
tttactgaaagtcta

SEQ ID NO: 499877 - DNA, 15 bp, Homo sapiens
ttttactgaaagtct

SEQ ID NO: 499878 - DNA, 15 bp, Homo sapiens
attttactgaaagtc

SEQ ID NO: 499879 - DNA, 15 bp, Homo sapiens
aattttactgaaagt

SEQ ID NO: 499880 - DNA, 15 bp, Homo sapiens
taattttactgaaag

SEQ ID NO: 499881 - DNA, 15 bp, Homo sapiens
ttaattttactgaaa

SEQ ID NO: 499882 - DNA, 15 bp, Homo sapiens
tttaattttactgaa

SEQ ID NO: 499883 - DNA, 15 bp, Homo sapiens
atttaattttactga

SEQ ID NO: 499884 - DNA, 15 bp, Homo sapiens
catttaattttactg

SEQ ID NO: 499885 - DNA, 15 bp, Homo sapiens
acatttaattttact

SEQ ID NO: 499886 - DNA, 15 bp, Homo sapiens
cacatttaattttac

SEQ ID NO: 499887 - DNA, 15 bp, Homo sapiens
tcacatttaatttta

SEQ ID NO: 499888 - DNA, 15 bp, Homo sapiens
ttcacatttaatttt

SEQ ID NO: 499889 - DNA, 15 bp, Homo sapiens
tttcacatttaattt

SEQ ID NO: 499890 - DNA, 15 bp, Homo sapiens
ctttcacatttaatt

SEQ ID NO: 499891 - DNA, 15 bp, Homo sapiens
tctttcacatttaat

SEQ ID NO: 499892 - DNA, 15 bp, Homo sapiens
ctctttcacatttaa

SEQ ID NO: 499893 - DNA, 15 bp, Homo sapiens
actctttcacattta

SEQ ID NO: 499894 - DNA, 15 bp, Homo sapiens
cactctttcacattt

SEQ ID NO: 499895 - DNA, 15 bp, Homo sapiens
tcactctttcacatt

SEQ ID NO: 499896 - DNA, 15 bp, Homo sapiens
atcactctttcacat

SEQ ID NO: 499897 - DNA, 15 bp, Homo sapiens
tatcactctttcaca

SEQ ID NO: 499898 - DNA, 15 bp, Homo sapiens
atatcactctttcac

SEQ ID NO: 499899 - DNA, 15 bp, Homo sapiens
catatcactctttca

SEQ ID NO: 499900 - DNA, 15 bp, Homo sapiens
acatatcactctttc

SEQ ID NO: 499901 - DNA, 15 bp, Homo sapiens
aacatatcactcttt

SEQ ID NO: 499902 - DNA, 15 bp, Homo sapiens
aaacatatcactctt

SEQ ID NO: 499903 - DNA, 15 bp, Homo sapiens
caaacatatcactct

SEQ ID NO: 499904 - DNA, 15 bp, Homo sapiens
ccaaacatatcactc

SEQ ID NO: 499905 - DNA, 15 bp, Homo sapiens
cccaaacatatcact

SEQ ID NO: 499906 - DNA, 15 bp, Homo sapiens
tcccaaacatatcac

SEQ ID NO: 499907 - DNA, 15 bp, Homo sapiens
ttcccaaacatatca

SEQ ID NO: 499908 - DNA, 15 bp, Homo sapiens
cttcccaaacatatc

SEQ ID NO: 499909 - DNA, 15 bp, Homo sapiens
acttcccaaacatat

SEQ ID NO: 499910 - DNA, 15 bp, Homo sapiens
aacttcccaaacata

SEQ ID NO: 499911 - DNA, 15 bp, Homo sapiens
taacttcccaaacat

SEQ ID NO: 499912 - DNA, 15 bp, Homo sapiens
ctaacttcccaaaca

SEQ ID NO: 499913 - DNA, 15 bp, Homo sapiens
actaacttcccaaac

SEQ ID NO: 499914 - DNA, 15 bp, Homo sapiens
cactaacttcccaaa

SEQ ID NO: 499915 - DNA, 15 bp, Homo sapiens
acactaacttcccaa

SEQ ID NO: 499916 - DNA, 15 bp, Homo sapiens
aacactaacttccca

SEQ ID NO: 499917 - DNA, 15 bp, Homo sapiens
caacactaacttccc

SEQ ID NO: 499918 - DNA, 15 bp, Homo sapiens
acaacactaacttcc

SEQ ID NO: 499919 - DNA, 15 bp, Homo sapiens
gacaacactaacttc

SEQ ID NO: 499920 - DNA, 15 bp, Homo sapiens
tgacaacactaactt

SEQ ID NO: 499921 - DNA, 15 bp, Homo sapiens
ctgacaacactaact

SEQ ID NO: 499922 - DNA, 15 bp, Homo sapiens
actgacaacactaac

SEQ ID NO: 499923 - DNA, 15 bp, Homo sapiens
aactgacaacactaa

SEQ ID NO: 499924 - DNA, 15 bp, Homo sapiens
aaactgacaacacta

SEQ ID NO: 499925 - DNA, 15 bp, Homo sapiens
taaactgacaacact

SEQ ID NO: 499926 - DNA, 15 bp, Homo sapiens
ataaactgacaacac

SEQ ID NO: 499927 - DNA, 15 bp, Homo sapiens
cataaactgacaaca

SEQ ID NO: 499928 - DNA, 15 bp, Homo sapiens
tcataaactgacaac

SEQ ID NO: 499929 - DNA, 15 bp, Homo sapiens
ttcataaactgacaa

SEQ ID NO: 499930 - DNA, 15 bp, Homo sapiens
cttcataaactgaca

SEQ ID NO: 499931 - DNA, 15 bp, Homo sapiens
tcttcataaactgac

SEQ ID NO: 499932 - DNA, 15 bp, Homo sapiens
ttcttcataaactga

SEQ ID NO: 499933 - DNA, 15 bp, Homo sapiens
attcttcataaactg

SEQ ID NO: 499934 - DNA, 15 bp, Homo sapiens
tattcttcataaact

SEQ ID NO: 499935 - DNA, 15 bp, Homo sapiens
ctattcttcataaac

SEQ ID NO: 499936 - DNA, 15 bp, Homo sapiens
actattcttcataaa

SEQ ID NO: 499937 - DNA, 15 bp, Homo sapiens
gactattcttcataa

SEQ ID NO: 499938 - DNA, 15 bp, Homo sapiens
agactattcttcata

SEQ ID NO: 499939 - DNA, 15 bp, Homo sapiens
tagactattcttcat

SEQ ID NO: 499940 - DNA, 15 bp, Homo sapiens
gtagactattcttca

SEQ ID NO: 499941 - DNA, 15 bp, Homo sapiens
tgtagactattcttc

SEQ ID NO: 499942 - DNA, 15 bp, Homo sapiens
ctgtagactattctt

SEQ ID NO: 499943 - DNA, 15 bp, Homo sapiens
actgtagactattct

SEQ ID NO: 499944 - DNA, 15 bp, Homo sapiens
aactgtagactattc

SEQ ID NO: 499945 - DNA, 15 bp, Homo sapiens
taactgtagactatt

SEQ ID NO: 499946 - DNA, 15 bp, Homo sapiens
ataactgtagactat

SEQ ID NO: 499947 - DNA, 15 bp, Homo sapiens
aataactgtagacta

SEQ ID NO: 499948 - DNA, 15 bp, Homo sapiens
caataactgtagact

SEQ ID NO: 499949 - DNA, 15 bp, Homo sapiens
ccaataactgtagac

SEQ ID NO: 499950 - DNA, 15 bp, Homo sapiens
cccaataactgtaga

SEQ ID NO: 499951 - DNA, 15 bp, Homo sapiens
tcccaataactgtag

SEQ ID NO: 499952 - DNA, 15 bp, Homo sapiens
ttcccaataactgta

SEQ ID NO: 499953 - DNA, 15 bp, Homo sapiens
tttcccaataactgt

SEQ ID NO: 499954 - DNA, 15 bp, Homo sapiens
atttcccaataactg

SEQ ID NO: 499955 - DNA, 15 bp, Homo sapiens
tatttcccaataact

SEQ ID NO: 499956 - DNA, 15 bp, Homo sapiens
ttatttcccaataac

SEQ ID NO: 499957 - DNA, 15 bp, Homo sapiens
cttatttcccaataa

SEQ ID NO: 499958 - DNA, 15 bp, Homo sapiens
tcttatttcccaata

SEQ ID NO: 499959 - DNA, 15 bp, Homo sapiens
atcttatttcccaat

SEQ ID NO: 499960 - DNA, 15 bp, Homo sapiens
tatcttatttcccaa

SEQ ID NO: 499961 - DNA, 15 bp, Homo sapiens
gtatcttatttccca

SEQ ID NO: 499962 - DNA, 15 bp, Homo sapiens
tgtatcttatttccc

SEQ ID NO: 499963 - DNA, 15 bp, Homo sapiens
atgtatcttatttcc

SEQ ID NO: 499964 - DNA, 15 bp, Homo sapiens
tatgtatcttatttc

SEQ ID NO: 499965 - DNA, 15 bp, Homo sapiens
ttatgtatcttattt

SEQ ID NO: 499966 - DNA, 15 bp, Homo sapiens
tttatgtatcttatt

SEQ ID NO: 499967 - DNA, 15 bp, Homo sapiens
ctttatgtatcttat

SEQ ID NO: 499968 - DNA, 15 bp, Homo sapiens
gctttatgtatctta

SEQ ID NO: 499969 - DNA, 15 bp, Homo sapiens
ggctttatgtatctt

SEQ ID NO: 499970 - DNA, 15 bp, Homo sapiens
aggctttatgtatct

SEQ ID NO: 499971 - DNA, 15 bp, Homo sapiens
gaggctttatgtatc

SEQ ID NO: 499972 - DNA, 15 bp, Homo sapiens
tgaggctttatgtat

SEQ ID NO: 499973 - DNA, 15 bp, Homo sapiens
ctgaggctttatgta

SEQ ID NO: 499974 - DNA, 15 bp, Homo sapiens
tctgaggctttatgt

SEQ ID NO: 499975 - DNA, 15 bp, Homo sapiens
atctgaggctttatg

SEQ ID NO: 499976 - DNA, 15 bp, Homo sapiens
aatctgaggctttat

SEQ ID NO: 499977 - DNA, 15 bp, Homo sapiens
caatctgaggcttta

SEQ ID NO: 499978 - DNA, 15 bp, Homo sapiens
gcaatctgaggcttt

SEQ ID NO: 499979 - DNA, 15 bp, Homo sapiens
tgcaatctgaggctt

SEQ ID NO: 499980 - DNA, 15 bp, Homo sapiens
atgcaatctgaggct

SEQ ID NO: 499981 - DNA, 15 bp, Homo sapiens
aatgcaatctgaggc

SEQ ID NO: 499982 - DNA, 15 bp, Homo sapiens
aaatgcaatctgagg

SEQ ID NO: 499983 - DNA, 15 bp, Homo sapiens
caaatgcaatctgag

SEQ ID NO: 499984 - DNA, 15 bp, Homo sapiens
acaaatgcaatctga

SEQ ID NO: 499985 - DNA, 15 bp, Homo sapiens
cacaaatgcaatctg

SEQ ID NO: 499986 - DNA, 15 bp, Homo sapiens
acacaaatgcaatct

SEQ ID NO: 499987 - DNA, 15 bp, Homo sapiens
aacacaaatgcaatc

SEQ ID NO: 499988 - DNA, 15 bp, Homo sapiens
taacacaaatgcaat

SEQ ID NO: 499989 - DNA, 15 bp, Homo sapiens
ataacacaaatgcaa

SEQ ID NO: 499990 - DNA, 15 bp, Homo sapiens
cataacacaaatgca

SEQ ID NO: 499991 - DNA, 15 bp, Homo sapiens
tcataacacaaatgc

SEQ ID NO: 499992 - DNA, 15 bp, Homo sapiens
atcataacacaaatg

SEQ ID NO: 499993 - DNA, 15 bp, Homo sapiens
aatcataacacaaat

SEQ ID NO: 499994 - DNA, 15 bp, Homo sapiens
taatcataacacaaa

SEQ ID NO: 499995 - DNA, 15 bp, Homo sapiens
ctaatcataacacaa

SEQ ID NO: 499996 - DNA, 15 bp, Homo sapiens
tctaatcataacaca

SEQ ID NO: 499997 - DNA, 15 bp, Homo sapiens
atctaatcataacac

SEQ ID NO: 499998 - DNA, 15 bp, Homo sapiens
tatctaatcataaca

SEQ ID NO: 499999 - DNA, 15 bp, Homo sapiens
ctatctaatcataac

SEQ ID NO: 500000 - DNA, 15 bp, Homo sapiens
tctatctaatcataa

SEQ ID NO: 500001 - DNA, 15 bp, Homo sapiens
atctatctaatcata

SEQ ID NO: 500002 - DNA, 15 bp, Homo sapiens
tatctatctaatcat

SEQ ID NO: 500003 - DNA, 15 bp, Homo sapiens
ttatctatctaatca

SEQ ID NO: 500004 - DNA, 15 bp, Homo sapiens
tttatctatctaatc

SEQ ID NO: 500005 - DNA, 15 bp, Homo sapiens
ctttatctatctaat

SEQ ID NO: 500006 - DNA, 15 bp, Homo sapiens
cctttatctatctaa

SEQ ID NO: 500007 - DNA, 15 bp, Homo sapiens
acctttatctatcta

SEQ ID NO: 500008 - DNA, 15 bp, Homo sapiens
tacctttatctatct

SEQ ID NO: 500009 - DNA, 15 bp, Homo sapiens
atacctttatctatc

SEQ ID NO: 500010 - DNA, 15 bp, Homo sapiens
aatacctttatctat

SEQ ID NO: 500011 - DNA, 15 bp, Homo sapiens
taatacctttatcta

SEQ ID NO: 500012 - DNA, 15 bp, Homo sapiens
ataatacctttatct

SEQ ID NO: 500013 - DNA, 15 bp, Homo sapiens
aataatacctttatc

SEQ ID NO: 500014 - DNA, 15 bp, Homo sapiens
aaataatacctttat

SEQ ID NO: 500015 - DNA, 15 bp, Homo sapiens
caaataataccttta

SEQ ID NO: 500016 - DNA, 15 bp, Homo sapiens
tcaaataataccttt

SEQ ID NO: 500017 - DNA, 15 bp, Homo sapiens
ctcaaataatacctt

SEQ ID NO: 500018 - DNA, 15 bp, Homo sapiens
cctcaaataatacct

SEQ ID NO: 500019 - DNA, 15 bp, Homo sapiens
tcctcaaataatacc

SEQ ID NO: 500020 - DNA, 15 bp, Homo sapiens
ttcctcaaataatac

SEQ ID NO: 500021 - DNA, 15 bp, Homo sapiens
gttcctcaaataata

SEQ ID NO: 500022 - DNA, 15 bp, Homo sapiens
agttcctcaaataat

SEQ ID NO: 500023 - DNA, 15 bp, Homo sapiens
gagttcctcaaataa

SEQ ID NO: 500024 - DNA, 15 bp, Homo sapiens
tgagttcctcaaata

SEQ ID NO: 500025 - DNA, 15 bp, Homo sapiens
atgagttcctcaaat

SEQ ID NO: 500026 - DNA, 15 bp, Homo sapiens
aatgagttcctcaaa

SEQ ID NO: 500027 - DNA, 15 bp, Homo sapiens
caatgagttcctcaa

SEQ ID NO: 500028 - DNA, 15 bp, Homo sapiens
acaatgagttcctca

SEQ ID NO: 500029 - DNA, 15 bp, Homo sapiens
cacaatgagttcctc

SEQ ID NO: 500030 - DNA, 15 bp, Homo sapiens
acacaatgagttcct

SEQ ID NO: 500031 - DNA, 15 bp, Homo sapiens
aacacaatgagttcc

SEQ ID NO: 500032 - DNA, 15 bp, Homo sapiens
caacacaatgagttc

SEQ ID NO: 500033 - DNA, 15 bp, Homo sapiens
tcaacacaatgagtt

SEQ ID NO: 500034 - DNA, 15 bp, Homo sapiens
ttcaacacaatgagt

SEQ ID NO: 500035 - DNA, 15 bp, Homo sapiens
attcaacacaatgag

SEQ ID NO: 500036 - DNA, 15 bp, Homo sapiens
gattcaacacaatga

SEQ ID NO: 500037 - DNA, 15 bp, Homo sapiens
agattcaacacaatg

SEQ ID NO: 500038 - DNA, 15 bp, Homo sapiens
aagattcaacacaat

SEQ ID NO: 500039 - DNA, 15 bp, Homo sapiens
aaagattcaacacaa

SEQ ID NO: 500040 - DNA, 15 bp, Homo sapiens
aaaagattcaacaca

SEQ ID NO: 500041 - DNA, 15 bp, Homo sapiens
aaaaagattcaacac

SEQ ID NO: 500042 - DNA, 15 bp, Homo sapiens
taaaaagattcaaca

SEQ ID NO: 500043 - DNA, 15 bp, Homo sapiens
ttaaaaagattcaac

SEQ ID NO: 500044 - DNA, 15 bp, Homo sapiens
cttaaaaagattcaa

SEQ ID NO: 500045 - DNA, 15 bp, Homo sapiens
tcttaaaaagattca

SEQ ID NO: 500046 - DNA, 15 bp, Homo sapiens
ttcttaaaaagattc

SEQ ID NO: 500047 - DNA, 15 bp, Homo sapiens
tttcttaaaaagatt

SEQ ID NO: 500048 - DNA, 15 bp, Homo sapiens
atttcttaaaaagat

SEQ ID NO: 500049 - DNA, 15 bp, Homo sapiens
tatttcttaaaaaga

SEQ ID NO: 500050 - DNA, 15 bp, Homo sapiens
ttatttcttaaaaag

SEQ ID NO: 500051 - DNA, 15 bp, Homo sapiens
attatttcttaaaaa

SEQ ID NO: 500052 - DNA, 15 bp, Homo sapiens
aattatttcttaaaa

SEQ ID NO: 500053 - DNA, 15 bp, Homo sapiens
caattatttcttaaa

SEQ ID NO: 500054 - DNA, 15 bp, Homo sapiens
tcaattatttcttaa

SEQ ID NO: 500055 - DNA, 15 bp, Homo sapiens
atcaattatttctta

SEQ ID NO: 500056 - DNA, 15 bp, Homo sapiens
aatcaattatttctt

SEQ ID NO: 500057 - DNA, 15 bp, Homo sapiens
aaatcaattatttct

SEQ ID NO: 500058 - DNA, 15 bp, Homo sapiens
gaaatcaattatttc

SEQ ID NO: 500059 - DNA, 15 bp, Homo sapiens
ggaaatcaattattt

SEQ ID NO: 500060 - DNA, 15 bp, Homo sapiens
aggaaatcaattatt

SEQ ID NO: 500061 - DNA, 15 bp, Homo sapiens
caggaaatcaattat

SEQ ID NO: 500062 - DNA, 15 bp, Homo sapiens
tcaggaaatcaatta

SEQ ID NO: 500063 - DNA, 15 bp, Homo sapiens
atcaggaaatcaatt

SEQ ID NO: 500064 - DNA, 15 bp, Homo sapiens
aatcaggaaatcaat

SEQ ID NO: 500065 - DNA, 15 bp, Homo sapiens
gaatcaggaaatcaa

SEQ ID NO: 500066 - DNA, 15 bp, Homo sapiens
tgaatcaggaaatca

SEQ ID NO: 500067 - DNA, 15 bp, Homo sapiens
ttgaatcaggaaatc

SEQ ID NO: 500068 - DNA, 15 bp, Homo sapiens
cttgaatcaggaaat

SEQ ID NO: 500069 - DNA, 15 bp, Homo sapiens
gcttgaatcaggaaa

SEQ ID NO: 500070 - DNA, 15 bp, Homo sapiens
tgcttgaatcaggaa

SEQ ID NO: 500071 - DNA, 15 bp, Homo sapiens
gtgcttgaatcagga

SEQ ID NO: 500072 - DNA, 15 bp, Homo sapiens
ggtgcttgaatcagg

SEQ ID NO: 500073 - DNA, 15 bp, Homo sapiens
tggtgcttgaatcag

SEQ ID NO: 500074 - DNA, 15 bp, Homo sapiens
ctggtgcttgaatca

SEQ ID NO: 500075 - DNA, 15 bp, Homo sapiens
tctggtgcttgaatc

SEQ ID NO: 500076 - DNA, 15 bp, Homo sapiens
ctctggtgcttgaat

SEQ ID NO: 500077 - DNA, 15 bp, Homo sapiens
tctctggtgcttgaa

SEQ ID NO: 500078 - DNA, 15 bp, Homo sapiens
gtctctggtgcttga

SEQ ID NO: 500079 - DNA, 15 bp, Homo sapiens
tgtctctggtgcttg

SEQ ID NO: 500080 - DNA, 15 bp, Homo sapiens
ctgtctctggtgctt

SEQ ID NO: 500081 - DNA, 15 bp, Homo sapiens
tctgtctctggtgct

SEQ ID NO: 500082 - DNA, 15 bp, Homo sapiens
ttctgtctctggtgc

SEQ ID NO: 500083 - DNA, 15 bp, Homo sapiens
tttctgtctctggtg

SEQ ID NO: 500084 - DNA, 15 bp, Homo sapiens
ttttctgtctctggt

SEQ ID NO: 500085 - DNA, 15 bp, Homo sapiens
tttttctgtctctgg

SEQ ID NO: 500086 - DNA, 15 bp, Homo sapiens
ttttttctgtctctg

SEQ ID NO: 500087 - DNA, 15 bp, Homo sapiens
tttttttctgtctct

SEQ ID NO: 500088 - DNA, 15 bp, Homo sapiens
ttttttttctgtctc

SEQ ID NO: 500089 - DNA, 15 bp, Homo sapiens
cttttttttctgtct

SEQ ID NO: 500090 - DNA, 15 bp, Homo sapiens
ccttttttttctgtc

SEQ ID NO: 500091 - DNA, 15 bp, Homo sapiens
tccttttttttctgt

SEQ ID NO: 500092 - DNA, 15 bp, Homo sapiens
ttccttttttttctg

SEQ ID NO: 500093 - DNA, 15 bp, Homo sapiens
cttccttttttttct

SEQ ID NO: 500094 - DNA, 15 bp, Homo sapiens
acttccttttttttc

SEQ ID NO: 500095 - DNA, 15 bp, Homo sapiens
tacttcctttttttt

SEQ ID NO: 500096 - DNA, 15 bp, Homo sapiens
ttacttccttttttt

SEQ ID NO: 500097 - DNA, 15 bp, Homo sapiens
attacttcctttttt

SEQ ID NO: 500098 - DNA, 15 bp, Homo sapiens
gattacttccttttt

SEQ ID NO: 500099 - DNA, 15 bp, Homo sapiens
tgattacttcctttt

SEQ ID NO: 500100 - DNA, 15 bp, Homo sapiens
ttgattacttccttt

SEQ ID NO: 500101 - DNA, 15 bp, Homo sapiens
cttgattacttcctt

SEQ ID NO: 500102 - DNA, 15 bp, Homo sapiens
acttgattacttcct

SEQ ID NO: 500103 - DNA, 15 bp, Homo sapiens
gacttgattacttcc

SEQ ID NO: 500104 - DNA, 15 bp, Homo sapiens
agacttgattacttc

SEQ ID NO: 500105 - DNA, 15 bp, Homo sapiens
cagacttgattactt

SEQ ID NO: 500106 - DNA, 15 bp, Homo sapiens
gcagacttgattact

SEQ ID NO: 500107 - DNA, 15 bp, Homo sapiens
agcagacttgattac

SEQ ID NO: 500108 - DNA, 15 bp, Homo sapiens
aagcagacttgatta

SEQ ID NO: 500109 - DNA, 15 bp, Homo sapiens
aaagcagacttgatt

SEQ ID NO: 500110 - DNA, 15 bp, Homo sapiens
taaagcagacttgat

SEQ ID NO: 500111 - DNA, 15 bp, Homo sapiens
ttaaagcagacttga

SEQ ID NO: 500112 - DNA, 15 bp, Homo sapiens
attaaagcagacttg

SEQ ID NO: 500113 - DNA, 15 bp, Homo sapiens
cattaaagcagactt

SEQ ID NO: 500114 - DNA, 15 bp, Homo sapiens
tcattaaagcagact

SEQ ID NO: 500115 - DNA, 15 bp, Homo sapiens
atcattaaagcagac

SEQ ID NO: 500116 - DNA, 15 bp, Homo sapiens
tatcattaaagcaga

SEQ ID NO: 500117 - DNA, 15 bp, Homo sapiens
gtatcattaaagcag

SEQ ID NO: 500118 - DNA, 15 bp, Homo sapiens
agtatcattaaagca

SEQ ID NO: 500119 - DNA, 15 bp, Homo sapiens
aagtatcattaaagc

SEQ ID NO: 500120 - DNA, 15 bp, Homo sapiens
taagtatcattaaag

SEQ ID NO: 500121 - DNA, 15 bp, Homo sapiens
ataagtatcattaaa

SEQ ID NO: 500122 - DNA, 15 bp, Homo sapiens
aataagtatcattaa

SEQ ID NO: 500123 - DNA, 15 bp, Homo sapiens
caataagtatcatta

SEQ ID NO: 500124 - DNA, 15 bp, Homo sapiens
tcaataagtatcatt

SEQ ID NO: 500125 - DNA, 15 bp, Homo sapiens
gtcaataagtatcat

SEQ ID NO: 500126 - DNA, 15 bp, Homo sapiens
tgtcaataagtatca

SEQ ID NO: 500127 - DNA, 15 bp, Homo sapiens
gtgtcaataagtatc

SEQ ID NO: 500128 - DNA, 15 bp, Homo sapiens
tgtgtcaataagtat

SEQ ID NO: 500129 - DNA, 15 bp, Homo sapiens
atgtgtcaataagta

SEQ ID NO: 500130 - DNA, 15 bp, Homo sapiens
tatgtgtcaataagt

SEQ ID NO: 500131 - DNA, 15 bp, Homo sapiens
atatgtgtcaataag

SEQ ID NO: 500132 - DNA, 15 bp, Homo sapiens
gatatgtgtcaataa

SEQ ID NO: 500133 - DNA, 15 bp, Homo sapiens
tgatatgtgtcaata

SEQ ID NO: 500134 - DNA, 15 bp, Homo sapiens
ctgatatgtgtcaat

SEQ ID NO: 500135 - DNA, 15 bp, Homo sapiens
tctgatatgtgtcaa

SEQ ID NO: 500136 - DNA, 15 bp, Homo sapiens
ttctgatatgtgtca

SEQ ID NO: 500137 - DNA, 15 bp, Homo sapiens
tttctgatatgtgtc

SEQ ID NO: 500138 - DNA, 15 bp, Homo sapiens
ttttctgatatgtgt

SEQ ID NO: 500139 - DNA, 15 bp, Homo sapiens
attttctgatatgtg

SEQ ID NO: 500140 - DNA, 15 bp, Homo sapiens
cattttctgatatgt

SEQ ID NO: 500141 - DNA, 15 bp, Homo sapiens
tcattttctgatatg

SEQ ID NO: 500142 - DNA, 15 bp, Homo sapiens
atcattttctgatat

SEQ ID NO: 500143 - DNA, 15 bp, Homo sapiens
aatcattttctgata

SEQ ID NO: 500144 - DNA, 15 bp, Homo sapiens
taatcattttctgat

SEQ ID NO: 500145 - DNA, 15 bp, Homo sapiens
ttaatcattttctga

SEQ ID NO: 500146 - DNA, 15 bp, Homo sapiens
tttaatcattttctg

SEQ ID NO: 500147 - DNA, 15 bp, Homo sapiens
gtttaatcattttct

SEQ ID NO: 500148 - DNA, 15 bp, Homo sapiens
tgtttaatcattttc

SEQ ID NO: 500149 - DNA, 15 bp, Homo sapiens
gtgtttaatcatttt

SEQ ID NO: 500150 - DNA, 15 bp, Homo sapiens
agtgtttaatcattt

SEQ ID NO: 500151 - DNA, 15 bp, Homo sapiens
tagtgtttaatcatt

SEQ ID NO: 500152 - DNA, 15 bp, Homo sapiens
atagtgtttaatcat

SEQ ID NO: 500153 - DNA, 15 bp, Homo sapiens
catagtgtttaatca

SEQ ID NO: 500154 - DNA, 15 bp, Homo sapiens
ccatagtgtttaatc

SEQ ID NO: 500155 - DNA, 15 bp, Homo sapiens
tccatagtgtttaat

SEQ ID NO: 500156 - DNA, 15 bp, Homo sapiens
gtccatagtgtttaa

SEQ ID NO: 500157 - DNA, 15 bp, Homo sapiens
agtccatagtgttta

SEQ ID NO: 500158 - DNA, 15 bp, Homo sapiens
cagtccatagtgttt

SEQ ID NO: 500159 - DNA, 15 bp, Homo sapiens
acagtccatagtgtt

SEQ ID NO: 500160 - DNA, 15 bp, Homo sapiens
tacagtccatagtgt

SEQ ID NO: 500161 - DNA, 15 bp, Homo sapiens
atacagtccatagtg

SEQ ID NO: 500162 - DNA, 15 bp, Homo sapiens
tatacagtccatagt

SEQ ID NO: 500163 - DNA, 15 bp, Homo sapiens
ttatacagtccatag

SEQ ID NO: 500164 - DNA, 15 bp, Homo sapiens
attatacagtccata

SEQ ID NO: 500165 - DNA, 15 bp, Homo sapiens
tattatacagtccat

SEQ ID NO: 500166 - DNA, 15 bp, Homo sapiens
ttattatacagtcca

SEQ ID NO: 500167 - DNA, 15 bp, Homo sapiens
cttattatacagtcc

SEQ ID NO: 500168 - DNA, 15 bp, Homo sapiens
gcttattatacagtc

SEQ ID NO: 500169 - DNA, 15 bp, Homo sapiens
tgcttattatacagt

SEQ ID NO: 500170 - DNA, 15 bp, Homo sapiens
atgcttattatacag

SEQ ID NO: 500171 - DNA, 15 bp, Homo sapiens
aatgcttattataca

SEQ ID NO: 500172 - DNA, 15 bp, Homo sapiens
gaatgcttattatac

SEQ ID NO: 500173 - DNA, 15 bp, Homo sapiens
tgaatgcttattata

SEQ ID NO: 500174 - DNA, 15 bp, Homo sapiens
gtgaatgcttattat

SEQ ID NO: 500175 - DNA, 15 bp, Homo sapiens
tgtgaatgcttatta

SEQ ID NO: 500176 - DNA, 15 bp, Homo sapiens
atgtgaatgcttatt

SEQ ID NO: 500177 - DNA, 15 bp, Homo sapiens
tatgtgaatgcttat

SEQ ID NO: 500178 - DNA, 15 bp, Homo sapiens
atatgtgaatgctta

SEQ ID NO: 500179 - DNA, 15 bp, Homo sapiens
catatgtgaatgctt

SEQ ID NO: 500180 - DNA, 15 bp, Homo sapiens
acatatgtgaatgct

SEQ ID NO: 500181 - DNA, 15 bp, Homo sapiens
aacatatgtgaatgc

SEQ ID NO: 500182 - DNA, 15 bp, Homo sapiens
aaacatatgtgaatg

SEQ ID NO: 500183 - DNA, 15 bp, Homo sapiens
gaaacatatgtgaat

SEQ ID NO: 500184 - DNA, 15 bp, Homo sapiens
agaaacatatgtgaa

SEQ ID NO: 500185 - DNA, 15 bp, Homo sapiens
aagaaacatatgtga

SEQ ID NO: 500186 - DNA, 15 bp, Homo sapiens
aaagaaacatatgtg

SEQ ID NO: 500187 - DNA, 15 bp, Homo sapiens
caaagaaacatatgt

SEQ ID NO: 500188 - DNA, 15 bp, Homo sapiens
tcaaagaaacatatg

SEQ ID NO: 500189 - DNA, 15 bp, Homo sapiens
gtcaaagaaacatat

SEQ ID NO: 500190 - DNA, 15 bp, Homo sapiens
ggtcaaagaaacata

SEQ ID NO: 500191 - DNA, 15 bp, Homo sapiens
tggtcaaagaaacat

SEQ ID NO: 500192 - DNA, 15 bp, Homo sapiens
ttggtcaaagaaaca

SEQ ID NO: 500193 - DNA, 15 bp, Homo sapiens
cttggtcaaagaaac

SEQ ID NO: 500194 - DNA, 15 bp, Homo sapiens
gcttggtcaaagaaa

SEQ ID NO: 500195 - DNA, 15 bp, Homo sapiens
ggcttggtcaaagaa

SEQ ID NO: 500196 - DNA, 15 bp, Homo sapiens
aggcttggtcaaaga

SEQ ID NO: 500197 - DNA, 15 bp, Homo sapiens
taggcttggtcaaag

SEQ ID NO: 500198 - DNA, 15 bp, Homo sapiens
ctaggcttggtcaaa

SEQ ID NO: 500199 - DNA, 15 bp, Homo sapiens
gctaggcttggtcaa

SEQ ID NO: 500200 - DNA, 15 bp, Homo sapiens
agctaggcttggtca

SEQ ID NO: 500201 - DNA, 15 bp, Homo sapiens
aagctaggcttggtc

SEQ ID NO: 500202 - DNA, 15 bp, Homo sapiens
aaagctaggcttggt

SEQ ID NO: 500203 - DNA, 15 bp, Homo sapiens
taaagctaggcttgg

SEQ ID NO: 500204 - DNA, 15 bp, Homo sapiens
ataaagctaggcttg

SEQ ID NO: 500205 - DNA, 15 bp, Homo sapiens
tataaagctaggctt

SEQ ID NO: 500206 - DNA, 15 bp, Homo sapiens
ttataaagctaggct

SEQ ID NO: 500207 - DNA, 15 bp, Homo sapiens
attataaagctaggc

SEQ ID NO: 500208 - DNA, 15 bp, Homo sapiens
tattataaagctagg

SEQ ID NO: 500209 - DNA, 15 bp, Homo sapiens
gtattataaagctag

SEQ ID NO: 500210 - DNA, 15 bp, Homo sapiens
tgtattataaagcta

SEQ ID NO: 500211 - DNA, 15 bp, Homo sapiens
ctgtattataaagct

SEQ ID NO: 500212 - DNA, 15 bp, Homo sapiens
actgtattataaagc

SEQ ID NO: 500213 - DNA, 15 bp, Homo sapiens
gactgtattataaag

SEQ ID NO: 500214 - DNA, 15 bp, Homo sapiens
agactgtattataaa

SEQ ID NO: 500215 - DNA, 15 bp, Homo sapiens
aagactgtattataa

SEQ ID NO: 500216 - DNA, 15 bp, Homo sapiens
gaagactgtattata

SEQ ID NO: 500217 - DNA, 15 bp, Homo sapiens
agaagactgtattat

SEQ ID NO: 500218 - DNA, 15 bp, Homo sapiens
gagaagactgtatta

SEQ ID NO: 500219 - DNA, 15 bp, Homo sapiens
agagaagactgtatt

SEQ ID NO: 500220 - DNA, 15 bp, Homo sapiens
cagagaagactgtat

SEQ ID NO: 500221 - DNA, 15 bp, Homo sapiens
acagagaagactgta

SEQ ID NO: 500222 - DNA, 15 bp, Homo sapiens
gacagagaagactgt

SEQ ID NO: 500223 - DNA, 15 bp, Homo sapiens
tgacagagaagactg

SEQ ID NO: 500224 - DNA, 15 bp, Homo sapiens
ctgacagagaagact

SEQ ID NO: 500225 - DNA, 15 bp, Homo sapiens
cctgacagagaagac

SEQ ID NO: 500226 - DNA, 15 bp, Homo sapiens
ccctgacagagaaga

SEQ ID NO: 500227 - DNA, 15 bp, Homo sapiens
tccctgacagagaag

SEQ ID NO: 500228 - DNA, 15 bp, Homo sapiens
atccctgacagagaa

SEQ ID NO: 500229 - DNA, 15 bp, Homo sapiens
aatccctgacagaga

SEQ ID NO: 500230 - DNA, 15 bp, Homo sapiens
caatccctgacagag

SEQ ID NO: 500231 - DNA, 15 bp, Homo sapiens
ccaatccctgacaga

SEQ ID NO: 500232 - DNA, 15 bp, Homo sapiens
accaatccctgacag

SEQ ID NO: 500233 - DNA, 15 bp, Homo sapiens
aaccaatccctgaca

SEQ ID NO: 500234 - DNA, 15 bp, Homo sapiens
gaaccaatccctgac

SEQ ID NO: 500235 - DNA, 15 bp, Homo sapiens
ggaaccaatccctga

SEQ ID NO: 500236 - DNA, 15 bp, Homo sapiens
tggaaccaatccctg

SEQ ID NO: 500237 - DNA, 15 bp, Homo sapiens
ttggaaccaatccct

SEQ ID NO: 500238 - DNA, 15 bp, Homo sapiens
cttggaaccaatccc

SEQ ID NO: 500239 - DNA, 15 bp, Homo sapiens
tcttggaaccaatcc

SEQ ID NO: 500240 - DNA, 15 bp, Homo sapiens
ttcttggaaccaatc

SEQ ID NO: 500241 - DNA, 15 bp, Homo sapiens
gttcttggaaccaat

SEQ ID NO: 500242 - DNA, 15 bp, Homo sapiens
ggttcttggaaccaa

SEQ ID NO: 500243 - DNA, 15 bp, Homo sapiens
tggttcttggaacca

SEQ ID NO: 500244 - DNA, 15 bp, Homo sapiens
gtggttcttggaacc

SEQ ID NO: 500245 - DNA, 15 bp, Homo sapiens
agtggttcttggaac

SEQ ID NO: 500246 - DNA, 15 bp, Homo sapiens
gagtggttcttggaa

SEQ ID NO: 500247 - DNA, 15 bp, Homo sapiens
ggagtggttcttgga

SEQ ID NO: 500248 - DNA, 15 bp, Homo sapiens
gggagtggttcttgg

SEQ ID NO: 500249 - DNA, 15 bp, Homo sapiens
ggggagtggttcttg

SEQ ID NO: 500250 - DNA, 15 bp, Homo sapiens
tggggagtggttctt

SEQ ID NO: 500251 - DNA, 15 bp, Homo sapiens
ttggggagtggttct

SEQ ID NO: 500252 - DNA, 15 bp, Homo sapiens
tttggggagtggttc

SEQ ID NO: 500253 - DNA, 15 bp, Homo sapiens
gtttggggagtggtt

SEQ ID NO: 500254 - DNA, 15 bp, Homo sapiens
ggtttggggagtggt

SEQ ID NO: 500255 - DNA, 15 bp, Homo sapiens
gggtttggggagtgg

SEQ ID NO: 500256 - DNA, 15 bp, Homo sapiens
ggggtttggggagtg

SEQ ID NO: 500257 - DNA, 15 bp, Homo sapiens
aggggtttggggagt

SEQ ID NO: 500258 - DNA, 15 bp, Homo sapiens
caggggtttggggag

SEQ ID NO: 500259 - DNA, 15 bp, Homo sapiens
gcaggggtttgggga

SEQ ID NO: 500260 - DNA, 15 bp, Homo sapiens
ggcaggggtttgggg

SEQ ID NO: 500261 - DNA, 15 bp, Homo sapiens
gggcaggggtttggg

SEQ ID NO: 500262 - DNA, 15 bp, Homo sapiens
tgggcaggggtttgg

SEQ ID NO: 500263 - DNA, 15 bp, Homo sapiens
gtgggcaggggtttg

SEQ ID NO: 500264 - DNA, 15 bp, Homo sapiens
tgtgggcaggggttt

SEQ ID NO: 500265 - DNA, 15 bp, Homo sapiens
atgtgggcaggggtt

SEQ ID NO: 500266 - DNA, 15 bp, Homo sapiens
gatgtgggcaggggt

SEQ ID NO: 500267 - DNA, 15 bp, Homo sapiens
agatgtgggcagggg

SEQ ID NO: 500268 - DNA, 15 bp, Homo sapiens
aagatgtgggcaggg

SEQ ID NO: 500269 - DNA, 15 bp, Homo sapiens
taagatgtgggcagg

SEQ ID NO: 500270 - DNA, 15 bp, Homo sapiens
gtaagatgtgggcag

SEQ ID NO: 500271 - DNA, 15 bp, Homo sapiens
agtaagatgtgggca

SEQ ID NO: 500272 - DNA, 15 bp, Homo sapiens
gagtaagatgtgggc

SEQ ID NO: 500273 - DNA, 15 bp, Homo sapiens
ggagtaagatgtggg

SEQ ID NO: 500274 - DNA, 15 bp, Homo sapiens
gggagtaagatgtgg

SEQ ID NO: 500275 - DNA, 15 bp, Homo sapiens
tgggagtaagatgtg

SEQ ID NO: 500276 - DNA, 15 bp, Homo sapiens
atgggagtaagatgt

SEQ ID NO: 500277 - DNA, 15 bp, Homo sapiens
catgggagtaagatg

SEQ ID NO: 500278 - DNA, 15 bp, Homo sapiens
tcatgggagtaagat

SEQ ID NO: 500279 - DNA, 15 bp, Homo sapiens
ttcatgggagtaaga

SEQ ID NO: 500280 - DNA, 15 bp, Homo sapiens
gttcatgggagtaag

SEQ ID NO: 500281 - DNA, 15 bp, Homo sapiens
tgttcatgggagtaa

SEQ ID NO: 500282 - DNA, 15 bp, Homo sapiens
gtgttcatgggagta

SEQ ID NO: 500283 - DNA, 15 bp, Homo sapiens
agtgttcatgggagt

SEQ ID NO: 500284 - DNA, 15 bp, Homo sapiens
tagtgttcatgggag

SEQ ID NO: 500285 - DNA, 15 bp, Homo sapiens
ttagtgttcatggga

SEQ ID NO: 500286 - DNA, 15 bp, Homo sapiens
tttagtgttcatggg

SEQ ID NO: 500287 - DNA, 15 bp, Homo sapiens
ttttagtgttcatgg

SEQ ID NO: 500288 - DNA, 15 bp, Homo sapiens
attttagtgttcatg

SEQ ID NO: 500289 - DNA, 15 bp, Homo sapiens
gattttagtgttcat

SEQ ID NO: 500290 - DNA, 15 bp, Homo sapiens
ggattttagtgttca

SEQ ID NO: 500291 - DNA, 15 bp, Homo sapiens
tggattttagtgttc

SEQ ID NO: 500292 - DNA, 15 bp, Homo sapiens
gtggattttagtgtt

SEQ ID NO: 500293 - DNA, 15 bp, Homo sapiens
tgtggattttagtgt

SEQ ID NO: 500294 - DNA, 15 bp, Homo sapiens
ctgtggattttagtg

SEQ ID NO: 500295 - DNA, 15 bp, Homo sapiens
tctgtggattttagt

SEQ ID NO: 500296 - DNA, 15 bp, Homo sapiens
atctgtggattttag

SEQ ID NO: 500297 - DNA, 15 bp, Homo sapiens
catctgtggatttta

SEQ ID NO: 500298 - DNA, 15 bp, Homo sapiens
gcatctgtggatttt

SEQ ID NO: 500299 - DNA, 15 bp, Homo sapiens
agcatctgtggattt

SEQ ID NO: 500300 - DNA, 15 bp, Homo sapiens
gagcatctgtggatt

SEQ ID NO: 500301 - DNA, 15 bp, Homo sapiens
tgagcatctgtggat

SEQ ID NO: 500302 - DNA, 15 bp, Homo sapiens
ttgagcatctgtgga

SEQ ID NO: 500303 - DNA, 15 bp, Homo sapiens
cttgagcatctgtgg

SEQ ID NO: 500304 - DNA, 15 bp, Homo sapiens
acttgagcatctgtg

SEQ ID NO: 500305 - DNA, 15 bp, Homo sapiens
gacttgagcatctgt

SEQ ID NO: 500306 - DNA, 15 bp, Homo sapiens
ggacttgagcatctg

SEQ ID NO: 500307 - DNA, 15 bp, Homo sapiens
gtcagggacttgagc

SEQ ID NO: 500308 - DNA, 15 bp, Homo sapiens
agtcagggacttgag

SEQ ID NO: 500309 - DNA, 15 bp, Homo sapiens
aagtcagggacttga

SEQ ID NO: 500310 - DNA, 15 bp, Homo sapiens
taagtcagggacttg

SEQ ID NO: 500311 - DNA, 15 bp, Homo sapiens
ttaagtcagggactt

SEQ ID NO: 500312 - DNA, 15 bp, Homo sapiens
cttaagtcagggact

SEQ ID NO: 500313 - DNA, 15 bp, Homo sapiens
tcttaagtcagggac

SEQ ID NO: 500314 - DNA, 15 bp, Homo sapiens
atcttaagtcaggga

SEQ ID NO: 500315 - DNA, 15 bp, Homo sapiens
catcttaagtcaggg

SEQ ID NO: 500316 - DNA, 15 bp, Homo sapiens
acatcttaagtcagg

SEQ ID NO: 500317 - DNA, 15 bp, Homo sapiens
gacatcttaagtcag

SEQ ID NO: 500318 - DNA, 15 bp, Homo sapiens
tgacatcttaagtca

SEQ ID NO: 500319 - DNA, 15 bp, Homo sapiens
atgacatcttaagtc

SEQ ID NO: 500320 - DNA, 15 bp, Homo sapiens
tatgacatcttaagt

SEQ ID NO: 500321 - DNA, 15 bp, Homo sapiens
ctatgacatcttaag

SEQ ID NO: 500322 - DNA, 15 bp, Homo sapiens
actatgacatcttaa

SEQ ID NO: 500323 - DNA, 15 bp, Homo sapiens
tactatgacatctta

SEQ ID NO: 500324 - DNA, 15 bp, Homo sapiens
atactatgacatctt

SEQ ID NO: 500325 - DNA, 15 bp, Homo sapiens
aatactatgacatct

SEQ ID NO: 500326 - DNA, 15 bp, Homo sapiens
aaatactatgacatc

SEQ ID NO: 500327 - DNA, 15 bp, Homo sapiens
caaatactatgacat

SEQ ID NO: 500328 - DNA, 15 bp, Homo sapiens
gcaaatactatgaca

SEQ ID NO: 500329 - DNA, 15 bp, Homo sapiens
tgcaaatactatgac

SEQ ID NO: 500330 - DNA, 15 bp, Homo sapiens
atgcaaatactatga

SEQ ID NO: 500331 - DNA, 15 bp, Homo sapiens
tatgcaaatactatg

SEQ ID NO: 500332 - DNA, 15 bp, Homo sapiens
atatgcaaatactat

SEQ ID NO: 500333 - DNA, 15 bp, Homo sapiens
tatatgcaaatacta

SEQ ID NO: 500334 - DNA, 15 bp, Homo sapiens
ttatatgcaaatact

SEQ ID NO: 500335 - DNA, 15 bp, Homo sapiens
tttatatgcaaatac

SEQ ID NO: 500336 - DNA, 15 bp, Homo sapiens
gtttatatgcaaata

SEQ ID NO: 500337 - DNA, 15 bp, Homo sapiens
agtttatatgcaaat

SEQ ID NO: 500338 - DNA, 15 bp, Homo sapiens
tagtttatatgcaaa

SEQ ID NO: 500339 - DNA, 15 bp, Homo sapiens
atagtttatatgcaa

SEQ ID NO: 500340 - DNA, 15 bp, Homo sapiens
tatagtttatatgca

SEQ ID NO: 500341 - DNA, 15 bp, Homo sapiens
gtatagtttatatgc

SEQ ID NO: 500342 - DNA, 15 bp, Homo sapiens
tgtatagtttatatg

SEQ ID NO: 500343 - DNA, 15 bp, Homo sapiens
gtgtatagtttatat

SEQ ID NO: 500344 - DNA, 15 bp, Homo sapiens
tgtgtatagtttata

SEQ ID NO: 500345 - DNA, 15 bp, Homo sapiens
atgtgtatagtttat

SEQ ID NO: 500346 - DNA, 15 bp, Homo sapiens
gatgtgtatagttta

SEQ ID NO: 500347 - DNA, 15 bp, Homo sapiens
ggatgtgtatagttt

SEQ ID NO: 500348 - DNA, 15 bp, Homo sapiens
aggatgtgtatagtt

SEQ ID NO: 500349 - DNA, 15 bp, Homo sapiens
gaggatgtgtatagt

SEQ ID NO: 500350 - DNA, 15 bp, Homo sapiens
ggaggatgtgtatag

SEQ ID NO: 500351 - DNA, 15 bp, Homo sapiens
gggaggatgtgtata

SEQ ID NO: 500352 - DNA, 15 bp, Homo sapiens
tgggaggatgtgtat

SEQ ID NO: 500353 - DNA, 15 bp, Homo sapiens
atgggaggatgtgta

SEQ ID NO: 500354 - DNA, 15 bp, Homo sapiens
tatgggaggatgtgt

SEQ ID NO: 500355 - DNA, 15 bp, Homo sapiens
atatgggaggatgtg

SEQ ID NO: 500356 - DNA, 15 bp, Homo sapiens
tatatgggaggatgt

SEQ ID NO: 500357 - DNA, 15 bp, Homo sapiens
atatatgggaggatg

SEQ ID NO: 500358 - DNA, 15 bp, Homo sapiens
aatatatgggaggat

SEQ ID NO: 500359 - DNA, 15 bp, Homo sapiens
aaatatatgggagga

SEQ ID NO: 500360 - DNA, 15 bp, Homo sapiens
aaaatatatgggagg

SEQ ID NO: 500361 - DNA, 15 bp, Homo sapiens
aaaaatatatgggag

SEQ ID NO: 500362 - DNA, 15 bp, Homo sapiens
taaaaatatatggga

SEQ ID NO: 500363 - DNA, 15 bp, Homo sapiens
ttaaaaatatatggg

SEQ ID NO: 500364 - DNA, 15 bp, Homo sapiens
attaaaaatatatgg

SEQ ID NO: 500365 - DNA, 15 bp, Homo sapiens
aattaaaaatatatg

SEQ ID NO: 500366 - DNA, 15 bp, Homo sapiens
taattaaaaatatat

SEQ ID NO: 500367 - DNA, 15 bp, Homo sapiens
ataattaaaaatata

SEQ ID NO: 500368 - DNA, 15 bp, Homo sapiens
gataattaaaaatat

SEQ ID NO: 500369 - DNA, 15 bp, Homo sapiens
agataattaaaaata

SEQ ID NO: 500370 - DNA, 15 bp, Homo sapiens
aagataattaaaaat

SEQ ID NO: 500371 - DNA, 15 bp, Homo sapiens
gaagataattaaaaa

SEQ ID NO: 500372 - DNA, 15 bp, Homo sapiens
tgaagataattaaaa

SEQ ID NO: 500373 - DNA, 15 bp, Homo sapiens
ctgaagataattaaa

SEQ ID NO: 500374 - DNA, 15 bp, Homo sapiens
tctgaagataattaa

SEQ ID NO: 500375 - DNA, 15 bp, Homo sapiens
atctgaagataatta

SEQ ID NO: 500376 - DNA, 15 bp, Homo sapiens
aatctgaagataatt

SEQ ID NO: 500377 - DNA, 15 bp, Homo sapiens
taatctgaagataat

SEQ ID NO: 500378 - DNA, 15 bp, Homo sapiens
gtaatctgaagataa

SEQ ID NO: 500379 - DNA, 15 bp, Homo sapiens
agtaatctgaagata

SEQ ID NO: 500380 - DNA, 15 bp, Homo sapiens
aagtaatctgaagat

SEQ ID NO: 500381 - DNA, 15 bp, Homo sapiens
taagtaatctgaaga

SEQ ID NO: 500382 - DNA, 15 bp, Homo sapiens
ataagtaatctgaag

SEQ ID NO: 500383 - DNA, 15 bp, Homo sapiens
tataagtaatctgaa

SEQ ID NO: 500384 - DNA, 15 bp, Homo sapiens
ttataagtaatctga

SEQ ID NO: 500385 - DNA, 15 bp, Homo sapiens
attataagtaatctg

SEQ ID NO: 500386 - DNA, 15 bp, Homo sapiens
tattataagtaatct

SEQ ID NO: 500387 - DNA, 15 bp, Homo sapiens
atattataagtaatc

SEQ ID NO: 500388 - DNA, 15 bp, Homo sapiens
gatattataagtaat

SEQ ID NO: 500389 - DNA, 15 bp, Homo sapiens
agatattataagtaa

SEQ ID NO: 500390 - DNA, 15 bp, Homo sapiens
tagatattataagta

SEQ ID NO: 500391 - DNA, 15 bp, Homo sapiens
ttagatattataagt

SEQ ID NO: 500392 - DNA, 15 bp, Homo sapiens
attagatattataag

SEQ ID NO: 500393 - DNA, 15 bp, Homo sapiens
tattagatattataa

SEQ ID NO: 500394 - DNA, 15 bp, Homo sapiens
gtattagatattata

SEQ ID NO: 500395 - DNA, 15 bp, Homo sapiens
tgtattagatattat

SEQ ID NO: 500396 - DNA, 15 bp, Homo sapiens
ttgtattagatatta

SEQ ID NO: 500397 - DNA, 15 bp, Homo sapiens
attgtattagatatt

SEQ ID NO: 500398 - DNA, 15 bp, Homo sapiens
tattgtattagatat

SEQ ID NO: 500399 - DNA, 15 bp, Homo sapiens
atattgtattagata

SEQ ID NO: 500400 - DNA, 15 bp, Homo sapiens
tatattgtattagat

SEQ ID NO: 500401 - DNA, 15 bp, Homo sapiens
ttatattgtattaga

SEQ ID NO: 500402 - DNA, 15 bp, Homo sapiens
tttatattgtattag

SEQ ID NO: 500403 - DNA, 15 bp, Homo sapiens
atttatattgtatta

SEQ ID NO: 500404 - DNA, 15 bp, Homo sapiens
catttatattgtatt

SEQ ID NO: 500405 - DNA, 15 bp, Homo sapiens
acatttatattgtat

SEQ ID NO: 500406 - DNA, 15 bp, Homo sapiens
aacatttatattgta

SEQ ID NO: 500407 - DNA, 15 bp, Homo sapiens
caacatttatattgt

SEQ ID NO: 500408 - DNA, 15 bp, Homo sapiens
acaacatttatattg

SEQ ID NO: 500409 - DNA, 15 bp, Homo sapiens
tacaacatttatatt

SEQ ID NO: 500410 - DNA, 15 bp, Homo sapiens
atacaacatttatat

SEQ ID NO: 500411 - DNA, 15 bp, Homo sapiens
tatacaacatttata

SEQ ID NO: 500412 - DNA, 15 bp, Homo sapiens
ttatacaacatttat

SEQ ID NO: 500413 - DNA, 15 bp, Homo sapiens
tttatacaacattta

SEQ ID NO: 500414 - DNA, 15 bp, Homo sapiens
atttatacaacattt

SEQ ID NO: 500415 - DNA, 15 bp, Homo sapiens
tatttatacaacatt

SEQ ID NO: 500416 - DNA, 15 bp, Homo sapiens
atatttatacaacat

SEQ ID NO: 500417 - DNA, 15 bp, Homo sapiens
aatatttatacaaca

SEQ ID NO: 500418 - DNA, 15 bp, Homo sapiens
aaatatttatacaac

SEQ ID NO: 500419 - DNA, 15 bp, Homo sapiens
caaatatttatacaa

SEQ ID NO: 500420 - DNA, 15 bp, Homo sapiens
acaaatatttataca

SEQ ID NO: 500421 - DNA, 15 bp, Homo sapiens
aacaaatatttatac

SEQ ID NO: 500422 - DNA, 15 bp, Homo sapiens
taacaaatatttata

SEQ ID NO: 500423 - DNA, 15 bp, Homo sapiens
ataacaaatatttat

SEQ ID NO: 500424 - DNA, 15 bp, Homo sapiens
tataacaaatattta

SEQ ID NO: 500425 - DNA, 15 bp, Homo sapiens
gtataacaaatattt

SEQ ID NO: 500426 - DNA, 15 bp, Homo sapiens
ggtataacaaatatt

SEQ ID NO: 500427 - DNA, 15 bp, Homo sapiens
tggtataacaaatat

SEQ ID NO: 500428 - DNA, 15 bp, Homo sapiens
atggtataacaaata

SEQ ID NO: 500429 - DNA, 15 bp, Homo sapiens
tatggtataacaaat

SEQ ID NO: 500430 - DNA, 15 bp, Homo sapiens
atatggtataacaaa

SEQ ID NO: 500431 - DNA, 15 bp, Homo sapiens
aatatggtataacaa

SEQ ID NO: 500432 - DNA, 15 bp, Homo sapiens
caatatggtataaca

SEQ ID NO: 500433 - DNA, 15 bp, Homo sapiens
acaatatggtataac

SEQ ID NO: 500434 - DNA, 15 bp, Homo sapiens
aacaatatggtataa

SEQ ID NO: 500435 - DNA, 15 bp, Homo sapiens
aaacaatatggtata

SEQ ID NO: 500436 - DNA, 15 bp, Homo sapiens
taaacaatatggtat

SEQ ID NO: 500437 - DNA, 15 bp, Homo sapiens
ctaaacaatatggta

SEQ ID NO: 500438 - DNA, 15 bp, Homo sapiens
cctaaacaatatggt

SEQ ID NO: 500439 - DNA, 15 bp, Homo sapiens
ccctaaacaatatgg

SEQ ID NO: 500440 - DNA, 15 bp, Homo sapiens
tccctaaacaatatg

SEQ ID NO: 500441 - DNA, 15 bp, Homo sapiens
ttccctaaacaatat

SEQ ID NO: 500442 - DNA, 15 bp, Homo sapiens
attccctaaacaata

SEQ ID NO: 500443 - DNA, 15 bp, Homo sapiens
tattccctaaacaat

SEQ ID NO: 500444 - DNA, 15 bp, Homo sapiens
ttattccctaaacaa

SEQ ID NO: 500445 - DNA, 15 bp, Homo sapiens
gttattccctaaaca

SEQ ID NO: 500446 - DNA, 15 bp, Homo sapiens
tgttattccctaaac

SEQ ID NO: 500447 - DNA, 15 bp, Homo sapiens
ttgttattccctaaa

SEQ ID NO: 500448 - DNA, 15 bp, Homo sapiens
gttgttattccctaa

SEQ ID NO: 500449 - DNA, 15 bp, Homo sapiens
tgttgttattcccta

SEQ ID NO: 500450 - DNA, 15 bp, Homo sapiens
ttgttgttattccct

SEQ ID NO: 500451 - DNA, 15 bp, Homo sapiens
gttgttgttattccc

SEQ ID NO: 500452 - DNA, 15 bp, Homo sapiens
tgttgttgttattcc

SEQ ID NO: 500453 - DNA, 15 bp, Homo sapiens
ttgttgttgttattc

SEQ ID NO: 500454 - DNA, 15 bp, Homo sapiens
tttgttgttgttatt

SEQ ID NO: 500455 - DNA, 15 bp, Homo sapiens
ttttgttgttgttat

SEQ ID NO: 500456 - DNA, 15 bp, Homo sapiens
tttttgttgttgtta

SEQ ID NO: 500457 - DNA, 15 bp, Homo sapiens
gattttttgttgttg

SEQ ID NO: 500458 - DNA, 15 bp, Homo sapiens
agattttttgttgtt

SEQ ID NO: 500459 - DNA, 15 bp, Homo sapiens
cagattttttgttgt

SEQ ID NO: 500460 - DNA, 15 bp, Homo sapiens
acagattttttgttg

SEQ ID NO: 500461 - DNA, 15 bp, Homo sapiens
tacagattttttgtt

SEQ ID NO: 500462 - DNA, 15 bp, Homo sapiens
gtacagattttttgt

SEQ ID NO: 500463 - DNA, 15 bp, Homo sapiens
tgtacagattttttg

SEQ ID NO: 500464 - DNA, 15 bp, Homo sapiens
atgtacagatttttt

SEQ ID NO: 500465 - DNA, 15 bp, Homo sapiens
catgtacagattttt

SEQ ID NO: 500466 - DNA, 15 bp, Homo sapiens
acatgtacagatttt

SEQ ID NO: 500467 - DNA, 15 bp, Homo sapiens
aacatgtacagattt

SEQ ID NO: 500468 - DNA, 15 bp, Homo sapiens
caacatgtacagatt

SEQ ID NO: 500469 - DNA, 15 bp, Homo sapiens
tcaacatgtacagat

SEQ ID NO: 500470 - DNA, 15 bp, Homo sapiens
ctcaacatgtacaga

SEQ ID NO: 500471 - DNA, 15 bp, Homo sapiens
actcaacatgtacag

SEQ ID NO: 500472 - DNA, 15 bp, Homo sapiens
tactcaacatgtaca

SEQ ID NO: 500473 - DNA, 15 bp, Homo sapiens
gtactcaacatgtac

SEQ ID NO: 500474 - DNA, 15 bp, Homo sapiens
tgtactcaacatgta

SEQ ID NO: 500475 - DNA, 15 bp, Homo sapiens
ctgtactcaacatgt

SEQ ID NO: 500476 - DNA, 15 bp, Homo sapiens
tctgtactcaacatg

SEQ ID NO: 500477 - DNA, 15 bp, Homo sapiens
atctgtactcaacat

SEQ ID NO: 500478 - DNA, 15 bp, Homo sapiens
catctgtactcaaca

SEQ ID NO: 500479 - DNA, 15 bp, Homo sapiens
tcatctgtactcaac

SEQ ID NO: 500480 - DNA, 15 bp, Homo sapiens
ttcatctgtactcaa

SEQ ID NO: 500481 - DNA, 15 bp, Homo sapiens
tttcatctgtactca

SEQ ID NO: 500482 - DNA, 15 bp, Homo sapiens
gtttcatctgtactc

SEQ ID NO: 500483 - DNA, 15 bp, Homo sapiens
ggtttcatctgtact

SEQ ID NO: 500484 - DNA, 15 bp, Homo sapiens
gggtttcatctgtac

SEQ ID NO: 500485 - DNA, 15 bp, Homo sapiens
agggtttcatctgta

SEQ ID NO: 500486 - DNA, 15 bp, Homo sapiens
gagggtttcatctgt

SEQ ID NO: 500487 - DNA, 15 bp, Homo sapiens
ggagggtttcatctg

SEQ ID NO: 500488 - DNA, 15 bp, Homo sapiens
aggagggtttcatct

SEQ ID NO: 500489 - DNA, 15 bp, Homo sapiens
aaggagggtttcatc

SEQ ID NO: 500490 - DNA, 15 bp, Homo sapiens
aaaggagggtttcat

SEQ ID NO: 500491 - DNA, 15 bp, Homo sapiens
aaaaggagggtttca

SEQ ID NO: 500492 - DNA, 15 bp, Homo sapiens
aaaaaggagggtttc

SEQ ID NO: 500493 - DNA, 15 bp, Homo sapiens
aaaaaaggagggttt

SEQ ID NO: 500494 - DNA, 15 bp, Homo sapiens
aaaaaaaggagggtt

SEQ ID NO: 500495 - DNA, 15 bp, Homo sapiens
aaaaaaaaggagggt

SEQ ID NO: 500496 - DNA, 15 bp, Homo sapiens
gaaaaaaaaggaggg

SEQ ID NO: 500497 - DNA, 15 bp, Homo sapiens
ggaaaaaaaaggagg

SEQ ID NO: 500498 - DNA, 15 bp, Homo sapiens
gggaaaaaaaaggag

SEQ ID NO: 500499 - DNA, 15 bp, Homo sapiens
ggggaaaaaaaagga

SEQ ID NO: 500500 - DNA, 15 bp, Homo sapiens
gggggaaaaaaaagg

SEQ ID NO: 500501 - DNA, 15 bp, Homo sapiens
tgggggaaaaaaaag

SEQ ID NO: 500502 - DNA, 15 bp, Homo sapiens
ttgggggaaaaaaaa

SEQ ID NO: 500503 - DNA, 15 bp, Homo sapiens
tttgggggaaaaaaa

SEQ ID NO: 500504 - DNA, 15 bp, Homo sapiens
atttgggggaaaaaa

SEQ ID NO: 500505 - DNA, 15 bp, Homo sapiens
tatttgggggaaaaa

SEQ ID NO: 500506 - DNA, 15 bp, Homo sapiens
atatttgggggaaaa

SEQ ID NO: 500507 - DNA, 15 bp, Homo sapiens
aatatttgggggaaa

SEQ ID NO: 500508 - DNA, 15 bp, Homo sapiens
aaatatttgggggaa

SEQ ID NO: 500509 - DNA, 15 bp, Homo sapiens
aaaatatttggggga

SEQ ID NO: 500510 - DNA, 15 bp, Homo sapiens
gaaaatatttggggg

SEQ ID NO: 500511 - DNA, 15 bp, Homo sapiens
tgaaaatatttgggg

SEQ ID NO: 500512 - DNA, 15 bp, Homo sapiens
ttgaaaatatttggg

SEQ ID NO: 500513 - DNA, 15 bp, Homo sapiens
attgaaaatatttgg

SEQ ID NO: 500514 - DNA, 15 bp, Homo sapiens
gattgaaaatatttg

SEQ ID NO: 500515 - DNA, 15 bp, Homo sapiens
ggattgaaaatattt

SEQ ID NO: 500516 - DNA, 15 bp, Homo sapiens
tggattgaaaatatt

SEQ ID NO: 500517 - DNA, 15 bp, Homo sapiens
atggattgaaaatat

SEQ ID NO: 500518 - DNA, 15 bp, Homo sapiens
catggattgaaaata

SEQ ID NO: 500519 - DNA, 15 bp, Homo sapiens
ccatggattgaaaat

SEQ ID NO: 500520 - DNA, 15 bp, Homo sapiens
cccatggattgaaaa

SEQ ID NO: 500521 - DNA, 15 bp, Homo sapiens
acccatggattgaaa

SEQ ID NO: 500522 - DNA, 15 bp, Homo sapiens
cacccatggattgaa

SEQ ID NO: 500523 - DNA, 15 bp, Homo sapiens
ccacccatggattga

SEQ ID NO: 500524 - DNA, 15 bp, Homo sapiens
accacccatggattg

SEQ ID NO: 500525 - DNA, 15 bp, Homo sapiens
aaccacccatggatt

SEQ ID NO: 500526 - DNA, 15 bp, Homo sapiens
caaccacccatggat

SEQ ID NO: 500527 - DNA, 15 bp, Homo sapiens
tcaaccacccatgga

SEQ ID NO: 500528 - DNA, 15 bp, Homo sapiens
ttcaaccacccatgg

SEQ ID NO: 500529 - DNA, 15 bp, Homo sapiens
attcaaccacccatg

SEQ ID NO: 500530 - DNA, 15 bp, Homo sapiens
gattcaaccacccat

SEQ ID NO: 500531 - DNA, 15 bp, Homo sapiens
ggattcaaccaccca

SEQ ID NO: 500532 - DNA, 15 bp, Homo sapiens
tggattcaaccaccc

SEQ ID NO: 500533 - DNA, 15 bp, Homo sapiens
atggattcaaccacc

SEQ ID NO: 500534 - DNA, 15 bp, Homo sapiens
catggattcaaccac

SEQ ID NO: 500535 - DNA, 15 bp, Homo sapiens
ccatggattcaacca

SEQ ID NO: 500536 - DNA, 15 bp, Homo sapiens
tccatggattcaacc

SEQ ID NO: 500537 - DNA, 15 bp, Homo sapiens
atccatggattcaac

SEQ ID NO: 500538 - DNA, 15 bp, Homo sapiens
tatccatggattcaa

SEQ ID NO: 500539 - DNA, 15 bp, Homo sapiens
atatccatggattca

SEQ ID NO: 500540 - DNA, 15 bp, Homo sapiens
tatatccatggattc

SEQ ID NO: 500541 - DNA, 15 bp, Homo sapiens
ctatatccatggatt

SEQ ID NO: 500542 - DNA, 15 bp, Homo sapiens
tctatatccatggat

SEQ ID NO: 500543 - DNA, 15 bp, Homo sapiens
ttctatatccatgga

SEQ ID NO: 500544 - DNA, 15 bp, Homo sapiens
gttctatatccatgg

SEQ ID NO: 500545 - DNA, 15 bp, Homo sapiens
agttctatatccatg

SEQ ID NO: 500546 - DNA, 15 bp, Homo sapiens
gagttctatatccat

SEQ ID NO: 500547 - DNA, 15 bp, Homo sapiens
tgagttctatatcca

SEQ ID NO: 500548 - DNA, 15 bp, Homo sapiens
gtgagttctatatcc

SEQ ID NO: 500549 - DNA, 15 bp, Homo sapiens
agtgagttctatatc

SEQ ID NO: 500550 - DNA, 15 bp, Homo sapiens
cagtgagttctatat

SEQ ID NO: 500551 - DNA, 15 bp, Homo sapiens
tcagtgagttctata

SEQ ID NO: 500552 - DNA, 15 bp, Homo sapiens
atcagtgagttctat

SEQ ID NO: 500553 - DNA, 15 bp, Homo sapiens
tatcagtgagttcta

SEQ ID NO: 500554 - DNA, 15 bp, Homo sapiens
gtatcagtgagttct

SEQ ID NO: 500555 - DNA, 15 bp, Homo sapiens
tgtatcagtgagttc

SEQ ID NO: 500556 - DNA, 15 bp, Homo sapiens
ctgtatcagtgagtt

SEQ ID NO: 500557 - DNA, 15 bp, Homo sapiens
tctgtatcagtgagt

SEQ ID NO: 500558 - DNA, 15 bp, Homo sapiens
ctctgtatcagtgag

SEQ ID NO: 500559 - DNA, 15 bp, Homo sapiens
cctctgtatcagtga

SEQ ID NO: 500560 - DNA, 15 bp, Homo sapiens
ccctctgtatcagtg

SEQ ID NO: 500561 - DNA, 15 bp, Homo sapiens
gccctctgtatcagt

SEQ ID NO: 500562 - DNA, 15 bp, Homo sapiens
ggccctctgtatcag

SEQ ID NO: 500563 - DNA, 15 bp, Homo sapiens
gggccctctgtatca

SEQ ID NO: 500564 - DNA, 15 bp, Homo sapiens
tgggccctctgtatc

SEQ ID NO: 500565 - DNA, 15 bp, Homo sapiens
atgggccctctgtat

SEQ ID NO: 500566 - DNA, 15 bp, Homo sapiens
aatgggccctctgta

SEQ ID NO: 500567 - DNA, 15 bp, Homo sapiens
caatgggccctctgt

SEQ ID NO: 500568 - DNA, 15 bp, Homo sapiens
acaatgggccctctg

SEQ ID NO: 500569 - DNA, 15 bp, Homo sapiens
tacaatgggccctct

SEQ ID NO: 500570 - DNA, 15 bp, Homo sapiens
gtacaatgggccctc

SEQ ID NO: 500571 - DNA, 15 bp, Homo sapiens
tgtacaatgggccct

SEQ ID NO: 500572 - DNA, 15 bp, Homo sapiens
atgtacaatgggccc

SEQ ID NO: 500573 - DNA, 15 bp, Homo sapiens
catgtacaatgggcc

SEQ ID NO: 500574 - DNA, 15 bp, Homo sapiens
gcatgtacaatgggc

SEQ ID NO: 500575 - DNA, 15 bp, Homo sapiens
agcatgtacaatggg

SEQ ID NO: 500576 - DNA, 15 bp, Homo sapiens
aagcatgtacaatgg

SEQ ID NO: 500577 - DNA, 15 bp, Homo sapiens
gaagcatgtacaatg

SEQ ID NO: 500578 - DNA, 15 bp, Homo sapiens
agaagcatgtacaat

SEQ ID NO: 500579 - DNA, 15 bp, Homo sapiens
cagaagcatgtacaa

SEQ ID NO: 500580 - DNA, 15 bp, Homo sapiens
tcagaagcatgtaca

SEQ ID NO: 500581 - DNA, 15 bp, Homo sapiens
atcagaagcatgtac

SEQ ID NO: 500582 - DNA, 15 bp, Homo sapiens
aatcagaagcatgta

SEQ ID NO: 500583 - DNA, 15 bp, Homo sapiens
aaatcagaagcatgt

SEQ ID NO: 500584 - DNA, 15 bp, Homo sapiens
taaatcagaagcatg

SEQ ID NO: 500585 - DNA, 15 bp, Homo sapiens
ttaaatcagaagcat

SEQ ID NO: 500586 - DNA, 15 bp, Homo sapiens
cttaaatcagaagca

SEQ ID NO: 500587 - DNA, 15 bp, Homo sapiens
ccttaaatcagaagc

SEQ ID NO: 500588 - DNA, 15 bp, Homo sapiens
accttaaatcagaag

SEQ ID NO: 500589 - DNA, 15 bp, Homo sapiens
taccttaaatcagaa

SEQ ID NO: 500590 - DNA, 15 bp, Homo sapiens
ctaccttaaatcaga

SEQ ID NO: 500591 - DNA, 15 bp, Homo sapiens
gctaccttaaatcag

SEQ ID NO: 500592 - DNA, 15 bp, Homo sapiens
ggctaccttaaatca

SEQ ID NO: 500593 - DNA, 15 bp, Homo sapiens
tggctaccttaaatc

SEQ ID NO: 500594 - DNA, 15 bp, Homo sapiens
atggctaccttaaat

SEQ ID NO: 500595 - DNA, 15 bp, Homo sapiens
aatggctaccttaaa

SEQ ID NO: 500596 - DNA, 15 bp, Homo sapiens
aaatggctaccttaa

SEQ ID NO: 500597 - DNA, 15 bp, Homo sapiens
aaaatggctacctta

SEQ ID NO: 500598 - DNA, 15 bp, Homo sapiens
caaaatggctacctt

SEQ ID NO: 500599 - DNA, 15 bp, Homo sapiens
gcaaaatggctacct

SEQ ID NO: 500600 - DNA, 15 bp, Homo sapiens
ggcaaaatggctacc

SEQ ID NO: 500601 - DNA, 15 bp, Homo sapiens
tggcaaaatggctac

SEQ ID NO: 500602 - DNA, 15 bp, Homo sapiens
ttggcaaaatggcta

SEQ ID NO: 500603 - DNA, 15 bp, Homo sapiens
cttggcaaaatggct

SEQ ID NO: 500604 - DNA, 15 bp, Homo sapiens
tcttggcaaaatggc

SEQ ID NO: 500605 - DNA, 15 bp, Homo sapiens
atcttggcaaaatgg

SEQ ID NO: 500606 - DNA, 15 bp, Homo sapiens
aatcttggcaaaatg

SEQ ID NO: 500607 - DNA, 15 bp, Homo sapiens
taatcttggcaaaat

SEQ ID NO: 500608 - DNA, 15 bp, Homo sapiens
gtaatcttggcaaaa

SEQ ID NO: 500609 - DNA, 15 bp, Homo sapiens
agtaatcttggcaaa

SEQ ID NO: 500610 - DNA, 15 bp, Homo sapiens
aagtaatcttggcaa

SEQ ID NO: 500611 - DNA, 15 bp, Homo sapiens
aaagtaatcttggca

SEQ ID NO: 500612 - DNA, 15 bp, Homo sapiens
caaagtaatcttggc

SEQ ID NO: 500613 - DNA, 15 bp, Homo sapiens
acaaagtaatcttgg

SEQ ID NO: 500614 - DNA, 15 bp, Homo sapiens
tacaaagtaatcttg

SEQ ID NO: 500615 - DNA, 15 bp, Homo sapiens
ctacaaagtaatctt

SEQ ID NO: 500616 - DNA, 15 bp, Homo sapiens
tctacaaagtaatct

SEQ ID NO: 500617 - DNA, 15 bp, Homo sapiens
ttctacaaagtaatc

SEQ ID NO: 500618 - DNA, 15 bp, Homo sapiens
tttctacaaagtaat

SEQ ID NO: 500619 - DNA, 15 bp, Homo sapiens
ctttctacaaagtaa

SEQ ID NO: 500620 - DNA, 15 bp, Homo sapiens
actttctacaaagta

SEQ ID NO: 500621 - DNA, 15 bp, Homo sapiens
tactttctacaaagt

SEQ ID NO: 500622 - DNA, 15 bp, Homo sapiens
ttactttctacaaag

SEQ ID NO: 500623 - DNA, 15 bp, Homo sapiens
cttactttctacaaa

SEQ ID NO: 500624 - DNA, 15 bp, Homo sapiens
acttactttctacaa

SEQ ID NO: 500625 - DNA, 15 bp, Homo sapiens
tacttactttctaca

SEQ ID NO: 500626 - DNA, 15 bp, Homo sapiens
atacttactttctac

SEQ ID NO: 500627 - DNA, 15 bp, Homo sapiens
aatacttactttcta

SEQ ID NO: 500628 - DNA, 15 bp, Homo sapiens
taatacttactttct

SEQ ID NO: 500629 - DNA, 15 bp, Homo sapiens
gtaatacttactttc

SEQ ID NO: 500630 - DNA, 15 bp, Homo sapiens
ggtaatacttacttt

SEQ ID NO: 500631 - DNA, 15 bp, Homo sapiens
aggtaatacttactt

SEQ ID NO: 500632 - DNA, 15 bp, Homo sapiens
aaggtaatacttact

SEQ ID NO: 500633 - DNA, 15 bp, Homo sapiens
gaaggtaatacttac

SEQ ID NO: 500634 - DNA, 15 bp, Homo sapiens
agaaggtaatactta

SEQ ID NO: 500635 - DNA, 15 bp, Homo sapiens
gagaaggtaatactt

SEQ ID NO: 500636 - DNA, 15 bp, Homo sapiens
ggagaaggtaatact

SEQ ID NO: 500637 - DNA, 15 bp, Homo sapiens
gggagaaggtaatac

SEQ ID NO: 500638 - DNA, 15 bp, Homo sapiens
ggggagaaggtaata

SEQ ID NO: 500639 - DNA, 15 bp, Homo sapiens
tggggagaaggtaat

SEQ ID NO: 500640 - DNA, 15 bp, Homo sapiens
atggggagaaggtaa

SEQ ID NO: 500641 - DNA, 15 bp, Homo sapiens
aatggggagaaggta

SEQ ID NO: 500642 - DNA, 15 bp, Homo sapiens
aaatggggagaaggt

SEQ ID NO: 500643 - DNA, 15 bp, Homo sapiens
caaatggggagaagg

SEQ ID NO: 500644 - DNA, 15 bp, Homo sapiens
tcaaatggggagaag

SEQ ID NO: 500645 - DNA, 15 bp, Homo sapiens
ctcaaatggggagaa

SEQ ID NO: 500646 - DNA, 15 bp, Homo sapiens
tctcaaatggggaga

SEQ ID NO: 500647 - DNA, 15 bp, Homo sapiens
atctcaaatggggag

SEQ ID NO: 500648 - DNA, 15 bp, Homo sapiens
catctcaaatgggga

SEQ ID NO: 500649 - DNA, 15 bp, Homo sapiens
tcatctcaaatgggg

SEQ ID NO: 500650 - DNA, 15 bp, Homo sapiens
atcatctcaaatggg

SEQ ID NO: 500651 - DNA, 15 bp, Homo sapiens
aatcatctcaaatgg

SEQ ID NO: 500652 - DNA, 15 bp, Homo sapiens
aaatcatctcaaatg

SEQ ID NO: 500653 - DNA, 15 bp, Homo sapiens
aaaatcatctcaaat

SEQ ID NO: 500654 - DNA, 15 bp, Homo sapiens
caaaatcatctcaaa

SEQ ID NO: 500655 - DNA, 15 bp, Homo sapiens
acaaaatcatctcaa

SEQ ID NO: 500656 - DNA, 15 bp, Homo sapiens
tacaaaatcatctca

SEQ ID NO: 500657 - DNA, 15 bp, Homo sapiens
atacaaaatcatctc

SEQ ID NO: 500658 - DNA, 15 bp, Homo sapiens
aatacaaaatcatct

SEQ ID NO: 500659 - DNA, 15 bp, Homo sapiens
gaatacaaaatcatc

SEQ ID NO: 500660 - DNA, 15 bp, Homo sapiens
agaatacaaaatcat

SEQ ID NO: 500661 - DNA, 15 bp, Homo sapiens
ccagaatacaaaatc

SEQ ID NO: 500662 - DNA, 15 bp, Homo sapiens
cccagaatacaaaat

SEQ ID NO: 500663 - DNA, 15 bp, Homo sapiens
tcccagaatacaaaa

SEQ ID NO: 500664 - DNA, 15 bp, Homo sapiens
atcccagaatacaaa

SEQ ID NO: 500665 - DNA, 15 bp, Homo sapiens
gatcccagaatacaa

SEQ ID NO: 500666 - DNA, 15 bp, Homo sapiens
agatcccagaataca

SEQ ID NO: 500667 - DNA, 15 bp, Homo sapiens
cagatcccagaatac

SEQ ID NO: 500668 - DNA, 15 bp, Homo sapiens
gcagatcccagaata

SEQ ID NO: 500669 - DNA, 15 bp, Homo sapiens
tgcagatcccagaat

SEQ ID NO: 500670 - DNA, 15 bp, Homo sapiens
atgcagatcccagaa

SEQ ID NO: 500671 - DNA, 15 bp, Homo sapiens
tatgcagatcccaga

SEQ ID NO: 500672 - DNA, 15 bp, Homo sapiens
atatgcagatcccag

SEQ ID NO: 500673 - DNA, 15 bp, Homo sapiens
aatatgcagatccca

SEQ ID NO: 500674 - DNA, 15 bp, Homo sapiens
taatatgcagatccc

SEQ ID NO: 500675 - DNA, 15 bp, Homo sapiens
ttaatatgcagatcc

SEQ ID NO: 500676 - DNA, 15 bp, Homo sapiens
gttaatatgcagatc

SEQ ID NO: 500677 - DNA, 15 bp, Homo sapiens
agttaatatgcagat

SEQ ID NO: 500678 - DNA, 15 bp, Homo sapiens
gagttaatatgcaga

SEQ ID NO: 500679 - DNA, 15 bp, Homo sapiens
tgagttaatatgcag

SEQ ID NO: 500680 - DNA, 15 bp, Homo sapiens
ttgagttaatatgca

SEQ ID NO: 500681 - DNA, 15 bp, Homo sapiens
tttgagttaatatgc

SEQ ID NO: 500682 - DNA, 15 bp, Homo sapiens
atttgagttaatatg

SEQ ID NO: 500683 - DNA, 15 bp, Homo sapiens
aatttgagttaatat

SEQ ID NO: 500684 - DNA, 15 bp, Homo sapiens
taatttgagttaata

SEQ ID NO: 500685 - DNA, 15 bp, Homo sapiens
ataatttgagttaat

SEQ ID NO: 500686 - DNA, 15 bp, Homo sapiens
aataatttgagttaa

SEQ ID NO: 500687 - DNA, 15 bp, Homo sapiens
aaataatttgagtta

SEQ ID NO: 500688 - DNA, 15 bp, Homo sapiens
caaataatttgagtt

SEQ ID NO: 500689 - DNA, 15 bp, Homo sapiens
ccaaataatttgagt

SEQ ID NO: 500690 - DNA, 15 bp, Homo sapiens
cccaaataatttgag

SEQ ID NO: 500691 - DNA, 15 bp, Homo sapiens
acccaaataatttga

SEQ ID NO: 500692 - DNA, 15 bp, Homo sapiens
aacccaaataatttg

SEQ ID NO: 500693 - DNA, 15 bp, Homo sapiens
caacccaaataattt

SEQ ID NO: 500694 - DNA, 15 bp, Homo sapiens
acaacccaaataatt

SEQ ID NO: 500695 - DNA, 15 bp, Homo sapiens
cacaacccaaataat

SEQ ID NO: 500696 - DNA, 15 bp, Homo sapiens
gcacaacccaaataa

SEQ ID NO: 500697 - DNA, 15 bp, Homo sapiens
agcacaacccaaata

SEQ ID NO: 500698 - DNA, 15 bp, Homo sapiens
tagcacaacccaaat

SEQ ID NO: 500699 - DNA, 15 bp, Homo sapiens
ttagcacaacccaaa

SEQ ID NO: 500700 - DNA, 15 bp, Homo sapiens
attagcacaacccaa

SEQ ID NO: 500701 - DNA, 15 bp, Homo sapiens
tattagcacaaccca

SEQ ID NO: 500702 - DNA, 15 bp, Homo sapiens
ttattagcacaaccc

SEQ ID NO: 500703 - DNA, 15 bp, Homo sapiens
attattagcacaacc

SEQ ID NO: 500704 - DNA, 15 bp, Homo sapiens
aattattagcacaac

SEQ ID NO: 500705 - DNA, 15 bp, Homo sapiens
aaattattagcacaa

SEQ ID NO: 500706 - DNA, 15 bp, Homo sapiens
caaattattagcaca

SEQ ID NO: 500707 - DNA, 15 bp, Homo sapiens
acaaattattagcac

SEQ ID NO: 500708 - DNA, 15 bp, Homo sapiens
aacaaattattagca

SEQ ID NO: 500709 - DNA, 15 bp, Homo sapiens
aaacaaattattagc

SEQ ID NO: 500710 - DNA, 15 bp, Homo sapiens
taaacaaattattag

SEQ ID NO: 500711 - DNA, 15 bp, Homo sapiens
ttaaacaaattatta

SEQ ID NO: 500712 - DNA, 15 bp, Homo sapiens
attaaacaaattatt

SEQ ID NO: 500713 - DNA, 15 bp, Homo sapiens
cattaaacaaattat

SEQ ID NO: 500714 - DNA, 15 bp, Homo sapiens
tcattaaacaaatta

SEQ ID NO: 500715 - DNA, 15 bp, Homo sapiens
ttcattaaacaaatt

SEQ ID NO: 500716 - DNA, 15 bp, Homo sapiens
tttcattaaacaaat

SEQ ID NO: 500717 - DNA, 15 bp, Homo sapiens
atttcattaaacaaa

SEQ ID NO: 500718 - DNA, 15 bp, Homo sapiens
tatttcattaaacaa

SEQ ID NO: 500719 - DNA, 15 bp, Homo sapiens
ctatttcattaaaca

SEQ ID NO: 500720 - DNA, 15 bp, Homo sapiens
cctatttcattaaac

SEQ ID NO: 500721 - DNA, 15 bp, Homo sapiens
acctatttcattaaa

SEQ ID NO: 500722 - DNA, 15 bp, Homo sapiens
tacctatttcattaa

SEQ ID NO: 500723 - DNA, 15 bp, Homo sapiens
ctacctatttcatta

SEQ ID NO: 500724 - DNA, 15 bp, Homo sapiens
actacctatttcatt

SEQ ID NO: 500725 - DNA, 15 bp, Homo sapiens
aactacctatttcat

SEQ ID NO: 500726 - DNA, 15 bp, Homo sapiens
gaactacctatttca

SEQ ID NO: 500727 - DNA, 15 bp, Homo sapiens
ggaactacctatttc

SEQ ID NO: 500728 - DNA, 15 bp, Homo sapiens
aggaactacctattt

SEQ ID NO: 500729 - DNA, 15 bp, Homo sapiens
taggaactacctatt

SEQ ID NO: 500730 - DNA, 15 bp, Homo sapiens
ttaggaactacctat

SEQ ID NO: 500731 - DNA, 15 bp, Homo sapiens
cttaggaactaccta

SEQ ID NO: 500732 - DNA, 15 bp, Homo sapiens
ccttaggaactacct

SEQ ID NO: 500733 - DNA, 15 bp, Homo sapiens
accttaggaactacc

SEQ ID NO: 500734 - DNA, 15 bp, Homo sapiens
aaccttaggaactac

SEQ ID NO: 500735 - DNA, 15 bp, Homo sapiens
aaaccttaggaacta

SEQ ID NO: 500736 - DNA, 15 bp, Homo sapiens
taaaccttaggaact

SEQ ID NO: 500737 - DNA, 15 bp, Homo sapiens
ataaaccttaggaac

SEQ ID NO: 500738 - DNA, 15 bp, Homo sapiens
tataaaccttaggaa

SEQ ID NO: 500739 - DNA, 15 bp, Homo sapiens
atataaaccttagga

SEQ ID NO: 500740 - DNA, 15 bp, Homo sapiens
gatataaaccttagg

SEQ ID NO: 500741 - DNA, 15 bp, Homo sapiens
agatataaaccttag

SEQ ID NO: 500742 - DNA, 15 bp, Homo sapiens
cagatataaacctta

SEQ ID NO: 500743 - DNA, 15 bp, Homo sapiens
acagatataaacctt

SEQ ID NO: 500744 - DNA, 15 bp, Homo sapiens
aacagatataaacct

SEQ ID NO: 500745 - DNA, 15 bp, Homo sapiens
taacagatataaacc

SEQ ID NO: 500746 - DNA, 15 bp, Homo sapiens
ctaacagatataaac

SEQ ID NO: 500747 - DNA, 15 bp, Homo sapiens
actaacagatataaa

SEQ ID NO: 500748 - DNA, 15 bp, Homo sapiens
tactaacagatataa

SEQ ID NO: 500749 - DNA, 15 bp, Homo sapiens
ttactaacagatata

SEQ ID NO: 500750 - DNA, 15 bp, Homo sapiens
cttactaacagatat

SEQ ID NO: 500751 - DNA, 15 bp, Homo sapiens
tcttactaacagata

SEQ ID NO: 500752 - DNA, 15 bp, Homo sapiens
ctcttactaacagat

SEQ ID NO: 500753 - DNA, 15 bp, Homo sapiens
cctcttactaacaga

SEQ ID NO: 500754 - DNA, 15 bp, Homo sapiens
acctcttactaacag

SEQ ID NO: 500755 - DNA, 15 bp, Homo sapiens
aacctcttactaaca

SEQ ID NO: 500756 - DNA, 15 bp, Homo sapiens
aaacctcttactaac

SEQ ID NO: 500757 - DNA, 15 bp, Homo sapiens
taaacctcttactaa

SEQ ID NO: 500758 - DNA, 15 bp, Homo sapiens
ataaacctcttacta

SEQ ID NO: 500759 - DNA, 15 bp, Homo sapiens
aataaacctcttact

SEQ ID NO: 500760 - DNA, 15 bp, Homo sapiens
aaataaacctcttac

SEQ ID NO: 500761 - DNA, 15 bp, Homo sapiens
caaataaacctctta

SEQ ID NO: 500762 - DNA, 15 bp, Homo sapiens
tcaaataaacctctt

SEQ ID NO: 500763 - DNA, 15 bp, Homo sapiens
ctcaaataaacctct

SEQ ID NO: 500764 - DNA, 15 bp, Homo sapiens
cctcaaataaacctc

SEQ ID NO: 500765 - DNA, 15 bp, Homo sapiens
ccctcaaataaacct

SEQ ID NO: 500766 - DNA, 15 bp, Homo sapiens
cccctcaaataaacc

SEQ ID NO: 500767 - DNA, 15 bp, Homo sapiens
tcccctcaaataaac

SEQ ID NO: 500768 - DNA, 15 bp, Homo sapiens
ttcccctcaaataaa

SEQ ID NO: 500769 - DNA, 15 bp, Homo sapiens
cttcccctcaaataa

SEQ ID NO: 500770 - DNA, 15 bp, Homo sapiens
acttcccctcaaata

SEQ ID NO: 500771 - DNA, 15 bp, Homo sapiens
cacttcccctcaaat

SEQ ID NO: 500772 - DNA, 15 bp, Homo sapiens
tcacttcccctcaaa

SEQ ID NO: 500773 - DNA, 15 bp, Homo sapiens
ttcacttcccctcaa

SEQ ID NO: 500774 - DNA, 15 bp, Homo sapiens
tttcacttcccctca

SEQ ID NO: 500775 - DNA, 15 bp, Homo sapiens
ctttcacttcccctc

SEQ ID NO: 500776 - DNA, 15 bp, Homo sapiens
tctttcacttcccct

SEQ ID NO: 500777 - DNA, 15 bp, Homo sapiens
ttctttcacttcccc

SEQ ID NO: 500778 - DNA, 15 bp, Homo sapiens
gttctttcacttccc

SEQ ID NO: 500779 - DNA, 15 bp, Homo sapiens
agttctttcacttcc

SEQ ID NO: 500780 - DNA, 15 bp, Homo sapiens
aagttctttcacttc

SEQ ID NO: 500781 - DNA, 15 bp, Homo sapiens
caagttctttcactt

SEQ ID NO: 500782 - DNA, 15 bp, Homo sapiens
tcaagttctttcact

SEQ ID NO: 500783 - DNA, 15 bp, Homo sapiens
ttcaagttctttcac

SEQ ID NO: 500784 - DNA, 15 bp, Homo sapiens
tttcaagttctttca

SEQ ID NO: 500785 - DNA, 15 bp, Homo sapiens
ctttcaagttctttc

SEQ ID NO: 500786 - DNA, 15 bp, Homo sapiens
tctttcaagttcttt

SEQ ID NO: 500787 - DNA, 15 bp, Homo sapiens
atctttcaagttctt

SEQ ID NO: 500788 - DNA, 15 bp, Homo sapiens
aatctttcaagttct

SEQ ID NO: 500789 - DNA, 15 bp, Homo sapiens
gaatctttcaagttc

SEQ ID NO: 500790 - DNA, 15 bp, Homo sapiens
tgaatctttcaagtt

SEQ ID NO: 500791 - DNA, 15 bp, Homo sapiens
atgaatctttcaagt

SEQ ID NO: 500792 - DNA, 15 bp, Homo sapiens
catgaatctttcaag

SEQ ID NO: 500793 - DNA, 15 bp, Homo sapiens
ccatgaatctttcaa

SEQ ID NO: 500794 - DNA, 15 bp, Homo sapiens
accatgaatctttca

SEQ ID NO: 500795 - DNA, 15 bp, Homo sapiens
gaccatgaatctttc

SEQ ID NO: 500796 - DNA, 15 bp, Homo sapiens
agaccatgaatcttt

SEQ ID NO: 500797 - DNA, 15 bp, Homo sapiens
gagaccatgaatctt

SEQ ID NO: 500798 - DNA, 15 bp, Homo sapiens
agagaccatgaatct

SEQ ID NO: 500799 - DNA, 15 bp, Homo sapiens
tagagaccatgaatc

SEQ ID NO: 500800 - DNA, 15 bp, Homo sapiens
ttagagaccatgaat

SEQ ID NO: 500801 - DNA, 15 bp, Homo sapiens
tttagagaccatgaa

SEQ ID NO: 500802 - DNA, 15 bp, Homo sapiens
atttagagaccatga

SEQ ID NO: 500803 - DNA, 15 bp, Homo sapiens
aatttagagaccatg

SEQ ID NO: 500804 - DNA, 15 bp, Homo sapiens
aaatttagagaccat

SEQ ID NO: 500805 - DNA, 15 bp, Homo sapiens
aaaatttagagacca

SEQ ID NO: 500806 - DNA, 15 bp, Homo sapiens
aaaaatttagagacc

SEQ ID NO: 500807 - DNA, 15 bp, Homo sapiens
aaaaaatttagagac

SEQ ID NO: 500808 - DNA, 15 bp, Homo sapiens
aaaaaaatttagaga

SEQ ID NO: 500809 - DNA, 15 bp, Homo sapiens
aaaaaaaatttagag

SEQ ID NO: 500810 - DNA, 15 bp, Homo sapiens
aaaaaaaaatttaga

SEQ ID NO: 500811 - DNA, 15 bp, Homo sapiens
aaaaaaaaaatttag

SEQ ID NO: 500812 - DNA, 15 bp, Homo sapiens
aaaaaaaaaaattta

SEQ ID NO: 500813 - DNA, 15 bp, Homo sapiens
tgaaaaaaaaaaaaa

SEQ ID NO: 500814 - DNA, 15 bp, Homo sapiens
ctgaaaaaaaaaaaa

SEQ ID NO: 500815 - DNA, 15 bp, Homo sapiens
tctgaaaaaaaaaaa

SEQ ID NO: 500816 - DNA, 15 bp, Homo sapiens
ctctgaaaaaaaaaa

SEQ ID NO: 500817 - DNA, 15 bp, Homo sapiens
tctctgaaaaaaaaa

SEQ ID NO: 500818 - DNA, 15 bp, Homo sapiens
atctctgaaaaaaaa

SEQ ID NO: 500819 - DNA, 15 bp, Homo sapiens
aatctctgaaaaaaa

SEQ ID NO: 500820 - DNA, 15 bp, Homo sapiens
aaatctctgaaaaaa

SEQ ID NO: 500821 - DNA, 15 bp, Homo sapiens
caaatctctgaaaaa

SEQ ID NO: 500822 - DNA, 15 bp, Homo sapiens
ccaaatctctgaaaa

SEQ ID NO: 500823 - DNA, 15 bp, Homo sapiens
tccaaatctctgaaa

SEQ ID NO: 500824 - DNA, 15 bp, Homo sapiens
gtccaaatctctgaa

SEQ ID NO: 500825 - DNA, 15 bp, Homo sapiens
ggtccaaatctctga

SEQ ID NO: 500826 - DNA, 15 bp, Homo sapiens
tggtccaaatctctg

SEQ ID NO: 500827 - DNA, 15 bp, Homo sapiens
ctggtccaaatctct

SEQ ID NO: 500828 - DNA, 15 bp, Homo sapiens
cctggtccaaatctc

SEQ ID NO: 500829 - DNA, 15 bp, Homo sapiens
gcctggtccaaatct

SEQ ID NO: 500830 - DNA, 15 bp, Homo sapiens
tgcctggtccaaatc

SEQ ID NO: 500831 - DNA, 15 bp, Homo sapiens
ttgcctggtccaaat

SEQ ID NO: 500832 - DNA, 15 bp, Homo sapiens
cttgcctggtccaaa

SEQ ID NO: 500833 - DNA, 15 bp, Homo sapiens
gcttgcctggtccaa

SEQ ID NO: 500834 - DNA, 15 bp, Homo sapiens
tgcttgcctggtcca

SEQ ID NO: 500835 - DNA, 15 bp, Homo sapiens
atgcttgcctggtcc

SEQ ID NO: 500836 - DNA, 15 bp, Homo sapiens
catgcttgcctggtc

SEQ ID NO: 500837 - DNA, 15 bp, Homo sapiens
ccatgcttgcctggt

SEQ ID NO: 500838 - DNA, 15 bp, Homo sapiens
tccatgcttgcctgg

SEQ ID NO: 500839 - DNA, 15 bp, Homo sapiens
ttccatgcttgcctg

SEQ ID NO: 500840 - DNA, 15 bp, Homo sapiens
cttccatgcttgcct

SEQ ID NO: 500841 - DNA, 15 bp, Homo sapiens
gcttccatgcttgcc

SEQ ID NO: 500842 - DNA, 15 bp, Homo sapiens
tgcttccatgcttgc

SEQ ID NO: 500843 - DNA, 15 bp, Homo sapiens
ctgcttccatgcttg

SEQ ID NO: 500844 - DNA, 15 bp, Homo sapiens
actgcttccatgctt

SEQ ID NO: 500845 - DNA, 15 bp, Homo sapiens
tactgcttccatgct

SEQ ID NO: 500846 - DNA, 15 bp, Homo sapiens
ctactgcttccatgc

SEQ ID NO: 500847 - DNA, 15 bp, Homo sapiens
actactgcttccatg

SEQ ID NO: 500848 - DNA, 15 bp, Homo sapiens
aactactgcttccat

SEQ ID NO: 500849 - DNA, 15 bp, Homo sapiens
aaactactgcttcca

SEQ ID NO: 500850 - DNA, 15 bp, Homo sapiens
gaaactactgcttcc

SEQ ID NO: 500851 - DNA, 15 bp, Homo sapiens
tgaaactactgcttc

SEQ ID NO: 500852 - DNA, 15 bp, Homo sapiens
gtgaaactactgctt

SEQ ID NO: 500853 - DNA, 15 bp, Homo sapiens
agtgaaactactgct

SEQ ID NO: 500854 - DNA, 15 bp, Homo sapiens
aagtgaaactactgc

SEQ ID NO: 500855 - DNA, 15 bp, Homo sapiens
gaagtgaaactactg

SEQ ID NO: 500856 - DNA, 15 bp, Homo sapiens
agaagtgaaactact

SEQ ID NO: 500857 - DNA, 15 bp, Homo sapiens
tagaagtgaaactac

SEQ ID NO: 500858 - DNA, 15 bp, Homo sapiens
ctagaagtgaaacta

SEQ ID NO: 500859 - DNA, 15 bp, Homo sapiens
gctagaagtgaaact

SEQ ID NO: 500860 - DNA, 15 bp, Homo sapiens
agctagaagtgaaac

SEQ ID NO: 500861 - DNA, 15 bp, Homo sapiens
cagctagaagtgaaa

SEQ ID NO: 500862 - DNA, 15 bp, Homo sapiens
ccagctagaagtgaa

SEQ ID NO: 500863 - DNA, 15 bp, Homo sapiens
accagctagaagtga

SEQ ID NO: 500864 - DNA, 15 bp, Homo sapiens
gaccagctagaagtg

SEQ ID NO: 500865 - DNA, 15 bp, Homo sapiens
agaccagctagaagt

SEQ ID NO: 500866 - DNA, 15 bp, Homo sapiens
gagaccagctagaag

SEQ ID NO: 500867 - DNA, 15 bp, Homo sapiens
ggagaccagctagaa

SEQ ID NO: 500868 - DNA, 15 bp, Homo sapiens
gggagaccagctaga

SEQ ID NO: 500869 - DNA, 15 bp, Homo sapiens
agggagaccagctag

SEQ ID NO: 500870 - DNA, 15 bp, Homo sapiens
gagggagaccagcta

SEQ ID NO: 500871 - DNA, 15 bp, Homo sapiens
agagggagaccagct

SEQ ID NO: 500872 - DNA, 15 bp, Homo sapiens
cagagggagaccagc

SEQ ID NO: 500873 - DNA, 15 bp, Homo sapiens
gcagagggagaccag

SEQ ID NO: 500874 - DNA, 15 bp, Homo sapiens
tgcagagggagacca

SEQ ID NO: 500875 - DNA, 15 bp, Homo sapiens
ctgcagagggagacc

SEQ ID NO: 500876 - DNA, 15 bp, Homo sapiens
gctgcagagggagac

SEQ ID NO: 500877 - DNA, 15 bp, Homo sapiens
ggctgcagagggaga

SEQ ID NO: 500878 - DNA, 15 bp, Homo sapiens
aggctgcagagggag

SEQ ID NO: 500879 - DNA, 15 bp, Homo sapiens
caggctgcagaggga

SEQ ID NO: 500880 - DNA, 15 bp, Homo sapiens
tcaggctgcagaggg

SEQ ID NO: 500881 - DNA, 15 bp, Homo sapiens
ttcaggctgcagagg

SEQ ID NO: 500882 - DNA, 15 bp, Homo sapiens
cttcaggctgcagag

SEQ ID NO: 500883 - DNA, 15 bp, Homo sapiens
tcttcaggctgcaga

SEQ ID NO: 500884 - DNA, 15 bp, Homo sapiens
ttcttcaggctgcag

SEQ ID NO: 500885 - DNA, 15 bp, Homo sapiens
cttcttcaggctgca

SEQ ID NO: 500886 - DNA, 15 bp, Homo sapiens
ccttcttcaggctgc

SEQ ID NO: 500887 - DNA, 15 bp, Homo sapiens
tccttcttcaggctg

SEQ ID NO: 500888 - DNA, 15 bp, Homo sapiens
ctccttcttcaggct

SEQ ID NO: 500889 - DNA, 15 bp, Homo sapiens
tctccttcttcaggc

SEQ ID NO: 500890 - DNA, 15 bp, Homo sapiens
atctccttcttcagg

SEQ ID NO: 500891 - DNA, 15 bp, Homo sapiens
catctccttcttcag

SEQ ID NO: 500892 - DNA, 15 bp, Homo sapiens
ccatctccttcttca

SEQ ID NO: 500893 - DNA, 15 bp, Homo sapiens
accatctccttcttc

SEQ ID NO: 500894 - DNA, 15 bp, Homo sapiens
caccatctccttctt

SEQ ID NO: 500895 - DNA, 15 bp, Homo sapiens
acaccatctccttct

SEQ ID NO: 500896 - DNA, 15 bp, Homo sapiens
cacaccatctccttc

SEQ ID NO: 500897 - DNA, 15 bp, Homo sapiens
ccacaccatctcctt

SEQ ID NO: 500898 - DNA, 15 bp, Homo sapiens
tccacaccatctcct

SEQ ID NO: 500899 - DNA, 15 bp, Homo sapiens
ttccacaccatctcc

SEQ ID NO: 500900 - DNA, 15 bp, Homo sapiens
attccacaccatctc

SEQ ID NO: 500901 - DNA, 15 bp, Homo sapiens
aattccacaccatct

SEQ ID NO: 500902 - DNA, 15 bp, Homo sapiens
caattccacaccatc

SEQ ID NO: 500903 - DNA, 15 bp, Homo sapiens
tcaattccacaccat

SEQ ID NO: 500904 - DNA, 15 bp, Homo sapiens
atcaattccacacca

SEQ ID NO: 500905 - DNA, 15 bp, Homo sapiens
catcaattccacacc

SEQ ID NO: 500906 - DNA, 15 bp, Homo sapiens
ccatcaattccacac

SEQ ID NO: 500907 - DNA, 15 bp, Homo sapiens
tccatcaattccaca

SEQ ID NO: 500908 - DNA, 15 bp, Homo sapiens
ttccatcaattccac

SEQ ID NO: 500909 - DNA, 15 bp, Homo sapiens
cttccatcaattcca

SEQ ID NO: 500910 - DNA, 15 bp, Homo sapiens
gcttccatcaattcc

SEQ ID NO: 500911 - DNA, 15 bp, Homo sapiens
ggcttccatcaattc

SEQ ID NO: 500912 - DNA, 15 bp, Homo sapiens
tggcttccatcaatt

SEQ ID NO: 500913 - DNA, 15 bp, Homo sapiens
ttggcttccatcaat

SEQ ID NO: 500914 - DNA, 15 bp, Homo sapiens
tttggcttccatcaa

SEQ ID NO: 500915 - DNA, 15 bp, Homo sapiens
atttggcttccatca

SEQ ID NO: 500916 - DNA, 15 bp, Homo sapiens
gatttggcttccatc

SEQ ID NO: 500917 - DNA, 15 bp, Homo sapiens
tgatttggcttccat

SEQ ID NO: 500918 - DNA, 15 bp, Homo sapiens
gtgatttggcttcca

SEQ ID NO: 500919 - DNA, 15 bp, Homo sapiens
tgtgatttggcttcc

SEQ ID NO: 500920 - DNA, 15 bp, Homo sapiens
ctgtgatttggcttc

SEQ ID NO: 500921 - DNA, 15 bp, Homo sapiens
actgtgatttggctt

SEQ ID NO: 500922 - DNA, 15 bp, Homo sapiens
aactgtgatttggct

SEQ ID NO: 500923 - DNA, 15 bp, Homo sapiens
taactgtgatttggc

SEQ ID NO: 500924 - DNA, 15 bp, Homo sapiens
ataactgtgatttgg

SEQ ID NO: 500925 - DNA, 15 bp, Homo sapiens
aataactgtgatttg

SEQ ID NO: 500926 - DNA, 15 bp, Homo sapiens
aaataactgtgattt

SEQ ID NO: 500927 - DNA, 15 bp, Homo sapiens
gaaataactgtgatt

SEQ ID NO: 500928 - DNA, 15 bp, Homo sapiens
agaaataactgtgat

SEQ ID NO: 500929 - DNA, 15 bp, Homo sapiens
aagaaataactgtga

SEQ ID NO: 500930 - DNA, 15 bp, Homo sapiens
taagaaataactgtg

SEQ ID NO: 500931 - DNA, 15 bp, Homo sapiens
ttaagaaataactgt

SEQ ID NO: 500932 - DNA, 15 bp, Homo sapiens
cttaagaaataactg

SEQ ID NO: 500933 - DNA, 15 bp, Homo sapiens
acttaagaaataact

SEQ ID NO: 500934 - DNA, 15 bp, Homo sapiens
tacttaagaaataac

SEQ ID NO: 500935 - DNA, 15 bp, Homo sapiens
ttacttaagaaataa

SEQ ID NO: 500936 - DNA, 15 bp, Homo sapiens
tttacttaagaaata

SEQ ID NO: 500937 - DNA, 15 bp, Homo sapiens
atttacttaagaaat

SEQ ID NO: 500938 - DNA, 15 bp, Homo sapiens
aatttacttaagaaa

SEQ ID NO: 500939 - DNA, 15 bp, Homo sapiens
aaatttacttaagaa

SEQ ID NO: 500940 - DNA, 15 bp, Homo sapiens
gaaatttacttaaga

SEQ ID NO: 500941 - DNA, 15 bp, Homo sapiens
tgaaatttacttaag

SEQ ID NO: 500942 - DNA, 15 bp, Homo sapiens
ctgaaatttacttaa

SEQ ID NO: 500943 - DNA, 15 bp, Homo sapiens
actgaaatttactta

SEQ ID NO: 500944 - DNA, 15 bp, Homo sapiens
gactgaaatttactt

SEQ ID NO: 500945 - DNA, 15 bp, Homo sapiens
tgactgaaatttact

SEQ ID NO: 500946 - DNA, 15 bp, Homo sapiens
gtgactgaaatttac

SEQ ID NO: 500947 - DNA, 15 bp, Homo sapiens
ggtgactgaaattta

SEQ ID NO: 500948 - DNA, 15 bp, Homo sapiens
tggtgactgaaattt

SEQ ID NO: 500949 - DNA, 15 bp, Homo sapiens
ttggtgactgaaatt

SEQ ID NO: 500950 - DNA, 15 bp, Homo sapiens
tttggtgactgaaat

SEQ ID NO: 500951 - DNA, 15 bp, Homo sapiens
ttttggtgactgaaa

SEQ ID NO: 500952 - DNA, 15 bp, Homo sapiens
tttttggtgactgaa

SEQ ID NO: 500953 - DNA, 15 bp, Homo sapiens
ttttttggtgactga

SEQ ID NO: 500954 - DNA, 15 bp, Homo sapiens
gttttttggtgactg

SEQ ID NO: 500955 - DNA, 15 bp, Homo sapiens
tgttttttggtgact

SEQ ID NO: 500956 - DNA, 15 bp, Homo sapiens
atgttttttggtgac

SEQ ID NO: 500957 - DNA, 15 bp, Homo sapiens
tatgttttttggtga

SEQ ID NO: 500958 - DNA, 15 bp, Homo sapiens
ttatgttttttggtg

SEQ ID NO: 500959 - DNA, 15 bp, Homo sapiens
tttatgttttttggt

SEQ ID NO: 500960 - DNA, 15 bp, Homo sapiens
ctttatgttttttgg

SEQ ID NO: 500961 - DNA, 15 bp, Homo sapiens
gctttatgttttttg

SEQ ID NO: 500962 - DNA, 15 bp, Homo sapiens
tgctttatgtttttt

SEQ ID NO: 500963 - DNA, 15 bp, Homo sapiens
ttgctttatgttttt

SEQ ID NO: 500964 - DNA, 15 bp, Homo sapiens
tttgctttatgtttt

SEQ ID NO: 500965 - DNA, 15 bp, Homo sapiens
ttttgctttatgttt

SEQ ID NO: 500966 - DNA, 15 bp, Homo sapiens
tttttgctttatgtt

SEQ ID NO: 500967 - DNA, 15 bp, Homo sapiens
ctttttgctttatgt

SEQ ID NO: 500968 - DNA, 15 bp, Homo sapiens
gctttttgctttatg

SEQ ID NO: 500969 - DNA, 15 bp, Homo sapiens
tgctttttgctttat

SEQ ID NO: 500970 - DNA, 15 bp, Homo sapiens
ttgctttttgcttta

SEQ ID NO: 500971 - DNA, 15 bp, Homo sapiens
tttgctttttgcttt

SEQ ID NO: 500972 - DNA, 15 bp, Homo sapiens
atttgctttttgctt

SEQ ID NO: 500973 - DNA, 15 bp, Homo sapiens
tatttgctttttgct

SEQ ID NO: 500974 - DNA, 15 bp, Homo sapiens
ttatttgctttttgc

SEQ ID NO: 500975 - DNA, 15 bp, Homo sapiens
tttatttgctttttg

SEQ ID NO: 500976 - DNA, 15 bp, Homo sapiens
ctttatttgcttttt

SEQ ID NO: 500977 - DNA, 15 bp, Homo sapiens
gctttatttgctttt

SEQ ID NO: 500978 - DNA, 15 bp, Homo sapiens
ggctttatttgcttt

SEQ ID NO: 500979 - DNA, 15 bp, Homo sapiens
gggctttatttgctt

SEQ ID NO: 500980 - DNA, 15 bp, Homo sapiens
ggggctttatttgct

SEQ ID NO: 500981 - DNA, 15 bp, Homo sapiens
gggggctttatttgc

SEQ ID NO: 500982 - DNA, 15 bp, Homo sapiens
ggggggctttatttg

SEQ ID NO: 500983 - DNA, 15 bp, Homo sapiens
tggggggctttattt

SEQ ID NO: 500984 - DNA, 15 bp, Homo sapiens
gtggggggctttatt

SEQ ID NO: 500985 - DNA, 15 bp, Homo sapiens
ggtggggggctttat

SEQ ID NO: 500986 - DNA, 15 bp, Homo sapiens
tggtggggggcttta

SEQ ID NO: 500987 - DNA, 15 bp, Homo sapiens
gtggtggggggcttt

SEQ ID NO: 500988 - DNA, 15 bp, Homo sapiens
tgtggtggggggctt

SEQ ID NO: 500989 - DNA, 15 bp, Homo sapiens
gtgtggtggggggct

SEQ ID NO: 500990 - DNA, 15 bp, Homo sapiens
tgtgtggtggggggc

SEQ ID NO: 500991 - DNA, 15 bp, Homo sapiens
ttgtgtggtgggggg

SEQ ID NO: 500992 - DNA, 15 bp, Homo sapiens
tttgtgtggtggggg

SEQ ID NO: 500993 - DNA, 15 bp, Homo sapiens
ttttgtgtggtgggg

SEQ ID NO: 500994 - DNA, 15 bp, Homo sapiens
tttttgtgtggtggg

SEQ ID NO: 500995 - DNA, 15 bp, Homo sapiens
ttttttgtgtggtgg

SEQ ID NO: 500996 - DNA, 15 bp, Homo sapiens
tttttttgtgtggtg

SEQ ID NO: 500997 - DNA, 15 bp, Homo sapiens
ctttttttgtgtggt

SEQ ID NO: 500998 - DNA, 15 bp, Homo sapiens
gctttttttgtgtgg

SEQ ID NO: 500999 - DNA, 15 bp, Homo sapiens
tgctttttttgtgtg

SEQ ID NO: 501000 - DNA, 15 bp, Homo sapiens
ttgctttttttgtgt

SEQ ID NO: 501001 - DNA, 15 bp, Homo sapiens
tttgctttttttgtg

SEQ ID NO: 501002 - DNA, 15 bp, Homo sapiens
ctttgctttttttgt

SEQ ID NO: 501003 - DNA, 15 bp, Homo sapiens
tctttgctttttttg

SEQ ID NO: 501004 - DNA, 15 bp, Homo sapiens
ttctttgcttttttt

SEQ ID NO: 501005 - DNA, 15 bp, Homo sapiens
tttctttgctttttt

SEQ ID NO: 501006 - DNA, 15 bp, Homo sapiens
atttctttgcttttt

SEQ ID NO: 501007 - DNA, 15 bp, Homo sapiens
tatttctttgctttt

SEQ ID NO: 501008 - DNA, 15 bp, Homo sapiens
ttatttctttgcttt

SEQ ID NO: 501009 - DNA, 15 bp, Homo sapiens
attatttctttgctt

SEQ ID NO: 501010 - DNA, 15 bp, Homo sapiens
tattatttctttgct

SEQ ID NO: 501011 - DNA, 15 bp, Homo sapiens
gtattatttctttgc

SEQ ID NO: 501012 - DNA, 15 bp, Homo sapiens
ggtattatttctttg

SEQ ID NO: 501013 - DNA, 15 bp, Homo sapiens
gggtattatttcttt

SEQ ID NO: 501014 - DNA, 15 bp, Homo sapiens
tgggtattatttctt

SEQ ID NO: 501015 - DNA, 15 bp, Homo sapiens
atgggtattatttct

SEQ ID NO: 501016 - DNA, 15 bp, Homo sapiens
catgggtattatttc

SEQ ID NO: 501017 - DNA, 15 bp, Homo sapiens
tcatgggtattattt

SEQ ID NO: 501018 - DNA, 15 bp, Homo sapiens
gtcatgggtattatt

SEQ ID NO: 501019 - DNA, 15 bp, Homo sapiens
tgtcatgggtattat

SEQ ID NO: 501020 - DNA, 15 bp, Homo sapiens
ctgtcatgggtatta

SEQ ID NO: 501021 - DNA, 15 bp, Homo sapiens
cctgtcatgggtatt

SEQ ID NO: 501022 - DNA, 15 bp, Homo sapiens
tcctgtcatgggtat

SEQ ID NO: 501023 - DNA, 15 bp, Homo sapiens
gtcctgtcatgggta

SEQ ID NO: 501024 - DNA, 15 bp, Homo sapiens
agtcctgtcatgggt

SEQ ID NO: 501025 - DNA, 15 bp, Homo sapiens
tagtcctgtcatggg

SEQ ID NO: 501026 - DNA, 15 bp, Homo sapiens
ctagtcctgtcatgg

SEQ ID NO: 501027 - DNA, 15 bp, Homo sapiens
cctagtcctgtcatg

SEQ ID NO: 501028 - DNA, 15 bp, Homo sapiens
tcctagtcctgtcat

SEQ ID NO: 501029 - DNA, 15 bp, Homo sapiens
atcctagtcctgtca

SEQ ID NO: 501030 - DNA, 15 bp, Homo sapiens
tatcctagtcctgtc

SEQ ID NO: 501031 - DNA, 15 bp, Homo sapiens
ctatcctagtcctgt

SEQ ID NO: 501032 - DNA, 15 bp, Homo sapiens
cctatcctagtcctg

SEQ ID NO: 501033 - DNA, 15 bp, Homo sapiens
tcctatcctagtcct

SEQ ID NO: 501034 - DNA, 15 bp, Homo sapiens
ttcctatcctagtcc

SEQ ID NO: 501035 - DNA, 15 bp, Homo sapiens
tttcctatcctagtc

SEQ ID NO: 501036 - DNA, 15 bp, Homo sapiens
ttttcctatcctagt

SEQ ID NO: 501037 - DNA, 15 bp, Homo sapiens
attttcctatcctag

SEQ ID NO: 501038 - DNA, 15 bp, Homo sapiens
tattttcctatccta

SEQ ID NO: 501039 - DNA, 15 bp, Homo sapiens
ttattttcctatcct

SEQ ID NO: 501040 - DNA, 15 bp, Homo sapiens
gttattttcctatcc

SEQ ID NO: 501041 - DNA, 15 bp, Homo sapiens
agttattttcctatc

SEQ ID NO: 501042 - DNA, 15 bp, Homo sapiens
cagttattttcctat

SEQ ID NO: 501043 - DNA, 15 bp, Homo sapiens
acagttattttccta

SEQ ID NO: 501044 - DNA, 15 bp, Homo sapiens
cacagttattttcct

SEQ ID NO: 501045 - DNA, 15 bp, Homo sapiens
acacagttattttcc

SEQ ID NO: 501046 - DNA, 15 bp, Homo sapiens
aacacagttattttc

SEQ ID NO: 501047 - DNA, 15 bp, Homo sapiens
aaacacagttatttt

SEQ ID NO: 501048 - DNA, 15 bp, Homo sapiens
aaaacacagttattt

SEQ ID NO: 501049 - DNA, 15 bp, Homo sapiens
caaaacacagttatt

SEQ ID NO: 501050 - DNA, 15 bp, Homo sapiens
acaaaacacagttat

SEQ ID NO: 501051 - DNA, 15 bp, Homo sapiens
cacaaaacacagtta

SEQ ID NO: 501052 - DNA, 15 bp, Homo sapiens
tcacaaaacacagtt

SEQ ID NO: 501053 - DNA, 15 bp, Homo sapiens
atcacaaaacacagt

SEQ ID NO: 501054 - DNA, 15 bp, Homo sapiens
aatcacaaaacacag

SEQ ID NO: 501055 - DNA, 15 bp, Homo sapiens
aaatcacaaaacaca

SEQ ID NO: 501056 - DNA, 15 bp, Homo sapiens
aaaatcacaaaacac

SEQ ID NO: 501057 - DNA, 15 bp, Homo sapiens
aaaaatcacaaaaca

SEQ ID NO: 501058 - DNA, 15 bp, Homo sapiens
aaaaaatcacaaaac

SEQ ID NO: 501059 - DNA, 15 bp, Homo sapiens
aaaaaaatcacaaaa

SEQ ID NO: 501060 - DNA, 15 bp, Homo sapiens
taaaaaaatcacaaa

SEQ ID NO: 501061 - DNA, 15 bp, Homo sapiens
ttaaaaaaatcacaa

SEQ ID NO: 501062 - DNA, 15 bp, Homo sapiens
tttaaaaaaatcaca

SEQ ID NO: 501063 - DNA, 15 bp, Homo sapiens
ctttaaaaaaatcac

SEQ ID NO: 501064 - DNA, 15 bp, Homo sapiens
tctttaaaaaaatca

SEQ ID NO: 501065 - DNA, 15 bp, Homo sapiens
ttctttaaaaaaatc

SEQ ID NO: 501066 - DNA, 15 bp, Homo sapiens
tttctttaaaaaaat

SEQ ID NO: 501067 - DNA, 15 bp, Homo sapiens
ctttctttaaaaaaa

SEQ ID NO: 501068 - DNA, 15 bp, Homo sapiens
actttctttaaaaaa

SEQ ID NO: 501069 - DNA, 15 bp, Homo sapiens
tactttctttaaaaa

SEQ ID NO: 501070 - DNA, 15 bp, Homo sapiens
ttactttctttaaaa

SEQ ID NO: 501071 - DNA, 15 bp, Homo sapiens
attactttctttaaa

SEQ ID NO: 501072 - DNA, 15 bp, Homo sapiens
tattactttctttaa

SEQ ID NO: 501073 - DNA, 15 bp, Homo sapiens
atattactttcttta

SEQ ID NO: 501074 - DNA, 15 bp, Homo sapiens
catattactttcttt

SEQ ID NO: 501075 - DNA, 15 bp, Homo sapiens
tcatattactttctt

SEQ ID NO: 501076 - DNA, 15 bp, Homo sapiens
atcatattactttct

SEQ ID NO: 501077 - DNA, 15 bp, Homo sapiens
gatcatattactttc

SEQ ID NO: 501078 - DNA, 15 bp, Homo sapiens
tgatcatattacttt

SEQ ID NO: 501079 - DNA, 15 bp, Homo sapiens
ctgatcatattactt

SEQ ID NO: 501080 - DNA, 15 bp, Homo sapiens
actgatcatattact

SEQ ID NO: 501081 - DNA, 15 bp, Homo sapiens
cactgatcatattac

SEQ ID NO: 501082 - DNA, 15 bp, Homo sapiens
tcactgatcatatta

SEQ ID NO: 501083 - DNA, 15 bp, Homo sapiens
ttcactgatcatatt

SEQ ID NO: 501084 - DNA, 15 bp, Homo sapiens
tttcactgatcatat

SEQ ID NO: 501085 - DNA, 15 bp, Homo sapiens
atttcactgatcata

SEQ ID NO: 501086 - DNA, 15 bp, Homo sapiens
aatttcactgatcat

SEQ ID NO: 501087 - DNA, 15 bp, Homo sapiens
aaatttcactgatca

SEQ ID NO: 501088 - DNA, 15 bp, Homo sapiens
aaaatttcactgatc

SEQ ID NO: 501089 - DNA, 15 bp, Homo sapiens
caaaatttcactgat

SEQ ID NO: 501090 - DNA, 15 bp, Homo sapiens
gcaaaatttcactga

SEQ ID NO: 501091 - DNA, 15 bp, Homo sapiens
agcaaaatttcactg

SEQ ID NO: 501092 - DNA, 15 bp, Homo sapiens
aagcaaaatttcact

SEQ ID NO: 501093 - DNA, 15 bp, Homo sapiens
taagcaaaatttcac

SEQ ID NO: 501094 - DNA, 15 bp, Homo sapiens
ataagcaaaatttca

SEQ ID NO: 501095 - DNA, 15 bp, Homo sapiens
tataagcaaaatttc

SEQ ID NO: 501096 - DNA, 15 bp, Homo sapiens
ttataagcaaaattt

SEQ ID NO: 501097 - DNA, 15 bp, Homo sapiens
attataagcaaaatt

SEQ ID NO: 501098 - DNA, 15 bp, Homo sapiens
tattataagcaaaat

SEQ ID NO: 501099 - DNA, 15 bp, Homo sapiens
ttattataagcaaaa

SEQ ID NO: 501100 - DNA, 15 bp, Homo sapiens
tttattataagcaaa

SEQ ID NO: 501101 - DNA, 15 bp, Homo sapiens
ttttattataagcaa

SEQ ID NO: 501102 - DNA, 15 bp, Homo sapiens
gttttattataagca

SEQ ID NO: 501103 - DNA, 15 bp, Homo sapiens
ggttttattataagc

SEQ ID NO: 501104 - DNA, 15 bp, Homo sapiens
gggttttattataag

SEQ ID NO: 501105 - DNA, 15 bp, Homo sapiens
tgggttttattataa

SEQ ID NO: 501106 - DNA, 15 bp, Homo sapiens
ctgggttttattata

SEQ ID NO: 501107 - DNA, 15 bp, Homo sapiens
tctgggttttattat

SEQ ID NO: 501108 - DNA, 15 bp, Homo sapiens
atctgggttttatta

SEQ ID NO: 501109 - DNA, 15 bp, Homo sapiens
aatctgggttttatt

SEQ ID NO: 501110 - DNA, 15 bp, Homo sapiens
caatctgggttttat

SEQ ID NO: 501111 - DNA, 15 bp, Homo sapiens
gcaatctgggtttta

SEQ ID NO: 501112 - DNA, 15 bp, Homo sapiens
agcaatctgggtttt

SEQ ID NO: 501113 - DNA, 15 bp, Homo sapiens
aagcaatctgggttt

SEQ ID NO: 501114 - DNA, 15 bp, Homo sapiens
gaagcaatctgggtt

SEQ ID NO: 501115 - DNA, 15 bp, Homo sapiens
tgaagcaatctgggt

SEQ ID NO: 501116 - DNA, 15 bp, Homo sapiens
atgaagcaatctggg

SEQ ID NO: 501117 - DNA, 15 bp, Homo sapiens
aatgaagcaatctgg

SEQ ID NO: 501118 - DNA, 15 bp, Homo sapiens
taatgaagcaatctg

SEQ ID NO: 501119 - DNA, 15 bp, Homo sapiens
ttaatgaagcaatct

SEQ ID NO: 501120 - DNA, 15 bp, Homo sapiens
cttaatgaagcaatc

SEQ ID NO: 501121 - DNA, 15 bp, Homo sapiens
acttaatgaagcaat

SEQ ID NO: 501122 - DNA, 15 bp, Homo sapiens
gacttaatgaagcaa

SEQ ID NO: 501123 - DNA, 15 bp, Homo sapiens
tgacttaatgaagca

SEQ ID NO: 501124 - DNA, 15 bp, Homo sapiens
atgacttaatgaagc

SEQ ID NO: 501125 - DNA, 15 bp, Homo sapiens
aatgacttaatgaag

SEQ ID NO: 501126 - DNA, 15 bp, Homo sapiens
aaatgacttaatgaa

SEQ ID NO: 501127 - DNA, 15 bp, Homo sapiens
taaatgacttaatga

SEQ ID NO: 501128 - DNA, 15 bp, Homo sapiens
gtaaatgacttaatg

SEQ ID NO: 501129 - DNA, 15 bp, Homo sapiens
tgtaaatgacttaat

SEQ ID NO: 501130 - DNA, 15 bp, Homo sapiens
ttgtaaatgacttaa

SEQ ID NO: 501131 - DNA, 15 bp, Homo sapiens
tttgtaaatgactta

SEQ ID NO: 501132 - DNA, 15 bp, Homo sapiens
ttttgtaaatgactt

SEQ ID NO: 501133 - DNA, 15 bp, Homo sapiens
cttttgtaaatgact

SEQ ID NO: 501134 - DNA, 15 bp, Homo sapiens
acttttgtaaatgac

SEQ ID NO: 501135 - DNA, 15 bp, Homo sapiens
cacttttgtaaatga

SEQ ID NO: 501136 - DNA, 15 bp, Homo sapiens
tcacttttgtaaatg

SEQ ID NO: 501137 - DNA, 15 bp, Homo sapiens
gtcacttttgtaaat

SEQ ID NO: 501138 - DNA, 15 bp, Homo sapiens
tgtcacttttgtaaa

SEQ ID NO: 501139 - DNA, 15 bp, Homo sapiens
atgtcacttttgtaa

SEQ ID NO: 501140 - DNA, 15 bp, Homo sapiens
aatgtcacttttgta

SEQ ID NO: 501141 - DNA, 15 bp, Homo sapiens
caatgtcacttttgt

SEQ ID NO: 501142 - DNA, 15 bp, Homo sapiens
acaatgtcacttttg

SEQ ID NO: 501143 - DNA, 15 bp, Homo sapiens
gacaatgtcactttt

SEQ ID NO: 501144 - DNA, 15 bp, Homo sapiens
agacaatgtcacttt

SEQ ID NO: 501145 - DNA, 15 bp, Homo sapiens
tagacaatgtcactt

SEQ ID NO: 501146 - DNA, 15 bp, Homo sapiens
ttagacaatgtcact

SEQ ID NO: 501147 - DNA, 15 bp, Homo sapiens
cttagacaatgtcac

SEQ ID NO: 501148 - DNA, 15 bp, Homo sapiens
gcttagacaatgtca

SEQ ID NO: 501149 - DNA, 15 bp, Homo sapiens
agcttagacaatgtc

SEQ ID NO: 501150 - DNA, 15 bp, Homo sapiens
cagcttagacaatgt

SEQ ID NO: 501151 - DNA, 15 bp, Homo sapiens
acagcttagacaatg

SEQ ID NO: 501152 - DNA, 15 bp, Homo sapiens
aacagcttagacaat

SEQ ID NO: 501153 - DNA, 15 bp, Homo sapiens
aaacagcttagacaa

SEQ ID NO: 501154 - DNA, 15 bp, Homo sapiens
caaacagcttagaca

SEQ ID NO: 501155 - DNA, 15 bp, Homo sapiens
ccaaacagcttagac

SEQ ID NO: 501156 - DNA, 15 bp, Homo sapiens
tccaaacagcttaga

SEQ ID NO: 501157 - DNA, 15 bp, Homo sapiens
gtccaaacagcttag

SEQ ID NO: 501158 - DNA, 15 bp, Homo sapiens
ggtccaaacagctta

SEQ ID NO: 501159 - DNA, 15 bp, Homo sapiens
tggtccaaacagctt

SEQ ID NO: 501160 - DNA, 15 bp, Homo sapiens
gtggtccaaacagct

SEQ ID NO: 501161 - DNA, 15 bp, Homo sapiens
agtggtccaaacagc

SEQ ID NO: 501162 - DNA, 15 bp, Homo sapiens
tagtggtccaaacag

SEQ ID NO: 501163 - DNA, 15 bp, Homo sapiens
ttagtggtccaaaca

SEQ ID NO: 501164 - DNA, 15 bp, Homo sapiens
attagtggtccaaac

SEQ ID NO: 501165 - DNA, 15 bp, Homo sapiens
aattagtggtccaaa

SEQ ID NO: 501166 - DNA, 15 bp, Homo sapiens
aaattagtggtccaa

SEQ ID NO: 501167 - DNA, 15 bp, Homo sapiens
aaaattagtggtcca

SEQ ID NO: 501168 - DNA, 15 bp, Homo sapiens
taaaattagtggtcc

SEQ ID NO: 501169 - DNA, 15 bp, Homo sapiens
ataaaattagtggtc

SEQ ID NO: 501170 - DNA, 15 bp, Homo sapiens
tataaaattagtggt

SEQ ID NO: 501171 - DNA, 15 bp, Homo sapiens
atataaaattagtgg

SEQ ID NO: 501172 - DNA, 15 bp, Homo sapiens
tatataaaattagtg

SEQ ID NO: 501173 - DNA, 15 bp, Homo sapiens
gtatataaaattagt

SEQ ID NO: 501174 - DNA, 15 bp, Homo sapiens
agtatataaaattag

SEQ ID NO: 501175 - DNA, 15 bp, Homo sapiens
tagtatataaaatta

SEQ ID NO: 501176 - DNA, 15 bp, Homo sapiens
ttagtatataaaatt

SEQ ID NO: 501177 - DNA, 15 bp, Homo sapiens
gttagtatataaaat

SEQ ID NO: 501178 - DNA, 15 bp, Homo sapiens
tgttagtatataaaa

SEQ ID NO: 501179 - DNA, 15 bp, Homo sapiens
atgttagtatataaa

SEQ ID NO: 501180 - DNA, 15 bp, Homo sapiens
aatgttagtatataa

SEQ ID NO: 501181 - DNA, 15 bp, Homo sapiens
taatgttagtatata

SEQ ID NO: 501182 - DNA, 15 bp, Homo sapiens
ttaatgttagtatat

SEQ ID NO: 501183 - DNA, 15 bp, Homo sapiens
tttaatgttagtata

SEQ ID NO: 501184 - DNA, 15 bp, Homo sapiens
ttttaatgttagtat

SEQ ID NO: 501185 - DNA, 15 bp, Homo sapiens
cttttaatgttagta

SEQ ID NO: 501186 - DNA, 15 bp, Homo sapiens
acttttaatgttagt

SEQ ID NO: 501187 - DNA, 15 bp, Homo sapiens
cacttttaatgttag

SEQ ID NO: 501188 - DNA, 15 bp, Homo sapiens
tcacttttaatgtta

SEQ ID NO: 501189 - DNA, 15 bp, Homo sapiens
gtcacttttaatgtt

SEQ ID NO: 501190 - DNA, 15 bp, Homo sapiens
tgtcacttttaatgt

SEQ ID NO: 501191 - DNA, 15 bp, Homo sapiens
gtgtcacttttaatg

SEQ ID NO: 501192 - DNA, 15 bp, Homo sapiens
tgtgtcacttttaat

SEQ ID NO: 501193 - DNA, 15 bp, Homo sapiens
atgtgtcacttttaa

SEQ ID NO: 501194 - DNA, 15 bp, Homo sapiens
aatgtgtcactttta

SEQ ID NO: 501195 - DNA, 15 bp, Homo sapiens
aaatgtgtcactttt

SEQ ID NO: 501196 - DNA, 15 bp, Homo sapiens
taaatgtgtcacttt

SEQ ID NO: 501197 - DNA, 15 bp, Homo sapiens
gtaaatgtgtcactt

SEQ ID NO: 501198 - DNA, 15 bp, Homo sapiens
ggtaaatgtgtcact

SEQ ID NO: 501199 - DNA, 15 bp, Homo sapiens
tggtaaatgtgtcac

SEQ ID NO: 501200 - DNA, 15 bp, Homo sapiens
ctggtaaatgtgtca

SEQ ID NO: 501201 - DNA, 15 bp, Homo sapiens
cctggtaaatgtgtc

SEQ ID NO: 501202 - DNA, 15 bp, Homo sapiens
acctggtaaatgtgt

SEQ ID NO: 501203 - DNA, 15 bp, Homo sapiens
tacctggtaaatgtg

SEQ ID NO: 501204 - DNA, 15 bp, Homo sapiens
ttacctggtaaatgt

SEQ ID NO: 501205 - DNA, 15 bp, Homo sapiens
attacctggtaaatg

SEQ ID NO: 501206 - DNA, 15 bp, Homo sapiens
tattacctggtaaat

SEQ ID NO: 501207 - DNA, 15 bp, Homo sapiens
atattacctggtaaa

SEQ ID NO: 501208 - DNA, 15 bp, Homo sapiens
aatattacctggtaa

SEQ ID NO: 501209 - DNA, 15 bp, Homo sapiens
caatattacctggta

SEQ ID NO: 501210 - DNA, 15 bp, Homo sapiens
gcaatattacctggt

SEQ ID NO: 501211 - DNA, 15 bp, Homo sapiens
tgcaatattacctgg

SEQ ID NO: 501212 - DNA, 15 bp, Homo sapiens
atgcaatattacctg

SEQ ID NO: 501213 - DNA, 15 bp, Homo sapiens
gatgcaatattacct

SEQ ID NO: 501214 - DNA, 15 bp, Homo sapiens
agatgcaatattacc

SEQ ID NO: 501215 - DNA, 15 bp, Homo sapiens
tagatgcaatattac

SEQ ID NO: 501216 - DNA, 15 bp, Homo sapiens
atagatgcaatatta

SEQ ID NO: 501217 - DNA, 15 bp, Homo sapiens
aatagatgcaatatt

SEQ ID NO: 501218 - DNA, 15 bp, Homo sapiens
aaatagatgcaatat

SEQ ID NO: 501219 - DNA, 15 bp, Homo sapiens
caaatagatgcaata

SEQ ID NO: 501220 - DNA, 15 bp, Homo sapiens
tcaaatagatgcaat

SEQ ID NO: 501221 - DNA, 15 bp, Homo sapiens
atcaaatagatgcaa

SEQ ID NO: 501222 - DNA, 15 bp, Homo sapiens
catcaaatagatgca

SEQ ID NO: 501223 - DNA, 15 bp, Homo sapiens
gcatcaaatagatgc

SEQ ID NO: 501224 - DNA, 15 bp, Homo sapiens
agcatcaaatagatg

SEQ ID NO: 501225 - DNA, 15 bp, Homo sapiens
tagcatcaaatagat

SEQ ID NO: 501226 - DNA, 15 bp, Homo sapiens
ttagcatcaaataga

SEQ ID NO: 501227 - DNA, 15 bp, Homo sapiens
attagcatcaaatag

SEQ ID NO: 501228 - DNA, 15 bp, Homo sapiens
cattagcatcaaata

SEQ ID NO: 501229 - DNA, 15 bp, Homo sapiens
acattagcatcaaat

SEQ ID NO: 501230 - DNA, 15 bp, Homo sapiens
aacattagcatcaaa

SEQ ID NO: 501231 - DNA, 15 bp, Homo sapiens
taacattagcatcaa

SEQ ID NO: 501232 - DNA, 15 bp, Homo sapiens
ataacattagcatca

SEQ ID NO: 501233 - DNA, 15 bp, Homo sapiens
cataacattagcatc

SEQ ID NO: 501234 - DNA, 15 bp, Homo sapiens
tcataacattagcat

SEQ ID NO: 501235 - DNA, 15 bp, Homo sapiens
ttcataacattagca

SEQ ID NO: 501236 - DNA, 15 bp, Homo sapiens
tttcataacattagc

SEQ ID NO: 501237 - DNA, 15 bp, Homo sapiens
ctttcataacattag

SEQ ID NO: 501238 - DNA, 15 bp, Homo sapiens
cctttcataacatta

SEQ ID NO: 501239 - DNA, 15 bp, Homo sapiens
acctttcataacatt

SEQ ID NO: 501240 - DNA, 15 bp, Homo sapiens
tacctttcataacat

SEQ ID NO: 501241 - DNA, 15 bp, Homo sapiens
atacctttcataaca

SEQ ID NO: 501242 - DNA, 15 bp, Homo sapiens
tatacctttcataac

SEQ ID NO: 501243 - DNA, 15 bp, Homo sapiens
gtatacctttcataa

SEQ ID NO: 501244 - DNA, 15 bp, Homo sapiens
agtatacctttcata

SEQ ID NO: 501245 - DNA, 15 bp, Homo sapiens
tagtatacctttcat

SEQ ID NO: 501246 - DNA, 15 bp, Homo sapiens
ctagtatacctttca

SEQ ID NO: 501247 - DNA, 15 bp, Homo sapiens
cctagtatacctttc

SEQ ID NO: 501248 - DNA, 15 bp, Homo sapiens
gcctagtataccttt

SEQ ID NO: 501249 - DNA, 15 bp, Homo sapiens
agcctagtatacctt

SEQ ID NO: 501250 - DNA, 15 bp, Homo sapiens
tagcctagtatacct

SEQ ID NO: 501251 - DNA, 15 bp, Homo sapiens
atagcctagtatacc

SEQ ID NO: 501252 - DNA, 15 bp, Homo sapiens
tatagcctagtatac

SEQ ID NO: 501253 - DNA, 15 bp, Homo sapiens
atatagcctagtata

SEQ ID NO: 501254 - DNA, 15 bp, Homo sapiens
gatatagcctagtat

SEQ ID NO: 501255 - DNA, 15 bp, Homo sapiens
tgatatagcctagta

SEQ ID NO: 501256 - DNA, 15 bp, Homo sapiens
ctgatatagcctagt

SEQ ID NO: 501257 - DNA, 15 bp, Homo sapiens
cctgatatagcctag

SEQ ID NO: 501258 - DNA, 15 bp, Homo sapiens
acctgatatagccta

SEQ ID NO: 501259 - DNA, 15 bp, Homo sapiens
tacctgatatagcct

SEQ ID NO: 501260 - DNA, 15 bp, Homo sapiens
ttacctgatatagcc

SEQ ID NO: 501261 - DNA, 15 bp, Homo sapiens
tttacctgatatagc

SEQ ID NO: 501262 - DNA, 15 bp, Homo sapiens
ttttacctgatatag

SEQ ID NO: 501263 - DNA, 15 bp, Homo sapiens
attttacctgatata

SEQ ID NO: 501264 - DNA, 15 bp, Homo sapiens
gattttacctgatat

SEQ ID NO: 501265 - DNA, 15 bp, Homo sapiens
tgattttacctgata

SEQ ID NO: 501266 - DNA, 15 bp, Homo sapiens
atgattttacctgat

SEQ ID NO: 501267 - DNA, 15 bp, Homo sapiens
catgattttacctga

SEQ ID NO: 501268 - DNA, 15 bp, Homo sapiens
acatgattttacctg

SEQ ID NO: 501269 - DNA, 15 bp, Homo sapiens
gacatgattttacct

SEQ ID NO: 501270 - DNA, 15 bp, Homo sapiens
ggacatgattttacc

SEQ ID NO: 501271 - DNA, 15 bp, Homo sapiens
tggacatgattttac

SEQ ID NO: 501272 - DNA, 15 bp, Homo sapiens
ttggacatgatttta

SEQ ID NO: 501273 - DNA, 15 bp, Homo sapiens
gttggacatgatttt

SEQ ID NO: 501274 - DNA, 15 bp, Homo sapiens
tgttggacatgattt

SEQ ID NO: 501275 - DNA, 15 bp, Homo sapiens
atgttggacatgatt

SEQ ID NO: 501276 - DNA, 15 bp, Homo sapiens
tatgttggacatgat

SEQ ID NO: 501277 - DNA, 15 bp, Homo sapiens
ctatgttggacatga

SEQ ID NO: 501278 - DNA, 15 bp, Homo sapiens
gctatgttggacatg

SEQ ID NO: 501279 - DNA, 15 bp, Homo sapiens
tgctatgttggacat

SEQ ID NO: 501280 - DNA, 15 bp, Homo sapiens
gtgctatgttggaca

SEQ ID NO: 501281 - DNA, 15 bp, Homo sapiens
tgtgctatgttggac

SEQ ID NO: 501282 - DNA, 15 bp, Homo sapiens
gtgtgctatgttgga

SEQ ID NO: 501283 - DNA, 15 bp, Homo sapiens
agtgtgctatgttgg

SEQ ID NO: 501284 - DNA, 15 bp, Homo sapiens
aagtgtgctatgttg

SEQ ID NO: 501285 - DNA, 15 bp, Homo sapiens
gaagtgtgctatgtt

SEQ ID NO: 501286 - DNA, 15 bp, Homo sapiens
tgaagtgtgctatgt

SEQ ID NO: 501287 - DNA, 15 bp, Homo sapiens
atgaagtgtgctatg

SEQ ID NO: 501288 - DNA, 15 bp, Homo sapiens
tatgaagtgtgctat

SEQ ID NO: 501289 - DNA, 15 bp, Homo sapiens
ttatgaagtgtgcta

SEQ ID NO: 501290 - DNA, 15 bp, Homo sapiens
attatgaagtgtgct

SEQ ID NO: 501291 - DNA, 15 bp, Homo sapiens
tattatgaagtgtgc

SEQ ID NO: 501292 - DNA, 15 bp, Homo sapiens
ttattatgaagtgtg

SEQ ID NO: 501293 - DNA, 15 bp, Homo sapiens
cttattatgaagtgt

SEQ ID NO: 501294 - DNA, 15 bp, Homo sapiens
gcttattatgaagtg

SEQ ID NO: 501295 - DNA, 15 bp, Homo sapiens
ggcttattatgaagt

SEQ ID NO: 501296 - DNA, 15 bp, Homo sapiens
tggcttattatgaag

SEQ ID NO: 501297 - DNA, 15 bp, Homo sapiens
gtggcttattatgaa

SEQ ID NO: 501298 - DNA, 15 bp, Homo sapiens
ggtggcttattatga

SEQ ID NO: 501299 - DNA, 15 bp, Homo sapiens
gggtggcttattatg

SEQ ID NO: 501300 - DNA, 15 bp, Homo sapiens
agggtggcttattat

SEQ ID NO: 501301 - DNA, 15 bp, Homo sapiens
cagggtggcttatta

SEQ ID NO: 501302 - DNA, 15 bp, Homo sapiens
ccagggtggcttatt

SEQ ID NO: 501303 - DNA, 15 bp, Homo sapiens
gccagggtggcttat

SEQ ID NO: 501304 - DNA, 15 bp, Homo sapiens
agccagggtggctta

SEQ ID NO: 501305 - DNA, 15 bp, Homo sapiens
cagccagggtggctt

SEQ ID NO: 501306 - DNA, 15 bp, Homo sapiens
tcagccagggtggct

SEQ ID NO: 501307 - DNA, 15 bp, Homo sapiens
atcagccagggtggc

SEQ ID NO: 501308 - DNA, 15 bp, Homo sapiens
aatcagccagggtgg

SEQ ID NO: 501309 - DNA, 15 bp, Homo sapiens
taatcagccagggtg

SEQ ID NO: 501310 - DNA, 15 bp, Homo sapiens
ataatcagccagggt

SEQ ID NO: 501311 - DNA, 15 bp, Homo sapiens
gataatcagccaggg

SEQ ID NO: 501312 - DNA, 15 bp, Homo sapiens
cgataatcagccagg

SEQ ID NO: 501313 - DNA, 15 bp, Homo sapiens
gcgataatcagccag

SEQ ID NO: 501314 - DNA, 15 bp, Homo sapiens
cgcgataatcagcca

SEQ ID NO: 501315 - DNA, 15 bp, Homo sapiens
tcgcgataatcagcc

SEQ ID NO: 501316 - DNA, 15 bp, Homo sapiens
ctcgcgataatcagc

SEQ ID NO: 501317 - DNA, 15 bp, Homo sapiens
tctcgcgataatcag

SEQ ID NO: 501318 - DNA, 15 bp, Homo sapiens
ctctcgcgataatca

SEQ ID NO: 501319 - DNA, 15 bp, Homo sapiens
tctctcgcgataatc

SEQ ID NO: 501320 - DNA, 15 bp, Homo sapiens
ctctctcgcgataat

SEQ ID NO: 501321 - DNA, 15 bp, Homo sapiens
cctctctcgcgataa

SEQ ID NO: 501322 - DNA, 15 bp, Homo sapiens
tcctctctcgcgata

SEQ ID NO: 501323 - DNA, 15 bp, Homo sapiens
ctcctctctcgcgat

SEQ ID NO: 501324 - DNA, 15 bp, Homo sapiens
tctcctctctcgcga

SEQ ID NO: 501325 - DNA, 15 bp, Homo sapiens
ctctcctctctcgcg

SEQ ID NO: 501326 - DNA, 15 bp, Homo sapiens
tctctcctctctcgc

SEQ ID NO: 501327 - DNA, 15 bp, Homo sapiens
ttctctcctctctcg

SEQ ID NO: 501328 - DNA, 15 bp, Homo sapiens
tttctctcctctctc

SEQ ID NO: 501329 - DNA, 15 bp, Homo sapiens
gtttctctcctctct

SEQ ID NO: 501330 - DNA, 15 bp, Homo sapiens
tgtttctctcctctc

SEQ ID NO: 501331 - DNA, 15 bp, Homo sapiens
ctgtttctctcctct

SEQ ID NO: 501332 - DNA, 15 bp, Homo sapiens
actgtttctctcctc

SEQ ID NO: 501333 - DNA, 15 bp, Homo sapiens
aactgtttctctcct

SEQ ID NO: 501334 - DNA, 15 bp, Homo sapiens
taactgtttctctcc

SEQ ID NO: 501335 - DNA, 15 bp, Homo sapiens
ttaactgtttctctc

SEQ ID NO: 501336 - DNA, 15 bp, Homo sapiens
gttaactgtttctct

SEQ ID NO: 501337 - DNA, 15 bp, Homo sapiens
ggttaactgtttctc

SEQ ID NO: 501338 - DNA, 15 bp, Homo sapiens
gggttaactgtttct

SEQ ID NO: 501339 - DNA, 15 bp, Homo sapiens
tgggttaactgtttc

SEQ ID NO: 501340 - DNA, 15 bp, Homo sapiens
ctgggttaactgttt

SEQ ID NO: 501341 - DNA, 15 bp, Homo sapiens
cctgggttaactgtt

SEQ ID NO: 501342 - DNA, 15 bp, Homo sapiens
ccctgggttaactgt

SEQ ID NO: 501343 - DNA, 15 bp, Homo sapiens
gccctgggttaactg

SEQ ID NO: 501344 - DNA, 15 bp, Homo sapiens
ggccctgggttaact

SEQ ID NO: 501345 - DNA, 15 bp, Homo sapiens
tggccctgggttaac

SEQ ID NO: 501346 - DNA, 15 bp, Homo sapiens
atggccctgggttaa

SEQ ID NO: 501347 - DNA, 15 bp, Homo sapiens
aatggccctgggtta

SEQ ID NO: 501348 - DNA, 15 bp, Homo sapiens
gaatggccctgggtt

SEQ ID NO: 501349 - DNA, 15 bp, Homo sapiens
tgaatggccctgggt

SEQ ID NO: 501350 - DNA, 15 bp, Homo sapiens
gtgaatggccctggg

SEQ ID NO: 501351 - DNA, 15 bp, Homo sapiens
tgtgaatggccctgg

SEQ ID NO: 501352 - DNA, 15 bp, Homo sapiens
gtgtgaatggccctg

SEQ ID NO: 501353 - DNA, 15 bp, Homo sapiens
ggtgtgaatggccct

SEQ ID NO: 501354 - DNA, 15 bp, Homo sapiens
tggtgtgaatggccc

SEQ ID NO: 501355 - DNA, 15 bp, Homo sapiens
atggtgtgaatggcc

SEQ ID NO: 501356 - DNA, 15 bp, Homo sapiens
catggtgtgaatggc

SEQ ID NO: 501357 - DNA, 15 bp, Homo sapiens
gcatggtgtgaatgg

SEQ ID NO: 501358 - DNA, 15 bp, Homo sapiens
tgcatggtgtgaatg

SEQ ID NO: 501359 - DNA, 15 bp, Homo sapiens
gtgcatggtgtgaat

SEQ ID NO: 501360 - DNA, 15 bp, Homo sapiens
tgtgcatggtgtgaa

SEQ ID NO: 501361 - DNA, 15 bp, Homo sapiens
atgtgcatggtgtga

SEQ ID NO: 501362 - DNA, 15 bp, Homo sapiens
tatgtgcatggtgtg

SEQ ID NO: 501363 - DNA, 15 bp, Homo sapiens
atatgtgcatggtgt

SEQ ID NO: 501364 - DNA, 15 bp, Homo sapiens
catatgtgcatggtg

SEQ ID NO: 501365 - DNA, 15 bp, Homo sapiens
tcatatgtgcatggt

SEQ ID NO: 501366 - DNA, 15 bp, Homo sapiens
atcatatgtgcatgg

SEQ ID NO: 501367 - DNA, 15 bp, Homo sapiens
aatcatatgtgcatg

SEQ ID NO: 501368 - DNA, 15 bp, Homo sapiens
caatcatatgtgcat

SEQ ID NO: 501369 - DNA, 15 bp, Homo sapiens
acaatcatatgtgca

SEQ ID NO: 501370 - DNA, 15 bp, Homo sapiens
aacaatcatatgtgc

SEQ ID NO: 501371 - DNA, 15 bp, Homo sapiens
aaacaatcatatgtg

SEQ ID NO: 501372 - DNA, 15 bp, Homo sapiens
aaaacaatcatatgt

SEQ ID NO: 501373 - DNA, 15 bp, Homo sapiens
caaaacaatcatatg

SEQ ID NO: 501374 - DNA, 15 bp, Homo sapiens
ccaaaacaatcatat

SEQ ID NO: 501375 - DNA, 15 bp, Homo sapiens
tccaaaacaatcata

SEQ ID NO: 501376 - DNA, 15 bp, Homo sapiens
ttccaaaacaatcat

SEQ ID NO: 501377 - DNA, 15 bp, Homo sapiens
attccaaaacaatca

SEQ ID NO: 501378 - DNA, 15 bp, Homo sapiens
cattccaaaacaatc

SEQ ID NO: 501379 - DNA, 15 bp, Homo sapiens
acattccaaaacaat

SEQ ID NO: 501380 - DNA, 15 bp, Homo sapiens
gacattccaaaacaa

SEQ ID NO: 501381 - DNA, 15 bp, Homo sapiens
agacattccaaaaca

SEQ ID NO: 501382 - DNA, 15 bp, Homo sapiens
cagacattccaaaac

SEQ ID NO: 501383 - DNA, 15 bp, Homo sapiens
ccagacattccaaaa

SEQ ID NO: 501384 - DNA, 15 bp, Homo sapiens
accagacattccaaa

SEQ ID NO: 501385 - DNA, 15 bp, Homo sapiens
aaccagacattccaa

SEQ ID NO: 501386 - DNA, 15 bp, Homo sapiens
taaccagacattcca

SEQ ID NO: 501387 - DNA, 15 bp, Homo sapiens
ctaaccagacattcc

SEQ ID NO: 501388 - DNA, 15 bp, Homo sapiens
gctaaccagacattc

SEQ ID NO: 501389 - DNA, 15 bp, Homo sapiens
agctaaccagacatt

SEQ ID NO: 501390 - DNA, 15 bp, Homo sapiens
aagctaaccagacat

SEQ ID NO: 501391 - DNA, 15 bp, Homo sapiens
aaagctaaccagaca

SEQ ID NO: 501392 - DNA, 15 bp, Homo sapiens
gaaagctaaccagac

SEQ ID NO: 501393 - DNA, 15 bp, Homo sapiens
agaaagctaaccaga

SEQ ID NO: 501394 - DNA, 15 bp, Homo sapiens
tagaaagctaaccag

SEQ ID NO: 501395 - DNA, 15 bp, Homo sapiens
ctagaaagctaacca

SEQ ID NO: 501396 - DNA, 15 bp, Homo sapiens
actagaaagctaacc

SEQ ID NO: 501397 - DNA, 15 bp, Homo sapiens
aactagaaagctaac

SEQ ID NO: 501398 - DNA, 15 bp, Homo sapiens
caactagaaagctaa

SEQ ID NO: 501399 - DNA, 15 bp, Homo sapiens
tcaactagaaagcta

SEQ ID NO: 501400 - DNA, 15 bp, Homo sapiens
atcaactagaaagct

SEQ ID NO: 501401 - DNA, 15 bp, Homo sapiens
tatcaactagaaagc

SEQ ID NO: 501402 - DNA, 15 bp, Homo sapiens
gtatcaactagaaag

SEQ ID NO: 501403 - DNA, 15 bp, Homo sapiens
cgtatcaactagaaa

SEQ ID NO: 501404 - DNA, 15 bp, Homo sapiens
ccgtatcaactagaa

SEQ ID NO: 501405 - DNA, 15 bp, Homo sapiens
gccgtatcaactaga

SEQ ID NO: 501406 - DNA, 15 bp, Homo sapiens
ggccgtatcaactag

SEQ ID NO: 501407 - DNA, 15 bp, Homo sapiens
aggccgtatcaacta

SEQ ID NO: 501408 - DNA, 15 bp, Homo sapiens
aaggccgtatcaact

SEQ ID NO: 501409 - DNA, 15 bp, Homo sapiens
gaaggccgtatcaac

SEQ ID NO: 501410 - DNA, 15 bp, Homo sapiens
tgaaggccgtatcaa

SEQ ID NO: 501411 - DNA, 15 bp, Homo sapiens
gtgaaggccgtatca

SEQ ID NO: 501412 - DNA, 15 bp, Homo sapiens
agtgaaggccgtatc

SEQ ID NO: 501413 - DNA, 15 bp, Homo sapiens
tagtgaaggccgtat

SEQ ID NO: 501414 - DNA, 15 bp, Homo sapiens
atagtgaaggccgta

SEQ ID NO: 501415 - DNA, 15 bp, Homo sapiens
catagtgaaggccgt

SEQ ID NO: 501416 - DNA, 15 bp, Homo sapiens
acatagtgaaggccg

SEQ ID NO: 501417 - DNA, 15 bp, Homo sapiens
tacatagtgaaggcc

SEQ ID NO: 501418 - DNA, 15 bp, Homo sapiens
ttacatagtgaaggc

SEQ ID NO: 501419 - DNA, 15 bp, Homo sapiens
tttacatagtgaagg

SEQ ID NO: 501420 - DNA, 15 bp, Homo sapiens
ctttacatagtgaag

SEQ ID NO: 501421 - DNA, 15 bp, Homo sapiens
cctttacatagtgaa

SEQ ID NO: 501422 - DNA, 15 bp, Homo sapiens
acctttacatagtga

SEQ ID NO: 501423 - DNA, 15 bp, Homo sapiens
gacctttacatagtg

SEQ ID NO: 501424 - DNA, 15 bp, Homo sapiens
tgacctttacatagt

SEQ ID NO: 501425 - DNA, 15 bp, Homo sapiens
ctgacctttacatag

SEQ ID NO: 501426 - DNA, 15 bp, Homo sapiens
actgacctttacata

SEQ ID NO: 501427 - DNA, 15 bp, Homo sapiens
gactgacctttacat

SEQ ID NO: 501428 - DNA, 15 bp, Homo sapiens
agactgacctttaca

SEQ ID NO: 501429 - DNA, 15 bp, Homo sapiens
aagactgacctttac

SEQ ID NO: 501430 - DNA, 15 bp, Homo sapiens
aaagactgaccttta

SEQ ID NO: 501431 - DNA, 15 bp, Homo sapiens
aaaagactgaccttt

SEQ ID NO: 501432 - DNA, 15 bp, Homo sapiens
aaaaagactgacctt

SEQ ID NO: 501433 - DNA, 15 bp, Homo sapiens
taaaaagactgacct

SEQ ID NO: 501434 - DNA, 15 bp, Homo sapiens
ataaaaagactgacc

SEQ ID NO: 501435 - DNA, 15 bp, Homo sapiens
aataaaaagactgac

SEQ ID NO: 501436 - DNA, 15 bp, Homo sapiens
aaataaaaagactga

SEQ ID NO: 501437 - DNA, 15 bp, Homo sapiens
gaaataaaaagactg

SEQ ID NO: 501438 - DNA, 15 bp, Homo sapiens
agaaataaaaagact

SEQ ID NO: 501439 - DNA, 15 bp, Homo sapiens
gagaaataaaaagac

SEQ ID NO: 501440 - DNA, 15 bp, Homo sapiens
tgagaaataaaaaga

SEQ ID NO: 501441 - DNA, 15 bp, Homo sapiens
ctgagaaataaaaag

SEQ ID NO: 501442 - DNA, 15 bp, Homo sapiens
tctgagaaataaaaa

SEQ ID NO: 501443 - DNA, 15 bp, Homo sapiens
atctgagaaataaaa

SEQ ID NO: 501444 - DNA, 15 bp, Homo sapiens
tatctgagaaataaa

SEQ ID NO: 501445 - DNA, 15 bp, Homo sapiens
gtatctgagaaataa

SEQ ID NO: 501446 - DNA, 15 bp, Homo sapiens
agtatctgagaaata

SEQ ID NO: 501447 - DNA, 15 bp, Homo sapiens
aagtatctgagaaat

SEQ ID NO: 501448 - DNA, 15 bp, Homo sapiens
gaagtatctgagaaa

SEQ ID NO: 501449 - DNA, 15 bp, Homo sapiens
tgaagtatctgagaa

SEQ ID NO: 501450 - DNA, 15 bp, Homo sapiens
gtgaagtatctgaga

SEQ ID NO: 501451 - DNA, 15 bp, Homo sapiens
tgtgaagtatctgag

SEQ ID NO: 501452 - DNA, 15 bp, Homo sapiens
atgtgaagtatctga

SEQ ID NO: 501453 - DNA, 15 bp, Homo sapiens
aatgtgaagtatctg

SEQ ID NO: 501454 - DNA, 15 bp, Homo sapiens
taatgtgaagtatct

SEQ ID NO: 501455 - DNA, 15 bp, Homo sapiens
ataatgtgaagtatc

SEQ ID NO: 501456 - DNA, 15 bp, Homo sapiens
aataatgtgaagtat

SEQ ID NO: 501457 - DNA, 15 bp, Homo sapiens
aaataatgtgaagta

SEQ ID NO: 501458 - DNA, 15 bp, Homo sapiens
taaataatgtgaagt

SEQ ID NO: 501459 - DNA, 15 bp, Homo sapiens
ataaataatgtgaag

SEQ ID NO: 501460 - DNA, 15 bp, Homo sapiens
cataaataatgtgaa

SEQ ID NO: 501461 - DNA, 15 bp, Homo sapiens
tcataaataatgtga

SEQ ID NO: 501462 - DNA, 15 bp, Homo sapiens
ttcataaataatgtg

SEQ ID NO: 501463 - DNA, 15 bp, Homo sapiens
gttcataaataatgt

SEQ ID NO: 501464 - DNA, 15 bp, Homo sapiens
ggttcataaataatg

SEQ ID NO: 501465 - DNA, 15 bp, Homo sapiens
aggttcataaataat

SEQ ID NO: 501466 - DNA, 15 bp, Homo sapiens
aaggttcataaataa

SEQ ID NO: 501467 - DNA, 15 bp, Homo sapiens
aaaggttcataaata

SEQ ID NO: 501468 - DNA, 15 bp, Homo sapiens
aaaaggttcataaat

SEQ ID NO: 501469 - DNA, 15 bp, Homo sapiens
caaaaggttcataaa

SEQ ID NO: 501470 - DNA, 15 bp, Homo sapiens
tcaaaaggttcataa

SEQ ID NO: 501471 - DNA, 15 bp, Homo sapiens
ttcaaaaggttcata

SEQ ID NO: 501472 - DNA, 15 bp, Homo sapiens
attcaaaaggttcat

SEQ ID NO: 501473 - DNA, 15 bp, Homo sapiens
cattcaaaaggttca

SEQ ID NO: 501474 - DNA, 15 bp, Homo sapiens
tcattcaaaaggttc

SEQ ID NO: 501475 - DNA, 15 bp, Homo sapiens
gtcattcaaaaggtt

SEQ ID NO: 501476 - DNA, 15 bp, Homo sapiens
agtcattcaaaaggt

SEQ ID NO: 501477 - DNA, 15 bp, Homo sapiens
cagtcattcaaaagg

SEQ ID NO: 501478 - DNA, 15 bp, Homo sapiens
gcagtcattcaaaag

SEQ ID NO: 501479 - DNA, 15 bp, Homo sapiens
tgcagtcattcaaaa

SEQ ID NO: 501480 - DNA, 15 bp, Homo sapiens
ctgcagtcattcaaa

SEQ ID NO: 501481 - DNA, 15 bp, Homo sapiens
actgcagtcattcaa

SEQ ID NO: 501482 - DNA, 15 bp, Homo sapiens
cactgcagtcattca

SEQ ID NO: 501483 - DNA, 15 bp, Homo sapiens
tcactgcagtcattc

SEQ ID NO: 501484 - DNA, 15 bp, Homo sapiens
ttcactgcagtcatt

SEQ ID NO: 501485 - DNA, 15 bp, Homo sapiens
cttcactgcagtcat

SEQ ID NO: 501486 - DNA, 15 bp, Homo sapiens
acttcactgcagtca

SEQ ID NO: 501487 - DNA, 15 bp, Homo sapiens
aacttcactgcagtc

SEQ ID NO: 501488 - DNA, 15 bp, Homo sapiens
caacttcactgcagt

SEQ ID NO: 501489 - DNA, 15 bp, Homo sapiens
tcaacttcactgcag

SEQ ID NO: 501490 - DNA, 15 bp, Homo sapiens
ttcaacttcactgca

SEQ ID NO: 501491 - DNA, 15 bp, Homo sapiens
cttcaacttcactgc

SEQ ID NO: 501492 - DNA, 15 bp, Homo sapiens
tcttcaacttcactg

SEQ ID NO: 501493 - DNA, 15 bp, Homo sapiens
atcttcaacttcact

SEQ ID NO: 501494 - DNA, 15 bp, Homo sapiens
catcttcaacttcac

SEQ ID NO: 501495 - DNA, 15 bp, Homo sapiens
tcatcttcaacttca

SEQ ID NO: 501496 - DNA, 15 bp, Homo sapiens
ttcatcttcaacttc

SEQ ID NO: 501497 - DNA, 15 bp, Homo sapiens
tttcatcttcaactt

SEQ ID NO: 501498 - DNA, 15 bp, Homo sapiens
ctttcatcttcaact

SEQ ID NO: 501499 - DNA, 15 bp, Homo sapiens
actttcatcttcaac

SEQ ID NO: 501500 - DNA, 15 bp, Homo sapiens
cactttcatcttcaa

SEQ ID NO: 501501 - DNA, 15 bp, Homo sapiens
gcactttcatcttca

SEQ ID NO: 501502 - DNA, 15 bp, Homo sapiens
cgcactttcatcttc

SEQ ID NO: 501503 - DNA, 15 bp, Homo sapiens
gcgcactttcatctt

SEQ ID NO: 501504 - DNA, 15 bp, Homo sapiens
tgcgcactttcatct

SEQ ID NO: 501505 - DNA, 15 bp, Homo sapiens
ttgcgcactttcatc

SEQ ID NO: 501506 - DNA, 15 bp, Homo sapiens
tttgcgcactttcat

SEQ ID NO: 501507 - DNA, 15 bp, Homo sapiens
gtttgcgcactttca

SEQ ID NO: 501508 - DNA, 15 bp, Homo sapiens
tgtttgcgcactttc

SEQ ID NO: 501509 - DNA, 15 bp, Homo sapiens
ctgtttgcgcacttt

SEQ ID NO: 501510 - DNA, 15 bp, Homo sapiens
cctgtttgcgcactt

SEQ ID NO: 501511 - DNA, 15 bp, Homo sapiens
acctgtttgcgcact

SEQ ID NO: 501512 - DNA, 15 bp, Homo sapiens
cacctgtttgcgcac

SEQ ID NO: 501513 - DNA, 15 bp, Homo sapiens
ccacctgtttgcgca

SEQ ID NO: 501514 - DNA, 15 bp, Homo sapiens
gccacctgtttgcgc

SEQ ID NO: 501515 - DNA, 15 bp, Homo sapiens
tgccacctgtttgcg

SEQ ID NO: 501516 - DNA, 15 bp, Homo sapiens
ctgccacctgtttgc

SEQ ID NO: 501517 - DNA, 15 bp, Homo sapiens
cctgccacctgtttg

SEQ ID NO: 501518 - DNA, 15 bp, Homo sapiens
tcctgccacctgttt

SEQ ID NO: 501519 - DNA, 15 bp, Homo sapiens
ttcctgccacctgtt

SEQ ID NO: 501520 - DNA, 15 bp, Homo sapiens
tttcctgccacctgt

SEQ ID NO: 501521 - DNA, 15 bp, Homo sapiens
gtttcctgccacctg

SEQ ID NO: 501522 - DNA, 15 bp, Homo sapiens
cgtttcctgccacct

SEQ ID NO: 501523 - DNA, 15 bp, Homo sapiens
acgtttcctgccacc

SEQ ID NO: 501524 - DNA, 15 bp, Homo sapiens
cacgtttcctgccac

SEQ ID NO: 501525 - DNA, 15 bp, Homo sapiens
ccacgtttcctgcca

SEQ ID NO: 501526 - DNA, 15 bp, Homo sapiens
gccacgtttcctgcc

SEQ ID NO: 501527 - DNA, 15 bp, Homo sapiens
tgccacgtttcctgc

SEQ ID NO: 501528 - DNA, 15 bp, Homo sapiens
atgccacgtttcctg

SEQ ID NO: 501529 - DNA, 15 bp, Homo sapiens
catgccacgtttcct

SEQ ID NO: 501530 - DNA, 15 bp, Homo sapiens
acatgccacgtttcc

SEQ ID NO: 501531 - DNA, 15 bp, Homo sapiens
gacatgccacgtttc

SEQ ID NO: 501532 - DNA, 15 bp, Homo sapiens
agacatgccacgttt

SEQ ID NO: 501533 - DNA, 15 bp, Homo sapiens
gagacatgccacgtt

SEQ ID NO: 501534 - DNA, 15 bp, Homo sapiens
cgagacatgccacgt

SEQ ID NO: 501535 - DNA, 15 bp, Homo sapiens
ccgagacatgccacg

SEQ ID NO: 501536 - DNA, 15 bp, Homo sapiens
tccgagacatgccac

SEQ ID NO: 501537 - DNA, 15 bp, Homo sapiens
ctccgagacatgcca

SEQ ID NO: 501538 - DNA, 15 bp, Homo sapiens
cctccgagacatgcc

SEQ ID NO: 501539 - DNA, 15 bp, Homo sapiens
gcctccgagacatgc

SEQ ID NO: 501540 - DNA, 15 bp, Homo sapiens
agcctccgagacatg

SEQ ID NO: 501541 - DNA, 15 bp, Homo sapiens
cagcctccgagacat

SEQ ID NO: 501542 - DNA, 15 bp, Homo sapiens
ccagcctccgagaca

SEQ ID NO: 501543 - DNA, 15 bp, Homo sapiens
gccagcctccgagac

SEQ ID NO: 501544 - DNA, 15 bp, Homo sapiens
tgccagcctccgaga

SEQ ID NO: 501545 - DNA, 15 bp, Homo sapiens
atgccagcctccgag

SEQ ID NO: 501546 - DNA, 15 bp, Homo sapiens
gatgccagcctccga

SEQ ID NO: 501547 - DNA, 15 bp, Homo sapiens
tgatgccagcctccg

SEQ ID NO: 501548 - DNA, 15 bp, Homo sapiens
gtgatgccagcctcc

SEQ ID NO: 501549 - DNA, 15 bp, Homo sapiens
agtgatgccagcctc

SEQ ID NO: 501550 - DNA, 15 bp, Homo sapiens
cagtgatgccagcct

SEQ ID NO: 501551 - DNA, 15 bp, Homo sapiens
tcagtgatgccagcc

SEQ ID NO: 501552 - DNA, 15 bp, Homo sapiens
ctcagtgatgccagc

SEQ ID NO: 501553 - DNA, 15 bp, Homo sapiens
cctcagtgatgccag

SEQ ID NO: 501554 - DNA, 15 bp, Homo sapiens
gcctcagtgatgcca

SEQ ID NO: 501555 - DNA, 15 bp, Homo sapiens
tgcctcagtgatgcc

SEQ ID NO: 501556 - DNA, 15 bp, Homo sapiens
gtgcctcagtgatgc

SEQ ID NO: 501557 - DNA, 15 bp, Homo sapiens
agtgcctcagtgatg

SEQ ID NO: 501558 - DNA, 15 bp, Homo sapiens
cagtgcctcagtgat

SEQ ID NO: 501559 - DNA, 15 bp, Homo sapiens
acagtgcctcagtga

SEQ ID NO: 501560 - DNA, 15 bp, Homo sapiens
tacagtgcctcagtg

SEQ ID NO: 501561 - DNA, 15 bp, Homo sapiens
gtacagtgcctcagt

SEQ ID NO: 501562 - DNA, 15 bp, Homo sapiens
cgtacagtgcctcag

SEQ ID NO: 501563 - DNA, 15 bp, Homo sapiens
ccgtacagtgcctca

SEQ ID NO: 501564 - DNA, 15 bp, Homo sapiens
accgtacagtgcctc

SEQ ID NO: 501565 - DNA, 15 bp, Homo sapiens
gaccgtacagtgcct

SEQ ID NO: 501566 - DNA, 15 bp, Homo sapiens
ggaccgtacagtgcc

SEQ ID NO: 501567 - DNA, 15 bp, Homo sapiens
aggaccgtacagtgc

SEQ ID NO: 501568 - DNA, 15 bp, Homo sapiens
aaggaccgtacagtg

SEQ ID NO: 501569 - DNA, 15 bp, Homo sapiens
caaggaccgtacagt

SEQ ID NO: 501570 - DNA, 15 bp, Homo sapiens
gcaaggaccgtacag

SEQ ID NO: 501571 - DNA, 15 bp, Homo sapiens
tgcaaggaccgtaca

SEQ ID NO: 501572 - DNA, 15 bp, Homo sapiens
ttgcaaggaccgtac

SEQ ID NO: 501573 - DNA, 15 bp, Homo sapiens
attgcaaggaccgta

SEQ ID NO: 501574 - DNA, 15 bp, Homo sapiens
cattgcaaggaccgt

SEQ ID NO: 501575 - DNA, 15 bp, Homo sapiens
acattgcaaggaccg

SEQ ID NO: 501576 - DNA, 15 bp, Homo sapiens
gacattgcaaggacc

SEQ ID NO: 501577 - DNA, 15 bp, Homo sapiens
tgacattgcaaggac

SEQ ID NO: 501578 - DNA, 15 bp, Homo sapiens
ttgacattgcaagga

SEQ ID NO: 501579 - DNA, 15 bp, Homo sapiens
tttgacattgcaagg

SEQ ID NO: 501580 - DNA, 15 bp, Homo sapiens
gtttgacattgcaag

SEQ ID NO: 501581 - DNA, 15 bp, Homo sapiens
agtttgacattgcaa

SEQ ID NO: 501582 - DNA, 15 bp, Homo sapiens
aagtttgacattgca

SEQ ID NO: 501583 - DNA, 15 bp, Homo sapiens
taagtttgacattgc

SEQ ID NO: 501584 - DNA, 15 bp, Homo sapiens
gtaagtttgacattg

SEQ ID NO: 501585 - DNA, 15 bp, Homo sapiens
agtaagtttgacatt

SEQ ID NO: 501586 - DNA, 15 bp, Homo sapiens
gagtaagtttgacat

SEQ ID NO: 501587 - DNA, 15 bp, Homo sapiens
tgagtaagtttgaca

SEQ ID NO: 501588 - DNA, 15 bp, Homo sapiens
ttgagtaagtttgac

SEQ ID NO: 501589 - DNA, 15 bp, Homo sapiens
attgagtaagtttga

SEQ ID NO: 501590 - DNA, 15 bp, Homo sapiens
cattgagtaagtttg

SEQ ID NO: 501591 - DNA, 15 bp, Homo sapiens
gcattgagtaagttt

SEQ ID NO: 501592 - DNA, 15 bp, Homo sapiens
ggcattgagtaagtt

SEQ ID NO: 501593 - DNA, 15 bp, Homo sapiens
tggcattgagtaagt

SEQ ID NO: 501594 - DNA, 15 bp, Homo sapiens
ttggcattgagtaag

SEQ ID NO: 501595 - DNA, 15 bp, Homo sapiens
gttggcattgagtaa

SEQ ID NO: 501596 - DNA, 15 bp, Homo sapiens
cgttggcattgagta

SEQ ID NO: 501597 - DNA, 15 bp, Homo sapiens
acgttggcattgagt

SEQ ID NO: 501598 - DNA, 15 bp, Homo sapiens
tacgttggcattgag

SEQ ID NO: 501599 - DNA, 15 bp, Homo sapiens
ctacgttggcattga

SEQ ID NO: 501600 - DNA, 15 bp, Homo sapiens
tctacgttggcattg

SEQ ID NO: 501601 - DNA, 15 bp, Homo sapiens
gtctacgttggcatt

SEQ ID NO: 501602 - DNA, 15 bp, Homo sapiens
tgtctacgttggcat

SEQ ID NO: 501603 - DNA, 15 bp, Homo sapiens
ctgtctacgttggca

SEQ ID NO: 501604 - DNA, 15 bp, Homo sapiens
actgtctacgttggc

SEQ ID NO: 501605 - DNA, 15 bp, Homo sapiens
cactgtctacgttgg

SEQ ID NO: 501606 - DNA, 15 bp, Homo sapiens
ccactgtctacgttg

SEQ ID NO: 501607 - DNA, 15 bp, Homo sapiens
accactgtctacgtt

SEQ ID NO: 501608 - DNA, 15 bp, Homo sapiens
gaccactgtctacgt

SEQ ID NO: 501609 - DNA, 15 bp, Homo sapiens
agaccactgtctacg

SEQ ID NO: 501610 - DNA, 15 bp, Homo sapiens
gagaccactgtctac

SEQ ID NO: 501611 - DNA, 15 bp, Homo sapiens
tgagaccactgtcta

SEQ ID NO: 501612 - DNA, 15 bp, Homo sapiens
atgagaccactgtct

SEQ ID NO: 501613 - DNA, 15 bp, Homo sapiens
catgagaccactgtc

SEQ ID NO: 501614 - DNA, 15 bp, Homo sapiens
gcatgagaccactgt

SEQ ID NO: 501615 - DNA, 15 bp, Homo sapiens
tgcatgagaccactg

SEQ ID NO: 501616 - DNA, 15 bp, Homo sapiens
gtgcatgagaccact

SEQ ID NO: 501617 - DNA, 15 bp, Homo sapiens
agtgcatgagaccac

SEQ ID NO: 501618 - DNA, 15 bp, Homo sapiens
gagtgcatgagacca

SEQ ID NO: 501619 - DNA, 15 bp, Homo sapiens
ggagtgcatgagacc

SEQ ID NO: 501620 - DNA, 15 bp, Homo sapiens
tggagtgcatgagac

SEQ ID NO: 501621 - DNA, 15 bp, Homo sapiens
atggagtgcatgaga

SEQ ID NO: 501622 - DNA, 15 bp, Homo sapiens
tatggagtgcatgag

SEQ ID NO: 501623 - DNA, 15 bp, Homo sapiens
ctatggagtgcatga

SEQ ID NO: 501624 - DNA, 15 bp, Homo sapiens
cctatggagtgcatg

SEQ ID NO: 501625 - DNA, 15 bp, Homo sapiens
acctatggagtgcat

SEQ ID NO: 501626 - DNA, 15 bp, Homo sapiens
cacctatggagtgca

SEQ ID NO: 501627 - DNA, 15 bp, Homo sapiens
tcacctatggagtgc

SEQ ID NO: 501628 - DNA, 15 bp, Homo sapiens
ctcacctatggagtg

SEQ ID NO: 501629 - DNA, 15 bp, Homo sapiens
tctcacctatggagt

SEQ ID NO: 501630 - DNA, 15 bp, Homo sapiens
atctcacctatggag

SEQ ID NO: 501631 - DNA, 15 bp, Homo sapiens
gatctcacctatgga

SEQ ID NO: 501632 - DNA, 15 bp, Homo sapiens
tgatctcacctatgg

SEQ ID NO: 501633 - DNA, 15 bp, Homo sapiens
ttgatctcacctatg

SEQ ID NO: 501634 - DNA, 15 bp, Homo sapiens
tttgatctcacctat

SEQ ID NO: 501635 - DNA, 15 bp, Homo sapiens
atttgatctcaccta

SEQ ID NO: 501636 - DNA, 15 bp, Homo sapiens
catttgatctcacct

SEQ ID NO: 501637 - DNA, 15 bp, Homo sapiens
tcatttgatctcacc

SEQ ID NO: 501638 - DNA, 15 bp, Homo sapiens
ttcatttgatctcac

SEQ ID NO: 501639 - DNA, 15 bp, Homo sapiens
tttcatttgatctca

SEQ ID NO: 501640 - DNA, 15 bp, Homo sapiens
ctttcatttgatctc

SEQ ID NO: 501641 - DNA, 15 bp, Homo sapiens
actttcatttgatct

SEQ ID NO: 501642 - DNA, 15 bp, Homo sapiens
aactttcatttgatc

SEQ ID NO: 501643 - DNA, 15 bp, Homo sapiens
aaactttcatttgat

SEQ ID NO: 501644 - DNA, 15 bp, Homo sapiens
gaaactttcatttga

SEQ ID NO: 501645 - DNA, 15 bp, Homo sapiens
tgaaactttcatttg

SEQ ID NO: 501646 - DNA, 15 bp, Homo sapiens
atgaaactttcattt

SEQ ID NO: 501647 - DNA, 15 bp, Homo sapiens
tatgaaactttcatt

SEQ ID NO: 501648 - DNA, 15 bp, Homo sapiens
atatgaaactttcat

SEQ ID NO: 501649 - DNA, 15 bp, Homo sapiens
tatatgaaactttca

SEQ ID NO: 501650 - DNA, 15 bp, Homo sapiens
ctatatgaaactttc

SEQ ID NO: 501651 - DNA, 15 bp, Homo sapiens
tctatatgaaacttt

SEQ ID NO: 501652 - DNA, 15 bp, Homo sapiens
ttctatatgaaactt

SEQ ID NO: 501653 - DNA, 15 bp, Homo sapiens
tttctatatgaaact

SEQ ID NO: 501654 - DNA, 15 bp, Homo sapiens
atttctatatgaaac

SEQ ID NO: 501655 - DNA, 15 bp, Homo sapiens
tatttctatatgaaa

SEQ ID NO: 501656 - DNA, 15 bp, Homo sapiens
gtatttctatatgaa

SEQ ID NO: 501657 - DNA, 15 bp, Homo sapiens
tgtatttctatatga

SEQ ID NO: 501658 - DNA, 15 bp, Homo sapiens
ttgtatttctatatg

SEQ ID NO: 501659 - DNA, 15 bp, Homo sapiens
tttgtatttctatat

SEQ ID NO: 501660 - DNA, 15 bp, Homo sapiens
ttttgtatttctata

SEQ ID NO: 501661 - DNA, 15 bp, Homo sapiens
gttttgtatttctat

SEQ ID NO: 501662 - DNA, 15 bp, Homo sapiens
ggttttgtatttcta

SEQ ID NO: 501663 - DNA, 15 bp, Homo sapiens
aggttttgtatttct

SEQ ID NO: 501664 - DNA, 15 bp, Homo sapiens
taggttttgtatttc

SEQ ID NO: 501665 - DNA, 15 bp, Homo sapiens
ctaggttttgtattt

SEQ ID NO: 501666 - DNA, 15 bp, Homo sapiens
tctaggttttgtatt

SEQ ID NO: 501667 - DNA, 15 bp, Homo sapiens
ctctaggttttgtat

SEQ ID NO: 501668 - DNA, 15 bp, Homo sapiens
tctctaggttttgta

SEQ ID NO: 501669 - DNA, 15 bp, Homo sapiens
ttctctaggttttgt

SEQ ID NO: 501670 - DNA, 15 bp, Homo sapiens
gttctctaggttttg

SEQ ID NO: 501671 - DNA, 15 bp, Homo sapiens
agttctctaggtttt

SEQ ID NO: 501672 - DNA, 15 bp, Homo sapiens
cagttctctaggttt

SEQ ID NO: 501673 - DNA, 15 bp, Homo sapiens
ccagttctctaggtt

SEQ ID NO: 501674 - DNA, 15 bp, Homo sapiens
gccagttctctaggt

SEQ ID NO: 501675 - DNA, 15 bp, Homo sapiens
tgccagttctctagg

SEQ ID NO: 501676 - DNA, 15 bp, Homo sapiens
atgccagttctctag

SEQ ID NO: 501677 - DNA, 15 bp, Homo sapiens
catgccagttctcta

SEQ ID NO: 501678 - DNA, 15 bp, Homo sapiens
acatgccagttctct

SEQ ID NO: 501679 - DNA, 15 bp, Homo sapiens
tacatgccagttctc

SEQ ID NO: 501680 - DNA, 15 bp, Homo sapiens
ttacatgccagttct

SEQ ID NO: 501681 - DNA, 15 bp, Homo sapiens
cttacatgccagttc

SEQ ID NO: 501682 - DNA, 15 bp, Homo sapiens
tcttacatgccagtt

SEQ ID NO: 501683 - DNA, 15 bp, Homo sapiens
ctcttacatgccagt

SEQ ID NO: 501684 - DNA, 15 bp, Homo sapiens
tctcttacatgccag

SEQ ID NO: 501685 - DNA, 15 bp, Homo sapiens
ttctcttacatgcca

SEQ ID NO: 501686 - DNA, 15 bp, Homo sapiens
cttctcttacatgcc

SEQ ID NO: 501687 - DNA, 15 bp, Homo sapiens
gcttctcttacatgc

SEQ ID NO: 501688 - DNA, 15 bp, Homo sapiens
tgcttctcttacatg

SEQ ID NO: 501689 - DNA, 15 bp, Homo sapiens
ttgcttctcttacat

SEQ ID NO: 501690 - DNA, 15 bp, Homo sapiens
tttgcttctcttaca

SEQ ID NO: 501691 - DNA, 15 bp, Homo sapiens
ttttgcttctcttac

SEQ ID NO: 501692 - DNA, 15 bp, Homo sapiens
tttttgcttctctta

SEQ ID NO: 501693 - DNA, 15 bp, Homo sapiens
atttttgcttctctt

SEQ ID NO: 501694 - DNA, 15 bp, Homo sapiens
aatttttgcttctct

SEQ ID NO: 501695 - DNA, 15 bp, Homo sapiens
taatttttgcttctc

SEQ ID NO: 501696 - DNA, 15 bp, Homo sapiens
gtaatttttgcttct

SEQ ID NO: 501697 - DNA, 15 bp, Homo sapiens
agtaatttttgcttc

SEQ ID NO: 501698 - DNA, 15 bp, Homo sapiens
aagtaatttttgctt

SEQ ID NO: 501699 - DNA, 15 bp, Homo sapiens
gaagtaatttttgct

SEQ ID NO: 501700 - DNA, 15 bp, Homo sapiens
tgaagtaatttttgc

SEQ ID NO: 501701 - DNA, 15 bp, Homo sapiens
ctgaagtaatttttg

SEQ ID NO: 501702 - DNA, 15 bp, Homo sapiens
gctgaagtaattttt

SEQ ID NO: 501703 - DNA, 15 bp, Homo sapiens
tgctgaagtaatttt

SEQ ID NO: 501704 - DNA, 15 bp, Homo sapiens
ttgctgaagtaattt

SEQ ID NO: 501705 - DNA, 15 bp, Homo sapiens
cttgctgaagtaatt

SEQ ID NO: 501706 - DNA, 15 bp, Homo sapiens
ccttgctgaagtaat

SEQ ID NO: 501707 - DNA, 15 bp, Homo sapiens
gccttgctgaagtaa

SEQ ID NO: 501708 - DNA, 15 bp, Homo sapiens
ggccttgctgaagta

SEQ ID NO: 501709 - DNA, 15 bp, Homo sapiens
tggccttgctgaagt

SEQ ID NO: 501710 - DNA, 15 bp, Homo sapiens
atggccttgctgaag

SEQ ID NO: 501711 - DNA, 15 bp, Homo sapiens
catggccttgctgaa

SEQ ID NO: 501712 - DNA, 15 bp, Homo sapiens
acatggccttgctga

SEQ ID NO: 501713 - DNA, 15 bp, Homo sapiens
aacatggccttgctg

SEQ ID NO: 501714 - DNA, 15 bp, Homo sapiens
taacatggccttgct

SEQ ID NO: 501715 - DNA, 15 bp, Homo sapiens
ctaacatggccttgc

SEQ ID NO: 501716 - DNA, 15 bp, Homo sapiens
actaacatggccttg

SEQ ID NO: 501717 - DNA, 15 bp, Homo sapiens
tactaacatggcctt

SEQ ID NO: 501718 - DNA, 15 bp, Homo sapiens
ttactaacatggcct

SEQ ID NO: 501719 - DNA, 15 bp, Homo sapiens
tttactaacatggcc

SEQ ID NO: 501720 - DNA, 15 bp, Homo sapiens
atttactaacatggc

SEQ ID NO: 501721 - DNA, 15 bp, Homo sapiens
aatttactaacatgg

SEQ ID NO: 501722 - DNA, 15 bp, Homo sapiens
aaatttactaacatg

SEQ ID NO: 501723 - DNA, 15 bp, Homo sapiens
caaatttactaacat

SEQ ID NO: 501724 - DNA, 15 bp, Homo sapiens
gcaaatttactaaca

SEQ ID NO: 501725 - DNA, 15 bp, Homo sapiens
tgcaaatttactaac

SEQ ID NO: 501726 - DNA, 15 bp, Homo sapiens
atgcaaatttactaa

SEQ ID NO: 501727 - DNA, 15 bp, Homo sapiens
gatgcaaatttacta

SEQ ID NO: 501728 - DNA, 15 bp, Homo sapiens
agatgcaaatttact

SEQ ID NO: 501729 - DNA, 15 bp, Homo sapiens
cagatgcaaatttac

SEQ ID NO: 501730 - DNA, 15 bp, Homo sapiens
acagatgcaaattta

SEQ ID NO: 501731 - DNA, 15 bp, Homo sapiens
aacagatgcaaattt

SEQ ID NO: 501732 - DNA, 15 bp, Homo sapiens
aaacagatgcaaatt

SEQ ID NO: 501733 - DNA, 15 bp, Homo sapiens
caaacagatgcaaat

SEQ ID NO: 501734 - DNA, 15 bp, Homo sapiens
acaaacagatgcaaa

SEQ ID NO: 501735 - DNA, 15 bp, Homo sapiens
gacaaacagatgcaa

SEQ ID NO: 501736 - DNA, 15 bp, Homo sapiens
ggacaaacagatgca

SEQ ID NO: 501737 - DNA, 15 bp, Homo sapiens
tggacaaacagatgc

SEQ ID NO: 501738 - DNA, 15 bp, Homo sapiens
gtggacaaacagatg

SEQ ID NO: 501739 - DNA, 15 bp, Homo sapiens
tgtggacaaacagat

SEQ ID NO: 501740 - DNA, 15 bp, Homo sapiens
atgtggacaaacaga

SEQ ID NO: 501741 - DNA, 15 bp, Homo sapiens
aatgtggacaaacag

SEQ ID NO: 501742 - DNA, 15 bp, Homo sapiens
taatgtggacaaaca

SEQ ID NO: 501743 - DNA, 15 bp, Homo sapiens
ctaatgtggacaaac

SEQ ID NO: 501744 - DNA, 15 bp, Homo sapiens
cctaatgtggacaaa

SEQ ID NO: 501745 - DNA, 15 bp, Homo sapiens
gcctaatgtggacaa

SEQ ID NO: 501746 - DNA, 15 bp, Homo sapiens
agcctaatgtggaca

SEQ ID NO: 501747 - DNA, 15 bp, Homo sapiens
aagcctaatgtggac

SEQ ID NO: 501748 - DNA, 15 bp, Homo sapiens
taagcctaatgtgga

SEQ ID NO: 501749 - DNA, 15 bp, Homo sapiens
ctaagcctaatgtgg

SEQ ID NO: 501750 - DNA, 15 bp, Homo sapiens
cctaagcctaatgtg

SEQ ID NO: 501751 - DNA, 15 bp, Homo sapiens
acctaagcctaatgt

SEQ ID NO: 501752 - DNA, 15 bp, Homo sapiens
aacctaagcctaatg

SEQ ID NO: 501753 - DNA, 15 bp, Homo sapiens
taacctaagcctaat

SEQ ID NO: 501754 - DNA, 15 bp, Homo sapiens
gtaacctaagcctaa

SEQ ID NO: 501755 - DNA, 15 bp, Homo sapiens
ggtaacctaagccta

SEQ ID NO: 501756 - DNA, 15 bp, Homo sapiens
tggtaacctaagcct

SEQ ID NO: 501757 - DNA, 15 bp, Homo sapiens
gtggtaacctaagcc

SEQ ID NO: 501758 - DNA, 15 bp, Homo sapiens
tgtggtaacctaagc

SEQ ID NO: 501759 - DNA, 15 bp, Homo sapiens
ttgtggtaacctaag

SEQ ID NO: 501760 - DNA, 15 bp, Homo sapiens
cttgtggtaacctaa

SEQ ID NO: 501761 - DNA, 15 bp, Homo sapiens
ccttgtggtaaccta

SEQ ID NO: 501762 - DNA, 15 bp, Homo sapiens
tccttgtggtaacct

SEQ ID NO: 501763 - DNA, 15 bp, Homo sapiens
atccttgtggtaacc

SEQ ID NO: 501764 - DNA, 15 bp, Homo sapiens
gatccttgtggtaac

SEQ ID NO: 501765 - DNA, 15 bp, Homo sapiens
agatccttgtggtaa

SEQ ID NO: 501766 - DNA, 15 bp, Homo sapiens
gagatccttgtggta

SEQ ID NO: 501767 - DNA, 15 bp, Homo sapiens
ggagatccttgtggt

SEQ ID NO: 501768 - DNA, 15 bp, Homo sapiens
tggagatccttgtgg

SEQ ID NO: 501769 - DNA, 15 bp, Homo sapiens
ctggagatccttgtg

SEQ ID NO: 501770 - DNA, 15 bp, Homo sapiens
tctggagatccttgt

SEQ ID NO: 501771 - DNA, 15 bp, Homo sapiens
gtctggagatccttg

SEQ ID NO: 501772 - DNA, 15 bp, Homo sapiens
tgtctggagatcctt

SEQ ID NO: 501773 - DNA, 15 bp, Homo sapiens
ttgtctggagatcct

SEQ ID NO: 501774 - DNA, 15 bp, Homo sapiens
cttgtctggagatcc

SEQ ID NO: 501775 - DNA, 15 bp, Homo sapiens
tcttgtctggagatc

SEQ ID NO: 501776 - DNA, 15 bp, Homo sapiens
ctcttgtctggagat

SEQ ID NO: 501777 - DNA, 15 bp, Homo sapiens
gctcttgtctggaga

SEQ ID NO: 501778 - DNA, 15 bp, Homo sapiens
agctcttgtctggag

SEQ ID NO: 501779 - DNA, 15 bp, Homo sapiens
tagctcttgtctgga

SEQ ID NO: 501780 - DNA, 15 bp, Homo sapiens
gtagctcttgtctgg

SEQ ID NO: 501781 - DNA, 15 bp, Homo sapiens
tgtagctcttgtctg

SEQ ID NO: 501782 - DNA, 15 bp, Homo sapiens
atgtagctcttgtct

SEQ ID NO: 501783 - DNA, 15 bp, Homo sapiens
aatgtagctcttgtc

SEQ ID NO: 501784 - DNA, 15 bp, Homo sapiens
aaatgtagctcttgt

SEQ ID NO: 501785 - DNA, 15 bp, Homo sapiens
taaatgtagctcttg

SEQ ID NO: 501786 - DNA, 15 bp, Homo sapiens
ataaatgtagctctt

SEQ ID NO: 501787 - DNA, 15 bp, Homo sapiens
cataaatgtagctct

SEQ ID NO: 501788 - DNA, 15 bp, Homo sapiens
ccataaatgtagctc

SEQ ID NO: 501789 - DNA, 15 bp, Homo sapiens
tccataaatgtagct

SEQ ID NO: 501790 - DNA, 15 bp, Homo sapiens
ttccataaatgtagc

SEQ ID NO: 501791 - DNA, 15 bp, Homo sapiens
cttccataaatgtag

SEQ ID NO: 501792 - DNA, 15 bp, Homo sapiens
acttccataaatgta

SEQ ID NO: 501793 - DNA, 15 bp, Homo sapiens
aacttccataaatgt

SEQ ID NO: 501794 - DNA, 15 bp, Homo sapiens
gaacttccataaatg

SEQ ID NO: 501795 - DNA, 15 bp, Homo sapiens
agaacttccataaat

SEQ ID NO: 501796 - DNA, 15 bp, Homo sapiens
cagaacttccataaa

SEQ ID NO: 501797 - DNA, 15 bp, Homo sapiens
tcagaacttccataa

SEQ ID NO: 501798 - DNA, 15 bp, Homo sapiens
gtcagaacttccata

SEQ ID NO: 501799 - DNA, 15 bp, Homo sapiens
tgtcagaacttccat

SEQ ID NO: 501800 - DNA, 15 bp, Homo sapiens
ttgtcagaacttcca

SEQ ID NO: 501801 - DNA, 15 bp, Homo sapiens
tttgtcagaacttcc

SEQ ID NO: 501802 - DNA, 15 bp, Homo sapiens
ttttgtcagaacttc

SEQ ID NO: 501803 - DNA, 15 bp, Homo sapiens
tttttgtcagaactt

SEQ ID NO: 501804 - DNA, 15 bp, Homo sapiens
atttttgtcagaact

SEQ ID NO: 501805 - DNA, 15 bp, Homo sapiens
gatttttgtcagaac

SEQ ID NO: 501806 - DNA, 15 bp, Homo sapiens
ggatttttgtcagaa

SEQ ID NO: 501807 - DNA, 15 bp, Homo sapiens
aggatttttgtcaga

SEQ ID NO: 501808 - DNA, 15 bp, Homo sapiens
aaggatttttgtcag

SEQ ID NO: 501809 - DNA, 15 bp, Homo sapiens
gaaggatttttgtca

SEQ ID NO: 501810 - DNA, 15 bp, Homo sapiens
tgaaggatttttgtc

SEQ ID NO: 501811 - DNA, 15 bp, Homo sapiens
ttgaaggatttttgt

SEQ ID NO: 501812 - DNA, 15 bp, Homo sapiens
gttgaaggatttttg

SEQ ID NO: 501813 - DNA, 15 bp, Homo sapiens
tgttgaaggattttt

SEQ ID NO: 501814 - DNA, 15 bp, Homo sapiens
ttgttgaaggatttt

SEQ ID NO: 501815 - DNA, 15 bp, Homo sapiens
cttgttgaaggattt

SEQ ID NO: 501816 - DNA, 15 bp, Homo sapiens
ccttgttgaaggatt

SEQ ID NO: 501817 - DNA, 15 bp, Homo sapiens
gccttgttgaaggat

SEQ ID NO: 501818 - DNA, 15 bp, Homo sapiens
tgccttgttgaagga

SEQ ID NO: 501819 - DNA, 15 bp, Homo sapiens
gtgccttgttgaagg

SEQ ID NO: 501820 - DNA, 15 bp, Homo sapiens
tgtgccttgttgaag

SEQ ID NO: 501821 - DNA, 15 bp, Homo sapiens
ctgtgccttgttgaa

SEQ ID NO: 501822 - DNA, 15 bp, Homo sapiens
tctgtgccttgttga

SEQ ID NO: 501823 - DNA, 15 bp, Homo sapiens
ttctgtgccttgttg

SEQ ID NO: 501824 - DNA, 15 bp, Homo sapiens
attctgtgccttgtt

SEQ ID NO: 501825 - DNA, 15 bp, Homo sapiens
aattctgtgccttgt

SEQ ID NO: 501826 - DNA, 15 bp, Homo sapiens
aaattctgtgccttg

SEQ ID NO: 501827 - DNA, 15 bp, Homo sapiens
caaattctgtgcctt

SEQ ID NO: 501828 - DNA, 15 bp, Homo sapiens
tcaaattctgtgcct

SEQ ID NO: 501829 - DNA, 15 bp, Homo sapiens
gtcaaattctgtgcc

SEQ ID NO: 501830 - DNA, 15 bp, Homo sapiens
tgtcaaattctgtgc

SEQ ID NO: 501831 - DNA, 15 bp, Homo sapiens
gtgtcaaattctgtg

SEQ ID NO: 501832 - DNA, 15 bp, Homo sapiens
tgtgtcaaattctgt

SEQ ID NO: 501833 - DNA, 15 bp, Homo sapiens
gtgtgtcaaattctg

SEQ ID NO: 501834 - DNA, 15 bp, Homo sapiens
agtgtgtcaaattct

SEQ ID NO: 501835 - DNA, 15 bp, Homo sapiens
aagtgtgtcaaattc

SEQ ID NO: 501836 - DNA, 15 bp, Homo sapiens
caagtgtgtcaaatt

SEQ ID NO: 501837 - DNA, 15 bp, Homo sapiens
gcaagtgtgtcaaat

SEQ ID NO: 501838 - DNA, 15 bp, Homo sapiens
tgcaagtgtgtcaaa

SEQ ID NO: 501839 - DNA, 15 bp, Homo sapiens
ctgcaagtgtgtcaa

SEQ ID NO: 501840 - DNA, 15 bp, Homo sapiens
tctgcaagtgtgtca

SEQ ID NO: 501841 - DNA, 15 bp, Homo sapiens
ttctgcaagtgtgtc

SEQ ID NO: 501842 - DNA, 15 bp, Homo sapiens
tttctgcaagtgtgt

SEQ ID NO: 501843 - DNA, 15 bp, Homo sapiens
gtttctgcaagtgtg

SEQ ID NO: 501844 - DNA, 15 bp, Homo sapiens
tgtttctgcaagtgt

SEQ ID NO: 501845 - DNA, 15 bp, Homo sapiens
ctgtttctgcaagtg

SEQ ID NO: 501846 - DNA, 15 bp, Homo sapiens
actgtttctgcaagt

SEQ ID NO: 501847 - DNA, 15 bp, Homo sapiens
tactgtttctgcaag

SEQ ID NO: 501848 - DNA, 15 bp, Homo sapiens
atactgtttctgcaa

SEQ ID NO: 501849 - DNA, 15 bp, Homo sapiens
aatactgtttctgca

SEQ ID NO: 501850 - DNA, 15 bp, Homo sapiens
caatactgtttctgc

SEQ ID NO: 501851 - DNA, 15 bp, Homo sapiens
ccaatactgtttctg

SEQ ID NO: 501852 - DNA, 15 bp, Homo sapiens
gccaatactgtttct

SEQ ID NO: 501853 - DNA, 15 bp, Homo sapiens
agccaatactgtttc

SEQ ID NO: 501854 - DNA, 15 bp, Homo sapiens
cagccaatactgttt

SEQ ID NO: 501855 - DNA, 15 bp, Homo sapiens
tcagccaatactgtt

SEQ ID NO: 501856 - DNA, 15 bp, Homo sapiens
atcagccaatactgt

SEQ ID NO: 501857 - DNA, 15 bp, Homo sapiens
gatcagccaatactg

SEQ ID NO: 501858 - DNA, 15 bp, Homo sapiens
cgatcagccaatact

SEQ ID NO: 501859 - DNA, 15 bp, Homo sapiens
ccgatcagccaatac

SEQ ID NO: 501860 - DNA, 15 bp, Homo sapiens
accgatcagccaata

SEQ ID NO: 501861 - DNA, 15 bp, Homo sapiens
aaccgatcagccaat

SEQ ID NO: 501862 - DNA, 15 bp, Homo sapiens
aaaccgatcagccaa

SEQ ID NO: 501863 - DNA, 15 bp, Homo sapiens
caaaccgatcagcca

SEQ ID NO: 501864 - DNA, 15 bp, Homo sapiens
tcaaaccgatcagcc

SEQ ID NO: 501865 - DNA, 15 bp, Homo sapiens
ctcaaaccgatcagc

SEQ ID NO: 501866 - DNA, 15 bp, Homo sapiens
tctcaaaccgatcag

SEQ ID NO: 501867 - DNA, 15 bp, Homo sapiens
ctctcaaaccgatca

SEQ ID NO: 501868 - DNA, 15 bp, Homo sapiens
tctctcaaaccgatc

SEQ ID NO: 501869 - DNA, 15 bp, Homo sapiens
atctctcaaaccgat

SEQ ID NO: 501870 - DNA, 15 bp, Homo sapiens
aatctctcaaaccga

SEQ ID NO: 501871 - DNA, 15 bp, Homo sapiens
caatctctcaaaccg

SEQ ID NO: 501872 - DNA, 15 bp, Homo sapiens
ccaatctctcaaacc

SEQ ID NO: 501873 - DNA, 15 bp, Homo sapiens
accaatctctcaaac

SEQ ID NO: 501874 - DNA, 15 bp, Homo sapiens
caccaatctctcaaa

SEQ ID NO: 501875 - DNA, 15 bp, Homo sapiens
ccaccaatctctcaa

SEQ ID NO: 501876 - DNA, 15 bp, Homo sapiens
tccaccaatctctca

SEQ ID NO: 501877 - DNA, 15 bp, Homo sapiens
ttccaccaatctctc

SEQ ID NO: 501878 - DNA, 15 bp, Homo sapiens
gttccaccaatctct

SEQ ID NO: 501879 - DNA, 15 bp, Homo sapiens
agttccaccaatctc

SEQ ID NO: 501880 - DNA, 15 bp, Homo sapiens
cagttccaccaatct

SEQ ID NO: 501881 - DNA, 15 bp, Homo sapiens
ccagttccaccaatc

SEQ ID NO: 501882 - DNA, 15 bp, Homo sapiens
accagttccaccaat

SEQ ID NO: 501883 - DNA, 15 bp, Homo sapiens
gaccagttccaccaa

SEQ ID NO: 501884 - DNA, 15 bp, Homo sapiens
tgaccagttccacca

SEQ ID NO: 501885 - DNA, 15 bp, Homo sapiens
gtgaccagttccacc

SEQ ID NO: 501886 - DNA, 15 bp, Homo sapiens
tgtgaccagttccac

SEQ ID NO: 501887 - DNA, 15 bp, Homo sapiens
ttgtgaccagttcca

SEQ ID NO: 501888 - DNA, 15 bp, Homo sapiens
attgtgaccagttcc

SEQ ID NO: 501889 - DNA, 15 bp, Homo sapiens
cattgtgaccagttc

SEQ ID NO: 501890 - DNA, 15 bp, Homo sapiens
tcattgtgaccagtt

SEQ ID NO: 501891 - DNA, 15 bp, Homo sapiens
atcattgtgaccagt

SEQ ID NO: 501892 - DNA, 15 bp, Homo sapiens
catcattgtgaccag

SEQ ID NO: 501893 - DNA, 15 bp, Homo sapiens
ccatcattgtgacca

SEQ ID NO: 501894 - DNA, 15 bp, Homo sapiens
cccatcattgtgacc

SEQ ID NO: 501895 - DNA, 15 bp, Homo sapiens
acccatcattgtgac

SEQ ID NO: 501896 - DNA, 15 bp, Homo sapiens
cacccatcattgtga

SEQ ID NO: 501897 - DNA, 15 bp, Homo sapiens
tcacccatcattgtg

SEQ ID NO: 501898 - DNA, 15 bp, Homo sapiens
atcacccatcattgt

SEQ ID NO: 501899 - DNA, 15 bp, Homo sapiens
gatcacccatcattg

SEQ ID NO: 501900 - DNA, 15 bp, Homo sapiens
tgatcacccatcatt

SEQ ID NO: 501901 - DNA, 15 bp, Homo sapiens
ttgatcacccatcat

SEQ ID NO: 501902 - DNA, 15 bp, Homo sapiens
cttgatcacccatca

SEQ ID NO: 501903 - DNA, 15 bp, Homo sapiens
ccttgatcacccatc

SEQ ID NO: 501904 - DNA, 15 bp, Homo sapiens
tccttgatcacccat

SEQ ID NO: 501905 - DNA, 15 bp, Homo sapiens
ctccttgatcaccca

SEQ ID NO: 501906 - DNA, 15 bp, Homo sapiens
tctccttgatcaccc

SEQ ID NO: 501907 - DNA, 15 bp, Homo sapiens
ttctccttgatcacc

SEQ ID NO: 501908 - DNA, 15 bp, Homo sapiens
gttctccttgatcac

SEQ ID NO: 501909 - DNA, 15 bp, Homo sapiens
agttctccttgatca

SEQ ID NO: 501910 - DNA, 15 bp, Homo sapiens
gagttctccttgatc

SEQ ID NO: 501911 - DNA, 15 bp, Homo sapiens
ggagttctccttgat

SEQ ID NO: 501912 - DNA, 15 bp, Homo sapiens
gggagttctccttga

SEQ ID NO: 501913 - DNA, 15 bp, Homo sapiens
agggagttctccttg

SEQ ID NO: 501914 - DNA, 15 bp, Homo sapiens
tagggagttctcctt

SEQ ID NO: 501915 - DNA, 15 bp, Homo sapiens
atagggagttctcct

SEQ ID NO: 501916 - DNA, 15 bp, Homo sapiens
tatagggagttctcc

SEQ ID NO: 501917 - DNA, 15 bp, Homo sapiens
ctatagggagttctc

SEQ ID NO: 501918 - DNA, 15 bp, Homo sapiens
gctatagggagttct

SEQ ID NO: 501919 - DNA, 15 bp, Homo sapiens
cgctatagggagttc

SEQ ID NO: 501920 - DNA, 15 bp, Homo sapiens
tcgctatagggagtt

SEQ ID NO: 501921 - DNA, 15 bp, Homo sapiens
atcgctatagggagt

SEQ ID NO: 501922 - DNA, 15 bp, Homo sapiens
catcgctatagggag

SEQ ID NO: 501923 - DNA, 15 bp, Homo sapiens
ccatcgctataggga

SEQ ID NO: 501924 - DNA, 15 bp, Homo sapiens
gccatcgctataggg

SEQ ID NO: 501925 - DNA, 15 bp, Homo sapiens
agccatcgctatagg

SEQ ID NO: 501926 - DNA, 15 bp, Homo sapiens
gagccatcgctatag

SEQ ID NO: 501927 - DNA, 15 bp, Homo sapiens
agagccatcgctata

SEQ ID NO: 501928 - DNA, 15 bp, Homo sapiens
cagagccatcgctat

SEQ ID NO: 501929 - DNA, 15 bp, Homo sapiens
ccagagccatcgcta

SEQ ID NO: 501930 - DNA, 15 bp, Homo sapiens
gccagagccatcgct

SEQ ID NO: 501931 - DNA, 15 bp, Homo sapiens
ggccagagccatcgc

SEQ ID NO: 501932 - DNA, 15 bp, Homo sapiens
tggccagagccatcg

SEQ ID NO: 501933 - DNA, 15 bp, Homo sapiens
ttggccagagccatc

SEQ ID NO: 501934 - DNA, 15 bp, Homo sapiens
attggccagagccat

SEQ ID NO: 501935 - DNA, 15 bp, Homo sapiens
cattggccagagcca

SEQ ID NO: 501936 - DNA, 15 bp, Homo sapiens
acattggccagagcc

SEQ ID NO: 501937 - DNA, 15 bp, Homo sapiens
cacattggccagagc

SEQ ID NO: 501938 - DNA, 15 bp, Homo sapiens
ccacattggccagag

SEQ ID NO: 501939 - DNA, 15 bp, Homo sapiens
accacattggccaga

SEQ ID NO: 501940 - DNA, 15 bp, Homo sapiens
aaccacattggccag

SEQ ID NO: 501941 - DNA, 15 bp, Homo sapiens
gaaccacattggcca

SEQ ID NO: 501942 - DNA, 15 bp, Homo sapiens
ggaaccacattggcc

SEQ ID NO: 501943 - DNA, 15 bp, Homo sapiens
aggaaccacattggc

SEQ ID NO: 501944 - DNA, 15 bp, Homo sapiens
aaggaaccacattgg

SEQ ID NO: 501945 - DNA, 15 bp, Homo sapiens
caaggaaccacattg

SEQ ID NO: 501946 - DNA, 15 bp, Homo sapiens
acaaggaaccacatt

SEQ ID NO: 501947 - DNA, 15 bp, Homo sapiens
aacaaggaaccacat

SEQ ID NO: 501948 - DNA, 15 bp, Homo sapiens
gaacaaggaaccaca

SEQ ID NO: 501949 - DNA, 15 bp, Homo sapiens
agaacaaggaaccac

SEQ ID NO: 501950 - DNA, 15 bp, Homo sapiens
gagaacaaggaacca

SEQ ID NO: 501951 - DNA, 15 bp, Homo sapiens
tgagaacaaggaacc

SEQ ID NO: 501952 - DNA, 15 bp, Homo sapiens
ctgagaacaaggaac

SEQ ID NO: 501953 - DNA, 15 bp, Homo sapiens
actgagaacaaggaa

SEQ ID NO: 501954 - DNA, 15 bp, Homo sapiens
cactgagaacaagga

SEQ ID NO: 501955 - DNA, 15 bp, Homo sapiens
ccactgagaacaagg

SEQ ID NO: 501956 - DNA, 15 bp, Homo sapiens
cccactgagaacaag

SEQ ID NO: 501957 - DNA, 15 bp, Homo sapiens
acccactgagaacaa

SEQ ID NO: 501958 - DNA, 15 bp, Homo sapiens
tacccactgagaaca

SEQ ID NO: 501959 - DNA, 15 bp, Homo sapiens
ttacccactgagaac

SEQ ID NO: 501960 - DNA, 15 bp, Homo sapiens
cttacccactgagaa

SEQ ID NO: 501961 - DNA, 15 bp, Homo sapiens
acttacccactgaga

SEQ ID NO: 501962 - DNA, 15 bp, Homo sapiens
cacttacccactgag

SEQ ID NO: 501963 - DNA, 15 bp, Homo sapiens
tcacttacccactga

SEQ ID NO: 501964 - DNA, 15 bp, Homo sapiens
atcacttacccactg

SEQ ID NO: 501965 - DNA, 15 bp, Homo sapiens
aatcacttacccact

SEQ ID NO: 501966 - DNA, 15 bp, Homo sapiens
taatcacttacccac

SEQ ID NO: 501967 - DNA, 15 bp, Homo sapiens
ctaatcacttaccca

SEQ ID NO: 501968 - DNA, 15 bp, Homo sapiens
tctaatcacttaccc

SEQ ID NO: 501969 - DNA, 15 bp, Homo sapiens
ctctaatcacttacc

SEQ ID NO: 501970 - DNA, 15 bp, Homo sapiens
actctaatcacttac

SEQ ID NO: 501971 - DNA, 15 bp, Homo sapiens
tactctaatcactta

SEQ ID NO: 501972 - DNA, 15 bp, Homo sapiens
ttactctaatcactt

SEQ ID NO: 501973 - DNA, 15 bp, Homo sapiens
cttactctaatcact

SEQ ID NO: 501974 - DNA, 15 bp, Homo sapiens
gcttactctaatcac

SEQ ID NO: 501975 - DNA, 15 bp, Homo sapiens
cgcttactctaatca

SEQ ID NO: 501976 - DNA, 15 bp, Homo sapiens
ccgcttactctaatc

SEQ ID NO: 501977 - DNA, 15 bp, Homo sapiens
cccgcttactctaat

SEQ ID NO: 501978 - DNA, 15 bp, Homo sapiens
ccccgcttactctaa

SEQ ID NO: 501979 - DNA, 15 bp, Homo sapiens
tccccgcttactcta

SEQ ID NO: 501980 - DNA, 15 bp, Homo sapiens
ttccccgcttactct

SEQ ID NO: 501981 - DNA, 15 bp, Homo sapiens
cttccccgcttactc

SEQ ID NO: 501982 - DNA, 15 bp, Homo sapiens
tcttccccgcttact

SEQ ID NO: 501983 - DNA, 15 bp, Homo sapiens
ttcttccccgcttac

SEQ ID NO: 501984 - DNA, 15 bp, Homo sapiens
tttcttccccgctta

SEQ ID NO: 501985 - DNA, 15 bp, Homo sapiens
ttttcttccccgctt

SEQ ID NO: 501986 - DNA, 15 bp, Homo sapiens
cttttcttccccgct

SEQ ID NO: 501987 - DNA, 15 bp, Homo sapiens
acttttcttccccgc

SEQ ID NO: 501988 - DNA, 15 bp, Homo sapiens
cacttttcttccccg

SEQ ID NO: 501989 - DNA, 15 bp, Homo sapiens
gcacttttcttcccc

SEQ ID NO: 501990 - DNA, 15 bp, Homo sapiens
ggcacttttcttccc

SEQ ID NO: 501991 - DNA, 15 bp, Homo sapiens
aggcacttttcttcc

SEQ ID NO: 501992 - DNA, 15 bp, Homo sapiens
caggcacttttcttc

SEQ ID NO: 501993 - DNA, 15 bp, Homo sapiens
ccaggcacttttctt

SEQ ID NO: 501994 - DNA, 15 bp, Homo sapiens
gccaggcacttttct

SEQ ID NO: 501995 - DNA, 15 bp, Homo sapiens
tgccaggcacttttc

SEQ ID NO: 501996 - DNA, 15 bp, Homo sapiens
gtgccaggcactttt

SEQ ID NO: 501997 - DNA, 15 bp, Homo sapiens
tgtgccaggcacttt

SEQ ID NO: 501998 - DNA, 15 bp, Homo sapiens
atgtgccaggcactt

SEQ ID NO: 501999 - DNA, 15 bp, Homo sapiens
tatgtgccaggcact

SEQ ID NO: 502000 - DNA, 15 bp, Homo sapiens
ctatgtgccaggcac

SEQ ID NO: 502001 - DNA, 15 bp, Homo sapiens
gctatgtgccaggca

SEQ ID NO: 502002 - DNA, 15 bp, Homo sapiens
tgctatgtgccaggc

SEQ ID NO: 502003 - DNA, 15 bp, Homo sapiens
ttgctatgtgccagg

SEQ ID NO: 502004 - DNA, 15 bp, Homo sapiens
tttgctatgtgccag

SEQ ID NO: 502005 - DNA, 15 bp, Homo sapiens
atttgctatgtgcca

SEQ ID NO: 502006 - DNA, 15 bp, Homo sapiens
gatttgctatgtgcc

SEQ ID NO: 502007 - DNA, 15 bp, Homo sapiens
ggatttgctatgtgc

SEQ ID NO: 502008 - DNA, 15 bp, Homo sapiens
aggatttgctatgtg

SEQ ID NO: 502009 - DNA, 15 bp, Homo sapiens
aaggatttgctatgt

SEQ ID NO: 502010 - DNA, 15 bp, Homo sapiens
gaaggatttgctatg

SEQ ID NO: 502011 - DNA, 15 bp, Homo sapiens
tgaaggatttgctat

SEQ ID NO: 502012 - DNA, 15 bp, Homo sapiens
ctgaaggatttgcta

SEQ ID NO: 502013 - DNA, 15 bp, Homo sapiens
tctgaaggatttgct

SEQ ID NO: 502014 - DNA, 15 bp, Homo sapiens
ttctgaaggatttgc

SEQ ID NO: 502015 - DNA, 15 bp, Homo sapiens
attctgaaggatttg

SEQ ID NO: 502016 - DNA, 15 bp, Homo sapiens
tattctgaaggattt

SEQ ID NO: 502017 - DNA, 15 bp, Homo sapiens
atattctgaaggatt

SEQ ID NO: 502018 - DNA, 15 bp, Homo sapiens
tatattctgaaggat

SEQ ID NO: 502019 - DNA, 15 bp, Homo sapiens
atatattctgaagga

SEQ ID NO: 502020 - DNA, 15 bp, Homo sapiens
aatatattctgaagg

SEQ ID NO: 502021 - DNA, 15 bp, Homo sapiens
aaatatattctgaag

SEQ ID NO: 502022 - DNA, 15 bp, Homo sapiens
caaatatattctgaa

SEQ ID NO: 502023 - DNA, 15 bp, Homo sapiens
acaaatatattctga

SEQ ID NO: 502024 - DNA, 15 bp, Homo sapiens
aacaaatatattctg

SEQ ID NO: 502025 - DNA, 15 bp, Homo sapiens
gaacaaatatattct

SEQ ID NO: 502026 - DNA, 15 bp, Homo sapiens
tgaacaaatatattc

SEQ ID NO: 502027 - DNA, 15 bp, Homo sapiens
ttgaacaaatatatt

SEQ ID NO: 502028 - DNA, 15 bp, Homo sapiens
attgaacaaatatat

SEQ ID NO: 502029 - DNA, 15 bp, Homo sapiens
tattgaacaaatata

SEQ ID NO: 502030 - DNA, 15 bp, Homo sapiens
ttattgaacaaatat

SEQ ID NO: 502031 - DNA, 15 bp, Homo sapiens
tttattgaacaaata

SEQ ID NO: 502032 - DNA, 15 bp, Homo sapiens
atttattgaacaaat

SEQ ID NO: 502033 - DNA, 15 bp, Homo sapiens
catttattgaacaaa

SEQ ID NO: 502034 - DNA, 15 bp, Homo sapiens
acatttattgaacaa

SEQ ID NO: 502035 - DNA, 15 bp, Homo sapiens
aacatttattgaaca

SEQ ID NO: 502036 - DNA, 15 bp, Homo sapiens
aaacatttattgaac

SEQ ID NO: 502037 - DNA, 15 bp, Homo sapiens
caaacatttattgaa

SEQ ID NO: 502038 - DNA, 15 bp, Homo sapiens
acaaacatttattga

SEQ ID NO: 502039 - DNA, 15 bp, Homo sapiens
aacaaacatttattg

SEQ ID NO: 502040 - DNA, 15 bp, Homo sapiens
caacaaacatttatt

SEQ ID NO: 502041 - DNA, 15 bp, Homo sapiens
tcaacaaacatttat

SEQ ID NO: 502042 - DNA, 15 bp, Homo sapiens
ttcaacaaacattta

SEQ ID NO: 502043 - DNA, 15 bp, Homo sapiens
attcaacaaacattt

SEQ ID NO: 502044 - DNA, 15 bp, Homo sapiens
cattcaacaaacatt

SEQ ID NO: 502045 - DNA, 15 bp, Homo sapiens
tcattcaacaaacat

SEQ ID NO: 502046 - DNA, 15 bp, Homo sapiens
ttcattcaacaaaca

SEQ ID NO: 502047 - DNA, 15 bp, Homo sapiens
attcattcaacaaac

SEQ ID NO: 502048 - DNA, 15 bp, Homo sapiens
aattcattcaacaaa

SEQ ID NO: 502049 - DNA, 15 bp, Homo sapiens
caattcattcaacaa

SEQ ID NO: 502050 - DNA, 15 bp, Homo sapiens
tcaattcattcaaca

SEQ ID NO: 502051 - DNA, 15 bp, Homo sapiens
atcaattcattcaac

SEQ ID NO: 502052 - DNA, 15 bp, Homo sapiens
tatcaattcattcaa

SEQ ID NO: 502053 - DNA, 15 bp, Homo sapiens
ttatcaattcattca

SEQ ID NO: 502054 - DNA, 15 bp, Homo sapiens
tttatcaattcattc

SEQ ID NO: 502055 - DNA, 15 bp, Homo sapiens
ttttatcaattcatt

SEQ ID NO: 502056 - DNA, 15 bp, Homo sapiens
attttatcaattcat

SEQ ID NO: 502057 - DNA, 15 bp, Homo sapiens
aattttatcaattca

SEQ ID NO: 502058 - DNA, 15 bp, Homo sapiens
aaattttatcaattc

SEQ ID NO: 502059 - DNA, 15 bp, Homo sapiens
gaaattttatcaatt

SEQ ID NO: 502060 - DNA, 15 bp, Homo sapiens
tgaaattttatcaat

SEQ ID NO: 502061 - DNA, 15 bp, Homo sapiens
ctgaaattttatcaa

SEQ ID NO: 502062 - DNA, 15 bp, Homo sapiens
tctgaaattttatca

SEQ ID NO: 502063 - DNA, 15 bp, Homo sapiens
ctctgaaattttatc

SEQ ID NO: 502064 - DNA, 15 bp, Homo sapiens
gctctgaaattttat

SEQ ID NO: 502065 - DNA, 15 bp, Homo sapiens
ggctctgaaatttta

SEQ ID NO: 502066 - DNA, 15 bp, Homo sapiens
tggctctgaaatttt

SEQ ID NO: 502067 - DNA, 15 bp, Homo sapiens
ctggctctgaaattt

SEQ ID NO: 502068 - DNA, 15 bp, Homo sapiens
tctggctctgaaatt

SEQ ID NO: 502069 - DNA, 15 bp, Homo sapiens
ttctggctctgaaat

SEQ ID NO: 502070 - DNA, 15 bp, Homo sapiens
cttctggctctgaaa

SEQ ID NO: 502071 - DNA, 15 bp, Homo sapiens
tcttctggctctgaa

SEQ ID NO: 502072 - DNA, 15 bp, Homo sapiens
ttcttctggctctga

SEQ ID NO: 502073 - DNA, 15 bp, Homo sapiens
tttcttctggctctg

SEQ ID NO: 502074 - DNA, 15 bp, Homo sapiens
ctttcttctggctct

SEQ ID NO: 502075 - DNA, 15 bp, Homo sapiens
tctttcttctggctc

SEQ ID NO: 502076 - DNA, 15 bp, Homo sapiens
atctttcttctggct

SEQ ID NO: 502077 - DNA, 15 bp, Homo sapiens
catctttcttctggc

SEQ ID NO: 502078 - DNA, 15 bp, Homo sapiens
acatctttcttctgg

SEQ ID NO: 502079 - DNA, 15 bp, Homo sapiens
aacatctttcttctg

SEQ ID NO: 502080 - DNA, 15 bp, Homo sapiens
aaacatctttcttct

SEQ ID NO: 502081 - DNA, 15 bp, Homo sapiens
taaacatctttcttc

SEQ ID NO: 502082 - DNA, 15 bp, Homo sapiens
ctaaacatctttctt

SEQ ID NO: 502083 - DNA, 15 bp, Homo sapiens
actaaacatctttct

SEQ ID NO: 502084 - DNA, 15 bp, Homo sapiens
aactaaacatctttc

SEQ ID NO: 502085 - DNA, 15 bp, Homo sapiens
taactaaacatcttt

SEQ ID NO: 502086 - DNA, 15 bp, Homo sapiens
ctaactaaacatctt

SEQ ID NO: 502087 - DNA, 15 bp, Homo sapiens
cctaactaaacatct

SEQ ID NO: 502088 - DNA, 15 bp, Homo sapiens
acctaactaaacatc

SEQ ID NO: 502089 - DNA, 15 bp, Homo sapiens
cacctaactaaacat

SEQ ID NO: 502090 - DNA, 15 bp, Homo sapiens
tcacctaactaaaca

SEQ ID NO: 502091 - DNA, 15 bp, Homo sapiens
atcacctaactaaac

SEQ ID NO: 502092 - DNA, 15 bp, Homo sapiens
aatcacctaactaaa

SEQ ID NO: 502093 - DNA, 15 bp, Homo sapiens
aaatcacctaactaa

SEQ ID NO: 502094 - DNA, 15 bp, Homo sapiens
aaaatcacctaacta

SEQ ID NO: 502095 - DNA, 15 bp, Homo sapiens
aaaaatcacctaact

SEQ ID NO: 502096 - DNA, 15 bp, Homo sapiens
gaaaaatcacctaac

SEQ ID NO: 502097 - DNA, 15 bp, Homo sapiens
tgaaaaatcacctaa

SEQ ID NO: 502098 - DNA, 15 bp, Homo sapiens
ctgaaaaatcaccta

SEQ ID NO: 502099 - DNA, 15 bp, Homo sapiens
gctgaaaaatcacct

SEQ ID NO: 502100 - DNA, 15 bp, Homo sapiens
agctgaaaaatcacc

SEQ ID NO: 502101 - DNA, 15 bp, Homo sapiens
cagctgaaaaatcac

SEQ ID NO: 502102 - DNA, 15 bp, Homo sapiens
acagctgaaaaatca

SEQ ID NO: 502103 - DNA, 15 bp, Homo sapiens
tacagctgaaaaatc

SEQ ID NO: 502104 - DNA, 15 bp, Homo sapiens
ctacagctgaaaaat

SEQ ID NO: 502105 - DNA, 15 bp, Homo sapiens
cctacagctgaaaaa

SEQ ID NO: 502106 - DNA, 15 bp, Homo sapiens
ccctacagctgaaaa

SEQ ID NO: 502107 - DNA, 15 bp, Homo sapiens
tccctacagctgaaa

SEQ ID NO: 502108 - DNA, 15 bp, Homo sapiens
ttccctacagctgaa

SEQ ID NO: 502109 - DNA, 15 bp, Homo sapiens
cttccctacagctga

SEQ ID NO: 502110 - DNA, 15 bp, Homo sapiens
acttccctacagctg

SEQ ID NO: 502111 - DNA, 15 bp, Homo sapiens
cacttccctacagct

SEQ ID NO: 502112 - DNA, 15 bp, Homo sapiens
ccacttccctacagc

SEQ ID NO: 502113 - DNA, 15 bp, Homo sapiens
accacttccctacag

SEQ ID NO: 502114 - DNA, 15 bp, Homo sapiens
aaccacttccctaca

SEQ ID NO: 502115 - DNA, 15 bp, Homo sapiens
caaccacttccctac

SEQ ID NO: 502116 - DNA, 15 bp, Homo sapiens
ccaaccacttcccta

SEQ ID NO: 502117 - DNA, 15 bp, Homo sapiens
gccaaccacttccct

SEQ ID NO: 502118 - DNA, 15 bp, Homo sapiens
tgccaaccacttccc

SEQ ID NO: 502119 - DNA, 15 bp, Homo sapiens
gtgccaaccacttcc

SEQ ID NO: 502120 - DNA, 15 bp, Homo sapiens
ggtgccaaccacttc

SEQ ID NO: 502121 - DNA, 15 bp, Homo sapiens
tggtgccaaccactt

SEQ ID NO: 502122 - DNA, 15 bp, Homo sapiens
gtggtgccaaccact

SEQ ID NO: 502123 - DNA, 15 bp, Homo sapiens
agtggtgccaaccac

SEQ ID NO: 502124 - DNA, 15 bp, Homo sapiens
tagtggtgccaacca

SEQ ID NO: 502125 - DNA, 15 bp, Homo sapiens
ctagtggtgccaacc

SEQ ID NO: 502126 - DNA, 15 bp, Homo sapiens
tctagtggtgccaac

SEQ ID NO: 502127 - DNA, 15 bp, Homo sapiens
gtctagtggtgccaa

SEQ ID NO: 502128 - DNA, 15 bp, Homo sapiens
ggtctagtggtgcca

SEQ ID NO: 502129 - DNA, 15 bp, Homo sapiens
aggtctagtggtgcc

SEQ ID NO: 502130 - DNA, 15 bp, Homo sapiens
caggtctagtggtgc

SEQ ID NO: 502131 - DNA, 15 bp, Homo sapiens
tcaggtctagtggtg

SEQ ID NO: 502132 - DNA, 15 bp, Homo sapiens
gtcaggtctagtggt

SEQ ID NO: 502133 - DNA, 15 bp, Homo sapiens
agtcaggtctagtgg

SEQ ID NO: 502134 - DNA, 15 bp, Homo sapiens
tagtcaggtctagtg

SEQ ID NO: 502135 - DNA, 15 bp, Homo sapiens
ctagtcaggtctagt

SEQ ID NO: 502136 - DNA, 15 bp, Homo sapiens
actagtcaggtctag

SEQ ID NO: 502137 - DNA, 15 bp, Homo sapiens
cactagtcaggtcta

SEQ ID NO: 502138 - DNA, 15 bp, Homo sapiens
acactagtcaggtct

SEQ ID NO: 502139 - DNA, 15 bp, Homo sapiens
aacactagtcaggtc

SEQ ID NO: 502140 - DNA, 15 bp, Homo sapiens
gaacactagtcaggt

SEQ ID NO: 502141 - DNA, 15 bp, Homo sapiens
agaacactagtcagg

SEQ ID NO: 502142 - DNA, 15 bp, Homo sapiens
cagaacactagtcag

SEQ ID NO: 502143 - DNA, 15 bp, Homo sapiens
acagaacactagtca

SEQ ID NO: 502144 - DNA, 15 bp, Homo sapiens
tacagaacactagtc

SEQ ID NO: 502145 - DNA, 15 bp, Homo sapiens
atacagaacactagt

SEQ ID NO: 502146 - DNA, 15 bp, Homo sapiens
gatacagaacactag

SEQ ID NO: 502147 - DNA, 15 bp, Homo sapiens
tgatacagaacacta

SEQ ID NO: 502148 - DNA, 15 bp, Homo sapiens
atgatacagaacact

SEQ ID NO: 502149 - DNA, 15 bp, Homo sapiens
aatgatacagaacac

SEQ ID NO: 502150 - DNA, 15 bp, Homo sapiens
aaatgatacagaaca

SEQ ID NO: 502151 - DNA, 15 bp, Homo sapiens
gaaatgatacagaac

SEQ ID NO: 502152 - DNA, 15 bp, Homo sapiens
tgaaatgatacagaa

SEQ ID NO: 502153 - DNA, 15 bp, Homo sapiens
atgaaatgatacaga

SEQ ID NO: 502154 - DNA, 15 bp, Homo sapiens
gatgaaatgatacag

SEQ ID NO: 502155 - DNA, 15 bp, Homo sapiens
ggatgaaatgataca

SEQ ID NO: 502156 - DNA, 15 bp, Homo sapiens
aggatgaaatgatac

SEQ ID NO: 502157 - DNA, 15 bp, Homo sapiens
taggatgaaatgata

SEQ ID NO: 502158 - DNA, 15 bp, Homo sapiens
gtaggatgaaatgat

SEQ ID NO: 502159 - DNA, 15 bp, Homo sapiens
agtaggatgaaatga

SEQ ID NO: 502160 - DNA, 15 bp, Homo sapiens
tagtaggatgaaatg

SEQ ID NO: 502161 - DNA, 15 bp, Homo sapiens
ttagtaggatgaaat

SEQ ID NO: 502162 - DNA, 15 bp, Homo sapiens
tttagtaggatgaaa

SEQ ID NO: 502163 - DNA, 15 bp, Homo sapiens
tttttagtaggatga

SEQ ID NO: 502164 - DNA, 15 bp, Homo sapiens
ttttttagtaggatg

SEQ ID NO: 502165 - DNA, 15 bp, Homo sapiens
attttttagtaggat

SEQ ID NO: 502166 - DNA, 15 bp, Homo sapiens
aattttttagtagga

SEQ ID NO: 502167 - DNA, 15 bp, Homo sapiens
gaattttttagtagg

SEQ ID NO: 502168 - DNA, 15 bp, Homo sapiens
ggaattttttagtag

SEQ ID NO: 502169 - DNA, 15 bp, Homo sapiens
tggaattttttagta

SEQ ID NO: 502170 - DNA, 15 bp, Homo sapiens
atggaattttttagt

SEQ ID NO: 502171 - DNA, 15 bp, Homo sapiens
aatggaattttttag

SEQ ID NO: 502172 - DNA, 15 bp, Homo sapiens
aaatggaatttttta

SEQ ID NO: 502173 - DNA, 15 bp, Homo sapiens
taaatggaatttttt

SEQ ID NO: 502174 - DNA, 15 bp, Homo sapiens
ttaaatggaattttt

SEQ ID NO: 502175 - DNA, 15 bp, Homo sapiens
tttaaatggaatttt

SEQ ID NO: 502176 - DNA, 15 bp, Homo sapiens
gtttaaatggaattt

SEQ ID NO: 502177 - DNA, 15 bp, Homo sapiens
cgtttaaatggaatt

SEQ ID NO: 502178 - DNA, 15 bp, Homo sapiens
gcgtttaaatggaat

SEQ ID NO: 502179 - DNA, 15 bp, Homo sapiens
tgcgtttaaatggaa

SEQ ID NO: 502180 - DNA, 15 bp, Homo sapiens
atgcgtttaaatgga

SEQ ID NO: 502181 - DNA, 15 bp, Homo sapiens
aatgcgtttaaatgg

SEQ ID NO: 502182 - DNA, 15 bp, Homo sapiens
taatgcgtttaaatg

SEQ ID NO: 502183 - DNA, 15 bp, Homo sapiens
ttaatgcgtttaaat

SEQ ID NO: 502184 - DNA, 15 bp, Homo sapiens
tttaatgcgtttaaa

SEQ ID NO: 502185 - DNA, 15 bp, Homo sapiens
ttttaatgcgtttaa

SEQ ID NO: 502186 - DNA, 15 bp, Homo sapiens
tttttaatgcgttta

SEQ ID NO: 502187 - DNA, 15 bp, Homo sapiens
atttttaatgcgttt

SEQ ID NO: 502188 - DNA, 15 bp, Homo sapiens
gatttttaatgcgtt

SEQ ID NO: 502189 - DNA, 15 bp, Homo sapiens
tgatttttaatgcgt

SEQ ID NO: 502190 - DNA, 15 bp, Homo sapiens
gtgatttttaatgcg

SEQ ID NO: 502191 - DNA, 15 bp, Homo sapiens
agtgatttttaatgc

SEQ ID NO: 502192 - DNA, 15 bp, Homo sapiens
cagtgatttttaatg

SEQ ID NO: 502193 - DNA, 15 bp, Homo sapiens
tcagtgatttttaat

SEQ ID NO: 502194 - DNA, 15 bp, Homo sapiens
atcagtgatttttaa

SEQ ID NO: 502195 - DNA, 15 bp, Homo sapiens
gatcagtgattttta

SEQ ID NO: 502196 - DNA, 15 bp, Homo sapiens
agatcagtgattttt

SEQ ID NO: 502197 - DNA, 15 bp, Homo sapiens
tagatcagtgatttt

SEQ ID NO: 502198 - DNA, 15 bp, Homo sapiens
gtagatcagtgattt

SEQ ID NO: 502199 - DNA, 15 bp, Homo sapiens
agtagatcagtgatt

SEQ ID NO: 502200 - DNA, 15 bp, Homo sapiens
gagtagatcagtgat

SEQ ID NO: 502201 - DNA, 15 bp, Homo sapiens
agagtagatcagtga

SEQ ID NO: 502202 - DNA, 15 bp, Homo sapiens
cagagtagatcagtg

SEQ ID NO: 502203 - DNA, 15 bp, Homo sapiens
ccagagtagatcagt

SEQ ID NO: 502204 - DNA, 15 bp, Homo sapiens
accagagtagatcag

SEQ ID NO: 502205 - DNA, 15 bp, Homo sapiens
caccagagtagatca

SEQ ID NO: 502206 - DNA, 15 bp, Homo sapiens
acaccagagtagatc

SEQ ID NO: 502207 - DNA, 15 bp, Homo sapiens
gacaccagagtagat

SEQ ID NO: 502208 - DNA, 15 bp, Homo sapiens
agacaccagagtaga

SEQ ID NO: 502209 - DNA, 15 bp, Homo sapiens
aagacaccagagtag

SEQ ID NO: 502210 - DNA, 15 bp, Homo sapiens
gaagacaccagagta

SEQ ID NO: 502211 - DNA, 15 bp, Homo sapiens
tgaagacaccagagt

SEQ ID NO: 502212 - DNA, 15 bp, Homo sapiens
atgaagacaccagag

SEQ ID NO: 502213 - DNA, 15 bp, Homo sapiens
tatgaagacaccaga

SEQ ID NO: 502214 - DNA, 15 bp, Homo sapiens
atatgaagacaccag

SEQ ID NO: 502215 - DNA, 15 bp, Homo sapiens
tatatgaagacacca

SEQ ID NO: 502216 - DNA, 15 bp, Homo sapiens
atatatgaagacacc

SEQ ID NO: 502217 - DNA, 15 bp, Homo sapiens
aatatatgaagacac

SEQ ID NO: 502218 - DNA, 15 bp, Homo sapiens
aaatatatgaagaca

SEQ ID NO: 502219 - DNA, 15 bp, Homo sapiens
caaatatatgaagac

SEQ ID NO: 502220 - DNA, 15 bp, Homo sapiens
tcaaatatatgaaga

SEQ ID NO: 502221 - DNA, 15 bp, Homo sapiens
atcaaatatatgaag

SEQ ID NO: 502222 - DNA, 15 bp, Homo sapiens
tatcaaatatatgaa

SEQ ID NO: 502223 - DNA, 15 bp, Homo sapiens
ttatcaaatatatga

SEQ ID NO: 502224 - DNA, 15 bp, Homo sapiens
cttatcaaatatatg

SEQ ID NO: 502225 - DNA, 15 bp, Homo sapiens
ccttatcaaatatat

SEQ ID NO: 502226 - DNA, 15 bp, Homo sapiens
accttatcaaatata

SEQ ID NO: 502227 - DNA, 15 bp, Homo sapiens
taccttatcaaatat

SEQ ID NO: 502228 - DNA, 15 bp, Homo sapiens
ttaccttatcaaata

SEQ ID NO: 502229 - DNA, 15 bp, Homo sapiens
attaccttatcaaat

SEQ ID NO: 502230 - DNA, 15 bp, Homo sapiens
aattaccttatcaaa

SEQ ID NO: 502231 - DNA, 15 bp, Homo sapiens
taattaccttatcaa

SEQ ID NO: 502232 - DNA, 15 bp, Homo sapiens
ctaattaccttatca

SEQ ID NO: 502233 - DNA, 15 bp, Homo sapiens
cctaattaccttatc

SEQ ID NO: 502234 - DNA, 15 bp, Homo sapiens
acctaattaccttat

SEQ ID NO: 502235 - DNA, 15 bp, Homo sapiens
aacctaattacctta

SEQ ID NO: 502236 - DNA, 15 bp, Homo sapiens
taacctaattacctt

SEQ ID NO: 502237 - DNA, 15 bp, Homo sapiens
ttaacctaattacct

SEQ ID NO: 502238 - DNA, 15 bp, Homo sapiens
tttaacctaattacc

SEQ ID NO: 502239 - DNA, 15 bp, Homo sapiens
gtttaacctaattac

SEQ ID NO: 502240 - DNA, 15 bp, Homo sapiens
ggtttaacctaatta

SEQ ID NO: 502241 - DNA, 15 bp, Homo sapiens
aggtttaacctaatt

SEQ ID NO: 502242 - DNA, 15 bp, Homo sapiens
taggtttaacctaat

SEQ ID NO: 502243 - DNA, 15 bp, Homo sapiens
ttaggtttaacctaa

SEQ ID NO: 502244 - DNA, 15 bp, Homo sapiens
attaggtttaaccta

SEQ ID NO: 502245 - DNA, 15 bp, Homo sapiens
aattaggtttaacct

SEQ ID NO: 502246 - DNA, 15 bp, Homo sapiens
aaattaggtttaacc

SEQ ID NO: 502247 - DNA, 15 bp, Homo sapiens
aaaattaggtttaac

SEQ ID NO: 502248 - DNA, 15 bp, Homo sapiens
taaaattaggtttaa

SEQ ID NO: 502249 - DNA, 15 bp, Homo sapiens
ctaaaattaggttta

SEQ ID NO: 502250 - DNA, 15 bp, Homo sapiens
actaaaattaggttt

SEQ ID NO: 502251 - DNA, 15 bp, Homo sapiens
aactaaaattaggtt

SEQ ID NO: 502252 - DNA, 15 bp, Homo sapiens
taactaaaattaggt

SEQ ID NO: 502253 - DNA, 15 bp, Homo sapiens
ctaactaaaattagg

SEQ ID NO: 502254 - DNA, 15 bp, Homo sapiens
actaactaaaattag

SEQ ID NO: 502255 - DNA, 15 bp, Homo sapiens
aactaactaaaatta

SEQ ID NO: 502256 - DNA, 15 bp, Homo sapiens
caactaactaaaatt

SEQ ID NO: 502257 - DNA, 15 bp, Homo sapiens
acaactaactaaaat

SEQ ID NO: 502258 - DNA, 15 bp, Homo sapiens
aacaactaactaaaa

SEQ ID NO: 502259 - DNA, 15 bp, Homo sapiens
caacaactaactaaa

SEQ ID NO: 502260 - DNA, 15 bp, Homo sapiens
gcaacaactaactaa

SEQ ID NO: 502261 - DNA, 15 bp, Homo sapiens
tgcaacaactaacta

SEQ ID NO: 502262 - DNA, 15 bp, Homo sapiens
ttgcaacaactaact

SEQ ID NO: 502263 - DNA, 15 bp, Homo sapiens
attgcaacaactaac

SEQ ID NO: 502264 - DNA, 15 bp, Homo sapiens
cattgcaacaactaa

SEQ ID NO: 502265 - DNA, 15 bp, Homo sapiens
gcattgcaacaacta

SEQ ID NO: 502266 - DNA, 15 bp, Homo sapiens
agcattgcaacaact

SEQ ID NO: 502267 - DNA, 15 bp, Homo sapiens
cagcattgcaacaac

SEQ ID NO: 502268 - DNA, 15 bp, Homo sapiens
ccagcattgcaacaa

SEQ ID NO: 502269 - DNA, 15 bp, Homo sapiens
tccagcattgcaaca

SEQ ID NO: 502270 - DNA, 15 bp, Homo sapiens
ttccagcattgcaac

SEQ ID NO: 502271 - DNA, 15 bp, Homo sapiens
attccagcattgcaa

SEQ ID NO: 502272 - DNA, 15 bp, Homo sapiens
aattccagcattgca

SEQ ID NO: 502273 - DNA, 15 bp, Homo sapiens
caattccagcattgc

SEQ ID NO: 502274 - DNA, 15 bp, Homo sapiens
ccaattccagcattg

SEQ ID NO: 502275 - DNA, 15 bp, Homo sapiens
tccaattccagcatt

SEQ ID NO: 502276 - DNA, 15 bp, Homo sapiens
ttccaattccagcat

SEQ ID NO: 502277 - DNA, 15 bp, Homo sapiens
attccaattccagca

SEQ ID NO: 502278 - DNA, 15 bp, Homo sapiens
gattccaattccagc

SEQ ID NO: 502279 - DNA, 15 bp, Homo sapiens
ggattccaattccag

SEQ ID NO: 502280 - DNA, 15 bp, Homo sapiens
tggattccaattcca

SEQ ID NO: 502281 - DNA, 15 bp, Homo sapiens
gtggattccaattcc

SEQ ID NO: 502282 - DNA, 15 bp, Homo sapiens
cgtggattccaattc

SEQ ID NO: 502283 - DNA, 15 bp, Homo sapiens
tcgtggattccaatt

SEQ ID NO: 502284 - DNA, 15 bp, Homo sapiens
atcgtggattccaat

SEQ ID NO: 502285 - DNA, 15 bp, Homo sapiens
aatcgtggattccaa

SEQ ID NO: 502286 - DNA, 15 bp, Homo sapiens
aaatcgtggattcca

SEQ ID NO: 502287 - DNA, 15 bp, Homo sapiens
caaatcgtggattcc

SEQ ID NO: 502288 - DNA, 15 bp, Homo sapiens
acaaatcgtggattc

SEQ ID NO: 502289 - DNA, 15 bp, Homo sapiens
cacaaatcgtggatt

SEQ ID NO: 502290 - DNA, 15 bp, Homo sapiens
gcacaaatcgtggat

SEQ ID NO: 502291 - DNA, 15 bp, Homo sapiens
ggcacaaatcgtgga

SEQ ID NO: 502292 - DNA, 15 bp, Homo sapiens
aggcacaaatcgtgg

SEQ ID NO: 502293 - DNA, 15 bp, Homo sapiens
caggcacaaatcgtg

SEQ ID NO: 502294 - DNA, 15 bp, Homo sapiens
acaggcacaaatcgt

SEQ ID NO: 502295 - DNA, 15 bp, Homo sapiens
aacaggcacaaatcg

SEQ ID NO: 502296 - DNA, 15 bp, Homo sapiens
aaacaggcacaaatc

SEQ ID NO: 502297 - DNA, 15 bp, Homo sapiens
taaacaggcacaaat

SEQ ID NO: 502298 - DNA, 15 bp, Homo sapiens
gtaaacaggcacaaa

SEQ ID NO: 502299 - DNA, 15 bp, Homo sapiens
agtaaacaggcacaa

SEQ ID NO: 502300 - DNA, 15 bp, Homo sapiens
tagtaaacaggcaca

SEQ ID NO: 502301 - DNA, 15 bp, Homo sapiens
gtagtaaacaggcac

SEQ ID NO: 502302 - DNA, 15 bp, Homo sapiens
ggtagtaaacaggca

SEQ ID NO: 502303 - DNA, 15 bp, Homo sapiens
aggtagtaaacaggc

SEQ ID NO: 502304 - DNA, 15 bp, Homo sapiens
gaggtagtaaacagg

SEQ ID NO: 502305 - DNA, 15 bp, Homo sapiens
ggaggtagtaaacag

SEQ ID NO: 502306 - DNA, 15 bp, Homo sapiens
tggaggtagtaaaca

SEQ ID NO: 502307 - DNA, 15 bp, Homo sapiens
ctggaggtagtaaac

SEQ ID NO: 502308 - DNA, 15 bp, Homo sapiens
actggaggtagtaaa

SEQ ID NO: 502309 - DNA, 15 bp, Homo sapiens
aactggaggtagtaa

SEQ ID NO: 502310 - DNA, 15 bp, Homo sapiens
aaactggaggtagta

SEQ ID NO: 502311 - DNA, 15 bp, Homo sapiens
caaactggaggtagt

SEQ ID NO: 502312 - DNA, 15 bp, Homo sapiens
gcaaactggaggtag

SEQ ID NO: 502313 - DNA, 15 bp, Homo sapiens
agcaaactggaggta

SEQ ID NO: 502314 - DNA, 15 bp, Homo sapiens
tagcaaactggaggt

SEQ ID NO: 502315 - DNA, 15 bp, Homo sapiens
atagcaaactggagg

SEQ ID NO: 502316 - DNA, 15 bp, Homo sapiens
aatagcaaactggag

SEQ ID NO: 502317 - DNA, 15 bp, Homo sapiens
gaatagcaaactgga

SEQ ID NO: 502318 - DNA, 15 bp, Homo sapiens
agaatagcaaactgg

SEQ ID NO: 502319 - DNA, 15 bp, Homo sapiens
aagaatagcaaactg

SEQ ID NO: 502320 - DNA, 15 bp, Homo sapiens
aaagaatagcaaact

SEQ ID NO: 502321 - DNA, 15 bp, Homo sapiens
aaaagaatagcaaac

SEQ ID NO: 502322 - DNA, 15 bp, Homo sapiens
gaaaagaatagcaaa

SEQ ID NO: 502323 - DNA, 15 bp, Homo sapiens
ggaaaagaatagcaa

SEQ ID NO: 502324 - DNA, 15 bp, Homo sapiens
gggaaaagaatagca

SEQ ID NO: 502325 - DNA, 15 bp, Homo sapiens
ggggaaaagaatagc

SEQ ID NO: 502326 - DNA, 15 bp, Homo sapiens
tggggaaaagaatag

SEQ ID NO: 502327 - DNA, 15 bp, Homo sapiens
atggggaaaagaata

SEQ ID NO: 502328 - DNA, 15 bp, Homo sapiens
tatggggaaaagaat

SEQ ID NO: 502329 - DNA, 15 bp, Homo sapiens
ttatggggaaaagaa

SEQ ID NO: 502330 - DNA, 15 bp, Homo sapiens
attatggggaaaaga

SEQ ID NO: 502331 - DNA, 15 bp, Homo sapiens
cattatggggaaaag

SEQ ID NO: 502332 - DNA, 15 bp, Homo sapiens
acattatggggaaaa

SEQ ID NO: 502333 - DNA, 15 bp, Homo sapiens
gacattatggggaaa

SEQ ID NO: 502334 - DNA, 15 bp, Homo sapiens
agacattatggggaa

SEQ ID NO: 502335 - DNA, 15 bp, Homo sapiens
gagacattatgggga

SEQ ID NO: 502336 - DNA, 15 bp, Homo sapiens
tgagacattatgggg

SEQ ID NO: 502337 - DNA, 15 bp, Homo sapiens
atgagacattatggg

SEQ ID NO: 502338 - DNA, 15 bp, Homo sapiens
tatgagacattatgg

SEQ ID NO: 502339 - DNA, 15 bp, Homo sapiens
gtatgagacattatg

SEQ ID NO: 502340 - DNA, 15 bp, Homo sapiens
tgtatgagacattat

SEQ ID NO: 502341 - DNA, 15 bp, Homo sapiens
ctgtatgagacatta

SEQ ID NO: 502342 - DNA, 15 bp, Homo sapiens
actgtatgagacatt

SEQ ID NO: 502343 - DNA, 15 bp, Homo sapiens
aactgtatgagacat

SEQ ID NO: 502344 - DNA, 15 bp, Homo sapiens
aaactgtatgagaca

SEQ ID NO: 502345 - DNA, 15 bp, Homo sapiens
aaaactgtatgagac

SEQ ID NO: 502346 - DNA, 15 bp, Homo sapiens
aaaaactgtatgaga

SEQ ID NO: 502347 - DNA, 15 bp, Homo sapiens
aaaaaactgtatgag

SEQ ID NO: 502348 - DNA, 15 bp, Homo sapiens
taaaaaactgtatga

SEQ ID NO: 502349 - DNA, 15 bp, Homo sapiens
ttaaaaaactgtatg

SEQ ID NO: 502350 - DNA, 15 bp, Homo sapiens
tttaaaaaactgtat

SEQ ID NO: 502351 - DNA, 15 bp, Homo sapiens
ttttaaaaaactgta

SEQ ID NO: 502352 - DNA, 15 bp, Homo sapiens
tttttaaaaaactgt

SEQ ID NO: 502353 - DNA, 15 bp, Homo sapiens
atttttaaaaaactg

SEQ ID NO: 502354 - DNA, 15 bp, Homo sapiens
aatttttaaaaaact

SEQ ID NO: 502355 - DNA, 15 bp, Homo sapiens
aaatttttaaaaaac

SEQ ID NO: 502356 - DNA, 15 bp, Homo sapiens
taaatttttaaaaaa

SEQ ID NO: 502357 - DNA, 15 bp, Homo sapiens
ttaaatttttaaaaa

SEQ ID NO: 502358 - DNA, 15 bp, Homo sapiens
cttaaatttttaaaa

SEQ ID NO: 502359 - DNA, 15 bp, Homo sapiens
gcttaaatttttaaa

SEQ ID NO: 502360 - DNA, 15 bp, Homo sapiens
tgcttaaatttttaa

SEQ ID NO: 502361 - DNA, 15 bp, Homo sapiens
gtgcttaaattttta

SEQ ID NO: 502362 - DNA, 15 bp, Homo sapiens
agtgcttaaattttt

SEQ ID NO: 502363 - DNA, 15 bp, Homo sapiens
tagtgcttaaatttt

SEQ ID NO: 502364 - DNA, 15 bp, Homo sapiens
atagtgcttaaattt

SEQ ID NO: 502365 - DNA, 15 bp, Homo sapiens
tatagtgcttaaatt

SEQ ID NO: 502366 - DNA, 15 bp, Homo sapiens
atatagtgcttaaat

SEQ ID NO: 502367 - DNA, 15 bp, Homo sapiens
aatatagtgcttaaa

SEQ ID NO: 502368 - DNA, 15 bp, Homo sapiens
aaatatagtgcttaa

SEQ ID NO: 502369 - DNA, 15 bp, Homo sapiens
caaatatagtgctta

SEQ ID NO: 502370 - DNA, 15 bp, Homo sapiens
gcaaatatagtgctt

SEQ ID NO: 502371 - DNA, 15 bp, Homo sapiens
tgcaaatatagtgct

SEQ ID NO: 502372 - DNA, 15 bp, Homo sapiens
atgcaaatatagtgc

SEQ ID NO: 502373 - DNA, 15 bp, Homo sapiens
aatgcaaatatagtg

SEQ ID NO: 502374 - DNA, 15 bp, Homo sapiens
aaatgcaaatatagt

SEQ ID NO: 502375 - DNA, 15 bp, Homo sapiens
caaatgcaaatatag

SEQ ID NO: 502376 - DNA, 15 bp, Homo sapiens
tcaaatgcaaatata

SEQ ID NO: 502377 - DNA, 15 bp, Homo sapiens
atcaaatgcaaatat

SEQ ID NO: 502378 - DNA, 15 bp, Homo sapiens
tatcaaatgcaaata

SEQ ID NO: 502379 - DNA, 15 bp, Homo sapiens
atatcaaatgcaaat

SEQ ID NO: 502380 - DNA, 15 bp, Homo sapiens
aatatcaaatgcaaa

SEQ ID NO: 502381 - DNA, 15 bp, Homo sapiens
taatatcaaatgcaa

SEQ ID NO: 502382 - DNA, 15 bp, Homo sapiens
ataatatcaaatgca

SEQ ID NO: 502383 - DNA, 15 bp, Homo sapiens
cataatatcaaatgc

SEQ ID NO: 502384 - DNA, 15 bp, Homo sapiens
tcataatatcaaatg

SEQ ID NO: 502385 - DNA, 15 bp, Homo sapiens
atcataatatcaaat

SEQ ID NO: 502386 - DNA, 15 bp, Homo sapiens
tatcataatatcaaa

SEQ ID NO: 502387 - DNA, 15 bp, Homo sapiens
atatcataatatcaa

SEQ ID NO: 502388 - DNA, 15 bp, Homo sapiens
aatatcataatatca

SEQ ID NO: 502389 - DNA, 15 bp, Homo sapiens
caatatcataatatc

SEQ ID NO: 502390 - DNA, 15 bp, Homo sapiens
acaatatcataatat

SEQ ID NO: 502391 - DNA, 15 bp, Homo sapiens
aacaatatcataata

SEQ ID NO: 502392 - DNA, 15 bp, Homo sapiens
aaacaatatcataat

SEQ ID NO: 502393 - DNA, 15 bp, Homo sapiens
taaacaatatcataa

SEQ ID NO: 502394 - DNA, 15 bp, Homo sapiens
ataaacaatatcata

SEQ ID NO: 502395 - DNA, 15 bp, Homo sapiens
aataaacaatatcat

SEQ ID NO: 502396 - DNA, 15 bp, Homo sapiens
aaataaacaatatca

SEQ ID NO: 502397 - DNA, 15 bp, Homo sapiens
aaaataaacaatatc

SEQ ID NO: 502398 - DNA, 15 bp, Homo sapiens
taaaataaacaatat

SEQ ID NO: 502399 - DNA, 15 bp, Homo sapiens
ttaaaataaacaata

SEQ ID NO: 502400 - DNA, 15 bp, Homo sapiens
tttaaaataaacaat

SEQ ID NO: 502401 - DNA, 15 bp, Homo sapiens
ttttaaaataaacaa

SEQ ID NO: 502402 - DNA, 15 bp, Homo sapiens
tttttaaaataaaca

SEQ ID NO: 502403 - DNA, 15 bp, Homo sapiens
gtttttaaaataaac

SEQ ID NO: 502404 - DNA, 15 bp, Homo sapiens
agtttttaaaataaa

SEQ ID NO: 502405 - DNA, 15 bp, Homo sapiens
cagtttttaaaataa

SEQ ID NO: 502406 - DNA, 15 bp, Homo sapiens
tcagtttttaaaata

SEQ ID NO: 502407 - DNA, 15 bp, Homo sapiens
ttcagtttttaaaat

SEQ ID NO: 502408 - DNA, 15 bp, Homo sapiens
tttcagtttttaaaa

SEQ ID NO: 502409 - DNA, 15 bp, Homo sapiens
ctttcagtttttaaa

SEQ ID NO: 502410 - DNA, 15 bp, Homo sapiens
gctttcagtttttaa

SEQ ID NO: 502411 - DNA, 15 bp, Homo sapiens
cgctttcagttttta

SEQ ID NO: 502412 - DNA, 15 bp, Homo sapiens
acgctttcagttttt

SEQ ID NO: 502413 - DNA, 15 bp, Homo sapiens
gacgctttcagtttt

SEQ ID NO: 502414 - DNA, 15 bp, Homo sapiens
tgacgctttcagttt

SEQ ID NO: 502415 - DNA, 15 bp, Homo sapiens
atgacgctttcagtt

SEQ ID NO: 502416 - DNA, 15 bp, Homo sapiens
tatgacgctttcagt

SEQ ID NO: 502417 - DNA, 15 bp, Homo sapiens
atatgacgctttcag

SEQ ID NO: 502418 - DNA, 15 bp, Homo sapiens
catatgacgctttca

SEQ ID NO: 502419 - DNA, 15 bp, Homo sapiens
ccatatgacgctttc

SEQ ID NO: 502420 - DNA, 15 bp, Homo sapiens
gccatatgacgcttt

SEQ ID NO: 502421 - DNA, 15 bp, Homo sapiens
agccatatgacgctt

SEQ ID NO: 502422 - DNA, 15 bp, Homo sapiens
tagccatatgacgct

SEQ ID NO: 502423 - DNA, 15 bp, Homo sapiens
atagccatatgacgc

SEQ ID NO: 502424 - DNA, 15 bp, Homo sapiens
catagccatatgacg

SEQ ID NO: 502425 - DNA, 15 bp, Homo sapiens
acatagccatatgac

SEQ ID NO: 502426 - DNA, 15 bp, Homo sapiens
gacatagccatatga

SEQ ID NO: 502427 - DNA, 15 bp, Homo sapiens
agacatagccatatg

SEQ ID NO: 502428 - DNA, 15 bp, Homo sapiens
gagacatagccatat

SEQ ID NO: 502429 - DNA, 15 bp, Homo sapiens
agagacatagccata

SEQ ID NO: 502430 - DNA, 15 bp, Homo sapiens
gagagacatagccat

SEQ ID NO: 502431 - DNA, 15 bp, Homo sapiens
agagagacatagcca

SEQ ID NO: 502432 - DNA, 15 bp, Homo sapiens
gagagagacatagcc

SEQ ID NO: 502433 - DNA, 15 bp, Homo sapiens
agagagagacatagc

SEQ ID NO: 502434 - DNA, 15 bp, Homo sapiens
aagagagagacatag

SEQ ID NO: 502435 - DNA, 15 bp, Homo sapiens
taagagagagacata

SEQ ID NO: 502436 - DNA, 15 bp, Homo sapiens
ttaagagagagacat

SEQ ID NO: 502437 - DNA, 15 bp, Homo sapiens
attaagagagagaca

SEQ ID NO: 502438 - DNA, 15 bp, Homo sapiens
aattaagagagagac

SEQ ID NO: 502439 - DNA, 15 bp, Homo sapiens
aaattaagagagaga

SEQ ID NO: 502440 - DNA, 15 bp, Homo sapiens
taaattaagagagag

SEQ ID NO: 502441 - DNA, 15 bp, Homo sapiens
ttaaattaagagaga

SEQ ID NO: 502442 - DNA, 15 bp, Homo sapiens
attaaattaagagag

SEQ ID NO: 502443 - DNA, 15 bp, Homo sapiens
cattaaattaagaga

SEQ ID NO: 502444 - DNA, 15 bp, Homo sapiens
tcattaaattaagag

SEQ ID NO: 502445 - DNA, 15 bp, Homo sapiens
ttcattaaattaaga

SEQ ID NO: 502446 - DNA, 15 bp, Homo sapiens
tttcattaaattaag

SEQ ID NO: 502447 - DNA, 15 bp, Homo sapiens
ttttcattaaattaa

SEQ ID NO: 502448 - DNA, 15 bp, Homo sapiens
tttttcattaaatta

SEQ ID NO: 502449 - DNA, 15 bp, Homo sapiens
atttttcattaaatt

SEQ ID NO: 502450 - DNA, 15 bp, Homo sapiens
aatttttcattaaat

SEQ ID NO: 502451 - DNA, 15 bp, Homo sapiens
aaatttttcattaaa

SEQ ID NO: 502452 - DNA, 15 bp, Homo sapiens
aaaatttttcattaa

SEQ ID NO: 502453 - DNA, 15 bp, Homo sapiens
gaaaatttttcatta

SEQ ID NO: 502454 - DNA, 15 bp, Homo sapiens
ggaaaatttttcatt

SEQ ID NO: 502455 - DNA, 15 bp, Homo sapiens
aggaaaatttttcat

SEQ ID NO: 502456 - DNA, 15 bp, Homo sapiens
taggaaaatttttca

SEQ ID NO: 502457 - DNA, 15 bp, Homo sapiens
ttaggaaaatttttc

SEQ ID NO: 502458 - DNA, 15 bp, Homo sapiens
tttaggaaaattttt

SEQ ID NO: 502459 - DNA, 15 bp, Homo sapiens
ttttaggaaaatttt

SEQ ID NO: 502460 - DNA, 15 bp, Homo sapiens
attttaggaaaattt

SEQ ID NO: 502461 - DNA, 15 bp, Homo sapiens
gattttaggaaaatt

SEQ ID NO: 502462 - DNA, 15 bp, Homo sapiens
tgattttaggaaaat

SEQ ID NO: 502463 - DNA, 15 bp, Homo sapiens
gtgattttaggaaaa

SEQ ID NO: 502464 - DNA, 15 bp, Homo sapiens
tgtgattttaggaaa

SEQ ID NO: 502465 - DNA, 15 bp, Homo sapiens
atgtgattttaggaa

SEQ ID NO: 502466 - DNA, 15 bp, Homo sapiens
gatgtgattttagga

SEQ ID NO: 502467 - DNA, 15 bp, Homo sapiens
tgatgtgattttagg

SEQ ID NO: 502468 - DNA, 15 bp, Homo sapiens
atgatgtgattttag

SEQ ID NO: 502469 - DNA, 15 bp, Homo sapiens
aatgatgtgatttta

SEQ ID NO: 502470 - DNA, 15 bp, Homo sapiens
gaatgatgtgatttt

SEQ ID NO: 502471 - DNA, 15 bp, Homo sapiens
agaatgatgtgattt

SEQ ID NO: 502472 - DNA, 15 bp, Homo sapiens
aagaatgatgtgatt

SEQ ID NO: 502473 - DNA, 15 bp, Homo sapiens
taagaatgatgtgat

SEQ ID NO: 502474 - DNA, 15 bp, Homo sapiens
ttaagaatgatgtga

SEQ ID NO: 502475 - DNA, 15 bp, Homo sapiens
attaagaatgatgtg

SEQ ID NO: 502476 - DNA, 15 bp, Homo sapiens
tattaagaatgatgt

SEQ ID NO: 502477 - DNA, 15 bp, Homo sapiens
gtattaagaatgatg

SEQ ID NO: 502478 - DNA, 15 bp, Homo sapiens
tgtattaagaatgat

SEQ ID NO: 502479 - DNA, 15 bp, Homo sapiens
atgtattaagaatga

SEQ ID NO: 502480 - DNA, 15 bp, Homo sapiens
catgtattaagaatg

SEQ ID NO: 502481 - DNA, 15 bp, Homo sapiens
gcatgtattaagaat

SEQ ID NO: 502482 - DNA, 15 bp, Homo sapiens
agcatgtattaagaa

SEQ ID NO: 502483 - DNA, 15 bp, Homo sapiens
tagcatgtattaaga

SEQ ID NO: 502484 - DNA, 15 bp, Homo sapiens
ttagcatgtattaag

SEQ ID NO: 502485 - DNA, 15 bp, Homo sapiens
tttagcatgtattaa

SEQ ID NO: 502486 - DNA, 15 bp, Homo sapiens
ttttagcatgtatta

SEQ ID NO: 502487 - DNA, 15 bp, Homo sapiens
gttttagcatgtatt

SEQ ID NO: 502488 - DNA, 15 bp, Homo sapiens
cgttttagcatgtat

SEQ ID NO: 502489 - DNA, 15 bp, Homo sapiens
acgttttagcatgta

SEQ ID NO: 502490 - DNA, 15 bp, Homo sapiens
aacgttttagcatgt

SEQ ID NO: 502491 - DNA, 15 bp, Homo sapiens
caacgttttagcatg

SEQ ID NO: 502492 - DNA, 15 bp, Homo sapiens
tcaacgttttagcat

SEQ ID NO: 502493 - DNA, 15 bp, Homo sapiens
ctcaacgttttagca

SEQ ID NO: 502494 - DNA, 15 bp, Homo sapiens
tctcaacgttttagc

SEQ ID NO: 502495 - DNA, 15 bp, Homo sapiens
gtctcaacgttttag

SEQ ID NO: 502496 - DNA, 15 bp, Homo sapiens
cgtctcaacgtttta

SEQ ID NO: 502497 - DNA, 15 bp, Homo sapiens
ccgtctcaacgtttt

SEQ ID NO: 502498 - DNA, 15 bp, Homo sapiens
cccgtctcaacgttt

SEQ ID NO: 502499 - DNA, 15 bp, Homo sapiens
acccgtctcaacgtt

SEQ ID NO: 502500 - DNA, 15 bp, Homo sapiens
aacccgtctcaacgt

SEQ ID NO: 502501 - DNA, 15 bp, Homo sapiens
caacccgtctcaacg

SEQ ID NO: 502502 - DNA, 15 bp, Homo sapiens
acaacccgtctcaac

SEQ ID NO: 502503 - DNA, 15 bp, Homo sapiens
aacaacccgtctcaa

SEQ ID NO: 502504 - DNA, 15 bp, Homo sapiens
caacaacccgtctca

SEQ ID NO: 502505 - DNA, 15 bp, Homo sapiens
acaacaacccgtctc

SEQ ID NO: 502506 - DNA, 15 bp, Homo sapiens
aacaacaacccgtct

SEQ ID NO: 502507 - DNA, 15 bp, Homo sapiens
gaacaacaacccgtc

SEQ ID NO: 502508 - DNA, 15 bp, Homo sapiens
ggaacaacaacccgt

SEQ ID NO: 502509 - DNA, 15 bp, Homo sapiens
aggaacaacaacccg

SEQ ID NO: 502510 - DNA, 15 bp, Homo sapiens
aaggaacaacaaccc

SEQ ID NO: 502511 - DNA, 15 bp, Homo sapiens
aaaggaacaacaacc

SEQ ID NO: 502512 - DNA, 15 bp, Homo sapiens
gaaaggaacaacaac

SEQ ID NO: 502513 - DNA, 15 bp, Homo sapiens
ggaaaggaacaacaa

SEQ ID NO: 502514 - DNA, 15 bp, Homo sapiens
tggaaaggaacaaca

SEQ ID NO: 502515 - DNA, 15 bp, Homo sapiens
ctggaaaggaacaac

SEQ ID NO: 502516 - DNA, 15 bp, Homo sapiens
actggaaaggaacaa

SEQ ID NO: 502517 - DNA, 15 bp, Homo sapiens
cactggaaaggaaca

SEQ ID NO: 502518 - DNA, 15 bp, Homo sapiens
acactggaaaggaac

SEQ ID NO: 502519 - DNA, 15 bp, Homo sapiens
aacactggaaaggaa

SEQ ID NO: 502520 - DNA, 15 bp, Homo sapiens
taacactggaaagga

SEQ ID NO: 502521 - DNA, 15 bp, Homo sapiens
ttaacactggaaagg

SEQ ID NO: 502522 - DNA, 15 bp, Homo sapiens
tttaacactggaaag

SEQ ID NO: 502523 - DNA, 15 bp, Homo sapiens
ttttaacactggaaa

SEQ ID NO: 502524 - DNA, 15 bp, Homo sapiens
cttttaacactggaa

SEQ ID NO: 502525 - DNA, 15 bp, Homo sapiens
ccttttaacactgga

SEQ ID NO: 502526 - DNA, 15 bp, Homo sapiens
gccttttaacactgg

SEQ ID NO: 502527 - DNA, 15 bp, Homo sapiens
agccttttaacactg

SEQ ID NO: 502528 - DNA, 15 bp, Homo sapiens
tagccttttaacact

SEQ ID NO: 502529 - DNA, 15 bp, Homo sapiens
atagccttttaacac

SEQ ID NO: 502530 - DNA, 15 bp, Homo sapiens
aatagccttttaaca

SEQ ID NO: 502531 - DNA, 15 bp, Homo sapiens
aaatagccttttaac

SEQ ID NO: 502532 - DNA, 15 bp, Homo sapiens
caaatagccttttaa

SEQ ID NO: 502533 - DNA, 15 bp, Homo sapiens
gcaaatagcctttta

SEQ ID NO: 502534 - DNA, 15 bp, Homo sapiens
agcaaatagcctttt

SEQ ID NO: 502535 - DNA, 15 bp, Homo sapiens
aagcaaatagccttt

SEQ ID NO: 502536 - DNA, 15 bp, Homo sapiens
aaagcaaatagcctt

SEQ ID NO: 502537 - DNA, 15 bp, Homo sapiens
aaaagcaaatagcct

SEQ ID NO: 502538 - DNA, 15 bp, Homo sapiens
aaaaagcaaatagcc

SEQ ID NO: 502539 - DNA, 15 bp, Homo sapiens
taaaaagcaaatagc

SEQ ID NO: 502540 - DNA, 15 bp, Homo sapiens
ctaaaaagcaaatag

SEQ ID NO: 502541 - DNA, 15 bp, Homo sapiens
actaaaaagcaaata

SEQ ID NO: 502542 - DNA, 15 bp, Homo sapiens
cactaaaaagcaaat

SEQ ID NO: 502543 - DNA, 15 bp, Homo sapiens
acactaaaaagcaaa

SEQ ID NO: 502544 - DNA, 15 bp, Homo sapiens
tacactaaaaagcaa

SEQ ID NO: 502545 - DNA, 15 bp, Homo sapiens
gtacactaaaaagca

SEQ ID NO: 502546 - DNA, 15 bp, Homo sapiens
ggtacactaaaaagc

SEQ ID NO: 502547 - DNA, 15 bp, Homo sapiens
tggtacactaaaaag

SEQ ID NO: 502548 - DNA, 15 bp, Homo sapiens
ttggtacactaaaaa

SEQ ID NO: 502549 - DNA, 15 bp, Homo sapiens
tttggtacactaaaa

SEQ ID NO: 502550 - DNA, 15 bp, Homo sapiens
ttttggtacactaaa

SEQ ID NO: 502551 - DNA, 15 bp, Homo sapiens
gttttggtacactaa

SEQ ID NO: 502552 - DNA, 15 bp, Homo sapiens
agttttggtacacta

SEQ ID NO: 502553 - DNA, 15 bp, Homo sapiens
cagttttggtacact

SEQ ID NO: 502554 - DNA, 15 bp, Homo sapiens
tcagttttggtacac

SEQ ID NO: 502555 - DNA, 15 bp, Homo sapiens
atcagttttggtaca

SEQ ID NO: 502556 - DNA, 15 bp, Homo sapiens
aatcagttttggtac

SEQ ID NO: 502557 - DNA, 15 bp, Homo sapiens
aaatcagttttggta

SEQ ID NO: 502558 - DNA, 15 bp, Homo sapiens
gaaatcagttttggt

SEQ ID NO: 502559 - DNA, 15 bp, Homo sapiens
tgaaatcagttttgg

SEQ ID NO: 502560 - DNA, 15 bp, Homo sapiens
ctgaaatcagttttg

SEQ ID NO: 502561 - DNA, 15 bp, Homo sapiens
actgaaatcagtttt

SEQ ID NO: 502562 - DNA, 15 bp, Homo sapiens
aactgaaatcagttt

SEQ ID NO: 502563 - DNA, 15 bp, Homo sapiens
taactgaaatcagtt

SEQ ID NO: 502564 - DNA, 15 bp, Homo sapiens
ataactgaaatcagt

SEQ ID NO: 502565 - DNA, 15 bp, Homo sapiens
tataactgaaatcag

SEQ ID NO: 502566 - DNA, 15 bp, Homo sapiens
ctataactgaaatca

SEQ ID NO: 502567 - DNA, 15 bp, Homo sapiens
actataactgaaatc

SEQ ID NO: 502568 - DNA, 15 bp, Homo sapiens
tactataactgaaat

SEQ ID NO: 502569 - DNA, 15 bp, Homo sapiens
ttactataactgaaa

SEQ ID NO: 502570 - DNA, 15 bp, Homo sapiens
tttactataactgaa

SEQ ID NO: 502571 - DNA, 15 bp, Homo sapiens
atttactataactga

SEQ ID NO: 502572 - DNA, 15 bp, Homo sapiens
aatttactataactg

SEQ ID NO: 502573 - DNA, 15 bp, Homo sapiens
taatttactataact

SEQ ID NO: 502574 - DNA, 15 bp, Homo sapiens
ataatttactataac

SEQ ID NO: 502575 - DNA, 15 bp, Homo sapiens
cataatttactataa

SEQ ID NO: 502576 - DNA, 15 bp, Homo sapiens
tcataatttactata

SEQ ID NO: 502577 - DNA, 15 bp, Homo sapiens
gtcataatttactat

SEQ ID NO: 502578 - DNA, 15 bp, Homo sapiens
agtcataatttacta

SEQ ID NO: 502579 - DNA, 15 bp, Homo sapiens
tagtcataatttact

SEQ ID NO: 502580 - DNA, 15 bp, Homo sapiens
ttagtcataatttac

SEQ ID NO: 502581 - DNA, 15 bp, Homo sapiens
attagtcataattta

SEQ ID NO: 502582 - DNA, 15 bp, Homo sapiens
tattagtcataattt

SEQ ID NO: 502583 - DNA, 15 bp, Homo sapiens
ttattagtcataatt

SEQ ID NO: 502584 - DNA, 15 bp, Homo sapiens
cttattagtcataat

SEQ ID NO: 502585 - DNA, 15 bp, Homo sapiens
ccttattagtcataa

SEQ ID NO: 502586 - DNA, 15 bp, Homo sapiens
accttattagtcata

SEQ ID NO: 502587 - DNA, 15 bp, Homo sapiens
taccttattagtcat

SEQ ID NO: 502588 - DNA, 15 bp, Homo sapiens
ttaccttattagtca

SEQ ID NO: 502589 - DNA, 15 bp, Homo sapiens
attaccttattagtc

SEQ ID NO: 502590 - DNA, 15 bp, Homo sapiens
gattaccttattagt

SEQ ID NO: 502591 - DNA, 15 bp, Homo sapiens
agattaccttattag

SEQ ID NO: 502592 - DNA, 15 bp, Homo sapiens
cagattaccttatta

SEQ ID NO: 502593 - DNA, 15 bp, Homo sapiens
acagattaccttatt

SEQ ID NO: 502594 - DNA, 15 bp, Homo sapiens
gacagattaccttat

SEQ ID NO: 502595 - DNA, 15 bp, Homo sapiens
ggacagattacctta

SEQ ID NO: 502596 - DNA, 15 bp, Homo sapiens
aggacagattacctt

SEQ ID NO: 502597 - DNA, 15 bp, Homo sapiens
aaggacagattacct

SEQ ID NO: 502598 - DNA, 15 bp, Homo sapiens
caaggacagattacc

SEQ ID NO: 502599 - DNA, 15 bp, Homo sapiens
acaaggacagattac

SEQ ID NO: 502600 - DNA, 15 bp, Homo sapiens
aacaaggacagatta

SEQ ID NO: 502601 - DNA, 15 bp, Homo sapiens
taacaaggacagatt

SEQ ID NO: 502602 - DNA, 15 bp, Homo sapiens
ttaacaaggacagat

SEQ ID NO: 502603 - DNA, 15 bp, Homo sapiens
gttaacaaggacaga

SEQ ID NO: 502604 - DNA, 15 bp, Homo sapiens
tgttaacaaggacag

SEQ ID NO: 502605 - DNA, 15 bp, Homo sapiens
ttgttaacaaggaca

SEQ ID NO: 502606 - DNA, 15 bp, Homo sapiens
cttgttaacaaggac

SEQ ID NO: 502607 - DNA, 15 bp, Homo sapiens
gcttgttaacaagga

SEQ ID NO: 502608 - DNA, 15 bp, Homo sapiens
ggcttgttaacaagg

SEQ ID NO: 502609 - DNA, 15 bp, Homo sapiens
aggcttgttaacaag

SEQ ID NO: 502610 - DNA, 15 bp, Homo sapiens
caggcttgttaacaa

SEQ ID NO: 502611 - DNA, 15 bp, Homo sapiens
acaggcttgttaaca

SEQ ID NO: 502612 - DNA, 15 bp, Homo sapiens
tacaggcttgttaac

SEQ ID NO: 502613 - DNA, 15 bp, Homo sapiens
atacaggcttgttaa

SEQ ID NO: 502614 - DNA, 15 bp, Homo sapiens
aatacaggcttgtta

SEQ ID NO: 502615 - DNA, 15 bp, Homo sapiens
aaatacaggcttgtt

SEQ ID NO: 502616 - DNA, 15 bp, Homo sapiens
caaatacaggcttgt

SEQ ID NO: 502617 - DNA, 15 bp, Homo sapiens
acaaatacaggcttg

SEQ ID NO: 502618 - DNA, 15 bp, Homo sapiens
aacaaatacaggctt

SEQ ID NO: 502619 - DNA, 15 bp, Homo sapiens
taacaaatacaggct

SEQ ID NO: 502620 - DNA, 15 bp, Homo sapiens
ataacaaatacaggc

SEQ ID NO: 502621 - DNA, 15 bp, Homo sapiens
tataacaaatacagg

SEQ ID NO: 502622 - DNA, 15 bp, Homo sapiens
gtataacaaatacag

SEQ ID NO: 502623 - DNA, 15 bp, Homo sapiens
ggtataacaaataca

SEQ ID NO: 502624 - DNA, 15 bp, Homo sapiens
aggtataacaaatac

SEQ ID NO: 502625 - DNA, 15 bp, Homo sapiens
caggtataacaaata

SEQ ID NO: 502626 - DNA, 15 bp, Homo sapiens
acaggtataacaaat

SEQ ID NO: 502627 - DNA, 15 bp, Homo sapiens
tacaggtataacaaa

SEQ ID NO: 502628 - DNA, 15 bp, Homo sapiens
gtacaggtataacaa

SEQ ID NO: 502629 - DNA, 15 bp, Homo sapiens
agtacaggtataaca

SEQ ID NO: 502630 - DNA, 15 bp, Homo sapiens
aagtacaggtataac

SEQ ID NO: 502631 - DNA, 15 bp, Homo sapiens
taagtacaggtataa

SEQ ID NO: 502632 - DNA, 15 bp, Homo sapiens
ttaagtacaggtata

SEQ ID NO: 502633 - DNA, 15 bp, Homo sapiens
tttaagtacaggtat

SEQ ID NO: 502634 - DNA, 15 bp, Homo sapiens
ctttaagtacaggta

SEQ ID NO: 502635 - DNA, 15 bp, Homo sapiens
actttaagtacaggt

SEQ ID NO: 502636 - DNA, 15 bp, Homo sapiens
tactttaagtacagg

SEQ ID NO: 502637 - DNA, 15 bp, Homo sapiens
ttactttaagtacag

SEQ ID NO: 502638 - DNA, 15 bp, Homo sapiens
tttactttaagtaca

SEQ ID NO: 502639 - DNA, 15 bp, Homo sapiens
ttttactttaagtac

SEQ ID NO: 502640 - DNA, 15 bp, Homo sapiens
attttactttaagta

SEQ ID NO: 502641 - DNA, 15 bp, Homo sapiens
aattttactttaagt

SEQ ID NO: 502642 - DNA, 15 bp, Homo sapiens
gaattttactttaag

SEQ ID NO: 502643 - DNA, 15 bp, Homo sapiens
tgaattttactttaa

SEQ ID NO: 502644 - DNA, 15 bp, Homo sapiens
ttgaattttacttta

SEQ ID NO: 502645 - DNA, 15 bp, Homo sapiens
tttgaattttacttt

SEQ ID NO: 502646 - DNA, 15 bp, Homo sapiens
gtttgaattttactt

SEQ ID NO: 502647 - DNA, 15 bp, Homo sapiens
agtttgaattttact

SEQ ID NO: 502648 - DNA, 15 bp, Homo sapiens
gagtttgaattttac

SEQ ID NO: 502649 - DNA, 15 bp, Homo sapiens
ggagtttgaatttta

SEQ ID NO: 502650 - DNA, 15 bp, Homo sapiens
aggagtttgaatttt

SEQ ID NO: 502651 - DNA, 15 bp, Homo sapiens
aaggagtttgaattt

SEQ ID NO: 502652 - DNA, 15 bp, Homo sapiens
taaggagtttgaatt

SEQ ID NO: 502653 - DNA, 15 bp, Homo sapiens
gtaaggagtttgaat

SEQ ID NO: 502654 - DNA, 15 bp, Homo sapiens
ggtaaggagtttgaa

SEQ ID NO: 502655 - DNA, 15 bp, Homo sapiens
gggtaaggagtttga

SEQ ID NO: 502656 - DNA, 15 bp, Homo sapiens
agggtaaggagtttg

SEQ ID NO: 502657 - DNA, 15 bp, Homo sapiens
cagggtaaggagttt

SEQ ID NO: 502658 - DNA, 15 bp, Homo sapiens
acagggtaaggagtt

SEQ ID NO: 502659 - DNA, 15 bp, Homo sapiens
gacagggtaaggagt

SEQ ID NO: 502660 - DNA, 15 bp, Homo sapiens
ggacagggtaaggag

SEQ ID NO: 502661 - DNA, 15 bp, Homo sapiens
aggacagggtaagga

SEQ ID NO: 502662 - DNA, 15 bp, Homo sapiens
taggacagggtaagg

SEQ ID NO: 502663 - DNA, 15 bp, Homo sapiens
gtaggacagggtaag

SEQ ID NO: 502664 - DNA, 15 bp, Homo sapiens
tgtaggacagggtaa

SEQ ID NO: 502665 - DNA, 15 bp, Homo sapiens
ttgtaggacagggta

SEQ ID NO: 502666 - DNA, 15 bp, Homo sapiens
cttgtaggacagggt

SEQ ID NO: 502667 - DNA, 15 bp, Homo sapiens
ccttgtaggacaggg

SEQ ID NO: 502668 - DNA, 15 bp, Homo sapiens
gccttgtaggacagg

SEQ ID NO: 502669 - DNA, 15 bp, Homo sapiens
agccttgtaggacag

SEQ ID NO: 502670 - DNA, 15 bp, Homo sapiens
gagccttgtaggaca

SEQ ID NO: 502671 - DNA, 15 bp, Homo sapiens
agagccttgtaggac

SEQ ID NO: 502672 - DNA, 15 bp, Homo sapiens
tagagccttgtagga

SEQ ID NO: 502673 - DNA, 15 bp, Homo sapiens
gtagagccttgtagg

SEQ ID NO: 502674 - DNA, 15 bp, Homo sapiens
ggtagagccttgtag

SEQ ID NO: 502675 - DNA, 15 bp, Homo sapiens
aggtagagccttgta

SEQ ID NO: 502676 - DNA, 15 bp, Homo sapiens
caggtagagccttgt

SEQ ID NO: 502677 - DNA, 15 bp, Homo sapiens
tcaggtagagccttg

SEQ ID NO: 502678 - DNA, 15 bp, Homo sapiens
atcaggtagagcctt

SEQ ID NO: 502679 - DNA, 15 bp, Homo sapiens
gatcaggtagagcct

SEQ ID NO: 502680 - DNA, 15 bp, Homo sapiens
agatcaggtagagcc

SEQ ID NO: 502681 - DNA, 15 bp, Homo sapiens
cagatcaggtagagc

SEQ ID NO: 502682 - DNA, 15 bp, Homo sapiens
ccagatcaggtagag

SEQ ID NO: 502683 - DNA, 15 bp, Homo sapiens
cccagatcaggtaga

SEQ ID NO: 502684 - DNA, 15 bp, Homo sapiens
gcccagatcaggtag

SEQ ID NO: 502685 - DNA, 15 bp, Homo sapiens
ggcccagatcaggta

SEQ ID NO: 502686 - DNA, 15 bp, Homo sapiens
gggcccagatcaggt

SEQ ID NO: 502687 - DNA, 15 bp, Homo sapiens
agggcccagatcagg

SEQ ID NO: 502688 - DNA, 15 bp, Homo sapiens
tagggcccagatcag

SEQ ID NO: 502689 - DNA, 15 bp, Homo sapiens
gtagggcccagatca

SEQ ID NO: 502690 - DNA, 15 bp, Homo sapiens
ggtagggcccagatc

SEQ ID NO: 502691 - DNA, 15 bp, Homo sapiens
aggtagggcccagat

SEQ ID NO: 502692 - DNA, 15 bp, Homo sapiens
gaggtagggcccaga

SEQ ID NO: 502693 - DNA, 15 bp, Homo sapiens
tgaggtagggcccag

SEQ ID NO: 502694 - DNA, 15 bp, Homo sapiens
atgaggtagggccca

SEQ ID NO: 502695 - DNA, 15 bp, Homo sapiens
gatgaggtagggccc

SEQ ID NO: 502696 - DNA, 15 bp, Homo sapiens
agatgaggtagggcc

SEQ ID NO: 502697 - DNA, 15 bp, Homo sapiens
gagatgaggtagggc

SEQ ID NO: 502698 - DNA, 15 bp, Homo sapiens
agagatgaggtaggg

SEQ ID NO: 502699 - DNA, 15 bp, Homo sapiens
tagagatgaggtagg

SEQ ID NO: 502700 - DNA, 15 bp, Homo sapiens
ttagagatgaggtag

SEQ ID NO: 502701 - DNA, 15 bp, Homo sapiens
gttagagatgaggta

SEQ ID NO: 502702 - DNA, 15 bp, Homo sapiens
tgttagagatgaggt

SEQ ID NO: 502703 - DNA, 15 bp, Homo sapiens
atgttagagatgagg

SEQ ID NO: 502704 - DNA, 15 bp, Homo sapiens
gatgttagagatgag

SEQ ID NO: 502705 - DNA, 15 bp, Homo sapiens
tgatgttagagatga

SEQ ID NO: 502706 - DNA, 15 bp, Homo sapiens
atgatgttagagatg

SEQ ID NO: 502707 - DNA, 15 bp, Homo sapiens
gatgatgttagagat

SEQ ID NO: 502708 - DNA, 15 bp, Homo sapiens
agatgatgttagaga

SEQ ID NO: 502709 - DNA, 15 bp, Homo sapiens
aagatgatgttagag

SEQ ID NO: 502710 - DNA, 15 bp, Homo sapiens
taagatgatgttaga

SEQ ID NO: 502711 - DNA, 15 bp, Homo sapiens
ataagatgatgttag

SEQ ID NO: 502712 - DNA, 15 bp, Homo sapiens
cataagatgatgtta

SEQ ID NO: 502713 - DNA, 15 bp, Homo sapiens
gcataagatgatgtt

SEQ ID NO: 502714 - DNA, 15 bp, Homo sapiens
agcataagatgatgt

SEQ ID NO: 502715 - DNA, 15 bp, Homo sapiens
tagcataagatgatg

SEQ ID NO: 502716 - DNA, 15 bp, Homo sapiens
atagcataagatgat

SEQ ID NO: 502717 - DNA, 15 bp, Homo sapiens
aatagcataagatga

SEQ ID NO: 502718 - DNA, 15 bp, Homo sapiens
aaatagcataagatg

SEQ ID NO: 502719 - DNA, 15 bp, Homo sapiens
aaaatagcataagat

SEQ ID NO: 502720 - DNA, 15 bp, Homo sapiens
gaaaatagcataaga

SEQ ID NO: 502721 - DNA, 15 bp, Homo sapiens
agaaaatagcataag

SEQ ID NO: 502722 - DNA, 15 bp, Homo sapiens
aagaaaatagcataa

SEQ ID NO: 502723 - DNA, 15 bp, Homo sapiens
aaagaaaatagcata

SEQ ID NO: 502724 - DNA, 15 bp, Homo sapiens
gaaagaaaatagcat

SEQ ID NO: 502725 - DNA, 15 bp, Homo sapiens
agaaagaaaatagca

SEQ ID NO: 502726 - DNA, 15 bp, Homo sapiens
aagaaagaaaatagc

SEQ ID NO: 502727 - DNA, 15 bp, Homo sapiens
caagaaagaaaatag

SEQ ID NO: 502728 - DNA, 15 bp, Homo sapiens
acaagaaagaaaata

SEQ ID NO: 502729 - DNA, 15 bp, Homo sapiens
aacaagaaagaaaat

SEQ ID NO: 502730 - DNA, 15 bp, Homo sapiens
gaacaagaaagaaaa

SEQ ID NO: 502731 - DNA, 15 bp, Homo sapiens
tgaacaagaaagaaa

SEQ ID NO: 502732 - DNA, 15 bp, Homo sapiens
gtgaacaagaaagaa

SEQ ID NO: 502733 - DNA, 15 bp, Homo sapiens
ggtgaacaagaaaga

SEQ ID NO: 502734 - DNA, 15 bp, Homo sapiens
tggtgaacaagaaag

SEQ ID NO: 502735 - DNA, 15 bp, Homo sapiens
ctggtgaacaagaaa

SEQ ID NO: 502736 - DNA, 15 bp, Homo sapiens
tctggtgaacaagaa

SEQ ID NO: 502737 - DNA, 15 bp, Homo sapiens
ctctggtgaacaaga

SEQ ID NO: 502738 - DNA, 15 bp, Homo sapiens
gctctggtgaacaag

SEQ ID NO: 502739 - DNA, 15 bp, Homo sapiens
ggctctggtgaacaa

SEQ ID NO: 502740 - DNA, 15 bp, Homo sapiens
tggctctggtgaaca

SEQ ID NO: 502741 - DNA, 15 bp, Homo sapiens
gtggctctggtgaac

SEQ ID NO: 502742 - DNA, 15 bp, Homo sapiens
tgtggctctggtgaa

SEQ ID NO: 502743 - DNA, 15 bp, Homo sapiens
gtgtggctctggtga

SEQ ID NO: 502744 - DNA, 15 bp, Homo sapiens
ggtgtggctctggtg

SEQ ID NO: 502745 - DNA, 15 bp, Homo sapiens
tggtgtggctctggt

SEQ ID NO: 502746 - DNA, 15 bp, Homo sapiens
ctggtgtggctctgg

SEQ ID NO: 502747 - DNA, 15 bp, Homo sapiens
gctggtgtggctctg

SEQ ID NO: 502748 - DNA, 15 bp, Homo sapiens
agctggtgtggctct

SEQ ID NO: 502749 - DNA, 15 bp, Homo sapiens
tagctggtgtggctc

SEQ ID NO: 502750 - DNA, 15 bp, Homo sapiens
gtagctggtgtggct

SEQ ID NO: 502751 - DNA, 15 bp, Homo sapiens
ggtagctggtgtggc

SEQ ID NO: 502752 - DNA, 15 bp, Homo sapiens
aggtagctggtgtgg

SEQ ID NO: 502753 - DNA, 15 bp, Homo sapiens
aaggtagctggtgtg

SEQ ID NO: 502754 - DNA, 15 bp, Homo sapiens
aaaggtagctggtgt

SEQ ID NO: 502755 - DNA, 15 bp, Homo sapiens
gaaaggtagctggtg

SEQ ID NO: 502756 - DNA, 15 bp, Homo sapiens
agaaaggtagctggt

SEQ ID NO: 502757 - DNA, 15 bp, Homo sapiens
cagaaaggtagctgg

SEQ ID NO: 502758 - DNA, 15 bp, Homo sapiens
acagaaaggtagctg

SEQ ID NO: 502759 - DNA, 15 bp, Homo sapiens
gacagaaaggtagct

SEQ ID NO: 502760 - DNA, 15 bp, Homo sapiens
ggacagaaaggtagc

SEQ ID NO: 502761 - DNA, 15 bp, Homo sapiens
gggacagaaaggtag

SEQ ID NO: 502762 - DNA, 15 bp, Homo sapiens
agggacagaaaggta

SEQ ID NO: 502763 - DNA, 15 bp, Homo sapiens
gagggacagaaaggt

SEQ ID NO: 502764 - DNA, 15 bp, Homo sapiens
ggagggacagaaagg

SEQ ID NO: 502765 - DNA, 15 bp, Homo sapiens
aggagggacagaaag

SEQ ID NO: 502766 - DNA, 15 bp, Homo sapiens
aaggagggacagaaa

SEQ ID NO: 502767 - DNA, 15 bp, Homo sapiens
caaggagggacagaa

SEQ ID NO: 502768 - DNA, 15 bp, Homo sapiens
acaaggagggacaga

SEQ ID NO: 502769 - DNA, 15 bp, Homo sapiens
aacaaggagggacag

SEQ ID NO: 502770 - DNA, 15 bp, Homo sapiens
taacaaggagggaca

SEQ ID NO: 502771 - DNA, 15 bp, Homo sapiens
ctaacaaggagggac

SEQ ID NO: 502772 - DNA, 15 bp, Homo sapiens
tctaacaaggaggga

SEQ ID NO: 502773 - DNA, 15 bp, Homo sapiens
gtctaacaaggaggg

SEQ ID NO: 502774 - DNA, 15 bp, Homo sapiens
agtctaacaaggagg

SEQ ID NO: 502775 - DNA, 15 bp, Homo sapiens
aagtctaacaaggag

SEQ ID NO: 502776 - DNA, 15 bp, Homo sapiens
taagtctaacaagga

SEQ ID NO: 502777 - DNA, 15 bp, Homo sapiens
ataagtctaacaagg

SEQ ID NO: 502778 - DNA, 15 bp, Homo sapiens
aataagtctaacaag

SEQ ID NO: 502779 - DNA, 15 bp, Homo sapiens
aaataagtctaacaa

SEQ ID NO: 502780 - DNA, 15 bp, Homo sapiens
gaaataagtctaaca

SEQ ID NO: 502781 - DNA, 15 bp, Homo sapiens
agaaataagtctaac

SEQ ID NO: 502782 - DNA, 15 bp, Homo sapiens
cagaaataagtctaa

SEQ ID NO: 502783 - DNA, 15 bp, Homo sapiens
gcagaaataagtcta

SEQ ID NO: 502784 - DNA, 15 bp, Homo sapiens
agcagaaataagtct

SEQ ID NO: 502785 - DNA, 15 bp, Homo sapiens
aagcagaaataagtc

SEQ ID NO: 502786 - DNA, 15 bp, Homo sapiens
aaagcagaaataagt

SEQ ID NO: 502787 - DNA, 15 bp, Homo sapiens
taaagcagaaataag

SEQ ID NO: 502788 - DNA, 15 bp, Homo sapiens
ctaaagcagaaataa

SEQ ID NO: 502789 - DNA, 15 bp, Homo sapiens
tctaaagcagaaata

SEQ ID NO: 502790 - DNA, 15 bp, Homo sapiens
ctctaaagcagaaat

SEQ ID NO: 502791 - DNA, 15 bp, Homo sapiens
gctctaaagcagaaa

SEQ ID NO: 502792 - DNA, 15 bp, Homo sapiens
tgctctaaagcagaa

SEQ ID NO: 502793 - DNA, 15 bp, Homo sapiens
gtgctctaaagcaga

SEQ ID NO: 502794 - DNA, 15 bp, Homo sapiens
ggtgctctaaagcag

SEQ ID NO: 502795 - DNA, 15 bp, Homo sapiens
gggtgctctaaagca

SEQ ID NO: 502796 - DNA, 15 bp, Homo sapiens
agggtgctctaaagc

SEQ ID NO: 502797 - DNA, 15 bp, Homo sapiens
aagggtgctctaaag

SEQ ID NO: 502798 - DNA, 15 bp, Homo sapiens
caagggtgctctaaa

SEQ ID NO: 502799 - DNA, 15 bp, Homo sapiens
gcaagggtgctctaa

SEQ ID NO: 502800 - DNA, 15 bp, Homo sapiens
agcaagggtgctcta

SEQ ID NO: 502801 - DNA, 15 bp, Homo sapiens
cagcaagggtgctct

SEQ ID NO: 502802 - DNA, 15 bp, Homo sapiens
gcagcaagggtgctc

SEQ ID NO: 502803 - DNA, 15 bp, Homo sapiens
agcagcaagggtgct

SEQ ID NO: 502804 - DNA, 15 bp, Homo sapiens
cagcagcaagggtgc

SEQ ID NO: 502805 - DNA, 15 bp, Homo sapiens
gcagcagcaagggtg

SEQ ID NO: 502806 - DNA, 15 bp, Homo sapiens
ggcagcagcaagggt

SEQ ID NO: 502807 - DNA, 15 bp, Homo sapiens
tggcagcagcaaggg

SEQ ID NO: 502808 - DNA, 15 bp, Homo sapiens
gtggcagcagcaagg

SEQ ID NO: 502809 - DNA, 15 bp, Homo sapiens
ggtggcagcagcaag

SEQ ID NO: 502810 - DNA, 15 bp, Homo sapiens
tggtggcagcagcaa

SEQ ID NO: 502811 - DNA, 15 bp, Homo sapiens
gtggtggcagcagca

SEQ ID NO: 502812 - DNA, 15 bp, Homo sapiens
ggtggtggcagcagc

SEQ ID NO: 502813 - DNA, 15 bp, Homo sapiens
aggtggtggcagcag

SEQ ID NO: 502814 - DNA, 15 bp, Homo sapiens
caggtggtggcagca

SEQ ID NO: 502815 - DNA, 15 bp, Homo sapiens
tcaggtggtggcagc

SEQ ID NO: 502816 - DNA, 15 bp, Homo sapiens
ttcaggtggtggcag

SEQ ID NO: 502817 - DNA, 15 bp, Homo sapiens
tttcaggtggtggca

SEQ ID NO: 502818 - DNA, 15 bp, Homo sapiens
atttcaggtggtggc

SEQ ID NO: 502819 - DNA, 15 bp, Homo sapiens
catttcaggtggtgg

SEQ ID NO: 502820 - DNA, 15 bp, Homo sapiens
gcatttcaggtggtg

SEQ ID NO: 502821 - DNA, 15 bp, Homo sapiens
agcatttcaggtggt

SEQ ID NO: 502822 - DNA, 15 bp, Homo sapiens
aagcatttcaggtgg

SEQ ID NO: 502823 - DNA, 15 bp, Homo sapiens
gaagcatttcaggtg

SEQ ID NO: 502824 - DNA, 15 bp, Homo sapiens
agaagcatttcaggt

SEQ ID NO: 502825 - DNA, 15 bp, Homo sapiens
gagaagcatttcagg

SEQ ID NO: 502826 - DNA, 15 bp, Homo sapiens
agagaagcatttcag

SEQ ID NO: 502827 - DNA, 15 bp, Homo sapiens
aagagaagcatttca

SEQ ID NO: 502828 - DNA, 15 bp, Homo sapiens
gaagagaagcatttc

SEQ ID NO: 502829 - DNA, 15 bp, Homo sapiens
agaagagaagcattt

SEQ ID NO: 502830 - DNA, 15 bp, Homo sapiens
cagaagagaagcatt

SEQ ID NO: 502831 - DNA, 15 bp, Homo sapiens
ccagaagagaagcat

SEQ ID NO: 502832 - DNA, 15 bp, Homo sapiens
accagaagagaagca

SEQ ID NO: 502833 - DNA, 15 bp, Homo sapiens
taccagaagagaagc

SEQ ID NO: 502834 - DNA, 15 bp, Homo sapiens
ataccagaagagaag

SEQ ID NO: 502835 - DNA, 15 bp, Homo sapiens
aataccagaagagaa

SEQ ID NO: 502836 - DNA, 15 bp, Homo sapiens
aaataccagaagaga

SEQ ID NO: 502837 - DNA, 15 bp, Homo sapiens
aaaataccagaagag

SEQ ID NO: 502838 - DNA, 15 bp, Homo sapiens
taaaataccagaaga

SEQ ID NO: 502839 - DNA, 15 bp, Homo sapiens
ataaaataccagaag

SEQ ID NO: 502840 - DNA, 15 bp, Homo sapiens
aataaaataccagaa

SEQ ID NO: 502841 - DNA, 15 bp, Homo sapiens
aaataaaataccaga

SEQ ID NO: 502842 - DNA, 15 bp, Homo sapiens
aaaataaaataccag

SEQ ID NO: 502843 - DNA, 15 bp, Homo sapiens
caaaataaaatacca

SEQ ID NO: 502844 - DNA, 15 bp, Homo sapiens
ccaaaataaaatacc

SEQ ID NO: 502845 - DNA, 15 bp, Homo sapiens
accaaaataaaatac

SEQ ID NO: 502846 - DNA, 15 bp, Homo sapiens
caccaaaataaaata

SEQ ID NO: 502847 - DNA, 15 bp, Homo sapiens
tcaccaaaataaaat

SEQ ID NO: 502848 - DNA, 15 bp, Homo sapiens
ctcaccaaaataaaa

SEQ ID NO: 502849 - DNA, 15 bp, Homo sapiens
tctcaccaaaataaa

SEQ ID NO: 502850 - DNA, 15 bp, Homo sapiens
ttctcaccaaaataa

SEQ ID NO: 502851 - DNA, 15 bp, Homo sapiens
gttctcaccaaaata

SEQ ID NO: 502852 - DNA, 15 bp, Homo sapiens
tgttctcaccaaaat

SEQ ID NO: 502853 - DNA, 15 bp, Homo sapiens
gtgttctcaccaaaa

SEQ ID NO: 502854 - DNA, 15 bp, Homo sapiens
ggtgttctcaccaaa

SEQ ID NO: 502855 - DNA, 15 bp, Homo sapiens
aggtgttctcaccaa

SEQ ID NO: 502856 - DNA, 15 bp, Homo sapiens
caggtgttctcacca

SEQ ID NO: 502857 - DNA, 15 bp, Homo sapiens
ccaggtgttctcacc

SEQ ID NO: 502858 - DNA, 15 bp, Homo sapiens
gccaggtgttctcac

SEQ ID NO: 502859 - DNA, 15 bp, Homo sapiens
tgccaggtgttctca

SEQ ID NO: 502860 - DNA, 15 bp, Homo sapiens
atgccaggtgttctc

SEQ ID NO: 502861 - DNA, 15 bp, Homo sapiens
catgccaggtgttct

SEQ ID NO: 502862 - DNA, 15 bp, Homo sapiens
tcatgccaggtgttc

SEQ ID NO: 502863 - DNA, 15 bp, Homo sapiens
ctcatgccaggtgtt

SEQ ID NO: 502864 - DNA, 15 bp, Homo sapiens
tctcatgccaggtgt

SEQ ID NO: 502865 - DNA, 15 bp, Homo sapiens
atctcatgccaggtg

SEQ ID NO: 502866 - DNA, 15 bp, Homo sapiens
gatctcatgccaggt

SEQ ID NO: 502867 - DNA, 15 bp, Homo sapiens
agatctcatgccagg

SEQ ID NO: 502868 - DNA, 15 bp, Homo sapiens
tagatctcatgccag

SEQ ID NO: 502869 - DNA, 15 bp, Homo sapiens
gtagatctcatgcca

SEQ ID NO: 502870 - DNA, 15 bp, Homo sapiens
ggtagatctcatgcc

SEQ ID NO: 502871 - DNA, 15 bp, Homo sapiens
gggtagatctcatgc

SEQ ID NO: 502872 - DNA, 15 bp, Homo sapiens
agggtagatctcatg

SEQ ID NO: 502873 - DNA, 15 bp, Homo sapiens
gagggtagatctcat

SEQ ID NO: 502874 - DNA, 15 bp, Homo sapiens
agagggtagatctca

SEQ ID NO: 502875 - DNA, 15 bp, Homo sapiens
tagagggtagatctc

SEQ ID NO: 502876 - DNA, 15 bp, Homo sapiens
ttagagggtagatct

SEQ ID NO: 502877 - DNA, 15 bp, Homo sapiens
gttagagggtagatc

SEQ ID NO: 502878 - DNA, 15 bp, Homo sapiens
tgttagagggtagat

SEQ ID NO: 502879 - DNA, 15 bp, Homo sapiens
ctgttagagggtaga

SEQ ID NO: 502880 - DNA, 15 bp, Homo sapiens
tctgttagagggtag

SEQ ID NO: 502881 - DNA, 15 bp, Homo sapiens
atctgttagagggta

SEQ ID NO: 502882 - DNA, 15 bp, Homo sapiens
aatctgttagagggt

SEQ ID NO: 502883 - DNA, 15 bp, Homo sapiens
aaatctgttagaggg

SEQ ID NO: 502884 - DNA, 15 bp, Homo sapiens
aaaatctgttagagg

SEQ ID NO: 502885 - DNA, 15 bp, Homo sapiens
aaaaatctgttagag

SEQ ID NO: 502886 - DNA, 15 bp, Homo sapiens
taaaaatctgttaga

SEQ ID NO: 502887 - DNA, 15 bp, Homo sapiens
ttaaaaatctgttag

SEQ ID NO: 502888 - DNA, 15 bp, Homo sapiens
cttaaaaatctgtta

SEQ ID NO: 502889 - DNA, 15 bp, Homo sapiens
acttaaaaatctgtt

SEQ ID NO: 502890 - DNA, 15 bp, Homo sapiens
cacttaaaaatctgt

SEQ ID NO: 502891 - DNA, 15 bp, Homo sapiens
acacttaaaaatctg

SEQ ID NO: 502892 - DNA, 15 bp, Homo sapiens
tacacttaaaaatct

SEQ ID NO: 502893 - DNA, 15 bp, Homo sapiens
atacacttaaaaatc

SEQ ID NO: 502894 - DNA, 15 bp, Homo sapiens
tatacacttaaaaat

SEQ ID NO: 502895 - DNA, 15 bp, Homo sapiens
ttatacacttaaaaa

SEQ ID NO: 502896 - DNA, 15 bp, Homo sapiens
attatacacttaaaa

SEQ ID NO: 502897 - DNA, 15 bp, Homo sapiens
tattatacacttaaa

SEQ ID NO: 502898 - DNA, 15 bp, Homo sapiens
gtattatacacttaa

SEQ ID NO: 502899 - DNA, 15 bp, Homo sapiens
tgtattatacactta

SEQ ID NO: 502900 - DNA, 15 bp, Homo sapiens
ctgtattatacactt

SEQ ID NO: 502901 - DNA, 15 bp, Homo sapiens
actgtattatacact

SEQ ID NO: 502902 - DNA, 15 bp, Homo sapiens
tactgtattatacac

SEQ ID NO: 502903 - DNA, 15 bp, Homo sapiens
atactgtattataca

SEQ ID NO: 502904 - DNA, 15 bp, Homo sapiens
aatactgtattatac

SEQ ID NO: 502905 - DNA, 15 bp, Homo sapiens
caatactgtattata

SEQ ID NO: 502906 - DNA, 15 bp, Homo sapiens
gcaatactgtattat

SEQ ID NO: 502907 - DNA, 15 bp, Homo sapiens
agcaatactgtatta

SEQ ID NO: 502908 - DNA, 15 bp, Homo sapiens
cagcaatactgtatt

SEQ ID NO: 502909 - DNA, 15 bp, Homo sapiens
acagcaatactgtat

SEQ ID NO: 502910 - DNA, 15 bp, Homo sapiens
gacagcaatactgta

SEQ ID NO: 502911 - DNA, 15 bp, Homo sapiens
agacagcaatactgt

SEQ ID NO: 502912 - DNA, 15 bp, Homo sapiens
cagacagcaatactg

SEQ ID NO: 502913 - DNA, 15 bp, Homo sapiens
acagacagcaatact

SEQ ID NO: 502914 - DNA, 15 bp, Homo sapiens
tacagacagcaatac

SEQ ID NO: 502915 - DNA, 15 bp, Homo sapiens
ctacagacagcaata

SEQ ID NO: 502916 - DNA, 15 bp, Homo sapiens
cctacagacagcaat

SEQ ID NO: 502917 - DNA, 15 bp, Homo sapiens
gcctacagacagcaa

SEQ ID NO: 502918 - DNA, 15 bp, Homo sapiens
tgcctacagacagca

SEQ ID NO: 502919 - DNA, 15 bp, Homo sapiens
gtgcctacagacagc

SEQ ID NO: 502920 - DNA, 15 bp, Homo sapiens
tgtgcctacagacag

SEQ ID NO: 502921 - DNA, 15 bp, Homo sapiens
ttgtgcctacagaca

SEQ ID NO: 502922 - DNA, 15 bp, Homo sapiens
attgtgcctacagac

SEQ ID NO: 502923 - DNA, 15 bp, Homo sapiens
cattgtgcctacaga

SEQ ID NO: 502924 - DNA, 15 bp, Homo sapiens
gcattgtgcctacag

SEQ ID NO: 502925 - DNA, 15 bp, Homo sapiens
agcattgtgcctaca

SEQ ID NO: 502926 - DNA, 15 bp, Homo sapiens
cagcattgtgcctac

SEQ ID NO: 502927 - DNA, 15 bp, Homo sapiens
gcagcattgtgccta

SEQ ID NO: 502928 - DNA, 15 bp, Homo sapiens
tgcagcattgtgcct

SEQ ID NO: 502929 - DNA, 15 bp, Homo sapiens
gtgcagcattgtgcc

SEQ ID NO: 502930 - DNA, 15 bp, Homo sapiens
tgtgcagcattgtgc

SEQ ID NO: 502931 - DNA, 15 bp, Homo sapiens
ctgtgcagcattgtg

SEQ ID NO: 502932 - DNA, 15 bp, Homo sapiens
gctgtgcagcattgt

SEQ ID NO: 502933 - DNA, 15 bp, Homo sapiens
tgctgtgcagcattg

SEQ ID NO: 502934 - DNA, 15 bp, Homo sapiens
ctgctgtgcagcatt

SEQ ID NO: 502935 - DNA, 15 bp, Homo sapiens
tctgctgtgcagcat

SEQ ID NO: 502936 - DNA, 15 bp, Homo sapiens
atctgctgtgcagca

SEQ ID NO: 502937 - DNA, 15 bp, Homo sapiens
gatctgctgtgcagc

SEQ ID NO: 502938 - DNA, 15 bp, Homo sapiens
agatctgctgtgcag

SEQ ID NO: 502939 - DNA, 15 bp, Homo sapiens
gagatctgctgtgca

SEQ ID NO: 502940 - DNA, 15 bp, Homo sapiens
agagatctgctgtgc

SEQ ID NO: 502941 - DNA, 15 bp, Homo sapiens
tagagatctgctgtg

SEQ ID NO: 502942 - DNA, 15 bp, Homo sapiens
tctagagatctgctg

SEQ ID NO: 502943 - DNA, 15 bp, Homo sapiens
ttctagagatctgct

SEQ ID NO: 502944 - DNA, 15 bp, Homo sapiens
gttctagagatctgc

SEQ ID NO: 502945 - DNA, 15 bp, Homo sapiens
agttctagagatctg

SEQ ID NO: 502946 - DNA, 15 bp, Homo sapiens
aagttctagagatct

SEQ ID NO: 502947 - DNA, 15 bp, Homo sapiens
taagttctagagatc

SEQ ID NO: 502948 - DNA, 15 bp, Homo sapiens
gtaagttctagagat

SEQ ID NO: 502949 - DNA, 15 bp, Homo sapiens
ggtaagttctagaga

SEQ ID NO: 502950 - DNA, 15 bp, Homo sapiens
aggtaagttctagag

SEQ ID NO: 502951 - DNA, 15 bp, Homo sapiens
aaggtaagttctaga

SEQ ID NO: 502952 - DNA, 15 bp, Homo sapiens
caaggtaagttctag

SEQ ID NO: 502953 - DNA, 15 bp, Homo sapiens
acaaggtaagttcta

SEQ ID NO: 502954 - DNA, 15 bp, Homo sapiens
tacaaggtaagttct

SEQ ID NO: 502955 - DNA, 15 bp, Homo sapiens
atacaaggtaagttc

SEQ ID NO: 502956 - DNA, 15 bp, Homo sapiens
tatacaaggtaagtt

SEQ ID NO: 502957 - DNA, 15 bp, Homo sapiens
ttatacaaggtaagt

SEQ ID NO: 502958 - DNA, 15 bp, Homo sapiens
gttatacaaggtaag

SEQ ID NO: 502959 - DNA, 15 bp, Homo sapiens
agttatacaaggtaa

SEQ ID NO: 502960 - DNA, 15 bp, Homo sapiens
cagttatacaaggta

SEQ ID NO: 502961 - DNA, 15 bp, Homo sapiens
tcagttatacaaggt

SEQ ID NO: 502962 - DNA, 15 bp, Homo sapiens
ttcagttatacaagg

SEQ ID NO: 502963 - DNA, 15 bp, Homo sapiens
tttcagttatacaag

SEQ ID NO: 502964 - DNA, 15 bp, Homo sapiens
atttcagttatacaa

SEQ ID NO: 502965 - DNA, 15 bp, Homo sapiens
aatttcagttataca

SEQ ID NO: 502966 - DNA, 15 bp, Homo sapiens
aaatttcagttatac

SEQ ID NO: 502967 - DNA, 15 bp, Homo sapiens
aaaatttcagttata

SEQ ID NO: 502968 - DNA, 15 bp, Homo sapiens
taaaatttcagttat

SEQ ID NO: 502969 - DNA, 15 bp, Homo sapiens
ataaaatttcagtta

SEQ ID NO: 502970 - DNA, 15 bp, Homo sapiens
tataaaatttcagtt

SEQ ID NO: 502971 - DNA, 15 bp, Homo sapiens
gtataaaatttcagt

SEQ ID NO: 502972 - DNA, 15 bp, Homo sapiens
agtataaaatttcag

SEQ ID NO: 502973 - DNA, 15 bp, Homo sapiens
gagtataaaatttca

SEQ ID NO: 502974 - DNA, 15 bp, Homo sapiens
tgagtataaaatttc

SEQ ID NO: 502975 - DNA, 15 bp, Homo sapiens
atgagtataaaattt

SEQ ID NO: 502976 - DNA, 15 bp, Homo sapiens
aatgagtataaaatt

SEQ ID NO: 502977 - DNA, 15 bp, Homo sapiens
caatgagtataaaat

SEQ ID NO: 502978 - DNA, 15 bp, Homo sapiens
tcaatgagtataaaa

SEQ ID NO: 502979 - DNA, 15 bp, Homo sapiens
atcaatgagtataaa

SEQ ID NO: 502980 - DNA, 15 bp, Homo sapiens
aatcaatgagtataa

SEQ ID NO: 502981 - DNA, 15 bp, Homo sapiens
taatcaatgagtata

SEQ ID NO: 502982 - DNA, 15 bp, Homo sapiens
ctaatcaatgagtat

SEQ ID NO: 502983 - DNA, 15 bp, Homo sapiens
gctaatcaatgagta

SEQ ID NO: 502984 - DNA, 15 bp, Homo sapiens
tgctaatcaatgagt

SEQ ID NO: 502985 - DNA, 15 bp, Homo sapiens
ttgctaatcaatgag

SEQ ID NO: 502986 - DNA, 15 bp, Homo sapiens
gttgctaatcaatga

SEQ ID NO: 502987 - DNA, 15 bp, Homo sapiens
tgttgctaatcaatg

SEQ ID NO: 502988 - DNA, 15 bp, Homo sapiens
ctgttgctaatcaat

SEQ ID NO: 502989 - DNA, 15 bp, Homo sapiens
gctgttgctaatcaa

SEQ ID NO: 502990 - DNA, 15 bp, Homo sapiens
ggctgttgctaatca

SEQ ID NO: 502991 - DNA, 15 bp, Homo sapiens
gggctgttgctaatc

SEQ ID NO: 502992 - DNA, 15 bp, Homo sapiens
ggggctgttgctaat

SEQ ID NO: 502993 - DNA, 15 bp, Homo sapiens
tggggctgttgctaa

SEQ ID NO: 502994 - DNA, 15 bp, Homo sapiens
ttggggctgttgcta

SEQ ID NO: 502995 - DNA, 15 bp, Homo sapiens
tttggggctgttgct

SEQ ID NO: 502996 - DNA, 15 bp, Homo sapiens
atttggggctgttgc

SEQ ID NO: 502997 - DNA, 15 bp, Homo sapiens
aatttggggctgttg

SEQ ID NO: 502998 - DNA, 15 bp, Homo sapiens
taatttggggctgtt

SEQ ID NO: 502999 - DNA, 15 bp, Homo sapiens
ataatttggggctgt

SEQ ID NO: 503000 - DNA, 15 bp, Homo sapiens
aataatttggggctg

SEQ ID NO: 503001 - DNA, 15 bp, Homo sapiens
caataatttggggct

SEQ ID NO: 503002 - DNA, 15 bp, Homo sapiens
tcaataatttggggc

SEQ ID NO: 503003 - DNA, 15 bp, Homo sapiens
ttcaataatttgggg

SEQ ID NO: 503004 - DNA, 15 bp, Homo sapiens
tttcaataatttggg

SEQ ID NO: 503005 - DNA, 15 bp, Homo sapiens
gtttcaataatttgg

SEQ ID NO: 503006 - DNA, 15 bp, Homo sapiens
ggtttcaataatttg

SEQ ID NO: 503007 - DNA, 15 bp, Homo sapiens
aggtttcaataattt

SEQ ID NO: 503008 - DNA, 15 bp, Homo sapiens
gaggtttcaataatt

SEQ ID NO: 503009 - DNA, 15 bp, Homo sapiens
ggaggtttcaataat

SEQ ID NO: 503010 - DNA, 15 bp, Homo sapiens
aggaggtttcaataa

SEQ ID NO: 503011 - DNA, 15 bp, Homo sapiens
aaggaggtttcaata

SEQ ID NO: 503012 - DNA, 15 bp, Homo sapiens
caaggaggtttcaat

SEQ ID NO: 503013 - DNA, 15 bp, Homo sapiens
tcaaggaggtttcaa

SEQ ID NO: 503014 - DNA, 15 bp, Homo sapiens
ttcaaggaggtttca

SEQ ID NO: 503015 - DNA, 15 bp, Homo sapiens
cttcaaggaggtttc

SEQ ID NO: 503016 - DNA, 15 bp, Homo sapiens
gcttcaaggaggttt

SEQ ID NO: 503017 - DNA, 15 bp, Homo sapiens
ggcttcaaggaggtt

SEQ ID NO: 503018 - DNA, 15 bp, Homo sapiens
aggcttcaaggaggt

SEQ ID NO: 503019 - DNA, 15 bp, Homo sapiens
taggcttcaaggagg

SEQ ID NO: 503020 - DNA, 15 bp, Homo sapiens
ttaggcttcaaggag

SEQ ID NO: 503021 - DNA, 15 bp, Homo sapiens
tttaggcttcaagga

SEQ ID NO: 503022 - DNA, 15 bp, Homo sapiens
atttaggcttcaagg

SEQ ID NO: 503023 - DNA, 15 bp, Homo sapiens
aatttaggcttcaag

SEQ ID NO: 503024 - DNA, 15 bp, Homo sapiens
aaatttaggcttcaa

SEQ ID NO: 503025 - DNA, 15 bp, Homo sapiens
gaaatttaggcttca

SEQ ID NO: 503026 - DNA, 15 bp, Homo sapiens
tgaaatttaggcttc

SEQ ID NO: 503027 - DNA, 15 bp, Homo sapiens
ctgaaatttaggctt

SEQ ID NO: 503028 - DNA, 15 bp, Homo sapiens
tctgaaatttaggct

SEQ ID NO: 503029 - DNA, 15 bp, Homo sapiens
ttctgaaatttaggc

SEQ ID NO: 503030 - DNA, 15 bp, Homo sapiens
tttctgaaatttagg

SEQ ID NO: 503031 - DNA, 15 bp, Homo sapiens
atttctgaaatttag

SEQ ID NO: 503032 - DNA, 15 bp, Homo sapiens
catttctgaaattta

SEQ ID NO: 503033 - DNA, 15 bp, Homo sapiens
acatttctgaaattt

SEQ ID NO: 503034 - DNA, 15 bp, Homo sapiens
aacatttctgaaatt

SEQ ID NO: 503035 - DNA, 15 bp, Homo sapiens
gaacatttctgaaat

SEQ ID NO: 503036 - DNA, 15 bp, Homo sapiens
tgaacatttctgaaa

SEQ ID NO: 503037 - DNA, 15 bp, Homo sapiens
ttgaacatttctgaa

SEQ ID NO: 503038 - DNA, 15 bp, Homo sapiens
tttgaacatttctga

SEQ ID NO: 503039 - DNA, 15 bp, Homo sapiens
atttgaacatttctg

SEQ ID NO: 503040 - DNA, 15 bp, Homo sapiens
catttgaacatttct

SEQ ID NO: 503041 - DNA, 15 bp, Homo sapiens
acatttgaacatttc

SEQ ID NO: 503042 - DNA, 15 bp, Homo sapiens
aacatttgaacattt

SEQ ID NO: 503043 - DNA, 15 bp, Homo sapiens
aaacatttgaacatt

SEQ ID NO: 503044 - DNA, 15 bp, Homo sapiens
aaaacatttgaacat

SEQ ID NO: 503045 - DNA, 15 bp, Homo sapiens
caaaacatttgaaca

SEQ ID NO: 503046 - DNA, 15 bp, Homo sapiens
tcaaaacatttgaac

SEQ ID NO: 503047 - DNA, 15 bp, Homo sapiens
ttcaaaacatttgaa

SEQ ID NO: 503048 - DNA, 15 bp, Homo sapiens
tttcaaaacatttga

SEQ ID NO: 503049 - DNA, 15 bp, Homo sapiens
ttttcaaaacatttg

SEQ ID NO: 503050 - DNA, 15 bp, Homo sapiens
attttcaaaacattt

SEQ ID NO: 503051 - DNA, 15 bp, Homo sapiens
cattttcaaaacatt

SEQ ID NO: 503052 - DNA, 15 bp, Homo sapiens
ccattttcaaaacat

SEQ ID NO: 503053 - DNA, 15 bp, Homo sapiens
tccattttcaaaaca

SEQ ID NO: 503054 - DNA, 15 bp, Homo sapiens
atccattttcaaaac

SEQ ID NO: 503055 - DNA, 15 bp, Homo sapiens
tatccattttcaaaa

SEQ ID NO: 503056 - DNA, 15 bp, Homo sapiens
atatccattttcaaa

SEQ ID NO: 503057 - DNA, 15 bp, Homo sapiens
aatatccattttcaa

SEQ ID NO: 503058 - DNA, 15 bp, Homo sapiens
gaatatccattttca

SEQ ID NO: 503059 - DNA, 15 bp, Homo sapiens
agaatatccattttc

SEQ ID NO: 503060 - DNA, 15 bp, Homo sapiens
cagaatatccatttt

SEQ ID NO: 503061 - DNA, 15 bp, Homo sapiens
tcagaatatccattt

SEQ ID NO: 503062 - DNA, 15 bp, Homo sapiens
ttcagaatatccatt

SEQ ID NO: 503063 - DNA, 15 bp, Homo sapiens
attcagaatatccat

SEQ ID NO: 503064 - DNA, 15 bp, Homo sapiens
aattcagaatatcca

SEQ ID NO: 503065 - DNA, 15 bp, Homo sapiens
taattcagaatatcc

SEQ ID NO: 503066 - DNA, 15 bp, Homo sapiens
ataattcagaatatc

SEQ ID NO: 503067 - DNA, 15 bp, Homo sapiens
gataattcagaatat

SEQ ID NO: 503068 - DNA, 15 bp, Homo sapiens
agataattcagaata

SEQ ID NO: 503069 - DNA, 15 bp, Homo sapiens
aagataattcagaat

SEQ ID NO: 503070 - DNA, 15 bp, Homo sapiens
taagataattcagaa

SEQ ID NO: 503071 - DNA, 15 bp, Homo sapiens
ataagataattcaga

SEQ ID NO: 503072 - DNA, 15 bp, Homo sapiens
aataagataattcag

SEQ ID NO: 503073 - DNA, 15 bp, Homo sapiens
taataagataattca

SEQ ID NO: 503074 - DNA, 15 bp, Homo sapiens
ctaataagataattc

SEQ ID NO: 503075 - DNA, 15 bp, Homo sapiens
gctaataagataatt

SEQ ID NO: 503076 - DNA, 15 bp, Homo sapiens
tgctaataagataat

SEQ ID NO: 503077 - DNA, 15 bp, Homo sapiens
atgctaataagataa

SEQ ID NO: 503078 - DNA, 15 bp, Homo sapiens
gatgctaataagata

SEQ ID NO: 503079 - DNA, 15 bp, Homo sapiens
agatgctaataagat

SEQ ID NO: 503080 - DNA, 15 bp, Homo sapiens
tagatgctaataaga

SEQ ID NO: 503081 - DNA, 15 bp, Homo sapiens
gtagatgctaataag

SEQ ID NO: 503082 - DNA, 15 bp, Homo sapiens
ggtagatgctaataa

SEQ ID NO: 503083 - DNA, 15 bp, Homo sapiens
aggtagatgctaata

SEQ ID NO: 503084 - DNA, 15 bp, Homo sapiens
taggtagatgctaat

SEQ ID NO: 503085 - DNA, 15 bp, Homo sapiens
ataggtagatgctaa

SEQ ID NO: 503086 - DNA, 15 bp, Homo sapiens
tataggtagatgcta

SEQ ID NO: 503087 - DNA, 15 bp, Homo sapiens
ttataggtagatgct

SEQ ID NO: 503088 - DNA, 15 bp, Homo sapiens
attataggtagatgc

SEQ ID NO: 503089 - DNA, 15 bp, Homo sapiens
aattataggtagatg

SEQ ID NO: 503090 - DNA, 15 bp, Homo sapiens
taattataggtagat

SEQ ID NO: 503091 - DNA, 15 bp, Homo sapiens
ctaattataggtaga

SEQ ID NO: 503092 - DNA, 15 bp, Homo sapiens
gctaattataggtag

SEQ ID NO: 503093 - DNA, 15 bp, Homo sapiens
tgctaattataggta

SEQ ID NO: 503094 - DNA, 15 bp, Homo sapiens
gtgctaattataggt

SEQ ID NO: 503095 - DNA, 15 bp, Homo sapiens
agtgctaattatagg

SEQ ID NO: 503096 - DNA, 15 bp, Homo sapiens
cagtgctaattatag

SEQ ID NO: 503097 - DNA, 15 bp, Homo sapiens
tcagtgctaattata

SEQ ID NO: 503098 - DNA, 15 bp, Homo sapiens
ttcagtgctaattat

SEQ ID NO: 503099 - DNA, 15 bp, Homo sapiens
tttcagtgctaatta

SEQ ID NO: 503100 - DNA, 15 bp, Homo sapiens
ttttcagtgctaatt

SEQ ID NO: 503101 - DNA, 15 bp, Homo sapiens
attttcagtgctaat

SEQ ID NO: 503102 - DNA, 15 bp, Homo sapiens
tattttcagtgctaa

SEQ ID NO: 503103 - DNA, 15 bp, Homo sapiens
ctattttcagtgcta

SEQ ID NO: 503104 - DNA, 15 bp, Homo sapiens
actattttcagtgct

SEQ ID NO: 503105 - DNA, 15 bp, Homo sapiens
tactattttcagtgc

SEQ ID NO: 503106 - DNA, 15 bp, Homo sapiens
ttactattttcagtg

SEQ ID NO: 503107 - DNA, 15 bp, Homo sapiens
attactattttcagt

SEQ ID NO: 503108 - DNA, 15 bp, Homo sapiens
aattactattttcag

SEQ ID NO: 503109 - DNA, 15 bp, Homo sapiens
aaattactattttca

SEQ ID NO: 503110 - DNA, 15 bp, Homo sapiens
aaaattactattttc

SEQ ID NO: 503111 - DNA, 15 bp, Homo sapiens
aaaaattactatttt

SEQ ID NO: 503112 - DNA, 15 bp, Homo sapiens
aaaaaattactattt

SEQ ID NO: 503113 - DNA, 15 bp, Homo sapiens
taaaaaattactatt

SEQ ID NO: 503114 - DNA, 15 bp, Homo sapiens
ttaaaaaattactat

SEQ ID NO: 503115 - DNA, 15 bp, Homo sapiens
tttaaaaaattacta

SEQ ID NO: 503116 - DNA, 15 bp, Homo sapiens
atttaaaaaattact

SEQ ID NO: 503117 - DNA, 15 bp, Homo sapiens
tatttaaaaaattac

SEQ ID NO: 503118 - DNA, 15 bp, Homo sapiens
ttatttaaaaaatta

SEQ ID NO: 503119 - DNA, 15 bp, Homo sapiens
tttatttaaaaaatt

SEQ ID NO: 503120 - DNA, 15 bp, Homo sapiens
ctttatttaaaaaat

SEQ ID NO: 503121 - DNA, 15 bp, Homo sapiens
tctttatttaaaaaa

SEQ ID NO: 503122 - DNA, 15 bp, Homo sapiens
ttctttatttaaaaa

SEQ ID NO: 503123 - DNA, 15 bp, Homo sapiens
attctttatttaaaa

SEQ ID NO: 503124 - DNA, 15 bp, Homo sapiens
gattctttatttaaa

SEQ ID NO: 503125 - DNA, 15 bp, Homo sapiens
tgattctttatttaa

SEQ ID NO: 503126 - DNA, 15 bp, Homo sapiens
ctgattctttattta

SEQ ID NO: 503127 - DNA, 15 bp, Homo sapiens
actgattctttattt

SEQ ID NO: 503128 - DNA, 15 bp, Homo sapiens
aactgattctttatt

SEQ ID NO: 503129 - DNA, 15 bp, Homo sapiens
taactgattctttat

SEQ ID NO: 503130 - DNA, 15 bp, Homo sapiens
ttaactgattcttta

SEQ ID NO: 503131 - DNA, 15 bp, Homo sapiens
cttaactgattcttt

SEQ ID NO: 503132 - DNA, 15 bp, Homo sapiens
ccttaactgattctt

SEQ ID NO: 503133 - DNA, 15 bp, Homo sapiens
cccttaactgattct

SEQ ID NO: 503134 - DNA, 15 bp, Homo sapiens
gcccttaactgattc

SEQ ID NO: 503135 - DNA, 15 bp, Homo sapiens
ggcccttaactgatt

SEQ ID NO: 503136 - DNA, 15 bp, Homo sapiens
cggcccttaactgat

SEQ ID NO: 503137 - DNA, 15 bp, Homo sapiens
ccggcccttaactga

SEQ ID NO: 503138 - DNA, 15 bp, Homo sapiens
cccggcccttaactg

SEQ ID NO: 503139 - DNA, 15 bp, Homo sapiens
acccggcccttaact

SEQ ID NO: 503140 - DNA, 15 bp, Homo sapiens
cacccggcccttaac

SEQ ID NO: 503141 - DNA, 15 bp, Homo sapiens
acacccggcccttaa

SEQ ID NO: 503142 - DNA, 15 bp, Homo sapiens
cacacccggccctta

SEQ ID NO: 503143 - DNA, 15 bp, Homo sapiens
ccacacccggccctt

SEQ ID NO: 503144 - DNA, 15 bp, Homo sapiens
accacacccggccct

SEQ ID NO: 503145 - DNA, 15 bp, Homo sapiens
gaccacacccggccc

SEQ ID NO: 503146 - DNA, 15 bp, Homo sapiens
cgaccacacccggcc

SEQ ID NO: 503147 - DNA, 15 bp, Homo sapiens
gcgaccacacccggc

SEQ ID NO: 503148 - DNA, 15 bp, Homo sapiens
agcgaccacacccgg

SEQ ID NO: 503149 - DNA, 15 bp, Homo sapiens
gagcgaccacacccg

SEQ ID NO: 503150 - DNA, 15 bp, Homo sapiens
tgagcgaccacaccc

SEQ ID NO: 503151 - DNA, 15 bp, Homo sapiens
gtgagcgaccacacc

SEQ ID NO: 503152 - DNA, 15 bp, Homo sapiens
cgtgagcgaccacac

SEQ ID NO: 503153 - DNA, 15 bp, Homo sapiens
gcgtgagcgaccaca

SEQ ID NO: 503154 - DNA, 15 bp, Homo sapiens
ggcgtgagcgaccac

SEQ ID NO: 503155 - DNA, 15 bp, Homo sapiens
aggcgtgagcgacca

SEQ ID NO: 503156 - DNA, 15 bp, Homo sapiens
caggcgtgagcgacc

SEQ ID NO: 503157 - DNA, 15 bp, Homo sapiens
acaggcgtgagcgac

SEQ ID NO: 503158 - DNA, 15 bp, Homo sapiens
tacaggcgtgagcga

SEQ ID NO: 503159 - DNA, 15 bp, Homo sapiens
ttacaggcgtgagcg

SEQ ID NO: 503160 - DNA, 15 bp, Homo sapiens
cctcccgcctcagcc

SEQ ID NO: 503161 - DNA, 15 bp, Homo sapiens
tcctcccgcctcagc

SEQ ID NO: 503162 - DNA, 15 bp, Homo sapiens
atcctcccgcctcag

SEQ ID NO: 503163 - DNA, 15 bp, Homo sapiens
gatcctcccgcctca

SEQ ID NO: 503164 - DNA, 15 bp, Homo sapiens
tgatcctcccgcctc

SEQ ID NO: 503165 - DNA, 15 bp, Homo sapiens
gtgatcctcccgcct

SEQ ID NO: 503166 - DNA, 15 bp, Homo sapiens
tgtgatcctcccgcc

SEQ ID NO: 503167 - DNA, 15 bp, Homo sapiens
ttgtgatcctcccgc

SEQ ID NO: 503168 - DNA, 15 bp, Homo sapiens
cttgtgatcctcccg

SEQ ID NO: 503169 - DNA, 15 bp, Homo sapiens
ccttgtgatcctccc

SEQ ID NO: 503170 - DNA, 15 bp, Homo sapiens
accttgtgatcctcc

SEQ ID NO: 503171 - DNA, 15 bp, Homo sapiens
gaccttgtgatcctc

SEQ ID NO: 503172 - DNA, 15 bp, Homo sapiens
cgaccttgtgatcct

SEQ ID NO: 503173 - DNA, 15 bp, Homo sapiens
ccgaccttgtgatcc

SEQ ID NO: 503174 - DNA, 15 bp, Homo sapiens
cccgaccttgtgatc

SEQ ID NO: 503175 - DNA, 15 bp, Homo sapiens
tcccgaccttgtgat

SEQ ID NO: 503176 - DNA, 15 bp, Homo sapiens
ctcccgaccttgtga

SEQ ID NO: 503177 - DNA, 15 bp, Homo sapiens
tctcccgaccttgtg

SEQ ID NO: 503178 - DNA, 15 bp, Homo sapiens
atctcccgaccttgt

SEQ ID NO: 503179 - DNA, 15 bp, Homo sapiens
gatctcccgaccttg

SEQ ID NO: 503180 - DNA, 15 bp, Homo sapiens
cgatctcccgacctt

SEQ ID NO: 503181 - DNA, 15 bp, Homo sapiens
tcgatctcccgacct

SEQ ID NO: 503182 - DNA, 15 bp, Homo sapiens
ctcgatctcccgacc

SEQ ID NO: 503183 - DNA, 15 bp, Homo sapiens
tctcgatctcccgac

SEQ ID NO: 503184 - DNA, 15 bp, Homo sapiens
gtctcgatctcccga

SEQ ID NO: 503185 - DNA, 15 bp, Homo sapiens
ggtctcgatctcccg

SEQ ID NO: 503186 - DNA, 15 bp, Homo sapiens
tggtctcgatctccc

SEQ ID NO: 503187 - DNA, 15 bp, Homo sapiens
atttttttagtagag

SEQ ID NO: 503188 - DNA, 15 bp, Homo sapiens
tatttttttagtaga

SEQ ID NO: 503189 - DNA, 15 bp, Homo sapiens
gtatttttttagtag

SEQ ID NO: 503190 - DNA, 15 bp, Homo sapiens
tgtatttttttagta

SEQ ID NO: 503191 - DNA, 15 bp, Homo sapiens
ttgtatttttttagt

SEQ ID NO: 503192 - DNA, 15 bp, Homo sapiens
tttgtatttttttag

SEQ ID NO: 503193 - DNA, 15 bp, Homo sapiens
ttttgtattttttta

SEQ ID NO: 503194 - DNA, 15 bp, Homo sapiens
tttttgtattttttt

SEQ ID NO: 503195 - DNA, 15 bp, Homo sapiens
gatttttttgtattt

SEQ ID NO: 503196 - DNA, 15 bp, Homo sapiens
tgatttttttgtatt

SEQ ID NO: 503197 - DNA, 15 bp, Homo sapiens
ctgatttttttgtat

SEQ ID NO: 503198 - DNA, 15 bp, Homo sapiens
gctgatttttttgta

SEQ ID NO: 503199 - DNA, 15 bp, Homo sapiens
agctgatttttttgt

SEQ ID NO: 503200 - DNA, 15 bp, Homo sapiens
cagctgatttttttg

SEQ ID NO: 503201 - DNA, 15 bp, Homo sapiens
ccagctgattttttt

SEQ ID NO: 503202 - DNA, 15 bp, Homo sapiens
cccagctgatttttt

SEQ ID NO: 503203 - DNA, 15 bp, Homo sapiens
gcccagctgattttt

SEQ ID NO: 503204 - DNA, 15 bp, Homo sapiens
cgcccagctgatttt

SEQ ID NO: 503205 - DNA, 15 bp, Homo sapiens
acgcccagctgattt

SEQ ID NO: 503206 - DNA, 15 bp, Homo sapiens
cacgcccagctgatt

SEQ ID NO: 503207 - DNA, 15 bp, Homo sapiens
ccacgcccagctgat

SEQ ID NO: 503208 - DNA, 15 bp, Homo sapiens
accacgcccagctga

SEQ ID NO: 503209 - DNA, 15 bp, Homo sapiens
caccacgcccagctg

SEQ ID NO: 503210 - DNA, 15 bp, Homo sapiens
acctgccaccacgcc

SEQ ID NO: 503211 - DNA, 15 bp, Homo sapiens
cacctgccaccacgc

SEQ ID NO: 503212 - DNA, 15 bp, Homo sapiens
gcacctgccaccacg

SEQ ID NO: 503213 - DNA, 15 bp, Homo sapiens
ggcacctgccaccac

SEQ ID NO: 503214 - DNA, 15 bp, Homo sapiens
tggcacctgccacca

SEQ ID NO: 503215 - DNA, 15 bp, Homo sapiens
ttggcacctgccacc

SEQ ID NO: 503216 - DNA, 15 bp, Homo sapiens
attggcacctgccac

SEQ ID NO: 503217 - DNA, 15 bp, Homo sapiens
tattggcacctgcca

SEQ ID NO: 503218 - DNA, 15 bp, Homo sapiens
ctattggcacctgcc

SEQ ID NO: 503219 - DNA, 15 bp, Homo sapiens
actattggcacctgc

SEQ ID NO: 503220 - DNA, 15 bp, Homo sapiens
gactattggcacctg

SEQ ID NO: 503221 - DNA, 15 bp, Homo sapiens
ggactattggcacct

SEQ ID NO: 503222 - DNA, 15 bp, Homo sapiens
gggactattggcacc

SEQ ID NO: 503223 - DNA, 15 bp, Homo sapiens
tgggactattggcac

SEQ ID NO: 503224 - DNA, 15 bp, Homo sapiens
ctgggactattggca

SEQ ID NO: 503225 - DNA, 15 bp, Homo sapiens
gctgggactattggc

SEQ ID NO: 503226 - DNA, 15 bp, Homo sapiens
agctgggactattgg

SEQ ID NO: 503227 - DNA, 15 bp, Homo sapiens
tagctgggactattg

SEQ ID NO: 503228 - DNA, 15 bp, Homo sapiens
gtagctgggactatt

SEQ ID NO: 503229 - DNA, 15 bp, Homo sapiens
agtagctgggactat

SEQ ID NO: 503230 - DNA, 15 bp, Homo sapiens
accattctcctgcct

SEQ ID NO: 503231 - DNA, 15 bp, Homo sapiens
caccattctcctgcc

SEQ ID NO: 503232 - DNA, 15 bp, Homo sapiens
acaccattctcctgc

SEQ ID NO: 503233 - DNA, 15 bp, Homo sapiens
cacaccattctcctg

SEQ ID NO: 503234 - DNA, 15 bp, Homo sapiens
tcacaccattctcct

SEQ ID NO: 503235 - DNA, 15 bp, Homo sapiens
ttcacaccattctcc

SEQ ID NO: 503236 - DNA, 15 bp, Homo sapiens
gttcacaccattctc

SEQ ID NO: 503237 - DNA, 15 bp, Homo sapiens
ggttcacaccattct

SEQ ID NO: 503238 - DNA, 15 bp, Homo sapiens
gggttcacaccattc

SEQ ID NO: 503239 - DNA, 15 bp, Homo sapiens
tgggttcacaccatt

SEQ ID NO: 503240 - DNA, 15 bp, Homo sapiens
ctgggttcacaccat

SEQ ID NO: 503241 - DNA, 15 bp, Homo sapiens
cctgggttcacacca

SEQ ID NO: 503242 - DNA, 15 bp, Homo sapiens
tcctgggttcacacc

SEQ ID NO: 503243 - DNA, 15 bp, Homo sapiens
ctcctgggttcacac

SEQ ID NO: 503244 - DNA, 15 bp, Homo sapiens
cctcctgggttcaca

SEQ ID NO: 503245 - DNA, 15 bp, Homo sapiens
ccctcctgggttcac

SEQ ID NO: 503246 - DNA, 15 bp, Homo sapiens
accctcctgggttca

SEQ ID NO: 503247 - DNA, 15 bp, Homo sapiens
aaccctcctgggttc

SEQ ID NO: 503248 - DNA, 15 bp, Homo sapiens
caaccctcctgggtt

SEQ ID NO: 503249 - DNA, 15 bp, Homo sapiens
gcaaccctcctgggt

SEQ ID NO: 503250 - DNA, 15 bp, Homo sapiens
tgcaaccctcctggg

SEQ ID NO: 503251 - DNA, 15 bp, Homo sapiens
ctgcaaccctcctgg

SEQ ID NO: 503252 - DNA, 15 bp, Homo sapiens
actgcaaccctcctg

SEQ ID NO: 503253 - DNA, 15 bp, Homo sapiens
cactgcaaccctcct

SEQ ID NO: 503254 - DNA, 15 bp, Homo sapiens
tcactgcaaccctcc

SEQ ID NO: 503255 - DNA, 15 bp, Homo sapiens
ctcactgcaaccctc

SEQ ID NO: 503256 - DNA, 15 bp, Homo sapiens
gctcactgcaaccct

SEQ ID NO: 503257 - DNA, 15 bp, Homo sapiens
ggctcactgcaaccc

SEQ ID NO: 503258 - DNA, 15 bp, Homo sapiens
agatcttggctcact

SEQ ID NO: 503259 - DNA, 15 bp, Homo sapiens
gagatcttggctcac

SEQ ID NO: 503260 - DNA, 15 bp, Homo sapiens
cgagatcttggctca

SEQ ID NO: 503261 - DNA, 15 bp, Homo sapiens
gcgagatcttggctc

SEQ ID NO: 503262 - DNA, 15 bp, Homo sapiens
ggcgagatcttggct

SEQ ID NO: 503263 - DNA, 15 bp, Homo sapiens
tggcgagatcttggc

SEQ ID NO: 503264 - DNA, 15 bp, Homo sapiens
gtggcgagatcttgg

SEQ ID NO: 503265 - DNA, 15 bp, Homo sapiens
agtggcgagatcttg

SEQ ID NO: 503266 - DNA, 15 bp, Homo sapiens
cagtggcgagatctt

SEQ ID NO: 503267 - DNA, 15 bp, Homo sapiens
gcagtggcgagatct

SEQ ID NO: 503268 - DNA, 15 bp, Homo sapiens
tgcagtggcgagatc

SEQ ID NO: 503269 - DNA, 15 bp, Homo sapiens
gtgcagtggcgagat

SEQ ID NO: 503270 - DNA, 15 bp, Homo sapiens
agtgcagtggcgaga

SEQ ID NO: 503271 - DNA, 15 bp, Homo sapiens
gagtgcagtggcgag

SEQ ID NO: 503272 - DNA, 15 bp, Homo sapiens
ggagtgcagtggcga

SEQ ID NO: 503273 - DNA, 15 bp, Homo sapiens
cagagtctcgctctg

SEQ ID NO: 503274 - DNA, 15 bp, Homo sapiens
tgattcttttttttt

SEQ ID NO: 503275 - DNA, 15 bp, Homo sapiens
atgattctttttttt

SEQ ID NO: 503276 - DNA, 15 bp, Homo sapiens
aatgattcttttttt

SEQ ID NO: 503277 - DNA, 15 bp, Homo sapiens
aaatgattctttttt

SEQ ID NO: 503278 - DNA, 15 bp, Homo sapiens
taaatgattcttttt

SEQ ID NO: 503279 - DNA, 15 bp, Homo sapiens
ctaaatgattctttt

SEQ ID NO: 503280 - DNA, 15 bp, Homo sapiens
actaaatgattcttt

SEQ ID NO: 503281 - DNA, 15 bp, Homo sapiens
aactaaatgattctt

SEQ ID NO: 503282 - DNA, 15 bp, Homo sapiens
gaactaaatgattct

SEQ ID NO: 503283 - DNA, 15 bp, Homo sapiens
tgaactaaatgattc

SEQ ID NO: 503284 - DNA, 15 bp, Homo sapiens
ttgaactaaatgatt

SEQ ID NO: 503285 - DNA, 15 bp, Homo sapiens
cttgaactaaatgat

SEQ ID NO: 503286 - DNA, 15 bp, Homo sapiens
acttgaactaaatga

SEQ ID NO: 503287 - DNA, 15 bp, Homo sapiens
tacttgaactaaatg

SEQ ID NO: 503288 - DNA, 15 bp, Homo sapiens
ctacttgaactaaat

SEQ ID NO: 503289 - DNA, 15 bp, Homo sapiens
gctacttgaactaaa

SEQ ID NO: 503290 - DNA, 15 bp, Homo sapiens
agctacttgaactaa

SEQ ID NO: 503291 - DNA, 15 bp, Homo sapiens
aagctacttgaacta

SEQ ID NO: 503292 - DNA, 15 bp, Homo sapiens
aaagctacttgaact

SEQ ID NO: 503293 - DNA, 15 bp, Homo sapiens
taaagctacttgaac

SEQ ID NO: 503294 - DNA, 15 bp, Homo sapiens
ttaaagctacttgaa

SEQ ID NO: 503295 - DNA, 15 bp, Homo sapiens
attaaagctacttga

SEQ ID NO: 503296 - DNA, 15 bp, Homo sapiens
aattaaagctacttg

SEQ ID NO: 503297 - DNA, 15 bp, Homo sapiens
gaattaaagctactt

SEQ ID NO: 503298 - DNA, 15 bp, Homo sapiens
cgaattaaagctact

SEQ ID NO: 503299 - DNA, 15 bp, Homo sapiens
acgaattaaagctac

SEQ ID NO: 503300 - DNA, 15 bp, Homo sapiens
aacgaattaaagcta

SEQ ID NO: 503301 - DNA, 15 bp, Homo sapiens
caacgaattaaagct

SEQ ID NO: 503302 - DNA, 15 bp, Homo sapiens
tcaacgaattaaagc

SEQ ID NO: 503303 - DNA, 15 bp, Homo sapiens
ctcaacgaattaaag

SEQ ID NO: 503304 - DNA, 15 bp, Homo sapiens
actcaacgaattaaa

SEQ ID NO: 503305 - DNA, 15 bp, Homo sapiens
aactcaacgaattaa

SEQ ID NO: 503306 - DNA, 15 bp, Homo sapiens
aaactcaacgaatta

SEQ ID NO: 503307 - DNA, 15 bp, Homo sapiens
aaaactcaacgaatt

SEQ ID NO: 503308 - DNA, 15 bp, Homo sapiens
taaaactcaacgaat

SEQ ID NO: 503309 - DNA, 15 bp, Homo sapiens
ataaaactcaacgaa

SEQ ID NO: 503310 - DNA, 15 bp, Homo sapiens
tataaaactcaacga

SEQ ID NO: 503311 - DNA, 15 bp, Homo sapiens
atataaaactcaacg

SEQ ID NO: 503312 - DNA, 15 bp, Homo sapiens
aatataaaactcaac

SEQ ID NO: 503313 - DNA, 15 bp, Homo sapiens
taatataaaactcaa

SEQ ID NO: 503314 - DNA, 15 bp, Homo sapiens
ttaatataaaactca

SEQ ID NO: 503315 - DNA, 15 bp, Homo sapiens
tttaatataaaactc

SEQ ID NO: 503316 - DNA, 15 bp, Homo sapiens
atttaatataaaact

SEQ ID NO: 503317 - DNA, 15 bp, Homo sapiens
catttaatataaaac

SEQ ID NO: 503318 - DNA, 15 bp, Homo sapiens
tcatttaatataaaa

SEQ ID NO: 503319 - DNA, 15 bp, Homo sapiens
gtcatttaatataaa

SEQ ID NO: 503320 - DNA, 15 bp, Homo sapiens
agtcatttaatataa

SEQ ID NO: 503321 - DNA, 15 bp, Homo sapiens
aagtcatttaatata

SEQ ID NO: 503322 - DNA, 15 bp, Homo sapiens
aaagtcatttaatat

SEQ ID NO: 503323 - DNA, 15 bp, Homo sapiens
caaagtcatttaata

SEQ ID NO: 503324 - DNA, 15 bp, Homo sapiens
tcaaagtcatttaat

SEQ ID NO: 503325 - DNA, 15 bp, Homo sapiens
ctcaaagtcatttaa

SEQ ID NO: 503326 - DNA, 15 bp, Homo sapiens
tctcaaagtcattta

SEQ ID NO: 503327 - DNA, 15 bp, Homo sapiens
ttctcaaagtcattt

SEQ ID NO: 503328 - DNA, 15 bp, Homo sapiens
cttctcaaagtcatt

SEQ ID NO: 503329 - DNA, 15 bp, Homo sapiens
ccttctcaaagtcat

SEQ ID NO: 503330 - DNA, 15 bp, Homo sapiens
tccttctcaaagtca

SEQ ID NO: 503331 - DNA, 15 bp, Homo sapiens
ttccttctcaaagtc

SEQ ID NO: 503332 - DNA, 15 bp, Homo sapiens
attccttctcaaagt

SEQ ID NO: 503333 - DNA, 15 bp, Homo sapiens
aattccttctcaaag

SEQ ID NO: 503334 - DNA, 15 bp, Homo sapiens
aaattccttctcaaa

SEQ ID NO: 503335 - DNA, 15 bp, Homo sapiens
aaaattccttctcaa

SEQ ID NO: 503336 - DNA, 15 bp, Homo sapiens
gaaaattccttctca

SEQ ID NO: 503337 - DNA, 15 bp, Homo sapiens
gccccagtgagggca

SEQ ID NO: 503338 - DNA, 15 bp, Homo sapiens
ggccccagtgagggc

SEQ ID NO: 503339 - DNA, 15 bp, Homo sapiens
aggccccagtgaggg

SEQ ID NO: 503340 - DNA, 15 bp, Homo sapiens
caggccccagtgagg

SEQ ID NO: 503341 - DNA, 15 bp, Homo sapiens
tcaggccccagtgag

SEQ ID NO: 503342 - DNA, 15 bp, Homo sapiens
gtcaggccccagtga

SEQ ID NO: 503343 - DNA, 15 bp, Homo sapiens
tgtcaggccccagtg

SEQ ID NO: 503344 - DNA, 15 bp, Homo sapiens
ctgtcaggccccagt

SEQ ID NO: 503345 - DNA, 15 bp, Homo sapiens
cctgtcaggccccag

SEQ ID NO: 503346 - DNA, 15 bp, Homo sapiens
tcctgtcaggcccca

SEQ ID NO: 503347 - DNA, 15 bp, Homo sapiens
ctcctgtcaggcccc

SEQ ID NO: 503348 - DNA, 15 bp, Homo sapiens
tctcctgtcaggccc

SEQ ID NO: 503349 - DNA, 15 bp, Homo sapiens
ctctcctgtcaggcc

SEQ ID NO: 503350 - DNA, 15 bp, Homo sapiens
tctctcctgtcaggc

SEQ ID NO: 503351 - DNA, 15 bp, Homo sapiens
ttctctcctgtcagg

SEQ ID NO: 503352 - DNA, 15 bp, Homo sapiens
cttctctcctgtcag

SEQ ID NO: 503353 - DNA, 15 bp, Homo sapiens
gcttctctcctgtca

SEQ ID NO: 503354 - DNA, 15 bp, Homo sapiens
ggcttctctcctgtc

SEQ ID NO: 503355 - DNA, 15 bp, Homo sapiens
tggcttctctcctgt

SEQ ID NO: 503356 - DNA, 15 bp, Homo sapiens
ttggcttctctcctg

SEQ ID NO: 503357 - DNA, 15 bp, Homo sapiens
cttggcttctctcct

SEQ ID NO: 503358 - DNA, 15 bp, Homo sapiens
tcttggcttctctcc

SEQ ID NO: 503359 - DNA, 15 bp, Homo sapiens
ctcttggcttctctc

SEQ ID NO: 503360 - DNA, 15 bp, Homo sapiens
cctcttggcttctct

SEQ ID NO: 503361 - DNA, 15 bp, Homo sapiens
gcctcttggcttctc

SEQ ID NO: 503362 - DNA, 15 bp, Homo sapiens
tgcctcttggcttct

SEQ ID NO: 503363 - DNA, 15 bp, Homo sapiens
ttgcctcttggcttc

SEQ ID NO: 503364 - DNA, 15 bp, Homo sapiens
tttgcctcttggctt

SEQ ID NO: 503365 - DNA, 15 bp, Homo sapiens
ctttgcctcttggct

SEQ ID NO: 503366 - DNA, 15 bp, Homo sapiens
gctttgcctcttggc

SEQ ID NO: 503367 - DNA, 15 bp, Homo sapiens
cgctttgcctcttgg

SEQ ID NO: 503368 - DNA, 15 bp, Homo sapiens
acgctttgcctcttg

SEQ ID NO: 503369 - DNA, 15 bp, Homo sapiens
gacgctttgcctctt

SEQ ID NO: 503370 - DNA, 15 bp, Homo sapiens
agacgctttgcctct

SEQ ID NO: 503371 - DNA, 15 bp, Homo sapiens
cagacgctttgcctc

SEQ ID NO: 503372 - DNA, 15 bp, Homo sapiens
ccagacgctttgcct

SEQ ID NO: 503373 - DNA, 15 bp, Homo sapiens
cccagacgctttgcc

SEQ ID NO: 503374 - DNA, 15 bp, Homo sapiens
ccccagacgctttgc

SEQ ID NO: 503375 - DNA, 15 bp, Homo sapiens
cccccagacgctttg

SEQ ID NO: 503376 - DNA, 15 bp, Homo sapiens
gcccccagacgcttt

SEQ ID NO: 503377 - DNA, 15 bp, Homo sapiens
agcccccagacgctt

SEQ ID NO: 503378 - DNA, 15 bp, Homo sapiens
gagcccccagacgct

SEQ ID NO: 503379 - DNA, 15 bp, Homo sapiens
ggagcccccagacgc

SEQ ID NO: 503380 - DNA, 15 bp, Homo sapiens
tggagcccccagacg

SEQ ID NO: 503381 - DNA, 15 bp, Homo sapiens
ctggagcccccagac

SEQ ID NO: 503382 - DNA, 15 bp, Homo sapiens
gctggagcccccaga

SEQ ID NO: 503383 - DNA, 15 bp, Homo sapiens
agctggagcccccag

SEQ ID NO: 503384 - DNA, 15 bp, Homo sapiens
aagctggagccccca

SEQ ID NO: 503385 - DNA, 15 bp, Homo sapiens
aaagctggagccccc

SEQ ID NO: 503386 - DNA, 15 bp, Homo sapiens
aaaagctggagcccc

SEQ ID NO: 503387 - DNA, 15 bp, Homo sapiens
caaaagctggagccc

SEQ ID NO: 503388 - DNA, 15 bp, Homo sapiens
ccaaaagctggagcc

SEQ ID NO: 503389 - DNA, 15 bp, Homo sapiens
tccaaaagctggagc

SEQ ID NO: 503390 - DNA, 15 bp, Homo sapiens
ttccaaaagctggag

SEQ ID NO: 503391 - DNA, 15 bp, Homo sapiens
cttccaaaagctgga

SEQ ID NO: 503392 - DNA, 15 bp, Homo sapiens
acttccaaaagctgg

SEQ ID NO: 503393 - DNA, 15 bp, Homo sapiens
gacttccaaaagctg

SEQ ID NO: 503394 - DNA, 15 bp, Homo sapiens
tgacttccaaaagct

SEQ ID NO: 503395 - DNA, 15 bp, Homo sapiens
ttgacttccaaaagc

SEQ ID NO: 503396 - DNA, 15 bp, Homo sapiens
gttgacttccaaaag

SEQ ID NO: 503397 - DNA, 15 bp, Homo sapiens
tgttgacttccaaaa

SEQ ID NO: 503398 - DNA, 15 bp, Homo sapiens
gtgttgacttccaaa

SEQ ID NO: 503399 - DNA, 15 bp, Homo sapiens
ggtgttgacttccaa

SEQ ID NO: 503400 - DNA, 15 bp, Homo sapiens
gggtgttgacttcca

SEQ ID NO: 503401 - DNA, 15 bp, Homo sapiens
ggggtgttgacttcc

SEQ ID NO: 503402 - DNA, 15 bp, Homo sapiens
gggggtgttgacttc

SEQ ID NO: 503403 - DNA, 15 bp, Homo sapiens
agggggtgttgactt

SEQ ID NO: 503404 - DNA, 15 bp, Homo sapiens
gagggggtgttgact

SEQ ID NO: 503405 - DNA, 15 bp, Homo sapiens
agagggggtgttgac

SEQ ID NO: 503406 - DNA, 15 bp, Homo sapiens
gagagggggtgttga

SEQ ID NO: 503407 - DNA, 15 bp, Homo sapiens
ggagagggggtgttg

SEQ ID NO: 503408 - DNA, 15 bp, Homo sapiens
aggagagggggtgtt

SEQ ID NO: 503409 - DNA, 15 bp, Homo sapiens
taggagagggggtgt

SEQ ID NO: 503410 - DNA, 15 bp, Homo sapiens
ttaggagagggggtg

SEQ ID NO: 503411 - DNA, 15 bp, Homo sapiens
gttaggagagggggt

SEQ ID NO: 503412 - DNA, 15 bp, Homo sapiens
ggttaggagaggggg

SEQ ID NO: 503413 - DNA, 15 bp, Homo sapiens
aggttaggagagggg

SEQ ID NO: 503414 - DNA, 15 bp, Homo sapiens
gaggttaggagaggg

SEQ ID NO: 503415 - DNA, 15 bp, Homo sapiens
agaggttaggagagg

SEQ ID NO: 503416 - DNA, 15 bp, Homo sapiens
gagaggttaggagag

SEQ ID NO: 503417 - DNA, 15 bp, Homo sapiens
ggagaggttaggaga

SEQ ID NO: 503418 - DNA, 15 bp, Homo sapiens
tggagaggttaggag

SEQ ID NO: 503419 - DNA, 15 bp, Homo sapiens
ttggagaggttagga

SEQ ID NO: 503420 - DNA, 15 bp, Homo sapiens
tttggagaggttagg

SEQ ID NO: 503421 - DNA, 15 bp, Homo sapiens
gtttggagaggttag

SEQ ID NO: 503422 - DNA, 15 bp, Homo sapiens
agtttggagaggtta

SEQ ID NO: 503423 - DNA, 15 bp, Homo sapiens
cagtttggagaggtt

SEQ ID NO: 503424 - DNA, 15 bp, Homo sapiens
ccagtttggagaggt

SEQ ID NO: 503425 - DNA, 15 bp, Homo sapiens
cccagtttggagagg

SEQ ID NO: 503426 - DNA, 15 bp, Homo sapiens
ccccagtttggagag

SEQ ID NO: 503427 - DNA, 15 bp, Homo sapiens
accccagtttggaga

SEQ ID NO: 503428 - DNA, 15 bp, Homo sapiens
gaccccagtttggag

SEQ ID NO: 503429 - DNA, 15 bp, Homo sapiens
agaccccagtttgga

SEQ ID NO: 503430 - DNA, 15 bp, Homo sapiens
tagaccccagtttgg

SEQ ID NO: 503431 - DNA, 15 bp, Homo sapiens
gtagaccccagtttg

SEQ ID NO: 503432 - DNA, 15 bp, Homo sapiens
ggtagaccccagttt

SEQ ID NO: 503433 - DNA, 15 bp, Homo sapiens
cggtagaccccagtt

SEQ ID NO: 503434 - DNA, 15 bp, Homo sapiens
acggtagaccccagt

SEQ ID NO: 503435 - DNA, 15 bp, Homo sapiens
tacggtagaccccag

SEQ ID NO: 503436 - DNA, 15 bp, Homo sapiens
ctacggtagacccca

SEQ ID NO: 503437 - DNA, 15 bp, Homo sapiens
cctacggtagacccc

SEQ ID NO: 503438 - DNA, 15 bp, Homo sapiens
tcctacggtagaccc

SEQ ID NO: 503439 - DNA, 15 bp, Homo sapiens
gtcctacggtagacc

SEQ ID NO: 503440 - DNA, 15 bp, Homo sapiens
ggtcctacggtagac

SEQ ID NO: 503441 - DNA, 15 bp, Homo sapiens
gggtcctacggtaga

SEQ ID NO: 503442 - DNA, 15 bp, Homo sapiens
ggggtcctacggtag

SEQ ID NO: 503443 - DNA, 15 bp, Homo sapiens
tggggtcctacggta

SEQ ID NO: 503444 - DNA, 15 bp, Homo sapiens
ctggggtcctacggt

SEQ ID NO: 503445 - DNA, 15 bp, Homo sapiens
gctggggtcctacgg

SEQ ID NO: 503446 - DNA, 15 bp, Homo sapiens
agctggggtcctacg

SEQ ID NO: 503447 - DNA, 15 bp, Homo sapiens
gagctggggtcctac

SEQ ID NO: 503448 - DNA, 15 bp, Homo sapiens
ggagctggggtccta

SEQ ID NO: 503449 - DNA, 15 bp, Homo sapiens
gggagctggggtcct

SEQ ID NO: 503450 - DNA, 15 bp, Homo sapiens
cgggagctggggtcc

SEQ ID NO: 503451 - DNA, 15 bp, Homo sapiens
ccgggagctggggtc

SEQ ID NO: 503452 - DNA, 15 bp, Homo sapiens
gccgggagctggggt

SEQ ID NO: 503453 - DNA, 15 bp, Homo sapiens
ggccgggagctgggg

SEQ ID NO: 503454 - DNA, 15 bp, Homo sapiens
aggccgggagctggg

SEQ ID NO: 503455 - DNA, 15 bp, Homo sapiens
caggccgggagctgg

SEQ ID NO: 503456 - DNA, 15 bp, Homo sapiens
tcaggccgggagctg

SEQ ID NO: 503457 - DNA, 15 bp, Homo sapiens
ctcaggccgggagct

SEQ ID NO: 503458 - DNA, 15 bp, Homo sapiens
gctcaggccgggagc

SEQ ID NO: 503459 - DNA, 15 bp, Homo sapiens
ggctcaggccgggag

SEQ ID NO: 503460 - DNA, 15 bp, Homo sapiens
gggctcaggccggga

SEQ ID NO: 503461 - DNA, 15 bp, Homo sapiens
tgggctcaggccggg

SEQ ID NO: 503462 - DNA, 15 bp, Homo sapiens
ctgggctcaggccgg

SEQ ID NO: 503463 - DNA, 15 bp, Homo sapiens
actgggctcaggccg

SEQ ID NO: 503464 - DNA, 15 bp, Homo sapiens
aactgggctcaggcc

SEQ ID NO: 503465 - DNA, 15 bp, Homo sapiens
gaactgggctcaggc

SEQ ID NO: 503466 - DNA, 15 bp, Homo sapiens
cgaactgggctcagg

SEQ ID NO: 503467 - DNA, 15 bp, Homo sapiens
gcgaactgggctcag

SEQ ID NO: 503468 - DNA, 15 bp, Homo sapiens
ggcgaactgggctca

SEQ ID NO: 503469 - DNA, 15 bp, Homo sapiens
cggcgaactgggctc

SEQ ID NO: 503470 - DNA, 15 bp, Homo sapiens
gcggcgaactgggct

SEQ ID NO: 503471 - DNA, 15 bp, Homo sapiens
ggcggcgaactgggc

SEQ ID NO: 503472 - DNA, 15 bp, Homo sapiens
aggcggcgaactggg

SEQ ID NO: 503473 - DNA, 15 bp, Homo sapiens
caggcggcgaactgg

SEQ ID NO: 503474 - DNA, 15 bp, Homo sapiens
acaggcggcgaactg

SEQ ID NO: 503475 - DNA, 15 bp, Homo sapiens
cacaggcggcgaact

SEQ ID NO: 503476 - DNA, 15 bp, Homo sapiens
ccacaggcggcgaac

SEQ ID NO: 503477 - DNA, 15 bp, Homo sapiens
gccacaggcggcgaa

SEQ ID NO: 503478 - DNA, 15 bp, Homo sapiens
ggccacaggcggcga

SEQ ID NO: 503479 - DNA, 15 bp, Homo sapiens
tggccacaggcggcg

SEQ ID NO: 503480 - DNA, 15 bp, Homo sapiens
ctggccacaggcggc

SEQ ID NO: 503481 - DNA, 15 bp, Homo sapiens
gctggccacaggcgg

SEQ ID NO: 503482 - DNA, 15 bp, Homo sapiens
agctggccacaggcg

SEQ ID NO: 503483 - DNA, 15 bp, Homo sapiens
tagctggccacaggc

SEQ ID NO: 503484 - DNA, 15 bp, Homo sapiens
ttagctggccacagg

SEQ ID NO: 503485 - DNA, 15 bp, Homo sapiens
attagctggccacag

SEQ ID NO: 503486 - DNA, 15 bp, Homo sapiens
gattagctggccaca

SEQ ID NO: 503487 - DNA, 15 bp, Homo sapiens
ggattagctggccac

SEQ ID NO: 503488 - DNA, 15 bp, Homo sapiens
aggattagctggcca

SEQ ID NO: 503489 - DNA, 15 bp, Homo sapiens
taggattagctggcc

SEQ ID NO: 503490 - DNA, 15 bp, Homo sapiens
ttaggattagctggc

SEQ ID NO: 503491 - DNA, 15 bp, Homo sapiens
attaggattagctgg

SEQ ID NO: 503492 - DNA, 15 bp, Homo sapiens
cattaggattagctg

SEQ ID NO: 503493 - DNA, 15 bp, Homo sapiens
gcattaggattagct

SEQ ID NO: 503494 - DNA, 15 bp, Homo sapiens
agcattaggattagc

SEQ ID NO: 503495 - DNA, 15 bp, Homo sapiens
gagcattaggattag

SEQ ID NO: 503496 - DNA, 15 bp, Homo sapiens
agagcattaggatta

SEQ ID NO: 503497 - DNA, 15 bp, Homo sapiens
cagagcattaggatt

SEQ ID NO: 503498 - DNA, 15 bp, Homo sapiens
tcagagcattaggat

SEQ ID NO: 503499 - DNA, 15 bp, Homo sapiens
gtcagagcattagga

SEQ ID NO: 503500 - DNA, 15 bp, Homo sapiens
ggtcagagcattagg

SEQ ID NO: 503501 - DNA, 15 bp, Homo sapiens
gggtcagagcattag

SEQ ID NO: 503502 - DNA, 15 bp, Homo sapiens
cgggtcagagcatta

SEQ ID NO: 503503 - DNA, 15 bp, Homo sapiens
ccgggtcagagcatt

SEQ ID NO: 503504 - DNA, 15 bp, Homo sapiens
cccgggtcagagcat

SEQ ID NO: 503505 - DNA, 15 bp, Homo sapiens
gcccgggtcagagca

SEQ ID NO: 503506 - DNA, 15 bp, Homo sapiens
agcccgggtcagagc

SEQ ID NO: 503507 - DNA, 15 bp, Homo sapiens
cagcccgggtcagag

SEQ ID NO: 503508 - DNA, 15 bp, Homo sapiens
ccagcccgggtcaga

SEQ ID NO: 503509 - DNA, 15 bp, Homo sapiens
cccagcccgggtcag

SEQ ID NO: 503510 - DNA, 15 bp, Homo sapiens
gcccagcccgggtca

SEQ ID NO: 503511 - DNA, 15 bp, Homo sapiens
tgcccagcccgggtc

SEQ ID NO: 503512 - DNA, 15 bp, Homo sapiens
gtgcccagcccgggt

SEQ ID NO: 503513 - DNA, 15 bp, Homo sapiens
cgtgcccagcccggg

SEQ ID NO: 503514 - DNA, 15 bp, Homo sapiens
tcgtgcccagcccgg

SEQ ID NO: 503515 - DNA, 15 bp, Homo sapiens
ttcgtgcccagcccg

SEQ ID NO: 503516 - DNA, 15 bp, Homo sapiens
tttcgtgcccagccc

SEQ ID NO: 503517 - DNA, 15 bp, Homo sapiens
ctttcgtgcccagcc

SEQ ID NO: 503518 - DNA, 15 bp, Homo sapiens
cctttcgtgcccagc

SEQ ID NO: 503519 - DNA, 15 bp, Homo sapiens
tcctttcgtgcccag

SEQ ID NO: 503520 - DNA, 15 bp, Homo sapiens
ctcctttcgtgccca

SEQ ID NO: 503521 - DNA, 15 bp, Homo sapiens
gctcctttcgtgccc

SEQ ID NO: 503522 - DNA, 15 bp, Homo sapiens
tgctcctttcgtgcc

SEQ ID NO: 503523 - DNA, 15 bp, Homo sapiens
ctgctcctttcgtgc

SEQ ID NO: 503524 - DNA, 15 bp, Homo sapiens
tctgctcctttcgtg

SEQ ID NO: 503525 - DNA, 15 bp, Homo sapiens
ttctgctcctttcgt

SEQ ID NO: 503526 - DNA, 15 bp, Homo sapiens
cttctgctcctttcg

SEQ ID NO: 503527 - DNA, 15 bp, Homo sapiens
gcttctgctcctttc

SEQ ID NO: 503528 - DNA, 15 bp, Homo sapiens
cgcttctgctccttt

SEQ ID NO: 503529 - DNA, 15 bp, Homo sapiens
ccgcttctgctcctt

SEQ ID NO: 503530 - DNA, 15 bp, Homo sapiens
gccgcttctgctcct

SEQ ID NO: 503531 - DNA, 15 bp, Homo sapiens
ggccgcttctgctcc

SEQ ID NO: 503532 - DNA, 15 bp, Homo sapiens
aggccgcttctgctc

SEQ ID NO: 503533 - DNA, 15 bp, Homo sapiens
aaggccgcttctgct

SEQ ID NO: 503534 - DNA, 15 bp, Homo sapiens
aaaggccgcttctgc

SEQ ID NO: 503535 - DNA, 15 bp, Homo sapiens
gaaaggccgcttctg

SEQ ID NO: 503536 - DNA, 15 bp, Homo sapiens
ggaaaggccgcttct

SEQ ID NO: 503537 - DNA, 15 bp, Homo sapiens
gggaaaggccgcttc

SEQ ID NO: 503538 - DNA, 15 bp, Homo sapiens
ggggaaaggccgctt

SEQ ID NO: 503539 - DNA, 15 bp, Homo sapiens
gggggaaaggccgct

SEQ ID NO: 503540 - DNA, 15 bp, Homo sapiens
tgggggaaaggccgc

SEQ ID NO: 503541 - DNA, 15 bp, Homo sapiens
gtgggggaaaggccg

SEQ ID NO: 503542 - DNA, 15 bp, Homo sapiens
agtgggggaaaggcc

SEQ ID NO: 503543 - DNA, 15 bp, Homo sapiens
cagtgggggaaaggc

SEQ ID NO: 503544 - DNA, 15 bp, Homo sapiens
gcagtgggggaaagg

SEQ ID NO: 503545 - DNA, 15 bp, Homo sapiens
cgcagtgggggaaag

SEQ ID NO: 503546 - DNA, 15 bp, Homo sapiens
acgcagtgggggaaa

SEQ ID NO: 503547 - DNA, 15 bp, Homo sapiens
gacgcagtgggggaa

SEQ ID NO: 503548 - DNA, 15 bp, Homo sapiens
agacgcagtggggga

SEQ ID NO: 503549 - DNA, 15 bp, Homo sapiens
aagacgcagtggggg

SEQ ID NO: 503550 - DNA, 15 bp, Homo sapiens
aaagacgcagtgggg

SEQ ID NO: 503551 - DNA, 15 bp, Homo sapiens
aaaagacgcagtggg

SEQ ID NO: 503552 - DNA, 15 bp, Homo sapiens
caaaagacgcagtgg

SEQ ID NO: 503553 - DNA, 15 bp, Homo sapiens
ccaaaagacgcagtg

SEQ ID NO: 503554 - DNA, 15 bp, Homo sapiens
accaaaagacgcagt

SEQ ID NO: 503555 - DNA, 15 bp, Homo sapiens
aaccaaaagacgcag

SEQ ID NO: 503556 - DNA, 15 bp, Homo sapiens
gaaccaaaagacgca

SEQ ID NO: 503557 - DNA, 15 bp, Homo sapiens
cgaaccaaaagacgc

SEQ ID NO: 503558 - DNA, 15 bp, Homo sapiens
tcgaaccaaaagacg

SEQ ID NO: 503559 - DNA, 15 bp, Homo sapiens
ttcgaaccaaaagac

SEQ ID NO: 503560 - DNA, 15 bp, Homo sapiens
tttcgaaccaaaaga

SEQ ID NO: 503561 - DNA, 15 bp, Homo sapiens
ctttcgaaccaaaag

SEQ ID NO: 503562 - DNA, 15 bp, Homo sapiens
tctttcgaaccaaaa

SEQ ID NO: 503563 - DNA, 15 bp, Homo sapiens
ctctttcgaaccaaa

SEQ ID NO: 503564 - DNA, 15 bp, Homo sapiens
cctctttcgaaccaa

SEQ ID NO: 503565 - DNA, 15 bp, Homo sapiens
ccctctttcgaacca

SEQ ID NO: 503566 - DNA, 15 bp, Homo sapiens
tccctctttcgaacc

SEQ ID NO: 503567 - DNA, 15 bp, Homo sapiens
ttccctctttcgaac

SEQ ID NO: 503568 - DNA, 15 bp, Homo sapiens
gttccctctttcgaa

SEQ ID NO: 503569 - DNA, 15 bp, Homo sapiens
agttccctctttcga

SEQ ID NO: 503570 - DNA, 15 bp, Homo sapiens
cagttccctctttcg

SEQ ID NO: 503571 - DNA, 15 bp, Homo sapiens
tcagttccctctttc

SEQ ID NO: 503572 - DNA, 15 bp, Homo sapiens
ctcagttccctcttt

SEQ ID NO: 503573 - DNA, 15 bp, Homo sapiens
tctcagttccctctt

SEQ ID NO: 503574 - DNA, 15 bp, Homo sapiens
gtctcagttccctct

SEQ ID NO: 503575 - DNA, 15 bp, Homo sapiens
agtctcagttccctc

SEQ ID NO: 503576 - DNA, 15 bp, Homo sapiens
cagtctcagttccct

SEQ ID NO: 503577 - DNA, 15 bp, Homo sapiens
tcagtctcagttccc

SEQ ID NO: 503578 - DNA, 15 bp, Homo sapiens
ctcagtctcagttcc

SEQ ID NO: 503579 - DNA, 15 bp, Homo sapiens
cctcagtctcagttc

SEQ ID NO: 503580 - DNA, 15 bp, Homo sapiens
ccctcagtctcagtt

SEQ ID NO: 503581 - DNA, 15 bp, Homo sapiens
tccctcagtctcagt

SEQ ID NO: 503582 - DNA, 15 bp, Homo sapiens
ctccctcagtctcag

SEQ ID NO: 503583 - DNA, 15 bp, Homo sapiens
cctccctcagtctca

SEQ ID NO: 503584 - DNA, 15 bp, Homo sapiens
ccctccctcagtctc

SEQ ID NO: 503585 - DNA, 15 bp, Homo sapiens
gccctccctcagtct

SEQ ID NO: 503586 - DNA, 15 bp, Homo sapiens
tgccctccctcagtc

SEQ ID NO: 503587 - DNA, 15 bp, Homo sapiens
ctgccctccctcagt

SEQ ID NO: 503588 - DNA, 15 bp, Homo sapiens
gctgccctccctcag

SEQ ID NO: 503589 - DNA, 15 bp, Homo sapiens
ggctgccctccctca

SEQ ID NO: 503590 - DNA, 15 bp, Homo sapiens
tggctgccctccctc

SEQ ID NO: 503591 - DNA, 15 bp, Homo sapiens
ctggctgccctccct

SEQ ID NO: 503592 - DNA, 15 bp, Homo sapiens
cctggctgccctccc

SEQ ID NO: 503593 - DNA, 15 bp, Homo sapiens
ccctggctgccctcc

SEQ ID NO: 503594 - DNA, 15 bp, Homo sapiens
accctggctgccctc

SEQ ID NO: 503595 - DNA, 15 bp, Homo sapiens
aaccctggctgccct

SEQ ID NO: 503596 - DNA, 15 bp, Homo sapiens
caaccctggctgccc

SEQ ID NO: 503597 - DNA, 15 bp, Homo sapiens
ccaaccctggctgcc

SEQ ID NO: 503598 - DNA, 15 bp, Homo sapiens
cccaaccctggctgc

SEQ ID NO: 503599 - DNA, 15 bp, Homo sapiens
ccccaaccctggctg

SEQ ID NO: 503600 - DNA, 15 bp, Homo sapiens
gccccaaccctggct

SEQ ID NO: 503601 - DNA, 15 bp, Homo sapiens
agccccaaccctggc

SEQ ID NO: 503602 - DNA, 15 bp, Homo sapiens
cagccccaaccctgg

SEQ ID NO: 503603 - DNA, 15 bp, Homo sapiens
acagccccaaccctg

SEQ ID NO: 503604 - DNA, 15 bp, Homo sapiens
cacagccccaaccct

SEQ ID NO: 503605 - DNA, 15 bp, Homo sapiens
tcacagccccaaccc

SEQ ID NO: 503606 - DNA, 15 bp, Homo sapiens
ctcacagccccaacc

SEQ ID NO: 503607 - DNA, 15 bp, Homo sapiens
gctcacagccccaac

SEQ ID NO: 503608 - DNA, 15 bp, Homo sapiens
cgctcacagccccaa

SEQ ID NO: 503609 - DNA, 15 bp, Homo sapiens
gcgctcacagcccca

SEQ ID NO: 503610 - DNA, 15 bp, Homo sapiens
agcgctcacagcccc

SEQ ID NO: 503611 - DNA, 15 bp, Homo sapiens
gagcgctcacagccc

SEQ ID NO: 503612 - DNA, 15 bp, Homo sapiens
ggagcgctcacagcc

SEQ ID NO: 503613 - DNA, 15 bp, Homo sapiens
tggagcgctcacagc

SEQ ID NO: 503614 - DNA, 15 bp, Homo sapiens
ctggagcgctcacag

SEQ ID NO: 503615 - DNA, 15 bp, Homo sapiens
actggagcgctcaca

SEQ ID NO: 503616 - DNA, 15 bp, Homo sapiens
tactggagcgctcac

SEQ ID NO: 503617 - DNA, 15 bp, Homo sapiens
gtactggagcgctca

SEQ ID NO: 503618 - DNA, 15 bp, Homo sapiens
tgtactggagcgctc

SEQ ID NO: 503619 - DNA, 15 bp, Homo sapiens
ctgtactggagcgct

SEQ ID NO: 503620 - DNA, 15 bp, Homo sapiens
gctgtactggagcgc

SEQ ID NO: 503621 - DNA, 15 bp, Homo sapiens
ggctgtactggagcg

SEQ ID NO: 503622 - DNA, 15 bp, Homo sapiens
gggctgtactggagc

SEQ ID NO: 503623 - DNA, 15 bp, Homo sapiens
ggggctgtactggag

SEQ ID NO: 503624 - DNA, 15 bp, Homo sapiens
gggggctgtactgga

SEQ ID NO: 503625 - DNA, 15 bp, Homo sapiens
agggggctgtactgg

SEQ ID NO: 503626 - DNA, 15 bp, Homo sapiens
gagggggctgtactg

SEQ ID NO: 503627 - DNA, 15 bp, Homo sapiens
cgagggggctgtact

SEQ ID NO: 503628 - DNA, 15 bp, Homo sapiens
tcgagggggctgtac

SEQ ID NO: 503629 - DNA, 15 bp, Homo sapiens
gtcgagggggctgta

SEQ ID NO: 503630 - DNA, 15 bp, Homo sapiens
cgtcgagggggctgt

SEQ ID NO: 503631 - DNA, 15 bp, Homo sapiens
ccgtcgagggggctg

SEQ ID NO: 503632 - DNA, 15 bp, Homo sapiens
accgtcgagggggct

SEQ ID NO: 503633 - DNA, 15 bp, Homo sapiens
taccgtcgagggggc

SEQ ID NO: 503634 - DNA, 15 bp, Homo sapiens
gtaccgtcgaggggg

SEQ ID NO: 503635 - DNA, 15 bp, Homo sapiens
cgtaccgtcgagggg

SEQ ID NO: 503636 - DNA, 15 bp, Homo sapiens
ccgtaccgtcgaggg

SEQ ID NO: 503637 - DNA, 15 bp, Homo sapiens
gccgtaccgtcgagg

SEQ ID NO: 503638 - DNA, 15 bp, Homo sapiens
ggccgtaccgtcgag

SEQ ID NO: 503639 - DNA, 15 bp, Homo sapiens
aggccgtaccgtcga

SEQ ID NO: 503640 - DNA, 15 bp, Homo sapiens
caggccgtaccgtcg

SEQ ID NO: 503641 - DNA, 15 bp, Homo sapiens
ccaggccgtaccgtc

SEQ ID NO: 503642 - DNA, 15 bp, Homo sapiens
cccaggccgtaccgt

SEQ ID NO: 503643 - DNA, 15 bp, Homo sapiens
ccccaggccgtaccg

SEQ ID NO: 503644 - DNA, 15 bp, Homo sapiens
gccccaggccgtacc

SEQ ID NO: 503645 - DNA, 15 bp, Homo sapiens
tgccccaggccgtac

SEQ ID NO: 503646 - DNA, 15 bp, Homo sapiens
ctgccccaggccgta

SEQ ID NO: 503647 - DNA, 15 bp, Homo sapiens
cctgccccaggccgt

SEQ ID NO: 503648 - DNA, 15 bp, Homo sapiens
gcctgccccaggccg

SEQ ID NO: 503649 - DNA, 15 bp, Homo sapiens
cgcctgccccaggcc

SEQ ID NO: 503650 - DNA, 15 bp, Homo sapiens
gcgcctgccccaggc

SEQ ID NO: 503651 - DNA, 15 bp, Homo sapiens
agcgcctgccccagg

SEQ ID NO: 503652 - DNA, 15 bp, Homo sapiens
cagcgcctgccccag

SEQ ID NO: 503653 - DNA, 15 bp, Homo sapiens
ccagcgcctgcccca

SEQ ID NO: 503654 - DNA, 15 bp, Homo sapiens
gccagcgcctgcccc

SEQ ID NO: 503655 - DNA, 15 bp, Homo sapiens
tgccagcgcctgccc

SEQ ID NO: 503656 - DNA, 15 bp, Homo sapiens
ctgccagcgcctgcc

SEQ ID NO: 503657 - DNA, 15 bp, Homo sapiens
actgccagcgcctgc

SEQ ID NO: 503658 - DNA, 15 bp, Homo sapiens
aactgccagcgcctg

SEQ ID NO: 503659 - DNA, 15 bp, Homo sapiens
gaactgccagcgcct

SEQ ID NO: 503660 - DNA, 15 bp, Homo sapiens
ggaactgccagcgcc

SEQ ID NO: 503661 - DNA, 15 bp, Homo sapiens
gggaactgccagcgc

SEQ ID NO: 503662 - DNA, 15 bp, Homo sapiens
ggggaactgccagcg

SEQ ID NO: 503663 - DNA, 15 bp, Homo sapiens
cggggaactgccagc

SEQ ID NO: 503664 - DNA, 15 bp, Homo sapiens
gcggggaactgccag

SEQ ID NO: 503665 - DNA, 15 bp, Homo sapiens
cgcggggaactgcca

SEQ ID NO: 503666 - DNA, 15 bp, Homo sapiens
ccgcggggaactgcc

SEQ ID NO: 503667 - DNA, 15 bp, Homo sapiens
tccgcggggaactgc

SEQ ID NO: 503668 - DNA, 15 bp, Homo sapiens
atccgcggggaactg

SEQ ID NO: 503669 - DNA, 15 bp, Homo sapiens
catccgcggggaact

SEQ ID NO: 503670 - DNA, 15 bp, Homo sapiens
ccatccgcggggaac

SEQ ID NO: 503671 - DNA, 15 bp, Homo sapiens
cccatccgcggggaa

SEQ ID NO: 503672 - DNA, 15 bp, Homo sapiens
gcccatccgcgggga

SEQ ID NO: 503673 - DNA, 15 bp, Homo sapiens
ggcccatccgcgggg

SEQ ID NO: 503674 - DNA, 15 bp, Homo sapiens
aggcccatccgcggg

SEQ ID NO: 503675 - DNA, 15 bp, Homo sapiens
gaggcccatccgcgg

SEQ ID NO: 503676 - DNA, 15 bp, Homo sapiens
agaggcccatccgcg

SEQ ID NO: 503677 - DNA, 15 bp, Homo sapiens
aagaggcccatccgc

SEQ ID NO: 503678 - DNA, 15 bp, Homo sapiens
caagaggcccatccg

SEQ ID NO: 503679 - DNA, 15 bp, Homo sapiens
ccaagaggcccatcc

SEQ ID NO: 503680 - DNA, 15 bp, Homo sapiens
cccaagaggcccatc

SEQ ID NO: 503681 - DNA, 15 bp, Homo sapiens
gcccaagaggcccat

SEQ ID NO: 503682 - DNA, 15 bp, Homo sapiens
ggcccaagaggccca

SEQ ID NO: 503683 - DNA, 15 bp, Homo sapiens
gggcccaagaggccc

SEQ ID NO: 503684 - DNA, 15 bp, Homo sapiens
ggggcccaagaggcc

SEQ ID NO: 503685 - DNA, 15 bp, Homo sapiens
tggggcccaagaggc

SEQ ID NO: 503686 - DNA, 15 bp, Homo sapiens
ctggggcccaagagg

SEQ ID NO: 503687 - DNA, 15 bp, Homo sapiens
gctggggcccaagag

SEQ ID NO: 503688 - DNA, 15 bp, Homo sapiens
cgctggggcccaaga

SEQ ID NO: 503689 - DNA, 15 bp, Homo sapiens
gcgctggggcccaag

SEQ ID NO: 503690 - DNA, 15 bp, Homo sapiens
agcgctggggcccaa

SEQ ID NO: 503691 - DNA, 15 bp, Homo sapiens
tagcgctggggccca

SEQ ID NO: 503692 - DNA, 15 bp, Homo sapiens
ctagcgctggggccc

SEQ ID NO: 503693 - DNA, 15 bp, Homo sapiens
cctagcgctggggcc

SEQ ID NO: 503694 - DNA, 15 bp, Homo sapiens
gcctagcgctggggc

SEQ ID NO: 503695 - DNA, 15 bp, Homo sapiens
agcctagcgctgggg

SEQ ID NO: 503696 - DNA, 15 bp, Homo sapiens
cagcctagcgctggg

SEQ ID NO: 503697 - DNA, 15 bp, Homo sapiens
gcagcctagcgctgg

SEQ ID NO: 503698 - DNA, 15 bp, Homo sapiens
ggcagcctagcgctg

SEQ ID NO: 503699 - DNA, 15 bp, Homo sapiens
aggcagcctagcgct

SEQ ID NO: 503700 - DNA, 15 bp, Homo sapiens
caggcagcctagcgc

SEQ ID NO: 503701 - DNA, 15 bp, Homo sapiens
ccaggcagcctagcg

SEQ ID NO: 503702 - DNA, 15 bp, Homo sapiens
cccaggcagcctagc

SEQ ID NO: 503703 - DNA, 15 bp, Homo sapiens
acccaggcagcctag

SEQ ID NO: 503704 - DNA, 15 bp, Homo sapiens
gacccaggcagccta

SEQ ID NO: 503705 - DNA, 15 bp, Homo sapiens
tgacccaggcagcct

SEQ ID NO: 503706 - DNA, 15 bp, Homo sapiens
ctgacccaggcagcc

SEQ ID NO: 503707 - DNA, 15 bp, Homo sapiens
cctgacccaggcagc

SEQ ID NO: 503708 - DNA, 15 bp, Homo sapiens
tcctgacccaggcag

SEQ ID NO: 503709 - DNA, 15 bp, Homo sapiens
ctcctgacccaggca

SEQ ID NO: 503710 - DNA, 15 bp, Homo sapiens
cctcctgacccaggc

SEQ ID NO: 503711 - DNA, 15 bp, Homo sapiens
ccctcctgacccagg

SEQ ID NO: 503712 - DNA, 15 bp, Homo sapiens
gccctcctgacccag

SEQ ID NO: 503713 - DNA, 15 bp, Homo sapiens
cgccctcctgaccca

SEQ ID NO: 503714 - DNA, 15 bp, Homo sapiens
gcgccctcctgaccc

SEQ ID NO: 503715 - DNA, 15 bp, Homo sapiens
ggcgccctcctgacc

SEQ ID NO: 503716 - DNA, 15 bp, Homo sapiens
cggcgccctcctgac

SEQ ID NO: 503717 - DNA, 15 bp, Homo sapiens
acggcgccctcctga

SEQ ID NO: 503718 - DNA, 15 bp, Homo sapiens
gacggcgccctcctg

SEQ ID NO: 503719 - DNA, 15 bp, Homo sapiens
cgacggcgccctcct

SEQ ID NO: 503720 - DNA, 15 bp, Homo sapiens
ccgacggcgccctcc

SEQ ID NO: 503721 - DNA, 15 bp, Homo sapiens
accgacggcgccctc

SEQ ID NO: 503722 - DNA, 15 bp, Homo sapiens
aaccgacggcgccct

SEQ ID NO: 503723 - DNA, 15 bp, Homo sapiens
caaccgacggcgccc

SEQ ID NO: 503724 - DNA, 15 bp, Homo sapiens
ccaaccgacggcgcc

SEQ ID NO: 503725 - DNA, 15 bp, Homo sapiens
cccaaccgacggcgc

SEQ ID NO: 503726 - DNA, 15 bp, Homo sapiens
ccccaaccgacggcg

SEQ ID NO: 503727 - DNA, 15 bp, Homo sapiens
gccccaaccgacggc

SEQ ID NO: 503728 - DNA, 15 bp, Homo sapiens
cgccccaaccgacgg

SEQ ID NO: 503729 - DNA, 15 bp, Homo sapiens
ccgccccaaccgacg

SEQ ID NO: 503730 - DNA, 15 bp, Homo sapiens
cccgccccaaccgac

SEQ ID NO: 503731 - DNA, 15 bp, Homo sapiens
gcccgccccaaccga

SEQ ID NO: 503732 - DNA, 15 bp, Homo sapiens
ggcccgccccaaccg

SEQ ID NO: 503733 - DNA, 15 bp, Homo sapiens
cggcccgccccaacc

SEQ ID NO: 503734 - DNA, 15 bp, Homo sapiens
ccggcccgccccaac

SEQ ID NO: 503735 - DNA, 15 bp, Homo sapiens
cccggcccgccccaa

SEQ ID NO: 503736 - DNA, 15 bp, Homo sapiens
gcccggcccgcccca

SEQ ID NO: 503737 - DNA, 15 bp, Homo sapiens
cgcccggcccgcccc

SEQ ID NO: 503738 - DNA, 15 bp, Homo sapiens
ccgcccggcccgccc

SEQ ID NO: 503739 - DNA, 15 bp, Homo sapiens
cccgcccggcccgcc

SEQ ID NO: 503740 - DNA, 15 bp, Homo sapiens
gcccgcccggcccgc

SEQ ID NO: 503741 - DNA, 15 bp, Homo sapiens
ggcccgcccggcccg

SEQ ID NO: 503742 - DNA, 15 bp, Homo sapiens
tggcccgcccggccc

SEQ ID NO: 503743 - DNA, 15 bp, Homo sapiens
ttggcccgcccggcc

SEQ ID NO: 503744 - DNA, 15 bp, Homo sapiens
attggcccgcccggc

SEQ ID NO: 503745 - DNA, 15 bp, Homo sapiens
cattggcccgcccgg

SEQ ID NO: 503746 - DNA, 15 bp, Homo sapiens
ccattggcccgcccg

SEQ ID NO: 503747 - DNA, 15 bp, Homo sapiens
gccattggcccgccc

SEQ ID NO: 503748 - DNA, 15 bp, Homo sapiens
cgccattggcccgcc

SEQ ID NO: 503749 - DNA, 15 bp, Homo sapiens
gcgccattggcccgc

SEQ ID NO: 503750 - DNA, 15 bp, Homo sapiens
cgcgccattggcccg

SEQ ID NO: 503751 - DNA, 15 bp, Homo sapiens
ccgcgccattggccc

SEQ ID NO: 503752 - DNA, 15 bp, Homo sapiens
tccgcgccattggcc

SEQ ID NO: 503753 - DNA, 15 bp, Homo sapiens
ttccgcgccattggc

SEQ ID NO: 503754 - DNA, 15 bp, Homo sapiens
tttccgcgccattgg

SEQ ID NO: 503755 - DNA, 15 bp, Homo sapiens
ttttccgcgccattg

SEQ ID NO: 503756 - DNA, 15 bp, Homo sapiens
gttttccgcgccatt

SEQ ID NO: 503757 - DNA, 15 bp, Homo sapiens
tgttttccgcgccat

SEQ ID NO: 503758 - DNA, 15 bp, Homo sapiens
ctgttttccgcgcca

SEQ ID NO: 503759 - DNA, 15 bp, Homo sapiens
cctgttttccgcgcc

SEQ ID NO: 503760 - DNA, 15 bp, Homo sapiens
ccctgttttccgcgc

SEQ ID NO: 503761 - DNA, 15 bp, Homo sapiens
cccctgttttccgcg

SEQ ID NO: 503762 - DNA, 15 bp, Homo sapiens
acccctgttttccgc

SEQ ID NO: 503763 - DNA, 15 bp, Homo sapiens
cacccctgttttccg

SEQ ID NO: 503764 - DNA, 15 bp, Homo sapiens
ccacccctgttttcc

SEQ ID NO: 503765 - DNA, 15 bp, Homo sapiens
gccacccctgttttc

SEQ ID NO: 503766 - DNA, 15 bp, Homo sapiens
ggccacccctgtttt

SEQ ID NO: 503767 - DNA, 15 bp, Homo sapiens
aggccacccctgttt

SEQ ID NO: 503768 - DNA, 15 bp, Homo sapiens
caggccacccctgtt

SEQ ID NO: 503769 - DNA, 15 bp, Homo sapiens
ccaggccacccctgt

SEQ ID NO: 503770 - DNA, 15 bp, Homo sapiens
gccaggccacccctg

SEQ ID NO: 503771 - DNA, 15 bp, Homo sapiens
agccaggccacccct

SEQ ID NO: 503772 - DNA, 15 bp, Homo sapiens
gagccaggccacccc

SEQ ID NO: 503773 - DNA, 15 bp, Homo sapiens
cgagccaggccaccc

SEQ ID NO: 503774 - DNA, 15 bp, Homo sapiens
ccgagccaggccacc

SEQ ID NO: 503775 - DNA, 15 bp, Homo sapiens
gccgagccaggccac

SEQ ID NO: 503776 - DNA, 15 bp, Homo sapiens
ggccgagccaggcca

SEQ ID NO: 503777 - DNA, 15 bp, Homo sapiens
aggccgagccaggcc

SEQ ID NO: 503778 - DNA, 15 bp, Homo sapiens
caggccgagccaggc

SEQ ID NO: 503779 - DNA, 15 bp, Homo sapiens
ccaggccgagccagg

SEQ ID NO: 503780 - DNA, 15 bp, Homo sapiens
gccaggccgagccag

SEQ ID NO: 503781 - DNA, 15 bp, Homo sapiens
ggccaggccgagcca

SEQ ID NO: 503782 - DNA, 15 bp, Homo sapiens
gggccaggccgagcc

SEQ ID NO: 503783 - DNA, 15 bp, Homo sapiens
ggggccaggccgagc

SEQ ID NO: 503784 - DNA, 15 bp, Homo sapiens
cggggccaggccgag

SEQ ID NO: 503785 - DNA, 15 bp, Homo sapiens
ccggggccaggccga

SEQ ID NO: 503786 - DNA, 15 bp, Homo sapiens
gccggggccaggccg

SEQ ID NO: 503787 - DNA, 15 bp, Homo sapiens
ggccggggccaggcc

SEQ ID NO: 503788 - DNA, 15 bp, Homo sapiens
cggccggggccaggc

SEQ ID NO: 503789 - DNA, 15 bp, Homo sapiens
tcggccggggccagg

SEQ ID NO: 503790 - DNA, 15 bp, Homo sapiens
gtcggccggggccag

SEQ ID NO: 503791 - DNA, 15 bp, Homo sapiens
cgtcggccggggcca

SEQ ID NO: 503792 - DNA, 15 bp, Homo sapiens
gcgtcggccggggcc

SEQ ID NO: 503793 - DNA, 15 bp, Homo sapiens
agcgtcggccggggc

SEQ ID NO: 503794 - DNA, 15 bp, Homo sapiens
cagcgtcggccgggg

SEQ ID NO: 503795 - DNA, 15 bp, Homo sapiens
acagcgtcggccggg

SEQ ID NO: 503796 - DNA, 15 bp, Homo sapiens
cacagcgtcggccgg

SEQ ID NO: 503797 - DNA, 15 bp, Homo sapiens
gcacagcgtcggccg

SEQ ID NO: 503798 - DNA, 15 bp, Homo sapiens
cgcacagcgtcggcc

SEQ ID NO: 503799 - DNA, 15 bp, Homo sapiens
acgcacagcgtcggc

SEQ ID NO: 503800 - DNA, 15 bp, Homo sapiens
aacgcacagcgtcgg

SEQ ID NO: 503801 - DNA, 15 bp, Homo sapiens
aaacgcacagcgtcg

SEQ ID NO: 503802 - DNA, 15 bp, Homo sapiens
caaacgcacagcgtc

SEQ ID NO: 503803 - DNA, 15 bp, Homo sapiens
acaaacgcacagcgt

SEQ ID NO: 503804 - DNA, 15 bp, Homo sapiens
gacaaacgcacagcg

SEQ ID NO: 503805 - DNA, 15 bp, Homo sapiens
cgacaaacgcacagc

SEQ ID NO: 503806 - DNA, 15 bp, Homo sapiens
gcgacaaacgcacag

SEQ ID NO: 503807 - DNA, 15 bp, Homo sapiens
agcgacaaacgcaca

SEQ ID NO: 503808 - DNA, 15 bp, Homo sapiens
aagcgacaaacgcac

SEQ ID NO: 503809 - DNA, 15 bp, Homo sapiens
taagcgacaaacgca

SEQ ID NO: 503810 - DNA, 15 bp, Homo sapiens
gtaagcgacaaacgc

SEQ ID NO: 503811 - DNA, 15 bp, Homo sapiens
tgtaagcgacaaacg

SEQ ID NO: 503812 - DNA, 15 bp, Homo sapiens
ctgtaagcgacaaac

SEQ ID NO: 503813 - DNA, 15 bp, Homo sapiens
actgtaagcgacaaa

SEQ ID NO: 503814 - DNA, 15 bp, Homo sapiens
gactgtaagcgacaa

SEQ ID NO: 503815 - DNA, 15 bp, Homo sapiens
agactgtaagcgaca

SEQ ID NO: 503816 - DNA, 15 bp, Homo sapiens
gagactgtaagcgac

SEQ ID NO: 503817 - DNA, 15 bp, Homo sapiens
ggagactgtaagcga

SEQ ID NO: 503818 - DNA, 15 bp, Homo sapiens
gggagactgtaagcg

SEQ ID NO: 503819 - DNA, 15 bp, Homo sapiens
cgggagactgtaagc

SEQ ID NO: 503820 - DNA, 15 bp, Homo sapiens
gcgggagactgtaag

SEQ ID NO: 503821 - DNA, 15 bp, Homo sapiens
agcgggagactgtaa

SEQ ID NO: 503822 - DNA, 15 bp, Homo sapiens
aagcgggagactgta

SEQ ID NO: 503823 - DNA, 15 bp, Homo sapiens
gaagcgggagactgt

SEQ ID NO: 503824 - DNA, 15 bp, Homo sapiens
tgaagcgggagactg

SEQ ID NO: 503825 - DNA, 15 bp, Homo sapiens
atgaagcgggagact

SEQ ID NO: 503826 - DNA, 15 bp, Homo sapiens
catgaagcgggagac

SEQ ID NO: 503827 - DNA, 15 bp, Homo sapiens
ccatgaagcgggaga

SEQ ID NO: 503828 - DNA, 15 bp, Homo sapiens
cccatgaagcgggag

SEQ ID NO: 503829 - DNA, 15 bp, Homo sapiens
gcccatgaagcggga

SEQ ID NO: 503830 - DNA, 15 bp, Homo sapiens
ggcccatgaagcggg

SEQ ID NO: 503831 - DNA, 15 bp, Homo sapiens
gggcccatgaagcgg

SEQ ID NO: 503832 - DNA, 15 bp, Homo sapiens
cgggcccatgaagcg

SEQ ID NO: 503833 - DNA, 15 bp, Homo sapiens
ccgggcccatgaagc

SEQ ID NO: 503834 - DNA, 15 bp, Homo sapiens
gccgggcccatgaag

SEQ ID NO: 503835 - DNA, 15 bp, Homo sapiens
cgccgggcccatgaa

SEQ ID NO: 503836 - DNA, 15 bp, Homo sapiens
tcgccgggcccatga

SEQ ID NO: 503837 - DNA, 15 bp, Homo sapiens
ctcgccgggcccatg

SEQ ID NO: 503838 - DNA, 15 bp, Homo sapiens
gctcgccgggcccat

SEQ ID NO: 503839 - DNA, 15 bp, Homo sapiens
cgctcgccgggccca

SEQ ID NO: 503840 - DNA, 15 bp, Homo sapiens
ccgctcgccgggccc

SEQ ID NO: 503841 - DNA, 15 bp, Homo sapiens
gccgctcgccgggcc

SEQ ID NO: 503842 - DNA, 15 bp, Homo sapiens
tgccgctcgccgggc

SEQ ID NO: 503843 - DNA, 15 bp, Homo sapiens
atgccgctcgccggg

SEQ ID NO: 503844 - DNA, 15 bp, Homo sapiens
catgccgctcgccgg

SEQ ID NO: 503845 - DNA, 15 bp, Homo sapiens
tcatgccgctcgccg

SEQ ID NO: 503846 - DNA, 15 bp, Homo sapiens
ttcatgccgctcgcc

SEQ ID NO: 503847 - DNA, 15 bp, Homo sapiens
gttcatgccgctcgc

SEQ ID NO: 503848 - DNA, 15 bp, Homo sapiens
tgttcatgccgctcg

SEQ ID NO: 503849 - DNA, 15 bp, Homo sapiens
atgttcatgccgctc

SEQ ID NO: 503850 - DNA, 15 bp, Homo sapiens
catgttcatgccgct

SEQ ID NO: 503851 - DNA, 15 bp, Homo sapiens
tcatgttcatgccgc

SEQ ID NO: 503852 - DNA, 15 bp, Homo sapiens
ctcatgttcatgccg

SEQ ID NO: 503853 - DNA, 15 bp, Homo sapiens
gctcatgttcatgcc

SEQ ID NO: 503854 - DNA, 15 bp, Homo sapiens
cgctcatgttcatgc

SEQ ID NO: 503855 - DNA, 15 bp, Homo sapiens
ccgctcatgttcatg

SEQ ID NO: 503856 - DNA, 15 bp, Homo sapiens
gccgctcatgttcat

SEQ ID NO: 503857 - DNA, 15 bp, Homo sapiens
tgccgctcatgttca

SEQ ID NO: 503858 - DNA, 15 bp, Homo sapiens
atgccgctcatgttc

SEQ ID NO: 503859 - DNA, 15 bp, Homo sapiens
catgccgctcatgtt

SEQ ID NO: 503860 - DNA, 15 bp, Homo sapiens
ccatgccgctcatgt

SEQ ID NO: 503861 - DNA, 15 bp, Homo sapiens
cccatgccgctcatg

SEQ ID NO: 503862 - DNA, 15 bp, Homo sapiens
gcccatgccgctcat

SEQ ID NO: 503863 - DNA, 15 bp, Homo sapiens
cgcccatgccgctca

SEQ ID NO: 503864 - DNA, 15 bp, Homo sapiens
ccgcccatgccgctc

SEQ ID NO: 503865 - DNA, 15 bp, Homo sapiens
gccgcccatgccgct

SEQ ID NO: 503866 - DNA, 15 bp, Homo sapiens
ggccgcccatgccgc

SEQ ID NO: 503867 - DNA, 15 bp, Homo sapiens
aggccgcccatgccg

SEQ ID NO: 503868 - DNA, 15 bp, Homo sapiens
caggccgcccatgcc

SEQ ID NO: 503869 - DNA, 15 bp, Homo sapiens
ccaggccgcccatgc

SEQ ID NO: 503870 - DNA, 15 bp, Homo sapiens
cccaggccgcccatg

SEQ ID NO: 503871 - DNA, 15 bp, Homo sapiens
gcccaggccgcccat

SEQ ID NO: 503872 - DNA, 15 bp, Homo sapiens
agcccaggccgccca

SEQ ID NO: 503873 - DNA, 15 bp, Homo sapiens
gagcccaggccgccc

SEQ ID NO: 503874 - DNA, 15 bp, Homo sapiens
cgagcccaggccgcc

SEQ ID NO: 503875 - DNA, 15 bp, Homo sapiens
gcgagcccaggccgc

SEQ ID NO: 503876 - DNA, 15 bp, Homo sapiens
agcgagcccaggccg

SEQ ID NO: 503877 - DNA, 15 bp, Homo sapiens
cagcgagcccaggcc

SEQ ID NO: 503878 - DNA, 15 bp, Homo sapiens
ccagcgagcccaggc

SEQ ID NO: 503879 - DNA, 15 bp, Homo sapiens
cccagcgagcccagg

SEQ ID NO: 503880 - DNA, 15 bp, Homo sapiens
ccccagcgagcccag

SEQ ID NO: 503881 - DNA, 15 bp, Homo sapiens
cccccagcgagccca

SEQ ID NO: 503882 - DNA, 15 bp, Homo sapiens
tcccccagcgagccc

SEQ ID NO: 503883 - DNA, 15 bp, Homo sapiens
gtcccccagcgagcc

SEQ ID NO: 503884 - DNA, 15 bp, Homo sapiens
cgtcccccagcgagc

SEQ ID NO: 503885 - DNA, 15 bp, Homo sapiens
acgtcccccagcgag

SEQ ID NO: 503886 - DNA, 15 bp, Homo sapiens
cacgtcccccagcga

SEQ ID NO: 503887 - DNA, 15 bp, Homo sapiens
tcacgtcccccagcg

SEQ ID NO: 503888 - DNA, 15 bp, Homo sapiens
ctcacgtcccccagc

SEQ ID NO: 503889 - DNA, 15 bp, Homo sapiens
gctcacgtcccccag

SEQ ID NO: 503890 - DNA, 15 bp, Homo sapiens
tgctcacgtccccca

SEQ ID NO: 503891 - DNA, 15 bp, Homo sapiens
ttgctcacgtccccc

SEQ ID NO: 503892 - DNA, 15 bp, Homo sapiens
cttgctcacgtcccc

SEQ ID NO: 503893 - DNA, 15 bp, Homo sapiens
tcttgctcacgtccc

SEQ ID NO: 503894 - DNA, 15 bp, Homo sapiens
ttcttgctcacgtcc

SEQ ID NO: 503895 - DNA, 15 bp, Homo sapiens
gttcttgctcacgtc

SEQ ID NO: 503896 - DNA, 15 bp, Homo sapiens
tgttcttgctcacgt

SEQ ID NO: 503897 - DNA, 15 bp, Homo sapiens
atgttcttgctcacg

SEQ ID NO: 503898 - DNA, 15 bp, Homo sapiens
catgttcttgctcac

SEQ ID NO: 503899 - DNA, 15 bp, Homo sapiens
ccatgttcttgctca

SEQ ID NO: 503900 - DNA, 15 bp, Homo sapiens
gccatgttcttgctc

SEQ ID NO: 503901 - DNA, 15 bp, Homo sapiens
ggccatgttcttgct

SEQ ID NO: 503902 - DNA, 15 bp, Homo sapiens
gggccatgttcttgc

SEQ ID NO: 503903 - DNA, 15 bp, Homo sapiens
ggggccatgttcttg

SEQ ID NO: 503904 - DNA, 15 bp, Homo sapiens
cggggccatgttctt

SEQ ID NO: 503905 - DNA, 15 bp, Homo sapiens
gcggggccatgttct

SEQ ID NO: 503906 - DNA, 15 bp, Homo sapiens
agcggggccatgttc

SEQ ID NO: 503907 - DNA, 15 bp, Homo sapiens
cagcggggccatgtt

SEQ ID NO: 503908 - DNA, 15 bp, Homo sapiens
gcagcggggccatgt

SEQ ID NO: 503909 - DNA, 15 bp, Homo sapiens
ggcagcggggccatg

SEQ ID NO: 503910 - DNA, 15 bp, Homo sapiens
tggcagcggggccat

SEQ ID NO: 503911 - DNA, 15 bp, Homo sapiens
ttggcagcggggcca

SEQ ID NO: 503912 - DNA, 15 bp, Homo sapiens
cttggcagcggggcc

SEQ ID NO: 503913 - DNA, 15 bp, Homo sapiens
gcttggcagcggggc

SEQ ID NO: 503914 - DNA, 15 bp, Homo sapiens
cgcttggcagcgggg

SEQ ID NO: 503915 - DNA, 15 bp, Homo sapiens
gcgcttggcagcggg

SEQ ID NO: 503916 - DNA, 15 bp, Homo sapiens
cgcgcttggcagcgg

SEQ ID NO: 503917 - DNA, 15 bp, Homo sapiens
gcgcgcttggcagcg

SEQ ID NO: 503918 - DNA, 15 bp, Homo sapiens
ggcgcgcttggcagc

SEQ ID NO: 503919 - DNA, 15 bp, Homo sapiens
cggcgcgcttggcag

SEQ ID NO: 503920 - DNA, 15 bp, Homo sapiens
gcggcgcgcttggca

SEQ ID NO: 503921 - DNA, 15 bp, Homo sapiens
cgcggcgcgcttggc

SEQ ID NO: 503922 - DNA, 15 bp, Homo sapiens
gcgcggcgcgcttgg

SEQ ID NO: 503923 - DNA, 15 bp, Homo sapiens
tgcgcggcgcgcttg

SEQ ID NO: 503924 - DNA, 15 bp, Homo sapiens
ctgcgcggcgcgctt

SEQ ID NO: 503925 - DNA, 15 bp, Homo sapiens
cctgcgcggcgcgct

SEQ ID NO: 503926 - DNA, 15 bp, Homo sapiens
tcctgcgcggcgcgc

SEQ ID NO: 503927 - DNA, 15 bp, Homo sapiens
ttcctgcgcggcgcg

SEQ ID NO: 503928 - DNA, 15 bp, Homo sapiens
cttcctgcgcggcgc

SEQ ID NO: 503929 - DNA, 15 bp, Homo sapiens
gcttcctgcgcggcg

SEQ ID NO: 503930 - DNA, 15 bp, Homo sapiens
cgcttcctgcgcggc

SEQ ID NO: 503931 - DNA, 15 bp, Homo sapiens
gcgcttcctgcgcgg

SEQ ID NO: 503932 - DNA, 15 bp, Homo sapiens
ggcgcttcctgcgcg

SEQ ID NO: 503933 - DNA, 15 bp, Homo sapiens
cggcgcttcctgcgc

SEQ ID NO: 503934 - DNA, 15 bp, Homo sapiens
ccggcgcttcctgcg

SEQ ID NO: 503935 - DNA, 15 bp, Homo sapiens
cccggcgcttcctgc

SEQ ID NO: 503936 - DNA, 15 bp, Homo sapiens
acccggcgcttcctg

SEQ ID NO: 503937 - DNA, 15 bp, Homo sapiens
cacccggcgcttcct

SEQ ID NO: 503938 - DNA, 15 bp, Homo sapiens
gcacccggcgcttcc

SEQ ID NO: 503939 - DNA, 15 bp, Homo sapiens
agcacccggcgcttc

SEQ ID NO: 503940 - DNA, 15 bp, Homo sapiens
gagcacccggcgctt

SEQ ID NO: 503941 - DNA, 15 bp, Homo sapiens
agagcacccggcgct

SEQ ID NO: 503942 - DNA, 15 bp, Homo sapiens
aagagcacccggcgc

SEQ ID NO: 503943 - DNA, 15 bp, Homo sapiens
gaagagcacccggcg

SEQ ID NO: 503944 - DNA, 15 bp, Homo sapiens
agaagagcacccggc

SEQ ID NO: 503945 - DNA, 15 bp, Homo sapiens
gagaagagcacccgg

SEQ ID NO: 503946 - DNA, 15 bp, Homo sapiens
cgagaagagcacccg

SEQ ID NO: 503947 - DNA, 15 bp, Homo sapiens
gcgagaagagcaccc

SEQ ID NO: 503948 - DNA, 15 bp, Homo sapiens
tgcgagaagagcacc

SEQ ID NO: 503949 - DNA, 15 bp, Homo sapiens
ctgcgagaagagcac

SEQ ID NO: 503950 - DNA, 15 bp, Homo sapiens
cctgcgagaagagca

SEQ ID NO: 503951 - DNA, 15 bp, Homo sapiens
gcctgcgagaagagc

SEQ ID NO: 503952 - DNA, 15 bp, Homo sapiens
cgcctgcgagaagag

SEQ ID NO: 503953 - DNA, 15 bp, Homo sapiens
gcgcctgcgagaaga

SEQ ID NO: 503954 - DNA, 15 bp, Homo sapiens
tgcgcctgcgagaag

SEQ ID NO: 503955 - DNA, 15 bp, Homo sapiens
ctgcgcctgcgagaa

SEQ ID NO: 503956 - DNA, 15 bp, Homo sapiens
cctgcgcctgcgaga

SEQ ID NO: 503957 - DNA, 15 bp, Homo sapiens
acctgcgcctgcgag

SEQ ID NO: 503958 - DNA, 15 bp, Homo sapiens
cacctgcgcctgcga

SEQ ID NO: 503959 - DNA, 15 bp, Homo sapiens
acacctgcgcctgcg

SEQ ID NO: 503960 - DNA, 15 bp, Homo sapiens
tacacctgcgcctgc

SEQ ID NO: 503961 - DNA, 15 bp, Homo sapiens
gtacacctgcgcctg

SEQ ID NO: 503962 - DNA, 15 bp, Homo sapiens
cgtacacctgcgcct

SEQ ID NO: 503963 - DNA, 15 bp, Homo sapiens
tcgtacacctgcgcc

SEQ ID NO: 503964 - DNA, 15 bp, Homo sapiens
ctcgtacacctgcgc

SEQ ID NO: 503965 - DNA, 15 bp, Homo sapiens
gctcgtacacctgcg

SEQ ID NO: 503966 - DNA, 15 bp, Homo sapiens
agctcgtacacctgc

SEQ ID NO: 503967 - DNA, 15 bp, Homo sapiens
cagctcgtacacctg

SEQ ID NO: 503968 - DNA, 15 bp, Homo sapiens
ccagctcgtacacct

SEQ ID NO: 503969 - DNA, 15 bp, Homo sapiens
tccagctcgtacacc

SEQ ID NO: 503970 - DNA, 15 bp, Homo sapiens
ctccagctcgtacac

SEQ ID NO: 503971 - DNA, 15 bp, Homo sapiens
gctccagctcgtaca

SEQ ID NO: 503972 - DNA, 15 bp, Homo sapiens
cgctccagctcgtac

SEQ ID NO: 503973 - DNA, 15 bp, Homo sapiens
tcgctccagctcgta

SEQ ID NO: 503974 - DNA, 15 bp, Homo sapiens
gtcgctccagctcgt

SEQ ID NO: 503975 - DNA, 15 bp, Homo sapiens
cgtcgctccagctcg

SEQ ID NO: 503976 - DNA, 15 bp, Homo sapiens
gcgtcgctccagctc

SEQ ID NO: 503977 - DNA, 15 bp, Homo sapiens
agcgtcgctccagct

SEQ ID NO: 503978 - DNA, 15 bp, Homo sapiens
aagcgtcgctccagc

SEQ ID NO: 503979 - DNA, 15 bp, Homo sapiens
gaagcgtcgctccag

SEQ ID NO: 503980 - DNA, 15 bp, Homo sapiens
tgaagcgtcgctcca

SEQ ID NO: 503981 - DNA, 15 bp, Homo sapiens
ttgaagcgtcgctcc

SEQ ID NO: 503982 - DNA, 15 bp, Homo sapiens
cttgaagcgtcgctc

SEQ ID NO: 503983 - DNA, 15 bp, Homo sapiens
gcttgaagcgtcgct

SEQ ID NO: 503984 - DNA, 15 bp, Homo sapiens
tgcttgaagcgtcgc

SEQ ID NO: 503985 - DNA, 15 bp, Homo sapiens
ttgcttgaagcgtcg

SEQ ID NO: 503986 - DNA, 15 bp, Homo sapiens
gttgcttgaagcgtc

SEQ ID NO: 503987 - DNA, 15 bp, Homo sapiens
tgttgcttgaagcgt

SEQ ID NO: 503988 - DNA, 15 bp, Homo sapiens
ctgttgcttgaagcg

SEQ ID NO: 503989 - DNA, 15 bp, Homo sapiens
tctgttgcttgaagc

SEQ ID NO: 503990 - DNA, 15 bp, Homo sapiens
ttctgttgcttgaag

SEQ ID NO: 503991 - DNA, 15 bp, Homo sapiens
cttctgttgcttgaa

SEQ ID NO: 503992 - DNA, 15 bp, Homo sapiens
acttctgttgcttga

SEQ ID NO: 503993 - DNA, 15 bp, Homo sapiens
tacttctgttgcttg

SEQ ID NO: 503994 - DNA, 15 bp, Homo sapiens
gtacttctgttgctt

SEQ ID NO: 503995 - DNA, 15 bp, Homo sapiens
ggtacttctgttgct

SEQ ID NO: 503996 - DNA, 15 bp, Homo sapiens
aggtacttctgttgc

SEQ ID NO: 503997 - DNA, 15 bp, Homo sapiens
caggtacttctgttg

SEQ ID NO: 503998 - DNA, 15 bp, Homo sapiens
acaggtacttctgtt

SEQ ID NO: 503999 - DNA, 15 bp, Homo sapiens
gacaggtacttctgt

SEQ ID NO: 504000 - DNA, 15 bp, Homo sapiens
cgacaggtacttctg

SEQ ID NO: 504001 - DNA, 15 bp, Homo sapiens
ccgacaggtacttct

SEQ ID NO: 504002 - DNA, 15 bp, Homo sapiens
gccgacaggtacttc

SEQ ID NO: 504003 - DNA, 15 bp, Homo sapiens
cgccgacaggtactt

SEQ ID NO: 504004 - DNA, 15 bp, Homo sapiens
gcgccgacaggtact

SEQ ID NO: 504005 - DNA, 15 bp, Homo sapiens
ggcgccgacaggtac

SEQ ID NO: 504006 - DNA, 15 bp, Homo sapiens
cggcgccgacaggta

SEQ ID NO: 504007 - DNA, 15 bp, Homo sapiens
ccggcgccgacaggt

SEQ ID NO: 504008 - DNA, 15 bp, Homo sapiens
tccggcgccgacagg

SEQ ID NO: 504009 - DNA, 15 bp, Homo sapiens
ctccggcgccgacag

SEQ ID NO: 504010 - DNA, 15 bp, Homo sapiens
gctccggcgccgaca

SEQ ID NO: 504011 - DNA, 15 bp, Homo sapiens
cgctccggcgccgac

SEQ ID NO: 504012 - DNA, 15 bp, Homo sapiens
gcgctccggcgccga

SEQ ID NO: 504013 - DNA, 15 bp, Homo sapiens
cgcgctccggcgccg

SEQ ID NO: 504014 - DNA, 15 bp, Homo sapiens
tcgcgctccggcgcc

SEQ ID NO: 504015 - DNA, 15 bp, Homo sapiens
ctcgcgctccggcgc

SEQ ID NO: 504016 - DNA, 15 bp, Homo sapiens
gctcgcgctccggcg

SEQ ID NO: 504017 - DNA, 15 bp, Homo sapiens
tgctcgcgctccggc

SEQ ID NO: 504018 - DNA, 15 bp, Homo sapiens
gtgctcgcgctccgg

SEQ ID NO: 504019 - DNA, 15 bp, Homo sapiens
ggtgctcgcgctccg

SEQ ID NO: 504020 - DNA, 15 bp, Homo sapiens
aggtgctcgcgctcc

SEQ ID NO: 504021 - DNA, 15 bp, Homo sapiens
caggtgctcgcgctc

SEQ ID NO: 504022 - DNA, 15 bp, Homo sapiens
ccaggtgctcgcgct

SEQ ID NO: 504023 - DNA, 15 bp, Homo sapiens
gccaggtgctcgcgc

SEQ ID NO: 504024 - DNA, 15 bp, Homo sapiens
ggccaggtgctcgcg

SEQ ID NO: 504025 - DNA, 15 bp, Homo sapiens
tggccaggtgctcgc

SEQ ID NO: 504026 - DNA, 15 bp, Homo sapiens
ctggccaggtgctcg

SEQ ID NO: 504027 - DNA, 15 bp, Homo sapiens
gctggccaggtgctc

SEQ ID NO: 504028 - DNA, 15 bp, Homo sapiens
tgctggccaggtgct

SEQ ID NO: 504029 - DNA, 15 bp, Homo sapiens
atgctggccaggtgc

SEQ ID NO: 504030 - DNA, 15 bp, Homo sapiens
catgctggccaggtg

SEQ ID NO: 504031 - DNA, 15 bp, Homo sapiens
tcatgctggccaggt

SEQ ID NO: 504032 - DNA, 15 bp, Homo sapiens
atcatgctggccagg

SEQ ID NO: 504033 - DNA, 15 bp, Homo sapiens
gatcatgctggccag

SEQ ID NO: 504034 - DNA, 15 bp, Homo sapiens
ggatcatgctggcca

SEQ ID NO: 504035 - DNA, 15 bp, Homo sapiens
tggatcatgctggcc

SEQ ID NO: 504036 - DNA, 15 bp, Homo sapiens
gtggatcatgctggc

SEQ ID NO: 504037 - DNA, 15 bp, Homo sapiens
ggtggatcatgctgg

SEQ ID NO: 504038 - DNA, 15 bp, Homo sapiens
aggtggatcatgctg

SEQ ID NO: 504039 - DNA, 15 bp, Homo sapiens
caggtggatcatgct

SEQ ID NO: 504040 - DNA, 15 bp, Homo sapiens
tcaggtggatcatgc

SEQ ID NO: 504041 - DNA, 15 bp, Homo sapiens
gtcaggtggatcatg

SEQ ID NO: 504042 - DNA, 15 bp, Homo sapiens
cgtcaggtggatcat

SEQ ID NO: 504043 - DNA, 15 bp, Homo sapiens
gcgtcaggtggatca

SEQ ID NO: 504044 - DNA, 15 bp, Homo sapiens
ggcgtcaggtggatc

SEQ ID NO: 504045 - DNA, 15 bp, Homo sapiens
gggcgtcaggtggat

SEQ ID NO: 504046 - DNA, 15 bp, Homo sapiens
tgggcgtcaggtgga

SEQ ID NO: 504047 - DNA, 15 bp, Homo sapiens
gtgggcgtcaggtgg

SEQ ID NO: 504048 - DNA, 15 bp, Homo sapiens
cgtgggcgtcaggtg

SEQ ID NO: 504049 - DNA, 15 bp, Homo sapiens
gcgtgggcgtcaggt

SEQ ID NO: 504050 - DNA, 15 bp, Homo sapiens
tgcgtgggcgtcagg

SEQ ID NO: 504051 - DNA, 15 bp, Homo sapiens
ctgcgtgggcgtcag

SEQ ID NO: 504052 - DNA, 15 bp, Homo sapiens
cctgcgtgggcgtca

SEQ ID NO: 504053 - DNA, 15 bp, Homo sapiens
acctgcgtgggcgtc

SEQ ID NO: 504054 - DNA, 15 bp, Homo sapiens
gacctgcgtgggcgt

SEQ ID NO: 504055 - DNA, 15 bp, Homo sapiens
tgacctgcgtgggcg

SEQ ID NO: 504056 - DNA, 15 bp, Homo sapiens
ttgacctgcgtgggc

SEQ ID NO: 504057 - DNA, 15 bp, Homo sapiens
cttgacctgcgtggg

SEQ ID NO: 504058 - DNA, 15 bp, Homo sapiens
tcttgacctgcgtgg

SEQ ID NO: 504059 - DNA, 15 bp, Homo sapiens
atcttgacctgcgtg

SEQ ID NO: 504060 - DNA, 15 bp, Homo sapiens
gatcttgacctgcgt

SEQ ID NO: 504061 - DNA, 15 bp, Homo sapiens
agatcttgacctgcg

SEQ ID NO: 504062 - DNA, 15 bp, Homo sapiens
cagatcttgacctgc

SEQ ID NO: 504063 - DNA, 15 bp, Homo sapiens
ccagatcttgacctg

SEQ ID NO: 504064 - DNA, 15 bp, Homo sapiens
accagatcttgacct

SEQ ID NO: 504065 - DNA, 15 bp, Homo sapiens
aaccagatcttgacc

SEQ ID NO: 504066 - DNA, 15 bp, Homo sapiens
gaaccagatcttgac

SEQ ID NO: 504067 - DNA, 15 bp, Homo sapiens
ggaaccagatcttga

SEQ ID NO: 504068 - DNA, 15 bp, Homo sapiens
tggaaccagatcttg

SEQ ID NO: 504069 - DNA, 15 bp, Homo sapiens
ctggaaccagatctt

SEQ ID NO: 504070 - DNA, 15 bp, Homo sapiens
tctggaaccagatct

SEQ ID NO: 504071 - DNA, 15 bp, Homo sapiens
ttctggaaccagatc

SEQ ID NO: 504072 - DNA, 15 bp, Homo sapiens
gttctggaaccagat

SEQ ID NO: 504073 - DNA, 15 bp, Homo sapiens
ggttctggaaccaga

SEQ ID NO: 504074 - DNA, 15 bp, Homo sapiens
tggttctggaaccag

SEQ ID NO: 504075 - DNA, 15 bp, Homo sapiens
gtggttctggaacca

SEQ ID NO: 504076 - DNA, 15 bp, Homo sapiens
ggtggttctggaacc

SEQ ID NO: 504077 - DNA, 15 bp, Homo sapiens
cggtggttctggaac

SEQ ID NO: 504078 - DNA, 15 bp, Homo sapiens
gcggtggttctggaa

SEQ ID NO: 504079 - DNA, 15 bp, Homo sapiens
agcggtggttctgga

SEQ ID NO: 504080 - DNA, 15 bp, Homo sapiens
tagcggtggttctgg

SEQ ID NO: 504081 - DNA, 15 bp, Homo sapiens
gtagcggtggttctg

SEQ ID NO: 504082 - DNA, 15 bp, Homo sapiens
tgtagcggtggttct

SEQ ID NO: 504083 - DNA, 15 bp, Homo sapiens
ttgtagcggtggttc

SEQ ID NO: 504084 - DNA, 15 bp, Homo sapiens
tttgtagcggtggtt

SEQ ID NO: 504085 - DNA, 15 bp, Homo sapiens
ttttgtagcggtggt

SEQ ID NO: 504086 - DNA, 15 bp, Homo sapiens
attttgtagcggtgg

SEQ ID NO: 504087 - DNA, 15 bp, Homo sapiens
cattttgtagcggtg

SEQ ID NO: 504088 - DNA, 15 bp, Homo sapiens
tcattttgtagcggt

SEQ ID NO: 504089 - DNA, 15 bp, Homo sapiens
ttcattttgtagcgg

SEQ ID NO: 504090 - DNA, 15 bp, Homo sapiens
cttcattttgtagcg

SEQ ID NO: 504091 - DNA, 15 bp, Homo sapiens
gcttcattttgtagc

SEQ ID NO: 504092 - DNA, 15 bp, Homo sapiens
cgcttcattttgtag

SEQ ID NO: 504093 - DNA, 15 bp, Homo sapiens
gcgcttcattttgta

SEQ ID NO: 504094 - DNA, 15 bp, Homo sapiens
ggcgcttcattttgt

SEQ ID NO: 504095 - DNA, 15 bp, Homo sapiens
tggcgcttcattttg

SEQ ID NO: 504096 - DNA, 15 bp, Homo sapiens
ctggcgcttcatttt

SEQ ID NO: 504097 - DNA, 15 bp, Homo sapiens
cctggcgcttcattt

SEQ ID NO: 504098 - DNA, 15 bp, Homo sapiens
gcctggcgcttcatt

SEQ ID NO: 504099 - DNA, 15 bp, Homo sapiens
ggcctggcgcttcat

SEQ ID NO: 504100 - DNA, 15 bp, Homo sapiens
tggcctggcgcttca

SEQ ID NO: 504101 - DNA, 15 bp, Homo sapiens
ttggcctggcgcttc

SEQ ID NO: 504102 - DNA, 15 bp, Homo sapiens
cttggcctggcgctt

SEQ ID NO: 504103 - DNA, 15 bp, Homo sapiens
ccttggcctggcgct

SEQ ID NO: 504104 - DNA, 15 bp, Homo sapiens
tccttggcctggcgc

SEQ ID NO: 504105 - DNA, 15 bp, Homo sapiens
gtccttggcctggcg

SEQ ID NO: 504106 - DNA, 15 bp, Homo sapiens
tgtccttggcctggc

SEQ ID NO: 504107 - DNA, 15 bp, Homo sapiens
ttgtccttggcctgg

SEQ ID NO: 504108 - DNA, 15 bp, Homo sapiens
cttgtccttggcctg

SEQ ID NO: 504109 - DNA, 15 bp, Homo sapiens
ccttgtccttggcct

SEQ ID NO: 504110 - DNA, 15 bp, Homo sapiens
gccttgtccttggcc

SEQ ID NO: 504111 - DNA, 15 bp, Homo sapiens
cgccttgtccttggc

SEQ ID NO: 504112 - DNA, 15 bp, Homo sapiens
ccgccttgtccttgg

SEQ ID NO: 504113 - DNA, 15 bp, Homo sapiens
gccgccttgtccttg

SEQ ID NO: 504114 - DNA, 15 bp, Homo sapiens
cgccgccttgtcctt

SEQ ID NO: 504115 - DNA, 15 bp, Homo sapiens
gcgccgccttgtcct

SEQ ID NO: 504116 - DNA, 15 bp, Homo sapiens
tgcgccgccttgtcc

SEQ ID NO: 504117 - DNA, 15 bp, Homo sapiens
ctgcgccgccttgtc

SEQ ID NO: 504118 - DNA, 15 bp, Homo sapiens
gctgcgccgccttgt

SEQ ID NO: 504119 - DNA, 15 bp, Homo sapiens
tgctgcgccgccttg

SEQ ID NO: 504120 - DNA, 15 bp, Homo sapiens
ctgctgcgccgcctt

SEQ ID NO: 504121 - DNA, 15 bp, Homo sapiens
gctgctgcgccgcct

SEQ ID NO: 504122 - DNA, 15 bp, Homo sapiens
tgctgctgcgccgcc

SEQ ID NO: 504123 - DNA, 15 bp, Homo sapiens
ttgctgctgcgccgc

SEQ ID NO: 504124 - DNA, 15 bp, Homo sapiens
gttgctgctgcgccg

SEQ ID NO: 504125 - DNA, 15 bp, Homo sapiens
agttgctgctgcgcc

SEQ ID NO: 504126 - DNA, 15 bp, Homo sapiens
cagttgctgctgcgc

SEQ ID NO: 504127 - DNA, 15 bp, Homo sapiens
gcagttgctgctgcg

SEQ ID NO: 504128 - DNA, 15 bp, Homo sapiens
tgcagttgctgctgc

SEQ ID NO: 504129 - DNA, 15 bp, Homo sapiens
ctgcagttgctgctg

SEQ ID NO: 504130 - DNA, 15 bp, Homo sapiens
gctgcagttgctgct

SEQ ID NO: 504131 - DNA, 15 bp, Homo sapiens
tgctgcagttgctgc

SEQ ID NO: 504132 - DNA, 15 bp, Homo sapiens
ctgctgcagttgctg

SEQ ID NO: 504133 - DNA, 15 bp, Homo sapiens
cctgctgcagttgct

SEQ ID NO: 504134 - DNA, 15 bp, Homo sapiens
tcctgctgcagttgc

SEQ ID NO: 504135 - DNA, 15 bp, Homo sapiens
gtcctgctgcagttg

SEQ ID NO: 504136 - DNA, 15 bp, Homo sapiens
tgtcctgctgcagtt

SEQ ID NO: 504137 - DNA, 15 bp, Homo sapiens
ctgtcctgctgcagt

SEQ ID NO: 504138 - DNA, 15 bp, Homo sapiens
gctgtcctgctgcag

SEQ ID NO: 504139 - DNA, 15 bp, Homo sapiens
cgctgtcctgctgca

SEQ ID NO: 504140 - DNA, 15 bp, Homo sapiens
ccgctgtcctgctgc

SEQ ID NO: 504141 - DNA, 15 bp, Homo sapiens
gccgctgtcctgctg

SEQ ID NO: 504142 - DNA, 15 bp, Homo sapiens
cgccgctgtcctgct

SEQ ID NO: 504143 - DNA, 15 bp, Homo sapiens
ccgccgctgtcctgc

SEQ ID NO: 504144 - DNA, 15 bp, Homo sapiens
gccgccgctgtcctg

SEQ ID NO: 504145 - DNA, 15 bp, Homo sapiens
cgccgccgctgtcct

SEQ ID NO: 504146 - DNA, 15 bp, Homo sapiens
ccgccgccgctgtcc

SEQ ID NO: 504147 - DNA, 15 bp, Homo sapiens
gccgccgccgctgtc

SEQ ID NO: 504148 - DNA, 15 bp, Homo sapiens
cgccgccgccgctgt

SEQ ID NO: 504149 - DNA, 15 bp, Homo sapiens
ccgccgccgccgctg

SEQ ID NO: 504150 - DNA, 15 bp, Homo sapiens
cccgccgccgccgct

SEQ ID NO: 504151 - DNA, 15 bp, Homo sapiens
ccccgccgccgccgc

SEQ ID NO: 504152 - DNA, 15 bp, Homo sapiens
cccccgccgccgccg

SEQ ID NO: 504153 - DNA, 15 bp, Homo sapiens
gcccccgccgccgcc

SEQ ID NO: 504154 - DNA, 15 bp, Homo sapiens
cgcccccgccgccgc

SEQ ID NO: 504155 - DNA, 15 bp, Homo sapiens
ccgcccccgccgccg

SEQ ID NO: 504156 - DNA, 15 bp, Homo sapiens
gccgcccccgccgcc

SEQ ID NO: 504157 - DNA, 15 bp, Homo sapiens
cgccgcccccgccgc

SEQ ID NO: 504158 - DNA, 15 bp, Homo sapiens
ccgccgcccccgccg

SEQ ID NO: 504159 - DNA, 15 bp, Homo sapiens
cccgccgcccccgcc

SEQ ID NO: 504160 - DNA, 15 bp, Homo sapiens
ccccgccgcccccgc

SEQ ID NO: 504161 - DNA, 15 bp, Homo sapiens
cccccgccgcccccg

SEQ ID NO: 504162 - DNA, 15 bp, Homo sapiens
gcccccgccgccccc

SEQ ID NO: 504163 - DNA, 15 bp, Homo sapiens
tgcccccgccgcccc

SEQ ID NO: 504164 - DNA, 15 bp, Homo sapiens
gtgcccccgccgccc

SEQ ID NO: 504165 - DNA, 15 bp, Homo sapiens
ggtgcccccgccgcc

SEQ ID NO: 504166 - DNA, 15 bp, Homo sapiens
cggtgcccccgccgc

SEQ ID NO: 504167 - DNA, 15 bp, Homo sapiens
ccggtgcccccgccg

SEQ ID NO: 504168 - DNA, 15 bp, Homo sapiens
cccggtgcccccgcc

SEQ ID NO: 504169 - DNA, 15 bp, Homo sapiens
acccggtgcccccgc

SEQ ID NO: 504170 - DNA, 15 bp, Homo sapiens
cacccggtgcccccg

SEQ ID NO: 504171 - DNA, 15 bp, Homo sapiens
gcacccggtgccccc

SEQ ID NO: 504172 - DNA, 15 bp, Homo sapiens
ggcacccggtgcccc

SEQ ID NO: 504173 - DNA, 15 bp, Homo sapiens
gggcacccggtgccc

SEQ ID NO: 504174 - DNA, 15 bp, Homo sapiens
cgggcacccggtgcc

SEQ ID NO: 504175 - DNA, 15 bp, Homo sapiens
gcgggcacccggtgc

SEQ ID NO: 504176 - DNA, 15 bp, Homo sapiens
tgcgggcacccggtg

SEQ ID NO: 504177 - DNA, 15 bp, Homo sapiens
ctgcgggcacccggt

SEQ ID NO: 504178 - DNA, 15 bp, Homo sapiens
gctgcgggcacccgg

SEQ ID NO: 504179 - DNA, 15 bp, Homo sapiens
tgctgcgggcacccg

SEQ ID NO: 504180 - DNA, 15 bp, Homo sapiens
ctgctgcgggcaccc

SEQ ID NO: 504181 - DNA, 15 bp, Homo sapiens
gctgctgcgggcacc

SEQ ID NO: 504182 - DNA, 15 bp, Homo sapiens
tgctgctgcgggcac

SEQ ID NO: 504183 - DNA, 15 bp, Homo sapiens
ttgctgctgcgggca

SEQ ID NO: 504184 - DNA, 15 bp, Homo sapiens
gttgctgctgcgggc

SEQ ID NO: 504185 - DNA, 15 bp, Homo sapiens
tgttgctgctgcggg

SEQ ID NO: 504186 - DNA, 15 bp, Homo sapiens
ctgttgctgctgcgg

SEQ ID NO: 504187 - DNA, 15 bp, Homo sapiens
cctgttgctgctgcg

SEQ ID NO: 504188 - DNA, 15 bp, Homo sapiens
gcctgttgctgctgc

SEQ ID NO: 504189 - DNA, 15 bp, Homo sapiens
agcctgttgctgctg

SEQ ID NO: 504190 - DNA, 15 bp, Homo sapiens
gagcctgttgctgct

SEQ ID NO: 504191 - DNA, 15 bp, Homo sapiens
tgagcctgttgctgc

SEQ ID NO: 504192 - DNA, 15 bp, Homo sapiens
ctgagcctgttgctg

SEQ ID NO: 504193 - DNA, 15 bp, Homo sapiens
gctgagcctgttgct

SEQ ID NO: 504194 - DNA, 15 bp, Homo sapiens
tgctgagcctgttgc

SEQ ID NO: 504195 - DNA, 15 bp, Homo sapiens
ctgctgagcctgttg

SEQ ID NO: 504196 - DNA, 15 bp, Homo sapiens
gctgctgagcctgtt

SEQ ID NO: 504197 - DNA, 15 bp, Homo sapiens
tgctgctgagcctgt

SEQ ID NO: 504198 - DNA, 15 bp, Homo sapiens
ctgctgctgagcctg

SEQ ID NO: 504199 - DNA, 15 bp, Homo sapiens
actgctgctgagcct

SEQ ID NO: 504200 - DNA, 15 bp, Homo sapiens
gactgctgctgagcc

SEQ ID NO: 504201 - DNA, 15 bp, Homo sapiens
cgactgctgctgagc

SEQ ID NO: 504202 - DNA, 15 bp, Homo sapiens
gcgactgctgctgag

SEQ ID NO: 504203 - DNA, 15 bp, Homo sapiens
ggcgactgctgctga

SEQ ID NO: 504204 - DNA, 15 bp, Homo sapiens
cggcgactgctgctg

SEQ ID NO: 504205 - DNA, 15 bp, Homo sapiens
gcggcgactgctgct

SEQ ID NO: 504206 - DNA, 15 bp, Homo sapiens
cgcggcgactgctgc

SEQ ID NO: 504207 - DNA, 15 bp, Homo sapiens
tcgcggcgactgctg

SEQ ID NO: 504208 - DNA, 15 bp, Homo sapiens
gtcgcggcgactgct

SEQ ID NO: 504209 - DNA, 15 bp, Homo sapiens
cgtcgcggcgactgc

SEQ ID NO: 504210 - DNA, 15 bp, Homo sapiens
gcgtcgcggcgactg

SEQ ID NO: 504211 - DNA, 15 bp, Homo sapiens
cgcgtcgcggcgact

SEQ ID NO: 504212 - DNA, 15 bp, Homo sapiens
acgcgtcgcggcgac

SEQ ID NO: 504213 - DNA, 15 bp, Homo sapiens
cacgcgtcgcggcga

SEQ ID NO: 504214 - DNA, 15 bp, Homo sapiens
ccacgcgtcgcggcg

SEQ ID NO: 504215 - DNA, 15 bp, Homo sapiens
gccacgcgtcgcggc

SEQ ID NO: 504216 - DNA, 15 bp, Homo sapiens
cgccacgcgtcgcgg

SEQ ID NO: 504217 - DNA, 15 bp, Homo sapiens
ccgccacgcgtcgcg

SEQ ID NO: 504218 - DNA, 15 bp, Homo sapiens
accgccacgcgtcgc

SEQ ID NO: 504219 - DNA, 15 bp, Homo sapiens
caccgccacgcgtcg

SEQ ID NO: 504220 - DNA, 15 bp, Homo sapiens
gcaccgccacgcgtc

SEQ ID NO: 504221 - DNA, 15 bp, Homo sapiens
ggcaccgccacgcgt

SEQ ID NO: 504222 - DNA, 15 bp, Homo sapiens
cggcaccgccacgcg

SEQ ID NO: 504223 - DNA, 15 bp, Homo sapiens
ccggcaccgccacgc

SEQ ID NO: 504224 - DNA, 15 bp, Homo sapiens
accggcaccgccacg

SEQ ID NO: 504225 - DNA, 15 bp, Homo sapiens
gaccggcaccgccac

SEQ ID NO: 504226 - DNA, 15 bp, Homo sapiens
ggaccggcaccgcca

SEQ ID NO: 504227 - DNA, 15 bp, Homo sapiens
aggaccggcaccgcc

SEQ ID NO: 504228 - DNA, 15 bp, Homo sapiens
caggaccggcaccgc

SEQ ID NO: 504229 - DNA, 15 bp, Homo sapiens
ccaggaccggcaccg

SEQ ID NO: 504230 - DNA, 15 bp, Homo sapiens
accaggaccggcacc

SEQ ID NO: 504231 - DNA, 15 bp, Homo sapiens
caccaggaccggcac

SEQ ID NO: 504232 - DNA, 15 bp, Homo sapiens
tcaccaggaccggca

SEQ ID NO: 504233 - DNA, 15 bp, Homo sapiens
ttcaccaggaccggc

SEQ ID NO: 504234 - DNA, 15 bp, Homo sapiens
tttcaccaggaccgg

SEQ ID NO: 504235 - DNA, 15 bp, Homo sapiens
ctttcaccaggaccg

SEQ ID NO: 504236 - DNA, 15 bp, Homo sapiens
tctttcaccaggacc

SEQ ID NO: 504237 - DNA, 15 bp, Homo sapiens
gtctttcaccaggac

SEQ ID NO: 504238 - DNA, 15 bp, Homo sapiens
cgtctttcaccagga

SEQ ID NO: 504239 - DNA, 15 bp, Homo sapiens
ccgtctttcaccagg

SEQ ID NO: 504240 - DNA, 15 bp, Homo sapiens
gccgtctttcaccag

SEQ ID NO: 504241 - DNA, 15 bp, Homo sapiens
tgccgtctttcacca

SEQ ID NO: 504242 - DNA, 15 bp, Homo sapiens
ttgccgtctttcacc

SEQ ID NO: 504243 - DNA, 15 bp, Homo sapiens
tttgccgtctttcac

SEQ ID NO: 504244 - DNA, 15 bp, Homo sapiens
gtttgccgtctttca

SEQ ID NO: 504245 - DNA, 15 bp, Homo sapiens
ggtttgccgtctttc

SEQ ID NO: 504246 - DNA, 15 bp, Homo sapiens
cggtttgccgtcttt

SEQ ID NO: 504247 - DNA, 15 bp, Homo sapiens
acggtttgccgtctt

SEQ ID NO: 504248 - DNA, 15 bp, Homo sapiens
cacggtttgccgtct

SEQ ID NO: 504249 - DNA, 15 bp, Homo sapiens
gcacggtttgccgtc

SEQ ID NO: 504250 - DNA, 15 bp, Homo sapiens
ggcacggtttgccgt

SEQ ID NO: 504251 - DNA, 15 bp, Homo sapiens
tggcacggtttgccg

SEQ ID NO: 504252 - DNA, 15 bp, Homo sapiens
ctggcacggtttgcc

SEQ ID NO: 504253 - DNA, 15 bp, Homo sapiens
cctggcacggtttgc

SEQ ID NO: 504254 - DNA, 15 bp, Homo sapiens
gcctggcacggtttg

SEQ ID NO: 504255 - DNA, 15 bp, Homo sapiens
cgcctggcacggttt

SEQ ID NO: 504256 - DNA, 15 bp, Homo sapiens
ccgcctggcacggtt

SEQ ID NO: 504257 - DNA, 15 bp, Homo sapiens
cccgcctggcacggt

SEQ ID NO: 504258 - DNA, 15 bp, Homo sapiens
acccgcctggcacgg

SEQ ID NO: 504259 - DNA, 15 bp, Homo sapiens
cacccgcctggcacg

SEQ ID NO: 504260 - DNA, 15 bp, Homo sapiens
gcacccgcctggcac

SEQ ID NO: 504261 - DNA, 15 bp, Homo sapiens
ggcacccgcctggca

SEQ ID NO: 504262 - DNA, 15 bp, Homo sapiens
gggcacccgcctggc

SEQ ID NO: 504263 - DNA, 15 bp, Homo sapiens
ggggcacccgcctgg

SEQ ID NO: 504264 - DNA, 15 bp, Homo sapiens
gggggcacccgcctg

SEQ ID NO: 504265 - DNA, 15 bp, Homo sapiens
cgggggcacccgcct

SEQ ID NO: 504266 - DNA, 15 bp, Homo sapiens
gcgggggcacccgcc

SEQ ID NO: 504267 - DNA, 15 bp, Homo sapiens
cgcgggggcacccgc

SEQ ID NO: 504268 - DNA, 15 bp, Homo sapiens
gcgcgggggcacccg

SEQ ID NO: 504269 - DNA, 15 bp, Homo sapiens
ggcgcgggggcaccc

SEQ ID NO: 504270 - DNA, 15 bp, Homo sapiens
cggcgcgggggcacc

SEQ ID NO: 504271 - DNA, 15 bp, Homo sapiens
ccggcgcgggggcac

SEQ ID NO: 504272 - DNA, 15 bp, Homo sapiens
cccggcgcgggggca

SEQ ID NO: 504273 - DNA, 15 bp, Homo sapiens
gcccggcgcgggggc

SEQ ID NO: 504274 - DNA, 15 bp, Homo sapiens
cgcccggcgcggggg

SEQ ID NO: 504275 - DNA, 15 bp, Homo sapiens
gcgcccggcgcgggg

SEQ ID NO: 504276 - DNA, 15 bp, Homo sapiens
ggcgcccggcgcggg

SEQ ID NO: 504277 - DNA, 15 bp, Homo sapiens
cggcgcccggcgcgg

SEQ ID NO: 504278 - DNA, 15 bp, Homo sapiens
gcggcgcccggcgcg

SEQ ID NO: 504279 - DNA, 15 bp, Homo sapiens
ggcggcgcccggcgc

SEQ ID NO: 504280 - DNA, 15 bp, Homo sapiens
tggcggcgcccggcg

SEQ ID NO: 504281 - DNA, 15 bp, Homo sapiens
ctggcggcgcccggc

SEQ ID NO: 504282 - DNA, 15 bp, Homo sapiens
gctggcggcgcccgg

SEQ ID NO: 504283 - DNA, 15 bp, Homo sapiens
ggctggcggcgcccg

SEQ ID NO: 504284 - DNA, 15 bp, Homo sapiens
aggctggcggcgccc

SEQ ID NO: 504285 - DNA, 15 bp, Homo sapiens
taggctggcggcgcc

SEQ ID NO: 504286 - DNA, 15 bp, Homo sapiens
gtaggctggcggcgc

SEQ ID NO: 504287 - DNA, 15 bp, Homo sapiens
tgtaggctggcggcg

SEQ ID NO: 504288 - DNA, 15 bp, Homo sapiens
ttgtaggctggcggc

SEQ ID NO: 504289 - DNA, 15 bp, Homo sapiens
cttgtaggctggcgg

SEQ ID NO: 504290 - DNA, 15 bp, Homo sapiens
ccttgtaggctggcg

SEQ ID NO: 504291 - DNA, 15 bp, Homo sapiens
gccttgtaggctggc

SEQ ID NO: 504292 - DNA, 15 bp, Homo sapiens
ggccttgtaggctgg

SEQ ID NO: 504293 - DNA, 15 bp, Homo sapiens
tggccttgtaggctg

SEQ ID NO: 504294 - DNA, 15 bp, Homo sapiens
gtggccttgtaggct

SEQ ID NO: 504295 - DNA, 15 bp, Homo sapiens
cgtggccttgtaggc

SEQ ID NO: 504296 - DNA, 15 bp, Homo sapiens
gcgtggccttgtagg

SEQ ID NO: 504297 - DNA, 15 bp, Homo sapiens
cgcgtggccttgtag

SEQ ID NO: 504298 - DNA, 15 bp, Homo sapiens
gcgcgtggccttgta

SEQ ID NO: 504299 - DNA, 15 bp, Homo sapiens
tgcgcgtggccttgt

SEQ ID NO: 504300 - DNA, 15 bp, Homo sapiens
ctgcgcgtggccttg

SEQ ID NO: 504301 - DNA, 15 bp, Homo sapiens
gctgcgcgtggcctt

SEQ ID NO: 504302 - DNA, 15 bp, Homo sapiens
tgctgcgcgtggcct

SEQ ID NO: 504303 - DNA, 15 bp, Homo sapiens
ctgctgcgcgtggcc

SEQ ID NO: 504304 - DNA, 15 bp, Homo sapiens
gctgctgcgcgtggc

SEQ ID NO: 504305 - DNA, 15 bp, Homo sapiens
tgctgctgcgcgtgg

SEQ ID NO: 504306 - DNA, 15 bp, Homo sapiens
ctgctgctgcgcgtg

SEQ ID NO: 504307 - DNA, 15 bp, Homo sapiens
cctgctgctgcgcgt

SEQ ID NO: 504308 - DNA, 15 bp, Homo sapiens
gcctgctgctgcgcg

SEQ ID NO: 504309 - DNA, 15 bp, Homo sapiens
cgcctgctgctgcgc

SEQ ID NO: 504310 - DNA, 15 bp, Homo sapiens
gcgcctgctgctgcg

SEQ ID NO: 504311 - DNA, 15 bp, Homo sapiens
tgcgcctgctgctgc

SEQ ID NO: 504312 - DNA, 15 bp, Homo sapiens
ctgcgcctgctgctg

SEQ ID NO: 504313 - DNA, 15 bp, Homo sapiens
gctgcgcctgctgct

SEQ ID NO: 504314 - DNA, 15 bp, Homo sapiens
tgctgcgcctgctgc

SEQ ID NO: 504315 - DNA, 15 bp, Homo sapiens
gtgctgcgcctgctg

SEQ ID NO: 504316 - DNA, 15 bp, Homo sapiens
ggtgctgcgcctgct

SEQ ID NO: 504317 - DNA, 15 bp, Homo sapiens
tggtgctgcgcctgc

SEQ ID NO: 504318 - DNA, 15 bp, Homo sapiens
ctggtgctgcgcctg

SEQ ID NO: 504319 - DNA, 15 bp, Homo sapiens
cctggtgctgcgcct

SEQ ID NO: 504320 - DNA, 15 bp, Homo sapiens
gcctggtgctgcgcc

SEQ ID NO: 504321 - DNA, 15 bp, Homo sapiens
cgcctggtgctgcgc

SEQ ID NO: 504322 - DNA, 15 bp, Homo sapiens
gcgcctggtgctgcg

SEQ ID NO: 504323 - DNA, 15 bp, Homo sapiens
tgcgcctggtgctgc

SEQ ID NO: 504324 - DNA, 15 bp, Homo sapiens
ctgcgcctggtgctg

SEQ ID NO: 504325 - DNA, 15 bp, Homo sapiens
cctgcgcctggtgct

SEQ ID NO: 504326 - DNA, 15 bp, Homo sapiens
gcctgcgcctggtgc

SEQ ID NO: 504327 - DNA, 15 bp, Homo sapiens
ggcctgcgcctggtg

SEQ ID NO: 504328 - DNA, 15 bp, Homo sapiens
cggcctgcgcctggt

SEQ ID NO: 504329 - DNA, 15 bp, Homo sapiens
gcggcctgcgcctgg

SEQ ID NO: 504330 - DNA, 15 bp, Homo sapiens
cgcggcctgcgcctg

SEQ ID NO: 504331 - DNA, 15 bp, Homo sapiens
gcgcggcctgcgcct

SEQ ID NO: 504332 - DNA, 15 bp, Homo sapiens
tgcgcggcctgcgcc

SEQ ID NO: 504333 - DNA, 15 bp, Homo sapiens
ctgcgcggcctgcgc

SEQ ID NO: 504334 - DNA, 15 bp, Homo sapiens
cctgcgcggcctgcg

SEQ ID NO: 504335 - DNA, 15 bp, Homo sapiens
gcctgcgcggcctgc

SEQ ID NO: 504336 - DNA, 15 bp, Homo sapiens
cgcctgcgcggcctg

SEQ ID NO: 504337 - DNA, 15 bp, Homo sapiens
ccgcctgcgcggcct

SEQ ID NO: 504338 - DNA, 15 bp, Homo sapiens
gccgcctgcgcggcc

SEQ ID NO: 504339 - DNA, 15 bp, Homo sapiens
cgccgcctgcgcggc

SEQ ID NO: 504340 - DNA, 15 bp, Homo sapiens
ccgccgcctgcgcgg

SEQ ID NO: 504341 - DNA, 15 bp, Homo sapiens
gccgccgcctgcgcg

SEQ ID NO: 504342 - DNA, 15 bp, Homo sapiens
tgccgccgcctgcgc

SEQ ID NO: 504343 - DNA, 15 bp, Homo sapiens
ctgccgccgcctgcg

SEQ ID NO: 504344 - DNA, 15 bp, Homo sapiens
gctgccgccgcctgc

SEQ ID NO: 504345 - DNA, 15 bp, Homo sapiens
cgctgccgccgcctg

SEQ ID NO: 504346 - DNA, 15 bp, Homo sapiens
ccgctgccgccgcct

SEQ ID NO: 504347 - DNA, 15 bp, Homo sapiens
gccgctgccgccgcc

SEQ ID NO: 504348 - DNA, 15 bp, Homo sapiens
ggccgctgccgccgc

SEQ ID NO: 504349 - DNA, 15 bp, Homo sapiens
tggccgctgccgccg

SEQ ID NO: 504350 - DNA, 15 bp, Homo sapiens
atggccgctgccgcc

SEQ ID NO: 504351 - DNA, 15 bp, Homo sapiens
gatggccgctgccgc

SEQ ID NO: 504352 - DNA, 15 bp, Homo sapiens
agatggccgctgccg

SEQ ID NO: 504353 - DNA, 15 bp, Homo sapiens
gagatggccgctgcc

SEQ ID NO: 504354 - DNA, 15 bp, Homo sapiens
ggagatggccgctgc

SEQ ID NO: 504355 - DNA, 15 bp, Homo sapiens
cggagatggccgctg

SEQ ID NO: 504356 - DNA, 15 bp, Homo sapiens
acggagatggccgct

SEQ ID NO: 504357 - DNA, 15 bp, Homo sapiens
cacggagatggccgc

SEQ ID NO: 504358 - DNA, 15 bp, Homo sapiens
ccacggagatggccg

SEQ ID NO: 504359 - DNA, 15 bp, Homo sapiens
cccacggagatggcc

SEQ ID NO: 504360 - DNA, 15 bp, Homo sapiens
gcccacggagatggc

SEQ ID NO: 504361 - DNA, 15 bp, Homo sapiens
tgcccacggagatgg

SEQ ID NO: 504362 - DNA, 15 bp, Homo sapiens
ctgcccacggagatg

SEQ ID NO: 504363 - DNA, 15 bp, Homo sapiens
gctgcccacggagat

SEQ ID NO: 504364 - DNA, 15 bp, Homo sapiens
cgctgcccacggaga

SEQ ID NO: 504365 - DNA, 15 bp, Homo sapiens
ccgctgcccacggag

SEQ ID NO: 504366 - DNA, 15 bp, Homo sapiens
accgctgcccacgga

SEQ ID NO: 504367 - DNA, 15 bp, Homo sapiens
caccgctgcccacgg

SEQ ID NO: 504368 - DNA, 15 bp, Homo sapiens
ccaccgctgcccacg

SEQ ID NO: 504369 - DNA, 15 bp, Homo sapiens
gccaccgctgcccac

SEQ ID NO: 504370 - DNA, 15 bp, Homo sapiens
cgccaccgctgccca

SEQ ID NO: 504371 - DNA, 15 bp, Homo sapiens
gcgccaccgctgccc

SEQ ID NO: 504372 - DNA, 15 bp, Homo sapiens
ggcgccaccgctgcc

SEQ ID NO: 504373 - DNA, 15 bp, Homo sapiens
cggcgccaccgctgc

SEQ ID NO: 504374 - DNA, 15 bp, Homo sapiens
ccggcgccaccgctg

SEQ ID NO: 504375 - DNA, 15 bp, Homo sapiens
gccggcgccaccgct

SEQ ID NO: 504376 - DNA, 15 bp, Homo sapiens
ggccggcgccaccgc

SEQ ID NO: 504377 - DNA, 15 bp, Homo sapiens
aggccggcgccaccg

SEQ ID NO: 504378 - DNA, 15 bp, Homo sapiens
aaggccggcgccacc

SEQ ID NO: 504379 - DNA, 15 bp, Homo sapiens
caaggccggcgccac

SEQ ID NO: 504380 - DNA, 15 bp, Homo sapiens
ccaaggccggcgcca

SEQ ID NO: 504381 - DNA, 15 bp, Homo sapiens
gccaaggccggcgcc

SEQ ID NO: 504382 - DNA, 15 bp, Homo sapiens
cgccaaggccggcgc

SEQ ID NO: 504383 - DNA, 15 bp, Homo sapiens
gcgccaaggccggcg

SEQ ID NO: 504384 - DNA, 15 bp, Homo sapiens
tgcgccaaggccggc

SEQ ID NO: 504385 - DNA, 15 bp, Homo sapiens
gtgcgccaaggccgg

SEQ ID NO: 504386 - DNA, 15 bp, Homo sapiens
tgtgcgccaaggccg

SEQ ID NO: 504387 - DNA, 15 bp, Homo sapiens
gtgtgcgccaaggcc

SEQ ID NO: 504388 - DNA, 15 bp, Homo sapiens
ggtgtgcgccaaggc

SEQ ID NO: 504389 - DNA, 15 bp, Homo sapiens
gggtgtgcgccaagg

SEQ ID NO: 504390 - DNA, 15 bp, Homo sapiens
cgggtgtgcgccaag

SEQ ID NO: 504391 - DNA, 15 bp, Homo sapiens
ccgggtgtgcgccaa

SEQ ID NO: 504392 - DNA, 15 bp, Homo sapiens
cccgggtgtgcgcca

SEQ ID NO: 504393 - DNA, 15 bp, Homo sapiens
gcccgggtgtgcgcc

SEQ ID NO: 504394 - DNA, 15 bp, Homo sapiens
ggcccgggtgtgcgc

SEQ ID NO: 504395 - DNA, 15 bp, Homo sapiens
tggcccgggtgtgcg

SEQ ID NO: 504396 - DNA, 15 bp, Homo sapiens
gtggcccgggtgtgc

SEQ ID NO: 504397 - DNA, 15 bp, Homo sapiens
ggtggcccgggtgtg

SEQ ID NO: 504398 - DNA, 15 bp, Homo sapiens
tggtggcccgggtgt

SEQ ID NO: 504399 - DNA, 15 bp, Homo sapiens
ctggtggcccgggtg

SEQ ID NO: 504400 - DNA, 15 bp, Homo sapiens
gctggtggcccgggt

SEQ ID NO: 504401 - DNA, 15 bp, Homo sapiens
ggctggtggcccggg

SEQ ID NO: 504402 - DNA, 15 bp, Homo sapiens
tggctggtggcccgg

SEQ ID NO: 504403 - DNA, 15 bp, Homo sapiens
ctggctggtggcccg

SEQ ID NO: 504404 - DNA, 15 bp, Homo sapiens
cctggctggtggccc

SEQ ID NO: 504405 - DNA, 15 bp, Homo sapiens
gcctggctggtggcc

SEQ ID NO: 504406 - DNA, 15 bp, Homo sapiens
tgcctggctggtggc

SEQ ID NO: 504407 - DNA, 15 bp, Homo sapiens
ctgcctggctggtgg

SEQ ID NO: 504408 - DNA, 15 bp, Homo sapiens
gctgcctggctggtg

SEQ ID NO: 504409 - DNA, 15 bp, Homo sapiens
cgctgcctggctggt

SEQ ID NO: 504410 - DNA, 15 bp, Homo sapiens
gcgctgcctggctgg

SEQ ID NO: 504411 - DNA, 15 bp, Homo sapiens
tgcgctgcctggctg

SEQ ID NO: 504412 - DNA, 15 bp, Homo sapiens
ctgcgctgcctggct

SEQ ID NO: 504413 - DNA, 15 bp, Homo sapiens
cctgcgctgcctggc

SEQ ID NO: 504414 - DNA, 15 bp, Homo sapiens
gcctgcgctgcctgg

SEQ ID NO: 504415 - DNA, 15 bp, Homo sapiens
ggcctgcgctgcctg

SEQ ID NO: 504416 - DNA, 15 bp, Homo sapiens
tggcctgcgctgcct

SEQ ID NO: 504417 - DNA, 15 bp, Homo sapiens
ctggcctgcgctgcc

SEQ ID NO: 504418 - DNA, 15 bp, Homo sapiens
actggcctgcgctgc

SEQ ID NO: 504419 - DNA, 15 bp, Homo sapiens
gactggcctgcgctg

SEQ ID NO: 504420 - DNA, 15 bp, Homo sapiens
agactggcctgcgct

SEQ ID NO: 504421 - DNA, 15 bp, Homo sapiens
gagactggcctgcgc

SEQ ID NO: 504422 - DNA, 15 bp, Homo sapiens
ggagactggcctgcg

SEQ ID NO: 504423 - DNA, 15 bp, Homo sapiens
cggagactggcctgc

SEQ ID NO: 504424 - DNA, 15 bp, Homo sapiens
ccggagactggcctg

SEQ ID NO: 504425 - DNA, 15 bp, Homo sapiens
tccggagactggcct

SEQ ID NO: 504426 - DNA, 15 bp, Homo sapiens
gtccggagactggcc

SEQ ID NO: 504427 - DNA, 15 bp, Homo sapiens
ggtccggagactggc

SEQ ID NO: 504428 - DNA, 15 bp, Homo sapiens
aggtccggagactgg

SEQ ID NO: 504429 - DNA, 15 bp, Homo sapiens
caggtccggagactg

SEQ ID NO: 504430 - DNA, 15 bp, Homo sapiens
ccaggtccggagact

SEQ ID NO: 504431 - DNA, 15 bp, Homo sapiens
gccaggtccggagac

SEQ ID NO: 504432 - DNA, 15 bp, Homo sapiens
cgccaggtccggaga

SEQ ID NO: 504433 - DNA, 15 bp, Homo sapiens
gcgccaggtccggag

SEQ ID NO: 504434 - DNA, 15 bp, Homo sapiens
tgcgccaggtccgga

SEQ ID NO: 504435 - DNA, 15 bp, Homo sapiens
gtgcgccaggtccgg

SEQ ID NO: 504436 - DNA, 15 bp, Homo sapiens
ggtgcgccaggtccg

SEQ ID NO: 504437 - DNA, 15 bp, Homo sapiens
tggtgcgccaggtcc

SEQ ID NO: 504438 - DNA, 15 bp, Homo sapiens
gtggtgcgccaggtc

SEQ ID NO: 504439 - DNA, 15 bp, Homo sapiens
cgtggtgcgccaggt

SEQ ID NO: 504440 - DNA, 15 bp, Homo sapiens
gcgtggtgcgccagg

SEQ ID NO: 504441 - DNA, 15 bp, Homo sapiens
ggcgtggtgcgccag

SEQ ID NO: 504442 - DNA, 15 bp, Homo sapiens
cggcgtggtgcgcca

SEQ ID NO: 504443 - DNA, 15 bp, Homo sapiens
gcggcgtggtgcgcc

SEQ ID NO: 504444 - DNA, 15 bp, Homo sapiens
ggcggcgtggtgcgc

SEQ ID NO: 504445 - DNA, 15 bp, Homo sapiens
tggcggcgtggtgcg

SEQ ID NO: 504446 - DNA, 15 bp, Homo sapiens
ctggcggcgtggtgc

SEQ ID NO: 504447 - DNA, 15 bp, Homo sapiens
gctggcggcgtggtg

SEQ ID NO: 504448 - DNA, 15 bp, Homo sapiens
ggctggcggcgtggt

SEQ ID NO: 504449 - DNA, 15 bp, Homo sapiens
gggctggcggcgtgg

SEQ ID NO: 504450 - DNA, 15 bp, Homo sapiens
ggggctggcggcgtg

SEQ ID NO: 504451 - DNA, 15 bp, Homo sapiens
cggggctggcggcgt

SEQ ID NO: 504452 - DNA, 15 bp, Homo sapiens
gcggggctggcggcg

SEQ ID NO: 504453 - DNA, 15 bp, Homo sapiens
cgcggggctggcggc

SEQ ID NO: 504454 - DNA, 15 bp, Homo sapiens
ccgcggggctggcgg

SEQ ID NO: 504455 - DNA, 15 bp, Homo sapiens
gccgcggggctggcg

SEQ ID NO: 504456 - DNA, 15 bp, Homo sapiens
cgccgcggggctggc

SEQ ID NO: 504457 - DNA, 15 bp, Homo sapiens
gcgccgcggggctgg

SEQ ID NO: 504458 - DNA, 15 bp, Homo sapiens
agcgccgcggggctg

SEQ ID NO: 504459 - DNA, 15 bp, Homo sapiens
cagcgccgcggggct

SEQ ID NO: 504460 - DNA, 15 bp, Homo sapiens
gcagcgccgcggggc

SEQ ID NO: 504461 - DNA, 15 bp, Homo sapiens
tgcagcgccgcgggg

SEQ ID NO: 504462 - DNA, 15 bp, Homo sapiens
ctgcagcgccgcggg

SEQ ID NO: 504463 - DNA, 15 bp, Homo sapiens
cctgcagcgccgcgg

SEQ ID NO: 504464 - DNA, 15 bp, Homo sapiens
ccctgcagcgccgcg

SEQ ID NO: 504465 - DNA, 15 bp, Homo sapiens
gccctgcagcgccgc

SEQ ID NO: 504466 - DNA, 15 bp, Homo sapiens
ggccctgcagcgccg

SEQ ID NO: 504467 - DNA, 15 bp, Homo sapiens
tggccctgcagcgcc

SEQ ID NO: 504468 - DNA, 15 bp, Homo sapiens
ctggccctgcagcgc

SEQ ID NO: 504469 - DNA, 15 bp, Homo sapiens
cctggccctgcagcg

SEQ ID NO: 504470 - DNA, 15 bp, Homo sapiens
acctggccctgcagc

SEQ ID NO: 504471 - DNA, 15 bp, Homo sapiens
tacctggccctgcag

SEQ ID NO: 504472 - DNA, 15 bp, Homo sapiens
atacctggccctgca

SEQ ID NO: 504473 - DNA, 15 bp, Homo sapiens
gatacctggccctgc

SEQ ID NO: 504474 - DNA, 15 bp, Homo sapiens
ggatacctggccctg

SEQ ID NO: 504475 - DNA, 15 bp, Homo sapiens
tggatacctggccct

SEQ ID NO: 504476 - DNA, 15 bp, Homo sapiens
ctggatacctggccc

SEQ ID NO: 504477 - DNA, 15 bp, Homo sapiens
gctggatacctggcc

SEQ ID NO: 504478 - DNA, 15 bp, Homo sapiens
ggctggatacctggc

SEQ ID NO: 504479 - DNA, 15 bp, Homo sapiens
aggctggatacctgg

SEQ ID NO: 504480 - DNA, 15 bp, Homo sapiens
caggctggatacctg

SEQ ID NO: 504481 - DNA, 15 bp, Homo sapiens
acaggctggatacct

SEQ ID NO: 504482 - DNA, 15 bp, Homo sapiens
gacaggctggatacc

SEQ ID NO: 504483 - DNA, 15 bp, Homo sapiens
ggacaggctggatac

SEQ ID NO: 504484 - DNA, 15 bp, Homo sapiens
gggacaggctggata

SEQ ID NO: 504485 - DNA, 15 bp, Homo sapiens
tgggacaggctggat

SEQ ID NO: 504486 - DNA, 15 bp, Homo sapiens
gtgggacaggctgga

SEQ ID NO: 504487 - DNA, 15 bp, Homo sapiens
ggtgggacaggctgg

SEQ ID NO: 504488 - DNA, 15 bp, Homo sapiens
aggtgggacaggctg

SEQ ID NO: 504489 - DNA, 15 bp, Homo sapiens
caggtgggacaggct

SEQ ID NO: 504490 - DNA, 15 bp, Homo sapiens
tcaggtgggacaggc

SEQ ID NO: 504491 - DNA, 15 bp, Homo sapiens
ttcaggtgggacagg

SEQ ID NO: 504492 - DNA, 15 bp, Homo sapiens
gttcaggtgggacag

SEQ ID NO: 504493 - DNA, 15 bp, Homo sapiens
agttcaggtgggaca

SEQ ID NO: 504494 - DNA, 15 bp, Homo sapiens
gagttcaggtgggac

SEQ ID NO: 504495 - DNA, 15 bp, Homo sapiens
ggagttcaggtggga

SEQ ID NO: 504496 - DNA, 15 bp, Homo sapiens
aggagttcaggtggg

SEQ ID NO: 504497 - DNA, 15 bp, Homo sapiens
gaggagttcaggtgg

SEQ ID NO: 504498 - DNA, 15 bp, Homo sapiens
cgaggagttcaggtg

SEQ ID NO: 504499 - DNA, 15 bp, Homo sapiens
ccgaggagttcaggt

SEQ ID NO: 504500 - DNA, 15 bp, Homo sapiens
cccgaggagttcagg

SEQ ID NO: 504501 - DNA, 15 bp, Homo sapiens
gcccgaggagttcag

SEQ ID NO: 504502 - DNA, 15 bp, Homo sapiens
agcccgaggagttca

SEQ ID NO: 504503 - DNA, 15 bp, Homo sapiens
gagcccgaggagttc

SEQ ID NO: 504504 - DNA, 15 bp, Homo sapiens
cgagcccgaggagtt

SEQ ID NO: 504505 - DNA, 15 bp, Homo sapiens
ccgagcccgaggagt

SEQ ID NO: 504506 - DNA, 15 bp, Homo sapiens
tccgagcccgaggag

SEQ ID NO: 504507 - DNA, 15 bp, Homo sapiens
gtccgagcccgagga

SEQ ID NO: 504508 - DNA, 15 bp, Homo sapiens
agtccgagcccgagg

SEQ ID NO: 504509 - DNA, 15 bp, Homo sapiens
tagtccgagcccgag

SEQ ID NO: 504510 - DNA, 15 bp, Homo sapiens
gtagtccgagcccga

SEQ ID NO: 504511 - DNA, 15 bp, Homo sapiens
cgtagtccgagcccg

SEQ ID NO: 504512 - DNA, 15 bp, Homo sapiens
ccgtagtccgagccc

SEQ ID NO: 504513 - DNA, 15 bp, Homo sapiens
gccgtagtccgagcc

SEQ ID NO: 504514 - DNA, 15 bp, Homo sapiens
tgccgtagtccgagc

SEQ ID NO: 504515 - DNA, 15 bp, Homo sapiens
gtgccgtagtccgag

SEQ ID NO: 504516 - DNA, 15 bp, Homo sapiens
ggtgccgtagtccga

SEQ ID NO: 504517 - DNA, 15 bp, Homo sapiens
tggtgccgtagtccg

SEQ ID NO: 504518 - DNA, 15 bp, Homo sapiens
atggtgccgtagtcc

SEQ ID NO: 504519 - DNA, 15 bp, Homo sapiens
catggtgccgtagtc

SEQ ID NO: 504520 - DNA, 15 bp, Homo sapiens
acatggtgccgtagt

SEQ ID NO: 504521 - DNA, 15 bp, Homo sapiens
gacatggtgccgtag

SEQ ID NO: 504522 - DNA, 15 bp, Homo sapiens
ggacatggtgccgta

SEQ ID NO: 504523 - DNA, 15 bp, Homo sapiens
aggacatggtgccgt

SEQ ID NO: 504524 - DNA, 15 bp, Homo sapiens
caggacatggtgccg

SEQ ID NO: 504525 - DNA, 15 bp, Homo sapiens
gcaggacatggtgcc

SEQ ID NO: 504526 - DNA, 15 bp, Homo sapiens
agcaggacatggtgc

SEQ ID NO: 504527 - DNA, 15 bp, Homo sapiens
gagcaggacatggtg

SEQ ID NO: 504528 - DNA, 15 bp, Homo sapiens
ggagcaggacatggt

SEQ ID NO: 504529 - DNA, 15 bp, Homo sapiens
tggagcaggacatgg

SEQ ID NO: 504530 - DNA, 15 bp, Homo sapiens
gtggagcaggacatg

SEQ ID NO: 504531 - DNA, 15 bp, Homo sapiens
ggtggagcaggacat

SEQ ID NO: 504532 - DNA, 15 bp, Homo sapiens
aggtggagcaggaca

SEQ ID NO: 504533 - DNA, 15 bp, Homo sapiens
aaggtggagcaggac

SEQ ID NO: 504534 - DNA, 15 bp, Homo sapiens
caaggtggagcagga

SEQ ID NO: 504535 - DNA, 15 bp, Homo sapiens
gcaaggtggagcagg

SEQ ID NO: 504536 - DNA, 15 bp, Homo sapiens
agcaaggtggagcag

SEQ ID NO: 504537 - DNA, 15 bp, Homo sapiens
tagcaaggtggagca

SEQ ID NO: 504538 - DNA, 15 bp, Homo sapiens
atagcaaggtggagc

SEQ ID NO: 504539 - DNA, 15 bp, Homo sapiens
tatagcaaggtggag

SEQ ID NO: 504540 - DNA, 15 bp, Homo sapiens
gtatagcaaggtgga

SEQ ID NO: 504541 - DNA, 15 bp, Homo sapiens
cgtatagcaaggtgg

SEQ ID NO: 504542 - DNA, 15 bp, Homo sapiens
ccgtatagcaaggtg

SEQ ID NO: 504543 - DNA, 15 bp, Homo sapiens
accgtatagcaaggt

SEQ ID NO: 504544 - DNA, 15 bp, Homo sapiens
gaccgtatagcaagg

SEQ ID NO: 504545 - DNA, 15 bp, Homo sapiens
cgaccgtatagcaag

SEQ ID NO: 504546 - DNA, 15 bp, Homo sapiens
ccgaccgtatagcaa

SEQ ID NO: 504547 - DNA, 15 bp, Homo sapiens
tccgaccgtatagca

SEQ ID NO: 504548 - DNA, 15 bp, Homo sapiens
gtccgaccgtatagc

SEQ ID NO: 504549 - DNA, 15 bp, Homo sapiens
ggtccgaccgtatag

SEQ ID NO: 504550 - DNA, 15 bp, Homo sapiens
aggtccgaccgtata

SEQ ID NO: 504551 - DNA, 15 bp, Homo sapiens
caggtccgaccgtat

SEQ ID NO: 504552 - DNA, 15 bp, Homo sapiens
ccaggtccgaccgta

SEQ ID NO: 504553 - DNA, 15 bp, Homo sapiens
accaggtccgaccgt

SEQ ID NO: 504554 - DNA, 15 bp, Homo sapiens
caccaggtccgaccg

SEQ ID NO: 504555 - DNA, 15 bp, Homo sapiens
tcaccaggtccgacc

SEQ ID NO: 504556 - DNA, 15 bp, Homo sapiens
ctcaccaggtccgac

SEQ ID NO: 504557 - DNA, 15 bp, Homo sapiens
tctcaccaggtccga

SEQ ID NO: 504558 - DNA, 15 bp, Homo sapiens
ctctcaccaggtccg

SEQ ID NO: 504559 - DNA, 15 bp, Homo sapiens
cctctcaccaggtcc

SEQ ID NO: 504560 - DNA, 15 bp, Homo sapiens
tcctctcaccaggtc

SEQ ID NO: 504561 - DNA, 15 bp, Homo sapiens
gtcctctcaccaggt

SEQ ID NO: 504562 - DNA, 15 bp, Homo sapiens
cgtcctctcaccagg

SEQ ID NO: 504563 - DNA, 15 bp, Homo sapiens
gcgtcctctcaccag

SEQ ID NO: 504564 - DNA, 15 bp, Homo sapiens
ggcgtcctctcacca

SEQ ID NO: 504565 - DNA, 15 bp, Homo sapiens
cggcgtcctctcacc

SEQ ID NO: 504566 - DNA, 15 bp, Homo sapiens
ccggcgtcctctcac

SEQ ID NO: 504567 - DNA, 15 bp, Homo sapiens
cccggcgtcctctca

SEQ ID NO: 504568 - DNA, 15 bp, Homo sapiens
gcccggcgtcctctc

SEQ ID NO: 504569 - DNA, 15 bp, Homo sapiens
ggcccggcgtcctct

SEQ ID NO: 504570 - DNA, 15 bp, Homo sapiens
cggcccggcgtcctc

SEQ ID NO: 504571 - DNA, 15 bp, Homo sapiens
ccggcccggcgtcct

SEQ ID NO: 504572 - DNA, 15 bp, Homo sapiens
gccggcccggcgtcc

SEQ ID NO: 504573 - DNA, 15 bp, Homo sapiens
ggccggcccggcgtc

SEQ ID NO: 504574 - DNA, 15 bp, Homo sapiens
gggccggcccggcgt

SEQ ID NO: 504575 - DNA, 15 bp, Homo sapiens
agggccggcccggcg

SEQ ID NO: 504576 - DNA, 15 bp, Homo sapiens
tagggccggcccggc

SEQ ID NO: 504577 - DNA, 15 bp, Homo sapiens
ctagggccggcccgg

SEQ ID NO: 504578 - DNA, 15 bp, Homo sapiens
gctagggccggcccg

SEQ ID NO: 504579 - DNA, 15 bp, Homo sapiens
ggctagggccggccc

SEQ ID NO: 504580 - DNA, 15 bp, Homo sapiens
gggctagggccggcc

SEQ ID NO: 504581 - DNA, 15 bp, Homo sapiens
tgggctagggccggc

SEQ ID NO: 504582 - DNA, 15 bp, Homo sapiens
ctgggctagggccgg

SEQ ID NO: 504583 - DNA, 15 bp, Homo sapiens
gctgggctagggccg

SEQ ID NO: 504584 - DNA, 15 bp, Homo sapiens
cgctgggctagggcc

SEQ ID NO: 504585 - DNA, 15 bp, Homo sapiens
gcgctgggctagggc

SEQ ID NO: 504586 - DNA, 15 bp, Homo sapiens
agcgctgggctaggg

SEQ ID NO: 504587 - DNA, 15 bp, Homo sapiens
gagcgctgggctagg

SEQ ID NO: 504588 - DNA, 15 bp, Homo sapiens
agagcgctgggctag

SEQ ID NO: 504589 - DNA, 15 bp, Homo sapiens
cagagcgctgggcta

SEQ ID NO: 504590 - DNA, 15 bp, Homo sapiens
gcagagcgctgggct

SEQ ID NO: 504591 - DNA, 15 bp, Homo sapiens
ggcagagcgctgggc

SEQ ID NO: 504592 - DNA, 15 bp, Homo sapiens
aggcagagcgctggg

SEQ ID NO: 504593 - DNA, 15 bp, Homo sapiens
gaggcagagcgctgg

SEQ ID NO: 504594 - DNA, 15 bp, Homo sapiens
tgaggcagagcgctg

SEQ ID NO: 504595 - DNA, 15 bp, Homo sapiens
gtgaggcagagcgct

SEQ ID NO: 504596 - DNA, 15 bp, Homo sapiens
ggtgaggcagagcgc

SEQ ID NO: 504597 - DNA, 15 bp, Homo sapiens
cggtgaggcagagcg

SEQ ID NO: 504598 - DNA, 15 bp, Homo sapiens
gcggtgaggcagagc

SEQ ID NO: 504599 - DNA, 15 bp, Homo sapiens
agcggtgaggcagag

SEQ ID NO: 504600 - DNA, 15 bp, Homo sapiens
aagcggtgaggcaga

SEQ ID NO: 504601 - DNA, 15 bp, Homo sapiens
gaagcggtgaggcag

SEQ ID NO: 504602 - DNA, 15 bp, Homo sapiens
ggaagcggtgaggca

SEQ ID NO: 504603 - DNA, 15 bp, Homo sapiens
gggaagcggtgaggc

SEQ ID NO: 504604 - DNA, 15 bp, Homo sapiens
agggaagcggtgagg

SEQ ID NO: 504605 - DNA, 15 bp, Homo sapiens
gagggaagcggtgag

SEQ ID NO: 504606 - DNA, 15 bp, Homo sapiens
ggagggaagcggtga

SEQ ID NO: 504607 - DNA, 15 bp, Homo sapiens
aggagggaagcggtg

SEQ ID NO: 504608 - DNA, 15 bp, Homo sapiens
caggagggaagcggt

SEQ ID NO: 504609 - DNA, 15 bp, Homo sapiens
gcaggagggaagcgg

SEQ ID NO: 504610 - DNA, 15 bp, Homo sapiens
ggcaggagggaagcg

SEQ ID NO: 504611 - DNA, 15 bp, Homo sapiens
gggcaggagggaagc

SEQ ID NO: 504612 - DNA, 15 bp, Homo sapiens
cgggcaggagggaag

SEQ ID NO: 504613 - DNA, 15 bp, Homo sapiens
gcgggcaggagggaa

SEQ ID NO: 504614 - DNA, 15 bp, Homo sapiens
ggcgggcaggaggga

SEQ ID NO: 504615 - DNA, 15 bp, Homo sapiens
tggcgggcaggaggg

SEQ ID NO: 504616 - DNA, 15 bp, Homo sapiens
gtggcgggcaggagg

SEQ ID NO: 504617 - DNA, 15 bp, Homo sapiens
tgtggcgggcaggag

SEQ ID NO: 504618 - DNA, 15 bp, Homo sapiens
gtgtggcgggcagga

SEQ ID NO: 504619 - DNA, 15 bp, Homo sapiens
tgtgtggcgggcagg

SEQ ID NO: 504620 - DNA, 15 bp, Homo sapiens
ctgtgtggcgggcag

SEQ ID NO: 504621 - DNA, 15 bp, Homo sapiens
tctgtgtggcgggca

SEQ ID NO: 504622 - DNA, 15 bp, Homo sapiens
gtctgtgtggcgggc

SEQ ID NO: 504623 - DNA, 15 bp, Homo sapiens
ggtctgtgtggcggg

SEQ ID NO: 504624 - DNA, 15 bp, Homo sapiens
tggtctgtgtggcgg

SEQ ID NO: 504625 - DNA, 15 bp, Homo sapiens
gtggtctgtgtggcg

SEQ ID NO: 504626 - DNA, 15 bp, Homo sapiens
ggtggtctgtgtggc

SEQ ID NO: 504627 - DNA, 15 bp, Homo sapiens
tggtggtctgtgtgg

SEQ ID NO: 504628 - DNA, 15 bp, Homo sapiens
atggtggtctgtgtg

SEQ ID NO: 504629 - DNA, 15 bp, Homo sapiens
gatggtggtctgtgt

SEQ ID NO: 504630 - DNA, 15 bp, Homo sapiens
ggatggtggtctgtg

SEQ ID NO: 504631 - DNA, 15 bp, Homo sapiens
tggatggtggtctgt

SEQ ID NO: 504632 - DNA, 15 bp, Homo sapiens
gtggatggtggtctg

SEQ ID NO: 504633 - DNA, 15 bp, Homo sapiens
ggtggatggtggtct

SEQ ID NO: 504634 - DNA, 15 bp, Homo sapiens
cggtggatggtggtc

SEQ ID NO: 504635 - DNA, 15 bp, Homo sapiens
gcggtggatggtggt

SEQ ID NO: 504636 - DNA, 15 bp, Homo sapiens
agcggtggatggtgg

SEQ ID NO: 504637 - DNA, 15 bp, Homo sapiens
cagcggtggatggtg

SEQ ID NO: 504638 - DNA, 15 bp, Homo sapiens
gcagcggtggatggt

SEQ ID NO: 504639 - DNA, 15 bp, Homo sapiens
agcagcggtggatgg

SEQ ID NO: 504640 - DNA, 15 bp, Homo sapiens
gagcagcggtggatg

SEQ ID NO: 504641 - DNA, 15 bp, Homo sapiens
ggagcagcggtggat

SEQ ID NO: 504642 - DNA, 15 bp, Homo sapiens
tggagcagcggtgga

SEQ ID NO: 504643 - DNA, 15 bp, Homo sapiens
gtggagcagcggtgg

SEQ ID NO: 504644 - DNA, 15 bp, Homo sapiens
cgtggagcagcggtg

SEQ ID NO: 504645 - DNA, 15 bp, Homo sapiens
gcgtggagcagcggt

SEQ ID NO: 504646 - DNA, 15 bp, Homo sapiens
cgcgtggagcagcgg

SEQ ID NO: 504647 - DNA, 15 bp, Homo sapiens
gcgcgtggagcagcg

SEQ ID NO: 504648 - DNA, 15 bp, Homo sapiens
agcgcgtggagcagc

SEQ ID NO: 504649 - DNA, 15 bp, Homo sapiens
aagcgcgtggagcag

SEQ ID NO: 504650 - DNA, 15 bp, Homo sapiens
gaagcgcgtggagca

SEQ ID NO: 504651 - DNA, 15 bp, Homo sapiens
cgaagcgcgtggagc

SEQ ID NO: 504652 - DNA, 15 bp, Homo sapiens
tcgaagcgcgtggag

SEQ ID NO: 504653 - DNA, 15 bp, Homo sapiens
gtcgaagcgcgtgga

SEQ ID NO: 504654 - DNA, 15 bp, Homo sapiens
agtcgaagcgcgtgg

SEQ ID NO: 504655 - DNA, 15 bp, Homo sapiens
aagtcgaagcgcgtg

SEQ ID NO: 504656 - DNA, 15 bp, Homo sapiens
aaagtcgaagcgcgt

SEQ ID NO: 504657 - DNA, 15 bp, Homo sapiens
aaaagtcgaagcgcg

SEQ ID NO: 504658 - DNA, 15 bp, Homo sapiens
gaaaagtcgaagcgc

SEQ ID NO: 504659 - DNA, 15 bp, Homo sapiens
agaaaagtcgaagcg

SEQ ID NO: 504660 - DNA, 15 bp, Homo sapiens
aagaaaagtcgaagc

SEQ ID NO: 504661 - DNA, 15 bp, Homo sapiens
taagaaaagtcgaag

SEQ ID NO: 504662 - DNA, 15 bp, Homo sapiens
ttaagaaaagtcgaa

SEQ ID NO: 504663 - DNA, 15 bp, Homo sapiens
gttaagaaaagtcga

SEQ ID NO: 504664 - DNA, 15 bp, Homo sapiens
tgttaagaaaagtcg

SEQ ID NO: 504665 - DNA, 15 bp, Homo sapiens
ttgttaagaaaagtc

SEQ ID NO: 504666 - DNA, 15 bp, Homo sapiens
gttgttaagaaaagt

SEQ ID NO: 504667 - DNA, 15 bp, Homo sapiens
ggttgttaagaaaag

SEQ ID NO: 504668 - DNA, 15 bp, Homo sapiens
aggttgttaagaaaa

SEQ ID NO: 504669 - DNA, 15 bp, Homo sapiens
caggttgttaagaaa

SEQ ID NO: 504670 - DNA, 15 bp, Homo sapiens
ccaggttgttaagaa

SEQ ID NO: 504671 - DNA, 15 bp, Homo sapiens
gccaggttgttaaga

SEQ ID NO: 504672 - DNA, 15 bp, Homo sapiens
ggccaggttgttaag

SEQ ID NO: 504673 - DNA, 15 bp, Homo sapiens
cggccaggttgttaa

SEQ ID NO: 504674 - DNA, 15 bp, Homo sapiens
gcggccaggttgtta

SEQ ID NO: 504675 - DNA, 15 bp, Homo sapiens
cgcggccaggttgtt

SEQ ID NO: 504676 - DNA, 15 bp, Homo sapiens
acgcggccaggttgt

SEQ ID NO: 504677 - DNA, 15 bp, Homo sapiens
aacgcggccaggttg

SEQ ID NO: 504678 - DNA, 15 bp, Homo sapiens
aaacgcggccaggtt

SEQ ID NO: 504679 - DNA, 15 bp, Homo sapiens
taaacgcggccaggt

SEQ ID NO: 504680 - DNA, 15 bp, Homo sapiens
ctaaacgcggccagg

SEQ ID NO: 504681 - DNA, 15 bp, Homo sapiens
tctaaacgcggccag

SEQ ID NO: 504682 - DNA, 15 bp, Homo sapiens
gtctaaacgcggcca

SEQ ID NO: 504683 - DNA, 15 bp, Homo sapiens
ggtctaaacgcggcc

SEQ ID NO: 504684 - DNA, 15 bp, Homo sapiens
tggtctaaacgcggc

SEQ ID NO: 504685 - DNA, 15 bp, Homo sapiens
ttggtctaaacgcgg

SEQ ID NO: 504686 - DNA, 15 bp, Homo sapiens
cttggtctaaacgcg

SEQ ID NO: 504687 - DNA, 15 bp, Homo sapiens
ccttggtctaaacgc

SEQ ID NO: 504688 - DNA, 15 bp, Homo sapiens
tccttggtctaaacg

SEQ ID NO: 504689 - DNA, 15 bp, Homo sapiens
ttccttggtctaaac

SEQ ID NO: 504690 - DNA, 15 bp, Homo sapiens
gttccttggtctaaa

SEQ ID NO: 504691 - DNA, 15 bp, Homo sapiens
tgttccttggtctaa

SEQ ID NO: 504692 - DNA, 15 bp, Homo sapiens
ttgttccttggtcta

SEQ ID NO: 504693 - DNA, 15 bp, Homo sapiens
tttgttccttggtct

SEQ ID NO: 504694 - DNA, 15 bp, Homo sapiens
ttttgttccttggtc

SEQ ID NO: 504695 - DNA, 15 bp, Homo sapiens
tttttgttccttggt

SEQ ID NO: 504696 - DNA, 15 bp, Homo sapiens
ttttttgttccttgg

SEQ ID NO: 504697 - DNA, 15 bp, Homo sapiens
tttttttgttccttg

SEQ ID NO: 504698 - DNA, 15 bp, Homo sapiens
gtttttttgttcctt

SEQ ID NO: 504699 - DNA, 15 bp, Homo sapiens
ggtttttttgttcct

SEQ ID NO: 504700 - DNA, 15 bp, Homo sapiens
tggtttttttgttcc

SEQ ID NO: 504701 - DNA, 15 bp, Homo sapiens
gtggtttttttgttc

SEQ ID NO: 504702 - DNA, 15 bp, Homo sapiens
tgtggtttttttgtt

SEQ ID NO: 504703 - DNA, 15 bp, Homo sapiens
ttgtggtttttttgt

SEQ ID NO: 504704 - DNA, 15 bp, Homo sapiens
tttgtggtttttttg

SEQ ID NO: 504705 - DNA, 15 bp, Homo sapiens
ctttgtggttttttt

SEQ ID NO: 504706 - DNA, 15 bp, Homo sapiens
cctttgtggtttttt

SEQ ID NO: 504707 - DNA, 15 bp, Homo sapiens
gcctttgtggttttt

SEQ ID NO: 504708 - DNA, 15 bp, Homo sapiens
ggcctttgtggtttt

SEQ ID NO: 504709 - DNA, 15 bp, Homo sapiens
tggcctttgtggttt

SEQ ID NO: 504710 - DNA, 15 bp, Homo sapiens
ttggcctttgtggtt

SEQ ID NO: 504711 - DNA, 15 bp, Homo sapiens
tttggcctttgtggt

SEQ ID NO: 504712 - DNA, 15 bp, Homo sapiens
gtttggcctttgtgg

SEQ ID NO: 504713 - DNA, 15 bp, Homo sapiens
agtttggcctttgtg

SEQ ID NO: 504714 - DNA, 15 bp, Homo sapiens
cagtttggcctttgt

SEQ ID NO: 504715 - DNA, 15 bp, Homo sapiens
gcagtttggcctttg

SEQ ID NO: 504716 - DNA, 15 bp, Homo sapiens
agcagtttggccttt

SEQ ID NO: 504717 - DNA, 15 bp, Homo sapiens
cagcagtttggcctt

SEQ ID NO: 504718 - DNA, 15 bp, Homo sapiens
ccagcagtttggcct

SEQ ID NO: 504719 - DNA, 15 bp, Homo sapiens
tccagcagtttggcc

SEQ ID NO: 504720 - DNA, 15 bp, Homo sapiens
gtccagcagtttggc

SEQ ID NO: 504721 - DNA, 15 bp, Homo sapiens
cgtccagcagtttgg

SEQ ID NO: 504722 - DNA, 15 bp, Homo sapiens
acgtccagcagtttg

SEQ ID NO: 504723 - DNA, 15 bp, Homo sapiens
gacgtccagcagttt

SEQ ID NO: 504724 - DNA, 15 bp, Homo sapiens
agacgtccagcagtt

SEQ ID NO: 504725 - DNA, 15 bp, Homo sapiens
aagacgtccagcagt

SEQ ID NO: 504726 - DNA, 15 bp, Homo sapiens
aaagacgtccagcag

SEQ ID NO: 504727 - DNA, 15 bp, Homo sapiens
gaaagacgtccagca

SEQ ID NO: 504728 - DNA, 15 bp, Homo sapiens
agaaagacgtccagc

SEQ ID NO: 504729 - DNA, 15 bp, Homo sapiens
aagaaagacgtccag

SEQ ID NO: 504730 - DNA, 15 bp, Homo sapiens
aaagaaagacgtcca

SEQ ID NO: 504731 - DNA, 15 bp, Homo sapiens
aaaagaaagacgtcc

SEQ ID NO: 504732 - DNA, 15 bp, Homo sapiens
aaaaagaaagacgtc

SEQ ID NO: 504733 - DNA, 15 bp, Homo sapiens
aaaaaagaaagacgt

SEQ ID NO: 504734 - DNA, 15 bp, Homo sapiens
aaaaaaagaaagacg

SEQ ID NO: 504735 - DNA, 15 bp, Homo sapiens
gaaaaaaagaaagac

SEQ ID NO: 504736 - DNA, 15 bp, Homo sapiens
ggaaaaaaagaaaga

SEQ ID NO: 504737 - DNA, 15 bp, Homo sapiens
gggaaaaaaagaaag

SEQ ID NO: 504738 - DNA, 15 bp, Homo sapiens
ggggaaaaaaagaaa

SEQ ID NO: 504739 - DNA, 15 bp, Homo sapiens
gggggaaaaaaagaa

SEQ ID NO: 504740 - DNA, 15 bp, Homo sapiens
ggggggaaaaaaaga

SEQ ID NO: 504741 - DNA, 15 bp, Homo sapiens
gggggggaaaaaaag

SEQ ID NO: 504742 - DNA, 15 bp, Homo sapiens
agggggggaaaaaaa

SEQ ID NO: 504743 - DNA, 15 bp, Homo sapiens
tagggggggaaaaaa

SEQ ID NO: 504744 - DNA, 15 bp, Homo sapiens
ttagggggggaaaaa

SEQ ID NO: 504745 - DNA, 15 bp, Homo sapiens
tttagggggggaaaa

SEQ ID NO: 504746 - DNA, 15 bp, Homo sapiens
ttttagggggggaaa

SEQ ID NO: 504747 - DNA, 15 bp, Homo sapiens
attttagggggggaa

SEQ ID NO: 504748 - DNA, 15 bp, Homo sapiens
aattttaggggggga

SEQ ID NO: 504749 - DNA, 15 bp, Homo sapiens
aaattttaggggggg

SEQ ID NO: 504750 - DNA, 15 bp, Homo sapiens
caaattttagggggg

SEQ ID NO: 504751 - DNA, 15 bp, Homo sapiens
acaaattttaggggg

SEQ ID NO: 504752 - DNA, 15 bp, Homo sapiens
cacaaattttagggg

SEQ ID NO: 504753 - DNA, 15 bp, Homo sapiens
ccacaaattttaggg

SEQ ID NO: 504754 - DNA, 15 bp, Homo sapiens
cccacaaattttagg

SEQ ID NO: 504755 - DNA, 15 bp, Homo sapiens
acccacaaattttag

SEQ ID NO: 504756 - DNA, 15 bp, Homo sapiens
aacccacaaatttta

SEQ ID NO: 504757 - DNA, 15 bp, Homo sapiens
aaacccacaaatttt

SEQ ID NO: 504758 - DNA, 15 bp, Homo sapiens
aaaacccacaaattt

SEQ ID NO: 504759 - DNA, 15 bp, Homo sapiens
aaaaacccacaaatt

SEQ ID NO: 504760 - DNA, 15 bp, Homo sapiens
aaaaaacccacaaat

SEQ ID NO: 504761 - DNA, 15 bp, Homo sapiens
aaaaaaacccacaaa

SEQ ID NO: 504762 - DNA, 15 bp, Homo sapiens
aaaaaaaacccacaa

SEQ ID NO: 504763 - DNA, 15 bp, Homo sapiens
aaaaaaaaacccaca

SEQ ID NO: 504764 - DNA, 15 bp, Homo sapiens
aaaaaaaaaacccac

SEQ ID NO: 504765 - DNA, 15 bp, Homo sapiens
aaaaaaaaaaaccca

SEQ ID NO: 504766 - DNA, 15 bp, Homo sapiens
taaaaaaaaaaaccc

SEQ ID NO: 504767 - DNA, 15 bp, Homo sapiens
ttaaaaaaaaaaacc

SEQ ID NO: 504768 - DNA, 15 bp, Homo sapiens
tttaaaaaaaaaaac

SEQ ID NO: 504769 - DNA, 15 bp, Homo sapiens
ttttaaaaaaaaaaa

SEQ ID NO: 504770 - DNA, 15 bp, Homo sapiens
tttttaaaaaaaaaa

SEQ ID NO: 504771 - DNA, 15 bp, Homo sapiens
ttttttaaaaaaaaa

SEQ ID NO: 504772 - DNA, 15 bp, Homo sapiens
tttttttaaaaaaaa

SEQ ID NO: 504773 - DNA, 15 bp, Homo sapiens
ctttttttaaaaaaa

SEQ ID NO: 504774 - DNA, 15 bp, Homo sapiens
tctttttttaaaaaa

SEQ ID NO: 504775 - DNA, 15 bp, Homo sapiens
ttctttttttaaaaa

SEQ ID NO: 504776 - DNA, 15 bp, Homo sapiens
tttctttttttaaaa

SEQ ID NO: 504777 - DNA, 15 bp, Homo sapiens
ttttctttttttaaa

SEQ ID NO: 504778 - DNA, 15 bp, Homo sapiens
attttctttttttaa

SEQ ID NO: 504779 - DNA, 15 bp, Homo sapiens
cattttcttttttta

SEQ ID NO: 504780 - DNA, 15 bp, Homo sapiens
tcattttcttttttt

SEQ ID NO: 504781 - DNA, 15 bp, Homo sapiens
ttcattttctttttt

SEQ ID NO: 504782 - DNA, 15 bp, Homo sapiens
tttcattttcttttt

SEQ ID NO: 504783 - DNA, 15 bp, Homo sapiens
ttttcattttctttt

SEQ ID NO: 504784 - DNA, 15 bp, Homo sapiens
tttttcattttcttt

SEQ ID NO: 504785 - DNA, 15 bp, Homo sapiens
gtttttcattttctt

SEQ ID NO: 504786 - DNA, 15 bp, Homo sapiens
tgtttttcattttct

SEQ ID NO: 504787 - DNA, 15 bp, Homo sapiens
ttgtttttcattttc

SEQ ID NO: 504788 - DNA, 15 bp, Homo sapiens
gttgtttttcatttt

SEQ ID NO: 504789 - DNA, 15 bp, Homo sapiens
ggttgtttttcattt

SEQ ID NO: 504790 - DNA, 15 bp, Homo sapiens
tggttgtttttcatt

SEQ ID NO: 504791 - DNA, 15 bp, Homo sapiens
ttggttgtttttcat

SEQ ID NO: 504792 - DNA, 15 bp, Homo sapiens
cttggttgtttttca

SEQ ID NO: 504793 - DNA, 15 bp, Homo sapiens
gcttggttgtttttc

SEQ ID NO: 504794 - DNA, 15 bp, Homo sapiens
cgcttggttgttttt

SEQ ID NO: 504795 - DNA, 15 bp, Homo sapiens
gcgcttggttgtttt

SEQ ID NO: 504796 - DNA, 15 bp, Homo sapiens
tgcgcttggttgttt

SEQ ID NO: 504797 - DNA, 15 bp, Homo sapiens
atgcgcttggttgtt

SEQ ID NO: 504798 - DNA, 15 bp, Homo sapiens
gatgcgcttggttgt

SEQ ID NO: 504799 - DNA, 15 bp, Homo sapiens
ggatgcgcttggttg

SEQ ID NO: 504800 - DNA, 15 bp, Homo sapiens
tggatgcgcttggtt

SEQ ID NO: 504801 - DNA, 15 bp, Homo sapiens
ttggatgcgcttggt

SEQ ID NO: 504802 - DNA, 15 bp, Homo sapiens
attggatgcgcttgg

SEQ ID NO: 504803 - DNA, 15 bp, Homo sapiens
gattggatgcgcttg

SEQ ID NO: 504804 - DNA, 15 bp, Homo sapiens
agattggatgcgctt

SEQ ID NO: 504805 - DNA, 15 bp, Homo sapiens
gagattggatgcgct

SEQ ID NO: 504806 - DNA, 15 bp, Homo sapiens
tgagattggatgcgc

SEQ ID NO: 504807 - DNA, 15 bp, Homo sapiens
ttgagattggatgcg

SEQ ID NO: 504808 - DNA, 15 bp, Homo sapiens
cttgagattggatgc

SEQ ID NO: 504809 - DNA, 15 bp, Homo sapiens
ccttgagattggatg

SEQ ID NO: 504810 - DNA, 15 bp, Homo sapiens
tccttgagattggat

SEQ ID NO: 504811 - DNA, 15 bp, Homo sapiens
ttccttgagattgga

SEQ ID NO: 504812 - DNA, 15 bp, Homo sapiens
attccttgagattgg

SEQ ID NO: 504813 - DNA, 15 bp, Homo sapiens
gattccttgagattg

SEQ ID NO: 504814 - DNA, 15 bp, Homo sapiens
agattccttgagatt

SEQ ID NO: 504815 - DNA, 15 bp, Homo sapiens
aagattccttgagat

SEQ ID NO: 504816 - DNA, 15 bp, Homo sapiens
aaagattccttgaga

SEQ ID NO: 504817 - DNA, 15 bp, Homo sapiens
taaagattccttgag

SEQ ID NO: 504818 - DNA, 15 bp, Homo sapiens
ttaaagattccttga

SEQ ID NO: 504819 - DNA, 15 bp, Homo sapiens
cttaaagattccttg

SEQ ID NO: 504820 - DNA, 15 bp, Homo sapiens
gcttaaagattcctt

SEQ ID NO: 504821 - DNA, 15 bp, Homo sapiens
tgcttaaagattcct

SEQ ID NO: 504822 - DNA, 15 bp, Homo sapiens
ctgcttaaagattcc

SEQ ID NO: 504823 - DNA, 15 bp, Homo sapiens
tctgcttaaagattc

SEQ ID NO: 504824 - DNA, 15 bp, Homo sapiens
ctctgcttaaagatt

SEQ ID NO: 504825 - DNA, 15 bp, Homo sapiens
tctctgcttaaagat

SEQ ID NO: 504826 - DNA, 15 bp, Homo sapiens
ttctctgcttaaaga

SEQ ID NO: 504827 - DNA, 15 bp, Homo sapiens
cttctctgcttaaag

SEQ ID NO: 504828 - DNA, 15 bp, Homo sapiens
ccttctctgcttaaa

SEQ ID NO: 504829 - DNA, 15 bp, Homo sapiens
cccttctctgcttaa

SEQ ID NO: 504830 - DNA, 15 bp, Homo sapiens
gcccttctctgctta

SEQ ID NO: 504831 - DNA, 15 bp, Homo sapiens
tgcccttctctgctt

SEQ ID NO: 504832 - DNA, 15 bp, Homo sapiens
atgcccttctctgct

SEQ ID NO: 504833 - DNA, 15 bp, Homo sapiens
tatgcccttctctgc

SEQ ID NO: 504834 - DNA, 15 bp, Homo sapiens
ttatgcccttctctg

SEQ ID NO: 504835 - DNA, 15 bp, Homo sapiens
tttatgcccttctct

SEQ ID NO: 504836 - DNA, 15 bp, Homo sapiens
ttttatgcccttctc

SEQ ID NO: 504837 - DNA, 15 bp, Homo sapiens
gttttatgcccttct

SEQ ID NO: 504838 - DNA, 15 bp, Homo sapiens
tgttttatgcccttc

SEQ ID NO: 504839 - DNA, 15 bp, Homo sapiens
ctgttttatgccctt

SEQ ID NO: 504840 - DNA, 15 bp, Homo sapiens
gctgttttatgccct

SEQ ID NO: 504841 - DNA, 15 bp, Homo sapiens
agctgttttatgccc

SEQ ID NO: 504842 - DNA, 15 bp, Homo sapiens
aagctgttttatgcc

SEQ ID NO: 504843 - DNA, 15 bp, Homo sapiens
aaagctgttttatgc

SEQ ID NO: 504844 - DNA, 15 bp, Homo sapiens
caaagctgttttatg

SEQ ID NO: 504845 - DNA, 15 bp, Homo sapiens
ccaaagctgttttat

SEQ ID NO: 504846 - DNA, 15 bp, Homo sapiens
cccaaagctgtttta

SEQ ID NO: 504847 - DNA, 15 bp, Homo sapiens
ccccaaagctgtttt

SEQ ID NO: 504848 - DNA, 15 bp, Homo sapiens
accccaaagctgttt

SEQ ID NO: 504849 - DNA, 15 bp, Homo sapiens
caccccaaagctgtt

SEQ ID NO: 504850 - DNA, 15 bp, Homo sapiens
acaccccaaagctgt

SEQ ID NO: 504851 - DNA, 15 bp, Homo sapiens
gacaccccaaagctg

SEQ ID NO: 504852 - DNA, 15 bp, Homo sapiens
agacaccccaaagct

SEQ ID NO: 504853 - DNA, 15 bp, Homo sapiens
aagacaccccaaagc

SEQ ID NO: 504854 - DNA, 15 bp, Homo sapiens
aaagacaccccaaag

SEQ ID NO: 504855 - DNA, 15 bp, Homo sapiens
aaaagacaccccaaa

SEQ ID NO: 504856 - DNA, 15 bp, Homo sapiens
aaaaagacaccccaa

SEQ ID NO: 504857 - DNA, 15 bp, Homo sapiens
aaaaaagacacccca

SEQ ID NO: 504858 - DNA, 15 bp, Homo sapiens
aaaaaaagacacccc

SEQ ID NO: 504859 - DNA, 15 bp, Homo sapiens
caaaaaaagacaccc

SEQ ID NO: 504860 - DNA, 15 bp, Homo sapiens
ccaaaaaaagacacc

SEQ ID NO: 504861 - DNA, 15 bp, Homo sapiens
accaaaaaaagacac

SEQ ID NO: 504862 - DNA, 15 bp, Homo sapiens
caccaaaaaaagaca

SEQ ID NO: 504863 - DNA, 15 bp, Homo sapiens
tcaccaaaaaaagac

SEQ ID NO: 504864 - DNA, 15 bp, Homo sapiens
atcaccaaaaaaaga

SEQ ID NO: 504865 - DNA, 15 bp, Homo sapiens
aatcaccaaaaaaag

SEQ ID NO: 504866 - DNA, 15 bp, Homo sapiens
gaatcaccaaaaaaa

SEQ ID NO: 504867 - DNA, 15 bp, Homo sapiens
tgaatcaccaaaaaa

SEQ ID NO: 504868 - DNA, 15 bp, Homo sapiens
ttgaatcaccaaaaa

SEQ ID NO: 504869 - DNA, 15 bp, Homo sapiens
tttgaatcaccaaaa

SEQ ID NO: 504870 - DNA, 15 bp, Homo sapiens
atttgaatcaccaaa

SEQ ID NO: 504871 - DNA, 15 bp, Homo sapiens
catttgaatcaccaa

SEQ ID NO: 504872 - DNA, 15 bp, Homo sapiens
ccatttgaatcacca

SEQ ID NO: 504873 - DNA, 15 bp, Homo sapiens
cccatttgaatcacc

SEQ ID NO: 504874 - DNA, 15 bp, Homo sapiens
acccatttgaatcac

SEQ ID NO: 504875 - DNA, 15 bp, Homo sapiens
aacccatttgaatca

SEQ ID NO: 504876 - DNA, 15 bp, Homo sapiens
aaacccatttgaatc

SEQ ID NO: 504877 - DNA, 15 bp, Homo sapiens
aaaacccatttgaat

SEQ ID NO: 504878 - DNA, 15 bp, Homo sapiens
gaaaacccatttgaa

SEQ ID NO: 504879 - DNA, 15 bp, Homo sapiens
ggaaaacccatttga

SEQ ID NO: 504880 - DNA, 15 bp, Homo sapiens
tggaaaacccatttg

SEQ ID NO: 504881 - DNA, 15 bp, Homo sapiens
gtggaaaacccattt

SEQ ID NO: 504882 - DNA, 15 bp, Homo sapiens
cgtggaaaacccatt

SEQ ID NO: 504883 - DNA, 15 bp, Homo sapiens
gcgtggaaaacccat

SEQ ID NO: 504884 - DNA, 15 bp, Homo sapiens
agcgtggaaaaccca

SEQ ID NO: 504885 - DNA, 15 bp, Homo sapiens
tagcgtggaaaaccc

SEQ ID NO: 504886 - DNA, 15 bp, Homo sapiens
ctagcgtggaaaacc

SEQ ID NO: 504887 - DNA, 15 bp, Homo sapiens
cctagcgtggaaaac

SEQ ID NO: 504888 - DNA, 15 bp, Homo sapiens
ccctagcgtggaaaa

SEQ ID NO: 504889 - DNA, 15 bp, Homo sapiens
gccctagcgtggaaa

SEQ ID NO: 504890 - DNA, 15 bp, Homo sapiens
cgccctagcgtggaa

SEQ ID NO: 504891 - DNA, 15 bp, Homo sapiens
ccgccctagcgtgga

SEQ ID NO: 504892 - DNA, 15 bp, Homo sapiens
cccgccctagcgtgg

SEQ ID NO: 504893 - DNA, 15 bp, Homo sapiens
ccccgccctagcgtg

SEQ ID NO: 504894 - DNA, 15 bp, Homo sapiens
gccccgccctagcgt

SEQ ID NO: 504895 - DNA, 15 bp, Homo sapiens
tgccccgccctagcg

SEQ ID NO: 504896 - DNA, 15 bp, Homo sapiens
gtgccccgccctagc

SEQ ID NO: 504897 - DNA, 15 bp, Homo sapiens
tgtgccccgccctag

SEQ ID NO: 504898 - DNA, 15 bp, Homo sapiens
ctgtgccccgcccta

SEQ ID NO: 504899 - DNA, 15 bp, Homo sapiens
tctgtgccccgccct

SEQ ID NO: 504900 - DNA, 15 bp, Homo sapiens
atctgtgccccgccc

SEQ ID NO: 504901 - DNA, 15 bp, Homo sapiens
aatctgtgccccgcc

SEQ ID NO: 504902 - DNA, 15 bp, Homo sapiens
caatctgtgccccgc

SEQ ID NO: 504903 - DNA, 15 bp, Homo sapiens
ccaatctgtgccccg

SEQ ID NO: 504904 - DNA, 15 bp, Homo sapiens
tccaatctgtgcccc

SEQ ID NO: 504905 - DNA, 15 bp, Homo sapiens
ctccaatctgtgccc

SEQ ID NO: 504906 - DNA, 15 bp, Homo sapiens
tctccaatctgtgcc

SEQ ID NO: 504907 - DNA, 15 bp, Homo sapiens
ctctccaatctgtgc

SEQ ID NO: 504908 - DNA, 15 bp, Homo sapiens
cctctccaatctgtg

SEQ ID NO: 504909 - DNA, 15 bp, Homo sapiens
ccctctccaatctgt

SEQ ID NO: 504910 - DNA, 15 bp, Homo sapiens
gccctctccaatctg

SEQ ID NO: 504911 - DNA, 15 bp, Homo sapiens
agccctctccaatct

SEQ ID NO: 504912 - DNA, 15 bp, Homo sapiens
gagccctctccaatc

SEQ ID NO: 504913 - DNA, 15 bp, Homo sapiens
agagccctctccaat

SEQ ID NO: 504914 - DNA, 15 bp, Homo sapiens
cagagccctctccaa

SEQ ID NO: 504915 - DNA, 15 bp, Homo sapiens
acagagccctctcca

SEQ ID NO: 504916 - DNA, 15 bp, Homo sapiens
cacagagccctctcc

SEQ ID NO: 504917 - DNA, 15 bp, Homo sapiens
gcacagagccctctc

SEQ ID NO: 504918 - DNA, 15 bp, Homo sapiens
agcacagagccctct

SEQ ID NO: 504919 - DNA, 15 bp, Homo sapiens
cagcacagagccctc

SEQ ID NO: 504920 - DNA, 15 bp, Homo sapiens
tcagcacagagccct

SEQ ID NO: 504921 - DNA, 15 bp, Homo sapiens
gtcagcacagagccc

SEQ ID NO: 504922 - DNA, 15 bp, Homo sapiens
tgtcagcacagagcc

SEQ ID NO: 504923 - DNA, 15 bp, Homo sapiens
atgtcagcacagagc

SEQ ID NO: 504924 - DNA, 15 bp, Homo sapiens
catgtcagcacagag

SEQ ID NO: 504925 - DNA, 15 bp, Homo sapiens
ccatgtcagcacaga

SEQ ID NO: 504926 - DNA, 15 bp, Homo sapiens
gccatgtcagcacag

SEQ ID NO: 504927 - DNA, 15 bp, Homo sapiens
agccatgtcagcaca

SEQ ID NO: 504928 - DNA, 15 bp, Homo sapiens
gagccatgtcagcac

SEQ ID NO: 504929 - DNA, 15 bp, Homo sapiens
agagccatgtcagca

SEQ ID NO: 504930 - DNA, 15 bp, Homo sapiens
cagagccatgtcagc

SEQ ID NO: 504931 - DNA, 15 bp, Homo sapiens
ccagagccatgtcag

SEQ ID NO: 504932 - DNA, 15 bp, Homo sapiens
tccagagccatgtca

SEQ ID NO: 504933 - DNA, 15 bp, Homo sapiens
gtccagagccatgtc

SEQ ID NO: 504934 - DNA, 15 bp, Homo sapiens
agtccagagccatgt

SEQ ID NO: 504935 - DNA, 15 bp, Homo sapiens
gagtccagagccatg

SEQ ID NO: 504936 - DNA, 15 bp, Homo sapiens
agagtccagagccat

SEQ ID NO: 504937 - DNA, 15 bp, Homo sapiens
tagagtccagagcca

SEQ ID NO: 504938 - DNA, 15 bp, Homo sapiens
ttagagtccagagcc

SEQ ID NO: 504939 - DNA, 15 bp, Homo sapiens
tttagagtccagagc

SEQ ID NO: 504940 - DNA, 15 bp, Homo sapiens
ctttagagtccagag

SEQ ID NO: 504941 - DNA, 15 bp, Homo sapiens
tctttagagtccaga

SEQ ID NO: 504942 - DNA, 15 bp, Homo sapiens
gtctttagagtccag

SEQ ID NO: 504943 - DNA, 15 bp, Homo sapiens
ggtctttagagtcca

SEQ ID NO: 504944 - DNA, 15 bp, Homo sapiens
tggtctttagagtcc

SEQ ID NO: 504945 - DNA, 15 bp, Homo sapiens
ttggtctttagagtc

SEQ ID NO: 504946 - DNA, 15 bp, Homo sapiens
tttggtctttagagt

SEQ ID NO: 504947 - DNA, 15 bp, Homo sapiens
gtttggtctttagag

SEQ ID NO: 504948 - DNA, 15 bp, Homo sapiens
agtttggtctttaga

SEQ ID NO: 504949 - DNA, 15 bp, Homo sapiens
aagtttggtctttag

SEQ ID NO: 504950 - DNA, 15 bp, Homo sapiens
gaagtttggtcttta

SEQ ID NO: 504951 - DNA, 15 bp, Homo sapiens
tgaagtttggtcttt

SEQ ID NO: 504952 - DNA, 15 bp, Homo sapiens
gtgaagtttggtctt

SEQ ID NO: 504953 - DNA, 15 bp, Homo sapiens
agtgaagtttggtct

SEQ ID NO: 504954 - DNA, 15 bp, Homo sapiens
gagtgaagtttggtc

SEQ ID NO: 504955 - DNA, 15 bp, Homo sapiens
agagtgaagtttggt

SEQ ID NO: 504956 - DNA, 15 bp, Homo sapiens
cagagtgaagtttgg

SEQ ID NO: 504957 - DNA, 15 bp, Homo sapiens
ccagagtgaagtttg

SEQ ID NO: 504958 - DNA, 15 bp, Homo sapiens
cccagagtgaagttt

SEQ ID NO: 504959 - DNA, 15 bp, Homo sapiens
gcccagagtgaagtt

SEQ ID NO: 504960 - DNA, 15 bp, Homo sapiens
tgcccagagtgaagt

SEQ ID NO: 504961 - DNA, 15 bp, Homo sapiens
gtgcccagagtgaag

SEQ ID NO: 504962 - DNA, 15 bp, Homo sapiens
tgtgcccagagtgaa

SEQ ID NO: 504963 - DNA, 15 bp, Homo sapiens
gtgtgcccagagtga

SEQ ID NO: 504964 - DNA, 15 bp, Homo sapiens
agtgtgcccagagtg

SEQ ID NO: 504965 - DNA, 15 bp, Homo sapiens
gagtgtgcccagagt

SEQ ID NO: 504966 - DNA, 15 bp, Homo sapiens
agagtgtgcccagag

SEQ ID NO: 504967 - DNA, 15 bp, Homo sapiens
cagagtgtgcccaga

SEQ ID NO: 504968 - DNA, 15 bp, Homo sapiens
gcagagtgtgcccag

SEQ ID NO: 504969 - DNA, 15 bp, Homo sapiens
ggcagagtgtgccca

SEQ ID NO: 504970 - DNA, 15 bp, Homo sapiens
tggcagagtgtgccc

SEQ ID NO: 504971 - DNA, 15 bp, Homo sapiens
ctggcagagtgtgcc

SEQ ID NO: 504972 - DNA, 15 bp, Homo sapiens
gctggcagagtgtgc

SEQ ID NO: 504973 - DNA, 15 bp, Homo sapiens
tgctggcagagtgtg

SEQ ID NO: 504974 - DNA, 15 bp, Homo sapiens
ttgctggcagagtgt

SEQ ID NO: 504975 - DNA, 15 bp, Homo sapiens
tttgctggcagagtg

SEQ ID NO: 504976 - DNA, 15 bp, Homo sapiens
ctttgctggcagagt

SEQ ID NO: 504977 - DNA, 15 bp, Homo sapiens
tctttgctggcagag

SEQ ID NO: 504978 - DNA, 15 bp, Homo sapiens
ctctttgctggcaga

SEQ ID NO: 504979 - DNA, 15 bp, Homo sapiens
cctctttgctggcag

SEQ ID NO: 504980 - DNA, 15 bp, Homo sapiens
tcctctttgctggca

SEQ ID NO: 504981 - DNA, 15 bp, Homo sapiens
gtcctctttgctggc

SEQ ID NO: 504982 - DNA, 15 bp, Homo sapiens
agtcctctttgctgg

SEQ ID NO: 504983 - DNA, 15 bp, Homo sapiens
gagtcctctttgctg

SEQ ID NO: 504984 - DNA, 15 bp, Homo sapiens
cgagtcctctttgct

SEQ ID NO: 504985 - DNA, 15 bp, Homo sapiens
gcgagtcctctttgc

SEQ ID NO: 504986 - DNA, 15 bp, Homo sapiens
agcgagtcctctttg

SEQ ID NO: 504987 - DNA, 15 bp, Homo sapiens
aagcgagtcctcttt

SEQ ID NO: 504988 - DNA, 15 bp, Homo sapiens
caagcgagtcctctt

SEQ ID NO: 504989 - DNA, 15 bp, Homo sapiens
acaagcgagtcctct

SEQ ID NO: 504990 - DNA, 15 bp, Homo sapiens
tacaagcgagtcctc

SEQ ID NO: 504991 - DNA, 15 bp, Homo sapiens
ttacaagcgagtcct

SEQ ID NO: 504992 - DNA, 15 bp, Homo sapiens
tttacaagcgagtcc

SEQ ID NO: 504993 - DNA, 15 bp, Homo sapiens
atttacaagcgagtc

SEQ ID NO: 504994 - DNA, 15 bp, Homo sapiens
tatttacaagcgagt

SEQ ID NO: 504995 - DNA, 15 bp, Homo sapiens
gtatttacaagcgag

SEQ ID NO: 504996 - DNA, 15 bp, Homo sapiens
ggtatttacaagcga

SEQ ID NO: 504997 - DNA, 15 bp, Homo sapiens
tggtatttacaagcg

SEQ ID NO: 504998 - DNA, 15 bp, Homo sapiens
ctggtatttacaagc

SEQ ID NO: 504999 - DNA, 15 bp, Homo sapiens
cctggtatttacaag

SEQ ID NO: 505000 - DNA, 15 bp, Homo sapiens
tcctggtatttacaa

SEQ ID NO: 505001 - DNA, 15 bp, Homo sapiens
atcctggtatttaca

SEQ ID NO: 505002 - DNA, 15 bp, Homo sapiens
aatcctggtatttac

SEQ ID NO: 505003 - DNA, 15 bp, Homo sapiens
aaatcctggtattta

SEQ ID NO: 505004 - DNA, 15 bp, Homo sapiens
aaaatcctggtattt

SEQ ID NO: 505005 - DNA, 15 bp, Homo sapiens
aaaaatcctggtatt

SEQ ID NO: 505006 - DNA, 15 bp, Homo sapiens
aaaaaatcctggtat

SEQ ID NO: 505007 - DNA, 15 bp, Homo sapiens
aaaaaaatcctggta

SEQ ID NO: 505008 - DNA, 15 bp, Homo sapiens
aaaaaaaatcctggt

SEQ ID NO: 505009 - DNA, 15 bp, Homo sapiens
aaaaaaaaatcctgg

SEQ ID NO: 505010 - DNA, 15 bp, Homo sapiens
aaaaaaaaaatcctg

SEQ ID NO: 505011 - DNA, 15 bp, Homo sapiens
aaaaaaaaaaatcct

SEQ ID NO: 505012 - DNA, 15 bp, Homo sapiens
aaaaaaaaaaaatcc

SEQ ID NO: 505013 - DNA, 15 bp, Homo sapiens
aaaaaaaaaaaaatc

SEQ ID NO: 505014 - DNA, 15 bp, Homo sapiens
aaaaaaaaaaaaaat

SEQ ID NO: 505015 - DNA, 15 bp, Homo sapiens
aaaaaaaaaaaaaaa

SEQ ID NO: 505016 - DNA, 15 bp, Homo sapiens
caaaaaaaaaaaaaa

SEQ ID NO: 505017 - DNA, 15 bp, Homo sapiens
tcaaaaaaaaaaaaa

SEQ ID NO: 505018 - DNA, 15 bp, Homo sapiens
ttcaaaaaaaaaaaa

SEQ ID NO: 505019 - DNA, 15 bp, Homo sapiens
cttcaaaaaaaaaaa

SEQ ID NO: 505020 - DNA, 15 bp, Homo sapiens
ccttcaaaaaaaaaa

SEQ ID NO: 505021 - DNA, 15 bp, Homo sapiens
cccttcaaaaaaaaa

SEQ ID NO: 505022 - DNA, 15 bp, Homo sapiens
tcccttcaaaaaaaa

SEQ ID NO: 505023 - DNA, 15 bp, Homo sapiens
ctcccttcaaaaaaa

SEQ ID NO: 505024 - DNA, 15 bp, Homo sapiens
cctcccttcaaaaaa

SEQ ID NO: 505025 - DNA, 15 bp, Homo sapiens
tcctcccttcaaaaa

SEQ ID NO: 505026 - DNA, 15 bp, Homo sapiens
gtcctcccttcaaaa

SEQ ID NO: 505027 - DNA, 15 bp, Homo sapiens
cgtcctcccttcaaa

SEQ ID NO: 505028 - DNA, 15 bp, Homo sapiens
ccgtcctcccttcaa

SEQ ID NO: 505029 - DNA, 15 bp, Homo sapiens
cccgtcctcccttca

SEQ ID NO: 505030 - DNA, 15 bp, Homo sapiens
tcccgtcctcccttc

SEQ ID NO: 505031 - DNA, 15 bp, Homo sapiens
ctcccgtcctccctt

SEQ ID NO: 505032 - DNA, 15 bp, Homo sapiens
gctcccgtcctccct

SEQ ID NO: 505033 - DNA, 15 bp, Homo sapiens
agctcccgtcctccc

SEQ ID NO: 505034 - DNA, 15 bp, Homo sapiens
cagctcccgtcctcc

SEQ ID NO: 505035 - DNA, 15 bp, Homo sapiens
ccagctcccgtcctc

SEQ ID NO: 505036 - DNA, 15 bp, Homo sapiens
cccagctcccgtcct

SEQ ID NO: 505037 - DNA, 15 bp, Homo sapiens
ccccagctcccgtcc

SEQ ID NO: 505038 - DNA, 15 bp, Homo sapiens
tccccagctcccgtc

SEQ ID NO: 505039 - DNA, 15 bp, Homo sapiens
ctccccagctcccgt

SEQ ID NO: 505040 - DNA, 15 bp, Homo sapiens
tctccccagctcccg

SEQ ID NO: 505041 - DNA, 15 bp, Homo sapiens
ctctccccagctccc

SEQ ID NO: 505042 - DNA, 15 bp, Homo sapiens
cctctccccagctcc

SEQ ID NO: 505043 - DNA, 15 bp, Homo sapiens
tcctctccccagctc

SEQ ID NO: 505044 - DNA, 15 bp, Homo sapiens
ttcctctccccagct

SEQ ID NO: 505045 - DNA, 15 bp, Homo sapiens
tttcctctccccagc

SEQ ID NO: 505046 - DNA, 15 bp, Homo sapiens
ctttcctctccccag

SEQ ID NO: 505047 - DNA, 15 bp, Homo sapiens
tctttcctctcccca

SEQ ID NO: 505048 - DNA, 15 bp, Homo sapiens
ctctttcctctcccc

SEQ ID NO: 505049 - DNA, 15 bp, Homo sapiens
actctttcctctccc

SEQ ID NO: 505050 - DNA, 15 bp, Homo sapiens
gactctttcctctcc

SEQ ID NO: 505051 - DNA, 15 bp, Homo sapiens
agactctttcctctc

SEQ ID NO: 505052 - DNA, 15 bp, Homo sapiens
aagactctttcctct

SEQ ID NO: 505053 - DNA, 15 bp, Homo sapiens
gaagactctttcctc

SEQ ID NO: 505054 - DNA, 15 bp, Homo sapiens
tgaagactctttcct

SEQ ID NO: 505055 - DNA, 15 bp, Homo sapiens
ttgaagactctttcc

SEQ ID NO: 505056 - DNA, 15 bp, Homo sapiens
gttgaagactctttc

SEQ ID NO: 505057 - DNA, 15 bp, Homo sapiens
tgttgaagactcttt

SEQ ID NO: 505058 - DNA, 15 bp, Homo sapiens
atgttgaagactctt

SEQ ID NO: 505059 - DNA, 15 bp, Homo sapiens
tatgttgaagactct

SEQ ID NO: 505060 - DNA, 15 bp, Homo sapiens
ttatgttgaagactc

SEQ ID NO: 505061 - DNA, 15 bp, Homo sapiens
gttatgttgaagact

SEQ ID NO: 505062 - DNA, 15 bp, Homo sapiens
ggttatgttgaagac

SEQ ID NO: 505063 - DNA, 15 bp, Homo sapiens
gggttatgttgaaga

SEQ ID NO: 505064 - DNA, 15 bp, Homo sapiens
tgggttatgttgaag

SEQ ID NO: 505065 - DNA, 15 bp, Homo sapiens
gtgggttatgttgaa

SEQ ID NO: 505066 - DNA, 15 bp, Homo sapiens
agtgggttatgttga

SEQ ID NO: 505067 - DNA, 15 bp, Homo sapiens
aagtgggttatgttg

SEQ ID NO: 505068 - DNA, 15 bp, Homo sapiens
caagtgggttatgtt

SEQ ID NO: 505069 - DNA, 15 bp, Homo sapiens
acaagtgggttatgt

SEQ ID NO: 505070 - DNA, 15 bp, Homo sapiens
gacaagtgggttatg

SEQ ID NO: 505071 - DNA, 15 bp, Homo sapiens
tgacaagtgggttat

SEQ ID NO: 505072 - DNA, 15 bp, Homo sapiens
gtgacaagtgggtta

SEQ ID NO: 505073 - DNA, 15 bp, Homo sapiens
agtgacaagtgggtt

SEQ ID NO: 505074 - DNA, 15 bp, Homo sapiens
cagtgacaagtgggt

SEQ ID NO: 505075 - DNA, 15 bp, Homo sapiens
tcagtgacaagtggg

SEQ ID NO: 505076 - DNA, 15 bp, Homo sapiens
gtcagtgacaagtgg

SEQ ID NO: 505077 - DNA, 15 bp, Homo sapiens
tgtcagtgacaagtg

SEQ ID NO: 505078 - DNA, 15 bp, Homo sapiens
gtgtcagtgacaagt

SEQ ID NO: 505079 - DNA, 15 bp, Homo sapiens
tgtgtcagtgacaag

SEQ ID NO: 505080 - DNA, 15 bp, Homo sapiens
ttgtgtcagtgacaa

SEQ ID NO: 505081 - DNA, 15 bp, Homo sapiens
tttgtgtcagtgaca

SEQ ID NO: 505082 - DNA, 15 bp, Homo sapiens
ctttgtgtcagtgac

SEQ ID NO: 505083 - DNA, 15 bp, Homo sapiens
cctttgtgtcagtga

SEQ ID NO: 505084 - DNA, 15 bp, Homo sapiens
tcctttgtgtcagtg

SEQ ID NO: 505085 - DNA, 15 bp, Homo sapiens
ttcctttgtgtcagt

SEQ ID NO: 505086 - DNA, 15 bp, Homo sapiens
cttcctttgtgtcag

SEQ ID NO: 505087 - DNA, 15 bp, Homo sapiens
acttcctttgtgtca

SEQ ID NO: 505088 - DNA, 15 bp, Homo sapiens
cacttcctttgtgtc

SEQ ID NO: 505089 - DNA, 15 bp, Homo sapiens
gcacttcctttgtgt

SEQ ID NO: 505090 - DNA, 15 bp, Homo sapiens
ggcacttcctttgtg

SEQ ID NO: 505091 - DNA, 15 bp, Homo sapiens
gggcacttcctttgt

SEQ ID NO: 505092 - DNA, 15 bp, Homo sapiens
ggggcacttcctttg

SEQ ID NO: 505093 - DNA, 15 bp, Homo sapiens
gggggcacttccttt

SEQ ID NO: 505094 - DNA, 15 bp, Homo sapiens
agggggcacttcctt

SEQ ID NO: 505095 - DNA, 15 bp, Homo sapiens
gagggggcacttcct

SEQ ID NO: 505096 - DNA, 15 bp, Homo sapiens
ggagggggcacttcc

SEQ ID NO: 505097 - DNA, 15 bp, Homo sapiens
gggagggggcacttc

SEQ ID NO: 505098 - DNA, 15 bp, Homo sapiens
ggggagggggcactt

SEQ ID NO: 505099 - DNA, 15 bp, Homo sapiens
cggggagggggcact

SEQ ID NO: 505100 - DNA, 15 bp, Homo sapiens
ccggggagggggcac

SEQ ID NO: 505101 - DNA, 15 bp, Homo sapiens
gccggggagggggca

SEQ ID NO: 505102 - DNA, 15 bp, Homo sapiens
tgccggggagggggc

SEQ ID NO: 505103 - DNA, 15 bp, Homo sapiens
gtgccggggaggggg

SEQ ID NO: 505104 - DNA, 15 bp, Homo sapiens
ggtgccggggagggg

SEQ ID NO: 505105 - DNA, 15 bp, Homo sapiens
gggtgccggggaggg

SEQ ID NO: 505106 - DNA, 15 bp, Homo sapiens
agggtgccggggagg

SEQ ID NO: 505107 - DNA, 15 bp, Homo sapiens
gagggtgccggggag

SEQ ID NO: 505108 - DNA, 15 bp, Homo sapiens
agagggtgccgggga

SEQ ID NO: 505109 - DNA, 15 bp, Homo sapiens
cagagggtgccgggg

SEQ ID NO: 505110 - DNA, 15 bp, Homo sapiens
ccagagggtgccggg

SEQ ID NO: 505111 - DNA, 15 bp, Homo sapiens
gccagagggtgccgg

SEQ ID NO: 505112 - DNA, 15 bp, Homo sapiens
ggccagagggtgccg

SEQ ID NO: 505113 - DNA, 15 bp, Homo sapiens
cggccagagggtgcc

SEQ ID NO: 505114 - DNA, 15 bp, Homo sapiens
gcggccagagggtgc

SEQ ID NO: 505115 - DNA, 15 bp, Homo sapiens
ggcggccagagggtg

SEQ ID NO: 505116 - DNA, 15 bp, Homo sapiens
aggcggccagagggt

SEQ ID NO: 505117 - DNA, 15 bp, Homo sapiens
taggcggccagaggg

SEQ ID NO: 505118 - DNA, 15 bp, Homo sapiens
ctaggcggccagagg

SEQ ID NO: 505119 - DNA, 15 bp, Homo sapiens
cctaggcggccagag

SEQ ID NO: 505120 - DNA, 15 bp, Homo sapiens
gcctaggcggccaga

SEQ ID NO: 505121 - DNA, 15 bp, Homo sapiens
agcctaggcggccag

SEQ ID NO: 505122 - DNA, 15 bp, Homo sapiens
gagcctaggcggcca

SEQ ID NO: 505123 - DNA, 15 bp, Homo sapiens
tgagcctaggcggcc

SEQ ID NO: 505124 - DNA, 15 bp, Homo sapiens
ctgagcctaggcggc

SEQ ID NO: 505125 - DNA, 15 bp, Homo sapiens
gctgagcctaggcgg

SEQ ID NO: 505126 - DNA, 15 bp, Homo sapiens
cgctgagcctaggcg

SEQ ID NO: 505127 - DNA, 15 bp, Homo sapiens
ccgctgagcctaggc

SEQ ID NO: 505128 - DNA, 15 bp, Homo sapiens
gccgctgagcctagg

SEQ ID NO: 505129 - DNA, 15 bp, Homo sapiens
cgccgctgagcctag

SEQ ID NO: 505130 - DNA, 15 bp, Homo sapiens
tcgccgctgagccta

SEQ ID NO: 505131 - DNA, 15 bp, Homo sapiens
gtcgccgctgagcct

SEQ ID NO: 505132 - DNA, 15 bp, Homo sapiens
ggtcgccgctgagcc

SEQ ID NO: 505133 - DNA, 15 bp, Homo sapiens
cggtcgccgctgagc

SEQ ID NO: 505134 - DNA, 15 bp, Homo sapiens
gcggtcgccgctgag

SEQ ID NO: 505135 - DNA, 15 bp, Homo sapiens
ggcggtcgccgctga

SEQ ID NO: 505136 - DNA, 15 bp, Homo sapiens
gggcggtcgccgctg

SEQ ID NO: 505137 - DNA, 15 bp, Homo sapiens
agggcggtcgccgct

SEQ ID NO: 505138 - DNA, 15 bp, Homo sapiens
gagggcggtcgccgc

SEQ ID NO: 505139 - DNA, 15 bp, Homo sapiens
ggagggcggtcgccg

SEQ ID NO: 505140 - DNA, 15 bp, Homo sapiens
cggagggcggtcgcc

SEQ ID NO: 505141 - DNA, 15 bp, Homo sapiens
gcggagggcggtcgc

SEQ ID NO: 505142 - DNA, 15 bp, Homo sapiens
cgcggagggcggtcg

SEQ ID NO: 505143 - DNA, 15 bp, Homo sapiens
tcgcggagggcggtc

SEQ ID NO: 505144 - DNA, 15 bp, Homo sapiens
ttcgcggagggcggt

SEQ ID NO: 505145 - DNA, 15 bp, Homo sapiens
tttcgcggagggcgg

SEQ ID NO: 505146 - DNA, 15 bp, Homo sapiens
ttttcgcggagggcg

SEQ ID NO: 505147 - DNA, 15 bp, Homo sapiens
attttcgcggagggc

SEQ ID NO: 505148 - DNA, 15 bp, Homo sapiens
tattttcgcggaggg

SEQ ID NO: 505149 - DNA, 15 bp, Homo sapiens
ctattttcgcggagg

SEQ ID NO: 505150 - DNA, 15 bp, Homo sapiens
actattttcgcggag

SEQ ID NO: 505151 - DNA, 15 bp, Homo sapiens
aactattttcgcgga

SEQ ID NO: 505152 - DNA, 15 bp, Homo sapiens
aaactattttcgcgg

SEQ ID NO: 505153 - DNA, 15 bp, Homo sapiens
caaactattttcgcg

SEQ ID NO: 505154 - DNA, 15 bp, Homo sapiens
acaaactattttcgc

SEQ ID NO: 505155 - DNA, 15 bp, Homo sapiens
aacaaactattttcg

SEQ ID NO: 505156 - DNA, 15 bp, Homo sapiens
aaacaaactattttc

SEQ ID NO: 505157 - DNA, 15 bp, Homo sapiens
taaacaaactatttt

SEQ ID NO: 505158 - DNA, 15 bp, Homo sapiens
ttaaacaaactattt

SEQ ID NO: 505159 - DNA, 15 bp, Homo sapiens
attaaacaaactatt

SEQ ID NO: 505160 - DNA, 15 bp, Homo sapiens
cattaaacaaactat

SEQ ID NO: 505161 - DNA, 15 bp, Homo sapiens
acattaaacaaacta

SEQ ID NO: 505162 - DNA, 15 bp, Homo sapiens
cacattaaacaaact

SEQ ID NO: 505163 - DNA, 15 bp, Homo sapiens
tcacattaaacaaac

SEQ ID NO: 505164 - DNA, 15 bp, Homo sapiens
ttcacattaaacaaa

SEQ ID NO: 505165 - DNA, 15 bp, Homo sapiens
gttcacattaaacaa

SEQ ID NO: 505166 - DNA, 15 bp, Homo sapiens
agttcacattaaaca

SEQ ID NO: 505167 - DNA, 15 bp, Homo sapiens
aagttcacattaaac

SEQ ID NO: 505168 - DNA, 15 bp, Homo sapiens
caagttcacattaaa

SEQ ID NO: 505169 - DNA, 15 bp, Homo sapiens
acaagttcacattaa

SEQ ID NO: 505170 - DNA, 15 bp, Homo sapiens
tacaagttcacatta

SEQ ID NO: 505171 - DNA, 15 bp, Homo sapiens
ctacaagttcacatt

SEQ ID NO: 505172 - DNA, 15 bp, Homo sapiens
gctacaagttcacat

SEQ ID NO: 505173 - DNA, 15 bp, Homo sapiens
agctacaagttcaca

SEQ ID NO: 505174 - DNA, 15 bp, Homo sapiens
cagctacaagttcac

SEQ ID NO: 505175 - DNA, 15 bp, Homo sapiens
acagctacaagttca

SEQ ID NO: 505176 - DNA, 15 bp, Homo sapiens
tacagctacaagttc

SEQ ID NO: 505177 - DNA, 15 bp, Homo sapiens
ttacagctacaagtt

SEQ ID NO: 505178 - DNA, 15 bp, Homo sapiens
tttacagctacaagt

SEQ ID NO: 505179 - DNA, 15 bp, Homo sapiens
ttttacagctacaag

SEQ ID NO: 505180 - DNA, 15 bp, Homo sapiens
gttttacagctacaa

SEQ ID NO: 505181 - DNA, 15 bp, Homo sapiens
cgttttacagctaca

SEQ ID NO: 505182 - DNA, 15 bp, Homo sapiens
gcgttttacagctac

SEQ ID NO: 505183 - DNA, 15 bp, Homo sapiens
agcgttttacagcta

SEQ ID NO: 505184 - DNA, 15 bp, Homo sapiens
cagcgttttacagct

SEQ ID NO: 505185 - DNA, 15 bp, Homo sapiens
acagcgttttacagc

SEQ ID NO: 505186 - DNA, 15 bp, Homo sapiens
gacagcgttttacag

SEQ ID NO: 505187 - DNA, 15 bp, Homo sapiens
tgacagcgttttaca

SEQ ID NO: 505188 - DNA, 15 bp, Homo sapiens
ttgacagcgttttac

SEQ ID NO: 505189 - DNA, 15 bp, Homo sapiens
tttgacagcgtttta

SEQ ID NO: 505190 - DNA, 15 bp, Homo sapiens
ttttgacagcgtttt

SEQ ID NO: 505191 - DNA, 15 bp, Homo sapiens
cttttgacagcgttt

SEQ ID NO: 505192 - DNA, 15 bp, Homo sapiens
acttttgacagcgtt

SEQ ID NO: 505193 - DNA, 15 bp, Homo sapiens
aacttttgacagcgt

SEQ ID NO: 505194 - DNA, 15 bp, Homo sapiens
caacttttgacagcg

SEQ ID NO: 505195 - DNA, 15 bp, Homo sapiens
ccaacttttgacagc

SEQ ID NO: 505196 - DNA, 15 bp, Homo sapiens
tccaacttttgacag

SEQ ID NO: 505197 - DNA, 15 bp, Homo sapiens
gtccaacttttgaca

SEQ ID NO: 505198 - DNA, 15 bp, Homo sapiens
agtccaacttttgac

SEQ ID NO: 505199 - DNA, 15 bp, Homo sapiens
tagtccaacttttga

SEQ ID NO: 505200 - DNA, 15 bp, Homo sapiens
ttagtccaacttttg

SEQ ID NO: 505201 - DNA, 15 bp, Homo sapiens
tttagtccaactttt

SEQ ID NO: 505202 - DNA, 15 bp, Homo sapiens
atttagtccaacttt

SEQ ID NO: 505203 - DNA, 15 bp, Homo sapiens
catttagtccaactt

SEQ ID NO: 505204 - DNA, 15 bp, Homo sapiens
gcatttagtccaact

SEQ ID NO: 505205 - DNA, 15 bp, Homo sapiens
ggcatttagtccaac

SEQ ID NO: 505206 - DNA, 15 bp, Homo sapiens
aggcatttagtccaa

SEQ ID NO: 505207 - DNA, 15 bp, Homo sapiens
taggcatttagtcca

SEQ ID NO: 505208 - DNA, 15 bp, Homo sapiens
ctaggcatttagtcc

SEQ ID NO: 505209 - DNA, 15 bp, Homo sapiens
actaggcatttagtc

SEQ ID NO: 505210 - DNA, 15 bp, Homo sapiens
aactaggcatttagt

SEQ ID NO: 505211 - DNA, 15 bp, Homo sapiens
aaactaggcatttag

SEQ ID NO: 505212 - DNA, 15 bp, Homo sapiens
aaaactaggcattta

SEQ ID NO: 505213 - DNA, 15 bp, Homo sapiens
aaaaactaggcattt

SEQ ID NO: 505214 - DNA, 15 bp, Homo sapiens
taaaaactaggcatt

SEQ ID NO: 505215 - DNA, 15 bp, Homo sapiens
ctaaaaactaggcat

SEQ ID NO: 505216 - DNA, 15 bp, Homo sapiens
actaaaaactaggca

SEQ ID NO: 505217 - DNA, 15 bp, Homo sapiens
tactaaaaactaggc

SEQ ID NO: 505218 - DNA, 15 bp, Homo sapiens
ttactaaaaactagg

SEQ ID NO: 505219 - DNA, 15 bp, Homo sapiens
attactaaaaactag

SEQ ID NO: 505220 - DNA, 15 bp, Homo sapiens
gattactaaaaacta

SEQ ID NO: 505221 - DNA, 15 bp, Homo sapiens
agattactaaaaact

SEQ ID NO: 505222 - DNA, 15 bp, Homo sapiens
cagattactaaaaac

SEQ ID NO: 505223 - DNA, 15 bp, Homo sapiens
acagattactaaaaa

SEQ ID NO: 505224 - DNA, 15 bp, Homo sapiens
tacagattactaaaa

SEQ ID NO: 505225 - DNA, 15 bp, Homo sapiens
gtacagattactaaa

SEQ ID NO: 505226 - DNA, 15 bp, Homo sapiens
tgtacagattactaa

SEQ ID NO: 505227 - DNA, 15 bp, Homo sapiens
atgtacagattacta

SEQ ID NO: 505228 - DNA, 15 bp, Homo sapiens
aatgtacagattact

SEQ ID NO: 505229 - DNA, 15 bp, Homo sapiens
aaatgtacagattac

SEQ ID NO: 505230 - DNA, 15 bp, Homo sapiens
aaaatgtacagatta

SEQ ID NO: 505231 - DNA, 15 bp, Homo sapiens
caaaatgtacagatt

SEQ ID NO: 505232 - DNA, 15 bp, Homo sapiens
acaaaatgtacagat

SEQ ID NO: 505233 - DNA, 15 bp, Homo sapiens
aacaaaatgtacaga

SEQ ID NO: 505234 - DNA, 15 bp, Homo sapiens
caacaaaatgtacag

SEQ ID NO: 505235 - DNA, 15 bp, Homo sapiens
acaacaaaatgtaca

SEQ ID NO: 505236 - DNA, 15 bp, Homo sapiens
tacaacaaaatgtac

SEQ ID NO: 505237 - DNA, 15 bp, Homo sapiens
ttacaacaaaatgta

SEQ ID NO: 505238 - DNA, 15 bp, Homo sapiens
tttacaacaaaatgt

SEQ ID NO: 505239 - DNA, 15 bp, Homo sapiens
ttttacaacaaaatg

SEQ ID NO: 505240 - DNA, 15 bp, Homo sapiens
tttttacaacaaaat

SEQ ID NO: 505241 - DNA, 15 bp, Homo sapiens
ctttttacaacaaaa

SEQ ID NO: 505242 - DNA, 15 bp, Homo sapiens
tctttttacaacaaa

SEQ ID NO: 505243 - DNA, 15 bp, Homo sapiens
ttctttttacaacaa

SEQ ID NO: 505244 - DNA, 15 bp, Homo sapiens
tttctttttacaaca

SEQ ID NO: 505245 - DNA, 15 bp, Homo sapiens
ttttctttttacaac

SEQ ID NO: 505246 - DNA, 15 bp, Homo sapiens
tttttctttttacaa

SEQ ID NO: 505247 - DNA, 15 bp, Homo sapiens
gtttttctttttaca

SEQ ID NO: 505248 - DNA, 15 bp, Homo sapiens
ggtttttctttttac

SEQ ID NO: 505249 - DNA, 15 bp, Homo sapiens
tggtttttcttttta

SEQ ID NO: 505250 - DNA, 15 bp, Homo sapiens
gtggtttttcttttt

SEQ ID NO: 505251 - DNA, 15 bp, Homo sapiens
agtggtttttctttt

SEQ ID NO: 505252 - DNA, 15 bp, Homo sapiens
gagtggtttttcttt

SEQ ID NO: 505253 - DNA, 15 bp, Homo sapiens
ggagtggtttttctt

SEQ ID NO: 505254 - DNA, 15 bp, Homo sapiens
gggagtggtttttct

SEQ ID NO: 505255 - DNA, 15 bp, Homo sapiens
tgggagtggtttttc

SEQ ID NO: 505256 - DNA, 15 bp, Homo sapiens
ctgggagtggttttt

SEQ ID NO: 505257 - DNA, 15 bp, Homo sapiens
actgggagtggtttt

SEQ ID NO: 505258 - DNA, 15 bp, Homo sapiens
gactgggagtggttt

SEQ ID NO: 505259 - DNA, 15 bp, Homo sapiens
ggactgggagtggtt

SEQ ID NO: 505260 - DNA, 15 bp, Homo sapiens
gggactgggagtggt

SEQ ID NO: 505261 - DNA, 15 bp, Homo sapiens
ggggactgggagtgg

SEQ ID NO: 505262 - DNA, 15 bp, Homo sapiens
tggggactgggagtg

SEQ ID NO: 505263 - DNA, 15 bp, Homo sapiens
ctggggactgggagt

SEQ ID NO: 505264 - DNA, 15 bp, Homo sapiens
gctggggactgggag

SEQ ID NO: 505265 - DNA, 15 bp, Homo sapiens
ggctggggactggga

SEQ ID NO: 505266 - DNA, 15 bp, Homo sapiens
gggctggggactggg

SEQ ID NO: 505267 - DNA, 15 bp, Homo sapiens
agggctggggactgg

SEQ ID NO: 505268 - DNA, 15 bp, Homo sapiens
aagggctggggactg

SEQ ID NO: 505269 - DNA, 15 bp, Homo sapiens
gaagggctggggact

SEQ ID NO: 505270 - DNA, 15 bp, Homo sapiens
tgaagggctggggac

SEQ ID NO: 505271 - DNA, 15 bp, Homo sapiens
gtgaagggctgggga

SEQ ID NO: 505272 - DNA, 15 bp, Homo sapiens
tgtgaagggctgggg

SEQ ID NO: 505273 - DNA, 15 bp, Homo sapiens
atgtgaagggctggg

SEQ ID NO: 505274 - DNA, 15 bp, Homo sapiens
aatgtgaagggctgg

SEQ ID NO: 505275 - DNA, 15 bp, Homo sapiens
aaatgtgaagggctg

SEQ ID NO: 505276 - DNA, 15 bp, Homo sapiens
aaaatgtgaagggct

SEQ ID NO: 505277 - DNA, 15 bp, Homo sapiens
aaaaatgtgaagggc

SEQ ID NO: 505278 - DNA, 15 bp, Homo sapiens
aaaaaatgtgaaggg

SEQ ID NO: 505279 - DNA, 15 bp, Homo sapiens
taaaaaatgtgaagg

SEQ ID NO: 505280 - DNA, 15 bp, Homo sapiens
ataaaaaatgtgaag

SEQ ID NO: 505281 - DNA, 15 bp, Homo sapiens
cataaaaaatgtgaa

SEQ ID NO: 505282 - DNA, 15 bp, Homo sapiens
ccataaaaaatgtga

SEQ ID NO: 505283 - DNA, 15 bp, Homo sapiens
cccataaaaaatgtg

SEQ ID NO: 505284 - DNA, 15 bp, Homo sapiens
gcccataaaaaatgt

SEQ ID NO: 505285 - DNA, 15 bp, Homo sapiens
tgcccataaaaaatg

SEQ ID NO: 505286 - DNA, 15 bp, Homo sapiens
atgcccataaaaaat

SEQ ID NO: 505287 - DNA, 15 bp, Homo sapiens
aatgcccataaaaaa

SEQ ID NO: 505288 - DNA, 15 bp, Homo sapiens
caatgcccataaaaa

SEQ ID NO: 505289 - DNA, 15 bp, Homo sapiens
tcaatgcccataaaa

SEQ ID NO: 505290 - DNA, 15 bp, Homo sapiens
gtcaatgcccataaa

SEQ ID NO: 505291 - DNA, 15 bp, Homo sapiens
tgtcaatgcccataa

SEQ ID NO: 505292 - DNA, 15 bp, Homo sapiens
ttgtcaatgcccata

SEQ ID NO: 505293 - DNA, 15 bp, Homo sapiens
tttgtcaatgcccat

SEQ ID NO: 505294 - DNA, 15 bp, Homo sapiens
atttgtcaatgccca

SEQ ID NO: 505295 - DNA, 15 bp, Homo sapiens
gatttgtcaatgccc

SEQ ID NO: 505296 - DNA, 15 bp, Homo sapiens
agatttgtcaatgcc

SEQ ID NO: 505297 - DNA, 15 bp, Homo sapiens
cagatttgtcaatgc

SEQ ID NO: 505298 - DNA, 15 bp, Homo sapiens
acagatttgtcaatg

SEQ ID NO: 505299 - DNA, 15 bp, Homo sapiens
cacagatttgtcaat

SEQ ID NO: 505300 - DNA, 15 bp, Homo sapiens
acacagatttgtcaa

SEQ ID NO: 505301 - DNA, 15 bp, Homo sapiens
tacacagatttgtca

SEQ ID NO: 505302 - DNA, 15 bp, Homo sapiens
atacacagatttgtc

SEQ ID NO: 505303 - DNA, 15 bp, Homo sapiens
tatacacagatttgt

SEQ ID NO: 505304 - DNA, 15 bp, Homo sapiens
atatacacagatttg

SEQ ID NO: 505305 - DNA, 15 bp, Homo sapiens
aatatacacagattt

SEQ ID NO: 505306 - DNA, 15 bp, Homo sapiens
taatatacacagatt

SEQ ID NO: 505307 - DNA, 15 bp, Homo sapiens
ataatatacacagat

SEQ ID NO: 505308 - DNA, 15 bp, Homo sapiens
aataatatacacaga

SEQ ID NO: 505309 - DNA, 15 bp, Homo sapiens
aaataatatacacag

SEQ ID NO: 505310 - DNA, 15 bp, Homo sapiens
caaataatatacaca

SEQ ID NO: 505311 - DNA, 15 bp, Homo sapiens
ccaaataatatacac

SEQ ID NO: 505312 - DNA, 15 bp, Homo sapiens
gccaaataatataca

SEQ ID NO: 505313 - DNA, 15 bp, Homo sapiens
tgccaaataatatac

SEQ ID NO: 505314 - DNA, 15 bp, Homo sapiens
ctgccaaataatata

SEQ ID NO: 505315 - DNA, 15 bp, Homo sapiens
actgccaaataatat

SEQ ID NO: 505316 - DNA, 15 bp, Homo sapiens
aactgccaaataata

SEQ ID NO: 505317 - DNA, 15 bp, Homo sapiens
aaactgccaaataat

SEQ ID NO: 505318 - DNA, 15 bp, Homo sapiens
caaactgccaaataa

SEQ ID NO: 505319 - DNA, 15 bp, Homo sapiens
ccaaactgccaaata

SEQ ID NO: 505320 - DNA, 15 bp, Homo sapiens
accaaactgccaaat

SEQ ID NO: 505321 - DNA, 15 bp, Homo sapiens
taccaaactgccaaa

SEQ ID NO: 505322 - DNA, 15 bp, Homo sapiens
ataccaaactgccaa

SEQ ID NO: 505323 - DNA, 15 bp, Homo sapiens
aataccaaactgcca

SEQ ID NO: 505324 - DNA, 15 bp, Homo sapiens
aaataccaaactgcc

SEQ ID NO: 505325 - DNA, 15 bp, Homo sapiens
caaataccaaactgc

SEQ ID NO: 505326 - DNA, 15 bp, Homo sapiens
gcaaataccaaactg

SEQ ID NO: 505327 - DNA, 15 bp, Homo sapiens
cgcaaataccaaact

SEQ ID NO: 505328 - DNA, 15 bp, Homo sapiens
ccgcaaataccaaac

SEQ ID NO: 505329 - DNA, 15 bp, Homo sapiens
gccgcaaataccaaa

SEQ ID NO: 505330 - DNA, 15 bp, Homo sapiens
cgccgcaaataccaa

SEQ ID NO: 505331 - DNA, 15 bp, Homo sapiens
acgccgcaaatacca

SEQ ID NO: 505332 - DNA, 15 bp, Homo sapiens
gacgccgcaaatacc

SEQ ID NO: 505333 - DNA, 15 bp, Homo sapiens
tgacgccgcaaatac

SEQ ID NO: 505334 - DNA, 15 bp, Homo sapiens
ctgacgccgcaaata

SEQ ID NO: 505335 - DNA, 15 bp, Homo sapiens
actgacgccgcaaat

SEQ ID NO: 505336 - DNA, 15 bp, Homo sapiens
gactgacgccgcaaa

SEQ ID NO: 505337 - DNA, 15 bp, Homo sapiens
agactgacgccgcaa

SEQ ID NO: 505338 - DNA, 15 bp, Homo sapiens
aagactgacgccgca

SEQ ID NO: 505339 - DNA, 15 bp, Homo sapiens
aaagactgacgccgc

SEQ ID NO: 505340 - DNA, 15 bp, Homo sapiens
aaaagactgacgccg

SEQ ID NO: 505341 - DNA, 15 bp, Homo sapiens
aaaaagactgacgcc

SEQ ID NO: 505342 - DNA, 15 bp, Homo sapiens
gaaaaagactgacgc

SEQ ID NO: 505343 - DNA, 15 bp, Homo sapiens
agaaaaagactgacg

SEQ ID NO: 505344 - DNA, 15 bp, Homo sapiens
cagaaaaagactgac

SEQ ID NO: 505345 - DNA, 15 bp, Homo sapiens
acagaaaaagactga

SEQ ID NO: 505346 - DNA, 15 bp, Homo sapiens
aacagaaaaagactg

SEQ ID NO: 505347 - DNA, 15 bp, Homo sapiens
caacagaaaaagact

SEQ ID NO: 505348 - DNA, 15 bp, Homo sapiens
acaacagaaaaagac

SEQ ID NO: 505349 - DNA, 15 bp, Homo sapiens
tacaacagaaaaaga

SEQ ID NO: 505350 - DNA, 15 bp, Homo sapiens
ttacaacagaaaaag

SEQ ID NO: 505351 - DNA, 15 bp, Homo sapiens
gttacaacagaaaaa

SEQ ID NO: 505352 - DNA, 15 bp, Homo sapiens
agttacaacagaaaa

SEQ ID NO: 505353 - DNA, 15 bp, Homo sapiens
aagttacaacagaaa

SEQ ID NO: 505354 - DNA, 15 bp, Homo sapiens
taagttacaacagaa

SEQ ID NO: 505355 - DNA, 15 bp, Homo sapiens
ataagttacaacaga

SEQ ID NO: 505356 - DNA, 15 bp, Homo sapiens
cataagttacaacag

SEQ ID NO: 505357 - DNA, 15 bp, Homo sapiens
acataagttacaaca

SEQ ID NO: 505358 - DNA, 15 bp, Homo sapiens
tacataagttacaac

SEQ ID NO: 505359 - DNA, 15 bp, Homo sapiens
ctacataagttacaa

SEQ ID NO: 505360 - DNA, 15 bp, Homo sapiens
tctacataagttaca

SEQ ID NO: 505361 - DNA, 15 bp, Homo sapiens
atctacataagttac

SEQ ID NO: 505362 - DNA, 15 bp, Homo sapiens
tatctacataagtta

SEQ ID NO: 505363 - DNA, 15 bp, Homo sapiens
atatctacataagtt

SEQ ID NO: 505364 - DNA, 15 bp, Homo sapiens
aatatctacataagt

SEQ ID NO: 505365 - DNA, 15 bp, Homo sapiens
aaatatctacataag

SEQ ID NO: 505366 - DNA, 15 bp, Homo sapiens
caaatatctacataa

SEQ ID NO: 505367 - DNA, 15 bp, Homo sapiens
ccaaatatctacata

SEQ ID NO: 505368 - DNA, 15 bp, Homo sapiens
gccaaatatctacat

SEQ ID NO: 505369 - DNA, 15 bp, Homo sapiens
agccaaatatctaca

SEQ ID NO: 505370 - DNA, 15 bp, Homo sapiens
aagccaaatatctac

SEQ ID NO: 505371 - DNA, 15 bp, Homo sapiens
taagccaaatatcta

SEQ ID NO: 505372 - DNA, 15 bp, Homo sapiens
ttaagccaaatatct

SEQ ID NO: 505373 - DNA, 15 bp, Homo sapiens
tttaagccaaatatc

SEQ ID NO: 505374 - DNA, 15 bp, Homo sapiens
atttaagccaaatat

SEQ ID NO: 505375 - DNA, 15 bp, Homo sapiens
tatttaagccaaata

SEQ ID NO: 505376 - DNA, 15 bp, Homo sapiens
atatttaagccaaat

SEQ ID NO: 505377 - DNA, 15 bp, Homo sapiens
tatatttaagccaaa

SEQ ID NO: 505378 - DNA, 15 bp, Homo sapiens
ctatatttaagccaa

SEQ ID NO: 505379 - DNA, 15 bp, Homo sapiens
actatatttaagcca

SEQ ID NO: 505380 - DNA, 15 bp, Homo sapiens
aactatatttaagcc

SEQ ID NO: 505381 - DNA, 15 bp, Homo sapiens
gaactatatttaagc

SEQ ID NO: 505382 - DNA, 15 bp, Homo sapiens
ggaactatatttaag

SEQ ID NO: 505383 - DNA, 15 bp, Homo sapiens
aggaactatatttaa

SEQ ID NO: 505384 - DNA, 15 bp, Homo sapiens
taggaactatattta

SEQ ID NO: 505385 - DNA, 15 bp, Homo sapiens
ttaggaactatattt

SEQ ID NO: 505386 - DNA, 15 bp, Homo sapiens
cttaggaactatatt

SEQ ID NO: 505387 - DNA, 15 bp, Homo sapiens
tcttaggaactatat

SEQ ID NO: 505388 - DNA, 15 bp, Homo sapiens
ttcttaggaactata

SEQ ID NO: 505389 - DNA, 15 bp, Homo sapiens
cttcttaggaactat

SEQ ID NO: 505390 - DNA, 15 bp, Homo sapiens
gcttcttaggaacta

SEQ ID NO: 505391 - DNA, 15 bp, Homo sapiens
agcttcttaggaact

SEQ ID NO: 505392 - DNA, 15 bp, Homo sapiens
aagcttcttaggaac

SEQ ID NO: 505393 - DNA, 15 bp, Homo sapiens
gaagcttcttaggaa

SEQ ID NO: 505394 - DNA, 15 bp, Homo sapiens
agaagcttcttagga

SEQ ID NO: 505395 - DNA, 15 bp, Homo sapiens
tagaagcttcttagg

SEQ ID NO: 505396 - DNA, 15 bp, Homo sapiens
ttagaagcttcttag

SEQ ID NO: 505397 - DNA, 15 bp, Homo sapiens
attagaagcttctta

SEQ ID NO: 505398 - DNA, 15 bp, Homo sapiens
tattagaagcttctt

SEQ ID NO: 505399 - DNA, 15 bp, Homo sapiens
ttattagaagcttct

SEQ ID NO: 505400 - DNA, 15 bp, Homo sapiens
tttattagaagcttc

SEQ ID NO: 505401 - DNA, 15 bp, Homo sapiens
atttattagaagctt

SEQ ID NO: 505402 - DNA, 15 bp, Homo sapiens
aatttattagaagct

SEQ ID NO: 505403 - DNA, 15 bp, Homo sapiens
taatttattagaagc

SEQ ID NO: 505404 - DNA, 15 bp, Homo sapiens
ataatttattagaag

SEQ ID NO: 505405 - DNA, 15 bp, Homo sapiens
tataatttattagaa

SEQ ID NO: 505406 - DNA, 15 bp, Homo sapiens
gtataatttattaga

SEQ ID NO: 505407 - DNA, 15 bp, Homo sapiens
tgtataatttattag

SEQ ID NO: 505408 - DNA, 15 bp, Homo sapiens
ttgtataatttatta

SEQ ID NO: 505409 - DNA, 15 bp, Homo sapiens
tttgtataatttatt

SEQ ID NO: 505410 - DNA, 15 bp, Homo sapiens
atttgtataatttat

SEQ ID NO: 505411 - DNA, 15 bp, Homo sapiens
aatttgtataattta

SEQ ID NO: 505412 - DNA, 15 bp, Homo sapiens
taatttgtataattt

SEQ ID NO: 505413 - DNA, 15 bp, Homo sapiens
ttaatttgtataatt

SEQ ID NO: 505414 - DNA, 15 bp, Homo sapiens
tttaatttgtataat

SEQ ID NO: 505415 - DNA, 15 bp, Homo sapiens
ttttaatttgtataa

SEQ ID NO: 505416 - DNA, 15 bp, Homo sapiens
tttttaatttgtata

SEQ ID NO: 505417 - DNA, 15 bp, Homo sapiens
ctttttaatttgtat

SEQ ID NO: 505418 - DNA, 15 bp, Homo sapiens
tctttttaatttgta

SEQ ID NO: 505419 - DNA, 15 bp, Homo sapiens
atctttttaatttgt

SEQ ID NO: 505420 - DNA, 15 bp, Homo sapiens
aatctttttaatttg

SEQ ID NO: 505421 - DNA, 15 bp, Homo sapiens
gaatctttttaattt

SEQ ID NO: 505422 - DNA, 15 bp, Homo sapiens
agaatctttttaatt

SEQ ID NO: 505423 - DNA, 15 bp, Homo sapiens
aagaatctttttaat

SEQ ID NO: 505424 - DNA, 15 bp, Homo sapiens
aaagaatctttttaa

SEQ ID NO: 505425 - DNA, 15 bp, Homo sapiens
aaaagaatcttttta

SEQ ID NO: 505426 - DNA, 15 bp, Homo sapiens
aaaaagaatcttttt

SEQ ID NO: 505427 - DNA, 15 bp, Homo sapiens
gaaaaagaatctttt

SEQ ID NO: 505428 - DNA, 15 bp, Homo sapiens
agaaaaagaatcttt

SEQ ID NO: 505429 - DNA, 15 bp, Homo sapiens
cagaaaaagaatctt

SEQ ID NO: 505430 - DNA, 15 bp, Homo sapiens
tcagaaaaagaatct

SEQ ID NO: 505431 - DNA, 15 bp, Homo sapiens
atcagaaaaagaatc

SEQ ID NO: 505432 - DNA, 15 bp, Homo sapiens
aatcagaaaaagaat

SEQ ID NO: 505433 - DNA, 15 bp, Homo sapiens
taatcagaaaaagaa

SEQ ID NO: 505434 - DNA, 15 bp, Homo sapiens
ttaatcagaaaaaga

SEQ ID NO: 505435 - DNA, 15 bp, Homo sapiens
tttaatcagaaaaag

SEQ ID NO: 505436 - DNA, 15 bp, Homo sapiens
ttttaatcagaaaaa

SEQ ID NO: 505437 - DNA, 15 bp, Homo sapiens
gttttaatcagaaaa

SEQ ID NO: 505438 - DNA, 15 bp, Homo sapiens
ggttttaatcagaaa

SEQ ID NO: 505439 - DNA, 15 bp, Homo sapiens
gggttttaatcagaa

SEQ ID NO: 505440 - DNA, 15 bp, Homo sapiens
agggttttaatcaga

SEQ ID NO: 505441 - DNA, 15 bp, Homo sapiens
gagggttttaatcag

SEQ ID NO: 505442 - DNA, 15 bp, Homo sapiens
ggagggttttaatca

SEQ ID NO: 505443 - DNA, 15 bp, Homo sapiens
aggagggttttaatc

SEQ ID NO: 505444 - DNA, 15 bp, Homo sapiens
aaggagggttttaat

SEQ ID NO: 505445 - DNA, 15 bp, Homo sapiens
aaaggagggttttaa

SEQ ID NO: 505446 - DNA, 15 bp, Homo sapiens
aaaaggagggtttta

SEQ ID NO: 505447 - DNA, 15 bp, Homo sapiens
aaaaaggagggtttt

SEQ ID NO: 505448 - DNA, 15 bp, Homo sapiens
caaaaaggagggttt

SEQ ID NO: 505449 - DNA, 15 bp, Homo sapiens
acaaaaaggagggtt

SEQ ID NO: 505450 - DNA, 15 bp, Homo sapiens
aacaaaaaggagggt

SEQ ID NO: 505451 - DNA, 15 bp, Homo sapiens
aaacaaaaaggaggg

SEQ ID NO: 505452 - DNA, 15 bp, Homo sapiens
aaaacaaaaaggagg

SEQ ID NO: 505453 - DNA, 15 bp, Homo sapiens
caaaacaaaaaggag

SEQ ID NO: 505454 - DNA, 15 bp, Homo sapiens
acaaaacaaaaagga

SEQ ID NO: 505455 - DNA, 15 bp, Homo sapiens
aacaaaacaaaaagg

SEQ ID NO: 505456 - DNA, 15 bp, Homo sapiens
aaacaaaacaaaaag

SEQ ID NO: 505457 - DNA, 15 bp, Homo sapiens
aaaacaaaacaaaaa

SEQ ID NO: 505458 - DNA, 15 bp, Homo sapiens
caaaacaaaacaaaa

SEQ ID NO: 505459 - DNA, 15 bp, Homo sapiens
tcaaaacaaaacaaa

SEQ ID NO: 505460 - DNA, 15 bp, Homo sapiens
atcaaaacaaaacaa

SEQ ID NO: 505461 - DNA, 15 bp, Homo sapiens
aatcaaaacaaaaca

SEQ ID NO: 505462 - DNA, 15 bp, Homo sapiens
aaatcaaaacaaaac

SEQ ID NO: 505463 - DNA, 15 bp, Homo sapiens
caaatcaaaacaaaa

SEQ ID NO: 505464 - DNA, 15 bp, Homo sapiens
ccaaatcaaaacaaa

SEQ ID NO: 505465 - DNA, 15 bp, Homo sapiens
gccaaatcaaaacaa

SEQ ID NO: 505466 - DNA, 15 bp, Homo sapiens
agccaaatcaaaaca

SEQ ID NO: 505467 - DNA, 15 bp, Homo sapiens
aagccaaatcaaaac

SEQ ID NO: 505468 - DNA, 15 bp, Homo sapiens
aaagccaaatcaaaa

SEQ ID NO: 505469 - DNA, 15 bp, Homo sapiens
taaagccaaatcaaa

SEQ ID NO: 505470 - DNA, 15 bp, Homo sapiens
ttaaagccaaatcaa

SEQ ID NO: 505471 - DNA, 15 bp, Homo sapiens
tttaaagccaaatca

SEQ ID NO: 505472 - DNA, 15 bp, Homo sapiens
atttaaagccaaatc

SEQ ID NO: 505473 - DNA, 15 bp, Homo sapiens
catttaaagccaaat

SEQ ID NO: 505474 - DNA, 15 bp, Homo sapiens
ccatttaaagccaaa

SEQ ID NO: 505475 - DNA, 15 bp, Homo sapiens
gccatttaaagccaa

SEQ ID NO: 505476 - DNA, 15 bp, Homo sapiens
agccatttaaagcca

SEQ ID NO: 505477 - DNA, 15 bp, Homo sapiens
aagccatttaaagcc

SEQ ID NO: 505478 - DNA, 15 bp, Homo sapiens
aaagccatttaaagc

SEQ ID NO: 505479 - DNA, 15 bp, Homo sapiens
caaagccatttaaag

SEQ ID NO: 505480 - DNA, 15 bp, Homo sapiens
tcaaagccatttaaa

SEQ ID NO: 505481 - DNA, 15 bp, Homo sapiens
ctcaaagccatttaa

SEQ ID NO: 505482 - DNA, 15 bp, Homo sapiens
cctcaaagccattta

SEQ ID NO: 505483 - DNA, 15 bp, Homo sapiens
ccctcaaagccattt

SEQ ID NO: 505484 - DNA, 15 bp, Homo sapiens
cccctcaaagccatt

SEQ ID NO: 505485 - DNA, 15 bp, Homo sapiens
gcccctcaaagccat

SEQ ID NO: 505486 - DNA, 15 bp, Homo sapiens
cgcccctcaaagcca

SEQ ID NO: 505487 - DNA, 15 bp, Homo sapiens
ccgcccctcaaagcc

SEQ ID NO: 505488 - DNA, 15 bp, Homo sapiens
cccgcccctcaaagc

SEQ ID NO: 505489 - DNA, 15 bp, Homo sapiens
ccccgcccctcaaag

SEQ ID NO: 505490 - DNA, 15 bp, Homo sapiens
cccccgcccctcaaa

SEQ ID NO: 505491 - DNA, 15 bp, Homo sapiens
gcccccgcccctcaa

SEQ ID NO: 505492 - DNA, 15 bp, Homo sapiens
agcccccgcccctca

SEQ ID NO: 505493 - DNA, 15 bp, Homo sapiens
aagcccccgcccctc

SEQ ID NO: 505494 - DNA, 15 bp, Homo sapiens
caagcccccgcccct

SEQ ID NO: 505495 - DNA, 15 bp, Homo sapiens
ccaagcccccgcccc

SEQ ID NO: 505496 - DNA, 15 bp, Homo sapiens
cccaagcccccgccc

SEQ ID NO: 505497 - DNA, 15 bp, Homo sapiens
tcccaagcccccgcc

SEQ ID NO: 505498 - DNA, 15 bp, Homo sapiens
ctcccaagcccccgc

SEQ ID NO: 505499 - DNA, 15 bp, Homo sapiens
cctcccaagcccccg

SEQ ID NO: 505500 - DNA, 15 bp, Homo sapiens
tcctcccaagccccc

SEQ ID NO: 505501 - DNA, 15 bp, Homo sapiens
atcctcccaagcccc

SEQ ID NO: 505502 - DNA, 15 bp, Homo sapiens
gatcctcccaagccc

SEQ ID NO: 505503 - DNA, 15 bp, Homo sapiens
agatcctcccaagcc

SEQ ID NO: 505504 - DNA, 15 bp, Homo sapiens
aagatcctcccaagc

SEQ ID NO: 505505 - DNA, 15 bp, Homo sapiens
caagatcctcccaag

SEQ ID NO: 505506 - DNA, 15 bp, Homo sapiens
acaagatcctcccaa

SEQ ID NO: 505507 - DNA, 15 bp, Homo sapiens
gacaagatcctccca

SEQ ID NO: 505508 - DNA, 15 bp, Homo sapiens
agacaagatcctccc

SEQ ID NO: 505509 - DNA, 15 bp, Homo sapiens
aagacaagatcctcc

SEQ ID NO: 505510 - DNA, 15 bp, Homo sapiens
aaagacaagatcctc

SEQ ID NO: 505511 - DNA, 15 bp, Homo sapiens
caaagacaagatcct

SEQ ID NO: 505512 - DNA, 15 bp, Homo sapiens
ccaaagacaagatcc

SEQ ID NO: 505513 - DNA, 15 bp, Homo sapiens
accaaagacaagatc

SEQ ID NO: 505514 - DNA, 15 bp, Homo sapiens
gaccaaagacaagat

SEQ ID NO: 505515 - DNA, 15 bp, Homo sapiens
agaccaaagacaaga

SEQ ID NO: 505516 - DNA, 15 bp, Homo sapiens
cagaccaaagacaag

SEQ ID NO: 505517 - DNA, 15 bp, Homo sapiens
tcagaccaaagacaa

SEQ ID NO: 505518 - DNA, 15 bp, Homo sapiens
atcagaccaaagaca

SEQ ID NO: 505519 - DNA, 15 bp, Homo sapiens
catcagaccaaagac

SEQ ID NO: 505520 - DNA, 15 bp, Homo sapiens
tcatcagaccaaaga

SEQ ID NO: 505521 - DNA, 15 bp, Homo sapiens
ctcatcagaccaaag

SEQ ID NO: 505522 - DNA, 15 bp, Homo sapiens
tctcatcagaccaaa

SEQ ID NO: 505523 - DNA, 15 bp, Homo sapiens
atctcatcagaccaa

SEQ ID NO: 505524 - DNA, 15 bp, Homo sapiens
aatctcatcagacca

SEQ ID NO: 505525 - DNA, 15 bp, Homo sapiens
gaatctcatcagacc

SEQ ID NO: 505526 - DNA, 15 bp, Homo sapiens
tgaatctcatcagac

SEQ ID NO: 505527 - DNA, 15 bp, Homo sapiens
ttgaatctcatcaga

SEQ ID NO: 505528 - DNA, 15 bp, Homo sapiens
tttgaatctcatcag

SEQ ID NO: 505529 - DNA, 15 bp, Homo sapiens
atttgaatctcatca

SEQ ID NO: 505530 - DNA, 15 bp, Homo sapiens
aatttgaatctcatc

SEQ ID NO: 505531 - DNA, 15 bp, Homo sapiens
caatttgaatctcat

SEQ ID NO: 505532 - DNA, 15 bp, Homo sapiens
acaatttgaatctca

SEQ ID NO: 505533 - DNA, 15 bp, Homo sapiens
aacaatttgaatctc

SEQ ID NO: 505534 - DNA, 15 bp, Homo sapiens
aaacaatttgaatct

SEQ ID NO: 505535 - DNA, 15 bp, Homo sapiens
caaacaatttgaatc

SEQ ID NO: 505536 - DNA, 15 bp, Homo sapiens
ccaaacaatttgaat

SEQ ID NO: 505537 - DNA, 15 bp, Homo sapiens
cccaaacaatttgaa

SEQ ID NO: 505538 - DNA, 15 bp, Homo sapiens
acccaaacaatttga

SEQ ID NO: 505539 - DNA, 15 bp, Homo sapiens
aacccaaacaatttg

SEQ ID NO: 505540 - DNA, 15 bp, Homo sapiens
aaacccaaacaattt

SEQ ID NO: 505541 - DNA, 15 bp, Homo sapiens
caaacccaaacaatt

SEQ ID NO: 505542 - DNA, 15 bp, Homo sapiens
tcaaacccaaacaat

SEQ ID NO: 505543 - DNA, 15 bp, Homo sapiens
ctcaaacccaaacaa

SEQ ID NO: 505544 - DNA, 15 bp, Homo sapiens
gctcaaacccaaaca

SEQ ID NO: 505545 - DNA, 15 bp, Homo sapiens
agctcaaacccaaac

SEQ ID NO: 505546 - DNA, 15 bp, Homo sapiens
gagctcaaacccaaa

SEQ ID NO: 505547 - DNA, 15 bp, Homo sapiens
tgagctcaaacccaa

SEQ ID NO: 505548 - DNA, 15 bp, Homo sapiens
ttgagctcaaaccca

SEQ ID NO: 505549 - DNA, 15 bp, Homo sapiens
tttgagctcaaaccc

SEQ ID NO: 505550 - DNA, 15 bp, Homo sapiens
ctttgagctcaaacc

SEQ ID NO: 505551 - DNA, 15 bp, Homo sapiens
cctttgagctcaaac

SEQ ID NO: 505552 - DNA, 15 bp, Homo sapiens
tcctttgagctcaaa

SEQ ID NO: 505553 - DNA, 15 bp, Homo sapiens
atcctttgagctcaa

SEQ ID NO: 505554 - DNA, 15 bp, Homo sapiens
aatcctttgagctca

SEQ ID NO: 505555 - DNA, 15 bp, Homo sapiens
gaatcctttgagctc

SEQ ID NO: 505556 - DNA, 15 bp, Homo sapiens
agaatcctttgagct

SEQ ID NO: 505557 - DNA, 15 bp, Homo sapiens
cagaatcctttgagc

SEQ ID NO: 505558 - DNA, 15 bp, Homo sapiens
tcagaatcctttgag

SEQ ID NO: 505559 - DNA, 15 bp, Homo sapiens
ttcagaatcctttga

SEQ ID NO: 505560 - DNA, 15 bp, Homo sapiens
gttcagaatcctttg

SEQ ID NO: 505561 - DNA, 15 bp, Homo sapiens
ggttcagaatccttt

SEQ ID NO: 505562 - DNA, 15 bp, Homo sapiens
cggttcagaatcctt

SEQ ID NO: 505563 - DNA, 15 bp, Homo sapiens
ccggttcagaatcct

SEQ ID NO: 505564 - DNA, 15 bp, Homo sapiens
accggttcagaatcc

SEQ ID NO: 505565 - DNA, 15 bp, Homo sapiens
aaccggttcagaatc

SEQ ID NO: 505566 - DNA, 15 bp, Homo sapiens
taaccggttcagaat

SEQ ID NO: 505567 - DNA, 15 bp, Homo sapiens
ttaaccggttcagaa

SEQ ID NO: 505568 - DNA, 15 bp, Homo sapiens
cttaaccggttcaga

SEQ ID NO: 505569 - DNA, 15 bp, Homo sapiens
ccttaaccggttcag

SEQ ID NO: 505570 - DNA, 15 bp, Homo sapiens
tccttaaccggttca

SEQ ID NO: 505571 - DNA, 15 bp, Homo sapiens
ctccttaaccggttc

SEQ ID NO: 505572 - DNA, 15 bp, Homo sapiens
cctccttaaccggtt

SEQ ID NO: 505573 - DNA, 15 bp, Homo sapiens
acctccttaaccggt

SEQ ID NO: 505574 - DNA, 15 bp, Homo sapiens
tacctccttaaccgg

SEQ ID NO: 505575 - DNA, 15 bp, Homo sapiens
ttacctccttaaccg

SEQ ID NO: 505576 - DNA, 15 bp, Homo sapiens
cttacctccttaacc

SEQ ID NO: 505577 - DNA, 15 bp, Homo sapiens
ccttacctccttaac

SEQ ID NO: 505578 - DNA, 15 bp, Homo sapiens
tccttacctccttaa

SEQ ID NO: 505579 - DNA, 15 bp, Homo sapiens
ctccttacctcctta

SEQ ID NO: 505580 - DNA, 15 bp, Homo sapiens
cctccttacctcctt

SEQ ID NO: 505581 - DNA, 15 bp, Homo sapiens
gcctccttacctcct

SEQ ID NO: 505582 - DNA, 15 bp, Homo sapiens
ggcctccttacctcc

SEQ ID NO: 505583 - DNA, 15 bp, Homo sapiens
tggcctccttacctc

SEQ ID NO: 505584 - DNA, 15 bp, Homo sapiens
ctggcctccttacct

SEQ ID NO: 505585 - DNA, 15 bp, Homo sapiens
cctggcctccttacc

SEQ ID NO: 505586 - DNA, 15 bp, Homo sapiens
gcctggcctccttac

SEQ ID NO: 505587 - DNA, 15 bp, Homo sapiens
ggcctggcctcctta

SEQ ID NO: 505588 - DNA, 15 bp, Homo sapiens
gggcctggcctcctt

SEQ ID NO: 505589 - DNA, 15 bp, Homo sapiens
tgggcctggcctcct

SEQ ID NO: 505590 - DNA, 15 bp, Homo sapiens
ctgggcctggcctcc

SEQ ID NO: 505591 - DNA, 15 bp, Homo sapiens
tctgggcctggcctc

SEQ ID NO: 505592 - DNA, 15 bp, Homo sapiens
ctctgggcctggcct

SEQ ID NO: 505593 - DNA, 15 bp, Homo sapiens
actctgggcctggcc

SEQ ID NO: 505594 - DNA, 15 bp, Homo sapiens
gactctgggcctggc

SEQ ID NO: 505595 - DNA, 15 bp, Homo sapiens
ggactctgggcctgg

SEQ ID NO: 505596 - DNA, 15 bp, Homo sapiens
aggactctgggcctg

SEQ ID NO: 505597 - DNA, 15 bp, Homo sapiens
aaggactctgggcct

SEQ ID NO: 505598 - DNA, 15 bp, Homo sapiens
caaggactctgggcc

SEQ ID NO: 505599 - DNA, 15 bp, Homo sapiens
gcaaggactctgggc

SEQ ID NO: 505600 - DNA, 15 bp, Homo sapiens
ggcaaggactctggg

SEQ ID NO: 505601 - DNA, 15 bp, Homo sapiens
gggcaaggactctgg

SEQ ID NO: 505602 - DNA, 15 bp, Homo sapiens
ggggcaaggactctg

SEQ ID NO: 505603 - DNA, 15 bp, Homo sapiens
tggggcaaggactct

SEQ ID NO: 505604 - DNA, 15 bp, Homo sapiens
gtggggcaaggactc

SEQ ID NO: 505605 - DNA, 15 bp, Homo sapiens
tgtggggcaaggact

SEQ ID NO: 505606 - DNA, 15 bp, Homo sapiens
ctgtggggcaaggac

SEQ ID NO: 505607 - DNA, 15 bp, Homo sapiens
cctgtggggcaagga

SEQ ID NO: 505608 - DNA, 15 bp, Homo sapiens
tcctgtggggcaagg

SEQ ID NO: 505609 - DNA, 15 bp, Homo sapiens
ttcctgtggggcaag

SEQ ID NO: 505610 - DNA, 15 bp, Homo sapiens
cttcctgtggggcaa

SEQ ID NO: 505611 - DNA, 15 bp, Homo sapiens
tcttcctgtggggca

SEQ ID NO: 505612 - DNA, 15 bp, Homo sapiens
ctcttcctgtggggc

SEQ ID NO: 505613 - DNA, 15 bp, Homo sapiens
cctcttcctgtgggg

SEQ ID NO: 505614 - DNA, 15 bp, Homo sapiens
ccctcttcctgtggg

SEQ ID NO: 505615 - DNA, 15 bp, Homo sapiens
tccctcttcctgtgg

SEQ ID NO: 505616 - DNA, 15 bp, Homo sapiens
ctccctcttcctgtg

SEQ ID NO: 505617 - DNA, 15 bp, Homo sapiens
actccctcttcctgt

SEQ ID NO: 505618 - DNA, 15 bp, Homo sapiens
aactccctcttcctg

SEQ ID NO: 505619 - DNA, 15 bp, Homo sapiens
aaactccctcttcct

SEQ ID NO: 505620 - DNA, 15 bp, Homo sapiens
aaaactccctcttcc

SEQ ID NO: 505621 - DNA, 15 bp, Homo sapiens
caaaactccctcttc

SEQ ID NO: 505622 - DNA, 15 bp, Homo sapiens
acaaaactccctctt

SEQ ID NO: 505623 - DNA, 15 bp, Homo sapiens
aacaaaactccctct

SEQ ID NO: 505624 - DNA, 15 bp, Homo sapiens
gaacaaaactccctc

SEQ ID NO: 505625 - DNA, 15 bp, Homo sapiens
agaacaaaactccct

SEQ ID NO: 505626 - DNA, 15 bp, Homo sapiens
cagaacaaaactccc

SEQ ID NO: 505627 - DNA, 15 bp, Homo sapiens
gcagaacaaaactcc

SEQ ID NO: 505628 - DNA, 15 bp, Homo sapiens
ggcagaacaaaactc

SEQ ID NO: 505629 - DNA, 15 bp, Homo sapiens
aggcagaacaaaact

SEQ ID NO: 505630 - DNA, 15 bp, Homo sapiens
gaggcagaacaaaac

SEQ ID NO: 505631 - DNA, 15 bp, Homo sapiens
tgaggcagaacaaaa

SEQ ID NO: 505632 - DNA, 15 bp, Homo sapiens
ctgaggcagaacaaa

SEQ ID NO: 505633 - DNA, 15 bp, Homo sapiens
tctgaggcagaacaa

SEQ ID NO: 505634 - DNA, 15 bp, Homo sapiens
ttctgaggcagaaca

SEQ ID NO: 505635 - DNA, 15 bp, Homo sapiens
tttctgaggcagaac

SEQ ID NO: 505636 - DNA, 15 bp, Homo sapiens
atttctgaggcagaa

SEQ ID NO: 505637 - DNA, 15 bp, Homo sapiens
aatttctgaggcaga

SEQ ID NO: 505638 - DNA, 15 bp, Homo sapiens
caatttctgaggcag

SEQ ID NO: 505639 - DNA, 15 bp, Homo sapiens
acaatttctgaggca

SEQ ID NO: 505640 - DNA, 15 bp, Homo sapiens
cacaatttctgaggc

SEQ ID NO: 505641 - DNA, 15 bp, Homo sapiens
acacaatttctgagg

SEQ ID NO: 505642 - DNA, 15 bp, Homo sapiens
cacacaatttctgag

SEQ ID NO: 505643 - DNA, 15 bp, Homo sapiens
ccacacaatttctga

SEQ ID NO: 505644 - DNA, 15 bp, Homo sapiens
tccacacaatttctg

SEQ ID NO: 505645 - DNA, 15 bp, Homo sapiens
ttccacacaatttct

SEQ ID NO: 505646 - DNA, 15 bp, Homo sapiens
tttccacacaatttc

SEQ ID NO: 505647 - DNA, 15 bp, Homo sapiens
gtttccacacaattt

SEQ ID NO: 505648 - DNA, 15 bp, Homo sapiens
tgtttccacacaatt

SEQ ID NO: 505649 - DNA, 15 bp, Homo sapiens
ttgtttccacacaat

SEQ ID NO: 505650 - DNA, 15 bp, Homo sapiens
tttgtttccacacaa

SEQ ID NO: 505651 - DNA, 15 bp, Homo sapiens
atttgtttccacaca

SEQ ID NO: 505652 - DNA, 15 bp, Homo sapiens
gatttgtttccacac

SEQ ID NO: 505653 - DNA, 15 bp, Homo sapiens
agatttgtttccaca

SEQ ID NO: 505654 - DNA, 15 bp, Homo sapiens
aagatttgtttccac

SEQ ID NO: 505655 - DNA, 15 bp, Homo sapiens
caagatttgtttcca

SEQ ID NO: 505656 - DNA, 15 bp, Homo sapiens
tcaagatttgtttcc

SEQ ID NO: 505657 - DNA, 15 bp, Homo sapiens
ctcaagatttgtttc

SEQ ID NO: 505658 - DNA, 15 bp, Homo sapiens
gctcaagatttgttt

SEQ ID NO: 505659 - DNA, 15 bp, Homo sapiens
tgctcaagatttgtt

SEQ ID NO: 505660 - DNA, 15 bp, Homo sapiens
ctgctcaagatttgt

SEQ ID NO: 505661 - DNA, 15 bp, Homo sapiens
actgctcaagatttg

SEQ ID NO: 505662 - DNA, 15 bp, Homo sapiens
gactgctcaagattt

SEQ ID NO: 505663 - DNA, 15 bp, Homo sapiens
ggactgctcaagatt

SEQ ID NO: 505664 - DNA, 15 bp, Homo sapiens
aggactgctcaagat

SEQ ID NO: 505665 - DNA, 15 bp, Homo sapiens
caggactgctcaaga

SEQ ID NO: 505666 - DNA, 15 bp, Homo sapiens
tcaggactgctcaag

SEQ ID NO: 505667 - DNA, 15 bp, Homo sapiens
ctcaggactgctcaa

SEQ ID NO: 505668 - DNA, 15 bp, Homo sapiens
tctcaggactgctca

SEQ ID NO: 505669 - DNA, 15 bp, Homo sapiens
gtctcaggactgctc

SEQ ID NO: 505670 - DNA, 15 bp, Homo sapiens
agtctcaggactgct

SEQ ID NO: 505671 - DNA, 15 bp, Homo sapiens
cagtctcaggactgc

SEQ ID NO: 505672 - DNA, 15 bp, Homo sapiens
gcagtctcaggactg

SEQ ID NO: 505673 - DNA, 15 bp, Homo sapiens
tgcagtctcaggact

SEQ ID NO: 505674 - DNA, 15 bp, Homo sapiens
ctgcagtctcaggac

SEQ ID NO: 505675 - DNA, 15 bp, Homo sapiens
actgcagtctcagga

SEQ ID NO: 505676 - DNA, 15 bp, Homo sapiens
cactgcagtctcagg

SEQ ID NO: 505677 - DNA, 15 bp, Homo sapiens
ccactgcagtctcag

SEQ ID NO: 505678 - DNA, 15 bp, Homo sapiens
tccactgcagtctca

SEQ ID NO: 505679 - DNA, 15 bp, Homo sapiens
ctccactgcagtctc

SEQ ID NO: 505680 - DNA, 15 bp, Homo sapiens
cctccactgcagtct

SEQ ID NO: 505681 - DNA, 15 bp, Homo sapiens
tcctccactgcagtc

SEQ ID NO: 505682 - DNA, 15 bp, Homo sapiens
gtcctccactgcagt

SEQ ID NO: 505683 - DNA, 15 bp, Homo sapiens
ggtcctccactgcag

SEQ ID NO: 505684 - DNA, 15 bp, Homo sapiens
cggtcctccactgca

SEQ ID NO: 505685 - DNA, 15 bp, Homo sapiens
tcggtcctccactgc

SEQ ID NO: 505686 - DNA, 15 bp, Homo sapiens
ttcggtcctccactg

SEQ ID NO: 505687 - DNA, 15 bp, Homo sapiens
tttcggtcctccact

SEQ ID NO: 505688 - DNA, 15 bp, Homo sapiens
atttcggtcctccac

SEQ ID NO: 505689 - DNA, 15 bp, Homo sapiens
tatttcggtcctcca

SEQ ID NO: 505690 - DNA, 15 bp, Homo sapiens
gtatttcggtcctcc

SEQ ID NO: 505691 - DNA, 15 bp, Homo sapiens
ggtatttcggtcctc

SEQ ID NO: 505692 - DNA, 15 bp, Homo sapiens
tggtatttcggtcct

SEQ ID NO: 505693 - DNA, 15 bp, Homo sapiens
ttggtatttcggtcc

SEQ ID NO: 505694 - DNA, 15 bp, Homo sapiens
tttggtatttcggtc

SEQ ID NO: 505695 - DNA, 15 bp, Homo sapiens
gtttggtatttcggt

SEQ ID NO: 505696 - DNA, 15 bp, Homo sapiens
agtttggtatttcgg

SEQ ID NO: 505697 - DNA, 15 bp, Homo sapiens
tagtttggtatttcg

SEQ ID NO: 505698 - DNA, 15 bp, Homo sapiens
gtagtttggtatttc

SEQ ID NO: 505699 - DNA, 15 bp, Homo sapiens
agtagtttggtattt

SEQ ID NO: 505700 - DNA, 15 bp, Homo sapiens
aagtagtttggtatt

SEQ ID NO: 505701 - DNA, 15 bp, Homo sapiens
gaagtagtttggtat

SEQ ID NO: 505702 - DNA, 15 bp, Homo sapiens
ggaagtagtttggta

SEQ ID NO: 505703 - DNA, 15 bp, Homo sapiens
tggaagtagtttggt

SEQ ID NO: 505704 - DNA, 15 bp, Homo sapiens
gtggaagtagtttgg

SEQ ID NO: 505705 - DNA, 15 bp, Homo sapiens
ggtggaagtagtttg

SEQ ID NO: 505706 - DNA, 15 bp, Homo sapiens
tggtggaagtagttt

SEQ ID NO: 505707 - DNA, 15 bp, Homo sapiens
ttggtggaagtagtt

SEQ ID NO: 505708 - DNA, 15 bp, Homo sapiens
cttggtggaagtagt

SEQ ID NO: 505709 - DNA, 15 bp, Homo sapiens
tcttggtggaagtag

SEQ ID NO: 505710 - DNA, 15 bp, Homo sapiens
ctcttggtggaagta

SEQ ID NO: 505711 - DNA, 15 bp, Homo sapiens
cctcttggtggaagt

SEQ ID NO: 505712 - DNA, 15 bp, Homo sapiens
ccctcttggtggaag

SEQ ID NO: 505713 - DNA, 15 bp, Homo sapiens
tccctcttggtggaa

SEQ ID NO: 505714 - DNA, 15 bp, Homo sapiens
ctccctcttggtgga

SEQ ID NO: 505715 - DNA, 15 bp, Homo sapiens
tctccctcttggtgg

SEQ ID NO: 505716 - DNA, 15 bp, Homo sapiens
ctctccctcttggtg

SEQ ID NO: 505717 - DNA, 15 bp, Homo sapiens
cctctccctcttggt

SEQ ID NO: 505718 - DNA, 15 bp, Homo sapiens
ccctctccctcttgg

SEQ ID NO: 505719 - DNA, 15 bp, Homo sapiens
tccctctccctcttg

SEQ ID NO: 505720 - DNA, 15 bp, Homo sapiens
ctccctctccctctt

SEQ ID NO: 505721 - DNA, 15 bp, Homo sapiens
tctccctctccctct

SEQ ID NO: 505722 - DNA, 15 bp, Homo sapiens
ctctccctctccctc

SEQ ID NO: 505723 - DNA, 15 bp, Homo sapiens
tctctccctctccct

SEQ ID NO: 505724 - DNA, 15 bp, Homo sapiens
ctctctccctctccc

SEQ ID NO: 505725 - DNA, 15 bp, Homo sapiens
cctctctccctctcc

SEQ ID NO: 505726 - DNA, 15 bp, Homo sapiens
tcctctctccctctc

SEQ ID NO: 505727 - DNA, 15 bp, Homo sapiens
ttcctctctccctct

SEQ ID NO: 505728 - DNA, 15 bp, Homo sapiens
cttcctctctccctc

SEQ ID NO: 505729 - DNA, 15 bp, Homo sapiens
tcttcctctctccct

SEQ ID NO: 505730 - DNA, 15 bp, Homo sapiens
ctcttcctctctccc

SEQ ID NO: 505731 - DNA, 15 bp, Homo sapiens
tctcttcctctctcc

SEQ ID NO: 505732 - DNA, 15 bp, Homo sapiens
ttctcttcctctctc

SEQ ID NO: 505733 - DNA, 15 bp, Homo sapiens
tttctcttcctctct

SEQ ID NO: 505734 - DNA, 15 bp, Homo sapiens
ctttctcttcctctc

SEQ ID NO: 505735 - DNA, 15 bp, Homo sapiens
tctttctcttcctct

SEQ ID NO: 505736 - DNA, 15 bp, Homo sapiens
ctctttctcttcctc

SEQ ID NO: 505737 - DNA, 15 bp, Homo sapiens
tctctttctcttcct

SEQ ID NO: 505738 - DNA, 15 bp, Homo sapiens
gtctctttctcttcc

SEQ ID NO: 505739 - DNA, 15 bp, Homo sapiens
ggtctctttctcttc

SEQ ID NO: 505740 - DNA, 15 bp, Homo sapiens
tggtctctttctctt

SEQ ID NO: 505741 - DNA, 15 bp, Homo sapiens
ttggtctctttctct

SEQ ID NO: 505742 - DNA, 15 bp, Homo sapiens
tttggtctctttctc

SEQ ID NO: 505743 - DNA, 15 bp, Homo sapiens
atttggtctctttct

SEQ ID NO: 505744 - DNA, 15 bp, Homo sapiens
tatttggtctctttc

SEQ ID NO: 505745 - DNA, 15 bp, Homo sapiens
ttatttggtctcttt

SEQ ID NO: 505746 - DNA, 15 bp, Homo sapiens
attatttggtctctt

SEQ ID NO: 505747 - DNA, 15 bp, Homo sapiens
aattatttggtctct

SEQ ID NO: 505748 - DNA, 15 bp, Homo sapiens
gaattatttggtctc

SEQ ID NO: 505749 - DNA, 15 bp, Homo sapiens
tgaattatttggtct

SEQ ID NO: 505750 - DNA, 15 bp, Homo sapiens
atgaattatttggtc

SEQ ID NO: 505751 - DNA, 15 bp, Homo sapiens
aatgaattatttggt

SEQ ID NO: 505752 - DNA, 15 bp, Homo sapiens
aaatgaattatttgg

SEQ ID NO: 505753 - DNA, 15 bp, Homo sapiens
aaaatgaattatttg

SEQ ID NO: 505754 - DNA, 15 bp, Homo sapiens
gaaaatgaattattt

SEQ ID NO: 505755 - DNA, 15 bp, Homo sapiens
agaaaatgaattatt

SEQ ID NO: 505756 - DNA, 15 bp, Homo sapiens
cagaaaatgaattat

SEQ ID NO: 505757 - DNA, 15 bp, Homo sapiens
tcagaaaatgaatta

SEQ ID NO: 505758 - DNA, 15 bp, Homo sapiens
ctcagaaaatgaatt

SEQ ID NO: 505759 - DNA, 15 bp, Homo sapiens
actcagaaaatgaat

SEQ ID NO: 505760 - DNA, 15 bp, Homo sapiens
gactcagaaaatgaa

SEQ ID NO: 505761 - DNA, 15 bp, Homo sapiens
tgactcagaaaatga

SEQ ID NO: 505762 - DNA, 15 bp, Homo sapiens
ctgactcagaaaatg

SEQ ID NO: 505763 - DNA, 15 bp, Homo sapiens
tctgactcagaaaat

SEQ ID NO: 505764 - DNA, 15 bp, Homo sapiens
gtctgactcagaaaa

SEQ ID NO: 505765 - DNA, 15 bp, Homo sapiens
agtctgactcagaaa

SEQ ID NO: 505766 - DNA, 15 bp, Homo sapiens
aagtctgactcagaa

SEQ ID NO: 505767 - DNA, 15 bp, Homo sapiens
gaagtctgactcaga

SEQ ID NO: 505768 - DNA, 15 bp, Homo sapiens
agaagtctgactcag

SEQ ID NO: 505769 - DNA, 15 bp, Homo sapiens
cagaagtctgactca

SEQ ID NO: 505770 - DNA, 15 bp, Homo sapiens
acagaagtctgactc

SEQ ID NO: 505771 - DNA, 15 bp, Homo sapiens
aacagaagtctgact

SEQ ID NO: 505772 - DNA, 15 bp, Homo sapiens
caacagaagtctgac

SEQ ID NO: 505773 - DNA, 15 bp, Homo sapiens
tcaacagaagtctga

SEQ ID NO: 505774 - DNA, 15 bp, Homo sapiens
atcaacagaagtctg

SEQ ID NO: 505775 - DNA, 15 bp, Homo sapiens
tatcaacagaagtct

SEQ ID NO: 505776 - DNA, 15 bp, Homo sapiens
ctatcaacagaagtc

SEQ ID NO: 505777 - DNA, 15 bp, Homo sapiens
cctatcaacagaagt

SEQ ID NO: 505778 - DNA, 15 bp, Homo sapiens
tcctatcaacagaag

SEQ ID NO: 505779 - DNA, 15 bp, Homo sapiens
ctcctatcaacagaa

SEQ ID NO: 505780 - DNA, 15 bp, Homo sapiens
actcctatcaacaga

SEQ ID NO: 505781 - DNA, 15 bp, Homo sapiens
gactcctatcaacag

SEQ ID NO: 505782 - DNA, 15 bp, Homo sapiens
agactcctatcaaca

SEQ ID NO: 505783 - DNA, 15 bp, Homo sapiens
gagactcctatcaac

SEQ ID NO: 505784 - DNA, 15 bp, Homo sapiens
tgagactcctatcaa

SEQ ID NO: 505785 - DNA, 15 bp, Homo sapiens
ctgagactcctatca

SEQ ID NO: 505786 - DNA, 15 bp, Homo sapiens
tctgagactcctatc

SEQ ID NO: 505787 - DNA, 15 bp, Homo sapiens
ttctgagactcctat

SEQ ID NO: 505788 - DNA, 15 bp, Homo sapiens
gttctgagactccta

SEQ ID NO: 505789 - DNA, 15 bp, Homo sapiens
agttctgagactcct

SEQ ID NO: 505790 - DNA, 15 bp, Homo sapiens
cagttctgagactcc

SEQ ID NO: 505791 - DNA, 15 bp, Homo sapiens
acagttctgagactc

SEQ ID NO: 505792 - DNA, 15 bp, Homo sapiens
gacagttctgagact

SEQ ID NO: 505793 - DNA, 15 bp, Homo sapiens
agacagttctgagac

SEQ ID NO: 505794 - DNA, 15 bp, Homo sapiens
tagacagttctgaga

SEQ ID NO: 505795 - DNA, 15 bp, Homo sapiens
gtagacagttctgag

SEQ ID NO: 505796 - DNA, 15 bp, Homo sapiens
agtagacagttctga

SEQ ID NO: 505797 - DNA, 15 bp, Homo sapiens
cagtagacagttctg

SEQ ID NO: 505798 - DNA, 15 bp, Homo sapiens
acagtagacagttct

SEQ ID NO: 505799 - DNA, 15 bp, Homo sapiens
cacagtagacagttc

SEQ ID NO: 505800 - DNA, 15 bp, Homo sapiens
ccacagtagacagtt

SEQ ID NO: 505801 - DNA, 15 bp, Homo sapiens
accacagtagacagt

SEQ ID NO: 505802 - DNA, 15 bp, Homo sapiens
gaccacagtagacag

SEQ ID NO: 505803 - DNA, 15 bp, Homo sapiens
agaccacagtagaca

SEQ ID NO: 505804 - DNA, 15 bp, Homo sapiens
gagaccacagtagac

SEQ ID NO: 505805 - DNA, 15 bp, Homo sapiens
tgagaccacagtaga

SEQ ID NO: 505806 - DNA, 15 bp, Homo sapiens
gtgagaccacagtag

SEQ ID NO: 505807 - DNA, 15 bp, Homo sapiens
tgtgagaccacagta

SEQ ID NO: 505808 - DNA, 15 bp, Homo sapiens
ttgtgagaccacagt

SEQ ID NO: 505809 - DNA, 15 bp, Homo sapiens
tttgtgagaccacag

SEQ ID NO: 505810 - DNA, 15 bp, Homo sapiens
ctttgtgagaccaca

SEQ ID NO: 505811 - DNA, 15 bp, Homo sapiens
gctttgtgagaccac

SEQ ID NO: 505812 - DNA, 15 bp, Homo sapiens
agctttgtgagacca

SEQ ID NO: 505813 - DNA, 15 bp, Homo sapiens
cagctttgtgagacc

SEQ ID NO: 505814 - DNA, 15 bp, Homo sapiens
tcagctttgtgagac

SEQ ID NO: 505815 - DNA, 15 bp, Homo sapiens
ctcagctttgtgaga

SEQ ID NO: 505816 - DNA, 15 bp, Homo sapiens
gctcagctttgtgag

SEQ ID NO: 505817 - DNA, 15 bp, Homo sapiens
ggctcagctttgtga

SEQ ID NO: 505818 - DNA, 15 bp, Homo sapiens
tggctcagctttgtg

SEQ ID NO: 505819 - DNA, 15 bp, Homo sapiens
ttggctcagctttgt

SEQ ID NO: 505820 - DNA, 15 bp, Homo sapiens
tttggctcagctttg

SEQ ID NO: 505821 - DNA, 15 bp, Homo sapiens
ctttggctcagcttt

SEQ ID NO: 505822 - DNA, 15 bp, Homo sapiens
actttggctcagctt

SEQ ID NO: 505823 - DNA, 15 bp, Homo sapiens
aactttggctcagct

SEQ ID NO: 505824 - DNA, 15 bp, Homo sapiens
aaactttggctcagc

SEQ ID NO: 505825 - DNA, 15 bp, Homo sapiens
aaaactttggctcag

SEQ ID NO: 505826 - DNA, 15 bp, Homo sapiens
taaaactttggctca

SEQ ID NO: 505827 - DNA, 15 bp, Homo sapiens
ttaaaactttggctc

SEQ ID NO: 505828 - DNA, 15 bp, Homo sapiens
tttaaaactttggct

SEQ ID NO: 505829 - DNA, 15 bp, Homo sapiens
ttttaaaactttggc

SEQ ID NO: 505830 - DNA, 15 bp, Homo sapiens
gttttaaaactttgg

SEQ ID NO: 505831 - DNA, 15 bp, Homo sapiens
tgttttaaaactttg

SEQ ID NO: 505832 - DNA, 15 bp, Homo sapiens
ctgttttaaaacttt

SEQ ID NO: 505833 - DNA, 15 bp, Homo sapiens
actgttttaaaactt

SEQ ID NO: 505834 - DNA, 15 bp, Homo sapiens
cactgttttaaaact

SEQ ID NO: 505835 - DNA, 15 bp, Homo sapiens
tcactgttttaaaac

SEQ ID NO: 505836 - DNA, 15 bp, Homo sapiens
ctcactgttttaaaa

SEQ ID NO: 505837 - DNA, 15 bp, Homo sapiens
tctcactgttttaaa

SEQ ID NO: 505838 - DNA, 15 bp, Homo sapiens
ctctcactgttttaa

SEQ ID NO: 505839 - DNA, 15 bp, Homo sapiens
tctctcactgtttta

SEQ ID NO: 505840 - DNA, 15 bp, Homo sapiens
ctctctcactgtttt

SEQ ID NO: 505841 - DNA, 15 bp, Homo sapiens
cctctctcactgttt

SEQ ID NO: 505842 - DNA, 15 bp, Homo sapiens
tcctctctcactgtt

SEQ ID NO: 505843 - DNA, 15 bp, Homo sapiens
gtcctctctcactgt

SEQ ID NO: 505844 - DNA, 15 bp, Homo sapiens
tgtcctctctcactg

SEQ ID NO: 505845 - DNA, 15 bp, Homo sapiens
gtgtcctctctcact

SEQ ID NO: 505846 - DNA, 15 bp, Homo sapiens
ggtgtcctctctcac

SEQ ID NO: 505847 - DNA, 15 bp, Homo sapiens
gggtgtcctctctca

SEQ ID NO: 505848 - DNA, 15 bp, Homo sapiens
tgggtgtcctctctc

SEQ ID NO: 505849 - DNA, 15 bp, Homo sapiens
atgggtgtcctctct

SEQ ID NO: 505850 - DNA, 15 bp, Homo sapiens
aatgggtgtcctctc

SEQ ID NO: 505851 - DNA, 15 bp, Homo sapiens
aaatgggtgtcctct

SEQ ID NO: 505852 - DNA, 15 bp, Homo sapiens
aaaatgggtgtcctc

SEQ ID NO: 505853 - DNA, 15 bp, Homo sapiens
taaaatgggtgtcct

SEQ ID NO: 505854 - DNA, 15 bp, Homo sapiens
ttaaaatgggtgtcc

SEQ ID NO: 505855 - DNA, 15 bp, Homo sapiens
tttaaaatgggtgtc

SEQ ID NO: 505856 - DNA, 15 bp, Homo sapiens
atttaaaatgggtgt

SEQ ID NO: 505857 - DNA, 15 bp, Homo sapiens
gatttaaaatgggtg

SEQ ID NO: 505858 - DNA, 15 bp, Homo sapiens
tgatttaaaatgggt

SEQ ID NO: 505859 - DNA, 15 bp, Homo sapiens
ctgatttaaaatggg

SEQ ID NO: 505860 - DNA, 15 bp, Homo sapiens
actgatttaaaatgg

SEQ ID NO: 505861 - DNA, 15 bp, Homo sapiens
gactgatttaaaatg

SEQ ID NO: 505862 - DNA, 15 bp, Homo sapiens
agactgatttaaaat

SEQ ID NO: 505863 - DNA, 15 bp, Homo sapiens
cagactgatttaaaa

SEQ ID NO: 505864 - DNA, 15 bp, Homo sapiens
tcagactgatttaaa

SEQ ID NO: 505865 - DNA, 15 bp, Homo sapiens
ctcagactgatttaa

SEQ ID NO: 505866 - DNA, 15 bp, Homo sapiens
actcagactgattta

SEQ ID NO: 505867 - DNA, 15 bp, Homo sapiens
cactcagactgattt

SEQ ID NO: 505868 - DNA, 15 bp, Homo sapiens
tcactcagactgatt

SEQ ID NO: 505869 - DNA, 15 bp, Homo sapiens
ctcactcagactgat

SEQ ID NO: 505870 - DNA, 15 bp, Homo sapiens
actcactcagactga

SEQ ID NO: 505871 - DNA, 15 bp, Homo sapiens
aactcactcagactg

SEQ ID NO: 505872 - DNA, 15 bp, Homo sapiens
taactcactcagact

SEQ ID NO: 505873 - DNA, 15 bp, Homo sapiens
ataactcactcagac

SEQ ID NO: 505874 - DNA, 15 bp, Homo sapiens
cataactcactcaga

SEQ ID NO: 505875 - DNA, 15 bp, Homo sapiens
ccataactcactcag

SEQ ID NO: 505876 - DNA, 15 bp, Homo sapiens
accataactcactca

SEQ ID NO: 505877 - DNA, 15 bp, Homo sapiens
aaccataactcactc

SEQ ID NO: 505878 - DNA, 15 bp, Homo sapiens
aaaccataactcact

SEQ ID NO: 505879 - DNA, 15 bp, Homo sapiens
aaaaccataactcac

SEQ ID NO: 505880 - DNA, 15 bp, Homo sapiens
gaaaaccataactca

SEQ ID NO: 505881 - DNA, 15 bp, Homo sapiens
tgaaaaccataactc

SEQ ID NO: 505882 - DNA, 15 bp, Homo sapiens
ctgaaaaccataact

SEQ ID NO: 505883 - DNA, 15 bp, Homo sapiens
actgaaaaccataac

SEQ ID NO: 505884 - DNA, 15 bp, Homo sapiens
cactgaaaaccataa

SEQ ID NO: 505885 - DNA, 15 bp, Homo sapiens
tcactgaaaaccata

SEQ ID NO: 505886 - DNA, 15 bp, Homo sapiens
ttcactgaaaaccat

SEQ ID NO: 505887 - DNA, 15 bp, Homo sapiens
attcactgaaaacca

SEQ ID NO: 505888 - DNA, 15 bp, Homo sapiens
cattcactgaaaacc

SEQ ID NO: 505889 - DNA, 15 bp, Homo sapiens
ccattcactgaaaac

SEQ ID NO: 505890 - DNA, 15 bp, Homo sapiens
tccattcactgaaaa

SEQ ID NO: 505891 - DNA, 15 bp, Homo sapiens
atccattcactgaaa

SEQ ID NO: 505892 - DNA, 15 bp, Homo sapiens
gatccattcactgaa

SEQ ID NO: 505893 - DNA, 15 bp, Homo sapiens
tgatccattcactga

SEQ ID NO: 505894 - DNA, 15 bp, Homo sapiens
gtgatccattcactg

SEQ ID NO: 505895 - DNA, 15 bp, Homo sapiens
ggtgatccattcact

SEQ ID NO: 505896 - DNA, 15 bp, Homo sapiens
aggtgatccattcac

SEQ ID NO: 505897 - DNA, 15 bp, Homo sapiens
gaggtgatccattca

SEQ ID NO: 505898 - DNA, 15 bp, Homo sapiens
agaggtgatccattc

SEQ ID NO: 505899 - DNA, 15 bp, Homo sapiens
cagaggtgatccatt

SEQ ID NO: 505900 - DNA, 15 bp, Homo sapiens
acagaggtgatccat

SEQ ID NO: 505901 - DNA, 15 bp, Homo sapiens
tacagaggtgatcca

SEQ ID NO: 505902 - DNA, 15 bp, Homo sapiens
ctacagaggtgatcc

SEQ ID NO: 505903 - DNA, 15 bp, Homo sapiens
tctacagaggtgatc

SEQ ID NO: 505904 - DNA, 15 bp, Homo sapiens
atctacagaggtgat

SEQ ID NO: 505905 - DNA, 15 bp, Homo sapiens
aatctacagaggtga

SEQ ID NO: 505906 - DNA, 15 bp, Homo sapiens
aaatctacagaggtg

SEQ ID NO: 505907 - DNA, 15 bp, Homo sapiens
caaatctacagaggt

SEQ ID NO: 505908 - DNA, 15 bp, Homo sapiens
tcaaatctacagagg

SEQ ID NO: 505909 - DNA, 15 bp, Homo sapiens
ttcaaatctacagag

SEQ ID NO: 505910 - DNA, 15 bp, Homo sapiens
gttcaaatctacaga

SEQ ID NO: 505911 - DNA, 15 bp, Homo sapiens
tgttcaaatctacag

SEQ ID NO: 505912 - DNA, 15 bp, Homo sapiens
atgttcaaatctaca

SEQ ID NO: 505913 - DNA, 15 bp, Homo sapiens
gatgttcaaatctac

SEQ ID NO: 505914 - DNA, 15 bp, Homo sapiens
tgatgttcaaatcta

SEQ ID NO: 505915 - DNA, 15 bp, Homo sapiens
ttgatgttcaaatct

SEQ ID NO: 505916 - DNA, 15 bp, Homo sapiens
tttgatgttcaaatc

SEQ ID NO: 505917 - DNA, 15 bp, Homo sapiens
gtttgatgttcaaat

SEQ ID NO: 505918 - DNA, 15 bp, Homo sapiens
ggtttgatgttcaaa

SEQ ID NO: 505919 - DNA, 15 bp, Homo sapiens
aggtttgatgttcaa

SEQ ID NO: 505920 - DNA, 15 bp, Homo sapiens
aaggtttgatgttca

SEQ ID NO: 505921 - DNA, 15 bp, Homo sapiens
aaaggtttgatgttc

SEQ ID NO: 505922 - DNA, 15 bp, Homo sapiens
taaaggtttgatgtt

SEQ ID NO: 505923 - DNA, 15 bp, Homo sapiens
ataaaggtttgatgt

SEQ ID NO: 505924 - DNA, 15 bp, Homo sapiens
aataaaggtttgatg

SEQ ID NO: 505925 - DNA, 15 bp, Homo sapiens
aaataaaggtttgat

SEQ ID NO: 505926 - DNA, 15 bp, Homo sapiens
gaaataaaggtttga

SEQ ID NO: 505927 - DNA, 15 bp, Homo sapiens
agaaataaaggtttg

SEQ ID NO: 505928 - DNA, 15 bp, Homo sapiens
tagaaataaaggttt

SEQ ID NO: 505929 - DNA, 15 bp, Homo sapiens
ttagaaataaaggtt

SEQ ID NO: 505930 - DNA, 15 bp, Homo sapiens
attagaaataaaggt

SEQ ID NO: 505931 - DNA, 15 bp, Homo sapiens
gattagaaataaagg

SEQ ID NO: 505932 - DNA, 15 bp, Homo sapiens
tgattagaaataaag

SEQ ID NO: 505933 - DNA, 15 bp, Homo sapiens
ctgattagaaataaa

SEQ ID NO: 505934 - DNA, 15 bp, Homo sapiens
actgattagaaataa

SEQ ID NO: 505935 - DNA, 15 bp, Homo sapiens
cactgattagaaata

SEQ ID NO: 505936 - DNA, 15 bp, Homo sapiens
ccactgattagaaat

SEQ ID NO: 505937 - DNA, 15 bp, Homo sapiens
gccactgattagaaa

SEQ ID NO: 505938 - DNA, 15 bp, Homo sapiens
agccactgattagaa

SEQ ID NO: 505939 - DNA, 15 bp, Homo sapiens
cagccactgattaga

SEQ ID NO: 505940 - DNA, 15 bp, Homo sapiens
tcagccactgattag

SEQ ID NO: 505941 - DNA, 15 bp, Homo sapiens
ctcagccactgatta

SEQ ID NO: 505942 - DNA, 15 bp, Homo sapiens
gctcagccactgatt

SEQ ID NO: 505943 - DNA, 15 bp, Homo sapiens
agctcagccactgat

SEQ ID NO: 505944 - DNA, 15 bp, Homo sapiens
gagctcagccactga

SEQ ID NO: 505945 - DNA, 15 bp, Homo sapiens
ggagctcagccactg

SEQ ID NO: 505946 - DNA, 15 bp, Homo sapiens
aggagctcagccact

SEQ ID NO: 505947 - DNA, 15 bp, Homo sapiens
aaggagctcagccac

SEQ ID NO: 505948 - DNA, 15 bp, Homo sapiens
gaaggagctcagcca

SEQ ID NO: 505949 - DNA, 15 bp, Homo sapiens
tgaaggagctcagcc

SEQ ID NO: 505950 - DNA, 15 bp, Homo sapiens
gtgaaggagctcagc

SEQ ID NO: 505951 - DNA, 15 bp, Homo sapiens
tgtgaaggagctcag

SEQ ID NO: 505952 - DNA, 15 bp, Homo sapiens
ctgtgaaggagctca

SEQ ID NO: 505953 - DNA, 15 bp, Homo sapiens
tctgtgaaggagctc

SEQ ID NO: 505954 - DNA, 15 bp, Homo sapiens
ttctgtgaaggagct

SEQ ID NO: 505955 - DNA, 15 bp, Homo sapiens
attctgtgaaggagc

SEQ ID NO: 505956 - DNA, 15 bp, Homo sapiens
aattctgtgaaggag

SEQ ID NO: 505957 - DNA, 15 bp, Homo sapiens
gaattctgtgaagga

SEQ ID NO: 505958 - DNA, 15 bp, Homo sapiens
cgaattctgtgaagg

SEQ ID NO: 505959 - DNA, 15 bp, Homo sapiens
tcgaattctgtgaag

SEQ ID NO: 505960 - DNA, 15 bp, Homo sapiens
atcgaattctgtgaa

SEQ ID NO: 505961 - DNA, 15 bp, Homo sapiens
catcgaattctgtga

SEQ ID NO: 505962 - DNA, 15 bp, Homo sapiens
ccatcgaattctgtg

SEQ ID NO: 505963 - DNA, 15 bp, Homo sapiens
cccatcgaattctgt

SEQ ID NO: 505964 - DNA, 15 bp, Homo sapiens
tcccatcgaattctg

SEQ ID NO: 505965 - DNA, 15 bp, Homo sapiens
ctcccatcgaattct

SEQ ID NO: 505966 - DNA, 15 bp, Homo sapiens
cctcccatcgaattc

SEQ ID NO: 505967 - DNA, 15 bp, Homo sapiens
gcctcccatcgaatt

SEQ ID NO: 505968 - DNA, 15 bp, Homo sapiens
agcctcccatcgaat

SEQ ID NO: 505969 - DNA, 15 bp, Homo sapiens
cagcctcccatcgaa

SEQ ID NO: 505970 - DNA, 15 bp, Homo sapiens
acagcctcccatcga

SEQ ID NO: 505971 - DNA, 15 bp, Homo sapiens
aacagcctcccatcg

SEQ ID NO: 505972 - DNA, 15 bp, Homo sapiens
aaacagcctcccatc

SEQ ID NO: 505973 - DNA, 15 bp, Homo sapiens
aaaacagcctcccat

SEQ ID NO: 505974 - DNA, 15 bp, Homo sapiens
gaaaacagcctccca

SEQ ID NO: 505975 - DNA, 15 bp, Homo sapiens
cgaaaacagcctccc

SEQ ID NO: 505976 - DNA, 15 bp, Homo sapiens
tcgaaaacagcctcc

SEQ ID NO: 505977 - DNA, 15 bp, Homo sapiens
ttcgaaaacagcctc

SEQ ID NO: 505978 - DNA, 15 bp, Homo sapiens
tttcgaaaacagcct

SEQ ID NO: 505979 - DNA, 15 bp, Homo sapiens
ctttcgaaaacagcc

SEQ ID NO: 505980 - DNA, 15 bp, Homo sapiens
actttcgaaaacagc

SEQ ID NO: 505981 - DNA, 15 bp, Homo sapiens
tactttcgaaaacag

SEQ ID NO: 505982 - DNA, 15 bp, Homo sapiens
ttactttcgaaaaca

SEQ ID NO: 505983 - DNA, 15 bp, Homo sapiens
cttactttcgaaaac

SEQ ID NO: 505984 - DNA, 15 bp, Homo sapiens
ccttactttcgaaaa

SEQ ID NO: 505985 - DNA, 15 bp, Homo sapiens
tccttactttcgaaa

SEQ ID NO: 505986 - DNA, 15 bp, Homo sapiens
ttccttactttcgaa

SEQ ID NO: 505987 - DNA, 15 bp, Homo sapiens
cttccttactttcga

SEQ ID NO: 505988 - DNA, 15 bp, Homo sapiens
acttccttactttcg

SEQ ID NO: 505989 - DNA, 15 bp, Homo sapiens
gacttccttactttc

SEQ ID NO: 505990 - DNA, 15 bp, Homo sapiens
tgacttccttacttt

SEQ ID NO: 505991 - DNA, 15 bp, Homo sapiens
atgacttccttactt

SEQ ID NO: 505992 - DNA, 15 bp, Homo sapiens
aatgacttccttact

SEQ ID NO: 505993 - DNA, 15 bp, Homo sapiens
gaatgacttccttac

SEQ ID NO: 505994 - DNA, 15 bp, Homo sapiens
tgaatgacttcctta

SEQ ID NO: 505995 - DNA, 15 bp, Homo sapiens
ctgaatgacttcctt

SEQ ID NO: 505996 - DNA, 15 bp, Homo sapiens
cctgaatgacttcct

SEQ ID NO: 505997 - DNA, 15 bp, Homo sapiens
ccctgaatgacttcc

SEQ ID NO: 505998 - DNA, 15 bp, Homo sapiens
cccctgaatgacttc

SEQ ID NO: 505999 - DNA, 15 bp, Homo sapiens
acccctgaatgactt

SEQ ID NO: 506000 - DNA, 15 bp, Homo sapiens
aacccctgaatgact

SEQ ID NO: 506001 - DNA, 15 bp, Homo sapiens
aaacccctgaatgac

SEQ ID NO: 506002 - DNA, 15 bp, Homo sapiens
aaaacccctgaatga

SEQ ID NO: 506003 - DNA, 15 bp, Homo sapiens
caaaacccctgaatg

SEQ ID NO: 506004 - DNA, 15 bp, Homo sapiens
acaaaacccctgaat

SEQ ID NO: 506005 - DNA, 15 bp, Homo sapiens
aacaaaacccctgaa

SEQ ID NO: 506006 - DNA, 15 bp, Homo sapiens
aaacaaaacccctga

SEQ ID NO: 506007 - DNA, 15 bp, Homo sapiens
gaaacaaaacccctg

SEQ ID NO: 506008 - DNA, 15 bp, Homo sapiens
agaaacaaaacccct

SEQ ID NO: 506009 - DNA, 15 bp, Homo sapiens
cagaaacaaaacccc

SEQ ID NO: 506010 - DNA, 15 bp, Homo sapiens
acagaaacaaaaccc

SEQ ID NO: 506011 - DNA, 15 bp, Homo sapiens
gacagaaacaaaacc

SEQ ID NO: 506012 - DNA, 15 bp, Homo sapiens
ggacagaaacaaaac

SEQ ID NO: 506013 - DNA, 15 bp, Homo sapiens
aggacagaaacaaaa

SEQ ID NO: 506014 - DNA, 15 bp, Homo sapiens
taggacagaaacaaa

SEQ ID NO: 506015 - DNA, 15 bp, Homo sapiens
ttaggacagaaacaa

SEQ ID NO: 506016 - DNA, 15 bp, Homo sapiens
tttaggacagaaaca

SEQ ID NO: 506017 - DNA, 15 bp, Homo sapiens
ttttaggacagaaac

SEQ ID NO: 506018 - DNA, 15 bp, Homo sapiens
gttttaggacagaaa

SEQ ID NO: 506019 - DNA, 15 bp, Homo sapiens
tgttttaggacagaa

SEQ ID NO: 506020 - DNA, 15 bp, Homo sapiens
ctgttttaggacaga

SEQ ID NO: 506021 - DNA, 15 bp, Homo sapiens
cctgttttaggacag

SEQ ID NO: 506022 - DNA, 15 bp, Homo sapiens
ccctgttttaggaca

SEQ ID NO: 506023 - DNA, 15 bp, Homo sapiens
tccctgttttaggac

SEQ ID NO: 506024 - DNA, 15 bp, Homo sapiens
gtccctgttttagga

SEQ ID NO: 506025 - DNA, 15 bp, Homo sapiens
ggtccctgttttagg

SEQ ID NO: 506026 - DNA, 15 bp, Homo sapiens
gggtccctgttttag

SEQ ID NO: 506027 - DNA, 15 bp, Homo sapiens
ggggtccctgtttta

SEQ ID NO: 506028 - DNA, 15 bp, Homo sapiens
aggggtccctgtttt

SEQ ID NO: 506029 - DNA, 15 bp, Homo sapiens
gaggggtccctgttt

SEQ ID NO: 506030 - DNA, 15 bp, Homo sapiens
agaggggtccctgtt

SEQ ID NO: 506031 - DNA, 15 bp, Homo sapiens
tagaggggtccctgt

SEQ ID NO: 506032 - DNA, 15 bp, Homo sapiens
ctagaggggtccctg

SEQ ID NO: 506033 - DNA, 15 bp, Homo sapiens
cctagaggggtccct

SEQ ID NO: 506034 - DNA, 15 bp, Homo sapiens
ccctagaggggtccc

SEQ ID NO: 506035 - DNA, 15 bp, Homo sapiens
cccctagaggggtcc

SEQ ID NO: 506036 - DNA, 15 bp, Homo sapiens
tcccctagaggggtc

SEQ ID NO: 506037 - DNA, 15 bp, Homo sapiens
gtcccctagaggggt

SEQ ID NO: 506038 - DNA, 15 bp, Homo sapiens
ggtcccctagagggg

SEQ ID NO: 506039 - DNA, 15 bp, Homo sapiens
tggtcccctagaggg

SEQ ID NO: 506040 - DNA, 15 bp, Homo sapiens
ctggtcccctagagg

SEQ ID NO: 506041 - DNA, 15 bp, Homo sapiens
gctggtcccctagag

SEQ ID NO: 506042 - DNA, 15 bp, Homo sapiens
tgctggtcccctaga

SEQ ID NO: 506043 - DNA, 15 bp, Homo sapiens
ctgctggtcccctag

SEQ ID NO: 506044 - DNA, 15 bp, Homo sapiens
gctgctggtccccta

SEQ ID NO: 506045 - DNA, 15 bp, Homo sapiens
tgctgctggtcccct

SEQ ID NO: 506046 - DNA, 15 bp, Homo sapiens
ctgctgctggtcccc

SEQ ID NO: 506047 - DNA, 15 bp, Homo sapiens
tctgctgctggtccc

SEQ ID NO: 506048 - DNA, 15 bp, Homo sapiens
gtctgctgctggtcc

SEQ ID NO: 506049 - DNA, 15 bp, Homo sapiens
cgtctgctgctggtc

SEQ ID NO: 506050 - DNA, 15 bp, Homo sapiens
gcgtctgctgctggt

SEQ ID NO: 506051 - DNA, 15 bp, Homo sapiens
ggcgtctgctgctgg

SEQ ID NO: 506052 - DNA, 15 bp, Homo sapiens
aggcgtctgctgctg

SEQ ID NO: 506053 - DNA, 15 bp, Homo sapiens
aaggcgtctgctgct

SEQ ID NO: 506054 - DNA, 15 bp, Homo sapiens
gaaggcgtctgctgc

SEQ ID NO: 506055 - DNA, 15 bp, Homo sapiens
tgaaggcgtctgctg

SEQ ID NO: 506056 - DNA, 15 bp, Homo sapiens
ctgaaggcgtctgct

SEQ ID NO: 506057 - DNA, 15 bp, Homo sapiens
gctgaaggcgtctgc

SEQ ID NO: 506058 - DNA, 15 bp, Homo sapiens
ggctgaaggcgtctg

SEQ ID NO: 506059 - DNA, 15 bp, Homo sapiens
gggctgaaggcgtct

SEQ ID NO: 506060 - DNA, 15 bp, Homo sapiens
ggggctgaaggcgtc

SEQ ID NO: 506061 - DNA, 15 bp, Homo sapiens
aggggctgaaggcgt

SEQ ID NO: 506062 - DNA, 15 bp, Homo sapiens
caggggctgaaggcg

SEQ ID NO: 506063 - DNA, 15 bp, Homo sapiens
gcaggggctgaaggc

SEQ ID NO: 506064 - DNA, 15 bp, Homo sapiens
agcaggggctgaagg

SEQ ID NO: 506065 - DNA, 15 bp, Homo sapiens
cagcaggggctgaag

SEQ ID NO: 506066 - DNA, 15 bp, Homo sapiens
gcagcaggggctgaa

SEQ ID NO: 506067 - DNA, 15 bp, Homo sapiens
agcagcaggggctga

SEQ ID NO: 506068 - DNA, 15 bp, Homo sapiens
aagcagcaggggctg

SEQ ID NO: 506069 - DNA, 15 bp, Homo sapiens
aaagcagcaggggct

SEQ ID NO: 506070 - DNA, 15 bp, Homo sapiens
aaaagcagcaggggc

SEQ ID NO: 506071 - DNA, 15 bp, Homo sapiens
caaaagcagcagggg

SEQ ID NO: 506072 - DNA, 15 bp, Homo sapiens
ccaaaagcagcaggg

SEQ ID NO: 506073 - DNA, 15 bp, Homo sapiens
gccaaaagcagcagg

SEQ ID NO: 506074 - DNA, 15 bp, Homo sapiens
agccaaaagcagcag

SEQ ID NO: 506075 - DNA, 15 bp, Homo sapiens
gagccaaaagcagca

SEQ ID NO: 506076 - DNA, 15 bp, Homo sapiens
ggagccaaaagcagc

SEQ ID NO: 506077 - DNA, 15 bp, Homo sapiens
aggagccaaaagcag

SEQ ID NO: 506078 - DNA, 15 bp, Homo sapiens
aaggagccaaaagca

SEQ ID NO: 506079 - DNA, 15 bp, Homo sapiens
aaaggagccaaaagc

SEQ ID NO: 506080 - DNA, 15 bp, Homo sapiens
caaaggagccaaaag

SEQ ID NO: 506081 - DNA, 15 bp, Homo sapiens
ccaaaggagccaaaa

SEQ ID NO: 506082 - DNA, 15 bp, Homo sapiens
gccaaaggagccaaa

SEQ ID NO: 506083 - DNA, 15 bp, Homo sapiens
ggccaaaggagccaa

SEQ ID NO: 506084 - DNA, 15 bp, Homo sapiens
aggccaaaggagcca

SEQ ID NO: 506085 - DNA, 15 bp, Homo sapiens
gaggccaaaggagcc

SEQ ID NO: 506086 - DNA, 15 bp, Homo sapiens
ggaggccaaaggagc

SEQ ID NO: 506087 - DNA, 15 bp, Homo sapiens
tggaggccaaaggag

SEQ ID NO: 506088 - DNA, 15 bp, Homo sapiens
ttggaggccaaagga

SEQ ID NO: 506089 - DNA, 15 bp, Homo sapiens
gttggaggccaaagg

SEQ ID NO: 506090 - DNA, 15 bp, Homo sapiens
cgttggaggccaaag

SEQ ID NO: 506091 - DNA, 15 bp, Homo sapiens
ccgttggaggccaaa

SEQ ID NO: 506092 - DNA, 15 bp, Homo sapiens
cccgttggaggccaa

SEQ ID NO: 506093 - DNA, 15 bp, Homo sapiens
ccccgttggaggcca

SEQ ID NO: 506094 - DNA, 15 bp, Homo sapiens
accccgttggaggcc

SEQ ID NO: 506095 - DNA, 15 bp, Homo sapiens
taccccgttggaggc

SEQ ID NO: 506096 - DNA, 15 bp, Homo sapiens
ttaccccgttggagg

SEQ ID NO: 506097 - DNA, 15 bp, Homo sapiens
gttaccccgttggag

SEQ ID NO: 506098 - DNA, 15 bp, Homo sapiens
tgttaccccgttgga

SEQ ID NO: 506099 - DNA, 15 bp, Homo sapiens
gtgttaccccgttgg

SEQ ID NO: 506100 - DNA, 15 bp, Homo sapiens
agtgttaccccgttg

SEQ ID NO: 506101 - DNA, 15 bp, Homo sapiens
cagtgttaccccgtt

SEQ ID NO: 506102 - DNA, 15 bp, Homo sapiens
ccagtgttaccccgt

SEQ ID NO: 506103 - DNA, 15 bp, Homo sapiens
cccagtgttaccccg

SEQ ID NO: 506104 - DNA, 15 bp, Homo sapiens
acccagtgttacccc

SEQ ID NO: 506105 - DNA, 15 bp, Homo sapiens
cacccagtgttaccc

SEQ ID NO: 506106 - DNA, 15 bp, Homo sapiens
tcacccagtgttacc

SEQ ID NO: 506107 - DNA, 15 bp, Homo sapiens
gtcacccagtgttac

SEQ ID NO: 506108 - DNA, 15 bp, Homo sapiens
tgtcacccagtgtta

SEQ ID NO: 506109 - DNA, 15 bp, Homo sapiens
ctgtcacccagtgtt

SEQ ID NO: 506110 - DNA, 15 bp, Homo sapiens
cctgtcacccagtgt

SEQ ID NO: 506111 - DNA, 15 bp, Homo sapiens
gcctgtcacccagtg

SEQ ID NO: 506112 - DNA, 15 bp, Homo sapiens
ggcctgtcacccagt

SEQ ID NO: 506113 - DNA, 15 bp, Homo sapiens
aggcctgtcacccag

SEQ ID NO: 506114 - DNA, 15 bp, Homo sapiens
caggcctgtcaccca

SEQ ID NO: 506115 - DNA, 15 bp, Homo sapiens
tcaggcctgtcaccc

SEQ ID NO: 506116 - DNA, 15 bp, Homo sapiens
ctcaggcctgtcacc

SEQ ID NO: 506117 - DNA, 15 bp, Homo sapiens
cctcaggcctgtcac

SEQ ID NO: 506118 - DNA, 15 bp, Homo sapiens
tcctcaggcctgtca

SEQ ID NO: 506119 - DNA, 15 bp, Homo sapiens
gtcctcaggcctgtc

SEQ ID NO: 506120 - DNA, 15 bp, Homo sapiens
tgtcctcaggcctgt

SEQ ID NO: 506121 - DNA, 15 bp, Homo sapiens
atgtcctcaggcctg

SEQ ID NO: 506122 - DNA, 15 bp, Homo sapiens
gatgtcctcaggcct

SEQ ID NO: 506123 - DNA, 15 bp, Homo sapiens
ggatgtcctcaggcc

SEQ ID NO: 506124 - DNA, 15 bp, Homo sapiens
gggatgtcctcaggc

SEQ ID NO: 506125 - DNA, 15 bp, Homo sapiens
tgggatgtcctcagg

SEQ ID NO: 506126 - DNA, 15 bp, Homo sapiens
ctgggatgtcctcag

SEQ ID NO: 506127 - DNA, 15 bp, Homo sapiens
cctgggatgtcctca

SEQ ID NO: 506128 - DNA, 15 bp, Homo sapiens
tcctgggatgtcctc

SEQ ID NO: 506129 - DNA, 15 bp, Homo sapiens
ttcctgggatgtcct

SEQ ID NO: 506130 - DNA, 15 bp, Homo sapiens
cttcctgggatgtcc

SEQ ID NO: 506131 - DNA, 15 bp, Homo sapiens
ccttcctgggatgtc

SEQ ID NO: 506132 - DNA, 15 bp, Homo sapiens
tccttcctgggatgt

SEQ ID NO: 506133 - DNA, 15 bp, Homo sapiens
gtccttcctgggatg

SEQ ID NO: 506134 - DNA, 15 bp, Homo sapiens
agtccttcctgggat

SEQ ID NO: 506135 - DNA, 15 bp, Homo sapiens
aagtccttcctggga

SEQ ID NO: 506136 - DNA, 15 bp, Homo sapiens
aaagtccttcctggg

SEQ ID NO: 506137 - DNA, 15 bp, Homo sapiens
caaagtccttcctgg

SEQ ID NO: 506138 - DNA, 15 bp, Homo sapiens
ccaaagtccttcctg

SEQ ID NO: 506139 - DNA, 15 bp, Homo sapiens
cccaaagtccttcct

SEQ ID NO: 506140 - DNA, 15 bp, Homo sapiens
tcccaaagtccttcc

SEQ ID NO: 506141 - DNA, 15 bp, Homo sapiens
ctcccaaagtccttc

SEQ ID NO: 506142 - DNA, 15 bp, Homo sapiens
gctcccaaagtcctt

SEQ ID NO: 506143 - DNA, 15 bp, Homo sapiens
agctcccaaagtcct

SEQ ID NO: 506144 - DNA, 15 bp, Homo sapiens
cagctcccaaagtcc

SEQ ID NO: 506145 - DNA, 15 bp, Homo sapiens
tcagctcccaaagtc

SEQ ID NO: 506146 - DNA, 15 bp, Homo sapiens
ctcagctcccaaagt

SEQ ID NO: 506147 - DNA, 15 bp, Homo sapiens
tctcagctcccaaag

SEQ ID NO: 506148 - DNA, 15 bp, Homo sapiens
atctcagctcccaaa

SEQ ID NO: 506149 - DNA, 15 bp, Homo sapiens
aatctcagctcccaa

SEQ ID NO: 506150 - DNA, 15 bp, Homo sapiens
aaatctcagctccca

SEQ ID NO: 506151 - DNA, 15 bp, Homo sapiens
gaaatctcagctccc

SEQ ID NO: 506152 - DNA, 15 bp, Homo sapiens
tgaaatctcagctcc

SEQ ID NO: 506153 - DNA, 15 bp, Homo sapiens
gtgaaatctcagctc

SEQ ID NO: 506154 - DNA, 15 bp, Homo sapiens
agtgaaatctcagct

SEQ ID NO: 506155 - DNA, 15 bp, Homo sapiens
gagtgaaatctcagc

SEQ ID NO: 506156 - DNA, 15 bp, Homo sapiens
agagtgaaatctcag

SEQ ID NO: 506157 - DNA, 15 bp, Homo sapiens
aagagtgaaatctca

SEQ ID NO: 506158 - DNA, 15 bp, Homo sapiens
aaagagtgaaatctc

SEQ ID NO: 506159 - DNA, 15 bp, Homo sapiens
caaagagtgaaatct

SEQ ID NO: 506160 - DNA, 15 bp, Homo sapiens
acaaagagtgaaatc

SEQ ID NO: 506161 - DNA, 15 bp, Homo sapiens
aacaaagagtgaaat

SEQ ID NO: 506162 - DNA, 15 bp, Homo sapiens
caacaaagagtgaaa

SEQ ID NO: 506163 - DNA, 15 bp, Homo sapiens
acaacaaagagtgaa

SEQ ID NO: 506164 - DNA, 15 bp, Homo sapiens
tacaacaaagagtga

SEQ ID NO: 506165 - DNA, 15 bp, Homo sapiens
gtacaacaaagagtg

SEQ ID NO: 506166 - DNA, 15 bp, Homo sapiens
agtacaacaaagagt

SEQ ID NO: 506167 - DNA, 15 bp, Homo sapiens
cagtacaacaaagag

SEQ ID NO: 506168 - DNA, 15 bp, Homo sapiens
ccagtacaacaaaga

SEQ ID NO: 506169 - DNA, 15 bp, Homo sapiens
cccagtacaacaaag

SEQ ID NO: 506170 - DNA, 15 bp, Homo sapiens
acccagtacaacaaa

SEQ ID NO: 506171 - DNA, 15 bp, Homo sapiens
aacccagtacaacaa

SEQ ID NO: 506172 - DNA, 15 bp, Homo sapiens
aaacccagtacaaca

SEQ ID NO: 506173 - DNA, 15 bp, Homo sapiens
aaaacccagtacaac

SEQ ID NO: 506174 - DNA, 15 bp, Homo sapiens
taaaacccagtacaa

SEQ ID NO: 506175 - DNA, 15 bp, Homo sapiens
ataaaacccagtaca

SEQ ID NO: 506176 - DNA, 15 bp, Homo sapiens
gataaaacccagtac

SEQ ID NO: 506177 - DNA, 15 bp, Homo sapiens
agataaaacccagta

SEQ ID NO: 506178 - DNA, 15 bp, Homo sapiens
gagataaaacccagt

SEQ ID NO: 506179 - DNA, 15 bp, Homo sapiens
agagataaaacccag

SEQ ID NO: 506180 - DNA, 15 bp, Homo sapiens
cagagataaaaccca

SEQ ID NO: 506181 - DNA, 15 bp, Homo sapiens
ccagagataaaaccc

SEQ ID NO: 506182 - DNA, 15 bp, Homo sapiens
cccagagataaaacc

SEQ ID NO: 506183 - DNA, 15 bp, Homo sapiens
tcccagagataaaac

SEQ ID NO: 506184 - DNA, 15 bp, Homo sapiens
atcccagagataaaa

SEQ ID NO: 506185 - DNA, 15 bp, Homo sapiens
gatcccagagataaa

SEQ ID NO: 506186 - DNA, 15 bp, Homo sapiens
ggatcccagagataa

SEQ ID NO: 506187 - DNA, 15 bp, Homo sapiens
aggatcccagagata

SEQ ID NO: 506188 - DNA, 15 bp, Homo sapiens
taggatcccagagat

SEQ ID NO: 506189 - DNA, 15 bp, Homo sapiens
ttaggatcccagaga

SEQ ID NO: 506190 - DNA, 15 bp, Homo sapiens
tttaggatcccagag

SEQ ID NO: 506191 - DNA, 15 bp, Homo sapiens
atttaggatcccaga

SEQ ID NO: 506192 - DNA, 15 bp, Homo sapiens
cctagtgaactaata

SEQ ID NO: 506193 - DNA, 15 bp, Homo sapiens
acctagtgaactaat

SEQ ID NO: 506194 - DNA, 15 bp, Homo sapiens
gacctagtgaactaa

SEQ ID NO: 506195 - DNA, 15 bp, Homo sapiens
tgacctagtgaacta

SEQ ID NO: 506196 - DNA, 15 bp, Homo sapiens
gtgacctagtgaact

SEQ ID NO: 506197 - DNA, 15 bp, Homo sapiens
cgtgacctagtgaac

SEQ ID NO: 506198 - DNA, 15 bp, Homo sapiens
tcgtgacctagtgaa

SEQ ID NO: 506199 - DNA, 15 bp, Homo sapiens
gtcgtgacctagtga

SEQ ID NO: 506200 - DNA, 15 bp, Homo sapiens
cgtcgtgacctagtg

SEQ ID NO: 506201 - DNA, 15 bp, Homo sapiens
tcgtcgtgacctagt

SEQ ID NO: 506202 - DNA, 15 bp, Homo sapiens
atcgtcgtgacctag

SEQ ID NO: 506203 - DNA, 15 bp, Homo sapiens
catcgtcgtgaccta

SEQ ID NO: 506204 - DNA, 15 bp, Homo sapiens
tcatcgtcgtgacct

SEQ ID NO: 506205 - DNA, 15 bp, Homo sapiens
atcatcgtcgtgacc

SEQ ID NO: 506206 - DNA, 15 bp, Homo sapiens
catcatcgtcgtgac

SEQ ID NO: 506207 - DNA, 15 bp, Homo sapiens
gcatcatcgtcgtga

SEQ ID NO: 506208 - DNA, 15 bp, Homo sapiens
tgcatcatcgtcgtg

SEQ ID NO: 506209 - DNA, 15 bp, Homo sapiens
ttgcatcatcgtcgt

SEQ ID NO: 506210 - DNA, 15 bp, Homo sapiens
tttgcatcatcgtcg

SEQ ID NO: 506211 - DNA, 15 bp, Homo sapiens
gtttgcatcatcgtc

SEQ ID NO: 506212 - DNA, 15 bp, Homo sapiens
agtttgcatcatcgt

SEQ ID NO: 506213 - DNA, 15 bp, Homo sapiens
gagtttgcatcatcg

SEQ ID NO: 506214 - DNA, 15 bp, Homo sapiens
agagtttgcatcatc

SEQ ID NO: 506215 - DNA, 15 bp, Homo sapiens
tagagtttgcatcat

SEQ ID NO: 506216 - DNA, 15 bp, Homo sapiens
ttagagtttgcatca

SEQ ID NO: 506217 - DNA, 15 bp, Homo sapiens
gttagagtttgcatc

SEQ ID NO: 506218 - DNA, 15 bp, Homo sapiens
agttagagtttgcat

SEQ ID NO: 506219 - DNA, 15 bp, Homo sapiens
aagttagagtttgca

SEQ ID NO: 506220 - DNA, 15 bp, Homo sapiens
caagttagagtttgc

SEQ ID NO: 506221 - DNA, 15 bp, Homo sapiens
gcaagttagagtttg

SEQ ID NO: 506222 - DNA, 15 bp, Homo sapiens
tgcaagttagagttt

SEQ ID NO: 506223 - DNA, 15 bp, Homo sapiens
ctgcaagttagagtt

SEQ ID NO: 506224 - DNA, 15 bp, Homo sapiens
cctgcaagttagagt

SEQ ID NO: 506225 - DNA, 15 bp, Homo sapiens
ccctgcaagttagag

SEQ ID NO: 506226 - DNA, 15 bp, Homo sapiens
tccctgcaagttaga

SEQ ID NO: 506227 - DNA, 15 bp, Homo sapiens
atccctgcaagttag

SEQ ID NO: 506228 - DNA, 15 bp, Homo sapiens
aatccctgcaagtta

SEQ ID NO: 506229 - DNA, 15 bp, Homo sapiens
aaatccctgcaagtt

SEQ ID NO: 506230 - DNA, 15 bp, Homo sapiens
aaaatccctgcaagt

SEQ ID NO: 506231 - DNA, 15 bp, Homo sapiens
aaaaatccctgcaag

SEQ ID NO: 506232 - DNA, 15 bp, Homo sapiens
taaaaatccctgcaa

SEQ ID NO: 506233 - DNA, 15 bp, Homo sapiens
ttaaaaatccctgca

SEQ ID NO: 506234 - DNA, 15 bp, Homo sapiens
tttaaaaatccctgc

SEQ ID NO: 506235 - DNA, 15 bp, Homo sapiens
ttttaaaaatccctg

SEQ ID NO: 506236 - DNA, 15 bp, Homo sapiens
tttttaaaaatccct

SEQ ID NO: 506237 - DNA, 15 bp, Homo sapiens
ttttttaaaaatccc

SEQ ID NO: 506238 - DNA, 15 bp, Homo sapiens
cttttttaaaaatcc

SEQ ID NO: 506239 - DNA, 15 bp, Homo sapiens
tcttttttaaaaatc

SEQ ID NO: 506240 - DNA, 15 bp, Homo sapiens
atcttttttaaaaat

SEQ ID NO: 506241 - DNA, 15 bp, Homo sapiens
gatcttttttaaaaa

SEQ ID NO: 506242 - DNA, 15 bp, Homo sapiens
agatcttttttaaaa

SEQ ID NO: 506243 - DNA, 15 bp, Homo sapiens
aagatcttttttaaa

SEQ ID NO: 506244 - DNA, 15 bp, Homo sapiens
taagatcttttttaa

SEQ ID NO: 506245 - DNA, 15 bp, Homo sapiens
ttaagatctttttta

SEQ ID NO: 506246 - DNA, 15 bp, Homo sapiens
gttaagatctttttt

SEQ ID NO: 506247 - DNA, 15 bp, Homo sapiens
cgttaagatcttttt

SEQ ID NO: 506248 - DNA, 15 bp, Homo sapiens
gcgttaagatctttt

SEQ ID NO: 506249 - DNA, 15 bp, Homo sapiens
tgcgttaagatcttt

SEQ ID NO: 506250 - DNA, 15 bp, Homo sapiens
gtgcgttaagatctt

SEQ ID NO: 506251 - DNA, 15 bp, Homo sapiens
tgtgcgttaagatct

SEQ ID NO: 506252 - DNA, 15 bp, Homo sapiens
ttgtgcgttaagatc

SEQ ID NO: 506253 - DNA, 15 bp, Homo sapiens
attgtgcgttaagat

SEQ ID NO: 506254 - DNA, 15 bp, Homo sapiens
gattgtgcgttaaga

SEQ ID NO: 506255 - DNA, 15 bp, Homo sapiens
agattgtgcgttaag

SEQ ID NO: 506256 - DNA, 15 bp, Homo sapiens
aagattgtgcgttaa

SEQ ID NO: 506257 - DNA, 15 bp, Homo sapiens
aaagattgtgcgtta

SEQ ID NO: 506258 - DNA, 15 bp, Homo sapiens
gaaagattgtgcgtt

SEQ ID NO: 506259 - DNA, 15 bp, Homo sapiens
agaaagattgtgcgt

SEQ ID NO: 506260 - DNA, 15 bp, Homo sapiens
aagaaagattgtgcg

SEQ ID NO: 506261 - DNA, 15 bp, Homo sapiens
aaagaaagattgtgc

SEQ ID NO: 506262 - DNA, 15 bp, Homo sapiens
caaagaaagattgtg

SEQ ID NO: 506263 - DNA, 15 bp, Homo sapiens
acaaagaaagattgt

SEQ ID NO: 506264 - DNA, 15 bp, Homo sapiens
tacaaagaaagattg

SEQ ID NO: 506265 - DNA, 15 bp, Homo sapiens
gtacaaagaaagatt

SEQ ID NO: 506266 - DNA, 15 bp, Homo sapiens
tgtacaaagaaagat

SEQ ID NO: 506267 - DNA, 15 bp, Homo sapiens
ttgtacaaagaaaga

SEQ ID NO: 506268 - DNA, 15 bp, Homo sapiens
tttgtacaaagaaag

SEQ ID NO: 506269 - DNA, 15 bp, Homo sapiens
atttgtacaaagaaa

SEQ ID NO: 506270 - DNA, 15 bp, Homo sapiens
tatttgtacaaagaa

SEQ ID NO: 506271 - DNA, 15 bp, Homo sapiens
ttatttgtacaaaga

SEQ ID NO: 506272 - DNA, 15 bp, Homo sapiens
tttatttgtacaaag

SEQ ID NO: 506273 - DNA, 15 bp, Homo sapiens
gtttatttgtacaaa

SEQ ID NO: 506274 - DNA, 15 bp, Homo sapiens
cgtttatttgtacaa

SEQ ID NO: 506275 - DNA, 15 bp, Homo sapiens
tcgtttatttgtaca

SEQ ID NO: 506276 - DNA, 15 bp, Homo sapiens
ttcgtttatttgtac

SEQ ID NO: 506277 - DNA, 15 bp, Homo sapiens
tttcgtttatttgta

SEQ ID NO: 506278 - DNA, 15 bp, Homo sapiens
gtttcgtttatttgt

SEQ ID NO: 506279 - DNA, 15 bp, Homo sapiens
ggtttcgtttatttg

SEQ ID NO: 506280 - DNA, 15 bp, Homo sapiens
tggtttcgtttattt

SEQ ID NO: 506281 - DNA, 15 bp, Homo sapiens
ttggtttcgtttatt

SEQ ID NO: 506282 - DNA, 15 bp, Homo sapiens
tttggtttcgtttat

SEQ ID NO: 506283 - DNA, 15 bp, Homo sapiens
gtttggtttcgttta

SEQ ID NO: 506284 - DNA, 15 bp, Homo sapiens
tgtttggtttcgttt

SEQ ID NO: 506285 - DNA, 15 bp, Homo sapiens
ttgtttggtttcgtt

SEQ ID NO: 506286 - DNA, 15 bp, Homo sapiens
tttgtttggtttcgt

SEQ ID NO: 506287 - DNA, 15 bp, Homo sapiens
ctttgtttggtttcg

SEQ ID NO: 506288 - DNA, 15 bp, Homo sapiens
gctttgtttggtttc

SEQ ID NO: 506289 - DNA, 15 bp, Homo sapiens
ggctttgtttggttt

SEQ ID NO: 506290 - DNA, 15 bp, Homo sapiens
tggctttgtttggtt

SEQ ID NO: 506291 - DNA, 15 bp, Homo sapiens
ctggctttgtttggt

SEQ ID NO: 506292 - DNA, 15 bp, Homo sapiens
gctggctttgtttgg

SEQ ID NO: 506293 - DNA, 15 bp, Homo sapiens
cgctggctttgtttg

SEQ ID NO: 506294 - DNA, 15 bp, Homo sapiens
tcgctggctttgttt

SEQ ID NO: 506295 - DNA, 15 bp, Homo sapiens
ttcgctggctttgtt

SEQ ID NO: 506296 - DNA, 15 bp, Homo sapiens
gttcgctggctttgt

SEQ ID NO: 506297 - DNA, 15 bp, Homo sapiens
agttcgctggctttg

SEQ ID NO: 506298 - DNA, 15 bp, Homo sapiens
tagttcgctggcttt

SEQ ID NO: 506299 - DNA, 15 bp, Homo sapiens
gtagttcgctggctt

SEQ ID NO: 506300 - DNA, 15 bp, Homo sapiens
agtagttcgctggct

SEQ ID NO: 506301 - DNA, 15 bp, Homo sapiens
cagtagttcgctggc

SEQ ID NO: 506302 - DNA, 15 bp, Homo sapiens
gcagtagttcgctgg

SEQ ID NO: 506303 - DNA, 15 bp, Homo sapiens
agcagtagttcgctg

SEQ ID NO: 506304 - DNA, 15 bp, Homo sapiens
cagcagtagttcgct

SEQ ID NO: 506305 - DNA, 15 bp, Homo sapiens
acagcagtagttcgc

SEQ ID NO: 506306 - DNA, 15 bp, Homo sapiens
aacagcagtagttcg

SEQ ID NO: 506307 - DNA, 15 bp, Homo sapiens
aaacagcagtagttc

SEQ ID NO: 506308 - DNA, 15 bp, Homo sapiens
gaaacagcagtagtt

SEQ ID NO: 506309 - DNA, 15 bp, Homo sapiens
ggaaacagcagtagt

SEQ ID NO: 506310 - DNA, 15 bp, Homo sapiens
gggaaacagcagtag

SEQ ID NO: 506311 - DNA, 15 bp, Homo sapiens
agggaaacagcagta

SEQ ID NO: 506312 - DNA, 15 bp, Homo sapiens
gagggaaacagcagt

SEQ ID NO: 506313 - DNA, 15 bp, Homo sapiens
cgagggaaacagcag

SEQ ID NO: 506314 - DNA, 15 bp, Homo sapiens
acgagggaaacagca

SEQ ID NO: 506315 - DNA, 15 bp, Homo sapiens
cacgagggaaacagc

SEQ ID NO: 506316 - DNA, 15 bp, Homo sapiens
tcacgagggaaacag

SEQ ID NO: 506317 - DNA, 15 bp, Homo sapiens
ttcacgagggaaaca

SEQ ID NO: 506318 - DNA, 15 bp, Homo sapiens
attcacgagggaaac

SEQ ID NO: 506319 - DNA, 15 bp, Homo sapiens
aattcacgagggaaa

SEQ ID NO: 506320 - DNA, 15 bp, Homo sapiens
aaattcacgagggaa

SEQ ID NO: 506321 - DNA, 15 bp, Homo sapiens
aaaattcacgaggga

SEQ ID NO: 506322 - DNA, 15 bp, Homo sapiens
gaaaattcacgaggg

SEQ ID NO: 506323 - DNA, 15 bp, Homo sapiens
agaaaattcacgagg

SEQ ID NO: 506324 - DNA, 15 bp, Homo sapiens
aagaaaattcacgag

SEQ ID NO: 506325 - DNA, 15 bp, Homo sapiens
taagaaaattcacga

SEQ ID NO: 506326 - DNA, 15 bp, Homo sapiens
ttaagaaaattcacg

SEQ ID NO: 506327 - DNA, 15 bp, Homo sapiens
cttaagaaaattcac

SEQ ID NO: 506328 - DNA, 15 bp, Homo sapiens
ccttaagaaaattca

SEQ ID NO: 506329 - DNA, 15 bp, Homo sapiens
tccttaagaaaattc

SEQ ID NO: 506330 - DNA, 15 bp, Homo sapiens
ttccttaagaaaatt

SEQ ID NO: 506331 - DNA, 15 bp, Homo sapiens
tttccttaagaaaat

SEQ ID NO: 506332 - DNA, 15 bp, Homo sapiens
ttttccttaagaaaa

SEQ ID NO: 506333 - DNA, 15 bp, Homo sapiens
cttttccttaagaaa

SEQ ID NO: 506334 - DNA, 15 bp, Homo sapiens
tcttttccttaagaa

SEQ ID NO: 506335 - DNA, 15 bp, Homo sapiens
ctcttttccttaaga

SEQ ID NO: 506336 - DNA, 15 bp, Homo sapiens
tctcttttccttaag

SEQ ID NO: 506337 - DNA, 15 bp, Homo sapiens
ctctcttttccttaa

SEQ ID NO: 506338 - DNA, 15 bp, Homo sapiens
tctctcttttcctta

SEQ ID NO: 506339 - DNA, 15 bp, Homo sapiens
atctctcttttcctt

SEQ ID NO: 506340 - DNA, 15 bp, Homo sapiens
aatctctcttttcct

SEQ ID NO: 506341 - DNA, 15 bp, Homo sapiens
gaatctctcttttcc

SEQ ID NO: 506342 - DNA, 15 bp, Homo sapiens
ggaatctctcttttc

SEQ ID NO: 506343 - DNA, 15 bp, Homo sapiens
aggaatctctctttt

SEQ ID NO: 506344 - DNA, 15 bp, Homo sapiens
aaggaatctctcttt

SEQ ID NO: 506345 - DNA, 15 bp, Homo sapiens
gaaggaatctctctt

SEQ ID NO: 506346 - DNA, 15 bp, Homo sapiens
agaaggaatctctct

SEQ ID NO: 506347 - DNA, 15 bp, Homo sapiens
gagaaggaatctctc

SEQ ID NO: 506348 - DNA, 15 bp, Homo sapiens
agagaaggaatctct

SEQ ID NO: 506349 - DNA, 15 bp, Homo sapiens
gagagaaggaatctc

SEQ ID NO: 506350 - DNA, 15 bp, Homo sapiens
ggagagaaggaatct

SEQ ID NO: 506351 - DNA, 15 bp, Homo sapiens
gggagagaaggaatc

SEQ ID NO: 506352 - DNA, 15 bp, Homo sapiens
ggggagagaaggaat

SEQ ID NO: 506353 - DNA, 15 bp, Homo sapiens
tggggagagaaggaa

SEQ ID NO: 506354 - DNA, 15 bp, Homo sapiens
ctggggagagaagga

SEQ ID NO: 506355 - DNA, 15 bp, Homo sapiens
tctggggagagaagg

SEQ ID NO: 506356 - DNA, 15 bp, Homo sapiens
atctggggagagaag

SEQ ID NO: 506357 - DNA, 15 bp, Homo sapiens
tatctggggagagaa

SEQ ID NO: 506358 - DNA, 15 bp, Homo sapiens
atatctggggagaga

SEQ ID NO: 506359 - DNA, 15 bp, Homo sapiens
gatatctggggagag

SEQ ID NO: 506360 - DNA, 15 bp, Homo sapiens
tgatatctggggaga

SEQ ID NO: 506361 - DNA, 15 bp, Homo sapiens
ttgatatctggggag

SEQ ID NO: 506362 - DNA, 15 bp, Homo sapiens
gttgatatctgggga

SEQ ID NO: 506363 - DNA, 15 bp, Homo sapiens
tgttgatatctgggg

SEQ ID NO: 506364 - DNA, 15 bp, Homo sapiens
atgttgatatctggg

SEQ ID NO: 506365 - DNA, 15 bp, Homo sapiens
gatgttgatatctgg

SEQ ID NO: 506366 - DNA, 15 bp, Homo sapiens
agatgttgatatctg

SEQ ID NO: 506367 - DNA, 15 bp, Homo sapiens
tagatgttgatatct

SEQ ID NO: 506368 - DNA, 15 bp, Homo sapiens
ttagatgttgatatc

SEQ ID NO: 506369 - DNA, 15 bp, Homo sapiens
gttagatgttgatat

SEQ ID NO: 506370 - DNA, 15 bp, Homo sapiens
cgttagatgttgata

SEQ ID NO: 506371 - DNA, 15 bp, Homo sapiens
tcgttagatgttgat

SEQ ID NO: 506372 - DNA, 15 bp, Homo sapiens
ttcgttagatgttga

SEQ ID NO: 506373 - DNA, 15 bp, Homo sapiens
attcgttagatgttg

SEQ ID NO: 506374 - DNA, 15 bp, Homo sapiens
aattcgttagatgtt

SEQ ID NO: 506375 - DNA, 15 bp, Homo sapiens
aaattcgttagatgt

SEQ ID NO: 506376 - DNA, 15 bp, Homo sapiens
aaaattcgttagatg

SEQ ID NO: 506377 - DNA, 15 bp, Homo sapiens
gaaaattcgttagat

SEQ ID NO: 506378 - DNA, 15 bp, Homo sapiens
agaaaattcgttaga

SEQ ID NO: 506379 - DNA, 15 bp, Homo sapiens
tagaaaattcgttag

SEQ ID NO: 506380 - DNA, 15 bp, Homo sapiens
ctagaaaattcgtta

SEQ ID NO: 506381 - DNA, 15 bp, Homo sapiens
cctagaaaattcgtt

SEQ ID NO: 506382 - DNA, 15 bp, Homo sapiens
tcctagaaaattcgt

SEQ ID NO: 506383 - DNA, 15 bp, Homo sapiens
ctcctagaaaattcg

SEQ ID NO: 506384 - DNA, 15 bp, Homo sapiens
tctcctagaaaattc

SEQ ID NO: 506385 - DNA, 15 bp, Homo sapiens
gtctcctagaaaatt

SEQ ID NO: 506386 - DNA, 15 bp, Homo sapiens
agtctcctagaaaat

SEQ ID NO: 506387 - DNA, 15 bp, Homo sapiens
cagtctcctagaaaa

SEQ ID NO: 506388 - DNA, 15 bp, Homo sapiens
tcagtctcctagaaa

SEQ ID NO: 506389 - DNA, 15 bp, Homo sapiens
ttcagtctcctagaa

SEQ ID NO: 506390 - DNA, 15 bp, Homo sapiens
tttcagtctcctaga

SEQ ID NO: 506391 - DNA, 15 bp, Homo sapiens
gtttcagtctcctag

SEQ ID NO: 506392 - DNA, 15 bp, Homo sapiens
agtttcagtctccta

SEQ ID NO: 506393 - DNA, 15 bp, Homo sapiens
gagtttcagtctcct

SEQ ID NO: 506394 - DNA, 15 bp, Homo sapiens
tgagtttcagtctcc

SEQ ID NO: 506395 - DNA, 15 bp, Homo sapiens
ttgagtttcagtctc

SEQ ID NO: 506396 - DNA, 15 bp, Homo sapiens
gttgagtttcagtct

SEQ ID NO: 506397 - DNA, 15 bp, Homo sapiens
ggttgagtttcagtc

SEQ ID NO: 506398 - DNA, 15 bp, Homo sapiens
aggttgagtttcagt

SEQ ID NO: 506399 - DNA, 15 bp, Homo sapiens
taggttgagtttcag

SEQ ID NO: 506400 - DNA, 15 bp, Homo sapiens
ttaggttgagtttca

SEQ ID NO: 506401 - DNA, 15 bp, Homo sapiens
attaggttgagtttc

SEQ ID NO: 506402 - DNA, 15 bp, Homo sapiens
tattaggttgagttt

SEQ ID NO: 506403 - DNA, 15 bp, Homo sapiens
ttattaggttgagtt

SEQ ID NO: 506404 - DNA, 15 bp, Homo sapiens
attattaggttgagt

SEQ ID NO: 506405 - DNA, 15 bp, Homo sapiens
tattattaggttgag

SEQ ID NO: 506406 - DNA, 15 bp, Homo sapiens
ctattattaggttga

SEQ ID NO: 506407 - DNA, 15 bp, Homo sapiens
actattattaggttg

SEQ ID NO: 506408 - DNA, 15 bp, Homo sapiens
tactattattaggtt

SEQ ID NO: 506409 - DNA, 15 bp, Homo sapiens
atactattattaggt

SEQ ID NO: 506410 - DNA, 15 bp, Homo sapiens
catactattattagg

SEQ ID NO: 506411 - DNA, 15 bp, Homo sapiens
acatactattattag

SEQ ID NO: 506412 - DNA, 15 bp, Homo sapiens
cacatactattatta

SEQ ID NO: 506413 - DNA, 15 bp, Homo sapiens
gcacatactattatt

SEQ ID NO: 506414 - DNA, 15 bp, Homo sapiens
agcacatactattat

SEQ ID NO: 506415 - DNA, 15 bp, Homo sapiens
aagcacatactatta

SEQ ID NO: 506416 - DNA, 15 bp, Homo sapiens
taagcacatactatt

SEQ ID NO: 506417 - DNA, 15 bp, Homo sapiens
ttaagcacatactat

SEQ ID NO: 506418 - DNA, 15 bp, Homo sapiens
attaagcacatacta

SEQ ID NO: 506419 - DNA, 15 bp, Homo sapiens
cattaagcacatact

SEQ ID NO: 506420 - DNA, 15 bp, Homo sapiens
gcattaagcacatac

SEQ ID NO: 506421 - DNA, 15 bp, Homo sapiens
agcattaagcacata

SEQ ID NO: 506422 - DNA, 15 bp, Homo sapiens
cagcattaagcacat

SEQ ID NO: 506423 - DNA, 15 bp, Homo sapiens
tcagcattaagcaca

SEQ ID NO: 506424 - DNA, 15 bp, Homo sapiens
atcagcattaagcac

SEQ ID NO: 506425 - DNA, 15 bp, Homo sapiens
aatcagcattaagca

SEQ ID NO: 506426 - DNA, 15 bp, Homo sapiens
gaatcagcattaagc

SEQ ID NO: 506427 - DNA, 15 bp, Homo sapiens
ggaatcagcattaag

SEQ ID NO: 506428 - DNA, 15 bp, Homo sapiens
tggaatcagcattaa

SEQ ID NO: 506429 - DNA, 15 bp, Homo sapiens
atggaatcagcatta

SEQ ID NO: 506430 - DNA, 15 bp, Homo sapiens
aatggaatcagcatt

SEQ ID NO: 506431 - DNA, 15 bp, Homo sapiens
aaatggaatcagcat

SEQ ID NO: 506432 - DNA, 15 bp, Homo sapiens
aaaatggaatcagca

SEQ ID NO: 506433 - DNA, 15 bp, Homo sapiens
aaaaatggaatcagc

SEQ ID NO: 506434 - DNA, 15 bp, Homo sapiens
caaaaatggaatcag

SEQ ID NO: 506435 - DNA, 15 bp, Homo sapiens
acaaaaatggaatca

SEQ ID NO: 506436 - DNA, 15 bp, Homo sapiens
aacaaaaatggaatc

SEQ ID NO: 506437 - DNA, 15 bp, Homo sapiens
aaacaaaaatggaat

SEQ ID NO: 506438 - DNA, 15 bp, Homo sapiens
gaaacaaaaatggaa

SEQ ID NO: 506439 - DNA, 15 bp, Homo sapiens
tgaaacaaaaatgga

SEQ ID NO: 506440 - DNA, 15 bp, Homo sapiens
ttgaaacaaaaatgg

SEQ ID NO: 506441 - DNA, 15 bp, Homo sapiens
tttgaaacaaaaatg

SEQ ID NO: 506442 - DNA, 15 bp, Homo sapiens
ctttgaaacaaaaat

SEQ ID NO: 506443 - DNA, 15 bp, Homo sapiens
cctttgaaacaaaaa

SEQ ID NO: 506444 - DNA, 15 bp, Homo sapiens
ccctttgaaacaaaa

SEQ ID NO: 506445 - DNA, 15 bp, Homo sapiens
cccctttgaaacaaa

SEQ ID NO: 506446 - DNA, 15 bp, Homo sapiens
ccccctttgaaacaa

SEQ ID NO: 506447 - DNA, 15 bp, Homo sapiens
cccccctttgaaaca

SEQ ID NO: 506448 - DNA, 15 bp, Homo sapiens
acccccctttgaaac

SEQ ID NO: 506449 - DNA, 15 bp, Homo sapiens
tacccccctttgaaa

SEQ ID NO: 506450 - DNA, 15 bp, Homo sapiens
ttacccccctttgaa

SEQ ID NO: 506451 - DNA, 15 bp, Homo sapiens
attacccccctttga

SEQ ID NO: 506452 - DNA, 15 bp, Homo sapiens
aattacccccctttg

SEQ ID NO: 506453 - DNA, 15 bp, Homo sapiens
aaattaccccccttt

SEQ ID NO: 506454 - DNA, 15 bp, Homo sapiens
taaattacccccctt

SEQ ID NO: 506455 - DNA, 15 bp, Homo sapiens
ataaattacccccct

SEQ ID NO: 506456 - DNA, 15 bp, Homo sapiens
aataaattacccccc

SEQ ID NO: 506457 - DNA, 15 bp, Homo sapiens
taataaattaccccc

SEQ ID NO: 506458 - DNA, 15 bp, Homo sapiens
ctaataaattacccc

SEQ ID NO: 506459 - DNA, 15 bp, Homo sapiens
gctaataaattaccc

SEQ ID NO: 506460 - DNA, 15 bp, Homo sapiens
agctaataaattacc

SEQ ID NO: 506461 - DNA, 15 bp, Homo sapiens
aagctaataaattac

SEQ ID NO: 506462 - DNA, 15 bp, Homo sapiens
gaagctaataaatta

SEQ ID NO: 506463 - DNA, 15 bp, Homo sapiens
ggaagctaataaatt

SEQ ID NO: 506464 - DNA, 15 bp, Homo sapiens
aggaagctaataaat

SEQ ID NO: 506465 - DNA, 15 bp, Homo sapiens
gaggaagctaataaa

SEQ ID NO: 506466 - DNA, 15 bp, Homo sapiens
tgaggaagctaataa

SEQ ID NO: 506467 - DNA, 15 bp, Homo sapiens
ttgaggaagctaata

SEQ ID NO: 506468 - DNA, 15 bp, Homo sapiens
tttgaggaagctaat

SEQ ID NO: 506469 - DNA, 15 bp, Homo sapiens
ctttgaggaagctaa

SEQ ID NO: 506470 - DNA, 15 bp, Homo sapiens
actttgaggaagcta

SEQ ID NO: 506471 - DNA, 15 bp, Homo sapiens
cactttgaggaagct

SEQ ID NO: 506472 - DNA, 15 bp, Homo sapiens
ccactttgaggaagc

SEQ ID NO: 506473 - DNA, 15 bp, Homo sapiens
accactttgaggaag

SEQ ID NO: 506474 - DNA, 15 bp, Homo sapiens
caccactttgaggaa

SEQ ID NO: 506475 - DNA, 15 bp, Homo sapiens
gcaccactttgagga

SEQ ID NO: 506476 - DNA, 15 bp, Homo sapiens
ggcaccactttgagg

SEQ ID NO: 506477 - DNA, 15 bp, Homo sapiens
aggcaccactttgag

SEQ ID NO: 506478 - DNA, 15 bp, Homo sapiens
gaggcaccactttga

SEQ ID NO: 506479 - DNA, 15 bp, Homo sapiens
cgaggcaccactttg

SEQ ID NO: 506480 - DNA, 15 bp, Homo sapiens
acgaggcaccacttt

SEQ ID NO: 506481 - DNA, 15 bp, Homo sapiens
tacgaggcaccactt

SEQ ID NO: 506482 - DNA, 15 bp, Homo sapiens
ctacgaggcaccact

SEQ ID NO: 506483 - DNA, 15 bp, Homo sapiens
cctacgaggcaccac

SEQ ID NO: 506484 - DNA, 15 bp, Homo sapiens
gcctacgaggcacca

SEQ ID NO: 506485 - DNA, 15 bp, Homo sapiens
tgcctacgaggcacc

SEQ ID NO: 506486 - DNA, 15 bp, Homo sapiens
ctgcctacgaggcac

SEQ ID NO: 506487 - DNA, 15 bp, Homo sapiens
cctgcctacgaggca

SEQ ID NO: 506488 - DNA, 15 bp, Homo sapiens
acctgcctacgaggc

SEQ ID NO: 506489 - DNA, 15 bp, Homo sapiens
cacctgcctacgagg

SEQ ID NO: 506490 - DNA, 15 bp, Homo sapiens
acacctgcctacgag

SEQ ID NO: 506491 - DNA, 15 bp, Homo sapiens
aacacctgcctacga

SEQ ID NO: 506492 - DNA, 15 bp, Homo sapiens
caacacctgcctacg

SEQ ID NO: 506493 - DNA, 15 bp, Homo sapiens
acaacacctgcctac

SEQ ID NO: 506494 - DNA, 15 bp, Homo sapiens
tacaacacctgccta

SEQ ID NO: 506495 - DNA, 15 bp, Homo sapiens
atacaacacctgcct

SEQ ID NO: 506496 - DNA, 15 bp, Homo sapiens
aatacaacacctgcc

SEQ ID NO: 506497 - DNA, 15 bp, Homo sapiens
aaatacaacacctgc

SEQ ID NO: 506498 - DNA, 15 bp, Homo sapiens
aaaatacaacacctg

SEQ ID NO: 506499 - DNA, 15 bp, Homo sapiens
aaaaatacaacacct

SEQ ID NO: 506500 - DNA, 15 bp, Homo sapiens
aaaaaatacaacacc

SEQ ID NO: 506501 - DNA, 15 bp, Homo sapiens
caaaaaatacaacac

SEQ ID NO: 506502 - DNA, 15 bp, Homo sapiens
tcaaaaaatacaaca

SEQ ID NO: 506503 - DNA, 15 bp, Homo sapiens
atcaaaaaatacaac

SEQ ID NO: 506504 - DNA, 15 bp, Homo sapiens
tatcaaaaaatacaa

SEQ ID NO: 506505 - DNA, 15 bp, Homo sapiens
atatcaaaaaataca

SEQ ID NO: 506506 - DNA, 15 bp, Homo sapiens
gatatcaaaaaatac

SEQ ID NO: 506507 - DNA, 15 bp, Homo sapiens
ggatatcaaaaaata

SEQ ID NO: 506508 - DNA, 15 bp, Homo sapiens
aggatatcaaaaaat

SEQ ID NO: 506509 - DNA, 15 bp, Homo sapiens
aaggatatcaaaaaa

SEQ ID NO: 506510 - DNA, 15 bp, Homo sapiens
caaggatatcaaaaa

SEQ ID NO: 506511 - DNA, 15 bp, Homo sapiens
acaaggatatcaaaa

SEQ ID NO: 506512 - DNA, 15 bp, Homo sapiens
tacaaggatatcaaa

SEQ ID NO: 506513 - DNA, 15 bp, Homo sapiens
ttacaaggatatcaa

SEQ ID NO: 506514 - DNA, 15 bp, Homo sapiens
tttacaaggatatca

SEQ ID NO: 506515 - DNA, 15 bp, Homo sapiens
ctttacaaggatatc

SEQ ID NO: 506516 - DNA, 15 bp, Homo sapiens
tctttacaaggatat

SEQ ID NO: 506517 - DNA, 15 bp, Homo sapiens
ctctttacaaggata

SEQ ID NO: 506518 - DNA, 15 bp, Homo sapiens
actctttacaaggat

SEQ ID NO: 506519 - DNA, 15 bp, Homo sapiens
aactctttacaagga

SEQ ID NO: 506520 - DNA, 15 bp, Homo sapiens
aaactctttacaagg

SEQ ID NO: 506521 - DNA, 15 bp, Homo sapiens
aaaactctttacaag

SEQ ID NO: 506522 - DNA, 15 bp, Homo sapiens
aaaaactctttacaa

SEQ ID NO: 506523 - DNA, 15 bp, Homo sapiens
caaaaactctttaca

SEQ ID NO: 506524 - DNA, 15 bp, Homo sapiens
gcaaaaactctttac

SEQ ID NO: 506525 - DNA, 15 bp, Homo sapiens
cgcaaaaactcttta

SEQ ID NO: 506526 - DNA, 15 bp, Homo sapiens
acgcaaaaactcttt

SEQ ID NO: 506527 - DNA, 15 bp, Homo sapiens
gacgcaaaaactctt

SEQ ID NO: 506528 - DNA, 15 bp, Homo sapiens
agacgcaaaaactct

SEQ ID NO: 506529 - DNA, 15 bp, Homo sapiens
cagacgcaaaaactc

SEQ ID NO: 506530 - DNA, 15 bp, Homo sapiens
ccagacgcaaaaact

SEQ ID NO: 506531 - DNA, 15 bp, Homo sapiens
cccagacgcaaaaac

SEQ ID NO: 506532 - DNA, 15 bp, Homo sapiens
tcccagacgcaaaaa

SEQ ID NO: 506533 - DNA, 15 bp, Homo sapiens
ttcccagacgcaaaa

SEQ ID NO: 506534 - DNA, 15 bp, Homo sapiens
cttcccagacgcaaa

SEQ ID NO: 506535 - DNA, 15 bp, Homo sapiens
tcttcccagacgcaa

SEQ ID NO: 506536 - DNA, 15 bp, Homo sapiens
atcttcccagacgca

SEQ ID NO: 506537 - DNA, 15 bp, Homo sapiens
gatcttcccagacgc

SEQ ID NO: 506538 - DNA, 15 bp, Homo sapiens
agatcttcccagacg

SEQ ID NO: 506539 - DNA, 15 bp, Homo sapiens
gagatcttcccagac

SEQ ID NO: 506540 - DNA, 15 bp, Homo sapiens
tgagatcttcccaga

SEQ ID NO: 506541 - DNA, 15 bp, Homo sapiens
ctgagatcttcccag

SEQ ID NO: 506542 - DNA, 15 bp, Homo sapiens
tctgagatcttccca

SEQ ID NO: 506543 - DNA, 15 bp, Homo sapiens
ttctgagatcttccc

SEQ ID NO: 506544 - DNA, 15 bp, Homo sapiens
cttctgagatcttcc

SEQ ID NO: 506545 - DNA, 15 bp, Homo sapiens
tcttctgagatcttc

SEQ ID NO: 506546 - DNA, 15 bp, Homo sapiens
ttcttctgagatctt

SEQ ID NO: 506547 - DNA, 15 bp, Homo sapiens
gttcttctgagatct

SEQ ID NO: 506548 - DNA, 15 bp, Homo sapiens
ggttcttctgagatc

SEQ ID NO: 506549 - DNA, 15 bp, Homo sapiens
tggttcttctgagat

SEQ ID NO: 506550 - DNA, 15 bp, Homo sapiens
ttggttcttctgaga

SEQ ID NO: 506551 - DNA, 15 bp, Homo sapiens
attggttcttctgag

SEQ ID NO: 506552 - DNA, 15 bp, Homo sapiens
tattggttcttctga

SEQ ID NO: 506553 - DNA, 15 bp, Homo sapiens
ttattggttcttctg

SEQ ID NO: 506554 - DNA, 15 bp, Homo sapiens
tttattggttcttct

SEQ ID NO: 506555 - DNA, 15 bp, Homo sapiens
atttattggttcttc

SEQ ID NO: 506556 - DNA, 15 bp, Homo sapiens
tatttattggttctt

SEQ ID NO: 506557 - DNA, 15 bp, Homo sapiens
ttatttattggttct

SEQ ID NO: 506558 - DNA, 15 bp, Homo sapiens
cttatttattggttc

SEQ ID NO: 506559 - DNA, 15 bp, Homo sapiens
ccttatttattggtt

SEQ ID NO: 506560 - DNA, 15 bp, Homo sapiens
accttatttattggt

SEQ ID NO: 506561 - DNA, 15 bp, Homo sapiens
caccttatttattgg

SEQ ID NO: 506562 - DNA, 15 bp, Homo sapiens
acaccttatttattg

SEQ ID NO: 506563 - DNA, 15 bp, Homo sapiens
cacaccttatttatt

SEQ ID NO: 506564 - DNA, 15 bp, Homo sapiens
acacaccttatttat

SEQ ID NO: 506565 - DNA, 15 bp, Homo sapiens
cacacaccttattta

SEQ ID NO: 506566 - DNA, 15 bp, Homo sapiens
acacacaccttattt

SEQ ID NO: 506567 - DNA, 15 bp, Homo sapiens
tacacacaccttatt

SEQ ID NO: 506568 - DNA, 15 bp, Homo sapiens
atacacacaccttat

SEQ ID NO: 506569 - DNA, 15 bp, Homo sapiens
catacacacacctta

SEQ ID NO: 506570 - DNA, 15 bp, Homo sapiens
acatacacacacctt

SEQ ID NO: 506571 - DNA, 15 bp, Homo sapiens
aacatacacacacct

SEQ ID NO: 506572 - DNA, 15 bp, Homo sapiens
caacatacacacacc

SEQ ID NO: 506573 - DNA, 15 bp, Homo sapiens
ccaacatacacacac

SEQ ID NO: 506574 - DNA, 15 bp, Homo sapiens
cccaacatacacaca

SEQ ID NO: 506575 - DNA, 15 bp, Homo sapiens
ccccaacatacacac

SEQ ID NO: 506576 - DNA, 15 bp, Homo sapiens
cccccaacatacaca

SEQ ID NO: 506577 - DNA, 15 bp, Homo sapiens
ccccccaacatacac

SEQ ID NO: 506578 - DNA, 15 bp, Homo sapiens
accccccaacataca

SEQ ID NO: 506579 - DNA, 15 bp, Homo sapiens
caccccccaacatac

SEQ ID NO: 506580 - DNA, 15 bp, Homo sapiens
ccaccccccaacata

SEQ ID NO: 506581 - DNA, 15 bp, Homo sapiens
tccaccccccaacat

SEQ ID NO: 506582 - DNA, 15 bp, Homo sapiens
ctccaccccccaaca

SEQ ID NO: 506583 - DNA, 15 bp, Homo sapiens
cctccaccccccaac

SEQ ID NO: 506584 - DNA, 15 bp, Homo sapiens
acctccaccccccaa

SEQ ID NO: 506585 - DNA, 15 bp, Homo sapiens
cacctccacccccca

SEQ ID NO: 506586 - DNA, 15 bp, Homo sapiens
ccacctccacccccc

SEQ ID NO: 506587 - DNA, 15 bp, Homo sapiens
cccacctccaccccc

SEQ ID NO: 506588 - DNA, 15 bp, Homo sapiens
tcccacctccacccc

SEQ ID NO: 506589 - DNA, 15 bp, Homo sapiens
atcccacctccaccc

SEQ ID NO: 506590 - DNA, 15 bp, Homo sapiens
aatcccacctccacc

SEQ ID NO: 506591 - DNA, 15 bp, Homo sapiens
gaatcccacctccac

SEQ ID NO: 506592 - DNA, 15 bp, Homo sapiens
agaatcccacctcca

SEQ ID NO: 506593 - DNA, 15 bp, Homo sapiens
cagaatcccacctcc

SEQ ID NO: 506594 - DNA, 15 bp, Homo sapiens
acagaatcccacctc

SEQ ID NO: 506595 - DNA, 15 bp, Homo sapiens
tacagaatcccacct

SEQ ID NO: 506596 - DNA, 15 bp, Homo sapiens
gtacagaatcccacc

SEQ ID NO: 506597 - DNA, 15 bp, Homo sapiens
tgtacagaatcccac

SEQ ID NO: 506598 - DNA, 15 bp, Homo sapiens
ctgtacagaatccca

SEQ ID NO: 506599 - DNA, 15 bp, Homo sapiens
gctgtacagaatccc

SEQ ID NO: 506600 - DNA, 15 bp, Homo sapiens
agctgtacagaatcc

SEQ ID NO: 506601 - DNA, 15 bp, Homo sapiens
gagctgtacagaatc

SEQ ID NO: 506602 - DNA, 15 bp, Homo sapiens
tgagctgtacagaat

SEQ ID NO: 506603 - DNA, 15 bp, Homo sapiens
atgagctgtacagaa

SEQ ID NO: 506604 - DNA, 15 bp, Homo sapiens
catgagctgtacaga

SEQ ID NO: 506605 - DNA, 15 bp, Homo sapiens
ccatgagctgtacag

SEQ ID NO: 506606 - DNA, 15 bp, Homo sapiens
gccatgagctgtaca

SEQ ID NO: 506607 - DNA, 15 bp, Homo sapiens
ggccatgagctgtac

SEQ ID NO: 506608 - DNA, 15 bp, Homo sapiens
gggccatgagctgta

SEQ ID NO: 506609 - DNA, 15 bp, Homo sapiens
agggccatgagctgt

SEQ ID NO: 506610 - DNA, 15 bp, Homo sapiens
cagggccatgagctg

SEQ ID NO: 506611 - DNA, 15 bp, Homo sapiens
gcagggccatgagct

SEQ ID NO: 506612 - DNA, 15 bp, Homo sapiens
agcagggccatgagc

SEQ ID NO: 506613 - DNA, 15 bp, Homo sapiens
aagcagggccatgag

SEQ ID NO: 506614 - DNA, 15 bp, Homo sapiens
caagcagggccatga

SEQ ID NO: 506615 - DNA, 15 bp, Homo sapiens
acaagcagggccatg

SEQ ID NO: 506616 - DNA, 15 bp, Homo sapiens
aacaagcagggccat

SEQ ID NO: 506617 - DNA, 15 bp, Homo sapiens
gaacaagcagggcca

SEQ ID NO: 506618 - DNA, 15 bp, Homo sapiens
tgaacaagcagggcc

SEQ ID NO: 506619 - DNA, 15 bp, Homo sapiens
ttgaacaagcagggc

SEQ ID NO: 506620 - DNA, 15 bp, Homo sapiens
attgaacaagcaggg

SEQ ID NO: 506621 - DNA, 15 bp, Homo sapiens
aattgaacaagcagg

SEQ ID NO: 506622 - DNA, 15 bp, Homo sapiens
aaattgaacaagcag

SEQ ID NO: 506623 - DNA, 15 bp, Homo sapiens
gaaattgaacaagca

SEQ ID NO: 506624 - DNA, 15 bp, Homo sapiens
tgaaattgaacaagc

SEQ ID NO: 506625 - DNA, 15 bp, Homo sapiens
atgaaattgaacaag

SEQ ID NO: 506626 - DNA, 15 bp, Homo sapiens
catgaaattgaacaa

SEQ ID NO: 506627 - DNA, 15 bp, Homo sapiens
gcatgaaattgaaca

SEQ ID NO: 506628 - DNA, 15 bp, Homo sapiens
tgcatgaaattgaac

SEQ ID NO: 506629 - DNA, 15 bp, Homo sapiens
ttgcatgaaattgaa

SEQ ID NO: 506630 - DNA, 15 bp, Homo sapiens
tttgcatgaaattga

SEQ ID NO: 506631 - DNA, 15 bp, Homo sapiens
ttttgcatgaaattg

SEQ ID NO: 506632 - DNA, 15 bp, Homo sapiens
gttttgcatgaaatt

SEQ ID NO: 506633 - DNA, 15 bp, Homo sapiens
agttttgcatgaaat

SEQ ID NO: 506634 - DNA, 15 bp, Homo sapiens
gagttttgcatgaaa

SEQ ID NO: 506635 - DNA, 15 bp, Homo sapiens
tgagttttgcatgaa

SEQ ID NO: 506636 - DNA, 15 bp, Homo sapiens
atgagttttgcatga

SEQ ID NO: 506637 - DNA, 15 bp, Homo sapiens
aatgagttttgcatg

SEQ ID NO: 506638 - DNA, 15 bp, Homo sapiens
gaatgagttttgcat

SEQ ID NO: 506639 - DNA, 15 bp, Homo sapiens
agaatgagttttgca

SEQ ID NO: 506640 - DNA, 15 bp, Homo sapiens
tagaatgagttttgc

SEQ ID NO: 506641 - DNA, 15 bp, Homo sapiens
ttagaatgagttttg

SEQ ID NO: 506642 - DNA, 15 bp, Homo sapiens
tttagaatgagtttt

SEQ ID NO: 506643 - DNA, 15 bp, Homo sapiens
ttttagaatgagttt

SEQ ID NO: 506644 - DNA, 15 bp, Homo sapiens
cttttagaatgagtt

SEQ ID NO: 506645 - DNA, 15 bp, Homo sapiens
gcttttagaatgagt

SEQ ID NO: 506646 - DNA, 15 bp, Homo sapiens
ggcttttagaatgag

SEQ ID NO: 506647 - DNA, 15 bp, Homo sapiens
gggcttttagaatga

SEQ ID NO: 506648 - DNA, 15 bp, Homo sapiens
ggggcttttagaatg

SEQ ID NO: 506649 - DNA, 15 bp, Homo sapiens
tggggcttttagaat

SEQ ID NO: 506650 - DNA, 15 bp, Homo sapiens
ctggggcttttagaa

SEQ ID NO: 506651 - DNA, 15 bp, Homo sapiens
cctggggcttttaga

SEQ ID NO: 506652 - DNA, 15 bp, Homo sapiens
ccctggggcttttag

SEQ ID NO: 506653 - DNA, 15 bp, Homo sapiens
accctggggctttta

SEQ ID NO: 506654 - DNA, 15 bp, Homo sapiens
aaccctggggctttt

SEQ ID NO: 506655 - DNA, 15 bp, Homo sapiens
gaaccctggggcttt

SEQ ID NO: 506656 - DNA, 15 bp, Homo sapiens
agaaccctggggctt

SEQ ID NO: 506657 - DNA, 15 bp, Homo sapiens
gagaaccctggggct

SEQ ID NO: 506658 - DNA, 15 bp, Homo sapiens
agagaaccctggggc

SEQ ID NO: 506659 - DNA, 15 bp, Homo sapiens
aagagaaccctgggg

SEQ ID NO: 506660 - DNA, 15 bp, Homo sapiens
aaagagaaccctggg

SEQ ID NO: 506661 - DNA, 15 bp, Homo sapiens
taaagagaaccctgg

SEQ ID NO: 506662 - DNA, 15 bp, Homo sapiens
ttaaagagaaccctg

SEQ ID NO: 506663 - DNA, 15 bp, Homo sapiens
attaaagagaaccct

SEQ ID NO: 506664 - DNA, 15 bp, Homo sapiens
tattaaagagaaccc

SEQ ID NO: 506665 - DNA, 15 bp, Homo sapiens
ctattaaagagaacc

SEQ ID NO: 506666 - DNA, 15 bp, Homo sapiens
cctattaaagagaac

SEQ ID NO: 506667 - DNA, 15 bp, Homo sapiens
ccctattaaagagaa

SEQ ID NO: 506668 - DNA, 15 bp, Homo sapiens
cccctattaaagaga

SEQ ID NO: 506669 - DNA, 15 bp, Homo sapiens
gcccctattaaagag

SEQ ID NO: 506670 - DNA, 15 bp, Homo sapiens
ggcccctattaaaga

SEQ ID NO: 506671 - DNA, 15 bp, Homo sapiens
tggcccctattaaag

SEQ ID NO: 506672 - DNA, 15 bp, Homo sapiens
ttggcccctattaaa

SEQ ID NO: 506673 - DNA, 15 bp, Homo sapiens
tttggcccctattaa

SEQ ID NO: 506674 - DNA, 15 bp, Homo sapiens
atttggcccctatta

SEQ ID NO: 506675 - DNA, 15 bp, Homo sapiens
catttggcccctatt

SEQ ID NO: 506676 - DNA, 15 bp, Homo sapiens
ccatttggcccctat

SEQ ID NO: 506677 - DNA, 15 bp, Homo sapiens
gccatttggccccta

SEQ ID NO: 506678 - DNA, 15 bp, Homo sapiens
tgccatttggcccct

SEQ ID NO: 506679 - DNA, 15 bp, Homo sapiens
ctgccatttggcccc

SEQ ID NO: 506680 - DNA, 15 bp, Homo sapiens
cctgccatttggccc

SEQ ID NO: 506681 - DNA, 15 bp, Homo sapiens
tcctgccatttggcc

SEQ ID NO: 506682 - DNA, 15 bp, Homo sapiens
ttcctgccatttggc

SEQ ID NO: 506683 - DNA, 15 bp, Homo sapiens
gttcctgccatttgg

SEQ ID NO: 506684 - DNA, 15 bp, Homo sapiens
ggttcctgccatttg

SEQ ID NO: 506685 - DNA, 15 bp, Homo sapiens
gggttcctgccattt

SEQ ID NO: 506686 - DNA, 15 bp, Homo sapiens
ggggttcctgccatt

SEQ ID NO: 506687 - DNA, 15 bp, Homo sapiens
tggggttcctgccat

SEQ ID NO: 506688 - DNA, 15 bp, Homo sapiens
ttggggttcctgcca

SEQ ID NO: 506689 - DNA, 15 bp, Homo sapiens
tttggggttcctgcc

SEQ ID NO: 506690 - DNA, 15 bp, Homo sapiens
ctttggggttcctgc

SEQ ID NO: 506691 - DNA, 15 bp, Homo sapiens
tctttggggttcctg

SEQ ID NO: 506692 - DNA, 15 bp, Homo sapiens
atctttggggttcct

SEQ ID NO: 506693 - DNA, 15 bp, Homo sapiens
gatctttggggttcc

SEQ ID NO: 506694 - DNA, 15 bp, Homo sapiens
agatctttggggttc

SEQ ID NO: 506695 - DNA, 15 bp, Homo sapiens
tagatctttggggtt

SEQ ID NO: 506696 - DNA, 15 bp, Homo sapiens
ttagatctttggggt

SEQ ID NO: 506697 - DNA, 15 bp, Homo sapiens
tttagatctttgggg

SEQ ID NO: 506698 - DNA, 15 bp, Homo sapiens
atttagatctttggg

SEQ ID NO: 506699 - DNA, 15 bp, Homo sapiens
tatttagatctttgg

SEQ ID NO: 506700 - DNA, 15 bp, Homo sapiens
atatttagatctttg

SEQ ID NO: 506701 - DNA, 15 bp, Homo sapiens
aatatttagatcttt

SEQ ID NO: 506702 - DNA, 15 bp, Homo sapiens
aaatatttagatctt

SEQ ID NO: 506703 - DNA, 15 bp, Homo sapiens
gaaatatttagatct

SEQ ID NO: 506704 - DNA, 15 bp, Homo sapiens
tgaaatatttagatc

SEQ ID NO: 506705 - DNA, 15 bp, Homo sapiens
gtgaaatatttagat

SEQ ID NO: 506706 - DNA, 15 bp, Homo sapiens
agtgaaatatttaga

SEQ ID NO: 506707 - DNA, 15 bp, Homo sapiens
gagtgaaatatttag

SEQ ID NO: 506708 - DNA, 15 bp, Homo sapiens
agagtgaaatattta

SEQ ID NO: 506709 - DNA, 15 bp, Homo sapiens
aagagtgaaatattt

SEQ ID NO: 506710 - DNA, 15 bp, Homo sapiens
gaagagtgaaatatt

SEQ ID NO: 506711 - DNA, 15 bp, Homo sapiens
ggaagagtgaaatat

SEQ ID NO: 506712 - DNA, 15 bp, Homo sapiens
aggaagagtgaaata

SEQ ID NO: 506713 - DNA, 15 bp, Homo sapiens
gaggaagagtgaaat

SEQ ID NO: 506714 - DNA, 15 bp, Homo sapiens
ggaggaagagtgaaa

SEQ ID NO: 506715 - DNA, 15 bp, Homo sapiens
gggaggaagagtgaa

SEQ ID NO: 506716 - DNA, 15 bp, Homo sapiens
agggaggaagagtga

SEQ ID NO: 506717 - DNA, 15 bp, Homo sapiens
cagggaggaagagtg

SEQ ID NO: 506718 - DNA, 15 bp, Homo sapiens
acagggaggaagagt

SEQ ID NO: 506719 - DNA, 15 bp, Homo sapiens
tacagggaggaagag

SEQ ID NO: 506720 - DNA, 15 bp, Homo sapiens
gtacagggaggaaga

SEQ ID NO: 506721 - DNA, 15 bp, Homo sapiens
ggtacagggaggaag

SEQ ID NO: 506722 - DNA, 15 bp, Homo sapiens
aggtacagggaggaa

SEQ ID NO: 506723 - DNA, 15 bp, Homo sapiens
gaggtacagggagga

SEQ ID NO: 506724 - DNA, 15 bp, Homo sapiens
ggaggtacagggagg

SEQ ID NO: 506725 - DNA, 15 bp, Homo sapiens
gggaggtacagggag

SEQ ID NO: 506726 - DNA, 15 bp, Homo sapiens
agggaggtacaggga

SEQ ID NO: 506727 - DNA, 15 bp, Homo sapiens
gagggaggtacaggg

SEQ ID NO: 506728 - DNA, 15 bp, Homo sapiens
tgagggaggtacagg

SEQ ID NO: 506729 - DNA, 15 bp, Homo sapiens
gtgagggaggtacag

SEQ ID NO: 506730 - DNA, 15 bp, Homo sapiens
agtgagggaggtaca

SEQ ID NO: 506731 - DNA, 15 bp, Homo sapiens
cagtgagggaggtac

SEQ ID NO: 506732 - DNA, 15 bp, Homo sapiens
gcagtgagggaggta

SEQ ID NO: 506733 - DNA, 15 bp, Homo sapiens
cgcagtgagggaggt

SEQ ID NO: 506734 - DNA, 15 bp, Homo sapiens
gcgcagtgagggagg

SEQ ID NO: 506735 - DNA, 15 bp, Homo sapiens
ggcgcagtgagggag

SEQ ID NO: 506736 - DNA, 15 bp, Homo sapiens
aggcgcagtgaggga

SEQ ID NO: 506737 - DNA, 15 bp, Homo sapiens
aaggcgcagtgaggg

SEQ ID NO: 506738 - DNA, 15 bp, Homo sapiens
gaaggcgcagtgagg

SEQ ID NO: 506739 - DNA, 15 bp, Homo sapiens
ggaaggcgcagtgag

SEQ ID NO: 506740 - DNA, 15 bp, Homo sapiens
tggaaggcgcagtga

SEQ ID NO: 506741 - DNA, 15 bp, Homo sapiens
gtggaaggcgcagtg

SEQ ID NO: 506742 - DNA, 15 bp, Homo sapiens
ggtggaaggcgcagt

SEQ ID NO: 506743 - DNA, 15 bp, Homo sapiens
gggtggaaggcgcag

SEQ ID NO: 506744 - DNA, 15 bp, Homo sapiens
ggggtggaaggcgca

SEQ ID NO: 506745 - DNA, 15 bp, Homo sapiens
gggggtggaaggcgc

SEQ ID NO: 506746 - DNA, 15 bp, Homo sapiens
tgggggtggaaggcg

SEQ ID NO: 506747 - DNA, 15 bp, Homo sapiens
ctgggggtggaaggc

SEQ ID NO: 506748 - DNA, 15 bp, Homo sapiens
gctgggggtggaagg

SEQ ID NO: 506749 - DNA, 15 bp, Homo sapiens
agctgggggtggaag

SEQ ID NO: 506750 - DNA, 15 bp, Homo sapiens
tagctgggggtggaa

SEQ ID NO: 506751 - DNA, 15 bp, Homo sapiens
atagctgggggtgga

SEQ ID NO: 506752 - DNA, 15 bp, Homo sapiens
tatagctgggggtgg

SEQ ID NO: 506753 - DNA, 15 bp, Homo sapiens
ttatagctgggggtg

SEQ ID NO: 506754 - DNA, 15 bp, Homo sapiens
tttatagctgggggt

SEQ ID NO: 506755 - DNA, 15 bp, Homo sapiens
atttatagctggggg

SEQ ID NO: 506756 - DNA, 15 bp, Homo sapiens
aatttatagctgggg

SEQ ID NO: 506757 - DNA, 15 bp, Homo sapiens
gaatttatagctggg

SEQ ID NO: 506758 - DNA, 15 bp, Homo sapiens
agaatttatagctgg

SEQ ID NO: 506759 - DNA, 15 bp, Homo sapiens
tagaatttatagctg

SEQ ID NO: 506760 - DNA, 15 bp, Homo sapiens
ctagaatttatagct

SEQ ID NO: 506761 - DNA, 15 bp, Homo sapiens
tctagaatttatagc

SEQ ID NO: 506762 - DNA, 15 bp, Homo sapiens
atctagaatttatag

SEQ ID NO: 506763 - DNA, 15 bp, Homo sapiens
aatctagaatttata

SEQ ID NO: 506764 - DNA, 15 bp, Homo sapiens
gaatctagaatttat

SEQ ID NO: 506765 - DNA, 15 bp, Homo sapiens
ggaatctagaattta

SEQ ID NO: 506766 - DNA, 15 bp, Homo sapiens
gggaatctagaattt

SEQ ID NO: 506767 - DNA, 15 bp, Homo sapiens
ggggaatctagaatt

SEQ ID NO: 506768 - DNA, 15 bp, Homo sapiens
aggggaatctagaat

SEQ ID NO: 506769 - DNA, 15 bp, Homo sapiens
gaggggaatctagaa

SEQ ID NO: 506770 - DNA, 15 bp, Homo sapiens
ggaggggaatctaga

SEQ ID NO: 506771 - DNA, 15 bp, Homo sapiens
gggaggggaatctag

SEQ ID NO: 506772 - DNA, 15 bp, Homo sapiens
ggggaggggaatcta

SEQ ID NO: 506773 - DNA, 15 bp, Homo sapiens
cggggaggggaatct

SEQ ID NO: 506774 - DNA, 15 bp, Homo sapiens
gcggggaggggaatc

SEQ ID NO: 506775 - DNA, 15 bp, Homo sapiens
ggcggggaggggaat

SEQ ID NO: 506776 - DNA, 15 bp, Homo sapiens
gggcggggaggggaa

SEQ ID NO: 506777 - DNA, 15 bp, Homo sapiens
ggggcggggagggga

SEQ ID NO: 506778 - DNA, 15 bp, Homo sapiens
gggggcggggagggg

SEQ ID NO: 506779 - DNA, 15 bp, Homo sapiens
ggggggcggggaggg

SEQ ID NO: 506780 - DNA, 15 bp, Homo sapiens
gggggggcggggagg

SEQ ID NO: 506781 - DNA, 15 bp, Homo sapiens
ggggggggcggggag

SEQ ID NO: 506782 - DNA, 15 bp, Homo sapiens
gggggggggcgggga

SEQ ID NO: 506783 - DNA, 15 bp, Homo sapiens
ggggggggggcgggg

SEQ ID NO: 506784 - DNA, 15 bp, Homo sapiens
tggggggggggcggg

SEQ ID NO: 506785 - DNA, 15 bp, Homo sapiens
gtggggggggggcgg

SEQ ID NO: 506786 - DNA, 15 bp, Homo sapiens
ggtggggggggggcg

SEQ ID NO: 506787 - DNA, 15 bp, Homo sapiens
gggtggggggggggc

SEQ ID NO: 506788 - DNA, 15 bp, Homo sapiens
tgggtgggggggggg

SEQ ID NO: 506789 - DNA, 15 bp, Homo sapiens
atgggtggggggggg

SEQ ID NO: 506790 - DNA, 15 bp, Homo sapiens
gatgggtgggggggg

SEQ ID NO: 506791 - DNA, 15 bp, Homo sapiens
ggatgggtggggggg

SEQ ID NO: 506792 - DNA, 15 bp, Homo sapiens
aggatgggtgggggg

SEQ ID NO: 506793 - DNA, 15 bp, Homo sapiens
caggatgggtggggg

SEQ ID NO: 506794 - DNA, 15 bp, Homo sapiens
gcaggatgggtgggg

SEQ ID NO: 506795 - DNA, 15 bp, Homo sapiens
cgcaggatgggtggg

SEQ ID NO: 506796 - DNA, 15 bp, Homo sapiens
ccgcaggatgggtgg

SEQ ID NO: 506797 - DNA, 15 bp, Homo sapiens
tccgcaggatgggtg

SEQ ID NO: 506798 - DNA, 15 bp, Homo sapiens
atccgcaggatgggt

SEQ ID NO: 506799 - DNA, 15 bp, Homo sapiens
tatccgcaggatggg

SEQ ID NO: 506800 - DNA, 15 bp, Homo sapiens
ttatccgcaggatgg

SEQ ID NO: 506801 - DNA, 15 bp, Homo sapiens
attatccgcaggatg

SEQ ID NO: 506802 - DNA, 15 bp, Homo sapiens
aattatccgcaggat

SEQ ID NO: 506803 - DNA, 15 bp, Homo sapiens
caattatccgcagga

SEQ ID NO: 506804 - DNA, 15 bp, Homo sapiens
tcaattatccgcagg

SEQ ID NO: 506805 - DNA, 15 bp, Homo sapiens
ctcaattatccgcag

SEQ ID NO: 506806 - DNA, 15 bp, Homo sapiens
actcaattatccgca

SEQ ID NO: 506807 - DNA, 15 bp, Homo sapiens
cactcaattatccgc

SEQ ID NO: 506808 - DNA, 15 bp, Homo sapiens
ccactcaattatccg

SEQ ID NO: 506809 - DNA, 15 bp, Homo sapiens
gccactcaattatcc

SEQ ID NO: 506810 - DNA, 15 bp, Homo sapiens
agccactcaattatc

SEQ ID NO: 506811 - DNA, 15 bp, Homo sapiens
gagccactcaattat

SEQ ID NO: 506812 - DNA, 15 bp, Homo sapiens
tgagccactcaatta

SEQ ID NO: 506813 - DNA, 15 bp, Homo sapiens
ctgagccactcaatt

SEQ ID NO: 506814 - DNA, 15 bp, Homo sapiens
tctgagccactcaat

SEQ ID NO: 506815 - DNA, 15 bp, Homo sapiens
ctctgagccactcaa

SEQ ID NO: 506816 - DNA, 15 bp, Homo sapiens
cctctgagccactca

SEQ ID NO: 506817 - DNA, 15 bp, Homo sapiens
gcctctgagccactc

SEQ ID NO: 506818 - DNA, 15 bp, Homo sapiens
tgcctctgagccact

SEQ ID NO: 506819 - DNA, 15 bp, Homo sapiens
gtgcctctgagccac

SEQ ID NO: 506820 - DNA, 15 bp, Homo sapiens
agtgcctctgagcca

SEQ ID NO: 506821 - DNA, 15 bp, Homo sapiens
tagtgcctctgagcc

SEQ ID NO: 506822 - DNA, 15 bp, Homo sapiens
ttagtgcctctgagc

SEQ ID NO: 506823 - DNA, 15 bp, Homo sapiens
attagtgcctctgag

SEQ ID NO: 506824 - DNA, 15 bp, Homo sapiens
gattagtgcctctga

SEQ ID NO: 506825 - DNA, 15 bp, Homo sapiens
agattagtgcctctg

SEQ ID NO: 506826 - DNA, 15 bp, Homo sapiens
cagattagtgcctct

SEQ ID NO: 506827 - DNA, 15 bp, Homo sapiens
gcagattagtgcctc

SEQ ID NO: 506828 - DNA, 15 bp, Homo sapiens
ggcagattagtgcct

SEQ ID NO: 506829 - DNA, 15 bp, Homo sapiens
gggcagattagtgcc

SEQ ID NO: 506830 - DNA, 15 bp, Homo sapiens
agggcagattagtgc

SEQ ID NO: 506831 - DNA, 15 bp, Homo sapiens
cagggcagattagtg

SEQ ID NO: 506832 - DNA, 15 bp, Homo sapiens
ccagggcagattagt

SEQ ID NO: 506833 - DNA, 15 bp, Homo sapiens
cccagggcagattag

SEQ ID NO: 506834 - DNA, 15 bp, Homo sapiens
ccccagggcagatta

SEQ ID NO: 506835 - DNA, 15 bp, Homo sapiens
accccagggcagatt

SEQ ID NO: 506836 - DNA, 15 bp, Homo sapiens
caccccagggcagat

SEQ ID NO: 506837 - DNA, 15 bp, Homo sapiens
tcaccccagggcaga

SEQ ID NO: 506838 - DNA, 15 bp, Homo sapiens
ctcaccccagggcag

SEQ ID NO: 506839 - DNA, 15 bp, Homo sapiens
cctcaccccagggca

SEQ ID NO: 506840 - DNA, 15 bp, Homo sapiens
acctcaccccagggc

SEQ ID NO: 506841 - DNA, 15 bp, Homo sapiens
cacctcaccccaggg

SEQ ID NO: 506842 - DNA, 15 bp, Homo sapiens
ccacctcaccccagg

SEQ ID NO: 506843 - DNA, 15 bp, Homo sapiens
cccacctcaccccag

SEQ ID NO: 506844 - DNA, 15 bp, Homo sapiens
ccccacctcacccca

SEQ ID NO: 506845 - DNA, 15 bp, Homo sapiens
gccccacctcacccc

SEQ ID NO: 506846 - DNA, 15 bp, Homo sapiens
agccccacctcaccc

SEQ ID NO: 506847 - DNA, 15 bp, Homo sapiens
cagccccacctcacc

SEQ ID NO: 506848 - DNA, 15 bp, Homo sapiens
ccagccccacctcac

SEQ ID NO: 506849 - DNA, 15 bp, Homo sapiens
gccagccccacctca

SEQ ID NO: 506850 - DNA, 15 bp, Homo sapiens
tgccagccccacctc

SEQ ID NO: 506851 - DNA, 15 bp, Homo sapiens
ctgccagccccacct

SEQ ID NO: 506852 - DNA, 15 bp, Homo sapiens
actgccagccccacc

SEQ ID NO: 506853 - DNA, 15 bp, Homo sapiens
cactgccagccccac

SEQ ID NO: 506854 - DNA, 15 bp, Homo sapiens
ccactgccagcccca

SEQ ID NO: 506855 - DNA, 15 bp, Homo sapiens
tccactgccagcccc

SEQ ID NO: 506856 - DNA, 15 bp, Homo sapiens
ctccactgccagccc

SEQ ID NO: 506857 - DNA, 15 bp, Homo sapiens
cctccactgccagcc

SEQ ID NO: 506858 - DNA, 15 bp, Homo sapiens
acctccactgccagc

SEQ ID NO: 506859 - DNA, 15 bp, Homo sapiens
tacctccactgccag

SEQ ID NO: 506860 - DNA, 15 bp, Homo sapiens
ttacctccactgcca

SEQ ID NO: 506861 - DNA, 15 bp, Homo sapiens
cttacctccactgcc

SEQ ID NO: 506862 - DNA, 15 bp, Homo sapiens
ccttacctccactgc

SEQ ID NO: 506863 - DNA, 15 bp, Homo sapiens
gccttacctccactg

SEQ ID NO: 506864 - DNA, 15 bp, Homo sapiens
ggccttacctccact

SEQ ID NO: 506865 - DNA, 15 bp, Homo sapiens
aggccttacctccac

SEQ ID NO: 506866 - DNA, 15 bp, Homo sapiens
gaggccttacctcca

SEQ ID NO: 506867 - DNA, 15 bp, Homo sapiens
ggaggccttacctcc

SEQ ID NO: 506868 - DNA, 15 bp, Homo sapiens
gggaggccttacctc

SEQ ID NO: 506869 - DNA, 15 bp, Homo sapiens
tgggaggccttacct

SEQ ID NO: 506870 - DNA, 15 bp, Homo sapiens
gtgggaggccttacc

SEQ ID NO: 506871 - DNA, 15 bp, Homo sapiens
tgtgggaggccttac

SEQ ID NO: 506872 - DNA, 15 bp, Homo sapiens
ctgtgggaggcctta

SEQ ID NO: 506873 - DNA, 15 bp, Homo sapiens
cctgtgggaggcctt

SEQ ID NO: 506874 - DNA, 15 bp, Homo sapiens
gcctgtgggaggcct

SEQ ID NO: 506875 - DNA, 15 bp, Homo sapiens
agcctgtgggaggcc

SEQ ID NO: 506876 - DNA, 15 bp, Homo sapiens
gagcctgtgggaggc

SEQ ID NO: 506877 - DNA, 15 bp, Homo sapiens
ggagcctgtgggagg

SEQ ID NO: 506878 - DNA, 15 bp, Homo sapiens
gggagcctgtgggag

SEQ ID NO: 506879 - DNA, 15 bp, Homo sapiens
agggagcctgtggga

SEQ ID NO: 506880 - DNA, 15 bp, Homo sapiens
cagggagcctgtggg

SEQ ID NO: 506881 - DNA, 15 bp, Homo sapiens
ccagggagcctgtgg

SEQ ID NO: 506882 - DNA, 15 bp, Homo sapiens
accagggagcctgtg

SEQ ID NO: 506883 - DNA, 15 bp, Homo sapiens
aaccagggagcctgt

SEQ ID NO: 506884 - DNA, 15 bp, Homo sapiens
gaaccagggagcctg

SEQ ID NO: 506885 - DNA, 15 bp, Homo sapiens
ggaaccagggagcct

SEQ ID NO: 506886 - DNA, 15 bp, Homo sapiens
cggaaccagggagcc

SEQ ID NO: 506887 - DNA, 15 bp, Homo sapiens
gcggaaccagggagc

SEQ ID NO: 506888 - DNA, 15 bp, Homo sapiens
tgcggaaccagggag

SEQ ID NO: 506889 - DNA, 15 bp, Homo sapiens
ttgcggaaccaggga

SEQ ID NO: 506890 - DNA, 15 bp, Homo sapiens
tttgcggaaccaggg

SEQ ID NO: 506891 - DNA, 15 bp, Homo sapiens
ttttgcggaaccagg

SEQ ID NO: 506892 - DNA, 15 bp, Homo sapiens
attttgcggaaccag

SEQ ID NO: 506893 - DNA, 15 bp, Homo sapiens
cattttgcggaacca

SEQ ID NO: 506894 - DNA, 15 bp, Homo sapiens
ccattttgcggaacc

SEQ ID NO: 506895 - DNA, 15 bp, Homo sapiens
cccattttgcggaac

SEQ ID NO: 506896 - DNA, 15 bp, Homo sapiens
tcccattttgcggaa

SEQ ID NO: 506897 - DNA, 15 bp, Homo sapiens
ctcccattttgcgga

SEQ ID NO: 506898 - DNA, 15 bp, Homo sapiens
cctcccattttgcgg

SEQ ID NO: 506899 - DNA, 15 bp, Homo sapiens
tcctcccattttgcg

SEQ ID NO: 506900 - DNA, 15 bp, Homo sapiens
gtcctcccattttgc

SEQ ID NO: 506901 - DNA, 15 bp, Homo sapiens
tgtcctcccattttg

SEQ ID NO: 506902 - DNA, 15 bp, Homo sapiens
ctgtcctcccatttt

SEQ ID NO: 506903 - DNA, 15 bp, Homo sapiens
tctgtcctcccattt

SEQ ID NO: 506904 - DNA, 15 bp, Homo sapiens
ttctgtcctcccatt

SEQ ID NO: 506905 - DNA, 15 bp, Homo sapiens
gttctgtcctcccat

SEQ ID NO: 506906 - DNA, 15 bp, Homo sapiens
agttctgtcctccca

SEQ ID NO: 506907 - DNA, 15 bp, Homo sapiens
gagttctgtcctccc

SEQ ID NO: 506908 - DNA, 15 bp, Homo sapiens
ggagttctgtcctcc

SEQ ID NO: 506909 - DNA, 15 bp, Homo sapiens
aggagttctgtcctc

SEQ ID NO: 506910 - DNA, 15 bp, Homo sapiens
taggagttctgtcct

SEQ ID NO: 506911 - DNA, 15 bp, Homo sapiens
gtaggagttctgtcc

SEQ ID NO: 506912 - DNA, 15 bp, Homo sapiens
tgtaggagttctgtc

SEQ ID NO: 506913 - DNA, 15 bp, Homo sapiens
ttgtaggagttctgt

SEQ ID NO: 506914 - DNA, 15 bp, Homo sapiens
gttgtaggagttctg

SEQ ID NO: 506915 - DNA, 15 bp, Homo sapiens
agttgtaggagttct

SEQ ID NO: 506916 - DNA, 15 bp, Homo sapiens
cagttgtaggagttc

SEQ ID NO: 506917 - DNA, 15 bp, Homo sapiens
ccagttgtaggagtt

SEQ ID NO: 506918 - DNA, 15 bp, Homo sapiens
gccagttgtaggagt

SEQ ID NO: 506919 - DNA, 15 bp, Homo sapiens
tgccagttgtaggag

SEQ ID NO: 506920 - DNA, 15 bp, Homo sapiens
ctgccagttgtagga

SEQ ID NO: 506921 - DNA, 15 bp, Homo sapiens
cctgccagttgtagg

SEQ ID NO: 506922 - DNA, 15 bp, Homo sapiens
tcctgccagttgtag

SEQ ID NO: 506923 - DNA, 15 bp, Homo sapiens
ctcctgccagttgta

SEQ ID NO: 506924 - DNA, 15 bp, Homo sapiens
cctcctgccagttgt

SEQ ID NO: 506925 - DNA, 15 bp, Homo sapiens
acctcctgccagttg

SEQ ID NO: 506926 - DNA, 15 bp, Homo sapiens
cacctcctgccagtt

SEQ ID NO: 506927 - DNA, 15 bp, Homo sapiens
tcacctcctgccagt

SEQ ID NO: 506928 - DNA, 15 bp, Homo sapiens
ttcacctcctgccag

SEQ ID NO: 506929 - DNA, 15 bp, Homo sapiens
cttcacctcctgcca

SEQ ID NO: 506930 - DNA, 15 bp, Homo sapiens
tcttcacctcctgcc

SEQ ID NO: 506931 - DNA, 15 bp, Homo sapiens
ctcttcacctcctgc

SEQ ID NO: 506932 - DNA, 15 bp, Homo sapiens
cctcttcacctcctg

SEQ ID NO: 506933 - DNA, 15 bp, Homo sapiens
tcctcttcacctcct

SEQ ID NO: 506934 - DNA, 15 bp, Homo sapiens
gtcctcttcacctcc

SEQ ID NO: 506935 - DNA, 15 bp, Homo sapiens
cgtcctcttcacctc

SEQ ID NO: 506936 - DNA, 15 bp, Homo sapiens
gcgtcctcttcacct

SEQ ID NO: 506937 - DNA, 15 bp, Homo sapiens
agcgtcctcttcacc

SEQ ID NO: 506938 - DNA, 15 bp, Homo sapiens
cagcgtcctcttcac

SEQ ID NO: 506939 - DNA, 15 bp, Homo sapiens
ccagcgtcctcttca

SEQ ID NO: 506940 - DNA, 15 bp, Homo sapiens
cccagcgtcctcttc

SEQ ID NO: 506941 - DNA, 15 bp, Homo sapiens
tcccagcgtcctctt

SEQ ID NO: 506942 - DNA, 15 bp, Homo sapiens
gtcccagcgtcctct

SEQ ID NO: 506943 - DNA, 15 bp, Homo sapiens
ggtcccagcgtcctc

SEQ ID NO: 506944 - DNA, 15 bp, Homo sapiens
gggtcccagcgtcct

SEQ ID NO: 506945 - DNA, 15 bp, Homo sapiens
tgggtcccagcgtcc

SEQ ID NO: 506946 - DNA, 15 bp, Homo sapiens
gtgggtcccagcgtc

SEQ ID NO: 506947 - DNA, 15 bp, Homo sapiens
tgtgggtcccagcgt

SEQ ID NO: 506948 - DNA, 15 bp, Homo sapiens
ctgtgggtcccagcg

SEQ ID NO: 506949 - DNA, 15 bp, Homo sapiens
cctgtgggtcccagc

SEQ ID NO: 506950 - DNA, 15 bp, Homo sapiens
tcctgtgggtcccag

SEQ ID NO: 506951 - DNA, 15 bp, Homo sapiens
gtcctgtgggtccca

SEQ ID NO: 506952 - DNA, 15 bp, Homo sapiens
ggtcctgtgggtccc

SEQ ID NO: 506953 - DNA, 15 bp, Homo sapiens
aggtcctgtgggtcc

SEQ ID NO: 506954 - DNA, 15 bp, Homo sapiens
taggtcctgtgggtc

SEQ ID NO: 506955 - DNA, 15 bp, Homo sapiens
ctaggtcctgtgggt

SEQ ID NO: 506956 - DNA, 15 bp, Homo sapiens
actaggtcctgtggg

SEQ ID NO: 506957 - DNA, 15 bp, Homo sapiens
gactaggtcctgtgg

SEQ ID NO: 506958 - DNA, 15 bp, Homo sapiens
agactaggtcctgtg

SEQ ID NO: 506959 - DNA, 15 bp, Homo sapiens
cagactaggtcctgt

SEQ ID NO: 506960 - DNA, 15 bp, Homo sapiens
gcagactaggtcctg

SEQ ID NO: 506961 - DNA, 15 bp, Homo sapiens
ggcagactaggtcct

SEQ ID NO: 506962 - DNA, 15 bp, Homo sapiens
tggcagactaggtcc

SEQ ID NO: 506963 - DNA, 15 bp, Homo sapiens
ctggcagactaggtc

SEQ ID NO: 506964 - DNA, 15 bp, Homo sapiens
cctggcagactaggt

SEQ ID NO: 506965 - DNA, 15 bp, Homo sapiens
ccctggcagactagg

SEQ ID NO: 506966 - DNA, 15 bp, Homo sapiens
cccctggcagactag

SEQ ID NO: 506967 - DNA, 15 bp, Homo sapiens
tcccctggcagacta

SEQ ID NO: 506968 - DNA, 15 bp, Homo sapiens
ttcccctggcagact

SEQ ID NO: 506969 - DNA, 15 bp, Homo sapiens
tttcccctggcagac

SEQ ID NO: 506970 - DNA, 15 bp, Homo sapiens
ctttcccctggcaga

SEQ ID NO: 506971 - DNA, 15 bp, Homo sapiens
cctttcccctggcag

SEQ ID NO: 506972 - DNA, 15 bp, Homo sapiens
ccctttcccctggca

SEQ ID NO: 506973 - DNA, 15 bp, Homo sapiens
tccctttcccctggc

SEQ ID NO: 506974 - DNA, 15 bp, Homo sapiens
ttccctttcccctgg

SEQ ID NO: 506975 - DNA, 15 bp, Homo sapiens
tttccctttcccctg

SEQ ID NO: 506976 - DNA, 15 bp, Homo sapiens
gtttccctttcccct

SEQ ID NO: 506977 - DNA, 15 bp, Homo sapiens
tgtttccctttcccc

SEQ ID NO: 506978 - DNA, 15 bp, Homo sapiens
ctgtttccctttccc

SEQ ID NO: 506979 - DNA, 15 bp, Homo sapiens
cctgtttccctttcc

SEQ ID NO: 506980 - DNA, 15 bp, Homo sapiens
gcctgtttccctttc

SEQ ID NO: 506981 - DNA, 15 bp, Homo sapiens
agcctgtttcccttt

SEQ ID NO: 506982 - DNA, 15 bp, Homo sapiens
gagcctgtttccctt

SEQ ID NO: 506983 - DNA, 15 bp, Homo sapiens
ggagcctgtttccct

SEQ ID NO: 506984 - DNA, 15 bp, Homo sapiens
gggagcctgtttccc

SEQ ID NO: 506985 - DNA, 15 bp, Homo sapiens
ggggagcctgtttcc

SEQ ID NO: 506986 - DNA, 15 bp, Homo sapiens
aggggagcctgtttc

SEQ ID NO: 506987 - DNA, 15 bp, Homo sapiens
caggggagcctgttt

SEQ ID NO: 506988 - DNA, 15 bp, Homo sapiens
tcaggggagcctgtt

SEQ ID NO: 506989 - DNA, 15 bp, Homo sapiens
gtcaggggagcctgt

SEQ ID NO: 506990 - DNA, 15 bp, Homo sapiens
agtcaggggagcctg

SEQ ID NO: 506991 - DNA, 15 bp, Homo sapiens
tagtcaggggagcct

SEQ ID NO: 506992 - DNA, 15 bp, Homo sapiens
ttagtcaggggagcc

SEQ ID NO: 506993 - DNA, 15 bp, Homo sapiens
cttagtcaggggagc

SEQ ID NO: 506994 - DNA, 15 bp, Homo sapiens
ccttagtcaggggag

SEQ ID NO: 506995 - DNA, 15 bp, Homo sapiens
tccttagtcagggga

SEQ ID NO: 506996 - DNA, 15 bp, Homo sapiens
gtccttagtcagggg

SEQ ID NO: 506997 - DNA, 15 bp, Homo sapiens
tgtccttagtcaggg

SEQ ID NO: 506998 - DNA, 15 bp, Homo sapiens
gtgtccttagtcagg

SEQ ID NO: 506999 - DNA, 15 bp, Homo sapiens
tgtgtccttagtcag

SEQ ID NO: 507000 - DNA, 15 bp, Homo sapiens
ctgtgtccttagtca

SEQ ID NO: 507001 - DNA, 15 bp, Homo sapiens
gctgtgtccttagtc

SEQ ID NO: 507002 - DNA, 15 bp, Homo sapiens
ggctgtgtccttagt

SEQ ID NO: 507003 - DNA, 15 bp, Homo sapiens
aggctgtgtccttag

SEQ ID NO: 507004 - DNA, 15 bp, Homo sapiens
gaggctgtgtcctta

SEQ ID NO: 507005 - DNA, 15 bp, Homo sapiens
tgaggctgtgtcctt

SEQ ID NO: 507006 - DNA, 15 bp, Homo sapiens
ctgaggctgtgtcct

SEQ ID NO: 507007 - DNA, 15 bp, Homo sapiens
tctgaggctgtgtcc

SEQ ID NO: 507008 - DNA, 15 bp, Homo sapiens
gtctgaggctgtgtc

SEQ ID NO: 507009 - DNA, 15 bp, Homo sapiens
ggtctgaggctgtgt

SEQ ID NO: 507010 - DNA, 15 bp, Homo sapiens
tggtctgaggctgtg

SEQ ID NO: 507011 - DNA, 15 bp, Homo sapiens
ctggtctgaggctgt

SEQ ID NO: 507012 - DNA, 15 bp, Homo sapiens
cctggtctgaggctg

SEQ ID NO: 507013 - DNA, 15 bp, Homo sapiens
gcctggtctgaggct

SEQ ID NO: 507014 - DNA, 15 bp, Homo sapiens
agcctggtctgaggc

SEQ ID NO: 507015 - DNA, 15 bp, Homo sapiens
aagcctggtctgagg

SEQ ID NO: 507016 - DNA, 15 bp, Homo sapiens
caagcctggtctgag

SEQ ID NO: 507017 - DNA, 15 bp, Homo sapiens
ccaagcctggtctga

SEQ ID NO: 507018 - DNA, 15 bp, Homo sapiens
gccaagcctggtctg

SEQ ID NO: 507019 - DNA, 15 bp, Homo sapiens
agccaagcctggtct

SEQ ID NO: 507020 - DNA, 15 bp, Homo sapiens
cagccaagcctggtc

SEQ ID NO: 507021 - DNA, 15 bp, Homo sapiens
ccagccaagcctggt

SEQ ID NO: 507022 - DNA, 15 bp, Homo sapiens
cccagccaagcctgg

SEQ ID NO: 507023 - DNA, 15 bp, Homo sapiens
acccagccaagcctg

SEQ ID NO: 507024 - DNA, 15 bp, Homo sapiens
cacccagccaagcct

SEQ ID NO: 507025 - DNA, 15 bp, Homo sapiens
ccacccagccaagcc

SEQ ID NO: 507026 - DNA, 15 bp, Homo sapiens
tccacccagccaagc

SEQ ID NO: 507027 - DNA, 15 bp, Homo sapiens
gtccacccagccaag

SEQ ID NO: 507028 - DNA, 15 bp, Homo sapiens
tgtccacccagccaa

SEQ ID NO: 507029 - DNA, 15 bp, Homo sapiens
ctgtccacccagcca

SEQ ID NO: 507030 - DNA, 15 bp, Homo sapiens
cctgtccacccagcc

SEQ ID NO: 507031 - DNA, 15 bp, Homo sapiens
tcctgtccacccagc

SEQ ID NO: 507032 - DNA, 15 bp, Homo sapiens
ttcctgtccacccag

SEQ ID NO: 507033 - DNA, 15 bp, Homo sapiens
attcctgtccaccca

SEQ ID NO: 507034 - DNA, 15 bp, Homo sapiens
cattcctgtccaccc

SEQ ID NO: 507035 - DNA, 15 bp, Homo sapiens
acattcctgtccacc

SEQ ID NO: 507036 - DNA, 15 bp, Homo sapiens
cacattcctgtccac

SEQ ID NO: 507037 - DNA, 15 bp, Homo sapiens
ccacattcctgtcca

SEQ ID NO: 507038 - DNA, 15 bp, Homo sapiens
accacattcctgtcc

SEQ ID NO: 507039 - DNA, 15 bp, Homo sapiens
caccacattcctgtc

SEQ ID NO: 507040 - DNA, 15 bp, Homo sapiens
gcaccacattcctgt

SEQ ID NO: 507041 - DNA, 15 bp, Homo sapiens
ggcaccacattcctg

SEQ ID NO: 507042 - DNA, 15 bp, Homo sapiens
gggcaccacattcct

SEQ ID NO: 507043 - DNA, 15 bp, Homo sapiens
tgggcaccacattcc

SEQ ID NO: 507044 - DNA, 15 bp, Homo sapiens
ttgggcaccacattc

SEQ ID NO: 507045 - DNA, 15 bp, Homo sapiens
cttgggcaccacatt

SEQ ID NO: 507046 - DNA, 15 bp, Homo sapiens
tcttgggcaccacat

SEQ ID NO: 507047 - DNA, 15 bp, Homo sapiens
ctcttgggcaccaca

SEQ ID NO: 507048 - DNA, 15 bp, Homo sapiens
gctcttgggcaccac

SEQ ID NO: 507049 - DNA, 15 bp, Homo sapiens
tgctcttgggcacca

SEQ ID NO: 507050 - DNA, 15 bp, Homo sapiens
ctgctcttgggcacc

SEQ ID NO: 507051 - DNA, 15 bp, Homo sapiens
gctgctcttgggcac

SEQ ID NO: 507052 - DNA, 15 bp, Homo sapiens
tgctgctcttgggca

SEQ ID NO: 507053 - DNA, 15 bp, Homo sapiens
ctgctgctcttgggc

SEQ ID NO: 507054 - DNA, 15 bp, Homo sapiens
tctgctgctcttggg

SEQ ID NO: 507055 - DNA, 15 bp, Homo sapiens
ctctgctgctcttgg

SEQ ID NO: 507056 - DNA, 15 bp, Homo sapiens
tctctgctgctcttg

SEQ ID NO: 507057 - DNA, 15 bp, Homo sapiens
atctctgctgctctt

SEQ ID NO: 507058 - DNA, 15 bp, Homo sapiens
gatctctgctgctct

SEQ ID NO: 507059 - DNA, 15 bp, Homo sapiens
ggatctctgctgctc

SEQ ID NO: 507060 - DNA, 15 bp, Homo sapiens
tggatctctgctgct

SEQ ID NO: 507061 - DNA, 15 bp, Homo sapiens
ctggatctctgctgc

SEQ ID NO: 507062 - DNA, 15 bp, Homo sapiens
cctggatctctgctg

SEQ ID NO: 507063 - DNA, 15 bp, Homo sapiens
ccctggatctctgct

SEQ ID NO: 507064 - DNA, 15 bp, Homo sapiens
accctggatctctgc

SEQ ID NO: 507065 - DNA, 15 bp, Homo sapiens
taccctggatctctg

SEQ ID NO: 507066 - DNA, 15 bp, Homo sapiens
ctaccctggatctct

SEQ ID NO: 507067 - DNA, 15 bp, Homo sapiens
cctaccctggatctc

SEQ ID NO: 507068 - DNA, 15 bp, Homo sapiens
tcctaccctggatct

SEQ ID NO: 507069 - DNA, 15 bp, Homo sapiens
ttcctaccctggatc

SEQ ID NO: 507070 - DNA, 15 bp, Homo sapiens
cttcctaccctggat

SEQ ID NO: 507071 - DNA, 15 bp, Homo sapiens
acttcctaccctgga

SEQ ID NO: 507072 - DNA, 15 bp, Homo sapiens
aacttcctaccctgg

SEQ ID NO: 507073 - DNA, 15 bp, Homo sapiens
caacttcctaccctg

SEQ ID NO: 507074 - DNA, 15 bp, Homo sapiens
gcaacttcctaccct

SEQ ID NO: 507075 - DNA, 15 bp, Homo sapiens
tgcaacttcctaccc

SEQ ID NO: 507076 - DNA, 15 bp, Homo sapiens
ctgcaacttcctacc

SEQ ID NO: 507077 - DNA, 15 bp, Homo sapiens
gctgcaacttcctac

SEQ ID NO: 507078 - DNA, 15 bp, Homo sapiens
ggctgcaacttccta

SEQ ID NO: 507079 - DNA, 15 bp, Homo sapiens
tggctgcaacttcct

SEQ ID NO: 507080 - DNA, 15 bp, Homo sapiens
atggctgcaacttcc

SEQ ID NO: 507081 - DNA, 15 bp, Homo sapiens
gatggctgcaacttc

SEQ ID NO: 507082 - DNA, 15 bp, Homo sapiens
agatggctgcaactt

SEQ ID NO: 507083 - DNA, 15 bp, Homo sapiens
cagatggctgcaact

SEQ ID NO: 507084 - DNA, 15 bp, Homo sapiens
tcagatggctgcaac

SEQ ID NO: 507085 - DNA, 15 bp, Homo sapiens
ttcagatggctgcaa

SEQ ID NO: 507086 - DNA, 15 bp, Homo sapiens
tttcagatggctgca

SEQ ID NO: 507087 - DNA, 15 bp, Homo sapiens
ttttcagatggctgc

SEQ ID NO: 507088 - DNA, 15 bp, Homo sapiens
gttttcagatggctg

SEQ ID NO: 507089 - DNA, 15 bp, Homo sapiens
ggttttcagatggct

SEQ ID NO: 507090 - DNA, 15 bp, Homo sapiens
gggttttcagatggc

SEQ ID NO: 507091 - DNA, 15 bp, Homo sapiens
ggggttttcagatgg

SEQ ID NO: 507092 - DNA, 15 bp, Homo sapiens
tggggttttcagatg

SEQ ID NO: 507093 - DNA, 15 bp, Homo sapiens
atggggttttcagat

SEQ ID NO: 507094 - DNA, 15 bp, Homo sapiens
tatggggttttcaga

SEQ ID NO: 507095 - DNA, 15 bp, Homo sapiens
ctatggggttttcag

SEQ ID NO: 507096 - DNA, 15 bp, Homo sapiens
tctatggggttttca

SEQ ID NO: 507097 - DNA, 15 bp, Homo sapiens
ctctatggggttttc

SEQ ID NO: 507098 - DNA, 15 bp, Homo sapiens
tctctatggggtttt

SEQ ID NO: 507099 - DNA, 15 bp, Homo sapiens
atctctatggggttt

SEQ ID NO: 507100 - DNA, 15 bp, Homo sapiens
tatctctatggggtt

SEQ ID NO: 507101 - DNA, 15 bp, Homo sapiens
atatctctatggggt

SEQ ID NO: 507102 - DNA, 15 bp, Homo sapiens
tatatctctatgggg

SEQ ID NO: 507103 - DNA, 15 bp, Homo sapiens
atatatctctatggg

SEQ ID NO: 507104 - DNA, 15 bp, Homo sapiens
aatatatctctatgg

SEQ ID NO: 507105 - DNA, 15 bp, Homo sapiens
caatatatctctatg

SEQ ID NO: 507106 - DNA, 15 bp, Homo sapiens
gcaatatatctctat

SEQ ID NO: 507107 - DNA, 15 bp, Homo sapiens
ggcaatatatctcta

SEQ ID NO: 507108 - DNA, 15 bp, Homo sapiens
gggcaatatatctct

SEQ ID NO: 507109 - DNA, 15 bp, Homo sapiens
tgggcaatatatctc

SEQ ID NO: 507110 - DNA, 15 bp, Homo sapiens
gtgggcaatatatct

SEQ ID NO: 507111 - DNA, 15 bp, Homo sapiens
tgtgggcaatatatc

SEQ ID NO: 507112 - DNA, 15 bp, Homo sapiens
atgtgggcaatatat

SEQ ID NO: 507113 - DNA, 15 bp, Homo sapiens
catgtgggcaatata

SEQ ID NO: 507114 - DNA, 15 bp, Homo sapiens
tcatgtgggcaatat

SEQ ID NO: 507115 - DNA, 15 bp, Homo sapiens
gtcatgtgggcaata

SEQ ID NO: 507116 - DNA, 15 bp, Homo sapiens
agtcatgtgggcaat

SEQ ID NO: 507117 - DNA, 15 bp, Homo sapiens
tagtcatgtgggcaa

SEQ ID NO: 507118 - DNA, 15 bp, Homo sapiens
atagtcatgtgggca

SEQ ID NO: 507119 - DNA, 15 bp, Homo sapiens
aatagtcatgtgggc

SEQ ID NO: 507120 - DNA, 15 bp, Homo sapiens
aaatagtcatgtggg

SEQ ID NO: 507121 - DNA, 15 bp, Homo sapiens
gaaatagtcatgtgg

SEQ ID NO: 507122 - DNA, 15 bp, Homo sapiens
agaaatagtcatgtg

SEQ ID NO: 507123 - DNA, 15 bp, Homo sapiens
tagaaatagtcatgt

SEQ ID NO: 507124 - DNA, 15 bp, Homo sapiens
ctagaaatagtcatg

SEQ ID NO: 507125 - DNA, 15 bp, Homo sapiens
tctagaaatagtcat

SEQ ID NO: 507126 - DNA, 15 bp, Homo sapiens
ttctagaaatagtca

SEQ ID NO: 507127 - DNA, 15 bp, Homo sapiens
cttctagaaatagtc

SEQ ID NO: 507128 - DNA, 15 bp, Homo sapiens
acttctagaaatagt

SEQ ID NO: 507129 - DNA, 15 bp, Homo sapiens
cacttctagaaatag

SEQ ID NO: 507130 - DNA, 15 bp, Homo sapiens
ccacttctagaaata

SEQ ID NO: 507131 - DNA, 15 bp, Homo sapiens
accacttctagaaat

SEQ ID NO: 507132 - DNA, 15 bp, Homo sapiens
caccacttctagaaa

SEQ ID NO: 507133 - DNA, 15 bp, Homo sapiens
ccaccacttctagaa

SEQ ID NO: 507134 - DNA, 15 bp, Homo sapiens
accaccacttctaga

SEQ ID NO: 507135 - DNA, 15 bp, Homo sapiens
aaccaccacttctag

SEQ ID NO: 507136 - DNA, 15 bp, Homo sapiens
caaccaccacttcta

SEQ ID NO: 507137 - DNA, 15 bp, Homo sapiens
tcaaccaccacttct

SEQ ID NO: 507138 - DNA, 15 bp, Homo sapiens
atcaaccaccacttc

SEQ ID NO: 507139 - DNA, 15 bp, Homo sapiens
gatcaaccaccactt

SEQ ID NO: 507140 - DNA, 15 bp, Homo sapiens
ggatcaaccaccact

SEQ ID NO: 507141 - DNA, 15 bp, Homo sapiens
gggatcaaccaccac

SEQ ID NO: 507142 - DNA, 15 bp, Homo sapiens
agggatcaaccacca

SEQ ID NO: 507143 - DNA, 15 bp, Homo sapiens
aagggatcaaccacc

SEQ ID NO: 507144 - DNA, 15 bp, Homo sapiens
gaagggatcaaccac

SEQ ID NO: 507145 - DNA, 15 bp, Homo sapiens
tgaagggatcaacca

SEQ ID NO: 507146 - DNA, 15 bp, Homo sapiens
gtgaagggatcaacc

SEQ ID NO: 507147 - DNA, 15 bp, Homo sapiens
tgtgaagggatcaac

SEQ ID NO: 507148 - DNA, 15 bp, Homo sapiens
gtgtgaagggatcaa

SEQ ID NO: 507149 - DNA, 15 bp, Homo sapiens
ggtgtgaagggatca

SEQ ID NO: 507150 - DNA, 15 bp, Homo sapiens
aggtgtgaagggatc

SEQ ID NO: 507151 - DNA, 15 bp, Homo sapiens
aaggtgtgaagggat

SEQ ID NO: 507152 - DNA, 15 bp, Homo sapiens
gaaggtgtgaaggga

SEQ ID NO: 507153 - DNA, 15 bp, Homo sapiens
ggaaggtgtgaaggg

SEQ ID NO: 507154 - DNA, 15 bp, Homo sapiens
gggaaggtgtgaagg

SEQ ID NO: 507155 - DNA, 15 bp, Homo sapiens
cgggaaggtgtgaag

SEQ ID NO: 507156 - DNA, 15 bp, Homo sapiens
ccgggaaggtgtgaa

SEQ ID NO: 507157 - DNA, 15 bp, Homo sapiens
tccgggaaggtgtga

SEQ ID NO: 507158 - DNA, 15 bp, Homo sapiens
atccgggaaggtgtg

SEQ ID NO: 507159 - DNA, 15 bp, Homo sapiens
gatccgggaaggtgt

SEQ ID NO: 507160 - DNA, 15 bp, Homo sapiens
ggatccgggaaggtg

SEQ ID NO: 507161 - DNA, 15 bp, Homo sapiens
tggatccgggaaggt

SEQ ID NO: 507162 - DNA, 15 bp, Homo sapiens
ctggatccgggaagg

SEQ ID NO: 507163 - DNA, 15 bp, Homo sapiens
cctggatccgggaag

SEQ ID NO: 507164 - DNA, 15 bp, Homo sapiens
tcctggatccgggaa

SEQ ID NO: 507165 - DNA, 15 bp, Homo sapiens
atcctggatccggga

SEQ ID NO: 507166 - DNA, 15 bp, Homo sapiens
tatcctggatccggg

SEQ ID NO: 507167 - DNA, 15 bp, Homo sapiens
atatcctggatccgg

SEQ ID NO: 507168 - DNA, 15 bp, Homo sapiens
tatatcctggatccg

SEQ ID NO: 507169 - DNA, 15 bp, Homo sapiens
gtatatcctggatcc

SEQ ID NO: 507170 - DNA, 15 bp, Homo sapiens
tgtatatcctggatc

SEQ ID NO: 507171 - DNA, 15 bp, Homo sapiens
ctgtatatcctggat

SEQ ID NO: 507172 - DNA, 15 bp, Homo sapiens
gctgtatatcctgga

SEQ ID NO: 507173 - DNA, 15 bp, Homo sapiens
cgctgtatatcctgg

SEQ ID NO: 507174 - DNA, 15 bp, Homo sapiens
ccgctgtatatcctg

SEQ ID NO: 507175 - DNA, 15 bp, Homo sapiens
gccgctgtatatcct

SEQ ID NO: 507176 - DNA, 15 bp, Homo sapiens
agccgctgtatatcc

SEQ ID NO: 507177 - DNA, 15 bp, Homo sapiens
gagccgctgtatatc

SEQ ID NO: 507178 - DNA, 15 bp, Homo sapiens
cgagccgctgtatat

SEQ ID NO: 507179 - DNA, 15 bp, Homo sapiens
gcgagccgctgtata

SEQ ID NO: 507180 - DNA, 15 bp, Homo sapiens
agcgagccgctgtat

SEQ ID NO: 507181 - DNA, 15 bp, Homo sapiens
tagcgagccgctgta

SEQ ID NO: 507182 - DNA, 15 bp, Homo sapiens
ctagcgagccgctgt

SEQ ID NO: 507183 - DNA, 15 bp, Homo sapiens
gctagcgagccgctg

SEQ ID NO: 507184 - DNA, 15 bp, Homo sapiens
ggctagcgagccgct

SEQ ID NO: 507185 - DNA, 15 bp, Homo sapiens
gggctagcgagccgc

SEQ ID NO: 507186 - DNA, 15 bp, Homo sapiens
tgggctagcgagccg

SEQ ID NO: 507187 - DNA, 15 bp, Homo sapiens
ttgggctagcgagcc

SEQ ID NO: 507188 - DNA, 15 bp, Homo sapiens
cttgggctagcgagc

SEQ ID NO: 507189 - DNA, 15 bp, Homo sapiens
acttgggctagcgag

SEQ ID NO: 507190 - DNA, 15 bp, Homo sapiens
gacttgggctagcga

SEQ ID NO: 507191 - DNA, 15 bp, Homo sapiens
agacttgggctagcg

SEQ ID NO: 507192 - DNA, 15 bp, Homo sapiens
aagacttgggctagc

SEQ ID NO: 507193 - DNA, 15 bp, Homo sapiens
gaagacttgggctag

SEQ ID NO: 507194 - DNA, 15 bp, Homo sapiens
tgaagacttgggcta

SEQ ID NO: 507195 - DNA, 15 bp, Homo sapiens
ctgaagacttgggct

SEQ ID NO: 507196 - DNA, 15 bp, Homo sapiens
cctgaagacttgggc

SEQ ID NO: 507197 - DNA, 15 bp, Homo sapiens
acctgaagacttggg

SEQ ID NO: 507198 - DNA, 15 bp, Homo sapiens
cacctgaagacttgg

SEQ ID NO: 507199 - DNA, 15 bp, Homo sapiens
gcacctgaagacttg

SEQ ID NO: 507200 - DNA, 15 bp, Homo sapiens
tgcacctgaagactt

SEQ ID NO: 507201 - DNA, 15 bp, Homo sapiens
ttgcacctgaagact

SEQ ID NO: 507202 - DNA, 15 bp, Homo sapiens
attgcacctgaagac

SEQ ID NO: 507203 - DNA, 15 bp, Homo sapiens
gattgcacctgaaga

SEQ ID NO: 507204 - DNA, 15 bp, Homo sapiens
ggattgcacctgaag

SEQ ID NO: 507205 - DNA, 15 bp, Homo sapiens
gggattgcacctgaa

SEQ ID NO: 507206 - DNA, 15 bp, Homo sapiens
tgggattgcacctga

SEQ ID NO: 507207 - DNA, 15 bp, Homo sapiens
ctgggattgcacctg

SEQ ID NO: 507208 - DNA, 15 bp, Homo sapiens
actgggattgcacct

SEQ ID NO: 507209 - DNA, 15 bp, Homo sapiens
gactgggattgcacc

SEQ ID NO: 507210 - DNA, 15 bp, Homo sapiens
tgactgggattgcac

SEQ ID NO: 507211 - DNA, 15 bp, Homo sapiens
ctgactgggattgca

SEQ ID NO: 507212 - DNA, 15 bp, Homo sapiens
cctgactgggattgc

SEQ ID NO: 507213 - DNA, 15 bp, Homo sapiens
ccctgactgggattg

SEQ ID NO: 507214 - DNA, 15 bp, Homo sapiens
tccctgactgggatt

SEQ ID NO: 507215 - DNA, 15 bp, Homo sapiens
ctccctgactgggat

SEQ ID NO: 507216 - DNA, 15 bp, Homo sapiens
tctccctgactggga

SEQ ID NO: 507217 - DNA, 15 bp, Homo sapiens
ttctccctgactggg

SEQ ID NO: 507218 - DNA, 15 bp, Homo sapiens
cttctccctgactgg

SEQ ID NO: 507219 - DNA, 15 bp, Homo sapiens
tcttctccctgactg

SEQ ID NO: 507220 - DNA, 15 bp, Homo sapiens
ttcttctccctgact

SEQ ID NO: 507221 - DNA, 15 bp, Homo sapiens
tttcttctccctgac

SEQ ID NO: 507222 - DNA, 15 bp, Homo sapiens
gtttcttctccctga

SEQ ID NO: 507223 - DNA, 15 bp, Homo sapiens
agtttcttctccctg

SEQ ID NO: 507224 - DNA, 15 bp, Homo sapiens
aagtttcttctccct

SEQ ID NO: 507225 - DNA, 15 bp, Homo sapiens
gaagtttcttctccc

SEQ ID NO: 507226 - DNA, 15 bp, Homo sapiens
tgaagtttcttctcc

SEQ ID NO: 507227 - DNA, 15 bp, Homo sapiens
gtgaagtttcttctc

SEQ ID NO: 507228 - DNA, 15 bp, Homo sapiens
ggtgaagtttcttct

SEQ ID NO: 507229 - DNA, 15 bp, Homo sapiens
gggtgaagtttcttc

SEQ ID NO: 507230 - DNA, 15 bp, Homo sapiens
agggtgaagtttctt

SEQ ID NO: 507231 - DNA, 15 bp, Homo sapiens
cagggtgaagtttct

SEQ ID NO: 507232 - DNA, 15 bp, Homo sapiens
gcagggtgaagtttc

SEQ ID NO: 507233 - DNA, 15 bp, Homo sapiens
ggcagggtgaagttt

SEQ ID NO: 507234 - DNA, 15 bp, Homo sapiens
gggcagggtgaagtt

SEQ ID NO: 507235 - DNA, 15 bp, Homo sapiens
agggcagggtgaagt

SEQ ID NO: 507236 - DNA, 15 bp, Homo sapiens
gagggcagggtgaag

SEQ ID NO: 507237 - DNA, 15 bp, Homo sapiens
ggagggcagggtgaa

SEQ ID NO: 507238 - DNA, 15 bp, Homo sapiens
aggagggcagggtga

SEQ ID NO: 507239 - DNA, 15 bp, Homo sapiens
gaggagggcagggtg

SEQ ID NO: 507240 - DNA, 15 bp, Homo sapiens
tgaggagggcagggt

SEQ ID NO: 507241 - DNA, 15 bp, Homo sapiens
ctgaggagggcaggg

SEQ ID NO: 507242 - DNA, 15 bp, Homo sapiens
cctgaggagggcagg

SEQ ID NO: 507243 - DNA, 15 bp, Homo sapiens
ccctgaggagggcag

SEQ ID NO: 507244 - DNA, 15 bp, Homo sapiens
tccctgaggagggca

SEQ ID NO: 507245 - DNA, 15 bp, Homo sapiens
ctccctgaggagggc

SEQ ID NO: 507246 - DNA, 15 bp, Homo sapiens
tctccctgaggaggg

SEQ ID NO: 507247 - DNA, 15 bp, Homo sapiens
gtctccctgaggagg

SEQ ID NO: 507248 - DNA, 15 bp, Homo sapiens
ggtctccctgaggag

SEQ ID NO: 507249 - DNA, 15 bp, Homo sapiens
gggtctccctgagga

SEQ ID NO: 507250 - DNA, 15 bp, Homo sapiens
ggggtctccctgagg

SEQ ID NO: 507251 - DNA, 15 bp, Homo sapiens
aggggtctccctgag

SEQ ID NO: 507252 - DNA, 15 bp, Homo sapiens
gaggggtctccctga

SEQ ID NO: 507253 - DNA, 15 bp, Homo sapiens
ggaggggtctccctg

SEQ ID NO: 507254 - DNA, 15 bp, Homo sapiens
aggaggggtctccct

SEQ ID NO: 507255 - DNA, 15 bp, Homo sapiens
caggaggggtctccc

SEQ ID NO: 507256 - DNA, 15 bp, Homo sapiens
gcaggaggggtctcc

SEQ ID NO: 507257 - DNA, 15 bp, Homo sapiens
ggcaggaggggtctc

SEQ ID NO: 507258 - DNA, 15 bp, Homo sapiens
aggcaggaggggtct

SEQ ID NO: 507259 - DNA, 15 bp, Homo sapiens
gaggcaggaggggtc

SEQ ID NO: 507260 - DNA, 15 bp, Homo sapiens
ggaggcaggaggggt

SEQ ID NO: 507261 - DNA, 15 bp, Homo sapiens
gggaggcaggagggg

SEQ ID NO: 507262 - DNA, 15 bp, Homo sapiens
ggggaggcaggaggg

SEQ ID NO: 507263 - DNA, 15 bp, Homo sapiens
tggggaggcaggagg

SEQ ID NO: 507264 - DNA, 15 bp, Homo sapiens
ctggggaggcaggag

SEQ ID NO: 507265 - DNA, 15 bp, Homo sapiens
actggggaggcagga

SEQ ID NO: 507266 - DNA, 15 bp, Homo sapiens
cactggggaggcagg

SEQ ID NO: 507267 - DNA, 15 bp, Homo sapiens
acactggggaggcag

SEQ ID NO: 507268 - DNA, 15 bp, Homo sapiens
tacactggggaggca

SEQ ID NO: 507269 - DNA, 15 bp, Homo sapiens
ctacactggggaggc

SEQ ID NO: 507270 - DNA, 15 bp, Homo sapiens
cctacactggggagg

SEQ ID NO: 507271 - DNA, 15 bp, Homo sapiens
acctacactggggag

SEQ ID NO: 507272 - DNA, 15 bp, Homo sapiens
tacctacactgggga

SEQ ID NO: 507273 - DNA, 15 bp, Homo sapiens
atacctacactgggg

SEQ ID NO: 507274 - DNA, 15 bp, Homo sapiens
catacctacactggg

SEQ ID NO: 507275 - DNA, 15 bp, Homo sapiens
acatacctacactgg

SEQ ID NO: 507276 - DNA, 15 bp, Homo sapiens
cacatacctacactg

SEQ ID NO: 507277 - DNA, 15 bp, Homo sapiens
tcacatacctacact

SEQ ID NO: 507278 - DNA, 15 bp, Homo sapiens
ctcacatacctacac

SEQ ID NO: 507279 - DNA, 15 bp, Homo sapiens
tctcacatacctaca

SEQ ID NO: 507280 - DNA, 15 bp, Homo sapiens
gtctcacatacctac

SEQ ID NO: 507281 - DNA, 15 bp, Homo sapiens
ggtctcacataccta

SEQ ID NO: 507282 - DNA, 15 bp, Homo sapiens
gggtctcacatacct

SEQ ID NO: 507283 - DNA, 15 bp, Homo sapiens
agggtctcacatacc

SEQ ID NO: 507284 - DNA, 15 bp, Homo sapiens
gagggtctcacatac

SEQ ID NO: 507285 - DNA, 15 bp, Homo sapiens
tgagggtctcacata

SEQ ID NO: 507286 - DNA, 15 bp, Homo sapiens
atgagggtctcacat

SEQ ID NO: 507287 - DNA, 15 bp, Homo sapiens
aatgagggtctcaca

SEQ ID NO: 507288 - DNA, 15 bp, Homo sapiens
taatgagggtctcac

SEQ ID NO: 507289 - DNA, 15 bp, Homo sapiens
ctaatgagggtctca

SEQ ID NO: 507290 - DNA, 15 bp, Homo sapiens
cctaatgagggtctc

SEQ ID NO: 507291 - DNA, 15 bp, Homo sapiens
tcctaatgagggtct

SEQ ID NO: 507292 - DNA, 15 bp, Homo sapiens
gtcctaatgagggtc

SEQ ID NO: 507293 - DNA, 15 bp, Homo sapiens
ggtcctaatgagggt

SEQ ID NO: 507294 - DNA, 15 bp, Homo sapiens
gggtcctaatgaggg

SEQ ID NO: 507295 - DNA, 15 bp, Homo sapiens
ggggtcctaatgagg

SEQ ID NO: 507296 - DNA, 15 bp, Homo sapiens
tggggtcctaatgag

SEQ ID NO: 507297 - DNA, 15 bp, Homo sapiens
ttggggtcctaatga

SEQ ID NO: 507298 - DNA, 15 bp, Homo sapiens
cttggggtcctaatg

SEQ ID NO: 507299 - DNA, 15 bp, Homo sapiens
tcttggggtcctaat

SEQ ID NO: 507300 - DNA, 15 bp, Homo sapiens
atcttggggtcctaa

SEQ ID NO: 507301 - DNA, 15 bp, Homo sapiens
gatcttggggtccta

SEQ ID NO: 507302 - DNA, 15 bp, Homo sapiens
tgatcttggggtcct

SEQ ID NO: 507303 - DNA, 15 bp, Homo sapiens
atgatcttggggtcc

SEQ ID NO: 507304 - DNA, 15 bp, Homo sapiens
catgatcttggggtc

SEQ ID NO: 507305 - DNA, 15 bp, Homo sapiens
acatgatcttggggt

SEQ ID NO: 507306 - DNA, 15 bp, Homo sapiens
cacatgatcttgggg

SEQ ID NO: 507307 - DNA, 15 bp, Homo sapiens
gcacatgatcttggg

SEQ ID NO: 507308 - DNA, 15 bp, Homo sapiens
tgcacatgatcttgg

SEQ ID NO: 507309 - DNA, 15 bp, Homo sapiens
ctgcacatgatcttg

SEQ ID NO: 507310 - DNA, 15 bp, Homo sapiens
cctgcacatgatctt

SEQ ID NO: 507311 - DNA, 15 bp, Homo sapiens
tcctgcacatgatct

SEQ ID NO: 507312 - DNA, 15 bp, Homo sapiens
ttcctgcacatgatc

SEQ ID NO: 507313 - DNA, 15 bp, Homo sapiens
gttcctgcacatgat

SEQ ID NO: 507314 - DNA, 15 bp, Homo sapiens
tgttcctgcacatga

SEQ ID NO: 507315 - DNA, 15 bp, Homo sapiens
atgttcctgcacatg

SEQ ID NO: 507316 - DNA, 15 bp, Homo sapiens
gatgttcctgcacat

SEQ ID NO: 507317 - DNA, 15 bp, Homo sapiens
tgatgttcctgcaca

SEQ ID NO: 507318 - DNA, 15 bp, Homo sapiens
ttgatgttcctgcac

SEQ ID NO: 507319 - DNA, 15 bp, Homo sapiens
cttgatgttcctgca

SEQ ID NO: 507320 - DNA, 15 bp, Homo sapiens
gcttgatgttcctgc

SEQ ID NO: 507321 - DNA, 15 bp, Homo sapiens
tgcttgatgttcctg

SEQ ID NO: 507322 - DNA, 15 bp, Homo sapiens
atgcttgatgttcct

SEQ ID NO: 507323 - DNA, 15 bp, Homo sapiens
gatgcttgatgttcc

SEQ ID NO: 507324 - DNA, 15 bp, Homo sapiens
agatgcttgatgttc

SEQ ID NO: 507325 - DNA, 15 bp, Homo sapiens
aagatgcttgatgtt

SEQ ID NO: 507326 - DNA, 15 bp, Homo sapiens
taagatgcttgatgt

SEQ ID NO: 507327 - DNA, 15 bp, Homo sapiens
ataagatgcttgatg

SEQ ID NO: 507328 - DNA, 15 bp, Homo sapiens
aataagatgcttgat

SEQ ID NO: 507329 - DNA, 15 bp, Homo sapiens
gaataagatgcttga

SEQ ID NO: 507330 - DNA, 15 bp, Homo sapiens
agaataagatgcttg

SEQ ID NO: 507331 - DNA, 15 bp, Homo sapiens
aagaataagatgctt

SEQ ID NO: 507332 - DNA, 15 bp, Homo sapiens
caagaataagatgct

SEQ ID NO: 507333 - DNA, 15 bp, Homo sapiens
acaagaataagatgc

SEQ ID NO: 507334 - DNA, 15 bp, Homo sapiens
tacaagaataagatg

SEQ ID NO: 507335 - DNA, 15 bp, Homo sapiens
atacaagaataagat

SEQ ID NO: 507336 - DNA, 15 bp, Homo sapiens
aatacaagaataaga

SEQ ID NO: 507337 - DNA, 15 bp, Homo sapiens
aaatacaagaataag

SEQ ID NO: 507338 - DNA, 15 bp, Homo sapiens
taaatacaagaataa

SEQ ID NO: 507339 - DNA, 15 bp, Homo sapiens
gtaaatacaagaata

SEQ ID NO: 507340 - DNA, 15 bp, Homo sapiens
tgtaaatacaagaat

SEQ ID NO: 507341 - DNA, 15 bp, Homo sapiens
ttgtaaatacaagaa

SEQ ID NO: 507342 - DNA, 15 bp, Homo sapiens
gttgtaaatacaaga

SEQ ID NO: 507343 - DNA, 15 bp, Homo sapiens
ggttgtaaatacaag

SEQ ID NO: 507344 - DNA, 15 bp, Homo sapiens
aggttgtaaatacaa

SEQ ID NO: 507345 - DNA, 15 bp, Homo sapiens
caggttgtaaataca

SEQ ID NO: 507346 - DNA, 15 bp, Homo sapiens
ccaggttgtaaatac

SEQ ID NO: 507347 - DNA, 15 bp, Homo sapiens
accaggttgtaaata

SEQ ID NO: 507348 - DNA, 15 bp, Homo sapiens
caccaggttgtaaat

SEQ ID NO: 507349 - DNA, 15 bp, Homo sapiens
acaccaggttgtaaa

SEQ ID NO: 507350 - DNA, 15 bp, Homo sapiens
cacaccaggttgtaa

SEQ ID NO: 507351 - DNA, 15 bp, Homo sapiens
tcacaccaggttgta

SEQ ID NO: 507352 - DNA, 15 bp, Homo sapiens
gtcacaccaggttgt

SEQ ID NO: 507353 - DNA, 15 bp, Homo sapiens
agtcacaccaggttg

SEQ ID NO: 507354 - DNA, 15 bp, Homo sapiens
aagtcacaccaggtt

SEQ ID NO: 507355 - DNA, 15 bp, Homo sapiens
aaagtcacaccaggt

SEQ ID NO: 507356 - DNA, 15 bp, Homo sapiens
taaagtcacaccagg

SEQ ID NO: 507357 - DNA, 15 bp, Homo sapiens
ataaagtcacaccag

SEQ ID NO: 507358 - DNA, 15 bp, Homo sapiens
aataaagtcacacca

SEQ ID NO: 507359 - DNA, 15 bp, Homo sapiens
taataaagtcacacc

SEQ ID NO: 507360 - DNA, 15 bp, Homo sapiens
ataataaagtcacac

SEQ ID NO: 507361 - DNA, 15 bp, Homo sapiens
gataataaagtcaca

SEQ ID NO: 507362 - DNA, 15 bp, Homo sapiens
agataataaagtcac

SEQ ID NO: 507363 - DNA, 15 bp, Homo sapiens
tagataataaagtca

SEQ ID NO: 507364 - DNA, 15 bp, Homo sapiens
gtagataataaagtc

SEQ ID NO: 507365 - DNA, 15 bp, Homo sapiens
agtagataataaagt

SEQ ID NO: 507366 - DNA, 15 bp, Homo sapiens
aagtagataataaag

SEQ ID NO: 507367 - DNA, 15 bp, Homo sapiens
aaagtagataataaa

SEQ ID NO: 507368 - DNA, 15 bp, Homo sapiens
aaaagtagataataa

SEQ ID NO: 507369 - DNA, 15 bp, Homo sapiens
gaaaagtagataata

SEQ ID NO: 507370 - DNA, 15 bp, Homo sapiens
agaaaagtagataat

SEQ ID NO: 507371 - DNA, 15 bp, Homo sapiens
aagaaaagtagataa

SEQ ID NO: 507372 - DNA, 15 bp, Homo sapiens
gaagaaaagtagata

SEQ ID NO: 507373 - DNA, 15 bp, Homo sapiens
agaagaaaagtagat

SEQ ID NO: 507374 - DNA, 15 bp, Homo sapiens
cagaagaaaagtaga

SEQ ID NO: 507375 - DNA, 15 bp, Homo sapiens
acagaagaaaagtag

SEQ ID NO: 507376 - DNA, 15 bp, Homo sapiens
aacagaagaaaagta

SEQ ID NO: 507377 - DNA, 15 bp, Homo sapiens
aaacagaagaaaagt

SEQ ID NO: 507378 - DNA, 15 bp, Homo sapiens
gaaacagaagaaaag

SEQ ID NO: 507379 - DNA, 15 bp, Homo sapiens
agaaacagaagaaaa

SEQ ID NO: 507380 - DNA, 15 bp, Homo sapiens
aagaaacagaagaaa

SEQ ID NO: 507381 - DNA, 15 bp, Homo sapiens
gaagaaacagaagaa

SEQ ID NO: 507382 - DNA, 15 bp, Homo sapiens
tgaagaaacagaaga

SEQ ID NO: 507383 - DNA, 15 bp, Homo sapiens
atgaagaaacagaag

SEQ ID NO: 507384 - DNA, 15 bp, Homo sapiens
gatgaagaaacagaa

SEQ ID NO: 507385 - DNA, 15 bp, Homo sapiens
ggatgaagaaacaga

SEQ ID NO: 507386 - DNA, 15 bp, Homo sapiens
aggatgaagaaacag

SEQ ID NO: 507387 - DNA, 15 bp, Homo sapiens
aaggatgaagaaaca

SEQ ID NO: 507388 - DNA, 15 bp, Homo sapiens
gaaggatgaagaaac

SEQ ID NO: 507389 - DNA, 15 bp, Homo sapiens
ggaaggatgaagaaa

SEQ ID NO: 507390 - DNA, 15 bp, Homo sapiens
gggaaggatgaagaa

SEQ ID NO: 507391 - DNA, 15 bp, Homo sapiens
ggggaaggatgaaga

SEQ ID NO: 507392 - DNA, 15 bp, Homo sapiens
tggggaaggatgaag

SEQ ID NO: 507393 - DNA, 15 bp, Homo sapiens
atggggaaggatgaa

SEQ ID NO: 507394 - DNA, 15 bp, Homo sapiens
aatggggaaggatga

SEQ ID NO: 507395 - DNA, 15 bp, Homo sapiens
aaatggggaaggatg

SEQ ID NO: 507396 - DNA, 15 bp, Homo sapiens
aaaatggggaaggat

SEQ ID NO: 507397 - DNA, 15 bp, Homo sapiens
gaaaatggggaagga

SEQ ID NO: 507398 - DNA, 15 bp, Homo sapiens
ggaaaatggggaagg

SEQ ID NO: 507399 - DNA, 15 bp, Homo sapiens
tggaaaatggggaag

SEQ ID NO: 507400 - DNA, 15 bp, Homo sapiens
atggaaaatggggaa

SEQ ID NO: 507401 - DNA, 15 bp, Homo sapiens
aatggaaaatgggga

SEQ ID NO: 507402 - DNA, 15 bp, Homo sapiens
aaatggaaaatgggg

SEQ ID NO: 507403 - DNA, 15 bp, Homo sapiens
gaaatggaaaatggg

SEQ ID NO: 507404 - DNA, 15 bp, Homo sapiens
agaaatggaaaatgg

SEQ ID NO: 507405 - DNA, 15 bp, Homo sapiens
aagaaatggaaaatg

SEQ ID NO: 507406 - DNA, 15 bp, Homo sapiens
aaagaaatggaaaat

SEQ ID NO: 507407 - DNA, 15 bp, Homo sapiens
taaagaaatggaaaa

SEQ ID NO: 507408 - DNA, 15 bp, Homo sapiens
ataaagaaatggaaa

SEQ ID NO: 507409 - DNA, 15 bp, Homo sapiens
aataaagaaatggaa

SEQ ID NO: 507410 - DNA, 15 bp, Homo sapiens
gaataaagaaatgga

SEQ ID NO: 507411 - DNA, 15 bp, Homo sapiens
ggaataaagaaatgg

SEQ ID NO: 507412 - DNA, 15 bp, Homo sapiens
tggaataaagaaatg

SEQ ID NO: 507413 - DNA, 15 bp, Homo sapiens
ttggaataaagaaat

SEQ ID NO: 507414 - DNA, 15 bp, Homo sapiens
attggaataaagaaa

SEQ ID NO: 507415 - DNA, 15 bp, Homo sapiens
cattggaataaagaa

SEQ ID NO: 507416 - DNA, 15 bp, Homo sapiens
gcattggaataaaga

SEQ ID NO: 507417 - DNA, 15 bp, Homo sapiens
ggcattggaataaag

SEQ ID NO: 507418 - DNA, 15 bp, Homo sapiens
cggcattggaataaa

SEQ ID NO: 507419 - DNA, 15 bp, Homo sapiens
tcggcattggaataa

SEQ ID NO: 507420 - DNA, 15 bp, Homo sapiens
atcggcattggaata

SEQ ID NO: 507421 - DNA, 15 bp, Homo sapiens
catcggcattggaat

SEQ ID NO: 507422 - DNA, 15 bp, Homo sapiens
acatcggcattggaa

SEQ ID NO: 507423 - DNA, 15 bp, Homo sapiens
aacatcggcattgga

SEQ ID NO: 507424 - DNA, 15 bp, Homo sapiens
aaacatcggcattgg

SEQ ID NO: 507425 - DNA, 15 bp, Homo sapiens
aaaacatcggcattg

SEQ ID NO: 507426 - DNA, 15 bp, Homo sapiens
gaaaacatcggcatt

SEQ ID NO: 507427 - DNA, 15 bp, Homo sapiens
agaaaacatcggcat

SEQ ID NO: 507428 - DNA, 15 bp, Homo sapiens
aagaaaacatcggca

SEQ ID NO: 507429 - DNA, 15 bp, Homo sapiens
aaagaaaacatcggc

SEQ ID NO: 507430 - DNA, 15 bp, Homo sapiens
caaagaaaacatcgg

SEQ ID NO: 507431 - DNA, 15 bp, Homo sapiens
gcaaagaaaacatcg

SEQ ID NO: 507432 - DNA, 15 bp, Homo sapiens
agcaaagaaaacatc

SEQ ID NO: 507433 - DNA, 15 bp, Homo sapiens
aagcaaagaaaacat

SEQ ID NO: 507434 - DNA, 15 bp, Homo sapiens
aaagcaaagaaaaca

SEQ ID NO: 507435 - DNA, 15 bp, Homo sapiens
gaaagcaaagaaaac

SEQ ID NO: 507436 - DNA, 15 bp, Homo sapiens
agaaagcaaagaaaa

SEQ ID NO: 507437 - DNA, 15 bp, Homo sapiens
aagaaagcaaagaaa

SEQ ID NO: 507438 - DNA, 15 bp, Homo sapiens
caagaaagcaaagaa

SEQ ID NO: 507439 - DNA, 15 bp, Homo sapiens
acaagaaagcaaaga

SEQ ID NO: 507440 - DNA, 15 bp, Homo sapiens
gacaagaaagcaaag

SEQ ID NO: 507441 - DNA, 15 bp, Homo sapiens
ggacaagaaagcaaa

SEQ ID NO: 507442 - DNA, 15 bp, Homo sapiens
tggacaagaaagcaa

SEQ ID NO: 507443 - DNA, 15 bp, Homo sapiens
ttggacaagaaagca

SEQ ID NO: 507444 - DNA, 15 bp, Homo sapiens
gttggacaagaaagc

SEQ ID NO: 507445 - DNA, 15 bp, Homo sapiens
agttggacaagaaag

SEQ ID NO: 507446 - DNA, 15 bp, Homo sapiens
gagttggacaagaaa

SEQ ID NO: 507447 - DNA, 15 bp, Homo sapiens
ggagttggacaagaa

SEQ ID NO: 507448 - DNA, 15 bp, Homo sapiens
tggagttggacaaga

SEQ ID NO: 507449 - DNA, 15 bp, Homo sapiens
ctggagttggacaag

SEQ ID NO: 507450 - DNA, 15 bp, Homo sapiens
actggagttggacaa

SEQ ID NO: 507451 - DNA, 15 bp, Homo sapiens
gactggagttggaca

SEQ ID NO: 507452 - DNA, 15 bp, Homo sapiens
tgactggagttggac

SEQ ID NO: 507453 - DNA, 15 bp, Homo sapiens
atgactggagttgga

SEQ ID NO: 507454 - DNA, 15 bp, Homo sapiens
catgactggagttgg

SEQ ID NO: 507455 - DNA, 15 bp, Homo sapiens
ccatgactggagttg

SEQ ID NO: 507456 - DNA, 15 bp, Homo sapiens
gccatgactggagtt

SEQ ID NO: 507457 - DNA, 15 bp, Homo sapiens
agccatgactggagt

SEQ ID NO: 507458 - DNA, 15 bp, Homo sapiens
cagccatgactggag

SEQ ID NO: 507459 - DNA, 15 bp, Homo sapiens
gcagccatgactgga

SEQ ID NO: 507460 - DNA, 15 bp, Homo sapiens
tgcagccatgactgg

SEQ ID NO: 507461 - DNA, 15 bp, Homo sapiens
ttgcagccatgactg

SEQ ID NO: 507462 - DNA, 15 bp, Homo sapiens
attgcagccatgact

SEQ ID NO: 507463 - DNA, 15 bp, Homo sapiens
gattgcagccatgac

SEQ ID NO: 507464 - DNA, 15 bp, Homo sapiens
ggattgcagccatga

SEQ ID NO: 507465 - DNA, 15 bp, Homo sapiens
aggattgcagccatg

SEQ ID NO: 507466 - DNA, 15 bp, Homo sapiens
taggattgcagccat

SEQ ID NO: 507467 - DNA, 15 bp, Homo sapiens
gtaggattgcagcca

SEQ ID NO: 507468 - DNA, 15 bp, Homo sapiens
agtaggattgcagcc

SEQ ID NO: 507469 - DNA, 15 bp, Homo sapiens
aagtaggattgcagc

SEQ ID NO: 507470 - DNA, 15 bp, Homo sapiens
aaagtaggattgcag

SEQ ID NO: 507471 - DNA, 15 bp, Homo sapiens
taaagtaggattgca

SEQ ID NO: 507472 - DNA, 15 bp, Homo sapiens
ataaagtaggattgc

SEQ ID NO: 507473 - DNA, 15 bp, Homo sapiens
tataaagtaggattg

SEQ ID NO: 507474 - DNA, 15 bp, Homo sapiens
ctataaagtaggatt

SEQ ID NO: 507475 - DNA, 15 bp, Homo sapiens
cctataaagtaggat

SEQ ID NO: 507476 - DNA, 15 bp, Homo sapiens
gcctataaagtagga

SEQ ID NO: 507477 - DNA, 15 bp, Homo sapiens
tgcctataaagtagg

SEQ ID NO: 507478 - DNA, 15 bp, Homo sapiens
ttgcctataaagtag

SEQ ID NO: 507479 - DNA, 15 bp, Homo sapiens
attgcctataaagta

SEQ ID NO: 507480 - DNA, 15 bp, Homo sapiens
aattgcctataaagt

SEQ ID NO: 507481 - DNA, 15 bp, Homo sapiens
gaattgcctataaag

SEQ ID NO: 507482 - DNA, 15 bp, Homo sapiens
cgaattgcctataaa

SEQ ID NO: 507483 - DNA, 15 bp, Homo sapiens
ccgaattgcctataa

SEQ ID NO: 507484 - DNA, 15 bp, Homo sapiens
accgaattgcctata

SEQ ID NO: 507485 - DNA, 15 bp, Homo sapiens
taccgaattgcctat

SEQ ID NO: 507486 - DNA, 15 bp, Homo sapiens
ataccgaattgccta

SEQ ID NO: 507487 - DNA, 15 bp, Homo sapiens
aataccgaattgcct

SEQ ID NO: 507488 - DNA, 15 bp, Homo sapiens
caataccgaattgcc

SEQ ID NO: 507489 - DNA, 15 bp, Homo sapiens
acaataccgaattgc

SEQ ID NO: 507490 - DNA, 15 bp, Homo sapiens
aacaataccgaattg

SEQ ID NO: 507491 - DNA, 15 bp, Homo sapiens
aaacaataccgaatt

SEQ ID NO: 507492 - DNA, 15 bp, Homo sapiens
taaacaataccgaat

SEQ ID NO: 507493 - DNA, 15 bp, Homo sapiens
ataaacaataccgaa

SEQ ID NO: 507494 - DNA, 15 bp, Homo sapiens
gataaacaataccga

SEQ ID NO: 507495 - DNA, 15 bp, Homo sapiens
ggataaacaataccg

SEQ ID NO: 507496 - DNA, 15 bp, Homo sapiens
aggataaacaatacc

SEQ ID NO: 507497 - DNA, 15 bp, Homo sapiens
taggataaacaatac

SEQ ID NO: 507498 - DNA, 15 bp, Homo sapiens
ttaggataaacaata

SEQ ID NO: 507499 - DNA, 15 bp, Homo sapiens
attaggataaacaat

SEQ ID NO: 507500 - DNA, 15 bp, Homo sapiens
cattaggataaacaa

SEQ ID NO: 507501 - DNA, 15 bp, Homo sapiens
acattaggataaaca

SEQ ID NO: 507502 - DNA, 15 bp, Homo sapiens
gacattaggataaac

SEQ ID NO: 507503 - DNA, 15 bp, Homo sapiens
tgacattaggataaa

SEQ ID NO: 507504 - DNA, 15 bp, Homo sapiens
ctgacattaggataa

SEQ ID NO: 507505 - DNA, 15 bp, Homo sapiens
actgacattaggata

SEQ ID NO: 507506 - DNA, 15 bp, Homo sapiens
tactgacattaggat

SEQ ID NO: 507507 - DNA, 15 bp, Homo sapiens
gtactgacattagga

SEQ ID NO: 507508 - DNA, 15 bp, Homo sapiens
agtactgacattagg

SEQ ID NO: 507509 - DNA, 15 bp, Homo sapiens
tagtactgacattag

SEQ ID NO: 507510 - DNA, 15 bp, Homo sapiens
ttagtactgacatta

SEQ ID NO: 507511 - DNA, 15 bp, Homo sapiens
tttagtactgacatt

SEQ ID NO: 507512 - DNA, 15 bp, Homo sapiens
ttttagtactgacat

SEQ ID NO: 507513 - DNA, 15 bp, Homo sapiens
cttttagtactgaca

SEQ ID NO: 507514 - DNA, 15 bp, Homo sapiens
ccttttagtactgac

SEQ ID NO: 507515 - DNA, 15 bp, Homo sapiens
tccttttagtactga

SEQ ID NO: 507516 - DNA, 15 bp, Homo sapiens
ttccttttagtactg

SEQ ID NO: 507517 - DNA, 15 bp, Homo sapiens
tttccttttagtact

SEQ ID NO: 507518 - DNA, 15 bp, Homo sapiens
ttttccttttagtac

SEQ ID NO: 507519 - DNA, 15 bp, Homo sapiens
cttttccttttagta

SEQ ID NO: 507520 - DNA, 15 bp, Homo sapiens
acttttccttttagt

SEQ ID NO: 507521 - DNA, 15 bp, Homo sapiens
tacttttccttttag

SEQ ID NO: 507522 - DNA, 15 bp, Homo sapiens
ctacttttcctttta

SEQ ID NO: 507523 - DNA, 15 bp, Homo sapiens
tctacttttcctttt

SEQ ID NO: 507524 - DNA, 15 bp, Homo sapiens
ctctacttttccttt

SEQ ID NO: 507525 - DNA, 15 bp, Homo sapiens
tctctacttttcctt

SEQ ID NO: 507526 - DNA, 15 bp, Homo sapiens
ttctctacttttcct

SEQ ID NO: 507527 - DNA, 15 bp, Homo sapiens
tttctctacttttcc

SEQ ID NO: 507528 - DNA, 15 bp, Homo sapiens
ctttctctacttttc

SEQ ID NO: 507529 - DNA, 15 bp, Homo sapiens
actttctctactttt

SEQ ID NO: 507530 - DNA, 15 bp, Homo sapiens
cactttctctacttt

SEQ ID NO: 507531 - DNA, 15 bp, Homo sapiens
ccactttctctactt

SEQ ID NO: 507532 - DNA, 15 bp, Homo sapiens
tccactttctctact

SEQ ID NO: 507533 - DNA, 15 bp, Homo sapiens
atccactttctctac

SEQ ID NO: 507534 - DNA, 15 bp, Homo sapiens
tatccactttctcta

SEQ ID NO: 507535 - DNA, 15 bp, Homo sapiens
ctatccactttctct

SEQ ID NO: 507536 - DNA, 15 bp, Homo sapiens
cctatccactttctc

SEQ ID NO: 507537 - DNA, 15 bp, Homo sapiens
gcctatccactttct

SEQ ID NO: 507538 - DNA, 15 bp, Homo sapiens
agcctatccactttc

SEQ ID NO: 507539 - DNA, 15 bp, Homo sapiens
tagcctatccacttt

SEQ ID NO: 507540 - DNA, 15 bp, Homo sapiens
ttagcctatccactt

SEQ ID NO: 507541 - DNA, 15 bp, Homo sapiens
cttagcctatccact

SEQ ID NO: 507542 - DNA, 15 bp, Homo sapiens
acttagcctatccac

SEQ ID NO: 507543 - DNA, 15 bp, Homo sapiens
tacttagcctatcca

SEQ ID NO: 507544 - DNA, 15 bp, Homo sapiens
ttacttagcctatcc

SEQ ID NO: 507545 - DNA, 15 bp, Homo sapiens
attacttagcctatc

SEQ ID NO: 507546 - DNA, 15 bp, Homo sapiens
tattacttagcctat

SEQ ID NO: 507547 - DNA, 15 bp, Homo sapiens
ttattacttagccta

SEQ ID NO: 507548 - DNA, 15 bp, Homo sapiens
tttattacttagcct

SEQ ID NO: 507549 - DNA, 15 bp, Homo sapiens
ctttattacttagcc

SEQ ID NO: 507550 - DNA, 15 bp, Homo sapiens
tctttattacttagc

SEQ ID NO: 507551 - DNA, 15 bp, Homo sapiens
ttctttattacttag

SEQ ID NO: 507552 - DNA, 15 bp, Homo sapiens
attctttattactta

SEQ ID NO: 507553 - DNA, 15 bp, Homo sapiens
cattctttattactt

SEQ ID NO: 507554 - DNA, 15 bp, Homo sapiens
tcattctttattact

SEQ ID NO: 507555 - DNA, 15 bp, Homo sapiens
ttcattctttattac

SEQ ID NO: 507556 - DNA, 15 bp, Homo sapiens
tttcattctttatta

SEQ ID NO: 507557 - DNA, 15 bp, Homo sapiens
ctttcattctttatt

SEQ ID NO: 507558 - DNA, 15 bp, Homo sapiens
gctttcattctttat

SEQ ID NO: 507559 - DNA, 15 bp, Homo sapiens
ggctttcattcttta

SEQ ID NO: 507560 - DNA, 15 bp, Homo sapiens
tggctttcattcttt

SEQ ID NO: 507561 - DNA, 15 bp, Homo sapiens
ctggctttcattctt

SEQ ID NO: 507562 - DNA, 15 bp, Homo sapiens
actggctttcattct

SEQ ID NO: 507563 - DNA, 15 bp, Homo sapiens
tactggctttcattc

SEQ ID NO: 507564 - DNA, 15 bp, Homo sapiens
ttactggctttcatt

SEQ ID NO: 507565 - DNA, 15 bp, Homo sapiens
cttactggctttcat

SEQ ID NO: 507566 - DNA, 15 bp, Homo sapiens
ccttactggctttca

SEQ ID NO: 507567 - DNA, 15 bp, Homo sapiens
accttactggctttc

SEQ ID NO: 507568 - DNA, 15 bp, Homo sapiens
gaccttactggcttt

SEQ ID NO: 507569 - DNA, 15 bp, Homo sapiens
ggaccttactggctt

SEQ ID NO: 507570 - DNA, 15 bp, Homo sapiens
tggaccttactggct

SEQ ID NO: 507571 - DNA, 15 bp, Homo sapiens
atggaccttactggc

SEQ ID NO: 507572 - DNA, 15 bp, Homo sapiens
tatggaccttactgg

SEQ ID NO: 507573 - DNA, 15 bp, Homo sapiens
atatggaccttactg

SEQ ID NO: 507574 - DNA, 15 bp, Homo sapiens
catatggaccttact

SEQ ID NO: 507575 - DNA, 15 bp, Homo sapiens
ccatatggaccttac

SEQ ID NO: 507576 - DNA, 15 bp, Homo sapiens
cccatatggacctta

SEQ ID NO: 507577 - DNA, 15 bp, Homo sapiens
tcccatatggacctt

SEQ ID NO: 507578 - DNA, 15 bp, Homo sapiens
ctcccatatggacct

SEQ ID NO: 507579 - DNA, 15 bp, Homo sapiens
tctcccatatggacc

SEQ ID NO: 507580 - DNA, 15 bp, Homo sapiens
gtctcccatatggac

SEQ ID NO: 507581 - DNA, 15 bp, Homo sapiens
ggtctcccatatgga

SEQ ID NO: 507582 - DNA, 15 bp, Homo sapiens
tggtctcccatatgg

SEQ ID NO: 507583 - DNA, 15 bp, Homo sapiens
ctggtctcccatatg

SEQ ID NO: 507584 - DNA, 15 bp, Homo sapiens
actggtctcccatat

SEQ ID NO: 507585 - DNA, 15 bp, Homo sapiens
aactggtctcccata

SEQ ID NO: 507586 - DNA, 15 bp, Homo sapiens
caactggtctcccat

SEQ ID NO: 507587 - DNA, 15 bp, Homo sapiens
ccaactggtctccca

SEQ ID NO: 507588 - DNA, 15 bp, Homo sapiens
cccaactggtctccc

SEQ ID NO: 507589 - DNA, 15 bp, Homo sapiens
ccccaactggtctcc

SEQ ID NO: 507590 - DNA, 15 bp, Homo sapiens
tccccaactggtctc

SEQ ID NO: 507591 - DNA, 15 bp, Homo sapiens
ctccccaactggtct

SEQ ID NO: 507592 - DNA, 15 bp, Homo sapiens
actccccaactggtc

SEQ ID NO: 507593 - DNA, 15 bp, Homo sapiens
tactccccaactggt

SEQ ID NO: 507594 - DNA, 15 bp, Homo sapiens
ttactccccaactgg

SEQ ID NO: 507595 - DNA, 15 bp, Homo sapiens
cttactccccaactg

SEQ ID NO: 507596 - DNA, 15 bp, Homo sapiens
tcttactccccaact

SEQ ID NO: 507597 - DNA, 15 bp, Homo sapiens
ttcttactccccaac

SEQ ID NO: 507598 - DNA, 15 bp, Homo sapiens
cttcttactccccaa

SEQ ID NO: 507599 - DNA, 15 bp, Homo sapiens
tcttcttactcccca

SEQ ID NO: 507600 - DNA, 15 bp, Homo sapiens
gtcttcttactcccc

SEQ ID NO: 507601 - DNA, 15 bp, Homo sapiens
ggtcttcttactccc

SEQ ID NO: 507602 - DNA, 15 bp, Homo sapiens
tggtcttcttactcc

SEQ ID NO: 507603 - DNA, 15 bp, Homo sapiens
ctggtcttcttactc

SEQ ID NO: 507604 - DNA, 15 bp, Homo sapiens
tctggtcttcttact

SEQ ID NO: 507605 - DNA, 15 bp, Homo sapiens
ctctggtcttcttac

SEQ ID NO: 507606 - DNA, 15 bp, Homo sapiens
tctctggtcttctta

SEQ ID NO: 507607 - DNA, 15 bp, Homo sapiens
ttctctggtcttctt

SEQ ID NO: 507608 - DNA, 15 bp, Homo sapiens
cttctctggtcttct

SEQ ID NO: 507609 - DNA, 15 bp, Homo sapiens
tcttctctggtcttc

SEQ ID NO: 507610 - DNA, 15 bp, Homo sapiens
ctcttctctggtctt

SEQ ID NO: 507611 - DNA, 15 bp, Homo sapiens
gctcttctctggtct

SEQ ID NO: 507612 - DNA, 15 bp, Homo sapiens
ggctcttctctggtc

SEQ ID NO: 507613 - DNA, 15 bp, Homo sapiens
tggctcttctctggt

SEQ ID NO: 507614 - DNA, 15 bp, Homo sapiens
ttggctcttctctgg

SEQ ID NO: 507615 - DNA, 15 bp, Homo sapiens
cttggctcttctctg

SEQ ID NO: 507616 - DNA, 15 bp, Homo sapiens
ccttggctcttctct

SEQ ID NO: 507617 - DNA, 15 bp, Homo sapiens
accttggctcttctc

SEQ ID NO: 507618 - DNA, 15 bp, Homo sapiens
gaccttggctcttct

SEQ ID NO: 507619 - DNA, 15 bp, Homo sapiens
tgaccttggctcttc

SEQ ID NO: 507620 - DNA, 15 bp, Homo sapiens
ctgaccttggctctt

SEQ ID NO: 507621 - DNA, 15 bp, Homo sapiens
gctgaccttggctct

SEQ ID NO: 507622 - DNA, 15 bp, Homo sapiens
ggctgaccttggctc

SEQ ID NO: 507623 - DNA, 15 bp, Homo sapiens
aggctgaccttggct

SEQ ID NO: 507624 - DNA, 15 bp, Homo sapiens
taggctgaccttggc

SEQ ID NO: 507625 - DNA, 15 bp, Homo sapiens
ataggctgaccttgg

SEQ ID NO: 507626 - DNA, 15 bp, Homo sapiens
gataggctgaccttg

SEQ ID NO: 507627 - DNA, 15 bp, Homo sapiens
tgataggctgacctt

SEQ ID NO: 507628 - DNA, 15 bp, Homo sapiens
ttgataggctgacct

SEQ ID NO: 507629 - DNA, 15 bp, Homo sapiens
tttgataggctgacc

SEQ ID NO: 507630 - DNA, 15 bp, Homo sapiens
ctttgataggctgac

SEQ ID NO: 507631 - DNA, 15 bp, Homo sapiens
cctttgataggctga

SEQ ID NO: 507632 - DNA, 15 bp, Homo sapiens
tcctttgataggctg

SEQ ID NO: 507633 - DNA, 15 bp, Homo sapiens
gtcctttgataggct

SEQ ID NO: 507634 - DNA, 15 bp, Homo sapiens
agtcctttgataggc

SEQ ID NO: 507635 - DNA, 15 bp, Homo sapiens
tagtcctttgatagg

SEQ ID NO: 507636 - DNA, 15 bp, Homo sapiens
ctagtcctttgatag

SEQ ID NO: 507637 - DNA, 15 bp, Homo sapiens
cctagtcctttgata

SEQ ID NO: 507638 - DNA, 15 bp, Homo sapiens
ccctagtcctttgat

SEQ ID NO: 507639 - DNA, 15 bp, Homo sapiens
tccctagtcctttga

SEQ ID NO: 507640 - DNA, 15 bp, Homo sapiens
ctccctagtcctttg

SEQ ID NO: 507641 - DNA, 15 bp, Homo sapiens
tctccctagtccttt

SEQ ID NO: 507642 - DNA, 15 bp, Homo sapiens
ttctccctagtcctt

SEQ ID NO: 507643 - DNA, 15 bp, Homo sapiens
tttctccctagtcct

SEQ ID NO: 507644 - DNA, 15 bp, Homo sapiens
ttttctccctagtcc

SEQ ID NO: 507645 - DNA, 15 bp, Homo sapiens
tttttctccctagtc

SEQ ID NO: 507646 - DNA, 15 bp, Homo sapiens
gtttttctccctagt

SEQ ID NO: 507647 - DNA, 15 bp, Homo sapiens
cgtttttctccctag

SEQ ID NO: 507648 - DNA, 15 bp, Homo sapiens
tcgtttttctcccta

SEQ ID NO: 507649 - DNA, 15 bp, Homo sapiens
atcgtttttctccct

SEQ ID NO: 507650 - DNA, 15 bp, Homo sapiens
tatcgtttttctccc

SEQ ID NO: 507651 - DNA, 15 bp, Homo sapiens
ctatcgtttttctcc

SEQ ID NO: 507652 - DNA, 15 bp, Homo sapiens
tctatcgtttttctc

SEQ ID NO: 507653 - DNA, 15 bp, Homo sapiens
ttctatcgtttttct

SEQ ID NO: 507654 - DNA, 15 bp, Homo sapiens
cttctatcgtttttc

SEQ ID NO: 507655 - DNA, 15 bp, Homo sapiens
gcttctatcgttttt

SEQ ID NO: 507656 - DNA, 15 bp, Homo sapiens
tgcttctatcgtttt

SEQ ID NO: 507657 - DNA, 15 bp, Homo sapiens
ttgcttctatcgttt

SEQ ID NO: 507658 - DNA, 15 bp, Homo sapiens
tttgcttctatcgtt

SEQ ID NO: 507659 - DNA, 15 bp, Homo sapiens
ctttgcttctatcgt

SEQ ID NO: 507660 - DNA, 15 bp, Homo sapiens
tctttgcttctatcg

SEQ ID NO: 507661 - DNA, 15 bp, Homo sapiens
ctctttgcttctatc

SEQ ID NO: 507662 - DNA, 15 bp, Homo sapiens
tctctttgcttctat

SEQ ID NO: 507663 - DNA, 15 bp, Homo sapiens
ttctctttgcttcta

SEQ ID NO: 507664 - DNA, 15 bp, Homo sapiens
cttctctttgcttct

SEQ ID NO: 507665 - DNA, 15 bp, Homo sapiens
gcttctctttgcttc

SEQ ID NO: 507666 - DNA, 15 bp, Homo sapiens
ggcttctctttgctt

SEQ ID NO: 507667 - DNA, 15 bp, Homo sapiens
cggcttctctttgct

SEQ ID NO: 507668 - DNA, 15 bp, Homo sapiens
gcggcttctctttgc

SEQ ID NO: 507669 - DNA, 15 bp, Homo sapiens
tgcggcttctctttg

SEQ ID NO: 507670 - DNA, 15 bp, Homo sapiens
ctgcggcttctcttt

SEQ ID NO: 507671 - DNA, 15 bp, Homo sapiens
gctgcggcttctctt

SEQ ID NO: 507672 - DNA, 15 bp, Homo sapiens
ggctgcggcttctct

SEQ ID NO: 507673 - DNA, 15 bp, Homo sapiens
aggctgcggcttctc

SEQ ID NO: 507674 - DNA, 15 bp, Homo sapiens
caggctgcggcttct

SEQ ID NO: 507675 - DNA, 15 bp, Homo sapiens
ccaggctgcggcttc

SEQ ID NO: 507676 - DNA, 15 bp, Homo sapiens
tccaggctgcggctt

SEQ ID NO: 507677 - DNA, 15 bp, Homo sapiens
ctccaggctgcggct

SEQ ID NO: 507678 - DNA, 15 bp, Homo sapiens
tctccaggctgcggc

SEQ ID NO: 507679 - DNA, 15 bp, Homo sapiens
ttctccaggctgcgg

SEQ ID NO: 507680 - DNA, 15 bp, Homo sapiens
tttctccaggctgcg

SEQ ID NO: 507681 - DNA, 15 bp, Homo sapiens
ttttctccaggctgc

SEQ ID NO: 507682 - DNA, 15 bp, Homo sapiens
attttctccaggctg

SEQ ID NO: 507683 - DNA, 15 bp, Homo sapiens
gattttctccaggct

SEQ ID NO: 507684 - DNA, 15 bp, Homo sapiens
tgattttctccaggc

SEQ ID NO: 507685 - DNA, 15 bp, Homo sapiens
ttgattttctccagg

SEQ ID NO: 507686 - DNA, 15 bp, Homo sapiens
attgattttctccag

SEQ ID NO: 507687 - DNA, 15 bp, Homo sapiens
aattgattttctcca

SEQ ID NO: 507688 - DNA, 15 bp, Homo sapiens
taattgattttctcc

SEQ ID NO: 507689 - DNA, 15 bp, Homo sapiens
ttaattgattttctc

SEQ ID NO: 507690 - DNA, 15 bp, Homo sapiens
attaattgattttct

SEQ ID NO: 507691 - DNA, 15 bp, Homo sapiens
cattaattgattttc

SEQ ID NO: 507692 - DNA, 15 bp, Homo sapiens
acattaattgatttt

SEQ ID NO: 507693 - DNA, 15 bp, Homo sapiens
gacattaattgattt

SEQ ID NO: 507694 - DNA, 15 bp, Homo sapiens
tgacattaattgatt

SEQ ID NO: 507695 - DNA, 15 bp, Homo sapiens
ctgacattaattgat

SEQ ID NO: 507696 - DNA, 15 bp, Homo sapiens
actgacattaattga

SEQ ID NO: 507697 - DNA, 15 bp, Homo sapiens
tactgacattaattg

SEQ ID NO: 507698 - DNA, 15 bp, Homo sapiens
ctactgacattaatt

SEQ ID NO: 507699 - DNA, 15 bp, Homo sapiens
tctactgacattaat

SEQ ID NO: 507700 - DNA, 15 bp, Homo sapiens
atctactgacattaa

SEQ ID NO: 507701 - DNA, 15 bp, Homo sapiens
catctactgacatta

SEQ ID NO: 507702 - DNA, 15 bp, Homo sapiens
ccatctactgacatt

SEQ ID NO: 507703 - DNA, 15 bp, Homo sapiens
cccatctactgacat

SEQ ID NO: 507704 - DNA, 15 bp, Homo sapiens
ccccatctactgaca

SEQ ID NO: 507705 - DNA, 15 bp, Homo sapiens
tccccatctactgac

SEQ ID NO: 507706 - DNA, 15 bp, Homo sapiens
ctccccatctactga

SEQ ID NO: 507707 - DNA, 15 bp, Homo sapiens
cctccccatctactg

SEQ ID NO: 507708 - DNA, 15 bp, Homo sapiens
tcctccccatctact

SEQ ID NO: 507709 - DNA, 15 bp, Homo sapiens
ctcctccccatctac

SEQ ID NO: 507710 - DNA, 15 bp, Homo sapiens
cctcctccccatcta

SEQ ID NO: 507711 - DNA, 15 bp, Homo sapiens
ccctcctccccatct

SEQ ID NO: 507712 - DNA, 15 bp, Homo sapiens
tccctcctccccatc

SEQ ID NO: 507713 - DNA, 15 bp, Homo sapiens
ctccctcctccccat

SEQ ID NO: 507714 - DNA, 15 bp, Homo sapiens
actccctcctcccca

SEQ ID NO: 507715 - DNA, 15 bp, Homo sapiens
tactccctcctcccc

SEQ ID NO: 507716 - DNA, 15 bp, Homo sapiens
gtactccctcctccc

SEQ ID NO: 507717 - DNA, 15 bp, Homo sapiens
tgtactccctcctcc

SEQ ID NO: 507718 - DNA, 15 bp, Homo sapiens
ctgtactccctcctc

SEQ ID NO: 507719 - DNA, 15 bp, Homo sapiens
gctgtactccctcct

SEQ ID NO: 507720 - DNA, 15 bp, Homo sapiens
ggctgtactccctcc

SEQ ID NO: 507721 - DNA, 15 bp, Homo sapiens
cggctgtactccctc

SEQ ID NO: 507722 - DNA, 15 bp, Homo sapiens
ccggctgtactccct

SEQ ID NO: 507723 - DNA, 15 bp, Homo sapiens
cccggctgtactccc

SEQ ID NO: 507724 - DNA, 15 bp, Homo sapiens
tcccggctgtactcc

SEQ ID NO: 507725 - DNA, 15 bp, Homo sapiens
gtcccggctgtactc

SEQ ID NO: 507726 - DNA, 15 bp, Homo sapiens
ggtcccggctgtact

SEQ ID NO: 507727 - DNA, 15 bp, Homo sapiens
gggtcccggctgtac

SEQ ID NO: 507728 - DNA, 15 bp, Homo sapiens
tgggtcccggctgta

SEQ ID NO: 507729 - DNA, 15 bp, Homo sapiens
ttgggtcccggctgt

SEQ ID NO: 507730 - DNA, 15 bp, Homo sapiens
cttgggtcccggctg

SEQ ID NO: 507731 - DNA, 15 bp, Homo sapiens
ccttgggtcccggct

SEQ ID NO: 507732 - DNA, 15 bp, Homo sapiens
gccttgggtcccggc

SEQ ID NO: 507733 - DNA, 15 bp, Homo sapiens
tgccttgggtcccgg

SEQ ID NO: 507734 - DNA, 15 bp, Homo sapiens
atgccttgggtcccg

SEQ ID NO: 507735 - DNA, 15 bp, Homo sapiens
tatgccttgggtccc

SEQ ID NO: 507736 - DNA, 15 bp, Homo sapiens
atatgccttgggtcc

SEQ ID NO: 507737 - DNA, 15 bp, Homo sapiens
catatgccttgggtc

SEQ ID NO: 507738 - DNA, 15 bp, Homo sapiens
gcatatgccttgggt

SEQ ID NO: 507739 - DNA, 15 bp, Homo sapiens
ggcatatgccttggg

SEQ ID NO: 507740 - DNA, 15 bp, Homo sapiens
aggcatatgccttgg

SEQ ID NO: 507741 - DNA, 15 bp, Homo sapiens
gaggcatatgccttg

SEQ ID NO: 507742 - DNA, 15 bp, Homo sapiens
ggaggcatatgcctt

SEQ ID NO: 507743 - DNA, 15 bp, Homo sapiens
gggaggcatatgcct

SEQ ID NO: 507744 - DNA, 15 bp, Homo sapiens
ggggaggcatatgcc

SEQ ID NO: 507745 - DNA, 15 bp, Homo sapiens
aggggaggcatatgc

SEQ ID NO: 507746 - DNA, 15 bp, Homo sapiens
caggggaggcatatg

SEQ ID NO: 507747 - DNA, 15 bp, Homo sapiens
ccaggggaggcatat

SEQ ID NO: 507748 - DNA, 15 bp, Homo sapiens
tccaggggaggcata

SEQ ID NO: 507749 - DNA, 15 bp, Homo sapiens
ctccaggggaggcat

SEQ ID NO: 507750 - DNA, 15 bp, Homo sapiens
cctccaggggaggca

SEQ ID NO: 507751 - DNA, 15 bp, Homo sapiens
ccctccaggggaggc

SEQ ID NO: 507752 - DNA, 15 bp, Homo sapiens
cccctccaggggagg

SEQ ID NO: 507753 - DNA, 15 bp, Homo sapiens
gcccctccaggggag

SEQ ID NO: 507754 - DNA, 15 bp, Homo sapiens
tgcccctccagggga

SEQ ID NO: 507755 - DNA, 15 bp, Homo sapiens
atgcccctccagggg

SEQ ID NO: 507756 - DNA, 15 bp, Homo sapiens
tatgcccctccaggg

SEQ ID NO: 507757 - DNA, 15 bp, Homo sapiens
ctatgcccctccagg

SEQ ID NO: 507758 - DNA, 15 bp, Homo sapiens
tctatgcccctccag

SEQ ID NO: 507759 - DNA, 15 bp, Homo sapiens
ctctatgcccctcca

SEQ ID NO: 507760 - DNA, 15 bp, Homo sapiens
tctctatgcccctcc

SEQ ID NO: 507761 - DNA, 15 bp, Homo sapiens
ctctctatgcccctc

SEQ ID NO: 507762 - DNA, 15 bp, Homo sapiens
cctctctatgcccct

SEQ ID NO: 507763 - DNA, 15 bp, Homo sapiens
ccctctctatgcccc

SEQ ID NO: 507764 - DNA, 15 bp, Homo sapiens
tccctctctatgccc

SEQ ID NO: 507765 - DNA, 15 bp, Homo sapiens
atccctctctatgcc

SEQ ID NO: 507766 - DNA, 15 bp, Homo sapiens
tatccctctctatgc

SEQ ID NO: 507767 - DNA, 15 bp, Homo sapiens
ttatccctctctatg

SEQ ID NO: 507768 - DNA, 15 bp, Homo sapiens
cttatccctctctat

SEQ ID NO: 507769 - DNA, 15 bp, Homo sapiens
ccttatccctctcta

SEQ ID NO: 507770 - DNA, 15 bp, Homo sapiens
cccttatccctctct

SEQ ID NO: 507771 - DNA, 15 bp, Homo sapiens
ccccttatccctctc

SEQ ID NO: 507772 - DNA, 15 bp, Homo sapiens
cccccttatccctct

SEQ ID NO: 507773 - DNA, 15 bp, Homo sapiens
tcccccttatccctc

SEQ ID NO: 507774 - DNA, 15 bp, Homo sapiens
ttcccccttatccct

SEQ ID NO: 507775 - DNA, 15 bp, Homo sapiens
cttcccccttatccc

SEQ ID NO: 507776 - DNA, 15 bp, Homo sapiens
gcttcccccttatcc

SEQ ID NO: 507777 - DNA, 15 bp, Homo sapiens
tgcttcccccttatc

SEQ ID NO: 507778 - DNA, 15 bp, Homo sapiens
ctgcttcccccttat

SEQ ID NO: 507779 - DNA, 15 bp, Homo sapiens
tctgcttccccctta

SEQ ID NO: 507780 - DNA, 15 bp, Homo sapiens
atctgcttccccctt

SEQ ID NO: 507781 - DNA, 15 bp, Homo sapiens
catctgcttccccct

SEQ ID NO: 507782 - DNA, 15 bp, Homo sapiens
acatctgcttccccc

SEQ ID NO: 507783 - DNA, 15 bp, Homo sapiens
cacatctgcttcccc

SEQ ID NO: 507784 - DNA, 15 bp, Homo sapiens
acacatctgcttccc

SEQ ID NO: 507785 - DNA, 15 bp, Homo sapiens
cacacatctgcttcc

SEQ ID NO: 507786 - DNA, 15 bp, Homo sapiens
acacacatctgcttc

SEQ ID NO: 507787 - DNA, 15 bp, Homo sapiens
tacacacatctgctt

SEQ ID NO: 507788 - DNA, 15 bp, Homo sapiens
atacacacatctgct

SEQ ID NO: 507789 - DNA, 15 bp, Homo sapiens
catacacacatctgc

SEQ ID NO: 507790 - DNA, 15 bp, Homo sapiens
ccatacacacatctg

SEQ ID NO: 507791 - DNA, 15 bp, Homo sapiens
gccatacacacatct

SEQ ID NO: 507792 - DNA, 15 bp, Homo sapiens
tgccatacacacatc

SEQ ID NO: 507793 - DNA, 15 bp, Homo sapiens
ctgccatacacacat

SEQ ID NO: 507794 - DNA, 15 bp, Homo sapiens
actgccatacacaca

SEQ ID NO: 507795 - DNA, 15 bp, Homo sapiens
gactgccatacacac

SEQ ID NO: 507796 - DNA, 15 bp, Homo sapiens
agactgccatacaca

SEQ ID NO: 507797 - DNA, 15 bp, Homo sapiens
cagactgccatacac

SEQ ID NO: 507798 - DNA, 15 bp, Homo sapiens
acagactgccataca

SEQ ID NO: 507799 - DNA, 15 bp, Homo sapiens
gacagactgccatac

SEQ ID NO: 507800 - DNA, 15 bp, Homo sapiens
agacagactgccata

SEQ ID NO: 507801 - DNA, 15 bp, Homo sapiens
gagacagactgccat

SEQ ID NO: 507802 - DNA, 15 bp, Homo sapiens
agagacagactgcca

SEQ ID NO: 507803 - DNA, 15 bp, Homo sapiens
cagagacagactgcc

SEQ ID NO: 507804 - DNA, 15 bp, Homo sapiens
tcagagacagactgc

SEQ ID NO: 507805 - DNA, 15 bp, Homo sapiens
ctcagagacagactg

SEQ ID NO: 507806 - DNA, 15 bp, Homo sapiens
gctcagagacagact

SEQ ID NO: 507807 - DNA, 15 bp, Homo sapiens
agctcagagacagac

SEQ ID NO: 507808 - DNA, 15 bp, Homo sapiens
cagctcagagacaga

SEQ ID NO: 507809 - DNA, 15 bp, Homo sapiens
tcagctcagagacag

SEQ ID NO: 507810 - DNA, 15 bp, Homo sapiens
ctcagctcagagaca

SEQ ID NO: 507811 - DNA, 15 bp, Homo sapiens
cctcagctcagagac

SEQ ID NO: 507812 - DNA, 15 bp, Homo sapiens
ccctcagctcagaga

SEQ ID NO: 507813 - DNA, 15 bp, Homo sapiens
cccctcagctcagag

SEQ ID NO: 507814 - DNA, 15 bp, Homo sapiens
gcccctcagctcaga

SEQ ID NO: 507815 - DNA, 15 bp, Homo sapiens
tgcccctcagctcag

SEQ ID NO: 507816 - DNA, 15 bp, Homo sapiens
ttgcccctcagctca

SEQ ID NO: 507817 - DNA, 15 bp, Homo sapiens
tttgcccctcagctc

SEQ ID NO: 507818 - DNA, 15 bp, Homo sapiens
ttttgcccctcagct

SEQ ID NO: 507819 - DNA, 15 bp, Homo sapiens
tttttgcccctcagc

SEQ ID NO: 507820 - DNA, 15 bp, Homo sapiens
gtttttgcccctcag

SEQ ID NO: 507821 - DNA, 15 bp, Homo sapiens
agtttttgcccctca

SEQ ID NO: 507822 - DNA, 15 bp, Homo sapiens
tagtttttgcccctc

SEQ ID NO: 507823 - DNA, 15 bp, Homo sapiens
ctagtttttgcccct

SEQ ID NO: 507824 - DNA, 15 bp, Homo sapiens
gctagtttttgcccc

SEQ ID NO: 507825 - DNA, 15 bp, Homo sapiens
tgctagtttttgccc

SEQ ID NO: 507826 - DNA, 15 bp, Homo sapiens
ttgctagtttttgcc

SEQ ID NO: 507827 - DNA, 15 bp, Homo sapiens
tttgctagtttttgc

SEQ ID NO: 507828 - DNA, 15 bp, Homo sapiens
ctttgctagtttttg

SEQ ID NO: 507829 - DNA, 15 bp, Homo sapiens
gctttgctagttttt

SEQ ID NO: 507830 - DNA, 15 bp, Homo sapiens
agctttgctagtttt

SEQ ID NO: 507831 - DNA, 15 bp, Homo sapiens
aagctttgctagttt

SEQ ID NO: 507832 - DNA, 15 bp, Homo sapiens
caagctttgctagtt

SEQ ID NO: 507833 - DNA, 15 bp, Homo sapiens
gcaagctttgctagt

SEQ ID NO: 507834 - DNA, 15 bp, Homo sapiens
ggcaagctttgctag

SEQ ID NO: 507835 - DNA, 15 bp, Homo sapiens
aggcaagctttgcta

SEQ ID NO: 507836 - DNA, 15 bp, Homo sapiens
aaggcaagctttgct

SEQ ID NO: 507837 - DNA, 15 bp, Homo sapiens
gaaggcaagctttgc

SEQ ID NO: 507838 - DNA, 15 bp, Homo sapiens
ggaaggcaagctttg

SEQ ID NO: 507839 - DNA, 15 bp, Homo sapiens
gggaaggcaagcttt

SEQ ID NO: 507840 - DNA, 15 bp, Homo sapiens
agggaaggcaagctt

SEQ ID NO: 507841 - DNA, 15 bp, Homo sapiens
aagggaaggcaagct

SEQ ID NO: 507842 - DNA, 15 bp, Homo sapiens
gaagggaaggcaagc

SEQ ID NO: 507843 - DNA, 15 bp, Homo sapiens
agaagggaaggcaag

SEQ ID NO: 507844 - DNA, 15 bp, Homo sapiens
aagaagggaaggcaa

SEQ ID NO: 507845 - DNA, 15 bp, Homo sapiens
gaagaagggaaggca

SEQ ID NO: 507846 - DNA, 15 bp, Homo sapiens
ggaagaagggaaggc

SEQ ID NO: 507847 - DNA, 15 bp, Homo sapiens
cggaagaagggaagg

SEQ ID NO: 507848 - DNA, 15 bp, Homo sapiens
ccggaagaagggaag

SEQ ID NO: 507849 - DNA, 15 bp, Homo sapiens
cccggaagaagggaa

SEQ ID NO: 507850 - DNA, 15 bp, Homo sapiens
gcccggaagaaggga

SEQ ID NO: 507851 - DNA, 15 bp, Homo sapiens
agcccggaagaaggg

SEQ ID NO: 507852 - DNA, 15 bp, Homo sapiens
aagcccggaagaagg

SEQ ID NO: 507853 - DNA, 15 bp, Homo sapiens
aaagcccggaagaag

SEQ ID NO: 507854 - DNA, 15 bp, Homo sapiens
taaagcccggaagaa

SEQ ID NO: 507855 - DNA, 15 bp, Homo sapiens
ttaaagcccggaaga

SEQ ID NO: 507856 - DNA, 15 bp, Homo sapiens
cttaaagcccggaag

SEQ ID NO: 507857 - DNA, 15 bp, Homo sapiens
tcttaaagcccggaa

SEQ ID NO: 507858 - DNA, 15 bp, Homo sapiens
ttcttaaagcccgga

SEQ ID NO: 507859 - DNA, 15 bp, Homo sapiens
cttcttaaagcccgg

SEQ ID NO: 507860 - DNA, 15 bp, Homo sapiens
ccttcttaaagcccg

SEQ ID NO: 507861 - DNA, 15 bp, Homo sapiens
cccttcttaaagccc

SEQ ID NO: 507862 - DNA, 15 bp, Homo sapiens
ccccttcttaaagcc

SEQ ID NO: 507863 - DNA, 15 bp, Homo sapiens
cccccttcttaaagc

SEQ ID NO: 507864 - DNA, 15 bp, Homo sapiens
tcccccttcttaaag

SEQ ID NO: 507865 - DNA, 15 bp, Homo sapiens
gtcccccttcttaaa

SEQ ID NO: 507866 - DNA, 15 bp, Homo sapiens
agtcccccttcttaa

SEQ ID NO: 507867 - DNA, 15 bp, Homo sapiens
cagtcccccttctta

SEQ ID NO: 507868 - DNA, 15 bp, Homo sapiens
acagtcccccttctt

SEQ ID NO: 507869 - DNA, 15 bp, Homo sapiens
gacagtcccccttct

SEQ ID NO: 507870 - DNA, 15 bp, Homo sapiens
ggacagtcccccttc

SEQ ID NO: 507871 - DNA, 15 bp, Homo sapiens
aggacagtccccctt

SEQ ID NO: 507872 - DNA, 15 bp, Homo sapiens
caggacagtccccct

SEQ ID NO: 507873 - DNA, 15 bp, Homo sapiens
gcaggacagtccccc

SEQ ID NO: 507874 - DNA, 15 bp, Homo sapiens
ggcaggacagtcccc

SEQ ID NO: 507875 - DNA, 15 bp, Homo sapiens
tggcaggacagtccc

SEQ ID NO: 507876 - DNA, 15 bp, Homo sapiens
ctggcaggacagtcc

SEQ ID NO: 507877 - DNA, 15 bp, Homo sapiens
tctggcaggacagtc

SEQ ID NO: 507878 - DNA, 15 bp, Homo sapiens
ctctggcaggacagt

SEQ ID NO: 507879 - DNA, 15 bp, Homo sapiens
gctctggcaggacag

SEQ ID NO: 507880 - DNA, 15 bp, Homo sapiens
tgctctggcaggaca

SEQ ID NO: 507881 - DNA, 15 bp, Homo sapiens
ttgctctggcaggac

SEQ ID NO: 507882 - DNA, 15 bp, Homo sapiens
tttgctctggcagga

SEQ ID NO: 507883 - DNA, 15 bp, Homo sapiens
atttgctctggcagg

SEQ ID NO: 507884 - DNA, 15 bp, Homo sapiens
aatttgctctggcag

SEQ ID NO: 507885 - DNA, 15 bp, Homo sapiens
caatttgctctggca

SEQ ID NO: 507886 - DNA, 15 bp, Homo sapiens
tcaatttgctctggc

SEQ ID NO: 507887 - DNA, 15 bp, Homo sapiens
ttcaatttgctctgg

SEQ ID NO: 507888 - DNA, 15 bp, Homo sapiens
tttcaatttgctctg

SEQ ID NO: 507889 - DNA, 15 bp, Homo sapiens
ctttcaatttgctct

SEQ ID NO: 507890 - DNA, 15 bp, Homo sapiens
tctttcaatttgctc

SEQ ID NO: 507891 - DNA, 15 bp, Homo sapiens
gtctttcaatttgct

SEQ ID NO: 507892 - DNA, 15 bp, Homo sapiens
agtctttcaatttgc

SEQ ID NO: 507893 - DNA, 15 bp, Homo sapiens
cagtctttcaatttg

SEQ ID NO: 507894 - DNA, 15 bp, Homo sapiens
acagtctttcaattt

SEQ ID NO: 507895 - DNA, 15 bp, Homo sapiens
cacagtctttcaatt

SEQ ID NO: 507896 - DNA, 15 bp, Homo sapiens
ccacagtctttcaat

SEQ ID NO: 507897 - DNA, 15 bp, Homo sapiens
tccacagtctttcaa

SEQ ID NO: 507898 - DNA, 15 bp, Homo sapiens
ctccacagtctttca

SEQ ID NO: 507899 - DNA, 15 bp, Homo sapiens
gctccacagtctttc

SEQ ID NO: 507900 - DNA, 15 bp, Homo sapiens
ggctccacagtcttt

SEQ ID NO: 507901 - DNA, 15 bp, Homo sapiens
gggctccacagtctt

SEQ ID NO: 507902 - DNA, 15 bp, Homo sapiens
tgggctccacagtct

SEQ ID NO: 507903 - DNA, 15 bp, Homo sapiens
ctgggctccacagtc

SEQ ID NO: 507904 - DNA, 15 bp, Homo sapiens
cctgggctccacagt

SEQ ID NO: 507905 - DNA, 15 bp, Homo sapiens
ccctgggctccacag

SEQ ID NO: 507906 - DNA, 15 bp, Homo sapiens
cccctgggctccaca

SEQ ID NO: 507907 - DNA, 15 bp, Homo sapiens
acccctgggctccac

SEQ ID NO: 507908 - DNA, 15 bp, Homo sapiens
gacccctgggctcca

SEQ ID NO: 507909 - DNA, 15 bp, Homo sapiens
tgacccctgggctcc

SEQ ID NO: 507910 - DNA, 15 bp, Homo sapiens
ctgacccctgggctc

SEQ ID NO: 507911 - DNA, 15 bp, Homo sapiens
cctgacccctgggct

SEQ ID NO: 507912 - DNA, 15 bp, Homo sapiens
tcctgacccctgggc

SEQ ID NO: 507913 - DNA, 15 bp, Homo sapiens
gtcctgacccctggg

SEQ ID NO: 507914 - DNA, 15 bp, Homo sapiens
agtcctgacccctgg

SEQ ID NO: 507915 - DNA, 15 bp, Homo sapiens
cagtcctgacccctg

SEQ ID NO: 507916 - DNA, 15 bp, Homo sapiens
ccagtcctgacccct

SEQ ID NO: 507917 - DNA, 15 bp, Homo sapiens
cccagtcctgacccc

SEQ ID NO: 507918 - DNA, 15 bp, Homo sapiens
tcccagtcctgaccc

SEQ ID NO: 507919 - DNA, 15 bp, Homo sapiens
ctcccagtcctgacc

SEQ ID NO: 507920 - DNA, 15 bp, Homo sapiens
actcccagtcctgac

SEQ ID NO: 507921 - DNA, 15 bp, Homo sapiens
aactcccagtcctga

SEQ ID NO: 507922 - DNA, 15 bp, Homo sapiens
gaactcccagtcctg

SEQ ID NO: 507923 - DNA, 15 bp, Homo sapiens
cgaactcccagtcct

SEQ ID NO: 507924 - DNA, 15 bp, Homo sapiens
gcgaactcccagtcc

SEQ ID NO: 507925 - DNA, 15 bp, Homo sapiens
ggcgaactcccagtc

SEQ ID NO: 507926 - DNA, 15 bp, Homo sapiens
tggcgaactcccagt

SEQ ID NO: 507927 - DNA, 15 bp, Homo sapiens
ctggcgaactcccag

SEQ ID NO: 507928 - DNA, 15 bp, Homo sapiens
gctggcgaactccca

SEQ ID NO: 507929 - DNA, 15 bp, Homo sapiens
ggctggcgaactccc

SEQ ID NO: 507930 - DNA, 15 bp, Homo sapiens
cggctggcgaactcc

SEQ ID NO: 507931 - DNA, 15 bp, Homo sapiens
tcggctggcgaactc

SEQ ID NO: 507932 - DNA, 15 bp, Homo sapiens
ttcggctggcgaact

SEQ ID NO: 507933 - DNA, 15 bp, Homo sapiens
gttcggctggcgaac

SEQ ID NO: 507934 - DNA, 15 bp, Homo sapiens
agttcggctggcgaa

SEQ ID NO: 507935 - DNA, 15 bp, Homo sapiens
gagttcggctggcga

SEQ ID NO: 507936 - DNA, 15 bp, Homo sapiens
ggagttcggctggcg

SEQ ID NO: 507937 - DNA, 15 bp, Homo sapiens
tggagttcggctggc

SEQ ID NO: 507938 - DNA, 15 bp, Homo sapiens
ctggagttcggctgg

SEQ ID NO: 507939 - DNA, 15 bp, Homo sapiens
gctggagttcggctg

SEQ ID NO: 507940 - DNA, 15 bp, Homo sapiens
ggctggagttcggct

SEQ ID NO: 507941 - DNA, 15 bp, Homo sapiens
aggctggagttcggc

SEQ ID NO: 507942 - DNA, 15 bp, Homo sapiens
caggctggagttcgg

SEQ ID NO: 507943 - DNA, 15 bp, Homo sapiens
gcaggctggagttcg

SEQ ID NO: 507944 - DNA, 15 bp, Homo sapiens
agcaggctggagttc

SEQ ID NO: 507945 - DNA, 15 bp, Homo sapiens
gagcaggctggagtt

SEQ ID NO: 507946 - DNA, 15 bp, Homo sapiens
ggagcaggctggagt

SEQ ID NO: 507947 - DNA, 15 bp, Homo sapiens
aggagcaggctggag

SEQ ID NO: 507948 - DNA, 15 bp, Homo sapiens
gaggagcaggctgga

SEQ ID NO: 507949 - DNA, 15 bp, Homo sapiens
ggaggagcaggctgg

SEQ ID NO: 507950 - DNA, 15 bp, Homo sapiens
tggaggagcaggctg

SEQ ID NO: 507951 - DNA, 15 bp, Homo sapiens
atggaggagcaggct

SEQ ID NO: 507952 - DNA, 15 bp, Homo sapiens
gatggaggagcaggc

SEQ ID NO: 507953 - DNA, 15 bp, Homo sapiens
ggatggaggagcagg

SEQ ID NO: 507954 - DNA, 15 bp, Homo sapiens
aggatggaggagcag

SEQ ID NO: 507955 - DNA, 15 bp, Homo sapiens
caggatggaggagca

SEQ ID NO: 507956 - DNA, 15 bp, Homo sapiens
ccaggatggaggagc

SEQ ID NO: 507957 - DNA, 15 bp, Homo sapiens
tccaggatggaggag

SEQ ID NO: 507958 - DNA, 15 bp, Homo sapiens
atccaggatggagga

SEQ ID NO: 507959 - DNA, 15 bp, Homo sapiens
gatccaggatggagg

SEQ ID NO: 507960 - DNA, 15 bp, Homo sapiens
cgatccaggatggag

SEQ ID NO: 507961 - DNA, 15 bp, Homo sapiens
gcgatccaggatgga

SEQ ID NO: 507962 - DNA, 15 bp, Homo sapiens
agcgatccaggatgg

SEQ ID NO: 507963 - DNA, 15 bp, Homo sapiens
gagcgatccaggatg

SEQ ID NO: 507964 - DNA, 15 bp, Homo sapiens
ggagcgatccaggat

SEQ ID NO: 507965 - DNA, 15 bp, Homo sapiens
cggagcgatccagga

SEQ ID NO: 507966 - DNA, 15 bp, Homo sapiens
ccggagcgatccagg

SEQ ID NO: 507967 - DNA, 15 bp, Homo sapiens
cccggagcgatccag

SEQ ID NO: 507968 - DNA, 15 bp, Homo sapiens
acccggagcgatcca

SEQ ID NO: 507969 - DNA, 15 bp, Homo sapiens
aacccggagcgatcc

SEQ ID NO: 507970 - DNA, 15 bp, Homo sapiens
gaacccggagcgatc

SEQ ID NO: 507971 - DNA, 15 bp, Homo sapiens
agaacccggagcgat

SEQ ID NO: 507972 - DNA, 15 bp, Homo sapiens
cagaacccggagcga

SEQ ID NO: 507973 - DNA, 15 bp, Homo sapiens
acagaacccggagcg

SEQ ID NO: 507974 - DNA, 15 bp, Homo sapiens
tacagaacccggagc

SEQ ID NO: 507975 - DNA, 15 bp, Homo sapiens
gtacagaacccggag

SEQ ID NO: 507976 - DNA, 15 bp, Homo sapiens
ggtacagaacccgga

SEQ ID NO: 507977 - DNA, 15 bp, Homo sapiens
gggtacagaacccgg

SEQ ID NO: 507978 - DNA, 15 bp, Homo sapiens
ggggtacagaacccg

SEQ ID NO: 507979 - DNA, 15 bp, Homo sapiens
cggggtacagaaccc

SEQ ID NO: 507980 - DNA, 15 bp, Homo sapiens
acggggtacagaacc

SEQ ID NO: 507981 - DNA, 15 bp, Homo sapiens
cacggggtacagaac

SEQ ID NO: 507982 - DNA, 15 bp, Homo sapiens
ccacggggtacagaa

SEQ ID NO: 507983 - DNA, 15 bp, Homo sapiens
tccacggggtacaga

SEQ ID NO: 507984 - DNA, 15 bp, Homo sapiens
ctccacggggtacag

SEQ ID NO: 507985 - DNA, 15 bp, Homo sapiens
cctccacggggtaca

SEQ ID NO: 507986 - DNA, 15 bp, Homo sapiens
tcctccacggggtac

SEQ ID NO: 507987 - DNA, 15 bp, Homo sapiens
ttcctccacggggta

SEQ ID NO: 507988 - DNA, 15 bp, Homo sapiens
gttcctccacggggt

SEQ ID NO: 507989 - DNA, 15 bp, Homo sapiens
tgttcctccacgggg

SEQ ID NO: 507990 - DNA, 15 bp, Homo sapiens
atgttcctccacggg

SEQ ID NO: 507991 - DNA, 15 bp, Homo sapiens
tatgttcctccacgg

SEQ ID NO: 507992 - DNA, 15 bp, Homo sapiens
atatgttcctccacg

SEQ ID NO: 507993 - DNA, 15 bp, Homo sapiens
aatatgttcctccac

SEQ ID NO: 507994 - DNA, 15 bp, Homo sapiens
gaatatgttcctcca

SEQ ID NO: 507995 - DNA, 15 bp, Homo sapiens
tgaatatgttcctcc

SEQ ID NO: 507996 - DNA, 15 bp, Homo sapiens
ttgaatatgttcctc

SEQ ID NO: 507997 - DNA, 15 bp, Homo sapiens
cttgaatatgttcct

SEQ ID NO: 507998 - DNA, 15 bp, Homo sapiens
ccttgaatatgttcc

SEQ ID NO: 507999 - DNA, 15 bp, Homo sapiens
cccttgaatatgttc

SEQ ID NO: 508000 - DNA, 15 bp, Homo sapiens
tcccttgaatatgtt

SEQ ID NO: 508001 - DNA, 15 bp, Homo sapiens
ttcccttgaatatgt

SEQ ID NO: 508002 - DNA, 15 bp, Homo sapiens
gttcccttgaatatg

SEQ ID NO: 508003 - DNA, 15 bp, Homo sapiens
ggttcccttgaatat

SEQ ID NO: 508004 - DNA, 15 bp, Homo sapiens
aggttcccttgaata

SEQ ID NO: 508005 - DNA, 15 bp, Homo sapiens
caggttcccttgaat

SEQ ID NO: 508006 - DNA, 15 bp, Homo sapiens
ccaggttcccttgaa

SEQ ID NO: 508007 - DNA, 15 bp, Homo sapiens
cccaggttcccttga

SEQ ID NO: 508008 - DNA, 15 bp, Homo sapiens
ccccaggttcccttg

SEQ ID NO: 508009 - DNA, 15 bp, Homo sapiens
cccccaggttccctt

SEQ ID NO: 508010 - DNA, 15 bp, Homo sapiens
gcccccaggttccct

SEQ ID NO: 508011 - DNA, 15 bp, Homo sapiens
tgcccccaggttccc

SEQ ID NO: 508012 - DNA, 15 bp, Homo sapiens
ctgcccccaggttcc

SEQ ID NO: 508013 - DNA, 15 bp, Homo sapiens
tctgcccccaggttc

SEQ ID NO: 508014 - DNA, 15 bp, Homo sapiens
ctctgcccccaggtt

SEQ ID NO: 508015 - DNA, 15 bp, Homo sapiens
cctctgcccccaggt

SEQ ID NO: 508016 - DNA, 15 bp, Homo sapiens
ccctctgcccccagg

SEQ ID NO: 508017 - DNA, 15 bp, Homo sapiens
gccctctgcccccag

SEQ ID NO: 508018 - DNA, 15 bp, Homo sapiens
tgccctctgccccca

SEQ ID NO: 508019 - DNA, 15 bp, Homo sapiens
ttgccctctgccccc

SEQ ID NO: 508020 - DNA, 15 bp, Homo sapiens
cttgccctctgcccc

SEQ ID NO: 508021 - DNA, 15 bp, Homo sapiens
ccttgccctctgccc

SEQ ID NO: 508022 - DNA, 15 bp, Homo sapiens
gccttgccctctgcc

SEQ ID NO: 508023 - DNA, 15 bp, Homo sapiens
ggccttgccctctgc

SEQ ID NO: 508024 - DNA, 15 bp, Homo sapiens
tggccttgccctctg

SEQ ID NO: 508025 - DNA, 15 bp, Homo sapiens
ttggccttgccctct

SEQ ID NO: 508026 - DNA, 15 bp, Homo sapiens
cttggccttgccctc

SEQ ID NO: 508027 - DNA, 15 bp, Homo sapiens
ccttggccttgccct

SEQ ID NO: 508028 - DNA, 15 bp, Homo sapiens
cccttggccttgccc

SEQ ID NO: 508029 - DNA, 15 bp, Homo sapiens
ccccttggccttgcc

SEQ ID NO: 508030 - DNA, 15 bp, Homo sapiens
tccccttggccttgc

SEQ ID NO: 508031 - DNA, 15 bp, Homo sapiens
ctccccttggccttg

SEQ ID NO: 508032 - DNA, 15 bp, Homo sapiens
cctccccttggcctt

SEQ ID NO: 508033 - DNA, 15 bp, Homo sapiens
ccctccccttggcct

SEQ ID NO: 508034 - DNA, 15 bp, Homo sapiens
cccctccccttggcc

SEQ ID NO: 508035 - DNA, 15 bp, Homo sapiens
tcccctccccttggc

SEQ ID NO: 508036 - DNA, 15 bp, Homo sapiens
ttcccctccccttgg

SEQ ID NO: 508037 - DNA, 15 bp, Homo sapiens
tttcccctccccttg

SEQ ID NO: 508038 - DNA, 15 bp, Homo sapiens
atttcccctcccctt

SEQ ID NO: 508039 - DNA, 15 bp, Homo sapiens
tatttcccctcccct

SEQ ID NO: 508040 - DNA, 15 bp, Homo sapiens
ctatttcccctcccc

SEQ ID NO: 508041 - DNA, 15 bp, Homo sapiens
gctatttcccctccc

SEQ ID NO: 508042 - DNA, 15 bp, Homo sapiens
agctatttcccctcc

SEQ ID NO: 508043 - DNA, 15 bp, Homo sapiens
aagctatttcccctc

SEQ ID NO: 508044 - DNA, 15 bp, Homo sapiens
gaagctatttcccct

SEQ ID NO: 508045 - DNA, 15 bp, Homo sapiens
agaagctatttcccc

SEQ ID NO: 508046 - DNA, 15 bp, Homo sapiens
tagaagctatttccc

SEQ ID NO: 508047 - DNA, 15 bp, Homo sapiens
ctagaagctatttcc

SEQ ID NO: 508048 - DNA, 15 bp, Homo sapiens
tctagaagctatttc

SEQ ID NO: 508049 - DNA, 15 bp, Homo sapiens
ttctagaagctattt

SEQ ID NO: 508050 - DNA, 15 bp, Homo sapiens
tttctagaagctatt

SEQ ID NO: 508051 - DNA, 15 bp, Homo sapiens
gtttctagaagctat

SEQ ID NO: 508052 - DNA, 15 bp, Homo sapiens
agtttctagaagcta

SEQ ID NO: 508053 - DNA, 15 bp, Homo sapiens
aagtttctagaagct

SEQ ID NO: 508054 - DNA, 15 bp, Homo sapiens
gaagtttctagaagc

SEQ ID NO: 508055 - DNA, 15 bp, Homo sapiens
agaagtttctagaag

SEQ ID NO: 508056 - DNA, 15 bp, Homo sapiens
cagaagtttctagaa

SEQ ID NO: 508057 - DNA, 15 bp, Homo sapiens
acagaagtttctaga

SEQ ID NO: 508058 - DNA, 15 bp, Homo sapiens
cacagaagtttctag

SEQ ID NO: 508059 - DNA, 15 bp, Homo sapiens
ccacagaagtttcta

SEQ ID NO: 508060 - DNA, 15 bp, Homo sapiens
tccacagaagtttct

SEQ ID NO: 508061 - DNA, 15 bp, Homo sapiens
ctccacagaagtttc

SEQ ID NO: 508062 - DNA, 15 bp, Homo sapiens
tctccacagaagttt

SEQ ID NO: 508063 - DNA, 15 bp, Homo sapiens
gtctccacagaagtt

SEQ ID NO: 508064 - DNA, 15 bp, Homo sapiens
tgtctccacagaagt

SEQ ID NO: 508065 - DNA, 15 bp, Homo sapiens
ctgtctccacagaag

SEQ ID NO: 508066 - DNA, 15 bp, Homo sapiens
cctgtctccacagaa

SEQ ID NO: 508067 - DNA, 15 bp, Homo sapiens
gcctgtctccacaga

SEQ ID NO: 508068 - DNA, 15 bp, Homo sapiens
tgcctgtctccacag

SEQ ID NO: 508069 - DNA, 15 bp, Homo sapiens
ttgcctgtctccaca

SEQ ID NO: 508070 - DNA, 15 bp, Homo sapiens
tttgcctgtctccac

SEQ ID NO: 508071 - DNA, 15 bp, Homo sapiens
ttttgcctgtctcca

SEQ ID NO: 508072 - DNA, 15 bp, Homo sapiens
gttttgcctgtctcc

SEQ ID NO: 508073 - DNA, 15 bp, Homo sapiens
agttttgcctgtctc

SEQ ID NO: 508074 - DNA, 15 bp, Homo sapiens
gagttttgcctgtct

SEQ ID NO: 508075 - DNA, 15 bp, Homo sapiens
agagttttgcctgtc

SEQ ID NO: 508076 - DNA, 15 bp, Homo sapiens
aagagttttgcctgt

SEQ ID NO: 508077 - DNA, 15 bp, Homo sapiens
aaagagttttgcctg

SEQ ID NO: 508078 - DNA, 15 bp, Homo sapiens
aaaagagttttgcct

SEQ ID NO: 508079 - DNA, 15 bp, Homo sapiens
aaaaagagttttgcc

SEQ ID NO: 508080 - DNA, 15 bp, Homo sapiens
gaaaaagagttttgc

SEQ ID NO: 508081 - DNA, 15 bp, Homo sapiens
agaaaaagagttttg

SEQ ID NO: 508082 - DNA, 15 bp, Homo sapiens
cagaaaaagagtttt

SEQ ID NO: 508083 - DNA, 15 bp, Homo sapiens
gcagaaaaagagttt

SEQ ID NO: 508084 - DNA, 15 bp, Homo sapiens
tgcagaaaaagagtt

SEQ ID NO: 508085 - DNA, 15 bp, Homo sapiens
gtgcagaaaaagagt

SEQ ID NO: 508086 - DNA, 15 bp, Homo sapiens
tgtgcagaaaaagag

SEQ ID NO: 508087 - DNA, 15 bp, Homo sapiens
gtgtgcagaaaaaga

SEQ ID NO: 508088 - DNA, 15 bp, Homo sapiens
cgtgtgcagaaaaag

SEQ ID NO: 508089 - DNA, 15 bp, Homo sapiens
acgtgtgcagaaaaa

SEQ ID NO: 508090 - DNA, 15 bp, Homo sapiens
cacgtgtgcagaaaa

SEQ ID NO: 508091 - DNA, 15 bp, Homo sapiens
acacgtgtgcagaaa

SEQ ID NO: 508092 - DNA, 15 bp, Homo sapiens
gacacgtgtgcagaa

SEQ ID NO: 508093 - DNA, 15 bp, Homo sapiens
ggacacgtgtgcaga

SEQ ID NO: 508094 - DNA, 15 bp, Homo sapiens
gggacacgtgtgcag

SEQ ID NO: 508095 - DNA, 15 bp, Homo sapiens
tgggacacgtgtgca

SEQ ID NO: 508096 - DNA, 15 bp, Homo sapiens
atgggacacgtgtgc

SEQ ID NO: 508097 - DNA, 15 bp, Homo sapiens
aatgggacacgtgtg

SEQ ID NO: 508098 - DNA, 15 bp, Homo sapiens
gaatgggacacgtgt

SEQ ID NO: 508099 - DNA, 15 bp, Homo sapiens
ggaatgggacacgtg

SEQ ID NO: 508100 - DNA, 15 bp, Homo sapiens
aggaatgggacacgt

SEQ ID NO: 508101 - DNA, 15 bp, Homo sapiens
gaggaatgggacacg

SEQ ID NO: 508102 - DNA, 15 bp, Homo sapiens
ggaggaatgggacac

SEQ ID NO: 508103 - DNA, 15 bp, Homo sapiens
aggaggaatgggaca

SEQ ID NO: 508104 - DNA, 15 bp, Homo sapiens
gaggaggaatgggac

SEQ ID NO: 508105 - DNA, 15 bp, Homo sapiens
ggaggaggaatggga

SEQ ID NO: 508106 - DNA, 15 bp, Homo sapiens
gggaggaggaatggg

SEQ ID NO: 508107 - DNA, 15 bp, Homo sapiens
agggaggaggaatgg

SEQ ID NO: 508108 - DNA, 15 bp, Homo sapiens
cagggaggaggaatg

SEQ ID NO: 508109 - DNA, 15 bp, Homo sapiens
acagggaggaggaat

SEQ ID NO: 508110 - DNA, 15 bp, Homo sapiens
tacagggaggaggaa

SEQ ID NO: 508111 - DNA, 15 bp, Homo sapiens
ctacagggaggagga

SEQ ID NO: 508112 - DNA, 15 bp, Homo sapiens
actacagggaggagg

SEQ ID NO: 508113 - DNA, 15 bp, Homo sapiens
aactacagggaggag

SEQ ID NO: 508114 - DNA, 15 bp, Homo sapiens
aaactacagggagga

SEQ ID NO: 508115 - DNA, 15 bp, Homo sapiens
caaactacagggagg

SEQ ID NO: 508116 - DNA, 15 bp, Homo sapiens
ccaaactacagggag

SEQ ID NO: 508117 - DNA, 15 bp, Homo sapiens
tccaaactacaggga

SEQ ID NO: 508118 - DNA, 15 bp, Homo sapiens
ctccaaactacaggg

SEQ ID NO: 508119 - DNA, 15 bp, Homo sapiens
tctccaaactacagg

SEQ ID NO: 508120 - DNA, 15 bp, Homo sapiens
ctctccaaactacag

SEQ ID NO: 508121 - DNA, 15 bp, Homo sapiens
cctctccaaactaca

SEQ ID NO: 508122 - DNA, 15 bp, Homo sapiens
ccctctccaaactac

SEQ ID NO: 508123 - DNA, 15 bp, Homo sapiens
gccctctccaaacta

SEQ ID NO: 508124 - DNA, 15 bp, Homo sapiens
tgccctctccaaact

SEQ ID NO: 508125 - DNA, 15 bp, Homo sapiens
atgccctctccaaac

SEQ ID NO: 508126 - DNA, 15 bp, Homo sapiens
aatgccctctccaaa

SEQ ID NO: 508127 - DNA, 15 bp, Homo sapiens
aaatgccctctccaa

SEQ ID NO: 508128 - DNA, 15 bp, Homo sapiens
aaaatgccctctcca

SEQ ID NO: 508129 - DNA, 15 bp, Homo sapiens
taaaatgccctctcc

SEQ ID NO: 508130 - DNA, 15 bp, Homo sapiens
ctaaaatgccctctc

SEQ ID NO: 508131 - DNA, 15 bp, Homo sapiens
tctaaaatgccctct

SEQ ID NO: 508132 - DNA, 15 bp, Homo sapiens
ttctaaaatgccctc

SEQ ID NO: 508133 - DNA, 15 bp, Homo sapiens
tttctaaaatgccct

SEQ ID NO: 508134 - DNA, 15 bp, Homo sapiens
ttttctaaaatgccc

SEQ ID NO: 508135 - DNA, 15 bp, Homo sapiens
tttttctaaaatgcc

SEQ ID NO: 508136 - DNA, 15 bp, Homo sapiens
ctttttctaaaatgc

SEQ ID NO: 508137 - DNA, 15 bp, Homo sapiens
tctttttctaaaatg

SEQ ID NO: 508138 - DNA, 15 bp, Homo sapiens
ctctttttctaaaat

SEQ ID NO: 508139 - DNA, 15 bp, Homo sapiens
actctttttctaaaa

SEQ ID NO: 508140 - DNA, 15 bp, Homo sapiens
gactctttttctaaa

SEQ ID NO: 508141 - DNA, 15 bp, Homo sapiens
ggactctttttctaa

SEQ ID NO: 508142 - DNA, 15 bp, Homo sapiens
gggactctttttcta

SEQ ID NO: 508143 - DNA, 15 bp, Homo sapiens
agggactctttttct

SEQ ID NO: 508144 - DNA, 15 bp, Homo sapiens
aagggactctttttc

SEQ ID NO: 508145 - DNA, 15 bp, Homo sapiens
caagggactcttttt

SEQ ID NO: 508146 - DNA, 15 bp, Homo sapiens
ccaagggactctttt

SEQ ID NO: 508147 - DNA, 15 bp, Homo sapiens
accaagggactcttt

SEQ ID NO: 508148 - DNA, 15 bp, Homo sapiens
aaccaagggactctt

SEQ ID NO: 508149 - DNA, 15 bp, Homo sapiens
gaaccaagggactct

SEQ ID NO: 508150 - DNA, 15 bp, Homo sapiens
ggaaccaagggactc

SEQ ID NO: 508151 - DNA, 15 bp, Homo sapiens
aggaaccaagggact

SEQ ID NO: 508152 - DNA, 15 bp, Homo sapiens
aaggaaccaagggac

SEQ ID NO: 508153 - DNA, 15 bp, Homo sapiens
caaggaaccaaggga

SEQ ID NO: 508154 - DNA, 15 bp, Homo sapiens
ccaaggaaccaaggg

SEQ ID NO: 508155 - DNA, 15 bp, Homo sapiens
accaaggaaccaagg

SEQ ID NO: 508156 - DNA, 15 bp, Homo sapiens
aaccaaggaaccaag

SEQ ID NO: 508157 - DNA, 15 bp, Homo sapiens
aaaccaaggaaccaa

SEQ ID NO: 508158 - DNA, 15 bp, Homo sapiens
aaaaccaaggaacca

SEQ ID NO: 508159 - DNA, 15 bp, Homo sapiens
gaaaaccaaggaacc

SEQ ID NO: 508160 - DNA, 15 bp, Homo sapiens
ggaaaaccaaggaac

SEQ ID NO: 508161 - DNA, 15 bp, Homo sapiens
gggaaaaccaaggaa

SEQ ID NO: 508162 - DNA, 15 bp, Homo sapiens
ggggaaaaccaagga

SEQ ID NO: 508163 - DNA, 15 bp, Homo sapiens
cggggaaaaccaagg

SEQ ID NO: 508164 - DNA, 15 bp, Homo sapiens
tcggggaaaaccaag

SEQ ID NO: 508165 - DNA, 15 bp, Homo sapiens
ttcggggaaaaccaa

SEQ ID NO: 508166 - DNA, 15 bp, Homo sapiens
gttcggggaaaacca

SEQ ID NO: 508167 - DNA, 15 bp, Homo sapiens
ggttcggggaaaacc

SEQ ID NO: 508168 - DNA, 15 bp, Homo sapiens
aggttcggggaaaac

SEQ ID NO: 508169 - DNA, 15 bp, Homo sapiens
caggttcggggaaaa

SEQ ID NO: 508170 - DNA, 15 bp, Homo sapiens
tcaggttcggggaaa

SEQ ID NO: 508171 - DNA, 15 bp, Homo sapiens
ctcaggttcggggaa

SEQ ID NO: 508172 - DNA, 15 bp, Homo sapiens
cctcaggttcgggga

SEQ ID NO: 508173 - DNA, 15 bp, Homo sapiens
acctcaggttcgggg

SEQ ID NO: 508174 - DNA, 15 bp, Homo sapiens
aacctcaggttcggg

SEQ ID NO: 508175 - DNA, 15 bp, Homo sapiens
caacctcaggttcgg

SEQ ID NO: 508176 - DNA, 15 bp, Homo sapiens
ccaacctcaggttcg

SEQ ID NO: 508177 - DNA, 15 bp, Homo sapiens
tccaacctcaggttc

SEQ ID NO: 508178 - DNA, 15 bp, Homo sapiens
gtccaacctcaggtt

SEQ ID NO: 508179 - DNA, 15 bp, Homo sapiens
tgtccaacctcaggt

SEQ ID NO: 508180 - DNA, 15 bp, Homo sapiens
ctgtccaacctcagg

SEQ ID NO: 508181 - DNA, 15 bp, Homo sapiens
gctgtccaacctcag

SEQ ID NO: 508182 - DNA, 15 bp, Homo sapiens
cgctgtccaacctca

SEQ ID NO: 508183 - DNA, 15 bp, Homo sapiens
gcgctgtccaacctc

SEQ ID NO: 508184 - DNA, 15 bp, Homo sapiens
ggcgctgtccaacct

SEQ ID NO: 508185 - DNA, 15 bp, Homo sapiens
gggcgctgtccaacc

SEQ ID NO: 508186 - DNA, 15 bp, Homo sapiens
ggggcgctgtccaac

SEQ ID NO: 508187 - DNA, 15 bp, Homo sapiens
gggggcgctgtccaa

SEQ ID NO: 508188 - DNA, 15 bp, Homo sapiens
agggggcgctgtcca

SEQ ID NO: 508189 - DNA, 15 bp, Homo sapiens
aagggggcgctgtcc

SEQ ID NO: 508190 - DNA, 15 bp, Homo sapiens
aaagggggcgctgtc

SEQ ID NO: 508191 - DNA, 15 bp, Homo sapiens
taaagggggcgctgt

SEQ ID NO: 508192 - DNA, 15 bp, Homo sapiens
ataaagggggcgctg

SEQ ID NO: 508193 - DNA, 15 bp, Homo sapiens
aataaagggggcgct

SEQ ID NO: 508194 - DNA, 15 bp, Homo sapiens
gaataaagggggcgc

SEQ ID NO: 508195 - DNA, 15 bp, Homo sapiens
agaataaagggggcg

SEQ ID NO: 508196 - DNA, 15 bp, Homo sapiens
gagaataaagggggc

SEQ ID NO: 508197 - DNA, 15 bp, Homo sapiens
ggagaataaaggggg

SEQ ID NO: 508198 - DNA, 15 bp, Homo sapiens
cggagaataaagggg

SEQ ID NO: 508199 - DNA, 15 bp, Homo sapiens
gcggagaataaaggg

SEQ ID NO: 508200 - DNA, 15 bp, Homo sapiens
cgcggagaataaagg

SEQ ID NO: 508201 - DNA, 15 bp, Homo sapiens
tcgcggagaataaag

SEQ ID NO: 508202 - DNA, 15 bp, Homo sapiens
ctcgcggagaataaa

SEQ ID NO: 508203 - DNA, 15 bp, Homo sapiens
gctcgcggagaataa

SEQ ID NO: 508204 - DNA, 15 bp, Homo sapiens
cgctcgcggagaata

SEQ ID NO: 508205 - DNA, 15 bp, Homo sapiens
gcgctcgcggagaat

SEQ ID NO: 508206 - DNA, 15 bp, Homo sapiens
tgcgctcgcggagaa

SEQ ID NO: 508207 - DNA, 15 bp, Homo sapiens
ctgcgctcgcggaga

SEQ ID NO: 508208 - DNA, 15 bp, Homo sapiens
gctgcgctcgcggag

SEQ ID NO: 508209 - DNA, 15 bp, Homo sapiens
ggctgcgctcgcgga

SEQ ID NO: 508210 - DNA, 15 bp, Homo sapiens
aggctgcgctcgcgg

SEQ ID NO: 508211 - DNA, 15 bp, Homo sapiens
caggctgcgctcgcg

SEQ ID NO: 508212 - DNA, 15 bp, Homo sapiens
ccaggctgcgctcgc

SEQ ID NO: 508213 - DNA, 15 bp, Homo sapiens
tccaggctgcgctcg

SEQ ID NO: 508214 - DNA, 15 bp, Homo sapiens
gtccaggctgcgctc

SEQ ID NO: 508215 - DNA, 15 bp, Homo sapiens
tgtccaggctgcgct

SEQ ID NO: 508216 - DNA, 15 bp, Homo sapiens
ttgtccaggctgcgc

SEQ ID NO: 508217 - DNA, 15 bp, Homo sapiens
tttgtccaggctgcg

SEQ ID NO: 508218 - DNA, 15 bp, Homo sapiens
ctttgtccaggctgc

SEQ ID NO: 508219 - DNA, 15 bp, Homo sapiens
cctttgtccaggctg

SEQ ID NO: 508220 - DNA, 15 bp, Homo sapiens
gcctttgtccaggct

SEQ ID NO: 508221 - DNA, 15 bp, Homo sapiens
cgcctttgtccaggc

SEQ ID NO: 508222 - DNA, 15 bp, Homo sapiens
acgcctttgtccagg

SEQ ID NO: 508223 - DNA, 15 bp, Homo sapiens
gacgcctttgtccag

SEQ ID NO: 508224 - DNA, 15 bp, Homo sapiens
tgacgcctttgtcca

SEQ ID NO: 508225 - DNA, 15 bp, Homo sapiens
gtgacgcctttgtcc

SEQ ID NO: 508226 - DNA, 15 bp, Homo sapiens
agtgacgcctttgtc

SEQ ID NO: 508227 - DNA, 15 bp, Homo sapiens
aagtgacgcctttgt

SEQ ID NO: 508228 - DNA, 15 bp, Homo sapiens
caagtgacgcctttg

SEQ ID NO: 508229 - DNA, 15 bp, Homo sapiens
ccaagtgacgccttt

SEQ ID NO: 508230 - DNA, 15 bp, Homo sapiens
tccaagtgacgcctt

SEQ ID NO: 508231 - DNA, 15 bp, Homo sapiens
ctccaagtgacgcct

SEQ ID NO: 508232 - DNA, 15 bp, Homo sapiens
cctccaagtgacgcc

SEQ ID NO: 508233 - DNA, 15 bp, Homo sapiens
ccctccaagtgacgc

SEQ ID NO: 508234 - DNA, 15 bp, Homo sapiens
gccctccaagtgacg

SEQ ID NO: 508235 - DNA, 15 bp, Homo sapiens
cgccctccaagtgac

SEQ ID NO: 508236 - DNA, 15 bp, Homo sapiens
gcgccctccaagtga

SEQ ID NO: 508237 - DNA, 15 bp, Homo sapiens
ggcgccctccaagtg

SEQ ID NO: 508238 - DNA, 15 bp, Homo sapiens
gggcgccctccaagt

SEQ ID NO: 508239 - DNA, 15 bp, Homo sapiens
ggggcgccctccaag

SEQ ID NO: 508240 - DNA, 15 bp, Homo sapiens
tggggcgccctccaa

SEQ ID NO: 508241 - DNA, 15 bp, Homo sapiens
ctggggcgccctcca

SEQ ID NO: 508242 - DNA, 15 bp, Homo sapiens
gctggggcgccctcc

SEQ ID NO: 508243 - DNA, 15 bp, Homo sapiens
agctggggcgccctc

SEQ ID NO: 508244 - DNA, 15 bp, Homo sapiens
cagctggggcgccct

SEQ ID NO: 508245 - DNA, 15 bp, Homo sapiens
gcagctggggcgccc

SEQ ID NO: 508246 - DNA, 15 bp, Homo sapiens
ggcagctggggcgcc

SEQ ID NO: 508247 - DNA, 15 bp, Homo sapiens
aggcagctggggcgc

SEQ ID NO: 508248 - DNA, 15 bp, Homo sapiens
caggcagctggggcg

SEQ ID NO: 508249 - DNA, 15 bp, Homo sapiens
ccaggcagctggggc

SEQ ID NO: 508250 - DNA, 15 bp, Homo sapiens
cccaggcagctgggg

SEQ ID NO: 508251 - DNA, 15 bp, Homo sapiens
tcccaggcagctggg

SEQ ID NO: 508252 - DNA, 15 bp, Homo sapiens
ttcccaggcagctgg

SEQ ID NO: 508253 - DNA, 15 bp, Homo sapiens
gttcccaggcagctg

SEQ ID NO: 508254 - DNA, 15 bp, Homo sapiens
agttcccaggcagct

SEQ ID NO: 508255 - DNA, 15 bp, Homo sapiens
gagttcccaggcagc

SEQ ID NO: 508256 - DNA, 15 bp, Homo sapiens
ggagttcccaggcag

SEQ ID NO: 508257 - DNA, 15 bp, Homo sapiens
cggagttcccaggca

SEQ ID NO: 508258 - DNA, 15 bp, Homo sapiens
tcggagttcccaggc

SEQ ID NO: 508259 - DNA, 15 bp, Homo sapiens
ctcggagttcccagg

SEQ ID NO: 508260 - DNA, 15 bp, Homo sapiens
gctcggagttcccag

SEQ ID NO: 508261 - DNA, 15 bp, Homo sapiens
cgctcggagttccca

SEQ ID NO: 508262 - DNA, 15 bp, Homo sapiens
ccgctcggagttccc

SEQ ID NO: 508263 - DNA, 15 bp, Homo sapiens
tccgctcggagttcc

SEQ ID NO: 508264 - DNA, 15 bp, Homo sapiens
ctccgctcggagttc

SEQ ID NO: 508265 - DNA, 15 bp, Homo sapiens
gctccgctcggagtt

SEQ ID NO: 508266 - DNA, 15 bp, Homo sapiens
ggctccgctcggagt

SEQ ID NO: 508267 - DNA, 15 bp, Homo sapiens
gggctccgctcggag

SEQ ID NO: 508268 - DNA, 15 bp, Homo sapiens
tgggctccgctcgga

SEQ ID NO: 508269 - DNA, 15 bp, Homo sapiens
atgggctccgctcgg

SEQ ID NO: 508270 - DNA, 15 bp, Homo sapiens
gatgggctccgctcg

SEQ ID NO: 508271 - DNA, 15 bp, Homo sapiens
ggatgggctccgctc

SEQ ID NO: 508272 - DNA, 15 bp, Homo sapiens
gggatgggctccgct

SEQ ID NO: 508273 - DNA, 15 bp, Homo sapiens
cgggatgggctccgc

SEQ ID NO: 508274 - DNA, 15 bp, Homo sapiens
gcgggatgggctccg

SEQ ID NO: 508275 - DNA, 15 bp, Homo sapiens
agcgggatgggctcc

SEQ ID NO: 508276 - DNA, 15 bp, Homo sapiens
aagcgggatgggctc

SEQ ID NO: 508277 - DNA, 15 bp, Homo sapiens
gaagcgggatgggct

SEQ ID NO: 508278 - DNA, 15 bp, Homo sapiens
ggaagcgggatgggc

SEQ ID NO: 508279 - DNA, 15 bp, Homo sapiens
gggaagcgggatggg

SEQ ID NO: 508280 - DNA, 15 bp, Homo sapiens
agggaagcgggatgg

SEQ ID NO: 508281 - DNA, 15 bp, Homo sapiens
tagggaagcgggatg

SEQ ID NO: 508282 - DNA, 15 bp, Homo sapiens
ttagggaagcgggat

SEQ ID NO: 508283 - DNA, 15 bp, Homo sapiens
gttagggaagcggga

SEQ ID NO: 508284 - DNA, 15 bp, Homo sapiens
ggttagggaagcggg

SEQ ID NO: 508285 - DNA, 15 bp, Homo sapiens
gggttagggaagcgg

SEQ ID NO: 508286 - DNA, 15 bp, Homo sapiens
cgggttagggaagcg

SEQ ID NO: 508287 - DNA, 15 bp, Homo sapiens
tcgggttagggaagc

SEQ ID NO: 508288 - DNA, 15 bp, Homo sapiens
ctcgggttagggaag

SEQ ID NO: 508289 - DNA, 15 bp, Homo sapiens
actcgggttagggaa

SEQ ID NO: 508290 - DNA, 15 bp, Homo sapiens
gactcgggttaggga

SEQ ID NO: 508291 - DNA, 15 bp, Homo sapiens
cgactcgggttaggg

SEQ ID NO: 508292 - DNA, 15 bp, Homo sapiens
acgactcgggttagg

SEQ ID NO: 508293 - DNA, 15 bp, Homo sapiens
aacgactcgggttag

SEQ ID NO: 508294 - DNA, 15 bp, Homo sapiens
aaacgactcgggtta

SEQ ID NO: 508295 - DNA, 15 bp, Homo sapiens
gaaacgactcgggtt

SEQ ID NO: 508296 - DNA, 15 bp, Homo sapiens
ggaaacgactcgggt

SEQ ID NO: 508297 - DNA, 15 bp, Homo sapiens
gggaaacgactcggg

SEQ ID NO: 508298 - DNA, 15 bp, Homo sapiens
tgggaaacgactcgg

SEQ ID NO: 508299 - DNA, 15 bp, Homo sapiens
ctgggaaacgactcg

SEQ ID NO: 508300 - DNA, 15 bp, Homo sapiens
cctgggaaacgactc

SEQ ID NO: 508301 - DNA, 15 bp, Homo sapiens
tcctgggaaacgact

SEQ ID NO: 508302 - DNA, 15 bp, Homo sapiens
atcctgggaaacgac

SEQ ID NO: 508303 - DNA, 15 bp, Homo sapiens
catcctgggaaacga

SEQ ID NO: 508304 - DNA, 15 bp, Homo sapiens
ccatcctgggaaacg

SEQ ID NO: 508305 - DNA, 15 bp, Homo sapiens
tccatcctgggaaac

SEQ ID NO: 508306 - DNA, 15 bp, Homo sapiens
ttccatcctgggaaa

SEQ ID NO: 508307 - DNA, 15 bp, Homo sapiens
cttccatcctgggaa

SEQ ID NO: 508308 - DNA, 15 bp, Homo sapiens
ccttccatcctggga

SEQ ID NO: 508309 - DNA, 15 bp, Homo sapiens
gccttccatcctggg

SEQ ID NO: 508310 - DNA, 15 bp, Homo sapiens
cgccttccatcctgg

SEQ ID NO: 508311 - DNA, 15 bp, Homo sapiens
ccgccttccatcctg

SEQ ID NO: 508312 - DNA, 15 bp, Homo sapiens
tccgccttccatcct

SEQ ID NO: 508313 - DNA, 15 bp, Homo sapiens
atccgccttccatcc

SEQ ID NO: 508314 - DNA, 15 bp, Homo sapiens
gatccgccttccatc

SEQ ID NO: 508315 - DNA, 15 bp, Homo sapiens
ggatccgccttccat

SEQ ID NO: 508316 - DNA, 15 bp, Homo sapiens
gggatccgccttcca

SEQ ID NO: 508317 - DNA, 15 bp, Homo sapiens
cgggatccgccttcc

SEQ ID NO: 508318 - DNA, 15 bp, Homo sapiens
ccgggatccgccttc

SEQ ID NO: 508319 - DNA, 15 bp, Homo sapiens
gccgggatccgcctt

SEQ ID NO: 508320 - DNA, 15 bp, Homo sapiens
agccgggatccgcct

SEQ ID NO: 508321 - DNA, 15 bp, Homo sapiens
gagccgggatccgcc

SEQ ID NO: 508322 - DNA, 15 bp, Homo sapiens
ggagccgggatccgc

SEQ ID NO: 508323 - DNA, 15 bp, Homo sapiens
gggagccgggatccg

SEQ ID NO: 508324 - DNA, 15 bp, Homo sapiens
ggggagccgggatcc

SEQ ID NO: 508325 - DNA, 15 bp, Homo sapiens
cggggagccgggatc

SEQ ID NO: 508326 - DNA, 15 bp, Homo sapiens
gcggggagccgggat

SEQ ID NO: 508327 - DNA, 15 bp, Homo sapiens
cgcggggagccggga

SEQ ID NO: 508328 - DNA, 15 bp, Homo sapiens
tcgcggggagccggg

SEQ ID NO: 508329 - DNA, 15 bp, Homo sapiens
atcgcggggagccgg

SEQ ID NO: 508330 - DNA, 15 bp, Homo sapiens
gatcgcggggagccg

SEQ ID NO: 508331 - DNA, 15 bp, Homo sapiens
tgatcgcggggagcc

SEQ ID NO: 508332 - DNA, 15 bp, Homo sapiens
ctgatcgcggggagc

SEQ ID NO: 508333 - DNA, 15 bp, Homo sapiens
cctgatcgcggggag

SEQ ID NO: 508334 - DNA, 15 bp, Homo sapiens
gcctgatcgcgggga

SEQ ID NO: 508335 - DNA, 15 bp, Homo sapiens
agcctgatcgcgggg

SEQ ID NO: 508336 - DNA, 15 bp, Homo sapiens
tagcctgatcgcggg

SEQ ID NO: 508337 - DNA, 15 bp, Homo sapiens
ctagcctgatcgcgg

SEQ ID NO: 508338 - DNA, 15 bp, Homo sapiens
cctagcctgatcgcg

SEQ ID NO: 508339 - DNA, 15 bp, Homo sapiens
gcctagcctgatcgc

SEQ ID NO: 508340 - DNA, 15 bp, Homo sapiens
ggcctagcctgatcg

SEQ ID NO: 508341 - DNA, 15 bp, Homo sapiens
cggcctagcctgatc

SEQ ID NO: 508342 - DNA, 15 bp, Homo sapiens
gcggcctagcctgat

SEQ ID NO: 508343 - DNA, 15 bp, Homo sapiens
cgcggcctagcctga

SEQ ID NO: 508344 - DNA, 15 bp, Homo sapiens
ccgcggcctagcctg

SEQ ID NO: 508345 - DNA, 15 bp, Homo sapiens
cccgcggcctagcct

SEQ ID NO: 508346 - DNA, 15 bp, Homo sapiens
acccgcggcctagcc

SEQ ID NO: 508347 - DNA, 15 bp, Homo sapiens
aacccgcggcctagc

SEQ ID NO: 508348 - DNA, 15 bp, Homo sapiens
gaacccgcggcctag

SEQ ID NO: 508349 - DNA, 15 bp, Homo sapiens
agaacccgcggccta

SEQ ID NO: 508350 - DNA, 15 bp, Homo sapiens
cagaacccgcggcct

SEQ ID NO: 508351 - DNA, 15 bp, Homo sapiens
ccagaacccgcggcc

SEQ ID NO: 508352 - DNA, 15 bp, Homo sapiens
gccagaacccgcggc

SEQ ID NO: 508353 - DNA, 15 bp, Homo sapiens
agccagaacccgcgg

SEQ ID NO: 508354 - DNA, 15 bp, Homo sapiens
cagccagaacccgcg

SEQ ID NO: 508355 - DNA, 15 bp, Homo sapiens
ccagccagaacccgc

SEQ ID NO: 508356 - DNA, 15 bp, Homo sapiens
cccagccagaacccg

SEQ ID NO: 508357 - DNA, 15 bp, Homo sapiens
gcccagccagaaccc

SEQ ID NO: 508358 - DNA, 15 bp, Homo sapiens
agcccagccagaacc

SEQ ID NO: 508359 - DNA, 15 bp, Homo sapiens
cagcccagccagaac

SEQ ID NO: 508360 - DNA, 15 bp, Homo sapiens
gcagcccagccagaa

SEQ ID NO: 508361 - DNA, 15 bp, Homo sapiens
tgcagcccagccaga

SEQ ID NO: 508362 - DNA, 15 bp, Homo sapiens
gtgcagcccagccag

SEQ ID NO: 508363 - DNA, 15 bp, Homo sapiens
ggtgcagcccagcca

SEQ ID NO: 508364 - DNA, 15 bp, Homo sapiens
gggtgcagcccagcc

SEQ ID NO: 508365 - DNA, 15 bp, Homo sapiens
ggggtgcagcccagc

SEQ ID NO: 508366 - DNA, 15 bp, Homo sapiens
gggggtgcagcccag

SEQ ID NO: 508367 - DNA, 15 bp, Homo sapiens
ggggggtgcagccca

SEQ ID NO: 508368 - DNA, 15 bp, Homo sapiens
tggggggtgcagccc

SEQ ID NO: 508369 - DNA, 15 bp, Homo sapiens
ctggggggtgcagcc

SEQ ID NO: 508370 - DNA, 15 bp, Homo sapiens
cctggggggtgcagc

SEQ ID NO: 508371 - DNA, 15 bp, Homo sapiens
acctggggggtgcag

SEQ ID NO: 508372 - DNA, 15 bp, Homo sapiens
gacctggggggtgca

SEQ ID NO: 508373 - DNA, 15 bp, Homo sapiens
ggacctggggggtgc

SEQ ID NO: 508374 - DNA, 15 bp, Homo sapiens
gggacctggggggtg

SEQ ID NO: 508375 - DNA, 15 bp, Homo sapiens
ggggacctggggggt

SEQ ID NO: 508376 - DNA, 15 bp, Homo sapiens
cggggacctgggggg

SEQ ID NO: 508377 - DNA, 15 bp, Homo sapiens
gcggggacctggggg

SEQ ID NO: 508378 - DNA, 15 bp, Homo sapiens
ggcggggacctgggg

SEQ ID NO: 508379 - DNA, 15 bp, Homo sapiens
gggcggggacctggg

SEQ ID NO: 508380 - DNA, 15 bp, Homo sapiens
ggggcggggacctgg

SEQ ID NO: 508381 - DNA, 15 bp, Homo sapiens
gggggcggggacctg

SEQ ID NO: 508382 - DNA, 15 bp, Homo sapiens
tgggggcggggacct

SEQ ID NO: 508383 - DNA, 15 bp, Homo sapiens
ctgggggcggggacc

SEQ ID NO: 508384 - DNA, 15 bp, Homo sapiens
gctgggggcggggac

SEQ ID NO: 508385 - DNA, 15 bp, Homo sapiens
ggctgggggcgggga

SEQ ID NO: 508386 - DNA, 15 bp, Homo sapiens
gggctgggggcgggg

SEQ ID NO: 508387 - DNA, 15 bp, Homo sapiens
ggggctgggggcggg

SEQ ID NO: 508388 - DNA, 15 bp, Homo sapiens
gggggctgggggcgg

SEQ ID NO: 508389 - DNA, 15 bp, Homo sapiens
tgggggctgggggcg

SEQ ID NO: 508390 - DNA, 15 bp, Homo sapiens
gtgggggctgggggc

SEQ ID NO: 508391 - DNA, 15 bp, Homo sapiens
ggtgggggctggggg

SEQ ID NO: 508392 - DNA, 15 bp, Homo sapiens
gggtgggggctgggg

SEQ ID NO: 508393 - DNA, 15 bp, Homo sapiens
agggtgggggctggg

SEQ ID NO: 508394 - DNA, 15 bp, Homo sapiens
gagggtgggggctgg

SEQ ID NO: 508395 - DNA, 15 bp, Homo sapiens
agagggtgggggctg

SEQ ID NO: 508396 - DNA, 15 bp, Homo sapiens
cagagggtgggggct

SEQ ID NO: 508397 - DNA, 15 bp, Homo sapiens
gcagagggtgggggc

SEQ ID NO: 508398 - DNA, 15 bp, Homo sapiens
ggcagagggtggggg

SEQ ID NO: 508399 - DNA, 15 bp, Homo sapiens
gggcagagggtgggg

SEQ ID NO: 508400 - DNA, 15 bp, Homo sapiens
ggggcagagggtggg

SEQ ID NO: 508401 - DNA, 15 bp, Homo sapiens
aggggcagagggtgg

SEQ ID NO: 508402 - DNA, 15 bp, Homo sapiens
gaggggcagagggtg

SEQ ID NO: 508403 - DNA, 15 bp, Homo sapiens
agaggggcagagggt

SEQ ID NO: 508404 - DNA, 15 bp, Homo sapiens
cagaggggcagaggg

SEQ ID NO: 508405 - DNA, 15 bp, Homo sapiens
ccagaggggcagagg

SEQ ID NO: 508406 - DNA, 15 bp, Homo sapiens
gccagaggggcagag

SEQ ID NO: 508407 - DNA, 15 bp, Homo sapiens
ggccagaggggcaga

SEQ ID NO: 508408 - DNA, 15 bp, Homo sapiens
cggccagaggggcag

SEQ ID NO: 508409 - DNA, 15 bp, Homo sapiens
ccggccagaggggca

SEQ ID NO: 508410 - DNA, 15 bp, Homo sapiens
cccggccagaggggc

SEQ ID NO: 508411 - DNA, 15 bp, Homo sapiens
gcccggccagagggg

SEQ ID NO: 508412 - DNA, 15 bp, Homo sapiens
agcccggccagaggg

SEQ ID NO: 508413 - DNA, 15 bp, Homo sapiens
gagcccggccagagg

SEQ ID NO: 508414 - DNA, 15 bp, Homo sapiens
ggagcccggccagag

SEQ ID NO: 508415 - DNA, 15 bp, Homo sapiens
cggagcccggccaga

SEQ ID NO: 508416 - DNA, 15 bp, Homo sapiens
gcggagcccggccag

SEQ ID NO: 508417 - DNA, 15 bp, Homo sapiens
tgcggagcccggcca

SEQ ID NO: 508418 - DNA, 15 bp, Homo sapiens
ctgcggagcccggcc

SEQ ID NO: 508419 - DNA, 15 bp, Homo sapiens
cctgcggagcccggc

SEQ ID NO: 508420 - DNA, 15 bp, Homo sapiens
ccctgcggagcccgg

SEQ ID NO: 508421 - DNA, 15 bp, Homo sapiens
gccctgcggagcccg

SEQ ID NO: 508422 - DNA, 15 bp, Homo sapiens
agccctgcggagccc

SEQ ID NO: 508423 - DNA, 15 bp, Homo sapiens
gagccctgcggagcc

SEQ ID NO: 508424 - DNA, 15 bp, Homo sapiens
agagccctgcggagc

SEQ ID NO: 508425 - DNA, 15 bp, Homo sapiens
gagagccctgcggag

SEQ ID NO: 508426 - DNA, 15 bp, Homo sapiens
cgagagccctgcgga

SEQ ID NO: 508427 - DNA, 15 bp, Homo sapiens
gcgagagccctgcgg

SEQ ID NO: 508428 - DNA, 15 bp, Homo sapiens
tgcgagagccctgcg

SEQ ID NO: 508429 - DNA, 15 bp, Homo sapiens
ctgcgagagccctgc

SEQ ID NO: 508430 - DNA, 15 bp, Homo sapiens
actgcgagagccctg

SEQ ID NO: 508431 - DNA, 15 bp, Homo sapiens
aactgcgagagccct

SEQ ID NO: 508432 - DNA, 15 bp, Homo sapiens
aaactgcgagagccc

SEQ ID NO: 508433 - DNA, 15 bp, Homo sapiens
gaaactgcgagagcc

SEQ ID NO: 508434 - DNA, 15 bp, Homo sapiens
cgaaactgcgagagc

SEQ ID NO: 508435 - DNA, 15 bp, Homo sapiens
ccgaaactgcgagag

SEQ ID NO: 508436 - DNA, 15 bp, Homo sapiens
tccgaaactgcgaga

SEQ ID NO: 508437 - DNA, 15 bp, Homo sapiens
ctccgaaactgcgag

SEQ ID NO: 508438 - DNA, 15 bp, Homo sapiens
gctccgaaactgcga

SEQ ID NO: 508439 - DNA, 15 bp, Homo sapiens
ggctccgaaactgcg

SEQ ID NO: 508440 - DNA, 15 bp, Homo sapiens
gggctccgaaactgc

SEQ ID NO: 508441 - DNA, 15 bp, Homo sapiens
cgggctccgaaactg

SEQ ID NO: 508442 - DNA, 15 bp, Homo sapiens
ccgggctccgaaact

SEQ ID NO: 508443 - DNA, 15 bp, Homo sapiens
cccgggctccgaaac

SEQ ID NO: 508444 - DNA, 15 bp, Homo sapiens
ccccgggctccgaaa

SEQ ID NO: 508445 - DNA, 15 bp, Homo sapiens
tccccgggctccgaa

SEQ ID NO: 508446 - DNA, 15 bp, Homo sapiens
gtccccgggctccga

SEQ ID NO: 508447 - DNA, 15 bp, Homo sapiens
ggtccccgggctccg

SEQ ID NO: 508448 - DNA, 15 bp, Homo sapiens
gggtccccgggctcc

SEQ ID NO: 508449 - DNA, 15 bp, Homo sapiens
ggggtccccgggctc

SEQ ID NO: 508450 - DNA, 15 bp, Homo sapiens
cggggtccccgggct

SEQ ID NO: 508451 - DNA, 15 bp, Homo sapiens
ccggggtccccgggc

SEQ ID NO: 508452 - DNA, 15 bp, Homo sapiens
gccggggtccccggg

SEQ ID NO: 508453 - DNA, 15 bp, Homo sapiens
cgccggggtccccgg

SEQ ID NO: 508454 - DNA, 15 bp, Homo sapiens
gcgccggggtccccg

SEQ ID NO: 508455 - DNA, 15 bp, Homo sapiens
tgcgccggggtcccc

SEQ ID NO: 508456 - DNA, 15 bp, Homo sapiens
ctgcgccggggtccc

SEQ ID NO: 508457 - DNA, 15 bp, Homo sapiens
cctgcgccggggtcc

SEQ ID NO: 508458 - DNA, 15 bp, Homo sapiens
tcctgcgccggggtc

SEQ ID NO: 508459 - DNA, 15 bp, Homo sapiens
ctcctgcgccggggt

SEQ ID NO: 508460 - DNA, 15 bp, Homo sapiens
cctcctgcgccgggg

SEQ ID NO: 508461 - DNA, 15 bp, Homo sapiens
tcctcctgcgccggg

SEQ ID NO: 508462 - DNA, 15 bp, Homo sapiens
ctcctcctgcgccgg

SEQ ID NO: 508463 - DNA, 15 bp, Homo sapiens
cctcctcctgcgccg

SEQ ID NO: 508464 - DNA, 15 bp, Homo sapiens
gcctcctcctgcgcc

SEQ ID NO: 508465 - DNA, 15 bp, Homo sapiens
ggcctcctcctgcgc

SEQ ID NO: 508466 - DNA, 15 bp, Homo sapiens
aggcctcctcctgcg

SEQ ID NO: 508467 - DNA, 15 bp, Homo sapiens
caggcctcctcctgc

SEQ ID NO: 508468 - DNA, 15 bp, Homo sapiens
ccaggcctcctcctg

SEQ ID NO: 508469 - DNA, 15 bp, Homo sapiens
cccaggcctcctcct

SEQ ID NO: 508470 - DNA, 15 bp, Homo sapiens
gcccaggcctcctcc

SEQ ID NO: 508471 - DNA, 15 bp, Homo sapiens
agcccaggcctcctc

SEQ ID NO: 508472 - DNA, 15 bp, Homo sapiens
aagcccaggcctcct

SEQ ID NO: 508473 - DNA, 15 bp, Homo sapiens
caagcccaggcctcc

SEQ ID NO: 508474 - DNA, 15 bp, Homo sapiens
gcaagcccaggcctc

SEQ ID NO: 508475 - DNA, 15 bp, Homo sapiens
ggcaagcccaggcct

SEQ ID NO: 508476 - DNA, 15 bp, Homo sapiens
gggcaagcccaggcc

SEQ ID NO: 508477 - DNA, 15 bp, Homo sapiens
cgggcaagcccaggc

SEQ ID NO: 508478 - DNA, 15 bp, Homo sapiens
ccgggcaagcccagg

SEQ ID NO: 508479 - DNA, 15 bp, Homo sapiens
cccgggcaagcccag

SEQ ID NO: 508480 - DNA, 15 bp, Homo sapiens
ccccgggcaagccca

SEQ ID NO: 508481 - DNA, 15 bp, Homo sapiens
cccccgggcaagccc

SEQ ID NO: 508482 - DNA, 15 bp, Homo sapiens
gcccccgggcaagcc

SEQ ID NO: 508483 - DNA, 15 bp, Homo sapiens
agcccccgggcaagc

SEQ ID NO: 508484 - DNA, 15 bp, Homo sapiens
atattagttcactag

SEQ ID NO: 508485 - DNA, 15 bp, Homo sapiens
aatattagttcacta

SEQ ID NO: 508486 - DNA, 15 bp, Homo sapiens
aaatattagttcact

SEQ ID NO: 508487 - DNA, 15 bp, Homo sapiens
caaatattagttcac

SEQ ID NO: 508488 - DNA, 15 bp, Homo sapiens
acaaatattagttca

SEQ ID NO: 508489 - DNA, 15 bp, Homo sapiens
tacaaatattagttc

SEQ ID NO: 508490 - DNA, 15 bp, Homo sapiens
atacaaatattagtt

SEQ ID NO: 508491 - DNA, 15 bp, Homo sapiens
tatacaaatattagt

SEQ ID NO: 508492 - DNA, 15 bp, Homo sapiens
atatacaaatattag

SEQ ID NO: 508493 - DNA, 15 bp, Homo sapiens
aatatacaaatatta

SEQ ID NO: 508494 - DNA, 15 bp, Homo sapiens
gaatatacaaatatt

SEQ ID NO: 508495 - DNA, 15 bp, Homo sapiens
agaatatacaaatat

SEQ ID NO: 508496 - DNA, 15 bp, Homo sapiens
cagaatatacaaata

SEQ ID NO: 508497 - DNA, 15 bp, Homo sapiens
ccagaatatacaaat

SEQ ID NO: 508498 - DNA, 15 bp, Homo sapiens
cccagaatatacaaa

SEQ ID NO: 508499 - DNA, 15 bp, Homo sapiens
tcccagaatatacaa

SEQ ID NO: 508500 - DNA, 15 bp, Homo sapiens
atcccagaatataca

SEQ ID NO: 508501 - DNA, 15 bp, Homo sapiens
gatcccagaatatac

SEQ ID NO: 508502 - DNA, 15 bp, Homo sapiens
cgatcccagaatata

SEQ ID NO: 508503 - DNA, 15 bp, Homo sapiens
tcgatcccagaatat

SEQ ID NO: 508504 - DNA, 15 bp, Homo sapiens
ttcgatcccagaata

SEQ ID NO: 508505 - DNA, 15 bp, Homo sapiens
tttcgatcccagaat

SEQ ID NO: 508506 - DNA, 15 bp, Homo sapiens
atttcgatcccagaa

SEQ ID NO: 508507 - DNA, 15 bp, Homo sapiens
aatttcgatcccaga

SEQ ID NO: 508508 - DNA, 15 bp, Homo sapiens
gaatttcgatcccag

SEQ ID NO: 508509 - DNA, 15 bp, Homo sapiens
ggaatttcgatccca

SEQ ID NO: 508510 - DNA, 15 bp, Homo sapiens
cggaatttcgatccc

SEQ ID NO: 508511 - DNA, 15 bp, Homo sapiens
tcggaatttcgatcc

SEQ ID NO: 508512 - DNA, 15 bp, Homo sapiens
ctcggaatttcgatc

SEQ ID NO: 508513 - DNA, 15 bp, Homo sapiens
cctcggaatttcgat

SEQ ID NO: 508514 - DNA, 15 bp, Homo sapiens
tcctcggaatttcga

SEQ ID NO: 508515 - DNA, 15 bp, Homo sapiens
ttcctcggaatttcg

SEQ ID NO: 508516 - DNA, 15 bp, Homo sapiens
cttcctcggaatttc

SEQ ID NO: 508517 - DNA, 15 bp, Homo sapiens
acttcctcggaattt

SEQ ID NO: 508518 - DNA, 15 bp, Homo sapiens
aacttcctcggaatt

SEQ ID NO: 508519 - DNA, 15 bp, Homo sapiens
aaacttcctcggaat

SEQ ID NO: 508520 - DNA, 15 bp, Homo sapiens
gaaacttcctcggaa

SEQ ID NO: 508521 - DNA, 15 bp, Homo sapiens
agaaacttcctcgga

SEQ ID NO: 508522 - DNA, 15 bp, Homo sapiens
cagaaacttcctcgg

SEQ ID NO: 508523 - DNA, 15 bp, Homo sapiens
gcagaaacttcctcg

SEQ ID NO: 508524 - DNA, 15 bp, Homo sapiens
agcagaaacttcctc

SEQ ID NO: 508525 - DNA, 15 bp, Homo sapiens
gagcagaaacttcct

SEQ ID NO: 508526 - DNA, 15 bp, Homo sapiens
agagcagaaacttcc

SEQ ID NO: 508527 - DNA, 15 bp, Homo sapiens
aagagcagaaacttc

SEQ ID NO: 508528 - DNA, 15 bp, Homo sapiens
gaagagcagaaactt

SEQ ID NO: 508529 - DNA, 15 bp, Homo sapiens
ggaagagcagaaact

SEQ ID NO: 508530 - DNA, 15 bp, Homo sapiens
cggaagagcagaaac

SEQ ID NO: 508531 - DNA, 15 bp, Homo sapiens
gcggaagagcagaaa

SEQ ID NO: 508532 - DNA, 15 bp, Homo sapiens
tgcggaagagcagaa

SEQ ID NO: 508533 - DNA, 15 bp, Homo sapiens
gtgcggaagagcaga

SEQ ID NO: 508534 - DNA, 15 bp, Homo sapiens
tgtgcggaagagcag

SEQ ID NO: 508535 - DNA, 15 bp, Homo sapiens
gtgtgcggaagagca

SEQ ID NO: 508536 - DNA, 15 bp, Homo sapiens
ggtgtgcggaagagc

SEQ ID NO: 508537 - DNA, 15 bp, Homo sapiens
tggtgtgcggaagag

SEQ ID NO: 508538 - DNA, 15 bp, Homo sapiens
ctggtgtgcggaaga

SEQ ID NO: 508539 - DNA, 15 bp, Homo sapiens
tctggtgtgcggaag

SEQ ID NO: 508540 - DNA, 15 bp, Homo sapiens
gtctggtgtgcggaa

SEQ ID NO: 508541 - DNA, 15 bp, Homo sapiens
agtctggtgtgcgga

SEQ ID NO: 508542 - DNA, 15 bp, Homo sapiens
aagtctggtgtgcgg

SEQ ID NO: 508543 - DNA, 15 bp, Homo sapiens
caagtctggtgtgcg

SEQ ID NO: 508544 - DNA, 15 bp, Homo sapiens
gcaagtctggtgtgc

SEQ ID NO: 508545 - DNA, 15 bp, Homo sapiens
ggcaagtctggtgtg

SEQ ID NO: 508546 - DNA, 15 bp, Homo sapiens
cggcaagtctggtgt

SEQ ID NO: 508547 - DNA, 15 bp, Homo sapiens
ccggcaagtctggtg

SEQ ID NO: 508548 - DNA, 15 bp, Homo sapiens
accggcaagtctggt

SEQ ID NO: 508549 - DNA, 15 bp, Homo sapiens
caccggcaagtctgg

SEQ ID NO: 508550 - DNA, 15 bp, Homo sapiens
acaccggcaagtctg

SEQ ID NO: 508551 - DNA, 15 bp, Homo sapiens
cacaccggcaagtct

SEQ ID NO: 508552 - DNA, 15 bp, Homo sapiens
ccacaccggcaagtc

SEQ ID NO: 508553 - DNA, 15 bp, Homo sapiens
accacaccggcaagt

SEQ ID NO: 508554 - DNA, 15 bp, Homo sapiens
gaccacaccggcaag

SEQ ID NO: 508555 - DNA, 15 bp, Homo sapiens
agaccacaccggcaa

SEQ ID NO: 508556 - DNA, 15 bp, Homo sapiens
gagaccacaccggca

SEQ ID NO: 508557 - DNA, 15 bp, Homo sapiens
ggagaccacaccggc

SEQ ID NO: 508558 - DNA, 15 bp, Homo sapiens
tggagaccacaccgg

SEQ ID NO: 508559 - DNA, 15 bp, Homo sapiens
ctggagaccacaccg

SEQ ID NO: 508560 - DNA, 15 bp, Homo sapiens
cctggagaccacacc

SEQ ID NO: 508561 - DNA, 15 bp, Homo sapiens
tcctggagaccacac

SEQ ID NO: 508562 - DNA, 15 bp, Homo sapiens
ctcctggagaccaca

SEQ ID NO: 508563 - DNA, 15 bp, Homo sapiens
cctcctggagaccac

SEQ ID NO: 508564 - DNA, 15 bp, Homo sapiens
ccctcctggagacca

SEQ ID NO: 508565 - DNA, 15 bp, Homo sapiens
cccctcctggagacc

SEQ ID NO: 508566 - DNA, 15 bp, Homo sapiens
acccctcctggagac

SEQ ID NO: 508567 - DNA, 15 bp, Homo sapiens
aacccctcctggaga

SEQ ID NO: 508568 - DNA, 15 bp, Homo sapiens
caacccctcctggag

SEQ ID NO: 508569 - DNA, 15 bp, Homo sapiens
ccaacccctcctgga

SEQ ID NO: 508570 - DNA, 15 bp, Homo sapiens
cccaacccctcctgg

SEQ ID NO: 508571 - DNA, 15 bp, Homo sapiens
ccccaacccctcctg

SEQ ID NO: 508572 - DNA, 15 bp, Homo sapiens
cccccaacccctcct

SEQ ID NO: 508573 - DNA, 15 bp, Homo sapiens
gcccccaacccctcc

SEQ ID NO: 508574 - DNA, 15 bp, Homo sapiens
ggcccccaacccctc

SEQ ID NO: 508575 - DNA, 15 bp, Homo sapiens
cggcccccaacccct

SEQ ID NO: 508576 - DNA, 15 bp, Homo sapiens
gcggcccccaacccc

SEQ ID NO: 508577 - DNA, 15 bp, Homo sapiens
cgcggcccccaaccc

SEQ ID NO: 508578 - DNA, 15 bp, Homo sapiens
acgcggcccccaacc

SEQ ID NO: 508579 - DNA, 15 bp, Homo sapiens
gacgcggcccccaac

SEQ ID NO: 508580 - DNA, 15 bp, Homo sapiens
ggacgcggcccccaa

SEQ ID NO: 508581 - DNA, 15 bp, Homo sapiens
aggacgcggccccca

SEQ ID NO: 508582 - DNA, 15 bp, Homo sapiens
gaggacgcggccccc

SEQ ID NO: 508583 - DNA, 15 bp, Homo sapiens
tgaggacgcggcccc

SEQ ID NO: 508584 - DNA, 15 bp, Homo sapiens
ctgaggacgcggccc

SEQ ID NO: 508585 - DNA, 15 bp, Homo sapiens
cctgaggacgcggcc

SEQ ID NO: 508586 - DNA, 15 bp, Homo sapiens
ccctgaggacgcggc

SEQ ID NO: 508587 - DNA, 15 bp, Homo sapiens
cccctgaggacgcgg

SEQ ID NO: 508588 - DNA, 15 bp, Homo sapiens
ccccctgaggacgcg

SEQ ID NO: 508589 - DNA, 15 bp, Homo sapiens
gccccctgaggacgc

SEQ ID NO: 508590 - DNA, 15 bp, Homo sapiens
cgccccctgaggacg

SEQ ID NO: 508591 - DNA, 15 bp, Homo sapiens
gcgccccctgaggac

SEQ ID NO: 508592 - DNA, 15 bp, Homo sapiens
cgcgccccctgagga

SEQ ID NO: 508593 - DNA, 15 bp, Homo sapiens
gcgcgccccctgagg

SEQ ID NO: 508594 - DNA, 15 bp, Homo sapiens
cgcgcgccccctgag

SEQ ID NO: 508595 - DNA, 15 bp, Homo sapiens
ccgcgcgccccctga

SEQ ID NO: 508596 - DNA, 15 bp, Homo sapiens
gccgcgcgccccctg

SEQ ID NO: 508597 - DNA, 15 bp, Homo sapiens
ggccgcgcgccccct

SEQ ID NO: 508598 - DNA, 15 bp, Homo sapiens
cggccgcgcgccccc

SEQ ID NO: 508599 - DNA, 15 bp, Homo sapiens
tcggccgcgcgcccc

SEQ ID NO: 508600 - DNA, 15 bp, Homo sapiens
ctcggccgcgcgccc

SEQ ID NO: 508601 - DNA, 15 bp, Homo sapiens
cctcggccgcgcgcc

SEQ ID NO: 508602 - DNA, 15 bp, Homo sapiens
gcctcggccgcgcgc

SEQ ID NO: 508603 - DNA, 15 bp, Homo sapiens
agcctcggccgcgcg

SEQ ID NO: 508604 - DNA, 15 bp, Homo sapiens
cagcctcggccgcgc

SEQ ID NO: 508605 - DNA, 15 bp, Homo sapiens
acagcctcggccgcg

SEQ ID NO: 508606 - DNA, 15 bp, Homo sapiens
aacagcctcggccgc

SEQ ID NO: 508607 - DNA, 15 bp, Homo sapiens
gaacagcctcggccg

SEQ ID NO: 508608 - DNA, 15 bp, Homo sapiens
ggaacagcctcggcc

SEQ ID NO: 508609 - DNA, 15 bp, Homo sapiens
gggaacagcctcggc

SEQ ID NO: 508610 - DNA, 15 bp, Homo sapiens
tgggaacagcctcgg

SEQ ID NO: 508611 - DNA, 15 bp, Homo sapiens
ctgggaacagcctcg

SEQ ID NO: 508612 - DNA, 15 bp, Homo sapiens
gctgggaacagcctc

SEQ ID NO: 508613 - DNA, 15 bp, Homo sapiens
cgctgggaacagcct

SEQ ID NO: 508614 - DNA, 15 bp, Homo sapiens
gcgctgggaacagcc

SEQ ID NO: 508615 - DNA, 15 bp, Homo sapiens
cgcgctgggaacagc

SEQ ID NO: 508616 - DNA, 15 bp, Homo sapiens
ccgcgctgggaacag

SEQ ID NO: 508617 - DNA, 15 bp, Homo sapiens
cccgcgctgggaaca

SEQ ID NO: 508618 - DNA, 15 bp, Homo sapiens
tcccgcgctgggaac

SEQ ID NO: 508619 - DNA, 15 bp, Homo sapiens
ttcccgcgctgggaa

SEQ ID NO: 508620 - DNA, 15 bp, Homo sapiens
gttcccgcgctggga

SEQ ID NO: 508621 - DNA, 15 bp, Homo sapiens
cgttcccgcgctggg

SEQ ID NO: 508622 - DNA, 15 bp, Homo sapiens
ccgttcccgcgctgg

SEQ ID NO: 508623 - DNA, 15 bp, Homo sapiens
cccgttcccgcgctg

SEQ ID NO: 508624 - DNA, 15 bp, Homo sapiens
tcccgttcccgcgct

SEQ ID NO: 508625 - DNA, 15 bp, Homo sapiens
ctcccgttcccgcgc

SEQ ID NO: 508626 - DNA, 15 bp, Homo sapiens
cctcccgttcccgcg

SEQ ID NO: 508627 - DNA, 15 bp, Homo sapiens
ccctcccgttcccgc

SEQ ID NO: 508628 - DNA, 15 bp, Homo sapiens
tccctcccgttcccg

SEQ ID NO: 508629 - DNA, 15 bp, Homo sapiens
ctccctcccgttccc

SEQ ID NO: 508630 - DNA, 15 bp, Homo sapiens
tctccctcccgttcc

SEQ ID NO: 508631 - DNA, 15 bp, Homo sapiens
ttctccctcccgttc

SEQ ID NO: 508632 - DNA, 15 bp, Homo sapiens
gttctccctcccgtt

SEQ ID NO: 508633 - DNA, 15 bp, Homo sapiens
ggttctccctcccgt

SEQ ID NO: 508634 - DNA, 15 bp, Homo sapiens
aggttctccctcccg

SEQ ID NO: 508635 - DNA, 15 bp, Homo sapiens
caggttctccctccc

SEQ ID NO: 508636 - DNA, 15 bp, Homo sapiens
ccaggttctccctcc

SEQ ID NO: 508637 - DNA, 15 bp, Homo sapiens
cccaggttctccctc

SEQ ID NO: 508638 - DNA, 15 bp, Homo sapiens
gcccaggttctccct

SEQ ID NO: 508639 - DNA, 15 bp, Homo sapiens
tgcccaggttctccc

SEQ ID NO: 508640 - DNA, 15 bp, Homo sapiens
ctgcccaggttctcc

SEQ ID NO: 508641 - DNA, 15 bp, Homo sapiens
cctgcccaggttctc

SEQ ID NO: 508642 - DNA, 15 bp, Homo sapiens
ccctgcccaggttct

SEQ ID NO: 508643 - DNA, 15 bp, Homo sapiens
cccctgcccaggttc

SEQ ID NO: 508644 - DNA, 15 bp, Homo sapiens
gcccctgcccaggtt

SEQ ID NO: 508645 - DNA, 15 bp, Homo sapiens
cgcccctgcccaggt

SEQ ID NO: 508646 - DNA, 15 bp, Homo sapiens
ccgcccctgcccagg

SEQ ID NO: 508647 - DNA, 15 bp, Homo sapiens
cccgcccctgcccag

SEQ ID NO: 508648 - DNA, 15 bp, Homo sapiens
ccccgcccctgccca

SEQ ID NO: 508649 - DNA, 15 bp, Homo sapiens
gccccgcccctgccc

SEQ ID NO: 508650 - DNA, 15 bp, Homo sapiens
cgccccgcccctgcc

SEQ ID NO: 508651 - DNA, 15 bp, Homo sapiens
ccgccccgcccctgc

SEQ ID NO: 508652 - DNA, 15 bp, Homo sapiens
cccgccccgcccctg

SEQ ID NO: 508653 - DNA, 15 bp, Homo sapiens
ccccgccccgcccct

SEQ ID NO: 508654 - DNA, 15 bp, Homo sapiens
gccccgccccgcccc

SEQ ID NO: 508655 - DNA, 15 bp, Homo sapiens
cgccccgccccgccc

SEQ ID NO: 508656 - DNA, 15 bp, Homo sapiens
ccgccccgccccgcc

SEQ ID NO: 508657 - DNA, 15 bp, Homo sapiens
cccgccccgccccgc

SEQ ID NO: 508658 - DNA, 15 bp, Homo sapiens
ccccgccccgccccg

SEQ ID NO: 508659 - DNA, 15 bp, Homo sapiens
gcgccccgccccgcc

SEQ ID NO: 508660 - DNA, 15 bp, Homo sapiens
cgcgccccgccccgc

SEQ ID NO: 508661 - DNA, 15 bp, Homo sapiens
ccgcgccccgccccg

SEQ ID NO: 508662 - DNA, 15 bp, Homo sapiens
cccgcgccccgcccc

SEQ ID NO: 508663 - DNA, 15 bp, Homo sapiens
ccccgcgccccgccc

SEQ ID NO: 508664 - DNA, 15 bp, Homo sapiens
tccccgcgccccgcc

SEQ ID NO: 508665 - DNA, 15 bp, Homo sapiens
gtccccgcgccccgc

SEQ ID NO: 508666 - DNA, 15 bp, Homo sapiens
ggtccccgcgccccg

SEQ ID NO: 508667 - DNA, 15 bp, Homo sapiens
aggtccccgcgcccc

SEQ ID NO: 508668 - DNA, 15 bp, Homo sapiens
caggtccccgcgccc

SEQ ID NO: 508669 - DNA, 15 bp, Homo sapiens
ccaggtccccgcgcc

SEQ ID NO: 508670 - DNA, 15 bp, Homo sapiens
cccaggtccccgcgc

SEQ ID NO: 508671 - DNA, 15 bp, Homo sapiens
acccaggtccccgcg

SEQ ID NO: 508672 - DNA, 15 bp, Homo sapiens
tacccaggtccccgc

SEQ ID NO: 508673 - DNA, 15 bp, Homo sapiens
gtacccaggtccccg

SEQ ID NO: 508674 - DNA, 15 bp, Homo sapiens
cgtacccaggtcccc

SEQ ID NO: 508675 - DNA, 15 bp, Homo sapiens
gcgtacccaggtccc

SEQ ID NO: 508676 - DNA, 15 bp, Homo sapiens
cgcgtacccaggtcc

SEQ ID NO: 508677 - DNA, 15 bp, Homo sapiens
ccgcgtacccaggtc

SEQ ID NO: 508678 - DNA, 15 bp, Homo sapiens
tccgcgtacccaggt

SEQ ID NO: 508679 - DNA, 15 bp, Homo sapiens
ctccgcgtacccagg

SEQ ID NO: 508680 - DNA, 15 bp, Homo sapiens
tctccgcgtacccag

SEQ ID NO: 508681 - DNA, 15 bp, Homo sapiens
gtctccgcgtaccca

SEQ ID NO: 508682 - DNA, 15 bp, Homo sapiens
cgtctccgcgtaccc

SEQ ID NO: 508683 - DNA, 15 bp, Homo sapiens
gcgtctccgcgtacc

SEQ ID NO: 508684 - DNA, 15 bp, Homo sapiens
cgcgtctccgcgtac

SEQ ID NO: 508685 - DNA, 15 bp, Homo sapiens
ccgcgtctccgcgta

SEQ ID NO: 508686 - DNA, 15 bp, Homo sapiens
cccgcgtctccgcgt

SEQ ID NO: 508687 - DNA, 15 bp, Homo sapiens
ccccgcgtctccgcg

SEQ ID NO: 508688 - DNA, 15 bp, Homo sapiens
gccccgcgtctccgc

SEQ ID NO: 508689 - DNA, 15 bp, Homo sapiens
cgccccgcgtctccg

SEQ ID NO: 508690 - DNA, 15 bp, Homo sapiens
ccgccccgcgtctcc

SEQ ID NO: 508691 - DNA, 15 bp, Homo sapiens
cccgccccgcgtctc

SEQ ID NO: 508692 - DNA, 15 bp, Homo sapiens
gcccgccccgcgtct

SEQ ID NO: 508693 - DNA, 15 bp, Homo sapiens
cgcccgccccgcgtc

SEQ ID NO: 508694 - DNA, 15 bp, Homo sapiens
ccgcccgccccgcgt

SEQ ID NO: 508695 - DNA, 15 bp, Homo sapiens
cccgcccgccccgcg

SEQ ID NO: 508696 - DNA, 15 bp, Homo sapiens
ccccgcccgccccgc

SEQ ID NO: 508697 - DNA, 15 bp, Homo sapiens
cccccgcccgccccg

SEQ ID NO: 508698 - DNA, 15 bp, Homo sapiens
gcccccgcccgcccc

SEQ ID NO: 508699 - DNA, 15 bp, Homo sapiens
ggcccccgcccgccc

SEQ ID NO: 508700 - DNA, 15 bp, Homo sapiens
cggcccccgcccgcc

SEQ ID NO: 508701 - DNA, 15 bp, Homo sapiens
tcggcccccgcccgc

SEQ ID NO: 508702 - DNA, 15 bp, Homo sapiens
ctcggcccccgcccg

SEQ ID NO: 508703 - DNA, 15 bp, Homo sapiens
tctcggcccccgccc

SEQ ID NO: 508704 - DNA, 15 bp, Homo sapiens
ctctcggcccccgcc

SEQ ID NO: 508705 - DNA, 15 bp, Homo sapiens
gctctcggcccccgc

SEQ ID NO: 508706 - DNA, 15 bp, Homo sapiens
cgctctcggcccccg

SEQ ID NO: 508707 - DNA, 15 bp, Homo sapiens
tcgctctcggccccc

SEQ ID NO: 508708 - DNA, 15 bp, Homo sapiens
ctcgctctcggcccc

SEQ ID NO: 508709 - DNA, 15 bp, Homo sapiens
cctcgctctcggccc

SEQ ID NO: 508710 - DNA, 15 bp, Homo sapiens
gcctcgctctcggcc

SEQ ID NO: 508711 - DNA, 15 bp, Homo sapiens
agcctcgctctcggc

SEQ ID NO: 508712 - DNA, 15 bp, Homo sapiens
cagcctcgctctcgg

SEQ ID NO: 508713 - DNA, 15 bp, Homo sapiens
gcagcctcgctctcg

SEQ ID NO: 508714 - DNA, 15 bp, Homo sapiens
ggcagcctcgctctc

SEQ ID NO: 508715 - DNA, 15 bp, Homo sapiens
cggcagcctcgctct

SEQ ID NO: 508716 - DNA, 15 bp, Homo sapiens
ccggcagcctcgctc

SEQ ID NO: 508717 - DNA, 15 bp, Homo sapiens
gccggcagcctcgct

SEQ ID NO: 508718 - DNA, 15 bp, Homo sapiens
agccggcagcctcgc

SEQ ID NO: 508719 - DNA, 15 bp, Homo sapiens
cagccggcagcctcg

SEQ ID NO: 508720 - DNA, 15 bp, Homo sapiens
ccagccggcagcctc

SEQ ID NO: 508721 - DNA, 15 bp, Homo sapiens
cccagccggcagcct

SEQ ID NO: 508722 - DNA, 15 bp, Homo sapiens
acccagccggcagcc

SEQ ID NO: 508723 - DNA, 15 bp, Homo sapiens
cacccagccggcagc

SEQ ID NO: 508724 - DNA, 15 bp, Homo sapiens
acacccagccggcag

SEQ ID NO: 508725 - DNA, 15 bp, Homo sapiens
aacacccagccggca

SEQ ID NO: 508726 - DNA, 15 bp, Homo sapiens
caacacccagccggc

SEQ ID NO: 508727 - DNA, 15 bp, Homo sapiens
ccaacacccagccgg

SEQ ID NO: 508728 - DNA, 15 bp, Homo sapiens
cccaacacccagccg

SEQ ID NO: 508729 - DNA, 15 bp, Homo sapiens
tcccaacacccagcc

SEQ ID NO: 508730 - DNA, 15 bp, Homo sapiens
ctcccaacacccagc

SEQ ID NO: 508731 - DNA, 15 bp, Homo sapiens
tctcccaacacccag

SEQ ID NO: 508732 - DNA, 15 bp, Homo sapiens
ctctcccaacaccca

SEQ ID NO: 508733 - DNA, 15 bp, Homo sapiens
tctctcccaacaccc

SEQ ID NO: 508734 - DNA, 15 bp, Homo sapiens
ctctctcccaacacc

SEQ ID NO: 508735 - DNA, 15 bp, Homo sapiens
cctctctcccaacac

SEQ ID NO: 508736 - DNA, 15 bp, Homo sapiens
gcctctctcccaaca

SEQ ID NO: 508737 - DNA, 15 bp, Homo sapiens
ggcctctctcccaac

SEQ ID NO: 508738 - DNA, 15 bp, Homo sapiens
cggcctctctcccaa

SEQ ID NO: 508739 - DNA, 15 bp, Homo sapiens
gcggcctctctccca

SEQ ID NO: 508740 - DNA, 15 bp, Homo sapiens
cgcggcctctctccc

SEQ ID NO: 508741 - DNA, 15 bp, Homo sapiens
ccgcggcctctctcc

SEQ ID NO: 508742 - DNA, 15 bp, Homo sapiens
cccgcggcctctctc

SEQ ID NO: 508743 - DNA, 15 bp, Homo sapiens
acccgcggcctctct

SEQ ID NO: 508744 - DNA, 15 bp, Homo sapiens
cacccgcggcctctc

SEQ ID NO: 508745 - DNA, 15 bp, Homo sapiens
ccacccgcggcctct

SEQ ID NO: 508746 - DNA, 15 bp, Homo sapiens
tccacccgcggcctc

SEQ ID NO: 508747 - DNA, 15 bp, Homo sapiens
gtccacccgcggcct

SEQ ID NO: 508748 - DNA, 15 bp, Homo sapiens
cgtccacccgcggcc

SEQ ID NO: 508749 - DNA, 15 bp, Homo sapiens
ccgtccacccgcggc

SEQ ID NO: 508750 - DNA, 15 bp, Homo sapiens
cccgtccacccgcgg

SEQ ID NO: 508751 - DNA, 15 bp, Homo sapiens
ccccgtccacccgcg

SEQ ID NO: 508752 - DNA, 15 bp, Homo sapiens
accccgtccacccgc

SEQ ID NO: 508753 - DNA, 15 bp, Homo sapiens
taccccgtccacccg

SEQ ID NO: 508754 - DNA, 15 bp, Homo sapiens
ttaccccgtccaccc

SEQ ID NO: 508755 - DNA, 15 bp, Homo sapiens
cttaccccgtccacc

SEQ ID NO: 508756 - DNA, 15 bp, Homo sapiens
ccttaccccgtccac

SEQ ID NO: 508757 - DNA, 15 bp, Homo sapiens
tccttaccccgtcca

SEQ ID NO: 508758 - DNA, 15 bp, Homo sapiens
gtccttaccccgtcc

SEQ ID NO: 508759 - DNA, 15 bp, Homo sapiens
agtccttaccccgtc

SEQ ID NO: 508760 - DNA, 15 bp, Homo sapiens
cagtccttaccccgt

SEQ ID NO: 508761 - DNA, 15 bp, Homo sapiens
ccagtccttaccccg

SEQ ID NO: 508762 - DNA, 15 bp, Homo sapiens
cccagtccttacccc

SEQ ID NO: 508763 - DNA, 15 bp, Homo sapiens
tcccagtccttaccc

SEQ ID NO: 508764 - DNA, 15 bp, Homo sapiens
gtcccagtccttacc

SEQ ID NO: 508765 - DNA, 15 bp, Homo sapiens
agtcccagtccttac

SEQ ID NO: 508766 - DNA, 15 bp, Homo sapiens
cagtcccagtcctta

SEQ ID NO: 508767 - DNA, 15 bp, Homo sapiens
ccagtcccagtcctt

SEQ ID NO: 508768 - DNA, 15 bp, Homo sapiens
cccagtcccagtcct

SEQ ID NO: 508769 - DNA, 15 bp, Homo sapiens
ccccagtcccagtcc

SEQ ID NO: 508770 - DNA, 15 bp, Homo sapiens
tccccagtcccagtc

SEQ ID NO: 508771 - DNA, 15 bp, Homo sapiens
ctccccagtcccagt

SEQ ID NO: 508772 - DNA, 15 bp, Homo sapiens
tctccccagtcccag

SEQ ID NO: 508773 - DNA, 15 bp, Homo sapiens
gtctccccagtccca

SEQ ID NO: 508774 - DNA, 15 bp, Homo sapiens
agtctccccagtccc

SEQ ID NO: 508775 - DNA, 15 bp, Homo sapiens
cagtctccccagtcc

SEQ ID NO: 508776 - DNA, 15 bp, Homo sapiens
tcagtctccccagtc

SEQ ID NO: 508777 - DNA, 15 bp, Homo sapiens
ctcagtctccccagt

SEQ ID NO: 508778 - DNA, 15 bp, Homo sapiens
tctcagtctccccag

SEQ ID NO: 508779 - DNA, 15 bp, Homo sapiens
ctctcagtctcccca

SEQ ID NO: 508780 - DNA, 15 bp, Homo sapiens
gctctcagtctcccc

SEQ ID NO: 508781 - DNA, 15 bp, Homo sapiens
agctctcagtctccc

SEQ ID NO: 508782 - DNA, 15 bp, Homo sapiens
cagctctcagtctcc

SEQ ID NO: 508783 - DNA, 15 bp, Homo sapiens
ccagctctcagtctc

SEQ ID NO: 508784 - DNA, 15 bp, Homo sapiens
cccagctctcagtct

SEQ ID NO: 508785 - DNA, 15 bp, Homo sapiens
ccccagctctcagtc

SEQ ID NO: 508786 - DNA, 15 bp, Homo sapiens
cccccagctctcagt

SEQ ID NO: 508787 - DNA, 15 bp, Homo sapiens
ccccccagctctcag

SEQ ID NO: 508788 - DNA, 15 bp, Homo sapiens
accccccagctctca

SEQ ID NO: 508789 - DNA, 15 bp, Homo sapiens
caccccccagctctc

SEQ ID NO: 508790 - DNA, 15 bp, Homo sapiens
gcaccccccagctct

SEQ ID NO: 508791 - DNA, 15 bp, Homo sapiens
cgcaccccccagctc

SEQ ID NO: 508792 - DNA, 15 bp, Homo sapiens
ccgcaccccccagct

SEQ ID NO: 508793 - DNA, 15 bp, Homo sapiens
cccgcaccccccagc

SEQ ID NO: 508794 - DNA, 15 bp, Homo sapiens
ccccgcaccccccag

SEQ ID NO: 508795 - DNA, 15 bp, Homo sapiens
tccccgcacccccca

SEQ ID NO: 508796 - DNA, 15 bp, Homo sapiens
ctccccgcacccccc

SEQ ID NO: 508797 - DNA, 15 bp, Homo sapiens
cctccccgcaccccc

SEQ ID NO: 508798 - DNA, 15 bp, Homo sapiens
tcctccccgcacccc

SEQ ID NO: 508799 - DNA, 15 bp, Homo sapiens
atcctccccgcaccc

SEQ ID NO: 508800 - DNA, 15 bp, Homo sapiens
catcctccccgcacc

SEQ ID NO: 508801 - DNA, 15 bp, Homo sapiens
tcatcctccccgcac

SEQ ID NO: 508802 - DNA, 15 bp, Homo sapiens
ctcatcctccccgca

SEQ ID NO: 508803 - DNA, 15 bp, Homo sapiens
cctcatcctccccgc

SEQ ID NO: 508804 - DNA, 15 bp, Homo sapiens
gcctcatcctccccg

SEQ ID NO: 508805 - DNA, 15 bp, Homo sapiens
agcctcatcctcccc

SEQ ID NO: 508806 - DNA, 15 bp, Homo sapiens
cagcctcatcctccc

SEQ ID NO: 508807 - DNA, 15 bp, Homo sapiens
gcagcctcatcctcc

SEQ ID NO: 508808 - DNA, 15 bp, Homo sapiens
cgcagcctcatcctc

SEQ ID NO: 508809 - DNA, 15 bp, Homo sapiens
ccgcagcctcatcct

SEQ ID NO: 508810 - DNA, 15 bp, Homo sapiens
tccgcagcctcatcc

SEQ ID NO: 508811 - DNA, 15 bp, Homo sapiens
gtccgcagcctcatc

SEQ ID NO: 508812 - DNA, 15 bp, Homo sapiens
tgtccgcagcctcat

SEQ ID NO: 508813 - DNA, 15 bp, Homo sapiens
ctgtccgcagcctca

SEQ ID NO: 508814 - DNA, 15 bp, Homo sapiens
cctgtccgcagcctc

SEQ ID NO: 508815 - DNA, 15 bp, Homo sapiens
tcctgtccgcagcct

SEQ ID NO: 508816 - DNA, 15 bp, Homo sapiens
ttcctgtccgcagcc

SEQ ID NO: 508817 - DNA, 15 bp, Homo sapiens
tttcctgtccgcagc

SEQ ID NO: 508818 - DNA, 15 bp, Homo sapiens
gtttcctgtccgcag

SEQ ID NO: 508819 - DNA, 15 bp, Homo sapiens
cgtttcctgtccgca

SEQ ID NO: 508820 - DNA, 15 bp, Homo sapiens
tcgtttcctgtccgc

SEQ ID NO: 508821 - DNA, 15 bp, Homo sapiens
ttcgtttcctgtccg

SEQ ID NO: 508822 - DNA, 15 bp, Homo sapiens
cttcgtttcctgtcc

SEQ ID NO: 508823 - DNA, 15 bp, Homo sapiens
ccttcgtttcctgtc

SEQ ID NO: 508824 - DNA, 15 bp, Homo sapiens
cccttcgtttcctgt

SEQ ID NO: 508825 - DNA, 15 bp, Homo sapiens
gcccttcgtttcctg

SEQ ID NO: 508826 - DNA, 15 bp, Homo sapiens
ggcccttcgtttcct

SEQ ID NO: 508827 - DNA, 15 bp, Homo sapiens
aggcccttcgtttcc

SEQ ID NO: 508828 - DNA, 15 bp, Homo sapiens
caggcccttcgtttc

SEQ ID NO: 508829 - DNA, 15 bp, Homo sapiens
ccaggcccttcgttt

SEQ ID NO: 508830 - DNA, 15 bp, Homo sapiens
cccaggcccttcgtt

SEQ ID NO: 508831 - DNA, 15 bp, Homo sapiens
tcccaggcccttcgt

SEQ ID NO: 508832 - DNA, 15 bp, Homo sapiens
gtcccaggcccttcg

SEQ ID NO: 508833 - DNA, 15 bp, Homo sapiens
tgtcccaggcccttc

SEQ ID NO: 508834 - DNA, 15 bp, Homo sapiens
ctgtcccaggccctt

SEQ ID NO: 508835 - DNA, 15 bp, Homo sapiens
gctgtcccaggccct

SEQ ID NO: 508836 - DNA, 15 bp, Homo sapiens
agctgtcccaggccc

SEQ ID NO: 508837 - DNA, 15 bp, Homo sapiens
cagctgtcccaggcc

SEQ ID NO: 508838 - DNA, 15 bp, Homo sapiens
gcagctgtcccaggc

SEQ ID NO: 508839 - DNA, 15 bp, Homo sapiens
agcagctgtcccagg

SEQ ID NO: 508840 - DNA, 15 bp, Homo sapiens
aagcagctgtcccag

SEQ ID NO: 508841 - DNA, 15 bp, Homo sapiens
gaagcagctgtccca

SEQ ID NO: 508842 - DNA, 15 bp, Homo sapiens
agaagcagctgtccc

SEQ ID NO: 508843 - DNA, 15 bp, Homo sapiens
gagaagcagctgtcc

SEQ ID NO: 508844 - DNA, 15 bp, Homo sapiens
agagaagcagctgtc

SEQ ID NO: 508845 - DNA, 15 bp, Homo sapiens
aagagaagcagctgt

SEQ ID NO: 508846 - DNA, 15 bp, Homo sapiens
caagagaagcagctg

SEQ ID NO: 508847 - DNA, 15 bp, Homo sapiens
ccaagagaagcagct

SEQ ID NO: 508848 - DNA, 15 bp, Homo sapiens
accaagagaagcagc

SEQ ID NO: 508849 - DNA, 15 bp, Homo sapiens
gaccaagagaagcag

SEQ ID NO: 508850 - DNA, 15 bp, Homo sapiens
ggaccaagagaagca

SEQ ID NO: 508851 - DNA, 15 bp, Homo sapiens
aggaccaagagaagc

SEQ ID NO: 508852 - DNA, 15 bp, Homo sapiens
taggaccaagagaag

SEQ ID NO: 508853 - DNA, 15 bp, Homo sapiens
ctaggaccaagagaa

SEQ ID NO: 508854 - DNA, 15 bp, Homo sapiens
tctaggaccaagaga

SEQ ID NO: 508855 - DNA, 15 bp, Homo sapiens
ttctaggaccaagag

SEQ ID NO: 508856 - DNA, 15 bp, Homo sapiens
tttctaggaccaaga

SEQ ID NO: 508857 - DNA, 15 bp, Homo sapiens
gtttctaggaccaag

SEQ ID NO: 508858 - DNA, 15 bp, Homo sapiens
ggtttctaggaccaa

SEQ ID NO: 508859 - DNA, 15 bp, Homo sapiens
tggtttctaggacca

SEQ ID NO: 508860 - DNA, 15 bp, Homo sapiens
ttggtttctaggacc

SEQ ID NO: 508861 - DNA, 15 bp, Homo sapiens
tttggtttctaggac

SEQ ID NO: 508862 - DNA, 15 bp, Homo sapiens
gtttggtttctagga

SEQ ID NO: 508863 - DNA, 15 bp, Homo sapiens
agtttggtttctagg

SEQ ID NO: 508864 - DNA, 15 bp, Homo sapiens
aagtttggtttctag

SEQ ID NO: 508865 - DNA, 15 bp, Homo sapiens
aaagtttggtttcta

SEQ ID NO: 508866 - DNA, 15 bp, Homo sapiens
gaaagtttggtttct

SEQ ID NO: 508867 - DNA, 15 bp, Homo sapiens
cgaaagtttggtttc

SEQ ID NO: 508868 - DNA, 15 bp, Homo sapiens
acgaaagtttggttt

SEQ ID NO: 508869 - DNA, 15 bp, Homo sapiens
tacgaaagtttggtt

SEQ ID NO: 508870 - DNA, 15 bp, Homo sapiens
ctacgaaagtttggt

SEQ ID NO: 508871 - DNA, 15 bp, Homo sapiens
gctacgaaagtttgg

SEQ ID NO: 508872 - DNA, 15 bp, Homo sapiens
cgctacgaaagtttg

SEQ ID NO: 508873 - DNA, 15 bp, Homo sapiens
tcgctacgaaagttt

SEQ ID NO: 508874 - DNA, 15 bp, Homo sapiens
ctcgctacgaaagtt

SEQ ID NO: 508875 - DNA, 15 bp, Homo sapiens
tctcgctacgaaagt

SEQ ID NO: 508876 - DNA, 15 bp, Homo sapiens
ctctcgctacgaaag

SEQ ID NO: 508877 - DNA, 15 bp, Homo sapiens
tctctcgctacgaaa

SEQ ID NO: 508878 - DNA, 15 bp, Homo sapiens
gtctctcgctacgaa

SEQ ID NO: 508879 - DNA, 15 bp, Homo sapiens
ggtctctcgctacga

SEQ ID NO: 508880 - DNA, 15 bp, Homo sapiens
gggtctctcgctacg

SEQ ID NO: 508881 - DNA, 15 bp, Homo sapiens
agggtctctcgctac

SEQ ID NO: 508882 - DNA, 15 bp, Homo sapiens
tagggtctctcgcta

SEQ ID NO: 508883 - DNA, 15 bp, Homo sapiens
ttagggtctctcgct

SEQ ID NO: 508884 - DNA, 15 bp, Homo sapiens
cttagggtctctcgc

SEQ ID NO: 508885 - DNA, 15 bp, Homo sapiens
tcttagggtctctcg

SEQ ID NO: 508886 - DNA, 15 bp, Homo sapiens
gtcttagggtctctc

SEQ ID NO: 508887 - DNA, 15 bp, Homo sapiens
tgtcttagggtctct

SEQ ID NO: 508888 - DNA, 15 bp, Homo sapiens
ctgtcttagggtctc

SEQ ID NO: 508889 - DNA, 15 bp, Homo sapiens
gctgtcttagggtct

SEQ ID NO: 508890 - DNA, 15 bp, Homo sapiens
agctgtcttagggtc

SEQ ID NO: 508891 - DNA, 15 bp, Homo sapiens
gagctgtcttagggt

SEQ ID NO: 508892 - DNA, 15 bp, Homo sapiens
cgagctgtcttaggg

SEQ ID NO: 508893 - DNA, 15 bp, Homo sapiens
tcgagctgtcttagg

SEQ ID NO: 508894 - DNA, 15 bp, Homo sapiens
ctcgagctgtcttag

SEQ ID NO: 508895 - DNA, 15 bp, Homo sapiens
tctcgagctgtctta

SEQ ID NO: 508896 - DNA, 15 bp, Homo sapiens
atctcgagctgtctt

SEQ ID NO: 508897 - DNA, 15 bp, Homo sapiens
aatctcgagctgtct

SEQ ID NO: 508898 - DNA, 15 bp, Homo sapiens
aaatctcgagctgtc

SEQ ID NO: 508899 - DNA, 15 bp, Homo sapiens
gaaatctcgagctgt

SEQ ID NO: 508900 - DNA, 15 bp, Homo sapiens
tgaaatctcgagctg

SEQ ID NO: 508901 - DNA, 15 bp, Homo sapiens
ttgaaatctcgagct

SEQ ID NO: 508902 - DNA, 15 bp, Homo sapiens
cttgaaatctcgagc

SEQ ID NO: 508903 - DNA, 15 bp, Homo sapiens
acttgaaatctcgag

SEQ ID NO: 508904 - DNA, 15 bp, Homo sapiens
cacttgaaatctcga

SEQ ID NO: 508905 - DNA, 15 bp, Homo sapiens
acacttgaaatctcg

SEQ ID NO: 508906 - DNA, 15 bp, Homo sapiens
gacacttgaaatctc

SEQ ID NO: 508907 - DNA, 15 bp, Homo sapiens
ggacacttgaaatct

SEQ ID NO: 508908 - DNA, 15 bp, Homo sapiens
tggacacttgaaatc

SEQ ID NO: 508909 - DNA, 15 bp, Homo sapiens
gtggacacttgaaat

SEQ ID NO: 508910 - DNA, 15 bp, Homo sapiens
tgtggacacttgaaa

SEQ ID NO: 508911 - DNA, 15 bp, Homo sapiens
gtgtggacacttgaa

SEQ ID NO: 508912 - DNA, 15 bp, Homo sapiens
agtgtggacacttga

SEQ ID NO: 508913 - DNA, 15 bp, Homo sapiens
aagtgtggacacttg

SEQ ID NO: 508914 - DNA, 15 bp, Homo sapiens
gaagtgtggacactt

SEQ ID NO: 508915 - DNA, 15 bp, Homo sapiens
agaagtgtggacact

SEQ ID NO: 508916 - DNA, 15 bp, Homo sapiens
tagaagtgtggacac

SEQ ID NO: 508917 - DNA, 15 bp, Homo sapiens
ctagaagtgtggaca

SEQ ID NO: 508918 - DNA, 15 bp, Homo sapiens
actagaagtgtggac

SEQ ID NO: 508919 - DNA, 15 bp, Homo sapiens
aactagaagtgtgga

SEQ ID NO: 508920 - DNA, 15 bp, Homo sapiens
aaactagaagtgtgg

SEQ ID NO: 508921 - DNA, 15 bp, Homo sapiens
taaactagaagtgtg

SEQ ID NO: 508922 - DNA, 15 bp, Homo sapiens
ctaaactagaagtgt

SEQ ID NO: 508923 - DNA, 15 bp, Homo sapiens
tctaaactagaagtg

SEQ ID NO: 508924 - DNA, 15 bp, Homo sapiens
gtctaaactagaagt

SEQ ID NO: 508925 - DNA, 15 bp, Homo sapiens
tgtctaaactagaag

SEQ ID NO: 508926 - DNA, 15 bp, Homo sapiens
atgtctaaactagaa

SEQ ID NO: 508927 - DNA, 15 bp, Homo sapiens
aatgtctaaactaga

SEQ ID NO: 508928 - DNA, 15 bp, Homo sapiens
aaatgtctaaactag

SEQ ID NO: 508929 - DNA, 15 bp, Homo sapiens
caaatgtctaaacta

SEQ ID NO: 508930 - DNA, 15 bp, Homo sapiens
ccaaatgtctaaact

SEQ ID NO: 508931 - DNA, 15 bp, Homo sapiens
gccaaatgtctaaac

SEQ ID NO: 508932 - DNA, 15 bp, Homo sapiens
tgccaaatgtctaaa

SEQ ID NO: 508933 - DNA, 15 bp, Homo sapiens
ttgccaaatgtctaa

SEQ ID NO: 508934 - DNA, 15 bp, Homo sapiens
gttgccaaatgtcta

SEQ ID NO: 508935 - DNA, 15 bp, Homo sapiens
ggttgccaaatgtct

SEQ ID NO: 508936 - DNA, 15 bp, Homo sapiens
tggttgccaaatgtc

SEQ ID NO: 508937 - DNA, 15 bp, Homo sapiens
ttggttgccaaatgt

SEQ ID NO: 508938 - DNA, 15 bp, Homo sapiens
attggttgccaaatg

SEQ ID NO: 508939 - DNA, 15 bp, Homo sapiens
aattggttgccaaat

SEQ ID NO: 508940 - DNA, 15 bp, Homo sapiens
gaattggttgccaaa

SEQ ID NO: 508941 - DNA, 15 bp, Homo sapiens
cgaattggttgccaa

SEQ ID NO: 508942 - DNA, 15 bp, Homo sapiens
ccgaattggttgcca

SEQ ID NO: 508943 - DNA, 15 bp, Homo sapiens
tccgaattggttgcc

SEQ ID NO: 508944 - DNA, 15 bp, Homo sapiens
ttccgaattggttgc

SEQ ID NO: 508945 - DNA, 15 bp, Homo sapiens
gttccgaattggttg

SEQ ID NO: 508946 - DNA, 15 bp, Homo sapiens
tgttccgaattggtt

SEQ ID NO: 508947 - DNA, 15 bp, Homo sapiens
ctgttccgaattggt

SEQ ID NO: 508948 - DNA, 15 bp, Homo sapiens
gctgttccgaattgg

SEQ ID NO: 508949 - DNA, 15 bp, Homo sapiens
ggctgttccgaattg

SEQ ID NO: 508950 - DNA, 15 bp, Homo sapiens
cggctgttccgaatt

SEQ ID NO: 508951 - DNA, 15 bp, Homo sapiens
ccggctgttccgaat

SEQ ID NO: 508952 - DNA, 15 bp, Homo sapiens
cccggctgttccgaa

SEQ ID NO: 508953 - DNA, 15 bp, Homo sapiens
gcccggctgttccga

SEQ ID NO: 508954 - DNA, 15 bp, Homo sapiens
ggcccggctgttccg

SEQ ID NO: 508955 - DNA, 15 bp, Homo sapiens
cggcccggctgttcc

SEQ ID NO: 508956 - DNA, 15 bp, Homo sapiens
gcggcccggctgttc

SEQ ID NO: 508957 - DNA, 15 bp, Homo sapiens
cgcggcccggctgtt

SEQ ID NO: 508958 - DNA, 15 bp, Homo sapiens
tcgcggcccggctgt

SEQ ID NO: 508959 - DNA, 15 bp, Homo sapiens
ctcgcggcccggctg

SEQ ID NO: 508960 - DNA, 15 bp, Homo sapiens
cctcgcggcccggct

SEQ ID NO: 508961 - DNA, 15 bp, Homo sapiens
ccctcgcggcccggc

SEQ ID NO: 508962 - DNA, 15 bp, Homo sapiens
cccctcgcggcccgg

SEQ ID NO: 508963 - DNA, 15 bp, Homo sapiens
gcccctcgcggcccg

SEQ ID NO: 508964 - DNA, 15 bp, Homo sapiens
ggcccctcgcggccc

SEQ ID NO: 508965 - DNA, 15 bp, Homo sapiens
gggcccctcgcggcc

SEQ ID NO: 508966 - DNA, 15 bp, Homo sapiens
ggggcccctcgcggc

SEQ ID NO: 508967 - DNA, 15 bp, Homo sapiens
gggggcccctcgcgg

SEQ ID NO: 508968 - DNA, 15 bp, Homo sapiens
tgggggcccctcgcg

SEQ ID NO: 508969 - DNA, 15 bp, Homo sapiens
ctgggggcccctcgc

SEQ ID NO: 508970 - DNA, 15 bp, Homo sapiens
cctgggggcccctcg

SEQ ID NO: 508971 - DNA, 15 bp, Homo sapiens
acctgggggcccctc

SEQ ID NO: 508972 - DNA, 15 bp, Homo sapiens
gacctgggggcccct

SEQ ID NO: 508973 - DNA, 15 bp, Homo sapiens
agacctgggggcccc

SEQ ID NO: 508974 - DNA, 15 bp, Homo sapiens
aagacctgggggccc

SEQ ID NO: 508975 - DNA, 15 bp, Homo sapiens
aaagacctgggggcc

SEQ ID NO: 508976 - DNA, 15 bp, Homo sapiens
caaagacctgggggc

SEQ ID NO: 508977 - DNA, 15 bp, Homo sapiens
ccaaagacctggggg

SEQ ID NO: 508978 - DNA, 15 bp, Homo sapiens
gccaaagacctgggg

SEQ ID NO: 508979 - DNA, 15 bp, Homo sapiens
cgccaaagacctggg

SEQ ID NO: 508980 - DNA, 15 bp, Homo sapiens
ccgccaaagacctgg

SEQ ID NO: 508981 - DNA, 15 bp, Homo sapiens
gccgccaaagacctg

SEQ ID NO: 508982 - DNA, 15 bp, Homo sapiens
cgccgccaaagacct

SEQ ID NO: 508983 - DNA, 15 bp, Homo sapiens
acgccgccaaagacc

SEQ ID NO: 508984 - DNA, 15 bp, Homo sapiens
gacgccgccaaagac

SEQ ID NO: 508985 - DNA, 15 bp, Homo sapiens
cgacgccgccaaaga

SEQ ID NO: 508986 - DNA, 15 bp, Homo sapiens
acgacgccgccaaag

SEQ ID NO: 508987 - DNA, 15 bp, Homo sapiens
aacgacgccgccaaa

SEQ ID NO: 508988 - DNA, 15 bp, Homo sapiens
caacgacgccgccaa

SEQ ID NO: 508989 - DNA, 15 bp, Homo sapiens
ccaacgacgccgcca

SEQ ID NO: 508990 - DNA, 15 bp, Homo sapiens
cccaacgacgccgcc

SEQ ID NO: 508991 - DNA, 15 bp, Homo sapiens
tcccaacgacgccgc

SEQ ID NO: 508992 - DNA, 15 bp, Homo sapiens
ctcccaacgacgccg

SEQ ID NO: 508993 - DNA, 15 bp, Homo sapiens
cctcccaacgacgcc

SEQ ID NO: 508994 - DNA, 15 bp, Homo sapiens
gcctcccaacgacgc

SEQ ID NO: 508995 - DNA, 15 bp, Homo sapiens
ggcctcccaacgacg

SEQ ID NO: 508996 - DNA, 15 bp, Homo sapiens
cggcctcccaacgac

SEQ ID NO: 508997 - DNA, 15 bp, Homo sapiens
gcggcctcccaacga

SEQ ID NO: 508998 - DNA, 15 bp, Homo sapiens
cgcggcctcccaacg

SEQ ID NO: 508999 - DNA, 15 bp, Homo sapiens
ccgcggcctcccaac

SEQ ID NO: 509000 - DNA, 15 bp, Homo sapiens
tccgcggcctcccaa

SEQ ID NO: 509001 - DNA, 15 bp, Homo sapiens
ctccgcggcctccca

SEQ ID NO: 509002 - DNA, 15 bp, Homo sapiens
actccgcggcctccc

SEQ ID NO: 509003 - DNA, 15 bp, Homo sapiens
aactccgcggcctcc

SEQ ID NO: 509004 - DNA, 15 bp, Homo sapiens
caactccgcggcctc

SEQ ID NO: 509005 - DNA, 15 bp, Homo sapiens
acaactccgcggcct

SEQ ID NO: 509006 - DNA, 15 bp, Homo sapiens
gacaactccgcggcc

SEQ ID NO: 509007 - DNA, 15 bp, Homo sapiens
ggacaactccgcggc

SEQ ID NO: 509008 - DNA, 15 bp, Homo sapiens
gggacaactccgcgg

SEQ ID NO: 509009 - DNA, 15 bp, Homo sapiens
agggacaactccgcg

SEQ ID NO: 509010 - DNA, 15 bp, Homo sapiens
cagggacaactccgc

SEQ ID NO: 509011 - DNA, 15 bp, Homo sapiens
ccagggacaactccg

SEQ ID NO: 509012 - DNA, 15 bp, Homo sapiens
cccagggacaactcc

SEQ ID NO: 509013 - DNA, 15 bp, Homo sapiens
gcccagggacaactc

SEQ ID NO: 509014 - DNA, 15 bp, Homo sapiens
agcccagggacaact

SEQ ID NO: 509015 - DNA, 15 bp, Homo sapiens
aagcccagggacaac

SEQ ID NO: 509016 - DNA, 15 bp, Homo sapiens
gaagcccagggacaa

SEQ ID NO: 509017 - DNA, 15 bp, Homo sapiens
ggaagcccagggaca

SEQ ID NO: 509018 - DNA, 15 bp, Homo sapiens
gggaagcccagggac

SEQ ID NO: 509019 - DNA, 15 bp, Homo sapiens
agggaagcccaggga

SEQ ID NO: 509020 - DNA, 15 bp, Homo sapiens
cagggaagcccaggg

SEQ ID NO: 509021 - DNA, 15 bp, Homo sapiens
tcagggaagcccagg

SEQ ID NO: 509022 - DNA, 15 bp, Homo sapiens
ttcagggaagcccag

SEQ ID NO: 509023 - DNA, 15 bp, Homo sapiens
cttcagggaagccca

SEQ ID NO: 509024 - DNA, 15 bp, Homo sapiens
ccttcagggaagccc

SEQ ID NO: 509025 - DNA, 15 bp, Homo sapiens
gccttcagggaagcc

SEQ ID NO: 509026 - DNA, 15 bp, Homo sapiens
ggccttcagggaagc

SEQ ID NO: 509027 - DNA, 15 bp, Homo sapiens
gggccttcagggaag

SEQ ID NO: 509028 - DNA, 15 bp, Homo sapiens
ggggccttcagggaa

SEQ ID NO: 509029 - DNA, 15 bp, Homo sapiens
cggggccttcaggga

SEQ ID NO: 509030 - DNA, 15 bp, Homo sapiens
gcggggccttcaggg

SEQ ID NO: 509031 - DNA, 15 bp, Homo sapiens
tgcggggccttcagg

SEQ ID NO: 509032 - DNA, 15 bp, Homo sapiens
ctgcggggccttcag

SEQ ID NO: 509033 - DNA, 15 bp, Homo sapiens
tctgcggggccttca

SEQ ID NO: 509034 - DNA, 15 bp, Homo sapiens
gtctgcggggccttc

SEQ ID NO: 509035 - DNA, 15 bp, Homo sapiens
agtctgcggggcctt

SEQ ID NO: 509036 - DNA, 15 bp, Homo sapiens
gagtctgcggggcct

SEQ ID NO: 509037 - DNA, 15 bp, Homo sapiens
ggagtctgcggggcc

SEQ ID NO: 509038 - DNA, 15 bp, Homo sapiens
gggagtctgcggggc

SEQ ID NO: 509039 - DNA, 15 bp, Homo sapiens
ggggagtctgcgggg

SEQ ID NO: 509040 - DNA, 15 bp, Homo sapiens
cggggagtctgcggg

SEQ ID NO: 509041 - DNA, 15 bp, Homo sapiens
gcggggagtctgcgg

SEQ ID NO: 509042 - DNA, 15 bp, Homo sapiens
ggcggggagtctgcg

SEQ ID NO: 509043 - DNA, 15 bp, Homo sapiens
tggcggggagtctgc

SEQ ID NO: 509044 - DNA, 15 bp, Homo sapiens
ctggcggggagtctg

SEQ ID NO: 509045 - DNA, 15 bp, Homo sapiens
actggcggggagtct

SEQ ID NO: 509046 - DNA, 15 bp, Homo sapiens
gactggcggggagtc

SEQ ID NO: 509047 - DNA, 15 bp, Homo sapiens
ggactggcggggagt

SEQ ID NO: 509048 - DNA, 15 bp, Homo sapiens
gggactggcggggag

SEQ ID NO: 509049 - DNA, 15 bp, Homo sapiens
cgggactggcgggga

SEQ ID NO: 509050 - DNA, 15 bp, Homo sapiens
ccgggactggcgggg

SEQ ID NO: 509051 - DNA, 15 bp, Homo sapiens
gccgggactggcggg

SEQ ID NO: 509052 - DNA, 15 bp, Homo sapiens
ggccgggactggcgg

SEQ ID NO: 509053 - DNA, 15 bp, Homo sapiens
tggccgggactggcg

SEQ ID NO: 509054 - DNA, 15 bp, Homo sapiens
gtggccgggactggc

SEQ ID NO: 509055 - DNA, 15 bp, Homo sapiens
tgtggccgggactgg

SEQ ID NO: 509056 - DNA, 15 bp, Homo sapiens
gtgtggccgggactg

SEQ ID NO: 509057 - DNA, 15 bp, Homo sapiens
ggtgtggccgggact

SEQ ID NO: 509058 - DNA, 15 bp, Homo sapiens
gggtgtggccgggac

SEQ ID NO: 509059 - DNA, 15 bp, Homo sapiens
tgggtgtggccggga

SEQ ID NO: 509060 - DNA, 15 bp, Homo sapiens
ctgggtgtggccggg

SEQ ID NO: 509061 - DNA, 15 bp, Homo sapiens
gctgggtgtggccgg

SEQ ID NO: 509062 - DNA, 15 bp, Homo sapiens
ggctgggtgtggccg

SEQ ID NO: 509063 - DNA, 15 bp, Homo sapiens
tggctgggtgtggcc

SEQ ID NO: 509064 - DNA, 15 bp, Homo sapiens
ctggctgggtgtggc

SEQ ID NO: 509065 - DNA, 15 bp, Homo sapiens
cctggctgggtgtgg

SEQ ID NO: 509066 - DNA, 15 bp, Homo sapiens
ccctggctgggtgtg

SEQ ID NO: 509067 - DNA, 15 bp, Homo sapiens
gccctggctgggtgt

SEQ ID NO: 509068 - DNA, 15 bp, Homo sapiens
agccctggctgggtg

SEQ ID NO: 509069 - DNA, 15 bp, Homo sapiens
aagccctggctgggt

SEQ ID NO: 509070 - DNA, 15 bp, Homo sapiens
aaagccctggctggg

SEQ ID NO: 509071 - DNA, 15 bp, Homo sapiens
caaagccctggctgg

SEQ ID NO: 509072 - DNA, 15 bp, Homo sapiens
gcaaagccctggctg

SEQ ID NO: 509073 - DNA, 15 bp, Homo sapiens
tgcaaagccctggct

SEQ ID NO: 509074 - DNA, 15 bp, Homo sapiens
ctgcaaagccctggc

SEQ ID NO: 509075 - DNA, 15 bp, Homo sapiens
gctgcaaagccctgg

SEQ ID NO: 509076 - DNA, 15 bp, Homo sapiens
agctgcaaagccctg

SEQ ID NO: 509077 - DNA, 15 bp, Homo sapiens
gagctgcaaagccct

SEQ ID NO: 509078 - DNA, 15 bp, Homo sapiens
ggagctgcaaagccc

SEQ ID NO: 509079 - DNA, 15 bp, Homo sapiens
tggagctgcaaagcc

SEQ ID NO: 509080 - DNA, 15 bp, Homo sapiens
ctggagctgcaaagc

SEQ ID NO: 509081 - DNA, 15 bp, Homo sapiens
gctggagctgcaaag

SEQ ID NO: 509082 - DNA, 15 bp, Homo sapiens
ggctggagctgcaaa

SEQ ID NO: 509083 - DNA, 15 bp, Homo sapiens
aggctggagctgcaa

SEQ ID NO: 509084 - DNA, 15 bp, Homo sapiens
caggctggagctgca

SEQ ID NO: 509085 - DNA, 15 bp, Homo sapiens
tcaggctggagctgc

SEQ ID NO: 509086 - DNA, 15 bp, Homo sapiens
ctcaggctggagctg

SEQ ID NO: 509087 - DNA, 15 bp, Homo sapiens
tctcaggctggagct

SEQ ID NO: 509088 - DNA, 15 bp, Homo sapiens
ttctcaggctggagc

SEQ ID NO: 509089 - DNA, 15 bp, Homo sapiens
attctcaggctggag

SEQ ID NO: 509090 - DNA, 15 bp, Homo sapiens
cattctcaggctgga

SEQ ID NO: 509091 - DNA, 15 bp, Homo sapiens
acattctcaggctgg

SEQ ID NO: 509092 - DNA, 15 bp, Homo sapiens
aacattctcaggctg

SEQ ID NO: 509093 - DNA, 15 bp, Homo sapiens
taacattctcaggct

SEQ ID NO: 509094 - DNA, 15 bp, Homo sapiens
ctaacattctcaggc

SEQ ID NO: 509095 - DNA, 15 bp, Homo sapiens
gctaacattctcagg

SEQ ID NO: 509096 - DNA, 15 bp, Homo sapiens
ggctaacattctcag

SEQ ID NO: 509097 - DNA, 15 bp, Homo sapiens
gggctaacattctca

SEQ ID NO: 509098 - DNA, 15 bp, Homo sapiens
ggggctaacattctc

SEQ ID NO: 509099 - DNA, 15 bp, Homo sapiens
cggggctaacattct

SEQ ID NO: 509100 - DNA, 15 bp, Homo sapiens
ccggggctaacattc

SEQ ID NO: 509101 - DNA, 15 bp, Homo sapiens
gccggggctaacatt

SEQ ID NO: 509102 - DNA, 15 bp, Homo sapiens
tgccggggctaacat

SEQ ID NO: 509103 - DNA, 15 bp, Homo sapiens
ttgccggggctaaca

SEQ ID NO: 509104 - DNA, 15 bp, Homo sapiens
gttgccggggctaac

SEQ ID NO: 509105 - DNA, 15 bp, Homo sapiens
ggttgccggggctaa

SEQ ID NO: 509106 - DNA, 15 bp, Homo sapiens
gggttgccggggcta

SEQ ID NO: 509107 - DNA, 15 bp, Homo sapiens
ggggttgccggggct

SEQ ID NO: 509108 - DNA, 15 bp, Homo sapiens
aggggttgccggggc

SEQ ID NO: 509109 - DNA, 15 bp, Homo sapiens
aaggggttgccgggg

SEQ ID NO: 509110 - DNA, 15 bp, Homo sapiens
gaaggggttgccggg

SEQ ID NO: 509111 - DNA, 15 bp, Homo sapiens
agaaggggttgccgg

SEQ ID NO: 509112 - DNA, 15 bp, Homo sapiens
cagaaggggttgccg

SEQ ID NO: 509113 - DNA, 15 bp, Homo sapiens
ccagaaggggttgcc

SEQ ID NO: 509114 - DNA, 15 bp, Homo sapiens
gccagaaggggttgc

SEQ ID NO: 509115 - DNA, 15 bp, Homo sapiens
cgccagaaggggttg

SEQ ID NO: 509116 - DNA, 15 bp, Homo sapiens
ccgccagaaggggtt

SEQ ID NO: 509117 - DNA, 15 bp, Homo sapiens
accgccagaaggggt

SEQ ID NO: 509118 - DNA, 15 bp, Homo sapiens
aaccgccagaagggg

SEQ ID NO: 509119 - DNA, 15 bp, Homo sapiens
caaccgccagaaggg

SEQ ID NO: 509120 - DNA, 15 bp, Homo sapiens
acaaccgccagaagg

SEQ ID NO: 509121 - DNA, 15 bp, Homo sapiens
aacaaccgccagaag

SEQ ID NO: 509122 - DNA, 15 bp, Homo sapiens
gaacaaccgccagaa

SEQ ID NO: 509123 - DNA, 15 bp, Homo sapiens
ggaacaaccgccaga

SEQ ID NO: 509124 - DNA, 15 bp, Homo sapiens
aggaacaaccgccag

SEQ ID NO: 509125 - DNA, 15 bp, Homo sapiens
aaggaacaaccgcca

SEQ ID NO: 509126 - DNA, 15 bp, Homo sapiens
aaaggaacaaccgcc

SEQ ID NO: 509127 - DNA, 15 bp, Homo sapiens
taaaggaacaaccgc

SEQ ID NO: 509128 - DNA, 15 bp, Homo sapiens
ttaaaggaacaaccg

SEQ ID NO: 509129 - DNA, 15 bp, Homo sapiens
tttaaaggaacaacc

SEQ ID NO: 509130 - DNA, 15 bp, Homo sapiens
ttttaaaggaacaac

SEQ ID NO: 509131 - DNA, 15 bp, Homo sapiens
tttttaaaggaacaa

SEQ ID NO: 509132 - DNA, 15 bp, Homo sapiens
gtttttaaaggaaca

SEQ ID NO: 509133 - DNA, 15 bp, Homo sapiens
ggtttttaaaggaac

SEQ ID NO: 509134 - DNA, 15 bp, Homo sapiens
tggtttttaaaggaa

SEQ ID NO: 509135 - DNA, 15 bp, Homo sapiens
ttggtttttaaagga

SEQ ID NO: 509136 - DNA, 15 bp, Homo sapiens
attggtttttaaagg

SEQ ID NO: 509137 - DNA, 15 bp, Homo sapiens
aattggtttttaaag

SEQ ID NO: 509138 - DNA, 15 bp, Homo sapiens
gaattggtttttaaa

SEQ ID NO: 509139 - DNA, 15 bp, Homo sapiens
tgaattggtttttaa

SEQ ID NO: 509140 - DNA, 15 bp, Homo sapiens
atgaattggttttta

SEQ ID NO: 509141 - DNA, 15 bp, Homo sapiens
aatgaattggttttt

SEQ ID NO: 509142 - DNA, 15 bp, Homo sapiens
aaatgaattggtttt

SEQ ID NO: 509143 - DNA, 15 bp, Homo sapiens
aaaatgaattggttt

SEQ ID NO: 509144 - DNA, 15 bp, Homo sapiens
aaaaatgaattggtt

SEQ ID NO: 509145 - DNA, 15 bp, Homo sapiens
aaaaaatgaattggt

SEQ ID NO: 509146 - DNA, 15 bp, Homo sapiens
gaaaaaatgaattgg

SEQ ID NO: 509147 - DNA, 15 bp, Homo sapiens
ggaaaaaatgaattg

SEQ ID NO: 509148 - DNA, 15 bp, Homo sapiens
tggaaaaaatgaatt

SEQ ID NO: 509149 - DNA, 15 bp, Homo sapiens
atggaaaaaatgaat

SEQ ID NO: 509150 - DNA, 15 bp, Homo sapiens
gatggaaaaaatgaa

SEQ ID NO: 509151 - DNA, 15 bp, Homo sapiens
tgatggaaaaaatga

SEQ ID NO: 509152 - DNA, 15 bp, Homo sapiens
ttgatggaaaaaatg

SEQ ID NO: 509153 - DNA, 15 bp, Homo sapiens
cttgatggaaaaaat

SEQ ID NO: 509154 - DNA, 15 bp, Homo sapiens
acttgatggaaaaaa

SEQ ID NO: 509155 - DNA, 15 bp, Homo sapiens
gacttgatggaaaaa

SEQ ID NO: 509156 - DNA, 15 bp, Homo sapiens
agacttgatggaaaa

SEQ ID NO: 509157 - DNA, 15 bp, Homo sapiens
aagacttgatggaaa

SEQ ID NO: 509158 - DNA, 15 bp, Homo sapiens
gaagacttgatggaa

SEQ ID NO: 509159 - DNA, 15 bp, Homo sapiens
agaagacttgatgga

SEQ ID NO: 509160 - DNA, 15 bp, Homo sapiens
tagaagacttgatgg

SEQ ID NO: 509161 - DNA, 15 bp, Homo sapiens
gtagaagacttgatg

SEQ ID NO: 509162 - DNA, 15 bp, Homo sapiens
ggtagaagacttgat

SEQ ID NO: 509163 - DNA, 15 bp, Homo sapiens
gggtagaagacttga

SEQ ID NO: 509164 - DNA, 15 bp, Homo sapiens
tgggtagaagacttg

SEQ ID NO: 509165 - DNA, 15 bp, Homo sapiens
ttgggtagaagactt

SEQ ID NO: 509166 - DNA, 15 bp, Homo sapiens
attgggtagaagact

SEQ ID NO: 509167 - DNA, 15 bp, Homo sapiens
cattgggtagaagac

SEQ ID NO: 509168 - DNA, 15 bp, Homo sapiens
ccattgggtagaaga

SEQ ID NO: 509169 - DNA, 15 bp, Homo sapiens
cccattgggtagaag

SEQ ID NO: 509170 - DNA, 15 bp, Homo sapiens
acccattgggtagaa

SEQ ID NO: 509171 - DNA, 15 bp, Homo sapiens
tacccattgggtaga

SEQ ID NO: 509172 - DNA, 15 bp, Homo sapiens
ctacccattgggtag

SEQ ID NO: 509173 - DNA, 15 bp, Homo sapiens
tctacccattgggta

SEQ ID NO: 509174 - DNA, 15 bp, Homo sapiens
gtctacccattgggt

SEQ ID NO: 509175 - DNA, 15 bp, Homo sapiens
agtctacccattggg

SEQ ID NO: 509176 - DNA, 15 bp, Homo sapiens
gagtctacccattgg

SEQ ID NO: 509177 - DNA, 15 bp, Homo sapiens
agagtctacccattg

SEQ ID NO: 509178 - DNA, 15 bp, Homo sapiens
aagagtctacccatt

SEQ ID NO: 509179 - DNA, 15 bp, Homo sapiens
gaagagtctacccat

SEQ ID NO: 509180 - DNA, 15 bp, Homo sapiens
cgaagagtctaccca

SEQ ID NO: 509181 - DNA, 15 bp, Homo sapiens
acgaagagtctaccc

SEQ ID NO: 509182 - DNA, 15 bp, Homo sapiens
aacgaagagtctacc

SEQ ID NO: 509183 - DNA, 15 bp, Homo sapiens
taacgaagagtctac

SEQ ID NO: 509184 - DNA, 15 bp, Homo sapiens
ttaacgaagagtcta

SEQ ID NO: 509185 - DNA, 15 bp, Homo sapiens
tttaacgaagagtct

SEQ ID NO: 509186 - DNA, 15 bp, Homo sapiens
atttaacgaagagtc

SEQ ID NO: 509187 - DNA, 15 bp, Homo sapiens
catttaacgaagagt

SEQ ID NO: 509188 - DNA, 15 bp, Homo sapiens
tcatttaacgaagag

SEQ ID NO: 509189 - DNA, 15 bp, Homo sapiens
gtcatttaacgaaga

SEQ ID NO: 509190 - DNA, 15 bp, Homo sapiens
agtcatttaacgaag

SEQ ID NO: 509191 - DNA, 15 bp, Homo sapiens
cagtcatttaacgaa

SEQ ID NO: 509192 - DNA, 15 bp, Homo sapiens
acagtcatttaacga

SEQ ID NO: 509193 - DNA, 15 bp, Homo sapiens
aacagtcatttaacg

SEQ ID NO: 509194 - DNA, 15 bp, Homo sapiens
taacagtcatttaac

SEQ ID NO: 509195 - DNA, 15 bp, Homo sapiens
ttaacagtcatttaa

SEQ ID NO: 509196 - DNA, 15 bp, Homo sapiens
gttaacagtcattta

SEQ ID NO: 509197 - DNA, 15 bp, Homo sapiens
ggttaacagtcattt

SEQ ID NO: 509198 - DNA, 15 bp, Homo sapiens
tggttaacagtcatt

SEQ ID NO: 509199 - DNA, 15 bp, Homo sapiens
ctggttaacagtcat

SEQ ID NO: 509200 - DNA, 15 bp, Homo sapiens
actggttaacagtca

SEQ ID NO: 509201 - DNA, 15 bp, Homo sapiens
tactggttaacagtc

SEQ ID NO: 509202 - DNA, 15 bp, Homo sapiens
gtactggttaacagt

SEQ ID NO: 509203 - DNA, 15 bp, Homo sapiens
agtactggttaacag

SEQ ID NO: 509204 - DNA, 15 bp, Homo sapiens
cagtactggttaaca

SEQ ID NO: 509205 - DNA, 15 bp, Homo sapiens
tcagtactggttaac

SEQ ID NO: 509206 - DNA, 15 bp, Homo sapiens
ctcagtactggttaa

SEQ ID NO: 509207 - DNA, 15 bp, Homo sapiens
cctcagtactggtta

SEQ ID NO: 509208 - DNA, 15 bp, Homo sapiens
tcctcagtactggtt

SEQ ID NO: 509209 - DNA, 15 bp, Homo sapiens
ctcctcagtactggt

SEQ ID NO: 509210 - DNA, 15 bp, Homo sapiens
tctcctcagtactgg

SEQ ID NO: 509211 - DNA, 15 bp, Homo sapiens
ttctcctcagtactg

SEQ ID NO: 509212 - DNA, 15 bp, Homo sapiens
cttctcctcagtact

SEQ ID NO: 509213 - DNA, 15 bp, Homo sapiens
gcttctcctcagtac

SEQ ID NO: 509214 - DNA, 15 bp, Homo sapiens
tgcttctcctcagta

SEQ ID NO: 509215 - DNA, 15 bp, Homo sapiens
gtgcttctcctcagt

SEQ ID NO: 509216 - DNA, 15 bp, Homo sapiens
tgtgcttctcctcag

SEQ ID NO: 509217 - DNA, 15 bp, Homo sapiens
ttgtgcttctcctca

SEQ ID NO: 509218 - DNA, 15 bp, Homo sapiens
attgtgcttctcctc

SEQ ID NO: 509219 - DNA, 15 bp, Homo sapiens
gattgtgcttctcct

SEQ ID NO: 509220 - DNA, 15 bp, Homo sapiens
tgattgtgcttctcc

SEQ ID NO: 509221 - DNA, 15 bp, Homo sapiens
ttgattgtgcttctc

SEQ ID NO: 509222 - DNA, 15 bp, Homo sapiens
gttgattgtgcttct

SEQ ID NO: 509223 - DNA, 15 bp, Homo sapiens
tgttgattgtgcttc

SEQ ID NO: 509224 - DNA, 15 bp, Homo sapiens
atgttgattgtgctt

SEQ ID NO: 509225 - DNA, 15 bp, Homo sapiens
tatgttgattgtgct

SEQ ID NO: 509226 - DNA, 15 bp, Homo sapiens
ctatgttgattgtgc

SEQ ID NO: 509227 - DNA, 15 bp, Homo sapiens
actatgttgattgtg

SEQ ID NO: 509228 - DNA, 15 bp, Homo sapiens
aactatgttgattgt

SEQ ID NO: 509229 - DNA, 15 bp, Homo sapiens
aaactatgttgattg

SEQ ID NO: 509230 - DNA, 15 bp, Homo sapiens
gaaactatgttgatt

SEQ ID NO: 509231 - DNA, 15 bp, Homo sapiens
agaaactatgttgat

SEQ ID NO: 509232 - DNA, 15 bp, Homo sapiens
gagaaactatgttga

SEQ ID NO: 509233 - DNA, 15 bp, Homo sapiens
agagaaactatgttg

SEQ ID NO: 509234 - DNA, 15 bp, Homo sapiens
cagagaaactatgtt

SEQ ID NO: 509235 - DNA, 15 bp, Homo sapiens
acagagaaactatgt

SEQ ID NO: 509236 - DNA, 15 bp, Homo sapiens
gacagagaaactatg

SEQ ID NO: 509237 - DNA, 15 bp, Homo sapiens
tgacagagaaactat

SEQ ID NO: 509238 - DNA, 15 bp, Homo sapiens
gtgacagagaaacta

SEQ ID NO: 509239 - DNA, 15 bp, Homo sapiens
ggtgacagagaaact

SEQ ID NO: 509240 - DNA, 15 bp, Homo sapiens
aggtgacagagaaac

SEQ ID NO: 509241 - DNA, 15 bp, Homo sapiens
aaggtgacagagaaa

SEQ ID NO: 509242 - DNA, 15 bp, Homo sapiens
aaaggtgacagagaa

SEQ ID NO: 509243 - DNA, 15 bp, Homo sapiens
gaaaggtgacagaga

SEQ ID NO: 509244 - DNA, 15 bp, Homo sapiens
agaaaggtgacagag

SEQ ID NO: 509245 - DNA, 15 bp, Homo sapiens
aagaaaggtgacaga

SEQ ID NO: 509246 - DNA, 15 bp, Homo sapiens
caagaaaggtgacag

SEQ ID NO: 509247 - DNA, 15 bp, Homo sapiens
gcaagaaaggtgaca

SEQ ID NO: 509248 - DNA, 15 bp, Homo sapiens
ggcaagaaaggtgac

SEQ ID NO: 509249 - DNA, 15 bp, Homo sapiens
cggcaagaaaggtga

SEQ ID NO: 509250 - DNA, 15 bp, Homo sapiens
ccggcaagaaaggtg

SEQ ID NO: 509251 - DNA, 15 bp, Homo sapiens
accggcaagaaaggt

SEQ ID NO: 509252 - DNA, 15 bp, Homo sapiens
aaccggcaagaaagg

SEQ ID NO: 509253 - DNA, 15 bp, Homo sapiens
aaaccggcaagaaag

SEQ ID NO: 509254 - DNA, 15 bp, Homo sapiens
aaaaccggcaagaaa

SEQ ID NO: 509255 - DNA, 15 bp, Homo sapiens
aaaaaccggcaagaa

SEQ ID NO: 509256 - DNA, 15 bp, Homo sapiens
aaaaaaccggcaaga

SEQ ID NO: 509257 - DNA, 15 bp, Homo sapiens
gaaaaaaccggcaag

SEQ ID NO: 509258 - DNA, 15 bp, Homo sapiens
ggaaaaaaccggcaa

SEQ ID NO: 509259 - DNA, 15 bp, Homo sapiens
aggaaaaaaccggca

SEQ ID NO: 509260 - DNA, 15 bp, Homo sapiens
gaggaaaaaaccggc

SEQ ID NO: 509261 - DNA, 15 bp, Homo sapiens
ggaggaaaaaaccgg

SEQ ID NO: 509262 - DNA, 15 bp, Homo sapiens
gggaggaaaaaaccg

SEQ ID NO: 509263 - DNA, 15 bp, Homo sapiens
tgggaggaaaaaacc

SEQ ID NO: 509264 - DNA, 15 bp, Homo sapiens
ttgggaggaaaaaac

SEQ ID NO: 509265 - DNA, 15 bp, Homo sapiens
gttgggaggaaaaaa

SEQ ID NO: 509266 - DNA, 15 bp, Homo sapiens
ggttgggaggaaaaa

SEQ ID NO: 509267 - DNA, 15 bp, Homo sapiens
tggttgggaggaaaa

SEQ ID NO: 509268 - DNA, 15 bp, Homo sapiens
atggttgggaggaaa

SEQ ID NO: 509269 - DNA, 15 bp, Homo sapiens
catggttgggaggaa

SEQ ID NO: 509270 - DNA, 15 bp, Homo sapiens
ccatggttgggagga

SEQ ID NO: 509271 - DNA, 15 bp, Homo sapiens
tccatggttgggagg

SEQ ID NO: 509272 - DNA, 15 bp, Homo sapiens
ctccatggttgggag

SEQ ID NO: 509273 - DNA, 15 bp, Homo sapiens
actccatggttggga

SEQ ID NO: 509274 - DNA, 15 bp, Homo sapiens
gactccatggttggg

SEQ ID NO: 509275 - DNA, 15 bp, Homo sapiens
agactccatggttgg

SEQ ID NO: 509276 - DNA, 15 bp, Homo sapiens
gagactccatggttg

SEQ ID NO: 509277 - DNA, 15 bp, Homo sapiens
ggagactccatggtt

SEQ ID NO: 509278 - DNA, 15 bp, Homo sapiens
tggagactccatggt

SEQ ID NO: 509279 - DNA, 15 bp, Homo sapiens
atggagactccatgg

SEQ ID NO: 509280 - DNA, 15 bp, Homo sapiens
aatggagactccatg

SEQ ID NO: 509281 - DNA, 15 bp, Homo sapiens
aaatggagactccat

SEQ ID NO: 509282 - DNA, 15 bp, Homo sapiens
aaaatggagactcca

SEQ ID NO: 509283 - DNA, 15 bp, Homo sapiens
gaaaatggagactcc

SEQ ID NO: 509284 - DNA, 15 bp, Homo sapiens
agaaaatggagactc

SEQ ID NO: 509285 - DNA, 15 bp, Homo sapiens
tagaaaatggagact

SEQ ID NO: 509286 - DNA, 15 bp, Homo sapiens
ttagaaaatggagac

SEQ ID NO: 509287 - DNA, 15 bp, Homo sapiens
cttagaaaatggaga

SEQ ID NO: 509288 - DNA, 15 bp, Homo sapiens
gcttagaaaatggag

SEQ ID NO: 509289 - DNA, 15 bp, Homo sapiens
tgcttagaaaatgga

SEQ ID NO: 509290 - DNA, 15 bp, Homo sapiens
ttgcttagaaaatgg

SEQ ID NO: 509291 - DNA, 15 bp, Homo sapiens
attgcttagaaaatg

SEQ ID NO: 509292 - DNA, 15 bp, Homo sapiens
aattgcttagaaaat

SEQ ID NO: 509293 - DNA, 15 bp, Homo sapiens
taattgcttagaaaa

SEQ ID NO: 509294 - DNA, 15 bp, Homo sapiens
ttaattgcttagaaa

SEQ ID NO: 509295 - DNA, 15 bp, Homo sapiens
tttaattgcttagaa

SEQ ID NO: 509296 - DNA, 15 bp, Homo sapiens
atttaattgcttaga

SEQ ID NO: 509297 - DNA, 15 bp, Homo sapiens
aatttaattgcttag

SEQ ID NO: 509298 - DNA, 15 bp, Homo sapiens
taatttaattgctta

SEQ ID NO: 509299 - DNA, 15 bp, Homo sapiens
ataatttaattgctt

SEQ ID NO: 509300 - DNA, 15 bp, Homo sapiens
tataatttaattgct

SEQ ID NO: 509301 - DNA, 15 bp, Homo sapiens
atataatttaattgc

SEQ ID NO: 509302 - DNA, 15 bp, Homo sapiens
tatataatttaattg

SEQ ID NO: 509303 - DNA, 15 bp, Homo sapiens
atatataatttaatt

SEQ ID NO: 509304 - DNA, 15 bp, Homo sapiens
aatatataatttaat

SEQ ID NO: 509305 - DNA, 15 bp, Homo sapiens
gaatatataatttaa

SEQ ID NO: 509306 - DNA, 15 bp, Homo sapiens
tgaatatataattta

SEQ ID NO: 509307 - DNA, 15 bp, Homo sapiens
ttgaatatataattt

SEQ ID NO: 509308 - DNA, 15 bp, Homo sapiens
gttgaatatataatt

SEQ ID NO: 509309 - DNA, 15 bp, Homo sapiens
tgttgaatatataat

SEQ ID NO: 509310 - DNA, 15 bp, Homo sapiens
ctgttgaatatataa

SEQ ID NO: 509311 - DNA, 15 bp, Homo sapiens
cctgttgaatatata

SEQ ID NO: 509312 - DNA, 15 bp, Homo sapiens
tcctgttgaatatat

SEQ ID NO: 509313 - DNA, 15 bp, Homo sapiens
ttcctgttgaatata

SEQ ID NO: 509314 - DNA, 15 bp, Homo sapiens
gttcctgttgaatat

SEQ ID NO: 509315 - DNA, 15 bp, Homo sapiens
tgttcctgttgaata

SEQ ID NO: 509316 - DNA, 15 bp, Homo sapiens
atgttcctgttgaat

SEQ ID NO: 509317 - DNA, 15 bp, Homo sapiens
aatgttcctgttgaa

SEQ ID NO: 509318 - DNA, 15 bp, Homo sapiens
gaatgttcctgttga

SEQ ID NO: 509319 - DNA, 15 bp, Homo sapiens
ggaatgttcctgttg

SEQ ID NO: 509320 - DNA, 15 bp, Homo sapiens
tggaatgttcctgtt

SEQ ID NO: 509321 - DNA, 15 bp, Homo sapiens
atggaatgttcctgt

SEQ ID NO: 509322 - DNA, 15 bp, Homo sapiens
aatggaatgttcctg

SEQ ID NO: 509323 - DNA, 15 bp, Homo sapiens
aaatggaatgttcct

SEQ ID NO: 509324 - DNA, 15 bp, Homo sapiens
taaatggaatgttcc

SEQ ID NO: 509325 - DNA, 15 bp, Homo sapiens
ttaaatggaatgttc

SEQ ID NO: 509326 - DNA, 15 bp, Homo sapiens
tttaaatggaatgtt

SEQ ID NO: 509327 - DNA, 15 bp, Homo sapiens
ttttaaatggaatgt

SEQ ID NO: 509328 - DNA, 15 bp, Homo sapiens
attttaaatggaatg

SEQ ID NO: 509329 - DNA, 15 bp, Homo sapiens
cattttaaatggaat

SEQ ID NO: 509330 - DNA, 15 bp, Homo sapiens
ccattttaaatggaa

SEQ ID NO: 509331 - DNA, 15 bp, Homo sapiens
accattttaaatgga

SEQ ID NO: 509332 - DNA, 15 bp, Homo sapiens
aaccattttaaatgg

SEQ ID NO: 509333 - DNA, 15 bp, Homo sapiens
gaaccattttaaatg

SEQ ID NO: 509334 - DNA, 15 bp, Homo sapiens
cgaaccattttaaat

SEQ ID NO: 509335 - DNA, 15 bp, Homo sapiens
ccgaaccattttaaa

SEQ ID NO: 509336 - DNA, 15 bp, Homo sapiens
cccgaaccattttaa

SEQ ID NO: 509337 - DNA, 15 bp, Homo sapiens
tcccgaaccatttta

SEQ ID NO: 509338 - DNA, 15 bp, Homo sapiens
gtcccgaaccatttt

SEQ ID NO: 509339 - DNA, 15 bp, Homo sapiens
tgtcccgaaccattt

SEQ ID NO: 509340 - DNA, 15 bp, Homo sapiens
ctgtcccgaaccatt

SEQ ID NO: 509341 - DNA, 15 bp, Homo sapiens
tctgtcccgaaccat

SEQ ID NO: 509342 - DNA, 15 bp, Homo sapiens
ttctgtcccgaacca

SEQ ID NO: 509343 - DNA, 15 bp, Homo sapiens
cttctgtcccgaacc

SEQ ID NO: 509344 - DNA, 15 bp, Homo sapiens
tcttctgtcccgaac

SEQ ID NO: 509345 - DNA, 15 bp, Homo sapiens
gtcttctgtcccgaa

SEQ ID NO: 509346 - DNA, 15 bp, Homo sapiens
agtcttctgtcccga

SEQ ID NO: 509347 - DNA, 15 bp, Homo sapiens
cagtcttctgtcccg

SEQ ID NO: 509348 - DNA, 15 bp, Homo sapiens
tcagtcttctgtccc

SEQ ID NO: 509349 - DNA, 15 bp, Homo sapiens
atcagtcttctgtcc

SEQ ID NO: 509350 - DNA, 15 bp, Homo sapiens
catcagtcttctgtc

SEQ ID NO: 509351 - DNA, 15 bp, Homo sapiens
gcatcagtcttctgt

SEQ ID NO: 509352 - DNA, 15 bp, Homo sapiens
tgcatcagtcttctg

SEQ ID NO: 509353 - DNA, 15 bp, Homo sapiens
gtgcatcagtcttct

SEQ ID NO: 509354 - DNA, 15 bp, Homo sapiens
tgtgcatcagtcttc

SEQ ID NO: 509355 - DNA, 15 bp, Homo sapiens
ttgtgcatcagtctt

SEQ ID NO: 509356 - DNA, 15 bp, Homo sapiens
cttgtgcatcagtct

SEQ ID NO: 509357 - DNA, 15 bp, Homo sapiens
ccttgtgcatcagtc

SEQ ID NO: 509358 - DNA, 15 bp, Homo sapiens
accttgtgcatcagt

SEQ ID NO: 509359 - DNA, 15 bp, Homo sapiens
gaccttgtgcatcag

SEQ ID NO: 509360 - DNA, 15 bp, Homo sapiens
agaccttgtgcatca

SEQ ID NO: 509361 - DNA, 15 bp, Homo sapiens
cagaccttgtgcatc

SEQ ID NO: 509362 - DNA, 15 bp, Homo sapiens
tcagaccttgtgcat

SEQ ID NO: 509363 - DNA, 15 bp, Homo sapiens
ttcagaccttgtgca

SEQ ID NO: 509364 - DNA, 15 bp, Homo sapiens
cttcagaccttgtgc

SEQ ID NO: 509365 - DNA, 15 bp, Homo sapiens
gcttcagaccttgtg

SEQ ID NO: 509366 - DNA, 15 bp, Homo sapiens
agcttcagaccttgt

SEQ ID NO: 509367 - DNA, 15 bp, Homo sapiens
cagcttcagaccttg

SEQ ID NO: 509368 - DNA, 15 bp, Homo sapiens
ccagcttcagacctt

SEQ ID NO: 509369 - DNA, 15 bp, Homo sapiens
tccagcttcagacct

SEQ ID NO: 509370 - DNA, 15 bp, Homo sapiens
ttccagcttcagacc

SEQ ID NO: 509371 - DNA, 15 bp, Homo sapiens
cttccagcttcagac

SEQ ID NO: 509372 - DNA, 15 bp, Homo sapiens
tcttccagcttcaga

SEQ ID NO: 509373 - DNA, 15 bp, Homo sapiens
ttcttccagcttcag

SEQ ID NO: 509374 - DNA, 15 bp, Homo sapiens
tttcttccagcttca

SEQ ID NO: 509375 - DNA, 15 bp, Homo sapiens
ttttcttccagcttc

SEQ ID NO: 509376 - DNA, 15 bp, Homo sapiens
attttcttccagctt

SEQ ID NO: 509377 - DNA, 15 bp, Homo sapiens
tattttcttccagct

SEQ ID NO: 509378 - DNA, 15 bp, Homo sapiens
atattttcttccagc

SEQ ID NO: 509379 - DNA, 15 bp, Homo sapiens
aatattttcttccag

SEQ ID NO: 509380 - DNA, 15 bp, Homo sapiens
aaatattttcttcca

SEQ ID NO: 509381 - DNA, 15 bp, Homo sapiens
taaatattttcttcc

SEQ ID NO: 509382 - DNA, 15 bp, Homo sapiens
ctaaatattttcttc

SEQ ID NO: 509383 - DNA, 15 bp, Homo sapiens
actaaatattttctt

SEQ ID NO: 509384 - DNA, 15 bp, Homo sapiens
cactaaatattttct

SEQ ID NO: 509385 - DNA, 15 bp, Homo sapiens
gcactaaatattttc

SEQ ID NO: 509386 - DNA, 15 bp, Homo sapiens
agcactaaatatttt

SEQ ID NO: 509387 - DNA, 15 bp, Homo sapiens
aagcactaaatattt

SEQ ID NO: 509388 - DNA, 15 bp, Homo sapiens
caagcactaaatatt

SEQ ID NO: 509389 - DNA, 15 bp, Homo sapiens
gcaagcactaaatat

SEQ ID NO: 509390 - DNA, 15 bp, Homo sapiens
ggcaagcactaaata

SEQ ID NO: 509391 - DNA, 15 bp, Homo sapiens
aggcaagcactaaat

SEQ ID NO: 509392 - DNA, 15 bp, Homo sapiens
taggcaagcactaaa

SEQ ID NO: 509393 - DNA, 15 bp, Homo sapiens
gtaggcaagcactaa

SEQ ID NO: 509394 - DNA, 15 bp, Homo sapiens
tgtaggcaagcacta

SEQ ID NO: 509395 - DNA, 15 bp, Homo sapiens
ctgtaggcaagcact

SEQ ID NO: 509396 - DNA, 15 bp, Homo sapiens
tctgtaggcaagcac

SEQ ID NO: 509397 - DNA, 15 bp, Homo sapiens
atctgtaggcaagca

SEQ ID NO: 509398 - DNA, 15 bp, Homo sapiens
aatctgtaggcaagc

SEQ ID NO: 509399 - DNA, 15 bp, Homo sapiens
gaatctgtaggcaag

SEQ ID NO: 509400 - DNA, 15 bp, Homo sapiens
agaatctgtaggcaa

SEQ ID NO: 509401 - DNA, 15 bp, Homo sapiens
cagaatctgtaggca

SEQ ID NO: 509402 - DNA, 15 bp, Homo sapiens
acagaatctgtaggc

SEQ ID NO: 509403 - DNA, 15 bp, Homo sapiens
gacagaatctgtagg

SEQ ID NO: 509404 - DNA, 15 bp, Homo sapiens
tgacagaatctgtag

SEQ ID NO: 509405 - DNA, 15 bp, Homo sapiens
gtgacagaatctgta

SEQ ID NO: 509406 - DNA, 15 bp, Homo sapiens
ggtgacagaatctgt

SEQ ID NO: 509407 - DNA, 15 bp, Homo sapiens
gggtgacagaatctg

SEQ ID NO: 509408 - DNA, 15 bp, Homo sapiens
tgggtgacagaatct

SEQ ID NO: 509409 - DNA, 15 bp, Homo sapiens
atgggtgacagaatc

SEQ ID NO: 509410 - DNA, 15 bp, Homo sapiens
gatgggtgacagaat

SEQ ID NO: 509411 - DNA, 15 bp, Homo sapiens
tgatgggtgacagaa

SEQ ID NO: 509412 - DNA, 15 bp, Homo sapiens
atgatgggtgacaga

SEQ ID NO: 509413 - DNA, 15 bp, Homo sapiens
gatgatgggtgacag

SEQ ID NO: 509414 - DNA, 15 bp, Homo sapiens
agatgatgggtgaca

SEQ ID NO: 509415 - DNA, 15 bp, Homo sapiens
cagatgatgggtgac

SEQ ID NO: 509416 - DNA, 15 bp, Homo sapiens
gcagatgatgggtga

SEQ ID NO: 509417 - DNA, 15 bp, Homo sapiens
agcagatgatgggtg

SEQ ID NO: 509418 - DNA, 15 bp, Homo sapiens
gagcagatgatgggt

SEQ ID NO: 509419 - DNA, 15 bp, Homo sapiens
cgagcagatgatggg

SEQ ID NO: 509420 - DNA, 15 bp, Homo sapiens
ccgagcagatgatgg

SEQ ID NO: 509421 - DNA, 15 bp, Homo sapiens
tccgagcagatgatg

SEQ ID NO: 509422 - DNA, 15 bp, Homo sapiens
ttccgagcagatgat

SEQ ID NO: 509423 - DNA, 15 bp, Homo sapiens
attccgagcagatga

SEQ ID NO: 509424 - DNA, 15 bp, Homo sapiens
cattccgagcagatg

SEQ ID NO: 509425 - DNA, 15 bp, Homo sapiens
gcattccgagcagat

SEQ ID NO: 509426 - DNA, 15 bp, Homo sapiens
cgcattccgagcaga

SEQ ID NO: 509427 - DNA, 15 bp, Homo sapiens
gcgcattccgagcag

SEQ ID NO: 509428 - DNA, 15 bp, Homo sapiens
agcgcattccgagca

SEQ ID NO: 509429 - DNA, 15 bp, Homo sapiens
gagcgcattccgagc

SEQ ID NO: 509430 - DNA, 15 bp, Homo sapiens
ggagcgcattccgag

SEQ ID NO: 509431 - DNA, 15 bp, Homo sapiens
cggagcgcattccga

SEQ ID NO: 509432 - DNA, 15 bp, Homo sapiens
acggagcgcattccg

SEQ ID NO: 509433 - DNA, 15 bp, Homo sapiens
tacggagcgcattcc

SEQ ID NO: 509434 - DNA, 15 bp, Homo sapiens
atacggagcgcattc

SEQ ID NO: 509435 - DNA, 15 bp, Homo sapiens
gatacggagcgcatt

SEQ ID NO: 509436 - DNA, 15 bp, Homo sapiens
agatacggagcgcat

SEQ ID NO: 509437 - DNA, 15 bp, Homo sapiens
aagatacggagcgca

SEQ ID NO: 509438 - DNA, 15 bp, Homo sapiens
aaagatacggagcgc

SEQ ID NO: 509439 - DNA, 15 bp, Homo sapiens
gaaagatacggagcg

SEQ ID NO: 509440 - DNA, 15 bp, Homo sapiens
tgaaagatacggagc

SEQ ID NO: 509441 - DNA, 15 bp, Homo sapiens
ctgaaagatacggag

SEQ ID NO: 509442 - DNA, 15 bp, Homo sapiens
gctgaaagatacgga

SEQ ID NO: 509443 - DNA, 15 bp, Homo sapiens
cgctgaaagatacgg

SEQ ID NO: 509444 - DNA, 15 bp, Homo sapiens
acgctgaaagatacg

SEQ ID NO: 509445 - DNA, 15 bp, Homo sapiens
cacgctgaaagatac

SEQ ID NO: 509446 - DNA, 15 bp, Homo sapiens
acacgctgaaagata

SEQ ID NO: 509447 - DNA, 15 bp, Homo sapiens
gacacgctgaaagat

SEQ ID NO: 509448 - DNA, 15 bp, Homo sapiens
ggacacgctgaaaga

SEQ ID NO: 509449 - DNA, 15 bp, Homo sapiens
cggacacgctgaaag

SEQ ID NO: 509450 - DNA, 15 bp, Homo sapiens
ccggacacgctgaaa

SEQ ID NO: 509451 - DNA, 15 bp, Homo sapiens
gccggacacgctgaa

SEQ ID NO: 509452 - DNA, 15 bp, Homo sapiens
agccggacacgctga

SEQ ID NO: 509453 - DNA, 15 bp, Homo sapiens
gagccggacacgctg

SEQ ID NO: 509454 - DNA, 15 bp, Homo sapiens
agagccggacacgct

SEQ ID NO: 509455 - DNA, 15 bp, Homo sapiens
aagagccggacacgc

SEQ ID NO: 509456 - DNA, 15 bp, Homo sapiens
taagagccggacacg

SEQ ID NO: 509457 - DNA, 15 bp, Homo sapiens
ataagagccggacac

SEQ ID NO: 509458 - DNA, 15 bp, Homo sapiens
cataagagccggaca

SEQ ID NO: 509459 - DNA, 15 bp, Homo sapiens
tcataagagccggac

SEQ ID NO: 509460 - DNA, 15 bp, Homo sapiens
atcataagagccgga

SEQ ID NO: 509461 - DNA, 15 bp, Homo sapiens
aatcataagagccgg

SEQ ID NO: 509462 - DNA, 15 bp, Homo sapiens
caatcataagagccg

SEQ ID NO: 509463 - DNA, 15 bp, Homo sapiens
gcaatcataagagcc

SEQ ID NO: 509464 - DNA, 15 bp, Homo sapiens
tgcaatcataagagc

SEQ ID NO: 509465 - DNA, 15 bp, Homo sapiens
ttgcaatcataagag

SEQ ID NO: 509466 - DNA, 15 bp, Homo sapiens
tttgcaatcataaga

SEQ ID NO: 509467 - DNA, 15 bp, Homo sapiens
atttgcaatcataag

SEQ ID NO: 509468 - DNA, 15 bp, Homo sapiens
catttgcaatcataa

SEQ ID NO: 509469 - DNA, 15 bp, Homo sapiens
ccatttgcaatcata

SEQ ID NO: 509470 - DNA, 15 bp, Homo sapiens
gccatttgcaatcat

SEQ ID NO: 509471 - DNA, 15 bp, Homo sapiens
ggccatttgcaatca

SEQ ID NO: 509472 - DNA, 15 bp, Homo sapiens
gggccatttgcaatc

SEQ ID NO: 509473 - DNA, 15 bp, Homo sapiens
agggccatttgcaat

SEQ ID NO: 509474 - DNA, 15 bp, Homo sapiens
cagggccatttgcaa

SEQ ID NO: 509475 - DNA, 15 bp, Homo sapiens
acagggccatttgca

SEQ ID NO: 509476 - DNA, 15 bp, Homo sapiens
aacagggccatttgc

SEQ ID NO: 509477 - DNA, 15 bp, Homo sapiens
aaacagggccatttg

SEQ ID NO: 509478 - DNA, 15 bp, Homo sapiens
aaaacagggccattt

SEQ ID NO: 509479 - DNA, 15 bp, Homo sapiens
gaaaacagggccatt

SEQ ID NO: 509480 - DNA, 15 bp, Homo sapiens
tgaaaacagggccat

SEQ ID NO: 509481 - DNA, 15 bp, Homo sapiens
ttgaaaacagggcca

SEQ ID NO: 509482 - DNA, 15 bp, Homo sapiens
tttgaaaacagggcc

SEQ ID NO: 509483 - DNA, 15 bp, Homo sapiens
atttgaaaacagggc

SEQ ID NO: 509484 - DNA, 15 bp, Homo sapiens
catttgaaaacaggg

SEQ ID NO: 509485 - DNA, 15 bp, Homo sapiens
ccatttgaaaacagg

SEQ ID NO: 509486 - DNA, 15 bp, Homo sapiens
tccatttgaaaacag

SEQ ID NO: 509487 - DNA, 15 bp, Homo sapiens
ttccatttgaaaaca

SEQ ID NO: 509488 - DNA, 15 bp, Homo sapiens
tttccatttgaaaac

SEQ ID NO: 509489 - DNA, 15 bp, Homo sapiens
atttccatttgaaaa

SEQ ID NO: 509490 - DNA, 15 bp, Homo sapiens
tatttccatttgaaa

SEQ ID NO: 509491 - DNA, 15 bp, Homo sapiens
ttatttccatttgaa

SEQ ID NO: 509492 - DNA, 15 bp, Homo sapiens
cttatttccatttga

SEQ ID NO: 509493 - DNA, 15 bp, Homo sapiens
tcttatttccatttg

SEQ ID NO: 509494 - DNA, 15 bp, Homo sapiens
gtcttatttccattt

SEQ ID NO: 509495 - DNA, 15 bp, Homo sapiens
agtcttatttccatt

SEQ ID NO: 509496 - DNA, 15 bp, Homo sapiens
aagtcttatttccat

SEQ ID NO: 509497 - DNA, 15 bp, Homo sapiens
caagtcttatttcca

SEQ ID NO: 509498 - DNA, 15 bp, Homo sapiens
gcaagtcttatttcc

SEQ ID NO: 509499 - DNA, 15 bp, Homo sapiens
tgcaagtcttatttc

SEQ ID NO: 509500 - DNA, 15 bp, Homo sapiens
ttgcaagtcttattt

SEQ ID NO: 509501 - DNA, 15 bp, Homo sapiens
tttgcaagtcttatt

SEQ ID NO: 509502 - DNA, 15 bp, Homo sapiens
gtttgcaagtcttat

SEQ ID NO: 509503 - DNA, 15 bp, Homo sapiens
agtttgcaagtctta

SEQ ID NO: 509504 - DNA, 15 bp, Homo sapiens
cagtttgcaagtctt

SEQ ID NO: 509505 - DNA, 15 bp, Homo sapiens
tcagtttgcaagtct

SEQ ID NO: 509506 - DNA, 15 bp, Homo sapiens
atcagtttgcaagtc

SEQ ID NO: 509507 - DNA, 15 bp, Homo sapiens
aatcagtttgcaagt

SEQ ID NO: 509508 - DNA, 15 bp, Homo sapiens
taatcagtttgcaag

SEQ ID NO: 509509 - DNA, 15 bp, Homo sapiens
ataatcagtttgcaa

SEQ ID NO: 509510 - DNA, 15 bp, Homo sapiens
cataatcagtttgca

SEQ ID NO: 509511 - DNA, 15 bp, Homo sapiens
acataatcagtttgc

SEQ ID NO: 509512 - DNA, 15 bp, Homo sapiens
cacataatcagtttg

SEQ ID NO: 509513 - DNA, 15 bp, Homo sapiens
acacataatcagttt

SEQ ID NO: 509514 - DNA, 15 bp, Homo sapiens
tacacataatcagtt

SEQ ID NO: 509515 - DNA, 15 bp, Homo sapiens
atacacataatcagt

SEQ ID NO: 509516 - DNA, 15 bp, Homo sapiens
aatacacataatcag

SEQ ID NO: 509517 - DNA, 15 bp, Homo sapiens
caatacacataatca

SEQ ID NO: 509518 - DNA, 15 bp, Homo sapiens
tcaatacacataatc

SEQ ID NO: 509519 - DNA, 15 bp, Homo sapiens
ttcaatacacataat

SEQ ID NO: 509520 - DNA, 15 bp, Homo sapiens
attcaatacacataa

SEQ ID NO: 509521 - DNA, 15 bp, Homo sapiens
gattcaatacacata

SEQ ID NO: 509522 - DNA, 15 bp, Homo sapiens
tgattcaatacacat

SEQ ID NO: 509523 - DNA, 15 bp, Homo sapiens
ctgattcaatacaca

SEQ ID NO: 509524 - DNA, 15 bp, Homo sapiens
tctgattcaatacac

SEQ ID NO: 509525 - DNA, 15 bp, Homo sapiens
ttctgattcaataca

SEQ ID NO: 509526 - DNA, 15 bp, Homo sapiens
attctgattcaatac

SEQ ID NO: 509527 - DNA, 15 bp, Homo sapiens
gattctgattcaata

SEQ ID NO: 509528 - DNA, 15 bp, Homo sapiens
tgattctgattcaat

SEQ ID NO: 509529 - DNA, 15 bp, Homo sapiens
gtgattctgattcaa

SEQ ID NO: 509530 - DNA, 15 bp, Homo sapiens
agtgattctgattca

SEQ ID NO: 509531 - DNA, 15 bp, Homo sapiens
gagtgattctgattc

SEQ ID NO: 509532 - DNA, 15 bp, Homo sapiens
cgagtgattctgatt

SEQ ID NO: 509533 - DNA, 15 bp, Homo sapiens
gcgagtgattctgat

SEQ ID NO: 509534 - DNA, 15 bp, Homo sapiens
agcgagtgattctga

SEQ ID NO: 509535 - DNA, 15 bp, Homo sapiens
tagcgagtgattctg

SEQ ID NO: 509536 - DNA, 15 bp, Homo sapiens
ctagcgagtgattct

SEQ ID NO: 509537 - DNA, 15 bp, Homo sapiens
tctagcgagtgattc

SEQ ID NO: 509538 - DNA, 15 bp, Homo sapiens
atctagcgagtgatt

SEQ ID NO: 509539 - DNA, 15 bp, Homo sapiens
gatctagcgagtgat

SEQ ID NO: 509540 - DNA, 15 bp, Homo sapiens
ggatctagcgagtga

SEQ ID NO: 509541 - DNA, 15 bp, Homo sapiens
aggatctagcgagtg

SEQ ID NO: 509542 - DNA, 15 bp, Homo sapiens
gaggatctagcgagt

SEQ ID NO: 509543 - DNA, 15 bp, Homo sapiens
agaggatctagcgag

SEQ ID NO: 509544 - DNA, 15 bp, Homo sapiens
aagaggatctagcga

SEQ ID NO: 509545 - DNA, 15 bp, Homo sapiens
caagaggatctagcg

SEQ ID NO: 509546 - DNA, 15 bp, Homo sapiens
acaagaggatctagc

SEQ ID NO: 509547 - DNA, 15 bp, Homo sapiens
aacaagaggatctag

SEQ ID NO: 509548 - DNA, 15 bp, Homo sapiens
aaacaagaggatcta

SEQ ID NO: 509549 - DNA, 15 bp, Homo sapiens
taaacaagaggatct

SEQ ID NO: 509550 - DNA, 15 bp, Homo sapiens
ttaaacaagaggatc

SEQ ID NO: 509551 - DNA, 15 bp, Homo sapiens
tttaaacaagaggat

SEQ ID NO: 509552 - DNA, 15 bp, Homo sapiens
ttttaaacaagagga

SEQ ID NO: 509553 - DNA, 15 bp, Homo sapiens
attttaaacaagagg

SEQ ID NO: 509554 - DNA, 15 bp, Homo sapiens
cattttaaacaagag

SEQ ID NO: 509555 - DNA, 15 bp, Homo sapiens
acattttaaacaaga

SEQ ID NO: 509556 - DNA, 15 bp, Homo sapiens
tacattttaaacaag

SEQ ID NO: 509557 - DNA, 15 bp, Homo sapiens
atacattttaaacaa

SEQ ID NO: 509558 - DNA, 15 bp, Homo sapiens
aatacattttaaaca

SEQ ID NO: 509559 - DNA, 15 bp, Homo sapiens
caatacattttaaac

SEQ ID NO: 509560 - DNA, 15 bp, Homo sapiens
tcaatacattttaaa

SEQ ID NO: 509561 - DNA, 15 bp, Homo sapiens
ttcaatacattttaa

SEQ ID NO: 509562 - DNA, 15 bp, Homo sapiens
tttcaatacatttta

SEQ ID NO: 509563 - DNA, 15 bp, Homo sapiens
ttttcaatacatttt

SEQ ID NO: 509564 - DNA, 15 bp, Homo sapiens
tttttcaatacattt

SEQ ID NO: 509565 - DNA, 15 bp, Homo sapiens
ttttttcaatacatt

SEQ ID NO: 509566 - DNA, 15 bp, Homo sapiens
cttttttcaatacat

SEQ ID NO: 509567 - DNA, 15 bp, Homo sapiens
ccttttttcaataca

SEQ ID NO: 509568 - DNA, 15 bp, Homo sapiens
tccttttttcaatac

SEQ ID NO: 509569 - DNA, 15 bp, Homo sapiens
atccttttttcaata

SEQ ID NO: 509570 - DNA, 15 bp, Homo sapiens
catccttttttcaat

SEQ ID NO: 509571 - DNA, 15 bp, Homo sapiens
tcatccttttttcaa

SEQ ID NO: 509572 - DNA, 15 bp, Homo sapiens
atcatccttttttca

SEQ ID NO: 509573 - DNA, 15 bp, Homo sapiens
catcatccttttttc

SEQ ID NO: 509574 - DNA, 15 bp, Homo sapiens
ccatcatcctttttt

SEQ ID NO: 509575 - DNA, 15 bp, Homo sapiens
cccatcatccttttt

SEQ ID NO: 509576 - DNA, 15 bp, Homo sapiens
acccatcatcctttt

SEQ ID NO: 509577 - DNA, 15 bp, Homo sapiens
cacccatcatccttt

SEQ ID NO: 509578 - DNA, 15 bp, Homo sapiens
gcacccatcatcctt

SEQ ID NO: 509579 - DNA, 15 bp, Homo sapiens
tgcacccatcatcct

SEQ ID NO: 509580 - DNA, 15 bp, Homo sapiens
ctgcacccatcatcc

SEQ ID NO: 509581 - DNA, 15 bp, Homo sapiens
tctgcacccatcatc

SEQ ID NO: 509582 - DNA, 15 bp, Homo sapiens
gtctgcacccatcat

SEQ ID NO: 509583 - DNA, 15 bp, Homo sapiens
ggtctgcacccatca

SEQ ID NO: 509584 - DNA, 15 bp, Homo sapiens
aggtctgcacccatc

SEQ ID NO: 509585 - DNA, 15 bp, Homo sapiens
gaggtctgcacccat

SEQ ID NO: 509586 - DNA, 15 bp, Homo sapiens
agaggtctgcaccca

SEQ ID NO: 509587 - DNA, 15 bp, Homo sapiens
cagaggtctgcaccc

SEQ ID NO: 509588 - DNA, 15 bp, Homo sapiens
acagaggtctgcacc

SEQ ID NO: 509589 - DNA, 15 bp, Homo sapiens
tacagaggtctgcac

SEQ ID NO: 509590 - DNA, 15 bp, Homo sapiens
ttacagaggtctgca

SEQ ID NO: 509591 - DNA, 15 bp, Homo sapiens
gttacagaggtctgc

SEQ ID NO: 509592 - DNA, 15 bp, Homo sapiens
ggttacagaggtctg

SEQ ID NO: 509593 - DNA, 15 bp, Homo sapiens
tggttacagaggtct

SEQ ID NO: 509594 - DNA, 15 bp, Homo sapiens
ctggttacagaggtc

SEQ ID NO: 509595 - DNA, 15 bp, Homo sapiens
gctggttacagaggt

SEQ ID NO: 509596 - DNA, 15 bp, Homo sapiens
agctggttacagagg

SEQ ID NO: 509597 - DNA, 15 bp, Homo sapiens
gagctggttacagag

SEQ ID NO: 509598 - DNA, 15 bp, Homo sapiens
agagctggttacaga

SEQ ID NO: 509599 - DNA, 15 bp, Homo sapiens
cagagctggttacag

SEQ ID NO: 509600 - DNA, 15 bp, Homo sapiens
acagagctggttaca

SEQ ID NO: 509601 - DNA, 15 bp, Homo sapiens
gacagagctggttac

SEQ ID NO: 509602 - DNA, 15 bp, Homo sapiens
agacagagctggtta

SEQ ID NO: 509603 - DNA, 15 bp, Homo sapiens
gagacagagctggtt

SEQ ID NO: 509604 - DNA, 15 bp, Homo sapiens
agagacagagctggt

SEQ ID NO: 509605 - DNA, 15 bp, Homo sapiens
aagagacagagctgg

SEQ ID NO: 509606 - DNA, 15 bp, Homo sapiens
gaagagacagagctg

SEQ ID NO: 509607 - DNA, 15 bp, Homo sapiens
agaagagacagagct

SEQ ID NO: 509608 - DNA, 15 bp, Homo sapiens
gagaagagacagagc

SEQ ID NO: 509609 - DNA, 15 bp, Homo sapiens
agagaagagacagag

SEQ ID NO: 509610 - DNA, 15 bp, Homo sapiens
cagagaagagacaga

SEQ ID NO: 509611 - DNA, 15 bp, Homo sapiens
ccagagaagagacag

SEQ ID NO: 509612 - DNA, 15 bp, Homo sapiens
cccagagaagagaca

SEQ ID NO: 509613 - DNA, 15 bp, Homo sapiens
tcccagagaagagac

SEQ ID NO: 509614 - DNA, 15 bp, Homo sapiens
ctcccagagaagaga

SEQ ID NO: 509615 - DNA, 15 bp, Homo sapiens
cctcccagagaagag

SEQ ID NO: 509616 - DNA, 15 bp, Homo sapiens
acctcccagagaaga

SEQ ID NO: 509617 - DNA, 15 bp, Homo sapiens
gacctcccagagaag

SEQ ID NO: 509618 - DNA, 15 bp, Homo sapiens
cgacctcccagagaa

SEQ ID NO: 509619 - DNA, 15 bp, Homo sapiens
tcgacctcccagaga

SEQ ID NO: 509620 - DNA, 15 bp, Homo sapiens
atcgacctcccagag

SEQ ID NO: 509621 - DNA, 15 bp, Homo sapiens
gatcgacctcccaga

SEQ ID NO: 509622 - DNA, 15 bp, Homo sapiens
agatcgacctcccag

SEQ ID NO: 509623 - DNA, 15 bp, Homo sapiens
tagatcgacctccca

SEQ ID NO: 509624 - DNA, 15 bp, Homo sapiens
atagatcgacctccc

SEQ ID NO: 509625 - DNA, 15 bp, Homo sapiens
aatagatcgacctcc

SEQ ID NO: 509626 - DNA, 15 bp, Homo sapiens
aaatagatcgacctc

SEQ ID NO: 509627 - DNA, 15 bp, Homo sapiens
aaaatagatcgacct

SEQ ID NO: 509628 - DNA, 15 bp, Homo sapiens
caaaatagatcgacc

SEQ ID NO: 509629 - DNA, 15 bp, Homo sapiens
gcaaaatagatcgac

SEQ ID NO: 509630 - DNA, 15 bp, Homo sapiens
tgcaaaatagatcga

SEQ ID NO: 509631 - DNA, 15 bp, Homo sapiens
ttgcaaaatagatcg

SEQ ID NO: 509632 - DNA, 15 bp, Homo sapiens
gttgcaaaatagatc

SEQ ID NO: 509633 - DNA, 15 bp, Homo sapiens
agttgcaaaatagat

SEQ ID NO: 509634 - DNA, 15 bp, Homo sapiens
aagttgcaaaataga

SEQ ID NO: 509635 - DNA, 15 bp, Homo sapiens
aaagttgcaaaatag

SEQ ID NO: 509636 - DNA, 15 bp, Homo sapiens
aaaagttgcaaaata

SEQ ID NO: 509637 - DNA, 15 bp, Homo sapiens
aaaaagttgcaaaat

SEQ ID NO: 509638 - DNA, 15 bp, Homo sapiens
caaaaagttgcaaaa

SEQ ID NO: 509639 - DNA, 15 bp, Homo sapiens
gcaaaaagttgcaaa

SEQ ID NO: 509640 - DNA, 15 bp, Homo sapiens
ggcaaaaagttgcaa

SEQ ID NO: 509641 - DNA, 15 bp, Homo sapiens
tggcaaaaagttgca

SEQ ID NO: 509642 - DNA, 15 bp, Homo sapiens
atggcaaaaagttgc

SEQ ID NO: 509643 - DNA, 15 bp, Homo sapiens
aatggcaaaaagttg

SEQ ID NO: 509644 - DNA, 15 bp, Homo sapiens
aaatggcaaaaagtt

SEQ ID NO: 509645 - DNA, 15 bp, Homo sapiens
caaatggcaaaaagt

SEQ ID NO: 509646 - DNA, 15 bp, Homo sapiens
tcaaatggcaaaaag

SEQ ID NO: 509647 - DNA, 15 bp, Homo sapiens
ctcaaatggcaaaaa

SEQ ID NO: 509648 - DNA, 15 bp, Homo sapiens
gctcaaatggcaaaa

SEQ ID NO: 509649 - DNA, 15 bp, Homo sapiens
cgctcaaatggcaaa

SEQ ID NO: 509650 - DNA, 15 bp, Homo sapiens
acgctcaaatggcaa

SEQ ID NO: 509651 - DNA, 15 bp, Homo sapiens
cacgctcaaatggca

SEQ ID NO: 509652 - DNA, 15 bp, Homo sapiens
acacgctcaaatggc

SEQ ID NO: 509653 - DNA, 15 bp, Homo sapiens
aacacgctcaaatgg

SEQ ID NO: 509654 - DNA, 15 bp, Homo sapiens
aaacacgctcaaatg

SEQ ID NO: 509655 - DNA, 15 bp, Homo sapiens
gaaacacgctcaaat

SEQ ID NO: 509656 - DNA, 15 bp, Homo sapiens
tgaaacacgctcaaa

SEQ ID NO: 509657 - DNA, 15 bp, Homo sapiens
ctgaaacacgctcaa

SEQ ID NO: 509658 - DNA, 15 bp, Homo sapiens
gctgaaacacgctca

SEQ ID NO: 509659 - DNA, 15 bp, Homo sapiens
ggctgaaacacgctc

SEQ ID NO: 509660 - DNA, 15 bp, Homo sapiens
tggctgaaacacgct

SEQ ID NO: 509661 - DNA, 15 bp, Homo sapiens
ctggctgaaacacgc

SEQ ID NO: 509662 - DNA, 15 bp, Homo sapiens
tctggctgaaacacg

SEQ ID NO: 509663 - DNA, 15 bp, Homo sapiens
atctggctgaaacac

SEQ ID NO: 509664 - DNA, 15 bp, Homo sapiens
tatctggctgaaaca

SEQ ID NO: 509665 - DNA, 15 bp, Homo sapiens
ttatctggctgaaac

SEQ ID NO: 509666 - DNA, 15 bp, Homo sapiens
attatctggctgaaa

SEQ ID NO: 509667 - DNA, 15 bp, Homo sapiens
aattatctggctgaa

SEQ ID NO: 509668 - DNA, 15 bp, Homo sapiens
taattatctggctga

SEQ ID NO: 509669 - DNA, 15 bp, Homo sapiens
gtaattatctggctg

SEQ ID NO: 509670 - DNA, 15 bp, Homo sapiens
cgtaattatctggct

SEQ ID NO: 509671 - DNA, 15 bp, Homo sapiens
acgtaattatctggc

SEQ ID NO: 509672 - DNA, 15 bp, Homo sapiens
aacgtaattatctgg

SEQ ID NO: 509673 - DNA, 15 bp, Homo sapiens
caacgtaattatctg

SEQ ID NO: 509674 - DNA, 15 bp, Homo sapiens
gcaacgtaattatct

SEQ ID NO: 509675 - DNA, 15 bp, Homo sapiens
ggcaacgtaattatc

SEQ ID NO: 509676 - DNA, 15 bp, Homo sapiens
tggcaacgtaattat

SEQ ID NO: 509677 - DNA, 15 bp, Homo sapiens
atggcaacgtaatta

SEQ ID NO: 509678 - DNA, 15 bp, Homo sapiens
aatggcaacgtaatt

SEQ ID NO: 509679 - DNA, 15 bp, Homo sapiens
caatggcaacgtaat

SEQ ID NO: 509680 - DNA, 15 bp, Homo sapiens
acaatggcaacgtaa

SEQ ID NO: 509681 - DNA, 15 bp, Homo sapiens
cacaatggcaacgta

SEQ ID NO: 509682 - DNA, 15 bp, Homo sapiens
acacaatggcaacgt

SEQ ID NO: 509683 - DNA, 15 bp, Homo sapiens
aacacaatggcaacg

SEQ ID NO: 509684 - DNA, 15 bp, Homo sapiens
taacacaatggcaac

SEQ ID NO: 509685 - DNA, 15 bp, Homo sapiens
gtaacacaatggcaa

SEQ ID NO: 509686 - DNA, 15 bp, Homo sapiens
ggtaacacaatggca

SEQ ID NO: 509687 - DNA, 15 bp, Homo sapiens
cggtaacacaatggc

SEQ ID NO: 509688 - DNA, 15 bp, Homo sapiens
ccggtaacacaatgg

SEQ ID NO: 509689 - DNA, 15 bp, Homo sapiens
gccggtaacacaatg

SEQ ID NO: 509690 - DNA, 15 bp, Homo sapiens
ggccggtaacacaat

SEQ ID NO: 509691 - DNA, 15 bp, Homo sapiens
gggccggtaacacaa

SEQ ID NO: 509692 - DNA, 15 bp, Homo sapiens
tgggccggtaacaca

SEQ ID NO: 509693 - DNA, 15 bp, Homo sapiens
ttgggccggtaacac

SEQ ID NO: 509694 - DNA, 15 bp, Homo sapiens
tttgggccggtaaca

SEQ ID NO: 509695 - DNA, 15 bp, Homo sapiens
ctttgggccggtaac

SEQ ID NO: 509696 - DNA, 15 bp, Homo sapiens
gctttgggccggtaa

SEQ ID NO: 509697 - DNA, 15 bp, Homo sapiens
agctttgggccggta

SEQ ID NO: 509698 - DNA, 15 bp, Homo sapiens
gagctttgggccggt

SEQ ID NO: 509699 - DNA, 15 bp, Homo sapiens
tgagctttgggccgg

SEQ ID NO: 509700 - DNA, 15 bp, Homo sapiens
ctgagctttgggccg

SEQ ID NO: 509701 - DNA, 15 bp, Homo sapiens
tctgagctttgggcc

SEQ ID NO: 509702 - DNA, 15 bp, Homo sapiens
gtctgagctttgggc

SEQ ID NO: 509703 - DNA, 15 bp, Homo sapiens
tgtctgagctttggg

SEQ ID NO: 509704 - DNA, 15 bp, Homo sapiens
ctgtctgagctttgg

SEQ ID NO: 509705 - DNA, 15 bp, Homo sapiens
cctgtctgagctttg

SEQ ID NO: 509706 - DNA, 15 bp, Homo sapiens
ccctgtctgagcttt

SEQ ID NO: 509707 - DNA, 15 bp, Homo sapiens
accctgtctgagctt

SEQ ID NO: 509708 - DNA, 15 bp, Homo sapiens
taccctgtctgagct

SEQ ID NO: 509709 - DNA, 15 bp, Homo sapiens
gtaccctgtctgagc

SEQ ID NO: 509710 - DNA, 15 bp, Homo sapiens
tgtaccctgtctgag

SEQ ID NO: 509711 - DNA, 15 bp, Homo sapiens
gtgtaccctgtctga

SEQ ID NO: 509712 - DNA, 15 bp, Homo sapiens
tgtgtaccctgtctg

SEQ ID NO: 509713 - DNA, 15 bp, Homo sapiens
gtgtgtaccctgtct

SEQ ID NO: 509714 - DNA, 15 bp, Homo sapiens
tgtgtgtaccctgtc

SEQ ID NO: 509715 - DNA, 15 bp, Homo sapiens
gtgtgtgtaccctgt

SEQ ID NO: 509716 - DNA, 15 bp, Homo sapiens
ggtgtgtgtaccctg

SEQ ID NO: 509717 - DNA, 15 bp, Homo sapiens
tggtgtgtgtaccct

SEQ ID NO: 509718 - DNA, 15 bp, Homo sapiens
gtggtgtgtgtaccc

SEQ ID NO: 509719 - DNA, 15 bp, Homo sapiens
ggtggtgtgtgtacc

SEQ ID NO: 509720 - DNA, 15 bp, Homo sapiens
tggtggtgtgtgtac

SEQ ID NO: 509721 - DNA, 15 bp, Homo sapiens
gtggtggtgtgtgta

SEQ ID NO: 509722 - DNA, 15 bp, Homo sapiens
ggtggtggtgtgtgt

SEQ ID NO: 509723 - DNA, 15 bp, Homo sapiens
gggtggtggtgtgtg

SEQ ID NO: 509724 - DNA, 15 bp, Homo sapiens
tgggtggtggtgtgt

SEQ ID NO: 509725 - DNA, 15 bp, Homo sapiens
ctgggtggtggtgtg

SEQ ID NO: 509726 - DNA, 15 bp, Homo sapiens
gctgggtggtggtgt

SEQ ID NO: 509727 - DNA, 15 bp, Homo sapiens
ggctgggtggtggtg

SEQ ID NO: 509728 - DNA, 15 bp, Homo sapiens
cggctgggtggtggt

SEQ ID NO: 509729 - DNA, 15 bp, Homo sapiens
acggctgggtggtgg

SEQ ID NO: 509730 - DNA, 15 bp, Homo sapiens
gacggctgggtggtg

SEQ ID NO: 509731 - DNA, 15 bp, Homo sapiens
agacggctgggtggt

SEQ ID NO: 509732 - DNA, 15 bp, Homo sapiens
gagacggctgggtgg

SEQ ID NO: 509733 - DNA, 15 bp, Homo sapiens
ggagacggctgggtg

SEQ ID NO: 509734 - DNA, 15 bp, Homo sapiens
gggagacggctgggt

SEQ ID NO: 509735 - DNA, 15 bp, Homo sapiens
tgggagacggctggg

SEQ ID NO: 509736 - DNA, 15 bp, Homo sapiens
ctgggagacggctgg

SEQ ID NO: 509737 - DNA, 15 bp, Homo sapiens
cctgggagacggctg

SEQ ID NO: 509738 - DNA, 15 bp, Homo sapiens
gcctgggagacggct

SEQ ID NO: 509739 - DNA, 15 bp, Homo sapiens
ggcctgggagacggc

SEQ ID NO: 509740 - DNA, 15 bp, Homo sapiens
gggcctgggagacgg

SEQ ID NO: 509741 - DNA, 15 bp, Homo sapiens
agggcctgggagacg

SEQ ID NO: 509742 - DNA, 15 bp, Homo sapiens
gagggcctgggagac

SEQ ID NO: 509743 - DNA, 15 bp, Homo sapiens
ggagggcctgggaga

SEQ ID NO: 509744 - DNA, 15 bp, Homo sapiens
gggagggcctgggag

SEQ ID NO: 509745 - DNA, 15 bp, Homo sapiens
ggggagggcctggga

SEQ ID NO: 509746 - DNA, 15 bp, Homo sapiens
tggggagggcctggg

SEQ ID NO: 509747 - DNA, 15 bp, Homo sapiens
gtggggagggcctgg

SEQ ID NO: 509748 - DNA, 15 bp, Homo sapiens
agtggggagggcctg

SEQ ID NO: 509749 - DNA, 15 bp, Homo sapiens
tagtggggagggcct

SEQ ID NO: 509750 - DNA, 15 bp, Homo sapiens
ctagtggggagggcc

SEQ ID NO: 509751 - DNA, 15 bp, Homo sapiens
cctagtggggagggc

SEQ ID NO: 509752 - DNA, 15 bp, Homo sapiens
tcctagtggggaggg

SEQ ID NO: 509753 - DNA, 15 bp, Homo sapiens
atcctagtggggagg

SEQ ID NO: 509754 - DNA, 15 bp, Homo sapiens
gatcctagtggggag

SEQ ID NO: 509755 - DNA, 15 bp, Homo sapiens
tgatcctagtgggga

SEQ ID NO: 509756 - DNA, 15 bp, Homo sapiens
gtgatcctagtgggg

SEQ ID NO: 509757 - DNA, 15 bp, Homo sapiens
ggtgatcctagtggg

SEQ ID NO: 509758 - DNA, 15 bp, Homo sapiens
gggtgatcctagtgg

SEQ ID NO: 509759 - DNA, 15 bp, Homo sapiens
ggggtgatcctagtg

SEQ ID NO: 509760 - DNA, 15 bp, Homo sapiens
gggggtgatcctagt

SEQ ID NO: 509761 - DNA, 15 bp, Homo sapiens
agggggtgatcctag

SEQ ID NO: 509762 - DNA, 15 bp, Homo sapiens
tagggggtgatccta

SEQ ID NO: 509763 - DNA, 15 bp, Homo sapiens
ttagggggtgatcct

SEQ ID NO: 509764 - DNA, 15 bp, Homo sapiens
tttagggggtgatcc

SEQ ID NO: 509765 - DNA, 15 bp, Homo sapiens
gtttagggggtgatc

SEQ ID NO: 509766 - DNA, 15 bp, Homo sapiens
tgtttagggggtgat

SEQ ID NO: 509767 - DNA, 15 bp, Homo sapiens
gtgtttagggggtga

SEQ ID NO: 509768 - DNA, 15 bp, Homo sapiens
ggtgtttagggggtg

SEQ ID NO: 509769 - DNA, 15 bp, Homo sapiens
tggtgtttagggggt

SEQ ID NO: 509770 - DNA, 15 bp, Homo sapiens
gtggtgtttaggggg

SEQ ID NO: 509771 - DNA, 15 bp, Homo sapiens
tgtggtgtttagggg

SEQ ID NO: 509772 - DNA, 15 bp, Homo sapiens
ctgtggtgtttaggg

SEQ ID NO: 509773 - DNA, 15 bp, Homo sapiens
cctgtggtgtttagg

SEQ ID NO: 509774 - DNA, 15 bp, Homo sapiens
gcctgtggtgtttag

SEQ ID NO: 509775 - DNA, 15 bp, Homo sapiens
tgcctgtggtgttta

SEQ ID NO: 509776 - DNA, 15 bp, Homo sapiens
gtgcctgtggtgttt

SEQ ID NO: 509777 - DNA, 15 bp, Homo sapiens
tgtgcctgtggtgtt

SEQ ID NO: 509778 - DNA, 15 bp, Homo sapiens
atgtgcctgtggtgt

SEQ ID NO: 509779 - DNA, 15 bp, Homo sapiens
catgtgcctgtggtg

SEQ ID NO: 509780 - DNA, 15 bp, Homo sapiens
tcatgtgcctgtggt

SEQ ID NO: 509781 - DNA, 15 bp, Homo sapiens
gtcatgtgcctgtgg

SEQ ID NO: 509782 - DNA, 15 bp, Homo sapiens
tgtcatgtgcctgtg

SEQ ID NO: 509783 - DNA, 15 bp, Homo sapiens
gtgtcatgtgcctgt

SEQ ID NO: 509784 - DNA, 15 bp, Homo sapiens
tgtgtcatgtgcctg

SEQ ID NO: 509785 - DNA, 15 bp, Homo sapiens
ctgtgtcatgtgcct

SEQ ID NO: 509786 - DNA, 15 bp, Homo sapiens
actgtgtcatgtgcc

SEQ ID NO: 509787 - DNA, 15 bp, Homo sapiens
gactgtgtcatgtgc

SEQ ID NO: 509788 - DNA, 15 bp, Homo sapiens
tgactgtgtcatgtg

SEQ ID NO: 509789 - DNA, 15 bp, Homo sapiens
atgactgtgtcatgt

SEQ ID NO: 509790 - DNA, 15 bp, Homo sapiens
gatgactgtgtcatg

SEQ ID NO: 509791 - DNA, 15 bp, Homo sapiens
ggatgactgtgtcat

SEQ ID NO: 509792 - DNA, 15 bp, Homo sapiens
tggatgactgtgtca

SEQ ID NO: 509793 - DNA, 15 bp, Homo sapiens
gtggatgactgtgtc

SEQ ID NO: 509794 - DNA, 15 bp, Homo sapiens
ggtggatgactgtgt

SEQ ID NO: 509795 - DNA, 15 bp, Homo sapiens
tggtggatgactgtg

SEQ ID NO: 509796 - DNA, 15 bp, Homo sapiens
gtggtggatgactgt

SEQ ID NO: 509797 - DNA, 15 bp, Homo sapiens
ggtggtggatgactg

SEQ ID NO: 509798 - DNA, 15 bp, Homo sapiens
tggtggtggatgact

SEQ ID NO: 509799 - DNA, 15 bp, Homo sapiens
atggtggtggatgac

SEQ ID NO: 509800 - DNA, 15 bp, Homo sapiens
gatggtggtggatga

SEQ ID NO: 509801 - DNA, 15 bp, Homo sapiens
ggatggtggtggatg

SEQ ID NO: 509802 - DNA, 15 bp, Homo sapiens
gggatggtggtggat

SEQ ID NO: 509803 - DNA, 15 bp, Homo sapiens
ggggatggtggtgga

SEQ ID NO: 509804 - DNA, 15 bp, Homo sapiens
tggggatggtggtgg

SEQ ID NO: 509805 - DNA, 15 bp, Homo sapiens
gtggggatggtggtg

SEQ ID NO: 509806 - DNA, 15 bp, Homo sapiens
ggtggggatggtggt

SEQ ID NO: 509807 - DNA, 15 bp, Homo sapiens
aggtggggatggtgg

SEQ ID NO: 509808 - DNA, 15 bp, Homo sapiens
gaggtggggatggtg

SEQ ID NO: 509809 - DNA, 15 bp, Homo sapiens
ggaggtggggatggt

SEQ ID NO: 509810 - DNA, 15 bp, Homo sapiens
gggaggtggggatgg

SEQ ID NO: 509811 - DNA, 15 bp, Homo sapiens
ggggaggtggggatg

SEQ ID NO: 509812 - DNA, 15 bp, Homo sapiens
tggggaggtggggat

SEQ ID NO: 509813 - DNA, 15 bp, Homo sapiens
atggggaggtgggga

SEQ ID NO: 509814 - DNA, 15 bp, Homo sapiens
gatggggaggtgggg

SEQ ID NO: 509815 - DNA, 15 bp, Homo sapiens
tgatggggaggtggg

SEQ ID NO: 509816 - DNA, 15 bp, Homo sapiens
gtgatggggaggtgg

SEQ ID NO: 509817 - DNA, 15 bp, Homo sapiens
agtgatggggaggtg

SEQ ID NO: 509818 - DNA, 15 bp, Homo sapiens
cagtgatggggaggt

SEQ ID NO: 509819 - DNA, 15 bp, Homo sapiens
acagtgatggggagg

SEQ ID NO: 509820 - DNA, 15 bp, Homo sapiens
cacagtgatggggag

SEQ ID NO: 509821 - DNA, 15 bp, Homo sapiens
tcacagtgatgggga

SEQ ID NO: 509822 - DNA, 15 bp, Homo sapiens
gtcacagtgatgggg

SEQ ID NO: 509823 - DNA, 15 bp, Homo sapiens
ggtcacagtgatggg

SEQ ID NO: 509824 - DNA, 15 bp, Homo sapiens
gggtcacagtgatgg

SEQ ID NO: 509825 - DNA, 15 bp, Homo sapiens
tgggtcacagtgatg

SEQ ID NO: 509826 - DNA, 15 bp, Homo sapiens
ctgggtcacagtgat

SEQ ID NO: 509827 - DNA, 15 bp, Homo sapiens
gctgggtcacagtga

SEQ ID NO: 509828 - DNA, 15 bp, Homo sapiens
agctgggtcacagtg

SEQ ID NO: 509829 - DNA, 15 bp, Homo sapiens
tagctgggtcacagt

SEQ ID NO: 509830 - DNA, 15 bp, Homo sapiens
atagctgggtcacag

SEQ ID NO: 509831 - DNA, 15 bp, Homo sapiens
tatagctgggtcaca

SEQ ID NO: 509832 - DNA, 15 bp, Homo sapiens
atatagctgggtcac

SEQ ID NO: 509833 - DNA, 15 bp, Homo sapiens
tatatagctgggtca

SEQ ID NO: 509834 - DNA, 15 bp, Homo sapiens
atatatagctgggtc

SEQ ID NO: 509835 - DNA, 15 bp, Homo sapiens
tatatatagctgggt

SEQ ID NO: 509836 - DNA, 15 bp, Homo sapiens
ttatatatagctggg

SEQ ID NO: 509837 - DNA, 15 bp, Homo sapiens
gttatatatagctgg

SEQ ID NO: 509838 - DNA, 15 bp, Homo sapiens
ggttatatatagctg

SEQ ID NO: 509839 - DNA, 15 bp, Homo sapiens
tggttatatatagct

SEQ ID NO: 509840 - DNA, 15 bp, Homo sapiens
ctggttatatatagc

SEQ ID NO: 509841 - DNA, 15 bp, Homo sapiens
gctggttatatatag

SEQ ID NO: 509842 - DNA, 15 bp, Homo sapiens
tgctggttatatata

SEQ ID NO: 509843 - DNA, 15 bp, Homo sapiens
gtgctggttatatat

SEQ ID NO: 509844 - DNA, 15 bp, Homo sapiens
agtgctggttatata

SEQ ID NO: 509845 - DNA, 15 bp, Homo sapiens
aagtgctggttatat

SEQ ID NO: 509846 - DNA, 15 bp, Homo sapiens
gaagtgctggttata

SEQ ID NO: 509847 - DNA, 15 bp, Homo sapiens
agaagtgctggttat

SEQ ID NO: 509848 - DNA, 15 bp, Homo sapiens
gagaagtgctggtta

SEQ ID NO: 509849 - DNA, 15 bp, Homo sapiens
tgagaagtgctggtt

SEQ ID NO: 509850 - DNA, 15 bp, Homo sapiens
ctgagaagtgctggt

SEQ ID NO: 509851 - DNA, 15 bp, Homo sapiens
gctgagaagtgctgg

SEQ ID NO: 509852 - DNA, 15 bp, Homo sapiens
agctgagaagtgctg

SEQ ID NO: 509853 - DNA, 15 bp, Homo sapiens
cagctgagaagtgct

SEQ ID NO: 509854 - DNA, 15 bp, Homo sapiens
gcagctgagaagtgc

SEQ ID NO: 509855 - DNA, 15 bp, Homo sapiens
ggcagctgagaagtg

SEQ ID NO: 509856 - DNA, 15 bp, Homo sapiens
tggcagctgagaagt

SEQ ID NO: 509857 - DNA, 15 bp, Homo sapiens
gtggcagctgagaag

SEQ ID NO: 509858 - DNA, 15 bp, Homo sapiens
tgtggcagctgagaa

SEQ ID NO: 509859 - DNA, 15 bp, Homo sapiens
ttgtggcagctgaga

SEQ ID NO: 509860 - DNA, 15 bp, Homo sapiens
gttgtggcagctgag

SEQ ID NO: 509861 - DNA, 15 bp, Homo sapiens
ggttgtggcagctga

SEQ ID NO: 509862 - DNA, 15 bp, Homo sapiens
cggttgtggcagctg

SEQ ID NO: 509863 - DNA, 15 bp, Homo sapiens
gcggttgtggcagct

SEQ ID NO: 509864 - DNA, 15 bp, Homo sapiens
ggcggttgtggcagc

SEQ ID NO: 509865 - DNA, 15 bp, Homo sapiens
gggcggttgtggcag

SEQ ID NO: 509866 - DNA, 15 bp, Homo sapiens
agggcggttgtggca

SEQ ID NO: 509867 - DNA, 15 bp, Homo sapiens
gagggcggttgtggc

SEQ ID NO: 509868 - DNA, 15 bp, Homo sapiens
tgagggcggttgtgg

SEQ ID NO: 509869 - DNA, 15 bp, Homo sapiens
ctgagggcggttgtg

SEQ ID NO: 509870 - DNA, 15 bp, Homo sapiens
tctgagggcggttgt

SEQ ID NO: 509871 - DNA, 15 bp, Homo sapiens
ttctgagggcggttg

SEQ ID NO: 509872 - DNA, 15 bp, Homo sapiens
cttctgagggcggtt

SEQ ID NO: 509873 - DNA, 15 bp, Homo sapiens
gcttctgagggcggt

SEQ ID NO: 509874 - DNA, 15 bp, Homo sapiens
ggcttctgagggcgg

SEQ ID NO: 509875 - DNA, 15 bp, Homo sapiens
gggcttctgagggcg

SEQ ID NO: 509876 - DNA, 15 bp, Homo sapiens
tgggcttctgagggc

SEQ ID NO: 509877 - DNA, 15 bp, Homo sapiens
gtgggcttctgaggg

SEQ ID NO: 509878 - DNA, 15 bp, Homo sapiens
tgtgggcttctgagg

SEQ ID NO: 509879 - DNA, 15 bp, Homo sapiens
gtgtgggcttctgag

SEQ ID NO: 509880 - DNA, 15 bp, Homo sapiens
tgtgtgggcttctga

SEQ ID NO: 509881 - DNA, 15 bp, Homo sapiens
gtgtgtgggcttctg

SEQ ID NO: 509882 - DNA, 15 bp, Homo sapiens
agtgtgtgggcttct

SEQ ID NO: 509883 - DNA, 15 bp, Homo sapiens
aagtgtgtgggcttc

SEQ ID NO: 509884 - DNA, 15 bp, Homo sapiens
aaagtgtgtgggctt

SEQ ID NO: 509885 - DNA, 15 bp, Homo sapiens
gaaagtgtgtgggct

SEQ ID NO: 509886 - DNA, 15 bp, Homo sapiens
tgaaagtgtgtgggc

SEQ ID NO: 509887 - DNA, 15 bp, Homo sapiens
gtgaaagtgtgtggg

SEQ ID NO: 509888 - DNA, 15 bp, Homo sapiens
ggtgaaagtgtgtgg

SEQ ID NO: 509889 - DNA, 15 bp, Homo sapiens
tggtgaaagtgtgtg

SEQ ID NO: 509890 - DNA, 15 bp, Homo sapiens
ctggtgaaagtgtgt

SEQ ID NO: 509891 - DNA, 15 bp, Homo sapiens
cctggtgaaagtgtg

SEQ ID NO: 509892 - DNA, 15 bp, Homo sapiens
tcctggtgaaagtgt

SEQ ID NO: 509893 - DNA, 15 bp, Homo sapiens
ttcctggtgaaagtg

SEQ ID NO: 509894 - DNA, 15 bp, Homo sapiens
attcctggtgaaagt

SEQ ID NO: 509895 - DNA, 15 bp, Homo sapiens
tattcctggtgaaag

SEQ ID NO: 509896 - DNA, 15 bp, Homo sapiens
ctattcctggtgaaa

SEQ ID NO: 509897 - DNA, 15 bp, Homo sapiens
actattcctggtgaa

SEQ ID NO: 509898 - DNA, 15 bp, Homo sapiens
aactattcctggtga

SEQ ID NO: 509899 - DNA, 15 bp, Homo sapiens
caactattcctggtg

SEQ ID NO: 509900 - DNA, 15 bp, Homo sapiens
acaactattcctggt

SEQ ID NO: 509901 - DNA, 15 bp, Homo sapiens
aacaactattcctgg

SEQ ID NO: 509902 - DNA, 15 bp, Homo sapiens
aaacaactattcctg

SEQ ID NO: 509903 - DNA, 15 bp, Homo sapiens
gaaacaactattcct

SEQ ID NO: 509904 - DNA, 15 bp, Homo sapiens
agaaacaactattcc

SEQ ID NO: 509905 - DNA, 15 bp, Homo sapiens
cagaaacaactattc

SEQ ID NO: 509906 - DNA, 15 bp, Homo sapiens
acagaaacaactatt

SEQ ID NO: 509907 - DNA, 15 bp, Homo sapiens
aacagaaacaactat

SEQ ID NO: 509908 - DNA, 15 bp, Homo sapiens
aaacagaaacaacta

SEQ ID NO: 509909 - DNA, 15 bp, Homo sapiens
aaaacagaaacaact

SEQ ID NO: 509910 - DNA, 15 bp, Homo sapiens
gaaaacagaaacaac

SEQ ID NO: 509911 - DNA, 15 bp, Homo sapiens
agaaaacagaaacaa

SEQ ID NO: 509912 - DNA, 15 bp, Homo sapiens
gagaaaacagaaaca

SEQ ID NO: 509913 - DNA, 15 bp, Homo sapiens
ggagaaaacagaaac

SEQ ID NO: 509914 - DNA, 15 bp, Homo sapiens
gggagaaaacagaaa

SEQ ID NO: 509915 - DNA, 15 bp, Homo sapiens
tgggagaaaacagaa

SEQ ID NO: 509916 - DNA, 15 bp, Homo sapiens
ctgggagaaaacaga

SEQ ID NO: 509917 - DNA, 15 bp, Homo sapiens
actgggagaaaacag

SEQ ID NO: 509918 - DNA, 15 bp, Homo sapiens
tactgggagaaaaca

SEQ ID NO: 509919 - DNA, 15 bp, Homo sapiens
atactgggagaaaac

SEQ ID NO: 509920 - DNA, 15 bp, Homo sapiens
gatactgggagaaaa

SEQ ID NO: 509921 - DNA, 15 bp, Homo sapiens
ggatactgggagaaa

SEQ ID NO: 509922 - DNA, 15 bp, Homo sapiens
aggatactgggagaa

SEQ ID NO: 509923 - DNA, 15 bp, Homo sapiens
aaggatactgggaga

SEQ ID NO: 509924 - DNA, 15 bp, Homo sapiens
aaaggatactgggag

SEQ ID NO: 509925 - DNA, 15 bp, Homo sapiens
gaaaggatactggga

SEQ ID NO: 509926 - DNA, 15 bp, Homo sapiens
ggaaaggatactggg

SEQ ID NO: 509927 - DNA, 15 bp, Homo sapiens
cggaaaggatactgg

SEQ ID NO: 509928 - DNA, 15 bp, Homo sapiens
ccggaaaggatactg

SEQ ID NO: 509929 - DNA, 15 bp, Homo sapiens
gccggaaaggatact

SEQ ID NO: 509930 - DNA, 15 bp, Homo sapiens
ggccggaaaggatac

SEQ ID NO: 509931 - DNA, 15 bp, Homo sapiens
gggccggaaaggata

SEQ ID NO: 509932 - DNA, 15 bp, Homo sapiens
ggggccggaaaggat

SEQ ID NO: 509933 - DNA, 15 bp, Homo sapiens
gggggccggaaagga

SEQ ID NO: 509934 - DNA, 15 bp, Homo sapiens
agggggccggaaagg

SEQ ID NO: 509935 - DNA, 15 bp, Homo sapiens
aagggggccggaaag

SEQ ID NO: 509936 - DNA, 15 bp, Homo sapiens
aaagggggccggaaa

SEQ ID NO: 509937 - DNA, 15 bp, Homo sapiens
gaaagggggccggaa

SEQ ID NO: 509938 - DNA, 15 bp, Homo sapiens
agaaagggggccgga

SEQ ID NO: 509939 - DNA, 15 bp, Homo sapiens
gagaaagggggccgg

SEQ ID NO: 509940 - DNA, 15 bp, Homo sapiens
agagaaagggggccg

SEQ ID NO: 509941 - DNA, 15 bp, Homo sapiens
gagagaaagggggcc

SEQ ID NO: 509942 - DNA, 15 bp, Homo sapiens
agagagaaagggggc

SEQ ID NO: 509943 - DNA, 15 bp, Homo sapiens
aagagagaaaggggg

SEQ ID NO: 509944 - DNA, 15 bp, Homo sapiens
gaagagagaaagggg

SEQ ID NO: 509945 - DNA, 15 bp, Homo sapiens
agaagagagaaaggg

SEQ ID NO: 509946 - DNA, 15 bp, Homo sapiens
cagaagagagaaagg

SEQ ID NO: 509947 - DNA, 15 bp, Homo sapiens
acagaagagagaaag

SEQ ID NO: 509948 - DNA, 15 bp, Homo sapiens
gacagaagagagaaa

SEQ ID NO: 509949 - DNA, 15 bp, Homo sapiens
agacagaagagagaa

SEQ ID NO: 509950 - DNA, 15 bp, Homo sapiens
aagacagaagagaga

SEQ ID NO: 509951 - DNA, 15 bp, Homo sapiens
aaagacagaagagag

SEQ ID NO: 509952 - DNA, 15 bp, Homo sapiens
gaaagacagaagaga

SEQ ID NO: 509953 - DNA, 15 bp, Homo sapiens
ggaaagacagaagag

SEQ ID NO: 509954 - DNA, 15 bp, Homo sapiens
tggaaagacagaaga

SEQ ID NO: 509955 - DNA, 15 bp, Homo sapiens
ttggaaagacagaag

SEQ ID NO: 509956 - DNA, 15 bp, Homo sapiens
attggaaagacagaa

SEQ ID NO: 509957 - DNA, 15 bp, Homo sapiens
cattggaaagacaga

SEQ ID NO: 509958 - DNA, 15 bp, Homo sapiens
tcattggaaagacag

SEQ ID NO: 509959 - DNA, 15 bp, Homo sapiens
ctcattggaaagaca

SEQ ID NO: 509960 - DNA, 15 bp, Homo sapiens
gctcattggaaagac

SEQ ID NO: 509961 - DNA, 15 bp, Homo sapiens
tgctcattggaaaga

SEQ ID NO: 509962 - DNA, 15 bp, Homo sapiens
ctgctcattggaaag

SEQ ID NO: 509963 - DNA, 15 bp, Homo sapiens
tctgctcattggaaa

SEQ ID NO: 509964 - DNA, 15 bp, Homo sapiens
ttctgctcattggaa

SEQ ID NO: 509965 - DNA, 15 bp, Homo sapiens
gttctgctcattgga

SEQ ID NO: 509966 - DNA, 15 bp, Homo sapiens
ggttctgctcattgg

SEQ ID NO: 509967 - DNA, 15 bp, Homo sapiens
tggttctgctcattg

SEQ ID NO: 509968 - DNA, 15 bp, Homo sapiens
gtggttctgctcatt

SEQ ID NO: 509969 - DNA, 15 bp, Homo sapiens
tgtggttctgctcat

SEQ ID NO: 509970 - DNA, 15 bp, Homo sapiens
atgtggttctgctca

SEQ ID NO: 509971 - DNA, 15 bp, Homo sapiens
tatgtggttctgctc

SEQ ID NO: 509972 - DNA, 15 bp, Homo sapiens
gtatgtggttctgct

SEQ ID NO: 509973 - DNA, 15 bp, Homo sapiens
tgtatgtggttctgc

SEQ ID NO: 509974 - DNA, 15 bp, Homo sapiens
gtgtatgtggttctg

SEQ ID NO: 509975 - DNA, 15 bp, Homo sapiens
tgtgtatgtggttct

SEQ ID NO: 509976 - DNA, 15 bp, Homo sapiens
ttgtgtatgtggttc

SEQ ID NO: 509977 - DNA, 15 bp, Homo sapiens
gttgtgtatgtggtt

SEQ ID NO: 509978 - DNA, 15 bp, Homo sapiens
ggttgtgtatgtggt

SEQ ID NO: 509979 - DNA, 15 bp, Homo sapiens
gggttgtgtatgtgg

SEQ ID NO: 509980 - DNA, 15 bp, Homo sapiens
ggggttgtgtatgtg

SEQ ID NO: 509981 - DNA, 15 bp, Homo sapiens
gggggttgtgtatgt

SEQ ID NO: 509982 - DNA, 15 bp, Homo sapiens
tgggggttgtgtatg

SEQ ID NO: 509983 - DNA, 15 bp, Homo sapiens
ttgggggttgtgtat

SEQ ID NO: 509984 - DNA, 15 bp, Homo sapiens
tttgggggttgtgta

SEQ ID NO: 509985 - DNA, 15 bp, Homo sapiens
atttgggggttgtgt

SEQ ID NO: 509986 - DNA, 15 bp, Homo sapiens
tatttgggggttgtg

SEQ ID NO: 509987 - DNA, 15 bp, Homo sapiens
ctatttgggggttgt

SEQ ID NO: 509988 - DNA, 15 bp, Homo sapiens
gctatttgggggttg

SEQ ID NO: 509989 - DNA, 15 bp, Homo sapiens
agctatttgggggtt

SEQ ID NO: 509990 - DNA, 15 bp, Homo sapiens
aagctatttgggggt

SEQ ID NO: 509991 - DNA, 15 bp, Homo sapiens
aaagctatttggggg

SEQ ID NO: 509992 - DNA, 15 bp, Homo sapiens
gaaagctatttgggg

SEQ ID NO: 509993 - DNA, 15 bp, Homo sapiens
tgaaagctatttggg

SEQ ID NO: 509994 - DNA, 15 bp, Homo sapiens
gtgaaagctatttgg

SEQ ID NO: 509995 - DNA, 15 bp, Homo sapiens
tgtgaaagctatttg

SEQ ID NO: 509996 - DNA, 15 bp, Homo sapiens
ctgtgaaagctattt

SEQ ID NO: 509997 - DNA, 15 bp, Homo sapiens
cctgtgaaagctatt

SEQ ID NO: 509998 - DNA, 15 bp, Homo sapiens
gcctgtgaaagctat

SEQ ID NO: 509999 - DNA, 15 bp, Homo sapiens
tgcctgtgaaagcta

SEQ ID NO: 510000 - DNA, 15 bp, Homo sapiens
gtgcctgtgaaagct

SEQ ID NO: 510001 - DNA, 15 bp, Homo sapiens
tgtgcctgtgaaagc

SEQ ID NO: 510002 - DNA, 15 bp, Homo sapiens
gtgtgcctgtgaaag

SEQ ID NO: 510003 - DNA, 15 bp, Homo sapiens
ggtgtgcctgtgaaa

SEQ ID NO: 510004 - DNA, 15 bp, Homo sapiens
tggtgtgcctgtgaa

SEQ ID NO: 510005 - DNA, 15 bp, Homo sapiens
gtggtgtgcctgtga

SEQ ID NO: 510006 - DNA, 15 bp, Homo sapiens
ggtggtgtgcctgtg

SEQ ID NO: 510007 - DNA, 15 bp, Homo sapiens
tggtggtgtgcctgt

SEQ ID NO: 510008 - DNA, 15 bp, Homo sapiens
ttggtggtgtgcctg

SEQ ID NO: 510009 - DNA, 15 bp, Homo sapiens
attggtggtgtgcct

SEQ ID NO: 510010 - DNA, 15 bp, Homo sapiens
cattggtggtgtgcc

SEQ ID NO: 510011 - DNA, 15 bp, Homo sapiens
gcattggtggtgtgc

SEQ ID NO: 510012 - DNA, 15 bp, Homo sapiens
tgcattggtggtgtg

SEQ ID NO: 510013 - DNA, 15 bp, Homo sapiens
ttgcattggtggtgt

SEQ ID NO: 510014 - DNA, 15 bp, Homo sapiens
attgcattggtggtg

SEQ ID NO: 510015 - DNA, 15 bp, Homo sapiens
gattgcattggtggt

SEQ ID NO: 510016 - DNA, 15 bp, Homo sapiens
agattgcattggtgg

SEQ ID NO: 510017 - DNA, 15 bp, Homo sapiens
tagattgcattggtg

SEQ ID NO: 510018 - DNA, 15 bp, Homo sapiens
ttagattgcattggt

SEQ ID NO: 510019 - DNA, 15 bp, Homo sapiens
cttagattgcattgg

SEQ ID NO: 510020 - DNA, 15 bp, Homo sapiens
acttagattgcattg

SEQ ID NO: 510021 - DNA, 15 bp, Homo sapiens
tacttagattgcatt

SEQ ID NO: 510022 - DNA, 15 bp, Homo sapiens
atacttagattgcat

SEQ ID NO: 510023 - DNA, 15 bp, Homo sapiens
aatacttagattgca

SEQ ID NO: 510024 - DNA, 15 bp, Homo sapiens
aaatacttagattgc

SEQ ID NO: 510025 - DNA, 15 bp, Homo sapiens
taaatacttagattg

SEQ ID NO: 510026 - DNA, 15 bp, Homo sapiens
ctaaatacttagatt

SEQ ID NO: 510027 - DNA, 15 bp, Homo sapiens
gctaaatacttagat

SEQ ID NO: 510028 - DNA, 15 bp, Homo sapiens
ggctaaatacttaga

SEQ ID NO: 510029 - DNA, 15 bp, Homo sapiens
tggctaaatacttag

SEQ ID NO: 510030 - DNA, 15 bp, Homo sapiens
atggctaaatactta

SEQ ID NO: 510031 - DNA, 15 bp, Homo sapiens
catggctaaatactt

SEQ ID NO: 510032 - DNA, 15 bp, Homo sapiens
acatggctaaatact

SEQ ID NO: 510033 - DNA, 15 bp, Homo sapiens
aacatggctaaatac

SEQ ID NO: 510034 - DNA, 15 bp, Homo sapiens
caacatggctaaata

SEQ ID NO: 510035 - DNA, 15 bp, Homo sapiens
tcaacatggctaaat

SEQ ID NO: 510036 - DNA, 15 bp, Homo sapiens
ctcaacatggctaaa

SEQ ID NO: 510037 - DNA, 15 bp, Homo sapiens
tctcaacatggctaa

SEQ ID NO: 510038 - DNA, 15 bp, Homo sapiens
ttctcaacatggcta

SEQ ID NO: 510039 - DNA, 15 bp, Homo sapiens
attctcaacatggct

SEQ ID NO: 510040 - DNA, 15 bp, Homo sapiens
aattctcaacatggc

SEQ ID NO: 510041 - DNA, 15 bp, Homo sapiens
aaattctcaacatgg

SEQ ID NO: 510042 - DNA, 15 bp, Homo sapiens
aaaattctcaacatg

SEQ ID NO: 510043 - DNA, 15 bp, Homo sapiens
gaaaattctcaacat

SEQ ID NO: 510044 - DNA, 15 bp, Homo sapiens
tgaaaattctcaaca

SEQ ID NO: 510045 - DNA, 15 bp, Homo sapiens
ttgaaaattctcaac

SEQ ID NO: 510046 - DNA, 15 bp, Homo sapiens
gttgaaaattctcaa

SEQ ID NO: 510047 - DNA, 15 bp, Homo sapiens
tgttgaaaattctca

SEQ ID NO: 510048 - DNA, 15 bp, Homo sapiens
ttgttgaaaattctc

SEQ ID NO: 510049 - DNA, 15 bp, Homo sapiens
gttgttgaaaattct

SEQ ID NO: 510050 - DNA, 15 bp, Homo sapiens
agttgttgaaaattc

SEQ ID NO: 510051 - DNA, 15 bp, Homo sapiens
tagttgttgaaaatt

SEQ ID NO: 510052 - DNA, 15 bp, Homo sapiens
ttagttgttgaaaat

SEQ ID NO: 510053 - DNA, 15 bp, Homo sapiens
gttagttgttgaaaa

SEQ ID NO: 510054 - DNA, 15 bp, Homo sapiens
agttagttgttgaaa

SEQ ID NO: 510055 - DNA, 15 bp, Homo sapiens
cagttagttgttgaa

SEQ ID NO: 510056 - DNA, 15 bp, Homo sapiens
acagttagttgttga

SEQ ID NO: 510057 - DNA, 15 bp, Homo sapiens
cacagttagttgttg

SEQ ID NO: 510058 - DNA, 15 bp, Homo sapiens
acacagttagttgtt

SEQ ID NO: 510059 - DNA, 15 bp, Homo sapiens
aacacagttagttgt

SEQ ID NO: 510060 - DNA, 15 bp, Homo sapiens
caacacagttagttg

SEQ ID NO: 510061 - DNA, 15 bp, Homo sapiens
tcaacacagttagtt

SEQ ID NO: 510062 - DNA, 15 bp, Homo sapiens
atcaacacagttagt

SEQ ID NO: 510063 - DNA, 15 bp, Homo sapiens
catcaacacagttag

SEQ ID NO: 510064 - DNA, 15 bp, Homo sapiens
acatcaacacagtta

SEQ ID NO: 510065 - DNA, 15 bp, Homo sapiens
cacatcaacacagtt

SEQ ID NO: 510066 - DNA, 15 bp, Homo sapiens
ccacatcaacacagt

SEQ ID NO: 510067 - DNA, 15 bp, Homo sapiens
gccacatcaacacag

SEQ ID NO: 510068 - DNA, 15 bp, Homo sapiens
tgccacatcaacaca

SEQ ID NO: 510069 - DNA, 15 bp, Homo sapiens
atgccacatcaacac

SEQ ID NO: 510070 - DNA, 15 bp, Homo sapiens
aatgccacatcaaca

SEQ ID NO: 510071 - DNA, 15 bp, Homo sapiens
caatgccacatcaac

SEQ ID NO: 510072 - DNA, 15 bp, Homo sapiens
acaatgccacatcaa

SEQ ID NO: 510073 - DNA, 15 bp, Homo sapiens
tacaatgccacatca

SEQ ID NO: 510074 - DNA, 15 bp, Homo sapiens
ttacaatgccacatc

SEQ ID NO: 510075 - DNA, 15 bp, Homo sapiens
attacaatgccacat

SEQ ID NO: 510076 - DNA, 15 bp, Homo sapiens
aattacaatgccaca

SEQ ID NO: 510077 - DNA, 15 bp, Homo sapiens
caattacaatgccac

SEQ ID NO: 510078 - DNA, 15 bp, Homo sapiens
acaattacaatgcca

SEQ ID NO: 510079 - DNA, 15 bp, Homo sapiens
aacaattacaatgcc

SEQ ID NO: 510080 - DNA, 15 bp, Homo sapiens
taacaattacaatgc

SEQ ID NO: 510081 - DNA, 15 bp, Homo sapiens
ctaacaattacaatg

SEQ ID NO: 510082 - DNA, 15 bp, Homo sapiens
tctaacaattacaat

SEQ ID NO: 510083 - DNA, 15 bp, Homo sapiens
ttctaacaattacaa

SEQ ID NO: 510084 - DNA, 15 bp, Homo sapiens
tttctaacaattaca

SEQ ID NO: 510085 - DNA, 15 bp, Homo sapiens
ttttctaacaattac

SEQ ID NO: 510086 - DNA, 15 bp, Homo sapiens
attttctaacaatta

SEQ ID NO: 510087 - DNA, 15 bp, Homo sapiens
cattttctaacaatt

SEQ ID NO: 510088 - DNA, 15 bp, Homo sapiens
ccattttctaacaat

SEQ ID NO: 510089 - DNA, 15 bp, Homo sapiens
accattttctaacaa

SEQ ID NO: 510090 - DNA, 15 bp, Homo sapiens
aaccattttctaaca

SEQ ID NO: 510091 - DNA, 15 bp, Homo sapiens
taaccattttctaac

SEQ ID NO: 510092 - DNA, 15 bp, Homo sapiens
ttaaccattttctaa

SEQ ID NO: 510093 - DNA, 15 bp, Homo sapiens
attaaccattttcta

SEQ ID NO: 510094 - DNA, 15 bp, Homo sapiens
tattaaccattttct

SEQ ID NO: 510095 - DNA, 15 bp, Homo sapiens
gtattaaccattttc

SEQ ID NO: 510096 - DNA, 15 bp, Homo sapiens
tgtattaaccatttt

SEQ ID NO: 510097 - DNA, 15 bp, Homo sapiens
ctgtattaaccattt

SEQ ID NO: 510098 - DNA, 15 bp, Homo sapiens
cctgtattaaccatt

SEQ ID NO: 510099 - DNA, 15 bp, Homo sapiens
tcctgtattaaccat

SEQ ID NO: 510100 - DNA, 15 bp, Homo sapiens
ttcctgtattaacca

SEQ ID NO: 510101 - DNA, 15 bp, Homo sapiens
cttcctgtattaacc

SEQ ID NO: 510102 - DNA, 15 bp, Homo sapiens
ccttcctgtattaac

SEQ ID NO: 510103 - DNA, 15 bp, Homo sapiens
accttcctgtattaa

SEQ ID NO: 510104 - DNA, 15 bp, Homo sapiens
aaccttcctgtatta

SEQ ID NO: 510105 - DNA, 15 bp, Homo sapiens
taaccttcctgtatt

SEQ ID NO: 510106 - DNA, 15 bp, Homo sapiens
gtaaccttcctgtat

SEQ ID NO: 510107 - DNA, 15 bp, Homo sapiens
agtaaccttcctgta

SEQ ID NO: 510108 - DNA, 15 bp, Homo sapiens
cagtaaccttcctgt

SEQ ID NO: 510109 - DNA, 15 bp, Homo sapiens
acagtaaccttcctg

SEQ ID NO: 510110 - DNA, 15 bp, Homo sapiens
cacagtaaccttcct

SEQ ID NO: 510111 - DNA, 15 bp, Homo sapiens
tcacagtaaccttcc

SEQ ID NO: 510112 - DNA, 15 bp, Homo sapiens
ttcacagtaaccttc

SEQ ID NO: 510113 - DNA, 15 bp, Homo sapiens
gttcacagtaacctt

SEQ ID NO: 510114 - DNA, 15 bp, Homo sapiens
tgttcacagtaacct

SEQ ID NO: 510115 - DNA, 15 bp, Homo sapiens
atgttcacagtaacc

SEQ ID NO: 510116 - DNA, 15 bp, Homo sapiens
catgttcacagtaac

SEQ ID NO: 510117 - DNA, 15 bp, Homo sapiens
acatgttcacagtaa

SEQ ID NO: 510118 - DNA, 15 bp, Homo sapiens
aacatgttcacagta

SEQ ID NO: 510119 - DNA, 15 bp, Homo sapiens
aaacatgttcacagt

SEQ ID NO: 510120 - DNA, 15 bp, Homo sapiens
caaacatgttcacag

SEQ ID NO: 510121 - DNA, 15 bp, Homo sapiens
acaaacatgttcaca

SEQ ID NO: 510122 - DNA, 15 bp, Homo sapiens
tacaaacatgttcac

SEQ ID NO: 510123 - DNA, 15 bp, Homo sapiens
atacaaacatgttca

SEQ ID NO: 510124 - DNA, 15 bp, Homo sapiens
catacaaacatgttc

SEQ ID NO: 510125 - DNA, 15 bp, Homo sapiens
gcatacaaacatgtt

SEQ ID NO: 510126 - DNA, 15 bp, Homo sapiens
agcatacaaacatgt

SEQ ID NO: 510127 - DNA, 15 bp, Homo sapiens
tagcatacaaacatg

SEQ ID NO: 510128 - DNA, 15 bp, Homo sapiens
gtagcatacaaacat

SEQ ID NO: 510129 - DNA, 15 bp, Homo sapiens
ggtagcatacaaaca

SEQ ID NO: 510130 - DNA, 15 bp, Homo sapiens
tggtagcatacaaac

SEQ ID NO: 510131 - DNA, 15 bp, Homo sapiens
gtggtagcatacaaa

SEQ ID NO: 510132 - DNA, 15 bp, Homo sapiens
tgtggtagcatacaa

SEQ ID NO: 510133 - DNA, 15 bp, Homo sapiens
atgtggtagcataca

SEQ ID NO: 510134 - DNA, 15 bp, Homo sapiens
tatgtggtagcatac

SEQ ID NO: 510135 - DNA, 15 bp, Homo sapiens
gtatgtggtagcata

SEQ ID NO: 510136 - DNA, 15 bp, Homo sapiens
ggtatgtggtagcat

SEQ ID NO: 510137 - DNA, 15 bp, Homo sapiens
aggtatgtggtagca

SEQ ID NO: 510138 - DNA, 15 bp, Homo sapiens
gaggtatgtggtagc

SEQ ID NO: 510139 - DNA, 15 bp, Homo sapiens
tgaggtatgtggtag

SEQ ID NO: 510140 - DNA, 15 bp, Homo sapiens
ttgaggtatgtggta

SEQ ID NO: 510141 - DNA, 15 bp, Homo sapiens
tttgaggtatgtggt

SEQ ID NO: 510142 - DNA, 15 bp, Homo sapiens
ctttgaggtatgtgg

SEQ ID NO: 510143 - DNA, 15 bp, Homo sapiens
cctttgaggtatgtg

SEQ ID NO: 510144 - DNA, 15 bp, Homo sapiens
ccctttgaggtatgt

SEQ ID NO: 510145 - DNA, 15 bp, Homo sapiens
accctttgaggtatg

SEQ ID NO: 510146 - DNA, 15 bp, Homo sapiens
aaccctttgaggtat

SEQ ID NO: 510147 - DNA, 15 bp, Homo sapiens
aaaccctttgaggta

SEQ ID NO: 510148 - DNA, 15 bp, Homo sapiens
gaaaccctttgaggt

SEQ ID NO: 510149 - DNA, 15 bp, Homo sapiens
agaaaccctttgagg

SEQ ID NO: 510150 - DNA, 15 bp, Homo sapiens
gagaaaccctttgag

SEQ ID NO: 510151 - DNA, 15 bp, Homo sapiens
agagaaaccctttga

SEQ ID NO: 510152 - DNA, 15 bp, Homo sapiens
aagagaaaccctttg

SEQ ID NO: 510153 - DNA, 15 bp, Homo sapiens
aaagagaaacccttt

SEQ ID NO: 510154 - DNA, 15 bp, Homo sapiens
gaaagagaaaccctt

SEQ ID NO: 510155 - DNA, 15 bp, Homo sapiens
agaaagagaaaccct

SEQ ID NO: 510156 - DNA, 15 bp, Homo sapiens
gagaaagagaaaccc

SEQ ID NO: 510157 - DNA, 15 bp, Homo sapiens
agagaaagagaaacc

SEQ ID NO: 510158 - DNA, 15 bp, Homo sapiens
aagagaaagagaaac

SEQ ID NO: 510159 - DNA, 15 bp, Homo sapiens
aaagagaaagagaaa

SEQ ID NO: 510160 - DNA, 15 bp, Homo sapiens
taaagagaaagagaa

SEQ ID NO: 510161 - DNA, 15 bp, Homo sapiens
gtaaagagaaagaga

SEQ ID NO: 510162 - DNA, 15 bp, Homo sapiens
ggtaaagagaaagag

SEQ ID NO: 510163 - DNA, 15 bp, Homo sapiens
gggtaaagagaaaga

SEQ ID NO: 510164 - DNA, 15 bp, Homo sapiens
ggggtaaagagaaag

SEQ ID NO: 510165 - DNA, 15 bp, Homo sapiens
aggggtaaagagaaa

SEQ ID NO: 510166 - DNA, 15 bp, Homo sapiens
taggggtaaagagaa

SEQ ID NO: 510167 - DNA, 15 bp, Homo sapiens
gtaggggtaaagaga

SEQ ID NO: 510168 - DNA, 15 bp, Homo sapiens
ggtaggggtaaagag

SEQ ID NO: 510169 - DNA, 15 bp, Homo sapiens
gggtaggggtaaaga

SEQ ID NO: 510170 - DNA, 15 bp, Homo sapiens
tgggtaggggtaaag

SEQ ID NO: 510171 - DNA, 15 bp, Homo sapiens
ctgggtaggggtaaa

SEQ ID NO: 510172 - DNA, 15 bp, Homo sapiens
actgggtaggggtaa

SEQ ID NO: 510173 - DNA, 15 bp, Homo sapiens
cactgggtaggggta

SEQ ID NO: 510174 - DNA, 15 bp, Homo sapiens
gcactgggtaggggt

SEQ ID NO: 510175 - DNA, 15 bp, Homo sapiens
agcactgggtagggg

SEQ ID NO: 510176 - DNA, 15 bp, Homo sapiens
tagcactgggtaggg

SEQ ID NO: 510177 - DNA, 15 bp, Homo sapiens
ttagcactgggtagg

SEQ ID NO: 510178 - DNA, 15 bp, Homo sapiens
tttagcactgggtag

SEQ ID NO: 510179 - DNA, 15 bp, Homo sapiens
atttagcactgggta

SEQ ID NO: 510180 - DNA, 15 bp, Homo sapiens
catttagcactgggt

SEQ ID NO: 510181 - DNA, 15 bp, Homo sapiens
tcatttagcactggg

SEQ ID NO: 510182 - DNA, 15 bp, Homo sapiens
atcatttagcactgg

SEQ ID NO: 510183 - DNA, 15 bp, Homo sapiens
catcatttagcactg

SEQ ID NO: 510184 - DNA, 15 bp, Homo sapiens
ccatcatttagcact

SEQ ID NO: 510185 - DNA, 15 bp, Homo sapiens
gccatcatttagcac

SEQ ID NO: 510186 - DNA, 15 bp, Homo sapiens
ggccatcatttagca

SEQ ID NO: 510187 - DNA, 15 bp, Homo sapiens
tggccatcatttagc

SEQ ID NO: 510188 - DNA, 15 bp, Homo sapiens
atggccatcatttag

SEQ ID NO: 510189 - DNA, 15 bp, Homo sapiens
catggccatcattta

SEQ ID NO: 510190 - DNA, 15 bp, Homo sapiens
tcatggccatcattt

SEQ ID NO: 510191 - DNA, 15 bp, Homo sapiens
ctcatggccatcatt

SEQ ID NO: 510192 - DNA, 15 bp, Homo sapiens
actcatggccatcat

SEQ ID NO: 510193 - DNA, 15 bp, Homo sapiens
cactcatggccatca

SEQ ID NO: 510194 - DNA, 15 bp, Homo sapiens
ccactcatggccatc

SEQ ID NO: 510195 - DNA, 15 bp, Homo sapiens
cccactcatggccat

SEQ ID NO: 510196 - DNA, 15 bp, Homo sapiens
acccactcatggcca

SEQ ID NO: 510197 - DNA, 15 bp, Homo sapiens
aacccactcatggcc

SEQ ID NO: 510198 - DNA, 15 bp, Homo sapiens
caacccactcatggc

SEQ ID NO: 510199 - DNA, 15 bp, Homo sapiens
ccaacccactcatgg

SEQ ID NO: 510200 - DNA, 15 bp, Homo sapiens
gccaacccactcatg

SEQ ID NO: 510201 - DNA, 15 bp, Homo sapiens
agccaacccactcat

SEQ ID NO: 510202 - DNA, 15 bp, Homo sapiens
aagccaacccactca

SEQ ID NO: 510203 - DNA, 15 bp, Homo sapiens
aaagccaacccactc

SEQ ID NO: 510204 - DNA, 15 bp, Homo sapiens
aaaagccaacccact

SEQ ID NO: 510205 - DNA, 15 bp, Homo sapiens
aaaaagccaacccac

SEQ ID NO: 510206 - DNA, 15 bp, Homo sapiens
caaaaagccaaccca

SEQ ID NO: 510207 - DNA, 15 bp, Homo sapiens
acaaaaagccaaccc

SEQ ID NO: 510208 - DNA, 15 bp, Homo sapiens
aacaaaaagccaacc

SEQ ID NO: 510209 - DNA, 15 bp, Homo sapiens
taacaaaaagccaac

SEQ ID NO: 510210 - DNA, 15 bp, Homo sapiens
ttaacaaaaagccaa

SEQ ID NO: 510211 - DNA, 15 bp, Homo sapiens
tttaacaaaaagcca

SEQ ID NO: 510212 - DNA, 15 bp, Homo sapiens
atttaacaaaaagcc

SEQ ID NO: 510213 - DNA, 15 bp, Homo sapiens
tatttaacaaaaagc

SEQ ID NO: 510214 - DNA, 15 bp, Homo sapiens
atatttaacaaaaag

SEQ ID NO: 510215 - DNA, 15 bp, Homo sapiens
aatatttaacaaaaa

SEQ ID NO: 510216 - DNA, 15 bp, Homo sapiens
aaatatttaacaaaa

SEQ ID NO: 510217 - DNA, 15 bp, Homo sapiens
gaaatatttaacaaa

SEQ ID NO: 510218 - DNA, 15 bp, Homo sapiens
ggaaatatttaacaa

SEQ ID NO: 510219 - DNA, 15 bp, Homo sapiens
tggaaatatttaaca

SEQ ID NO: 510220 - DNA, 15 bp, Homo sapiens
ttggaaatatttaac

SEQ ID NO: 510221 - DNA, 15 bp, Homo sapiens
tttggaaatatttaa

SEQ ID NO: 510222 - DNA, 15 bp, Homo sapiens
ttttggaaatattta

SEQ ID NO: 510223 - DNA, 15 bp, Homo sapiens
tttttggaaatattt

SEQ ID NO: 510224 - DNA, 15 bp, Homo sapiens
gtttttggaaatatt

SEQ ID NO: 510225 - DNA, 15 bp, Homo sapiens
agtttttggaaatat

SEQ ID NO: 510226 - DNA, 15 bp, Homo sapiens
aagtttttggaaata

SEQ ID NO: 510227 - DNA, 15 bp, Homo sapiens
aaagtttttggaaat

SEQ ID NO: 510228 - DNA, 15 bp, Homo sapiens
aaaagtttttggaaa

SEQ ID NO: 510229 - DNA, 15 bp, Homo sapiens
aaaaagtttttggaa

SEQ ID NO: 510230 - DNA, 15 bp, Homo sapiens
gaaaaagtttttgga

SEQ ID NO: 510231 - DNA, 15 bp, Homo sapiens
agaaaaagtttttgg

SEQ ID NO: 510232 - DNA, 15 bp, Homo sapiens
cagaaaaagtttttg

SEQ ID NO: 510233 - DNA, 15 bp, Homo sapiens
acagaaaaagttttt

SEQ ID NO: 510234 - DNA, 15 bp, Homo sapiens
aacagaaaaagtttt

SEQ ID NO: 510235 - DNA, 15 bp, Homo sapiens
aaacagaaaaagttt

SEQ ID NO: 510236 - DNA, 15 bp, Homo sapiens
caaacagaaaaagtt

SEQ ID NO: 510237 - DNA, 15 bp, Homo sapiens
tcaaacagaaaaagt

SEQ ID NO: 510238 - DNA, 15 bp, Homo sapiens
atcaaacagaaaaag

SEQ ID NO: 510239 - DNA, 15 bp, Homo sapiens
aatcaaacagaaaaa

SEQ ID NO: 510240 - DNA, 15 bp, Homo sapiens
aaatcaaacagaaaa

SEQ ID NO: 510241 - DNA, 15 bp, Homo sapiens
gaaatcaaacagaaa

SEQ ID NO: 510242 - DNA, 15 bp, Homo sapiens
tgaaatcaaacagaa

SEQ ID NO: 510243 - DNA, 15 bp, Homo sapiens
ctgaaatcaaacaga

SEQ ID NO: 510244 - DNA, 15 bp, Homo sapiens
actgaaatcaaacag

SEQ ID NO: 510245 - DNA, 15 bp, Homo sapiens
tactgaaatcaaaca

SEQ ID NO: 510246 - DNA, 15 bp, Homo sapiens
gtactgaaatcaaac

SEQ ID NO: 510247 - DNA, 15 bp, Homo sapiens
cgtactgaaatcaaa

SEQ ID NO: 510248 - DNA, 15 bp, Homo sapiens
tcgtactgaaatcaa

SEQ ID NO: 510249 - DNA, 15 bp, Homo sapiens
ttcgtactgaaatca

SEQ ID NO: 510250 - DNA, 15 bp, Homo sapiens
cttcgtactgaaatc

SEQ ID NO: 510251 - DNA, 15 bp, Homo sapiens
gcttcgtactgaaat

SEQ ID NO: 510252 - DNA, 15 bp, Homo sapiens
ggcttcgtactgaaa

SEQ ID NO: 510253 - DNA, 15 bp, Homo sapiens
tggcttcgtactgaa

SEQ ID NO: 510254 - DNA, 15 bp, Homo sapiens
ttggcttcgtactga

SEQ ID NO: 510255 - DNA, 15 bp, Homo sapiens
attggcttcgtactg

SEQ ID NO: 510256 - DNA, 15 bp, Homo sapiens
cattggcttcgtact

SEQ ID NO: 510257 - DNA, 15 bp, Homo sapiens
ccattggcttcgtac

SEQ ID NO: 510258 - DNA, 15 bp, Homo sapiens
tccattggcttcgta

SEQ ID NO: 510259 - DNA, 15 bp, Homo sapiens
gtccattggcttcgt

SEQ ID NO: 510260 - DNA, 15 bp, Homo sapiens
agtccattggcttcg

SEQ ID NO: 510261 - DNA, 15 bp, Homo sapiens
tagtccattggcttc

SEQ ID NO: 510262 - DNA, 15 bp, Homo sapiens
atagtccattggctt

SEQ ID NO: 510263 - DNA, 15 bp, Homo sapiens
catagtccattggct

SEQ ID NO: 510264 - DNA, 15 bp, Homo sapiens
acatagtccattggc

SEQ ID NO: 510265 - DNA, 15 bp, Homo sapiens
tacatagtccattgg

SEQ ID NO: 510266 - DNA, 15 bp, Homo sapiens
ctacatagtccattg

SEQ ID NO: 510267 - DNA, 15 bp, Homo sapiens
tctacatagtccatt

SEQ ID NO: 510268 - DNA, 15 bp, Homo sapiens
atctacatagtccat

SEQ ID NO: 510269 - DNA, 15 bp, Homo sapiens
catctacatagtcca

SEQ ID NO: 510270 - DNA, 15 bp, Homo sapiens
acatctacatagtcc

SEQ ID NO: 510271 - DNA, 15 bp, Homo sapiens
cacatctacatagtc

SEQ ID NO: 510272 - DNA, 15 bp, Homo sapiens
acacatctacatagt

SEQ ID NO: 510273 - DNA, 15 bp, Homo sapiens
tacacatctacatag

SEQ ID NO: 510274 - DNA, 15 bp, Homo sapiens
ctacacatctacata

SEQ ID NO: 510275 - DNA, 15 bp, Homo sapiens
tctacacatctacat

SEQ ID NO: 510276 - DNA, 15 bp, Homo sapiens
ctctacacatctaca

SEQ ID NO: 510277 - DNA, 15 bp, Homo sapiens
tctctacacatctac

SEQ ID NO: 510278 - DNA, 15 bp, Homo sapiens
ctctctacacatcta

SEQ ID NO: 510279 - DNA, 15 bp, Homo sapiens
tctctctacacatct

SEQ ID NO: 510280 - DNA, 15 bp, Homo sapiens
atctctctacacatc

SEQ ID NO: 510281 - DNA, 15 bp, Homo sapiens
catctctctacacat

SEQ ID NO: 510282 - DNA, 15 bp, Homo sapiens
acatctctctacaca

SEQ ID NO: 510283 - DNA, 15 bp, Homo sapiens
gacatctctctacac

SEQ ID NO: 510284 - DNA, 15 bp, Homo sapiens
agacatctctctaca

SEQ ID NO: 510285 - DNA, 15 bp, Homo sapiens
cagacatctctctac

SEQ ID NO: 510286 - DNA, 15 bp, Homo sapiens
tcagacatctctcta

SEQ ID NO: 510287 - DNA, 15 bp, Homo sapiens
ctcagacatctctct

SEQ ID NO: 510288 - DNA, 15 bp, Homo sapiens
actcagacatctctc

SEQ ID NO: 510289 - DNA, 15 bp, Homo sapiens
aactcagacatctct

SEQ ID NO: 510290 - DNA, 15 bp, Homo sapiens
aaactcagacatctc

SEQ ID NO: 510291 - DNA, 15 bp, Homo sapiens
aaaactcagacatct

SEQ ID NO: 510292 - DNA, 15 bp, Homo sapiens
taaaactcagacatc

SEQ ID NO: 510293 - DNA, 15 bp, Homo sapiens
ataaaactcagacat

SEQ ID NO: 510294 - DNA, 15 bp, Homo sapiens
gataaaactcagaca

SEQ ID NO: 510295 - DNA, 15 bp, Homo sapiens
agataaaactcagac

SEQ ID NO: 510296 - DNA, 15 bp, Homo sapiens
tagataaaactcaga

SEQ ID NO: 510297 - DNA, 15 bp, Homo sapiens
atagataaaactcag

SEQ ID NO: 510298 - DNA, 15 bp, Homo sapiens
aatagataaaactca

SEQ ID NO: 510299 - DNA, 15 bp, Homo sapiens
caatagataaaactc

SEQ ID NO: 510300 - DNA, 15 bp, Homo sapiens
gcaatagataaaact

SEQ ID NO: 510301 - DNA, 15 bp, Homo sapiens
cgcaatagataaaac

SEQ ID NO: 510302 - DNA, 15 bp, Homo sapiens
acgcaatagataaaa

SEQ ID NO: 510303 - DNA, 15 bp, Homo sapiens
cacgcaatagataaa

SEQ ID NO: 510304 - DNA, 15 bp, Homo sapiens
tcacgcaatagataa

SEQ ID NO: 510305 - DNA, 15 bp, Homo sapiens
ctcacgcaatagata

SEQ ID NO: 510306 - DNA, 15 bp, Homo sapiens
actcacgcaatagat

SEQ ID NO: 510307 - DNA, 15 bp, Homo sapiens
aactcacgcaataga

SEQ ID NO: 510308 - DNA, 15 bp, Homo sapiens
caactcacgcaatag

SEQ ID NO: 510309 - DNA, 15 bp, Homo sapiens
acaactcacgcaata

SEQ ID NO: 510310 - DNA, 15 bp, Homo sapiens
tacaactcacgcaat

SEQ ID NO: 510311 - DNA, 15 bp, Homo sapiens
ctacaactcacgcaa

SEQ ID NO: 510312 - DNA, 15 bp, Homo sapiens
cctacaactcacgca

SEQ ID NO: 510313 - DNA, 15 bp, Homo sapiens
acctacaactcacgc

SEQ ID NO: 510314 - DNA, 15 bp, Homo sapiens
tacctacaactcacg

SEQ ID NO: 510315 - DNA, 15 bp, Homo sapiens
atacctacaactcac

SEQ ID NO: 510316 - DNA, 15 bp, Homo sapiens
catacctacaactca

SEQ ID NO: 510317 - DNA, 15 bp, Homo sapiens
tcatacctacaactc

SEQ ID NO: 510318 - DNA, 15 bp, Homo sapiens
atcatacctacaact

SEQ ID NO: 510319 - DNA, 15 bp, Homo sapiens
tatcatacctacaac

SEQ ID NO: 510320 - DNA, 15 bp, Homo sapiens
gtatcatacctacaa

SEQ ID NO: 510321 - DNA, 15 bp, Homo sapiens
tgtatcatacctaca

SEQ ID NO: 510322 - DNA, 15 bp, Homo sapiens
ttgtatcatacctac

SEQ ID NO: 510323 - DNA, 15 bp, Homo sapiens
attgtatcataccta

SEQ ID NO: 510324 - DNA, 15 bp, Homo sapiens
cattgtatcatacct

SEQ ID NO: 510325 - DNA, 15 bp, Homo sapiens
gcattgtatcatacc

SEQ ID NO: 510326 - DNA, 15 bp, Homo sapiens
tgcattgtatcatac

SEQ ID NO: 510327 - DNA, 15 bp, Homo sapiens
ctgcattgtatcata

SEQ ID NO: 510328 - DNA, 15 bp, Homo sapiens
gctgcattgtatcat

SEQ ID NO: 510329 - DNA, 15 bp, Homo sapiens
tgctgcattgtatca

SEQ ID NO: 510330 - DNA, 15 bp, Homo sapiens
gtgctgcattgtatc

SEQ ID NO: 510331 - DNA, 15 bp, Homo sapiens
agtgctgcattgtat

SEQ ID NO: 510332 - DNA, 15 bp, Homo sapiens
aagtgctgcattgta

SEQ ID NO: 510333 - DNA, 15 bp, Homo sapiens
gaagtgctgcattgt

SEQ ID NO: 510334 - DNA, 15 bp, Homo sapiens
ggaagtgctgcattg

SEQ ID NO: 510335 - DNA, 15 bp, Homo sapiens
tggaagtgctgcatt

SEQ ID NO: 510336 - DNA, 15 bp, Homo sapiens
ttggaagtgctgcat

SEQ ID NO: 510337 - DNA, 15 bp, Homo sapiens
tttggaagtgctgca

SEQ ID NO: 510338 - DNA, 15 bp, Homo sapiens
ctttggaagtgctgc

SEQ ID NO: 510339 - DNA, 15 bp, Homo sapiens
actttggaagtgctg

SEQ ID NO: 510340 - DNA, 15 bp, Homo sapiens
aactttggaagtgct

SEQ ID NO: 510341 - DNA, 15 bp, Homo sapiens
aaactttggaagtgc

SEQ ID NO: 510342 - DNA, 15 bp, Homo sapiens
taaactttggaagtg

SEQ ID NO: 510343 - DNA, 15 bp, Homo sapiens
gtaaactttggaagt

SEQ ID NO: 510344 - DNA, 15 bp, Homo sapiens
agtaaactttggaag

SEQ ID NO: 510345 - DNA, 15 bp, Homo sapiens
cagtaaactttggaa

SEQ ID NO: 510346 - DNA, 15 bp, Homo sapiens
gcagtaaactttgga

SEQ ID NO: 510347 - DNA, 15 bp, Homo sapiens
tgcagtaaactttgg

SEQ ID NO: 510348 - DNA, 15 bp, Homo sapiens
gtgcagtaaactttg

SEQ ID NO: 510349 - DNA, 15 bp, Homo sapiens
ggtgcagtaaacttt

SEQ ID NO: 510350 - DNA, 15 bp, Homo sapiens
gggtgcagtaaactt

SEQ ID NO: 510351 - DNA, 15 bp, Homo sapiens
tgggtgcagtaaact

SEQ ID NO: 510352 - DNA, 15 bp, Homo sapiens
ctgggtgcagtaaac

SEQ ID NO: 510353 - DNA, 15 bp, Homo sapiens
cctgggtgcagtaaa

SEQ ID NO: 510354 - DNA, 15 bp, Homo sapiens
acctgggtgcagtaa

SEQ ID NO: 510355 - DNA, 15 bp, Homo sapiens
gacctgggtgcagta

SEQ ID NO: 510356 - DNA, 15 bp, Homo sapiens
cgacctgggtgcagt

SEQ ID NO: 510357 - DNA, 15 bp, Homo sapiens
tcgacctgggtgcag

SEQ ID NO: 510358 - DNA, 15 bp, Homo sapiens
ctcgacctgggtgca

SEQ ID NO: 510359 - DNA, 15 bp, Homo sapiens
cctcgacctgggtgc

SEQ ID NO: 510360 - DNA, 15 bp, Homo sapiens
gcctcgacctgggtg

SEQ ID NO: 510361 - DNA, 15 bp, Homo sapiens
agcctcgacctgggt

SEQ ID NO: 510362 - DNA, 15 bp, Homo sapiens
gagcctcgacctggg

SEQ ID NO: 510363 - DNA, 15 bp, Homo sapiens
tgagcctcgacctgg

SEQ ID NO: 510364 - DNA, 15 bp, Homo sapiens
ctgagcctcgacctg

SEQ ID NO: 510365 - DNA, 15 bp, Homo sapiens
cctgagcctcgacct

SEQ ID NO: 510366 - DNA, 15 bp, Homo sapiens
tcctgagcctcgacc

SEQ ID NO: 510367 - DNA, 15 bp, Homo sapiens
ctcctgagcctcgac

SEQ ID NO: 510368 - DNA, 15 bp, Homo sapiens
actcctgagcctcga

SEQ ID NO: 510369 - DNA, 15 bp, Homo sapiens
gactcctgagcctcg

SEQ ID NO: 510370 - DNA, 15 bp, Homo sapiens
ggactcctgagcctc

SEQ ID NO: 510371 - DNA, 15 bp, Homo sapiens
aggactcctgagcct

SEQ ID NO: 510372 - DNA, 15 bp, Homo sapiens
caggactcctgagcc

SEQ ID NO: 510373 - DNA, 15 bp, Homo sapiens
acaggactcctgagc

SEQ ID NO: 510374 - DNA, 15 bp, Homo sapiens
gacaggactcctgag

SEQ ID NO: 510375 - DNA, 15 bp, Homo sapiens
tgacaggactcctga

SEQ ID NO: 510376 - DNA, 15 bp, Homo sapiens
ctgacaggactcctg

SEQ ID NO: 510377 - DNA, 15 bp, Homo sapiens
cctgacaggactcct

SEQ ID NO: 510378 - DNA, 15 bp, Homo sapiens
ccctgacaggactcc

SEQ ID NO: 510379 - DNA, 15 bp, Homo sapiens
tccctgacaggactc

SEQ ID NO: 510380 - DNA, 15 bp, Homo sapiens
ttccctgacaggact

SEQ ID NO: 510381 - DNA, 15 bp, Homo sapiens
gttccctgacaggac

SEQ ID NO: 510382 - DNA, 15 bp, Homo sapiens
tgttccctgacagga

SEQ ID NO: 510383 - DNA, 15 bp, Homo sapiens
ctgttccctgacagg

SEQ ID NO: 510384 - DNA, 15 bp, Homo sapiens
actgttccctgacag

SEQ ID NO: 510385 - DNA, 15 bp, Homo sapiens
cactgttccctgaca

SEQ ID NO: 510386 - DNA, 15 bp, Homo sapiens
gcactgttccctgac

SEQ ID NO: 510387 - DNA, 15 bp, Homo sapiens
agcactgttccctga

SEQ ID NO: 510388 - DNA, 15 bp, Homo sapiens
cagcactgttccctg

SEQ ID NO: 510389 - DNA, 15 bp, Homo sapiens
gcagcactgttccct

SEQ ID NO: 510390 - DNA, 15 bp, Homo sapiens
ggcagcactgttccc

SEQ ID NO: 510391 - DNA, 15 bp, Homo sapiens
tggcagcactgttcc

SEQ ID NO: 510392 - DNA, 15 bp, Homo sapiens
ctggcagcactgttc

SEQ ID NO: 510393 - DNA, 15 bp, Homo sapiens
cctggcagcactgtt

SEQ ID NO: 510394 - DNA, 15 bp, Homo sapiens
ccctggcagcactgt

SEQ ID NO: 510395 - DNA, 15 bp, Homo sapiens
tccctggcagcactg

SEQ ID NO: 510396 - DNA, 15 bp, Homo sapiens
ctccctggcagcact

SEQ ID NO: 510397 - DNA, 15 bp, Homo sapiens
actccctggcagcac

SEQ ID NO: 510398 - DNA, 15 bp, Homo sapiens
tactccctggcagca

SEQ ID NO: 510399 - DNA, 15 bp, Homo sapiens
ctactccctggcagc

SEQ ID NO: 510400 - DNA, 15 bp, Homo sapiens
actactccctggcag

SEQ ID NO: 510401 - DNA, 15 bp, Homo sapiens
tactactccctggca

SEQ ID NO: 510402 - DNA, 15 bp, Homo sapiens
ttactactccctggc

SEQ ID NO: 510403 - DNA, 15 bp, Homo sapiens
attactactccctgg

SEQ ID NO: 510404 - DNA, 15 bp, Homo sapiens
gattactactccctg

SEQ ID NO: 510405 - DNA, 15 bp, Homo sapiens
cgattactactccct

SEQ ID NO: 510406 - DNA, 15 bp, Homo sapiens
tcgattactactccc

SEQ ID NO: 510407 - DNA, 15 bp, Homo sapiens
gtcgattactactcc

SEQ ID NO: 510408 - DNA, 15 bp, Homo sapiens
tgtcgattactactc

SEQ ID NO: 510409 - DNA, 15 bp, Homo sapiens
atgtcgattactact

SEQ ID NO: 510410 - DNA, 15 bp, Homo sapiens
aatgtcgattactac

SEQ ID NO: 510411 - DNA, 15 bp, Homo sapiens
aaatgtcgattacta

SEQ ID NO: 510412 - DNA, 15 bp, Homo sapiens
gaaatgtcgattact

SEQ ID NO: 510413 - DNA, 15 bp, Homo sapiens
tgaaatgtcgattac

SEQ ID NO: 510414 - DNA, 15 bp, Homo sapiens
ctgaaatgtcgatta

SEQ ID NO: 510415 - DNA, 15 bp, Homo sapiens
actgaaatgtcgatt

SEQ ID NO: 510416 - DNA, 15 bp, Homo sapiens
aactgaaatgtcgat

SEQ ID NO: 510417 - DNA, 15 bp, Homo sapiens
taactgaaatgtcga

SEQ ID NO: 510418 - DNA, 15 bp, Homo sapiens
ttaactgaaatgtcg

SEQ ID NO: 510419 - DNA, 15 bp, Homo sapiens
attaactgaaatgtc

SEQ ID NO: 510420 - DNA, 15 bp, Homo sapiens
tattaactgaaatgt

SEQ ID NO: 510421 - DNA, 15 bp, Homo sapiens
gtattaactgaaatg

SEQ ID NO: 510422 - DNA, 15 bp, Homo sapiens
agtattaactgaaat

SEQ ID NO: 510423 - DNA, 15 bp, Homo sapiens
cagtattaactgaaa

SEQ ID NO: 510424 - DNA, 15 bp, Homo sapiens
gcagtattaactgaa

SEQ ID NO: 510425 - DNA, 15 bp, Homo sapiens
ggcagtattaactga

SEQ ID NO: 510426 - DNA, 15 bp, Homo sapiens
tggcagtattaactg

SEQ ID NO: 510427 - DNA, 15 bp, Homo sapiens
ctggcagtattaact

SEQ ID NO: 510428 - DNA, 15 bp, Homo sapiens
cctggcagtattaac

SEQ ID NO: 510429 - DNA, 15 bp, Homo sapiens
acctggcagtattaa

SEQ ID NO: 510430 - DNA, 15 bp, Homo sapiens
gacctggcagtatta

SEQ ID NO: 510431 - DNA, 15 bp, Homo sapiens
tgacctggcagtatt

SEQ ID NO: 510432 - DNA, 15 bp, Homo sapiens
gtgacctggcagtat

SEQ ID NO: 510433 - DNA, 15 bp, Homo sapiens
tgtgacctggcagta

SEQ ID NO: 510434 - DNA, 15 bp, Homo sapiens
ctgtgacctggcagt

SEQ ID NO: 510435 - DNA, 15 bp, Homo sapiens
cctgtgacctggcag

SEQ ID NO: 510436 - DNA, 15 bp, Homo sapiens
ccctgtgacctggca

SEQ ID NO: 510437 - DNA, 15 bp, Homo sapiens
gccctgtgacctggc

SEQ ID NO: 510438 - DNA, 15 bp, Homo sapiens
tgccctgtgacctgg

SEQ ID NO: 510439 - DNA, 15 bp, Homo sapiens
ctgccctgtgacctg

SEQ ID NO: 510440 - DNA, 15 bp, Homo sapiens
actgccctgtgacct

SEQ ID NO: 510441 - DNA, 15 bp, Homo sapiens
tactgccctgtgacc

SEQ ID NO: 510442 - DNA, 15 bp, Homo sapiens
ttactgccctgtgac

SEQ ID NO: 510443 - DNA, 15 bp, Homo sapiens
gttactgccctgtga

SEQ ID NO: 510444 - DNA, 15 bp, Homo sapiens
cgttactgccctgtg

SEQ ID NO: 510445 - DNA, 15 bp, Homo sapiens
tcgttactgccctgt

SEQ ID NO: 510446 - DNA, 15 bp, Homo sapiens
ttcgttactgccctg

SEQ ID NO: 510447 - DNA, 15 bp, Homo sapiens
gttcgttactgccct

SEQ ID NO: 510448 - DNA, 15 bp, Homo sapiens
agttcgttactgccc

SEQ ID NO: 510449 - DNA, 15 bp, Homo sapiens
tagttcgttactgcc

SEQ ID NO: 510450 - DNA, 15 bp, Homo sapiens
ctagttcgttactgc

SEQ ID NO: 510451 - DNA, 15 bp, Homo sapiens
gctagttcgttactg

SEQ ID NO: 510452 - DNA, 15 bp, Homo sapiens
agctagttcgttact

SEQ ID NO: 510453 - DNA, 15 bp, Homo sapiens
tagctagttcgttac

SEQ ID NO: 510454 - DNA, 15 bp, Homo sapiens
gtagctagttcgtta

SEQ ID NO: 510455 - DNA, 15 bp, Homo sapiens
tgtagctagttcgtt

SEQ ID NO: 510456 - DNA, 15 bp, Homo sapiens
ttgtagctagttcgt

SEQ ID NO: 510457 - DNA, 15 bp, Homo sapiens
attgtagctagttcg

SEQ ID NO: 510458 - DNA, 15 bp, Homo sapiens
aattgtagctagttc

SEQ ID NO: 510459 - DNA, 15 bp, Homo sapiens
aaattgtagctagtt

SEQ ID NO: 510460 - DNA, 15 bp, Homo sapiens
gaaattgtagctagt

SEQ ID NO: 510461 - DNA, 15 bp, Homo sapiens
agaaattgtagctag

SEQ ID NO: 510462 - DNA, 15 bp, Homo sapiens
cagaaattgtagcta

SEQ ID NO: 510463 - DNA, 15 bp, Homo sapiens
acagaaattgtagct

SEQ ID NO: 510464 - DNA, 15 bp, Homo sapiens
gacagaaattgtagc

SEQ ID NO: 510465 - DNA, 15 bp, Homo sapiens
agacagaaattgtag

SEQ ID NO: 510466 - DNA, 15 bp, Homo sapiens
cagacagaaattgta

SEQ ID NO: 510467 - DNA, 15 bp, Homo sapiens
gcagacagaaattgt

SEQ ID NO: 510468 - DNA, 15 bp, Homo sapiens
agcagacagaaattg

SEQ ID NO: 510469 - DNA, 15 bp, Homo sapiens
cagcagacagaaatt

SEQ ID NO: 510470 - DNA, 15 bp, Homo sapiens
acagcagacagaaat

SEQ ID NO: 510471 - DNA, 15 bp, Homo sapiens
cacagcagacagaaa

SEQ ID NO: 510472 - DNA, 15 bp, Homo sapiens
ccacagcagacagaa

SEQ ID NO: 510473 - DNA, 15 bp, Homo sapiens
gccacagcagacaga

SEQ ID NO: 510474 - DNA, 15 bp, Homo sapiens
agccacagcagacag

SEQ ID NO: 510475 - DNA, 15 bp, Homo sapiens
aagccacagcagaca

SEQ ID NO: 510476 - DNA, 15 bp, Homo sapiens
caagccacagcagac

SEQ ID NO: 510477 - DNA, 15 bp, Homo sapiens
tcaagccacagcaga

SEQ ID NO: 510478 - DNA, 15 bp, Homo sapiens
ctcaagccacagcag

SEQ ID NO: 510479 - DNA, 15 bp, Homo sapiens
cctcaagccacagca

SEQ ID NO: 510480 - DNA, 15 bp, Homo sapiens
acctcaagccacagc

SEQ ID NO: 510481 - DNA, 15 bp, Homo sapiens
tacctcaagccacag

SEQ ID NO: 510482 - DNA, 15 bp, Homo sapiens
ctacctcaagccaca

SEQ ID NO: 510483 - DNA, 15 bp, Homo sapiens
cctacctcaagccac

SEQ ID NO: 510484 - DNA, 15 bp, Homo sapiens
tcctacctcaagcca

SEQ ID NO: 510485 - DNA, 15 bp, Homo sapiens
ttcctacctcaagcc

SEQ ID NO: 510486 - DNA, 15 bp, Homo sapiens
attcctacctcaagc

SEQ ID NO: 510487 - DNA, 15 bp, Homo sapiens
cattcctacctcaag

SEQ ID NO: 510488 - DNA, 15 bp, Homo sapiens
acattcctacctcaa

SEQ ID NO: 510489 - DNA, 15 bp, Homo sapiens
cacattcctacctca

SEQ ID NO: 510490 - DNA, 15 bp, Homo sapiens
acacattcctacctc

SEQ ID NO: 510491 - DNA, 15 bp, Homo sapiens
cacacattcctacct

SEQ ID NO: 510492 - DNA, 15 bp, Homo sapiens
gcacacattcctacc

SEQ ID NO: 510493 - DNA, 15 bp, Homo sapiens
agcacacattcctac

SEQ ID NO: 510494 - DNA, 15 bp, Homo sapiens
cagcacacattccta

SEQ ID NO: 510495 - DNA, 15 bp, Homo sapiens
acagcacacattcct

SEQ ID NO: 510496 - DNA, 15 bp, Homo sapiens
cacagcacacattcc

SEQ ID NO: 510497 - DNA, 15 bp, Homo sapiens
acacagcacacattc

SEQ ID NO: 510498 - DNA, 15 bp, Homo sapiens
cacacagcacacatt

SEQ ID NO: 510499 - DNA, 15 bp, Homo sapiens
gcacacagcacacat

SEQ ID NO: 510500 - DNA, 15 bp, Homo sapiens
tgcacacagcacaca

SEQ ID NO: 510501 - DNA, 15 bp, Homo sapiens
gtgcacacagcacac

SEQ ID NO: 510502 - DNA, 15 bp, Homo sapiens
ggtgcacacagcaca

SEQ ID NO: 510503 - DNA, 15 bp, Homo sapiens
tggtgcacacagcac

SEQ ID NO: 510504 - DNA, 15 bp, Homo sapiens
gtggtgcacacagca

SEQ ID NO: 510505 - DNA, 15 bp, Homo sapiens
cgtggtgcacacagc

SEQ ID NO: 510506 - DNA, 15 bp, Homo sapiens
ccgtggtgcacacag

SEQ ID NO: 510507 - DNA, 15 bp, Homo sapiens
accgtggtgcacaca

SEQ ID NO: 510508 - DNA, 15 bp, Homo sapiens
caccgtggtgcacac

SEQ ID NO: 510509 - DNA, 15 bp, Homo sapiens
ccaccgtggtgcaca

SEQ ID NO: 510510 - DNA, 15 bp, Homo sapiens
accaccgtggtgcac

SEQ ID NO: 510511 - DNA, 15 bp, Homo sapiens
aaccaccgtggtgca

SEQ ID NO: 510512 - DNA, 15 bp, Homo sapiens
aaaccaccgtggtgc

SEQ ID NO: 510513 - DNA, 15 bp, Homo sapiens
caaaccaccgtggtg

SEQ ID NO: 510514 - DNA, 15 bp, Homo sapiens
tcaaaccaccgtggt

SEQ ID NO: 510515 - DNA, 15 bp, Homo sapiens
gtcaaaccaccgtgg

SEQ ID NO: 510516 - DNA, 15 bp, Homo sapiens
tgtcaaaccaccgtg

SEQ ID NO: 510517 - DNA, 15 bp, Homo sapiens
ctgtcaaaccaccgt

SEQ ID NO: 510518 - DNA, 15 bp, Homo sapiens
actgtcaaaccaccg

SEQ ID NO: 510519 - DNA, 15 bp, Homo sapiens
aactgtcaaaccacc

SEQ ID NO: 510520 - DNA, 15 bp, Homo sapiens
caactgtcaaaccac

SEQ ID NO: 510521 - DNA, 15 bp, Homo sapiens
gcaactgtcaaacca

SEQ ID NO: 510522 - DNA, 15 bp, Homo sapiens
tgcaactgtcaaacc

SEQ ID NO: 510523 - DNA, 15 bp, Homo sapiens
ttgcaactgtcaaac

SEQ ID NO: 510524 - DNA, 15 bp, Homo sapiens
attgcaactgtcaaa

SEQ ID NO: 510525 - DNA, 15 bp, Homo sapiens
aattgcaactgtcaa

SEQ ID NO: 510526 - DNA, 15 bp, Homo sapiens
gaattgcaactgtca

SEQ ID NO: 510527 - DNA, 15 bp, Homo sapiens
agaattgcaactgtc

SEQ ID NO: 510528 - DNA, 15 bp, Homo sapiens
aagaattgcaactgt

SEQ ID NO: 510529 - DNA, 15 bp, Homo sapiens
aaagaattgcaactg

SEQ ID NO: 510530 - DNA, 15 bp, Homo sapiens
gaaagaattgcaact

SEQ ID NO: 510531 - DNA, 15 bp, Homo sapiens
agaaagaattgcaac

SEQ ID NO: 510532 - DNA, 15 bp, Homo sapiens
cagaaagaattgcaa

SEQ ID NO: 510533 - DNA, 15 bp, Homo sapiens
tcagaaagaattgca

SEQ ID NO: 510534 - DNA, 15 bp, Homo sapiens
ttcagaaagaattgc

SEQ ID NO: 510535 - DNA, 15 bp, Homo sapiens
cttcagaaagaattg

SEQ ID NO: 510536 - DNA, 15 bp, Homo sapiens
acttcagaaagaatt

SEQ ID NO: 510537 - DNA, 15 bp, Homo sapiens
tacttcagaaagaat

SEQ ID NO: 510538 - DNA, 15 bp, Homo sapiens
ctacttcagaaagaa

SEQ ID NO: 510539 - DNA, 15 bp, Homo sapiens
tctacttcagaaaga

SEQ ID NO: 510540 - DNA, 15 bp, Homo sapiens
ttctacttcagaaag

SEQ ID NO: 510541 - DNA, 15 bp, Homo sapiens
attctacttcagaaa

SEQ ID NO: 510542 - DNA, 15 bp, Homo sapiens
gattctacttcagaa

SEQ ID NO: 510543 - DNA, 15 bp, Homo sapiens
tgattctacttcaga

SEQ ID NO: 510544 - DNA, 15 bp, Homo sapiens
ctgattctacttcag

SEQ ID NO: 510545 - DNA, 15 bp, Homo sapiens
tctgattctacttca

SEQ ID NO: 510546 - DNA, 15 bp, Homo sapiens
ttctgattctacttc

SEQ ID NO: 510547 - DNA, 15 bp, Homo sapiens
cttctgattctactt

SEQ ID NO: 510548 - DNA, 15 bp, Homo sapiens
ccttctgattctact

SEQ ID NO: 510549 - DNA, 15 bp, Homo sapiens
cccttctgattctac

SEQ ID NO: 510550 - DNA, 15 bp, Homo sapiens
tcccttctgattcta

SEQ ID NO: 510551 - DNA, 15 bp, Homo sapiens
ttcccttctgattct

SEQ ID NO: 510552 - DNA, 15 bp, Homo sapiens
cttcccttctgattc

SEQ ID NO: 510553 - DNA, 15 bp, Homo sapiens
ccttcccttctgatt

SEQ ID NO: 510554 - DNA, 15 bp, Homo sapiens
tccttcccttctgat

SEQ ID NO: 510555 - DNA, 15 bp, Homo sapiens
ttccttcccttctga

SEQ ID NO: 510556 - DNA, 15 bp, Homo sapiens
cttccttcccttctg

SEQ ID NO: 510557 - DNA, 15 bp, Homo sapiens
tcttccttcccttct

SEQ ID NO: 510558 - DNA, 15 bp, Homo sapiens
ttcttccttcccttc

SEQ ID NO: 510559 - DNA, 15 bp, Homo sapiens
cttcttccttccctt

SEQ ID NO: 510560 - DNA, 15 bp, Homo sapiens
gcttcttccttccct

SEQ ID NO: 510561 - DNA, 15 bp, Homo sapiens
agcttcttccttccc

SEQ ID NO: 510562 - DNA, 15 bp, Homo sapiens
cagcttcttccttcc

SEQ ID NO: 510563 - DNA, 15 bp, Homo sapiens
gcagcttcttccttc

SEQ ID NO: 510564 - DNA, 15 bp, Homo sapiens
ggcagcttcttcctt

SEQ ID NO: 510565 - DNA, 15 bp, Homo sapiens
tggcagcttcttcct

SEQ ID NO: 510566 - DNA, 15 bp, Homo sapiens
gtggcagcttcttcc

SEQ ID NO: 510567 - DNA, 15 bp, Homo sapiens
agtggcagcttcttc

SEQ ID NO: 510568 - DNA, 15 bp, Homo sapiens
cagtggcagcttctt

SEQ ID NO: 510569 - DNA, 15 bp, Homo sapiens
gcagtggcagcttct

SEQ ID NO: 510570 - DNA, 15 bp, Homo sapiens
ggcagtggcagcttc

SEQ ID NO: 510571 - DNA, 15 bp, Homo sapiens
gggcagtggcagctt

SEQ ID NO: 510572 - DNA, 15 bp, Homo sapiens
tgggcagtggcagct

SEQ ID NO: 510573 - DNA, 15 bp, Homo sapiens
ctgggcagtggcagc

SEQ ID NO: 510574 - DNA, 15 bp, Homo sapiens
gctgggcagtggcag

SEQ ID NO: 510575 - DNA, 15 bp, Homo sapiens
ggctgggcagtggca

SEQ ID NO: 510576 - DNA, 15 bp, Homo sapiens
gggctgggcagtggc

SEQ ID NO: 510577 - DNA, 15 bp, Homo sapiens
ggggctgggcagtgg

SEQ ID NO: 510578 - DNA, 15 bp, Homo sapiens
gggggctgggcagtg

SEQ ID NO: 510579 - DNA, 15 bp, Homo sapiens
ggggggctgggcagt

SEQ ID NO: 510580 - DNA, 15 bp, Homo sapiens
tggggggctgggcag

SEQ ID NO: 510581 - DNA, 15 bp, Homo sapiens
ctggggggctgggca

SEQ ID NO: 510582 - DNA, 15 bp, Homo sapiens
cctggggggctgggc

SEQ ID NO: 510583 - DNA, 15 bp, Homo sapiens
gcctggggggctggg

SEQ ID NO: 510584 - DNA, 15 bp, Homo sapiens
ggcctggggggctgg

SEQ ID NO: 510585 - DNA, 15 bp, Homo sapiens
gggcctggggggctg

SEQ ID NO: 510586 - DNA, 15 bp, Homo sapiens
agggcctggggggct

SEQ ID NO: 510587 - DNA, 15 bp, Homo sapiens
aagggcctggggggc

SEQ ID NO: 510588 - DNA, 15 bp, Homo sapiens
taagggcctgggggg

SEQ ID NO: 510589 - DNA, 15 bp, Homo sapiens
ctaagggcctggggg

SEQ ID NO: 510590 - DNA, 15 bp, Homo sapiens
actaagggcctgggg

SEQ ID NO: 510591 - DNA, 15 bp, Homo sapiens
gactaagggcctggg

SEQ ID NO: 510592 - DNA, 15 bp, Homo sapiens
ggactaagggcctgg

SEQ ID NO: 510593 - DNA, 15 bp, Homo sapiens
gggactaagggcctg

SEQ ID NO: 510594 - DNA, 15 bp, Homo sapiens
tgggactaagggcct

SEQ ID NO: 510595 - DNA, 15 bp, Homo sapiens
gtgggactaagggcc

SEQ ID NO: 510596 - DNA, 15 bp, Homo sapiens
ggtgggactaagggc

SEQ ID NO: 510597 - DNA, 15 bp, Homo sapiens
gggtgggactaaggg

SEQ ID NO: 510598 - DNA, 15 bp, Homo sapiens
ggggtgggactaagg

SEQ ID NO: 510599 - DNA, 15 bp, Homo sapiens
tggggtgggactaag

SEQ ID NO: 510600 - DNA, 15 bp, Homo sapiens
ctggggtgggactaa

SEQ ID NO: 510601 - DNA, 15 bp, Homo sapiens
cctggggtgggacta

SEQ ID NO: 510602 - DNA, 15 bp, Homo sapiens
gcctggggtgggact

SEQ ID NO: 510603 - DNA, 15 bp, Homo sapiens
ggcctggggtgggac

SEQ ID NO: 510604 - DNA, 15 bp, Homo sapiens
aggcctggggtggga

SEQ ID NO: 510605 - DNA, 15 bp, Homo sapiens
aaggcctggggtggg

SEQ ID NO: 510606 - DNA, 15 bp, Homo sapiens
caaggcctggggtgg

SEQ ID NO: 510607 - DNA, 15 bp, Homo sapiens
gcaaggcctggggtg

SEQ ID NO: 510608 - DNA, 15 bp, Homo sapiens
tgcaaggcctggggt

SEQ ID NO: 510609 - DNA, 15 bp, Homo sapiens
ctgcaaggcctgggg

SEQ ID NO: 510610 - DNA, 15 bp, Homo sapiens
tctgcaaggcctggg

SEQ ID NO: 510611 - DNA, 15 bp, Homo sapiens
gtctgcaaggcctgg

SEQ ID NO: 510612 - DNA, 15 bp, Homo sapiens
ggtctgcaaggcctg

SEQ ID NO: 510613 - DNA, 15 bp, Homo sapiens
aggtctgcaaggcct

SEQ ID NO: 510614 - DNA, 15 bp, Homo sapiens
aaggtctgcaaggcc

SEQ ID NO: 510615 - DNA, 15 bp, Homo sapiens
caaggtctgcaaggc

SEQ ID NO: 510616 - DNA, 15 bp, Homo sapiens
tcaaggtctgcaagg

SEQ ID NO: 510617 - DNA, 15 bp, Homo sapiens
ctcaaggtctgcaag

SEQ ID NO: 510618 - DNA, 15 bp, Homo sapiens
cctcaaggtctgcaa

SEQ ID NO: 510619 - DNA, 15 bp, Homo sapiens
gcctcaaggtctgca

SEQ ID NO: 510620 - DNA, 15 bp, Homo sapiens
tgcctcaaggtctgc

SEQ ID NO: 510621 - DNA, 15 bp, Homo sapiens
gtgcctcaaggtctg

SEQ ID NO: 510622 - DNA, 15 bp, Homo sapiens
ggtgcctcaaggtct

SEQ ID NO: 510623 - DNA, 15 bp, Homo sapiens
tggtgcctcaaggtc

SEQ ID NO: 510624 - DNA, 15 bp, Homo sapiens
atggtgcctcaaggt

SEQ ID NO: 510625 - DNA, 15 bp, Homo sapiens
gatggtgcctcaagg

SEQ ID NO: 510626 - DNA, 15 bp, Homo sapiens
tgatggtgcctcaag

SEQ ID NO: 510627 - DNA, 15 bp, Homo sapiens
ttgatggtgcctcaa

SEQ ID NO: 510628 - DNA, 15 bp, Homo sapiens
cttgatggtgcctca

SEQ ID NO: 510629 - DNA, 15 bp, Homo sapiens
acttgatggtgcctc

SEQ ID NO: 510630 - DNA, 15 bp, Homo sapiens
cacttgatggtgcct

SEQ ID NO: 510631 - DNA, 15 bp, Homo sapiens
ccacttgatggtgcc

SEQ ID NO: 510632 - DNA, 15 bp, Homo sapiens
gccacttgatggtgc

SEQ ID NO: 510633 - DNA, 15 bp, Homo sapiens
ggccacttgatggtg

SEQ ID NO: 510634 - DNA, 15 bp, Homo sapiens
tggccacttgatggt

SEQ ID NO: 510635 - DNA, 15 bp, Homo sapiens
ctggccacttgatgg

SEQ ID NO: 510636 - DNA, 15 bp, Homo sapiens
cctggccacttgatg

SEQ ID NO: 510637 - DNA, 15 bp, Homo sapiens
gcctggccacttgat

SEQ ID NO: 510638 - DNA, 15 bp, Homo sapiens
tgcctggccacttga

SEQ ID NO: 510639 - DNA, 15 bp, Homo sapiens
ctgcctggccacttg

SEQ ID NO: 510640 - DNA, 15 bp, Homo sapiens
tctgcctggccactt

SEQ ID NO: 510641 - DNA, 15 bp, Homo sapiens
ctctgcctggccact

SEQ ID NO: 510642 - DNA, 15 bp, Homo sapiens
tctctgcctggccac

SEQ ID NO: 510643 - DNA, 15 bp, Homo sapiens
ctctctgcctggcca

SEQ ID NO: 510644 - DNA, 15 bp, Homo sapiens
tctctctgcctggcc

SEQ ID NO: 510645 - DNA, 15 bp, Homo sapiens
ctctctctgcctggc

SEQ ID NO: 510646 - DNA, 15 bp, Homo sapiens
tctctctctgcctgg

SEQ ID NO: 510647 - DNA, 15 bp, Homo sapiens
ctctctctctgcctg

SEQ ID NO: 510648 - DNA, 15 bp, Homo sapiens
tctctctctctgcct

SEQ ID NO: 510649 - DNA, 15 bp, Homo sapiens
atctctctctctgcc

SEQ ID NO: 510650 - DNA, 15 bp, Homo sapiens
aatctctctctctgc

SEQ ID NO: 510651 - DNA, 15 bp, Homo sapiens
aaatctctctctctg

SEQ ID NO: 510652 - DNA, 15 bp, Homo sapiens
taaatctctctctct

SEQ ID NO: 510653 - DNA, 15 bp, Homo sapiens
ttaaatctctctctc

SEQ ID NO: 510654 - DNA, 15 bp, Homo sapiens
attaaatctctctct

SEQ ID NO: 510655 - DNA, 15 bp, Homo sapiens
gattaaatctctctc

SEQ ID NO: 510656 - DNA, 15 bp, Homo sapiens
ggattaaatctctct

SEQ ID NO: 510657 - DNA, 15 bp, Homo sapiens
aggattaaatctctc

SEQ ID NO: 510658 - DNA, 15 bp, Homo sapiens
gaggattaaatctct

SEQ ID NO: 510659 - DNA, 15 bp, Homo sapiens
agaggattaaatctc

SEQ ID NO: 510660 - DNA, 15 bp, Homo sapiens
cagaggattaaatct

SEQ ID NO: 510661 - DNA, 15 bp, Homo sapiens
gcagaggattaaatc

SEQ ID NO: 510662 - DNA, 15 bp, Homo sapiens
cgcagaggattaaat

SEQ ID NO: 510663 - DNA, 15 bp, Homo sapiens
ccgcagaggattaaa

SEQ ID NO: 510664 - DNA, 15 bp, Homo sapiens
gccgcagaggattaa

SEQ ID NO: 510665 - DNA, 15 bp, Homo sapiens
agccgcagaggatta

SEQ ID NO: 510666 - DNA, 15 bp, Homo sapiens
aagccgcagaggatt

SEQ ID NO: 510667 - DNA, 15 bp, Homo sapiens
caagccgcagaggat

SEQ ID NO: 510668 - DNA, 15 bp, Homo sapiens
tcaagccgcagagga

SEQ ID NO: 510669 - DNA, 15 bp, Homo sapiens
ctcaagccgcagagg

SEQ ID NO: 510670 - DNA, 15 bp, Homo sapiens
actcaagccgcagag

SEQ ID NO: 510671 - DNA, 15 bp, Homo sapiens
gactcaagccgcaga

SEQ ID NO: 510672 - DNA, 15 bp, Homo sapiens
agactcaagccgcag

SEQ ID NO: 510673 - DNA, 15 bp, Homo sapiens
gagactcaagccgca

SEQ ID NO: 510674 - DNA, 15 bp, Homo sapiens
ggagactcaagccgc

SEQ ID NO: 510675 - DNA, 15 bp, Homo sapiens
aggagactcaagccg

SEQ ID NO: 510676 - DNA, 15 bp, Homo sapiens
gaggagactcaagcc

SEQ ID NO: 510677 - DNA, 15 bp, Homo sapiens
agaggagactcaagc

SEQ ID NO: 510678 - DNA, 15 bp, Homo sapiens
tagaggagactcaag

SEQ ID NO: 510679 - DNA, 15 bp, Homo sapiens
ctagaggagactcaa

SEQ ID NO: 510680 - DNA, 15 bp, Homo sapiens
tctagaggagactca

SEQ ID NO: 510681 - DNA, 15 bp, Homo sapiens
ttctagaggagactc

SEQ ID NO: 510682 - DNA, 15 bp, Homo sapiens
cttctagaggagact

SEQ ID NO: 510683 - DNA, 15 bp, Homo sapiens
acttctagaggagac

SEQ ID NO: 510684 - DNA, 15 bp, Homo sapiens
gacttctagaggaga

SEQ ID NO: 510685 - DNA, 15 bp, Homo sapiens
agacttctagaggag

SEQ ID NO: 510686 - DNA, 15 bp, Homo sapiens
cagacttctagagga

SEQ ID NO: 510687 - DNA, 15 bp, Homo sapiens
acagacttctagagg

SEQ ID NO: 510688 - DNA, 15 bp, Homo sapiens
gacagacttctagag

SEQ ID NO: 510689 - DNA, 15 bp, Homo sapiens
cgacagacttctaga

SEQ ID NO: 510690 - DNA, 15 bp, Homo sapiens
gcgacagacttctag

SEQ ID NO: 510691 - DNA, 15 bp, Homo sapiens
agcgacagacttcta

SEQ ID NO: 510692 - DNA, 15 bp, Homo sapiens
cagcgacagacttct

SEQ ID NO: 510693 - DNA, 15 bp, Homo sapiens
gcagcgacagacttc

SEQ ID NO: 510694 - DNA, 15 bp, Homo sapiens
tgcagcgacagactt

SEQ ID NO: 510695 - DNA, 15 bp, Homo sapiens
ttgcagcgacagact

SEQ ID NO: 510696 - DNA, 15 bp, Homo sapiens
cttgcagcgacagac

SEQ ID NO: 510697 - DNA, 15 bp, Homo sapiens
acttgcagcgacaga

SEQ ID NO: 510698 - DNA, 15 bp, Homo sapiens
gacttgcagcgacag

SEQ ID NO: 510699 - DNA, 15 bp, Homo sapiens
agacttgcagcgaca

SEQ ID NO: 510700 - DNA, 15 bp, Homo sapiens
cagacttgcagcgac

SEQ ID NO: 510701 - DNA, 15 bp, Homo sapiens
acagacttgcagcga

SEQ ID NO: 510702 - DNA, 15 bp, Homo sapiens
aacagacttgcagcg

SEQ ID NO: 510703 - DNA, 15 bp, Homo sapiens
aaacagacttgcagc

SEQ ID NO: 510704 - DNA, 15 bp, Homo sapiens
taaacagacttgcag

SEQ ID NO: 510705 - DNA, 15 bp, Homo sapiens
ctaaacagacttgca

SEQ ID NO: 510706 - DNA, 15 bp, Homo sapiens
tctaaacagacttgc

SEQ ID NO: 510707 - DNA, 15 bp, Homo sapiens
ctctaaacagacttg

SEQ ID NO: 510708 - DNA, 15 bp, Homo sapiens
tctctaaacagactt

SEQ ID NO: 510709 - DNA, 15 bp, Homo sapiens
gtctctaaacagact

SEQ ID NO: 510710 - DNA, 15 bp, Homo sapiens
ggtctctaaacagac

SEQ ID NO: 510711 - DNA, 15 bp, Homo sapiens
aggtctctaaacaga

SEQ ID NO: 510712 - DNA, 15 bp, Homo sapiens
taggtctctaaacag

SEQ ID NO: 510713 - DNA, 15 bp, Homo sapiens
ttaggtctctaaaca

SEQ ID NO: 510714 - DNA, 15 bp, Homo sapiens
attaggtctctaaac

SEQ ID NO: 510715 - DNA, 15 bp, Homo sapiens
cattaggtctctaaa

SEQ ID NO: 510716 - DNA, 15 bp, Homo sapiens
gcattaggtctctaa

SEQ ID NO: 510717 - DNA, 15 bp, Homo sapiens
agcattaggtctcta

SEQ ID NO: 510718 - DNA, 15 bp, Homo sapiens
gagcattaggtctct

SEQ ID NO: 510719 - DNA, 15 bp, Homo sapiens
agagcattaggtctc

SEQ ID NO: 510720 - DNA, 15 bp, Homo sapiens
cagagcattaggtct

SEQ ID NO: 510721 - DNA, 15 bp, Homo sapiens
ccagagcattaggtc

SEQ ID NO: 510722 - DNA, 15 bp, Homo sapiens
tccagagcattaggt

SEQ ID NO: 510723 - DNA, 15 bp, Homo sapiens
ttccagagcattagg

SEQ ID NO: 510724 - DNA, 15 bp, Homo sapiens
cttccagagcattag

SEQ ID NO: 510725 - DNA, 15 bp, Homo sapiens
gcttccagagcatta

SEQ ID NO: 510726 - DNA, 15 bp, Homo sapiens
cgcttccagagcatt

SEQ ID NO: 510727 - DNA, 15 bp, Homo sapiens
acgcttccagagcat

SEQ ID NO: 510728 - DNA, 15 bp, Homo sapiens
gacgcttccagagca

SEQ ID NO: 510729 - DNA, 15 bp, Homo sapiens
agacgcttccagagc

SEQ ID NO: 510730 - DNA, 15 bp, Homo sapiens
cagacgcttccagag

SEQ ID NO: 510731 - DNA, 15 bp, Homo sapiens
acagacgcttccaga

SEQ ID NO: 510732 - DNA, 15 bp, Homo sapiens
aacagacgcttccag

SEQ ID NO: 510733 - DNA, 15 bp, Homo sapiens
caacagacgcttcca

SEQ ID NO: 510734 - DNA, 15 bp, Homo sapiens
ccaacagacgcttcc

SEQ ID NO: 510735 - DNA, 15 bp, Homo sapiens
cccaacagacgcttc

SEQ ID NO: 510736 - DNA, 15 bp, Homo sapiens
tcccaacagacgctt

SEQ ID NO: 510737 - DNA, 15 bp, Homo sapiens
gtcccaacagacgct

SEQ ID NO: 510738 - DNA, 15 bp, Homo sapiens
ggtcccaacagacgc

SEQ ID NO: 510739 - DNA, 15 bp, Homo sapiens
tggtcccaacagacg

SEQ ID NO: 510740 - DNA, 15 bp, Homo sapiens
atggtcccaacagac

SEQ ID NO: 510741 - DNA, 15 bp, Homo sapiens
tatggtcccaacaga

SEQ ID NO: 510742 - DNA, 15 bp, Homo sapiens
ttatggtcccaacag

SEQ ID NO: 510743 - DNA, 15 bp, Homo sapiens
gttatggtcccaaca

SEQ ID NO: 510744 - DNA, 15 bp, Homo sapiens
agttatggtcccaac

SEQ ID NO: 510745 - DNA, 15 bp, Homo sapiens
aagttatggtcccaa

SEQ ID NO: 510746 - DNA, 15 bp, Homo sapiens
aaagttatggtccca

SEQ ID NO: 510747 - DNA, 15 bp, Homo sapiens
caaagttatggtccc

SEQ ID NO: 510748 - DNA, 15 bp, Homo sapiens
gcaaagttatggtcc

SEQ ID NO: 510749 - DNA, 15 bp, Homo sapiens
cgcaaagttatggtc

SEQ ID NO: 510750 - DNA, 15 bp, Homo sapiens
tcgcaaagttatggt

SEQ ID NO: 510751 - DNA, 15 bp, Homo sapiens
ctcgcaaagttatgg

SEQ ID NO: 510752 - DNA, 15 bp, Homo sapiens
cctcgcaaagttatg

SEQ ID NO: 510753 - DNA, 15 bp, Homo sapiens
acctcgcaaagttat

SEQ ID NO: 510754 - DNA, 15 bp, Homo sapiens
aacctcgcaaagtta

SEQ ID NO: 510755 - DNA, 15 bp, Homo sapiens
gaacctcgcaaagtt

SEQ ID NO: 510756 - DNA, 15 bp, Homo sapiens
cgaacctcgcaaagt

SEQ ID NO: 510757 - DNA, 15 bp, Homo sapiens
gcgaacctcgcaaag

SEQ ID NO: 510758 - DNA, 15 bp, Homo sapiens
agcgaacctcgcaaa

SEQ ID NO: 510759 - DNA, 15 bp, Homo sapiens
aagcgaacctcgcaa

SEQ ID NO: 510760 - DNA, 15 bp, Homo sapiens
aaagcgaacctcgca

SEQ ID NO: 510761 - DNA, 15 bp, Homo sapiens
taaagcgaacctcgc

SEQ ID NO: 510762 - DNA, 15 bp, Homo sapiens
gtaaagcgaacctcg

SEQ ID NO: 510763 - DNA, 15 bp, Homo sapiens
tgtaaagcgaacctc

SEQ ID NO: 510764 - DNA, 15 bp, Homo sapiens
gtgtaaagcgaacct

SEQ ID NO: 510765 - DNA, 15 bp, Homo sapiens
tgtgtaaagcgaacc

SEQ ID NO: 510766 - DNA, 15 bp, Homo sapiens
atgtgtaaagcgaac

SEQ ID NO: 510767 - DNA, 15 bp, Homo sapiens
tatgtgtaaagcgaa

SEQ ID NO: 510768 - DNA, 15 bp, Homo sapiens
ctatgtgtaaagcga

SEQ ID NO: 510769 - DNA, 15 bp, Homo sapiens
cctatgtgtaaagcg

SEQ ID NO: 510770 - DNA, 15 bp, Homo sapiens
gcctatgtgtaaagc

SEQ ID NO: 510771 - DNA, 15 bp, Homo sapiens
tgcctatgtgtaaag

SEQ ID NO: 510772 - DNA, 15 bp, Homo sapiens
atgcctatgtgtaaa

SEQ ID NO: 510773 - DNA, 15 bp, Homo sapiens
tatgcctatgtgtaa

SEQ ID NO: 510774 - DNA, 15 bp, Homo sapiens
atatgcctatgtgta

SEQ ID NO: 510775 - DNA, 15 bp, Homo sapiens
gatatgcctatgtgt

SEQ ID NO: 510776 - DNA, 15 bp, Homo sapiens
ggatatgcctatgtg

SEQ ID NO: 510777 - DNA, 15 bp, Homo sapiens
tggatatgcctatgt

SEQ ID NO: 510778 - DNA, 15 bp, Homo sapiens
ctggatatgcctatg

SEQ ID NO: 510779 - DNA, 15 bp, Homo sapiens
actggatatgcctat

SEQ ID NO: 510780 - DNA, 15 bp, Homo sapiens
aactggatatgccta

SEQ ID NO: 510781 - DNA, 15 bp, Homo sapiens
gtgccctcactgggg

SEQ ID NO: 510782 - DNA, 15 bp, Homo sapiens
ggtgccctcactggg

SEQ ID NO: 510783 - DNA, 15 bp, Homo sapiens
aggtgccctcactgg

SEQ ID NO: 510784 - DNA, 15 bp, Homo sapiens
caggtgccctcactg

SEQ ID NO: 510785 - DNA, 15 bp, Homo sapiens
gcaggtgccctcact

SEQ ID NO: 510786 - DNA, 15 bp, Homo sapiens
agcaggtgccctcac

SEQ ID NO: 510787 - DNA, 15 bp, Homo sapiens
gagcaggtgccctca

SEQ ID NO: 510788 - DNA, 15 bp, Homo sapiens
cgagcaggtgccctc

SEQ ID NO: 510789 - DNA, 15 bp, Homo sapiens
ccgagcaggtgccct

SEQ ID NO: 510790 - DNA, 15 bp, Homo sapiens
tccgagcaggtgccc

SEQ ID NO: 510791 - DNA, 15 bp, Homo sapiens
gtccgagcaggtgcc

SEQ ID NO: 510792 - DNA, 15 bp, Homo sapiens
ggtccgagcaggtgc

SEQ ID NO: 510793 - DNA, 15 bp, Homo sapiens
gggtccgagcaggtg

SEQ ID NO: 510794 - DNA, 15 bp, Homo sapiens
agggtccgagcaggt

SEQ ID NO: 510795 - DNA, 15 bp, Homo sapiens
aagggtccgagcagg

SEQ ID NO: 510796 - DNA, 15 bp, Homo sapiens
taagggtccgagcag

SEQ ID NO: 510797 - DNA, 15 bp, Homo sapiens
ctaagggtccgagca

SEQ ID NO: 510798 - DNA, 15 bp, Homo sapiens
tctaagggtccgagc

SEQ ID NO: 510799 - DNA, 15 bp, Homo sapiens
ctctaagggtccgag

SEQ ID NO: 510800 - DNA, 15 bp, Homo sapiens
actctaagggtccga

SEQ ID NO: 510801 - DNA, 15 bp, Homo sapiens
gactctaagggtccg

SEQ ID NO: 510802 - DNA, 15 bp, Homo sapiens
ggactctaagggtcc

SEQ ID NO: 510803 - DNA, 15 bp, Homo sapiens
gggactctaagggtc

SEQ ID NO: 510804 - DNA, 15 bp, Homo sapiens
ggggactctaagggt

SEQ ID NO: 510805 - DNA, 15 bp, Homo sapiens
aggggactctaaggg

SEQ ID NO: 510806 - DNA, 15 bp, Homo sapiens
gaggggactctaagg

SEQ ID NO: 510807 - DNA, 15 bp, Homo sapiens
agaggggactctaag

SEQ ID NO: 510808 - DNA, 15 bp, Homo sapiens
cagaggggactctaa

SEQ ID NO: 510809 - DNA, 15 bp, Homo sapiens
ccagaggggactcta

SEQ ID NO: 510810 - DNA, 15 bp, Homo sapiens
tccagaggggactct

SEQ ID NO: 510811 - DNA, 15 bp, Homo sapiens
ttccagaggggactc

SEQ ID NO: 510812 - DNA, 15 bp, Homo sapiens
gttccagaggggact

SEQ ID NO: 510813 - DNA, 15 bp, Homo sapiens
agttccagaggggac

SEQ ID NO: 510814 - DNA, 15 bp, Homo sapiens
cagttccagagggga

SEQ ID NO: 510815 - DNA, 15 bp, Homo sapiens
gcagttccagagggg

SEQ ID NO: 510816 - DNA, 15 bp, Homo sapiens
cgcagttccagaggg

SEQ ID NO: 510817 - DNA, 15 bp, Homo sapiens
tcgcagttccagagg

SEQ ID NO: 510818 - DNA, 15 bp, Homo sapiens
ctcgcagttccagag

SEQ ID NO: 510819 - DNA, 15 bp, Homo sapiens
actcgcagttccaga

SEQ ID NO: 510820 - DNA, 15 bp, Homo sapiens
gactcgcagttccag

SEQ ID NO: 510821 - DNA, 15 bp, Homo sapiens
ggactcgcagttcca

SEQ ID NO: 510822 - DNA, 15 bp, Homo sapiens
aggactcgcagttcc

SEQ ID NO: 510823 - DNA, 15 bp, Homo sapiens
gaggactcgcagttc

SEQ ID NO: 510824 - DNA, 15 bp, Homo sapiens
ggaggactcgcagtt

SEQ ID NO: 510825 - DNA, 15 bp, Homo sapiens
gggaggactcgcagt

SEQ ID NO: 510826 - DNA, 15 bp, Homo sapiens
tgggaggactcgcag

SEQ ID NO: 510827 - DNA, 15 bp, Homo sapiens
gtgggaggactcgca

SEQ ID NO: 510828 - DNA, 15 bp, Homo sapiens
ggtgggaggactcgc

SEQ ID NO: 510829 - DNA, 15 bp, Homo sapiens
aggtgggaggactcg

SEQ ID NO: 510830 - DNA, 15 bp, Homo sapiens
caggtgggaggactc

SEQ ID NO: 510831 - DNA, 15 bp, Homo sapiens
gcaggtgggaggact

SEQ ID NO: 510832 - DNA, 15 bp, Homo sapiens
ggcaggtgggaggac

SEQ ID NO: 510833 - DNA, 15 bp, Homo sapiens
gggcaggtgggagga

SEQ ID NO: 510834 - DNA, 15 bp, Homo sapiens
tgggcaggtgggagg

SEQ ID NO: 510835 - DNA, 15 bp, Homo sapiens
ctgggcaggtgggag

SEQ ID NO: 510836 - DNA, 15 bp, Homo sapiens
tctgggcaggtggga

SEQ ID NO: 510837 - DNA, 15 bp, Homo sapiens
gtctgggcaggtggg

SEQ ID NO: 510838 - DNA, 15 bp, Homo sapiens
agtctgggcaggtgg

SEQ ID NO: 510839 - DNA, 15 bp, Homo sapiens
gagtctgggcaggtg

SEQ ID NO: 510840 - DNA, 15 bp, Homo sapiens
ggagtctgggcaggt

SEQ ID NO: 510841 - DNA, 15 bp, Homo sapiens
cggagtctgggcagg

SEQ ID NO: 510842 - DNA, 15 bp, Homo sapiens
gcggagtctgggcag

SEQ ID NO: 510843 - DNA, 15 bp, Homo sapiens
agcggagtctgggca

SEQ ID NO: 510844 - DNA, 15 bp, Homo sapiens
cagcggagtctgggc

SEQ ID NO: 510845 - DNA, 15 bp, Homo sapiens
ccagcggagtctggg

SEQ ID NO: 510846 - DNA, 15 bp, Homo sapiens
tccagcggagtctgg

SEQ ID NO: 510847 - DNA, 15 bp, Homo sapiens
ctccagcggagtctg

SEQ ID NO: 510848 - DNA, 15 bp, Homo sapiens
tctccagcggagtct

SEQ ID NO: 510849 - DNA, 15 bp, Homo sapiens
ctctccagcggagtc

SEQ ID NO: 510850 - DNA, 15 bp, Homo sapiens
tctctccagcggagt

SEQ ID NO: 510851 - DNA, 15 bp, Homo sapiens
ctctctccagcggag

SEQ ID NO: 510852 - DNA, 15 bp, Homo sapiens
cctctctccagcgga

SEQ ID NO: 510853 - DNA, 15 bp, Homo sapiens
ccctctctccagcgg

SEQ ID NO: 510854 - DNA, 15 bp, Homo sapiens
gccctctctccagcg

SEQ ID NO: 510855 - DNA, 15 bp, Homo sapiens
ggccctctctccagc

SEQ ID NO: 510856 - DNA, 15 bp, Homo sapiens
cggccctctctccag

SEQ ID NO: 510857 - DNA, 15 bp, Homo sapiens
ccggccctctctcca

SEQ ID NO: 510858 - DNA, 15 bp, Homo sapiens
cccggccctctctcc

SEQ ID NO: 510859 - DNA, 15 bp, Homo sapiens
gcccggccctctctc

SEQ ID NO: 510860 - DNA, 15 bp, Homo sapiens
ggcccggccctctct

SEQ ID NO: 510861 - DNA, 15 bp, Homo sapiens
cggcccggccctctc

SEQ ID NO: 510862 - DNA, 15 bp, Homo sapiens
ccggcccggccctct

SEQ ID NO: 510863 - DNA, 15 bp, Homo sapiens
cccggcccggccctc

SEQ ID NO: 510864 - DNA, 15 bp, Homo sapiens
gcccggcccggccct

SEQ ID NO: 510865 - DNA, 15 bp, Homo sapiens
cgcccggcccggccc

SEQ ID NO: 510866 - DNA, 15 bp, Homo sapiens
gcgcccggcccggcc

SEQ ID NO: 510867 - DNA, 15 bp, Homo sapiens
agcgcccggcccggc

SEQ ID NO: 510868 - DNA, 15 bp, Homo sapiens
gagcgcccggcccgg

SEQ ID NO: 510869 - DNA, 15 bp, Homo sapiens
cgagcgcccggcccg

SEQ ID NO: 510870 - DNA, 15 bp, Homo sapiens
tcgagcgcccggccc

SEQ ID NO: 510871 - DNA, 15 bp, Homo sapiens
ctcgagcgcccggcc

SEQ ID NO: 510872 - DNA, 15 bp, Homo sapiens
actcgagcgcccggc

SEQ ID NO: 510873 - DNA, 15 bp, Homo sapiens
cactcgagcgcccgg

SEQ ID NO: 510874 - DNA, 15 bp, Homo sapiens
gcactcgagcgcccg

SEQ ID NO: 510875 - DNA, 15 bp, Homo sapiens
ggcactcgagcgccc

SEQ ID NO: 510876 - DNA, 15 bp, Homo sapiens
aggcactcgagcgcc

SEQ ID NO: 510877 - DNA, 15 bp, Homo sapiens
gaggcactcgagcgc

SEQ ID NO: 510878 - DNA, 15 bp, Homo sapiens
ggaggcactcgagcg

SEQ ID NO: 510879 - DNA, 15 bp, Homo sapiens
gggaggcactcgagc

SEQ ID NO: 510880 - DNA, 15 bp, Homo sapiens
tgggaggcactcgag

SEQ ID NO: 510881 - DNA, 15 bp, Homo sapiens
ttgggaggcactcga

SEQ ID NO: 510882 - DNA, 15 bp, Homo sapiens
gttgggaggcactcg

SEQ ID NO: 510883 - DNA, 15 bp, Homo sapiens
tgttgggaggcactc

SEQ ID NO: 510884 - DNA, 15 bp, Homo sapiens
ctgttgggaggcact

SEQ ID NO: 510885 - DNA, 15 bp, Homo sapiens
cctgttgggaggcac

SEQ ID NO: 510886 - DNA, 15 bp, Homo sapiens
ccctgttgggaggca

SEQ ID NO: 510887 - DNA, 15 bp, Homo sapiens
gccctgttgggaggc

SEQ ID NO: 510888 - DNA, 15 bp, Homo sapiens
tgccctgttgggagg

SEQ ID NO: 510889 - DNA, 15 bp, Homo sapiens
ctgccctgttgggag

SEQ ID NO: 510890 - DNA, 15 bp, Homo sapiens
gctgccctgttggga

SEQ ID NO: 510891 - DNA, 15 bp, Homo sapiens
ggctgccctgttggg

SEQ ID NO: 510892 - DNA, 15 bp, Homo sapiens
aggctgccctgttgg

SEQ ID NO: 510893 - DNA, 15 bp, Homo sapiens
gaggctgccctgttg

SEQ ID NO: 510894 - DNA, 15 bp, Homo sapiens
ggaggctgccctgtt

SEQ ID NO: 510895 - DNA, 15 bp, Homo sapiens
gggaggctgccctgt

SEQ ID NO: 510896 - DNA, 15 bp, Homo sapiens
agggaggctgccctg

SEQ ID NO: 510897 - DNA, 15 bp, Homo sapiens
gagggaggctgccct

SEQ ID NO: 510898 - DNA, 15 bp, Homo sapiens
ggagggaggctgccc

SEQ ID NO: 510899 - DNA, 15 bp, Homo sapiens
aggagggaggctgcc

SEQ ID NO: 510900 - DNA, 15 bp, Homo sapiens
caggagggaggctgc

SEQ ID NO: 510901 - DNA, 15 bp, Homo sapiens
ccaggagggaggctg

SEQ ID NO: 510902 - DNA, 15 bp, Homo sapiens
gccaggagggaggct

SEQ ID NO: 510903 - DNA, 15 bp, Homo sapiens
ggccaggagggaggc

SEQ ID NO: 510904 - DNA, 15 bp, Homo sapiens
gggccaggagggagg

SEQ ID NO: 510905 - DNA, 15 bp, Homo sapiens
cgggccaggagggag

SEQ ID NO: 510906 - DNA, 15 bp, Homo sapiens
ccgggccaggaggga

SEQ ID NO: 510907 - DNA, 15 bp, Homo sapiens
accgggccaggaggg

SEQ ID NO: 510908 - DNA, 15 bp, Homo sapiens
gaccgggccaggagg

SEQ ID NO: 510909 - DNA, 15 bp, Homo sapiens
agaccgggccaggag

SEQ ID NO: 510910 - DNA, 15 bp, Homo sapiens
tagaccgggccagga

SEQ ID NO: 510911 - DNA, 15 bp, Homo sapiens
ctagaccgggccagg

SEQ ID NO: 510912 - DNA, 15 bp, Homo sapiens
gctagaccgggccag

SEQ ID NO: 510913 - DNA, 15 bp, Homo sapiens
ggctagaccgggcca

SEQ ID NO: 510914 - DNA, 15 bp, Homo sapiens
aggctagaccgggcc

SEQ ID NO: 510915 - DNA, 15 bp, Homo sapiens
gaggctagaccgggc

SEQ ID NO: 510916 - DNA, 15 bp, Homo sapiens
agaggctagaccggg

SEQ ID NO: 510917 - DNA, 15 bp, Homo sapiens
gagaggctagaccgg

SEQ ID NO: 510918 - DNA, 15 bp, Homo sapiens
ggagaggctagaccg

SEQ ID NO: 510919 - DNA, 15 bp, Homo sapiens
cggagaggctagacc

SEQ ID NO: 510920 - DNA, 15 bp, Homo sapiens
gcggagaggctagac

SEQ ID NO: 510921 - DNA, 15 bp, Homo sapiens
cgcggagaggctaga

SEQ ID NO: 510922 - DNA, 15 bp, Homo sapiens
gcgcggagaggctag

SEQ ID NO: 510923 - DNA, 15 bp, Homo sapiens
agcgcggagaggcta

SEQ ID NO: 510924 - DNA, 15 bp, Homo sapiens
gagcgcggagaggct

SEQ ID NO: 510925 - DNA, 15 bp, Homo sapiens
agagcgcggagaggc

SEQ ID NO: 510926 - DNA, 15 bp, Homo sapiens
cagagcgcggagagg

SEQ ID NO: 510927 - DNA, 15 bp, Homo sapiens
gcagagcgcggagag

SEQ ID NO: 510928 - DNA, 15 bp, Homo sapiens
agcagagcgcggaga

SEQ ID NO: 510929 - DNA, 15 bp, Homo sapiens
gagcagagcgcggag

SEQ ID NO: 510930 - DNA, 15 bp, Homo sapiens
cgagcagagcgcgga

SEQ ID NO: 510931 - DNA, 15 bp, Homo sapiens
gcgagcagagcgcgg

SEQ ID NO: 510932 - DNA, 15 bp, Homo sapiens
ggcgagcagagcgcg

SEQ ID NO: 510933 - DNA, 15 bp, Homo sapiens
gggcgagcagagcgc

SEQ ID NO: 510934 - DNA, 15 bp, Homo sapiens
ggggcgagcagagcg

SEQ ID NO: 510935 - DNA, 15 bp, Homo sapiens
aggggcgagcagagc

SEQ ID NO: 510936 - DNA, 15 bp, Homo sapiens
caggggcgagcagag

SEQ ID NO: 510937 - DNA, 15 bp, Homo sapiens
gcaggggcgagcaga

SEQ ID NO: 510938 - DNA, 15 bp, Homo sapiens
agcaggggcgagcag

SEQ ID NO: 510939 - DNA, 15 bp, Homo sapiens
gagcaggggcgagca

SEQ ID NO: 510940 - DNA, 15 bp, Homo sapiens
ggagcaggggcgagc

SEQ ID NO: 510941 - DNA, 15 bp, Homo sapiens
aggagcaggggcgag

SEQ ID NO: 510942 - DNA, 15 bp, Homo sapiens
aaggagcaggggcga

SEQ ID NO: 510943 - DNA, 15 bp, Homo sapiens
caaggagcaggggcg

SEQ ID NO: 510944 - DNA, 15 bp, Homo sapiens
tcaaggagcaggggc

SEQ ID NO: 510945 - DNA, 15 bp, Homo sapiens
ctcaaggagcagggg

SEQ ID NO: 510946 - DNA, 15 bp, Homo sapiens
gctcaaggagcaggg

SEQ ID NO: 510947 - DNA, 15 bp, Homo sapiens
agctcaaggagcagg

SEQ ID NO: 510948 - DNA, 15 bp, Homo sapiens
gagctcaaggagcag

SEQ ID NO: 510949 - DNA, 15 bp, Homo sapiens
cgagctcaaggagca

SEQ ID NO: 510950 - DNA, 15 bp, Homo sapiens
ccgagctcaaggagc

SEQ ID NO: 510951 - DNA, 15 bp, Homo sapiens
cccgagctcaaggag

SEQ ID NO: 510952 - DNA, 15 bp, Homo sapiens
ccccgagctcaagga

SEQ ID NO: 510953 - DNA, 15 bp, Homo sapiens
accccgagctcaagg

SEQ ID NO: 510954 - DNA, 15 bp, Homo sapiens
gaccccgagctcaag

SEQ ID NO: 510955 - DNA, 15 bp, Homo sapiens
cgaccccgagctcaa

SEQ ID NO: 510956 - DNA, 15 bp, Homo sapiens
gcgaccccgagctca

SEQ ID NO: 510957 - DNA, 15 bp, Homo sapiens
agcgaccccgagctc

SEQ ID NO: 510958 - DNA, 15 bp, Homo sapiens
aagcgaccccgagct

SEQ ID NO: 510959 - DNA, 15 bp, Homo sapiens
gaagcgaccccgagc

SEQ ID NO: 510960 - DNA, 15 bp, Homo sapiens
ggaagcgaccccgag

SEQ ID NO: 510961 - DNA, 15 bp, Homo sapiens
gggaagcgaccccga

SEQ ID NO: 510962 - DNA, 15 bp, Homo sapiens
agggaagcgaccccg

SEQ ID NO: 510963 - DNA, 15 bp, Homo sapiens
aagggaagcgacccc

SEQ ID NO: 510964 - DNA, 15 bp, Homo sapiens
caagggaagcgaccc

SEQ ID NO: 510965 - DNA, 15 bp, Homo sapiens
ccaagggaagcgacc

SEQ ID NO: 510966 - DNA, 15 bp, Homo sapiens
gccaagggaagcgac

SEQ ID NO: 510967 - DNA, 15 bp, Homo sapiens
agccaagggaagcga

SEQ ID NO: 510968 - DNA, 15 bp, Homo sapiens
gagccaagggaagcg

SEQ ID NO: 510969 - DNA, 15 bp, Homo sapiens
ggagccaagggaagc

SEQ ID NO: 510970 - DNA, 15 bp, Homo sapiens
gggagccaagggaag

SEQ ID NO: 510971 - DNA, 15 bp, Homo sapiens
ggggagccaagggaa

SEQ ID NO: 510972 - DNA, 15 bp, Homo sapiens
cggggagccaaggga

SEQ ID NO: 510973 - DNA, 15 bp, Homo sapiens
tcggggagccaaggg

SEQ ID NO: 510974 - DNA, 15 bp, Homo sapiens
ctcggggagccaagg

SEQ ID NO: 510975 - DNA, 15 bp, Homo sapiens
cctcggggagccaag

SEQ ID NO: 510976 - DNA, 15 bp, Homo sapiens
acctcggggagccaa

SEQ ID NO: 510977 - DNA, 15 bp, Homo sapiens
gacctcggggagcca

SEQ ID NO: 510978 - DNA, 15 bp, Homo sapiens
agacctcggggagcc

SEQ ID NO: 510979 - DNA, 15 bp, Homo sapiens
aagacctcggggagc

SEQ ID NO: 510980 - DNA, 15 bp, Homo sapiens
gaagacctcggggag

SEQ ID NO: 510981 - DNA, 15 bp, Homo sapiens
agaagacctcgggga

SEQ ID NO: 510982 - DNA, 15 bp, Homo sapiens
cagaagacctcgggg

SEQ ID NO: 510983 - DNA, 15 bp, Homo sapiens
gcagaagacctcggg

SEQ ID NO: 510984 - DNA, 15 bp, Homo sapiens
cgcagaagacctcgg

SEQ ID NO: 510985 - DNA, 15 bp, Homo sapiens
gcgcagaagacctcg

SEQ ID NO: 510986 - DNA, 15 bp, Homo sapiens
ggcgcagaagacctc

SEQ ID NO: 510987 - DNA, 15 bp, Homo sapiens
cggcgcagaagacct

SEQ ID NO: 510988 - DNA, 15 bp, Homo sapiens
tcggcgcagaagacc

SEQ ID NO: 510989 - DNA, 15 bp, Homo sapiens
ctcggcgcagaagac

SEQ ID NO: 510990 - DNA, 15 bp, Homo sapiens
gctcggcgcagaaga

SEQ ID NO: 510991 - DNA, 15 bp, Homo sapiens
tgctcggcgcagaag

SEQ ID NO: 510992 - DNA, 15 bp, Homo sapiens
ctgctcggcgcagaa

SEQ ID NO: 510993 - DNA, 15 bp, Homo sapiens
tctgctcggcgcaga

SEQ ID NO: 510994 - DNA, 15 bp, Homo sapiens
ctctgctcggcgcag

SEQ ID NO: 510995 - DNA, 15 bp, Homo sapiens
gctctgctcggcgca

SEQ ID NO: 510996 - DNA, 15 bp, Homo sapiens
agctctgctcggcgc

SEQ ID NO: 510997 - DNA, 15 bp, Homo sapiens
cagctctgctcggcg

SEQ ID NO: 510998 - DNA, 15 bp, Homo sapiens
gcagctctgctcggc

SEQ ID NO: 510999 - DNA, 15 bp, Homo sapiens
ggcagctctgctcgg

SEQ ID NO: 511000 - DNA, 15 bp, Homo sapiens
tggcagctctgctcg

SEQ ID NO: 511001 - DNA, 15 bp, Homo sapiens
ctggcagctctgctc

SEQ ID NO: 511002 - DNA, 15 bp, Homo sapiens
actggcagctctgct

SEQ ID NO: 511003 - DNA, 15 bp, Homo sapiens
gactggcagctctgc

SEQ ID NO: 511004 - DNA, 15 bp, Homo sapiens
ggactggcagctctg

SEQ ID NO: 511005 - DNA, 15 bp, Homo sapiens
tggactggcagctct

SEQ ID NO: 511006 - DNA, 15 bp, Homo sapiens
gtggactggcagctc

SEQ ID NO: 511007 - DNA, 15 bp, Homo sapiens
ggtggactggcagct

SEQ ID NO: 511008 - DNA, 15 bp, Homo sapiens
cggtggactggcagc

SEQ ID NO: 511009 - DNA, 15 bp, Homo sapiens
gcggtggactggcag

SEQ ID NO: 511010 - DNA, 15 bp, Homo sapiens
cgcggtggactggca

SEQ ID NO: 511011 - DNA, 15 bp, Homo sapiens
gcgcggtggactggc

SEQ ID NO: 511012 - DNA, 15 bp, Homo sapiens
ggcgcggtggactgg

SEQ ID NO: 511013 - DNA, 15 bp, Homo sapiens
aggcgcggtggactg

SEQ ID NO: 511014 - DNA, 15 bp, Homo sapiens
taggcgcggtggact

SEQ ID NO: 511015 - DNA, 15 bp, Homo sapiens
ctaggcgcggtggac

SEQ ID NO: 511016 - DNA, 15 bp, Homo sapiens
cctaggcgcggtgga

SEQ ID NO: 511017 - DNA, 15 bp, Homo sapiens
tcctaggcgcggtgg

SEQ ID NO: 511018 - DNA, 15 bp, Homo sapiens
ctcctaggcgcggtg

SEQ ID NO: 511019 - DNA, 15 bp, Homo sapiens
tctcctaggcgcggt

SEQ ID NO: 511020 - DNA, 15 bp, Homo sapiens
gtctcctaggcgcgg

SEQ ID NO: 511021 - DNA, 15 bp, Homo sapiens
cgtctcctaggcgcg

SEQ ID NO: 511022 - DNA, 15 bp, Homo sapiens
gcgtctcctaggcgc

SEQ ID NO: 511023 - DNA, 15 bp, Homo sapiens
ggcgtctcctaggcg

SEQ ID NO: 511024 - DNA, 15 bp, Homo sapiens
cggcgtctcctaggc

SEQ ID NO: 511025 - DNA, 15 bp, Homo sapiens
tcggcgtctcctagg

SEQ ID NO: 511026 - DNA, 15 bp, Homo sapiens
ctcggcgtctcctag

SEQ ID NO: 511027 - DNA, 15 bp, Homo sapiens
actcggcgtctccta

SEQ ID NO: 511028 - DNA, 15 bp, Homo sapiens
tactcggcgtctcct

SEQ ID NO: 511029 - DNA, 15 bp, Homo sapiens
gtactcggcgtctcc

SEQ ID NO: 511030 - DNA, 15 bp, Homo sapiens
ggtactcggcgtctc

SEQ ID NO: 511031 - DNA, 15 bp, Homo sapiens
gggtactcggcgtct

SEQ ID NO: 511032 - DNA, 15 bp, Homo sapiens
cgggtactcggcgtc

SEQ ID NO: 511033 - DNA, 15 bp, Homo sapiens
gcgggtactcggcgt

SEQ ID NO: 511034 - DNA, 15 bp, Homo sapiens
tgcgggtactcggcg

SEQ ID NO: 511035 - DNA, 15 bp, Homo sapiens
atgcgggtactcggc

SEQ ID NO: 511036 - DNA, 15 bp, Homo sapiens
gatgcgggtactcgg

SEQ ID NO: 511037 - DNA, 15 bp, Homo sapiens
agatgcgggtactcg

SEQ ID NO: 511038 - DNA, 15 bp, Homo sapiens
cagatgcgggtactc

SEQ ID NO: 511039 - DNA, 15 bp, Homo sapiens
tcagatgcgggtact

SEQ ID NO: 511040 - DNA, 15 bp, Homo sapiens
gtcagatgcgggtac

SEQ ID NO: 511041 - DNA, 15 bp, Homo sapiens
ggtcagatgcgggta

SEQ ID NO: 511042 - DNA, 15 bp, Homo sapiens
cggtcagatgcgggt

SEQ ID NO: 511043 - DNA, 15 bp, Homo sapiens
gcggtcagatgcggg

SEQ ID NO: 511044 - DNA, 15 bp, Homo sapiens
tgcggtcagatgcgg

SEQ ID NO: 511045 - DNA, 15 bp, Homo sapiens
ctgcggtcagatgcg

SEQ ID NO: 511046 - DNA, 15 bp, Homo sapiens
cctgcggtcagatgc

SEQ ID NO: 511047 - DNA, 15 bp, Homo sapiens
tcctgcggtcagatg

SEQ ID NO: 511048 - DNA, 15 bp, Homo sapiens
gtcctgcggtcagat

SEQ ID NO: 511049 - DNA, 15 bp, Homo sapiens
ggtcctgcggtcaga

SEQ ID NO: 511050 - DNA, 15 bp, Homo sapiens
gggtcctgcggtcag

SEQ ID NO: 511051 - DNA, 15 bp, Homo sapiens
ggggtcctgcggtca

SEQ ID NO: 511052 - DNA, 15 bp, Homo sapiens
tggggtcctgcggtc

SEQ ID NO: 511053 - DNA, 15 bp, Homo sapiens
ctggggtcctgcggt

SEQ ID NO: 511054 - DNA, 15 bp, Homo sapiens
gctggggtcctgcgg

SEQ ID NO: 511055 - DNA, 15 bp, Homo sapiens
cgctggggtcctgcg

SEQ ID NO: 511056 - DNA, 15 bp, Homo sapiens
gcgctggggtcctgc

SEQ ID NO: 511057 - DNA, 15 bp, Homo sapiens
agcgctggggtcctg

SEQ ID NO: 511058 - DNA, 15 bp, Homo sapiens
tagcgctggggtcct

SEQ ID NO: 511059 - DNA, 15 bp, Homo sapiens
gtagcgctggggtcc

SEQ ID NO: 511060 - DNA, 15 bp, Homo sapiens
ggtagcgctggggtc

SEQ ID NO: 511061 - DNA, 15 bp, Homo sapiens
tggtagcgctggggt

SEQ ID NO: 511062 - DNA, 15 bp, Homo sapiens
ttggtagcgctgggg

SEQ ID NO: 511063 - DNA, 15 bp, Homo sapiens
cttggtagcgctggg

SEQ ID NO: 511064 - DNA, 15 bp, Homo sapiens
acttggtagcgctgg

SEQ ID NO: 511065 - DNA, 15 bp, Homo sapiens
cacttggtagcgctg

SEQ ID NO: 511066 - DNA, 15 bp, Homo sapiens
gcacttggtagcgct

SEQ ID NO: 511067 - DNA, 15 bp, Homo sapiens
ggcacttggtagcgc

SEQ ID NO: 511068 - DNA, 15 bp, Homo sapiens
aggcacttggtagcg

SEQ ID NO: 511069 - DNA, 15 bp, Homo sapiens
caggcacttggtagc

SEQ ID NO: 511070 - DNA, 15 bp, Homo sapiens
acaggcacttggtag

SEQ ID NO: 511071 - DNA, 15 bp, Homo sapiens
aacaggcacttggta

SEQ ID NO: 511072 - DNA, 15 bp, Homo sapiens
gaacaggcacttggt

SEQ ID NO: 511073 - DNA, 15 bp, Homo sapiens
agaacaggcacttgg

SEQ ID NO: 511074 - DNA, 15 bp, Homo sapiens
aagaacaggcacttg

SEQ ID NO: 511075 - DNA, 15 bp, Homo sapiens
caagaacaggcactt

SEQ ID NO: 511076 - DNA, 15 bp, Homo sapiens
ccaagaacaggcact

SEQ ID NO: 511077 - DNA, 15 bp, Homo sapiens
tccaagaacaggcac

SEQ ID NO: 511078 - DNA, 15 bp, Homo sapiens
gtccaagaacaggca

SEQ ID NO: 511079 - DNA, 15 bp, Homo sapiens
ggtccaagaacaggc

SEQ ID NO: 511080 - DNA, 15 bp, Homo sapiens
gggtccaagaacagg

SEQ ID NO: 511081 - DNA, 15 bp, Homo sapiens
ggggtccaagaacag

SEQ ID NO: 511082 - DNA, 15 bp, Homo sapiens
gggggtccaagaaca

SEQ ID NO: 511083 - DNA, 15 bp, Homo sapiens
tgggggtccaagaac

SEQ ID NO: 511084 - DNA, 15 bp, Homo sapiens
ctgggggtccaagaa

SEQ ID NO: 511085 - DNA, 15 bp, Homo sapiens
gctgggggtccaaga

SEQ ID NO: 511086 - DNA, 15 bp, Homo sapiens
ggctgggggtccaag

SEQ ID NO: 511087 - DNA, 15 bp, Homo sapiens
cggctgggggtccaa

SEQ ID NO: 511088 - DNA, 15 bp, Homo sapiens
tcggctgggggtcca

SEQ ID NO: 511089 - DNA, 15 bp, Homo sapiens
ctcggctgggggtcc

SEQ ID NO: 511090 - DNA, 15 bp, Homo sapiens
gctcggctgggggtc

SEQ ID NO: 511091 - DNA, 15 bp, Homo sapiens
tgctcggctgggggt

SEQ ID NO: 511092 - DNA, 15 bp, Homo sapiens
ctgctcggctggggg

SEQ ID NO: 511093 - DNA, 15 bp, Homo sapiens
cctgctcggctgggg

SEQ ID NO: 511094 - DNA, 15 bp, Homo sapiens
ccctgctcggctggg

SEQ ID NO: 511095 - DNA, 15 bp, Homo sapiens
cccctgctcggctgg

SEQ ID NO: 511096 - DNA, 15 bp, Homo sapiens
ccccctgctcggctg

SEQ ID NO: 511097 - DNA, 15 bp, Homo sapiens
tccccctgctcggct

SEQ ID NO: 511098 - DNA, 15 bp, Homo sapiens
ttccccctgctcggc

SEQ ID NO: 511099 - DNA, 15 bp, Homo sapiens
cttccccctgctcgg

SEQ ID NO: 511100 - DNA, 15 bp, Homo sapiens
gcttccccctgctcg

SEQ ID NO: 511101 - DNA, 15 bp, Homo sapiens
tgcttccccctgctc

SEQ ID NO: 511102 - DNA, 15 bp, Homo sapiens
atgcttccccctgct

SEQ ID NO: 511103 - DNA, 15 bp, Homo sapiens
gatgcttccccctgc

SEQ ID NO: 511104 - DNA, 15 bp, Homo sapiens
ggatgcttccccctg

SEQ ID NO: 511105 - DNA, 15 bp, Homo sapiens
gggatgcttccccct

SEQ ID NO: 511106 - DNA, 15 bp, Homo sapiens
ggggatgcttccccc

SEQ ID NO: 511107 - DNA, 15 bp, Homo sapiens
tggggatgcttcccc

SEQ ID NO: 511108 - DNA, 15 bp, Homo sapiens
ctggggatgcttccc

SEQ ID NO: 511109 - DNA, 15 bp, Homo sapiens
gctggggatgcttcc

SEQ ID NO: 511110 - DNA, 15 bp, Homo sapiens
agctggggatgcttc

SEQ ID NO: 511111 - DNA, 15 bp, Homo sapiens
gagctggggatgctt

SEQ ID NO: 511112 - DNA, 15 bp, Homo sapiens
ggagctggggatgct

SEQ ID NO: 511113 - DNA, 15 bp, Homo sapiens
gggagctggggatgc

SEQ ID NO: 511114 - DNA, 15 bp, Homo sapiens
cgggagctggggatg

SEQ ID NO: 511115 - DNA, 15 bp, Homo sapiens
gcgggagctggggat

SEQ ID NO: 511116 - DNA, 15 bp, Homo sapiens
tgcgggagctgggga

SEQ ID NO: 511117 - DNA, 15 bp, Homo sapiens
gtgcgggagctgggg

SEQ ID NO: 511118 - DNA, 15 bp, Homo sapiens
ggtgcgggagctggg

SEQ ID NO: 511119 - DNA, 15 bp, Homo sapiens
gggtgcgggagctgg

SEQ ID NO: 511120 - DNA, 15 bp, Homo sapiens
tgggtgcgggagctg

SEQ ID NO: 511121 - DNA, 15 bp, Homo sapiens
ttgggtgcgggagct

SEQ ID NO: 511122 - DNA, 15 bp, Homo sapiens
cttgggtgcgggagc

SEQ ID NO: 511123 - DNA, 15 bp, Homo sapiens
acttgggtgcgggag

SEQ ID NO: 511124 - DNA, 15 bp, Homo sapiens
gacttgggtgcggga

SEQ ID NO: 511125 - DNA, 15 bp, Homo sapiens
ggacttgggtgcggg

SEQ ID NO: 511126 - DNA, 15 bp, Homo sapiens
gggacttgggtgcgg

SEQ ID NO: 511127 - DNA, 15 bp, Homo sapiens
agggacttgggtgcg

SEQ ID NO: 511128 - DNA, 15 bp, Homo sapiens
cagggacttgggtgc

SEQ ID NO: 511129 - DNA, 15 bp, Homo sapiens
ccagggacttgggtg

SEQ ID NO: 511130 - DNA, 15 bp, Homo sapiens
gccagggacttgggt

SEQ ID NO: 511131 - DNA, 15 bp, Homo sapiens
cgccagggacttggg

SEQ ID NO: 511132 - DNA, 15 bp, Homo sapiens
gcgccagggacttgg

SEQ ID NO: 511133 - DNA, 15 bp, Homo sapiens
ggcgccagggacttg

SEQ ID NO: 511134 - DNA, 15 bp, Homo sapiens
cggcgccagggactt

SEQ ID NO: 511135 - DNA, 15 bp, Homo sapiens
gcggcgccagggact

SEQ ID NO: 511136 - DNA, 15 bp, Homo sapiens
agcggcgccagggac

SEQ ID NO: 511137 - DNA, 15 bp, Homo sapiens
cagcggcgccaggga

SEQ ID NO: 511138 - DNA, 15 bp, Homo sapiens
gcagcggcgccaggg

SEQ ID NO: 511139 - DNA, 15 bp, Homo sapiens
ggcagcggcgccagg

SEQ ID NO: 511140 - DNA, 15 bp, Homo sapiens
cggcagcggcgccag

SEQ ID NO: 511141 - DNA, 15 bp, Homo sapiens
ccggcagcggcgcca

SEQ ID NO: 511142 - DNA, 15 bp, Homo sapiens
cccggcagcggcgcc

SEQ ID NO: 511143 - DNA, 15 bp, Homo sapiens
gcccggcagcggcgc

SEQ ID NO: 511144 - DNA, 15 bp, Homo sapiens
ggcccggcagcggcg

SEQ ID NO: 511145 - DNA, 15 bp, Homo sapiens
cggcccggcagcggc

SEQ ID NO: 511146 - DNA, 15 bp, Homo sapiens
gcggcccggcagcgg

SEQ ID NO: 511147 - DNA, 15 bp, Homo sapiens
ggcggcccggcagcg

SEQ ID NO: 511148 - DNA, 15 bp, Homo sapiens
gggcggcccggcagc

SEQ ID NO: 511149 - DNA, 15 bp, Homo sapiens
agggcggcccggcag

SEQ ID NO: 511150 - DNA, 15 bp, Homo sapiens
gagggcggcccggca

SEQ ID NO: 511151 - DNA, 15 bp, Homo sapiens
ggagggcggcccggc

SEQ ID NO: 511152 - DNA, 15 bp, Homo sapiens
gggagggcggcccgg

SEQ ID NO: 511153 - DNA, 15 bp, Homo sapiens
agggagggcggcccg

SEQ ID NO: 511154 - DNA, 15 bp, Homo sapiens
cagggagggcggccc

SEQ ID NO: 511155 - DNA, 15 bp, Homo sapiens
tcagggagggcggcc

SEQ ID NO: 511156 - DNA, 15 bp, Homo sapiens
atcagggagggcggc

SEQ ID NO: 511157 - DNA, 15 bp, Homo sapiens
catcagggagggcgg

SEQ ID NO: 511158 - DNA, 15 bp, Homo sapiens
gcatcagggagggcg

SEQ ID NO: 511159 - DNA, 15 bp, Homo sapiens
ggcatcagggagggc

SEQ ID NO: 511160 - DNA, 15 bp, Homo sapiens
gggcatcagggaggg

SEQ ID NO: 511161 - DNA, 15 bp, Homo sapiens
tgggcatcagggagg

SEQ ID NO: 511162 - DNA, 15 bp, Homo sapiens
ctgggcatcagggag

SEQ ID NO: 511163 - DNA, 15 bp, Homo sapiens
gctgggcatcaggga

SEQ ID NO: 511164 - DNA, 15 bp, Homo sapiens
cgctgggcatcaggg

SEQ ID NO: 511165 - DNA, 15 bp, Homo sapiens
gcgctgggcatcagg

SEQ ID NO: 511166 - DNA, 15 bp, Homo sapiens
cgcgctgggcatcag

SEQ ID NO: 511167 - DNA, 15 bp, Homo sapiens
gcgcgctgggcatca

SEQ ID NO: 511168 - DNA, 15 bp, Homo sapiens
tgcgcgctgggcatc

SEQ ID NO: 511169 - DNA, 15 bp, Homo sapiens
ctgcgcgctgggcat

SEQ ID NO: 511170 - DNA, 15 bp, Homo sapiens
gctgcgcgctgggca

SEQ ID NO: 511171 - DNA, 15 bp, Homo sapiens
ggctgcgcgctgggc

SEQ ID NO: 511172 - DNA, 15 bp, Homo sapiens
aggctgcgcgctggg

SEQ ID NO: 511173 - DNA, 15 bp, Homo sapiens
caggctgcgcgctgg

SEQ ID NO: 511174 - DNA, 15 bp, Homo sapiens
gcaggctgcgcgctg

SEQ ID NO: 511175 - DNA, 15 bp, Homo sapiens
ggcaggctgcgcgct

SEQ ID NO: 511176 - DNA, 15 bp, Homo sapiens
cggcaggctgcgcgc

SEQ ID NO: 511177 - DNA, 15 bp, Homo sapiens
ccggcaggctgcgcg

SEQ ID NO: 511178 - DNA, 15 bp, Homo sapiens
gccggcaggctgcgc

SEQ ID NO: 511179 - DNA, 15 bp, Homo sapiens
cgccggcaggctgcg

SEQ ID NO: 511180 - DNA, 15 bp, Homo sapiens
gcgccggcaggctgc

SEQ ID NO: 511181 - DNA, 15 bp, Homo sapiens
ggcgccggcaggctg

SEQ ID NO: 511182 - DNA, 15 bp, Homo sapiens
cggcgccggcaggct

SEQ ID NO: 511183 - DNA, 15 bp, Homo sapiens
gcggcgccggcaggc

SEQ ID NO: 511184 - DNA, 15 bp, Homo sapiens
cgcggcgccggcagg

SEQ ID NO: 511185 - DNA, 15 bp, Homo sapiens
gcgcggcgccggcag

SEQ ID NO: 511186 - DNA, 15 bp, Homo sapiens
ggcgcggcgccggca

SEQ ID NO: 511187 - DNA, 15 bp, Homo sapiens
aggcgcggcgccggc

SEQ ID NO: 511188 - DNA, 15 bp, Homo sapiens
aaggcgcggcgccgg

SEQ ID NO: 511189 - DNA, 15 bp, Homo sapiens
gaaggcgcggcgccg

SEQ ID NO: 511190 - DNA, 15 bp, Homo sapiens
agaaggcgcggcgcc

SEQ ID NO: 511191 - DNA, 15 bp, Homo sapiens
cagaaggcgcggcgc

SEQ ID NO: 511192 - DNA, 15 bp, Homo sapiens
ccagaaggcgcggcg

SEQ ID NO: 511193 - DNA, 15 bp, Homo sapiens
tccagaaggcgcggc

SEQ ID NO: 511194 - DNA, 15 bp, Homo sapiens
gtccagaaggcgcgg

SEQ ID NO: 511195 - DNA, 15 bp, Homo sapiens
cgtccagaaggcgcg

SEQ ID NO: 511196 - DNA, 15 bp, Homo sapiens
ccgtccagaaggcgc

SEQ ID NO: 511197 - DNA, 15 bp, Homo sapiens
gccgtccagaaggcg

SEQ ID NO: 511198 - DNA, 15 bp, Homo sapiens
agccgtccagaaggc

SEQ ID NO: 511199 - DNA, 15 bp, Homo sapiens
gagccgtccagaagg

SEQ ID NO: 511200 - DNA, 15 bp, Homo sapiens
agagccgtccagaag

SEQ ID NO: 511201 - DNA, 15 bp, Homo sapiens
gagagccgtccagaa

SEQ ID NO: 511202 - DNA, 15 bp, Homo sapiens
cgagagccgtccaga

SEQ ID NO: 511203 - DNA, 15 bp, Homo sapiens
gcgagagccgtccag

SEQ ID NO: 511204 - DNA, 15 bp, Homo sapiens
ggcgagagccgtcca

SEQ ID NO: 511205 - DNA, 15 bp, Homo sapiens
cggcgagagccgtcc

SEQ ID NO: 511206 - DNA, 15 bp, Homo sapiens
gcggcgagagccgtc

SEQ ID NO: 511207 - DNA, 15 bp, Homo sapiens
tgcggcgagagccgt

SEQ ID NO: 511208 - DNA, 15 bp, Homo sapiens
gtgcggcgagagccg

SEQ ID NO: 511209 - DNA, 15 bp, Homo sapiens
ggtgcggcgagagcc

SEQ ID NO: 511210 - DNA, 15 bp, Homo sapiens
aggtgcggcgagagc

SEQ ID NO: 511211 - DNA, 15 bp, Homo sapiens
gaggtgcggcgagag

SEQ ID NO: 511212 - DNA, 15 bp, Homo sapiens
ggaggtgcggcgaga

SEQ ID NO: 511213 - DNA, 15 bp, Homo sapiens
aggaggtgcggcgag

SEQ ID NO: 511214 - DNA, 15 bp, Homo sapiens
caggaggtgcggcga

SEQ ID NO: 511215 - DNA, 15 bp, Homo sapiens
tcaggaggtgcggcg

SEQ ID NO: 511216 - DNA, 15 bp, Homo sapiens
ctcaggaggtgcggc

SEQ ID NO: 511217 - DNA, 15 bp, Homo sapiens
gctcaggaggtgcgg

SEQ ID NO: 511218 - DNA, 15 bp, Homo sapiens
agctcaggaggtgcg

SEQ ID NO: 511219 - DNA, 15 bp, Homo sapiens
gagctcaggaggtgc

SEQ ID NO: 511220 - DNA, 15 bp, Homo sapiens
tgagctcaggaggtg

SEQ ID NO: 511221 - DNA, 15 bp, Homo sapiens
ctgagctcaggaggt

SEQ ID NO: 511222 - DNA, 15 bp, Homo sapiens
gctgagctcaggagg

SEQ ID NO: 511223 - DNA, 15 bp, Homo sapiens
ggctgagctcaggag

SEQ ID NO: 511224 - DNA, 15 bp, Homo sapiens
gggctgagctcagga

SEQ ID NO: 511225 - DNA, 15 bp, Homo sapiens
cgggctgagctcagg

SEQ ID NO: 511226 - DNA, 15 bp, Homo sapiens
gcgggctgagctcag

SEQ ID NO: 511227 - DNA, 15 bp, Homo sapiens
cgcgggctgagctca

SEQ ID NO: 511228 - DNA, 15 bp, Homo sapiens
ccgcgggctgagctc

SEQ ID NO: 511229 - DNA, 15 bp, Homo sapiens
gccgcgggctgagct

SEQ ID NO: 511230 - DNA, 15 bp, Homo sapiens
ggccgcgggctgagc

SEQ ID NO: 511231 - DNA, 15 bp, Homo sapiens
gggccgcgggctgag

SEQ ID NO: 511232 - DNA, 15 bp, Homo sapiens
ggggccgcgggctga

SEQ ID NO: 511233 - DNA, 15 bp, Homo sapiens
cggggccgcgggctg

SEQ ID NO: 511234 - DNA, 15 bp, Homo sapiens
gcggggccgcgggct

SEQ ID NO: 511235 - DNA, 15 bp, Homo sapiens
tgcggggccgcgggc

SEQ ID NO: 511236 - DNA, 15 bp, Homo sapiens
ctgcggggccgcggg

SEQ ID NO: 511237 - DNA, 15 bp, Homo sapiens
actgcggggccgcgg

SEQ ID NO: 511238 - DNA, 15 bp, Homo sapiens
cactgcggggccgcg

SEQ ID NO: 511239 - DNA, 15 bp, Homo sapiens
ccactgcggggccgc

SEQ ID NO: 511240 - DNA, 15 bp, Homo sapiens
cccactgcggggccg

SEQ ID NO: 511241 - DNA, 15 bp, Homo sapiens
ccccactgcggggcc

SEQ ID NO: 511242 - DNA, 15 bp, Homo sapiens
gccccactgcggggc

SEQ ID NO: 511243 - DNA, 15 bp, Homo sapiens
cgccccactgcgggg

SEQ ID NO: 511244 - DNA, 15 bp, Homo sapiens
ccgccccactgcggg

SEQ ID NO: 511245 - DNA, 15 bp, Homo sapiens
gccgccccactgcgg

SEQ ID NO: 511246 - DNA, 15 bp, Homo sapiens
ggccgccccactgcg

SEQ ID NO: 511247 - DNA, 15 bp, Homo sapiens
aggccgccccactgc

SEQ ID NO: 511248 - DNA, 15 bp, Homo sapiens
gaggccgccccactg

SEQ ID NO: 511249 - DNA, 15 bp, Homo sapiens
tgaggccgccccact

SEQ ID NO: 511250 - DNA, 15 bp, Homo sapiens
gtgaggccgccccac

SEQ ID NO: 511251 - DNA, 15 bp, Homo sapiens
agtgaggccgcccca

SEQ ID NO: 511252 - DNA, 15 bp, Homo sapiens
aagtgaggccgcccc

SEQ ID NO: 511253 - DNA, 15 bp, Homo sapiens
taagtgaggccgccc

SEQ ID NO: 511254 - DNA, 15 bp, Homo sapiens
gtaagtgaggccgcc

SEQ ID NO: 511255 - DNA, 15 bp, Homo sapiens
agtaagtgaggccgc

SEQ ID NO: 511256 - DNA, 15 bp, Homo sapiens
cagtaagtgaggccg

SEQ ID NO: 511257 - DNA, 15 bp, Homo sapiens
ccagtaagtgaggcc

SEQ ID NO: 511258 - DNA, 15 bp, Homo sapiens
gccagtaagtgaggc

SEQ ID NO: 511259 - DNA, 15 bp, Homo sapiens
cgccagtaagtgagg

SEQ ID NO: 511260 - DNA, 15 bp, Homo sapiens
ccgccagtaagtgag

SEQ ID NO: 511261 - DNA, 15 bp, Homo sapiens
cccgccagtaagtga

SEQ ID NO: 511262 - DNA, 15 bp, Homo sapiens
ccccgccagtaagtg

SEQ ID NO: 511263 - DNA, 15 bp, Homo sapiens
tccccgccagtaagt

SEQ ID NO: 511264 - DNA, 15 bp, Homo sapiens
ttccccgccagtaag

SEQ ID NO: 511265 - DNA, 15 bp, Homo sapiens
cttccccgccagtaa

SEQ ID NO: 511266 - DNA, 15 bp, Homo sapiens
gcttccccgccagta

SEQ ID NO: 511267 - DNA, 15 bp, Homo sapiens
cgcttccccgccagt

SEQ ID NO: 511268 - DNA, 15 bp, Homo sapiens
gcgcttccccgccag

SEQ ID NO: 511269 - DNA, 15 bp, Homo sapiens
cgcgcttccccgcca

SEQ ID NO: 511270 - DNA, 15 bp, Homo sapiens
ccgcgcttccccgcc

SEQ ID NO: 511271 - DNA, 15 bp, Homo sapiens
cccgcgcttccccgc

SEQ ID NO: 511272 - DNA, 15 bp, Homo sapiens
acccgcgcttccccg

SEQ ID NO: 511273 - DNA, 15 bp, Homo sapiens
gacccgcgcttcccc

SEQ ID NO: 511274 - DNA, 15 bp, Homo sapiens
agacccgcgcttccc

SEQ ID NO: 511275 - DNA, 15 bp, Homo sapiens
cagacccgcgcttcc

SEQ ID NO: 511276 - DNA, 15 bp, Homo sapiens
ccagacccgcgcttc

SEQ ID NO: 511277 - DNA, 15 bp, Homo sapiens
cccagacccgcgctt

SEQ ID NO: 511278 - DNA, 15 bp, Homo sapiens
acccagacccgcgct

SEQ ID NO: 511279 - DNA, 15 bp, Homo sapiens
aacccagacccgcgc

SEQ ID NO: 511280 - DNA, 15 bp, Homo sapiens
caacccagacccgcg

SEQ ID NO: 511281 - DNA, 15 bp, Homo sapiens
ccaacccagacccgc

SEQ ID NO: 511282 - DNA, 15 bp, Homo sapiens
gccaacccagacccg

SEQ ID NO: 511283 - DNA, 15 bp, Homo sapiens
cgccaacccagaccc

SEQ ID NO: 511284 - DNA, 15 bp, Homo sapiens
gcgccaacccagacc

SEQ ID NO: 511285 - DNA, 15 bp, Homo sapiens
ggcgccaacccagac

SEQ ID NO: 511286 - DNA, 15 bp, Homo sapiens
cggcgccaacccaga

SEQ ID NO: 511287 - DNA, 15 bp, Homo sapiens
acggcgccaacccag

SEQ ID NO: 511288 - DNA, 15 bp, Homo sapiens
tacggcgccaaccca

SEQ ID NO: 511289 - DNA, 15 bp, Homo sapiens
gtacggcgccaaccc

SEQ ID NO: 511290 - DNA, 15 bp, Homo sapiens
ggtacggcgccaacc

SEQ ID NO: 511291 - DNA, 15 bp, Homo sapiens
tggtacggcgccaac

SEQ ID NO: 511292 - DNA, 15 bp, Homo sapiens
atggtacggcgccaa

SEQ ID NO: 511293 - DNA, 15 bp, Homo sapiens
gatggtacggcgcca

SEQ ID NO: 511294 - DNA, 15 bp, Homo sapiens
ggatggtacggcgcc

SEQ ID NO: 511295 - DNA, 15 bp, Homo sapiens
cggatggtacggcgc

SEQ ID NO: 511296 - DNA, 15 bp, Homo sapiens
ccggatggtacggcg

SEQ ID NO: 511297 - DNA, 15 bp, Homo sapiens
cccggatggtacggc

SEQ ID NO: 511298 - DNA, 15 bp, Homo sapiens
ccccggatggtacgg

SEQ ID NO: 511299 - DNA, 15 bp, Homo sapiens
gccccggatggtacg

SEQ ID NO: 511300 - DNA, 15 bp, Homo sapiens
ggccccggatggtac

SEQ ID NO: 511301 - DNA, 15 bp, Homo sapiens
tggccccggatggta

SEQ ID NO: 511302 - DNA, 15 bp, Homo sapiens
ctggccccggatggt

SEQ ID NO: 511303 - DNA, 15 bp, Homo sapiens
tctggccccggatgg

SEQ ID NO: 511304 - DNA, 15 bp, Homo sapiens
ctctggccccggatg

SEQ ID NO: 511305 - DNA, 15 bp, Homo sapiens
cctctggccccggat

SEQ ID NO: 511306 - DNA, 15 bp, Homo sapiens
gcctctggccccgga

SEQ ID NO: 511307 - DNA, 15 bp, Homo sapiens
cgcctctggccccgg

SEQ ID NO: 511308 - DNA, 15 bp, Homo sapiens
gcgcctctggccccg

SEQ ID NO: 511309 - DNA, 15 bp, Homo sapiens
agcgcctctggcccc

SEQ ID NO: 511310 - DNA, 15 bp, Homo sapiens
cagcgcctctggccc

SEQ ID NO: 511311 - DNA, 15 bp, Homo sapiens
acagcgcctctggcc

SEQ ID NO: 511312 - DNA, 15 bp, Homo sapiens
aacagcgcctctggc

SEQ ID NO: 511313 - DNA, 15 bp, Homo sapiens
gaacagcgcctctgg

SEQ ID NO: 511314 - DNA, 15 bp, Homo sapiens
ggaacagcgcctctg

SEQ ID NO: 511315 - DNA, 15 bp, Homo sapiens
aggaacagcgcctct

SEQ ID NO: 511316 - DNA, 15 bp, Homo sapiens
gaggaacagcgcctc

SEQ ID NO: 511317 - DNA, 15 bp, Homo sapiens
tgaggaacagcgcct

SEQ ID NO: 511318 - DNA, 15 bp, Homo sapiens
atgaggaacagcgcc

SEQ ID NO: 511319 - DNA, 15 bp, Homo sapiens
catgaggaacagcgc

SEQ ID NO: 511320 - DNA, 15 bp, Homo sapiens
ccatgaggaacagcg

SEQ ID NO: 511321 - DNA, 15 bp, Homo sapiens
accatgaggaacagc

SEQ ID NO: 511322 - DNA, 15 bp, Homo sapiens
caccatgaggaacag

SEQ ID NO: 511323 - DNA, 15 bp, Homo sapiens
acaccatgaggaaca

SEQ ID NO: 511324 - DNA, 15 bp, Homo sapiens
gacaccatgaggaac

SEQ ID NO: 511325 - DNA, 15 bp, Homo sapiens
ggacaccatgaggaa

SEQ ID NO: 511326 - DNA, 15 bp, Homo sapiens
aggacaccatgagga

SEQ ID NO: 511327 - DNA, 15 bp, Homo sapiens
caggacaccatgagg

SEQ ID NO: 511328 - DNA, 15 bp, Homo sapiens
ccaggacaccatgag

SEQ ID NO: 511329 - DNA, 15 bp, Homo sapiens
accaggacaccatga

SEQ ID NO: 511330 - DNA, 15 bp, Homo sapiens
taccaggacaccatg

SEQ ID NO: 511331 - DNA, 15 bp, Homo sapiens
gtaccaggacaccat

SEQ ID NO: 511332 - DNA, 15 bp, Homo sapiens
cgtaccaggacacca

SEQ ID NO: 511333 - DNA, 15 bp, Homo sapiens
ccgtaccaggacacc

SEQ ID NO: 511334 - DNA, 15 bp, Homo sapiens
gccgtaccaggacac

SEQ ID NO: 511335 - DNA, 15 bp, Homo sapiens
cgccgtaccaggaca

SEQ ID NO: 511336 - DNA, 15 bp, Homo sapiens
ccgccgtaccaggac

SEQ ID NO: 511337 - DNA, 15 bp, Homo sapiens
gccgccgtaccagga

SEQ ID NO: 511338 - DNA, 15 bp, Homo sapiens
tgccgccgtaccagg

SEQ ID NO: 511339 - DNA, 15 bp, Homo sapiens
ctgccgccgtaccag

SEQ ID NO: 511340 - DNA, 15 bp, Homo sapiens
gctgccgccgtacca

SEQ ID NO: 511341 - DNA, 15 bp, Homo sapiens
agctgccgccgtacc

SEQ ID NO: 511342 - DNA, 15 bp, Homo sapiens
gagctgccgccgtac

SEQ ID NO: 511343 - DNA, 15 bp, Homo sapiens
cgagctgccgccgta

SEQ ID NO: 511344 - DNA, 15 bp, Homo sapiens
gcgagctgccgccgt

SEQ ID NO: 511345 - DNA, 15 bp, Homo sapiens
agcgagctgccgccg

SEQ ID NO: 511346 - DNA, 15 bp, Homo sapiens
gagcgagctgccgcc

SEQ ID NO: 511347 - DNA, 15 bp, Homo sapiens
tgagcgagctgccgc

SEQ ID NO: 511348 - DNA, 15 bp, Homo sapiens
atgagcgagctgccg

SEQ ID NO: 511349 - DNA, 15 bp, Homo sapiens
catgagcgagctgcc

SEQ ID NO: 511350 - DNA, 15 bp, Homo sapiens
acatgagcgagctgc

SEQ ID NO: 511351 - DNA, 15 bp, Homo sapiens
aacatgagcgagctg

SEQ ID NO: 511352 - DNA, 15 bp, Homo sapiens
caacatgagcgagct

SEQ ID NO: 511353 - DNA, 15 bp, Homo sapiens
gcaacatgagcgagc

SEQ ID NO: 511354 - DNA, 15 bp, Homo sapiens
ggcaacatgagcgag

SEQ ID NO: 511355 - DNA, 15 bp, Homo sapiens
gggcaacatgagcga

SEQ ID NO: 511356 - DNA, 15 bp, Homo sapiens
tgggcaacatgagcg

SEQ ID NO: 511357 - DNA, 15 bp, Homo sapiens
ctgggcaacatgagc

SEQ ID NO: 511358 - DNA, 15 bp, Homo sapiens
cctgggcaacatgag

SEQ ID NO: 511359 - DNA, 15 bp, Homo sapiens
acctgggcaacatga

SEQ ID NO: 511360 - DNA, 15 bp, Homo sapiens
aacctgggcaacatg

SEQ ID NO: 511361 - DNA, 15 bp, Homo sapiens
caacctgggcaacat

SEQ ID NO: 511362 - DNA, 15 bp, Homo sapiens
gcaacctgggcaaca

SEQ ID NO: 511363 - DNA, 15 bp, Homo sapiens
ggcaacctgggcaac

SEQ ID NO: 511364 - DNA, 15 bp, Homo sapiens
cggcaacctgggcaa

SEQ ID NO: 511365 - DNA, 15 bp, Homo sapiens
acggcaacctgggca

SEQ ID NO: 511366 - DNA, 15 bp, Homo sapiens
aacggcaacctgggc

SEQ ID NO: 511367 - DNA, 15 bp, Homo sapiens
caacggcaacctggg

SEQ ID NO: 511368 - DNA, 15 bp, Homo sapiens
gcaacggcaacctgg

SEQ ID NO: 511369 - DNA, 15 bp, Homo sapiens
tgcaacggcaacctg

SEQ ID NO: 511370 - DNA, 15 bp, Homo sapiens
ctgcaacggcaacct

SEQ ID NO: 511371 - DNA, 15 bp, Homo sapiens
actgcaacggcaacc

SEQ ID NO: 511372 - DNA, 15 bp, Homo sapiens
tactgcaacggcaac

SEQ ID NO: 511373 - DNA, 15 bp, Homo sapiens
ctactgcaacggcaa

SEQ ID NO: 511374 - DNA, 15 bp, Homo sapiens
gctactgcaacggca

SEQ ID NO: 511375 - DNA, 15 bp, Homo sapiens
ggctactgcaacggc

SEQ ID NO: 511376 - DNA, 15 bp, Homo sapiens
gggctactgcaacgg

SEQ ID NO: 511377 - DNA, 15 bp, Homo sapiens
ggggctactgcaacg

SEQ ID NO: 511378 - DNA, 15 bp, Homo sapiens
gggggctactgcaac

SEQ ID NO: 511379 - DNA, 15 bp, Homo sapiens
ggggggctactgcaa

SEQ ID NO: 511380 - DNA, 15 bp, Homo sapiens
tggggggctactgca

SEQ ID NO: 511381 - DNA, 15 bp, Homo sapiens
gtggggggctactgc

SEQ ID NO: 511382 - DNA, 15 bp, Homo sapiens
cgtggggggctactg

SEQ ID NO: 511383 - DNA, 15 bp, Homo sapiens
ccgtggggggctact

SEQ ID NO: 511384 - DNA, 15 bp, Homo sapiens
gccgtggggggctac

SEQ ID NO: 511385 - DNA, 15 bp, Homo sapiens
cgccgtggggggcta

SEQ ID NO: 511386 - DNA, 15 bp, Homo sapiens
ccgccgtggggggct

SEQ ID NO: 511387 - DNA, 15 bp, Homo sapiens
tccgccgtggggggc

SEQ ID NO: 511388 - DNA, 15 bp, Homo sapiens
ctccgccgtgggggg

SEQ ID NO: 511389 - DNA, 15 bp, Homo sapiens
actccgccgtggggg

SEQ ID NO: 511390 - DNA, 15 bp, Homo sapiens
cactccgccgtgggg

SEQ ID NO: 511391 - DNA, 15 bp, Homo sapiens
gcactccgccgtggg

SEQ ID NO: 511392 - DNA, 15 bp, Homo sapiens
cgcactccgccgtgg

SEQ ID NO: 511393 - DNA, 15 bp, Homo sapiens
tcgcactccgccgtg

SEQ ID NO: 511394 - DNA, 15 bp, Homo sapiens
ctcgcactccgccgt

SEQ ID NO: 511395 - DNA, 15 bp, Homo sapiens
tctcgcactccgccg

SEQ ID NO: 511396 - DNA, 15 bp, Homo sapiens
ctctcgcactccgcc

SEQ ID NO: 511397 - DNA, 15 bp, Homo sapiens
gctctcgcactccgc

SEQ ID NO: 511398 - DNA, 15 bp, Homo sapiens
agctctcgcactccg

SEQ ID NO: 511399 - DNA, 15 bp, Homo sapiens
cagctctcgcactcc

SEQ ID NO: 511400 - DNA, 15 bp, Homo sapiens
ccagctctcgcactc

SEQ ID NO: 511401 - DNA, 15 bp, Homo sapiens
cccagctctcgcact

SEQ ID NO: 511402 - DNA, 15 bp, Homo sapiens
ccccagctctcgcac

SEQ ID NO: 511403 - DNA, 15 bp, Homo sapiens
gccccagctctcgca

SEQ ID NO: 511404 - DNA, 15 bp, Homo sapiens
tgccccagctctcgc

SEQ ID NO: 511405 - DNA, 15 bp, Homo sapiens
gtgccccagctctcg

SEQ ID NO: 511406 - DNA, 15 bp, Homo sapiens
ggtgccccagctctc

SEQ ID NO: 511407 - DNA, 15 bp, Homo sapiens
gggtgccccagctct

SEQ ID NO: 511408 - DNA, 15 bp, Homo sapiens
ggggtgccccagctc

SEQ ID NO: 511409 - DNA, 15 bp, Homo sapiens
gggggtgccccagct

SEQ ID NO: 511410 - DNA, 15 bp, Homo sapiens
cgggggtgccccagc

SEQ ID NO: 511411 - DNA, 15 bp, Homo sapiens
gcgggggtgccccag

SEQ ID NO: 511412 - DNA, 15 bp, Homo sapiens
ggcgggggtgcccca

SEQ ID NO: 511413 - DNA, 15 bp, Homo sapiens
cggcgggggtgcccc

SEQ ID NO: 511414 - DNA, 15 bp, Homo sapiens
gcggcgggggtgccc

SEQ ID NO: 511415 - DNA, 15 bp, Homo sapiens
ggcggcgggggtgcc

SEQ ID NO: 511416 - DNA, 15 bp, Homo sapiens
cggcggcgggggtgc

SEQ ID NO: 511417 - DNA, 15 bp, Homo sapiens
acggcggcgggggtg

SEQ ID NO: 511418 - DNA, 15 bp, Homo sapiens
gacggcggcgggggt

SEQ ID NO: 511419 - DNA, 15 bp, Homo sapiens
tgacggcggcggggg

SEQ ID NO: 511420 - DNA, 15 bp, Homo sapiens
atgacggcggcgggg

SEQ ID NO: 511421 - DNA, 15 bp, Homo sapiens
catgacggcggcggg

SEQ ID NO: 511422 - DNA, 15 bp, Homo sapiens
acatgacggcggcgg

SEQ ID NO: 511423 - DNA, 15 bp, Homo sapiens
cacatgacggcggcg

SEQ ID NO: 511424 - DNA, 15 bp, Homo sapiens
ccacatgacggcggc

SEQ ID NO: 511425 - DNA, 15 bp, Homo sapiens
accacatgacggcgg

SEQ ID NO: 511426 - DNA, 15 bp, Homo sapiens
taccacatgacggcg

SEQ ID NO: 511427 - DNA, 15 bp, Homo sapiens
ctaccacatgacggc

SEQ ID NO: 511428 - DNA, 15 bp, Homo sapiens
cctaccacatgacgg

SEQ ID NO: 511429 - DNA, 15 bp, Homo sapiens
gcctaccacatgacg

SEQ ID NO: 511430 - DNA, 15 bp, Homo sapiens
cgcctaccacatgac

SEQ ID NO: 511431 - DNA, 15 bp, Homo sapiens
ccgcctaccacatga

SEQ ID NO: 511432 - DNA, 15 bp, Homo sapiens
gccgcctaccacatg

SEQ ID NO: 511433 - DNA, 15 bp, Homo sapiens
cgccgcctaccacat

SEQ ID NO: 511434 - DNA, 15 bp, Homo sapiens
ccgccgcctaccaca

SEQ ID NO: 511435 - DNA, 15 bp, Homo sapiens
accgccgcctaccac

SEQ ID NO: 511436 - DNA, 15 bp, Homo sapiens
caccgccgcctacca

SEQ ID NO: 511437 - DNA, 15 bp, Homo sapiens
tcaccgccgcctacc

SEQ ID NO: 511438 - DNA, 15 bp, Homo sapiens
gtcaccgccgcctac

SEQ ID NO: 511439 - DNA, 15 bp, Homo sapiens
cgtcaccgccgccta

SEQ ID NO: 511440 - DNA, 15 bp, Homo sapiens
ccgtcaccgccgcct

SEQ ID NO: 511441 - DNA, 15 bp, Homo sapiens
gccgtcaccgccgcc

SEQ ID NO: 511442 - DNA, 15 bp, Homo sapiens
cgccgtcaccgccgc

SEQ ID NO: 511443 - DNA, 15 bp, Homo sapiens
gcgccgtcaccgccg

SEQ ID NO: 511444 - DNA, 15 bp, Homo sapiens
ggcgccgtcaccgcc

SEQ ID NO: 511445 - DNA, 15 bp, Homo sapiens
cggcgccgtcaccgc

SEQ ID NO: 511446 - DNA, 15 bp, Homo sapiens
acggcgccgtcaccg

SEQ ID NO: 511447 - DNA, 15 bp, Homo sapiens
cacggcgccgtcacc

SEQ ID NO: 511448 - DNA, 15 bp, Homo sapiens
ccacggcgccgtcac

SEQ ID NO: 511449 - DNA, 15 bp, Homo sapiens
accacggcgccgtca

SEQ ID NO: 511450 - DNA, 15 bp, Homo sapiens
caccacggcgccgtc

SEQ ID NO: 511451 - DNA, 15 bp, Homo sapiens
gcaccacggcgccgt

SEQ ID NO: 511452 - DNA, 15 bp, Homo sapiens
ggcaccacggcgccg

SEQ ID NO: 511453 - DNA, 15 bp, Homo sapiens
gggcaccacggcgcc

SEQ ID NO: 511454 - DNA, 15 bp, Homo sapiens
ggggcaccacggcgc

SEQ ID NO: 511455 - DNA, 15 bp, Homo sapiens
tggggcaccacggcg

SEQ ID NO: 511456 - DNA, 15 bp, Homo sapiens
gtggggcaccacggc

SEQ ID NO: 511457 - DNA, 15 bp, Homo sapiens
cgtggggcaccacgg

SEQ ID NO: 511458 - DNA, 15 bp, Homo sapiens
ccgtggggcaccacg

SEQ ID NO: 511459 - DNA, 15 bp, Homo sapiens
gccgtggggcaccac

SEQ ID NO: 511460 - DNA, 15 bp, Homo sapiens
cgccgtggggcacca

SEQ ID NO: 511461 - DNA, 15 bp, Homo sapiens
acgccgtggggcacc

SEQ ID NO: 511462 - DNA, 15 bp, Homo sapiens
cacgccgtggggcac

SEQ ID NO: 511463 - DNA, 15 bp, Homo sapiens
gcacgccgtggggca

SEQ ID NO: 511464 - DNA, 15 bp, Homo sapiens
agcacgccgtggggc

SEQ ID NO: 511465 - DNA, 15 bp, Homo sapiens
cagcacgccgtgggg

SEQ ID NO: 511466 - DNA, 15 bp, Homo sapiens
gcagcacgccgtggg

SEQ ID NO: 511467 - DNA, 15 bp, Homo sapiens
agcagcacgccgtgg

SEQ ID NO: 511468 - DNA, 15 bp, Homo sapiens
cagcagcacgccgtg

SEQ ID NO: 511469 - DNA, 15 bp, Homo sapiens
gcagcagcacgccgt

SEQ ID NO: 511470 - DNA, 15 bp, Homo sapiens
tgcagcagcacgccg

SEQ ID NO: 511471 - DNA, 15 bp, Homo sapiens
atgcagcagcacgcc

SEQ ID NO: 511472 - DNA, 15 bp, Homo sapiens
catgcagcagcacgc

SEQ ID NO: 511473 - DNA, 15 bp, Homo sapiens
ccatgcagcagcacg

SEQ ID NO: 511474 - DNA, 15 bp, Homo sapiens
gccatgcagcagcac

SEQ ID NO: 511475 - DNA, 15 bp, Homo sapiens
ggccatgcagcagca

SEQ ID NO: 511476 - DNA, 15 bp, Homo sapiens
cggccatgcagcagc

SEQ ID NO: 511477 - DNA, 15 bp, Homo sapiens
gcggccatgcagcag

SEQ ID NO: 511478 - DNA, 15 bp, Homo sapiens
agcggccatgcagca

SEQ ID NO: 511479 - DNA, 15 bp, Homo sapiens
cagcggccatgcagc

SEQ ID NO: 511480 - DNA, 15 bp, Homo sapiens
acagcggccatgcag

SEQ ID NO: 511481 - DNA, 15 bp, Homo sapiens
aacagcggccatgca

SEQ ID NO: 511482 - DNA, 15 bp, Homo sapiens
caacagcggccatgc

SEQ ID NO: 511483 - DNA, 15 bp, Homo sapiens
ccaacagcggccatg

SEQ ID NO: 511484 - DNA, 15 bp, Homo sapiens
gccaacagcggccat

SEQ ID NO: 511485 - DNA, 15 bp, Homo sapiens
cgccaacagcggcca

SEQ ID NO: 511486 - DNA, 15 bp, Homo sapiens
ccgccaacagcggcc

SEQ ID NO: 511487 - DNA, 15 bp, Homo sapiens
accgccaacagcggc

SEQ ID NO: 511488 - DNA, 15 bp, Homo sapiens
caccgccaacagcgg

SEQ ID NO: 511489 - DNA, 15 bp, Homo sapiens
gcaccgccaacagcg

SEQ ID NO: 511490 - DNA, 15 bp, Homo sapiens
ggcaccgccaacagc

SEQ ID NO: 511491 - DNA, 15 bp, Homo sapiens
cggcaccgccaacag

SEQ ID NO: 511492 - DNA, 15 bp, Homo sapiens
gcggcaccgccaaca

SEQ ID NO: 511493 - DNA, 15 bp, Homo sapiens
ggcggcaccgccaac

SEQ ID NO: 511494 - DNA, 15 bp, Homo sapiens
aggcggcaccgccaa

SEQ ID NO: 511495 - DNA, 15 bp, Homo sapiens
caggcggcaccgcca

SEQ ID NO: 511496 - DNA, 15 bp, Homo sapiens
ccaggcggcaccgcc

SEQ ID NO: 511497 - DNA, 15 bp, Homo sapiens
gccaggcggcaccgc

SEQ ID NO: 511498 - DNA, 15 bp, Homo sapiens
ggccaggcggcaccg

SEQ ID NO: 511499 - DNA, 15 bp, Homo sapiens
gggccaggcggcacc

SEQ ID NO: 511500 - DNA, 15 bp, Homo sapiens
agggccaggcggcac

SEQ ID NO: 511501 - DNA, 15 bp, Homo sapiens
cagggccaggcggca

SEQ ID NO: 511502 - DNA, 15 bp, Homo sapiens
gcagggccaggcggc

SEQ ID NO: 511503 - DNA, 15 bp, Homo sapiens
ggcagggccaggcgg

SEQ ID NO: 511504 - DNA, 15 bp, Homo sapiens
aggcagggccaggcg

SEQ ID NO: 511505 - DNA, 15 bp, Homo sapiens
caggcagggccaggc

SEQ ID NO: 511506 - DNA, 15 bp, Homo sapiens
acaggcagggccagg

SEQ ID NO: 511507 - DNA, 15 bp, Homo sapiens
tacaggcagggccag

SEQ ID NO: 511508 - DNA, 15 bp, Homo sapiens
gtacaggcagggcca

SEQ ID NO: 511509 - DNA, 15 bp, Homo sapiens
cgtacaggcagggcc

SEQ ID NO: 511510 - DNA, 15 bp, Homo sapiens
gcgtacaggcagggc

SEQ ID NO: 511511 - DNA, 15 bp, Homo sapiens
ggcgtacaggcaggg

SEQ ID NO: 511512 - DNA, 15 bp, Homo sapiens
cggcgtacaggcagg

SEQ ID NO: 511513 - DNA, 15 bp, Homo sapiens
gcggcgtacaggcag

SEQ ID NO: 511514 - DNA, 15 bp, Homo sapiens
ggcggcgtacaggca

SEQ ID NO: 511515 - DNA, 15 bp, Homo sapiens
tggcggcgtacaggc

SEQ ID NO: 511516 - DNA, 15 bp, Homo sapiens
ctggcggcgtacagg

SEQ ID NO: 511517 - DNA, 15 bp, Homo sapiens
gctggcggcgtacag

SEQ ID NO: 511518 - DNA, 15 bp, Homo sapiens
cgctggcggcgtaca

SEQ ID NO: 511519 - DNA, 15 bp, Homo sapiens
ccgctggcggcgtac

SEQ ID NO: 511520 - DNA, 15 bp, Homo sapiens
tccgctggcggcgta

SEQ ID NO: 511521 - DNA, 15 bp, Homo sapiens
ctccgctggcggcgt

SEQ ID NO: 511522 - DNA, 15 bp, Homo sapiens
gctccgctggcggcg

SEQ ID NO: 511523 - DNA, 15 bp, Homo sapiens
ggctccgctggcggc

SEQ ID NO: 511524 - DNA, 15 bp, Homo sapiens
gggctccgctggcgg

SEQ ID NO: 511525 - DNA, 15 bp, Homo sapiens
ggggctccgctggcg

SEQ ID NO: 511526 - DNA, 15 bp, Homo sapiens
cggggctccgctggc

SEQ ID NO: 511527 - DNA, 15 bp, Homo sapiens
tcggggctccgctgg

SEQ ID NO: 511528 - DNA, 15 bp, Homo sapiens
ctcggggctccgctg

SEQ ID NO: 511529 - DNA, 15 bp, Homo sapiens
cctcggggctccgct

SEQ ID NO: 511530 - DNA, 15 bp, Homo sapiens
gcctcggggctccgc

SEQ ID NO: 511531 - DNA, 15 bp, Homo sapiens
ggcctcggggctccg

SEQ ID NO: 511532 - DNA, 15 bp, Homo sapiens
cggcctcggggctcc

SEQ ID NO: 511533 - DNA, 15 bp, Homo sapiens
gcggcctcggggctc

SEQ ID NO: 511534 - DNA, 15 bp, Homo sapiens
ggcggcctcggggct

SEQ ID NO: 511535 - DNA, 15 bp, Homo sapiens
cggcggcctcggggc

SEQ ID NO: 511536 - DNA, 15 bp, Homo sapiens
gcggcggcctcgggg

SEQ ID NO: 511537 - DNA, 15 bp, Homo sapiens
ggcggcggcctcggg

SEQ ID NO: 511538 - DNA, 15 bp, Homo sapiens
gggcggcggcctcgg

SEQ ID NO: 511539 - DNA, 15 bp, Homo sapiens
agggcggcggcctcg

SEQ ID NO: 511540 - DNA, 15 bp, Homo sapiens
gagggcggcggcctc

SEQ ID NO: 511541 - DNA, 15 bp, Homo sapiens
ggagggcggcggcct

SEQ ID NO: 511542 - DNA, 15 bp, Homo sapiens
tggagggcggcggcc

SEQ ID NO: 511543 - DNA, 15 bp, Homo sapiens
atggagggcggcggc

SEQ ID NO: 511544 - DNA, 15 bp, Homo sapiens
catggagggcggcgg

SEQ ID NO: 511545 - DNA, 15 bp, Homo sapiens
gcatggagggcggcg

SEQ ID NO: 511546 - DNA, 15 bp, Homo sapiens
ggcatggagggcggc

SEQ ID NO: 511547 - DNA, 15 bp, Homo sapiens
gggcatggagggcgg

SEQ ID NO: 511548 - DNA, 15 bp, Homo sapiens
tgggcatggagggcg

SEQ ID NO: 511549 - DNA, 15 bp, Homo sapiens
gtgggcatggagggc

SEQ ID NO: 511550 - DNA, 15 bp, Homo sapiens
agtgggcatggaggg

SEQ ID NO: 511551 - DNA, 15 bp, Homo sapiens
aagtgggcatggagg

SEQ ID NO: 511552 - DNA, 15 bp, Homo sapiens
aaagtgggcatggag

SEQ ID NO: 511553 - DNA, 15 bp, Homo sapiens
gaaagtgggcatgga

SEQ ID NO: 511554 - DNA, 15 bp, Homo sapiens
agaaagtgggcatgg

SEQ ID NO: 511555 - DNA, 15 bp, Homo sapiens
aagaaagtgggcatg

SEQ ID NO: 511556 - DNA, 15 bp, Homo sapiens
caagaaagtgggcat

SEQ ID NO: 511557 - DNA, 15 bp, Homo sapiens
acaagaaagtgggca

SEQ ID NO: 511558 - DNA, 15 bp, Homo sapiens
tacaagaaagtgggc

SEQ ID NO: 511559 - DNA, 15 bp, Homo sapiens
ctacaagaaagtggg

SEQ ID NO: 511560 - DNA, 15 bp, Homo sapiens
gctacaagaaagtgg

SEQ ID NO: 511561 - DNA, 15 bp, Homo sapiens
agctacaagaaagtg

SEQ ID NO: 511562 - DNA, 15 bp, Homo sapiens
aagctacaagaaagt

SEQ ID NO: 511563 - DNA, 15 bp, Homo sapiens
aaagctacaagaaag

SEQ ID NO: 511564 - DNA, 15 bp, Homo sapiens
gaaagctacaagaaa

SEQ ID NO: 511565 - DNA, 15 bp, Homo sapiens
ggaaagctacaagaa

SEQ ID NO: 511566 - DNA, 15 bp, Homo sapiens
aggaaagctacaaga

SEQ ID NO: 511567 - DNA, 15 bp, Homo sapiens
gaggaaagctacaag

SEQ ID NO: 511568 - DNA, 15 bp, Homo sapiens
ggaggaaagctacaa

SEQ ID NO: 511569 - DNA, 15 bp, Homo sapiens
tggaggaaagctaca

SEQ ID NO: 511570 - DNA, 15 bp, Homo sapiens
ctggaggaaagctac

SEQ ID NO: 511571 - DNA, 15 bp, Homo sapiens
cctggaggaaagcta

SEQ ID NO: 511572 - DNA, 15 bp, Homo sapiens
ccctggaggaaagct

SEQ ID NO: 511573 - DNA, 15 bp, Homo sapiens
cccctggaggaaagc

SEQ ID NO: 511574 - DNA, 15 bp, Homo sapiens
tcccctggaggaaag

SEQ ID NO: 511575 - DNA, 15 bp, Homo sapiens
gtcccctggaggaaa

SEQ ID NO: 511576 - DNA, 15 bp, Homo sapiens
agtcccctggaggaa

SEQ ID NO: 511577 - DNA, 15 bp, Homo sapiens
gagtcccctggagga

SEQ ID NO: 511578 - DNA, 15 bp, Homo sapiens
tgagtcccctggagg

SEQ ID NO: 511579 - DNA, 15 bp, Homo sapiens
ttgagtcccctggag

SEQ ID NO: 511580 - DNA, 15 bp, Homo sapiens
cttgagtcccctgga

SEQ ID NO: 511581 - DNA, 15 bp, Homo sapiens
tcttgagtcccctgg

SEQ ID NO: 511582 - DNA, 15 bp, Homo sapiens
atcttgagtcccctg

SEQ ID NO: 511583 - DNA, 15 bp, Homo sapiens
catcttgagtcccct

SEQ ID NO: 511584 - DNA, 15 bp, Homo sapiens
acatcttgagtcccc

SEQ ID NO: 511585 - DNA, 15 bp, Homo sapiens
gacatcttgagtccc

SEQ ID NO: 511586 - DNA, 15 bp, Homo sapiens
tgacatcttgagtcc

SEQ ID NO: 511587 - DNA, 15 bp, Homo sapiens
ctgacatcttgagtc

SEQ ID NO: 511588 - DNA, 15 bp, Homo sapiens
tctgacatcttgagt

SEQ ID NO: 511589 - DNA, 15 bp, Homo sapiens
gtctgacatcttgag

SEQ ID NO: 511590 - DNA, 15 bp, Homo sapiens
tgtctgacatcttga

SEQ ID NO: 511591 - DNA, 15 bp, Homo sapiens
gtgtctgacatcttg

SEQ ID NO: 511592 - DNA, 15 bp, Homo sapiens
agtgtctgacatctt

SEQ ID NO: 511593 - DNA, 15 bp, Homo sapiens
cagtgtctgacatct

SEQ ID NO: 511594 - DNA, 15 bp, Homo sapiens
tcagtgtctgacatc

SEQ ID NO: 511595 - DNA, 15 bp, Homo sapiens
ctcagtgtctgacat

SEQ ID NO: 511596 - DNA, 15 bp, Homo sapiens
tctcagtgtctgaca

SEQ ID NO: 511597 - DNA, 15 bp, Homo sapiens
ttctcagtgtctgac

SEQ ID NO: 511598 - DNA, 15 bp, Homo sapiens
gttctcagtgtctga

SEQ ID NO: 511599 - DNA, 15 bp, Homo sapiens
cgttctcagtgtctg

SEQ ID NO: 511600 - DNA, 15 bp, Homo sapiens
ccgttctcagtgtct

SEQ ID NO: 511601 - DNA, 15 bp, Homo sapiens
tccgttctcagtgtc

SEQ ID NO: 511602 - DNA, 15 bp, Homo sapiens
ctccgttctcagtgt

SEQ ID NO: 511603 - DNA, 15 bp, Homo sapiens
actccgttctcagtg

SEQ ID NO: 511604 - DNA, 15 bp, Homo sapiens
gactccgttctcagt

SEQ ID NO: 511605 - DNA, 15 bp, Homo sapiens
cgactccgttctcag

SEQ ID NO: 511606 - DNA, 15 bp, Homo sapiens
acgactccgttctca

SEQ ID NO: 511607 - DNA, 15 bp, Homo sapiens
cacgactccgttctc

SEQ ID NO: 511608 - DNA, 15 bp, Homo sapiens
acacgactccgttct

SEQ ID NO: 511609 - DNA, 15 bp, Homo sapiens
cacacgactccgttc

SEQ ID NO: 511610 - DNA, 15 bp, Homo sapiens
gcacacgactccgtt

SEQ ID NO: 511611 - DNA, 15 bp, Homo sapiens
agcacacgactccgt

SEQ ID NO: 511612 - DNA, 15 bp, Homo sapiens
aagcacacgactccg

SEQ ID NO: 511613 - DNA, 15 bp, Homo sapiens
aaagcacacgactcc

SEQ ID NO: 511614 - DNA, 15 bp, Homo sapiens
caaagcacacgactc

SEQ ID NO: 511615 - DNA, 15 bp, Homo sapiens
ccaaagcacacgact

SEQ ID NO: 511616 - DNA, 15 bp, Homo sapiens
tccaaagcacacgac

SEQ ID NO: 511617 - DNA, 15 bp, Homo sapiens
gtccaaagcacacga

SEQ ID NO: 511618 - DNA, 15 bp, Homo sapiens
agtccaaagcacacg

SEQ ID NO: 511619 - DNA, 15 bp, Homo sapiens
gagtccaaagcacac

SEQ ID NO: 511620 - DNA, 15 bp, Homo sapiens
tgagtccaaagcaca

SEQ ID NO: 511621 - DNA, 15 bp, Homo sapiens
atgagtccaaagcac

SEQ ID NO: 511622 - DNA, 15 bp, Homo sapiens
gatgagtccaaagca

SEQ ID NO: 511623 - DNA, 15 bp, Homo sapiens
cgatgagtccaaagc

SEQ ID NO: 511624 - DNA, 15 bp, Homo sapiens
tcgatgagtccaaag

SEQ ID NO: 511625 - DNA, 15 bp, Homo sapiens
gtcgatgagtccaaa

SEQ ID NO: 511626 - DNA, 15 bp, Homo sapiens
tgtcgatgagtccaa

SEQ ID NO: 511627 - DNA, 15 bp, Homo sapiens
atgtcgatgagtcca

SEQ ID NO: 511628 - DNA, 15 bp, Homo sapiens
catgtcgatgagtcc

SEQ ID NO: 511629 - DNA, 15 bp, Homo sapiens
tcatgtcgatgagtc

SEQ ID NO: 511630 - DNA, 15 bp, Homo sapiens
atcatgtcgatgagt

SEQ ID NO: 511631 - DNA, 15 bp, Homo sapiens
aatcatgtcgatgag

SEQ ID NO: 511632 - DNA, 15 bp, Homo sapiens
gaatcatgtcgatga

SEQ ID NO: 511633 - DNA, 15 bp, Homo sapiens
cgaatcatgtcgatg

SEQ ID NO: 511634 - DNA, 15 bp, Homo sapiens
ccgaatcatgtcgat

SEQ ID NO: 511635 - DNA, 15 bp, Homo sapiens
gccgaatcatgtcga

SEQ ID NO: 511636 - DNA, 15 bp, Homo sapiens
cgccgaatcatgtcg

SEQ ID NO: 511637 - DNA, 15 bp, Homo sapiens
ccgccgaatcatgtc

SEQ ID NO: 511638 - DNA, 15 bp, Homo sapiens
gccgccgaatcatgt

SEQ ID NO: 511639 - DNA, 15 bp, Homo sapiens
cgccgccgaatcatg

SEQ ID NO: 511640 - DNA, 15 bp, Homo sapiens
ccgccgccgaatcat

SEQ ID NO: 511641 - DNA, 15 bp, Homo sapiens
gccgccgccgaatca

SEQ ID NO: 511642 - DNA, 15 bp, Homo sapiens
agccgccgccgaatc

SEQ ID NO: 511643 - DNA, 15 bp, Homo sapiens
cagccgccgccgaat

SEQ ID NO: 511644 - DNA, 15 bp, Homo sapiens
ccagccgccgccgaa

SEQ ID NO: 511645 - DNA, 15 bp, Homo sapiens
tccagccgccgccga

SEQ ID NO: 511646 - DNA, 15 bp, Homo sapiens
ctccagccgccgccg

SEQ ID NO: 511647 - DNA, 15 bp, Homo sapiens
cctccagccgccgcc

SEQ ID NO: 511648 - DNA, 15 bp, Homo sapiens
tcctccagccgccgc

SEQ ID NO: 511649 - DNA, 15 bp, Homo sapiens
ctcctccagccgccg

SEQ ID NO: 511650 - DNA, 15 bp, Homo sapiens
cctcctccagccgcc

SEQ ID NO: 511651 - DNA, 15 bp, Homo sapiens
tcctcctccagccgc

SEQ ID NO: 511652 - DNA, 15 bp, Homo sapiens
ttcctcctccagccg

SEQ ID NO: 511653 - DNA, 15 bp, Homo sapiens
cttcctcctccagcc

SEQ ID NO: 511654 - DNA, 15 bp, Homo sapiens
ccttcctcctccagc

SEQ ID NO: 511655 - DNA, 15 bp, Homo sapiens
tccttcctcctccag

SEQ ID NO: 511656 - DNA, 15 bp, Homo sapiens
ttccttcctcctcca

SEQ ID NO: 511657 - DNA, 15 bp, Homo sapiens
cttccttcctcctcc

SEQ ID NO: 511658 - DNA, 15 bp, Homo sapiens
tcttccttcctcctc

SEQ ID NO: 511659 - DNA, 15 bp, Homo sapiens
ctcttccttcctcct

SEQ ID NO: 511660 - DNA, 15 bp, Homo sapiens
cctcttccttcctcc

SEQ ID NO: 511661 - DNA, 15 bp, Homo sapiens
tcctcttccttcctc

SEQ ID NO: 511662 - DNA, 15 bp, Homo sapiens
ctcctcttccttcct

SEQ ID NO: 511663 - DNA, 15 bp, Homo sapiens
cctcctcttccttcc

SEQ ID NO: 511664 - DNA, 15 bp, Homo sapiens
tcctcctcttccttc

SEQ ID NO: 511665 - DNA, 15 bp, Homo sapiens
ttcctcctcttcctt

SEQ ID NO: 511666 - DNA, 15 bp, Homo sapiens
tttcctcctcttcct

SEQ ID NO: 511667 - DNA, 15 bp, Homo sapiens
ttttcctcctcttcc

SEQ ID NO: 511668 - DNA, 15 bp, Homo sapiens
tttttcctcctcttc

SEQ ID NO: 511669 - DNA, 15 bp, Homo sapiens
ttttttcctcctctt

SEQ ID NO: 511670 - DNA, 15 bp, Homo sapiens
tttttttcctcctct

SEQ ID NO: 511671 - DNA, 15 bp, Homo sapiens
ttttttttcctcctc

SEQ ID NO: 511672 - DNA, 15 bp, Homo sapiens
cttttttttcctcct

SEQ ID NO: 511673 - DNA, 15 bp, Homo sapiens
ccttttttttcctcc

SEQ ID NO: 511674 - DNA, 15 bp, Homo sapiens
cccttttttttcctc

SEQ ID NO: 511675 - DNA, 15 bp, Homo sapiens
tcccttttttttcct

SEQ ID NO: 511676 - DNA, 15 bp, Homo sapiens
ctcccttttttttcc

SEQ ID NO: 511677 - DNA, 15 bp, Homo sapiens
tctcccttttttttc

SEQ ID NO: 511678 - DNA, 15 bp, Homo sapiens
ctctccctttttttt

SEQ ID NO: 511679 - DNA, 15 bp, Homo sapiens
cctctcccttttttt

SEQ ID NO: 511680 - DNA, 15 bp, Homo sapiens
ccctctccctttttt

SEQ ID NO: 511681 - DNA, 15 bp, Homo sapiens
cccctctcccttttt

SEQ ID NO: 511682 - DNA, 15 bp, Homo sapiens
ccccctctccctttt

SEQ ID NO: 511683 - DNA, 15 bp, Homo sapiens
tccccctctcccttt

SEQ ID NO: 511684 - DNA, 15 bp, Homo sapiens
ttccccctctccctt

SEQ ID NO: 511685 - DNA, 15 bp, Homo sapiens
cttccccctctccct

SEQ ID NO: 511686 - DNA, 15 bp, Homo sapiens
ccttccccctctccc

SEQ ID NO: 511687 - DNA, 15 bp, Homo sapiens
gccttccccctctcc

SEQ ID NO: 511688 - DNA, 15 bp, Homo sapiens
cgccttccccctctc

SEQ ID NO: 511689 - DNA, 15 bp, Homo sapiens
tcgccttccccctct

SEQ ID NO: 511690 - DNA, 15 bp, Homo sapiens
ttcgccttccccctc

SEQ ID NO: 511691 - DNA, 15 bp, Homo sapiens
cttcgccttccccct

SEQ ID NO: 511692 - DNA, 15 bp, Homo sapiens
gcttcgccttccccc

SEQ ID NO: 511693 - DNA, 15 bp, Homo sapiens
ggcttcgccttcccc

SEQ ID NO: 511694 - DNA, 15 bp, Homo sapiens
aggcttcgccttccc

SEQ ID NO: 511695 - DNA, 15 bp, Homo sapiens
gaggcttcgccttcc

SEQ ID NO: 511696 - DNA, 15 bp, Homo sapiens
cgaggcttcgccttc

SEQ ID NO: 511697 - DNA, 15 bp, Homo sapiens
gcgaggcttcgcctt

SEQ ID NO: 511698 - DNA, 15 bp, Homo sapiens
agcgaggcttcgcct

SEQ ID NO: 511699 - DNA, 15 bp, Homo sapiens
cagcgaggcttcgcc

SEQ ID NO: 511700 - DNA, 15 bp, Homo sapiens
gcagcgaggcttcgc

SEQ ID NO: 511701 - DNA, 15 bp, Homo sapiens
agcagcgaggcttcg

SEQ ID NO: 511702 - DNA, 15 bp, Homo sapiens
aagcagcgaggcttc

SEQ ID NO: 511703 - DNA, 15 bp, Homo sapiens
aaagcagcgaggctt

SEQ ID NO: 511704 - DNA, 15 bp, Homo sapiens
aaaagcagcgaggct

SEQ ID NO: 511705 - DNA, 15 bp, Homo sapiens
aaaaagcagcgaggc

SEQ ID NO: 511706 - DNA, 15 bp, Homo sapiens
aaaaaagcagcgagg

SEQ ID NO: 511707 - DNA, 15 bp, Homo sapiens
aaaaaaagcagcgag

SEQ ID NO: 511708 - DNA, 15 bp, Homo sapiens
aaaaaaaagcagcga

SEQ ID NO: 511709 - DNA, 15 bp, Homo sapiens
aaaaaaaaagcagcg

SEQ ID NO: 511710 - DNA, 15 bp, Homo sapiens
gaaaaaaaaagcagc

SEQ ID NO: 511711 - DNA, 15 bp, Homo sapiens
agaaaaaaaaagcag

SEQ ID NO: 511712 - DNA, 15 bp, Homo sapiens
gagaaaaaaaaagca

SEQ ID NO: 511713 - DNA, 15 bp, Homo sapiens
ggagaaaaaaaaagc

SEQ ID NO: 511714 - DNA, 15 bp, Homo sapiens
gggagaaaaaaaaag

SEQ ID NO: 511715 - DNA, 15 bp, Homo sapiens
agggagaaaaaaaaa

SEQ ID NO: 511716 - DNA, 15 bp, Homo sapiens
aagggagaaaaaaaa

SEQ ID NO: 511717 - DNA, 15 bp, Homo sapiens
aaagggagaaaaaaa

SEQ ID NO: 511718 - DNA, 15 bp, Homo sapiens
caaagggagaaaaaa

SEQ ID NO: 511719 - DNA, 15 bp, Homo sapiens
gcaaagggagaaaaa

SEQ ID NO: 511720 - DNA, 15 bp, Homo sapiens
ggcaaagggagaaaa

SEQ ID NO: 511721 - DNA, 15 bp, Homo sapiens
tggcaaagggagaaa

SEQ ID NO: 511722 - DNA, 15 bp, Homo sapiens
ttggcaaagggagaa

SEQ ID NO: 511723 - DNA, 15 bp, Homo sapiens
tttggcaaagggaga

SEQ ID NO: 511724 - DNA, 15 bp, Homo sapiens
atttggcaaagggag

SEQ ID NO: 511725 - DNA, 15 bp, Homo sapiens
tatttggcaaaggga

SEQ ID NO: 511726 - DNA, 15 bp, Homo sapiens
atatttggcaaaggg

SEQ ID NO: 511727 - DNA, 15 bp, Homo sapiens
aatatttggcaaagg

SEQ ID NO: 511728 - DNA, 15 bp, Homo sapiens
gaatatttggcaaag

SEQ ID NO: 511729 - DNA, 15 bp, Homo sapiens
agaatatttggcaaa

SEQ ID NO: 511730 - DNA, 15 bp, Homo sapiens
cagaatatttggcaa

SEQ ID NO: 511731 - DNA, 15 bp, Homo sapiens
ccagaatatttggca

SEQ ID NO: 511732 - DNA, 15 bp, Homo sapiens
accagaatatttggc

SEQ ID NO: 511733 - DNA, 15 bp, Homo sapiens
caccagaatatttgg

SEQ ID NO: 511734 - DNA, 15 bp, Homo sapiens
acaccagaatatttg

SEQ ID NO: 511735 - DNA, 15 bp, Homo sapiens
aacaccagaatattt

SEQ ID NO: 511736 - DNA, 15 bp, Homo sapiens
taacaccagaatatt

SEQ ID NO: 511737 - DNA, 15 bp, Homo sapiens
gtaacaccagaatat

SEQ ID NO: 511738 - DNA, 15 bp, Homo sapiens
ggtaacaccagaata

SEQ ID NO: 511739 - DNA, 15 bp, Homo sapiens
aggtaacaccagaat

SEQ ID NO: 511740 - DNA, 15 bp, Homo sapiens
aaggtaacaccagaa

SEQ ID NO: 511741 - DNA, 15 bp, Homo sapiens
taaggtaacaccaga

SEQ ID NO: 511742 - DNA, 15 bp, Homo sapiens
ttaaggtaacaccag

SEQ ID NO: 511743 - DNA, 15 bp, Homo sapiens
gttaaggtaacacca

SEQ ID NO: 511744 - DNA, 15 bp, Homo sapiens
cgttaaggtaacacc

SEQ ID NO: 511745 - DNA, 15 bp, Homo sapiens
gcgttaaggtaacac

SEQ ID NO: 511746 - DNA, 15 bp, Homo sapiens
ggcgttaaggtaaca

SEQ ID NO: 511747 - DNA, 15 bp, Homo sapiens
cggcgttaaggtaac

SEQ ID NO: 511748 - DNA, 15 bp, Homo sapiens
tcggcgttaaggtaa

SEQ ID NO: 511749 - DNA, 15 bp, Homo sapiens
atcggcgttaaggta

SEQ ID NO: 511750 - DNA, 15 bp, Homo sapiens
gatcggcgttaaggt

SEQ ID NO: 511751 - DNA, 15 bp, Homo sapiens
agatcggcgttaagg

SEQ ID NO: 511752 - DNA, 15 bp, Homo sapiens
aagatcggcgttaag

SEQ ID NO: 511753 - DNA, 15 bp, Homo sapiens
caagatcggcgttaa

SEQ ID NO: 511754 - DNA, 15 bp, Homo sapiens
acaagatcggcgtta

SEQ ID NO: 511755 - DNA, 15 bp, Homo sapiens
aacaagatcggcgtt

SEQ ID NO: 511756 - DNA, 15 bp, Homo sapiens
caacaagatcggcgt

SEQ ID NO: 511757 - DNA, 15 bp, Homo sapiens
ccaacaagatcggcg

SEQ ID NO: 511758 - DNA, 15 bp, Homo sapiens
tccaacaagatcggc

SEQ ID NO: 511759 - DNA, 15 bp, Homo sapiens
atccaacaagatcgg

SEQ ID NO: 511760 - DNA, 15 bp, Homo sapiens
catccaacaagatcg

SEQ ID NO: 511761 - DNA, 15 bp, Homo sapiens
acatccaacaagatc

SEQ ID NO: 511762 - DNA, 15 bp, Homo sapiens
tacatccaacaagat

SEQ ID NO: 511763 - DNA, 15 bp, Homo sapiens
gtacatccaacaaga

SEQ ID NO: 511764 - DNA, 15 bp, Homo sapiens
tgtacatccaacaag

SEQ ID NO: 511765 - DNA, 15 bp, Homo sapiens
gtgtacatccaacaa

SEQ ID NO: 511766 - DNA, 15 bp, Homo sapiens
cgtgtacatccaaca

SEQ ID NO: 511767 - DNA, 15 bp, Homo sapiens
acgtgtacatccaac

SEQ ID NO: 511768 - DNA, 15 bp, Homo sapiens
tacgtgtacatccaa

SEQ ID NO: 511769 - DNA, 15 bp, Homo sapiens
ttacgtgtacatcca

SEQ ID NO: 511770 - DNA, 15 bp, Homo sapiens
gttacgtgtacatcc

SEQ ID NO: 511771 - DNA, 15 bp, Homo sapiens
cgttacgtgtacatc

SEQ ID NO: 511772 - DNA, 15 bp, Homo sapiens
ccgttacgtgtacat

SEQ ID NO: 511773 - DNA, 15 bp, Homo sapiens
tccgttacgtgtaca

SEQ ID NO: 511774 - DNA, 15 bp, Homo sapiens
ctccgttacgtgtac

SEQ ID NO: 511775 - DNA, 15 bp, Homo sapiens
actccgttacgtgta

SEQ ID NO: 511776 - DNA, 15 bp, Homo sapiens
cactccgttacgtgt

SEQ ID NO: 511777 - DNA, 15 bp, Homo sapiens
ccactccgttacgtg

SEQ ID NO: 511778 - DNA, 15 bp, Homo sapiens
tccactccgttacgt

SEQ ID NO: 511779 - DNA, 15 bp, Homo sapiens
gtccactccgttacg

SEQ ID NO: 511780 - DNA, 15 bp, Homo sapiens
ggtccactccgttac

SEQ ID NO: 511781 - DNA, 15 bp, Homo sapiens
cggtccactccgtta

SEQ ID NO: 511782 - DNA, 15 bp, Homo sapiens
tcggtccactccgtt

SEQ ID NO: 511783 - DNA, 15 bp, Homo sapiens
ctcggtccactccgt

SEQ ID NO: 511784 - DNA, 15 bp, Homo sapiens
actcggtccactccg

SEQ ID NO: 511785 - DNA, 15 bp, Homo sapiens
gactcggtccactcc

SEQ ID NO: 511786 - DNA, 15 bp, Homo sapiens
ggactcggtccactc

SEQ ID NO: 511787 - DNA, 15 bp, Homo sapiens
aggactcggtccact

SEQ ID NO: 511788 - DNA, 15 bp, Homo sapiens
gaggactcggtccac

SEQ ID NO: 511789 - DNA, 15 bp, Homo sapiens
ggaggactcggtcca

SEQ ID NO: 511790 - DNA, 15 bp, Homo sapiens
aggaggactcggtcc

SEQ ID NO: 511791 - DNA, 15 bp, Homo sapiens
aaggaggactcggtc

SEQ ID NO: 511792 - DNA, 15 bp, Homo sapiens
taaggaggactcggt

SEQ ID NO: 511793 - DNA, 15 bp, Homo sapiens
ttaaggaggactcgg

SEQ ID NO: 511794 - DNA, 15 bp, Homo sapiens
attaaggaggactcg

SEQ ID NO: 511795 - DNA, 15 bp, Homo sapiens
aattaaggaggactc

SEQ ID NO: 511796 - DNA, 15 bp, Homo sapiens
caattaaggaggact

SEQ ID NO: 511797 - DNA, 15 bp, Homo sapiens
ccaattaaggaggac

SEQ ID NO: 511798 - DNA, 15 bp, Homo sapiens
gccaattaaggagga

SEQ ID NO: 511799 - DNA, 15 bp, Homo sapiens
agccaattaaggagg

SEQ ID NO: 511800 - DNA, 15 bp, Homo sapiens
aagccaattaaggag

SEQ ID NO: 511801 - DNA, 15 bp, Homo sapiens
caagccaattaagga

SEQ ID NO: 511802 - DNA, 15 bp, Homo sapiens
tcaagccaattaagg

SEQ ID NO: 511803 - DNA, 15 bp, Homo sapiens
ctcaagccaattaag

SEQ ID NO: 511804 - DNA, 15 bp, Homo sapiens
actcaagccaattaa

SEQ ID NO: 511805 - DNA, 15 bp, Homo sapiens
cactcaagccaatta

SEQ ID NO: 511806 - DNA, 15 bp, Homo sapiens
ccactcaagccaatt

SEQ ID NO: 511807 - DNA, 15 bp, Homo sapiens
tccactcaagccaat

SEQ ID NO: 511808 - DNA, 15 bp, Homo sapiens
ctccactcaagccaa

SEQ ID NO: 511809 - DNA, 15 bp, Homo sapiens
cctccactcaagcca

SEQ ID NO: 511810 - DNA, 15 bp, Homo sapiens
gcctccactcaagcc

SEQ ID NO: 511811 - DNA, 15 bp, Homo sapiens
agcctccactcaagc

SEQ ID NO: 511812 - DNA, 15 bp, Homo sapiens
gagcctccactcaag

SEQ ID NO: 511813 - DNA, 15 bp, Homo sapiens
cgagcctccactcaa

SEQ ID NO: 511814 - DNA, 15 bp, Homo sapiens
ccgagcctccactca

SEQ ID NO: 511815 - DNA, 15 bp, Homo sapiens
cccgagcctccactc

SEQ ID NO: 511816 - DNA, 15 bp, Homo sapiens
ccccgagcctccact

SEQ ID NO: 511817 - DNA, 15 bp, Homo sapiens
cccccgagcctccac

SEQ ID NO: 511818 - DNA, 15 bp, Homo sapiens
gcccccgagcctcca

SEQ ID NO: 511819 - DNA, 15 bp, Homo sapiens
agcccccgagcctcc

SEQ ID NO: 511820 - DNA, 15 bp, Homo sapiens
cagcccccgagcctc

SEQ ID NO: 511821 - DNA, 15 bp, Homo sapiens
gcagcccccgagcct

SEQ ID NO: 511822 - DNA, 15 bp, Homo sapiens
ggcagcccccgagcc

SEQ ID NO: 511823 - DNA, 15 bp, Homo sapiens
aggcagcccccgagc

SEQ ID NO: 511824 - DNA, 15 bp, Homo sapiens
gaggcagcccccgag

SEQ ID NO: 511825 - DNA, 15 bp, Homo sapiens
cgaggcagcccccga

SEQ ID NO: 511826 - DNA, 15 bp, Homo sapiens
gcgaggcagcccccg

SEQ ID NO: 511827 - DNA, 15 bp, Homo sapiens
cgcgaggcagccccc

SEQ ID NO: 511828 - DNA, 15 bp, Homo sapiens
acgcgaggcagcccc

SEQ ID NO: 511829 - DNA, 15 bp, Homo sapiens
aacgcgaggcagccc

SEQ ID NO: 511830 - DNA, 15 bp, Homo sapiens
aaacgcgaggcagcc

SEQ ID NO: 511831 - DNA, 15 bp, Homo sapiens
caaacgcgaggcagc

SEQ ID NO: 511832 - DNA, 15 bp, Homo sapiens
acaaacgcgaggcag

SEQ ID NO: 511833 - DNA, 15 bp, Homo sapiens
aacaaacgcgaggca

SEQ ID NO: 511834 - DNA, 15 bp, Homo sapiens
aaacaaacgcgaggc

SEQ ID NO: 511835 - DNA, 15 bp, Homo sapiens
aaaacaaacgcgagg

SEQ ID NO: 511836 - DNA, 15 bp, Homo sapiens
taaaacaaacgcgag

SEQ ID NO: 511837 - DNA, 15 bp, Homo sapiens
ctaaaacaaacgcga

SEQ ID NO: 511838 - DNA, 15 bp, Homo sapiens
gctaaaacaaacgcg

SEQ ID NO: 511839 - DNA, 15 bp, Homo sapiens
ggctaaaacaaacgc

SEQ ID NO: 511840 - DNA, 15 bp, Homo sapiens
gggctaaaacaaacg

SEQ ID NO: 511841 - DNA, 15 bp, Homo sapiens
cgggctaaaacaaac

SEQ ID NO: 511842 - DNA, 15 bp, Homo sapiens
ccgggctaaaacaaa

SEQ ID NO: 511843 - DNA, 15 bp, Homo sapiens
gccgggctaaaacaa

SEQ ID NO: 511844 - DNA, 15 bp, Homo sapiens
cgccgggctaaaaca

SEQ ID NO: 511845 - DNA, 15 bp, Homo sapiens
gcgccgggctaaaac

SEQ ID NO: 511846 - DNA, 15 bp, Homo sapiens
ggcgccgggctaaaa

SEQ ID NO: 511847 - DNA, 15 bp, Homo sapiens
tggcgccgggctaaa

SEQ ID NO: 511848 - DNA, 15 bp, Homo sapiens
ctggcgccgggctaa

SEQ ID NO: 511849 - DNA, 15 bp, Homo sapiens
cctggcgccgggcta

SEQ ID NO: 511850 - DNA, 15 bp, Homo sapiens
acctggcgccgggct

SEQ ID NO: 511851 - DNA, 15 bp, Homo sapiens
aacctggcgccgggc

SEQ ID NO: 511852 - DNA, 15 bp, Homo sapiens
aaacctggcgccggg

SEQ ID NO: 511853 - DNA, 15 bp, Homo sapiens
aaaacctggcgccgg

SEQ ID NO: 511854 - DNA, 15 bp, Homo sapiens
taaaacctggcgccg

SEQ ID NO: 511855 - DNA, 15 bp, Homo sapiens
ctaaaacctggcgcc

SEQ ID NO: 511856 - DNA, 15 bp, Homo sapiens
cctaaaacctggcgc

SEQ ID NO: 511857 - DNA, 15 bp, Homo sapiens
gcctaaaacctggcg

SEQ ID NO: 511858 - DNA, 15 bp, Homo sapiens
tgcctaaaacctggc

SEQ ID NO: 511859 - DNA, 15 bp, Homo sapiens
ctgcctaaaacctgg

SEQ ID NO: 511860 - DNA, 15 bp, Homo sapiens
gctgcctaaaacctg

SEQ ID NO: 511861 - DNA, 15 bp, Homo sapiens
ggctgcctaaaacct

SEQ ID NO: 511862 - DNA, 15 bp, Homo sapiens
tggctgcctaaaacc

SEQ ID NO: 511863 - DNA, 15 bp, Homo sapiens
gtggctgcctaaaac

SEQ ID NO: 511864 - DNA, 15 bp, Homo sapiens
ggtggctgcctaaaa

SEQ ID NO: 511865 - DNA, 15 bp, Homo sapiens
tggtggctgcctaaa

SEQ ID NO: 511866 - DNA, 15 bp, Homo sapiens
ctggtggctgcctaa

SEQ ID NO: 511867 - DNA, 15 bp, Homo sapiens
tctggtggctgccta

SEQ ID NO: 511868 - DNA, 15 bp, Homo sapiens
ctctggtggctgcct

SEQ ID NO: 511869 - DNA, 15 bp, Homo sapiens
cctctggtggctgcc

SEQ ID NO: 511870 - DNA, 15 bp, Homo sapiens
gcctctggtggctgc

SEQ ID NO: 511871 - DNA, 15 bp, Homo sapiens
cgcctctggtggctg

SEQ ID NO: 511872 - DNA, 15 bp, Homo sapiens
ccgcctctggtggct

SEQ ID NO: 511873 - DNA, 15 bp, Homo sapiens
cccgcctctggtggc

SEQ ID NO: 511874 - DNA, 15 bp, Homo sapiens
ccccgcctctggtgg

SEQ ID NO: 511875 - DNA, 15 bp, Homo sapiens
gccccgcctctggtg

SEQ ID NO: 511876 - DNA, 15 bp, Homo sapiens
cgccccgcctctggt

SEQ ID NO: 511877 - DNA, 15 bp, Homo sapiens
acgccccgcctctgg

SEQ ID NO: 511878 - DNA, 15 bp, Homo sapiens
tacgccccgcctctg

SEQ ID NO: 511879 - DNA, 15 bp, Homo sapiens
ttacgccccgcctct

SEQ ID NO: 511880 - DNA, 15 bp, Homo sapiens
cttacgccccgcctc

SEQ ID NO: 511881 - DNA, 15 bp, Homo sapiens
gcttacgccccgcct

SEQ ID NO: 511882 - DNA, 15 bp, Homo sapiens
cgcttacgccccgcc

SEQ ID NO: 511883 - DNA, 15 bp, Homo sapiens
gcgcttacgccccgc

SEQ ID NO: 511884 - DNA, 15 bp, Homo sapiens
agcgcttacgccccg

SEQ ID NO: 511885 - DNA, 15 bp, Homo sapiens
tagcgcttacgcccc

SEQ ID NO: 511886 - DNA, 15 bp, Homo sapiens
ttagcgcttacgccc

SEQ ID NO: 511887 - DNA, 15 bp, Homo sapiens
tttagcgcttacgcc

SEQ ID NO: 511888 - DNA, 15 bp, Homo sapiens
ctttagcgcttacgc

SEQ ID NO: 511889 - DNA, 15 bp, Homo sapiens
gctttagcgcttacg

SEQ ID NO: 511890 - DNA, 15 bp, Homo sapiens
tgctttagcgcttac

SEQ ID NO: 511891 - DNA, 15 bp, Homo sapiens
ttgctttagcgctta

SEQ ID NO: 511892 - DNA, 15 bp, Homo sapiens
gttgctttagcgctt

SEQ ID NO: 511893 - DNA, 15 bp, Homo sapiens
tgttgctttagcgct

SEQ ID NO: 511894 - DNA, 15 bp, Homo sapiens
ttgttgctttagcgc

SEQ ID NO: 511895 - DNA, 15 bp, Homo sapiens
cttgttgctttagcg

SEQ ID NO: 511896 - DNA, 15 bp, Homo sapiens
tcttgttgctttagc

SEQ ID NO: 511897 - DNA, 15 bp, Homo sapiens
gtcttgttgctttag

SEQ ID NO: 511898 - DNA, 15 bp, Homo sapiens
tgtcttgttgcttta

SEQ ID NO: 511899 - DNA, 15 bp, Homo sapiens
ttgtcttgttgcttt

SEQ ID NO: 511900 - DNA, 15 bp, Homo sapiens
attgtcttgttgctt

SEQ ID NO: 511901 - DNA, 15 bp, Homo sapiens
tattgtcttgttgct

SEQ ID NO: 511902 - DNA, 15 bp, Homo sapiens
ctattgtcttgttgc

SEQ ID NO: 511903 - DNA, 15 bp, Homo sapiens
tctattgtcttgttg

SEQ ID NO: 511904 - DNA, 15 bp, Homo sapiens
ttctattgtcttgtt

SEQ ID NO: 511905 - DNA, 15 bp, Homo sapiens
cttctattgtcttgt

SEQ ID NO: 511906 - DNA, 15 bp, Homo sapiens
gcttctattgtcttg

SEQ ID NO: 511907 - DNA, 15 bp, Homo sapiens
ggcttctattgtctt

SEQ ID NO: 511908 - DNA, 15 bp, Homo sapiens
aggcttctattgtct

SEQ ID NO: 511909 - DNA, 15 bp, Homo sapiens
taggcttctattgtc

SEQ ID NO: 511910 - DNA, 15 bp, Homo sapiens
gtaggcttctattgt

SEQ ID NO: 511911 - DNA, 15 bp, Homo sapiens
tgtaggcttctattg

SEQ ID NO: 511912 - DNA, 15 bp, Homo sapiens
atgtaggcttctatt

SEQ ID NO: 511913 - DNA, 15 bp, Homo sapiens
gatgtaggcttctat

SEQ ID NO: 511914 - DNA, 15 bp, Homo sapiens
agatgtaggcttcta

SEQ ID NO: 511915 - DNA, 15 bp, Homo sapiens
aagatgtaggcttct

SEQ ID NO: 511916 - DNA, 15 bp, Homo sapiens
caagatgtaggcttc

SEQ ID NO: 511917 - DNA, 15 bp, Homo sapiens
gcaagatgtaggctt

SEQ ID NO: 511918 - DNA, 15 bp, Homo sapiens
ggcaagatgtaggct

SEQ ID NO: 511919 - DNA, 15 bp, Homo sapiens
gggcaagatgtaggc

SEQ ID NO: 511920 - DNA, 15 bp, Homo sapiens
cgggcaagatgtagg

SEQ ID NO: 511921 - DNA, 15 bp, Homo sapiens
tcgggcaagatgtag

SEQ ID NO: 511922 - DNA, 15 bp, Homo sapiens
ctcgggcaagatgta

SEQ ID NO: 511923 - DNA, 15 bp, Homo sapiens
tctcgggcaagatgt

SEQ ID NO: 511924 - DNA, 15 bp, Homo sapiens
atctcgggcaagatg

SEQ ID NO: 511925 - DNA, 15 bp, Homo sapiens
tatctcgggcaagat

SEQ ID NO: 511926 - DNA, 15 bp, Homo sapiens
ttatctcgggcaaga

SEQ ID NO: 511927 - DNA, 15 bp, Homo sapiens
attatctcgggcaag

SEQ ID NO: 511928 - DNA, 15 bp, Homo sapiens
aattatctcgggcaa

SEQ ID NO: 511929 - DNA, 15 bp, Homo sapiens
taattatctcgggca

SEQ ID NO: 511930 - DNA, 15 bp, Homo sapiens
ctaattatctcgggc

SEQ ID NO: 511931 - DNA, 15 bp, Homo sapiens
gctaattatctcggg

SEQ ID NO: 511932 - DNA, 15 bp, Homo sapiens
agctaattatctcgg

SEQ ID NO: 511933 - DNA, 15 bp, Homo sapiens
aagctaattatctcg

SEQ ID NO: 511934 - DNA, 15 bp, Homo sapiens
taagctaattatctc

SEQ ID NO: 511935 - DNA, 15 bp, Homo sapiens
gtaagctaattatct

SEQ ID NO: 511936 - DNA, 15 bp, Homo sapiens
tgtaagctaattatc

SEQ ID NO: 511937 - DNA, 15 bp, Homo sapiens
atgtaagctaattat

SEQ ID NO: 511938 - DNA, 15 bp, Homo sapiens
catgtaagctaatta

SEQ ID NO: 511939 - DNA, 15 bp, Homo sapiens
gcatgtaagctaatt

SEQ ID NO: 511940 - DNA, 15 bp, Homo sapiens
agcatgtaagctaat

SEQ ID NO: 511941 - DNA, 15 bp, Homo sapiens
cagcatgtaagctaa

SEQ ID NO: 511942 - DNA, 15 bp, Homo sapiens
tcagcatgtaagcta

SEQ ID NO: 511943 - DNA, 15 bp, Homo sapiens
atcagcatgtaagct

SEQ ID NO: 511944 - DNA, 15 bp, Homo sapiens
catcagcatgtaagc

SEQ ID NO: 511945 - DNA, 15 bp, Homo sapiens
tcatcagcatgtaag

SEQ ID NO: 511946 - DNA, 15 bp, Homo sapiens
gtcatcagcatgtaa

SEQ ID NO: 511947 - DNA, 15 bp, Homo sapiens
tgtcatcagcatgta

SEQ ID NO: 511948 - DNA, 15 bp, Homo sapiens
ttgtcatcagcatgt

SEQ ID NO: 511949 - DNA, 15 bp, Homo sapiens
cttgtcatcagcatg

SEQ ID NO: 511950 - DNA, 15 bp, Homo sapiens
ccttgtcatcagcat

SEQ ID NO: 511951 - DNA, 15 bp, Homo sapiens
accttgtcatcagca

SEQ ID NO: 511952 - DNA, 15 bp, Homo sapiens
taccttgtcatcagc

SEQ ID NO: 511953 - DNA, 15 bp, Homo sapiens
ttaccttgtcatcag

SEQ ID NO: 511954 - DNA, 15 bp, Homo sapiens
tttaccttgtcatca

SEQ ID NO: 511955 - DNA, 15 bp, Homo sapiens
gtttaccttgtcatc

SEQ ID NO: 511956 - DNA, 15 bp, Homo sapiens
tgtttaccttgtcat

SEQ ID NO: 511957 - DNA, 15 bp, Homo sapiens
gtgtttaccttgtca

SEQ ID NO: 511958 - DNA, 15 bp, Homo sapiens
ggtgtttaccttgtc

SEQ ID NO: 511959 - DNA, 15 bp, Homo sapiens
aggtgtttaccttgt

SEQ ID NO: 511960 - DNA, 15 bp, Homo sapiens
aaggtgtttaccttg

SEQ ID NO: 511961 - DNA, 15 bp, Homo sapiens
aaaggtgtttacctt

SEQ ID NO: 511962 - DNA, 15 bp, Homo sapiens
taaaggtgtttacct

SEQ ID NO: 511963 - DNA, 15 bp, Homo sapiens
ttaaaggtgtttacc

SEQ ID NO: 511964 - DNA, 15 bp, Homo sapiens
cttaaaggtgtttac

SEQ ID NO: 511965 - DNA, 15 bp, Homo sapiens
acttaaaggtgttta

SEQ ID NO: 511966 - DNA, 15 bp, Homo sapiens
aacttaaaggtgttt

SEQ ID NO: 511967 - DNA, 15 bp, Homo sapiens
aaacttaaaggtgtt

SEQ ID NO: 511968 - DNA, 15 bp, Homo sapiens
gaaacttaaaggtgt

SEQ ID NO: 511969 - DNA, 15 bp, Homo sapiens
tgaaacttaaaggtg

SEQ ID NO: 511970 - DNA, 15 bp, Homo sapiens
gtgaaacttaaaggt

SEQ ID NO: 511971 - DNA, 15 bp, Homo sapiens
agtgaaacttaaagg

SEQ ID NO: 511972 - DNA, 15 bp, Homo sapiens
aagtgaaacttaaag

SEQ ID NO: 511973 - DNA, 15 bp, Homo sapiens
caagtgaaacttaaa

SEQ ID NO: 511974 - DNA, 15 bp, Homo sapiens
acaagtgaaacttaa

SEQ ID NO: 511975 - DNA, 15 bp, Homo sapiens
gacaagtgaaactta

SEQ ID NO: 511976 - DNA, 15 bp, Homo sapiens
tgacaagtgaaactt

SEQ ID NO: 511977 - DNA, 15 bp, Homo sapiens
ctgacaagtgaaact

SEQ ID NO: 511978 - DNA, 15 bp, Homo sapiens
cctgacaagtgaaac

SEQ ID NO: 511979 - DNA, 15 bp, Homo sapiens
tcctgacaagtgaaa

SEQ ID NO: 511980 - DNA, 15 bp, Homo sapiens
atcctgacaagtgaa

SEQ ID NO: 511981 - DNA, 15 bp, Homo sapiens
aatcctgacaagtga

SEQ ID NO: 511982 - DNA, 15 bp, Homo sapiens
aaatcctgacaagtg

SEQ ID NO: 511983 - DNA, 15 bp, Homo sapiens
aaaatcctgacaagt

SEQ ID NO: 511984 - DNA, 15 bp, Homo sapiens
aaaaatcctgacaag

SEQ ID NO: 511985 - DNA, 15 bp, Homo sapiens
taaaaatcctgacaa

SEQ ID NO: 511986 - DNA, 15 bp, Homo sapiens
ctaaaaatcctgaca

SEQ ID NO: 511987 - DNA, 15 bp, Homo sapiens
cctaaaaatcctgac

SEQ ID NO: 511988 - DNA, 15 bp, Homo sapiens
acctaaaaatcctga

SEQ ID NO: 511989 - DNA, 15 bp, Homo sapiens
gacctaaaaatcctg

SEQ ID NO: 511990 - DNA, 15 bp, Homo sapiens
agacctaaaaatcct

SEQ ID NO: 511991 - DNA, 15 bp, Homo sapiens
gagacctaaaaatcc

SEQ ID NO: 511992 - DNA, 15 bp, Homo sapiens
tgagacctaaaaatc

SEQ ID NO: 511993 - DNA, 15 bp, Homo sapiens
ttgagacctaaaaat

SEQ ID NO: 511994 - DNA, 15 bp, Homo sapiens
tttgagacctaaaaa

SEQ ID NO: 511995 - DNA, 15 bp, Homo sapiens
ctttgagacctaaaa

SEQ ID NO: 511996 - DNA, 15 bp, Homo sapiens
tctttgagacctaaa

SEQ ID NO: 511997 - DNA, 15 bp, Homo sapiens
ctctttgagacctaa

SEQ ID NO: 511998 - DNA, 15 bp, Homo sapiens
tctctttgagaccta

SEQ ID NO: 511999 - DNA, 15 bp, Homo sapiens
ctctctttgagacct

SEQ ID NO: 512000 - DNA, 15 bp, Homo sapiens
tctctctttgagacc

SEQ ID NO: 512001 - DNA, 15 bp, Homo sapiens
ctctctctttgagac

SEQ ID NO: 512002 - DNA, 15 bp, Homo sapiens
tctctctctttgaga

SEQ ID NO: 512003 - DNA, 15 bp, Homo sapiens
ctctctctctttgag

SEQ ID NO: 512004 - DNA, 15 bp, Homo sapiens
tctctctctctttga

SEQ ID NO: 512005 - DNA, 15 bp, Homo sapiens
ctctctctctctttg

SEQ ID NO: 512006 - DNA, 15 bp, Homo sapiens
tctctctctctcttt

SEQ ID NO: 512007 - DNA, 15 bp, Homo sapiens
ctctctctctctctt

SEQ ID NO: 512008 - DNA, 15 bp, Homo sapiens
tctctctctctctct

SEQ ID NO: 512009 - DNA, 15 bp, Homo sapiens
ctctctctctctctc

SEQ ID NO: 512010 - DNA, 15 bp, Homo sapiens
cctctctctctctct

SEQ ID NO: 512011 - DNA, 15 bp, Homo sapiens
gcctctctctctctc

SEQ ID NO: 512012 - DNA, 15 bp, Homo sapiens
tgcctctctctctct

SEQ ID NO: 512013 - DNA, 15 bp, Homo sapiens
ctgcctctctctctc

SEQ ID NO: 512014 - DNA, 15 bp, Homo sapiens
tctgcctctctctct

SEQ ID NO: 512015 - DNA, 15 bp, Homo sapiens
ctctgcctctctctc

SEQ ID NO: 512016 - DNA, 15 bp, Homo sapiens
tctctgcctctctct

SEQ ID NO: 512017 - DNA, 15 bp, Homo sapiens
gtctctgcctctctc

SEQ ID NO: 512018 - DNA, 15 bp, Homo sapiens
cgtctctgcctctct

SEQ ID NO: 512019 - DNA, 15 bp, Homo sapiens
tcgtctctgcctctc

SEQ ID NO: 512020 - DNA, 15 bp, Homo sapiens
ctcgtctctgcctct

SEQ ID NO: 512021 - DNA, 15 bp, Homo sapiens
tctcgtctctgcctc

SEQ ID NO: 512022 - DNA, 15 bp, Homo sapiens
gtctcgtctctgcct

SEQ ID NO: 512023 - DNA, 15 bp, Homo sapiens
ggtctcgtctctgcc

SEQ ID NO: 512024 - DNA, 15 bp, Homo sapiens
gggtctcgtctctgc

SEQ ID NO: 512025 - DNA, 15 bp, Homo sapiens
tgggtctcgtctctg

SEQ ID NO: 512026 - DNA, 15 bp, Homo sapiens
ttgggtctcgtctct

SEQ ID NO: 512027 - DNA, 15 bp, Homo sapiens
tttgggtctcgtctc

SEQ ID NO: 512028 - DNA, 15 bp, Homo sapiens
ctttgggtctcgtct

SEQ ID NO: 512029 - DNA, 15 bp, Homo sapiens
gctttgggtctcgtc

SEQ ID NO: 512030 - DNA, 15 bp, Homo sapiens
tgctttgggtctcgt

SEQ ID NO: 512031 - DNA, 15 bp, Homo sapiens
atgctttgggtctcg

SEQ ID NO: 512032 - DNA, 15 bp, Homo sapiens
aatgctttgggtctc

SEQ ID NO: 512033 - DNA, 15 bp, Homo sapiens
aaatgctttgggtct

SEQ ID NO: 512034 - DNA, 15 bp, Homo sapiens
gaaatgctttgggtc

SEQ ID NO: 512035 - DNA, 15 bp, Homo sapiens
ggaaatgctttgggt

SEQ ID NO: 512036 - DNA, 15 bp, Homo sapiens
gggaaatgctttggg

SEQ ID NO: 512037 - DNA, 15 bp, Homo sapiens
ggggaaatgctttgg

SEQ ID NO: 512038 - DNA, 15 bp, Homo sapiens
gggggaaatgctttg

SEQ ID NO: 512039 - DNA, 15 bp, Homo sapiens
ggggggaaatgcttt

SEQ ID NO: 512040 - DNA, 15 bp, Homo sapiens
aggggggaaatgctt

SEQ ID NO: 512041 - DNA, 15 bp, Homo sapiens
gaggggggaaatgct

SEQ ID NO: 512042 - DNA, 15 bp, Homo sapiens
ggaggggggaaatgc

SEQ ID NO: 512043 - DNA, 15 bp, Homo sapiens
gggaggggggaaatg

SEQ ID NO: 512044 - DNA, 15 bp, Homo sapiens
agggaggggggaaat

SEQ ID NO: 512045 - DNA, 15 bp, Homo sapiens
aagggaggggggaaa

SEQ ID NO: 512046 - DNA, 15 bp, Homo sapiens
caagggaggggggaa

SEQ ID NO: 512047 - DNA, 15 bp, Homo sapiens
ccaagggagggggga

SEQ ID NO: 512048 - DNA, 15 bp, Homo sapiens
tccaagggagggggg

SEQ ID NO: 512049 - DNA, 15 bp, Homo sapiens
gtccaagggaggggg

SEQ ID NO: 512050 - DNA, 15 bp, Homo sapiens
tgtccaagggagggg

SEQ ID NO: 512051 - DNA, 15 bp, Homo sapiens
gtgtccaagggaggg

SEQ ID NO: 512052 - DNA, 15 bp, Homo sapiens
ggtgtccaagggagg

SEQ ID NO: 512053 - DNA, 15 bp, Homo sapiens
gggtgtccaagggag

SEQ ID NO: 512054 - DNA, 15 bp, Homo sapiens
ggggtgtccaaggga

SEQ ID NO: 512055 - DNA, 15 bp, Homo sapiens
gggggtgtccaaggg

SEQ ID NO: 512056 - DNA, 15 bp, Homo sapiens
tgggggtgtccaagg

SEQ ID NO: 512057 - DNA, 15 bp, Homo sapiens
gtgggggtgtccaag

SEQ ID NO: 512058 - DNA, 15 bp, Homo sapiens
ggtgggggtgtccaa

SEQ ID NO: 512059 - DNA, 15 bp, Homo sapiens
gggtgggggtgtcca

SEQ ID NO: 512060 - DNA, 15 bp, Homo sapiens
ggggtgggggtgtcc

SEQ ID NO: 512061 - DNA, 15 bp, Homo sapiens
gggggtgggggtgtc

SEQ ID NO: 512062 - DNA, 15 bp, Homo sapiens
tgggggtgggggtgt

SEQ ID NO: 512063 - DNA, 15 bp, Homo sapiens
atgggggtgggggtg

SEQ ID NO: 512064 - DNA, 15 bp, Homo sapiens
aatgggggtgggggt

SEQ ID NO: 512065 - DNA, 15 bp, Homo sapiens
aaatgggggtggggg

SEQ ID NO: 512066 - DNA, 15 bp, Homo sapiens
aaaatgggggtgggg

SEQ ID NO: 512067 - DNA, 15 bp, Homo sapiens
aaaaatgggggtggg

SEQ ID NO: 512068 - DNA, 15 bp, Homo sapiens
aaaaaatgggggtgg

SEQ ID NO: 512069 - DNA, 15 bp, Homo sapiens
caaaaaatgggggtg

SEQ ID NO: 512070 - DNA, 15 bp, Homo sapiens
acaaaaaatgggggt

SEQ ID NO: 512071 - DNA, 15 bp, Homo sapiens
cacaaaaaatggggg

SEQ ID NO: 512072 - DNA, 15 bp, Homo sapiens
ccacaaaaaatgggg

SEQ ID NO: 512073 - DNA, 15 bp, Homo sapiens
cccacaaaaaatggg

SEQ ID NO: 512074 - DNA, 15 bp, Homo sapiens
ccccacaaaaaatgg

SEQ ID NO: 512075 - DNA, 15 bp, Homo sapiens
accccacaaaaaatg

SEQ ID NO: 512076 - DNA, 15 bp, Homo sapiens
taccccacaaaaaat

SEQ ID NO: 512077 - DNA, 15 bp, Homo sapiens
gtaccccacaaaaaa

SEQ ID NO: 512078 - DNA, 15 bp, Homo sapiens
ggtaccccacaaaaa

SEQ ID NO: 512079 - DNA, 15 bp, Homo sapiens
tggtaccccacaaaa

SEQ ID NO: 512080 - DNA, 15 bp, Homo sapiens
ctggtaccccacaaa

SEQ ID NO: 512081 - DNA, 15 bp, Homo sapiens
gctggtaccccacaa

SEQ ID NO: 512082 - DNA, 15 bp, Homo sapiens
cgctggtaccccaca

SEQ ID NO: 512083 - DNA, 15 bp, Homo sapiens
ccgctggtaccccac

SEQ ID NO: 512084 - DNA, 15 bp, Homo sapiens
tccgctggtacccca

SEQ ID NO: 512085 - DNA, 15 bp, Homo sapiens
ctccgctggtacccc

SEQ ID NO: 512086 - DNA, 15 bp, Homo sapiens
gctccgctggtaccc

SEQ ID NO: 512087 - DNA, 15 bp, Homo sapiens
cgctccgctggtacc

SEQ ID NO: 512088 - DNA, 15 bp, Homo sapiens
gcgctccgctggtac

SEQ ID NO: 512089 - DNA, 15 bp, Homo sapiens
cgcgctccgctggta

SEQ ID NO: 512090 - DNA, 15 bp, Homo sapiens
ccgcgctccgctggt

SEQ ID NO: 512091 - DNA, 15 bp, Homo sapiens
cccgcgctccgctgg

SEQ ID NO: 512092 - DNA, 15 bp, Homo sapiens
ccccgcgctccgctg

SEQ ID NO: 512093 - DNA, 15 bp, Homo sapiens
tccccgcgctccgct

SEQ ID NO: 512094 - DNA, 15 bp, Homo sapiens
ctccccgcgctccgc

SEQ ID NO: 512095 - DNA, 15 bp, Homo sapiens
cctccccgcgctccg

SEQ ID NO: 512096 - DNA, 15 bp, Homo sapiens
tcctccccgcgctcc

SEQ ID NO: 512097 - DNA, 15 bp, Homo sapiens
ctcctccccgcgctc

SEQ ID NO: 512098 - DNA, 15 bp, Homo sapiens
cctcctccccgcgct

SEQ ID NO: 512099 - DNA, 15 bp, Homo sapiens
acctcctccccgcgc

SEQ ID NO: 512100 - DNA, 15 bp, Homo sapiens
cacctcctccccgcg

SEQ ID NO: 512101 - DNA, 15 bp, Homo sapiens
ccacctcctccccgc

SEQ ID NO: 512102 - DNA, 15 bp, Homo sapiens
tccacctcctccccg

SEQ ID NO: 512103 - DNA, 15 bp, Homo sapiens
ctccacctcctcccc

SEQ ID NO: 512104 - DNA, 15 bp, Homo sapiens
cctccacctcctccc

SEQ ID NO: 512105 - DNA, 15 bp, Homo sapiens
ccctccacctcctcc

SEQ ID NO: 512106 - DNA, 15 bp, Homo sapiens
cccctccacctcctc

SEQ ID NO: 512107 - DNA, 15 bp, Homo sapiens
tcccctccacctcct

SEQ ID NO: 512108 - DNA, 15 bp, Homo sapiens
ctcccctccacctcc

SEQ ID NO: 512109 - DNA, 15 bp, Homo sapiens
cctcccctccacctc

SEQ ID NO: 512110 - DNA, 15 bp, Homo sapiens
ccctcccctccacct

SEQ ID NO: 512111 - DNA, 15 bp, Homo sapiens
cccctcccctccacc

SEQ ID NO: 512112 - DNA, 15 bp, Homo sapiens
tcccctcccctccac

SEQ ID NO: 512113 - DNA, 15 bp, Homo sapiens
ttcccctcccctcca

SEQ ID NO: 512114 - DNA, 15 bp, Homo sapiens
cttcccctcccctcc

SEQ ID NO: 512115 - DNA, 15 bp, Homo sapiens
ccttcccctcccctc

SEQ ID NO: 512116 - DNA, 15 bp, Homo sapiens
tccttcccctcccct

SEQ ID NO: 512117 - DNA, 15 bp, Homo sapiens
ctccttcccctcccc

SEQ ID NO: 512118 - DNA, 15 bp, Homo sapiens
cctccttcccctccc

SEQ ID NO: 512119 - DNA, 15 bp, Homo sapiens
tcctccttcccctcc

SEQ ID NO: 512120 - DNA, 15 bp, Homo sapiens
ctcctccttcccctc

SEQ ID NO: 512121 - DNA, 15 bp, Homo sapiens
cctcctccttcccct

SEQ ID NO: 512122 - DNA, 15 bp, Homo sapiens
ccctcctccttcccc

SEQ ID NO: 512123 - DNA, 15 bp, Homo sapiens
tccctcctccttccc

SEQ ID NO: 512124 - DNA, 15 bp, Homo sapiens
ttccctcctccttcc

SEQ ID NO: 512125 - DNA, 15 bp, Homo sapiens
gttccctcctccttc

SEQ ID NO: 512126 - DNA, 15 bp, Homo sapiens
ggttccctcctcctt

SEQ ID NO: 512127 - DNA, 15 bp, Homo sapiens
cggttccctcctcct

SEQ ID NO: 512128 - DNA, 15 bp, Homo sapiens
tcggttccctcctcc

SEQ ID NO: 512129 - DNA, 15 bp, Homo sapiens
ctcggttccctcctc

SEQ ID NO: 512130 - DNA, 15 bp, Homo sapiens
tctcggttccctcct

SEQ ID NO: 512131 - DNA, 15 bp, Homo sapiens
ctctcggttccctcc

SEQ ID NO: 512132 - DNA, 15 bp, Homo sapiens
gctctcggttccctc

SEQ ID NO: 512133 - DNA, 15 bp, Homo sapiens
cgctctcggttccct

SEQ ID NO: 512134 - DNA, 15 bp, Homo sapiens
ccgctctcggttccc

SEQ ID NO: 512135 - DNA, 15 bp, Homo sapiens
cccgctctcggttcc

SEQ ID NO: 512136 - DNA, 15 bp, Homo sapiens
ccccgctctcggttc

SEQ ID NO: 512137 - DNA, 15 bp, Homo sapiens
tccccgctctcggtt

SEQ ID NO: 512138 - DNA, 15 bp, Homo sapiens
ctccccgctctcggt

SEQ ID NO: 512139 - DNA, 15 bp, Homo sapiens
cctccccgctctcgg

SEQ ID NO: 512140 - DNA, 15 bp, Homo sapiens
ccctccccgctctcg

SEQ ID NO: 512141 - DNA, 15 bp, Homo sapiens
gccctccccgctctc

SEQ ID NO: 512142 - DNA, 15 bp, Homo sapiens
tgccctccccgctct

SEQ ID NO: 512143 - DNA, 15 bp, Homo sapiens
ctgccctccccgctc

SEQ ID NO: 512144 - DNA, 15 bp, Homo sapiens
cctgccctccccgct

SEQ ID NO: 512145 - DNA, 15 bp, Homo sapiens
tcctgccctccccgc

SEQ ID NO: 512146 - DNA, 15 bp, Homo sapiens
ctcctgccctccccg

SEQ ID NO: 512147 - DNA, 15 bp, Homo sapiens
cctcctgccctcccc

SEQ ID NO: 512148 - DNA, 15 bp, Homo sapiens
acctcctgccctccc

SEQ ID NO: 512149 - DNA, 15 bp, Homo sapiens
cacctcctgccctcc

SEQ ID NO: 512150 - DNA, 15 bp, Homo sapiens
ccacctcctgccctc

SEQ ID NO: 512151 - DNA, 15 bp, Homo sapiens
cccacctcctgccct

SEQ ID NO: 512152 - DNA, 15 bp, Homo sapiens
ccccacctcctgccc

SEQ ID NO: 512153 - DNA, 15 bp, Homo sapiens
accccacctcctgcc

SEQ ID NO: 512154 - DNA, 15 bp, Homo sapiens
caccccacctcctgc

SEQ ID NO: 512155 - DNA, 15 bp, Homo sapiens
ccaccccacctcctg

SEQ ID NO: 512156 - DNA, 15 bp, Homo sapiens
cccaccccacctcct

SEQ ID NO: 512157 - DNA, 15 bp, Homo sapiens
ccccaccccacctcc

SEQ ID NO: 512158 - DNA, 15 bp, Homo sapiens
cccccaccccacctc

SEQ ID NO: 512159 - DNA, 15 bp, Homo sapiens
tcccccaccccacct

SEQ ID NO: 512160 - DNA, 15 bp, Homo sapiens
ctcccccaccccacc

SEQ ID NO: 512161 - DNA, 15 bp, Homo sapiens
actcccccaccccac

SEQ ID NO: 512162 - DNA, 15 bp, Homo sapiens
tactcccccacccca

SEQ ID NO: 512163 - DNA, 15 bp, Homo sapiens
ttactcccccacccc

SEQ ID NO: 512164 - DNA, 15 bp, Homo sapiens
gttactcccccaccc

SEQ ID NO: 512165 - DNA, 15 bp, Homo sapiens
tgttactcccccacc

SEQ ID NO: 512166 - DNA, 15 bp, Homo sapiens
ctgttactcccccac

SEQ ID NO: 512167 - DNA, 15 bp, Homo sapiens
tctgttactccccca

SEQ ID NO: 512168 - DNA, 15 bp, Homo sapiens
ctctgttactccccc

SEQ ID NO: 512169 - DNA, 15 bp, Homo sapiens
cctctgttactcccc

SEQ ID NO: 512170 - DNA, 15 bp, Homo sapiens
tcctctgttactccc

SEQ ID NO: 512171 - DNA, 15 bp, Homo sapiens
ctcctctgttactcc

SEQ ID NO: 512172 - DNA, 15 bp, Homo sapiens
cctcctctgttactc

SEQ ID NO: 512173 - DNA, 15 bp, Homo sapiens
tcctcctctgttact

SEQ ID NO: 512174 - DNA, 15 bp, Homo sapiens
ctcctcctctgttac

SEQ ID NO: 512175 - DNA, 15 bp, Homo sapiens
tctcctcctctgtta

SEQ ID NO: 512176 - DNA, 15 bp, Homo sapiens
ctctcctcctctgtt

SEQ ID NO: 512177 - DNA, 15 bp, Homo sapiens
tctctcctcctctgt

SEQ ID NO: 512178 - DNA, 15 bp, Homo sapiens
atctctcctcctctg

SEQ ID NO: 512179 - DNA, 15 bp, Homo sapiens
catctctcctcctct

SEQ ID NO: 512180 - DNA, 15 bp, Homo sapiens
ccatctctcctcctc

SEQ ID NO: 512181 - DNA, 15 bp, Homo sapiens
accatctctcctcct

SEQ ID NO: 512182 - DNA, 15 bp, Homo sapiens
aaccatctctcctcc

SEQ ID NO: 512183 - DNA, 15 bp, Homo sapiens
caaccatctctcctc

SEQ ID NO: 512184 - DNA, 15 bp, Homo sapiens
tcaaccatctctcct

SEQ ID NO: 512185 - DNA, 15 bp, Homo sapiens
ctcaaccatctctcc

SEQ ID NO: 512186 - DNA, 15 bp, Homo sapiens
tctcaaccatctctc

SEQ ID NO: 512187 - DNA, 15 bp, Homo sapiens
ctctcaaccatctct

SEQ ID NO: 512188 - DNA, 15 bp, Homo sapiens
cctctcaaccatctc

SEQ ID NO: 512189 - DNA, 15 bp, Homo sapiens
tcctctcaaccatct

SEQ ID NO: 512190 - DNA, 15 bp, Homo sapiens
ttcctctcaaccatc

SEQ ID NO: 512191 - DNA, 15 bp, Homo sapiens
cttcctctcaaccat

SEQ ID NO: 512192 - DNA, 15 bp, Homo sapiens
ccttcctctcaacca

SEQ ID NO: 512193 - DNA, 15 bp, Homo sapiens
tccttcctctcaacc

SEQ ID NO: 512194 - DNA, 15 bp, Homo sapiens
ttccttcctctcaac

SEQ ID NO: 512195 - DNA, 15 bp, Homo sapiens
cttccttcctctcaa

SEQ ID NO: 512196 - DNA, 15 bp, Homo sapiens
ccttccttcctctca

SEQ ID NO: 512197 - DNA, 15 bp, Homo sapiens
accttccttcctctc

SEQ ID NO: 512198 - DNA, 15 bp, Homo sapiens
caccttccttcctct

SEQ ID NO: 512199 - DNA, 15 bp, Homo sapiens
tcaccttccttcctc

SEQ ID NO: 512200 - DNA, 15 bp, Homo sapiens
ttcaccttccttcct

SEQ ID NO: 512201 - DNA, 15 bp, Homo sapiens
attcaccttccttcc

SEQ ID NO: 512202 - DNA, 15 bp, Homo sapiens
cattcaccttccttc

SEQ ID NO: 512203 - DNA, 15 bp, Homo sapiens
gcattcaccttcctt

SEQ ID NO: 512204 - DNA, 15 bp, Homo sapiens
agcattcaccttcct

SEQ ID NO: 512205 - DNA, 15 bp, Homo sapiens
cagcattcaccttcc

SEQ ID NO: 512206 - DNA, 15 bp, Homo sapiens
gcagcattcaccttc

SEQ ID NO: 512207 - DNA, 15 bp, Homo sapiens
agcagcattcacctt

SEQ ID NO: 512208 - DNA, 15 bp, Homo sapiens
aagcagcattcacct

SEQ ID NO: 512209 - DNA, 15 bp, Homo sapiens
aaagcagcattcacc

SEQ ID NO: 512210 - DNA, 15 bp, Homo sapiens
caaagcagcattcac

SEQ ID NO: 512211 - DNA, 15 bp, Homo sapiens
gcaaagcagcattca

SEQ ID NO: 512212 - DNA, 15 bp, Homo sapiens
tgcaaagcagcattc

SEQ ID NO: 512213 - DNA, 15 bp, Homo sapiens
ttgcaaagcagcatt

SEQ ID NO: 512214 - DNA, 15 bp, Homo sapiens
gttgcaaagcagcat

SEQ ID NO: 512215 - DNA, 15 bp, Homo sapiens
ggttgcaaagcagca

SEQ ID NO: 512216 - DNA, 15 bp, Homo sapiens
tggttgcaaagcagc

SEQ ID NO: 512217 - DNA, 15 bp, Homo sapiens
ttggttgcaaagcag

SEQ ID NO: 512218 - DNA, 15 bp, Homo sapiens
gttggttgcaaagca

SEQ ID NO: 512219 - DNA, 15 bp, Homo sapiens
agttggttgcaaagc

SEQ ID NO: 512220 - DNA, 15 bp, Homo sapiens
aagttggttgcaaag

SEQ ID NO: 512221 - DNA, 15 bp, Homo sapiens
caagttggttgcaaa

SEQ ID NO: 512222 - DNA, 15 bp, Homo sapiens
gcaagttggttgcaa

SEQ ID NO: 512223 - DNA, 15 bp, Homo sapiens
cgcaagttggttgca

SEQ ID NO: 512224 - DNA, 15 bp, Homo sapiens
ccgcaagttggttgc

SEQ ID NO: 512225 - DNA, 15 bp, Homo sapiens
tccgcaagttggttg

SEQ ID NO: 512226 - DNA, 15 bp, Homo sapiens
ctccgcaagttggtt

SEQ ID NO: 512227 - DNA, 15 bp, Homo sapiens
actccgcaagttggt

SEQ ID NO: 512228 - DNA, 15 bp, Homo sapiens
aactccgcaagttgg

SEQ ID NO: 512229 - DNA, 15 bp, Homo sapiens
taactccgcaagttg

SEQ ID NO: 512230 - DNA, 15 bp, Homo sapiens
gtaactccgcaagtt

SEQ ID NO: 512231 - DNA, 15 bp, Homo sapiens
tgtaactccgcaagt

SEQ ID NO: 512232 - DNA, 15 bp, Homo sapiens
ttgtaactccgcaag

SEQ ID NO: 512233 - DNA, 15 bp, Homo sapiens
tttgtaactccgcaa

SEQ ID NO: 512234 - DNA, 15 bp, Homo sapiens
ctttgtaactccgca

SEQ ID NO: 512235 - DNA, 15 bp, Homo sapiens
actttgtaactccgc

SEQ ID NO: 512236 - DNA, 15 bp, Homo sapiens
cactttgtaactccg

SEQ ID NO: 512237 - DNA, 15 bp, Homo sapiens
ccactttgtaactcc

SEQ ID NO: 512238 - DNA, 15 bp, Homo sapiens
tccactttgtaactc

SEQ ID NO: 512239 - DNA, 15 bp, Homo sapiens
ttccactttgtaact

SEQ ID NO: 512240 - DNA, 15 bp, Homo sapiens
gttccactttgtaac

SEQ ID NO: 512241 - DNA, 15 bp, Homo sapiens
ggttccactttgtaa

SEQ ID NO: 512242 - DNA, 15 bp, Homo sapiens
tggttccactttgta

SEQ ID NO: 512243 - DNA, 15 bp, Homo sapiens
gtggttccactttgt

SEQ ID NO: 512244 - DNA, 15 bp, Homo sapiens
agtggttccactttg

SEQ ID NO: 512245 - DNA, 15 bp, Homo sapiens
aagtggttccacttt

SEQ ID NO: 512246 - DNA, 15 bp, Homo sapiens
aaagtggttccactt

SEQ ID NO: 512247 - DNA, 15 bp, Homo sapiens
gaaagtggttccact

SEQ ID NO: 512248 - DNA, 15 bp, Homo sapiens
ggaaagtggttccac

SEQ ID NO: 512249 - DNA, 15 bp, Homo sapiens
tggaaagtggttcca

SEQ ID NO: 512250 - DNA, 15 bp, Homo sapiens
ttggaaagtggttcc

SEQ ID NO: 512251 - DNA, 15 bp, Homo sapiens
attggaaagtggttc

SEQ ID NO: 512252 - DNA, 15 bp, Homo sapiens
aattggaaagtggtt

SEQ ID NO: 512253 - DNA, 15 bp, Homo sapiens
gaattggaaagtggt

SEQ ID NO: 512254 - DNA, 15 bp, Homo sapiens
cgaattggaaagtgg

SEQ ID NO: 512255 - DNA, 15 bp, Homo sapiens
ccgaattggaaagtg

SEQ ID NO: 512256 - DNA, 15 bp, Homo sapiens
accgaattggaaagt

SEQ ID NO: 512257 - DNA, 15 bp, Homo sapiens
gaccgaattggaaag

SEQ ID NO: 512258 - DNA, 15 bp, Homo sapiens
cgaccgaattggaaa

SEQ ID NO: 512259 - DNA, 15 bp, Homo sapiens
ccgaccgaattggaa

SEQ ID NO: 512260 - DNA, 15 bp, Homo sapiens
cccgaccgaattgga

SEQ ID NO: 512261 - DNA, 15 bp, Homo sapiens
ccccgaccgaattgg

SEQ ID NO: 512262 - DNA, 15 bp, Homo sapiens
accccgaccgaattg

SEQ ID NO: 512263 - DNA, 15 bp, Homo sapiens
aaccccgaccgaatt

SEQ ID NO: 512264 - DNA, 15 bp, Homo sapiens
gaaccccgaccgaat

SEQ ID NO: 512265 - DNA, 15 bp, Homo sapiens
ggaaccccgaccgaa

SEQ ID NO: 512266 - DNA, 15 bp, Homo sapiens
gggaaccccgaccga

SEQ ID NO: 512267 - DNA, 15 bp, Homo sapiens
ggggaaccccgaccg

SEQ ID NO: 512268 - DNA, 15 bp, Homo sapiens
cggggaaccccgacc

SEQ ID NO: 512269 - DNA, 15 bp, Homo sapiens
ccggggaaccccgac

SEQ ID NO: 512270 - DNA, 15 bp, Homo sapiens
cccggggaaccccga

SEQ ID NO: 512271 - DNA, 15 bp, Homo sapiens
gcccggggaaccccg

SEQ ID NO: 512272 - DNA, 15 bp, Homo sapiens
tgcccggggaacccc

SEQ ID NO: 512273 - DNA, 15 bp, Homo sapiens
gtgcccggggaaccc

SEQ ID NO: 512274 - DNA, 15 bp, Homo sapiens
cgtgcccggggaacc

SEQ ID NO: 512275 - DNA, 15 bp, Homo sapiens
ccgtgcccggggaac

SEQ ID NO: 512276 - DNA, 15 bp, Homo sapiens
tccgtgcccggggaa

SEQ ID NO: 512277 - DNA, 15 bp, Homo sapiens
gtccgtgcccgggga

SEQ ID NO: 512278 - DNA, 15 bp, Homo sapiens
tgtccgtgcccgggg

SEQ ID NO: 512279 - DNA, 15 bp, Homo sapiens
ctgtccgtgcccggg

SEQ ID NO: 512280 - DNA, 15 bp, Homo sapiens
cctgtccgtgcccgg

SEQ ID NO: 512281 - DNA, 15 bp, Homo sapiens
acctgtccgtgcccg

SEQ ID NO: 512282 - DNA, 15 bp, Homo sapiens
gacctgtccgtgccc

SEQ ID NO: 512283 - DNA, 15 bp, Homo sapiens
agacctgtccgtgcc

SEQ ID NO: 512284 - DNA, 15 bp, Homo sapiens
aagacctgtccgtgc

SEQ ID NO: 512285 - DNA, 15 bp, Homo sapiens
aaagacctgtccgtg

SEQ ID NO: 512286 - DNA, 15 bp, Homo sapiens
taaagacctgtccgt

SEQ ID NO: 512287 - DNA, 15 bp, Homo sapiens
ctaaagacctgtccg

SEQ ID NO: 512288 - DNA, 15 bp, Homo sapiens
cctaaagacctgtcc

SEQ ID NO: 512289 - DNA, 15 bp, Homo sapiens
tcctaaagacctgtc

SEQ ID NO: 512290 - DNA, 15 bp, Homo sapiens
ctcctaaagacctgt

SEQ ID NO: 512291 - DNA, 15 bp, Homo sapiens
cctcctaaagacctg

SEQ ID NO: 512292 - DNA, 15 bp, Homo sapiens
tcctcctaaagacct

SEQ ID NO: 512293 - DNA, 15 bp, Homo sapiens
ctcctcctaaagacc

SEQ ID NO: 512294 - DNA, 15 bp, Homo sapiens
cctcctcctaaagac

SEQ ID NO: 512295 - DNA, 15 bp, Homo sapiens
ccctcctcctaaaga

SEQ ID NO: 512296 - DNA, 15 bp, Homo sapiens
cccctcctcctaaag

SEQ ID NO: 512297 - DNA, 15 bp, Homo sapiens
ccccctcctcctaaa

SEQ ID NO: 512298 - DNA, 15 bp, Homo sapiens
gccccctcctcctaa

SEQ ID NO: 512299 - DNA, 15 bp, Homo sapiens
agccccctcctccta

SEQ ID NO: 512300 - DNA, 15 bp, Homo sapiens
cagccccctcctcct

SEQ ID NO: 512301 - DNA, 15 bp, Homo sapiens
tcagccccctcctcc

SEQ ID NO: 512302 - DNA, 15 bp, Homo sapiens
ctcagccccctcctc

SEQ ID NO: 512303 - DNA, 15 bp, Homo sapiens
cctcagccccctcct

SEQ ID NO: 512304 - DNA, 15 bp, Homo sapiens
ccctcagccccctcc

SEQ ID NO: 512305 - DNA, 15 bp, Homo sapiens
tccctcagccccctc

SEQ ID NO: 512306 - DNA, 15 bp, Homo sapiens
gtccctcagccccct

SEQ ID NO: 512307 - DNA, 15 bp, Homo sapiens
tgtccctcagccccc

SEQ ID NO: 512308 - DNA, 15 bp, Homo sapiens
ctgtccctcagcccc

SEQ ID NO: 512309 - DNA, 15 bp, Homo sapiens
cctgtccctcagccc

SEQ ID NO: 512310 - DNA, 15 bp, Homo sapiens
ccctgtccctcagcc

SEQ ID NO: 512311 - DNA, 15 bp, Homo sapiens
accctgtccctcagc

SEQ ID NO: 512312 - DNA, 15 bp, Homo sapiens
caccctgtccctcag

SEQ ID NO: 512313 - DNA, 15 bp, Homo sapiens
ccaccctgtccctca

SEQ ID NO: 512314 - DNA, 15 bp, Homo sapiens
cccaccctgtccctc

SEQ ID NO: 512315 - DNA, 15 bp, Homo sapiens
ccccaccctgtccct

SEQ ID NO: 512316 - DNA, 15 bp, Homo sapiens
cccccaccctgtccc

SEQ ID NO: 512317 - DNA, 15 bp, Homo sapiens
acccccaccctgtcc

SEQ ID NO: 512318 - DNA, 15 bp, Homo sapiens
aacccccaccctgtc

SEQ ID NO: 512319 - DNA, 15 bp, Homo sapiens
aaacccccaccctgt

SEQ ID NO: 512320 - DNA, 15 bp, Homo sapiens
gaaacccccaccctg

SEQ ID NO: 512321 - DNA, 15 bp, Homo sapiens
tgaaacccccaccct

SEQ ID NO: 512322 - DNA, 15 bp, Homo sapiens
gtgaaacccccaccc

SEQ ID NO: 512323 - DNA, 15 bp, Homo sapiens
ggtgaaacccccacc

SEQ ID NO: 512324 - DNA, 15 bp, Homo sapiens
aggtgaaacccccac

SEQ ID NO: 512325 - DNA, 15 bp, Homo sapiens
caggtgaaaccccca

SEQ ID NO: 512326 - DNA, 15 bp, Homo sapiens
tcaggtgaaaccccc

SEQ ID NO: 512327 - DNA, 15 bp, Homo sapiens
ctcaggtgaaacccc

SEQ ID NO: 512328 - DNA, 15 bp, Homo sapiens
gctcaggtgaaaccc

SEQ ID NO: 512329 - DNA, 15 bp, Homo sapiens
ggctcaggtgaaacc

SEQ ID NO: 512330 - DNA, 15 bp, Homo sapiens
aggctcaggtgaaac

SEQ ID NO: 512331 - DNA, 15 bp, Homo sapiens
caggctcaggtgaaa

SEQ ID NO: 512332 - DNA, 15 bp, Homo sapiens
gcaggctcaggtgaa

SEQ ID NO: 512333 - DNA, 15 bp, Homo sapiens
ggcaggctcaggtga

SEQ ID NO: 512334 - DNA, 15 bp, Homo sapiens
cggcaggctcaggtg

SEQ ID NO: 512335 - DNA, 15 bp, Homo sapiens
ccggcaggctcaggt

SEQ ID NO: 512336 - DNA, 15 bp, Homo sapiens
cccggcaggctcagg

SEQ ID NO: 512337 - DNA, 15 bp, Homo sapiens
ccccggcaggctcag

SEQ ID NO: 512338 - DNA, 15 bp, Homo sapiens
gccccggcaggctca

SEQ ID NO: 512339 - DNA, 15 bp, Homo sapiens
agccccggcaggctc

SEQ ID NO: 512340 - DNA, 15 bp, Homo sapiens
cagccccggcaggct

SEQ ID NO: 512341 - DNA, 15 bp, Homo sapiens
gcagccccggcaggc

SEQ ID NO: 512342 - DNA, 15 bp, Homo sapiens
agcagccccggcagg

SEQ ID NO: 512343 - DNA, 15 bp, Homo sapiens
gagcagccccggcag

SEQ ID NO: 512344 - DNA, 15 bp, Homo sapiens
ggagcagccccggca

SEQ ID NO: 512345 - DNA, 15 bp, Homo sapiens
aggagcagccccggc

SEQ ID NO: 512346 - DNA, 15 bp, Homo sapiens
gaggagcagccccgg

SEQ ID NO: 512347 - DNA, 15 bp, Homo sapiens
ggaggagcagccccg

SEQ ID NO: 512348 - DNA, 15 bp, Homo sapiens
gggaggagcagcccc

SEQ ID NO: 512349 - DNA, 15 bp, Homo sapiens
agggaggagcagccc

SEQ ID NO: 512350 - DNA, 15 bp, Homo sapiens
gagggaggagcagcc

SEQ ID NO: 512351 - DNA, 15 bp, Homo sapiens
ggagggaggagcagc

SEQ ID NO: 512352 - DNA, 15 bp, Homo sapiens
gggagggaggagcag

SEQ ID NO: 512353 - DNA, 15 bp, Homo sapiens
cgggagggaggagca

SEQ ID NO: 512354 - DNA, 15 bp, Homo sapiens
gcgggagggaggagc

SEQ ID NO: 512355 - DNA, 15 bp, Homo sapiens
ggcgggagggaggag

SEQ ID NO: 512356 - DNA, 15 bp, Homo sapiens
cggcgggagggagga

SEQ ID NO: 512357 - DNA, 15 bp, Homo sapiens
gcggcgggagggagg

SEQ ID NO: 512358 - DNA, 15 bp, Homo sapiens
cgcggcgggagggag

SEQ ID NO: 512359 - DNA, 15 bp, Homo sapiens
ccgcggcgggaggga

SEQ ID NO: 512360 - DNA, 15 bp, Homo sapiens
gccgcggcgggaggg

SEQ ID NO: 512361 - DNA, 15 bp, Homo sapiens
ggccgcggcgggagg

SEQ ID NO: 512362 - DNA, 15 bp, Homo sapiens
aggccgcggcgggag

SEQ ID NO: 512363 - DNA, 15 bp, Homo sapiens
gaggccgcggcggga

SEQ ID NO: 512364 - DNA, 15 bp, Homo sapiens
ggaggccgcggcggg

SEQ ID NO: 512365 - DNA, 15 bp, Homo sapiens
gggaggccgcggcgg

SEQ ID NO: 512366 - DNA, 15 bp, Homo sapiens
tgggaggccgcggcg

SEQ ID NO: 512367 - DNA, 15 bp, Homo sapiens
ctgggaggccgcggc

SEQ ID NO: 512368 - DNA, 15 bp, Homo sapiens
gctgggaggccgcgg

SEQ ID NO: 512369 - DNA, 15 bp, Homo sapiens
ggctgggaggccgcg

SEQ ID NO: 512370 - DNA, 15 bp, Homo sapiens
gggctgggaggccgc

SEQ ID NO: 512371 - DNA, 15 bp, Homo sapiens
ggggctgggaggccg

SEQ ID NO: 512372 - DNA, 15 bp, Homo sapiens
cggggctgggaggcc

SEQ ID NO: 512373 - DNA, 15 bp, Homo sapiens
gcggggctgggaggc

SEQ ID NO: 512374 - DNA, 15 bp, Homo sapiens
cgcggggctgggagg

SEQ ID NO: 512375 - DNA, 15 bp, Homo sapiens
gcgcggggctgggag

SEQ ID NO: 512376 - DNA, 15 bp, Homo sapiens
ggcgcggggctggga

SEQ ID NO: 512377 - DNA, 15 bp, Homo sapiens
aggcgcggggctggg

SEQ ID NO: 512378 - DNA, 15 bp, Homo sapiens
aaggcgcggggctgg

SEQ ID NO: 512379 - DNA, 15 bp, Homo sapiens
gaaggcgcggggctg

SEQ ID NO: 512380 - DNA, 15 bp, Homo sapiens
ggaaggcgcggggct

SEQ ID NO: 512381 - DNA, 15 bp, Homo sapiens
gggaaggcgcggggc

SEQ ID NO: 512382 - DNA, 15 bp, Homo sapiens
tgggaaggcgcgggg

SEQ ID NO: 512383 - DNA, 15 bp, Homo sapiens
gtgggaaggcgcggg

SEQ ID NO: 512384 - DNA, 15 bp, Homo sapiens
agtgggaaggcgcgg

SEQ ID NO: 512385 - DNA, 15 bp, Homo sapiens
cagtgggaaggcgcg

SEQ ID NO: 512386 - DNA, 15 bp, Homo sapiens
gcagtgggaaggcgc

SEQ ID NO: 512387 - DNA, 15 bp, Homo sapiens
ggcagtgggaaggcg

SEQ ID NO: 512388 - DNA, 15 bp, Homo sapiens
aggcagtgggaaggc

SEQ ID NO: 512389 - DNA, 15 bp, Homo sapiens
gaggcagtgggaagg

SEQ ID NO: 512390 - DNA, 15 bp, Homo sapiens
ggaggcagtgggaag

SEQ ID NO: 512391 - DNA, 15 bp, Homo sapiens
cggaggcagtgggaa

SEQ ID NO: 512392 - DNA, 15 bp, Homo sapiens
ccggaggcagtggga

SEQ ID NO: 512393 - DNA, 15 bp, Homo sapiens
tccggaggcagtggg

SEQ ID NO: 512394 - DNA, 15 bp, Homo sapiens
gtccggaggcagtgg

SEQ ID NO: 512395 - DNA, 15 bp, Homo sapiens
ggtccggaggcagtg

SEQ ID NO: 512396 - DNA, 15 bp, Homo sapiens
tggtccggaggcagt

SEQ ID NO: 512397 - DNA, 15 bp, Homo sapiens
gtggtccggaggcag

SEQ ID NO: 512398 - DNA, 15 bp, Homo sapiens
tgtggtccggaggca

SEQ ID NO: 512399 - DNA, 15 bp, Homo sapiens
atgtggtccggaggc

SEQ ID NO: 512400 - DNA, 15 bp, Homo sapiens
gatgtggtccggagg

SEQ ID NO: 512401 - DNA, 15 bp, Homo sapiens
cgatgtggtccggag

SEQ ID NO: 512402 - DNA, 15 bp, Homo sapiens
ccgatgtggtccgga

SEQ ID NO: 512403 - DNA, 15 bp, Homo sapiens
cccgatgtggtccgg

SEQ ID NO: 512404 - DNA, 15 bp, Homo sapiens
gcccgatgtggtccg

SEQ ID NO: 512405 - DNA, 15 bp, Homo sapiens
agcccgatgtggtcc

SEQ ID NO: 512406 - DNA, 15 bp, Homo sapiens
aagcccgatgtggtc

SEQ ID NO: 512407 - DNA, 15 bp, Homo sapiens
gaagcccgatgtggt

SEQ ID NO: 512408 - DNA, 15 bp, Homo sapiens
cgaagcccgatgtgg

SEQ ID NO: 512409 - DNA, 15 bp, Homo sapiens
gcgaagcccgatgtg

SEQ ID NO: 512410 - DNA, 15 bp, Homo sapiens
agcgaagcccgatgt

SEQ ID NO: 512411 - DNA, 15 bp, Homo sapiens
cagcgaagcccgatg

SEQ ID NO: 512412 - DNA, 15 bp, Homo sapiens
gcagcgaagcccgat

SEQ ID NO: 512413 - DNA, 15 bp, Homo sapiens
cgcagcgaagcccga

SEQ ID NO: 512414 - DNA, 15 bp, Homo sapiens
gcgcagcgaagcccg

SEQ ID NO: 512415 - DNA, 15 bp, Homo sapiens
agcgcagcgaagccc

SEQ ID NO: 512416 - DNA, 15 bp, Homo sapiens
cagcgcagcgaagcc

SEQ ID NO: 512417 - DNA, 15 bp, Homo sapiens
tcagcgcagcgaagc

SEQ ID NO: 512418 - DNA, 15 bp, Homo sapiens
ctcagcgcagcgaag

SEQ ID NO: 512419 - DNA, 15 bp, Homo sapiens
gctcagcgcagcgaa

SEQ ID NO: 512420 - DNA, 15 bp, Homo sapiens
ggctcagcgcagcga

SEQ ID NO: 512421 - DNA, 15 bp, Homo sapiens
gggctcagcgcagcg

SEQ ID NO: 512422 - DNA, 15 bp, Homo sapiens
ggggctcagcgcagc

SEQ ID NO: 512423 - DNA, 15 bp, Homo sapiens
tggggctcagcgcag

SEQ ID NO: 512424 - DNA, 15 bp, Homo sapiens
ctggggctcagcgca

SEQ ID NO: 512425 - DNA, 15 bp, Homo sapiens
actggggctcagcgc

SEQ ID NO: 512426 - DNA, 15 bp, Homo sapiens
gactggggctcagcg

SEQ ID NO: 512427 - DNA, 15 bp, Homo sapiens
cgactggggctcagc

SEQ ID NO: 512428 - DNA, 15 bp, Homo sapiens
gcgactggggctcag

SEQ ID NO: 512429 - DNA, 15 bp, Homo sapiens
ggcgactggggctca

SEQ ID NO: 512430 - DNA, 15 bp, Homo sapiens
tggcgactggggctc

SEQ ID NO: 512431 - DNA, 15 bp, Homo sapiens
ttggcgactggggct

SEQ ID NO: 512432 - DNA, 15 bp, Homo sapiens
gttggcgactggggc

SEQ ID NO: 512433 - DNA, 15 bp, Homo sapiens
tgttggcgactgggg

SEQ ID NO: 512434 - DNA, 15 bp, Homo sapiens
ttgttggcgactggg

SEQ ID NO: 512435 - DNA, 15 bp, Homo sapiens
tttgttggcgactgg

SEQ ID NO: 512436 - DNA, 15 bp, Homo sapiens
atttgttggcgactg

SEQ ID NO: 512437 - DNA, 15 bp, Homo sapiens
catttgttggcgact

SEQ ID NO: 512438 - DNA, 15 bp, Homo sapiens
tcatttgttggcgac

SEQ ID NO: 512439 - DNA, 15 bp, Homo sapiens
ctcatttgttggcga

SEQ ID NO: 512440 - DNA, 15 bp, Homo sapiens
gctcatttgttggcg

SEQ ID NO: 512441 - DNA, 15 bp, Homo sapiens
cgctcatttgttggc

SEQ ID NO: 512442 - DNA, 15 bp, Homo sapiens
tcgctcatttgttgg

SEQ ID NO: 512443 - DNA, 15 bp, Homo sapiens
ctcgctcatttgttg

SEQ ID NO: 512444 - DNA, 15 bp, Homo sapiens
gctcgctcatttgtt

SEQ ID NO: 512445 - DNA, 15 bp, Homo sapiens
cgctcgctcatttgt

SEQ ID NO: 512446 - DNA, 15 bp, Homo sapiens
tcgctcgctcatttg

SEQ ID NO: 512447 - DNA, 15 bp, Homo sapiens
ctcgctcgctcattt

SEQ ID NO: 512448 - DNA, 15 bp, Homo sapiens
actcgctcgctcatt

SEQ ID NO: 512449 - DNA, 15 bp, Homo sapiens
gactcgctcgctcat

SEQ ID NO: 512450 - DNA, 15 bp, Homo sapiens
agactcgctcgctca

SEQ ID NO: 512451 - DNA, 15 bp, Homo sapiens
cagactcgctcgctc

SEQ ID NO: 512452 - DNA, 15 bp, Homo sapiens
ccagactcgctcgct

SEQ ID NO: 512453 - DNA, 15 bp, Homo sapiens
cccagactcgctcgc

SEQ ID NO: 512454 - DNA, 15 bp, Homo sapiens
ccccagactcgctcg

SEQ ID NO: 512455 - DNA, 15 bp, Homo sapiens
tccccagactcgctc

SEQ ID NO: 512456 - DNA, 15 bp, Homo sapiens
gtccccagactcgct

SEQ ID NO: 512457 - DNA, 15 bp, Homo sapiens
cgtccccagactcgc

SEQ ID NO: 512458 - DNA, 15 bp, Homo sapiens
tcgtccccagactcg

SEQ ID NO: 512459 - DNA, 15 bp, Homo sapiens
ttcgtccccagactc

SEQ ID NO: 512460 - DNA, 15 bp, Homo sapiens
gttcgtccccagact

SEQ ID NO: 512461 - DNA, 15 bp, Homo sapiens
ggttcgtccccagac

SEQ ID NO: 512462 - DNA, 15 bp, Homo sapiens
gggttcgtccccaga

SEQ ID NO: 512463 - DNA, 15 bp, Homo sapiens
agggttcgtccccag

SEQ ID NO: 512464 - DNA, 15 bp, Homo sapiens
cagggttcgtcccca

SEQ ID NO: 512465 - DNA, 15 bp, Homo sapiens
ccagggttcgtcccc

SEQ ID NO: 512466 - DNA, 15 bp, Homo sapiens
cccagggttcgtccc

SEQ ID NO: 512467 - DNA, 15 bp, Homo sapiens
ccccagggttcgtcc

SEQ ID NO: 512468 - DNA, 15 bp, Homo sapiens
gccccagggttcgtc

SEQ ID NO: 512469 - DNA, 15 bp, Homo sapiens
ggccccagggttcgt

SEQ ID NO: 512470 - DNA, 15 bp, Homo sapiens
cggccccagggttcg

SEQ ID NO: 512471 - DNA, 15 bp, Homo sapiens
gcggccccagggttc

SEQ ID NO: 512472 - DNA, 15 bp, Homo sapiens
tgcggccccagggtt

SEQ ID NO: 512473 - DNA, 15 bp, Homo sapiens
gtgcggccccagggt

SEQ ID NO: 512474 - DNA, 15 bp, Homo sapiens
agtgcggccccaggg

SEQ ID NO: 512475 - DNA, 15 bp, Homo sapiens
cagtgcggccccagg

SEQ ID NO: 512476 - DNA, 15 bp, Homo sapiens
acagtgcggccccag

SEQ ID NO: 512477 - DNA, 15 bp, Homo sapiens
aacagtgcggcccca

SEQ ID NO: 512478 - DNA, 15 bp, Homo sapiens
caacagtgcggcccc

SEQ ID NO: 512479 - DNA, 15 bp, Homo sapiens
ccaacagtgcggccc

SEQ ID NO: 512480 - DNA, 15 bp, Homo sapiens
accaacagtgcggcc

SEQ ID NO: 512481 - DNA, 15 bp, Homo sapiens
gaccaacagtgcggc

SEQ ID NO: 512482 - DNA, 15 bp, Homo sapiens
agaccaacagtgcgg

SEQ ID NO: 512483 - DNA, 15 bp, Homo sapiens
tagaccaacagtgcg

SEQ ID NO: 512484 - DNA, 15 bp, Homo sapiens
gtagaccaacagtgc

SEQ ID NO: 512485 - DNA, 15 bp, Homo sapiens
cgtagaccaacagtg

SEQ ID NO: 512486 - DNA, 15 bp, Homo sapiens
acgtagaccaacagt

SEQ ID NO: 512487 - DNA, 15 bp, Homo sapiens
cacgtagaccaacag

SEQ ID NO: 512488 - DNA, 15 bp, Homo sapiens
acacgtagaccaaca

SEQ ID NO: 512489 - DNA, 15 bp, Homo sapiens
gacacgtagaccaac

SEQ ID NO: 512490 - DNA, 15 bp, Homo sapiens
agacacgtagaccaa

SEQ ID NO: 512491 - DNA, 15 bp, Homo sapiens
cagacacgtagacca

SEQ ID NO: 512492 - DNA, 15 bp, Homo sapiens
acagacacgtagacc

SEQ ID NO: 512493 - DNA, 15 bp, Homo sapiens
gacagacacgtagac

SEQ ID NO: 512494 - DNA, 15 bp, Homo sapiens
tgacagacacgtaga

SEQ ID NO: 512495 - DNA, 15 bp, Homo sapiens
ctgacagacacgtag

SEQ ID NO: 512496 - DNA, 15 bp, Homo sapiens
actgacagacacgta

SEQ ID NO: 512497 - DNA, 15 bp, Homo sapiens
gactgacagacacgt

SEQ ID NO: 512498 - DNA, 15 bp, Homo sapiens
agactgacagacacg

SEQ ID NO: 512499 - DNA, 15 bp, Homo sapiens
cagactgacagacac

SEQ ID NO: 512500 - DNA, 15 bp, Homo sapiens
acagactgacagaca

SEQ ID NO: 512501 - DNA, 15 bp, Homo sapiens
gacagactgacagac

SEQ ID NO: 512502 - DNA, 15 bp, Homo sapiens
agacagactgacaga

SEQ ID NO: 512503 - DNA, 15 bp, Homo sapiens
cagacagactgacag

SEQ ID NO: 512504 - DNA, 15 bp, Homo sapiens
gcagacagactgaca

SEQ ID NO: 512505 - DNA, 15 bp, Homo sapiens
ggcagacagactgac

SEQ ID NO: 512506 - DNA, 15 bp, Homo sapiens
aggcagacagactga

SEQ ID NO: 512507 - DNA, 15 bp, Homo sapiens
gaggcagacagactg

SEQ ID NO: 512508 - DNA, 15 bp, Homo sapiens
agaggcagacagact

SEQ ID NO: 512509 - DNA, 15 bp, Homo sapiens
gagaggcagacagac

SEQ ID NO: 512510 - DNA, 15 bp, Homo sapiens
agagaggcagacaga

SEQ ID NO: 512511 - DNA, 15 bp, Homo sapiens
aagagaggcagacag

SEQ ID NO: 512512 - DNA, 15 bp, Homo sapiens
gaagagaggcagaca

SEQ ID NO: 512513 - DNA, 15 bp, Homo sapiens
agaagagaggcagac

SEQ ID NO: 512514 - DNA, 15 bp, Homo sapiens
cagaagagaggcaga

SEQ ID NO: 512515 - DNA, 15 bp, Homo sapiens
gcagaagagaggcag

SEQ ID NO: 512516 - DNA, 15 bp, Homo sapiens
ggcagaagagaggca

SEQ ID NO: 512517 - DNA, 15 bp, Homo sapiens
cggcagaagagaggc

SEQ ID NO: 512518 - DNA, 15 bp, Homo sapiens
gcggcagaagagagg

SEQ ID NO: 512519 - DNA, 15 bp, Homo sapiens
ggcggcagaagagag

SEQ ID NO: 512520 - DNA, 15 bp, Homo sapiens
cggcggcagaagaga

SEQ ID NO: 512521 - DNA, 15 bp, Homo sapiens
acggcggcagaagag

SEQ ID NO: 512522 - DNA, 15 bp, Homo sapiens
gacggcggcagaaga

SEQ ID NO: 512523 - DNA, 15 bp, Homo sapiens
tgacggcggcagaag

SEQ ID NO: 512524 - DNA, 15 bp, Homo sapiens
ctgacggcggcagaa

SEQ ID NO: 512525 - DNA, 15 bp, Homo sapiens
tctgacggcggcaga

SEQ ID NO: 512526 - DNA, 15 bp, Homo sapiens
ctctgacggcggcag

SEQ ID NO: 512527 - DNA, 15 bp, Homo sapiens
cctctgacggcggca

SEQ ID NO: 512528 - DNA, 15 bp, Homo sapiens
ccctctgacggcggc

SEQ ID NO: 512529 - DNA, 15 bp, Homo sapiens
tccctctgacggcgg

SEQ ID NO: 512530 - DNA, 15 bp, Homo sapiens
gtccctctgacggcg

SEQ ID NO: 512531 - DNA, 15 bp, Homo sapiens
tgtccctctgacggc

SEQ ID NO: 512532 - DNA, 15 bp, Homo sapiens
gtgtccctctgacgg

SEQ ID NO: 512533 - DNA, 15 bp, Homo sapiens
ggtgtccctctgacg

SEQ ID NO: 512534 - DNA, 15 bp, Homo sapiens
aggtgtccctctgac

SEQ ID NO: 512535 - DNA, 15 bp, Homo sapiens
gaggtgtccctctga

SEQ ID NO: 512536 - DNA, 15 bp, Homo sapiens
agaggtgtccctctg

SEQ ID NO: 512537 - DNA, 15 bp, Homo sapiens
cagaggtgtccctct

SEQ ID NO: 512538 - DNA, 15 bp, Homo sapiens
gcagaggtgtccctc

SEQ ID NO: 512539 - DNA, 15 bp, Homo sapiens
agcagaggtgtccct

SEQ ID NO: 512540 - DNA, 15 bp, Homo sapiens
gagcagaggtgtccc

SEQ ID NO: 512541 - DNA, 15 bp, Homo sapiens
ggagcagaggtgtcc

SEQ ID NO: 512542 - DNA, 15 bp, Homo sapiens
gggagcagaggtgtc

SEQ ID NO: 512543 - DNA, 15 bp, Homo sapiens
ggggagcagaggtgt

SEQ ID NO: 512544 - DNA, 15 bp, Homo sapiens
cggggagcagaggtg

SEQ ID NO: 512545 - DNA, 15 bp, Homo sapiens
gcggggagcagaggt

SEQ ID NO: 512546 - DNA, 15 bp, Homo sapiens
ggcggggagcagagg

SEQ ID NO: 512547 - DNA, 15 bp, Homo sapiens
gggcggggagcagag

SEQ ID NO: 512548 - DNA, 15 bp, Homo sapiens
ggggcggggagcaga

SEQ ID NO: 512549 - DNA, 15 bp, Homo sapiens
gggggcggggagcag

SEQ ID NO: 512550 - DNA, 15 bp, Homo sapiens
agggggcggggagca

SEQ ID NO: 512551 - DNA, 15 bp, Homo sapiens
aagggggcggggagc

SEQ ID NO: 512552 - DNA, 15 bp, Homo sapiens
aaagggggcggggag

SEQ ID NO: 512553 - DNA, 15 bp, Homo sapiens
gaaagggggcgggga

SEQ ID NO: 512554 - DNA, 15 bp, Homo sapiens
ggaaagggggcgggg

SEQ ID NO: 512555 - DNA, 15 bp, Homo sapiens
gggaaagggggcggg

SEQ ID NO: 512556 - DNA, 15 bp, Homo sapiens
ggggaaagggggcgg

SEQ ID NO: 512557 - DNA, 15 bp, Homo sapiens
gggggaaagggggcg

SEQ ID NO: 512558 - DNA, 15 bp, Homo sapiens
agggggaaagggggc

SEQ ID NO: 512559 - DNA, 15 bp, Homo sapiens
tagggggaaaggggg

SEQ ID NO: 512560 - DNA, 15 bp, Homo sapiens
gtagggggaaagggg

SEQ ID NO: 512561 - DNA, 15 bp, Homo sapiens
ggtagggggaaaggg

SEQ ID NO: 512562 - DNA, 15 bp, Homo sapiens
cggtagggggaaagg

SEQ ID NO: 512563 - DNA, 15 bp, Homo sapiens
ccggtagggggaaag

SEQ ID NO: 512564 - DNA, 15 bp, Homo sapiens
tccggtagggggaaa

SEQ ID NO: 512565 - DNA, 15 bp, Homo sapiens
ctccggtagggggaa

SEQ ID NO: 512566 - DNA, 15 bp, Homo sapiens
tctccggtaggggga

SEQ ID NO: 512567 - DNA, 15 bp, Homo sapiens
ctctccggtaggggg

SEQ ID NO: 512568 - DNA, 15 bp, Homo sapiens
tctctccggtagggg

SEQ ID NO: 512569 - DNA, 15 bp, Homo sapiens
ttctctccggtaggg

SEQ ID NO: 512570 - DNA, 15 bp, Homo sapiens
attctctccggtagg

SEQ ID NO: 512571 - DNA, 15 bp, Homo sapiens
gattctctccggtag

SEQ ID NO: 512572 - DNA, 15 bp, Homo sapiens
ggattctctccggta

SEQ ID NO: 512573 - DNA, 15 bp, Homo sapiens
cggattctctccggt

SEQ ID NO: 512574 - DNA, 15 bp, Homo sapiens
tcggattctctccgg

SEQ ID NO: 512575 - DNA, 15 bp, Homo sapiens
ctcggattctctccg

SEQ ID NO: 512576 - DNA, 15 bp, Homo sapiens
gctcggattctctcc

SEQ ID NO: 512577 - DNA, 15 bp, Homo sapiens
cgctcggattctctc

SEQ ID NO: 512578 - DNA, 15 bp, Homo sapiens
ccgctcggattctct

SEQ ID NO: 512579 - DNA, 15 bp, Homo sapiens
cccgctcggattctc

SEQ ID NO: 512580 - DNA, 15 bp, Homo sapiens
gcccgctcggattct

SEQ ID NO: 512581 - DNA, 15 bp, Homo sapiens
cgcccgctcggattc

SEQ ID NO: 512582 - DNA, 15 bp, Homo sapiens
ccgcccgctcggatt

SEQ ID NO: 512583 - DNA, 15 bp, Homo sapiens
tccgcccgctcggat

SEQ ID NO: 512584 - DNA, 15 bp, Homo sapiens
ctccgcccgctcgga

SEQ ID NO: 512585 - DNA, 15 bp, Homo sapiens
cctccgcccgctcgg

SEQ ID NO: 512586 - DNA, 15 bp, Homo sapiens
ccctccgcccgctcg

SEQ ID NO: 512587 - DNA, 15 bp, Homo sapiens
cccctccgcccgctc

SEQ ID NO: 512588 - DNA, 15 bp, Homo sapiens
ccccctccgcccgct

SEQ ID NO: 512589 - DNA, 15 bp, Homo sapiens
gccccctccgcccgc

SEQ ID NO: 512590 - DNA, 15 bp, Homo sapiens
cgccccctccgcccg

SEQ ID NO: 512591 - DNA, 15 bp, Homo sapiens
gcgccccctccgccc

SEQ ID NO: 512592 - DNA, 15 bp, Homo sapiens
agcgccccctccgcc

SEQ ID NO: 512593 - DNA, 15 bp, Homo sapiens
cagcgccccctccgc

SEQ ID NO: 512594 - DNA, 15 bp, Homo sapiens
tcagcgccccctccg

SEQ ID NO: 512595 - DNA, 15 bp, Homo sapiens
ctcagcgccccctcc

SEQ ID NO: 512596 - DNA, 15 bp, Homo sapiens
actcagcgccccctc

SEQ ID NO: 512597 - DNA, 15 bp, Homo sapiens
tactcagcgccccct

SEQ ID NO: 512598 - DNA, 15 bp, Homo sapiens
ctactcagcgccccc

SEQ ID NO: 512599 - DNA, 15 bp, Homo sapiens
cctactcagcgcccc

SEQ ID NO: 512600 - DNA, 15 bp, Homo sapiens
ccctactcagcgccc

SEQ ID NO: 512601 - DNA, 15 bp, Homo sapiens
cccctactcagcgcc

SEQ ID NO: 512602 - DNA, 15 bp, Homo sapiens
tcccctactcagcgc

SEQ ID NO: 512603 - DNA, 15 bp, Homo sapiens
atcccctactcagcg

SEQ ID NO: 512604 - DNA, 15 bp, Homo sapiens
gatcccctactcagc

SEQ ID NO: 512605 - DNA, 15 bp, Homo sapiens
cgatcccctactcag

SEQ ID NO: 512606 - DNA, 15 bp, Homo sapiens
tcgatcccctactca

SEQ ID NO: 512607 - DNA, 15 bp, Homo sapiens
gtcgatcccctactc

SEQ ID NO: 512608 - DNA, 15 bp, Homo sapiens
agtcgatcccctact

SEQ ID NO: 512609 - DNA, 15 bp, Homo sapiens
cagtcgatcccctac

SEQ ID NO: 512610 - DNA, 15 bp, Homo sapiens
gcagtcgatccccta

SEQ ID NO: 512611 - DNA, 15 bp, Homo sapiens
ggcagtcgatcccct

SEQ ID NO: 512612 - DNA, 15 bp, Homo sapiens
aggcagtcgatcccc

SEQ ID NO: 512613 - DNA, 15 bp, Homo sapiens
gaggcagtcgatccc

SEQ ID NO: 512614 - DNA, 15 bp, Homo sapiens
ggaggcagtcgatcc

SEQ ID NO: 512615 - DNA, 15 bp, Homo sapiens
gggaggcagtcgatc

SEQ ID NO: 512616 - DNA, 15 bp, Homo sapiens
cgggaggcagtcgat

SEQ ID NO: 512617 - DNA, 15 bp, Homo sapiens
ccgggaggcagtcga

SEQ ID NO: 512618 - DNA, 15 bp, Homo sapiens
tccgggaggcagtcg

SEQ ID NO: 512619 - DNA, 15 bp, Homo sapiens
ctccgggaggcagtc

SEQ ID NO: 512620 - DNA, 15 bp, Homo sapiens
cctccgggaggcagt

SEQ ID NO: 512621 - DNA, 15 bp, Homo sapiens
gcctccgggaggcag

SEQ ID NO: 512622 - DNA, 15 bp, Homo sapiens
agcctccgggaggca

SEQ ID NO: 512623 - DNA, 15 bp, Homo sapiens
cagcctccgggaggc

SEQ ID NO: 512624 - DNA, 15 bp, Homo sapiens
acagcctccgggagg

SEQ ID NO: 512625 - DNA, 15 bp, Homo sapiens
gacagcctccgggag

SEQ ID NO: 512626 - DNA, 15 bp, Homo sapiens
ggacagcctccggga

SEQ ID NO: 512627 - DNA, 15 bp, Homo sapiens
gggacagcctccggg

SEQ ID NO: 512628 - DNA, 15 bp, Homo sapiens
cgggacagcctccgg

SEQ ID NO: 512629 - DNA, 15 bp, Homo sapiens
ccgggacagcctccg

SEQ ID NO: 512630 - DNA, 15 bp, Homo sapiens
tccgggacagcctcc

SEQ ID NO: 512631 - DNA, 15 bp, Homo sapiens
atccgggacagcctc

SEQ ID NO: 512632 - DNA, 15 bp, Homo sapiens
gatccgggacagcct

SEQ ID NO: 512633 - DNA, 15 bp, Homo sapiens
ggatccgggacagcc

SEQ ID NO: 512634 - DNA, 15 bp, Homo sapiens
gggatccgggacagc

SEQ ID NO: 512635 - DNA, 15 bp, Homo sapiens
ggggatccgggacag

SEQ ID NO: 512636 - DNA, 15 bp, Homo sapiens
cggggatccgggaca

SEQ ID NO: 512637 - DNA, 15 bp, Homo sapiens
tcggggatccgggac

SEQ ID NO: 512638 - DNA, 15 bp, Homo sapiens
ctcggggatccggga

SEQ ID NO: 512639 - DNA, 15 bp, Homo sapiens
gctcggggatccggg

SEQ ID NO: 512640 - DNA, 15 bp, Homo sapiens
ggctcggggatccgg

SEQ ID NO: 512641 - DNA, 15 bp, Homo sapiens
tggctcggggatccg

SEQ ID NO: 512642 - DNA, 15 bp, Homo sapiens
gtggctcggggatcc

SEQ ID NO: 512643 - DNA, 15 bp, Homo sapiens
tgtggctcggggatc

SEQ ID NO: 512644 - DNA, 15 bp, Homo sapiens
ttgtggctcggggat

SEQ ID NO: 512645 - DNA, 15 bp, Homo sapiens
gttgtggctcgggga

SEQ ID NO: 512646 - DNA, 15 bp, Homo sapiens
ggttgtggctcgggg

SEQ ID NO: 512647 - DNA, 15 bp, Homo sapiens
gggttgtggctcggg

SEQ ID NO: 512648 - DNA, 15 bp, Homo sapiens
cgggttgtggctcgg

SEQ ID NO: 512649 - DNA, 15 bp, Homo sapiens
gcgggttgtggctcg

SEQ ID NO: 512650 - DNA, 15 bp, Homo sapiens
ggcgggttgtggctc

SEQ ID NO: 512651 - DNA, 15 bp, Homo sapiens
gggcgggttgtggct

SEQ ID NO: 512652 - DNA, 15 bp, Homo sapiens
ggggcgggttgtggc

SEQ ID NO: 512653 - DNA, 15 bp, Homo sapiens
gggggcgggttgtgg

SEQ ID NO: 512654 - DNA, 15 bp, Homo sapiens
cgggggcgggttgtg

SEQ ID NO: 512655 - DNA, 15 bp, Homo sapiens
gcgggggcgggttgt

SEQ ID NO: 512656 - DNA, 15 bp, Homo sapiens
tgcgggggcgggttg

SEQ ID NO: 512657 - DNA, 15 bp, Homo sapiens
ctgcgggggcgggtt

SEQ ID NO: 512658 - DNA, 15 bp, Homo sapiens
gctgcgggggcgggt

SEQ ID NO: 512659 - DNA, 15 bp, Homo sapiens
agctgcgggggcggg

SEQ ID NO: 512660 - DNA, 15 bp, Homo sapiens
gagctgcgggggcgg

SEQ ID NO: 512661 - DNA, 15 bp, Homo sapiens
tgagctgcgggggcg

SEQ ID NO: 512662 - DNA, 15 bp, Homo sapiens
ctgagctgcgggggc

SEQ ID NO: 512663 - DNA, 15 bp, Homo sapiens
cctgagctgcggggg

SEQ ID NO: 512664 - DNA, 15 bp, Homo sapiens
ccctgagctgcgggg

SEQ ID NO: 512665 - DNA, 15 bp, Homo sapiens
cccctgagctgcggg

SEQ ID NO: 512666 - DNA, 15 bp, Homo sapiens
acccctgagctgcgg

SEQ ID NO: 512667 - DNA, 15 bp, Homo sapiens
aacccctgagctgcg

SEQ ID NO: 512668 - DNA, 15 bp, Homo sapiens
aaacccctgagctgc

SEQ ID NO: 512669 - DNA, 15 bp, Homo sapiens
aaaacccctgagctg

SEQ ID NO: 512670 - DNA, 15 bp, Homo sapiens
aaaaacccctgagct

SEQ ID NO: 512671 - DNA, 15 bp, Homo sapiens
gaaaaacccctgagc

SEQ ID NO: 512672 - DNA, 15 bp, Homo sapiens
tgaaaaacccctgag

SEQ ID NO: 512673 - DNA, 15 bp, Homo sapiens
ctgaaaaacccctga

SEQ ID NO: 512674 - DNA, 15 bp, Homo sapiens
actgaaaaacccctg

SEQ ID NO: 512675 - DNA, 15 bp, Homo sapiens
cactgaaaaacccct

SEQ ID NO: 512676 - DNA, 15 bp, Homo sapiens
ccactgaaaaacccc

SEQ ID NO: 512677 - DNA, 15 bp, Homo sapiens
cccactgaaaaaccc

SEQ ID NO: 512678 - DNA, 15 bp, Homo sapiens
gcccactgaaaaacc

SEQ ID NO: 512679 - DNA, 15 bp, Homo sapiens
ggcccactgaaaaac

SEQ ID NO: 512680 - DNA, 15 bp, Homo sapiens
tggcccactgaaaaa

SEQ ID NO: 512681 - DNA, 15 bp, Homo sapiens
gtggcccactgaaaa

SEQ ID NO: 512682 - DNA, 15 bp, Homo sapiens
ggtggcccactgaaa

SEQ ID NO: 512683 - DNA, 15 bp, Homo sapiens
gggtggcccactgaa

SEQ ID NO: 512684 - DNA, 15 bp, Homo sapiens
ggggtggcccactga

SEQ ID NO: 512685 - DNA, 15 bp, Homo sapiens
gggggtggcccactg

SEQ ID NO: 512686 - DNA, 15 bp, Homo sapiens
cgggggtggcccact

SEQ ID NO: 512687 - DNA, 15 bp, Homo sapiens
gcgggggtggcccac

SEQ ID NO: 512688 - DNA, 15 bp, Homo sapiens
agcgggggtggccca

SEQ ID NO: 512689 - DNA, 15 bp, Homo sapiens
tagcgggggtggccc

SEQ ID NO: 512690 - DNA, 15 bp, Homo sapiens
ttagcgggggtggcc

SEQ ID NO: 512691 - DNA, 15 bp, Homo sapiens
gttagcgggggtggc

SEQ ID NO: 512692 - DNA, 15 bp, Homo sapiens
tgttagcgggggtgg

SEQ ID NO: 512693 - DNA, 15 bp, Homo sapiens
gtgttagcgggggtg

SEQ ID NO: 512694 - DNA, 15 bp, Homo sapiens
cgtgttagcgggggt

SEQ ID NO: 512695 - DNA, 15 bp, Homo sapiens
gcgtgttagcggggg

SEQ ID NO: 512696 - DNA, 15 bp, Homo sapiens
ggcgtgttagcgggg

SEQ ID NO: 512697 - DNA, 15 bp, Homo sapiens
aggcgtgttagcggg

SEQ ID NO: 512698 - DNA, 15 bp, Homo sapiens
gaggcgtgttagcgg

SEQ ID NO: 512699 - DNA, 15 bp, Homo sapiens
ggaggcgtgttagcg

SEQ ID NO: 512700 - DNA, 15 bp, Homo sapiens
gggaggcgtgttagc

SEQ ID NO: 512701 - DNA, 15 bp, Homo sapiens
ggggaggcgtgttag

SEQ ID NO: 512702 - DNA, 15 bp, Homo sapiens
gggggaggcgtgtta

SEQ ID NO: 512703 - DNA, 15 bp, Homo sapiens
tgggggaggcgtgtt

SEQ ID NO: 512704 - DNA, 15 bp, Homo sapiens
ttgggggaggcgtgt

SEQ ID NO: 512705 - DNA, 15 bp, Homo sapiens
cttgggggaggcgtg

SEQ ID NO: 512706 - DNA, 15 bp, Homo sapiens
ccttgggggaggcgt

SEQ ID NO: 512707 - DNA, 15 bp, Homo sapiens
accttgggggaggcg

SEQ ID NO: 512708 - DNA, 15 bp, Homo sapiens
gaccttgggggaggc

SEQ ID NO: 512709 - DNA, 15 bp, Homo sapiens
agaccttgggggagg

SEQ ID NO: 512710 - DNA, 15 bp, Homo sapiens
aagaccttgggggag

SEQ ID NO: 512711 - DNA, 15 bp, Homo sapiens
gaagaccttggggga

SEQ ID NO: 512712 - DNA, 15 bp, Homo sapiens
ggaagaccttggggg

SEQ ID NO: 512713 - DNA, 15 bp, Homo sapiens
gggaagaccttgggg

SEQ ID NO: 512714 - DNA, 15 bp, Homo sapiens
ggggaagaccttggg

SEQ ID NO: 512715 - DNA, 15 bp, Homo sapiens
gggggaagaccttgg

SEQ ID NO: 512716 - DNA, 15 bp, Homo sapiens
ggggggaagaccttg

SEQ ID NO: 512717 - DNA, 15 bp, Homo sapiens
gggggggaagacctt

SEQ ID NO: 512718 - DNA, 15 bp, Homo sapiens
ggggggggaagacct

SEQ ID NO: 512719 - DNA, 15 bp, Homo sapiens
gggggggggaagacc

SEQ ID NO: 512720 - DNA, 15 bp, Homo sapiens
ggggggggggaagac

SEQ ID NO: 512721 - DNA, 15 bp, Homo sapiens
gggggggggggaaga

SEQ ID NO: 512722 - DNA, 15 bp, Homo sapiens
ggggggggggggaag

SEQ ID NO: 512723 - DNA, 15 bp, Homo sapiens
gggggggggggggaa

SEQ ID NO: 512724 - DNA, 15 bp, Homo sapiens
gggggggggggggga

SEQ ID NO: 512725 - DNA, 15 bp, Homo sapiens
tgggggggggggggg

SEQ ID NO: 512726 - DNA, 15 bp, Homo sapiens
gtggggggggggggg

SEQ ID NO: 512727 - DNA, 15 bp, Homo sapiens
ggtgggggggggggg

SEQ ID NO: 512728 - DNA, 15 bp, Homo sapiens
gggtggggggggggg

SEQ ID NO: 512729 - DNA, 15 bp, Homo sapiens
ggggtgggggggggg

SEQ ID NO: 512730 - DNA, 15 bp, Homo sapiens
gggggtggggggggg

SEQ ID NO: 512731 - DNA, 15 bp, Homo sapiens
cgggggtgggggggg

SEQ ID NO: 512732 - DNA, 15 bp, Homo sapiens
ccgggggtggggggg

SEQ ID NO: 512733 - DNA, 15 bp, Homo sapiens
gccgggggtgggggg

SEQ ID NO: 512734 - DNA, 15 bp, Homo sapiens
ggccgggggtggggg

SEQ ID NO: 512735 - DNA, 15 bp, Homo sapiens
cggccgggggtgggg

SEQ ID NO: 512736 - DNA, 15 bp, Homo sapiens
tcggccgggggtggg

SEQ ID NO: 512737 - DNA, 15 bp, Homo sapiens
ctcggccgggggtgg

SEQ ID NO: 512738 - DNA, 15 bp, Homo sapiens
gctcggccgggggtg

SEQ ID NO: 512739 - DNA, 15 bp, Homo sapiens
tgctcggccgggggt

SEQ ID NO: 512740 - DNA, 15 bp, Homo sapiens
ttgctcggccggggg

SEQ ID NO: 512741 - DNA, 15 bp, Homo sapiens
tttgctcggccgggg

SEQ ID NO: 512742 - DNA, 15 bp, Homo sapiens
gtttgctcggccggg

SEQ ID NO: 512743 - DNA, 15 bp, Homo sapiens
tgtttgctcggccgg

SEQ ID NO: 512744 - DNA, 15 bp, Homo sapiens
gtgtttgctcggccg

SEQ ID NO: 512745 - DNA, 15 bp, Homo sapiens
tgtgtttgctcggcc

SEQ ID NO: 512746 - DNA, 15 bp, Homo sapiens
ctgtgtttgctcggc

SEQ ID NO: 512747 - DNA, 15 bp, Homo sapiens
gctgtgtttgctcgg

SEQ ID NO: 512748 - DNA, 15 bp, Homo sapiens
tgctgtgtttgctcg

SEQ ID NO: 512749 - DNA, 15 bp, Homo sapiens
gtgctgtgtttgctc

SEQ ID NO: 512750 - DNA, 15 bp, Homo sapiens
agtgctgtgtttgct

SEQ ID NO: 512751 - DNA, 15 bp, Homo sapiens
cagtgctgtgtttgc

SEQ ID NO: 512752 - DNA, 15 bp, Homo sapiens
ccagtgctgtgtttg

SEQ ID NO: 512753 - DNA, 15 bp, Homo sapiens
gccagtgctgtgttt

SEQ ID NO: 512754 - DNA, 15 bp, Homo sapiens
ggccagtgctgtgtt

SEQ ID NO: 512755 - DNA, 15 bp, Homo sapiens
gggccagtgctgtgt

SEQ ID NO: 512756 - DNA, 15 bp, Homo sapiens
ggggccagtgctgtg

SEQ ID NO: 512757 - DNA, 15 bp, Homo sapiens
gggggccagtgctgt

SEQ ID NO: 512758 - DNA, 15 bp, Homo sapiens
tgggggccagtgctg

SEQ ID NO: 512759 - DNA, 15 bp, Homo sapiens
ctgggggccagtgct

SEQ ID NO: 512760 - DNA, 15 bp, Homo sapiens
tctgggggccagtgc

SEQ ID NO: 512761 - DNA, 15 bp, Homo sapiens
ctctgggggccagtg

SEQ ID NO: 512762 - DNA, 15 bp, Homo sapiens
gctctgggggccagt

SEQ ID NO: 512763 - DNA, 15 bp, Homo sapiens
agctctgggggccag

SEQ ID NO: 512764 - DNA, 15 bp, Homo sapiens
cagctctgggggcca

SEQ ID NO: 512765 - DNA, 15 bp, Homo sapiens
ccagctctgggggcc

SEQ ID NO: 512766 - DNA, 15 bp, Homo sapiens
cccagctctgggggc

SEQ ID NO: 512767 - DNA, 15 bp, Homo sapiens
tcccagctctggggg

SEQ ID NO: 512768 - DNA, 15 bp, Homo sapiens
ctcccagctctgggg

SEQ ID NO: 512769 - DNA, 15 bp, Homo sapiens
cctcccagctctggg

SEQ ID NO: 512770 - DNA, 15 bp, Homo sapiens
tcctcccagctctgg

SEQ ID NO: 512771 - DNA, 15 bp, Homo sapiens
atcctcccagctctg

SEQ ID NO: 512772 - DNA, 15 bp, Homo sapiens
catcctcccagctct

SEQ ID NO: 512773 - DNA, 15 bp, Homo sapiens
ccatcctcccagctc

SEQ ID NO: 512774 - DNA, 15 bp, Homo sapiens
cccatcctcccagct

SEQ ID NO: 512775 - DNA, 15 bp, Homo sapiens
tcccatcctcccagc

SEQ ID NO: 512776 - DNA, 15 bp, Homo sapiens
ttcccatcctcccag

SEQ ID NO: 512777 - DNA, 15 bp, Homo sapiens
cttcccatcctccca

SEQ ID NO: 512778 - DNA, 15 bp, Homo sapiens
ccttcccatcctccc

SEQ ID NO: 512779 - DNA, 15 bp, Homo sapiens
cccttcccatcctcc

SEQ ID NO: 512780 - DNA, 15 bp, Homo sapiens
ccccttcccatcctc

SEQ ID NO: 512781 - DNA, 15 bp, Homo sapiens
accccttcccatcct

SEQ ID NO: 512782 - DNA, 15 bp, Homo sapiens
gaccccttcccatcc

SEQ ID NO: 512783 - DNA, 15 bp, Homo sapiens
agaccccttcccatc

SEQ ID NO: 512784 - DNA, 15 bp, Homo sapiens
gagaccccttcccat

SEQ ID NO: 512785 - DNA, 15 bp, Homo sapiens
tgagaccccttccca

SEQ ID NO: 512786 - DNA, 15 bp, Homo sapiens
gtgagaccccttccc

SEQ ID NO: 512787 - DNA, 15 bp, Homo sapiens
cgtgagaccccttcc

SEQ ID NO: 512788 - DNA, 15 bp, Homo sapiens
ccgtgagaccccttc

SEQ ID NO: 512789 - DNA, 15 bp, Homo sapiens
cccgtgagacccctt

SEQ ID NO: 512790 - DNA, 15 bp, Homo sapiens
tcccgtgagacccct

SEQ ID NO: 512791 - DNA, 15 bp, Homo sapiens
ctcccgtgagacccc

SEQ ID NO: 512792 - DNA, 15 bp, Homo sapiens
cctcccgtgagaccc

SEQ ID NO: 512793 - DNA, 15 bp, Homo sapiens
ccctcccgtgagacc

SEQ ID NO: 512794 - DNA, 15 bp, Homo sapiens
accctcccgtgagac

SEQ ID NO: 512795 - DNA, 15 bp, Homo sapiens
gaccctcccgtgaga

SEQ ID NO: 512796 - DNA, 15 bp, Homo sapiens
ggaccctcccgtgag

SEQ ID NO: 512797 - DNA, 15 bp, Homo sapiens
cggaccctcccgtga

SEQ ID NO: 512798 - DNA, 15 bp, Homo sapiens
acggaccctcccgtg

SEQ ID NO: 512799 - DNA, 15 bp, Homo sapiens
gacggaccctcccgt

SEQ ID NO: 512800 - DNA, 15 bp, Homo sapiens
tgacggaccctcccg

SEQ ID NO: 512801 - DNA, 15 bp, Homo sapiens
gtgacggaccctccc

SEQ ID NO: 512802 - DNA, 15 bp, Homo sapiens
agtgacggaccctcc

SEQ ID NO: 512803 - DNA, 15 bp, Homo sapiens
cagtgacggaccctc

SEQ ID NO: 512804 - DNA, 15 bp, Homo sapiens
tcagtgacggaccct

SEQ ID NO: 512805 - DNA, 15 bp, Homo sapiens
ttcagtgacggaccc

SEQ ID NO: 512806 - DNA, 15 bp, Homo sapiens
cttcagtgacggacc

SEQ ID NO: 512807 - DNA, 15 bp, Homo sapiens
acttcagtgacggac

SEQ ID NO: 512808 - DNA, 15 bp, Homo sapiens
aacttcagtgacgga

SEQ ID NO: 512809 - DNA, 15 bp, Homo sapiens
caacttcagtgacgg

SEQ ID NO: 512810 - DNA, 15 bp, Homo sapiens
gcaacttcagtgacg

SEQ ID NO: 512811 - DNA, 15 bp, Homo sapiens
ggcaacttcagtgac

SEQ ID NO: 512812 - DNA, 15 bp, Homo sapiens
gggcaacttcagtga

SEQ ID NO: 512813 - DNA, 15 bp, Homo sapiens
ggggcaacttcagtg

SEQ ID NO: 512814 - DNA, 15 bp, Homo sapiens
tggggcaacttcagt

SEQ ID NO: 512815 - DNA, 15 bp, Homo sapiens
gtggggcaacttcag

SEQ ID NO: 512816 - DNA, 15 bp, Homo sapiens
ggtggggcaacttca

SEQ ID NO: 512817 - DNA, 15 bp, Homo sapiens
aggtggggcaacttc

SEQ ID NO: 512818 - DNA, 15 bp, Homo sapiens
gaggtggggcaactt

SEQ ID NO: 512819 - DNA, 15 bp, Homo sapiens
cgaggtggggcaact

SEQ ID NO: 512820 - DNA, 15 bp, Homo sapiens
tcgaggtggggcaac

SEQ ID NO: 512821 - DNA, 15 bp, Homo sapiens
ttcgaggtggggcaa

SEQ ID NO: 512822 - DNA, 15 bp, Homo sapiens
gttcgaggtggggca

SEQ ID NO: 512823 - DNA, 15 bp, Homo sapiens
tgttcgaggtggggc

SEQ ID NO: 512824 - DNA, 15 bp, Homo sapiens
ttgttcgaggtgggg

SEQ ID NO: 512825 - DNA, 15 bp, Homo sapiens
tttgttcgaggtggg

SEQ ID NO: 512826 - DNA, 15 bp, Homo sapiens
gtttgttcgaggtgg

SEQ ID NO: 512827 - DNA, 15 bp, Homo sapiens
ggtttgttcgaggtg

SEQ ID NO: 512828 - DNA, 15 bp, Homo sapiens
aggtttgttcgaggt

SEQ ID NO: 512829 - DNA, 15 bp, Homo sapiens
caggtttgttcgagg

SEQ ID NO: 512830 - DNA, 15 bp, Homo sapiens
ccaggtttgttcgag

SEQ ID NO: 512831 - DNA, 15 bp, Homo sapiens
accaggtttgttcga

SEQ ID NO: 512832 - DNA, 15 bp, Homo sapiens
caccaggtttgttcg

SEQ ID NO: 512833 - DNA, 15 bp, Homo sapiens
acaccaggtttgttc

SEQ ID NO: 512834 - DNA, 15 bp, Homo sapiens
gacaccaggtttgtt

SEQ ID NO: 512835 - DNA, 15 bp, Homo sapiens
ggacaccaggtttgt

SEQ ID NO: 512836 - DNA, 15 bp, Homo sapiens
gggacaccaggtttg

SEQ ID NO: 512837 - DNA, 15 bp, Homo sapiens
agggacaccaggttt

SEQ ID NO: 512838 - DNA, 15 bp, Homo sapiens
cagggacaccaggtt

SEQ ID NO: 512839 - DNA, 15 bp, Homo sapiens
tcagggacaccaggt

SEQ ID NO: 512840 - DNA, 15 bp, Homo sapiens
gtcagggacaccagg

SEQ ID NO: 512841 - DNA, 15 bp, Homo sapiens
ggtcagggacaccag

SEQ ID NO: 512842 - DNA, 15 bp, Homo sapiens
gggtcagggacacca

SEQ ID NO: 512843 - DNA, 15 bp, Homo sapiens
agggtcagggacacc

SEQ ID NO: 512844 - DNA, 15 bp, Homo sapiens
gagggtcagggacac

SEQ ID NO: 512845 - DNA, 15 bp, Homo sapiens
cgagggtcagggaca

SEQ ID NO: 512846 - DNA, 15 bp, Homo sapiens
gcgagggtcagggac

SEQ ID NO: 512847 - DNA, 15 bp, Homo sapiens
ggcgagggtcaggga

SEQ ID NO: 512848 - DNA, 15 bp, Homo sapiens
gggcgagggtcaggg

SEQ ID NO: 512849 - DNA, 15 bp, Homo sapiens
tgggcgagggtcagg

SEQ ID NO: 512850 - DNA, 15 bp, Homo sapiens
atgggcgagggtcag

SEQ ID NO: 512851 - DNA, 15 bp, Homo sapiens
gatgggcgagggtca

SEQ ID NO: 512852 - DNA, 15 bp, Homo sapiens
agatgggcgagggtc

SEQ ID NO: 512853 - DNA, 15 bp, Homo sapiens
gagatgggcgagggt

SEQ ID NO: 512854 - DNA, 15 bp, Homo sapiens
ggagatgggcgaggg

SEQ ID NO: 512855 - DNA, 15 bp, Homo sapiens
gggagatgggcgagg

SEQ ID NO: 512856 - DNA, 15 bp, Homo sapiens
tgggagatgggcgag

SEQ ID NO: 512857 - DNA, 15 bp, Homo sapiens
ctgggagatgggcga

SEQ ID NO: 512858 - DNA, 15 bp, Homo sapiens
tctgggagatgggcg

SEQ ID NO: 512859 - DNA, 15 bp, Homo sapiens
gtctgggagatgggc

SEQ ID NO: 512860 - DNA, 15 bp, Homo sapiens
tgtctgggagatggg

SEQ ID NO: 512861 - DNA, 15 bp, Homo sapiens
gtgtctgggagatgg

SEQ ID NO: 512862 - DNA, 15 bp, Homo sapiens
cgtgtctgggagatg

SEQ ID NO: 512863 - DNA, 15 bp, Homo sapiens
gcgtgtctgggagat

SEQ ID NO: 512864 - DNA, 15 bp, Homo sapiens
cgcgtgtctgggaga

SEQ ID NO: 512865 - DNA, 15 bp, Homo sapiens
ccgcgtgtctgggag

SEQ ID NO: 512866 - DNA, 15 bp, Homo sapiens
cccgcgtgtctggga

SEQ ID NO: 512867 - DNA, 15 bp, Homo sapiens
ccccgcgtgtctggg

SEQ ID NO: 512868 - DNA, 15 bp, Homo sapiens
tccccgcgtgtctgg

SEQ ID NO: 512869 - DNA, 15 bp, Homo sapiens
atccccgcgtgtctg

SEQ ID NO: 512870 - DNA, 15 bp, Homo sapiens
gatccccgcgtgtct

SEQ ID NO: 512871 - DNA, 15 bp, Homo sapiens
agatccccgcgtgtc

SEQ ID NO: 512872 - DNA, 15 bp, Homo sapiens
cagatccccgcgtgt

SEQ ID NO: 512873 - DNA, 15 bp, Homo sapiens
ccagatccccgcgtg

SEQ ID NO: 512874 - DNA, 15 bp, Homo sapiens
cccagatccccgcgt

SEQ ID NO: 512875 - DNA, 15 bp, Homo sapiens
ccccagatccccgcg

SEQ ID NO: 512876 - DNA, 15 bp, Homo sapiens
gccccagatccccgc

SEQ ID NO: 512877 - DNA, 15 bp, Homo sapiens
agccccagatccccg

SEQ ID NO: 512878 - DNA, 15 bp, Homo sapiens
cagccccagatcccc

SEQ ID NO: 512879 - DNA, 15 bp, Homo sapiens
ccagccccagatccc

SEQ ID NO: 512880 - DNA, 15 bp, Homo sapiens
tccagccccagatcc

SEQ ID NO: 512881 - DNA, 15 bp, Homo sapiens
ctccagccccagatc

SEQ ID NO: 512882 - DNA, 15 bp, Homo sapiens
gctccagccccagat

SEQ ID NO: 512883 - DNA, 15 bp, Homo sapiens
agctccagccccaga

SEQ ID NO: 512884 - DNA, 15 bp, Homo sapiens
cagctccagccccag

SEQ ID NO: 512885 - DNA, 15 bp, Homo sapiens
tcagctccagcccca

SEQ ID NO: 512886 - DNA, 15 bp, Homo sapiens
gtcagctccagcccc

SEQ ID NO: 512887 - DNA, 15 bp, Homo sapiens
agtcagctccagccc

SEQ ID NO: 512888 - DNA, 15 bp, Homo sapiens
aagtcagctccagcc

SEQ ID NO: 512889 - DNA, 15 bp, Homo sapiens
aaagtcagctccagc

SEQ ID NO: 512890 - DNA, 15 bp, Homo sapiens
gaaagtcagctccag

SEQ ID NO: 512891 - DNA, 15 bp, Homo sapiens
ggaaagtcagctcca

SEQ ID NO: 512892 - DNA, 15 bp, Homo sapiens
cggaaagtcagctcc

SEQ ID NO: 512893 - DNA, 15 bp, Homo sapiens
tcggaaagtcagctc

SEQ ID NO: 512894 - DNA, 15 bp, Homo sapiens
ctcggaaagtcagct

SEQ ID NO: 512895 - DNA, 15 bp, Homo sapiens
cctcggaaagtcagc

SEQ ID NO: 512896 - DNA, 15 bp, Homo sapiens
tcctcggaaagtcag

SEQ ID NO: 512897 - DNA, 15 bp, Homo sapiens
gtcctcggaaagtca

SEQ ID NO: 512898 - DNA, 15 bp, Homo sapiens
tgtcctcggaaagtc

SEQ ID NO: 512899 - DNA, 15 bp, Homo sapiens
atgtcctcggaaagt

SEQ ID NO: 512900 - DNA, 15 bp, Homo sapiens
gatgtcctcggaaag

SEQ ID NO: 512901 - DNA, 15 bp, Homo sapiens
tgatgtcctcggaaa

SEQ ID NO: 512902 - DNA, 15 bp, Homo sapiens
gtgatgtcctcggaa

SEQ ID NO: 512903 - DNA, 15 bp, Homo sapiens
tgtgatgtcctcgga

SEQ ID NO: 512904 - DNA, 15 bp, Homo sapiens
ctgtgatgtcctcgg

SEQ ID NO: 512905 - DNA, 15 bp, Homo sapiens
gctgtgatgtcctcg

SEQ ID NO: 512906 - DNA, 15 bp, Homo sapiens
ggctgtgatgtcctc

SEQ ID NO: 512907 - DNA, 15 bp, Homo sapiens
gggctgtgatgtcct

SEQ ID NO: 512908 - DNA, 15 bp, Homo sapiens
ggggctgtgatgtcc

SEQ ID NO: 512909 - DNA, 15 bp, Homo sapiens
tggggctgtgatgtc

SEQ ID NO: 512910 - DNA, 15 bp, Homo sapiens
ctggggctgtgatgt

SEQ ID NO: 512911 - DNA, 15 bp, Homo sapiens
gctggggctgtgatg

SEQ ID NO: 512912 - DNA, 15 bp, Homo sapiens
tgctggggctgtgat

SEQ ID NO: 512913 - DNA, 15 bp, Homo sapiens
gtgctggggctgtga

SEQ ID NO: 512914 - DNA, 15 bp, Homo sapiens
ggtgctggggctgtg

SEQ ID NO: 512915 - DNA, 15 bp, Homo sapiens
gggtgctggggctgt

SEQ ID NO: 512916 - DNA, 15 bp, Homo sapiens
cgggtgctggggctg

SEQ ID NO: 512917 - DNA, 15 bp, Homo sapiens
tcgggtgctggggct

SEQ ID NO: 512918 - DNA, 15 bp, Homo sapiens
ctcgggtgctggggc

SEQ ID NO: 512919 - DNA, 15 bp, Homo sapiens
gctcgggtgctgggg

SEQ ID NO: 512920 - DNA, 15 bp, Homo sapiens
ggctcgggtgctggg

SEQ ID NO: 512921 - DNA, 15 bp, Homo sapiens
gggctcgggtgctgg

SEQ ID NO: 512922 - DNA, 15 bp, Homo sapiens
tgggctcgggtgctg

SEQ ID NO: 512923 - DNA, 15 bp, Homo sapiens
ctgggctcgggtgct

SEQ ID NO: 512924 - DNA, 15 bp, Homo sapiens
tctgggctcgggtgc

SEQ ID NO: 512925 - DNA, 15 bp, Homo sapiens
ctctgggctcgggtg

SEQ ID NO: 512926 - DNA, 15 bp, Homo sapiens
gctctgggctcgggt

SEQ ID NO: 512927 - DNA, 15 bp, Homo sapiens
ggctctgggctcggg

SEQ ID NO: 512928 - DNA, 15 bp, Homo sapiens
tggctctgggctcgg

SEQ ID NO: 512929 - DNA, 15 bp, Homo sapiens
gtggctctgggctcg

SEQ ID NO: 512930 - DNA, 15 bp, Homo sapiens
cgtggctctgggctc

SEQ ID NO: 512931 - DNA, 15 bp, Homo sapiens
gcgtggctctgggct

SEQ ID NO: 512932 - DNA, 15 bp, Homo sapiens
agcgtggctctgggc

SEQ ID NO: 512933 - DNA, 15 bp, Homo sapiens
cagcgtggctctggg

SEQ ID NO: 512934 - DNA, 15 bp, Homo sapiens
acagcgtggctctgg

SEQ ID NO: 512935 - DNA, 15 bp, Homo sapiens
aacagcgtggctctg

SEQ ID NO: 512936 - DNA, 15 bp, Homo sapiens
aaacagcgtggctct

SEQ ID NO: 512937 - DNA, 15 bp, Homo sapiens
aaaacagcgtggctc

SEQ ID NO: 512938 - DNA, 15 bp, Homo sapiens
gaaaacagcgtggct

SEQ ID NO: 512939 - DNA, 15 bp, Homo sapiens
ggaaaacagcgtggc

SEQ ID NO: 512940 - DNA, 15 bp, Homo sapiens
gggaaaacagcgtgg

SEQ ID NO: 512941 - DNA, 15 bp, Homo sapiens
ggggaaaacagcgtg

SEQ ID NO: 512942 - DNA, 15 bp, Homo sapiens
aggggaaaacagcgt

SEQ ID NO: 512943 - DNA, 15 bp, Homo sapiens
gaggggaaaacagcg

SEQ ID NO: 512944 - DNA, 15 bp, Homo sapiens
agaggggaaaacagc

SEQ ID NO: 512945 - DNA, 15 bp, Homo sapiens
cagaggggaaaacag

SEQ ID NO: 512946 - DNA, 15 bp, Homo sapiens
tcagaggggaaaaca

SEQ ID NO: 512947 - DNA, 15 bp, Homo sapiens
atcagaggggaaaac

SEQ ID NO: 512948 - DNA, 15 bp, Homo sapiens
catcagaggggaaaa

SEQ ID NO: 512949 - DNA, 15 bp, Homo sapiens
gcatcagaggggaaa

SEQ ID NO: 512950 - DNA, 15 bp, Homo sapiens
agcatcagaggggaa

SEQ ID NO: 512951 - DNA, 15 bp, Homo sapiens
aagcatcagagggga

SEQ ID NO: 512952 - DNA, 15 bp, Homo sapiens
gaagcatcagagggg

SEQ ID NO: 512953 - DNA, 15 bp, Homo sapiens
tgaagcatcagaggg

SEQ ID NO: 512954 - DNA, 15 bp, Homo sapiens
ctgaagcatcagagg

SEQ ID NO: 512955 - DNA, 15 bp, Homo sapiens
cctgaagcatcagag

SEQ ID NO: 512956 - DNA, 15 bp, Homo sapiens
ccctgaagcatcaga

SEQ ID NO: 512957 - DNA, 15 bp, Homo sapiens
tccctgaagcatcag

SEQ ID NO: 512958 - DNA, 15 bp, Homo sapiens
ctccctgaagcatca

SEQ ID NO: 512959 - DNA, 15 bp, Homo sapiens
gctccctgaagcatc

SEQ ID NO: 512960 - DNA, 15 bp, Homo sapiens
cgctccctgaagcat

SEQ ID NO: 512961 - DNA, 15 bp, Homo sapiens
gcgctccctgaagca

SEQ ID NO: 512962 - DNA, 15 bp, Homo sapiens
cgcgctccctgaagc

SEQ ID NO: 512963 - DNA, 15 bp, Homo sapiens
gcgcgctccctgaag

SEQ ID NO: 512964 - DNA, 15 bp, Homo sapiens
cgcgcgctccctgaa

SEQ ID NO: 512965 - DNA, 15 bp, Homo sapiens
tcgcgcgctccctga

SEQ ID NO: 512966 - DNA, 15 bp, Homo sapiens
ctcgcgcgctccctg

SEQ ID NO: 512967 - DNA, 15 bp, Homo sapiens
gctcgcgcgctccct

SEQ ID NO: 512968 - DNA, 15 bp, Homo sapiens
tgctcgcgcgctccc

SEQ ID NO: 512969 - DNA, 15 bp, Homo sapiens
ctgctcgcgcgctcc

SEQ ID NO: 512970 - DNA, 15 bp, Homo sapiens
cctgctcgcgcgctc

SEQ ID NO: 512971 - DNA, 15 bp, Homo sapiens
ccctgctcgcgcgct

SEQ ID NO: 512972 - DNA, 15 bp, Homo sapiens
tccctgctcgcgcgc

SEQ ID NO: 512973 - DNA, 15 bp, Homo sapiens
ctccctgctcgcgcg

SEQ ID NO: 512974 - DNA, 15 bp, Homo sapiens
gctccctgctcgcgc

SEQ ID NO: 512975 - DNA, 15 bp, Homo sapiens
cgctccctgctcgcg

SEQ ID NO: 512976 - DNA, 15 bp, Homo sapiens
ccgctccctgctcgc

SEQ ID NO: 512977 - DNA, 15 bp, Homo sapiens
gccgctccctgctcg

SEQ ID NO: 512978 - DNA, 15 bp, Homo sapiens
cgccgctccctgctc

SEQ ID NO: 512979 - DNA, 15 bp, Homo sapiens
acgccgctccctgct

SEQ ID NO: 512980 - DNA, 15 bp, Homo sapiens
cacgccgctccctgc

SEQ ID NO: 512981 - DNA, 15 bp, Homo sapiens
tcacgccgctccctg

SEQ ID NO: 512982 - DNA, 15 bp, Homo sapiens
ctcacgccgctccct

SEQ ID NO: 512983 - DNA, 15 bp, Homo sapiens
actcacgccgctccc

SEQ ID NO: 512984 - DNA, 15 bp, Homo sapiens
cactcacgccgctcc

SEQ ID NO: 512985 - DNA, 15 bp, Homo sapiens
gcactcacgccgctc

SEQ ID NO: 512986 - DNA, 15 bp, Homo sapiens
ggcactcacgccgct

SEQ ID NO: 512987 - DNA, 15 bp, Homo sapiens
gggcactcacgccgc

SEQ ID NO: 512988 - DNA, 15 bp, Homo sapiens
cgggcactcacgccg

SEQ ID NO: 512989 - DNA, 15 bp, Homo sapiens
acgggcactcacgcc

SEQ ID NO: 512990 - DNA, 15 bp, Homo sapiens
gacgggcactcacgc

SEQ ID NO: 512991 - DNA, 15 bp, Homo sapiens
agacgggcactcacg

SEQ ID NO: 512992 - DNA, 15 bp, Homo sapiens
cagacgggcactcac

SEQ ID NO: 512993 - DNA, 15 bp, Homo sapiens
acagacgggcactca

SEQ ID NO: 512994 - DNA, 15 bp, Homo sapiens
gacagacgggcactc

SEQ ID NO: 512995 - DNA, 15 bp, Homo sapiens
agacagacgggcact

SEQ ID NO: 512996 - DNA, 15 bp, Homo sapiens
cagacagacgggcac

SEQ ID NO: 512997 - DNA, 15 bp, Homo sapiens
acagacagacgggca

SEQ ID NO: 512998 - DNA, 15 bp, Homo sapiens
aacagacagacgggc

SEQ ID NO: 512999 - DNA, 15 bp, Homo sapiens
caacagacagacggg

SEQ ID NO: 513000 - DNA, 15 bp, Homo sapiens
gcaacagacagacgg

SEQ ID NO: 513001 - DNA, 15 bp, Homo sapiens
ggcaacagacagacg

SEQ ID NO: 513002 - DNA, 15 bp, Homo sapiens
cggcaacagacagac

SEQ ID NO: 513003 - DNA, 15 bp, Homo sapiens
ccggcaacagacaga

SEQ ID NO: 513004 - DNA, 15 bp, Homo sapiens
cccggcaacagacag

SEQ ID NO: 513005 - DNA, 15 bp, Homo sapiens
gcccggcaacagaca

SEQ ID NO: 513006 - DNA, 15 bp, Homo sapiens
cgcccggcaacagac

SEQ ID NO: 513007 - DNA, 15 bp, Homo sapiens
ccgcccggcaacaga

SEQ ID NO: 513008 - DNA, 15 bp, Homo sapiens
tccgcccggcaacag

SEQ ID NO: 513009 - DNA, 15 bp, Homo sapiens
ttccgcccggcaaca

SEQ ID NO: 513010 - DNA, 15 bp, Homo sapiens
gttccgcccggcaac

SEQ ID NO: 513011 - DNA, 15 bp, Homo sapiens
agttccgcccggcaa

SEQ ID NO: 513012 - DNA, 15 bp, Homo sapiens
cagttccgcccggca

SEQ ID NO: 513013 - DNA, 15 bp, Homo sapiens
tcagttccgcccggc

SEQ ID NO: 513014 - DNA, 15 bp, Homo sapiens
ctcagttccgcccgg

SEQ ID NO: 513015 - DNA, 15 bp, Homo sapiens
gctcagttccgcccg

SEQ ID NO: 513016 - DNA, 15 bp, Homo sapiens
ggctcagttccgccc

SEQ ID NO: 513017 - DNA, 15 bp, Homo sapiens
aggctcagttccgcc

SEQ ID NO: 513018 - DNA, 15 bp, Homo sapiens
caggctcagttccgc

SEQ ID NO: 513019 - DNA, 15 bp, Homo sapiens
tcaggctcagttccg

SEQ ID NO: 513020 - DNA, 15 bp, Homo sapiens
ttcaggctcagttcc

SEQ ID NO: 513021 - DNA, 15 bp, Homo sapiens
gttcaggctcagttc

SEQ ID NO: 513022 - DNA, 15 bp, Homo sapiens
ggttcaggctcagtt

SEQ ID NO: 513023 - DNA, 15 bp, Homo sapiens
gggttcaggctcagt

SEQ ID NO: 513024 - DNA, 15 bp, Homo sapiens
ggggttcaggctcag

SEQ ID NO: 513025 - DNA, 15 bp, Homo sapiens
cggggttcaggctca

SEQ ID NO: 513026 - DNA, 15 bp, Homo sapiens
ccggggttcaggctc

SEQ ID NO: 513027 - DNA, 15 bp, Homo sapiens
gccggggttcaggct

SEQ ID NO: 513028 - DNA, 15 bp, Homo sapiens
cgccggggttcaggc

SEQ ID NO: 513029 - DNA, 15 bp, Homo sapiens
ccgccggggttcagg

SEQ ID NO: 513030 - DNA, 15 bp, Homo sapiens
gccgccggggttcag

SEQ ID NO: 513031 - DNA, 15 bp, Homo sapiens
agccgccggggttca

SEQ ID NO: 513032 - DNA, 15 bp, Homo sapiens
cagccgccggggttc

SEQ ID NO: 513033 - DNA, 15 bp, Homo sapiens
ccagccgccggggtt

SEQ ID NO: 513034 - DNA, 15 bp, Homo sapiens
tccagccgccggggt

SEQ ID NO: 513035 - DNA, 15 bp, Homo sapiens
ctccagccgccgggg

SEQ ID NO: 513036 - DNA, 15 bp, Homo sapiens
gctccagccgccggg

SEQ ID NO: 513037 - DNA, 15 bp, Homo sapiens
cgctccagccgccgg

SEQ ID NO: 513038 - DNA, 15 bp, Homo sapiens
gcgctccagccgccg

SEQ ID NO: 513039 - DNA, 15 bp, Homo sapiens
agcgctccagccgcc

SEQ ID NO: 513040 - DNA, 15 bp, Homo sapiens
cagcgctccagccgc

SEQ ID NO: 513041 - DNA, 15 bp, Homo sapiens
ccagcgctccagccg

SEQ ID NO: 513042 - DNA, 15 bp, Homo sapiens
gccagcgctccagcc

SEQ ID NO: 513043 - DNA, 15 bp, Homo sapiens
ggccagcgctccagc

SEQ ID NO: 513044 - DNA, 15 bp, Homo sapiens
tggccagcgctccag

SEQ ID NO: 513045 - DNA, 15 bp, Homo sapiens
ctggccagcgctcca

SEQ ID NO: 513046 - DNA, 15 bp, Homo sapiens
cctggccagcgctcc

SEQ ID NO: 513047 - DNA, 15 bp, Homo sapiens
tcctggccagcgctc

SEQ ID NO: 513048 - DNA, 15 bp, Homo sapiens
ctcctggccagcgct

SEQ ID NO: 513049 - DNA, 15 bp, Homo sapiens
cctcctggccagcgc

SEQ ID NO: 513050 - DNA, 15 bp, Homo sapiens
ccctcctggccagcg

SEQ ID NO: 513051 - DNA, 15 bp, Homo sapiens
cccctcctggccagc

SEQ ID NO: 513052 - DNA, 15 bp, Homo sapiens
ccccctcctggccag

SEQ ID NO: 513053 - DNA, 15 bp, Homo sapiens
gccccctcctggcca

SEQ ID NO: 513054 - DNA, 15 bp, Homo sapiens
cgccccctcctggcc

SEQ ID NO: 513055 - DNA, 15 bp, Homo sapiens
tcgccccctcctggc

SEQ ID NO: 513056 - DNA, 15 bp, Homo sapiens
ttcgccccctcctgg

SEQ ID NO: 513057 - DNA, 15 bp, Homo sapiens
attcgccccctcctg

SEQ ID NO: 513058 - DNA, 15 bp, Homo sapiens
cattcgccccctcct

SEQ ID NO: 513059 - DNA, 15 bp, Homo sapiens
gcattcgccccctcc

SEQ ID NO: 513060 - DNA, 15 bp, Homo sapiens
ggcattcgccccctc

SEQ ID NO: 513061 - DNA, 15 bp, Homo sapiens
cggcattcgccccct

SEQ ID NO: 513062 - DNA, 15 bp, Homo sapiens
tcggcattcgccccc

SEQ ID NO: 513063 - DNA, 15 bp, Homo sapiens
ctcggcattcgcccc

SEQ ID NO: 513064 - DNA, 15 bp, Homo sapiens
cctcggcattcgccc

SEQ ID NO: 513065 - DNA, 15 bp, Homo sapiens
acctcggcattcgcc

SEQ ID NO: 513066 - DNA, 15 bp, Homo sapiens
cacctcggcattcgc

SEQ ID NO: 513067 - DNA, 15 bp, Homo sapiens
gcacctcggcattcg

SEQ ID NO: 513068 - DNA, 15 bp, Homo sapiens
cgcacctcggcattc

SEQ ID NO: 513069 - DNA, 15 bp, Homo sapiens
ccgcacctcggcatt

SEQ ID NO: 513070 - DNA, 15 bp, Homo sapiens
cccgcacctcggcat

SEQ ID NO: 513071 - DNA, 15 bp, Homo sapiens
gcccgcacctcggca

SEQ ID NO: 513072 - DNA, 15 bp, Homo sapiens
tgcccgcacctcggc

SEQ ID NO: 513073 - DNA, 15 bp, Homo sapiens
ctgcccgcacctcgg

SEQ ID NO: 513074 - DNA, 15 bp, Homo sapiens
gctgcccgcacctcg

SEQ ID NO: 513075 - DNA, 15 bp, Homo sapiens
agctgcccgcacctc

SEQ ID NO: 513076 - DNA, 15 bp, Homo sapiens
gagctgcccgcacct

SEQ ID NO: 513077 - DNA, 15 bp, Homo sapiens
tgagctgcccgcacc

SEQ ID NO: 513078 - DNA, 15 bp, Homo sapiens
ctgagctgcccgcac

SEQ ID NO: 513079 - DNA, 15 bp, Homo sapiens
gctgagctgcccgca

SEQ ID NO: 513080 - DNA, 15 bp, Homo sapiens
cgctgagctgcccgc

SEQ ID NO: 513081 - DNA, 15 bp, Homo sapiens
ccgctgagctgcccg

SEQ ID NO: 513082 - DNA, 15 bp, Homo sapiens
cccgctgagctgccc

SEQ ID NO: 513083 - DNA, 15 bp, Homo sapiens
gcccgctgagctgcc

SEQ ID NO: 513084 - DNA, 15 bp, Homo sapiens
cgcccgctgagctgc

SEQ ID NO: 513085 - DNA, 15 bp, Homo sapiens
ccgcccgctgagctg

SEQ ID NO: 513086 - DNA, 15 bp, Homo sapiens
cccgcccgctgagct

SEQ ID NO: 513087 - DNA, 15 bp, Homo sapiens
tcccgcccgctgagc

SEQ ID NO: 513088 - DNA, 15 bp, Homo sapiens
ctcccgcccgctgag

SEQ ID NO: 513089 - DNA, 15 bp, Homo sapiens
cctcccgcccgctga

SEQ ID NO: 513090 - DNA, 15 bp, Homo sapiens
gcctcccgcccgctg

SEQ ID NO: 513091 - DNA, 15 bp, Homo sapiens
agcctcccgcccgct

SEQ ID NO: 513092 - DNA, 15 bp, Homo sapiens
cagcctcccgcccgc

SEQ ID NO: 513093 - DNA, 15 bp, Homo sapiens
ccagcctcccgcccg

SEQ ID NO: 513094 - DNA, 15 bp, Homo sapiens
cccagcctcccgccc

SEQ ID NO: 513095 - DNA, 15 bp, Homo sapiens
gcccagcctcccgcc

SEQ ID NO: 513096 - DNA, 15 bp, Homo sapiens
ggcccagcctcccgc

SEQ ID NO: 513097 - DNA, 15 bp, Homo sapiens
cggcccagcctcccg

SEQ ID NO: 513098 - DNA, 15 bp, Homo sapiens
tcggcccagcctccc

SEQ ID NO: 513099 - DNA, 15 bp, Homo sapiens
ctcggcccagcctcc

SEQ ID NO: 513100 - DNA, 15 bp, Homo sapiens
cctcggcccagcctc

SEQ ID NO: 513101 - DNA, 15 bp, Homo sapiens
gcctcggcccagcct

SEQ ID NO: 513102 - DNA, 15 bp, Homo sapiens
agcctcggcccagcc

SEQ ID NO: 513103 - DNA, 15 bp, Homo sapiens
gagcctcggcccagc

SEQ ID NO: 513104 - DNA, 15 bp, Homo sapiens
cgagcctcggcccag

SEQ ID NO: 513105 - DNA, 15 bp, Homo sapiens
gcgagcctcggccca

SEQ ID NO: 513106 - DNA, 15 bp, Homo sapiens
ggcgagcctcggccc

SEQ ID NO: 513107 - DNA, 15 bp, Homo sapiens
aggcgagcctcggcc

SEQ ID NO: 513108 - DNA, 15 bp, Homo sapiens
gaggcgagcctcggc

SEQ ID NO: 513109 - DNA, 15 bp, Homo sapiens
ggaggcgagcctcgg

SEQ ID NO: 513110 - DNA, 15 bp, Homo sapiens
cggaggcgagcctcg

SEQ ID NO: 513111 - DNA, 15 bp, Homo sapiens
gcggaggcgagcctc

SEQ ID NO: 513112 - DNA, 15 bp, Homo sapiens
ggcggaggcgagcct

SEQ ID NO: 513113 - DNA, 15 bp, Homo sapiens
gggcggaggcgagcc

SEQ ID NO: 513114 - DNA, 15 bp, Homo sapiens
cgggcggaggcgagc

SEQ ID NO: 513115 - DNA, 15 bp, Homo sapiens
gcgggcggaggcgag

SEQ ID NO: 513116 - DNA, 15 bp, Homo sapiens
tgcgggcggaggcga

SEQ ID NO: 513117 - DNA, 15 bp, Homo sapiens
ctgcgggcggaggcg

SEQ ID NO: 513118 - DNA, 15 bp, Homo sapiens
gctgcgggcggaggc

SEQ ID NO: 513119 - DNA, 15 bp, Homo sapiens
agctgcgggcggagg

SEQ ID NO: 513120 - DNA, 15 bp, Homo sapiens
gagctgcgggcggag

SEQ ID NO: 513121 - DNA, 15 bp, Homo sapiens
tgagctgcgggcgga

SEQ ID NO: 513122 - DNA, 15 bp, Homo sapiens
ctgagctgcgggcgg

SEQ ID NO: 513123 - DNA, 15 bp, Homo sapiens
gctgagctgcgggcg

SEQ ID NO: 513124 - DNA, 15 bp, Homo sapiens
ggctgagctgcgggc

SEQ ID NO: 513125 - DNA, 15 bp, Homo sapiens
tggctgagctgcggg

SEQ ID NO: 513126 - DNA, 15 bp, Homo sapiens
atggctgagctgcgg

SEQ ID NO: 513127 - DNA, 15 bp, Homo sapiens
catggctgagctgcg

SEQ ID NO: 513128 - DNA, 15 bp, Homo sapiens
gcatggctgagctgc

SEQ ID NO: 513129 - DNA, 15 bp, Homo sapiens
tgcatggctgagctg

SEQ ID NO: 513130 - DNA, 15 bp, Homo sapiens
ttgcatggctgagct

SEQ ID NO: 513131 - DNA, 15 bp, Homo sapiens
tttgcatggctgagc

SEQ ID NO: 513132 - DNA, 15 bp, Homo sapiens
ttttgcatggctgag

SEQ ID NO: 513133 - DNA, 15 bp, Homo sapiens
cttttgcatggctga

SEQ ID NO: 513134 - DNA, 15 bp, Homo sapiens
acttttgcatggctg

SEQ ID NO: 513135 - DNA, 15 bp, Homo sapiens
cacttttgcatggct

SEQ ID NO: 513136 - DNA, 15 bp, Homo sapiens
gcacttttgcatggc

SEQ ID NO: 513137 - DNA, 15 bp, Homo sapiens
agcacttttgcatgg

SEQ ID NO: 513138 - DNA, 15 bp, Homo sapiens
gagcacttttgcatg

SEQ ID NO: 513139 - DNA, 15 bp, Homo sapiens
agagcacttttgcat

SEQ ID NO: 513140 - DNA, 15 bp, Homo sapiens
aagagcacttttgca

SEQ ID NO: 513141 - DNA, 15 bp, Homo sapiens
caagagcacttttgc

SEQ ID NO: 513142 - DNA, 15 bp, Homo sapiens
gcaagagcacttttg

SEQ ID NO: 513143 - DNA, 15 bp, Homo sapiens
agcaagagcactttt

SEQ ID NO: 513144 - DNA, 15 bp, Homo sapiens
aagcaagagcacttt

SEQ ID NO: 513145 - DNA, 15 bp, Homo sapiens
gaagcaagagcactt

SEQ ID NO: 513146 - DNA, 15 bp, Homo sapiens
ggaagcaagagcact

SEQ ID NO: 513147 - DNA, 15 bp, Homo sapiens
gggaagcaagagcac

SEQ ID NO: 513148 - DNA, 15 bp, Homo sapiens
cgggaagcaagagca

SEQ ID NO: 513149 - DNA, 15 bp, Homo sapiens
ccgggaagcaagagc

SEQ ID NO: 513150 - DNA, 15 bp, Homo sapiens
cccgggaagcaagag

SEQ ID NO: 513151 - DNA, 15 bp, Homo sapiens
tcccgggaagcaaga

SEQ ID NO: 513152 - DNA, 15 bp, Homo sapiens
ttcccgggaagcaag

SEQ ID NO: 513153 - DNA, 15 bp, Homo sapiens
attcccgggaagcaa

SEQ ID NO: 513154 - DNA, 15 bp, Homo sapiens
tattcccgggaagca

SEQ ID NO: 513155 - DNA, 15 bp, Homo sapiens
ttattcccgggaagc

SEQ ID NO: 513156 - DNA, 15 bp, Homo sapiens
gttattcccgggaag

SEQ ID NO: 513157 - DNA, 15 bp, Homo sapiens
ggttattcccgggaa

SEQ ID NO: 513158 - DNA, 15 bp, Homo sapiens
tggttattcccggga

SEQ ID NO: 513159 - DNA, 15 bp, Homo sapiens
ttggttattcccggg

SEQ ID NO: 513160 - DNA, 15 bp, Homo sapiens
tttggttattcccgg

SEQ ID NO: 513161 - DNA, 15 bp, Homo sapiens
atttggttattcccg

SEQ ID NO: 513162 - DNA, 15 bp, Homo sapiens
tatttggttattccc

SEQ ID NO: 513163 - DNA, 15 bp, Homo sapiens
atatttggttattcc

SEQ ID NO: 513164 - DNA, 15 bp, Homo sapiens
gatatttggttattc

SEQ ID NO: 513165 - DNA, 15 bp, Homo sapiens
agatatttggttatt

SEQ ID NO: 513166 - DNA, 15 bp, Homo sapiens
aagatatttggttat

SEQ ID NO: 513167 - DNA, 15 bp, Homo sapiens
aaagatatttggtta

SEQ ID NO: 513168 - DNA, 15 bp, Homo sapiens
caaagatatttggtt

SEQ ID NO: 513169 - DNA, 15 bp, Homo sapiens
acaaagatatttggt

SEQ ID NO: 513170 - DNA, 15 bp, Homo sapiens
aacaaagatatttgg

SEQ ID NO: 513171 - DNA, 15 bp, Homo sapiens
aaacaaagatatttg

SEQ ID NO: 513172 - DNA, 15 bp, Homo sapiens
taaacaaagatattt

SEQ ID NO: 513173 - DNA, 15 bp, Homo sapiens
ttaaacaaagatatt

SEQ ID NO: 513174 - DNA, 15 bp, Homo sapiens
tttaaacaaagatat

SEQ ID NO: 513175 - DNA, 15 bp, Homo sapiens
ctttaaacaaagata

SEQ ID NO: 513176 - DNA, 15 bp, Homo sapiens
actttaaacaaagat

SEQ ID NO: 513177 - DNA, 15 bp, Homo sapiens
cactttaaacaaaga

SEQ ID NO: 513178 - DNA, 15 bp, Homo sapiens
ccactttaaacaaag

SEQ ID NO: 513179 - DNA, 15 bp, Homo sapiens
accactttaaacaaa

SEQ ID NO: 513180 - DNA, 15 bp, Homo sapiens
caccactttaaacaa

SEQ ID NO: 513181 - DNA, 15 bp, Homo sapiens
ccaccactttaaaca

SEQ ID NO: 513182 - DNA, 15 bp, Homo sapiens
gccaccactttaaac

SEQ ID NO: 513183 - DNA, 15 bp, Homo sapiens
cgccaccactttaaa

SEQ ID NO: 513184 - DNA, 15 bp, Homo sapiens
acgccaccactttaa

SEQ ID NO: 513185 - DNA, 15 bp, Homo sapiens
tacgccaccacttta

SEQ ID NO: 513186 - DNA, 15 bp, Homo sapiens
ttacgccaccacttt

SEQ ID NO: 513187 - DNA, 15 bp, Homo sapiens
tttacgccaccactt

SEQ ID NO: 513188 - DNA, 15 bp, Homo sapiens
atttacgccaccact

SEQ ID NO: 513189 - DNA, 15 bp, Homo sapiens
catttacgccaccac

SEQ ID NO: 513190 - DNA, 15 bp, Homo sapiens
ccatttacgccacca

SEQ ID NO: 513191 - DNA, 15 bp, Homo sapiens
gccatttacgccacc

SEQ ID NO: 513192 - DNA, 15 bp, Homo sapiens
ggccatttacgccac

SEQ ID NO: 513193 - DNA, 15 bp, Homo sapiens
tggccatttacgcca

SEQ ID NO: 513194 - DNA, 15 bp, Homo sapiens
ctggccatttacgcc

SEQ ID NO: 513195 - DNA, 15 bp, Homo sapiens
actggccatttacgc

SEQ ID NO: 513196 - DNA, 15 bp, Homo sapiens
gactggccatttacg

SEQ ID NO: 513197 - DNA, 15 bp, Homo sapiens
cgactggccatttac

SEQ ID NO: 513198 - DNA, 15 bp, Homo sapiens
gcgactggccattta

SEQ ID NO: 513199 - DNA, 15 bp, Homo sapiens
agcgactggccattt

SEQ ID NO: 513200 - DNA, 15 bp, Homo sapiens
aagcgactggccatt

SEQ ID NO: 513201 - DNA, 15 bp, Homo sapiens
aaagcgactggccat

SEQ ID NO: 513202 - DNA, 15 bp, Homo sapiens
caaagcgactggcca

SEQ ID NO: 513203 - DNA, 15 bp, Homo sapiens
acaaagcgactggcc

SEQ ID NO: 513204 - DNA, 15 bp, Homo sapiens
cacaaagcgactggc

SEQ ID NO: 513205 - DNA, 15 bp, Homo sapiens
ccacaaagcgactgg

SEQ ID NO: 513206 - DNA, 15 bp, Homo sapiens
gccacaaagcgactg

SEQ ID NO: 513207 - DNA, 15 bp, Homo sapiens
ggccacaaagcgact

SEQ ID NO: 513208 - DNA, 15 bp, Homo sapiens
tggccacaaagcgac

SEQ ID NO: 513209 - DNA, 15 bp, Homo sapiens
gtggccacaaagcga

SEQ ID NO: 513210 - DNA, 15 bp, Homo sapiens
cgtggccacaaagcg

SEQ ID NO: 513211 - DNA, 15 bp, Homo sapiens
gcgtggccacaaagc

SEQ ID NO: 513212 - DNA, 15 bp, Homo sapiens
agcgtggccacaaag

SEQ ID NO: 513213 - DNA, 15 bp, Homo sapiens
cagcgtggccacaaa

SEQ ID NO: 513214 - DNA, 15 bp, Homo sapiens
ccagcgtggccacaa

SEQ ID NO: 513215 - DNA, 15 bp, Homo sapiens
tccagcgtggccaca

SEQ ID NO: 513216 - DNA, 15 bp, Homo sapiens
atccagcgtggccac

SEQ ID NO: 513217 - DNA, 15 bp, Homo sapiens
tatccagcgtggcca

SEQ ID NO: 513218 - DNA, 15 bp, Homo sapiens
atatccagcgtggcc

SEQ ID NO: 513219 - DNA, 15 bp, Homo sapiens
aatatccagcgtggc

SEQ ID NO: 513220 - DNA, 15 bp, Homo sapiens
taatatccagcgtgg

SEQ ID NO: 513221 - DNA, 15 bp, Homo sapiens
ctaatatccagcgtg

SEQ ID NO: 513222 - DNA, 15 bp, Homo sapiens
actaatatccagcgt

SEQ ID NO: 513223 - DNA, 15 bp, Homo sapiens
tactaatatccagcg

SEQ ID NO: 513224 - DNA, 15 bp, Homo sapiens
ctactaatatccagc

SEQ ID NO: 513225 - DNA, 15 bp, Homo sapiens
tctactaatatccag

SEQ ID NO: 513226 - DNA, 15 bp, Homo sapiens
atctactaatatcca

SEQ ID NO: 513227 - DNA, 15 bp, Homo sapiens
catctactaatatcc

SEQ ID NO: 513228 - DNA, 15 bp, Homo sapiens
tcatctactaatatc

SEQ ID NO: 513229 - DNA, 15 bp, Homo sapiens
ctcatctactaatat

SEQ ID NO: 513230 - DNA, 15 bp, Homo sapiens
cctcatctactaata

SEQ ID NO: 513231 - DNA, 15 bp, Homo sapiens
tcctcatctactaat

SEQ ID NO: 513232 - DNA, 15 bp, Homo sapiens
atcctcatctactaa

SEQ ID NO: 513233 - DNA, 15 bp, Homo sapiens
gatcctcatctacta

SEQ ID NO: 513234 - DNA, 15 bp, Homo sapiens
tgatcctcatctact

SEQ ID NO: 513235 - DNA, 15 bp, Homo sapiens
atgatcctcatctac

SEQ ID NO: 513236 - DNA, 15 bp, Homo sapiens
aatgatcctcatcta

SEQ ID NO: 513237 - DNA, 15 bp, Homo sapiens
gaatgatcctcatct

SEQ ID NO: 513238 - DNA, 15 bp, Homo sapiens
agaatgatcctcatc

SEQ ID NO: 513239 - DNA, 15 bp, Homo sapiens
cagaatgatcctcat

SEQ ID NO: 513240 - DNA, 15 bp, Homo sapiens
gcagaatgatcctca

SEQ ID NO: 513241 - DNA, 15 bp, Homo sapiens
agcagaatgatcctc

SEQ ID NO: 513242 - DNA, 15 bp, Homo sapiens
aagcagaatgatcct

SEQ ID NO: 513243 - DNA, 15 bp, Homo sapiens
gaagcagaatgatcc

SEQ ID NO: 513244 - DNA, 15 bp, Homo sapiens
tgaagcagaatgatc

SEQ ID NO: 513245 - DNA, 15 bp, Homo sapiens
ttgaagcagaatgat

SEQ ID NO: 513246 - DNA, 15 bp, Homo sapiens
attgaagcagaatga

SEQ ID NO: 513247 - DNA, 15 bp, Homo sapiens
aattgaagcagaatg

SEQ ID NO: 513248 - DNA, 15 bp, Homo sapiens
caattgaagcagaat

SEQ ID NO: 513249 - DNA, 15 bp, Homo sapiens
ccaattgaagcagaa

SEQ ID NO: 513250 - DNA, 15 bp, Homo sapiens
cccaattgaagcaga

SEQ ID NO: 513251 - DNA, 15 bp, Homo sapiens
gcccaattgaagcag

SEQ ID NO: 513252 - DNA, 15 bp, Homo sapiens
cgcccaattgaagca

SEQ ID NO: 513253 - DNA, 15 bp, Homo sapiens
gcgcccaattgaagc

SEQ ID NO: 513254 - DNA, 15 bp, Homo sapiens
ggcgcccaattgaag

SEQ ID NO: 513255 - DNA, 15 bp, Homo sapiens
aggcgcccaattgaa

SEQ ID NO: 513256 - DNA, 15 bp, Homo sapiens
gaggcgcccaattga

SEQ ID NO: 513257 - DNA, 15 bp, Homo sapiens
agaggcgcccaattg

SEQ ID NO: 513258 - DNA, 15 bp, Homo sapiens
gagaggcgcccaatt

SEQ ID NO: 513259 - DNA, 15 bp, Homo sapiens
tgagaggcgcccaat

SEQ ID NO: 513260 - DNA, 15 bp, Homo sapiens
atgagaggcgcccaa

SEQ ID NO: 513261 - DNA, 15 bp, Homo sapiens
gatgagaggcgccca

SEQ ID NO: 513262 - DNA, 15 bp, Homo sapiens
ggatgagaggcgccc

SEQ ID NO: 513263 - DNA, 15 bp, Homo sapiens
cggatgagaggcgcc

SEQ ID NO: 513264 - DNA, 15 bp, Homo sapiens
tcggatgagaggcgc

SEQ ID NO: 513265 - DNA, 15 bp, Homo sapiens
gtcggatgagaggcg

SEQ ID NO: 513266 - DNA, 15 bp, Homo sapiens
cgtcggatgagaggc

SEQ ID NO: 513267 - DNA, 15 bp, Homo sapiens
tcgtcggatgagagg

SEQ ID NO: 513268 - DNA, 15 bp, Homo sapiens
ctcgtcggatgagag

SEQ ID NO: 513269 - DNA, 15 bp, Homo sapiens
gctcgtcggatgaga

SEQ ID NO: 513270 - DNA, 15 bp, Homo sapiens
tgctcgtcggatgag

SEQ ID NO: 513271 - DNA, 15 bp, Homo sapiens
ttgctcgtcggatga

SEQ ID NO: 513272 - DNA, 15 bp, Homo sapiens
cttgctcgtcggatg

SEQ ID NO: 513273 - DNA, 15 bp, Homo sapiens
tcttgctcgtcggat

SEQ ID NO: 513274 - DNA, 15 bp, Homo sapiens
ttcttgctcgtcgga

SEQ ID NO: 513275 - DNA, 15 bp, Homo sapiens
tttcttgctcgtcgg

SEQ ID NO: 513276 - DNA, 15 bp, Homo sapiens
gtttcttgctcgtcg

SEQ ID NO: 513277 - DNA, 15 bp, Homo sapiens
agtttcttgctcgtc

SEQ ID NO: 513278 - DNA, 15 bp, Homo sapiens
cagtttcttgctcgt

SEQ ID NO: 513279 - DNA, 15 bp, Homo sapiens
gcagtttcttgctcg

SEQ ID NO: 513280 - DNA, 15 bp, Homo sapiens
agcagtttcttgctc

SEQ ID NO: 513281 - DNA, 15 bp, Homo sapiens
aagcagtttcttgct

SEQ ID NO: 513282 - DNA, 15 bp, Homo sapiens
taagcagtttcttgc

SEQ ID NO: 513283 - DNA, 15 bp, Homo sapiens
ctaagcagtttcttg

SEQ ID NO: 513284 - DNA, 15 bp, Homo sapiens
cctaagcagtttctt

SEQ ID NO: 513285 - DNA, 15 bp, Homo sapiens
tcctaagcagtttct

SEQ ID NO: 513286 - DNA, 15 bp, Homo sapiens
ctcctaagcagtttc

SEQ ID NO: 513287 - DNA, 15 bp, Homo sapiens
cctcctaagcagttt

SEQ ID NO: 513288 - DNA, 15 bp, Homo sapiens
tcctcctaagcagtt

SEQ ID NO: 513289 - DNA, 15 bp, Homo sapiens
ttcctcctaagcagt

SEQ ID NO: 513290 - DNA, 15 bp, Homo sapiens
cttcctcctaagcag

SEQ ID NO: 513291 - DNA, 15 bp, Homo sapiens
tcttcctcctaagca

SEQ ID NO: 513292 - DNA, 15 bp, Homo sapiens
ctcttcctcctaagc

SEQ ID NO: 513293 - DNA, 15 bp, Homo sapiens
cctcttcctcctaag

SEQ ID NO: 513294 - DNA, 15 bp, Homo sapiens
ccctcttcctcctaa

SEQ ID NO: 513295 - DNA, 15 bp, Homo sapiens
accctcttcctccta

SEQ ID NO: 513296 - DNA, 15 bp, Homo sapiens
aaccctcttcctcct

SEQ ID NO: 513297 - DNA, 15 bp, Homo sapiens
aaaccctcttcctcc

SEQ ID NO: 513298 - DNA, 15 bp, Homo sapiens
gaaaccctcttcctc

SEQ ID NO: 513299 - DNA, 15 bp, Homo sapiens
ggaaaccctcttcct

SEQ ID NO: 513300 - DNA, 15 bp, Homo sapiens
aggaaaccctcttcc

SEQ ID NO: 513301 - DNA, 15 bp, Homo sapiens
caggaaaccctcttc

SEQ ID NO: 513302 - DNA, 15 bp, Homo sapiens
acaggaaaccctctt

SEQ ID NO: 513303 - DNA, 15 bp, Homo sapiens
gacaggaaaccctct

SEQ ID NO: 513304 - DNA, 15 bp, Homo sapiens
agacaggaaaccctc

SEQ ID NO: 513305 - DNA, 15 bp, Homo sapiens
cagacaggaaaccct

SEQ ID NO: 513306 - DNA, 15 bp, Homo sapiens
gcagacaggaaaccc

SEQ ID NO: 513307 - DNA, 15 bp, Homo sapiens
cgcagacaggaaacc

SEQ ID NO: 513308 - DNA, 15 bp, Homo sapiens
gcgcagacaggaaac

SEQ ID NO: 513309 - DNA, 15 bp, Homo sapiens
cgcgcagacaggaaa

SEQ ID NO: 513310 - DNA, 15 bp, Homo sapiens
acgcgcagacaggaa

SEQ ID NO: 513311 - DNA, 15 bp, Homo sapiens
aacgcgcagacagga

SEQ ID NO: 513312 - DNA, 15 bp, Homo sapiens
gaacgcgcagacagg

SEQ ID NO: 513313 - DNA, 15 bp, Homo sapiens
ggaacgcgcagacag

SEQ ID NO: 513314 - DNA, 15 bp, Homo sapiens
gggaacgcgcagaca

SEQ ID NO: 513315 - DNA, 15 bp, Homo sapiens
tgggaacgcgcagac

SEQ ID NO: 513316 - DNA, 15 bp, Homo sapiens
ctgggaacgcgcaga

SEQ ID NO: 513317 - DNA, 15 bp, Homo sapiens
cctgggaacgcgcag

SEQ ID NO: 513318 - DNA, 15 bp, Homo sapiens
gcctgggaacgcgca

SEQ ID NO: 513319 - DNA, 15 bp, Homo sapiens
agcctgggaacgcgc

SEQ ID NO: 513320 - DNA, 15 bp, Homo sapiens
aagcctgggaacgcg

SEQ ID NO: 513321 - DNA, 15 bp, Homo sapiens
gaagcctgggaacgc

SEQ ID NO: 513322 - DNA, 15 bp, Homo sapiens
tgaagcctgggaacg

SEQ ID NO: 513323 - DNA, 15 bp, Homo sapiens
ttgaagcctgggaac

SEQ ID NO: 513324 - DNA, 15 bp, Homo sapiens
cttgaagcctgggaa

SEQ ID NO: 513325 - DNA, 15 bp, Homo sapiens
acttgaagcctggga

SEQ ID NO: 513326 - DNA, 15 bp, Homo sapiens
cacttgaagcctggg

SEQ ID NO: 513327 - DNA, 15 bp, Homo sapiens
acacttgaagcctgg

SEQ ID NO: 513328 - DNA, 15 bp, Homo sapiens
cacacttgaagcctg

SEQ ID NO: 513329 - DNA, 15 bp, Homo sapiens
ccacacttgaagcct

SEQ ID NO: 513330 - DNA, 15 bp, Homo sapiens
cccacacttgaagcc

SEQ ID NO: 513331 - DNA, 15 bp, Homo sapiens
gcccacacttgaagc

SEQ ID NO: 513332 - DNA, 15 bp, Homo sapiens
ggcccacacttgaag

SEQ ID NO: 513333 - DNA, 15 bp, Homo sapiens
gggcccacacttgaa

SEQ ID NO: 513334 - DNA, 15 bp, Homo sapiens
ggggcccacacttga

SEQ ID NO: 513335 - DNA, 15 bp, Homo sapiens
cggggcccacacttg

SEQ ID NO: 513336 - DNA, 15 bp, Homo sapiens
gcggggcccacactt

SEQ ID NO: 513337 - DNA, 15 bp, Homo sapiens
cgcggggcccacact

SEQ ID NO: 513338 - DNA, 15 bp, Homo sapiens
gcgcggggcccacac

SEQ ID NO: 513339 - DNA, 15 bp, Homo sapiens
ggcgcggggcccaca

SEQ ID NO: 513340 - DNA, 15 bp, Homo sapiens
aggcgcggggcccac

SEQ ID NO: 513341 - DNA, 15 bp, Homo sapiens
aaggcgcggggccca

SEQ ID NO: 513342 - DNA, 15 bp, Homo sapiens
caaggcgcggggccc

SEQ ID NO: 513343 - DNA, 15 bp, Homo sapiens
tcaaggcgcggggcc

SEQ ID NO: 513344 - DNA, 15 bp, Homo sapiens
ctcaaggcgcggggc

SEQ ID NO: 513345 - DNA, 15 bp, Homo sapiens
cctcaaggcgcgggg

SEQ ID NO: 513346 - DNA, 15 bp, Homo sapiens
ccctcaaggcgcggg

SEQ ID NO: 513347 - DNA, 15 bp, Homo sapiens
accctcaaggcgcgg

SEQ ID NO: 513348 - DNA, 15 bp, Homo sapiens
gaccctcaaggcgcg

SEQ ID NO: 513349 - DNA, 15 bp, Homo sapiens
ggaccctcaaggcgc

SEQ ID NO: 513350 - DNA, 15 bp, Homo sapiens
aggaccctcaaggcg

SEQ ID NO: 513351 - DNA, 15 bp, Homo sapiens
aaggaccctcaaggc

SEQ ID NO: 513352 - DNA, 15 bp, Homo sapiens
caaggaccctcaagg

SEQ ID NO: 513353 - DNA, 15 bp, Homo sapiens
ccaaggaccctcaag

SEQ ID NO: 513354 - DNA, 15 bp, Homo sapiens
cccaaggaccctcaa

SEQ ID NO: 513355 - DNA, 15 bp, Homo sapiens
gcccaaggaccctca

SEQ ID NO: 513356 - DNA, 15 bp, Homo sapiens
cgcccaaggaccctc

SEQ ID NO: 513357 - DNA, 15 bp, Homo sapiens
gcgcccaaggaccct

SEQ ID NO: 513358 - DNA, 15 bp, Homo sapiens
ggcgcccaaggaccc

SEQ ID NO: 513359 - DNA, 15 bp, Homo sapiens
aggcgcccaaggacc

SEQ ID NO: 513360 - DNA, 15 bp, Homo sapiens
caggcgcccaaggac

SEQ ID NO: 513361 - DNA, 15 bp, Homo sapiens
ccaggcgcccaagga

SEQ ID NO: 513362 - DNA, 15 bp, Homo sapiens
gccaggcgcccaagg

SEQ ID NO: 513363 - DNA, 15 bp, Homo sapiens
cgccaggcgcccaag

SEQ ID NO: 513364 - DNA, 15 bp, Homo sapiens
tcgccaggcgcccaa

SEQ ID NO: 513365 - DNA, 15 bp, Homo sapiens
ctcgccaggcgccca

SEQ ID NO: 513366 - DNA, 15 bp, Homo sapiens
cctcgccaggcgccc

SEQ ID NO: 513367 - DNA, 15 bp, Homo sapiens
ccctcgccaggcgcc

SEQ ID NO: 513368 - DNA, 15 bp, Homo sapiens
cccctcgccaggcgc

SEQ ID NO: 513369 - DNA, 15 bp, Homo sapiens
ccccctcgccaggcg

SEQ ID NO: 513370 - DNA, 15 bp, Homo sapiens
tccccctcgccaggc

SEQ ID NO: 513371 - DNA, 15 bp, Homo sapiens
ctccccctcgccagg

SEQ ID NO: 513372 - DNA, 15 bp, Homo sapiens
gctccccctcgccag

SEQ ID NO: 513373 - DNA, 15 bp, Homo sapiens
agctccccctcgcca

SEQ ID NO: 513374 - DNA, 15 bp, Homo sapiens
cagctccccctcgcc

SEQ ID NO: 513375 - DNA, 15 bp, Homo sapiens
acagctccccctcgc

SEQ ID NO: 513376 - DNA, 15 bp, Homo sapiens
cacagctccccctcg

SEQ ID NO: 513377 - DNA, 15 bp, Homo sapiens
ccacagctccccctc

SEQ ID NO: 513378 - DNA, 15 bp, Homo sapiens
cccacagctccccct

SEQ ID NO: 513379 - DNA, 15 bp, Homo sapiens
gcccacagctccccc

SEQ ID NO: 513380 - DNA, 15 bp, Homo sapiens
agcccacagctcccc

SEQ ID NO: 513381 - DNA, 15 bp, Homo sapiens
cagcccacagctccc

SEQ ID NO: 513382 - DNA, 15 bp, Homo sapiens
gcagcccacagctcc

SEQ ID NO: 513383 - DNA, 15 bp, Homo sapiens
cgcagcccacagctc

SEQ ID NO: 513384 - DNA, 15 bp, Homo sapiens
gcgcagcccacagct

SEQ ID NO: 513385 - DNA, 15 bp, Homo sapiens
agcgcagcccacagc

SEQ ID NO: 513386 - DNA, 15 bp, Homo sapiens
gagcgcagcccacag

SEQ ID NO: 513387 - DNA, 15 bp, Homo sapiens
ggagcgcagcccaca

SEQ ID NO: 513388 - DNA, 15 bp, Homo sapiens
gggagcgcagcccac

SEQ ID NO: 513389 - DNA, 15 bp, Homo sapiens
ggggagcgcagccca

SEQ ID NO: 513390 - DNA, 15 bp, Homo sapiens
tggggagcgcagccc

SEQ ID NO: 513391 - DNA, 15 bp, Homo sapiens
ctggggagcgcagcc

SEQ ID NO: 513392 - DNA, 15 bp, Homo sapiens
gctggggagcgcagc

SEQ ID NO: 513393 - DNA, 15 bp, Homo sapiens
cgctggggagcgcag

SEQ ID NO: 513394 - DNA, 15 bp, Homo sapiens
ccgctggggagcgca

SEQ ID NO: 513395 - DNA, 15 bp, Homo sapiens
tccgctggggagcgc

SEQ ID NO: 513396 - DNA, 15 bp, Homo sapiens
ttccgctggggagcg

SEQ ID NO: 513397 - DNA, 15 bp, Homo sapiens
attccgctggggagc

SEQ ID NO: 513398 - DNA, 15 bp, Homo sapiens
gattccgctggggag

SEQ ID NO: 513399 - DNA, 15 bp, Homo sapiens
cgattccgctgggga

SEQ ID NO: 513400 - DNA, 15 bp, Homo sapiens
ccgattccgctgggg

SEQ ID NO: 513401 - DNA, 15 bp, Homo sapiens
cccgattccgctggg

SEQ ID NO: 513402 - DNA, 15 bp, Homo sapiens
ccccgattccgctgg

SEQ ID NO: 513403 - DNA, 15 bp, Homo sapiens
cccccgattccgctg

SEQ ID NO: 513404 - DNA, 15 bp, Homo sapiens
acccccgattccgct

SEQ ID NO: 513405 - DNA, 15 bp, Homo sapiens
cacccccgattccgc

SEQ ID NO: 513406 - DNA, 15 bp, Homo sapiens
acacccccgattccg

SEQ ID NO: 513407 - DNA, 15 bp, Homo sapiens
gacacccccgattcc

SEQ ID NO: 513408 - DNA, 15 bp, Homo sapiens
ggacacccccgattc

SEQ ID NO: 513409 - DNA, 15 bp, Homo sapiens
gggacacccccgatt

SEQ ID NO: 513410 - DNA, 15 bp, Homo sapiens
ggggacacccccgat

SEQ ID NO: 513411 - DNA, 15 bp, Homo sapiens
gggggacacccccga

SEQ ID NO: 513412 - DNA, 15 bp, Homo sapiens
cgggggacacccccg

SEQ ID NO: 513413 - DNA, 15 bp, Homo sapiens
gcgggggacaccccc

SEQ ID NO: 513414 - DNA, 15 bp, Homo sapiens
cgcgggggacacccc

SEQ ID NO: 513415 - DNA, 15 bp, Homo sapiens
acgcgggggacaccc

SEQ ID NO: 513416 - DNA, 15 bp, Homo sapiens
aacgcgggggacacc

SEQ ID NO: 513417 - DNA, 15 bp, Homo sapiens
caacgcgggggacac

SEQ ID NO: 513418 - DNA, 15 bp, Homo sapiens
gcaacgcgggggaca

SEQ ID NO: 513419 - DNA, 15 bp, Homo sapiens
agcaacgcgggggac

SEQ ID NO: 513420 - DNA, 15 bp, Homo sapiens
gagcaacgcggggga

SEQ ID NO: 513421 - DNA, 15 bp, Homo sapiens
ggagcaacgcggggg

SEQ ID NO: 513422 - DNA, 15 bp, Homo sapiens
cggagcaacgcgggg

SEQ ID NO: 513423 - DNA, 15 bp, Homo sapiens
ccggagcaacgcggg

SEQ ID NO: 513424 - DNA, 15 bp, Homo sapiens
gccggagcaacgcgg

SEQ ID NO: 513425 - DNA, 15 bp, Homo sapiens
ggccggagcaacgcg

SEQ ID NO: 513426 - DNA, 15 bp, Homo sapiens
tggccggagcaacgc

SEQ ID NO: 513427 - DNA, 15 bp, Homo sapiens
ctggccggagcaacg

SEQ ID NO: 513428 - DNA, 15 bp, Homo sapiens
cctggccggagcaac

SEQ ID NO: 513429 - DNA, 15 bp, Homo sapiens
gcctggccggagcaa

SEQ ID NO: 513430 - DNA, 15 bp, Homo sapiens
ggcctggccggagca

SEQ ID NO: 513431 - DNA, 15 bp, Homo sapiens
cggcctggccggagc

SEQ ID NO: 513432 - DNA, 15 bp, Homo sapiens
ccggcctggccggag

SEQ ID NO: 513433 - DNA, 15 bp, Homo sapiens
cccggcctggccgga

SEQ ID NO: 513434 - DNA, 15 bp, Homo sapiens
ccccggcctggccgg

SEQ ID NO: 513435 - DNA, 15 bp, Homo sapiens
gccccggcctggccg

SEQ ID NO: 513436 - DNA, 15 bp, Homo sapiens
ggccccggcctggcc

SEQ ID NO: 513437 - DNA, 15 bp, Homo sapiens
aggccccggcctggc

SEQ ID NO: 513438 - DNA, 15 bp, Homo sapiens
caggccccggcctgg

SEQ ID NO: 513439 - DNA, 15 bp, Homo sapiens
gcaggccccggcctg

SEQ ID NO: 513440 - DNA, 15 bp, Homo sapiens
tgcaggccccggcct

SEQ ID NO: 513441 - DNA, 15 bp, Homo sapiens
ctgcaggccccggcc

SEQ ID NO: 513442 - DNA, 15 bp, Homo sapiens
gctgcaggccccggc

SEQ ID NO: 513443 - DNA, 15 bp, Homo sapiens
ggctgcaggccccgg

SEQ ID NO: 513444 - DNA, 15 bp, Homo sapiens
cggctgcaggccccg

SEQ ID NO: 513445 - DNA, 15 bp, Homo sapiens
tcggctgcaggcccc

SEQ ID NO: 513446 - DNA, 15 bp, Homo sapiens
ctcggctgcaggccc

SEQ ID NO: 513447 - DNA, 15 bp, Homo sapiens
actcggctgcaggcc

SEQ ID NO: 513448 - DNA, 15 bp, Homo sapiens
gactcggctgcaggc

SEQ ID NO: 513449 - DNA, 15 bp, Homo sapiens
cgactcggctgcagg

SEQ ID NO: 513450 - DNA, 15 bp, Homo sapiens
tcgactcggctgcag

SEQ ID NO: 513451 - DNA, 15 bp, Homo sapiens
gtcgactcggctgca

SEQ ID NO: 513452 - DNA, 15 bp, Homo sapiens
agtcgactcggctgc

SEQ ID NO: 513453 - DNA, 15 bp, Homo sapiens
tagtcgactcggctg

SEQ ID NO: 513454 - DNA, 15 bp, Homo sapiens
gtagtcgactcggct

SEQ ID NO: 513455 - DNA, 15 bp, Homo sapiens
ggtagtcgactcggc

SEQ ID NO: 513456 - DNA, 15 bp, Homo sapiens
cggtagtcgactcgg

SEQ ID NO: 513457 - DNA, 15 bp, Homo sapiens
tcggtagtcgactcg

SEQ ID NO: 513458 - DNA, 15 bp, Homo sapiens
ctcggtagtcgactc

SEQ ID NO: 513459 - DNA, 15 bp, Homo sapiens
actcggtagtcgact

SEQ ID NO: 513460 - DNA, 15 bp, Homo sapiens
cactcggtagtcgac

SEQ ID NO: 513461 - DNA, 15 bp, Homo sapiens
ccactcggtagtcga

SEQ ID NO: 513462 - DNA, 15 bp, Homo sapiens
tccactcggtagtcg

SEQ ID NO: 513463 - DNA, 15 bp, Homo sapiens
ctccactcggtagtc

SEQ ID NO: 513464 - DNA, 15 bp, Homo sapiens
gctccactcggtagt

SEQ ID NO: 513465 - DNA, 15 bp, Homo sapiens
tgctccactcggtag

SEQ ID NO: 513466 - DNA, 15 bp, Homo sapiens
gtgctccactcggta

SEQ ID NO: 513467 - DNA, 15 bp, Homo sapiens
agtgctccactcggt

SEQ ID NO: 513468 - DNA, 15 bp, Homo sapiens
cagtgctccactcgg

SEQ ID NO: 513469 - DNA, 15 bp, Homo sapiens
tcagtgctccactcg

SEQ ID NO: 513470 - DNA, 15 bp, Homo sapiens
ttcagtgctccactc

SEQ ID NO: 513471 - DNA, 15 bp, Homo sapiens
gttcagtgctccact

SEQ ID NO: 513472 - DNA, 15 bp, Homo sapiens
cgttcagtgctccac

SEQ ID NO: 513473 - DNA, 15 bp, Homo sapiens
ccgttcagtgctcca

SEQ ID NO: 513474 - DNA, 15 bp, Homo sapiens
gccgttcagtgctcc

SEQ ID NO: 513475 - DNA, 15 bp, Homo sapiens
cgccgttcagtgctc

SEQ ID NO: 513476 - DNA, 15 bp, Homo sapiens
gcgccgttcagtgct

SEQ ID NO: 513477 - DNA, 15 bp, Homo sapiens
cgcgccgttcagtgc

SEQ ID NO: 513478 - DNA, 15 bp, Homo sapiens
ccgcgccgttcagtg

SEQ ID NO: 513479 - DNA, 15 bp, Homo sapiens
tccgcgccgttcagt

SEQ ID NO: 513480 - DNA, 15 bp, Homo sapiens
atccgcgccgttcag

SEQ ID NO: 513481 - DNA, 15 bp, Homo sapiens
aatccgcgccgttca

SEQ ID NO: 513482 - DNA, 15 bp, Homo sapiens
aaatccgcgccgttc

SEQ ID NO: 513483 - DNA, 15 bp, Homo sapiens
aaaatccgcgccgtt

SEQ ID NO: 513484 - DNA, 15 bp, Homo sapiens
caaaatccgcgccgt

SEQ ID NO: 513485 - DNA, 15 bp, Homo sapiens
tcaaaatccgcgccg

SEQ ID NO: 513486 - DNA, 15 bp, Homo sapiens
ctcaaaatccgcgcc

SEQ ID NO: 513487 - DNA, 15 bp, Homo sapiens
tctcaaaatccgcgc

SEQ ID NO: 513488 - DNA, 15 bp, Homo sapiens
gtctcaaaatccgcg

SEQ ID NO: 513489 - DNA, 15 bp, Homo sapiens
ggtctcaaaatccgc

SEQ ID NO: 513490 - DNA, 15 bp, Homo sapiens
cggtctcaaaatccg

SEQ ID NO: 513491 - DNA, 15 bp, Homo sapiens
tcggtctcaaaatcc

SEQ ID NO: 513492 - DNA, 15 bp, Homo sapiens
gtcggtctcaaaatc

SEQ ID NO: 513493 - DNA, 15 bp, Homo sapiens
agtcggtctcaaaat

SEQ ID NO: 513494 - DNA, 15 bp, Homo sapiens
gagtcggtctcaaaa

SEQ ID NO: 513495 - DNA, 15 bp, Homo sapiens
ggagtcggtctcaaa

SEQ ID NO: 513496 - DNA, 15 bp, Homo sapiens
cggagtcggtctcaa

SEQ ID NO: 513497 - DNA, 15 bp, Homo sapiens
ccggagtcggtctca

SEQ ID NO: 513498 - DNA, 15 bp, Homo sapiens
accggagtcggtctc

SEQ ID NO: 513499 - DNA, 15 bp, Homo sapiens
aaccggagtcggtct

SEQ ID NO: 513500 - DNA, 15 bp, Homo sapiens
aaaccggagtcggtc

SEQ ID NO: 513501 - DNA, 15 bp, Homo sapiens
aaaaccggagtcggt

SEQ ID NO: 513502 - DNA, 15 bp, Homo sapiens
aaaaaccggagtcgg

SEQ ID NO: 513503 - DNA, 15 bp, Homo sapiens
caaaaaccggagtcg

SEQ ID NO: 513504 - DNA, 15 bp, Homo sapiens
acaaaaaccggagtc

SEQ ID NO: 513505 - DNA, 15 bp, Homo sapiens
gacaaaaaccggagt

SEQ ID NO: 513506 - DNA, 15 bp, Homo sapiens
ggacaaaaaccggag

SEQ ID NO: 513507 - DNA, 15 bp, Homo sapiens
aggacaaaaaccgga

SEQ ID NO: 513508 - DNA, 15 bp, Homo sapiens
aaggacaaaaaccgg

SEQ ID NO: 513509 - DNA, 15 bp, Homo sapiens
caaggacaaaaaccg

SEQ ID NO: 513510 - DNA, 15 bp, Homo sapiens
ccaaggacaaaaacc

SEQ ID NO: 513511 - DNA, 15 bp, Homo sapiens
tccaaggacaaaaac

SEQ ID NO: 513512 - DNA, 15 bp, Homo sapiens
atccaaggacaaaaa

SEQ ID NO: 513513 - DNA, 15 bp, Homo sapiens
aatccaaggacaaaa

SEQ ID NO: 513514 - DNA, 15 bp, Homo sapiens
aaatccaaggacaaa

SEQ ID NO: 513515 - DNA, 15 bp, Homo sapiens
aaaatccaaggacaa

SEQ ID NO: 513516 - DNA, 15 bp, Homo sapiens
taaaatccaaggaca

SEQ ID NO: 513517 - DNA, 15 bp, Homo sapiens
ttaaaatccaaggac

SEQ ID NO: 513518 - DNA, 15 bp, Homo sapiens
tttaaaatccaagga

SEQ ID NO: 513519 - DNA, 15 bp, Homo sapiens
gtttaaaatccaagg

SEQ ID NO: 513520 - DNA, 15 bp, Homo sapiens
cgtttaaaatccaag

SEQ ID NO: 513521 - DNA, 15 bp, Homo sapiens
acgtttaaaatccaa

SEQ ID NO: 513522 - DNA, 15 bp, Homo sapiens
aacgtttaaaatcca

SEQ ID NO: 513523 - DNA, 15 bp, Homo sapiens
aaacgtttaaaatcc

SEQ ID NO: 513524 - DNA, 15 bp, Homo sapiens
aaaacgtttaaaatc

SEQ ID NO: 513525 - DNA, 15 bp, Homo sapiens
aaaaacgtttaaaat

SEQ ID NO: 513526 - DNA, 15 bp, Homo sapiens
taaaaacgtttaaaa

SEQ ID NO: 513527 - DNA, 15 bp, Homo sapiens
ataaaaacgtttaaa

SEQ ID NO: 513528 - DNA, 15 bp, Homo sapiens
gataaaaacgtttaa

SEQ ID NO: 513529 - DNA, 15 bp, Homo sapiens
tgataaaaacgttta

SEQ ID NO: 513530 - DNA, 15 bp, Homo sapiens
atgataaaaacgttt

SEQ ID NO: 513531 - DNA, 15 bp, Homo sapiens
aatgataaaaacgtt

SEQ ID NO: 513532 - DNA, 15 bp, Homo sapiens
caatgataaaaacgt

SEQ ID NO: 513533 - DNA, 15 bp, Homo sapiens
acaatgataaaaacg

SEQ ID NO: 513534 - DNA, 15 bp, Homo sapiens
aacaatgataaaaac

SEQ ID NO: 513535 - DNA, 15 bp, Homo sapiens
aaacaatgataaaaa

SEQ ID NO: 513536 - DNA, 15 bp, Homo sapiens
aaaacaatgataaaa

SEQ ID NO: 513537 - DNA, 15 bp, Homo sapiens
aaaaacaatgataaa

SEQ ID NO: 513538 - DNA, 15 bp, Homo sapiens
caaaaacaatgataa

SEQ ID NO: 513539 - DNA, 15 bp, Homo sapiens
acaaaaacaatgata

SEQ ID NO: 513540 - DNA, 15 bp, Homo sapiens
aacaaaaacaatgat

SEQ ID NO: 513541 - DNA, 15 bp, Homo sapiens
aaacaaaaacaatga

SEQ ID NO: 513542 - DNA, 15 bp, Homo sapiens
aaaacaaaaacaatg

SEQ ID NO: 513543 - DNA, 15 bp, Homo sapiens
caaaacaaaaacaat

SEQ ID NO: 513544 - DNA, 15 bp, Homo sapiens
gcaaaacaaaaacaa

SEQ ID NO: 513545 - DNA, 15 bp, Homo sapiens
agcaaaacaaaaaca

SEQ ID NO: 513546 - DNA, 15 bp, Homo sapiens
aagcaaaacaaaaac

SEQ ID NO: 513547 - DNA, 15 bp, Homo sapiens
aaagcaaaacaaaaa

SEQ ID NO: 513548 - DNA, 15 bp, Homo sapiens
gaaagcaaaacaaaa

SEQ ID NO: 513549 - DNA, 15 bp, Homo sapiens
agaaagcaaaacaaa

SEQ ID NO: 513550 - DNA, 15 bp, Homo sapiens
gagaaagcaaaacaa

SEQ ID NO: 513551 - DNA, 15 bp, Homo sapiens
ggagaaagcaaaaca

SEQ ID NO: 513552 - DNA, 15 bp, Homo sapiens
aggagaaagcaaaac

SEQ ID NO: 513553 - DNA, 15 bp, Homo sapiens
aaggagaaagcaaaa

SEQ ID NO: 513554 - DNA, 15 bp, Homo sapiens
taaggagaaagcaaa

SEQ ID NO: 513555 - DNA, 15 bp, Homo sapiens
ctaaggagaaagcaa

SEQ ID NO: 513556 - DNA, 15 bp, Homo sapiens
gctaaggagaaagca

SEQ ID NO: 513557 - DNA, 15 bp, Homo sapiens
agctaaggagaaagc

SEQ ID NO: 513558 - DNA, 15 bp, Homo sapiens
cagctaaggagaaag

SEQ ID NO: 513559 - DNA, 15 bp, Homo sapiens
acagctaaggagaaa

SEQ ID NO: 513560 - DNA, 15 bp, Homo sapiens
aacagctaaggagaa

SEQ ID NO: 513561 - DNA, 15 bp, Homo sapiens
aaacagctaaggaga

SEQ ID NO: 513562 - DNA, 15 bp, Homo sapiens
aaaacagctaaggag

SEQ ID NO: 513563 - DNA, 15 bp, Homo sapiens
taaaacagctaagga

SEQ ID NO: 513564 - DNA, 15 bp, Homo sapiens
ctaaaacagctaagg

SEQ ID NO: 513565 - DNA, 15 bp, Homo sapiens
actaaaacagctaag

SEQ ID NO: 513566 - DNA, 15 bp, Homo sapiens
gactaaaacagctaa

SEQ ID NO: 513567 - DNA, 15 bp, Homo sapiens
agactaaaacagcta

SEQ ID NO: 513568 - DNA, 15 bp, Homo sapiens
gagactaaaacagct

SEQ ID NO: 513569 - DNA, 15 bp, Homo sapiens
ggagactaaaacagc

SEQ ID NO: 513570 - DNA, 15 bp, Homo sapiens
aggagactaaaacag

SEQ ID NO: 513571 - DNA, 15 bp, Homo sapiens
gaggagactaaaaca

SEQ ID NO: 513572 - DNA, 15 bp, Homo sapiens
agaggagactaaaac

SEQ ID NO: 513573 - DNA, 15 bp, Homo sapiens
cagaggagactaaaa

SEQ ID NO: 513574 - DNA, 15 bp, Homo sapiens
gcagaggagactaaa

SEQ ID NO: 513575 - DNA, 15 bp, Homo sapiens
cgcagaggagactaa

SEQ ID NO: 513576 - DNA, 15 bp, Homo sapiens
gcgcagaggagacta

SEQ ID NO: 513577 - DNA, 15 bp, Homo sapiens
cgcgcagaggagact

SEQ ID NO: 513578 - DNA, 15 bp, Homo sapiens
gcgcgcagaggagac

SEQ ID NO: 513579 - DNA, 15 bp, Homo sapiens
ggcgcgcagaggaga

SEQ ID NO: 513580 - DNA, 15 bp, Homo sapiens
tggcgcgcagaggag

SEQ ID NO: 513581 - DNA, 15 bp, Homo sapiens
ctggcgcgcagagga

SEQ ID NO: 513582 - DNA, 15 bp, Homo sapiens
cctggcgcgcagagg

SEQ ID NO: 513583 - DNA, 15 bp, Homo sapiens
ccctggcgcgcagag

SEQ ID NO: 513584 - DNA, 15 bp, Homo sapiens
cccctggcgcgcaga

SEQ ID NO: 513585 - DNA, 15 bp, Homo sapiens
gcccctggcgcgcag

SEQ ID NO: 513586 - DNA, 15 bp, Homo sapiens
agcccctggcgcgca

SEQ ID NO: 513587 - DNA, 15 bp, Homo sapiens
cagcccctggcgcgc

SEQ ID NO: 513588 - DNA, 15 bp, Homo sapiens
ccagcccctggcgcg

SEQ ID NO: 513589 - DNA, 15 bp, Homo sapiens
cccagcccctggcgc

SEQ ID NO: 513590 - DNA, 15 bp, Homo sapiens
tcccagcccctggcg

SEQ ID NO: 513591 - DNA, 15 bp, Homo sapiens
ctcccagcccctggc

SEQ ID NO: 513592 - DNA, 15 bp, Homo sapiens
cctcccagcccctgg

SEQ ID NO: 513593 - DNA, 15 bp, Homo sapiens
ccctcccagcccctg

SEQ ID NO: 513594 - DNA, 15 bp, Homo sapiens
gccctcccagcccct

SEQ ID NO: 513595 - DNA, 15 bp, Homo sapiens
cgccctcccagcccc

SEQ ID NO: 513596 - DNA, 15 bp, Homo sapiens
ccgccctcccagccc

SEQ ID NO: 513597 - DNA, 15 bp, Homo sapiens
tccgccctcccagcc

SEQ ID NO: 513598 - DNA, 15 bp, Homo sapiens
ctccgccctcccagc

SEQ ID NO: 513599 - DNA, 15 bp, Homo sapiens
gctccgccctcccag

SEQ ID NO: 513600 - DNA, 15 bp, Homo sapiens
cgctccgccctccca

SEQ ID NO: 513601 - DNA, 15 bp, Homo sapiens
gcgctccgccctccc

SEQ ID NO: 513602 - DNA, 15 bp, Homo sapiens
agcgctccgccctcc

SEQ ID NO: 513603 - DNA, 15 bp, Homo sapiens
gagcgctccgccctc

SEQ ID NO: 513604 - DNA, 15 bp, Homo sapiens
ggagcgctccgccct

SEQ ID NO: 513605 - DNA, 15 bp, Homo sapiens
gggagcgctccgccc

SEQ ID NO: 513606 - DNA, 15 bp, Homo sapiens
ggggagcgctccgcc

SEQ ID NO: 513607 - DNA, 15 bp, Homo sapiens
cggggagcgctccgc

SEQ ID NO: 513608 - DNA, 15 bp, Homo sapiens
ccggggagcgctccg

SEQ ID NO: 513609 - DNA, 15 bp, Homo sapiens
gccggggagcgctcc

SEQ ID NO: 513610 - DNA, 15 bp, Homo sapiens
ggccggggagcgctc

SEQ ID NO: 513611 - DNA, 15 bp, Homo sapiens
cggccggggagcgct

SEQ ID NO: 513612 - DNA, 15 bp, Homo sapiens
ccggccggggagcgc

SEQ ID NO: 513613 - DNA, 15 bp, Homo sapiens
gccggccggggagcg

SEQ ID NO: 513614 - DNA, 15 bp, Homo sapiens
ggccggccggggagc

SEQ ID NO: 513615 - DNA, 15 bp, Homo sapiens
gggccggccggggag

SEQ ID NO: 513616 - DNA, 15 bp, Homo sapiens
ggggccggccgggga

SEQ ID NO: 513617 - DNA, 15 bp, Homo sapiens
cggggccggccgggg

SEQ ID NO: 513618 - DNA, 15 bp, Homo sapiens
ccggggccggccggg

SEQ ID NO: 513619 - DNA, 15 bp, Homo sapiens
gccggggccggccgg

SEQ ID NO: 513620 - DNA, 15 bp, Homo sapiens
tgccggggccggccg

SEQ ID NO: 513621 - DNA, 15 bp, Homo sapiens
ctgccggggccggcc

SEQ ID NO: 513622 - DNA, 15 bp, Homo sapiens
cctgccggggccggc

SEQ ID NO: 513623 - DNA, 15 bp, Homo sapiens
acctgccggggccgg

SEQ ID NO: 513624 - DNA, 15 bp, Homo sapiens
cacctgccggggccg

SEQ ID NO: 513625 - DNA, 15 bp, Homo sapiens
gcacctgccggggcc

SEQ ID NO: 513626 - DNA, 15 bp, Homo sapiens
ggcacctgccggggc

SEQ ID NO: 513627 - DNA, 15 bp, Homo sapiens
aggcacctgccgggg

SEQ ID NO: 513628 - DNA, 15 bp, Homo sapiens
gaggcacctgccggg

SEQ ID NO: 513629 - DNA, 15 bp, Homo sapiens
ggaggcacctgccgg

SEQ ID NO: 513630 - DNA, 15 bp, Homo sapiens
tggaggcacctgccg

SEQ ID NO: 513631 - DNA, 15 bp, Homo sapiens
ttggaggcacctgcc

SEQ ID NO: 513632 - DNA, 15 bp, Homo sapiens
cttggaggcacctgc

SEQ ID NO: 513633 - DNA, 15 bp, Homo sapiens
tcttggaggcacctg

SEQ ID NO: 513634 - DNA, 15 bp, Homo sapiens
gtcttggaggcacct

SEQ ID NO: 513635 - DNA, 15 bp, Homo sapiens
tgtcttggaggcacc

SEQ ID NO: 513636 - DNA, 15 bp, Homo sapiens
gtgtcttggaggcac

SEQ ID NO: 513637 - DNA, 15 bp, Homo sapiens
ggtgtcttggaggca

SEQ ID NO: 513638 - DNA, 15 bp, Homo sapiens
gggtgtcttggaggc

SEQ ID NO: 513639 - DNA, 15 bp, Homo sapiens
cgggtgtcttggagg

SEQ ID NO: 513640 - DNA, 15 bp, Homo sapiens
gcgggtgtcttggag

SEQ ID NO: 513641 - DNA, 15 bp, Homo sapiens
cgcgggtgtcttgga

SEQ ID NO: 513642 - DNA, 15 bp, Homo sapiens
gcgcgggtgtcttgg

SEQ ID NO: 513643 - DNA, 15 bp, Homo sapiens
agcgcgggtgtcttg

SEQ ID NO: 513644 - DNA, 15 bp, Homo sapiens
cagcgcgggtgtctt

SEQ ID NO: 513645 - DNA, 15 bp, Homo sapiens
ccagcgcgggtgtct

SEQ ID NO: 513646 - DNA, 15 bp, Homo sapiens
accagcgcgggtgtc

SEQ ID NO: 513647 - DNA, 15 bp, Homo sapiens
gaccagcgcgggtgt

SEQ ID NO: 513648 - DNA, 15 bp, Homo sapiens
tgaccagcgcgggtg

SEQ ID NO: 513649 - DNA, 15 bp, Homo sapiens
ttgaccagcgcgggt

SEQ ID NO: 513650 - DNA, 15 bp, Homo sapiens
cttgaccagcgcggg

SEQ ID NO: 513651 - DNA, 15 bp, Homo sapiens
ccttgaccagcgcgg

SEQ ID NO: 513652 - DNA, 15 bp, Homo sapiens
tccttgaccagcgcg

SEQ ID NO: 513653 - DNA, 15 bp, Homo sapiens
ctccttgaccagcgc

SEQ ID NO: 513654 - DNA, 15 bp, Homo sapiens
gctccttgaccagcg

SEQ ID NO: 513655 - DNA, 15 bp, Homo sapiens
agctccttgaccagc

SEQ ID NO: 513656 - DNA, 15 bp, Homo sapiens
aagctccttgaccag

SEQ ID NO: 513657 - DNA, 15 bp, Homo sapiens
gaagctccttgacca

SEQ ID NO: 513658 - DNA, 15 bp, Homo sapiens
agaagctccttgacc

SEQ ID NO: 513659 - DNA, 15 bp, Homo sapiens
aagaagctccttgac

SEQ ID NO: 513660 - DNA, 15 bp, Homo sapiens
caagaagctccttga

SEQ ID NO: 513661 - DNA, 15 bp, Homo sapiens
tcaagaagctccttg

SEQ ID NO: 513662 - DNA, 15 bp, Homo sapiens
ttcaagaagctcctt

SEQ ID NO: 513663 - DNA, 15 bp, Homo sapiens
attcaagaagctcct

SEQ ID NO: 513664 - DNA, 15 bp, Homo sapiens
aattcaagaagctcc

SEQ ID NO: 513665 - DNA, 15 bp, Homo sapiens
aaattcaagaagctc

SEQ ID NO: 513666 - DNA, 15 bp, Homo sapiens
taaattcaagaagct

SEQ ID NO: 513667 - DNA, 15 bp, Homo sapiens
ctaaattcaagaagc

SEQ ID NO: 513668 - DNA, 15 bp, Homo sapiens
actaaattcaagaag

SEQ ID NO: 513669 - DNA, 15 bp, Homo sapiens
aactaaattcaagaa

SEQ ID NO: 513670 - DNA, 15 bp, Homo sapiens
aaactaaattcaaga

SEQ ID NO: 513671 - DNA, 15 bp, Homo sapiens
aaaactaaattcaag

SEQ ID NO: 513672 - DNA, 15 bp, Homo sapiens
aaaaactaaattcaa

SEQ ID NO: 513673 - DNA, 15 bp, Homo sapiens
caaaaactaaattca

SEQ ID NO: 513674 - DNA, 15 bp, Homo sapiens
acaaaaactaaattc

SEQ ID NO: 513675 - DNA, 15 bp, Homo sapiens
aacaaaaactaaatt

SEQ ID NO: 513676 - DNA, 15 bp, Homo sapiens
aaacaaaaactaaat

SEQ ID NO: 513677 - DNA, 15 bp, Homo sapiens
aaaacaaaaactaaa

SEQ ID NO: 513678 - DNA, 15 bp, Homo sapiens
gaaaacaaaaactaa

SEQ ID NO: 513679 - DNA, 15 bp, Homo sapiens
tgaaaacaaaaacta

SEQ ID NO: 513680 - DNA, 15 bp, Homo sapiens
gtgaaaacaaaaact

SEQ ID NO: 513681 - DNA, 15 bp, Homo sapiens
tgtgaaaacaaaaac

SEQ ID NO: 513682 - DNA, 15 bp, Homo sapiens
atgtgaaaacaaaaa

SEQ ID NO: 513683 - DNA, 15 bp, Homo sapiens
aatgtgaaaacaaaa

SEQ ID NO: 513684 - DNA, 15 bp, Homo sapiens
aaatgtgaaaacaaa

SEQ ID NO: 513685 - DNA, 15 bp, Homo sapiens
aaaatgtgaaaacaa

SEQ ID NO: 513686 - DNA, 15 bp, Homo sapiens
gaaaatgtgaaaaca

SEQ ID NO: 513687 - DNA, 15 bp, Homo sapiens
agaaaatgtgaaaac

SEQ ID NO: 513688 - DNA, 15 bp, Homo sapiens
aagaaaatgtgaaaa

SEQ ID NO: 513689 - DNA, 15 bp, Homo sapiens
aaagaaaatgtgaaa

SEQ ID NO: 513690 - DNA, 15 bp, Homo sapiens
gaaagaaaatgtgaa

SEQ ID NO: 513691 - DNA, 15 bp, Homo sapiens
ggaaagaaaatgtga

SEQ ID NO: 513692 - DNA, 15 bp, Homo sapiens
gggaaagaaaatgtg

SEQ ID NO: 513693 - DNA, 15 bp, Homo sapiens
ggggaaagaaaatgt

SEQ ID NO: 513694 - DNA, 15 bp, Homo sapiens
aggggaaagaaaatg

SEQ ID NO: 513695 - DNA, 15 bp, Homo sapiens
gaggggaaagaaaat

SEQ ID NO: 513696 - DNA, 15 bp, Homo sapiens
ggaggggaaagaaaa

SEQ ID NO: 513697 - DNA, 15 bp, Homo sapiens
aggaggggaaagaaa

SEQ ID NO: 513698 - DNA, 15 bp, Homo sapiens
aaggaggggaaagaa

SEQ ID NO: 513699 - DNA, 15 bp, Homo sapiens
caaggaggggaaaga

SEQ ID NO: 513700 - DNA, 15 bp, Homo sapiens
acaaggaggggaaag

SEQ ID NO: 513701 - DNA, 15 bp, Homo sapiens
tacaaggaggggaaa

SEQ ID NO: 513702 - DNA, 15 bp, Homo sapiens
ctacaaggaggggaa

SEQ ID NO: 513703 - DNA, 15 bp, Homo sapiens
tctacaaggagggga

SEQ ID NO: 513704 - DNA, 15 bp, Homo sapiens
ctctacaaggagggg

SEQ ID NO: 513705 - DNA, 15 bp, Homo sapiens
tctctacaaggaggg

SEQ ID NO: 513706 - DNA, 15 bp, Homo sapiens
ttctctacaaggagg

SEQ ID NO: 513707 - DNA, 15 bp, Homo sapiens
cttctctacaaggag

SEQ ID NO: 513708 - DNA, 15 bp, Homo sapiens
ccttctctacaagga

SEQ ID NO: 513709 - DNA, 15 bp, Homo sapiens
tccttctctacaagg

SEQ ID NO: 513710 - DNA, 15 bp, Homo sapiens
ctccttctctacaag

SEQ ID NO: 513711 - DNA, 15 bp, Homo sapiens
gctccttctctacaa

SEQ ID NO: 513712 - DNA, 15 bp, Homo sapiens
agctccttctctaca

SEQ ID NO: 513713 - DNA, 15 bp, Homo sapiens
gagctccttctctac

SEQ ID NO: 513714 - DNA, 15 bp, Homo sapiens
ggagctccttctcta

SEQ ID NO: 513715 - DNA, 15 bp, Homo sapiens
aggagctccttctct

SEQ ID NO: 513716 - DNA, 15 bp, Homo sapiens
caggagctccttctc

SEQ ID NO: 513717 - DNA, 15 bp, Homo sapiens
tcaggagctccttct

SEQ ID NO: 513718 - DNA, 15 bp, Homo sapiens
atcaggagctccttc

SEQ ID NO: 513719 - DNA, 15 bp, Homo sapiens
gatcaggagctcctt

SEQ ID NO: 513720 - DNA, 15 bp, Homo sapiens
tgatcaggagctcct

SEQ ID NO: 513721 - DNA, 15 bp, Homo sapiens
atgatcaggagctcc

SEQ ID NO: 513722 - DNA, 15 bp, Homo sapiens
catgatcaggagctc

SEQ ID NO: 513723 - DNA, 15 bp, Homo sapiens
tcatgatcaggagct

SEQ ID NO: 513724 - DNA, 15 bp, Homo sapiens
gtcatgatcaggagc

SEQ ID NO: 513725 - DNA, 15 bp, Homo sapiens
cgtcatgatcaggag

SEQ ID NO: 513726 - DNA, 15 bp, Homo sapiens
tcgtcatgatcagga

SEQ ID NO: 513727 - DNA, 15 bp, Homo sapiens
ttcgtcatgatcagg

SEQ ID NO: 513728 - DNA, 15 bp, Homo sapiens
gttcgtcatgatcag

SEQ ID NO: 513729 - DNA, 15 bp, Homo sapiens
tgttcgtcatgatca

SEQ ID NO: 513730 - DNA, 15 bp, Homo sapiens
ctgttcgtcatgatc

SEQ ID NO: 513731 - DNA, 15 bp, Homo sapiens
cctgttcgtcatgat

SEQ ID NO: 513732 - DNA, 15 bp, Homo sapiens
gcctgttcgtcatga

SEQ ID NO: 513733 - DNA, 15 bp, Homo sapiens
tgcctgttcgtcatg

SEQ ID NO: 513734 - DNA, 15 bp, Homo sapiens
ctgcctgttcgtcat

SEQ ID NO: 513735 - DNA, 15 bp, Homo sapiens
actgcctgttcgtca

SEQ ID NO: 513736 - DNA, 15 bp, Homo sapiens
aactgcctgttcgtc

SEQ ID NO: 513737 - DNA, 15 bp, Homo sapiens
aaactgcctgttcgt

SEQ ID NO: 513738 - DNA, 15 bp, Homo sapiens
aaaactgcctgttcg

SEQ ID NO: 513739 - DNA, 15 bp, Homo sapiens
caaaactgcctgttc

SEQ ID NO: 513740 - DNA, 15 bp, Homo sapiens
tcaaaactgcctgtt

SEQ ID NO: 513741 - DNA, 15 bp, Homo sapiens
ctcaaaactgcctgt

SEQ ID NO: 513742 - DNA, 15 bp, Homo sapiens
gctcaaaactgcctg

SEQ ID NO: 513743 - DNA, 15 bp, Homo sapiens
agctcaaaactgcct

SEQ ID NO: 513744 - DNA, 15 bp, Homo sapiens
tagctcaaaactgcc

SEQ ID NO: 513745 - DNA, 15 bp, Homo sapiens
gtagctcaaaactgc

SEQ ID NO: 513746 - DNA, 15 bp, Homo sapiens
agtagctcaaaactg

SEQ ID NO: 513747 - DNA, 15 bp, Homo sapiens
aagtagctcaaaact

SEQ ID NO: 513748 - DNA, 15 bp, Homo sapiens
taagtagctcaaaac

SEQ ID NO: 513749 - DNA, 15 bp, Homo sapiens
ttaagtagctcaaaa

SEQ ID NO: 513750 - DNA, 15 bp, Homo sapiens
attaagtagctcaaa

SEQ ID NO: 513751 - DNA, 15 bp, Homo sapiens
aattaagtagctcaa

SEQ ID NO: 513752 - DNA, 15 bp, Homo sapiens
gaattaagtagctca

SEQ ID NO: 513753 - DNA, 15 bp, Homo sapiens
tgaattaagtagctc

SEQ ID NO: 513754 - DNA, 15 bp, Homo sapiens
atgaattaagtagct

SEQ ID NO: 513755 - DNA, 15 bp, Homo sapiens
gatgaattaagtagc

SEQ ID NO: 513756 - DNA, 15 bp, Homo sapiens
ggatgaattaagtag

SEQ ID NO: 513757 - DNA, 15 bp, Homo sapiens
cggatgaattaagta

SEQ ID NO: 513758 - DNA, 15 bp, Homo sapiens
ccggatgaattaagt

SEQ ID NO: 513759 - DNA, 15 bp, Homo sapiens
cccggatgaattaag

SEQ ID NO: 513760 - DNA, 15 bp, Homo sapiens
gcccggatgaattaa

SEQ ID NO: 513761 - DNA, 15 bp, Homo sapiens
agcccggatgaatta

SEQ ID NO: 513762 - DNA, 15 bp, Homo sapiens
gagcccggatgaatt

SEQ ID NO: 513763 - DNA, 15 bp, Homo sapiens
ggagcccggatgaat

SEQ ID NO: 513764 - DNA, 15 bp, Homo sapiens
gggagcccggatgaa

SEQ ID NO: 513765 - DNA, 15 bp, Homo sapiens
agggagcccggatga

SEQ ID NO: 513766 - DNA, 15 bp, Homo sapiens
aagggagcccggatg

SEQ ID NO: 513767 - DNA, 15 bp, Homo sapiens
aaagggagcccggat

SEQ ID NO: 513768 - DNA, 15 bp, Homo sapiens
aaaagggagcccgga

SEQ ID NO: 513769 - DNA, 15 bp, Homo sapiens
aaaaagggagcccgg

SEQ ID NO: 513770 - DNA, 15 bp, Homo sapiens
aaaaaagggagcccg

SEQ ID NO: 513771 - DNA, 15 bp, Homo sapiens
aaaaaaagggagccc

SEQ ID NO: 513772 - DNA, 15 bp, Homo sapiens
taaaaaaagggagcc

SEQ ID NO: 513773 - DNA, 15 bp, Homo sapiens
ataaaaaaagggagc

SEQ ID NO: 513774 - DNA, 15 bp, Homo sapiens
aataaaaaaagggag

SEQ ID NO: 513775 - DNA, 15 bp, Homo sapiens
taataaaaaaaggga

SEQ ID NO: 513776 - DNA, 15 bp, Homo sapiens
ttaataaaaaaaggg

SEQ ID NO: 513777 - DNA, 15 bp, Homo sapiens
attaataaaaaaagg

SEQ ID NO: 513778 - DNA, 15 bp, Homo sapiens
tattaataaaaaaag

SEQ ID NO: 513779 - DNA, 15 bp, Homo sapiens
ctattaataaaaaaa

SEQ ID NO: 513780 - DNA, 15 bp, Homo sapiens
gctattaataaaaaa

SEQ ID NO: 513781 - DNA, 15 bp, Homo sapiens
tgctattaataaaaa

SEQ ID NO: 513782 - DNA, 15 bp, Homo sapiens
ttgctattaataaaa

SEQ ID NO: 513783 - DNA, 15 bp, Homo sapiens
attgctattaataaa

SEQ ID NO: 513784 - DNA, 15 bp, Homo sapiens
aattgctattaataa

SEQ ID NO: 513785 - DNA, 15 bp, Homo sapiens
taattgctattaata

SEQ ID NO: 513786 - DNA, 15 bp, Homo sapiens
gtaattgctattaat

SEQ ID NO: 513787 - DNA, 15 bp, Homo sapiens
tgtaattgctattaa

SEQ ID NO: 513788 - DNA, 15 bp, Homo sapiens
ctgtaattgctatta

SEQ ID NO: 513789 - DNA, 15 bp, Homo sapiens
actgtaattgctatt

SEQ ID NO: 513790 - DNA, 15 bp, Homo sapiens
tactgtaattgctat

SEQ ID NO: 513791 - DNA, 15 bp, Homo sapiens
ctactgtaattgcta

SEQ ID NO: 513792 - DNA, 15 bp, Homo sapiens
tctactgtaattgct

SEQ ID NO: 513793 - DNA, 15 bp, Homo sapiens
ctctactgtaattgc

SEQ ID NO: 513794 - DNA, 15 bp, Homo sapiens
tctctactgtaattg

SEQ ID NO: 513795 - DNA, 15 bp, Homo sapiens
ttctctactgtaatt

SEQ ID NO: 513796 - DNA, 15 bp, Homo sapiens
tttctctactgtaat

SEQ ID NO: 513797 - DNA, 15 bp, Homo sapiens
ctttctctactgtaa

SEQ ID NO: 513798 - DNA, 15 bp, Homo sapiens
actttctctactgta

SEQ ID NO: 513799 - DNA, 15 bp, Homo sapiens
aactttctctactgt

SEQ ID NO: 513800 - DNA, 15 bp, Homo sapiens
aaactttctctactg

SEQ ID NO: 513801 - DNA, 15 bp, Homo sapiens
aaaactttctctact

SEQ ID NO: 513802 - DNA, 15 bp, Homo sapiens
taaaactttctctac

SEQ ID NO: 513803 - DNA, 15 bp, Homo sapiens
ataaaactttctcta

SEQ ID NO: 513804 - DNA, 15 bp, Homo sapiens
aataaaactttctct

SEQ ID NO: 513805 - DNA, 15 bp, Homo sapiens
aaataaaactttctc

SEQ ID NO: 513806 - DNA, 15 bp, Homo sapiens
taaataaaactttct

SEQ ID NO: 513807 - DNA, 15 bp, Homo sapiens
ataaataaaactttc

SEQ ID NO: 513808 - DNA, 15 bp, Homo sapiens
aataaataaaacttt

SEQ ID NO: 513809 - DNA, 15 bp, Homo sapiens
aaataaataaaactt

SEQ ID NO: 513810 - DNA, 15 bp, Homo sapiens
aaaataaataaaact

SEQ ID NO: 513811 - DNA, 15 bp, Homo sapiens
aaaaataaataaaac

SEQ ID NO: 513812 - DNA, 15 bp, Homo sapiens
taaaaataaataaaa

SEQ ID NO: 513813 - DNA, 15 bp, Homo sapiens
ttaaaaataaataaa

SEQ ID NO: 513814 - DNA, 15 bp, Homo sapiens
tttaaaaataaataa

SEQ ID NO: 513815 - DNA, 15 bp, Homo sapiens
ctttaaaaataaata

SEQ ID NO: 513816 - DNA, 15 bp, Homo sapiens
tctttaaaaataaat

SEQ ID NO: 513817 - DNA, 15 bp, Homo sapiens
atctttaaaaataaa

SEQ ID NO: 513818 - DNA, 15 bp, Homo sapiens
aatctttaaaaataa

SEQ ID NO: 513819 - DNA, 15 bp, Homo sapiens
aaatctttaaaaata

SEQ ID NO: 513820 - DNA, 15 bp, Homo sapiens
gaaatctttaaaaat

SEQ ID NO: 513821 - DNA, 15 bp, Homo sapiens
tgaaatctttaaaaa

SEQ ID NO: 513822 - DNA, 15 bp, Homo sapiens
ctgaaatctttaaaa

SEQ ID NO: 513823 - DNA, 15 bp, Homo sapiens
gctgaaatctttaaa

SEQ ID NO: 513824 - DNA, 15 bp, Homo sapiens
ggctgaaatctttaa

SEQ ID NO: 513825 - DNA, 15 bp, Homo sapiens
gggctgaaatcttta

SEQ ID NO: 513826 - DNA, 15 bp, Homo sapiens
agggctgaaatcttt

SEQ ID NO: 513827 - DNA, 15 bp, Homo sapiens
gagggctgaaatctt

SEQ ID NO: 513828 - DNA, 15 bp, Homo sapiens
agagggctgaaatct

SEQ ID NO: 513829 - DNA, 15 bp, Homo sapiens
gagagggctgaaatc

SEQ ID NO: 513830 - DNA, 15 bp, Homo sapiens
ggagagggctgaaat

SEQ ID NO: 513831 - DNA, 15 bp, Homo sapiens
aggagagggctgaaa

SEQ ID NO: 513832 - DNA, 15 bp, Homo sapiens
aaggagagggctgaa

SEQ ID NO: 513833 - DNA, 15 bp, Homo sapiens
caaggagagggctga

SEQ ID NO: 513834 - DNA, 15 bp, Homo sapiens
tcaaggagagggctg

SEQ ID NO: 513835 - DNA, 15 bp, Homo sapiens
ttcaaggagagggct

SEQ ID NO: 513836 - DNA, 15 bp, Homo sapiens
cttcaaggagagggc

SEQ ID NO: 513837 - DNA, 15 bp, Homo sapiens
tcttcaaggagaggg

SEQ ID NO: 513838 - DNA, 15 bp, Homo sapiens
ctcttcaaggagagg

SEQ ID NO: 513839 - DNA, 15 bp, Homo sapiens
tctcttcaaggagag

SEQ ID NO: 513840 - DNA, 15 bp, Homo sapiens
ctctcttcaaggaga

SEQ ID NO: 513841 - DNA, 15 bp, Homo sapiens
gctctcttcaaggag

SEQ ID NO: 513842 - DNA, 15 bp, Homo sapiens
agctctcttcaagga

SEQ ID NO: 513843 - DNA, 15 bp, Homo sapiens
gagctctcttcaagg

SEQ ID NO: 513844 - DNA, 15 bp, Homo sapiens
agagctctcttcaag

SEQ ID NO: 513845 - DNA, 15 bp, Homo sapiens
aagagctctcttcaa

SEQ ID NO: 513846 - DNA, 15 bp, Homo sapiens
taagagctctcttca

SEQ ID NO: 513847 - DNA, 15 bp, Homo sapiens
gtaagagctctcttc

SEQ ID NO: 513848 - DNA, 15 bp, Homo sapiens
agtaagagctctctt

SEQ ID NO: 513849 - DNA, 15 bp, Homo sapiens
gagtaagagctctct

SEQ ID NO: 513850 - DNA, 15 bp, Homo sapiens
ggagtaagagctctc

SEQ ID NO: 513851 - DNA, 15 bp, Homo sapiens
gggagtaagagctct

SEQ ID NO: 513852 - DNA, 15 bp, Homo sapiens
agggagtaagagctc

SEQ ID NO: 513853 - DNA, 15 bp, Homo sapiens
gagggagtaagagct

SEQ ID NO: 513854 - DNA, 15 bp, Homo sapiens
tgagggagtaagagc

SEQ ID NO: 513855 - DNA, 15 bp, Homo sapiens
ttgagggagtaagag

SEQ ID NO: 513856 - DNA, 15 bp, Homo sapiens
attgagggagtaaga

SEQ ID NO: 513857 - DNA, 15 bp, Homo sapiens
tattgagggagtaag

SEQ ID NO: 513858 - DNA, 15 bp, Homo sapiens
gtattgagggagtaa

SEQ ID NO: 513859 - DNA, 15 bp, Homo sapiens
tgtattgagggagta

SEQ ID NO: 513860 - DNA, 15 bp, Homo sapiens
ttgtattgagggagt

SEQ ID NO: 513861 - DNA, 15 bp, Homo sapiens
tttgtattgagggag

SEQ ID NO: 513862 - DNA, 15 bp, Homo sapiens
ctttgtattgaggga

SEQ ID NO: 513863 - DNA, 15 bp, Homo sapiens
gctttgtattgaggg

SEQ ID NO: 513864 - DNA, 15 bp, Homo sapiens
ggctttgtattgagg

SEQ ID NO: 513865 - DNA, 15 bp, Homo sapiens
tggctttgtattgag

SEQ ID NO: 513866 - DNA, 15 bp, Homo sapiens
ttggctttgtattga

SEQ ID NO: 513867 - DNA, 15 bp, Homo sapiens
gttggctttgtattg

SEQ ID NO: 513868 - DNA, 15 bp, Homo sapiens
agttggctttgtatt

SEQ ID NO: 513869 - DNA, 15 bp, Homo sapiens
aagttggctttgtat

SEQ ID NO: 513870 - DNA, 15 bp, Homo sapiens
gaagttggctttgta

SEQ ID NO: 513871 - DNA, 15 bp, Homo sapiens
agaagttggctttgt

SEQ ID NO: 513872 - DNA, 15 bp, Homo sapiens
tagaagttggctttg

SEQ ID NO: 513873 - DNA, 15 bp, Homo sapiens
atagaagttggcttt

SEQ ID NO: 513874 - DNA, 15 bp, Homo sapiens
tatagaagttggctt

SEQ ID NO: 513875 - DNA, 15 bp, Homo sapiens
ttatagaagttggct

SEQ ID NO: 513876 - DNA, 15 bp, Homo sapiens
attatagaagttggc

SEQ ID NO: 513877 - DNA, 15 bp, Homo sapiens
tattatagaagttgg

SEQ ID NO: 513878 - DNA, 15 bp, Homo sapiens
ttattatagaagttg

SEQ ID NO: 513879 - DNA, 15 bp, Homo sapiens
gttattatagaagtt

SEQ ID NO: 513880 - DNA, 15 bp, Homo sapiens
tgttattatagaagt

SEQ ID NO: 513881 - DNA, 15 bp, Homo sapiens
atgttattatagaag

SEQ ID NO: 513882 - DNA, 15 bp, Homo sapiens
aatgttattatagaa

SEQ ID NO: 513883 - DNA, 15 bp, Homo sapiens
gaatgttattataga

SEQ ID NO: 513884 - DNA, 15 bp, Homo sapiens
cgaatgttattatag

SEQ ID NO: 513885 - DNA, 15 bp, Homo sapiens
gcgaatgttattata

SEQ ID NO: 513886 - DNA, 15 bp, Homo sapiens
agcgaatgttattat

SEQ ID NO: 513887 - DNA, 15 bp, Homo sapiens
aagcgaatgttatta

SEQ ID NO: 513888 - DNA, 15 bp, Homo sapiens
aaagcgaatgttatt

SEQ ID NO: 513889 - DNA, 15 bp, Homo sapiens
aaaagcgaatgttat

SEQ ID NO: 513890 - DNA, 15 bp, Homo sapiens
gaaaagcgaatgtta

SEQ ID NO: 513891 - DNA, 15 bp, Homo sapiens
agaaaagcgaatgtt

SEQ ID NO: 513892 - DNA, 15 bp, Homo sapiens
gagaaaagcgaatgt

SEQ ID NO: 513893 - DNA, 15 bp, Homo sapiens
tgagaaaagcgaatg

SEQ ID NO: 513894 - DNA, 15 bp, Homo sapiens
gtgagaaaagcgaat

SEQ ID NO: 513895 - DNA, 15 bp, Homo sapiens
ggtgagaaaagcgaa

SEQ ID NO: 513896 - DNA, 15 bp, Homo sapiens
cggtgagaaaagcga

SEQ ID NO: 513897 - DNA, 15 bp, Homo sapiens
gcggtgagaaaagcg

SEQ ID NO: 513898 - DNA, 15 bp, Homo sapiens
ggcggtgagaaaagc

SEQ ID NO: 513899 - DNA, 15 bp, Homo sapiens
aggcggtgagaaaag

SEQ ID NO: 513900 - DNA, 15 bp, Homo sapiens
taggcggtgagaaaa

SEQ ID NO: 513901 - DNA, 15 bp, Homo sapiens
gtaggcggtgagaaa

SEQ ID NO: 513902 - DNA, 15 bp, Homo sapiens
ggtaggcggtgagaa

SEQ ID NO: 513903 - DNA, 15 bp, Homo sapiens
aggtaggcggtgaga

SEQ ID NO: 513904 - DNA, 15 bp, Homo sapiens
aaggtaggcggtgag

SEQ ID NO: 513905 - DNA, 15 bp, Homo sapiens
gaaggtaggcggtga

SEQ ID NO: 513906 - DNA, 15 bp, Homo sapiens
agaaggtaggcggtg

SEQ ID NO: 513907 - DNA, 15 bp, Homo sapiens
aagaaggtaggcggt

SEQ ID NO: 513908 - DNA, 15 bp, Homo sapiens
aaagaaggtaggcgg

SEQ ID NO: 513909 - DNA, 15 bp, Homo sapiens
taaagaaggtaggcg

SEQ ID NO: 513910 - DNA, 15 bp, Homo sapiens
gtaaagaaggtaggc

SEQ ID NO: 513911 - DNA, 15 bp, Homo sapiens
ggtaaagaaggtagg

SEQ ID NO: 513912 - DNA, 15 bp, Homo sapiens
tggtaaagaaggtag

SEQ ID NO: 513913 - DNA, 15 bp, Homo sapiens
ctggtaaagaaggta

SEQ ID NO: 513914 - DNA, 15 bp, Homo sapiens
cctggtaaagaaggt

SEQ ID NO: 513915 - DNA, 15 bp, Homo sapiens
ccctggtaaagaagg

SEQ ID NO: 513916 - DNA, 15 bp, Homo sapiens
accctggtaaagaag

SEQ ID NO: 513917 - DNA, 15 bp, Homo sapiens
taccctggtaaagaa

SEQ ID NO: 513918 - DNA, 15 bp, Homo sapiens
ttaccctggtaaaga

SEQ ID NO: 513919 - DNA, 15 bp, Homo sapiens
tttaccctggtaaag

SEQ ID NO: 513920 - DNA, 15 bp, Homo sapiens
ctttaccctggtaaa

SEQ ID NO: 513921 - DNA, 15 bp, Homo sapiens
tctttaccctggtaa

SEQ ID NO: 513922 - DNA, 15 bp, Homo sapiens
ttctttaccctggta

SEQ ID NO: 513923 - DNA, 15 bp, Homo sapiens
tttctttaccctggt

SEQ ID NO: 513924 - DNA, 15 bp, Homo sapiens
ctttctttaccctgg

SEQ ID NO: 513925 - DNA, 15 bp, Homo sapiens
gctttctttaccctg

SEQ ID NO: 513926 - DNA, 15 bp, Homo sapiens
agctttctttaccct

SEQ ID NO: 513927 - DNA, 15 bp, Homo sapiens
gagctttctttaccc

SEQ ID NO: 513928 - DNA, 15 bp, Homo sapiens
tgagctttctttacc

SEQ ID NO: 513929 - DNA, 15 bp, Homo sapiens
ctgagctttctttac

SEQ ID NO: 513930 - DNA, 15 bp, Homo sapiens
cctgagctttcttta

SEQ ID NO: 513931 - DNA, 15 bp, Homo sapiens
tcctgagctttcttt

SEQ ID NO: 513932 - DNA, 15 bp, Homo sapiens
gtcctgagctttctt

SEQ ID NO: 513933 - DNA, 15 bp, Homo sapiens
tgtcctgagctttct

SEQ ID NO: 513934 - DNA, 15 bp, Homo sapiens
gtgtcctgagctttc

SEQ ID NO: 513935 - DNA, 15 bp, Homo sapiens
ggtgtcctgagcttt

SEQ ID NO: 513936 - DNA, 15 bp, Homo sapiens
gggtgtcctgagctt

SEQ ID NO: 513937 - DNA, 15 bp, Homo sapiens
agggtgtcctgagct

SEQ ID NO: 513938 - DNA, 15 bp, Homo sapiens
gagggtgtcctgagc

SEQ ID NO: 513939 - DNA, 15 bp, Homo sapiens
ggagggtgtcctgag

SEQ ID NO: 513940 - DNA, 15 bp, Homo sapiens
cggagggtgtcctga

SEQ ID NO: 513941 - DNA, 15 bp, Homo sapiens
gcggagggtgtcctg

SEQ ID NO: 513942 - DNA, 15 bp, Homo sapiens
ggcggagggtgtcct

SEQ ID NO: 513943 - DNA, 15 bp, Homo sapiens
gggcggagggtgtcc

SEQ ID NO: 513944 - DNA, 15 bp, Homo sapiens
agggcggagggtgtc

SEQ ID NO: 513945 - DNA, 15 bp, Homo sapiens
gagggcggagggtgt

SEQ ID NO: 513946 - DNA, 15 bp, Homo sapiens
ggagggcggagggtg

SEQ ID NO: 513947 - DNA, 15 bp, Homo sapiens
gggagggcggagggt

SEQ ID NO: 513948 - DNA, 15 bp, Homo sapiens
tgggagggcggaggg

SEQ ID NO: 513949 - DNA, 15 bp, Homo sapiens
gtgggagggcggagg

SEQ ID NO: 513950 - DNA, 15 bp, Homo sapiens
ggtgggagggcggag

SEQ ID NO: 513951 - DNA, 15 bp, Homo sapiens
aggtgggagggcgga

SEQ ID NO: 513952 - DNA, 15 bp, Homo sapiens
caggtgggagggcgg

SEQ ID NO: 513953 - DNA, 15 bp, Homo sapiens
gcaggtgggagggcg

SEQ ID NO: 513954 - DNA, 15 bp, Homo sapiens
cgcaggtgggagggc

SEQ ID NO: 513955 - DNA, 15 bp, Homo sapiens
gcgcaggtgggaggg

SEQ ID NO: 513956 - DNA, 15 bp, Homo sapiens
ggcgcaggtgggagg

SEQ ID NO: 513957 - DNA, 15 bp, Homo sapiens
gggcgcaggtgggag

SEQ ID NO: 513958 - DNA, 15 bp, Homo sapiens
cgggcgcaggtggga

SEQ ID NO: 513959 - DNA, 15 bp, Homo sapiens
gcgggcgcaggtggg

SEQ ID NO: 513960 - DNA, 15 bp, Homo sapiens
cgcgggcgcaggtgg

SEQ ID NO: 513961 - DNA, 15 bp, Homo sapiens
acgcgggcgcaggtg

SEQ ID NO: 513962 - DNA, 15 bp, Homo sapiens
aacgcgggcgcaggt

SEQ ID NO: 513963 - DNA, 15 bp, Homo sapiens
aaacgcgggcgcagg

SEQ ID NO: 513964 - DNA, 15 bp, Homo sapiens
aaaacgcgggcgcag

SEQ ID NO: 513965 - DNA, 15 bp, Homo sapiens
aaaaacgcgggcgca

SEQ ID NO: 513966 - DNA, 15 bp, Homo sapiens
caaaaacgcgggcgc

SEQ ID NO: 513967 - DNA, 15 bp, Homo sapiens
acaaaaacgcgggcg

SEQ ID NO: 513968 - DNA, 15 bp, Homo sapiens
cacaaaaacgcgggc

SEQ ID NO: 513969 - DNA, 15 bp, Homo sapiens
gcacaaaaacgcggg

SEQ ID NO: 513970 - DNA, 15 bp, Homo sapiens
cgcacaaaaacgcgg

SEQ ID NO: 513971 - DNA, 15 bp, Homo sapiens
ccgcacaaaaacgcg

SEQ ID NO: 513972 - DNA, 15 bp, Homo sapiens
accgcacaaaaacgc

SEQ ID NO: 513973 - DNA, 15 bp, Homo sapiens
gaccgcacaaaaacg

SEQ ID NO: 513974 - DNA, 15 bp, Homo sapiens
ggaccgcacaaaaac

SEQ ID NO: 513975 - DNA, 15 bp, Homo sapiens
gggaccgcacaaaaa

SEQ ID NO: 513976 - DNA, 15 bp, Homo sapiens
ggggaccgcacaaaa

SEQ ID NO: 513977 - DNA, 15 bp, Homo sapiens
tggggaccgcacaaa

SEQ ID NO: 513978 - DNA, 15 bp, Homo sapiens
gtggggaccgcacaa

SEQ ID NO: 513979 - DNA, 15 bp, Homo sapiens
cgtggggaccgcaca

SEQ ID NO: 513980 - DNA, 15 bp, Homo sapiens
ccgtggggaccgcac

SEQ ID NO: 513981 - DNA, 15 bp, Homo sapiens
gccgtggggaccgca

SEQ ID NO: 513982 - DNA, 15 bp, Homo sapiens
tgccgtggggaccgc

SEQ ID NO: 513983 - DNA, 15 bp, Homo sapiens
ctgccgtggggaccg

SEQ ID NO: 513984 - DNA, 15 bp, Homo sapiens
tctgccgtggggacc

SEQ ID NO: 513985 - DNA, 15 bp, Homo sapiens
ctctgccgtggggac

SEQ ID NO: 513986 - DNA, 15 bp, Homo sapiens
gctctgccgtgggga

SEQ ID NO: 513987 - DNA, 15 bp, Homo sapiens
agctctgccgtgggg

SEQ ID NO: 513988 - DNA, 15 bp, Homo sapiens
cagctctgccgtggg

SEQ ID NO: 513989 - DNA, 15 bp, Homo sapiens
ccagctctgccgtgg

SEQ ID NO: 513990 - DNA, 15 bp, Homo sapiens
cccagctctgccgtg

SEQ ID NO: 513991 - DNA, 15 bp, Homo sapiens
ccccagctctgccgt

SEQ ID NO: 513992 - DNA, 15 bp, Homo sapiens
tccccagctctgccg

SEQ ID NO: 513993 - DNA, 15 bp, Homo sapiens
ctccccagctctgcc

SEQ ID NO: 513994 - DNA, 15 bp, Homo sapiens
cctccccagctctgc

SEQ ID NO: 513995 - DNA, 15 bp, Homo sapiens
gcctccccagctctg

SEQ ID NO: 513996 - DNA, 15 bp, Homo sapiens
ggcctccccagctct

SEQ ID NO: 513997 - DNA, 15 bp, Homo sapiens
tggcctccccagctc

SEQ ID NO: 513998 - DNA, 15 bp, Homo sapiens
gtggcctccccagct

SEQ ID NO: 513999 - DNA, 15 bp, Homo sapiens
ggtggcctccccagc

SEQ ID NO: 514000 - DNA, 15 bp, Homo sapiens
gggtggcctccccag

SEQ ID NO: 514001 - DNA, 15 bp, Homo sapiens
agggtggcctcccca

SEQ ID NO: 514002 - DNA, 15 bp, Homo sapiens
tagggtggcctcccc

SEQ ID NO: 514003 - DNA, 15 bp, Homo sapiens
gtagggtggcctccc

SEQ ID NO: 514004 - DNA, 15 bp, Homo sapiens
cgtagggtggcctcc

SEQ ID NO: 514005 - DNA, 15 bp, Homo sapiens
acgtagggtggcctc

SEQ ID NO: 514006 - DNA, 15 bp, Homo sapiens
aacgtagggtggcct

SEQ ID NO: 514007 - DNA, 15 bp, Homo sapiens
aaacgtagggtggcc

SEQ ID NO: 514008 - DNA, 15 bp, Homo sapiens
caaacgtagggtggc

SEQ ID NO: 514009 - DNA, 15 bp, Homo sapiens
gcaaacgtagggtgg

SEQ ID NO: 514010 - DNA, 15 bp, Homo sapiens
cgcaaacgtagggtg

SEQ ID NO: 514011 - DNA, 15 bp, Homo sapiens
gcgcaaacgtagggt

SEQ ID NO: 514012 - DNA, 15 bp, Homo sapiens
tgcgcaaacgtaggg

SEQ ID NO: 514013 - DNA, 15 bp, Homo sapiens
ctgcgcaaacgtagg

SEQ ID NO: 514014 - DNA, 15 bp, Homo sapiens
cctgcgcaaacgtag

SEQ ID NO: 514015 - DNA, 15 bp, Homo sapiens
ccctgcgcaaacgta

SEQ ID NO: 514016 - DNA, 15 bp, Homo sapiens
tccctgcgcaaacgt

SEQ ID NO: 514017 - DNA, 15 bp, Homo sapiens
ctccctgcgcaaacg

SEQ ID NO: 514018 - DNA, 15 bp, Homo sapiens
tctccctgcgcaaac

SEQ ID NO: 514019 - DNA, 15 bp, Homo sapiens
gtctccctgcgcaaa

SEQ ID NO: 514020 - DNA, 15 bp, Homo sapiens
cgtctccctgcgcaa

SEQ ID NO: 514021 - DNA, 15 bp, Homo sapiens
gcgtctccctgcgca

SEQ ID NO: 514022 - DNA, 15 bp, Homo sapiens
cgcgtctccctgcgc

SEQ ID NO: 514023 - DNA, 15 bp, Homo sapiens
gcgcgtctccctgcg

SEQ ID NO: 514024 - DNA, 15 bp, Homo sapiens
agcgcgtctccctgc

SEQ ID NO: 514025 - DNA, 15 bp, Homo sapiens
gagcgcgtctccctg

SEQ ID NO: 514026 - DNA, 15 bp, Homo sapiens
cgagcgcgtctccct

SEQ ID NO: 514027 - DNA, 15 bp, Homo sapiens
gcgagcgcgtctccc

SEQ ID NO: 514028 - DNA, 15 bp, Homo sapiens
ggcgagcgcgtctcc

SEQ ID NO: 514029 - DNA, 15 bp, Homo sapiens
cggcgagcgcgtctc

SEQ ID NO: 514030 - DNA, 15 bp, Homo sapiens
gcggcgagcgcgtct

SEQ ID NO: 514031 - DNA, 15 bp, Homo sapiens
agcggcgagcgcgtc

SEQ ID NO: 514032 - DNA, 15 bp, Homo sapiens
cagcggcgagcgcgt

SEQ ID NO: 514033 - DNA, 15 bp, Homo sapiens
ccagcggcgagcgcg

SEQ ID NO: 514034 - DNA, 15 bp, Homo sapiens
accagcggcgagcgc

SEQ ID NO: 514035 - DNA, 15 bp, Homo sapiens
caccagcggcgagcg

SEQ ID NO: 514036 - DNA, 15 bp, Homo sapiens
acaccagcggcgagc

SEQ ID NO: 514037 - DNA, 15 bp, Homo sapiens
aacaccagcggcgag

SEQ ID NO: 514038 - DNA, 15 bp, Homo sapiens
caacaccagcggcga

SEQ ID NO: 514039 - DNA, 15 bp, Homo sapiens
gcaacaccagcggcg

SEQ ID NO: 514040 - DNA, 15 bp, Homo sapiens
cgcaacaccagcggc

SEQ ID NO: 514041 - DNA, 15 bp, Homo sapiens
tcgcaacaccagcgg

SEQ ID NO: 514042 - DNA, 15 bp, Homo sapiens
ttcgcaacaccagcg

SEQ ID NO: 514043 - DNA, 15 bp, Homo sapiens
tttcgcaacaccagc

SEQ ID NO: 514044 - DNA, 15 bp, Homo sapiens
ctttcgcaacaccag

SEQ ID NO: 514045 - DNA, 15 bp, Homo sapiens
tctttcgcaacacca

SEQ ID NO: 514046 - DNA, 15 bp, Homo sapiens
gtctttcgcaacacc

SEQ ID NO: 514047 - DNA, 15 bp, Homo sapiens
ggtctttcgcaacac

SEQ ID NO: 514048 - DNA, 15 bp, Homo sapiens
tggtctttcgcaaca

SEQ ID NO: 514049 - DNA, 15 bp, Homo sapiens
ctggtctttcgcaac

SEQ ID NO: 514050 - DNA, 15 bp, Homo sapiens
tctggtctttcgcaa

SEQ ID NO: 514051 - DNA, 15 bp, Homo sapiens
ctctggtctttcgca

SEQ ID NO: 514052 - DNA, 15 bp, Homo sapiens
gctctggtctttcgc

SEQ ID NO: 514053 - DNA, 15 bp, Homo sapiens
cgctctggtctttcg

SEQ ID NO: 514054 - DNA, 15 bp, Homo sapiens
tcgctctggtctttc

SEQ ID NO: 514055 - DNA, 15 bp, Homo sapiens
ttcgctctggtcttt

SEQ ID NO: 514056 - DNA, 15 bp, Homo sapiens
cttcgctctggtctt

SEQ ID NO: 514057 - DNA, 15 bp, Homo sapiens
gcttcgctctggtct

SEQ ID NO: 514058 - DNA, 15 bp, Homo sapiens
ggcttcgctctggtc

SEQ ID NO: 514059 - DNA, 15 bp, Homo sapiens
gggcttcgctctggt

SEQ ID NO: 514060 - DNA, 15 bp, Homo sapiens
cgggcttcgctctgg

SEQ ID NO: 514061 - DNA, 15 bp, Homo sapiens
ccgggcttcgctctg

SEQ ID NO: 514062 - DNA, 15 bp, Homo sapiens
gccgggcttcgctct

SEQ ID NO: 514063 - DNA, 15 bp, Homo sapiens
agccgggcttcgctc

SEQ ID NO: 514064 - DNA, 15 bp, Homo sapiens
gagccgggcttcgct

SEQ ID NO: 514065 - DNA, 15 bp, Homo sapiens
ggagccgggcttcgc

SEQ ID NO: 514066 - DNA, 15 bp, Homo sapiens
aggagccgggcttcg

SEQ ID NO: 514067 - DNA, 15 bp, Homo sapiens
aaggagccgggcttc

SEQ ID NO: 514068 - DNA, 15 bp, Homo sapiens
caaggagccgggctt

SEQ ID NO: 514069 - DNA, 15 bp, Homo sapiens
gcaaggagccgggct

SEQ ID NO: 514070 - DNA, 15 bp, Homo sapiens
ggcaaggagccgggc

SEQ ID NO: 514071 - DNA, 15 bp, Homo sapiens
gggcaaggagccggg

SEQ ID NO: 514072 - DNA, 15 bp, Homo sapiens
agggcaaggagccgg

SEQ ID NO: 514073 - DNA, 15 bp, Homo sapiens
aagggcaaggagccg

SEQ ID NO: 514074 - DNA, 15 bp, Homo sapiens
gaagggcaaggagcc

SEQ ID NO: 514075 - DNA, 15 bp, Homo sapiens
ggaagggcaaggagc

SEQ ID NO: 514076 - DNA, 15 bp, Homo sapiens
aggaagggcaaggag

SEQ ID NO: 514077 - DNA, 15 bp, Homo sapiens
aaggaagggcaagga

SEQ ID NO: 514078 - DNA, 15 bp, Homo sapiens
gaaggaagggcaagg

SEQ ID NO: 514079 - DNA, 15 bp, Homo sapiens
ggaaggaagggcaag

SEQ ID NO: 514080 - DNA, 15 bp, Homo sapiens
gggaaggaagggcaa

SEQ ID NO: 514081 - DNA, 15 bp, Homo sapiens
tgggaaggaagggca

SEQ ID NO: 514082 - DNA, 15 bp, Homo sapiens
ctgggaaggaagggc

SEQ ID NO: 514083 - DNA, 15 bp, Homo sapiens
cctgggaaggaaggg

SEQ ID NO: 514084 - DNA, 15 bp, Homo sapiens
ccctgggaaggaagg

SEQ ID NO: 514085 - DNA, 15 bp, Homo sapiens
cccctgggaaggaag

SEQ ID NO: 514086 - DNA, 15 bp, Homo sapiens
gcccctgggaaggaa

SEQ ID NO: 514087 - DNA, 15 bp, Homo sapiens
agcccctgggaagga

SEQ ID NO: 514088 - DNA, 15 bp, Homo sapiens
aagcccctgggaagg

SEQ ID NO: 514089 - DNA, 15 bp, Homo sapiens
gaagcccctgggaag

SEQ ID NO: 514090 - DNA, 15 bp, Homo sapiens
agaagcccctgggaa

SEQ ID NO: 514091 - DNA, 15 bp, Homo sapiens
gagaagcccctggga

SEQ ID NO: 514092 - DNA, 15 bp, Homo sapiens
agagaagcccctggg

SEQ ID NO: 514093 - DNA, 15 bp, Homo sapiens
cagagaagcccctgg

SEQ ID NO: 514094 - DNA, 15 bp, Homo sapiens
ccagagaagcccctg

SEQ ID NO: 514095 - DNA, 15 bp, Homo sapiens
cccagagaagcccct

SEQ ID NO: 514096 - DNA, 15 bp, Homo sapiens
ccccagagaagcccc

SEQ ID NO: 514097 - DNA, 15 bp, Homo sapiens
cccccagagaagccc

SEQ ID NO: 514098 - DNA, 15 bp, Homo sapiens
ccccccagagaagcc

SEQ ID NO: 514099 - DNA, 15 bp, Homo sapiens
gccccccagagaagc

SEQ ID NO: 514100 - DNA, 15 bp, Homo sapiens
cgccccccagagaag

SEQ ID NO: 514101 - DNA, 15 bp, Homo sapiens
gcgccccccagagaa

SEQ ID NO: 514102 - DNA, 15 bp, Homo sapiens
agcgccccccagaga

SEQ ID NO: 514103 - DNA, 15 bp, Homo sapiens
gagcgccccccagag

SEQ ID NO: 514104 - DNA, 15 bp, Homo sapiens
agagcgccccccaga

SEQ ID NO: 514105 - DNA, 15 bp, Homo sapiens
gagagcgccccccag

SEQ ID NO: 514106 - DNA, 15 bp, Homo sapiens
tgagagcgcccccca

SEQ ID NO: 514107 - DNA, 15 bp, Homo sapiens
ctgagagcgcccccc

SEQ ID NO: 514108 - DNA, 15 bp, Homo sapiens
cctgagagcgccccc

SEQ ID NO: 514109 - DNA, 15 bp, Homo sapiens
gcctgagagcgcccc

SEQ ID NO: 514110 - DNA, 15 bp, Homo sapiens
ggcctgagagcgccc

SEQ ID NO: 514111 - DNA, 15 bp, Homo sapiens
gggcctgagagcgcc

SEQ ID NO: 514112 - DNA, 15 bp, Homo sapiens
ggggcctgagagcgc

SEQ ID NO: 514113 - DNA, 15 bp, Homo sapiens
cggggcctgagagcg

SEQ ID NO: 514114 - DNA, 15 bp, Homo sapiens
tcggggcctgagagc

SEQ ID NO: 514115 - DNA, 15 bp, Homo sapiens
gtcggggcctgagag

SEQ ID NO: 514116 - DNA, 15 bp, Homo sapiens
cgtcggggcctgaga

SEQ ID NO: 514117 - DNA, 15 bp, Homo sapiens
tcgtcggggcctgag

SEQ ID NO: 514118 - DNA, 15 bp, Homo sapiens
ttcgtcggggcctga

SEQ ID NO: 514119 - DNA, 15 bp, Homo sapiens
gttcgtcggggcctg

SEQ ID NO: 514120 - DNA, 15 bp, Homo sapiens
agttcgtcggggcct

SEQ ID NO: 514121 - DNA, 15 bp, Homo sapiens
cagttcgtcggggcc

SEQ ID NO: 514122 - DNA, 15 bp, Homo sapiens
tcagttcgtcggggc

SEQ ID NO: 514123 - DNA, 15 bp, Homo sapiens
ctcagttcgtcgggg

SEQ ID NO: 514124 - DNA, 15 bp, Homo sapiens
gctcagttcgtcggg

SEQ ID NO: 514125 - DNA, 15 bp, Homo sapiens
tgctcagttcgtcgg

SEQ ID NO: 514126 - DNA, 15 bp, Homo sapiens
atgctcagttcgtcg

SEQ ID NO: 514127 - DNA, 15 bp, Homo sapiens
aatgctcagttcgtc

SEQ ID NO: 514128 - DNA, 15 bp, Homo sapiens
caatgctcagttcgt

SEQ ID NO: 514129 - DNA, 15 bp, Homo sapiens
tcaatgctcagttcg

SEQ ID NO: 514130 - DNA, 15 bp, Homo sapiens
atcaatgctcagttc

SEQ ID NO: 514131 - DNA, 15 bp, Homo sapiens
gatcaatgctcagtt

SEQ ID NO: 514132 - DNA, 15 bp, Homo sapiens
tgatcaatgctcagt

SEQ ID NO: 514133 - DNA, 15 bp, Homo sapiens
gtgatcaatgctcag

SEQ ID NO: 514134 - DNA, 15 bp, Homo sapiens
agtgatcaatgctca

SEQ ID NO: 514135 - DNA, 15 bp, Homo sapiens
cagtgatcaatgctc

SEQ ID NO: 514136 - DNA, 15 bp, Homo sapiens
acagtgatcaatgct

SEQ ID NO: 514137 - DNA, 15 bp, Homo sapiens
cacagtgatcaatgc

SEQ ID NO: 514138 - DNA, 15 bp, Homo sapiens
ccacagtgatcaatg

SEQ ID NO: 514139 - DNA, 15 bp, Homo sapiens
accacagtgatcaat

SEQ ID NO: 514140 - DNA, 15 bp, Homo sapiens
caccacagtgatcaa

SEQ ID NO: 514141 - DNA, 15 bp, Homo sapiens
ccaccacagtgatca

SEQ ID NO: 514142 - DNA, 15 bp, Homo sapiens
gccaccacagtgatc

SEQ ID NO: 514143 - DNA, 15 bp, Homo sapiens
agccaccacagtgat

SEQ ID NO: 514144 - DNA, 15 bp, Homo sapiens
tagccaccacagtga

SEQ ID NO: 514145 - DNA, 15 bp, Homo sapiens
ttagccaccacagtg

SEQ ID NO: 514146 - DNA, 15 bp, Homo sapiens
cttagccaccacagt

SEQ ID NO: 514147 - DNA, 15 bp, Homo sapiens
gcttagccaccacag

SEQ ID NO: 514148 - DNA, 15 bp, Homo sapiens
tgcttagccaccaca

SEQ ID NO: 514149 - DNA, 15 bp, Homo sapiens
ttgcttagccaccac

SEQ ID NO: 514150 - DNA, 15 bp, Homo sapiens
cttgcttagccacca

SEQ ID NO: 514151 - DNA, 15 bp, Homo sapiens
ccttgcttagccacc

SEQ ID NO: 514152 - DNA, 15 bp, Homo sapiens
tccttgcttagccac

SEQ ID NO: 514153 - DNA, 15 bp, Homo sapiens
ctccttgcttagcca

SEQ ID NO: 514154 - DNA, 15 bp, Homo sapiens
cctccttgcttagcc

SEQ ID NO: 514155 - DNA, 15 bp, Homo sapiens
ccctccttgcttagc

SEQ ID NO: 514156 - DNA, 15 bp, Homo sapiens
cccctccttgcttag

SEQ ID NO: 514157 - DNA, 15 bp, Homo sapiens
tcccctccttgctta

SEQ ID NO: 514158 - DNA, 15 bp, Homo sapiens
ctcccctccttgctt

SEQ ID NO: 514159 - DNA, 15 bp, Homo sapiens
cctcccctccttgct

SEQ ID NO: 514160 - DNA, 15 bp, Homo sapiens
gcctcccctccttgc

SEQ ID NO: 514161 - DNA, 15 bp, Homo sapiens
cgcctcccctccttg

SEQ ID NO: 514162 - DNA, 15 bp, Homo sapiens
tcgcctcccctcctt

SEQ ID NO: 514163 - DNA, 15 bp, Homo sapiens
gtcgcctcccctcct

SEQ ID NO: 514164 - DNA, 15 bp, Homo sapiens
cgtcgcctcccctcc

SEQ ID NO: 514165 - DNA, 15 bp, Homo sapiens
gcgtcgcctcccctc

SEQ ID NO: 514166 - DNA, 15 bp, Homo sapiens
ggcgtcgcctcccct

SEQ ID NO: 514167 - DNA, 15 bp, Homo sapiens
cggcgtcgcctcccc

SEQ ID NO: 514168 - DNA, 15 bp, Homo sapiens
ccggcgtcgcctccc

SEQ ID NO: 514169 - DNA, 15 bp, Homo sapiens
cccggcgtcgcctcc

SEQ ID NO: 514170 - DNA, 15 bp, Homo sapiens
gcccggcgtcgcctc

SEQ ID NO: 514171 - DNA, 15 bp, Homo sapiens
agcccggcgtcgcct

SEQ ID NO: 514172 - DNA, 15 bp, Homo sapiens
aagcccggcgtcgcc

SEQ ID NO: 514173 - DNA, 15 bp, Homo sapiens
taagcccggcgtcgc

SEQ ID NO: 514174 - DNA, 15 bp, Homo sapiens
ttaagcccggcgtcg

SEQ ID NO: 514175 - DNA, 15 bp, Homo sapiens
cttaagcccggcgtc

SEQ ID NO: 514176 - DNA, 15 bp, Homo sapiens
gcttaagcccggcgt

SEQ ID NO: 514177 - DNA, 15 bp, Homo sapiens
cgcttaagcccggcg

SEQ ID NO: 514178 - DNA, 15 bp, Homo sapiens
tcgcttaagcccggc

SEQ ID NO: 514179 - DNA, 15 bp, Homo sapiens
ttcgcttaagcccgg

SEQ ID NO: 514180 - DNA, 15 bp, Homo sapiens
gttcgcttaagcccg

SEQ ID NO: 514181 - DNA, 15 bp, Homo sapiens
ggttcgcttaagccc

SEQ ID NO: 514182 - DNA, 15 bp, Homo sapiens
tggttcgcttaagcc

SEQ ID NO: 514183 - DNA, 15 bp, Homo sapiens
gtggttcgcttaagc

SEQ ID NO: 514184 - DNA, 15 bp, Homo sapiens
tgtggttcgcttaag

SEQ ID NO: 514185 - DNA, 15 bp, Homo sapiens
ctgtggttcgcttaa

SEQ ID NO: 514186 - DNA, 15 bp, Homo sapiens
tctgtggttcgctta

SEQ ID NO: 514187 - DNA, 15 bp, Homo sapiens
ctctgtggttcgctt

SEQ ID NO: 514188 - DNA, 15 bp, Homo sapiens
cctctgtggttcgct

SEQ ID NO: 514189 - DNA, 15 bp, Homo sapiens
tcctctgtggttcgc

SEQ ID NO: 514190 - DNA, 15 bp, Homo sapiens
ctcctctgtggttcg

SEQ ID NO: 514191 - DNA, 15 bp, Homo sapiens
tctcctctgtggttc

SEQ ID NO: 514192 - DNA, 15 bp, Homo sapiens
ttctcctctgtggtt

SEQ ID NO: 514193 - DNA, 15 bp, Homo sapiens
gttctcctctgtggt

SEQ ID NO: 514194 - DNA, 15 bp, Homo sapiens
agttctcctctgtgg

SEQ ID NO: 514195 - DNA, 15 bp, Homo sapiens
cagttctcctctgtg

SEQ ID NO: 514196 - DNA, 15 bp, Homo sapiens
ccagttctcctctgt

SEQ ID NO: 514197 - DNA, 15 bp, Homo sapiens
gccagttctcctctg

SEQ ID NO: 514198 - DNA, 15 bp, Homo sapiens
tgccagttctcctct

SEQ ID NO: 514199 - DNA, 15 bp, Homo sapiens
ttgccagttctcctc

SEQ ID NO: 514200 - DNA, 15 bp, Homo sapiens
gttgccagttctcct

SEQ ID NO: 514201 - DNA, 15 bp, Homo sapiens
cgttgccagttctcc

SEQ ID NO: 514202 - DNA, 15 bp, Homo sapiens
gcgttgccagttctc

SEQ ID NO: 514203 - DNA, 15 bp, Homo sapiens
agcgttgccagttct

SEQ ID NO: 514204 - DNA, 15 bp, Homo sapiens
cagcgttgccagttc

SEQ ID NO: 514205 - DNA, 15 bp, Homo sapiens
tcagcgttgccagtt

SEQ ID NO: 514206 - DNA, 15 bp, Homo sapiens
ttcagcgttgccagt

SEQ ID NO: 514207 - DNA, 15 bp, Homo sapiens
attcagcgttgccag

SEQ ID NO: 514208 - DNA, 15 bp, Homo sapiens
tattcagcgttgcca

SEQ ID NO: 514209 - DNA, 15 bp, Homo sapiens
gtattcagcgttgcc

SEQ ID NO: 514210 - DNA, 15 bp, Homo sapiens
tgtattcagcgttgc

SEQ ID NO: 514211 - DNA, 15 bp, Homo sapiens
ctgtattcagcgttg

SEQ ID NO: 514212 - DNA, 15 bp, Homo sapiens
tctgtattcagcgtt

SEQ ID NO: 514213 - DNA, 15 bp, Homo sapiens
gtctgtattcagcgt

SEQ ID NO: 514214 - DNA, 15 bp, Homo sapiens
ggtctgtattcagcg

SEQ ID NO: 514215 - DNA, 15 bp, Homo sapiens
aggtctgtattcagc

SEQ ID NO: 514216 - DNA, 15 bp, Homo sapiens
aaggtctgtattcag

SEQ ID NO: 514217 - DNA, 15 bp, Homo sapiens
caaggtctgtattca

SEQ ID NO: 514218 - DNA, 15 bp, Homo sapiens
acaaggtctgtattc

SEQ ID NO: 514219 - DNA, 15 bp, Homo sapiens
gacaaggtctgtatt

SEQ ID NO: 514220 - DNA, 15 bp, Homo sapiens
agacaaggtctgtat

SEQ ID NO: 514221 - DNA, 15 bp, Homo sapiens
cagacaaggtctgta

SEQ ID NO: 514222 - DNA, 15 bp, Homo sapiens
gcagacaaggtctgt

SEQ ID NO: 514223 - DNA, 15 bp, Homo sapiens
tgcagacaaggtctg

SEQ ID NO: 514224 - DNA, 15 bp, Homo sapiens
ctgcagacaaggtct

SEQ ID NO: 514225 - DNA, 15 bp, Homo sapiens
cctgcagacaaggtc

SEQ ID NO: 514226 - DNA, 15 bp, Homo sapiens
gcctgcagacaaggt

SEQ ID NO: 514227 - DNA, 15 bp, Homo sapiens
cgcctgcagacaagg

SEQ ID NO: 514228 - DNA, 15 bp, Homo sapiens
gcgcctgcagacaag

SEQ ID NO: 514229 - DNA, 15 bp, Homo sapiens
cgcgcctgcagacaa

SEQ ID NO: 514230 - DNA, 15 bp, Homo sapiens
tcgcgcctgcagaca

SEQ ID NO: 514231 - DNA, 15 bp, Homo sapiens
gtcgcgcctgcagac

SEQ ID NO: 514232 - DNA, 15 bp, Homo sapiens
ggtcgcgcctgcaga

SEQ ID NO: 514233 - DNA, 15 bp, Homo sapiens
aggtcgcgcctgcag

SEQ ID NO: 514234 - DNA, 15 bp, Homo sapiens
caggtcgcgcctgca

SEQ ID NO: 514235 - DNA, 15 bp, Homo sapiens
ccaggtcgcgcctgc

SEQ ID NO: 514236 - DNA, 15 bp, Homo sapiens
gccaggtcgcgcctg

SEQ ID NO: 514237 - DNA, 15 bp, Homo sapiens
ggccaggtcgcgcct

SEQ ID NO: 514238 - DNA, 15 bp, Homo sapiens
cggccaggtcgcgcc

SEQ ID NO: 514239 - DNA, 15 bp, Homo sapiens
ccggccaggtcgcgc

SEQ ID NO: 514240 - DNA, 15 bp, Homo sapiens
cccggccaggtcgcg

SEQ ID NO: 514241 - DNA, 15 bp, Homo sapiens
gcccggccaggtcgc

SEQ ID NO: 514242 - DNA, 15 bp, Homo sapiens
ggcccggccaggtcg

SEQ ID NO: 514243 - DNA, 15 bp, Homo sapiens
aggcccggccaggtc

SEQ ID NO: 514244 - DNA, 15 bp, Homo sapiens
caggcccggccaggt

SEQ ID NO: 514245 - DNA, 15 bp, Homo sapiens
tcaggcccggccagg

SEQ ID NO: 514246 - DNA, 15 bp, Homo sapiens
ctcaggcccggccag

SEQ ID NO: 514247 - DNA, 15 bp, Homo sapiens
actcaggcccggcca

SEQ ID NO: 514248 - DNA, 15 bp, Homo sapiens
gactcaggcccggcc

SEQ ID NO: 514249 - DNA, 15 bp, Homo sapiens
ggactcaggcccggc

SEQ ID NO: 514250 - DNA, 15 bp, Homo sapiens
gggactcaggcccgg

SEQ ID NO: 514251 - DNA, 15 bp, Homo sapiens
cgggactcaggcccg

SEQ ID NO: 514252 - DNA, 15 bp, Homo sapiens
tcgggactcaggccc

SEQ ID NO: 514253 - DNA, 15 bp, Homo sapiens
ttcgggactcaggcc

SEQ ID NO: 514254 - DNA, 15 bp, Homo sapiens
attcgggactcaggc

SEQ ID NO: 514255 - DNA, 15 bp, Homo sapiens
cattcgggactcagg

SEQ ID NO: 514256 - DNA, 15 bp, Homo sapiens
ccattcgggactcag

SEQ ID NO: 514257 - DNA, 15 bp, Homo sapiens
cccattcgggactca

SEQ ID NO: 514258 - DNA, 15 bp, Homo sapiens
ccccattcgggactc

SEQ ID NO: 514259 - DNA, 15 bp, Homo sapiens
accccattcgggact

SEQ ID NO: 514260 - DNA, 15 bp, Homo sapiens
gaccccattcgggac

SEQ ID NO: 514261 - DNA, 15 bp, Homo sapiens
agaccccattcggga

SEQ ID NO: 514262 - DNA, 15 bp, Homo sapiens
tagaccccattcggg

SEQ ID NO: 514263 - DNA, 15 bp, Homo sapiens
ttagaccccattcgg

SEQ ID NO: 514264 - DNA, 15 bp, Homo sapiens
attagaccccattcg

SEQ ID NO: 514265 - DNA, 15 bp, Homo sapiens
aattagaccccattc

SEQ ID NO: 514266 - DNA, 15 bp, Homo sapiens
caattagaccccatt

SEQ ID NO: 514267 - DNA, 15 bp, Homo sapiens
gcaattagaccccat

SEQ ID NO: 514268 - DNA, 15 bp, Homo sapiens
cgcaattagacccca

SEQ ID NO: 514269 - DNA, 15 bp, Homo sapiens
tcgcaattagacccc

SEQ ID NO: 514270 - DNA, 15 bp, Homo sapiens
ttcgcaattagaccc

SEQ ID NO: 514271 - DNA, 15 bp, Homo sapiens
cttcgcaattagacc

SEQ ID NO: 514272 - DNA, 15 bp, Homo sapiens
ccttcgcaattagac

SEQ ID NO: 514273 - DNA, 15 bp, Homo sapiens
gccttcgcaattaga

SEQ ID NO: 514274 - DNA, 15 bp, Homo sapiens
cgccttcgcaattag

SEQ ID NO: 514275 - DNA, 15 bp, Homo sapiens
ccgccttcgcaatta

SEQ ID NO: 514276 - DNA, 15 bp, Homo sapiens
cccgccttcgcaatt

SEQ ID NO: 514277 - DNA, 15 bp, Homo sapiens
ccccgccttcgcaat

SEQ ID NO: 514278 - DNA, 15 bp, Homo sapiens
accccgccttcgcaa

SEQ ID NO: 514279 - DNA, 15 bp, Homo sapiens
caccccgccttcgca

SEQ ID NO: 514280 - DNA, 15 bp, Homo sapiens
ccaccccgccttcgc

SEQ ID NO: 514281 - DNA, 15 bp, Homo sapiens
cccaccccgccttcg

SEQ ID NO: 514282 - DNA, 15 bp, Homo sapiens
acccaccccgccttc

SEQ ID NO: 514283 - DNA, 15 bp, Homo sapiens
aacccaccccgcctt

SEQ ID NO: 514284 - DNA, 15 bp, Homo sapiens
aaacccaccccgcct

SEQ ID NO: 514285 - DNA, 15 bp, Homo sapiens
gaaacccaccccgcc

SEQ ID NO: 514286 - DNA, 15 bp, Homo sapiens
ggaaacccaccccgc

SEQ ID NO: 514287 - DNA, 15 bp, Homo sapiens
gggaaacccaccccg

SEQ ID NO: 514288 - DNA, 15 bp, Homo sapiens
tgggaaacccacccc

SEQ ID NO: 514289 - DNA, 15 bp, Homo sapiens
ctgggaaacccaccc

SEQ ID NO: 514290 - DNA, 15 bp, Homo sapiens
actgggaaacccacc

SEQ ID NO: 514291 - DNA, 15 bp, Homo sapiens
gactgggaaacccac

SEQ ID NO: 514292 - DNA, 15 bp, Homo sapiens
tgactgggaaaccca

SEQ ID NO: 514293 - DNA, 15 bp, Homo sapiens
gtgactgggaaaccc

SEQ ID NO: 514294 - DNA, 15 bp, Homo sapiens
ggtgactgggaaacc

SEQ ID NO: 514295 - DNA, 15 bp, Homo sapiens
gggtgactgggaaac

SEQ ID NO: 514296 - DNA, 15 bp, Homo sapiens
tgggtgactgggaaa

SEQ ID NO: 514297 - DNA, 15 bp, Homo sapiens
ctgggtgactgggaa

SEQ ID NO: 514298 - DNA, 15 bp, Homo sapiens
gctgggtgactggga

SEQ ID NO: 514299 - DNA, 15 bp, Homo sapiens
agctgggtgactggg

SEQ ID NO: 514300 - DNA, 15 bp, Homo sapiens
aagctgggtgactgg

SEQ ID NO: 514301 - DNA, 15 bp, Homo sapiens
gaagctgggtgactg

SEQ ID NO: 514302 - DNA, 15 bp, Homo sapiens
agaagctgggtgact

SEQ ID NO: 514303 - DNA, 15 bp, Homo sapiens
aagaagctgggtgac

SEQ ID NO: 514304 - DNA, 15 bp, Homo sapiens
aaagaagctgggtga

SEQ ID NO: 514305 - DNA, 15 bp, Homo sapiens
gaaagaagctgggtg

SEQ ID NO: 514306 - DNA, 15 bp, Homo sapiens
agaaagaagctgggt

SEQ ID NO: 514307 - DNA, 15 bp, Homo sapiens
gagaaagaagctggg

SEQ ID NO: 514308 - DNA, 15 bp, Homo sapiens
agagaaagaagctgg

SEQ ID NO: 514309 - DNA, 15 bp, Homo sapiens
gagagaaagaagctg

SEQ ID NO: 514310 - DNA, 15 bp, Homo sapiens
tgagagaaagaagct

SEQ ID NO: 514311 - DNA, 15 bp, Homo sapiens
gtgagagaaagaagc

SEQ ID NO: 514312 - DNA, 15 bp, Homo sapiens
agtgagagaaagaag

SEQ ID NO: 514313 - DNA, 15 bp, Homo sapiens
gagtgagagaaagaa

SEQ ID NO: 514314 - DNA, 15 bp, Homo sapiens
cgagtgagagaaaga

SEQ ID NO: 514315 - DNA, 15 bp, Homo sapiens
gcgagtgagagaaag

SEQ ID NO: 514316 - DNA, 15 bp, Homo sapiens
ggcgagtgagagaaa

SEQ ID NO: 514317 - DNA, 15 bp, Homo sapiens
tggcgagtgagagaa

SEQ ID NO: 514318 - DNA, 15 bp, Homo sapiens
atggcgagtgagaga

SEQ ID NO: 514319 - DNA, 15 bp, Homo sapiens
aatggcgagtgagag

SEQ ID NO: 514320 - DNA, 15 bp, Homo sapiens
taatggcgagtgaga

SEQ ID NO: 514321 - DNA, 15 bp, Homo sapiens
ataatggcgagtgag

SEQ ID NO: 514322 - DNA, 15 bp, Homo sapiens
aataatggcgagtga

SEQ ID NO: 514323 - DNA, 15 bp, Homo sapiens
aaataatggcgagtg

SEQ ID NO: 514324 - DNA, 15 bp, Homo sapiens
gaaataatggcgagt

SEQ ID NO: 514325 - DNA, 15 bp, Homo sapiens
tgaaataatggcgag

SEQ ID NO: 514326 - DNA, 15 bp, Homo sapiens
atgaaataatggcga

SEQ ID NO: 514327 - DNA, 15 bp, Homo sapiens
tatgaaataatggcg

SEQ ID NO: 514328 - DNA, 15 bp, Homo sapiens
ctatgaaataatggc

SEQ ID NO: 514329 - DNA, 15 bp, Homo sapiens
actatgaaataatgg

SEQ ID NO: 514330 - DNA, 15 bp, Homo sapiens
aactatgaaataatg

SEQ ID NO: 514331 - DNA, 15 bp, Homo sapiens
caactatgaaataat

SEQ ID NO: 514332 - DNA, 15 bp, Homo sapiens
acaactatgaaataa

SEQ ID NO: 514333 - DNA, 15 bp, Homo sapiens
aacaactatgaaata

SEQ ID NO: 514334 - DNA, 15 bp, Homo sapiens
aaacaactatgaaat

SEQ ID NO: 514335 - DNA, 15 bp, Homo sapiens
caaacaactatgaaa

SEQ ID NO: 514336 - DNA, 15 bp, Homo sapiens
acaaacaactatgaa

SEQ ID NO: 514337 - DNA, 15 bp, Homo sapiens
tacaaacaactatga

SEQ ID NO: 514338 - DNA, 15 bp, Homo sapiens
ttacaaacaactatg

SEQ ID NO: 514339 - DNA, 15 bp, Homo sapiens
cttacaaacaactat

SEQ ID NO: 514340 - DNA, 15 bp, Homo sapiens
acttacaaacaacta

SEQ ID NO: 514341 - DNA, 15 bp, Homo sapiens
aacttacaaacaact

SEQ ID NO: 514342 - DNA, 15 bp, Homo sapiens
aaacttacaaacaac

SEQ ID NO: 514343 - DNA, 15 bp, Homo sapiens
taaacttacaaacaa

SEQ ID NO: 514344 - DNA, 15 bp, Homo sapiens
ttaaacttacaaaca

SEQ ID NO: 514345 - DNA, 15 bp, Homo sapiens
cttaaacttacaaac

SEQ ID NO: 514346 - DNA, 15 bp, Homo sapiens
ccttaaacttacaaa

SEQ ID NO: 514347 - DNA, 15 bp, Homo sapiens
tccttaaacttacaa

SEQ ID NO: 514348 - DNA, 15 bp, Homo sapiens
ttccttaaacttaca

SEQ ID NO: 514349 - DNA, 15 bp, Homo sapiens
gttccttaaacttac

SEQ ID NO: 514350 - DNA, 15 bp, Homo sapiens
tgttccttaaactta

SEQ ID NO: 514351 - DNA, 15 bp, Homo sapiens
gtgttccttaaactt

SEQ ID NO: 514352 - DNA, 15 bp, Homo sapiens
ggtgttccttaaact

SEQ ID NO: 514353 - DNA, 15 bp, Homo sapiens
tggtgttccttaaac

SEQ ID NO: 514354 - DNA, 15 bp, Homo sapiens
ttggtgttccttaaa

SEQ ID NO: 514355 - DNA, 15 bp, Homo sapiens
cttggtgttccttaa

SEQ ID NO: 514356 - DNA, 15 bp, Homo sapiens
acttggtgttcctta

SEQ ID NO: 514357 - DNA, 15 bp, Homo sapiens
cacttggtgttcctt

SEQ ID NO: 514358 - DNA, 15 bp, Homo sapiens
acacttggtgttcct

SEQ ID NO: 514359 - DNA, 15 bp, Homo sapiens
tacacttggtgttcc

SEQ ID NO: 514360 - DNA, 15 bp, Homo sapiens
ctacacttggtgttc

SEQ ID NO: 514361 - DNA, 15 bp, Homo sapiens
tctacacttggtgtt

SEQ ID NO: 514362 - DNA, 15 bp, Homo sapiens
ttctacacttggtgt

SEQ ID NO: 514363 - DNA, 15 bp, Homo sapiens
attctacacttggtg

SEQ ID NO: 514364 - DNA, 15 bp, Homo sapiens
cattctacacttggt

SEQ ID NO: 514365 - DNA, 15 bp, Homo sapiens
acattctacacttgg

SEQ ID NO: 514366 - DNA, 15 bp, Homo sapiens
aacattctacacttg

SEQ ID NO: 514367 - DNA, 15 bp, Homo sapiens
caacattctacactt

SEQ ID NO: 514368 - DNA, 15 bp, Homo sapiens
acaacattctacact

SEQ ID NO: 514369 - DNA, 15 bp, Homo sapiens
tacaacattctacac

SEQ ID NO: 514370 - DNA, 15 bp, Homo sapiens
gtacaacattctaca

SEQ ID NO: 514371 - DNA, 15 bp, Homo sapiens
tgtacaacattctac

SEQ ID NO: 514372 - DNA, 15 bp, Homo sapiens
atgtacaacattcta

SEQ ID NO: 514373 - DNA, 15 bp, Homo sapiens
gatgtacaacattct

SEQ ID NO: 514374 - DNA, 15 bp, Homo sapiens
agatgtacaacattc

SEQ ID NO: 514375 - DNA, 15 bp, Homo sapiens
gagatgtacaacatt

SEQ ID NO: 514376 - DNA, 15 bp, Homo sapiens
agagatgtacaacat

SEQ ID NO: 514377 - DNA, 15 bp, Homo sapiens
aagagatgtacaaca

SEQ ID NO: 514378 - DNA, 15 bp, Homo sapiens
gaagagatgtacaac

SEQ ID NO: 514379 - DNA, 15 bp, Homo sapiens
ggaagagatgtacaa

SEQ ID NO: 514380 - DNA, 15 bp, Homo sapiens
tggaagagatgtaca

SEQ ID NO: 514381 - DNA, 15 bp, Homo sapiens
ctggaagagatgtac

SEQ ID NO: 514382 - DNA, 15 bp, Homo sapiens
actggaagagatgta

SEQ ID NO: 514383 - DNA, 15 bp, Homo sapiens
gactggaagagatgt

SEQ ID NO: 514384 - DNA, 15 bp, Homo sapiens
agactggaagagatg

SEQ ID NO: 514385 - DNA, 15 bp, Homo sapiens
gagactggaagagat

SEQ ID NO: 514386 - DNA, 15 bp, Homo sapiens
tgagactggaagaga

SEQ ID NO: 514387 - DNA, 15 bp, Homo sapiens
ttgagactggaagag

SEQ ID NO: 514388 - DNA, 15 bp, Homo sapiens
gttgagactggaaga

SEQ ID NO: 514389 - DNA, 15 bp, Homo sapiens
cgttgagactggaag

SEQ ID NO: 514390 - DNA, 15 bp, Homo sapiens
gcgttgagactggaa

SEQ ID NO: 514391 - DNA, 15 bp, Homo sapiens
ggcgttgagactgga

SEQ ID NO: 514392 - DNA, 15 bp, Homo sapiens
tggcgttgagactgg

SEQ ID NO: 514393 - DNA, 15 bp, Homo sapiens
atggcgttgagactg

SEQ ID NO: 514394 - DNA, 15 bp, Homo sapiens
aatggcgttgagact

SEQ ID NO: 514395 - DNA, 15 bp, Homo sapiens
aaatggcgttgagac

SEQ ID NO: 514396 - DNA, 15 bp, Homo sapiens
taaatggcgttgaga

SEQ ID NO: 514397 - DNA, 15 bp, Homo sapiens
ctaaatggcgttgag

SEQ ID NO: 514398 - DNA, 15 bp, Homo sapiens
tctaaatggcgttga

SEQ ID NO: 514399 - DNA, 15 bp, Homo sapiens
ttctaaatggcgttg

SEQ ID NO: 514400 - DNA, 15 bp, Homo sapiens
tttctaaatggcgtt

SEQ ID NO: 514401 - DNA, 15 bp, Homo sapiens
atttctaaatggcgt

SEQ ID NO: 514402 - DNA, 15 bp, Homo sapiens
catttctaaatggcg

SEQ ID NO: 514403 - DNA, 15 bp, Homo sapiens
ccatttctaaatggc

SEQ ID NO: 514404 - DNA, 15 bp, Homo sapiens
tccatttctaaatgg

SEQ ID NO: 514405 - DNA, 15 bp, Homo sapiens
ctccatttctaaatg

SEQ ID NO: 514406 - DNA, 15 bp, Homo sapiens
tctccatttctaaat

SEQ ID NO: 514407 - DNA, 15 bp, Homo sapiens
atctccatttctaaa

SEQ ID NO: 514408 - DNA, 15 bp, Homo sapiens
gatctccatttctaa

SEQ ID NO: 514409 - DNA, 15 bp, Homo sapiens
tgatctccatttcta

SEQ ID NO: 514410 - DNA, 15 bp, Homo sapiens
ttgatctccatttct

SEQ ID NO: 514411 - DNA, 15 bp, Homo sapiens
attgatctccatttc

SEQ ID NO: 514412 - DNA, 15 bp, Homo sapiens
gattgatctccattt

SEQ ID NO: 514413 - DNA, 15 bp, Homo sapiens
agattgatctccatt

SEQ ID NO: 514414 - DNA, 15 bp, Homo sapiens
aagattgatctccat

SEQ ID NO: 514415 - DNA, 15 bp, Homo sapiens
gaagattgatctcca

SEQ ID NO: 514416 - DNA, 15 bp, Homo sapiens
tgaagattgatctcc

SEQ ID NO: 514417 - DNA, 15 bp, Homo sapiens
gtgaagattgatctc

SEQ ID NO: 514418 - DNA, 15 bp, Homo sapiens
tgtgaagattgatct

SEQ ID NO: 514419 - DNA, 15 bp, Homo sapiens
ttgtgaagattgatc

SEQ ID NO: 514420 - DNA, 15 bp, Homo sapiens
cttgtgaagattgat

SEQ ID NO: 514421 - DNA, 15 bp, Homo sapiens
ccttgtgaagattga

SEQ ID NO: 514422 - DNA, 15 bp, Homo sapiens
accttgtgaagattg

SEQ ID NO: 514423 - DNA, 15 bp, Homo sapiens
aaccttgtgaagatt

SEQ ID NO: 514424 - DNA, 15 bp, Homo sapiens
aaaccttgtgaagat

SEQ ID NO: 514425 - DNA, 15 bp, Homo sapiens
aaaaccttgtgaaga

SEQ ID NO: 514426 - DNA, 15 bp, Homo sapiens
aaaaaccttgtgaag

SEQ ID NO: 514427 - DNA, 15 bp, Homo sapiens
caaaaaccttgtgaa

SEQ ID NO: 514428 - DNA, 15 bp, Homo sapiens
acaaaaaccttgtga

SEQ ID NO: 514429 - DNA, 15 bp, Homo sapiens
cacaaaaaccttgtg

SEQ ID NO: 514430 - DNA, 15 bp, Homo sapiens
tcacaaaaaccttgt

SEQ ID NO: 514431 - DNA, 15 bp, Homo sapiens
ctcacaaaaaccttg

SEQ ID NO: 514432 - DNA, 15 bp, Homo sapiens
tctcacaaaaacctt

SEQ ID NO: 514433 - DNA, 15 bp, Homo sapiens
atctcacaaaaacct

SEQ ID NO: 514434 - DNA, 15 bp, Homo sapiens
aatctcacaaaaacc

SEQ ID NO: 514435 - DNA, 15 bp, Homo sapiens
gaatctcacaaaaac

SEQ ID NO: 514436 - DNA, 15 bp, Homo sapiens
tgaatctcacaaaaa

SEQ ID NO: 514437 - DNA, 15 bp, Homo sapiens
ttgaatctcacaaaa

SEQ ID NO: 514438 - DNA, 15 bp, Homo sapiens
cttgaatctcacaaa

SEQ ID NO: 514439 - DNA, 15 bp, Homo sapiens
acttgaatctcacaa

SEQ ID NO: 514440 - DNA, 15 bp, Homo sapiens
tacttgaatctcaca

SEQ ID NO: 514441 - DNA, 15 bp, Homo sapiens
ttacttgaatctcac

SEQ ID NO: 514442 - DNA, 15 bp, Homo sapiens
cttacttgaatctca

SEQ ID NO: 514443 - DNA, 15 bp, Homo sapiens
tcttacttgaatctc

SEQ ID NO: 514444 - DNA, 15 bp, Homo sapiens
atcttacttgaatct

SEQ ID NO: 514445 - DNA, 15 bp, Homo sapiens
catcttacttgaatc

SEQ ID NO: 514446 - DNA, 15 bp, Homo sapiens
tcatcttacttgaat

SEQ ID NO: 514447 - DNA, 15 bp, Homo sapiens
ttcatcttacttgaa

SEQ ID NO: 514448 - DNA, 15 bp, Homo sapiens
cttcatcttacttga

SEQ ID NO: 514449 - DNA, 15 bp, Homo sapiens
gcttcatcttacttg

SEQ ID NO: 514450 - DNA, 15 bp, Homo sapiens
tgcttcatcttactt

SEQ ID NO: 514451 - DNA, 15 bp, Homo sapiens
gtgcttcatcttact

SEQ ID NO: 514452 - DNA, 15 bp, Homo sapiens
tgtgcttcatcttac

SEQ ID NO: 514453 - DNA, 15 bp, Homo sapiens
atgtgcttcatctta

SEQ ID NO: 514454 - DNA, 15 bp, Homo sapiens
gatgtgcttcatctt

SEQ ID NO: 514455 - DNA, 15 bp, Homo sapiens
tgatgtgcttcatct

SEQ ID NO: 514456 - DNA, 15 bp, Homo sapiens
ttgatgtgcttcatc

SEQ ID NO: 514457 - DNA, 15 bp, Homo sapiens
tttgatgtgcttcat

SEQ ID NO: 514458 - DNA, 15 bp, Homo sapiens
ttttgatgtgcttca

SEQ ID NO: 514459 - DNA, 15 bp, Homo sapiens
attttgatgtgcttc

SEQ ID NO: 514460 - DNA, 15 bp, Homo sapiens
cattttgatgtgctt

SEQ ID NO: 514461 - DNA, 15 bp, Homo sapiens
gcattttgatgtgct

SEQ ID NO: 514462 - DNA, 15 bp, Homo sapiens
agcattttgatgtgc

SEQ ID NO: 514463 - DNA, 15 bp, Homo sapiens
aagcattttgatgtg

SEQ ID NO: 514464 - DNA, 15 bp, Homo sapiens
aaagcattttgatgt

SEQ ID NO: 514465 - DNA, 15 bp, Homo sapiens
caaagcattttgatg

SEQ ID NO: 514466 - DNA, 15 bp, Homo sapiens
tcaaagcattttgat

SEQ ID NO: 514467 - DNA, 15 bp, Homo sapiens
ttcaaagcattttga

SEQ ID NO: 514468 - DNA, 15 bp, Homo sapiens
tttcaaagcattttg

SEQ ID NO: 514469 - DNA, 15 bp, Homo sapiens
ctttcaaagcatttt

SEQ ID NO: 514470 - DNA, 15 bp, Homo sapiens
gctttcaaagcattt

SEQ ID NO: 514471 - DNA, 15 bp, Homo sapiens
agctttcaaagcatt

SEQ ID NO: 514472 - DNA, 15 bp, Homo sapiens
aagctttcaaagcat

SEQ ID NO: 514473 - DNA, 15 bp, Homo sapiens
aaagctttcaaagca

SEQ ID NO: 514474 - DNA, 15 bp, Homo sapiens
caaagctttcaaagc

SEQ ID NO: 514475 - DNA, 15 bp, Homo sapiens
tcaaagctttcaaag

SEQ ID NO: 514476 - DNA, 15 bp, Homo sapiens
ttcaaagctttcaaa

SEQ ID NO: 514477 - DNA, 15 bp, Homo sapiens
attcaaagctttcaa

SEQ ID NO: 514478 - DNA, 15 bp, Homo sapiens
cattcaaagctttca

SEQ ID NO: 514479 - DNA, 15 bp, Homo sapiens
acattcaaagctttc

SEQ ID NO: 514480 - DNA, 15 bp, Homo sapiens
aacattcaaagcttt

SEQ ID NO: 514481 - DNA, 15 bp, Homo sapiens
aaacattcaaagctt

SEQ ID NO: 514482 - DNA, 15 bp, Homo sapiens
aaaacattcaaagct

SEQ ID NO: 514483 - DNA, 15 bp, Homo sapiens
aaaaacattcaaagc

SEQ ID NO: 514484 - DNA, 15 bp, Homo sapiens
gaaaaacattcaaag

SEQ ID NO: 514485 - DNA, 15 bp, Homo sapiens
tgaaaaacattcaaa

SEQ ID NO: 514486 - DNA, 15 bp, Homo sapiens
ctgaaaaacattcaa

SEQ ID NO: 514487 - DNA, 15 bp, Homo sapiens
gctgaaaaacattca

SEQ ID NO: 514488 - DNA, 15 bp, Homo sapiens
agctgaaaaacattc

SEQ ID NO: 514489 - DNA, 15 bp, Homo sapiens
gagctgaaaaacatt

SEQ ID NO: 514490 - DNA, 15 bp, Homo sapiens
tgagctgaaaaacat

SEQ ID NO: 514491 - DNA, 15 bp, Homo sapiens
ctgagctgaaaaaca

SEQ ID NO: 514492 - DNA, 15 bp, Homo sapiens
actgagctgaaaaac

SEQ ID NO: 514493 - DNA, 15 bp, Homo sapiens
cactgagctgaaaaa

SEQ ID NO: 514494 - DNA, 15 bp, Homo sapiens
gcactgagctgaaaa

SEQ ID NO: 514495 - DNA, 15 bp, Homo sapiens
ggcactgagctgaaa

SEQ ID NO: 514496 - DNA, 15 bp, Homo sapiens
tggcactgagctgaa

SEQ ID NO: 514497 - DNA, 15 bp, Homo sapiens
ctggcactgagctga

SEQ ID NO: 514498 - DNA, 15 bp, Homo sapiens
gctggcactgagctg

SEQ ID NO: 514499 - DNA, 15 bp, Homo sapiens
tgctggcactgagct

SEQ ID NO: 514500 - DNA, 15 bp, Homo sapiens
gtgctggcactgagc

SEQ ID NO: 514501 - DNA, 15 bp, Homo sapiens
agtgctggcactgag

SEQ ID NO: 514502 - DNA, 15 bp, Homo sapiens
cagtgctggcactga

SEQ ID NO: 514503 - DNA, 15 bp, Homo sapiens
ccagtgctggcactg

SEQ ID NO: 514504 - DNA, 15 bp, Homo sapiens
tccagtgctggcact

SEQ ID NO: 514505 - DNA, 15 bp, Homo sapiens
ctccagtgctggcac

SEQ ID NO: 514506 - DNA, 15 bp, Homo sapiens
tctccagtgctggca

SEQ ID NO: 514507 - DNA, 15 bp, Homo sapiens
atctccagtgctggc

SEQ ID NO: 514508 - DNA, 15 bp, Homo sapiens
aatctccagtgctgg

SEQ ID NO: 514509 - DNA, 15 bp, Homo sapiens
caatctccagtgctg

SEQ ID NO: 514510 - DNA, 15 bp, Homo sapiens
gcaatctccagtgct

SEQ ID NO: 514511 - DNA, 15 bp, Homo sapiens
cgcaatctccagtgc

SEQ ID NO: 514512 - DNA, 15 bp, Homo sapiens
ccgcaatctccagtg

SEQ ID NO: 514513 - DNA, 15 bp, Homo sapiens
accgcaatctccagt

SEQ ID NO: 514514 - DNA, 15 bp, Homo sapiens
taccgcaatctccag

SEQ ID NO: 514515 - DNA, 15 bp, Homo sapiens
ctaccgcaatctcca

SEQ ID NO: 514516 - DNA, 15 bp, Homo sapiens
actaccgcaatctcc

SEQ ID NO: 514517 - DNA, 15 bp, Homo sapiens
aactaccgcaatctc

SEQ ID NO: 514518 - DNA, 15 bp, Homo sapiens
taactaccgcaatct

SEQ ID NO: 514519 - DNA, 15 bp, Homo sapiens
ataactaccgcaatc

SEQ ID NO: 514520 - DNA, 15 bp, Homo sapiens
aataactaccgcaat

SEQ ID NO: 514521 - DNA, 15 bp, Homo sapiens
taataactaccgcaa

SEQ ID NO: 514522 - DNA, 15 bp, Homo sapiens
ataataactaccgca

SEQ ID NO: 514523 - DNA, 15 bp, Homo sapiens
gataataactaccgc

SEQ ID NO: 514524 - DNA, 15 bp, Homo sapiens
tgataataactaccg

SEQ ID NO: 514525 - DNA, 15 bp, Homo sapiens
atgataataactacc

SEQ ID NO: 514526 - DNA, 15 bp, Homo sapiens
catgataataactac

SEQ ID NO: 514527 - DNA, 15 bp, Homo sapiens
tcatgataataacta

SEQ ID NO: 514528 - DNA, 15 bp, Homo sapiens
gtcatgataataact

SEQ ID NO: 514529 - DNA, 15 bp, Homo sapiens
agtcatgataataac

SEQ ID NO: 514530 - DNA, 15 bp, Homo sapiens
tagtcatgataataa

SEQ ID NO: 514531 - DNA, 15 bp, Homo sapiens
atagtcatgataata

SEQ ID NO: 514532 - DNA, 15 bp, Homo sapiens
gatagtcatgataat

SEQ ID NO: 514533 - DNA, 15 bp, Homo sapiens
ggatagtcatgataa

SEQ ID NO: 514534 - DNA, 15 bp, Homo sapiens
gggatagtcatgata

SEQ ID NO: 514535 - DNA, 15 bp, Homo sapiens
ggggatagtcatgat

SEQ ID NO: 514536 - DNA, 15 bp, Homo sapiens
tggggatagtcatga

SEQ ID NO: 514537 - DNA, 15 bp, Homo sapiens
gtggggatagtcatg

SEQ ID NO: 514538 - DNA, 15 bp, Homo sapiens
ggtggggatagtcat

SEQ ID NO: 514539 - DNA, 15 bp, Homo sapiens
gggtggggatagtca

SEQ ID NO: 514540 - DNA, 15 bp, Homo sapiens
ggggtggggatagtc

SEQ ID NO: 514541 - DNA, 15 bp, Homo sapiens
gggggtggggatagt

SEQ ID NO: 514542 - DNA, 15 bp, Homo sapiens
agggggtggggatag

SEQ ID NO: 514543 - DNA, 15 bp, Homo sapiens
gagggggtggggata

SEQ ID NO: 514544 - DNA, 15 bp, Homo sapiens
agagggggtggggat

SEQ ID NO: 514545 - DNA, 15 bp, Homo sapiens
aagagggggtgggga

SEQ ID NO: 514546 - DNA, 15 bp, Homo sapiens
taagagggggtgggg

SEQ ID NO: 514547 - DNA, 15 bp, Homo sapiens
ctaagagggggtggg

SEQ ID NO: 514548 - DNA, 15 bp, Homo sapiens
cctaagagggggtgg

SEQ ID NO: 514549 - DNA, 15 bp, Homo sapiens
acctaagagggggtg

SEQ ID NO: 514550 - DNA, 15 bp, Homo sapiens
gacctaagagggggt

SEQ ID NO: 514551 - DNA, 15 bp, Homo sapiens
ggacctaagaggggg

SEQ ID NO: 514552 - DNA, 15 bp, Homo sapiens
gggacctaagagggg

SEQ ID NO: 514553 - DNA, 15 bp, Homo sapiens
tgggacctaagaggg

SEQ ID NO: 514554 - DNA, 15 bp, Homo sapiens
ttgggacctaagagg

SEQ ID NO: 514555 - DNA, 15 bp, Homo sapiens
cttgggacctaagag

SEQ ID NO: 514556 - DNA, 15 bp, Homo sapiens
tcttgggacctaaga

SEQ ID NO: 514557 - DNA, 15 bp, Homo sapiens
gtcttgggacctaag

SEQ ID NO: 514558 - DNA, 15 bp, Homo sapiens
ggtcttgggacctaa

SEQ ID NO: 514559 - DNA, 15 bp, Homo sapiens
aggtcttgggaccta

SEQ ID NO: 514560 - DNA, 15 bp, Homo sapiens
caggtcttgggacct

SEQ ID NO: 514561 - DNA, 15 bp, Homo sapiens
tcaggtcttgggacc

SEQ ID NO: 514562 - DNA, 15 bp, Homo sapiens
ctcaggtcttgggac

SEQ ID NO: 514563 - DNA, 15 bp, Homo sapiens
actcaggtcttggga

SEQ ID NO: 514564 - DNA, 15 bp, Homo sapiens
tactcaggtcttggg

SEQ ID NO: 514565 - DNA, 15 bp, Homo sapiens
ttactcaggtcttgg

SEQ ID NO: 514566 - DNA, 15 bp, Homo sapiens
tttactcaggtcttg

SEQ ID NO: 514567 - DNA, 15 bp, Homo sapiens
ttttactcaggtctt

SEQ ID NO: 514568 - DNA, 15 bp, Homo sapiens
cttttactcaggtct

SEQ ID NO: 514569 - DNA, 15 bp, Homo sapiens
ccttttactcaggtc

SEQ ID NO: 514570 - DNA, 15 bp, Homo sapiens
tccttttactcaggt

SEQ ID NO: 514571 - DNA, 15 bp, Homo sapiens
ttccttttactcagg

SEQ ID NO: 514572 - DNA, 15 bp, Homo sapiens
cttccttttactcag

SEQ ID NO: 514573 - DNA, 15 bp, Homo sapiens
tcttccttttactca

SEQ ID NO: 514574 - DNA, 15 bp, Homo sapiens
ctcttccttttactc

SEQ ID NO: 514575 - DNA, 15 bp, Homo sapiens
actcttccttttact

SEQ ID NO: 514576 - DNA, 15 bp, Homo sapiens
aactcttccttttac

SEQ ID NO: 514577 - DNA, 15 bp, Homo sapiens
caactcttcctttta

SEQ ID NO: 514578 - DNA, 15 bp, Homo sapiens
ccaactcttcctttt

SEQ ID NO: 514579 - DNA, 15 bp, Homo sapiens
cccaactcttccttt

SEQ ID NO: 514580 - DNA, 15 bp, Homo sapiens
acccaactcttcctt

SEQ ID NO: 514581 - DNA, 15 bp, Homo sapiens
cacccaactcttcct

SEQ ID NO: 514582 - DNA, 15 bp, Homo sapiens
tcacccaactcttcc

SEQ ID NO: 514583 - DNA, 15 bp, Homo sapiens
ttcacccaactcttc

SEQ ID NO: 514584 - DNA, 15 bp, Homo sapiens
attcacccaactctt

SEQ ID NO: 514585 - DNA, 15 bp, Homo sapiens
gattcacccaactct

SEQ ID NO: 514586 - DNA, 15 bp, Homo sapiens
agattcacccaactc

SEQ ID NO: 514587 - DNA, 15 bp, Homo sapiens
aagattcacccaact

SEQ ID NO: 514588 - DNA, 15 bp, Homo sapiens
gaagattcacccaac

SEQ ID NO: 514589 - DNA, 15 bp, Homo sapiens
ggaagattcacccaa

SEQ ID NO: 514590 - DNA, 15 bp, Homo sapiens
tggaagattcaccca

SEQ ID NO: 514591 - DNA, 15 bp, Homo sapiens
gtggaagattcaccc

SEQ ID NO: 514592 - DNA, 15 bp, Homo sapiens
tgtggaagattcacc

SEQ ID NO: 514593 - DNA, 15 bp, Homo sapiens
ctgtggaagattcac

SEQ ID NO: 514594 - DNA, 15 bp, Homo sapiens
gctgtggaagattca

SEQ ID NO: 514595 - DNA, 15 bp, Homo sapiens
ggctgtggaagattc

SEQ ID NO: 514596 - DNA, 15 bp, Homo sapiens
gggctgtggaagatt

SEQ ID NO: 514597 - DNA, 15 bp, Homo sapiens
ggggctgtggaagat

SEQ ID NO: 514598 - DNA, 15 bp, Homo sapiens
aggggctgtggaaga

SEQ ID NO: 514599 - DNA, 15 bp, Homo sapiens
taggggctgtggaag

SEQ ID NO: 514600 - DNA, 15 bp, Homo sapiens
ctaggggctgtggaa

SEQ ID NO: 514601 - DNA, 15 bp, Homo sapiens
cctaggggctgtgga

SEQ ID NO: 514602 - DNA, 15 bp, Homo sapiens
acctaggggctgtgg

SEQ ID NO: 514603 - DNA, 15 bp, Homo sapiens
gacctaggggctgtg

SEQ ID NO: 514604 - DNA, 15 bp, Homo sapiens
ggacctaggggctgt

SEQ ID NO: 514605 - DNA, 15 bp, Homo sapiens
aggacctaggggctg

SEQ ID NO: 514606 - DNA, 15 bp, Homo sapiens
caggacctaggggct

SEQ ID NO: 514607 - DNA, 15 bp, Homo sapiens
acaggacctaggggc

SEQ ID NO: 514608 - DNA, 15 bp, Homo sapiens
gacaggacctagggg

SEQ ID NO: 514609 - DNA, 15 bp, Homo sapiens
agacaggacctaggg

SEQ ID NO: 514610 - DNA, 15 bp, Homo sapiens
aagacaggacctagg

SEQ ID NO: 514611 - DNA, 15 bp, Homo sapiens
gaagacaggacctag

SEQ ID NO: 514612 - DNA, 15 bp, Homo sapiens
agaagacaggaccta

SEQ ID NO: 514613 - DNA, 15 bp, Homo sapiens
gagaagacaggacct

SEQ ID NO: 514614 - DNA, 15 bp, Homo sapiens
cgagaagacaggacc

SEQ ID NO: 514615 - DNA, 15 bp, Homo sapiens
ccgagaagacaggac

SEQ ID NO: 514616 - DNA, 15 bp, Homo sapiens
gccgagaagacagga

SEQ ID NO: 514617 - DNA, 15 bp, Homo sapiens
ggccgagaagacagg

SEQ ID NO: 514618 - DNA, 15 bp, Homo sapiens
aggccgagaagacag

SEQ ID NO: 514619 - DNA, 15 bp, Homo sapiens
aaggccgagaagaca

SEQ ID NO: 514620 - DNA, 15 bp, Homo sapiens
gaaggccgagaagac

SEQ ID NO: 514621 - DNA, 15 bp, Homo sapiens
cgaaggccgagaaga

SEQ ID NO: 514622 - DNA, 15 bp, Homo sapiens
acgaaggccgagaag

SEQ ID NO: 514623 - DNA, 15 bp, Homo sapiens
gacgaaggccgagaa

SEQ ID NO: 514624 - DNA, 15 bp, Homo sapiens
ggacgaaggccgaga

SEQ ID NO: 514625 - DNA, 15 bp, Homo sapiens
gggacgaaggccgag

SEQ ID NO: 514626 - DNA, 15 bp, Homo sapiens
agggacgaaggccga

SEQ ID NO: 514627 - DNA, 15 bp, Homo sapiens
aagggacgaaggccg

SEQ ID NO: 514628 - DNA, 15 bp, Homo sapiens
caagggacgaaggcc

SEQ ID NO: 514629 - DNA, 15 bp, Homo sapiens
ccaagggacgaaggc

SEQ ID NO: 514630 - DNA, 15 bp, Homo sapiens
gccaagggacgaagg

SEQ ID NO: 514631 - DNA, 15 bp, Homo sapiens
tgccaagggacgaag

SEQ ID NO: 514632 - DNA, 15 bp, Homo sapiens
ctgccaagggacgaa

SEQ ID NO: 514633 - DNA, 15 bp, Homo sapiens
gctgccaagggacga

SEQ ID NO: 514634 - DNA, 15 bp, Homo sapiens
agctgccaagggacg

SEQ ID NO: 514635 - DNA, 15 bp, Homo sapiens
aagctgccaagggac

SEQ ID NO: 514636 - DNA, 15 bp, Homo sapiens
aaagctgccaaggga

SEQ ID NO: 514637 - DNA, 15 bp, Homo sapiens
aaaagctgccaaggg

SEQ ID NO: 514638 - DNA, 15 bp, Homo sapiens
gaaaagctgccaagg

SEQ ID NO: 514639 - DNA, 15 bp, Homo sapiens
tgaaaagctgccaag

SEQ ID NO: 514640 - DNA, 15 bp, Homo sapiens
ttgaaaagctgccaa

SEQ ID NO: 514641 - DNA, 15 bp, Homo sapiens
gttgaaaagctgcca

SEQ ID NO: 514642 - DNA, 15 bp, Homo sapiens
ggttgaaaagctgcc

SEQ ID NO: 514643 - DNA, 15 bp, Homo sapiens
aggttgaaaagctgc

SEQ ID NO: 514644 - DNA, 15 bp, Homo sapiens
gaggttgaaaagctg

SEQ ID NO: 514645 - DNA, 15 bp, Homo sapiens
agaggttgaaaagct

SEQ ID NO: 514646 - DNA, 15 bp, Homo sapiens
gagaggttgaaaagc

SEQ ID NO: 514647 - DNA, 15 bp, Homo sapiens
tgagaggttgaaaag

SEQ ID NO: 514648 - DNA, 15 bp, Homo sapiens
ctgagaggttgaaaa

SEQ ID NO: 514649 - DNA, 15 bp, Homo sapiens
gctgagaggttgaaa

SEQ ID NO: 514650 - DNA, 15 bp, Homo sapiens
tgctgagaggttgaa

SEQ ID NO: 514651 - DNA, 15 bp, Homo sapiens
ctgctgagaggttga

SEQ ID NO: 514652 - DNA, 15 bp, Homo sapiens
cctgctgagaggttg

SEQ ID NO: 514653 - DNA, 15 bp, Homo sapiens
gcctgctgagaggtt

SEQ ID NO: 514654 - DNA, 15 bp, Homo sapiens
ggcctgctgagaggt

SEQ ID NO: 514655 - DNA, 15 bp, Homo sapiens
tggcctgctgagagg

SEQ ID NO: 514656 - DNA, 15 bp, Homo sapiens
gtggcctgctgagag

SEQ ID NO: 514657 - DNA, 15 bp, Homo sapiens
tgtggcctgctgaga

SEQ ID NO: 514658 - DNA, 15 bp, Homo sapiens
ctgtggcctgctgag

SEQ ID NO: 514659 - DNA, 15 bp, Homo sapiens
cctgtggcctgctga

SEQ ID NO: 514660 - DNA, 15 bp, Homo sapiens
gcctgtggcctgctg

SEQ ID NO: 514661 - DNA, 15 bp, Homo sapiens
cgcctgtggcctgct

SEQ ID NO: 514662 - DNA, 15 bp, Homo sapiens
gcgcctgtggcctgc

SEQ ID NO: 514663 - DNA, 15 bp, Homo sapiens
tgcgcctgtggcctg

SEQ ID NO: 514664 - DNA, 15 bp, Homo sapiens
gtgcgcctgtggcct

SEQ ID NO: 514665 - DNA, 15 bp, Homo sapiens
cgtgcgcctgtggcc

SEQ ID NO: 514666 - DNA, 15 bp, Homo sapiens
acgtgcgcctgtggc

SEQ ID NO: 514667 - DNA, 15 bp, Homo sapiens
cacgtgcgcctgtgg

SEQ ID NO: 514668 - DNA, 15 bp, Homo sapiens
ccacgtgcgcctgtg

SEQ ID NO: 514669 - DNA, 15 bp, Homo sapiens
gccacgtgcgcctgt

SEQ ID NO: 514670 - DNA, 15 bp, Homo sapiens
agccacgtgcgcctg

SEQ ID NO: 514671 - DNA, 15 bp, Homo sapiens
cagccacgtgcgcct

SEQ ID NO: 514672 - DNA, 15 bp, Homo sapiens
ccagccacgtgcgcc

SEQ ID NO: 514673 - DNA, 15 bp, Homo sapiens
gccagccacgtgcgc

SEQ ID NO: 514674 - DNA, 15 bp, Homo sapiens
tgccagccacgtgcg

SEQ ID NO: 514675 - DNA, 15 bp, Homo sapiens
ctgccagccacgtgc

SEQ ID NO: 514676 - DNA, 15 bp, Homo sapiens
gctgccagccacgtg

SEQ ID NO: 514677 - DNA, 15 bp, Homo sapiens
agctgccagccacgt

SEQ ID NO: 514678 - DNA, 15 bp, Homo sapiens
gagctgccagccacg

SEQ ID NO: 514679 - DNA, 15 bp, Homo sapiens
ggagctgccagccac

SEQ ID NO: 514680 - DNA, 15 bp, Homo sapiens
gggagctgccagcca

SEQ ID NO: 514681 - DNA, 15 bp, Homo sapiens
ggggagctgccagcc

SEQ ID NO: 514682 - DNA, 15 bp, Homo sapiens
cggggagctgccagc

SEQ ID NO: 514683 - DNA, 15 bp, Homo sapiens
ccggggagctgccag

SEQ ID NO: 514684 - DNA, 15 bp, Homo sapiens
gccggggagctgcca

SEQ ID NO: 514685 - DNA, 15 bp, Homo sapiens
ggccggggagctgcc

SEQ ID NO: 514686 - DNA, 15 bp, Homo sapiens
aggccggggagctgc

SEQ ID NO: 514687 - DNA, 15 bp, Homo sapiens
gaggccggggagctg

SEQ ID NO: 514688 - DNA, 15 bp, Homo sapiens
ggaggccggggagct

SEQ ID NO: 514689 - DNA, 15 bp, Homo sapiens
cggaggccggggagc

SEQ ID NO: 514690 - DNA, 15 bp, Homo sapiens
ccggaggccggggag

SEQ ID NO: 514691 - DNA, 15 bp, Homo sapiens
gccggaggccgggga

SEQ ID NO: 514692 - DNA, 15 bp, Homo sapiens
agccggaggccgggg

SEQ ID NO: 514693 - DNA, 15 bp, Homo sapiens
gagccggaggccggg

SEQ ID NO: 514694 - DNA, 15 bp, Homo sapiens
agagccggaggccgg

SEQ ID NO: 514695 - DNA, 15 bp, Homo sapiens
cagagccggaggccg

SEQ ID NO: 514696 - DNA, 15 bp, Homo sapiens
tcagagccggaggcc

SEQ ID NO: 514697 - DNA, 15 bp, Homo sapiens
gtcagagccggaggc

SEQ ID NO: 514698 - DNA, 15 bp, Homo sapiens
tgtcagagccggagg

SEQ ID NO: 514699 - DNA, 15 bp, Homo sapiens
ctgtcagagccggag

SEQ ID NO: 514700 - DNA, 15 bp, Homo sapiens
actgtcagagccgga

SEQ ID NO: 514701 - DNA, 15 bp, Homo sapiens
gactgtcagagccgg

SEQ ID NO: 514702 - DNA, 15 bp, Homo sapiens
ggactgtcagagccg

SEQ ID NO: 514703 - DNA, 15 bp, Homo sapiens
cggactgtcagagcc

SEQ ID NO: 514704 - DNA, 15 bp, Homo sapiens
ccggactgtcagagc

SEQ ID NO: 514705 - DNA, 15 bp, Homo sapiens
cccggactgtcagag

SEQ ID NO: 514706 - DNA, 15 bp, Homo sapiens
ccccggactgtcaga

SEQ ID NO: 514707 - DNA, 15 bp, Homo sapiens
cccccggactgtcag

SEQ ID NO: 514708 - DNA, 15 bp, Homo sapiens
gcccccggactgtca

SEQ ID NO: 514709 - DNA, 15 bp, Homo sapiens
tgcccccggactgtc

SEQ ID NO: 514710 - DNA, 15 bp, Homo sapiens
ttgcccccggactgt

SEQ ID NO: 514711 - DNA, 15 bp, Homo sapiens
gttgcccccggactg

SEQ ID NO: 514712 - DNA, 15 bp, Homo sapiens
ggttgcccccggact

SEQ ID NO: 514713 - DNA, 15 bp, Homo sapiens
tggttgcccccggac

SEQ ID NO: 514714 - DNA, 15 bp, Homo sapiens
ctggttgcccccgga

SEQ ID NO: 514715 - DNA, 15 bp, Homo sapiens
cctggttgcccccgg

SEQ ID NO: 514716 - DNA, 15 bp, Homo sapiens
gcctggttgcccccg

SEQ ID NO: 514717 - DNA, 15 bp, Homo sapiens
ggcctggttgccccc

SEQ ID NO: 514718 - DNA, 15 bp, Homo sapiens
aggcctggttgcccc

SEQ ID NO: 514719 - DNA, 15 bp, Homo sapiens
caggcctggttgccc

SEQ ID NO: 514720 - DNA, 15 bp, Homo sapiens
gcaggcctggttgcc

SEQ ID NO: 514721 - DNA, 15 bp, Homo sapiens
tgcaggcctggttgc

SEQ ID NO: 514722 - DNA, 15 bp, Homo sapiens
ctgcaggcctggttg

SEQ ID NO: 514723 - DNA, 15 bp, Homo sapiens
actgcaggcctggtt

SEQ ID NO: 514724 - DNA, 15 bp, Homo sapiens
aactgcaggcctggt

SEQ ID NO: 514725 - DNA, 15 bp, Homo sapiens
gaactgcaggcctgg

SEQ ID NO: 514726 - DNA, 15 bp, Homo sapiens
agaactgcaggcctg

SEQ ID NO: 514727 - DNA, 15 bp, Homo sapiens
gagaactgcaggcct

SEQ ID NO: 514728 - DNA, 15 bp, Homo sapiens
cgagaactgcaggcc

SEQ ID NO: 514729 - DNA, 15 bp, Homo sapiens
tcgagaactgcaggc

SEQ ID NO: 514730 - DNA, 15 bp, Homo sapiens
ctcgagaactgcagg

SEQ ID NO: 514731 - DNA, 15 bp, Homo sapiens
cctcgagaactgcag

SEQ ID NO: 514732 - DNA, 15 bp, Homo sapiens
tcctcgagaactgca

SEQ ID NO: 514733 - DNA, 15 bp, Homo sapiens
ttcctcgagaactgc

SEQ ID NO: 514734 - DNA, 15 bp, Homo sapiens
tttcctcgagaactg

SEQ ID NO: 514735 - DNA, 15 bp, Homo sapiens
gtttcctcgagaact

SEQ ID NO: 514736 - DNA, 15 bp, Homo sapiens
ggtttcctcgagaac

SEQ ID NO: 514737 - DNA, 15 bp, Homo sapiens
gggtttcctcgagaa

SEQ ID NO: 514738 - DNA, 15 bp, Homo sapiens
ggggtttcctcgaga

SEQ ID NO: 514739 - DNA, 15 bp, Homo sapiens
gggggtttcctcgag

SEQ ID NO: 514740 - DNA, 15 bp, Homo sapiens
tgggggtttcctcga

SEQ ID NO: 514741 - DNA, 15 bp, Homo sapiens
ctgggggtttcctcg

SEQ ID NO: 514742 - DNA, 15 bp, Homo sapiens
gctgggggtttcctc

SEQ ID NO: 514743 - DNA, 15 bp, Homo sapiens
ggctgggggtttcct

SEQ ID NO: 514744 - DNA, 15 bp, Homo sapiens
gggctgggggtttcc

SEQ ID NO: 514745 - DNA, 15 bp, Homo sapiens
ggggctgggggtttc

SEQ ID NO: 514746 - DNA, 15 bp, Homo sapiens
gggggctgggggttt

SEQ ID NO: 514747 - DNA, 15 bp, Homo sapiens
ggggggctgggggtt

SEQ ID NO: 514748 - DNA, 15 bp, Homo sapiens
tggggggctgggggt

SEQ ID NO: 514749 - DNA, 15 bp, Homo sapiens
gtggggggctggggg

SEQ ID NO: 514750 - DNA, 15 bp, Homo sapiens
cgtggggggctgggg

SEQ ID NO: 514751 - DNA, 15 bp, Homo sapiens
acgtggggggctggg

SEQ ID NO: 514752 - DNA, 15 bp, Homo sapiens
gacgtggggggctgg

SEQ ID NO: 514753 - DNA, 15 bp, Homo sapiens
agacgtggggggctg

SEQ ID NO: 514754 - DNA, 15 bp, Homo sapiens
gagacgtggggggct

SEQ ID NO: 514755 - DNA, 15 bp, Homo sapiens
cgagacgtggggggc

SEQ ID NO: 514756 - DNA, 15 bp, Homo sapiens
acgagacgtgggggg

SEQ ID NO: 514757 - DNA, 15 bp, Homo sapiens
aacgagacgtggggg

SEQ ID NO: 514758 - DNA, 15 bp, Homo sapiens
gaacgagacgtgggg

SEQ ID NO: 514759 - DNA, 15 bp, Homo sapiens
agaacgagacgtggg

SEQ ID NO: 514760 - DNA, 15 bp, Homo sapiens
cagaacgagacgtgg

SEQ ID NO: 514761 - DNA, 15 bp, Homo sapiens
ccagaacgagacgtg

SEQ ID NO: 514762 - DNA, 15 bp, Homo sapiens
tccagaacgagacgt

SEQ ID NO: 514763 - DNA, 15 bp, Homo sapiens
gtccagaacgagacg

SEQ ID NO: 514764 - DNA, 15 bp, Homo sapiens
ggtccagaacgagac

SEQ ID NO: 514765 - DNA, 15 bp, Homo sapiens
tggtccagaacgaga

SEQ ID NO: 514766 - DNA, 15 bp, Homo sapiens
ctggtccagaacgag

SEQ ID NO: 514767 - DNA, 15 bp, Homo sapiens
cctggtccagaacga

SEQ ID NO: 514768 - DNA, 15 bp, Homo sapiens
tcctggtccagaacg

SEQ ID NO: 514769 - DNA, 15 bp, Homo sapiens
ttcctggtccagaac

SEQ ID NO: 514770 - DNA, 15 bp, Homo sapiens
gttcctggtccagaa

SEQ ID NO: 514771 - DNA, 15 bp, Homo sapiens
ggttcctggtccaga

SEQ ID NO: 514772 - DNA, 15 bp, Homo sapiens
gggttcctggtccag

SEQ ID NO: 514773 - DNA, 15 bp, Homo sapiens
ggggttcctggtcca

SEQ ID NO: 514774 - DNA, 15 bp, Homo sapiens
gggggttcctggtcc

SEQ ID NO: 514775 - DNA, 15 bp, Homo sapiens
agggggttcctggtc

SEQ ID NO: 514776 - DNA, 15 bp, Homo sapiens
gagggggttcctggt

SEQ ID NO: 514777 - DNA, 15 bp, Homo sapiens
ggagggggttcctgg

SEQ ID NO: 514778 - DNA, 15 bp, Homo sapiens
gggagggggttcctg

SEQ ID NO: 514779 - DNA, 15 bp, Homo sapiens
ggggagggggttcct

SEQ ID NO: 514780 - DNA, 15 bp, Homo sapiens
tggggagggggttcc

SEQ ID NO: 514781 - DNA, 15 bp, Homo sapiens
ttggggagggggttc

SEQ ID NO: 514782 - DNA, 15 bp, Homo sapiens
gttggggagggggtt

SEQ ID NO: 514783 - DNA, 15 bp, Homo sapiens
tgttggggagggggt

SEQ ID NO: 514784 - DNA, 15 bp, Homo sapiens
ttgttggggaggggg

SEQ ID NO: 514785 - DNA, 15 bp, Homo sapiens
gttgttggggagggg

SEQ ID NO: 514786 - DNA, 15 bp, Homo sapiens
ggttgttggggaggg

SEQ ID NO: 514787 - DNA, 15 bp, Homo sapiens
cggttgttggggagg

SEQ ID NO: 514788 - DNA, 15 bp, Homo sapiens
gcggttgttggggag

SEQ ID NO: 514789 - DNA, 15 bp, Homo sapiens
cgcggttgttgggga

SEQ ID NO: 514790 - DNA, 15 bp, Homo sapiens
gcgcggttgttgggg

SEQ ID NO: 514791 - DNA, 15 bp, Homo sapiens
tgcgcggttgttggg

SEQ ID NO: 514792 - DNA, 15 bp, Homo sapiens
ctgcgcggttgttgg

SEQ ID NO: 514793 - DNA, 15 bp, Homo sapiens
gctgcgcggttgttg

SEQ ID NO: 514794 - DNA, 15 bp, Homo sapiens
tgctgcgcggttgtt

SEQ ID NO: 514795 - DNA, 15 bp, Homo sapiens
ttgctgcgcggttgt

SEQ ID NO: 514796 - DNA, 15 bp, Homo sapiens
cttgctgcgcggttg

SEQ ID NO: 514797 - DNA, 15 bp, Homo sapiens
acttgctgcgcggtt

SEQ ID NO: 514798 - DNA, 15 bp, Homo sapiens
cacttgctgcgcggt

SEQ ID NO: 514799 - DNA, 15 bp, Homo sapiens
ccacttgctgcgcgg

SEQ ID NO: 514800 - DNA, 15 bp, Homo sapiens
gccacttgctgcgcg

SEQ ID NO: 514801 - DNA, 15 bp, Homo sapiens
cgccacttgctgcgc

SEQ ID NO: 514802 - DNA, 15 bp, Homo sapiens
tcgccacttgctgcg

SEQ ID NO: 514803 - DNA, 15 bp, Homo sapiens
gtcgccacttgctgc

SEQ ID NO: 514804 - DNA, 15 bp, Homo sapiens
agtcgccacttgctg

SEQ ID NO: 514805 - DNA, 15 bp, Homo sapiens
gagtcgccacttgct

SEQ ID NO: 514806 - DNA, 15 bp, Homo sapiens
agagtcgccacttgc

SEQ ID NO: 514807 - DNA, 15 bp, Homo sapiens
cagagtcgccacttg

SEQ ID NO: 514808 - DNA, 15 bp, Homo sapiens
ccagagtcgccactt

SEQ ID NO: 514809 - DNA, 15 bp, Homo sapiens
cccagagtcgccact

SEQ ID NO: 514810 - DNA, 15 bp, Homo sapiens
tcccagagtcgccac

SEQ ID NO: 514811 - DNA, 15 bp, Homo sapiens
ctcccagagtcgcca

SEQ ID NO: 514812 - DNA, 15 bp, Homo sapiens
gctcccagagtcgcc

SEQ ID NO: 514813 - DNA, 15 bp, Homo sapiens
agctcccagagtcgc

SEQ ID NO: 514814 - DNA, 15 bp, Homo sapiens
cagctcccagagtcg

SEQ ID NO: 514815 - DNA, 15 bp, Homo sapiens
tcagctcccagagtc

SEQ ID NO: 514816 - DNA, 15 bp, Homo sapiens
ttcagctcccagagt

SEQ ID NO: 514817 - DNA, 15 bp, Homo sapiens
gttcagctcccagag

SEQ ID NO: 514818 - DNA, 15 bp, Homo sapiens
agttcagctcccaga

SEQ ID NO: 514819 - DNA, 15 bp, Homo sapiens
cagttcagctcccag

SEQ ID NO: 514820 - DNA, 15 bp, Homo sapiens
ccagttcagctccca

SEQ ID NO: 514821 - DNA, 15 bp, Homo sapiens
tccagttcagctccc

SEQ ID NO: 514822 - DNA, 15 bp, Homo sapiens
ctccagttcagctcc

SEQ ID NO: 514823 - DNA, 15 bp, Homo sapiens
actccagttcagctc

SEQ ID NO: 514824 - DNA, 15 bp, Homo sapiens
cactccagttcagct

SEQ ID NO: 514825 - DNA, 15 bp, Homo sapiens
ccactccagttcagc

SEQ ID NO: 514826 - DNA, 15 bp, Homo sapiens
tccactccagttcag

SEQ ID NO: 514827 - DNA, 15 bp, Homo sapiens
ctccactccagttca

SEQ ID NO: 514828 - DNA, 15 bp, Homo sapiens
gctccactccagttc

SEQ ID NO: 514829 - DNA, 15 bp, Homo sapiens
agctccactccagtt

SEQ ID NO: 514830 - DNA, 15 bp, Homo sapiens
gagctccactccagt

SEQ ID NO: 514831 - DNA, 15 bp, Homo sapiens
cgagctccactccag

SEQ ID NO: 514832 - DNA, 15 bp, Homo sapiens
tcgagctccactcca

SEQ ID NO: 514833 - DNA, 15 bp, Homo sapiens
ttcgagctccactcc

SEQ ID NO: 514834 - DNA, 15 bp, Homo sapiens
cttcgagctccactc

SEQ ID NO: 514835 - DNA, 15 bp, Homo sapiens
acttcgagctccact

SEQ ID NO: 514836 - DNA, 15 bp, Homo sapiens
cacttcgagctccac

SEQ ID NO: 514837 - DNA, 15 bp, Homo sapiens
ccacttcgagctcca

SEQ ID NO: 514838 - DNA, 15 bp, Homo sapiens
gccacttcgagctcc

SEQ ID NO: 514839 - DNA, 15 bp, Homo sapiens
agccacttcgagctc

SEQ ID NO: 514840 - DNA, 15 bp, Homo sapiens
cagccacttcgagct

SEQ ID NO: 514841 - DNA, 15 bp, Homo sapiens
ccagccacttcgagc

SEQ ID NO: 514842 - DNA, 15 bp, Homo sapiens
cccagccacttcgag

SEQ ID NO: 514843 - DNA, 15 bp, Homo sapiens
ccccagccacttcga

SEQ ID NO: 514844 - DNA, 15 bp, Homo sapiens
gccccagccacttcg

SEQ ID NO: 514845 - DNA, 15 bp, Homo sapiens
cgccccagccacttc

SEQ ID NO: 514846 - DNA, 15 bp, Homo sapiens
ccgccccagccactt

SEQ ID NO: 514847 - DNA, 15 bp, Homo sapiens
cccgccccagccact

SEQ ID NO: 514848 - DNA, 15 bp, Homo sapiens
gcccgccccagccac

SEQ ID NO: 514849 - DNA, 15 bp, Homo sapiens
tgcccgccccagcca

SEQ ID NO: 514850 - DNA, 15 bp, Homo sapiens
ttgcccgccccagcc

SEQ ID NO: 514851 - DNA, 15 bp, Homo sapiens
tttgcccgccccagc

SEQ ID NO: 514852 - DNA, 15 bp, Homo sapiens
ctttgcccgccccag

SEQ ID NO: 514853 - DNA, 15 bp, Homo sapiens
tctttgcccgcccca

SEQ ID NO: 514854 - DNA, 15 bp, Homo sapiens
gtctttgcccgcccc

SEQ ID NO: 514855 - DNA, 15 bp, Homo sapiens
agtctttgcccgccc

SEQ ID NO: 514856 - DNA, 15 bp, Homo sapiens
gagtctttgcccgcc

SEQ ID NO: 514857 - DNA, 15 bp, Homo sapiens
ggagtctttgcccgc

SEQ ID NO: 514858 - DNA, 15 bp, Homo sapiens
gggagtctttgcccg

SEQ ID NO: 514859 - DNA, 15 bp, Homo sapiens
cgggagtctttgccc

SEQ ID NO: 514860 - DNA, 15 bp, Homo sapiens
gcgggagtctttgcc

SEQ ID NO: 514861 - DNA, 15 bp, Homo sapiens
agcgggagtctttgc

SEQ ID NO: 514862 - DNA, 15 bp, Homo sapiens
aagcgggagtctttg

SEQ ID NO: 514863 - DNA, 15 bp, Homo sapiens
gaagcgggagtcttt

SEQ ID NO: 514864 - DNA, 15 bp, Homo sapiens
tgaagcgggagtctt

SEQ ID NO: 514865 - DNA, 15 bp, Homo sapiens
gtgaagcgggagtct

SEQ ID NO: 514866 - DNA, 15 bp, Homo sapiens
agtgaagcgggagtc

SEQ ID NO: 514867 - DNA, 15 bp, Homo sapiens
gagtgaagcgggagt

SEQ ID NO: 514868 - DNA, 15 bp, Homo sapiens
agagtgaagcgggag

SEQ ID NO: 514869 - DNA, 15 bp, Homo sapiens
cagagtgaagcggga

SEQ ID NO: 514870 - DNA, 15 bp, Homo sapiens
ccagagtgaagcggg

SEQ ID NO: 514871 - DNA, 15 bp, Homo sapiens
cccagagtgaagcgg

SEQ ID NO: 514872 - DNA, 15 bp, Homo sapiens
tcccagagtgaagcg

SEQ ID NO: 514873 - DNA, 15 bp, Homo sapiens
gtcccagagtgaagc

SEQ ID NO: 514874 - DNA, 15 bp, Homo sapiens
tgtcccagagtgaag

SEQ ID NO: 514875 - DNA, 15 bp, Homo sapiens
gtgtcccagagtgaa

SEQ ID NO: 514876 - DNA, 15 bp, Homo sapiens
tgtgtcccagagtga

SEQ ID NO: 514877 - DNA, 15 bp, Homo sapiens
ttgtgtcccagagtg

SEQ ID NO: 514878 - DNA, 15 bp, Homo sapiens
gttgtgtcccagagt

SEQ ID NO: 514879 - DNA, 15 bp, Homo sapiens
agttgtgtcccagag

SEQ ID NO: 514880 - DNA, 15 bp, Homo sapiens
cagttgtgtcccaga

SEQ ID NO: 514881 - DNA, 15 bp, Homo sapiens
ccagttgtgtcccag

SEQ ID NO: 514882 - DNA, 15 bp, Homo sapiens
cccagttgtgtccca

SEQ ID NO: 514883 - DNA, 15 bp, Homo sapiens
tcccagttgtgtccc

SEQ ID NO: 514884 - DNA, 15 bp, Homo sapiens
gtcccagttgtgtcc

SEQ ID NO: 514885 - DNA, 15 bp, Homo sapiens
cgtcccagttgtgtc

SEQ ID NO: 514886 - DNA, 15 bp, Homo sapiens
ccgtcccagttgtgt

SEQ ID NO: 514887 - DNA, 15 bp, Homo sapiens
gccgtcccagttgtg

SEQ ID NO: 514888 - DNA, 15 bp, Homo sapiens
cgccgtcccagttgt

SEQ ID NO: 514889 - DNA, 15 bp, Homo sapiens
gcgccgtcccagttg

SEQ ID NO: 514890 - DNA, 15 bp, Homo sapiens
agcgccgtcccagtt

SEQ ID NO: 514891 - DNA, 15 bp, Homo sapiens
aagcgccgtcccagt

SEQ ID NO: 514892 - DNA, 15 bp, Homo sapiens
gaagcgccgtcccag

SEQ ID NO: 514893 - DNA, 15 bp, Homo sapiens
tgaagcgccgtccca

SEQ ID NO: 514894 - DNA, 15 bp, Homo sapiens
ttgaagcgccgtccc

SEQ ID NO: 514895 - DNA, 15 bp, Homo sapiens
gttgaagcgccgtcc

SEQ ID NO: 514896 - DNA, 15 bp, Homo sapiens
ggttgaagcgccgtc

SEQ ID NO: 514897 - DNA, 15 bp, Homo sapiens
aggttgaagcgccgt

SEQ ID NO: 514898 - DNA, 15 bp, Homo sapiens
gaggttgaagcgccg

SEQ ID NO: 514899 - DNA, 15 bp, Homo sapiens
agaggttgaagcgcc

SEQ ID NO: 514900 - DNA, 15 bp, Homo sapiens
cagaggttgaagcgc

SEQ ID NO: 514901 - DNA, 15 bp, Homo sapiens
gcagaggttgaagcg

SEQ ID NO: 514902 - DNA, 15 bp, Homo sapiens
ggcagaggttgaagc

SEQ ID NO: 514903 - DNA, 15 bp, Homo sapiens
aggcagaggttgaag

SEQ ID NO: 514904 - DNA, 15 bp, Homo sapiens
caggcagaggttgaa

SEQ ID NO: 514905 - DNA, 15 bp, Homo sapiens
gcaggcagaggttga

SEQ ID NO: 514906 - DNA, 15 bp, Homo sapiens
tgcaggcagaggttg

SEQ ID NO: 514907 - DNA, 15 bp, Homo sapiens
ctgcaggcagaggtt

SEQ ID NO: 514908 - DNA, 15 bp, Homo sapiens
cctgcaggcagaggt

SEQ ID NO: 514909 - DNA, 15 bp, Homo sapiens
gcctgcaggcagagg

SEQ ID NO: 514910 - DNA, 15 bp, Homo sapiens
cgcctgcaggcagag

SEQ ID NO: 514911 - DNA, 15 bp, Homo sapiens
acgcctgcaggcaga

SEQ ID NO: 514912 - DNA, 15 bp, Homo sapiens
cacgcctgcaggcag

SEQ ID NO: 514913 - DNA, 15 bp, Homo sapiens
gcacgcctgcaggca

SEQ ID NO: 514914 - DNA, 15 bp, Homo sapiens
agcacgcctgcaggc

SEQ ID NO: 514915 - DNA, 15 bp, Homo sapiens
aagcacgcctgcagg

SEQ ID NO: 514916 - DNA, 15 bp, Homo sapiens
gaagcacgcctgcag

SEQ ID NO: 514917 - DNA, 15 bp, Homo sapiens
agaagcacgcctgca

SEQ ID NO: 514918 - DNA, 15 bp, Homo sapiens
gagaagcacgcctgc

SEQ ID NO: 514919 - DNA, 15 bp, Homo sapiens
cgagaagcacgcctg

SEQ ID NO: 514920 - DNA, 15 bp, Homo sapiens
gcgagaagcacgcct

SEQ ID NO: 514921 - DNA, 15 bp, Homo sapiens
cgcgagaagcacgcc

SEQ ID NO: 514922 - DNA, 15 bp, Homo sapiens
gcgcgagaagcacgc

SEQ ID NO: 514923 - DNA, 15 bp, Homo sapiens
cgcgcgagaagcacg

SEQ ID NO: 514924 - DNA, 15 bp, Homo sapiens
gcgcgcgagaagcac

SEQ ID NO: 514925 - DNA, 15 bp, Homo sapiens
tgcgcgcgagaagca

SEQ ID NO: 514926 - DNA, 15 bp, Homo sapiens
gtgcgcgcgagaagc

SEQ ID NO: 514927 - DNA, 15 bp, Homo sapiens
ggtgcgcgcgagaag

SEQ ID NO: 514928 - DNA, 15 bp, Homo sapiens
tggtgcgcgcgagaa

SEQ ID NO: 514929 - DNA, 15 bp, Homo sapiens
ctggtgcgcgcgaga

SEQ ID NO: 514930 - DNA, 15 bp, Homo sapiens
gctggtgcgcgcgag

SEQ ID NO: 514931 - DNA, 15 bp, Homo sapiens
tgctggtgcgcgcga

SEQ ID NO: 514932 - DNA, 15 bp, Homo sapiens
ttgctggtgcgcgcg

SEQ ID NO: 514933 - DNA, 15 bp, Homo sapiens
cttgctggtgcgcgc

SEQ ID NO: 514934 - DNA, 15 bp, Homo sapiens
gcttgctggtgcgcg

SEQ ID NO: 514935 - DNA, 15 bp, Homo sapiens
agcttgctggtgcgc

SEQ ID NO: 514936 - DNA, 15 bp, Homo sapiens
gagcttgctggtgcg

SEQ ID NO: 514937 - DNA, 15 bp, Homo sapiens
agagcttgctggtgc

SEQ ID NO: 514938 - DNA, 15 bp, Homo sapiens
gagagcttgctggtg

SEQ ID NO: 514939 - DNA, 15 bp, Homo sapiens
agagagcttgctggt

SEQ ID NO: 514940 - DNA, 15 bp, Homo sapiens
tagagagcttgctgg

SEQ ID NO: 514941 - DNA, 15 bp, Homo sapiens
atagagagcttgctg

SEQ ID NO: 514942 - DNA, 15 bp, Homo sapiens
gatagagagcttgct

SEQ ID NO: 514943 - DNA, 15 bp, Homo sapiens
ggatagagagcttgc

SEQ ID NO: 514944 - DNA, 15 bp, Homo sapiens
tggatagagagcttg

SEQ ID NO: 514945 - DNA, 15 bp, Homo sapiens
gtggatagagagctt

SEQ ID NO: 514946 - DNA, 15 bp, Homo sapiens
ggtggatagagagct

SEQ ID NO: 514947 - DNA, 15 bp, Homo sapiens
aggtggatagagagc

SEQ ID NO: 514948 - DNA, 15 bp, Homo sapiens
gaggtggatagagag

SEQ ID NO: 514949 - DNA, 15 bp, Homo sapiens
cgaggtggatagaga

SEQ ID NO: 514950 - DNA, 15 bp, Homo sapiens
gcgaggtggatagag

SEQ ID NO: 514951 - DNA, 15 bp, Homo sapiens
ggcgaggtggataga

SEQ ID NO: 514952 - DNA, 15 bp, Homo sapiens
aggcgaggtggatag

SEQ ID NO: 514953 - DNA, 15 bp, Homo sapiens
caggcgaggtggata

SEQ ID NO: 514954 - DNA, 15 bp, Homo sapiens
ccaggcgaggtggat

SEQ ID NO: 514955 - DNA, 15 bp, Homo sapiens
cccaggcgaggtgga

SEQ ID NO: 514956 - DNA, 15 bp, Homo sapiens
gcccaggcgaggtgg

SEQ ID NO: 514957 - DNA, 15 bp, Homo sapiens
ggcccaggcgaggtg

SEQ ID NO: 514958 - DNA, 15 bp, Homo sapiens
aggcccaggcgaggt

SEQ ID NO: 514959 - DNA, 15 bp, Homo sapiens
aaggcccaggcgagg

SEQ ID NO: 514960 - DNA, 15 bp, Homo sapiens
aaaggcccaggcgag

SEQ ID NO: 514961 - DNA, 15 bp, Homo sapiens
caaaggcccaggcga

SEQ ID NO: 514962 - DNA, 15 bp, Homo sapiens
gcaaaggcccaggcg

SEQ ID NO: 514963 - DNA, 15 bp, Homo sapiens
tgcaaaggcccaggc

SEQ ID NO: 514964 - DNA, 15 bp, Homo sapiens
ctgcaaaggcccagg

SEQ ID NO: 514965 - DNA, 15 bp, Homo sapiens
gctgcaaaggcccag

SEQ ID NO: 514966 - DNA, 15 bp, Homo sapiens
cgctgcaaaggccca

SEQ ID NO: 514967 - DNA, 15 bp, Homo sapiens
gcgctgcaaaggccc

SEQ ID NO: 514968 - DNA, 15 bp, Homo sapiens
ggcgctgcaaaggcc

SEQ ID NO: 514969 - DNA, 15 bp, Homo sapiens
gggcgctgcaaaggc

SEQ ID NO: 514970 - DNA, 15 bp, Homo sapiens
agggcgctgcaaagg

SEQ ID NO: 514971 - DNA, 15 bp, Homo sapiens
cagggcgctgcaaag

SEQ ID NO: 514972 - DNA, 15 bp, Homo sapiens
gcagggcgctgcaaa

SEQ ID NO: 514973 - DNA, 15 bp, Homo sapiens
ggcagggcgctgcaa

SEQ ID NO: 514974 - DNA, 15 bp, Homo sapiens
cggcagggcgctgca

SEQ ID NO: 514975 - DNA, 15 bp, Homo sapiens
gcggcagggcgctgc

SEQ ID NO: 514976 - DNA, 15 bp, Homo sapiens
ggcggcagggcgctg

SEQ ID NO: 514977 - DNA, 15 bp, Homo sapiens
gggcggcagggcgct

SEQ ID NO: 514978 - DNA, 15 bp, Homo sapiens
tgggcggcagggcgc

SEQ ID NO: 514979 - DNA, 15 bp, Homo sapiens
ctgggcggcagggcg

SEQ ID NO: 514980 - DNA, 15 bp, Homo sapiens
cctgggcggcagggc

SEQ ID NO: 514981 - DNA, 15 bp, Homo sapiens
gcctgggcggcaggg

SEQ ID NO: 514982 - DNA, 15 bp, Homo sapiens
agcctgggcggcagg

SEQ ID NO: 514983 - DNA, 15 bp, Homo sapiens
gagcctgggcggcag

SEQ ID NO: 514984 - DNA, 15 bp, Homo sapiens
ggagcctgggcggca

SEQ ID NO: 514985 - DNA, 15 bp, Homo sapiens
tggagcctgggcggc

SEQ ID NO: 514986 - DNA, 15 bp, Homo sapiens
ctggagcctgggcgg

SEQ ID NO: 514987 - DNA, 15 bp, Homo sapiens
gctggagcctgggcg

SEQ ID NO: 514988 - DNA, 15 bp, Homo sapiens
cgctggagcctgggc

SEQ ID NO: 514989 - DNA, 15 bp, Homo sapiens
gcgctggagcctggg

SEQ ID NO: 514990 - DNA, 15 bp, Homo sapiens
ggcgctggagcctgg

SEQ ID NO: 514991 - DNA, 15 bp, Homo sapiens
aggcgctggagcctg

SEQ ID NO: 514992 - DNA, 15 bp, Homo sapiens
gaggcgctggagcct

SEQ ID NO: 514993 - DNA, 15 bp, Homo sapiens
agaggcgctggagcc

SEQ ID NO: 514994 - DNA, 15 bp, Homo sapiens
tagaggcgctggagc

SEQ ID NO: 514995 - DNA, 15 bp, Homo sapiens
gtagaggcgctggag

SEQ ID NO: 514996 - DNA, 15 bp, Homo sapiens
agtagaggcgctgga

SEQ ID NO: 514997 - DNA, 15 bp, Homo sapiens
tagtagaggcgctgg

SEQ ID NO: 514998 - DNA, 15 bp, Homo sapiens
gtagtagaggcgctg

SEQ ID NO: 514999 - DNA, 15 bp, Homo sapiens
ggtagtagaggcgct

SEQ ID NO: 515000 - DNA, 15 bp, Homo sapiens
gggtagtagaggcgc

SEQ ID NO: 515001 - DNA, 15 bp, Homo sapiens
agggtagtagaggcg

SEQ ID NO: 515002 - DNA, 15 bp, Homo sapiens
tagggtagtagaggc

SEQ ID NO: 515003 - DNA, 15 bp, Homo sapiens
ctagggtagtagagg

SEQ ID NO: 515004 - DNA, 15 bp, Homo sapiens
gctagggtagtagag

SEQ ID NO: 515005 - DNA, 15 bp, Homo sapiens
ggctagggtagtaga

SEQ ID NO: 515006 - DNA, 15 bp, Homo sapiens
gggctagggtagtag

SEQ ID NO: 515007 - DNA, 15 bp, Homo sapiens
ggggctagggtagta

SEQ ID NO: 515008 - DNA, 15 bp, Homo sapiens
aggggctagggtagt

SEQ ID NO: 515009 - DNA, 15 bp, Homo sapiens
aaggggctagggtag

SEQ ID NO: 515010 - DNA, 15 bp, Homo sapiens
gaaggggctagggta

SEQ ID NO: 515011 - DNA, 15 bp, Homo sapiens
agaaggggctagggt

SEQ ID NO: 515012 - DNA, 15 bp, Homo sapiens
gagaaggggctaggg

SEQ ID NO: 515013 - DNA, 15 bp, Homo sapiens
tgagaaggggctagg

SEQ ID NO: 515014 - DNA, 15 bp, Homo sapiens
ttgagaaggggctag

SEQ ID NO: 515015 - DNA, 15 bp, Homo sapiens
gttgagaaggggcta

SEQ ID NO: 515016 - DNA, 15 bp, Homo sapiens
tgttgagaaggggct

SEQ ID NO: 515017 - DNA, 15 bp, Homo sapiens
gtgttgagaaggggc

SEQ ID NO: 515018 - DNA, 15 bp, Homo sapiens
cgtgttgagaagggg

SEQ ID NO: 515019 - DNA, 15 bp, Homo sapiens
gcgtgttgagaaggg

SEQ ID NO: 515020 - DNA, 15 bp, Homo sapiens
cgcgtgttgagaagg

SEQ ID NO: 515021 - DNA, 15 bp, Homo sapiens
ccgcgtgttgagaag

SEQ ID NO: 515022 - DNA, 15 bp, Homo sapiens
gccgcgtgttgagaa

SEQ ID NO: 515023 - DNA, 15 bp, Homo sapiens
agccgcgtgttgaga

SEQ ID NO: 515024 - DNA, 15 bp, Homo sapiens
gagccgcgtgttgag

SEQ ID NO: 515025 - DNA, 15 bp, Homo sapiens
agagccgcgtgttga

SEQ ID NO: 515026 - DNA, 15 bp, Homo sapiens
cagagccgcgtgttg

SEQ ID NO: 515027 - DNA, 15 bp, Homo sapiens
gcagagccgcgtgtt

SEQ ID NO: 515028 - DNA, 15 bp, Homo sapiens
ggcagagccgcgtgt

SEQ ID NO: 515029 - DNA, 15 bp, Homo sapiens
aggcagagccgcgtg

SEQ ID NO: 515030 - DNA, 15 bp, Homo sapiens
aaggcagagccgcgt

SEQ ID NO: 515031 - DNA, 15 bp, Homo sapiens
gaaggcagagccgcg

SEQ ID NO: 515032 - DNA, 15 bp, Homo sapiens
agaaggcagagccgc

SEQ ID NO: 515033 - DNA, 15 bp, Homo sapiens
aagaaggcagagccg

SEQ ID NO: 515034 - DNA, 15 bp, Homo sapiens
gaagaaggcagagcc

SEQ ID NO: 515035 - DNA, 15 bp, Homo sapiens
ggaagaaggcagagc

SEQ ID NO: 515036 - DNA, 15 bp, Homo sapiens
gggaagaaggcagag

SEQ ID NO: 515037 - DNA, 15 bp, Homo sapiens
ggggaagaaggcaga

SEQ ID NO: 515038 - DNA, 15 bp, Homo sapiens
tggggaagaaggcag

SEQ ID NO: 515039 - DNA, 15 bp, Homo sapiens
ctggggaagaaggca

SEQ ID NO: 515040 - DNA, 15 bp, Homo sapiens
actggggaagaaggc

SEQ ID NO: 515041 - DNA, 15 bp, Homo sapiens
tactggggaagaagg

SEQ ID NO: 515042 - DNA, 15 bp, Homo sapiens
gtactggggaagaag

SEQ ID NO: 515043 - DNA, 15 bp, Homo sapiens
ggtactggggaagaa

SEQ ID NO: 515044 - DNA, 15 bp, Homo sapiens
tggtactggggaaga

SEQ ID NO: 515045 - DNA, 15 bp, Homo sapiens
gtggtactggggaag

SEQ ID NO: 515046 - DNA, 15 bp, Homo sapiens
agtggtactggggaa

SEQ ID NO: 515047 - DNA, 15 bp, Homo sapiens
cagtggtactgggga

SEQ ID NO: 515048 - DNA, 15 bp, Homo sapiens
gcagtggtactgggg

SEQ ID NO: 515049 - DNA, 15 bp, Homo sapiens
tgcagtggtactggg

SEQ ID NO: 515050 - DNA, 15 bp, Homo sapiens
gtgcagtggtactgg

SEQ ID NO: 515051 - DNA, 15 bp, Homo sapiens
agtgcagtggtactg

SEQ ID NO: 515052 - DNA, 15 bp, Homo sapiens
cagtgcagtggtact

SEQ ID NO: 515053 - DNA, 15 bp, Homo sapiens
gcagtgcagtggtac

SEQ ID NO: 515054 - DNA, 15 bp, Homo sapiens
ggcagtgcagtggta

SEQ ID NO: 515055 - DNA, 15 bp, Homo sapiens
cggcagtgcagtggt

SEQ ID NO: 515056 - DNA, 15 bp, Homo sapiens
tcggcagtgcagtgg

SEQ ID NO: 515057 - DNA, 15 bp, Homo sapiens
ttcggcagtgcagtg

SEQ ID NO: 515058 - DNA, 15 bp, Homo sapiens
tttcggcagtgcagt

SEQ ID NO: 515059 - DNA, 15 bp, Homo sapiens
ttttcggcagtgcag

SEQ ID NO: 515060 - DNA, 15 bp, Homo sapiens
attttcggcagtgca

SEQ ID NO: 515061 - DNA, 15 bp, Homo sapiens
tattttcggcagtgc

SEQ ID NO: 515062 - DNA, 15 bp, Homo sapiens
ttattttcggcagtg

SEQ ID NO: 515063 - DNA, 15 bp, Homo sapiens
cttattttcggcagt

SEQ ID NO: 515064 - DNA, 15 bp, Homo sapiens
gcttattttcggcag

SEQ ID NO: 515065 - DNA, 15 bp, Homo sapiens
ggcttattttcggca

SEQ ID NO: 515066 - DNA, 15 bp, Homo sapiens
gggcttattttcggc

SEQ ID NO: 515067 - DNA, 15 bp, Homo sapiens
cgggcttattttcgg

SEQ ID NO: 515068 - DNA, 15 bp, Homo sapiens
ccgggcttattttcg

SEQ ID NO: 515069 - DNA, 15 bp, Homo sapiens
tccgggcttattttc

SEQ ID NO: 515070 - DNA, 15 bp, Homo sapiens
ctccgggcttatttt

SEQ ID NO: 515071 - DNA, 15 bp, Homo sapiens
tctccgggcttattt

SEQ ID NO: 515072 - DNA, 15 bp, Homo sapiens
gtctccgggcttatt

SEQ ID NO: 515073 - DNA, 15 bp, Homo sapiens
agtctccgggcttat

SEQ ID NO: 515074 - DNA, 15 bp, Homo sapiens
tagtctccgggctta

SEQ ID NO: 515075 - DNA, 15 bp, Homo sapiens
ttagtctccgggctt

SEQ ID NO: 515076 - DNA, 15 bp, Homo sapiens
gttagtctccgggct

SEQ ID NO: 515077 - DNA, 15 bp, Homo sapiens
cgttagtctccgggc

SEQ ID NO: 515078 - DNA, 15 bp, Homo sapiens
gcgttagtctccggg

SEQ ID NO: 515079 - DNA, 15 bp, Homo sapiens
tgcgttagtctccgg

SEQ ID NO: 515080 - DNA, 15 bp, Homo sapiens
gtgcgttagtctccg

SEQ ID NO: 515081 - DNA, 15 bp, Homo sapiens
ggtgcgttagtctcc

SEQ ID NO: 515082 - DNA, 15 bp, Homo sapiens
aggtgcgttagtctc

SEQ ID NO: 515083 - DNA, 15 bp, Homo sapiens
aaggtgcgttagtct

SEQ ID NO: 515084 - DNA, 15 bp, Homo sapiens
caaggtgcgttagtc

SEQ ID NO: 515085 - DNA, 15 bp, Homo sapiens
acaaggtgcgttagt

SEQ ID NO: 515086 - DNA, 15 bp, Homo sapiens
tacaaggtgcgttag

SEQ ID NO: 515087 - DNA, 15 bp, Homo sapiens
ctacaaggtgcgtta

SEQ ID NO: 515088 - DNA, 15 bp, Homo sapiens
cctacaaggtgcgtt

SEQ ID NO: 515089 - DNA, 15 bp, Homo sapiens
ccctacaaggtgcgt

SEQ ID NO: 515090 - DNA, 15 bp, Homo sapiens
tccctacaaggtgcg

SEQ ID NO: 515091 - DNA, 15 bp, Homo sapiens
ttccctacaaggtgc

SEQ ID NO: 515092 - DNA, 15 bp, Homo sapiens
cttccctacaaggtg

SEQ ID NO: 515093 - DNA, 15 bp, Homo sapiens
tcttccctacaaggt

SEQ ID NO: 515094 - DNA, 15 bp, Homo sapiens
ctcttccctacaagg

SEQ ID NO: 515095 - DNA, 15 bp, Homo sapiens
tctcttccctacaag

SEQ ID NO: 515096 - DNA, 15 bp, Homo sapiens
ttctcttccctacaa

SEQ ID NO: 515097 - DNA, 15 bp, Homo sapiens
cttctcttccctaca

SEQ ID NO: 515098 - DNA, 15 bp, Homo sapiens
ccttctcttccctac

SEQ ID NO: 515099 - DNA, 15 bp, Homo sapiens
tccttctcttcccta

SEQ ID NO: 515100 - DNA, 15 bp, Homo sapiens
gtccttctcttccct

SEQ ID NO: 515101 - DNA, 15 bp, Homo sapiens
tgtccttctcttccc

SEQ ID NO: 515102 - DNA, 15 bp, Homo sapiens
atgtccttctcttcc

SEQ ID NO: 515103 - DNA, 15 bp, Homo sapiens
gatgtccttctcttc

SEQ ID NO: 515104 - DNA, 15 bp, Homo sapiens
agatgtccttctctt

SEQ ID NO: 515105 - DNA, 15 bp, Homo sapiens
cagatgtccttctct

SEQ ID NO: 515106 - DNA, 15 bp, Homo sapiens
acagatgtccttctc

SEQ ID NO: 515107 - DNA, 15 bp, Homo sapiens
tacagatgtccttct

SEQ ID NO: 515108 - DNA, 15 bp, Homo sapiens
atacagatgtccttc

SEQ ID NO: 515109 - DNA, 15 bp, Homo sapiens
gatacagatgtcctt

SEQ ID NO: 515110 - DNA, 15 bp, Homo sapiens
agatacagatgtcct

SEQ ID NO: 515111 - DNA, 15 bp, Homo sapiens
gagatacagatgtcc

SEQ ID NO: 515112 - DNA, 15 bp, Homo sapiens
ggagatacagatgtc

SEQ ID NO: 515113 - DNA, 15 bp, Homo sapiens
tggagatacagatgt

SEQ ID NO: 515114 - DNA, 15 bp, Homo sapiens
ttggagatacagatg

SEQ ID NO: 515115 - DNA, 15 bp, Homo sapiens
cttggagatacagat

SEQ ID NO: 515116 - DNA, 15 bp, Homo sapiens
gcttggagatacaga

SEQ ID NO: 515117 - DNA, 15 bp, Homo sapiens
agcttggagatacag

SEQ ID NO: 515118 - DNA, 15 bp, Homo sapiens
aagcttggagataca

SEQ ID NO: 515119 - DNA, 15 bp, Homo sapiens
taagcttggagatac

SEQ ID NO: 515120 - DNA, 15 bp, Homo sapiens
ataagcttggagata

SEQ ID NO: 515121 - DNA, 15 bp, Homo sapiens
gataagcttggagat

SEQ ID NO: 515122 - DNA, 15 bp, Homo sapiens
ggataagcttggaga

SEQ ID NO: 515123 - DNA, 15 bp, Homo sapiens
tggataagcttggag

SEQ ID NO: 515124 - DNA, 15 bp, Homo sapiens
ttggataagcttgga

SEQ ID NO: 515125 - DNA, 15 bp, Homo sapiens
cttggataagcttgg

SEQ ID NO: 515126 - DNA, 15 bp, Homo sapiens
gcttggataagcttg

SEQ ID NO: 515127 - DNA, 15 bp, Homo sapiens
tgcttggataagctt

SEQ ID NO: 515128 - DNA, 15 bp, Homo sapiens
ttgcttggataagct

SEQ ID NO: 515129 - DNA, 15 bp, Homo sapiens
tttgcttggataagc

SEQ ID NO: 515130 - DNA, 15 bp, Homo sapiens
ctttgcttggataag

SEQ ID NO: 515131 - DNA, 15 bp, Homo sapiens
cctttgcttggataa

SEQ ID NO: 515132 - DNA, 15 bp, Homo sapiens
gcctttgcttggata

SEQ ID NO: 515133 - DNA, 15 bp, Homo sapiens
ggcctttgcttggat

SEQ ID NO: 515134 - DNA, 15 bp, Homo sapiens
aggcctttgcttgga

SEQ ID NO: 515135 - DNA, 15 bp, Homo sapiens
gaggcctttgcttgg

SEQ ID NO: 515136 - DNA, 15 bp, Homo sapiens
ggaggcctttgcttg

SEQ ID NO: 515137 - DNA, 15 bp, Homo sapiens
tggaggcctttgctt

SEQ ID NO: 515138 - DNA, 15 bp, Homo sapiens
ctggaggcctttgct

SEQ ID NO: 515139 - DNA, 15 bp, Homo sapiens
tctggaggcctttgc

SEQ ID NO: 515140 - DNA, 15 bp, Homo sapiens
ctctggaggcctttg

SEQ ID NO: 515141 - DNA, 15 bp, Homo sapiens
actctggaggccttt

SEQ ID NO: 515142 - DNA, 15 bp, Homo sapiens
gactctggaggcctt

SEQ ID NO: 515143 - DNA, 15 bp, Homo sapiens
ggactctggaggcct

SEQ ID NO: 515144 - DNA, 15 bp, Homo sapiens
gggactctggaggcc

SEQ ID NO: 515145 - DNA, 15 bp, Homo sapiens
agggactctggaggc

SEQ ID NO: 515146 - DNA, 15 bp, Homo sapiens
gagggactctggagg

SEQ ID NO: 515147 - DNA, 15 bp, Homo sapiens
ggagggactctggag

SEQ ID NO: 515148 - DNA, 15 bp, Homo sapiens
gggagggactctgga

SEQ ID NO: 515149 - DNA, 15 bp, Homo sapiens
tgggagggactctgg

SEQ ID NO: 515150 - DNA, 15 bp, Homo sapiens
atgggagggactctg

SEQ ID NO: 515151 - DNA, 15 bp, Homo sapiens
catgggagggactct

SEQ ID NO: 515152 - DNA, 15 bp, Homo sapiens
ccatgggagggactc

SEQ ID NO: 515153 - DNA, 15 bp, Homo sapiens
gccatgggagggact

SEQ ID NO: 515154 - DNA, 15 bp, Homo sapiens
ggccatgggagggac

SEQ ID NO: 515155 - DNA, 15 bp, Homo sapiens
gggccatgggaggga

SEQ ID NO: 515156 - DNA, 15 bp, Homo sapiens
cgggccatgggaggg

SEQ ID NO: 515157 - DNA, 15 bp, Homo sapiens
tcgggccatgggagg

SEQ ID NO: 515158 - DNA, 15 bp, Homo sapiens
ttcgggccatgggag

SEQ ID NO: 515159 - DNA, 15 bp, Homo sapiens
tttcgggccatggga

SEQ ID NO: 515160 - DNA, 15 bp, Homo sapiens
gtttcgggccatggg

SEQ ID NO: 515161 - DNA, 15 bp, Homo sapiens
tgtttcgggccatgg

SEQ ID NO: 515162 - DNA, 15 bp, Homo sapiens
gtgtttcgggccatg

SEQ ID NO: 515163 - DNA, 15 bp, Homo sapiens
ggtgtttcgggccat

SEQ ID NO: 515164 - DNA, 15 bp, Homo sapiens
aggtgtttcgggcca

SEQ ID NO: 515165 - DNA, 15 bp, Homo sapiens
gaggtgtttcgggcc

SEQ ID NO: 515166 - DNA, 15 bp, Homo sapiens
ggaggtgtttcgggc

SEQ ID NO: 515167 - DNA, 15 bp, Homo sapiens
gggaggtgtttcggg

SEQ ID NO: 515168 - DNA, 15 bp, Homo sapiens
agggaggtgtttcgg

SEQ ID NO: 515169 - DNA, 15 bp, Homo sapiens
gagggaggtgtttcg

SEQ ID NO: 515170 - DNA, 15 bp, Homo sapiens
agagggaggtgtttc

SEQ ID NO: 515171 - DNA, 15 bp, Homo sapiens
cagagggaggtgttt

SEQ ID NO: 515172 - DNA, 15 bp, Homo sapiens
tcagagggaggtgtt

SEQ ID NO: 515173 - DNA, 15 bp, Homo sapiens
gtcagagggaggtgt

SEQ ID NO: 515174 - DNA, 15 bp, Homo sapiens
ggtcagagggaggtg

SEQ ID NO: 515175 - DNA, 15 bp, Homo sapiens
cggtcagagggaggt

SEQ ID NO: 515176 - DNA, 15 bp, Homo sapiens
tcggtcagagggagg

SEQ ID NO: 515177 - DNA, 15 bp, Homo sapiens
ttcggtcagagggag

SEQ ID NO: 515178 - DNA, 15 bp, Homo sapiens
cttcggtcagaggga

SEQ ID NO: 515179 - DNA, 15 bp, Homo sapiens
tcttcggtcagaggg

SEQ ID NO: 515180 - DNA, 15 bp, Homo sapiens
ctcttcggtcagagg

SEQ ID NO: 515181 - DNA, 15 bp, Homo sapiens
gctcttcggtcagag

SEQ ID NO: 515182 - DNA, 15 bp, Homo sapiens
cgctcttcggtcaga

SEQ ID NO: 515183 - DNA, 15 bp, Homo sapiens
acgctcttcggtcag

SEQ ID NO: 515184 - DNA, 15 bp, Homo sapiens
gacgctcttcggtca

SEQ ID NO: 515185 - DNA, 15 bp, Homo sapiens
ggacgctcttcggtc

SEQ ID NO: 515186 - DNA, 15 bp, Homo sapiens
aggacgctcttcggt

SEQ ID NO: 515187 - DNA, 15 bp, Homo sapiens
aaggacgctcttcgg

SEQ ID NO: 515188 - DNA, 15 bp, Homo sapiens
aaaggacgctcttcg

SEQ ID NO: 515189 - DNA, 15 bp, Homo sapiens
gaaaggacgctcttc

SEQ ID NO: 515190 - DNA, 15 bp, Homo sapiens
agaaaggacgctctt

SEQ ID NO: 515191 - DNA, 15 bp, Homo sapiens
aagaaaggacgctct

SEQ ID NO: 515192 - DNA, 15 bp, Homo sapiens
aaagaaaggacgctc

SEQ ID NO: 515193 - DNA, 15 bp, Homo sapiens
gaaagaaaggacgct

SEQ ID NO: 515194 - DNA, 15 bp, Homo sapiens
ggaaagaaaggacgc

SEQ ID NO: 515195 - DNA, 15 bp, Homo sapiens
cggaaagaaaggacg

SEQ ID NO: 515196 - DNA, 15 bp, Homo sapiens
gcggaaagaaaggac

SEQ ID NO: 515197 - DNA, 15 bp, Homo sapiens
ggcggaaagaaagga

SEQ ID NO: 515198 - DNA, 15 bp, Homo sapiens
cggcggaaagaaagg

SEQ ID NO: 515199 - DNA, 15 bp, Homo sapiens
gcggcggaaagaaag

SEQ ID NO: 515200 - DNA, 15 bp, Homo sapiens
ggcggcggaaagaaa

SEQ ID NO: 515201 - DNA, 15 bp, Homo sapiens
aggcggcggaaagaa

SEQ ID NO: 515202 - DNA, 15 bp, Homo sapiens
gaggcggcggaaaga

SEQ ID NO: 515203 - DNA, 15 bp, Homo sapiens
ggaggcggcggaaag

SEQ ID NO: 515204 - DNA, 15 bp, Homo sapiens
aggaggcggcggaaa

SEQ ID NO: 515205 - DNA, 15 bp, Homo sapiens
caggaggcggcggaa

SEQ ID NO: 515206 - DNA, 15 bp, Homo sapiens
ccaggaggcggcgga

SEQ ID NO: 515207 - DNA, 15 bp, Homo sapiens
tccaggaggcggcgg

SEQ ID NO: 515208 - DNA, 15 bp, Homo sapiens
gtccaggaggcggcg

SEQ ID NO: 515209 - DNA, 15 bp, Homo sapiens
agtccaggaggcggc

SEQ ID NO: 515210 - DNA, 15 bp, Homo sapiens
gagtccaggaggcgg

SEQ ID NO: 515211 - DNA, 15 bp, Homo sapiens
tgagtccaggaggcg

SEQ ID NO: 515212 - DNA, 15 bp, Homo sapiens
atgagtccaggaggc

SEQ ID NO: 515213 - DNA, 15 bp, Homo sapiens
gatgagtccaggagg

SEQ ID NO: 515214 - DNA, 15 bp, Homo sapiens
ggatgagtccaggag

SEQ ID NO: 515215 - DNA, 15 bp, Homo sapiens
aggatgagtccagga

SEQ ID NO: 515216 - DNA, 15 bp, Homo sapiens
taggatgagtccagg

SEQ ID NO: 515217 - DNA, 15 bp, Homo sapiens
ttaggatgagtccag

SEQ ID NO: 515218 - DNA, 15 bp, Homo sapiens
tttaggatgagtcca

SEQ ID NO: 515219 - DNA, 15 bp, Homo sapiens
atttaggatgagtcc

SEQ ID NO: 515220 - DNA, 15 bp, Homo sapiens
tatttaggatgagtc

SEQ ID NO: 515221 - DNA, 15 bp, Homo sapiens
ctatttaggatgagt

SEQ ID NO: 515222 - DNA, 15 bp, Homo sapiens
cctatttaggatgag

SEQ ID NO: 515223 - DNA, 15 bp, Homo sapiens
ccctatttaggatga

SEQ ID NO: 515224 - DNA, 15 bp, Homo sapiens
gccctatttaggatg

SEQ ID NO: 515225 - DNA, 15 bp, Homo sapiens
tgccctatttaggat

SEQ ID NO: 515226 - DNA, 15 bp, Homo sapiens
ctgccctatttagga

SEQ ID NO: 515227 - DNA, 15 bp, Homo sapiens
tctgccctatttagg

SEQ ID NO: 515228 - DNA, 15 bp, Homo sapiens
gtctgccctatttag

SEQ ID NO: 515229 - DNA, 15 bp, Homo sapiens
ggtctgccctattta

SEQ ID NO: 515230 - DNA, 15 bp, Homo sapiens
gggtctgccctattt

SEQ ID NO: 515231 - DNA, 15 bp, Homo sapiens
cgggtctgccctatt

SEQ ID NO: 515232 - DNA, 15 bp, Homo sapiens
ccgggtctgccctat

SEQ ID NO: 515233 - DNA, 15 bp, Homo sapiens
cccgggtctgcccta

SEQ ID NO: 515234 - DNA, 15 bp, Homo sapiens
gcccgggtctgccct
